United States Patent Application Publication US 2011/0318380 A1 - sequence listing, part 3

SEQ ID NO: 78691 - protein, 14 aa, Homo Sapiens
TFVPRRKAGICFGD

SEQ ID NO: 78692 - protein, 14 aa, Homo Sapiens
FVPRRKAGICFGDS

SEQ ID NO: 78693 - protein, 14 aa, Homo Sapiens
VPRRKAGICFGDSG

SEQ ID NO: 78694 - protein, 14 aa, Homo Sapiens
PRRKAGICFGDSGG

SEQ ID NO: 78695 - protein, 14 aa, Homo Sapiens
RRKAGICFGDSGGP

SEQ ID NO: 78696 - protein, 14 aa, Homo Sapiens
RKAGICFGDSGGPL

SEQ ID NO: 78697 - protein, 14 aa, Homo Sapiens
KAGICFGDSGGPLI

SEQ ID NO: 78698 - protein, 14 aa, Homo Sapiens
AGICFGDSGGPLIC

SEQ ID NO: 78699 - protein, 14 aa, Homo Sapiens
GICFGDSGGPLICD

SEQ ID NO: 78700 - protein, 14 aa, Homo Sapiens
ICFGDSGGPLICDG

SEQ ID NO: 78701 - protein, 14 aa, Homo Sapiens
CFGDSGGPLICDGI

SEQ ID NO: 78702 - protein, 14 aa, Homo Sapiens
FGDSGGPLICDGII

SEQ ID NO: 78703 - protein, 14 aa, Homo Sapiens
GDSGGPLICDGIIQ

SEQ ID NO: 78704 - protein, 14 aa, Homo Sapiens
DSGGPLICDGIIQG

SEQ ID NO: 78705 - protein, 14 aa, Homo Sapiens
SGGPLICDGIIQGI

SEQ ID NO: 78706 - protein, 14 aa, Homo Sapiens
GGPLICDGIIQGID

SEQ ID NO: 78707 - protein, 14 aa, Homo Sapiens
GPLICDGIIQGIDS

SEQ ID NO: 78708 - protein, 14 aa, Homo Sapiens
PLICDGIIQGIDSF

SEQ ID NO: 78709 - protein, 14 aa, Homo Sapiens
LICDGIIQGIDSFV

SEQ ID NO: 78710 - protein, 14 aa, Homo Sapiens
ICDGIIQGIDSFVI

SEQ ID NO: 78711 - protein, 14 aa, Homo Sapiens
CDGIIQGIDSFVIW

SEQ ID NO: 78712 - protein, 14 aa, Homo Sapiens
DGIIQGIDSFVIWG

SEQ ID NO: 78713 - protein, 14 aa, Homo Sapiens
GIIQGIDSFVIWGC

SEQ ID NO: 78714 - protein, 14 aa, Homo Sapiens
IIQGIDSFVIWGCA

SEQ ID NO: 78715 - protein, 14 aa, Homo Sapiens
IQGIDSFVIWGCAT

SEQ ID NO: 78716 - protein, 14 aa, Homo Sapiens
QGIDSFVIWGCATR

SEQ ID NO: 78717 - protein, 14 aa, Homo Sapiens
GIDSFVIWGCATRL

SEQ ID NO: 78718 - protein, 14 aa, Homo Sapiens
IDSFVIWGCATRLF

SEQ ID NO: 78719 - protein, 14 aa, Homo Sapiens
DSFVIWGCATRLFP

SEQ ID NO: 78720 - protein, 14 aa, Homo Sapiens
SFVIWGCATRLFPD

SEQ ID NO: 78721 - protein, 14 aa, Homo Sapiens
FVIWGCATRLFPDF

SEQ ID NO: 78722 - protein, 14 aa, Homo Sapiens
VIWGCATRLFPDFF

SEQ ID NO: 78723 - protein, 14 aa, Homo Sapiens
IWGCATRLFPDFFT

SEQ ID NO: 78724 - protein, 14 aa, Homo Sapiens
WGCATRLFPDFFTR

SEQ ID NO: 78725 - protein, 14 aa, Homo Sapiens
GCATRLFPDFFTRV

SEQ ID NO: 78726 - protein, 14 aa, Homo Sapiens
CATRLFPDFFTRVA

SEQ ID NO: 78727 - protein, 14 aa, Homo Sapiens
ATRLFPDFFTRVAL

SEQ ID NO: 78728 - protein, 14 aa, Homo Sapiens
TRLFPDFFTRVALY

SEQ ID NO: 78729 - protein, 14 aa, Homo Sapiens
RLFPDFFTRVALYV

SEQ ID NO: 78730 - protein, 14 aa, Homo Sapiens
LFPDFFTRVALYVD

SEQ ID NO: 78731 - protein, 14 aa, Homo Sapiens
FPDFFTRVALYVDW

SEQ ID NO: 78732 - protein, 14 aa, Homo Sapiens
PDFFTRVALYVDWI

SEQ ID NO: 78733 - protein, 14 aa, Homo Sapiens
DFFTRVALYVDWIR

SEQ ID NO: 78734 - protein, 14 aa, Homo Sapiens
FFTRVALYVDWIRS

SEQ ID NO: 78735 - protein, 14 aa, Homo Sapiens
FTRVALYVDWIRST

SEQ ID NO: 78736 - protein, 14 aa, Homo Sapiens
TRVALYVDWIRSTL

SEQ ID NO: 78737 - protein, 14 aa, Homo Sapiens
RVALYVDWIRSTLR

SEQ ID NO: 78738 - protein, 14 aa, Homo Sapiens
VALYVDWIRSTLRR

SEQ ID NO: 78739 - protein, 14 aa, Homo Sapiens
ALYVDWIRSTLRRV

SEQ ID NO: 78740 - protein, 14 aa, Homo Sapiens
LYVDWIRSTLRRVE

SEQ ID NO: 78741 - protein, 14 aa, Homo Sapiens
YVDWIRSTLRRVEA

SEQ ID NO: 78742 - protein, 14 aa, Homo Sapiens
VDWIRSTLRRVEAK

SEQ ID NO: 78743 - protein, 14 aa, Homo Sapiens
DWIRSTLRRVEAKG

SEQ ID NO: 78744 - protein, 14 aa, Homo Sapiens
WIRSTLRRVEAKGR

SEQ ID NO: 78745 - protein, 14 aa, Homo Sapiens
IRSTLRRVEAKGRP

SEQ ID NO: 78746 - protein, 15 aa, Homo Sapiens
MAHRPPSPALASVLL

SEQ ID NO: 78747 - protein, 15 aa, Homo Sapiens
AHRPPSPALASVLLA

SEQ ID NO: 78748 - protein, 15 aa, Homo Sapiens
HRPPSPALASVLLAL

SEQ ID NO: 78749 - protein, 15 aa, Homo Sapiens
RPPSPALASVLLALL

SEQ ID NO: 78750 - protein, 15 aa, Homo Sapiens
PPSPALASVLLALLL

SEQ ID NO: 78751 - protein, 15 aa, Homo Sapiens
PSPALASVLLALLLS

SEQ ID NO: 78752 - protein, 15 aa, Homo Sapiens
SPALASVLLALLLSG

SEQ ID NO: 78753 - protein, 15 aa, Homo Sapiens
PALASVLLALLLSGA

SEQ ID NO: 78754 - protein, 15 aa, Homo Sapiens
ALASVLLALLLSGAA

SEQ ID NO: 78755 - protein, 15 aa, Homo Sapiens
LASVLLALLLSGAAR

SEQ ID NO: 78756 - protein, 15 aa, Homo Sapiens
ASVLLALLLSGAARA

SEQ ID NO: 78757 - protein, 15 aa, Homo Sapiens
SVLLALLLSGAARAA

SEQ ID NO: 78758 - protein, 15 aa, Homo Sapiens
VLLALLLSGAARAAE

SEQ ID NO: 78759 - protein, 15 aa, Homo Sapiens
LLALLLSGAARAAEI

SEQ ID NO: 78760 - protein, 15 aa, Homo Sapiens
LALLLSGAARAAEIV

SEQ ID NO: 78761 - protein, 15 aa, Homo Sapiens
ALLLSGAARAAEIVG

SEQ ID NO: 78762 - protein, 15 aa, Homo Sapiens
LLLSGAARAAEIVGG

SEQ ID NO: 78763 - protein, 15 aa, Homo Sapiens
LLSGAARAAEIVGGH

SEQ ID NO: 78764 - protein, 15 aa, Homo Sapiens
LSGAARAAEIVGGHE

SEQ ID NO: 78765 - protein, 15 aa, Homo Sapiens
SGAARAAEIVGGHEA

SEQ ID NO: 78766 - protein, 15 aa, Homo Sapiens
GAARAAEIVGGHEAQ

SEQ ID NO: 78767 - protein, 15 aa, Homo Sapiens
AARAAEIVGGHEAQP

SEQ ID NO: 78768 - protein, 15 aa, Homo Sapiens
ARAAEIVGGHEAQPH

SEQ ID NO: 78769 - protein, 15 aa, Homo Sapiens
RAAEIVGGHEAQPHS

SEQ ID NO: 78770 - protein, 15 aa, Homo Sapiens
AAEIVGGHEAQPHSR

SEQ ID NO: 78771 - protein, 15 aa, Homo Sapiens
AEIVGGHEAQPHSRP

SEQ ID NO: 78772 - protein, 15 aa, Homo Sapiens
EIVGGHEAQPHSRPY

SEQ ID NO: 78773 - protein, 15 aa, Homo Sapiens
IVGGHEAQPHSRPYM

SEQ ID NO: 78774 - protein, 15 aa, Homo Sapiens
VGGHEAQPHSRPYMA

SEQ ID NO: 78775 - protein, 15 aa, Homo Sapiens
GGHEAQPHSRPYMAS

SEQ ID NO: 78776 - protein, 15 aa, Homo Sapiens
GHEAQPHSRPYMASL

SEQ ID NO: 78777 - protein, 15 aa, Homo Sapiens
HEAQPHSRPYMASLQ

SEQ ID NO: 78778 - protein, 15 aa, Homo Sapiens
EAQPHSRPYMASLQM

SEQ ID NO: 78779 - protein, 15 aa, Homo Sapiens
AQPHSRPYMASLQMR

SEQ ID NO: 78780 - protein, 15 aa, Homo Sapiens
QPHSRPYMASLQMRG

SEQ ID NO: 78781 - protein, 15 aa, Homo Sapiens
PHSRPYMASLQMRGN

SEQ ID NO: 78782 - protein, 15 aa, Homo Sapiens
HSRPYMASLQMRGNP

SEQ ID NO: 78783 - protein, 15 aa, Homo Sapiens
SRPYMASLQMRGNPG

SEQ ID NO: 78784 - protein, 15 aa, Homo Sapiens
RPYMASLQMRGNPGS

SEQ ID NO: 78785 - protein, 15 aa, Homo Sapiens
PYMASLQMRGNPGSH

SEQ ID NO: 78786 - protein, 15 aa, Homo Sapiens
YMASLQMRGNPGSHF

SEQ ID NO: 78787 - protein, 15 aa, Homo Sapiens
MASLQMRGNPGSHFC

SEQ ID NO: 78788 - protein, 15 aa, Homo Sapiens
ASLQMRGNPGSHFCG

SEQ ID NO: 78789 - protein, 15 aa, Homo Sapiens
SLQMRGNPGSHFCGG

SEQ ID NO: 78790 - protein, 15 aa, Homo Sapiens
LQMRGNPGSHFCGGT

SEQ ID NO: 78791 - protein, 15 aa, Homo Sapiens
QMRGNPGSHFCGGTL

SEQ ID NO: 78792 - protein, 15 aa, Homo Sapiens
MRGNPGSHFCGGTLI

SEQ ID NO: 78793 - protein, 15 aa, Homo Sapiens
RGNPGSHFCGGTLIH

SEQ ID NO: 78794 - protein, 15 aa, Homo Sapiens
GNPGSHFCGGTLIHP

SEQ ID NO: 78795 - protein, 15 aa, Homo Sapiens
NPGSHFCGGTLIHPS

SEQ ID NO: 78796 - protein, 15 aa, Homo Sapiens
PGSHFCGGTLIHPSF

SEQ ID NO: 78797 - protein, 15 aa, Homo Sapiens
GSHFCGGTLIHPSFV

SEQ ID NO: 78798 - protein, 15 aa, Homo Sapiens
SHFCGGTLIHPSFVL

SEQ ID NO: 78799 - protein, 15 aa, Homo Sapiens
HFCGGTLIHPSFVLT

SEQ ID NO: 78800 - protein, 15 aa, Homo Sapiens
FCGGTLIHPSFVLTA

SEQ ID NO: 78801 - protein, 15 aa, Homo Sapiens
CGGTLIHPSFVLTAA

SEQ ID NO: 78802 - protein, 15 aa, Homo Sapiens
GGTLIHPSFVLTAAH

SEQ ID NO: 78803 - protein, 15 aa, Homo Sapiens
GTLIHPSFVLTAAHC

SEQ ID NO: 78804 - protein, 15 aa, Homo Sapiens
TLIHPSFVLTAAHCL

SEQ ID NO: 78805 - protein, 15 aa, Homo Sapiens
LIHPSFVLTAAHCLR

SEQ ID NO: 78806 - protein, 15 aa, Homo Sapiens
IHPSFVLTAAHCLRD

SEQ ID NO: 78807 - protein, 15 aa, Homo Sapiens
HPSFVLTAAHCLRDI

SEQ ID NO: 78808 - protein, 15 aa, Homo Sapiens
PSFVLTAAHCLRDIP

SEQ ID NO: 78809 - protein, 15 aa, Homo Sapiens
SFVLTAAHCLRDIPQ

SEQ ID NO: 78810 - protein, 15 aa, Homo Sapiens
FVLTAAHCLRDIPQR

SEQ ID NO: 78811 - protein, 15 aa, Homo Sapiens
VLTAAHCLRDIPQRL

SEQ ID NO: 78812 - protein, 15 aa, Homo Sapiens
LTAAHCLRDIPQRLV

SEQ ID NO: 78813 - protein, 15 aa, Homo Sapiens
TAAHCLRDIPQRLVN

SEQ ID NO: 78814 - protein, 15 aa, Homo Sapiens
AAHCLRDIPQRLVNV

SEQ ID NO: 78815 - protein, 15 aa, Homo Sapiens
AHCLRDIPQRLVNVV

SEQ ID NO: 78816 - protein, 15 aa, Homo Sapiens
HCLRDIPQRLVNVVL

SEQ ID NO: 78817 - protein, 15 aa, Homo Sapiens
CLRDIPQRLVNVVLG

SEQ ID NO: 78818 - protein, 15 aa, Homo Sapiens
LRDIPQRLVNVVLGA

SEQ ID NO: 78819 - protein, 15 aa, Homo Sapiens
RDIPQRLVNVVLGAH

SEQ ID NO: 78820 - protein, 15 aa, Homo Sapiens
DIPQRLVNVVLGAHN

SEQ ID NO: 78821 - protein, 15 aa, Homo Sapiens
IPQRLVNVVLGAHNV

SEQ ID NO: 78822 - protein, 15 aa, Homo Sapiens
PQRLVNVVLGAHNVR

SEQ ID NO: 78823 - protein, 15 aa, Homo Sapiens
QRLVNVVLGAHNVRT

SEQ ID NO: 78824 - protein, 15 aa, Homo Sapiens
RLVNVVLGAHNVRTQ

SEQ ID NO: 78825 - protein, 15 aa, Homo Sapiens
LVNVVLGAHNVRTQE

SEQ ID NO: 78826 - protein, 15 aa, Homo Sapiens
VNVVLGAHNVRTQEP

SEQ ID NO: 78827 - protein, 15 aa, Homo Sapiens
NVVLGAHNVRTQEPT

SEQ ID NO: 78828 - protein, 15 aa, Homo Sapiens
VVLGAHNVRTQEPTQ

SEQ ID NO: 78829 - protein, 15 aa, Homo Sapiens
VLGAHNVRTQEPTQQ

SEQ ID NO: 78830 - protein, 15 aa, Homo Sapiens
LGAHNVRTQEPTQQH

SEQ ID NO: 78831 - protein, 15 aa, Homo Sapiens
GAHNVRTQEPTQQHF

SEQ ID NO: 78832 - protein, 15 aa, Homo Sapiens
AHNVRTQEPTQQHFS

SEQ ID NO: 78833 - protein, 15 aa, Homo Sapiens
HNVRTQEPTQQHFSV

SEQ ID NO: 78834 - protein, 15 aa, Homo Sapiens
NVRTQEPTQQHFSVA

SEQ ID NO: 78835 - protein, 15 aa, Homo Sapiens
VRTQEPTQQHFSVAQ

SEQ ID NO: 78836 - protein, 15 aa, Homo Sapiens
RTQEPTQQHFSVAQV

SEQ ID NO: 78837 - protein, 15 aa, Homo Sapiens
TQEPTQQHFSVAQVF

SEQ ID NO: 78838 - protein, 15 aa, Homo Sapiens
QEPTQQHFSVAQVFL

SEQ ID NO: 78839 - protein, 15 aa, Homo Sapiens
EPTQQHFSVAQVFLN

SEQ ID NO: 78840 - protein, 15 aa, Homo Sapiens
PTQQHFSVAQVFLNN

SEQ ID NO: 78841 - protein, 15 aa, Homo Sapiens
TQQHFSVAQVFLNNY

SEQ ID NO: 78842 - protein, 15 aa, Homo Sapiens
QQHFSVAQVFLNNYD

SEQ ID NO: 78843 - protein, 15 aa, Homo Sapiens
QHFSVAQVFLNNYDA

SEQ ID NO: 78844 - protein, 15 aa, Homo Sapiens
HFSVAQVFLNNYDAE

SEQ ID NO: 78845 - protein, 15 aa, Homo Sapiens
FSVAQVFLNNYDAEN

SEQ ID NO: 78846 - protein, 15 aa, Homo Sapiens
SVAQVFLNNYDAENK

SEQ ID NO: 78847 - protein, 15 aa, Homo Sapiens
VAQVFLNNYDAENKL

SEQ ID NO: 78848 - protein, 15 aa, Homo Sapiens
AQVFLNNYDAENKLN

SEQ ID NO: 78849 - protein, 15 aa, Homo Sapiens
QVFLNNYDAENKLND

SEQ ID NO: 78850 - protein, 15 aa, Homo Sapiens
VFLNNYDAENKLNDI

SEQ ID NO: 78851 - protein, 15 aa, Homo Sapiens
FLNNYDAENKLNDIL

SEQ ID NO: 78852 - protein, 15 aa, Homo Sapiens
LNNYDAENKLNDILL

SEQ ID NO: 78853 - protein, 15 aa, Homo Sapiens
NNYDAENKLNDILLI

SEQ ID NO: 78854 - protein, 15 aa, Homo Sapiens
NYDAENKLNDILLIQ

SEQ ID NO: 78855 - protein, 15 aa, Homo Sapiens
YDAENKLNDILLIQL

SEQ ID NO: 78856 - protein, 15 aa, Homo Sapiens
DAENKLNDILLIQLS

SEQ ID NO: 78857 - protein, 15 aa, Homo Sapiens
AENKLNDILLIQLSS

SEQ ID NO: 78858 - protein, 15 aa, Homo Sapiens
ENKLNDILLIQLSSP

SEQ ID NO: 78859 - protein, 15 aa, Homo Sapiens
NKLNDILLIQLSSPA

SEQ ID NO: 78860 - protein, 15 aa, Homo Sapiens
KLNDILLIQLSSPAN

SEQ ID NO: 78861 - protein, 15 aa, Homo Sapiens
LNDILLIQLSSPANL

SEQ ID NO: 78862 - protein, 15 aa, Homo Sapiens
NDILLIQLSSPANLS

SEQ ID NO: 78863 - protein, 15 aa, Homo Sapiens
DILLIQLSSPANLSA

SEQ ID NO: 78864 - protein, 15 aa, Homo Sapiens
ILLIQLSSPANLSAS

SEQ ID NO: 78865 - protein, 15 aa, Homo Sapiens
LLIQLSSPANLSASV

SEQ ID NO: 78866 - protein, 15 aa, Homo Sapiens
LIQLSSPANLSASVA

SEQ ID NO: 78867 - protein, 15 aa, Homo Sapiens
IQLSSPANLSASVAT

SEQ ID NO: 78868 - protein, 15 aa, Homo Sapiens
QLSSPANLSASVATV

SEQ ID NO: 78869 - protein, 15 aa, Homo Sapiens
LSSPANLSASVATVQ

SEQ ID NO: 78870 - protein, 15 aa, Homo Sapiens
SSPANLSASVATVQL

SEQ ID NO: 78871 - protein, 15 aa, Homo Sapiens
SPANLSASVATVQLP

SEQ ID NO: 78872 - protein, 15 aa, Homo Sapiens
PANLSASVATVQLPQ

SEQ ID NO: 78873 - protein, 15 aa, Homo Sapiens
ANLSASVATVQLPQQ

SEQ ID NO: 78874 - protein, 15 aa, Homo Sapiens
NLSASVATVQLPQQD

SEQ ID NO: 78875 - protein, 15 aa, Homo Sapiens
LSASVATVQLPQQDQ

SEQ ID NO: 78876 - protein, 15 aa, Homo Sapiens
SASVATVQLPQQDQP

SEQ ID NO: 78877 - protein, 15 aa, Homo Sapiens
ASVATVQLPQQDQPV

SEQ ID NO: 78878 - protein, 15 aa, Homo Sapiens
SVATVQLPQQDQPVP

SEQ ID NO: 78879 - protein, 15 aa, Homo Sapiens
VATVQLPQQDQPVPH

SEQ ID NO: 78880 - protein, 15 aa, Homo Sapiens
ATVQLPQQDQPVPHG

SEQ ID NO: 78881 - protein, 15 aa, Homo Sapiens
TVQLPQQDQPVPHGT

SEQ ID NO: 78882 - protein, 15 aa, Homo Sapiens
VQLPQQDQPVPHGTQ

SEQ ID NO: 78883 - protein, 15 aa, Homo Sapiens
QLPQQDQPVPHGTQC

SEQ ID NO: 78884 - protein, 15 aa, Homo Sapiens
LPQQDQPVPHGTQCL

SEQ ID NO: 78885 - protein, 15 aa, Homo Sapiens
PQQDQPVPHGTQCLA

SEQ ID NO: 78886 - protein, 15 aa, Homo Sapiens
QQDQPVPHGTQCLAM

SEQ ID NO: 78887 - protein, 15 aa, Homo Sapiens
QDQPVPHGTQCLAMG

SEQ ID NO: 78888 - protein, 15 aa, Homo Sapiens
DQPVPHGTQCLAMGW

SEQ ID NO: 78889 - protein, 15 aa, Homo Sapiens
QPVPHGTQCLAMGWG

SEQ ID NO: 78890 - protein, 15 aa, Homo Sapiens
PVPHGTQCLAMGWGR

SEQ ID NO: 78891 - protein, 15 aa, Homo Sapiens
VPHGTQCLAMGWGRV

SEQ ID NO: 78892 - protein, 15 aa, Homo Sapiens
PHGTQCLAMGWGRVG

SEQ ID NO: 78893 - protein, 15 aa, Homo Sapiens
HGTQCLAMGWGRVGA

SEQ ID NO: 78894 - protein, 15 aa, Homo Sapiens
GTQCLAMGWGRVGAH

SEQ ID NO: 78895 - protein, 15 aa, Homo Sapiens
TQCLAMGWGRVGAHD

SEQ ID NO: 78896 - protein, 15 aa, Homo Sapiens
QCLAMGWGRVGAHDP

SEQ ID NO: 78897 - protein, 15 aa, Homo Sapiens
CLAMGWGRVGAHDPP

SEQ ID NO: 78898 - protein, 15 aa, Homo Sapiens
LAMGWGRVGAHDPPA

SEQ ID NO: 78899 - protein, 15 aa, Homo Sapiens
AMGWGRVGAHDPPAQ

SEQ ID NO: 78900 - protein, 15 aa, Homo Sapiens
MGWGRVGAHDPPAQV

SEQ ID NO: 78901 - protein, 15 aa, Homo Sapiens
GWGRVGAHDPPAQVL

SEQ ID NO: 78902 - protein, 15 aa, Homo Sapiens
WGRVGAHDPPAQVLQ

SEQ ID NO: 78903 - protein, 15 aa, Homo Sapiens
GRVGAHDPPAQVLQE

SEQ ID NO: 78904 - protein, 15 aa, Homo Sapiens
RVGAHDPPAQVLQEL

SEQ ID NO: 78905 - protein, 15 aa, Homo Sapiens
VGAHDPPAQVLQELN

SEQ ID NO: 78906 - protein, 15 aa, Homo Sapiens
GAHDPPAQVLQELNV

SEQ ID NO: 78907 - protein, 15 aa, Homo Sapiens
AHDPPAQVLQELNVT

SEQ ID NO: 78908 - protein, 15 aa, Homo Sapiens
HDPPAQVLQELNVTV

SEQ ID NO: 78909 - protein, 15 aa, Homo Sapiens
DPPAQVLQELNVTVV

SEQ ID NO: 78910 - protein, 15 aa, Homo Sapiens
PPAQVLQELNVTVVT

SEQ ID NO: 78911 - protein, 15 aa, Homo Sapiens
PAQVLQELNVTVVTF

SEQ ID NO: 78912 - protein, 15 aa, Homo Sapiens
AQVLQELNVTVVTFF

SEQ ID NO: 78913 - protein, 15 aa, Homo Sapiens
QVLQELNVTVVTFFC

SEQ ID NO: 78914 - protein, 15 aa, Homo Sapiens
VLQELNVTVVTFFCR

SEQ ID NO: 78915 - protein, 15 aa, Homo Sapiens
LQELNVTVVTFFCRP

SEQ ID NO: 78916 - protein, 15 aa, Homo Sapiens
QELNVTVVTFFCRPH

SEQ ID NO: 78917 - protein, 15 aa, Homo Sapiens
ELNVTVVTFFCRPHN

SEQ ID NO: 78918 - protein, 15 aa, Homo Sapiens
LNVTVVTFFCRPHNI

SEQ ID NO: 78919 - protein, 15 aa, Homo Sapiens
NVTVVTFFCRPHNIC

SEQ ID NO: 78920 - protein, 15 aa, Homo Sapiens
VTVVTFFCRPHNICT

SEQ ID NO: 78921 - protein, 15 aa, Homo Sapiens
TVVTFFCRPHNICTF

SEQ ID NO: 78922 - protein, 15 aa, Homo Sapiens
VVTFFCRPHNICTFV

SEQ ID NO: 78923 - protein, 15 aa, Homo Sapiens
VTFFCRPHNICTFVP

SEQ ID NO: 78924 - protein, 15 aa, Homo Sapiens
TFFCRPHNICTFVPR

SEQ ID NO: 78925 - protein, 15 aa, Homo Sapiens
FFCRPHNICTFVPRR

SEQ ID NO: 78926 - protein, 15 aa, Homo Sapiens
FCRPHNICTFVPRRK

SEQ ID NO: 78927 - protein, 15 aa, Homo Sapiens
CRPHNICTFVPRRKA

SEQ ID NO: 78928 - protein, 15 aa, Homo Sapiens
RPHNICTFVPRRKAG

SEQ ID NO: 78929 - protein, 15 aa, Homo Sapiens
PHNICTFVPRRKAGI

SEQ ID NO: 78930 - protein, 15 aa, Homo Sapiens
HNICTFVPRRKAGIC

SEQ ID NO: 78931 - protein, 15 aa, Homo Sapiens
NICTFVPRRKAGICF

SEQ ID NO: 78932 - protein, 15 aa, Homo Sapiens
ICTFVPRRKAGICFG

SEQ ID NO: 78933 - protein, 15 aa, Homo Sapiens
CTFVPRRKAGICFGD

SEQ ID NO: 78934 - protein, 15 aa, Homo Sapiens
TFVPRRKAGICFGDS

SEQ ID NO: 78935 - protein, 15 aa, Homo Sapiens
FVPRRKAGICFGDSG

SEQ ID NO: 78936 - protein, 15 aa, Homo Sapiens
VPRRKAGICFGDSGG

SEQ ID NO: 78937 - protein, 15 aa, Homo Sapiens
PRRKAGICFGDSGGP

SEQ ID NO: 78938 - protein, 15 aa, Homo Sapiens
RRKAGICFGDSGGPL

SEQ ID NO: 78939 - protein, 15 aa, Homo Sapiens
RKAGICFGDSGGPLI

SEQ ID NO: 78940 - protein, 15 aa, Homo Sapiens
KAGICFGDSGGPLIC

SEQ ID NO: 78941 - protein, 15 aa, Homo Sapiens
AGICFGDSGGPLICD

SEQ ID NO: 78942 - protein, 15 aa, Homo Sapiens
GICFGDSGGPLICDG

SEQ ID NO: 78943 - protein, 15 aa, Homo Sapiens
ICFGDSGGPLICDGI

SEQ ID NO: 78944 - protein, 15 aa, Homo Sapiens
CFGDSGGPLICDGII

SEQ ID NO: 78945 - protein, 15 aa, Homo Sapiens
FGDSGGPLICDGIIQ

SEQ ID NO: 78946 - protein, 15 aa, Homo Sapiens
GDSGGPLICDGIIQG

SEQ ID NO: 78947 - protein, 15 aa, Homo Sapiens
DSGGPLICDGIIQGI

SEQ ID NO: 78948 - protein, 15 aa, Homo Sapiens
SGGPLICDGIIQGID

SEQ ID NO: 78949 - protein, 15 aa, Homo Sapiens
GGPLICDGIIQGIDS

SEQ ID NO: 78950 - protein, 15 aa, Homo Sapiens
GPLICDGIIQGIDSF

SEQ ID NO: 78951 - protein, 15 aa, Homo Sapiens
PLICDGIIQGIDSFV

SEQ ID NO: 78952 - protein, 15 aa, Homo Sapiens
LICDGIIQGIDSFVI

SEQ ID NO: 78953 - protein, 15 aa, Homo Sapiens
ICDGIIQGIDSFVIW

SEQ ID NO: 78954 - protein, 15 aa, Homo Sapiens
CDGIIQGIDSFVIWG

SEQ ID NO: 78955 - protein, 15 aa, Homo Sapiens
DGIIQGIDSFVIWGC

SEQ ID NO: 78956 - protein, 15 aa, Homo Sapiens
GIIQGIDSFVIWGCA

SEQ ID NO: 78957 - protein, 15 aa, Homo Sapiens
IIQGIDSFVIWGCAT

SEQ ID NO: 78958 - protein, 15 aa, Homo Sapiens
IQGIDSFVIWGCATR

SEQ ID NO: 78959 - protein, 15 aa, Homo Sapiens
QGIDSFVIWGCATRL

SEQ ID NO: 78960 - protein, 15 aa, Homo Sapiens
GIDSFVIWGCATRLF

SEQ ID NO: 78961 - protein, 15 aa, Homo Sapiens
IDSFVIWGCATRLFP

SEQ ID NO: 78962 - protein, 15 aa, Homo Sapiens
DSFVIWGCATRLFPD

SEQ ID NO: 78963 - protein, 15 aa, Homo Sapiens
SFVIWGCATRLFPDF

SEQ ID NO: 78964 - protein, 15 aa, Homo Sapiens
FVIWGCATRLFPDFF

SEQ ID NO: 78965 - protein, 15 aa, Homo Sapiens
VIWGCATRLFPDFFT

SEQ ID NO: 78966 - protein, 15 aa, Homo Sapiens
IWGCATRLFPDFFTR

SEQ ID NO: 78967 - protein, 15 aa, Homo Sapiens
WGCATRLFPDFFTRV

SEQ ID NO: 78968 - protein, 15 aa, Homo Sapiens
GCATRLFPDFFTRVA

SEQ ID NO: 78969 - protein, 15 aa, Homo Sapiens
CATRLFPDFFTRVAL

SEQ ID NO: 78970 - protein, 15 aa, Homo Sapiens
ATRLFPDFFTRVALY

SEQ ID NO: 78971 - protein, 15 aa, Homo Sapiens
TRLFPDFFTRVALYV

SEQ ID NO: 78972 - protein, 15 aa, Homo Sapiens
RLFPDFFTRVALYVD

SEQ ID NO: 78973 - protein, 15 aa, Homo Sapiens
LFPDFFTRVALYVDW

SEQ ID NO: 78974 - protein, 15 aa, Homo Sapiens
FPDFFTRVALYVDWI

SEQ ID NO: 78975 - protein, 15 aa, Homo Sapiens
PDFFTRVALYVDWIR

SEQ ID NO: 78976 - protein, 15 aa, Homo Sapiens
DFFTRVALYVDWIRS

SEQ ID NO: 78977 - protein, 15 aa, Homo Sapiens
FFTRVALYVDWIRST

SEQ ID NO: 78978 - protein, 15 aa, Homo Sapiens
FTRVALYVDWIRSTL

SEQ ID NO: 78979 - protein, 15 aa, Homo Sapiens
TRVALYVDWIRSTLR

SEQ ID NO: 78980 - protein, 15 aa, Homo Sapiens
RVALYVDWIRSTLRR

SEQ ID NO: 78981 - protein, 15 aa, Homo Sapiens
VALYVDWIRSTLRRV

SEQ ID NO: 78982 - protein, 15 aa, Homo Sapiens
ALYVDWIRSTLRRVE

SEQ ID NO: 78983 - protein, 15 aa, Homo Sapiens
LYVDWIRSTLRRVEA

SEQ ID NO: 78984 - protein, 15 aa, Homo Sapiens
YVDWIRSTLRRVEAK

SEQ ID NO: 78985 - protein, 15 aa, Homo Sapiens
VDWIRSTLRRVEAKG

SEQ ID NO: 78986 - protein, 15 aa, Homo Sapiens
DWIRSTLRRVEAKGR

SEQ ID NO: 78987 - protein, 15 aa, Homo Sapiens
WIRSTLRRVEAKGRP

SEQ ID NO: 78988 - protein, 16 aa, Homo Sapiens
MAHRPPSPALASVLLA

SEQ ID NO: 78989 - protein, 16 aa, Homo Sapiens
AHRPPSPALASVLLAL

SEQ ID NO: 78990 - protein, 16 aa, Homo Sapiens
HRPPSPALASVLLALL

SEQ ID NO: 78991 - protein, 16 aa, Homo Sapiens
RPPSPALASVLLALLL

SEQ ID NO: 78992 - protein, 16 aa, Homo Sapiens
PPSPALASVLLALLLS

SEQ ID NO: 78993 - protein, 16 aa, Homo Sapiens
PSPALASVLLALLLSG

SEQ ID NO: 78994 - protein, 16 aa, Homo Sapiens
SPALASVLLALLLSGA

SEQ ID NO: 78995 - protein, 16 aa, Homo Sapiens
PALASVLLALLLSGAA

SEQ ID NO: 78996 - protein, 16 aa, Homo Sapiens
ALASVLLALLLSGAAR

SEQ ID NO: 78997 - protein, 16 aa, Homo Sapiens
LASVLLALLLSGAARA

SEQ ID NO: 78998 - protein, 16 aa, Homo Sapiens
ASVLLALLLSGAARAA

SEQ ID NO: 78999 - protein, 16 aa, Homo Sapiens
SVLLALLLSGAARAAE

SEQ ID NO: 79000 - protein, 16 aa, Homo Sapiens
VLLALLLSGAARAAEI

SEQ ID NO: 79001 - protein, 16 aa, Homo Sapiens
LLALLLSGAARAAEIV

SEQ ID NO: 79002 - protein, 16 aa, Homo Sapiens
LALLLSGAARAAEIVG

SEQ ID NO: 79003 - protein, 16 aa, Homo Sapiens
ALLLSGAARAAEIVGG

SEQ ID NO: 79004 - protein, 16 aa, Homo Sapiens
LLLSGAARAAEIVGGH

SEQ ID NO: 79005 - protein, 16 aa, Homo Sapiens
LLSGAARAAEIVGGHE

SEQ ID NO: 79006 - protein, 16 aa, Homo Sapiens
LSGAARAAEIVGGHEA

SEQ ID NO: 79007 - protein, 16 aa, Homo Sapiens
SGAARAAEIVGGHEAQ

SEQ ID NO: 79008 - protein, 16 aa, Homo Sapiens
GAARAAEIVGGHEAQP

SEQ ID NO: 79009 - protein, 16 aa, Homo Sapiens
AARAAEIVGGHEAQPH

SEQ ID NO: 79010 - protein, 16 aa, Homo Sapiens
ARAAEIVGGHEAQPHS

SEQ ID NO: 79011 - protein, 16 aa, Homo Sapiens
RAAEIVGGHEAQPHSR

SEQ ID NO: 79012 - protein, 16 aa, Homo Sapiens
AAEIVGGHEAQPHSRP

SEQ ID NO: 79013 - protein, 16 aa, Homo Sapiens
AEIVGGHEAQPHSRPY

SEQ ID NO: 79014 - protein, 16 aa, Homo Sapiens
EIVGGHEAQPHSRPYM

SEQ ID NO: 79015 - protein, 16 aa, Homo Sapiens
IVGGHEAQPHSRPYMA

SEQ ID NO: 79016 - protein, 16 aa, Homo Sapiens
VGGHEAQPHSRPYMAS

SEQ ID NO: 79017 - protein, 16 aa, Homo Sapiens
GGHEAQPHSRPYMASL

SEQ ID NO: 79018 - protein, 16 aa, Homo Sapiens
GHEAQPHSRPYMASLQ

SEQ ID NO: 79019 - protein, 16 aa, Homo Sapiens
HEAQPHSRPYMASLQM

SEQ ID NO: 79020 - protein, 16 aa, Homo Sapiens
EAQPHSRPYMASLQMR

SEQ ID NO: 79021 - protein, 16 aa, Homo Sapiens
AQPHSRPYMASLQMRG

SEQ ID NO: 79022 - protein, 16 aa, Homo Sapiens
QPHSRPYMASLQMRGN

SEQ ID NO: 79023 - protein, 16 aa, Homo Sapiens
PHSRPYMASLQMRGNP

SEQ ID NO: 79024 - protein, 16 aa, Homo Sapiens
HSRPYMASLQMRGNPG

SEQ ID NO: 79025 - protein, 16 aa, Homo Sapiens
SRPYMASLQMRGNPGS

SEQ ID NO: 79026 - protein, 16 aa, Homo Sapiens
RPYMASLQMRGNPGSH

SEQ ID NO: 79027 - protein, 16 aa, Homo Sapiens
PYMASLQMRGNPGSHF

SEQ ID NO: 79028 - protein, 16 aa, Homo Sapiens
YMASLQMRGNPGSHFC

SEQ ID NO: 79029 - protein, 16 aa, Homo Sapiens
MASLQMRGNPGSHFCG

SEQ ID NO: 79030 - protein, 16 aa, Homo Sapiens
ASLQMRGNPGSHFCGG

SEQ ID NO: 79031 - protein, 16 aa, Homo Sapiens
SLQMRGNPGSHFCGGT

SEQ ID NO: 79032 - protein, 16 aa, Homo Sapiens
LQMRGNPGSHFCGGTL

SEQ ID NO: 79033 - protein, 16 aa, Homo Sapiens
QMRGNPGSHFCGGTLI

SEQ ID NO: 79034 - protein, 16 aa, Homo Sapiens
MRGNPGSHFCGGTLIH

SEQ ID NO: 79035 - protein, 16 aa, Homo Sapiens
RGNPGSHFCGGTLIHP

SEQ ID NO: 79036 - protein, 16 aa, Homo Sapiens
GNPGSHFCGGTLIHPS

SEQ ID NO: 79037 - protein, 16 aa, Homo Sapiens
NPGSHFCGGTLIHPSF

SEQ ID NO: 79038 - protein, 16 aa, Homo Sapiens
PGSHFCGGTLIHPSFV

SEQ ID NO: 79039 - protein, 16 aa, Homo Sapiens
GSHFCGGTLIHPSFVL

SEQ ID NO: 79040 - protein, 16 aa, Homo Sapiens
SHFCGGTLIHPSFVLT

SEQ ID NO: 79041 - protein, 16 aa, Homo Sapiens
HFCGGTLIHPSFVLTA

SEQ ID NO: 79042 - protein, 16 aa, Homo Sapiens
FCGGTLIHPSFVLTAA

SEQ ID NO: 79043 - protein, 16 aa, Homo Sapiens
CGGTLIHPSFVLTAAH

SEQ ID NO: 79044 - protein, 16 aa, Homo Sapiens
GGTLIHPSFVLTAAHC

SEQ ID NO: 79045 - protein, 16 aa, Homo Sapiens
GTLIHPSFVLTAAHCL

SEQ ID NO: 79046 - protein, 16 aa, Homo Sapiens
TLIHPSFVLTAAHCLR

SEQ ID NO: 79047 - protein, 16 aa, Homo Sapiens
LIHPSFVLTAAHCLRD

SEQ ID NO: 79048 - protein, 16 aa, Homo Sapiens
IHPSFVLTAAHCLRDI

SEQ ID NO: 79049 - protein, 16 aa, Homo Sapiens
HPSFVLTAAHCLRDIP

SEQ ID NO: 79050 - protein, 16 aa, Homo Sapiens
PSFVLTAAHCLRDIPQ

SEQ ID NO: 79051 - protein, 16 aa, Homo Sapiens
SFVLTAAHCLRDIPQR

SEQ ID NO: 79052 - protein, 16 aa, Homo Sapiens
FVLTAAHCLRDIPQRL

SEQ ID NO: 79053 - protein, 16 aa, Homo Sapiens
VLTAAHCLRDIPQRLV

SEQ ID NO: 79054 - protein, 16 aa, Homo Sapiens
LTAAHCLRDIPQRLVN

SEQ ID NO: 79055 - protein, 16 aa, Homo Sapiens
TAAHCLRDIPQRLVNV

SEQ ID NO: 79056 - protein, 16 aa, Homo Sapiens
AAHCLRDIPQRLVNVV

SEQ ID NO: 79057 - protein, 16 aa, Homo Sapiens
AHCLRDIPQRLVNVVL

SEQ ID NO: 79058 - protein, 16 aa, Homo Sapiens
HCLRDIPQRLVNVVLG

SEQ ID NO: 79059 - protein, 16 aa, Homo Sapiens
CLRDIPQRLVNVVLGA

SEQ ID NO: 79060 - protein, 16 aa, Homo Sapiens
LRDIPQRLVNVVLGAH

SEQ ID NO: 79061 - protein, 16 aa, Homo Sapiens
RDIPQRLVNVVLGAHN

SEQ ID NO: 79062 - protein, 16 aa, Homo Sapiens
DIPQRLVNVVLGAHNV

SEQ ID NO: 79063 - protein, 16 aa, Homo Sapiens
IPQRLVNVVLGAHNVR

SEQ ID NO: 79064 - protein, 16 aa, Homo Sapiens
PQRLVNVVLGAHNVRT

SEQ ID NO: 79065 - protein, 16 aa, Homo Sapiens
QRLVNVVLGAHNVRTQ

SEQ ID NO: 79066 - protein, 16 aa, Homo Sapiens
RLVNVVLGAHNVRTQE

SEQ ID NO: 79067 - protein, 16 aa, Homo Sapiens
LVNVVLGAHNVRTQEP

SEQ ID NO: 79068 - protein, 16 aa, Homo Sapiens
VNVVLGAHNVRTQEPT

SEQ ID NO: 79069 - protein, 16 aa, Homo Sapiens
NVVLGAHNVRTQEPTQ

SEQ ID NO: 79070 - protein, 16 aa, Homo Sapiens
VVLGAHNVRTQEPTQQ

SEQ ID NO: 79071 - protein, 16 aa, Homo Sapiens
VLGAHNVRTQEPTQQH

SEQ ID NO: 79072 - protein, 16 aa, Homo Sapiens
LGAHNVRTQEPTQQHF

SEQ ID NO: 79073 - protein, 16 aa, Homo Sapiens
GAHNVRTQEPTQQHFS

SEQ ID NO: 79074 - protein, 16 aa, Homo Sapiens
AHNVRTQEPTQQHFSV

SEQ ID NO: 79075 - protein, 16 aa, Homo Sapiens
HNVRTQEPTQQHFSVA

SEQ ID NO: 79076 - protein, 16 aa, Homo Sapiens
NVRTQEPTQQHFSVAQ

SEQ ID NO: 79077 - protein, 16 aa, Homo Sapiens
VRTQEPTQQHFSVAQV

SEQ ID NO: 79078 - protein, 16 aa, Homo Sapiens
RTQEPTQQHFSVAQVF

SEQ ID NO: 79079 - protein, 16 aa, Homo Sapiens
TQEPTQQHFSVAQVFL

SEQ ID NO: 79080 - protein, 16 aa, Homo Sapiens
QEPTQQHFSVAQVFLN

SEQ ID NO: 79081 - protein, 16 aa, Homo Sapiens
EPTQQHFSVAQVFLNN

SEQ ID NO: 79082 - protein, 16 aa, Homo Sapiens
PTQQHFSVAQVFLNNY

SEQ ID NO: 79083 - protein, 16 aa, Homo Sapiens
TQQHFSVAQVFLNNYD

SEQ ID NO: 79084 - protein, 16 aa, Homo Sapiens
QQHFSVAQVFLNNYDA

SEQ ID NO: 79085 - protein, 16 aa, Homo Sapiens
QHFSVAQVFLNNYDAE

SEQ ID NO: 79086 - protein, 16 aa, Homo Sapiens
HFSVAQVFLNNYDAEN

SEQ ID NO: 79087 - protein, 16 aa, Homo Sapiens
FSVAQVFLNNYDAENK

SEQ ID NO: 79088 - protein, 16 aa, Homo Sapiens
SVAQVFLNNYDAENKL

SEQ ID NO: 79089 - protein, 16 aa, Homo Sapiens
VAQVFLNNYDAENKLN

SEQ ID NO: 79090 - protein, 16 aa, Homo Sapiens
AQVFLNNYDAENKLND

SEQ ID NO: 79091 - protein, 16 aa, Homo Sapiens
QVFLNNYDAENKLNDI

SEQ ID NO: 79092 - protein, 16 aa, Homo Sapiens
VFLNNYDAENKLNDIL

SEQ ID NO: 79093 - protein, 16 aa, Homo Sapiens
FLNNYDAENKLNDILL

SEQ ID NO: 79094 - protein, 16 aa, Homo Sapiens
LNNYDAENKLNDILLI

SEQ ID NO: 79095 - protein, 16 aa, Homo Sapiens
NNYDAENKLNDILLIQ

SEQ ID NO: 79096 - protein, 16 aa, Homo Sapiens
NYDAENKLNDILLIQL

SEQ ID NO: 79097 - protein, 16 aa, Homo Sapiens
YDAENKLNDILLIQLS

SEQ ID NO: 79098 - protein, 16 aa, Homo Sapiens
DAENKLNDILLIQLSS

SEQ ID NO: 79099 - protein, 16 aa, Homo Sapiens
AENKLNDILLIQLSSP

SEQ ID NO: 79100 - protein, 16 aa, Homo Sapiens
ENKLNDILLIQLSSPA

SEQ ID NO: 79101 - protein, 16 aa, Homo Sapiens
NKLNDILLIQLSSPAN

SEQ ID NO: 79102 - protein, 16 aa, Homo Sapiens
KLNDILLIQLSSPANL

SEQ ID NO: 79103 - protein, 16 aa, Homo Sapiens
LNDILLIQLSSPANLS

SEQ ID NO: 79104 - protein, 16 aa, Homo Sapiens
NDILLIQLSSPANLSA

SEQ ID NO: 79105 - protein, 16 aa, Homo Sapiens
DILLIQLSSPANLSAS

SEQ ID NO: 79106 - protein, 16 aa, Homo Sapiens
ILLIQLSSPANLSASV

SEQ ID NO: 79107 - protein, 16 aa, Homo Sapiens
LLIQLSSPANLSASVA

SEQ ID NO: 79108 - protein, 16 aa, Homo Sapiens
LIQLSSPANLSASVAT

SEQ ID NO: 79109 - protein, 16 aa, Homo Sapiens
IQLSSPANLSASVATV

SEQ ID NO: 79110 - protein, 16 aa, Homo Sapiens
QLSSPANLSASVATVQ

SEQ ID NO: 79111 - protein, 16 aa, Homo Sapiens
LSSPANLSASVATVQL

SEQ ID NO: 79112 - protein, 16 aa, Homo Sapiens
SSPANLSASVATVQLP

SEQ ID NO: 79113 - protein, 16 aa, Homo Sapiens
SPANLSASVATVQLPQ

SEQ ID NO: 79114 - protein, 16 aa, Homo Sapiens
PANLSASVATVQLPQQ

SEQ ID NO: 79115 - protein, 16 aa, Homo Sapiens
ANLSASVATVQLPQQD

SEQ ID NO: 79116 - protein, 16 aa, Homo Sapiens
NLSASVATVQLPQQDQ

SEQ ID NO: 79117 - protein, 16 aa, Homo Sapiens
LSASVATVQLPQQDQP

SEQ ID NO: 79118 - protein, 16 aa, Homo Sapiens
SASVATVQLPQQDQPV

SEQ ID NO: 79119 - protein, 16 aa, Homo Sapiens
ASVATVQLPQQDQPVP

SEQ ID NO: 79120 - protein, 16 aa, Homo Sapiens
SVATVQLPQQDQPVPH

SEQ ID NO: 79121 - protein, 16 aa, Homo Sapiens
VATVQLPQQDQPVPHG

SEQ ID NO: 79122 - protein, 16 aa, Homo Sapiens
ATVQLPQQDQPVPHGT

SEQ ID NO: 79123 - protein, 16 aa, Homo Sapiens
TVQLPQQDQPVPHGTQ

SEQ ID NO: 79124 - protein, 16 aa, Homo Sapiens
VQLPQQDQPVPHGTQC

SEQ ID NO: 79125 - protein, 16 aa, Homo Sapiens
QLPQQDQPVPHGTQCL

SEQ ID NO: 79126 - protein, 16 aa, Homo Sapiens
LPQQDQPVPHGTQCLA

SEQ ID NO: 79127 - protein, 16 aa, Homo Sapiens
PQQDQPVPHGTQCLAM

SEQ ID NO: 79128 - protein, 16 aa, Homo Sapiens
QQDQPVPHGTQCLAMG

SEQ ID NO: 79129 - protein, 16 aa, Homo Sapiens
QDQPVPHGTQCLAMGW

SEQ ID NO: 79130 - protein, 16 aa, Homo Sapiens
DQPVPHGTQCLAMGWG

SEQ ID NO: 79131 - protein, 16 aa, Homo Sapiens
QPVPHGTQCLAMGWGR

SEQ ID NO: 79132 - protein, 16 aa, Homo Sapiens
PVPHGTQCLAMGWGRV

SEQ ID NO: 79133 - protein, 16 aa, Homo Sapiens
VPHGTQCLAMGWGRVG

SEQ ID NO: 79134 - protein, 16 aa, Homo Sapiens
PHGTQCLAMGWGRVGA

SEQ ID NO: 79135 - protein, 16 aa, Homo Sapiens
HGTQCLAMGWGRVGAH

SEQ ID NO: 79136 - protein, 16 aa, Homo Sapiens
GTQCLAMGWGRVGAHD

SEQ ID NO: 79137 - protein, 16 aa, Homo Sapiens
TQCLAMGWGRVGAHDP

SEQ ID NO: 79138 - protein, 16 aa, Homo Sapiens
QCLAMGWGRVGAHDPP

SEQ ID NO: 79139 - protein, 16 aa, Homo Sapiens
CLAMGWGRVGAHDPPA

SEQ ID NO: 79140 - protein, 16 aa, Homo Sapiens
LAMGWGRVGAHDPPAQ

SEQ ID NO: 79141 - protein, 16 aa, Homo Sapiens
AMGWGRVGAHDPPAQV

SEQ ID NO: 79142 - protein, 16 aa, Homo Sapiens
MGWGRVGAHDPPAQVL

SEQ ID NO: 79143 - protein, 16 aa, Homo Sapiens
GWGRVGAHDPPAQVLQ

SEQ ID NO: 79144 - protein, 16 aa, Homo Sapiens
WGRVGAHDPPAQVLQE

SEQ ID NO: 79145 - protein, 16 aa, Homo Sapiens
GRVGAHDPPAQVLQEL

SEQ ID NO: 79146 - protein, 16 aa, Homo Sapiens
RVGAHDPPAQVLQELN

SEQ ID NO: 79147 - protein, 16 aa, Homo Sapiens
VGAHDPPAQVLQELNV

SEQ ID NO: 79148 - protein, 16 aa, Homo Sapiens
GAHDPPAQVLQELNVT

SEQ ID NO: 79149 - protein, 16 aa, Homo Sapiens
AHDPPAQVLQELNVTV

SEQ ID NO: 79150 - protein, 16 aa, Homo Sapiens
HDPPAQVLQELNVTVV

SEQ ID NO: 79151 - protein, 16 aa, Homo Sapiens
DPPAQVLQELNVTVVT

SEQ ID NO: 79152 - protein, 16 aa, Homo Sapiens
PPAQVLQELNVTVVTF

SEQ ID NO: 79153 - protein, 16 aa, Homo Sapiens
PAQVLQELNVTVVTFF

SEQ ID NO: 79154 - protein, 16 aa, Homo Sapiens
AQVLQELNVTVVTFFC

SEQ ID NO: 79155 - protein, 16 aa, Homo Sapiens
QVLQELNVTVVTFFCR

SEQ ID NO: 79156 - protein, 16 aa, Homo Sapiens
VLQELNVTVVTFFCRP

SEQ ID NO: 79157 - protein, 16 aa, Homo Sapiens
LQELNVTVVTFFCRPH

SEQ ID NO: 79158 - protein, 16 aa, Homo Sapiens
QELNVTVVTFFCRPHN

SEQ ID NO: 79159 - protein, 16 aa, Homo Sapiens
ELNVTVVTFFCRPHNI

SEQ ID NO: 79160 - protein, 16 aa, Homo Sapiens
LNVTVVTFFCRPHNIC

SEQ ID NO: 79161 - protein, 16 aa, Homo Sapiens
NVTVVTFFCRPHNICT

SEQ ID NO: 79162 - protein, 16 aa, Homo Sapiens
VTVVTFFCRPHNICTF

SEQ ID NO: 79163 - protein, 16 aa, Homo Sapiens
TVVTFFCRPHNICTFV

SEQ ID NO: 79164 - protein, 16 aa, Homo Sapiens
VVTFFCRPHNICTFVP

SEQ ID NO: 79165 - protein, 16 aa, Homo Sapiens
VTFFCRPHNICTFVPR

SEQ ID NO: 79166 - protein, 16 aa, Homo Sapiens
TFFCRPHNICTFVPRR

SEQ ID NO: 79167 - protein, 16 aa, Homo Sapiens
FFCRPHNICTFVPRRK

SEQ ID NO: 79168 - protein, 16 aa, Homo Sapiens
FCRPHNICTFVPRRKA

SEQ ID NO: 79169 - protein, 16 aa, Homo Sapiens
CRPHNICTFVPRRKAG

SEQ ID NO: 79170 - protein, 16 aa, Homo Sapiens
RPHNICTFVPRRKAGI

SEQ ID NO: 79171 - protein, 16 aa, Homo Sapiens
PHNICTFVPRRKAGIC

SEQ ID NO: 79172 - protein, 16 aa, Homo Sapiens
HNICTFVPRRKAGICF

SEQ ID NO: 79173 - protein, 16 aa, Homo Sapiens
NICTFVPRRKAGICFG

SEQ ID NO: 79174 - protein, 16 aa, Homo Sapiens
ICTFVPRRKAGICFGD

SEQ ID NO: 79175 - protein, 16 aa, Homo Sapiens
CTFVPRRKAGICFGDS

SEQ ID NO: 79176 - protein, 16 aa, Homo Sapiens
TFVPRRKAGICFGDSG

SEQ ID NO: 79177 - protein, 16 aa, Homo Sapiens
FVPRRKAGICFGDSGG

SEQ ID NO: 79178 - protein, 16 aa, Homo Sapiens
VPRRKAGICFGDSGGP

SEQ ID NO: 79179 - protein, 16 aa, Homo Sapiens
PRRKAGICFGDSGGPL

SEQ ID NO: 79180 - protein, 16 aa, Homo Sapiens
RRKAGICFGDSGGPLI

SEQ ID NO: 79181 - protein, 16 aa, Homo Sapiens
RKAGICFGDSGGPLIC

SEQ ID NO: 79182 - protein, 16 aa, Homo Sapiens
KAGICFGDSGGPLICD

SEQ ID NO: 79183 - protein, 16 aa, Homo Sapiens
AGICFGDSGGPLICDG

SEQ ID NO: 79184 - protein, 16 aa, Homo Sapiens
GICFGDSGGPLICDGI

SEQ ID NO: 79185 - protein, 16 aa, Homo Sapiens
ICFGDSGGPLICDGII

SEQ ID NO: 79186 - protein, 16 aa, Homo Sapiens
CFGDSGGPLICDGIIQ

SEQ ID NO: 79187 - protein, 16 aa, Homo Sapiens
FGDSGGPLICDGIIQG

SEQ ID NO: 79188 - protein, 16 aa, Homo Sapiens
GDSGGPLICDGIIQGI

SEQ ID NO: 79189 - protein, 16 aa, Homo Sapiens
DSGGPLICDGIIQGID

SEQ ID NO: 79190 - protein, 16 aa, Homo Sapiens
SGGPLICDGIIQGIDS

SEQ ID NO: 79191 - protein, 16 aa, Homo Sapiens
GGPLICDGIIQGIDSF

SEQ ID NO: 79192 - protein, 16 aa, Homo Sapiens
GPLICDGIIQGIDSFV

SEQ ID NO: 79193 - protein, 16 aa, Homo Sapiens
PLICDGIIQGIDSFVI

SEQ ID NO: 79194 - protein, 16 aa, Homo Sapiens
LICDGIIQGIDSFVIW

SEQ ID NO: 79195 - protein, 16 aa, Homo Sapiens
ICDGIIQGIDSFVIWG

SEQ ID NO: 79196 - protein, 16 aa, Homo Sapiens
CDGIIQGIDSFVIWGC

SEQ ID NO: 79197 - protein, 16 aa, Homo Sapiens
DGIIQGIDSFVIWGCA

SEQ ID NO: 79198 - protein, 16 aa, Homo Sapiens
GIIQGIDSFVIWGCAT

SEQ ID NO: 79199 - protein, 16 aa, Homo Sapiens
IIQGIDSFVIWGCATR

SEQ ID NO: 79200 - protein, 16 aa, Homo Sapiens
IQGIDSFVIWGCATRL

SEQ ID NO: 79201 - protein, 16 aa, Homo Sapiens
QGIDSFVIWGCATRLF

SEQ ID NO: 79202 - protein, 16 aa, Homo Sapiens
GIDSFVIWGCATRLFP

SEQ ID NO: 79203 - protein, 16 aa, Homo Sapiens
IDSFVIWGCATRLFPD

SEQ ID NO: 79204 - protein, 16 aa, Homo Sapiens
DSFVIWGCATRLFPDF

SEQ ID NO: 79205 - protein, 16 aa, Homo Sapiens
SFVIWGCATRLFPDFF

SEQ ID NO: 79206 - protein, 16 aa, Homo Sapiens
FVIWGCATRLFPDFFT

SEQ ID NO: 79207 - protein, 16 aa, Homo Sapiens
VIWGCATRLFPDFFTR

SEQ ID NO: 79208 - protein, 16 aa, Homo Sapiens
IWGCATRLFPDFFTRV

SEQ ID NO: 79209 - protein, 16 aa, Homo Sapiens
WGCATRLFPDFFTRVA

SEQ ID NO: 79210 - protein, 16 aa, Homo Sapiens
GCATRLFPDFFTRVAL

SEQ ID NO: 79211 - protein, 16 aa, Homo Sapiens
CATRLFPDFFTRVALY

SEQ ID NO: 79212 - protein, 16 aa, Homo Sapiens
ATRLFPDFFTRVALYV

SEQ ID NO: 79213 - protein, 16 aa, Homo Sapiens
TRLFPDFFTRVALYVD

SEQ ID NO: 79214 - protein, 16 aa, Homo Sapiens
RLFPDFFTRVALYVDW

SEQ ID NO: 79215 - protein, 16 aa, Homo Sapiens
LFPDFFTRVALYVDWI

SEQ ID NO: 79216 - protein, 16 aa, Homo Sapiens
FPDFFTRVALYVDWIR

SEQ ID NO: 79217 - protein, 16 aa, Homo Sapiens
PDFFTRVALYVDWIRS

SEQ ID NO: 79218 - protein, 16 aa, Homo Sapiens
DFFTRVALYVDWIRST

SEQ ID NO: 79219 - protein, 16 aa, Homo Sapiens
FFTRVALYVDWIRSTL

SEQ ID NO: 79220 - protein, 16 aa, Homo Sapiens
FTRVALYVDWIRSTLR

SEQ ID NO: 79221 - protein, 16 aa, Homo Sapiens
TRVALYVDWIRSTLRR

SEQ ID NO: 79222 - protein, 16 aa, Homo Sapiens
RVALYVDWIRSTLRRV

SEQ ID NO: 79223 - protein, 16 aa, Homo Sapiens
VALYVDWIRSTLRRVE

SEQ ID NO: 79224 - protein, 16 aa, Homo Sapiens
ALYVDWIRSTLRRVEA

SEQ ID NO: 79225 - protein, 16 aa, Homo Sapiens
LYVDWIRSTLRRVEAK

SEQ ID NO: 79226 - protein, 16 aa, Homo Sapiens
YVDWIRSTLRRVEAKG

SEQ ID NO: 79227 - protein, 16 aa, Homo Sapiens
VDWIRSTLRRVEAKGR

SEQ ID NO: 79228 - protein, 16 aa, Homo Sapiens
DWIRSTLRRVEAKGRP

SEQ ID NO: 79229 - protein, 92 aa, Homo Sapiens
MKPIQKLLAGLILLTWCVEGCSSQHWSYGLRPGGKRDAENLIDSFQEIVKEVGQLAETQRFECTTHQPRSPLRDLKGALESLIEEETGQKKI

SEQ ID NO: 79230 - protein, 8 aa, Homo Sapiens
KPIQKLLA

SEQ ID NO: 79231 - protein, 8 aa, Homo Sapiens
IQKLLAGL

SEQ ID NO: 79232 - protein, 8 aa, Homo Sapiens
KLLAGLIL

SEQ ID NO: 79233 - protein, 8 aa, Homo Sapiens
LLAGLILL

SEQ ID NO: 79234 - protein, 8 aa, Homo Sapiens
AGLILLTW

SEQ ID NO: 79235 - protein, 8 aa, Homo Sapiens
GLILLTWC

SEQ ID NO: 79236 - protein, 8 aa, Homo Sapiens
LILLTWCV

SEQ ID NO: 79237 - protein, 8 aa, Homo Sapiens
CSSQHWSY

SEQ ID NO: 79238 - protein, 8 aa, Homo Sapiens
SQHWSYGL

SEQ ID NO: 79239 - protein, 8 aa, Homo Sapiens
GLRPGGKR

SEQ ID NO: 79240 - protein, 8 aa, Homo Sapiens
RPGGKRDA

SEQ ID NO: 79241 - protein, 8 aa, Homo Sapiens
AENLIDSF

SEQ ID NO: 79242 - protein, 8 aa, Homo Sapiens
NLIDSFQE

SEQ ID NO: 79243 - protein, 8 aa, Homo Sapiens
LIDSFQEI

SEQ ID NO: 79244 - protein, 8 aa, Homo Sapiens
DSFQEIVK

SEQ ID NO: 79245 - protein, 8 aa, Homo Sapiens
FQEIVKEV

SEQ ID NO: 79246 - protein, 8 aa, Homo Sapiens
IVKEVGQL

SEQ ID NO: 79247 - protein, 8 aa, Homo Sapiens
GQLAETQR

SEQ ID NO: 79248 - protein, 8 aa, Homo Sapiens
QLAETQRF

SEQ ID NO: 79249 - protein, 8 aa, Homo Sapiens
THQPRSPL

SEQ ID NO: 79250 - protein, 8 aa, Homo Sapiens
HQPRSPLR

SEQ ID NO: 79251 - protein, 8 aa, Homo Sapiens
RSPLRDLK

SEQ ID NO: 79252 - protein, 8 aa, Homo Sapiens
PLRDLKGA

SEQ ID NO: 79253 - protein, 9 aa, Homo Sapiens
KPIQKLLAG

SEQ ID NO: 79254 - protein, 9 aa, Homo Sapiens
KLLAGLILL

SEQ ID NO: 79255 - protein, 9 aa, Homo Sapiens
LLAGLILLT

SEQ ID NO: 79256 - protein, 9 aa, Homo Sapiens
LAGLILLTW

SEQ ID NO: 79257 - protein, 9 aa, Homo Sapiens
GLILLTWCV

SEQ ID NO: 79258 - protein, 9 aa, Homo Sapiens
LLTWCVEGC

SEQ ID NO: 79259 - protein, 9 aa, Homo Sapiens
SSQHWSYGL

SEQ ID NO: 79260 - protein, 9 aa, Homo Sapiens
SQHWSYGLR

SEQ ID NO: 79261 - protein, 9 aa, Homo Sapiens
SYGLRPGGK

SEQ ID NO: 79262 - protein, 9 aa, Homo Sapiens
RPGGKRDAE

SEQ ID NO: 79263 - protein, 9 aa, Homo Sapiens
DAENLIDSF

SEQ ID NO: 79264 - protein, 9 aa, Homo Sapiens
AENLIDSFQ

SEQ ID NO: 79265 - protein, 9 aa, Homo Sapiens
NLIDSFQEI

SEQ ID NO: 79266 - protein, 9 aa, Homo Sapiens
LIDSFQEIV

SEQ ID NO: 79267 - protein, 9 aa, Homo Sapiens
SFQEIVKEV

SEQ ID NO: 79268 - protein, 9 aa, Homo Sapiens
EIVKEVGQL

SEQ ID NO: 79269 - protein, 9 aa, Homo Sapiens
GQLAETQRF

SEQ ID NO: 79270 - protein, 9 aa, Homo Sapiens
AETQRFECT

SEQ ID NO: 79271 - protein, 9 aa, Homo Sapiens
TTHQPRSPL

SEQ ID NO: 79272 - protein, 9 aa, Homo Sapiens
QPRSPLRDL

SEQ ID NO: 79273 - protein, 9 aa, Homo Sapiens
PLRDLKGAL

SEQ ID NO: 79274 - protein, 9 aa, Homo Sapiens
DLKGALESL

SEQ ID NO: 79275 - protein, 9 aa, Homo Sapiens
SLIEEETGQ

SEQ ID NO: 79276 - protein, 10 aa, Homo Sapiens
KPIQKLLAGL

SEQ ID NO: 79277 - protein, 10 aa, Homo Sapiens
IQKLLAGLIL

SEQ ID NO: 79278 - protein, 10 aa, Homo Sapiens
KLLAGLILLT

SEQ ID NO: 79279 - protein, 10 aa, Homo Sapiens
LLAGLILLTW

SEQ ID NO: 79280 - protein, 10 aa, Homo Sapiens
ILLTWCVEGC

SEQ ID NO: 79281 - protein, 10 aa, Homo Sapiens
EGCSSQHWSY

SEQ ID NO: 79282 - protein, 10 aa, Homo Sapiens
CSSQHWSYGL

SEQ ID NO: 79283 - protein, 10 aa, Homo Sapiens
SSQHWSYGLR

SEQ ID NO: 79284 - protein, 10 aa, Homo Sapiens
WSYGLRPGGK

SEQ ID NO: 79285 - protein, 10 aa, Homo Sapiens
GLRPGGKRDA

SEQ ID NO: 79286 - protein, 10 aa, Homo Sapiens
NLIDSFQEIV

SEQ ID NO: 79287 - protein, 10 aa, Homo Sapiens
LIDSFQEIVK

SEQ ID NO: 79288 - protein, 10 aa, Homo Sapiens
DSFQEIVKEV

SEQ ID NO: 79289 - protein, 10 aa, Homo Sapiens
QEIVKEVGQL

SEQ ID NO: 79290 - protein, 10 aa, Homo Sapiens
EVGQLAETQR

SEQ ID NO: 79291 - protein, 10 aa, Homo Sapiens
QLAETQRFEC

SEQ ID NO: 79292 - protein, 10 aa, Homo Sapiens
AETQRFECTT

SEQ ID NO: 79293 - protein, 10 aa, Homo Sapiens
RFECTTHQPR

SEQ ID NO: 79294 - protein, 10 aa, Homo Sapiens
CTTHQPRSPL

SEQ ID NO: 79295 - protein, 10 aa, Homo Sapiens
TTHQPRSPLR

SEQ ID NO: 79296 - protein, 10 aa, Homo Sapiens
SPLRDLKGAL

SEQ ID NO: 79297 - protein, 10 aa, Homo Sapiens
DLKGALESLI

SEQ ID NO: 79298 - protein, 10 aa, Homo Sapiens
ALESLIEEET

SEQ ID NO: 79299 - protein, 10 aa, Homo Sapiens
SLIEEETGQK

SEQ ID NO: 79300 - protein, 11 aa, Homo Sapiens
KPIQKLLAGLI

SEQ ID NO: 79301 - protein, 11 aa, Homo Sapiens
IQKLLAGLILL

SEQ ID NO: 79302 - protein, 11 aa, Homo Sapiens
KLLAGLILLTW

SEQ ID NO: 79303 - protein, 11 aa, Homo Sapiens
LLAGLILLTWC

SEQ ID NO: 79304 - protein, 11 aa, Homo Sapiens
LAGLILLTWCV

SEQ ID NO: 79305 - protein, 11 aa, Homo Sapiens
VEGCSSQHWSY

SEQ ID NO: 79306 - protein, 11 aa, Homo Sapiens
GCSSQHWSYGL

SEQ ID NO: 79307 - protein, 11 aa, Homo Sapiens
CSSQHWSYGLR

SEQ ID NO: 79308 - protein, 11 aa, Homo Sapiens
WSYGLRPGGKR

SEQ ID NO: 79309 - protein, 11 aa, Homo Sapiens
RPGGKRDAENL

SEQ ID NO: 79310 - protein, 11 aa, Homo Sapiens
AENLIDSFQEI

SEQ ID NO: 79311 - protein, 11 aa, Homo Sapiens
NLIDSFQEIVK

SEQ ID NO: 79312 - protein, 11 aa, Homo Sapiens
FQEIVKEVGQL

SEQ ID NO: 79313 - protein, 11 aa, Homo Sapiens
EIVKEVGQLAE

SEQ ID NO: 79314 - protein, 11 aa, Homo Sapiens
EVGQLAETQRF

SEQ ID NO: 79315 - protein, 11 aa, Homo Sapiens
GQLAETQRFEC

SEQ ID NO: 79316 - protein, 11 aa, Homo Sapiens
QLAETQRFECT

SEQ ID NO: 79317 - protein, 11 aa, Homo Sapiens
QRFECTTHQPR

SEQ ID NO: 79318 - protein, 11 aa, Homo Sapiens
ECTTHQPRSPL

SEQ ID NO: 79319 - protein, 11 aa, Homo Sapiens
CTTHQPRSPLR

SEQ ID NO: 79320 - protein, 11 aa, Homo Sapiens
ESLIEEETGQK

SEQ ID NO: 79321 - protein, 11 aa, Homo Sapiens
SLIEEETGQKK

SEQ ID NO: 79322 - protein, 13 aa, Homo Sapiens
MKPIQKLLAGLIL

SEQ ID NO: 79323 - protein, 13 aa, Homo Sapiens
KPIQKLLAGLILL

SEQ ID NO: 79324 - protein, 13 aa, Homo Sapiens
PIQKLLAGLILLT

SEQ ID NO: 79325 - protein, 13 aa, Homo Sapiens
IQKLLAGLILLTW

SEQ ID NO: 79326 - protein, 13 aa, Homo Sapiens
QKLLAGLILLTWC

SEQ ID NO: 79327 - protein, 13 aa, Homo Sapiens
KLLAGLILLTWCV

SEQ ID NO: 79328 - protein, 13 aa, Homo Sapiens
LLAGLILLTWCVE

SEQ ID NO: 79329 - protein, 13 aa, Homo Sapiens
LAGLILLTWCVEG

SEQ ID NO: 79330 - protein, 13 aa, Homo Sapiens
AGLILLTWCVEGC

SEQ ID NO: 79331 - protein, 13 aa, Homo Sapiens
GLILLTWCVEGCS

SEQ ID NO: 79332 - protein, 13 aa, Homo Sapiens
LILLTWCVEGCSS

SEQ ID NO: 79333 - protein, 13 aa, Homo Sapiens
ILLTWCVEGCSSQ

SEQ ID NO: 79334 - protein, 13 aa, Homo Sapiens
LLTWCVEGCSSQH

SEQ ID NO: 79335 - protein, 13 aa, Homo Sapiens
LTWCVEGCSSQHW

SEQ ID NO: 79336 - protein, 13 aa, Homo Sapiens
TWCVEGCSSQHWS

SEQ ID NO: 79337 - protein, 13 aa, Homo Sapiens
WCVEGCSSQHWSY

SEQ ID NO: 79338 - protein, 13 aa, Homo Sapiens
CVEGCSSQHWSYG

SEQ ID NO: 79339 - protein, 13 aa, Homo Sapiens
VEGCSSQHWSYGL

SEQ ID NO: 79340 - protein, 13 aa, Homo Sapiens
EGCSSQHWSYGLR

SEQ ID NO: 79341 - protein, 13 aa, Homo Sapiens
GCSSQHWSYGLRP

SEQ ID NO: 79342 - protein, 13 aa, Homo Sapiens
CSSQHWSYGLRPG

SEQ ID NO: 79343 - protein, 13 aa, Homo Sapiens
SSQHWSYGLRPGG

SEQ ID NO: 79344 - protein, 13 aa, Homo Sapiens
SQHWSYGLRPGGK

SEQ ID NO: 79345 - protein, 13 aa, Homo Sapiens
QHWSYGLRPGGKR

SEQ ID NO: 79346 - protein, 13 aa, Homo Sapiens
HWSYGLRPGGKRD

SEQ ID NO: 79347 - protein, 13 aa, Homo Sapiens
WSYGLRPGGKRDA

SEQ ID NO: 79348 - protein, 13 aa, Homo Sapiens
SYGLRPGGKRDAE

SEQ ID NO: 79349 - protein, 13 aa, Homo Sapiens
YGLRPGGKRDAEN

SEQ ID NO: 79350 - protein, 13 aa, Homo Sapiens
GLRPGGKRDAENL

SEQ ID NO: 79351 - protein, 13 aa, Homo Sapiens
LRPGGKRDAENLI

SEQ ID NO: 79352 - protein, 13 aa, Homo Sapiens
RPGGKRDAENLID

SEQ ID NO: 79353 - protein, 13 aa, Homo Sapiens
PGGKRDAENLIDS

SEQ ID NO: 79354 - protein, 13 aa, Homo Sapiens
GGKRDAENLIDSF

SEQ ID NO: 79355 - protein, 13 aa, Homo Sapiens
GKRDAENLIDSFQ

SEQ ID NO: 79356 - protein, 13 aa, Homo Sapiens
KRDAENLIDSFQE

SEQ ID NO: 79357 - protein, 13 aa, Homo Sapiens
RDAENLIDSFQEI

SEQ ID NO: 79358 - protein, 13 aa, Homo Sapiens
DAENLIDSFQEIV

SEQ ID NO: 79359 - protein, 13 aa, Homo Sapiens
AENLIDSFQEIVK

SEQ ID NO: 79360 - protein, 13 aa, Homo Sapiens
ENLIDSFQEIVKE

SEQ ID NO: 79361 - protein, 13 aa, Homo Sapiens
NLIDSFQEIVKEV

SEQ ID NO: 79362 - protein, 13 aa, Homo Sapiens
LIDSFQEIVKEVG

SEQ ID NO: 79363 - protein, 13 aa, Homo Sapiens
IDSFQEIVKEVGQ

SEQ ID NO: 79364 - protein, 13 aa, Homo Sapiens
DSFQEIVKEVGQL

SEQ ID NO: 79365 - protein, 13 aa, Homo Sapiens
SFQEIVKEVGQLA

SEQ ID NO: 79366 - protein, 13 aa, Homo Sapiens
FQEIVKEVGQLAE

SEQ ID NO: 79367 - protein, 13 aa, Homo Sapiens
QEIVKEVGQLAET

SEQ ID NO: 79368 - protein, 13 aa, Homo Sapiens
EIVKEVGQLAETQ

SEQ ID NO: 79369 - protein, 13 aa, Homo Sapiens
IVKEVGQLAETQR

SEQ ID NO: 79370 - protein, 13 aa, Homo Sapiens
VKEVGQLAETQRF

SEQ ID NO: 79371 - protein, 13 aa, Homo Sapiens
KEVGQLAETQRFE

SEQ ID NO: 79372 - protein, 13 aa, Homo Sapiens
EVGQLAETQRFEC

SEQ ID NO: 79373 - protein, 13 aa, Homo Sapiens
VGQLAETQRFECT

SEQ ID NO: 79374 - protein, 13 aa, Homo Sapiens
GQLAETQRFECTT

SEQ ID NO: 79375 - protein, 13 aa, Homo Sapiens
QLAETQRFECTTH

SEQ ID NO: 79376 - protein, 13 aa, Homo Sapiens
LAETQRFECTTHQ

SEQ ID NO: 79377 - protein, 13 aa, Homo Sapiens
AETQRFECTTHQP

SEQ ID NO: 79378 - protein, 13 aa, Homo Sapiens
ETQRFECTTHQPR

SEQ ID NO: 79379 - protein, 13 aa, Homo Sapiens
TQRFECTTHQPRS

SEQ ID NO: 79380 - protein, 13 aa, Homo Sapiens
QRFECTTHQPRSP

SEQ ID NO: 79381 - protein, 13 aa, Homo Sapiens
RFECTTHQPRSPL

SEQ ID NO: 79382 - protein, 13 aa, Homo Sapiens
FECTTHQPRSPLR

SEQ ID NO: 79383 - protein, 13 aa, Homo Sapiens
ECTTHQPRSPLRD

SEQ ID NO: 79384 - protein, 13 aa, Homo Sapiens
CTTHQPRSPLRDL

SEQ ID NO: 79385 - protein, 13 aa, Homo Sapiens
TTHQPRSPLRDLK

SEQ ID NO: 79386 - protein, 13 aa, Homo Sapiens
THQPRSPLRDLKG

SEQ ID NO: 79387 - protein, 13 aa, Homo Sapiens
HQPRSPLRDLKGA

SEQ ID NO: 79388 - protein, 13 aa, Homo Sapiens
QPRSPLRDLKGAL

SEQ ID NO: 79389 - protein, 13 aa, Homo Sapiens
PRSPLRDLKGALE

SEQ ID NO: 79390 - protein, 13 aa, Homo Sapiens
RSPLRDLKGALES

SEQ ID NO: 79391 - protein, 13 aa, Homo Sapiens
SPLRDLKGALESL

SEQ ID NO: 79392 - protein, 13 aa, Homo Sapiens
PLRDLKGALESLI

SEQ ID NO: 79393 - protein, 13 aa, Homo Sapiens
LRDLKGALESLIE

SEQ ID NO: 79394 - protein, 13 aa, Homo Sapiens
RDLKGALESLIEE

SEQ ID NO: 79395 - protein, 13 aa, Homo Sapiens
DLKGALESLIEEE

SEQ ID NO: 79396 - protein, 13 aa, Homo Sapiens
LKGALESLIEEET

SEQ ID NO: 79397 - protein, 13 aa, Homo Sapiens
KGALESLIEEETG

SEQ ID NO: 79398 - protein, 13 aa, Homo Sapiens
GALESLIEEETGQ

SEQ ID NO: 79399 - protein, 13 aa, Homo Sapiens
ALESLIEEETGQK

SEQ ID NO: 79400 - protein, 13 aa, Homo Sapiens
LESLIEEETGQKK

SEQ ID NO: 79401 - protein, 13 aa, Homo Sapiens
ESLIEEETGQKKI

SEQ ID NO: 79402 - protein, 14 aa, Homo Sapiens
MKPIQKLLAGLILL

SEQ ID NO: 79403 - protein, 14 aa, Homo Sapiens
KPIQKLLAGLILLT

SEQ ID NO: 79404 - protein, 14 aa, Homo Sapiens
PIQKLLAGLILLTW

SEQ ID NO: 79405 - protein, 14 aa, Homo Sapiens
IQKLLAGLILLTWC

SEQ ID NO: 79406 - protein, 14 aa, Homo Sapiens
QKLLAGLILLTWCV

SEQ ID NO: 79407 - protein, 14 aa, Homo Sapiens
KLLAGLILLTWCVE

SEQ ID NO: 79408 - protein, 14 aa, Homo Sapiens
LLAGLILLTWCVEG

SEQ ID NO: 79409 - protein, 14 aa, Homo Sapiens
LAGLILLTWCVEGC

SEQ ID NO: 79410 - protein, 14 aa, Homo Sapiens
AGLILLTWCVEGCS

SEQ ID NO: 79411 - protein, 14 aa, Homo Sapiens
GLILLTWCVEGCSS

SEQ ID NO: 79412 - protein, 14 aa, Homo Sapiens
LILLTWCVEGCSSQ

SEQ ID NO: 79413 - protein, 14 aa, Homo Sapiens
ILLTWCVEGCSSQH

SEQ ID NO: 79414 - protein, 14 aa, Homo Sapiens
LLTWCVEGCSSQHW

SEQ ID NO: 79415 - protein, 14 aa, Homo Sapiens
LTWCVEGCSSQHWS

SEQ ID NO: 79416 - protein, 14 aa, Homo Sapiens
TWCVEGCSSQHWSY

SEQ ID NO: 79417 - protein, 14 aa, Homo Sapiens
WCVEGCSSQHWSYG

SEQ ID NO: 79418 - protein, 14 aa, Homo Sapiens
CVEGCSSQHWSYGL

SEQ ID NO: 79419 - protein, 14 aa, Homo Sapiens
VEGCSSQHWSYGLR

SEQ ID NO: 79420 - protein, 14 aa, Homo Sapiens
EGCSSQHWSYGLRP

SEQ ID NO: 79421 - protein, 14 aa, Homo Sapiens
GCSSQHWSYGLRPG

SEQ ID NO: 79422 - protein, 14 aa, Homo Sapiens
CSSQHWSYGLRPGG

SEQ ID NO: 79423 - protein, 14 aa, Homo Sapiens
SSQHWSYGLRPGGK

SEQ ID NO: 79424 - protein, 14 aa, Homo Sapiens
SQHWSYGLRPGGKR

SEQ ID NO: 79425 - protein, 14 aa, Homo Sapiens
QHWSYGLRPGGKRD

SEQ ID NO: 79426 - protein, 14 aa, Homo Sapiens
HWSYGLRPGGKRDA

SEQ ID NO: 79427 - protein, 14 aa, Homo Sapiens
WSYGLRPGGKRDAE

SEQ ID NO: 79428 - protein, 14 aa, Homo Sapiens
SYGLRPGGKRDAEN

SEQ ID NO: 79429 - protein, 14 aa, Homo Sapiens
YGLRPGGKRDAENL

SEQ ID NO: 79430 - protein, 14 aa, Homo Sapiens
GLRPGGKRDAENLI

SEQ ID NO: 79431 - protein, 14 aa, Homo Sapiens
LRPGGKRDAENLID

SEQ ID NO: 79432 - protein, 14 aa, Homo Sapiens
RPGGKRDAENLIDS

SEQ ID NO: 79433 - protein, 14 aa, Homo Sapiens
PGGKRDAENLIDSF

SEQ ID NO: 79434 - protein, 14 aa, Homo Sapiens
GGKRDAENLIDSFQ

SEQ ID NO: 79435 - protein, 14 aa, Homo Sapiens
GKRDAENLIDSFQE

SEQ ID NO: 79436 - protein, 14 aa, Homo Sapiens
KRDAENLIDSFQEI

SEQ ID NO: 79437 - protein, 14 aa, Homo Sapiens
RDAENLIDSFQEIV

SEQ ID NO: 79438 - protein, 14 aa, Homo Sapiens
DAENLIDSFQEIVK

SEQ ID NO: 79439 - protein, 14 aa, Homo Sapiens
AENLIDSFQEIVKE

SEQ ID NO: 79440 - protein, 14 aa, Homo Sapiens
ENLIDSFQEIVKEV

SEQ ID NO: 79441 - protein, 14 aa, Homo Sapiens
NLIDSFQEIVKEVG

SEQ ID NO: 79442 - protein, 14 aa, Homo Sapiens
LIDSFQEIVKEVGQ

SEQ ID NO: 79443 - protein, 14 aa, Homo Sapiens
IDSFQEIVKEVGQL

SEQ ID NO: 79444 - protein, 14 aa, Homo Sapiens
DSFQEIVKEVGQLA

SEQ ID NO: 79445 - protein, 14 aa, Homo Sapiens
SFQEIVKEVGQLAE

SEQ ID NO: 79446 - protein, 14 aa, Homo Sapiens
FQEIVKEVGQLAET

SEQ ID NO: 79447 - protein, 14 aa, Homo Sapiens
QEIVKEVGQLAETQ

SEQ ID NO: 79448 - protein, 14 aa, Homo Sapiens
EIVKEVGQLAETQR

SEQ ID NO: 79449 - protein, 14 aa, Homo Sapiens
IVKEVGQLAETQRF

SEQ ID NO: 79450 - protein, 14 aa, Homo Sapiens
VKEVGQLAETQRFE

SEQ ID NO: 79451 - protein, 14 aa, Homo Sapiens
KEVGQLAETQRFEC

SEQ ID NO: 79452 - protein, 14 aa, Homo Sapiens
EVGQLAETQRFECT

SEQ ID NO: 79453 - protein, 14 aa, Homo Sapiens
VGQLAETQRFECTT

SEQ ID NO: 79454 - protein, 14 aa, Homo Sapiens
GQLAETQRFECTTH

SEQ ID NO: 79455 - protein, 14 aa, Homo Sapiens
QLAETQRFECTTHQ

SEQ ID NO: 79456 - protein, 14 aa, Homo Sapiens
LAETQRFECTTHQP

SEQ ID NO: 79457 - protein, 14 aa, Homo Sapiens
AETQRFECTTHQPR

SEQ ID NO: 79458 - protein, 14 aa, Homo Sapiens
ETQRFECTTHQPRS

SEQ ID NO: 79459 - protein, 14 aa, Homo Sapiens
TQRFECTTHQPRSP

SEQ ID NO: 79460 - protein, 14 aa, Homo Sapiens
QRFECTTHQPRSPL

SEQ ID NO: 79461 - protein, 14 aa, Homo Sapiens
RFECTTHQPRSPLR

SEQ ID NO: 79462 - protein, 14 aa, Homo Sapiens
FECTTHQPRSPLRD

SEQ ID NO: 79463 - protein, 14 aa, Homo Sapiens
ECTTHQPRSPLRDL

SEQ ID NO: 79464 - protein, 14 aa, Homo Sapiens
CTTHQPRSPLRDLK

SEQ ID NO: 79465 - protein, 14 aa, Homo Sapiens
TTHQPRSPLRDLKG

SEQ ID NO: 79466 - protein, 14 aa, Homo Sapiens
THQPRSPLRDLKGA

SEQ ID NO: 79467 - protein, 14 aa, Homo Sapiens
HQPRSPLRDLKGAL

SEQ ID NO: 79468 - protein, 14 aa, Homo Sapiens
QPRSPLRDLKGALE

SEQ ID NO: 79469 - protein, 14 aa, Homo Sapiens
PRSPLRDLKGALES

SEQ ID NO: 79470 - protein, 14 aa, Homo Sapiens
RSPLRDLKGALESL

SEQ ID NO: 79471 - protein, 14 aa, Homo Sapiens
SPLRDLKGALESLI

SEQ ID NO: 79472 - protein, 14 aa, Homo Sapiens
PLRDLKGALESLIE

SEQ ID NO: 79473 - protein, 14 aa, Homo Sapiens
LRDLKGALESLIEE

SEQ ID NO: 79474 - protein, 14 aa, Homo Sapiens
RDLKGALESLIEEE

SEQ ID NO: 79475 - protein, 14 aa, Homo Sapiens
DLKGALESLIEEET

SEQ ID NO: 79476 - protein, 14 aa, Homo Sapiens
LKGALESLIEEETG

SEQ ID NO: 79477 - protein, 14 aa, Homo Sapiens
KGALESLIEEETGQ

SEQ ID NO: 79478 - protein, 14 aa, Homo Sapiens
GALESLIEEETGQK

SEQ ID NO: 79479 - protein, 14 aa, Homo Sapiens
ALESLIEEETGQKK

SEQ ID NO: 79480 - protein, 14 aa, Homo Sapiens
LESLIEEETGQKKI

SEQ ID NO: 79481 - protein, 15 aa, Homo Sapiens
MKPIQKLLAGLILLT

SEQ ID NO: 79482 - protein, 15 aa, Homo Sapiens
KPIQKLLAGLILLTW

SEQ ID NO: 79483 - protein, 15 aa, Homo Sapiens
PIQKLLAGLILLTWC

SEQ ID NO: 79484 - protein, 15 aa, Homo Sapiens
IQKLLAGLILLTWCV

SEQ ID NO: 79485 - protein, 15 aa, Homo Sapiens
QKLLAGLILLTWCVE

SEQ ID NO: 79486 - protein, 15 aa, Homo Sapiens
KLLAGLILLTWCVEG

SEQ ID NO: 79487 - protein, 15 aa, Homo Sapiens
LLAGLILLTWCVEGC

SEQ ID NO: 79488 - protein, 15 aa, Homo Sapiens
LAGLILLTWCVEGCS

SEQ ID NO: 79489 - protein, 15 aa, Homo Sapiens
AGLILLTWCVEGCSS

SEQ ID NO: 79490 - protein, 15 aa, Homo Sapiens
GLILLTWCVEGCSSQ

SEQ ID NO: 79491 - protein, 15 aa, Homo Sapiens
LILLTWCVEGCSSQH

SEQ ID NO: 79492 - protein, 15 aa, Homo Sapiens
ILLTWCVEGCSSQHW

SEQ ID NO: 79493 - protein, 15 aa, Homo Sapiens
LLTWCVEGCSSQHWS

SEQ ID NO: 79494 - protein, 15 aa, Homo Sapiens
LTWCVEGCSSQHWSY

SEQ ID NO: 79495 - protein, 15 aa, Homo Sapiens
TWCVEGCSSQHWSYG

SEQ ID NO: 79496 - protein, 15 aa, Homo Sapiens
WCVEGCSSQHWSYGL

SEQ ID NO: 79497 - protein, 15 aa, Homo Sapiens
CVEGCSSQHWSYGLR

SEQ ID NO: 79498 - protein, 15 aa, Homo Sapiens
VEGCSSQHWSYGLRP

SEQ ID NO: 79499 - protein, 15 aa, Homo Sapiens
EGCSSQHWSYGLRPG

SEQ ID NO: 79500 - protein, 15 aa, Homo Sapiens
GCSSQHWSYGLRPGG

SEQ ID NO: 79501 - protein, 15 aa, Homo Sapiens
CSSQHWSYGLRPGGK

SEQ ID NO: 79502 - protein, 15 aa, Homo Sapiens
SSQHWSYGLRPGGKR

SEQ ID NO: 79503 - protein, 15 aa, Homo Sapiens
SQHWSYGLRPGGKRD

SEQ ID NO: 79504 - protein, 15 aa, Homo Sapiens
QHWSYGLRPGGKRDA

SEQ ID NO: 79505 - protein, 15 aa, Homo Sapiens
HWSYGLRPGGKRDAE

SEQ ID NO: 79506 - protein, 15 aa, Homo Sapiens
WSYGLRPGGKRDAEN

SEQ ID NO: 79507 - protein, 15 aa, Homo Sapiens
SYGLRPGGKRDAENL

SEQ ID NO: 79508 - protein, 15 aa, Homo Sapiens
YGLRPGGKRDAENLI

SEQ ID NO: 79509 - protein, 15 aa, Homo Sapiens
GLRPGGKRDAENLID

SEQ ID NO: 79510 - protein, 15 aa, Homo Sapiens
LRPGGKRDAENLIDS

SEQ ID NO: 79511 - protein, 15 aa, Homo Sapiens
RPGGKRDAENLIDSF

SEQ ID NO: 79512 - protein, 15 aa, Homo Sapiens
PGGKRDAENLIDSFQ

SEQ ID NO: 79513 - protein, 15 aa, Homo Sapiens
GGKRDAENLIDSFQE

SEQ ID NO: 79514 - protein, 15 aa, Homo Sapiens
GKRDAENLIDSFQEI

SEQ ID NO: 79515 - protein, 15 aa, Homo Sapiens
KRDAENLIDSFQEIV

SEQ ID NO: 79516 - protein, 15 aa, Homo Sapiens
RDAENLIDSFQEIVK

SEQ ID NO: 79517 - protein, 15 aa, Homo Sapiens
DAENLIDSFQEIVKE

SEQ ID NO: 79518 - protein, 15 aa, Homo Sapiens
AENLIDSFQEIVKEV

SEQ ID NO: 79519 - protein, 15 aa, Homo Sapiens
ENLIDSFQEIVKEVG

SEQ ID NO: 79520 - protein, 15 aa, Homo Sapiens
NLIDSFQEIVKEVGQ

SEQ ID NO: 79521 - protein, 15 aa, Homo Sapiens
LIDSFQEIVKEVGQL

SEQ ID NO: 79522 - protein, 15 aa, Homo Sapiens
IDSFQEIVKEVGQLA

SEQ ID NO: 79523 - protein, 15 aa, Homo Sapiens
DSFQEIVKEVGQLAE

SEQ ID NO: 79524 - protein, 15 aa, Homo Sapiens
SFQEIVKEVGQLAET

SEQ ID NO: 79525 - protein, 15 aa, Homo Sapiens
FQEIVKEVGQLAETQ

SEQ ID NO: 79526 - protein, 15 aa, Homo Sapiens
QEIVKEVGQLAETQR

SEQ ID NO: 79527 - protein, 15 aa, Homo Sapiens
EIVKEVGQLAETQRF

SEQ ID NO: 79528 - protein, 15 aa, Homo Sapiens
IVKEVGQLAETQRFE

SEQ ID NO: 79529 - protein, 15 aa, Homo Sapiens
VKEVGQLAETQRFEC

SEQ ID NO: 79530 - protein, 15 aa, Homo Sapiens
KEVGQLAETQRFECT

SEQ ID NO: 79531 - protein, 15 aa, Homo Sapiens
EVGQLAETQRFECTT

SEQ ID NO: 79532 - protein, 15 aa, Homo Sapiens
VGQLAETQRFECTTH

SEQ ID NO: 79533 - protein, 15 aa, Homo Sapiens
GQLAETQRFECTTHQ

SEQ ID NO: 79534 - protein, 15 aa, Homo Sapiens
QLAETQRFECTTHQP

SEQ ID NO: 79535 - protein, 15 aa, Homo Sapiens
LAETQRFECTTHQPR

SEQ ID NO: 79536 - protein, 15 aa, Homo Sapiens
AETQRFECTTHQPRS

SEQ ID NO: 79537 - protein, 15 aa, Homo Sapiens
ETQRFECTTHQPRSP

SEQ ID NO: 79538 - protein, 15 aa, Homo Sapiens
TQRFECTTHQPRSPL

SEQ ID NO: 79539 - protein, 15 aa, Homo Sapiens
QRFECTTHQPRSPLR

SEQ ID NO: 79540 - protein, 15 aa, Homo Sapiens
RFECTTHQPRSPLRD

SEQ ID NO: 79541 - protein, 15 aa, Homo Sapiens
FECTTHQPRSPLRDL

SEQ ID NO: 79542 - protein, 15 aa, Homo Sapiens
ECTTHQPRSPLRDLK

SEQ ID NO: 79543 - protein, 15 aa, Homo Sapiens
CTTHQPRSPLRDLKG

SEQ ID NO: 79544 - protein, 15 aa, Homo Sapiens
TTHQPRSPLRDLKGA

SEQ ID NO: 79545 - protein, 15 aa, Homo Sapiens
THQPRSPLRDLKGAL

SEQ ID NO: 79546 - protein, 15 aa, Homo Sapiens
HQPRSPLRDLKGALE

SEQ ID NO: 79547 - protein, 15 aa, Homo Sapiens
QPRSPLRDLKGALES

SEQ ID NO: 79548 - protein, 15 aa, Homo Sapiens
PRSPLRDLKGALESL

SEQ ID NO: 79549 - protein, 15 aa, Homo Sapiens
RSPLRDLKGALESLI

SEQ ID NO: 79550 - protein, 15 aa, Homo Sapiens
SPLRDLKGALESLIE

SEQ ID NO: 79551 - protein, 15 aa, Homo Sapiens
PLRDLKGALESLIEE

SEQ ID NO: 79552 - protein, 15 aa, Homo Sapiens
LRDLKGALESLIEEE

SEQ ID NO: 79553 - protein, 15 aa, Homo Sapiens
RDLKGALESLIEEET

SEQ ID NO: 79554 - protein, 15 aa, Homo Sapiens
DLKGALESLIEEETG

SEQ ID NO: 79555 - protein, 15 aa, Homo Sapiens
LKGALESLIEEETGQ

SEQ ID NO: 79556 - protein, 15 aa, Homo Sapiens
KGALESLIEEETGQK

SEQ ID NO: 79557 - protein, 15 aa, Homo Sapiens
GALESLIEEETGQKK

SEQ ID NO: 79558 - protein, 15 aa, Homo Sapiens
ALESLIEEETGQKKI

SEQ ID NO: 79559 - protein, 16 aa, Homo Sapiens
MKPIQKLLAGLILLTW

SEQ ID NO: 79560 - protein, 16 aa, Homo Sapiens
KPIQKLLAGLILLTWC

SEQ ID NO: 79561 - protein, 16 aa, Homo Sapiens
PIQKLLAGLILLTWCV

SEQ ID NO: 79562 - protein, 16 aa, Homo Sapiens
IQKLLAGLILLTWCVE

SEQ ID NO: 79563 - protein, 16 aa, Homo Sapiens
QKLLAGLILLTWCVEG

SEQ ID NO: 79564 - protein, 16 aa, Homo Sapiens
KLLAGLILLTWCVEGC

SEQ ID NO: 79565 - protein, 16 aa, Homo Sapiens
LLAGLILLTWCVEGCS

SEQ ID NO: 79566 - protein, 16 aa, Homo Sapiens
LAGLILLTWCVEGCSS

SEQ ID NO: 79567 - protein, 16 aa, Homo Sapiens
AGLILLTWCVEGCSSQ

SEQ ID NO: 79568 - protein, 16 aa, Homo Sapiens
GLILLTWCVEGCSSQH

SEQ ID NO: 79569 - protein, 16 aa, Homo Sapiens
LILLTWCVEGCSSQHW

SEQ ID NO: 79570 - protein, 16 aa, Homo Sapiens
ILLTWCVEGCSSQHWS

SEQ ID NO: 79571 - protein, 16 aa, Homo Sapiens
LLTWCVEGCSSQHWSY

SEQ ID NO: 79572 - protein, 16 aa, Homo Sapiens
LTWCVEGCSSQHWSYG

SEQ ID NO: 79573 - protein, 16 aa, Homo Sapiens
TWCVEGCSSQHWSYGL

SEQ ID NO: 79574 - protein, 16 aa, Homo Sapiens
WCVEGCSSQHWSYGLR

SEQ ID NO: 79575 - protein, 16 aa, Homo Sapiens
CVEGCSSQHWSYGLRP

SEQ ID NO: 79576 - protein, 16 aa, Homo Sapiens
VEGCSSQHWSYGLRPG

SEQ ID NO: 79577 - protein, 16 aa, Homo Sapiens
EGCSSQHWSYGLRPGG

SEQ ID NO: 79578 - protein, 16 aa, Homo Sapiens
GCSSQHWSYGLRPGGK

SEQ ID NO: 79579 - protein, 16 aa, Homo Sapiens
CSSQHWSYGLRPGGKR

SEQ ID NO: 79580 - protein, 16 aa, Homo Sapiens
SSQHWSYGLRPGGKRD

SEQ ID NO: 79581 - protein, 16 aa, Homo Sapiens
SQHWSYGLRPGGKRDA

SEQ ID NO: 79582 - protein, 16 aa, Homo Sapiens
QHWSYGLRPGGKRDAE

SEQ ID NO: 79583 - protein, 16 aa, Homo Sapiens
HWSYGLRPGGKRDAEN

SEQ ID NO: 79584 - protein, 16 aa, Homo Sapiens
WSYGLRPGGKRDAENL

SEQ ID NO: 79585 - protein, 16 aa, Homo Sapiens
SYGLRPGGKRDAENLI

SEQ ID NO: 79586 - protein, 16 aa, Homo Sapiens
YGLRPGGKRDAENLID

SEQ ID NO: 79587 - protein, 16 aa, Homo Sapiens
GLRPGGKRDAENLIDS

SEQ ID NO: 79588 - protein, 16 aa, Homo Sapiens
LRPGGKRDAENLIDSF

SEQ ID NO: 79589 - protein, 16 aa, Homo Sapiens
RPGGKRDAENLIDSFQ

SEQ ID NO: 79590 - protein, 16 aa, Homo Sapiens
PGGKRDAENLIDSFQE

SEQ ID NO: 79591 - protein, 16 aa, Homo Sapiens
GGKRDAENLIDSFQEI

SEQ ID NO: 79592 - protein, 16 aa, Homo Sapiens
GKRDAENLIDSFQEIV

SEQ ID NO: 79593 - protein, 16 aa, Homo Sapiens
KRDAENLIDSFQEIVK

SEQ ID NO: 79594 - protein, 16 aa, Homo Sapiens
RDAENLIDSFQEIVKE

SEQ ID NO: 79595 - protein, 16 aa, Homo Sapiens
DAENLIDSFQEIVKEV

SEQ ID NO: 79596 - protein, 16 aa, Homo Sapiens
AENLIDSFQEIVKEVG

SEQ ID NO: 79597 - protein, 16 aa, Homo Sapiens
ENLIDSFQEIVKEVGQ

SEQ ID NO: 79598 - protein, 16 aa, Homo Sapiens
NLIDSFQEIVKEVGQL

SEQ ID NO: 79599 - protein, 16 aa, Homo Sapiens
LIDSFQEIVKEVGQLA

SEQ ID NO: 79600 - protein, 16 aa, Homo Sapiens
IDSFQEIVKEVGQLAE

SEQ ID NO: 79601 - protein, 16 aa, Homo Sapiens
DSFQEIVKEVGQLAET

SEQ ID NO: 79602 - protein, 16 aa, Homo Sapiens
SFQEIVKEVGQLAETQ

SEQ ID NO: 79603 - protein, 16 aa, Homo Sapiens
FQEIVKEVGQLAETQR

SEQ ID NO: 79604 - protein, 16 aa, Homo Sapiens
QEIVKEVGQLAETQRF

SEQ ID NO: 79605 - protein, 16 aa, Homo Sapiens
EIVKEVGQLAETQRFE

SEQ ID NO: 79606 - protein, 16 aa, Homo Sapiens
IVKEVGQLAETQRFEC

SEQ ID NO: 79607 - protein, 16 aa, Homo Sapiens
VKEVGQLAETQRFECT

SEQ ID NO: 79608 - protein, 16 aa, Homo Sapiens
KEVGQLAETQRFECTT

SEQ ID NO: 79609 - protein, 16 aa, Homo Sapiens
EVGQLAETQRFECTTH

SEQ ID NO: 79610 - protein, 16 aa, Homo Sapiens
VGQLAETQRFECTTHQ

SEQ ID NO: 79611 - protein, 16 aa, Homo Sapiens
GQLAETQRFECTTHQP

SEQ ID NO: 79612 - protein, 16 aa, Homo Sapiens
QLAETQRFECTTHQPR

SEQ ID NO: 79613 - protein, 16 aa, Homo Sapiens
LAETQRFECTTHQPRS

SEQ ID NO: 79614 - protein, 16 aa, Homo Sapiens
AETQRFECTTHQPRSP

SEQ ID NO: 79615 - protein, 16 aa, Homo Sapiens
ETQRFECTTHQPRSPL

SEQ ID NO: 79616 - protein, 16 aa, Homo Sapiens
TQRFECTTHQPRSPLR

SEQ ID NO: 79617 - protein, 16 aa, Homo Sapiens
QRFECTTHQPRSPLRD

SEQ ID NO: 79618 - protein, 16 aa, Homo Sapiens
RFECTTHQPRSPLRDL

SEQ ID NO: 79619 - protein, 16 aa, Homo Sapiens
FECTTHQPRSPLRDLK

SEQ ID NO: 79620 - protein, 16 aa, Homo Sapiens
ECTTHQPRSPLRDLKG

SEQ ID NO: 79621 - protein, 16 aa, Homo Sapiens
CTTHQPRSPLRDLKGA

SEQ ID NO: 79622 - protein, 16 aa, Homo Sapiens
TTHQPRSPLRDLKGAL

SEQ ID NO: 79623 - protein, 16 aa, Homo Sapiens
THQPRSPLRDLKGALE

SEQ ID NO: 79624 - protein, 16 aa, Homo Sapiens
HQPRSPLRDLKGALES

SEQ ID NO: 79625 - protein, 16 aa, Homo Sapiens
QPRSPLRDLKGALESL

SEQ ID NO: 79626 - protein, 16 aa, Homo Sapiens
PRSPLRDLKGALESLI

SEQ ID NO: 79627 - protein, 16 aa, Homo Sapiens
RSPLRDLKGALESLIE

SEQ ID NO: 79628 - protein, 16 aa, Homo Sapiens
SPLRDLKGALESLIEE

SEQ ID NO: 79629 - protein, 16 aa, Homo Sapiens
PLRDLKGALESLIEEE

SEQ ID NO: 79630 - protein, 16 aa, Homo Sapiens
LRDLKGALESLIEEET

SEQ ID NO: 79631 - protein, 16 aa, Homo Sapiens
RDLKGALESLIEEETG

SEQ ID NO: 79632 - protein, 16 aa, Homo Sapiens
DLKGALESLIEEETGQ

SEQ ID NO: 79633 - protein, 16 aa, Homo Sapiens
LKGALESLIEEETGQK

SEQ ID NO: 79634 - protein, 16 aa, Homo Sapiens
KGALESLIEEETGQKK

SEQ ID NO: 79635 - protein, 16 aa, Homo Sapiens
GALESLIEEETGQKKI

SEQ ID NO: 79636 - protein, 839 aa, Homo Sapiens
MSVVGIDLGFQSCYVAVARAGGIETIANEYSDRCTPACISFGPKNRSIGAAAKSQVISNAKNTVQGFKRFHGRAFSDPFVEAEKSNLAYDIVQLPTGLTGIKVTYMEEERNFTTEQVTAMLLSKLKETAESVLKKPVVDCVVSVPCFYTDAERRSVMDATQIAGLNCLRLMNETTAVALAYGIYKQDLPALEEKPRNVVFVDMGHSAYQVSVCAFNRGKLKVLATAFDTTLGGRKFDEVLVNHFCEEFGKKYKLDIKSKIRALLRLSQECEKLKKLMSANASDLPLSIECFMNDVDVSGTMNRGKFLEMCNDLLARVEPPLRSVLEQTKLKKEDIYAVEIVGGATRIPAVKEKISKFFGKELSTTLNADEAVTRGCALQCAILSPAFKVREFSITDVVPYPISLRWNSPAEEGSSDCEVFSKNHAAPFSKVLTFYRKEPFTLEAYYSSPQDLPYPDPAIAQFSVQKVTPQSDGSSSKVKVKVRVNVHGIFSVSSASLVEVHKSEENEEPMETDQNAKEEEKMQVDQEEPHVEEQQQQTPAENKAESEEMETSQAGSKDKKMDQPPQAKKAKVKTSTVDLPIENQLLWQIDREMLNLYIENEGKMIMQDKLEKERNDAKNAVEEYVYEMRDKLSGEYEKFVSEDDRNSFTLKLEDTENWLYEDGEDQPKQVYVDKLAELKNLGQPIKIRFQESEERPKLFEELGKQIQQYMKIISSFKNKEDQYDHLDAADMTKVEKSTNEAMEWMNNKLNLQNKQSLTMDPVVKSKEIEAKIKELTSTCSPIISKPKPKVEPPKEEQKNAEQNGPVDGQGDNPGPQAAEQGTDTAVPSDSDKKLPEMDI

SEQ ID NO: 79637 - protein, 8 aa, Homo Sapiens
LGFQSCYV

SEQ ID NO: 79638 - protein, 8 aa, Homo Sapiens
FQSCYVAV

SEQ ID NO: 79639 - protein, 8 aa, Homo Sapiens
SCYVAVAR

SEQ ID NO: 79640 - protein, 8 aa, Homo Sapiens
AVARAGGI

SEQ ID NO: 79641 - protein, 8 aa, Homo Sapiens
IETIANEY

SEQ ID NO: 79642 - protein, 8 aa, Homo Sapiens
ETIANEYS

SEQ ID NO: 79643 - protein, 8 aa, Homo Sapiens
IANEYSDR

SEQ ID NO: 79644 - protein, 8 aa, Homo Sapiens
CTPACISF

SEQ ID NO: 79645 - protein, 8 aa, Homo Sapiens
ACISFGPK

SEQ ID NO: 79646 - protein, 8 aa, Homo Sapiens
ISFGPKNR

SEQ ID NO: 79647 - protein, 8 aa, Homo Sapiens
RSIGAAAK

SEQ ID NO: 79648 - protein, 8 aa, Homo Sapiens
GAAAKSQV

SEQ ID NO: 79649 - protein, 8 aa, Homo Sapiens
SQVISNAK

SEQ ID NO: 79650 - protein, 8 aa, Homo Sapiens
KNTVQGFK

SEQ ID NO: 79651 - protein, 8 aa, Homo Sapiens
NTVQGFKR

SEQ ID NO: 79652 - protein, 8 aa, Homo Sapiens
GFKRFHGR

SEQ ID NO: 79653 - protein, 8 aa, Homo Sapiens
KRFHGRAF

SEQ ID NO: 79654 - protein, 8 aa, Homo Sapiens
RFHGRAFS

SEQ ID NO: 79655 - protein, 8 aa, Homo Sapiens
GRAFSDPF

SEQ ID NO: 79656 - protein, 8 aa, Homo Sapiens
RAFSDPFV

SEQ ID NO: 79657 - protein, 8 aa, Homo Sapiens
FSDPFVEA

SEQ ID NO: 79658 - protein, 8 aa, Homo Sapiens
DPFVEAEK

SEQ ID NO: 79659 - protein, 8 aa, Homo Sapiens
AEKSNLAY

SEQ ID NO: 79660 - protein, 8 aa, Homo Sapiens
LAYDIVQL

SEQ ID NO: 79661 - protein, 8 aa, Homo Sapiens
VQLPTGLT

SEQ ID NO: 79662 - protein, 8 aa, Homo Sapiens
LPTGLTGI

SEQ ID NO: 79663 - protein, 8 aa, Homo Sapiens
GLTGIKVT

SEQ ID NO: 79664 - protein, 8 aa, Homo Sapiens
LTGIKVTY

SEQ ID NO: 79665 - protein, 8 aa, Homo Sapiens
VTYMEEER

SEQ ID NO: 79666 - protein, 8 aa, Homo Sapiens
YMEEERNF

SEQ ID NO: 79667 - protein, 8 aa, Homo Sapiens
FTTEQVTA

SEQ ID NO: 79668 - protein, 8 aa, Homo Sapiens
TTEQVTAM

SEQ ID NO: 79669 - protein, 8 aa, Homo Sapiens
TEQVTAML

SEQ ID NO: 79670 - protein, 8 aa, Homo Sapiens
VTAMLLSK

SEQ ID NO: 79671 - protein, 8 aa, Homo Sapiens
TAMLLSKL

SEQ ID NO: 79672 - protein, 8 aa, Homo Sapiens
AMLLSKLK

SEQ ID NO: 79673 - protein, 8 aa, Homo Sapiens
KETAESVL

SEQ ID NO: 79674 - protein, 8 aa, Homo Sapiens
ETAESVLK

SEQ ID NO: 79675 - protein, 8 aa, Homo Sapiens
TAESVLKK

SEQ ID NO: 79676 - protein, 8 aa, Homo Sapiens
ESVLKKPV

SEQ ID NO: 79677 - protein, 8 aa, Homo Sapiens
SVLKKPVV

SEQ ID NO: 79678 - protein, 8 aa, Homo Sapiens
KPVVDCVV

SEQ ID NO: 79679 - protein, 8 aa, Homo Sapiens
VVDCVVSV

SEQ ID NO: 79680 - protein, 8 aa, Homo Sapiens
VVSVPCFY

SEQ ID NO: 79681 - protein, 8 aa, Homo Sapiens
VPCFYTDA

SEQ ID NO: 79682 - protein, 8 aa, Homo Sapiens
CFYTDAER

SEQ ID NO: 79683 - protein, 8 aa, Homo Sapiens
FYTDAERR

SEQ ID NO: 79684 - protein, 8 aa, Homo Sapiens
SVMDATQI

SEQ ID NO: 79685 - protein, 8 aa, Homo Sapiens
VMDATQIA

SEQ ID NO: 79686 - protein, 8 aa, Homo Sapiens
DATQIAGL

SEQ ID NO: 79687 - protein, 8 aa, Homo Sapiens
TQIAGLNC

SEQ ID NO: 79688 - protein, 8 aa, Homo Sapiens
QIAGLNCL

SEQ ID NO: 79689 - protein, 8 aa, Homo Sapiens
IAGLNCLR

SEQ ID NO: 79690 - protein, 8 aa, Homo Sapiens
GLNCLRLM

SEQ ID NO: 79691 - protein, 8 aa, Homo Sapiens
RLMNETTA

SEQ ID NO: 79692 - protein, 8 aa, Homo Sapiens
LMNETTAV

SEQ ID NO: 79693 - protein, 8 aa, Homo Sapiens
NETTAVAL

SEQ ID NO: 79694 - protein, 8 aa, Homo Sapiens
ETTAVALA

SEQ ID NO: 79695 - protein, 8 aa, Homo Sapiens
TTAVALAY

SEQ ID NO: 79696 - protein, 8 aa, Homo Sapiens
AVALAYGI

SEQ ID NO: 79697 - protein, 8 aa, Homo Sapiens
VALAYGIY

SEQ ID NO: 79698 - protein, 8 aa, Homo Sapiens
ALAYGIYK

SEQ ID NO: 79699 - protein, 8 aa, Homo Sapiens
YKQDLPAL

SEQ ID NO: 79700 - protein, 8 aa, Homo Sapiens
DLPALEEK

SEQ ID NO: 79701 - protein, 8 aa, Homo Sapiens
EEKPRNVV

SEQ ID NO: 79702 - protein, 8 aa, Homo Sapiens
KPRNVVFV

SEQ ID NO: 79703 - protein, 8 aa, Homo Sapiens
FVDMGHSA

SEQ ID NO: 79704 - protein, 8 aa, Homo Sapiens
MGHSAYQV

SEQ ID NO: 79705 - protein, 8 aa, Homo Sapiens
HSAYQVSV

SEQ ID NO: 79706 - protein, 8 aa, Homo Sapiens
YQVSVCAF

SEQ ID NO: 79707 - protein, 8 aa, Homo Sapiens
VSVCAFNR

SEQ ID NO: 79708 - protein, 8 aa, Homo Sapiens
AFNRGKLK

SEQ ID NO: 79709 - protein, 8 aa, Homo Sapiens
KLKVLATA

SEQ ID NO: 79710 - protein, 8 aa, Homo Sapiens
LKVLATAF

SEQ ID NO: 79711 - protein, 8 aa, Homo Sapiens
ATAFDTTL

SEQ ID NO: 79712 - protein, 8 aa, Homo Sapiens
DTTLGGRK

SEQ ID NO: 79713 - protein, 8 aa, Homo Sapiens
RKFDEVLV

SEQ ID NO: 79714 - protein, 8 aa, Homo Sapiens
DEVLVNHF

SEQ ID NO: 79715 - protein, 8 aa, Homo Sapiens
EVLVNHFC

SEQ ID NO: 79716 - protein, 8 aa, Homo Sapiens
HFCEEFGK

SEQ ID NO: 79717 - protein, 8 aa, Homo Sapiens
KLDIKSKI

SEQ ID NO: 79718 - protein, 8 aa, Homo Sapiens
KIRALLRL

SEQ ID NO: 79719 - protein, 8 aa, Homo Sapiens
RLSQECEK

SEQ ID NO: 79720 - protein, 8 aa, Homo Sapiens
SQECEKLK

SEQ ID NO: 79721 - protein, 8 aa, Homo Sapiens
KLKKLMSA

SEQ ID NO: 79722 - protein, 8 aa, Homo Sapiens
KLMSANAS

SEQ ID NO: 79723 - protein, 8 aa, Homo Sapiens
MSANASDL

SEQ ID NO: 79724 - protein, 8 aa, Homo Sapiens
LPLSIECF

SEQ ID NO: 79725 - protein, 8 aa, Homo Sapiens
PLSIECFM

SEQ ID NO: 79726 - protein, 8 aa, Homo Sapiens
FMNDVDVS

SEQ ID NO: 79727 - protein, 8 aa, Homo Sapiens
DVDVSGTM

SEQ ID NO: 79728 - protein, 8 aa, Homo Sapiens
DVSGTMNR

SEQ ID NO: 79729 - protein, 8 aa, Homo Sapiens
GTMNRGKF

SEQ ID NO: 79730 - protein, 8 aa, Homo Sapiens
TMNRGKFL

SEQ ID NO: 79731 - protein, 8 aa, Homo Sapiens
FLEMCNDL

SEQ ID NO: 79732 - protein, 8 aa, Homo Sapiens
LEMCNDLL

SEQ ID NO: 79733 - protein, 8 aa, Homo Sapiens
EMCNDLLA

SEQ ID NO: 79734 - protein, 8 aa, Homo Sapiens
MCNDLLAR

SEQ ID NO: 79735 - protein, 8 aa, Homo Sapiens
VEPPLRSV

SEQ ID NO: 79736 - protein, 8 aa, Homo Sapiens
EPPLRSVL

SEQ ID NO: 79737 - protein, 8 aa, Homo Sapiens
RSVLEQTK

SEQ ID NO: 79738 - protein, 8 aa, Homo Sapiens
SVLEQTKL

SEQ ID NO: 79739 - protein, 8 aa, Homo Sapiens
KKEDIYAV

SEQ ID NO: 79740 - protein, 8 aa, Homo Sapiens
DIYAVEIV

SEQ ID NO: 79741 - protein, 8 aa, Homo Sapiens
EIVGGATR

SEQ ID NO: 79742 - protein, 8 aa, Homo Sapiens
IVGGATRI

SEQ ID NO: 79743 - protein, 8 aa, Homo Sapiens
GATRIPAV

SEQ ID NO: 79744 - protein, 8 aa, Homo Sapiens
ATRIPAVK

SEQ ID NO: 79745 - protein, 8 aa, Homo Sapiens
RIPAVKEK

SEQ ID NO: 79746 - protein, 8 aa, Homo Sapiens
IPAVKEKI

SEQ ID NO: 79747 - protein, 8 aa, Homo Sapiens
AVKEKISK

SEQ ID NO: 79748 - protein, 8 aa, Homo Sapiens
KEKISKFF

SEQ ID NO: 79749 - protein, 8 aa, Homo Sapiens
KISKFFGK

SEQ ID NO: 79750 - protein, 8 aa, Homo Sapiens
ELSTTLNA

SEQ ID NO: 79751 - protein, 8 aa, Homo Sapiens
TLNADEAV

SEQ ID NO: 79752 - protein, 8 aa, Homo Sapiens
NADEAVTR

SEQ ID NO: 79753 - protein, 8 aa, Homo Sapiens
AVTRGCAL

SEQ ID NO: 79754 - protein, 8 aa, Homo Sapiens
QCAILSPA

SEQ ID NO: 79755 - protein, 8 aa, Homo Sapiens
CAILSPAF

SEQ ID NO: 79756 - protein, 8 aa, Homo Sapiens
AILSPAFK

SEQ ID NO: 79757 - protein, 8 aa, Homo Sapiens
ILSPAFKV

SEQ ID NO: 79758 - protein, 8 aa, Homo Sapiens
LSPAFKVR

SEQ ID NO: 79759 - protein, 8 aa, Homo Sapiens
FKVREFSI

SEQ ID NO: 79760 - protein, 8 aa, Homo Sapiens
REFSITDV

SEQ ID NO: 79761 - protein, 8 aa, Homo Sapiens
SITDVVPY

SEQ ID NO: 79762 - protein, 8 aa, Homo Sapiens
TDVVPYPI

SEQ ID NO: 79763 - protein, 8 aa, Homo Sapiens
VPYPISLR

SEQ ID NO: 79764 - protein, 8 aa, Homo Sapiens
PYPISLRW

SEQ ID NO: 79765 - protein, 8 aa, Homo Sapiens
YPISLRWN

SEQ ID NO: 79766 - protein, 8 aa, Homo Sapiens
SLRWNSPA

SEQ ID NO: 79767 - protein, 8 aa, Homo Sapiens
EGSSDCEV

SEQ ID NO: 79768 - protein, 8 aa, Homo Sapiens
SDCEVFSK

SEQ ID NO: 79769 - protein, 8 aa, Homo Sapiens
EVFSKNHA

SEQ ID NO: 79770 - protein, 8 aa, Homo Sapiens
HAAPFSKV

SEQ ID NO: 79771 - protein, 8 aa, Homo Sapiens
APFSKVLT

SEQ ID NO: 79772 - protein, 8 aa, Homo Sapiens
PFSKVLTF

SEQ ID NO: 79773 - protein, 8 aa, Homo Sapiens
FSKVLTFY

SEQ ID NO: 79774 - protein, 8 aa, Homo Sapiens
SKVLTFYR

SEQ ID NO: 79775 - protein, 8 aa, Homo Sapiens
KVLTFYRK

SEQ ID NO: 79776 - protein, 8 aa, Homo Sapiens
TFYRKEPF

SEQ ID NO: 79777 - protein, 8 aa, Homo Sapiens
YRKEPFTL

SEQ ID NO: 79778 - protein, 8 aa, Homo Sapiens
EPFTLEAY

SEQ ID NO: 79779 - protein, 8 aa, Homo Sapiens
PFTLEAYY

SEQ ID NO: 79780 - protein, 8 aa, Homo Sapiens
FTLEAYYS

SEQ ID NO: 79781 - protein, 8 aa, Homo Sapiens
EAYYSSPQ

SEQ ID NO: 79782 - protein, 8 aa, Homo Sapiens
YYSSPQDL

SEQ ID NO: 79783 - protein, 8 aa, Homo Sapiens
SSPQDLPY

SEQ ID NO: 79784 - protein, 8 aa, Homo Sapiens
LPYPDPAI

SEQ ID NO: 79785 - protein, 8 aa, Homo Sapiens
YPDPAIAQ

SEQ ID NO: 79786 - protein, 8 aa, Homo Sapiens
PAIAQFSV

SEQ ID NO: 79787 - protein, 8 aa, Homo Sapiens
IAQFSVQK

SEQ ID NO: 79788 - protein, 8 aa, Homo Sapiens
AQFSVQKV

SEQ ID NO: 79789 - protein, 8 aa, Homo Sapiens
QSDGSSSK

SEQ ID NO: 79790 - protein, 8 aa, Homo Sapiens
SSSKVKVK

SEQ ID NO: 79791 - protein, 8 aa, Homo Sapiens
KVKVKVRV

SEQ ID NO: 79792 - protein, 8 aa, Homo Sapiens
KVKVRVNV

SEQ ID NO: 79793 - protein, 8 aa, Homo Sapiens
RVNVHGIF

SEQ ID NO: 79794 - protein, 8 aa, Homo Sapiens
NVHGIFSV

SEQ ID NO: 79795 - protein, 8 aa, Homo Sapiens
GIFSVSSA

SEQ ID NO: 79796 - protein, 8 aa, Homo Sapiens
FSVSSASL

SEQ ID NO: 79797 - protein, 8 aa, Homo Sapiens
SVSSASLV

SEQ ID NO: 79798 - protein, 8 aa, Homo Sapiens
SSASLVEV

SEQ ID NO: 79799 - protein, 8 aa, Homo Sapiens
ASLVEVHK

SEQ ID NO: 79800 - protein, 8 aa, Homo Sapiens
SLVEVHKS

SEQ ID NO: 79801 - protein, 8 aa, Homo Sapiens
MQVDQEEP

SEQ ID NO: 79802 - protein, 8 aa, Homo Sapiens
AENKAESE

SEQ ID NO: 79803 - protein, 8 aa, Homo Sapiens
AESEEMET

SEQ ID NO: 79804 - protein, 8 aa, Homo Sapiens
EEMETSQA

SEQ ID NO: 79805 - protein, 8 aa, Homo Sapiens
ETSQAGSK

SEQ ID NO: 79806 - protein, 8 aa, Homo Sapiens
SQAGSKDK

SEQ ID NO: 79807 - protein, 8 aa, Homo Sapiens
KMDQPPQA

SEQ ID NO: 79808 - protein, 8 aa, Homo Sapiens
QAKKAKVK

SEQ ID NO: 79809 - protein, 8 aa, Homo Sapiens
AKVKTSTV

SEQ ID NO: 79810 - protein, 8 aa, Homo Sapiens
DLPIENQL

SEQ ID NO: 79811 - protein, 8 aa, Homo Sapiens
LPIENQLL

SEQ ID NO: 79812 - protein, 8 aa, Homo Sapiens
WQIDREML

SEQ ID NO: 79813 - protein, 8 aa, Homo Sapiens
REMLNLYI

SEQ ID NO: 79814 - protein, 8 aa, Homo Sapiens
LYIENEGK

SEQ ID NO: 79815 - protein, 8 aa, Homo Sapiens
YIENEGKM

SEQ ID NO: 79816 - protein, 8 aa, Homo Sapiens
IENEGKMI

SEQ ID NO: 79817 - protein, 8 aa, Homo Sapiens
KMIMQDKL

SEQ ID NO: 79818 - protein, 8 aa, Homo Sapiens
IMQDKLEK

SEQ ID NO: 79819 - protein, 8 aa, Homo Sapiens
NAVEEYVY

SEQ ID NO: 79820 - protein, 8 aa, Homo Sapiens
VEEYVYEM

SEQ ID NO: 79821 - protein, 8 aa, Homo Sapiens
EEYVYEMR

SEQ ID NO: 79822 - protein, 8 aa, Homo Sapiens
YVYEMRDK

SEQ ID NO: 79823 - protein, 8 aa, Homo Sapiens
VYEMRDKL

SEQ ID NO: 79824 - protein, 8 aa, Homo Sapiens
KLSGEYEK

SEQ ID NO: 79825 - protein, 8 aa, Homo Sapiens
LEDTENWL

SEQ ID NO: 79826 - protein, 8 aa, Homo Sapiens
KQVYVDKL

SEQ ID NO: 79827 - protein, 8 aa, Homo Sapiens
YVDKLAEL

SEQ ID NO: 79828 - protein, 8 aa, Homo Sapiens
KLAELKNL

SEQ ID NO: 79829 - protein, 8 aa, Homo Sapiens
KNLGQPIK

SEQ ID NO: 79830 - protein, 8 aa, Homo Sapiens
NLGQPIKI

SEQ ID NO: 79831 - protein, 8 aa, Homo Sapiens
RFQESEER

SEQ ID NO: 79832 - protein, 8 aa, Homo Sapiens
RPKLFEEL

SEQ ID NO: 79833 - protein, 8 aa, Homo Sapiens
KLFEELGK

SEQ ID NO: 79834 - protein, 8 aa, Homo Sapiens
FEELGKQI

SEQ ID NO: 79835 - protein, 8 aa, Homo Sapiens
ELGKQIQQ

SEQ ID NO: 79836 - protein, 8 aa, Homo Sapiens
KQIQQYMK

SEQ ID NO: 79837 - protein, 8 aa, Homo Sapiens
YMKIISSF

SEQ ID NO: 79838 - protein, 8 aa, Homo Sapiens
MKIISSFK

SEQ ID NO: 79839 - protein, 8 aa, Homo Sapiens
IISSFKNK

SEQ ID NO: 79840 - protein, 8 aa, Homo Sapiens
KEDQYDHL

SEQ ID NO: 79841 - protein, 8 aa, Homo Sapiens
HLDAADMT

SEQ ID NO: 79842 - protein, 8 aa, Homo Sapiens
DAADMTKV

SEQ ID NO: 79843 - protein, 5 aa, Homo Sapiens
STNEA

SEQ ID NO: 79844 - protein, 9 aa, Homo Sapiens
SVVGIDLGF

SEQ ID NO: 79845 - protein, 9 aa, Homo Sapiens
GIDLGFQSC

SEQ ID NO: 79846 - protein, 9 aa, Homo Sapiens
DLGFQSCYV

SEQ ID NO: 79847 - protein, 9 aa, Homo Sapiens
FQSCYVAVA

SEQ ID NO: 79848 - protein, 9 aa, Homo Sapiens
QSCYVAVAR

SEQ ID NO: 79849 - protein, 9 aa, Homo Sapiens
GIETIANEY

SEQ ID NO: 79850 - protein, 9 aa, Homo Sapiens
TIANEYSDR

SEQ ID NO: 79851 - protein, 9 aa, Homo Sapiens
RCTPACISF

SEQ ID NO: 79852 - protein, 9 aa, Homo Sapiens
PACISFGPK

SEQ ID NO: 79853 - protein, 9 aa, Homo Sapiens
CISFGPKNR

SEQ ID NO: 79854 - protein, 9 aa, Homo Sapiens
IGAAAKSQV

SEQ ID NO: 79855 - protein, 9 aa, Homo Sapiens
KSQVISNAK

SEQ ID NO: 79856 - protein, 9 aa, Homo Sapiens
VISNAKNTV

SEQ ID NO: 79857 - protein, 9 aa, Homo Sapiens
AKNTVQGFK

SEQ ID NO: 79858 - protein, 9 aa, Homo Sapiens
KNTVQGFKR

SEQ ID NO: 79859 - protein, 9 aa, Homo Sapiens
NTVQGFKRF

SEQ ID NO: 79860 - protein, 9 aa, Homo Sapiens
QGFKRFHGR

SEQ ID NO: 79861 - protein, 9 aa, Homo Sapiens
FKRFHGRAF

SEQ ID NO: 79862 - protein, 9 aa, Homo Sapiens
HGRAFSDPF

SEQ ID NO: 79863 - protein, 9 aa, Homo Sapiens
EAEKSNLAY

SEQ ID NO: 79864 - protein, 9 aa, Homo Sapiens
NLAYDIVQL

SEQ ID NO: 79865 - protein, 9 aa, Homo Sapiens
DIVQLPTGL

SEQ ID NO: 79866 - protein, 9 aa, Homo Sapiens
QLPTGLTGI

SEQ ID NO: 79867 - protein, 9 aa, Homo Sapiens
LPTGLTGIK

SEQ ID NO: 79868 - protein, 9 aa, Homo Sapiens
GLTGIKVTY

SEQ ID NO: 79869 - protein, 9 aa, Homo Sapiens
KVTYMEEER

SEQ ID NO: 79870 - protein, 9 aa, Homo Sapiens
TYMEEERNF

SEQ ID NO: 79871 - protein, 9 aa, Homo Sapiens
YMEEERNFT

SEQ ID NO: 79872 - protein, 9 aa, Homo Sapiens
ERNFTTEQV

SEQ ID NO: 79873 - protein, 9 aa, Homo Sapiens
FTTEQVTAM

SEQ ID NO: 79874 - protein, 9 aa, Homo Sapiens
TTEQVTAML

SEQ ID NO: 79875 - protein, 9 aa, Homo Sapiens
TEQVTAMLL

SEQ ID NO: 79876 - protein, 9 aa, Homo Sapiens
QVTAMLLSK

SEQ ID NO: 79877 - protein, 9 aa, Homo Sapiens
VTAMLLSKL

SEQ ID NO: 79878 - protein, 9 aa, Homo Sapiens
TAMLLSKLK

SEQ ID NO: 79879 - protein, 9 aa, Homo Sapiens
MLLSKLKET

SEQ ID NO: 79880 - protein, 9 aa, Homo Sapiens
LLSKLKETA

SEQ ID NO: 79881 - protein, 9 aa, Homo Sapiens
KLKETAESV

SEQ ID NO: 79882 - protein, 9 aa, Homo Sapiens
ETAESVLKK

SEQ ID NO: 79883 - protein, 9 aa, Homo Sapiens
AESVLKKPV

SEQ ID NO: 79884 - protein, 9 aa, Homo Sapiens
PVVDCVVSV

SEQ ID NO: 79885 - protein, 9 aa, Homo Sapiens
CVVSVPCFY

SEQ ID NO: 79886 - protein, 9 aa, Homo Sapiens
SVPCFYTDA

SEQ ID NO: 79887 - protein, 9 aa, Homo Sapiens
CFYTDAERR

SEQ ID NO: 79888 - protein, 9 aa, Homo Sapiens
YTDAERRSV

SEQ ID NO: 79889 - protein, 9 aa, Homo Sapiens
SVMDATQIA

SEQ ID NO: 79890 - protein, 9 aa, Homo Sapiens
VMDATQIAG

SEQ ID NO: 79891 - protein, 9 aa, Homo Sapiens
MDATQIAGL

SEQ ID NO: 79892 - protein, 9 aa, Homo Sapiens
TQIAGLNCL

SEQ ID NO: 79893 - protein, 9 aa, Homo Sapiens
QIAGLNCLR

SEQ ID NO: 79894 - protein, 9 aa, Homo Sapiens
RLMNETTAV

SEQ ID NO: 79895 - protein, 9 aa, Homo Sapiens
LMNETTAVA

SEQ ID NO: 79896 - protein, 9 aa, Homo Sapiens
ETTAVALAY

SEQ ID NO: 79897 - protein, 9 aa, Homo Sapiens
TAVALAYGI

SEQ ID NO: 79898 - protein, 9 aa, Homo Sapiens
AVALAYGIY

SEQ ID NO: 79899 - protein, 9 aa, Homo Sapiens
VALAYGIYK

SEQ ID NO: 79900 - protein, 9 aa, Homo Sapiens
ALAYGIYKQ

SEQ ID NO: 79901 - protein, 9 aa, Homo Sapiens
AYGIYKQDL

SEQ ID NO: 79902 - protein, 9 aa, Homo Sapiens
IYKQDLPAL

SEQ ID NO: 79903 - protein, 9 aa, Homo Sapiens
ALEEKPRNV

SEQ ID NO: 79904 - protein, 9 aa, Homo Sapiens
EEKPRNVVF

SEQ ID NO: 79905 - protein, 9 aa, Homo Sapiens
EKPRNVVFV

SEQ ID NO: 79906 - protein, 9 aa, Homo Sapiens
NVVFVDMGH

SEQ ID NO: 79907 - protein, 9 aa, Homo Sapiens
FVDMGHSAY

SEQ ID NO: 79908 - protein, 9 aa, Homo Sapiens
DMGHSAYQV

SEQ ID NO: 79909 - protein, 9 aa, Homo Sapiens
AYQVSVCAF

SEQ ID NO: 79910 - protein, 9 aa, Homo Sapiens
QVSVCAFNR

SEQ ID NO: 79911 - protein, 9 aa, Homo Sapiens
SVCAFNRGK

SEQ ID NO: 79912 - protein, 9 aa, Homo Sapiens
CAFNRGKLK

SEQ ID NO: 79913 - protein, 9 aa, Homo Sapiens
AFNRGKLKV

SEQ ID NO: 79914 - protein, 9 aa, Homo Sapiens
KLKVLATAF

SEQ ID NO: 79915 - protein, 9 aa, Homo Sapiens
VLATAFDTT

SEQ ID NO: 79916 - protein, 9 aa, Homo Sapiens
LATAFDTTL

SEQ ID NO: 79917 - protein, 9 aa, Homo Sapiens
VLVNHFCEE

SEQ ID NO: 79918 - protein, 9 aa, Homo Sapiens
LVNHFCEEF

SEQ ID NO: 79919 - protein, 9 aa, Homo Sapiens
EEFGKKYKL

SEQ ID NO: 79920 - protein, 9 aa, Homo Sapiens
KYKLDIKSK

SEQ ID NO: 79921 - protein, 9 aa, Homo Sapiens
DIKSKIRAL

SEQ ID NO: 79922 - protein, 9 aa, Homo Sapiens
KSKIRALLR

SEQ ID NO: 79923 - protein, 9 aa, Homo Sapiens
ALLRLSQEC

SEQ ID NO: 79924 - protein, 9 aa, Homo Sapiens
RLSQECEKL

SEQ ID NO: 79925 - protein, 9 aa, Homo Sapiens
LSQECEKLK

SEQ ID NO: 79926 - protein, 9 aa, Homo Sapiens
SQECEKLKK

SEQ ID NO: 79927 - protein, 9 aa, Homo Sapiens
LMSANASDL

SEQ ID NO: 79928 - protein, 9 aa, Homo Sapiens
SANASDLPL

SEQ ID NO: 79929 - protein, 9 aa, Homo Sapiens
NASDLPLSI

SEQ ID NO: 79930 - protein, 9 aa, Homo Sapiens
DLPLSIECF

SEQ ID NO: 79931 - protein, 9 aa, Homo Sapiens
LPLSIECFM

SEQ ID NO: 79932 - protein, 9 aa, Homo Sapiens
SIECFMNDV

SEQ ID NO: 79933 - protein, 9 aa, Homo Sapiens
ECFMNDVDV

SEQ ID NO: 79934 - protein, 9 aa, Homo Sapiens
FMNDVDVSG

SEQ ID NO: 79935 - protein, 9 aa, Homo Sapiens
VSGTMNRGK

SEQ ID NO: 79936 - protein, 9 aa, Homo Sapiens
TMNRGKFLE

SEQ ID NO: 79937 - protein, 9 aa, Homo Sapiens
KFLEMCNDL

SEQ ID NO: 79938 - protein, 9 aa, Homo Sapiens
FLEMCNDLL

SEQ ID NO: 79939 - protein, 9 aa, Homo Sapiens
EMCNDLLAR

SEQ ID NO: 79940 - protein, 9 aa, Homo Sapiens
MCNDLLARV

SEQ ID NO: 79941 - protein, 9 aa, Homo Sapiens
LLARVEPPL

SEQ ID NO: 79942 - protein, 9 aa, Homo Sapiens
LARVEPPLR

SEQ ID NO: 79943 - protein, 9 aa, Homo Sapiens
RVEPPLRSV

SEQ ID NO: 79944 - protein, 9 aa, Homo Sapiens
VEPPLRSVL

SEQ ID NO: 79945 - protein, 9 aa, Homo Sapiens
SVLEQTKLK

SEQ ID NO: 79946 - protein, 9 aa, Homo Sapiens
VLEQTKLKK

SEQ ID NO: 79947 - protein, 9 aa, Homo Sapiens
KLKKEDIYA

SEQ ID NO: 79948 - protein, 9 aa, Homo Sapiens
KEDIYAVEI

SEQ ID NO: 79949 - protein, 9 aa, Homo Sapiens
EDIYAVEIV

SEQ ID NO: 79950 - protein, 9 aa, Homo Sapiens
YAVEIVGGA

SEQ ID NO: 79951 - protein, 9 aa, Homo Sapiens
EIVGGATRI

SEQ ID NO: 79952 - protein, 9 aa, Homo Sapiens
GATRIPAVK

SEQ ID NO: 79953 - protein, 9 aa, Homo Sapiens
AVKEKISKF

SEQ ID NO: 79954 - protein, 9 aa, Homo Sapiens
EKISKFFGK

SEQ ID NO: 79955 - protein, 9 aa, Homo Sapiens
FGKELSTTL

SEQ ID NO: 79956 - protein, 9 aa, Homo Sapiens
TTLNADEAV

SEQ ID NO: 79957 - protein, 9 aa, Homo Sapiens
EAVTRGCAL

SEQ ID NO: 79958 - protein, 9 aa, Homo Sapiens
LQCAILSPA

SEQ ID NO: 79959 - protein, 9 aa, Homo Sapiens
QCAILSPAF

SEQ ID NO: 79960 - protein, 9 aa, Homo Sapiens
CAILSPAFK

SEQ ID NO: 79961 - protein, 9 aa, Homo Sapiens
AILSPAFKV

SEQ ID NO: 79962 - protein, 9 aa, Homo Sapiens
SPAFKVREF

SEQ ID NO: 79963 - protein, 9 aa, Homo Sapiens
KVREFSITD

SEQ ID NO: 79964 - protein, 9 aa, Homo Sapiens
REFSITDVV

SEQ ID NO: 79965 - protein, 9 aa, Homo Sapiens
FSITDVVPY

SEQ ID NO: 79966 - protein, 9 aa, Homo Sapiens
SITDVVPYP

SEQ ID NO: 79967 - protein, 9 aa, Homo Sapiens
ITDVVPYPI

SEQ ID NO: 79968 - protein, 9 aa, Homo Sapiens
DVVPYPISL

SEQ ID NO: 79969 - protein, 9 aa, Homo Sapiens
VVPYPISLR

SEQ ID NO: 79970 - protein, 9 aa, Homo Sapiens
VPYPISLRW

SEQ ID NO: 79971 - protein, 9 aa, Homo Sapiens
YPISLRWNS

SEQ ID NO: 79972 - protein, 9 aa, Homo Sapiens
SLRWNSPAE

SEQ ID NO: 79973 - protein, 9 aa, Homo Sapiens
EEGSSDCEV

SEQ ID NO: 79974 - protein, 9 aa, Homo Sapiens
SSDCEVFSK

SEQ ID NO: 79975 - protein, 9 aa, Homo Sapiens
EVFSKNHAA

SEQ ID NO: 79976 - protein, 9 aa, Homo Sapiens
FSKNHAAPF

SEQ ID NO: 79977 - protein, 9 aa, Homo Sapiens
KNHAAPFSK

SEQ ID NO: 79978 - protein, 9 aa, Homo Sapiens
NHAAPFSKV

SEQ ID NO: 79979 - protein, 9 aa, Homo Sapiens
HAAPFSKVL

SEQ ID NO: 79980 - protein, 9 aa, Homo Sapiens
APFSKVLTF

SEQ ID NO: 79981 - protein, 9 aa, Homo Sapiens
PFSKVLTFY

SEQ ID NO: 79982 - protein, 9 aa, Homo Sapiens
FSKVLTFYR

SEQ ID NO: 79983 - protein, 9 aa, Homo Sapiens
SKVLTFYRK

SEQ ID NO: 79984 - protein, 9 aa, Homo Sapiens
LTFYRKEPF

SEQ ID NO: 79985 - protein, 9 aa, Homo Sapiens
FYRKEPFTL

SEQ ID NO: 79986 - protein, 9 aa, Homo Sapiens
EPFTLEAYY

SEQ ID NO: 79987 - protein, 9 aa, Homo Sapiens
FTLEAYYSS

SEQ ID NO: 79988 - protein, 9 aa, Homo Sapiens
AYYSSPQDL

SEQ ID NO: 79989 - protein, 9 aa, Homo Sapiens
YSSPQDLPY

SEQ ID NO: 79990 - protein, 9 aa, Homo Sapiens
LPYPDPAIA

SEQ ID NO: 79991 - protein, 9 aa, Homo Sapiens
YPDPAIAQF

SEQ ID NO: 79992 - protein, 9 aa, Homo Sapiens
DPAIAQFSV

SEQ ID NO: 79993 - protein, 9 aa, Homo Sapiens
AIAQFSVQK

SEQ ID NO: 79994 - protein, 9 aa, Homo Sapiens
GSSSKVKVK

SEQ ID NO: 79995 - protein, 9 aa, Homo Sapiens
SSSKVKVKV

SEQ ID NO: 79996 - protein, 9 aa, Homo Sapiens
SSKVKVKVR

SEQ ID NO: 79997 - protein, 9 aa, Homo Sapiens
SKVKVKVRV

SEQ ID NO: 79998 - protein, 9 aa, Homo Sapiens
KVRVNVHGI

SEQ ID NO: 79999 - protein, 9 aa, Homo Sapiens
RVNVHGIFS

SEQ ID NO: 80000 - protein, 9 aa, Homo Sapiens
VNVHGIFSV

SEQ ID NO: 80001 - protein, 9 aa, Homo Sapiens
NVHGIFSVS

SEQ ID NO: 80002 - protein, 9 aa, Homo Sapiens
HGIFSVSSA

SEQ ID NO: 80003 - protein, 9 aa, Homo Sapiens
FSVSSASLV

SEQ ID NO: 80004 - protein, 9 aa, Homo Sapiens
VSSASLVEV

SEQ ID NO: 80005 - protein, 9 aa, Homo Sapiens
SASLVEVHK

SEQ ID NO: 80006 - protein, 9 aa, Homo Sapiens
EENEEPMET

SEQ ID NO: 80007 - protein, 9 aa, Homo Sapiens
EPMETDQNA

SEQ ID NO: 80008 - protein, 9 aa, Homo Sapiens
QVDQEEPHV

SEQ ID NO: 80009 - protein, 9 aa, Homo Sapiens
EEQQQQTPA

SEQ ID NO: 80010 - protein, 9 aa, Homo Sapiens
QQQTPAENK

SEQ ID NO: 80011 - protein, 9 aa, Homo Sapiens
TPAENKAES

SEQ ID NO: 80012 - protein, 9 aa, Homo Sapiens
AENKAESEE

SEQ ID NO: 80013 - protein, 9 aa, Homo Sapiens
AESEEMETS

SEQ ID NO: 80014 - protein, 9 aa, Homo Sapiens
EEMETSQAG

SEQ ID NO: 80015 - protein, 9 aa, Homo Sapiens
TSQAGSKDK

SEQ ID NO: 80016 - protein, 9 aa, Homo Sapiens
SQAGSKDKK

SEQ ID NO: 80017 - protein, 9 aa, Homo Sapiens
KMDQPPQAK

SEQ ID NO: 80018 - protein, 9 aa, Homo Sapiens
KAKVKTSTV

SEQ ID NO: 80019 - protein, 9 aa, Homo Sapiens
KTSTVDLPI

SEQ ID NO: 80020 - protein, 9 aa, Homo Sapiens
DLPIENQLL

SEQ ID NO: 80021 - protein, 9 aa, Homo Sapiens
LPIENQLLW

SEQ ID NO: 80022 - protein, 9 aa, Homo Sapiens
IENQLLWQI

SEQ ID NO: 80023 - protein, 9 aa, Homo Sapiens
NQLLWQIDR

SEQ ID NO: 80024 - protein, 9 aa, Homo Sapiens
LLWQIDREM

SEQ ID NO: 80025 - protein, 9 aa, Homo Sapiens
QIDREMLNL

SEQ ID NO: 80026 - protein, 9 aa, Homo Sapiens
MLNLYIENE

SEQ ID NO: 80027 - protein, 9 aa, Homo Sapiens
NLYIENEGK

SEQ ID NO: 80028 - protein, 9 aa, Homo Sapiens
IENEGKMIM

SEQ ID NO: 80029 - protein, 9 aa, Homo Sapiens
MIMQDKLEK

SEQ ID NO: 80030 - protein, 9 aa, Homo Sapiens
ERNDAKNAV

SEQ ID NO: 80031 - protein, 9 aa, Homo Sapiens
DAKNAVEEY

SEQ ID NO: 80032 - protein, 9 aa, Homo Sapiens
KNAVEEYVY

SEQ ID NO: 80033 - protein, 9 aa, Homo Sapiens
AVEEYVYEM

SEQ ID NO: 80034 - protein, 9 aa, Homo Sapiens
EYVYEMRDK

SEQ ID NO: 80035 - protein, 9 aa, Homo Sapiens
YVYEMRDKL

SEQ ID NO: 80036 - protein, 9 aa, Homo Sapiens
KLSGEYEKF

SEQ ID NO: 80037 - protein, 9 aa, Homo Sapiens
EDDRNSFTL

SEQ ID NO: 80038 - protein, 9 aa, Homo Sapiens
KLEDTENWL

SEQ ID NO: 80039 - protein, 9 aa, Homo Sapiens
LEDTENWLY

SEQ ID NO: 80040 - protein, 9 aa, Homo Sapiens
WLYEDGEDQ

SEQ ID NO: 80041 - protein, 9 aa, Homo Sapiens
KQVYVDKLA

SEQ ID NO: 80042 - protein, 9 aa, Homo Sapiens
VYVDKLAEL

SEQ ID NO: 80043 - protein, 9 aa, Homo Sapiens
YVDKLAELK

SEQ ID NO: 80044 - protein, 9 aa, Homo Sapiens
ELKNLGQPI

SEQ ID NO: 80045 - protein, 9 aa, Homo Sapiens
QESEERPKL

SEQ ID NO: 80046 - protein, 9 aa, Homo Sapiens
ERPKLFEEL

SEQ ID NO: 80047 - protein, 9 aa, Homo Sapiens
KLFEELGKQ

SEQ ID NO: 80048 - protein, 9 aa, Homo Sapiens
ELGKQIQQY

SEQ ID NO: 80049 - protein, 9 aa, Homo Sapiens
KQIQQYMKI

SEQ ID NO: 80050 - protein, 9 aa, Homo Sapiens
QIQQYMKII

SEQ ID NO: 80051 - protein, 9 aa, Homo Sapiens
QYMKIISSF

SEQ ID NO: 80052 - protein, 9 aa, Homo Sapiens
YMKIISSFK

SEQ ID NO: 80053 - protein, 9 aa, Homo Sapiens
KIISSFKNK

SEQ ID NO: 80054 - protein, 9 aa, Homo Sapiens
DQYDHLDAA

SEQ ID NO: 80055 - protein, 9 aa, Homo Sapiens
HLDAADMTK

SEQ ID NO: 80056 - protein, 9 aa, Homo Sapiens
AADMTKVEK

SEQ ID NO: 80057 - protein, 9 aa, Homo Sapiens
KSTNEAMEW

SEQ ID NO: 80058 - protein, 9 aa, Homo Sapiens
STNEAMEWM

SEQ ID NO: 80059 - protein, 9 aa, Homo Sapiens
EAMEWMNNK

SEQ ID NO: 80060 - protein, 9 aa, Homo Sapiens
AMEWMNNKL

SEQ ID NO: 80061 - protein, 9 aa, Homo Sapiens
EWMNNKLNL

SEQ ID NO: 80062 - protein, 9 aa, Homo Sapiens
WMNNKLNLQ

SEQ ID NO: 80063 - protein, 9 aa, Homo Sapiens
LQNKQSLTM

SEQ ID NO: 80064 - protein, 9 aa, Homo Sapiens
KQSLTMDPV

SEQ ID NO: 80065 - protein, 9 aa, Homo Sapiens
SLTMDPVVK

SEQ ID NO: 80066 - protein, 9 aa, Homo Sapiens
TMDPVVKSK

SEQ ID NO: 80067 - protein, 9 aa, Homo Sapiens
EIEAKIKEL

SEQ ID NO: 80068 - protein, 9 aa, Homo Sapiens
ELTSTCSPI

SEQ ID NO: 80069 - protein, 9 aa, Homo Sapiens
STCSPIISK

SEQ ID NO: 80070 - protein, 9 aa, Homo Sapiens
IISKPKPKV

SEQ ID NO: 80071 - protein, 9 aa, Homo Sapiens
AEQGTDTAV

SEQ ID NO: 80072 - protein, 9 aa, Homo Sapiens
TAVPSDSDK

SEQ ID NO: 80073 - protein, 9 aa, Homo Sapiens
AVPSDSDKK

SEQ ID NO: 80074 - protein, 9 aa, Homo Sapiens
VPSDSDKKL

SEQ ID NO: 80075 - protein, 10 aa, Homo Sapiens
MSVVGIDLGF

SEQ ID NO: 80076 - protein, 10 aa, Homo Sapiens
GIDLGFQSCY

SEQ ID NO: 80077 - protein, 10 aa, Homo Sapiens
IDLGFQSCYV

SEQ ID NO: 80078 - protein, 10 aa, Homo Sapiens
LGFQSCYVAV

SEQ ID NO: 80079 - protein, 10 aa, Homo Sapiens
FQSCYVAVAR

SEQ ID NO: 80080 - protein, 10 aa, Homo Sapiens
YVAVARAGGI

SEQ ID NO: 80081 - protein, 10 aa, Homo Sapiens
ETIANEYSDR

SEQ ID NO: 80082 - protein, 10 aa, Homo Sapiens
TPACISFGPK

SEQ ID NO: 80083 - protein, 10 aa, Homo Sapiens
GPKNRSIGAA

SEQ ID NO: 80084 - protein, 10 aa, Homo Sapiens
KNRSIGAAAK

SEQ ID NO: 80085 - protein, 10 aa, Homo Sapiens
SIGAAAKSQV

SEQ ID NO: 80086 - protein, 10 aa, Homo Sapiens
AAKSQVISNA

SEQ ID NO: 80087 - protein, 10 aa, Homo Sapiens
QVISNAKNTV

SEQ ID NO: 80088 - protein, 10 aa, Homo Sapiens
NAKNTVQGFK

SEQ ID NO: 80089 - protein, 10 aa, Homo Sapiens
AKNTVQGFKR

SEQ ID NO: 80090 - protein, 10 aa, Homo Sapiens
VQGFKRFHGR

SEQ ID NO: 80091 - protein, 10 aa, Homo Sapiens
GFKRFHGRAF

SEQ ID NO: 80092 - protein, 10 aa, Homo Sapiens
FHGRAFSDPF

SEQ ID NO: 80093 - protein, 10 aa, Homo Sapiens
RAFSDPFVEA

SEQ ID NO: 80094 - protein, 10 aa, Homo Sapiens
FSDPFVEAEK

SEQ ID NO: 80095 - protein, 10 aa, Homo Sapiens
VEAEKSNLAY

SEQ ID NO: 80096 - protein, 10 aa, Homo Sapiens
AEKSNLAYDI

SEQ ID NO: 80097 - protein, 10 aa, Homo Sapiens
VQLPTGLTGI

SEQ ID NO: 80098 - protein, 10 aa, Homo Sapiens
QLPTGLTGIK

SEQ ID NO: 80099 - protein, 10 aa, Homo Sapiens
LPTGLTGIKV

SEQ ID NO: 80100 - protein, 10 aa, Homo Sapiens
GLTGIKVTYM

SEQ ID NO: 80101 - protein, 10 aa, Homo Sapiens
VTYMEEERNF

SEQ ID NO: 80102 - protein, 10 aa, Homo Sapiens
YMEEERNFTT

SEQ ID NO: 80103 - protein, 10 aa, Homo Sapiens
EERNFTTEQV

SEQ ID NO: 80104 - protein, 10 aa, Homo Sapiens
NFTTEQVTAM

SEQ ID NO: 80105 - protein, 10 aa, Homo Sapiens
FTTEQVTAML

SEQ ID NO: 80106 - protein, 10 aa, Homo Sapiens
TTEQVTAMLL

SEQ ID NO: 80107 - protein, 10 aa, Homo Sapiens
EQVTAMLLSK

SEQ ID NO: 80108 - protein, 10 aa, Homo Sapiens
QVTAMLLSKL

SEQ ID NO: 80109 - protein, 10 aa, Homo Sapiens
VTAMLLSKLK

SEQ ID NO: 80110 - protein, 10 aa, Homo Sapiens
MLLSKLKETA

SEQ ID NO: 80111 - protein, 10 aa, Homo Sapiens
KLKETAESVL

SEQ ID NO: 80112 - protein, 10 aa, Homo Sapiens
AESVLKKPVV

SEQ ID NO: 80113 - protein, 10 aa, Homo Sapiens
VLKKPVVDCV

SEQ ID NO: 80114 - protein, 10 aa, Homo Sapiens
KPVVDCVVSV

SEQ ID NO: 80115 - protein, 10 aa, Homo Sapiens
DCVVSVPCFY

SEQ ID NO: 80116 - protein, 10 aa, Homo Sapiens
CVVSVPCFYT

SEQ ID NO: 80117 - protein, 10 aa, Homo Sapiens
VPCFYTDAER

SEQ ID NO: 80118 - protein, 10 aa, Homo Sapiens
FYTDAERRSV

SEQ ID NO: 80119 - protein, 10 aa, Homo Sapiens
YTDAERRSVM

SEQ ID NO: 80120 - protein, 10 aa, Homo Sapiens
VMDATQIAGL

SEQ ID NO: 80121 - protein, 10 aa, Homo Sapiens
TQIAGLNCLR

SEQ ID NO: 80122 - protein, 10 aa, Homo Sapiens
QIAGLNCLRL

SEQ ID NO: 80123 - protein, 10 aa, Homo Sapiens
CLRLMNETTA

SEQ ID NO: 80124 - protein, 10 aa, Homo Sapiens
RLMNETTAVA

SEQ ID NO: 80125 - protein, 10 aa, Homo Sapiens
LMNETTAVAL

SEQ ID NO: 80126 - protein, 10 aa, Homo Sapiens
NETTAVALAY

SEQ ID NO: 80127 - protein, 10 aa, Homo Sapiens
TTAVALAYGI

SEQ ID NO: 80128 - protein, 10 aa, Homo Sapiens
TAVALAYGIY

SEQ ID NO: 80129 - protein, 10 aa, Homo Sapiens
AVALAYGIYK

SEQ ID NO: 80130 - protein, 10 aa, Homo Sapiens
LAYGIYKQDL

SEQ ID NO: 80131 - protein, 10 aa, Homo Sapiens
GIYKQDLPAL

SEQ ID NO: 80132 - protein, 10 aa, Homo Sapiens
KQDLPALEEK

SEQ ID NO: 80133 - protein, 10 aa, Homo Sapiens
ALEEKPRNVV

SEQ ID NO: 80134 - protein, 10 aa, Homo Sapiens
LEEKPRNVVF

SEQ ID NO: 80135 - protein, 10 aa, Homo Sapiens
EEKPRNVVFV

SEQ ID NO: 80136 - protein, 10 aa, Homo Sapiens
KPRNVVFVDM

SEQ ID NO: 80137 - protein, 10 aa, Homo Sapiens
VVFVDMGHSA

SEQ ID NO: 80138 - protein, 10 aa, Homo Sapiens
VFVDMGHSAY

SEQ ID NO: 80139 - protein, 10 aa, Homo Sapiens
FVDMGHSAYQ

SEQ ID NO: 80140 - protein, 10 aa, Homo Sapiens
MGHSAYQVSV

SEQ ID NO: 80141 - protein, 10 aa, Homo Sapiens
HSAYQVSVCA

SEQ ID NO: 80142 - protein, 10 aa, Homo Sapiens
SAYQVSVCAF

SEQ ID NO: 80143 - protein, 10 aa, Homo Sapiens
YQVSVCAFNR

SEQ ID NO: 80144 - protein, 10 aa, Homo Sapiens
VSVCAFNRGK

SEQ ID NO: 80145 - protein, 10 aa, Homo Sapiens
SVCAFNRGKL

SEQ ID NO: 80146 - protein, 10 aa, Homo Sapiens
CAFNRGKLKV

SEQ ID NO: 80147 - protein, 10 aa, Homo Sapiens
KVLATAFDTT

SEQ ID NO: 80148 - protein, 10 aa, Homo Sapiens
VLATAFDTTL

SEQ ID NO: 80149 - protein, 10 aa, Homo Sapiens
TAFDTTLGGR

SEQ ID NO: 80150 - protein, 10 aa, Homo Sapiens
TLGGRKFDEV

SEQ ID NO: 80151 - protein, 10 aa, Homo Sapiens
KFDEVLVNHF

SEQ ID NO: 80152 - protein, 10 aa, Homo Sapiens
VLVNHFCEEF

SEQ ID NO: 80153 - protein, 10 aa, Homo Sapiens
HFCEEFGKKY

SEQ ID NO: 80154 - protein, 10 aa, Homo Sapiens
CEEFGKKYKL

SEQ ID NO: 80155 - protein, 10 aa, Homo Sapiens
KYKLDIKSKI

SEQ ID NO: 80156 - protein, 10 aa, Homo Sapiens
KLDIKSKIRA

SEQ ID NO: 80157 - protein, 10 aa, Homo Sapiens
DIKSKIRALL

SEQ ID NO: 80158 - protein, 10 aa, Homo Sapiens
IKSKIRALLR

SEQ ID NO: 80159 - protein, 10 aa, Homo Sapiens
KIRALLRLSQ

SEQ ID NO: 80160 - protein, 10 aa, Homo Sapiens
LLRLSQECEK

SEQ ID NO: 80161 - protein, 10 aa, Homo Sapiens
RLSQECEKLK

SEQ ID NO: 80162 - protein, 10 aa, Homo Sapiens
LSQECEKLKK

SEQ ID NO: 80163 - protein, 10 aa, Homo Sapiens
KLKKLMSANA

SEQ ID NO: 80164 - protein, 10 aa, Homo Sapiens
KLMSANASDL

SEQ ID NO: 80165 - protein, 10 aa, Homo Sapiens
MSANASDLPL

SEQ ID NO: 80166 - protein, 10 aa, Homo Sapiens
DLPLSIECFM

SEQ ID NO: 80167 - protein, 10 aa, Homo Sapiens
LPLSIECFMN

SEQ ID NO: 80168 - protein, 10 aa, Homo Sapiens
LSIECFMNDV

SEQ ID NO: 80169 - protein, 10 aa, Homo Sapiens
IECFMNDVDV

SEQ ID NO: 80170 - protein, 10 aa, Homo Sapiens
FMNDVDVSGT

SEQ ID NO: 80171 - protein, 10 aa, Homo Sapiens
DVDVSGTMNR

SEQ ID NO: 80172 - protein, 10 aa, Homo Sapiens
DVSGTMNRGK

SEQ ID NO: 80173 - protein, 10 aa, Homo Sapiens
TMNRGKFLEM

SEQ ID NO: 80174 - protein, 10 aa, Homo Sapiens
KFLEMCNDLL

SEQ ID NO: 80175 - protein, 10 aa, Homo Sapiens
FLEMCNDLLA

SEQ ID NO: 80176 - protein, 10 aa, Homo Sapiens
EMCNDLLARV

SEQ ID NO: 80177 - protein, 10 aa, Homo Sapiens
DLLARVEPPL

SEQ ID NO: 80178 - protein, 10 aa, Homo Sapiens
LLARVEPPLR

SEQ ID NO: 80179 - protein, 10 aa, Homo Sapiens
RVEPPLRSVL

SEQ ID NO: 80180 - protein, 10 aa, Homo Sapiens
PLRSVLEQTK

SEQ ID NO: 80181 - protein, 10 aa, Homo Sapiens
RSVLEQTKLK

SEQ ID NO: 80182 - protein, 10 aa, Homo Sapiens
SVLEQTKLKK

SEQ ID NO: 80183 - protein, 10 aa, Homo Sapiens
QTKLKKEDIY

SEQ ID NO: 80184 - protein, 10 aa, Homo Sapiens
KLKKEDIYAV

SEQ ID NO: 80185 - protein, 10 aa, Homo Sapiens
KEDIYAVEIV

SEQ ID NO: 80186 - protein, 10 aa, Homo Sapiens
YAVEIVGGAT

SEQ ID NO: 80187 - protein, 10 aa, Homo Sapiens
AVEIVGGATR

SEQ ID NO: 80188 - protein, 10 aa, Homo Sapiens
VEIVGGATRI

SEQ ID NO: 80189 - protein, 10 aa, Homo Sapiens
ATRIPAVKEK

SEQ ID NO: 80190 - protein, 10 aa, Homo Sapiens
AVKEKISKFF

SEQ ID NO: 80191 - protein, 10 aa, Homo Sapiens
KEKISKFFGK

SEQ ID NO: 80192 - protein, 10 aa, Homo Sapiens
KISKFFGKEL

SEQ ID NO: 80193 - protein, 10 aa, Homo Sapiens
FFGKELSTTL

SEQ ID NO: 80194 - protein, 10 aa, Homo Sapiens
STTLNADEAV

SEQ ID NO: 80195 - protein, 10 aa, Homo Sapiens
TLNADEAVTR

SEQ ID NO: 80196 - protein, 10 aa, Homo Sapiens
DEAVTRGCAL

SEQ ID NO: 80197 - protein, 10 aa, Homo Sapiens
ALQCAILSPA

SEQ ID NO: 80198 - protein, 10 aa, Homo Sapiens
LQCAILSPAF

SEQ ID NO: 80199 - protein, 10 aa, Homo Sapiens
CAILSPAFKV

SEQ ID NO: 80200 - protein, 10 aa, Homo Sapiens
AILSPAFKVR

SEQ ID NO: 80201 - protein, 10 aa, Homo Sapiens
KVREFSITDV

SEQ ID NO: 80202 - protein, 10 aa, Homo Sapiens
EFSITDVVPY

SEQ ID NO: 80203 - protein, 10 aa, Homo Sapiens
SITDVVPYPI

SEQ ID NO: 80204 - protein, 10 aa, Homo Sapiens
DVVPYPISLR

SEQ ID NO: 80205 - protein, 10 aa, Homo Sapiens
YPISLRWNSP

SEQ ID NO: 80206 - protein, 10 aa, Homo Sapiens
SPAEEGSSDC

SEQ ID NO: 80207 - protein, 10 aa, Homo Sapiens
AEEGSSDCEV

SEQ ID NO: 80208 - protein, 10 aa, Homo Sapiens
EEGSSDCEVF

SEQ ID NO: 80209 - protein, 10 aa, Homo Sapiens
GSSDCEVFSK

SEQ ID NO: 80210 - protein, 10 aa, Homo Sapiens
VFSKNHAAPF

SEQ ID NO: 80211 - protein, 10 aa, Homo Sapiens
SKNHAAPFSK

SEQ ID NO: 80212 - protein, 10 aa, Homo Sapiens
NHAAPFSKVL

SEQ ID NO: 80213 - protein, 10 aa, Homo Sapiens
AAPFSKVLTF

SEQ ID NO: 80214 - protein, 10 aa, Homo Sapiens
APFSKVLTFY

SEQ ID NO: 80215 - protein, 10 aa, Homo Sapiens
PFSKVLTFYR

SEQ ID NO: 80216 - protein, 10 aa, Homo Sapiens
FSKVLTFYRK

SEQ ID NO: 80217 - protein, 10 aa, Homo Sapiens
TFYRKEPFTL

SEQ ID NO: 80218 - protein, 10 aa, Homo Sapiens
EPFTLEAYYS

SEQ ID NO: 80219 - protein, 10 aa, Homo Sapiens
FTLEAYYSSP

SEQ ID NO: 80220 - protein, 10 aa, Homo Sapiens
TLEAYYSSPQ

SEQ ID NO: 80221 - protein, 10 aa, Homo Sapiens
EAYYSSPQDL

SEQ ID NO: 80222 - protein, 10 aa, Homo Sapiens
YYSSPQDLPY

SEQ ID NO: 80223 - protein, 10 aa, Homo Sapiens
LPYPDPAIAQ

SEQ ID NO: 80224 - protein, 10 aa, Homo Sapiens
PYPDPAIAQF

SEQ ID NO: 80225 - protein, 10 aa, Homo Sapiens
YPDPAIAQFS

SEQ ID NO: 80226 - protein, 10 aa, Homo Sapiens
PAIAQFSVQK

SEQ ID NO: 80227 - protein, 10 aa, Homo Sapiens
AIAQFSVQKV

SEQ ID NO: 80228 - protein, 10 aa, Homo Sapiens
PQSDGSSSKV

SEQ ID NO: 80229 - protein, 10 aa, Homo Sapiens
SSSKVKVKVR

SEQ ID NO: 80230 - protein, 10 aa, Homo Sapiens
KVKVKVRVNV

SEQ ID NO: 80231 - protein, 10 aa, Homo Sapiens
KVRVNVHGIF

SEQ ID NO: 80232 - protein, 10 aa, Homo Sapiens
RVNVHGIFSV

SEQ ID NO: 80233 - protein, 10 aa, Homo Sapiens
NVHGIFSVSS

SEQ ID NO: 80234 - protein, 10 aa, Homo Sapiens
GIFSVSSASL

SEQ ID NO: 80235 - protein, 10 aa, Homo Sapiens
SVSSASLVEV

SEQ ID NO: 80236 - protein, 10 aa, Homo Sapiens
SSASLVEVHK

SEQ ID NO: 80237 - protein, 10 aa, Homo Sapiens
EPMETDQNAK

SEQ ID NO: 80238 - protein, 10 aa, Homo Sapiens
MQVDQEEPHV

SEQ ID NO: 80239 - protein, 10 aa, Homo Sapiens
QQQQTPAENK

SEQ ID NO: 80240 - protein, 10 aa, Homo Sapiens
AENKAESEEM

SEQ ID NO: 80241 - protein, 10 aa, Homo Sapiens
AESEEMETSQ

SEQ ID NO: 80242 - protein, 10 aa, Homo Sapiens
EEMETSQAGS

SEQ ID NO: 80243 - protein, 10 aa, Homo Sapiens
EMETSQAGSK

SEQ ID NO: 80244 - protein, 10 aa, Homo Sapiens
ETSQAGSKDK

SEQ ID NO: 80245 - protein, 10 aa, Homo Sapiens
TSQAGSKDKK

SEQ ID NO: 80246 - protein, 10 aa, Homo Sapiens
KKMDQPPQAK

SEQ ID NO: 80247 - protein, 10 aa, Homo Sapiens
KMDQPPQAKK

SEQ ID NO: 80248 - protein, 10 aa, Homo Sapiens
TVDLPIENQL

SEQ ID NO: 80249 - protein, 10 aa, Homo Sapiens
PIENQLLWQI

SEQ ID NO: 80250 - protein, 10 aa, Homo Sapiens
QLLWQIDREM

SEQ ID NO: 80251 - protein, 10 aa, Homo Sapiens
LLWQIDREML

SEQ ID NO: 80252 - protein, 10 aa, Homo Sapiens
WQIDREMLNL

SEQ ID NO: 80253 - protein, 10 aa, Homo Sapiens
QIDREMLNLY

SEQ ID NO: 80254 - protein, 10 aa, Homo Sapiens
NLYIENEGKM

SEQ ID NO: 80255 - protein, 10 aa, Homo Sapiens
LYIENEGKMI

SEQ ID NO: 80256 - protein, 10 aa, Homo Sapiens
YIENEGKMIM

SEQ ID NO: 80257 - protein, 10 aa, Homo Sapiens
KMIMQDKLEK

SEQ ID NO: 80258 - protein, 10 aa, Homo Sapiens
NAVEEYVYEM

SEQ ID NO: 80259 - protein, 10 aa, Homo Sapiens
AVEEYVYEMR

SEQ ID NO: 80260 - protein, 10 aa, Homo Sapiens
EYVYEMRDKL

SEQ ID NO: 80261 - protein, 10 aa, Homo Sapiens
EMRDKLSGEY

SEQ ID NO: 80262 - protein, 10 aa, Homo Sapiens
RDKLSGEYEK

SEQ ID NO: 80263 - protein, 10 aa, Homo Sapiens
KLSGEYEKFV

SEQ ID NO: 80264 - protein, 10 aa, Homo Sapiens
FVSEDDRNSF

SEQ ID NO: 80265 - protein, 10 aa, Homo Sapiens
SEDDRNSFTL

SEQ ID NO: 80266 - protein, 10 aa, Homo Sapiens
KLEDTENWLY

SEQ ID NO: 80267 - protein, 10 aa, Homo Sapiens
WLYEDGEDQP

SEQ ID NO: 80268 - protein, 10 aa, Homo Sapiens
GEDQPKQVYV

SEQ ID NO: 80269 - protein, 10 aa, Homo Sapiens
QVYVDKLAEL

SEQ ID NO: 80270 - protein, 10 aa, Homo Sapiens
VYVDKLAELK

SEQ ID NO: 80271 - protein, 10 aa, Homo Sapiens
KLAELKNLGQ

SEQ ID NO: 80272 - protein, 10 aa, Homo Sapiens
AELKNLGQPI

SEQ ID NO: 80273 - protein, 10 aa, Homo Sapiens
ELKNLGQPIK

SEQ ID NO: 80274 - protein, 10 aa, Homo Sapiens
KIRFQESEER

SEQ ID NO: 80275 - protein, 10 aa, Homo Sapiens
RFQESEERPK

SEQ ID NO: 80276 - protein, 10 aa, Homo Sapiens
QESEERPKLF

SEQ ID NO: 80277 - protein, 10 aa, Homo Sapiens
EERPKLFEEL

SEQ ID NO: 80278 - protein, 10 aa, Homo Sapiens
RPKLFEELGK

SEQ ID NO: 80279 - protein, 10 aa, Homo Sapiens
KLFEELGKQI

SEQ ID NO: 80280 - protein, 10 aa, Homo Sapiens
EELGKQIQQY

SEQ ID NO: 80281 - protein, 10 aa, Homo Sapiens
ELGKQIQQYM

SEQ ID NO: 80282 - protein, 10 aa, Homo Sapiens
LGKQIQQYMK

SEQ ID NO: 80283 - protein, 10 aa, Homo Sapiens
KQIQQYMKII

SEQ ID NO: 80284 - protein, 10 aa, Homo Sapiens
QQYMKIISSF

SEQ ID NO: 80285 - protein, 10 aa, Homo Sapiens
QYMKIISSFK

SEQ ID NO: 80286 - protein, 10 aa, Homo Sapiens
SSFKNKEDQY

SEQ ID NO: 80287 - protein, 10 aa, Homo Sapiens
HLDAADMTKV

SEQ ID NO: 80288 - protein, 10 aa, Homo Sapiens
DAADMTKVEK

SEQ ID NO: 80289 - protein, 10 aa, Homo Sapiens
KVEKSTNEAM

SEQ ID NO: 80290 - protein, 10 aa, Homo Sapiens
EAMEWMNNKL

SEQ ID NO: 80291 - protein, 10 aa, Homo Sapiens
MEWMNNKLNL

SEQ ID NO: 80292 - protein, 10 aa, Homo Sapiens
KLNLQNKQSL

SEQ ID NO: 80293 - protein, 10 aa, Homo Sapiens
NLQNKQSLTM

SEQ ID NO: 80294 - protein, 10 aa, Homo Sapiens
KQSLTMDPVV

SEQ ID NO: 80295 - protein, 10 aa, Homo Sapiens
QSLTMDPVVK

SEQ ID NO: 80296 - protein, 10 aa, Homo Sapiens
LTMDPVVKSK

SEQ ID NO: 80297 - protein, 10 aa, Homo Sapiens
VVKSKEIEAK

SEQ ID NO: 80298 - protein, 10 aa, Homo Sapiens
KSKEIEAKIK

SEQ ID NO: 80299 - protein, 10 aa, Homo Sapiens
KEIEAKIKEL

SEQ ID NO: 80300 - protein, 10 aa, Homo Sapiens
KELTSTCSPI

SEQ ID NO: 80301 - protein, 10 aa, Homo Sapiens
ELTSTCSPII

SEQ ID NO: 80302 - protein, 10 aa, Homo Sapiens
TSTCSPIISK

SEQ ID NO: 80303 - protein, 10 aa, Homo Sapiens
PIISKPKPKV

SEQ ID NO: 80304 - protein, 10 aa, Homo Sapiens
KPKPKVEPPK

SEQ ID NO: 80305 - protein, 10 aa, Homo Sapiens
KVEPPKEEQK

SEQ ID NO: 80306 - protein, 10 aa, Homo Sapiens
AAEQGTDTAV

SEQ ID NO: 80307 - protein, 10 aa, Homo Sapiens
DTAVPSDSDK

SEQ ID NO: 80308 - protein, 10 aa, Homo Sapiens
TAVPSDSDKK

SEQ ID NO: 80309 - protein, 11 aa, Homo Sapiens
VGIDLGFQSCY

SEQ ID NO: 80310 - protein, 11 aa, Homo Sapiens
GIDLGFQSCYV

SEQ ID NO: 80311 - protein, 11 aa, Homo Sapiens
DLGFQSCYVAV

SEQ ID NO: 80312 - protein, 11 aa, Homo Sapiens
GFQSCYVAVAR

SEQ ID NO: 80313 - protein, 11 aa, Homo Sapiens
FQSCYVAVARA

SEQ ID NO: 80314 - protein, 11 aa, Homo Sapiens
CYVAVARAGGI

SEQ ID NO: 80315 - protein, 11 aa, Homo Sapiens
AVARAGGIETI

SEQ ID NO: 80316 - protein, 11 aa, Homo Sapiens
EYSDRCTPACI

SEQ ID NO: 80317 - protein, 11 aa, Homo Sapiens
CTPACISFGPK

SEQ ID NO: 80318 - protein, 11 aa, Homo Sapiens
CISFGPKNRSI

SEQ ID NO: 80319 - protein, 11 aa, Homo Sapiens
GPKNRSIGAAA

SEQ ID NO: 80320 - protein, 11 aa, Homo Sapiens
RSIGAAAKSQV

SEQ ID NO: 80321 - protein, 11 aa, Homo Sapiens
AAKSQVISNAK

SEQ ID NO: 80322 - protein, 11 aa, Homo Sapiens
SQVISNAKNTV

SEQ ID NO: 80323 - protein, 11 aa, Homo Sapiens
ISNAKNTVQGF

SEQ ID NO: 80324 - protein, 11 aa, Homo Sapiens
SNAKNTVQGFK

SEQ ID NO: 80325 - protein, 11 aa, Homo Sapiens
NAKNTVQGFKR

SEQ ID NO: 80326 - protein, 11 aa, Homo Sapiens
TVQGFKRFHGR

SEQ ID NO: 80327 - protein, 11 aa, Homo Sapiens
RFHGRAFSDPF

SEQ ID NO: 80328 - protein, 11 aa, Homo Sapiens
AFSDPFVEAEK

SEQ ID NO: 80329 - protein, 11 aa, Homo Sapiens
FVEAEKSNLAY

SEQ ID NO: 80330 - protein, 11 aa, Homo Sapiens
AEKSNLAYDIV

SEQ ID NO: 80331 - protein, 11 aa, Homo Sapiens
NLAYDIVQLPT

SEQ ID NO: 80332 - protein, 11 aa, Homo Sapiens
AYDIVQLPTGL

SEQ ID NO: 80333 - protein, 11 aa, Homo Sapiens
IVQLPTGLTGI

SEQ ID NO: 80334 - protein, 11 aa, Homo Sapiens
VQLPTGLTGIK

SEQ ID NO: 80335 - protein, 11 aa, Homo Sapiens
QLPTGLTGIKV

SEQ ID NO: 80336 - protein, 11 aa, Homo Sapiens
LPTGLTGIKVT

SEQ ID NO: 80337 - protein, 11 aa, Homo Sapiens
GLTGIKVTYME

SEQ ID NO: 80338 - protein, 11 aa, Homo Sapiens
GIKVTYMEEER

SEQ ID NO: 80339 - protein, 11 aa, Homo Sapiens
YMEEERNFTTE

SEQ ID NO: 80340 - protein, 11 aa, Homo Sapiens
EERNFTTEQVT

SEQ ID NO: 80341 - protein, 11 aa, Homo Sapiens
FTTEQVTAMLL

SEQ ID NO: 80342 - protein, 11 aa, Homo Sapiens
TEQVTAMLLSK

SEQ ID NO: 80343 - protein, 11 aa, Homo Sapiens
QVTAMLLSKLK

SEQ ID NO: 80344 - protein, 11 aa, Homo Sapiens
AMLLSKLKETA

SEQ ID NO: 80345 - protein, 11 aa, Homo Sapiens
KLKETAESVLK

SEQ ID NO: 80346 - protein, 11 aa, Homo Sapiens
ETAESVLKKPV

SEQ ID NO: 80347 - protein, 11 aa, Homo Sapiens
SVLKKPVVDCV

SEQ ID NO: 80348 - protein, 11 aa, Homo Sapiens
VLKKPVVDCVV

SEQ ID NO: 80349 - protein, 11 aa, Homo Sapiens
SVPCFYTDAER

SEQ ID NO: 80350 - protein, 11 aa, Homo Sapiens
VPCFYTDAERR

SEQ ID NO: 80351 - protein, 11 aa, Homo Sapiens
FYTDAERRSVM

SEQ ID NO: 80352 - protein, 11 aa, Homo Sapiens
SVMDATQIAGL

SEQ ID NO: 80353 - protein, 11 aa, Homo Sapiens
ATQIAGLNCLR

SEQ ID NO: 80354 - protein, 11 aa, Homo Sapiens
TQIAGLNCLRL

SEQ ID NO: 80355 - protein, 11 aa, Homo Sapiens
QIAGLNCLRLM

SEQ ID NO: 80356 - protein, 11 aa, Homo Sapiens
GLNCLRLMNET

SEQ ID NO: 80357 - protein, 11 aa, Homo Sapiens
CLRLMNETTAV

SEQ ID NO: 80358 - protein, 11 aa, Homo Sapiens
RLMNETTAVAL

SEQ ID NO: 80359 - protein, 11 aa, Homo Sapiens
LMNETTAVALA

SEQ ID NO: 80360 - protein, 11 aa, Homo Sapiens
MNETTAVALAY

SEQ ID NO: 80361 - protein, 11 aa, Homo Sapiens
ETTAVALAYGI

SEQ ID NO: 80362 - protein, 11 aa, Homo Sapiens
TTAVALAYGIY

SEQ ID NO: 80363 - protein, 11 aa, Homo Sapiens
TAVALAYGIYK

SEQ ID NO: 80364 - protein, 11 aa, Homo Sapiens
ALAYGIYKQDL

SEQ ID NO: 80365 - protein, 11 aa, Homo Sapiens
YGIYKQDLPAL

SEQ ID NO: 80366 - protein, 11 aa, Homo Sapiens
LPALEEKPRNV

SEQ ID NO: 80367 - protein, 11 aa, Homo Sapiens
NVVFVDMGHSA

SEQ ID NO: 80368 - protein, 11 aa, Homo Sapiens
VVFVDMGHSAY

SEQ ID NO: 80369 - protein, 11 aa, Homo Sapiens
FVDMGHSAYQV

SEQ ID NO: 80370 - protein, 11 aa, Homo Sapiens
DMGHSAYQVSV

SEQ ID NO: 80371 - protein, 11 aa, Homo Sapiens
HSAYQVSVCAF

SEQ ID NO: 80372 - protein, 11 aa, Homo Sapiens
AYQVSVCAFNR

SEQ ID NO: 80373 - protein, 11 aa, Homo Sapiens
YQVSVCAFNRG

SEQ ID NO: 80374 - protein, 11 aa, Homo Sapiens
QVSVCAFNRGK

SEQ ID NO: 80375 - protein, 11 aa, Homo Sapiens
SVCAFNRGKLK

SEQ ID NO: 80376 - protein, 11 aa, Homo Sapiens
RGKLKVLATAF

SEQ ID NO: 80377 - protein, 11 aa, Homo Sapiens
KVLATAFDTTL

SEQ ID NO: 80378 - protein, 11 aa, Homo Sapiens
ATAFDTTLGGR

SEQ ID NO: 80379 - protein, 11 aa, Homo Sapiens
TAFDTTLGGRK

SEQ ID NO: 80380 - protein, 11 aa, Homo Sapiens
AFDTTLGGRKF

SEQ ID NO: 80381 - protein, 11 aa, Homo Sapiens
TTLGGRKFDEV

SEQ ID NO: 80382 - protein, 11 aa, Homo Sapiens
TLGGRKFDEVL

SEQ ID NO: 80383 - protein, 11 aa, Homo Sapiens
EVLVNHFCEEF

SEQ ID NO: 80384 - protein, 11 aa, Homo Sapiens
LVNHFCEEFGK

SEQ ID NO: 80385 - protein, 11 aa, Homo Sapiens
EEFGKKYKLDI

SEQ ID NO: 80386 - protein, 11 aa, Homo Sapiens
KYKLDIKSKIR

SEQ ID NO: 80387 - protein, 11 aa, Homo Sapiens
KLDIKSKIRAL

SEQ ID NO: 80388 - protein, 11 aa, Homo Sapiens
DIKSKIRALLR

SEQ ID NO: 80389 - protein, 11 aa, Homo Sapiens
ALLRLSQECEK

SEQ ID NO: 80390 - protein, 11 aa, Homo Sapiens
LLRLSQECEKL

SEQ ID NO: 80391 - protein, 11 aa, Homo Sapiens
RLSQECEKLKK

SEQ ID NO: 80392 - protein, 11 aa, Homo Sapiens
KLMSANASDLP

SEQ ID NO: 80393 - protein, 11 aa, Homo Sapiens
LMSANASDLPL

SEQ ID NO: 80394 - protein, 11 aa, Homo Sapiens
PLSIECFMNDV

SEQ ID NO: 80395 - protein, 11 aa, Homo Sapiens
SIECFMNDVDV

SEQ ID NO: 80396 - protein, 11 aa, Homo Sapiens
FMNDVDVSGTM

SEQ ID NO: 80397 - protein, 11 aa, Homo Sapiens
NDVDVSGTMNR

SEQ ID NO: 80398 - protein, 11 aa, Homo Sapiens
DVSGTMNRGKF

SEQ ID NO: 80399 - protein, 11 aa, Homo Sapiens
TMNRGKFLEMC

SEQ ID NO: 80400 - protein, 11 aa, Homo Sapiens
FLEMCNDLLAR

SEQ ID NO: 80401 - protein, 11 aa, Homo Sapiens
LEMCNDLLARV

SEQ ID NO: 80402 - protein, 11 aa, Homo Sapiens
DLLARVEPPLR

SEQ ID NO: 80403 - protein, 11 aa, Homo Sapiens
LARVEPPLRSV

SEQ ID NO: 80404 - protein, 11 aa, Homo Sapiens
PLRSVLEQTKL

SEQ ID NO: 80405 - protein, 11 aa, Homo Sapiens
RSVLEQTKLKK

SEQ ID NO: 80406 - protein, 11 aa, Homo Sapiens
DIYAVEIVGGA

SEQ ID NO: 80407 - protein, 11 aa, Homo Sapiens
YAVEIVGGATR

SEQ ID NO: 80408 - protein, 11 aa, Homo Sapiens
EIVGGATRIPA

SEQ ID NO: 80409 - protein, 11 aa, Homo Sapiens
IVGGATRIPAV

SEQ ID NO: 80410 - protein, 11 aa, Homo Sapiens
RIPAVKEKISK

SEQ ID NO: 80411 - protein, 11 aa, Homo Sapiens
IPAVKEKISKF

SEQ ID NO: 80412 - protein, 11 aa, Homo Sapiens
KFFGKELSTTL

SEQ ID NO: 80413 - protein, 11 aa, Homo Sapiens
ELSTTLNADEA

SEQ ID NO: 80414 - protein, 11 aa, Homo Sapiens
LSTTLNADEAV

SEQ ID NO: 80415 - protein, 11 aa, Homo Sapiens
TTLNADEAVTR

SEQ ID NO: 80416 - protein, 11 aa, Homo Sapiens
ALQCAILSPAF

SEQ ID NO: 80417 - protein, 11 aa, Homo Sapiens
LQCAILSPAFK

SEQ ID NO: 80418 - protein, 11 aa, Homo Sapiens
QCAILSPAFKV

SEQ ID NO: 80419 - protein, 11 aa, Homo Sapiens
CAILSPAFKVR

SEQ ID NO: 80420 - protein, 11 aa, Homo Sapiens
ILSPAFKVREF

SEQ ID NO: 80421 - protein, 11 aa, Homo Sapiens
SPAFKVREFSI

SEQ ID NO: 80422 - protein, 11 aa, Homo Sapiens
FKVREFSITDV

SEQ ID NO: 80423 - protein, 11 aa, Homo Sapiens
KVREFSITDVV

SEQ ID NO: 80424 - protein, 11 aa, Homo Sapiens
REFSITDVVPY

SEQ ID NO: 80425 - protein, 11 aa, Homo Sapiens
FSITDVVPYPI

SEQ ID NO: 80426 - protein, 11 aa, Homo Sapiens
ITDVVPYPISL

SEQ ID NO: 80427 - protein, 11 aa, Homo Sapiens
TDVVPYPISLR

SEQ ID NO: 80428 - protein, 11 aa, Homo Sapiens
DVVPYPISLRW

SEQ ID NO: 80429 - protein, 11 aa, Homo Sapiens
VPYPISLRWNS

SEQ ID NO: 80430 - protein, 11 aa, Homo Sapiens
YPISLRWNSPA

SEQ ID NO: 80431 - protein, 11 aa, Homo Sapiens
PAEEGSSDCEV

SEQ ID NO: 80432 - protein, 11 aa, Homo Sapiens
AEEGSSDCEVF

SEQ ID NO: 80433 - protein, 11 aa, Homo Sapiens
EEGSSDCEVFS

SEQ ID NO: 80434 - protein, 11 aa, Homo Sapiens
EGSSDCEVFSK

SEQ ID NO: 80435 - protein, 11 aa, Homo Sapiens
EVFSKNHAAPF

SEQ ID NO: 80436 - protein, 11 aa, Homo Sapiens
FSKNHAAPFSK

SEQ ID NO: 80437 - protein, 11 aa, Homo Sapiens
HAAPFSKVLTF

SEQ ID NO: 80438 - protein, 11 aa, Homo Sapiens
APFSKVLTFYR

SEQ ID NO: 80439 - protein, 11 aa, Homo Sapiens
PFSKVLTFYRK

SEQ ID NO: 80440 - protein, 11 aa, Homo Sapiens
VLTFYRKEPFT

SEQ ID NO: 80441 - protein, 11 aa, Homo Sapiens
LTFYRKEPFTL

SEQ ID NO: 80442 - protein, 11 aa, Homo Sapiens
EPFTLEAYYSS

SEQ ID NO: 80443 - protein, 11 aa, Homo Sapiens
FTLEAYYSSPQ

SEQ ID NO: 80444 - protein, 11 aa, Homo Sapiens
LEAYYSSPQDL

SEQ ID NO: 80445 - protein, 11 aa, Homo Sapiens
AYYSSPQDLPY

SEQ ID NO: 80446 - protein, 11 aa, Homo Sapiens
SPQDLPYPDPA

SEQ ID NO: 80447 - protein, 11 aa, Homo Sapiens
LPYPDPAIAQF

SEQ ID NO: 80448 - protein, 11 aa, Homo Sapiens
YPDPAIAQFSV

SEQ ID NO: 80449 - protein, 11 aa, Homo Sapiens
DPAIAQFSVQK

SEQ ID NO: 80450 - protein, 11 aa, Homo Sapiens
VTPQSDGSSSK

SEQ ID NO: 80451 - protein, 11 aa, Homo Sapiens
TPQSDGSSSKV

SEQ ID NO: 80452 - protein, 11 aa, Homo Sapiens
SSSKVKVKVRV

SEQ ID NO: 80453 - protein, 11 aa, Homo Sapiens
KVKVRVNVHGI

SEQ ID NO: 80454 - protein, 11 aa, Homo Sapiens
KVRVNVHGIFS

SEQ ID NO: 80455 - protein, 11 aa, Homo Sapiens
NVHGIFSVSSA

SEQ ID NO: 80456 - protein, 11 aa, Homo Sapiens
HGIFSVSSASL

SEQ ID NO: 80457 - protein, 11 aa, Homo Sapiens
GIFSVSSASLV

SEQ ID NO: 80458 - protein, 11 aa, Homo Sapiens
FSVSSASLVEV

SEQ ID NO: 80459 - protein, 11 aa, Homo Sapiens
VSSASLVEVHK

SEQ ID NO: 80460 - protein, 11 aa, Homo Sapiens
EENEEPMETDQ

SEQ ID NO: 80461 - protein, 11 aa, Homo Sapiens
ETDQNAKEEEK

SEQ ID NO: 80462 - protein, 11 aa, Homo Sapiens
KMQVDQEEPHV

SEQ ID NO: 80463 - protein, 11 aa, Homo Sapiens
MQVDQEEPHVE

SEQ ID NO: 80464 - protein, 11 aa, Homo Sapiens
AENKAESEEME

SEQ ID NO: 80465 - protein, 11 aa, Homo Sapiens
AESEEMETSQA

SEQ ID NO: 80466 - protein, 11 aa, Homo Sapiens
ETSQAGSKDKK

SEQ ID NO: 80467 - protein, 11 aa, Homo Sapiens
KKMDQPPQAKK

SEQ ID NO: 80468 - protein, 11 aa, Homo Sapiens
KMDQPPQAKKA

SEQ ID NO: 80469 - protein, 11 aa, Homo Sapiens
AKKAKVKTSTV

SEQ ID NO: 80470 - protein, 11 aa, Homo Sapiens
KVKTSTVDLPI

SEQ ID NO: 80471 - protein, 11 aa, Homo Sapiens
STVDLPIENQL

SEQ ID NO: 80472 - protein, 11 aa, Homo Sapiens
TVDLPIENQLL

SEQ ID NO: 80473 - protein, 11 aa, Homo Sapiens
LPIENQLLWQI

SEQ ID NO: 80474 - protein, 11 aa, Homo Sapiens
QLLWQIDREML

SEQ ID NO: 80475 - protein, 11 aa, Homo Sapiens
LLWQIDREMLN

SEQ ID NO: 80476 - protein, 11 aa, Homo Sapiens
WQIDREMLNLY

SEQ ID NO: 80477 - protein, 11 aa, Homo Sapiens
QIDREMLNLYI

SEQ ID NO: 80478 - protein, 11 aa, Homo Sapiens
MLNLYIENEGK

SEQ ID NO: 80479 - protein, 11 aa, Homo Sapiens
NLYIENEGKMI

SEQ ID NO: 80480 - protein, 11 aa, Homo Sapiens
NEGKMIMQDKL

SEQ ID NO: 80481 - protein, 11 aa, Homo Sapiens
MIMQDKLEKER

SEQ ID NO: 80482 - protein, 11 aa, Homo Sapiens
DAKNAVEEYVY

SEQ ID NO: 80483 - protein, 11 aa, Homo Sapiens
NAVEEYVYEMR

SEQ ID NO: 80484 - protein, 11 aa, Homo Sapiens
EEYVYEMRDKL

SEQ ID NO: 80485 - protein, 11 aa, Homo Sapiens
YEMRDKLSGEY

SEQ ID NO: 80486 - protein, 11 aa, Homo Sapiens
EYEKFVSEDDR

SEQ ID NO: 80487 - protein, 11 aa, Homo Sapiens
KFVSEDDRNSF

SEQ ID NO: 80488 - protein, 11 aa, Homo Sapiens
FVSEDDRNSFT

SEQ ID NO: 80489 - protein, 11 aa, Homo Sapiens
VSEDDRNSFTL

SEQ ID NO: 80490 - protein, 11 aa, Homo Sapiens
FTLKLEDTENW

SEQ ID NO: 80491 - protein, 11 aa, Homo Sapiens
TLKLEDTENWL

SEQ ID NO: 80492 - protein, 11 aa, Homo Sapiens
WLYEDGEDQPK

SEQ ID NO: 80493 - protein, 11 aa, Homo Sapiens
YEDGEDQPKQV

SEQ ID NO: 80494 - protein, 11 aa, Homo Sapiens
KQVYVDKLAEL

SEQ ID NO: 80495 - protein, 11 aa, Homo Sapiens
QVYVDKLAELK

SEQ ID NO: 80496 - protein, 11 aa, Homo Sapiens
YVDKLAELKNL

SEQ ID NO: 80497 - protein, 11 aa, Homo Sapiens
ELKNLGQPIKI

SEQ ID NO: 80498 - protein, 11 aa, Homo Sapiens
RFQESEERPKL

SEQ ID NO: 80499 - protein, 11 aa, Homo Sapiens
SEERPKLFEEL

SEQ ID NO: 80500 - protein, 11 aa, Homo Sapiens
KLFEELGKQIQ

SEQ ID NO: 80501 - protein, 11 aa, Homo Sapiens
FEELGKQIQQY

SEQ ID NO: 80502 - protein, 11 aa, Homo Sapiens
EELGKQIQQYM

SEQ ID NO: 80503 - protein, 11 aa, Homo Sapiens
IQQYMKIISSF

SEQ ID NO: 80504 - protein, 11 aa, Homo Sapiens
QQYMKIISSFK

SEQ ID NO: 80505 - protein, 11 aa, Homo Sapiens
YMKIISSFKNK

SEQ ID NO: 80506 - protein, 11 aa, Homo Sapiens
FKNKEDQYDHL

SEQ ID NO: 80507 - protein, 11 aa, Homo Sapiens
VEKSTNEAMEW

SEQ ID NO: 80508 - protein, 11 aa, Homo Sapiens
NEAMEWMNNKL

SEQ ID NO: 80509 - protein, 11 aa, Homo Sapiens
AMEWMNNKLNL

SEQ ID NO: 80510 - protein, 11 aa, Homo Sapiens
WMNNKLNLQNK

SEQ ID NO: 80511 - protein, 11 aa, Homo Sapiens
KQSLTMDPVVK

SEQ ID NO: 80512 - protein, 11 aa, Homo Sapiens
SLTMDPVVKSK

SEQ ID NO: 80513 - protein, 11 aa, Homo Sapiens
TMDPVVKSKEI

SEQ ID NO: 80514 - protein, 11 aa, Homo Sapiens
KEIEAKIKELT

SEQ ID NO: 80515 - protein, 11 aa, Homo Sapiens
KELTSTCSPII

SEQ ID NO: 80516 - protein, 11 aa, Homo Sapiens
LTSTCSPIISK

SEQ ID NO: 80517 - protein, 11 aa, Homo Sapiens
STCSPIISKPK

SEQ ID NO: 80518 - protein, 11 aa, Homo Sapiens
SPIISKPKPKV

SEQ ID NO: 80519 - protein, 11 aa, Homo Sapiens
GQGDNPGPQAA

SEQ ID NO: 80520 - protein, 11 aa, Homo Sapiens
QAAEQGTDTAV

SEQ ID NO: 80521 - protein, 11 aa, Homo Sapiens
DTAVPSDSDKK

SEQ ID NO: 80522 - protein, 295 aa, Homo Sapiens
MEHQLLCCEVETIRRAYPDANLLNDRVLRAMLKAEETCAPSVSYFKCVQKEVLPSMRKIVATWMLEVCEEQKCEEEVFPLAMNYLDRFLSLEPVKKSRLQLLGATCMFVASKMKETIPLTAEKLCIYTDNSIRPEELLQMELLLVNKLKWNLAAMTPHDFIEHFLSKMPEAEENKQIIRKHAQTFVALCATDVKFISNPPSMVAAGSVVAAVQGLNLRSPNNFLSYYRLTRFLSRVIKCDPDCLRACQEQIEALLESSLRQAQQNMDPKAAEEEEEEEEEVDLACTPTDVRDVDI

SEQ ID NO: 80523 - protein, 8 aa, Homo Sapiens
HQLLCCEV

SEQ ID NO: 80524 - protein, 8 aa, Homo Sapiens
RAYPDANL

SEQ ID NO: 80525 - protein, 8 aa, Homo Sapiens
AYPDANLL

SEQ ID NO: 80526 - protein, 8 aa, Homo Sapiens
DANLLNDR

SEQ ID NO: 80527 - protein, 8 aa, Homo Sapiens
NLLNDRVL

SEQ ID NO: 80528 - protein, 8 aa, Homo Sapiens
LLNDRVLR

SEQ ID NO: 80529 - protein, 8 aa, Homo Sapiens
RVLRAMLK

SEQ ID NO: 80530 - protein, 8 aa, Homo Sapiens
VLRAMLKA

SEQ ID NO: 80531 - protein, 8 aa, Homo Sapiens
AMLKAEET

SEQ ID NO: 80532 - protein, 8 aa, Homo Sapiens
AEETCAPS

SEQ ID NO: 80533 - protein, 8 aa, Homo Sapiens
EETCAPSV

SEQ ID NO: 80534 - protein, 8 aa, Homo Sapiens
CAPSVSYF

SEQ ID NO: 80535 - protein, 8 aa, Homo Sapiens
APSVSYFK

SEQ ID NO: 80536 - protein, 8 aa, Homo Sapiens
SVSYFKCV

SEQ ID NO: 80537 - protein, 8 aa, Homo Sapiens
SYFKCVQK

SEQ ID NO: 80538 - protein, 8 aa, Homo Sapiens
EVLPSMRK

SEQ ID NO: 80539 - protein, 8 aa, Homo Sapiens
VLPSMRKI

SEQ ID NO: 80540 - protein, 8 aa, Homo Sapiens
LPSMRKIV

SEQ ID NO: 80541 - protein, 8 aa, Homo Sapiens
SMRKIVAT

SEQ ID NO: 80542 - protein, 8 aa, Homo Sapiens
KIVATWML

SEQ ID NO: 80543 - protein, 8 aa, Homo Sapiens
VATWMLEV

SEQ ID NO: 80544 - protein, 8 aa, Homo Sapiens
WMLEVCEE

SEQ ID NO: 80545 - protein, 8 aa, Homo Sapiens
CEEEVFPL

SEQ ID NO: 80546 - protein, 8 aa, Homo Sapiens
EEEVFPLA

SEQ ID NO: 80547 - protein, 8 aa, Homo Sapiens
EEVFPLAM

SEQ ID NO: 80548 - protein, 8 aa, Homo Sapiens
VFPLAMNY

SEQ ID NO: 80549 - protein, 8 aa, Homo Sapiens
FPLAMNYL

SEQ ID NO: 80550 - protein, 8 aa, Homo Sapiens
LAMNYLDR

SEQ ID NO: 80551 - protein, 8 aa, Homo Sapiens
YLDRFLSL

SEQ ID NO: 80552 - protein, 8 aa, Homo Sapiens
RFLSLEPV

SEQ ID NO: 80553 - protein, 8 aa, Homo Sapiens
FLSLEPVK

SEQ ID NO: 80554 - protein, 8 aa, Homo Sapiens
LSLEPVKK

SEQ ID NO: 80555 - protein, 8 aa, Homo Sapiens
EPVKKSRL

SEQ ID NO: 80556 - protein, 8 aa, Homo Sapiens
LQLLGATC

SEQ ID NO: 80557 - protein, 8 aa, Homo Sapiens
QLLGATCM

SEQ ID NO: 80558 - protein, 8 aa, Homo Sapiens
LGATCMFV

SEQ ID NO: 80559 - protein, 8 aa, Homo Sapiens
TCMFVASK

SEQ ID NO: 80560 - protein, 8 aa, Homo Sapiens
MFVASKMK

SEQ ID NO: 80561 - protein, 8 aa, Homo Sapiens
KMKETIPL

SEQ ID NO: 80562 - protein, 8 aa, Homo Sapiens
ETIPLTAE

SEQ ID NO: 80563 - protein, 8 aa, Homo Sapiens
TIPLTAEK

SEQ ID NO: 80564 - protein, 8 aa, Homo Sapiens
IPLTAEKL

SEQ ID NO: 80565 - protein, 8 aa, Homo Sapiens
LTAEKLCI

SEQ ID NO: 80566 - protein, 8 aa, Homo Sapiens
TAEKLCIY

SEQ ID NO: 80567 - protein, 8 aa, Homo Sapiens
AEKLCIYT

SEQ ID NO: 80568 - protein, 8 aa, Homo Sapiens
CIYTDNSI

SEQ ID NO: 80569 - protein, 8 aa, Homo Sapiens
IYTDNSIR

SEQ ID NO: 80570 - protein, 8 aa, Homo Sapiens
NSIRPEEL

SEQ ID NO: 80571 - protein, 8 aa, Homo Sapiens
SIRPEELL

SEQ ID NO: 80572 - protein, 8 aa, Homo Sapiens
RPEELLQM

SEQ ID NO: 80573 - protein, 8 aa, Homo Sapiens
EELLQMEL

SEQ ID NO: 80574 - protein, 8 aa, Homo Sapiens
ELLQMELL

SEQ ID NO: 80575 - protein, 8 aa, Homo Sapiens
LLQMELLL

SEQ ID NO: 80576 - protein, 8 aa, Homo Sapiens
LQMELLLV

SEQ ID NO: 80577 - protein, 8 aa, Homo Sapiens
ELLLVNKL

SEQ ID NO: 80578 - protein, 8 aa, Homo Sapiens
LLLVNKLK

SEQ ID NO: 80579 - protein, 8 aa, Homo Sapiens
LLVNKLKW

SEQ ID NO: 80580 - protein, 8 aa, Homo Sapiens
KLKWNLAA

SEQ ID NO: 80581 - protein, 8 aa, Homo Sapiens
LKWNLAAM

SEQ ID NO: 80582 - protein, 8 aa, Homo Sapiens
AAMTPHDF

SEQ ID NO: 80583 - protein, 8 aa, Homo Sapiens
AMTPHDFI

SEQ ID NO: 80584 - protein, 8 aa, Homo Sapiens
TPHDFIEH

SEQ ID NO: 80585 - protein, 8 aa, Homo Sapiens
FIEHFLSK

SEQ ID NO: 80586 - protein, 8 aa, Homo Sapiens
FLSKMPEA

SEQ ID NO: 80587 - protein, 8 aa, Homo Sapiens
AEENKQII

SEQ ID NO: 80588 - protein, 8 aa, Homo Sapiens
KQIIRKHA

SEQ ID NO: 80589 - protein, 8 aa, Homo Sapiens
HAQTFVAL

SEQ ID NO: 80590 - protein, 8 aa, Homo Sapiens
QTFVALCA

SEQ ID NO: 80591 - protein, 8 aa, Homo Sapiens
ALCATDVK

SEQ ID NO: 80592 - protein, 8 aa, Homo Sapiens
FISNPPSM

SEQ ID NO: 80593 - protein, 8 aa, Homo Sapiens
ISNPPSMV

SEQ ID NO: 80594 - protein, 8 aa, Homo Sapiens
NPPSMVAA

SEQ ID NO: 80595 - protein, 8 aa, Homo Sapiens
SMVAAGSV

SEQ ID NO: 80596 - protein, 8 aa, Homo Sapiens
MVAAGSVV

SEQ ID NO: 80597 - protein, 8 aa, Homo Sapiens
VVAAVQGL

SEQ ID NO: 80598 - protein, 8 aa, Homo Sapiens
AAVQGLNL

SEQ ID NO: 80599 - protein, 8 aa, Homo Sapiens
AVQGLNLR

SEQ ID NO: 80600 - protein, 8 aa, Homo Sapiens
SPNNFLSY

SEQ ID NO: 80601 - protein, 8 aa, Homo Sapiens
NNFLSYYR

SEQ ID NO: 80602 - protein, 8 aa, Homo Sapiens
NFLSYYRL

SEQ ID NO: 80603 - protein, 8 aa, Homo Sapiens
FLSYYRLT

SEQ ID NO: 80604 - protein, 8 aa, Homo Sapiens
LSYYRLTR

SEQ ID NO: 80605 - protein, 8 aa, Homo Sapiens
SYYRLTRF

SEQ ID NO: 80606 - protein, 8 aa, Homo Sapiens
YYRLTRFL

SEQ ID NO: 80607 - protein, 8 aa, Homo Sapiens
RLTRFLSR

SEQ ID NO: 80608 - protein, 8 aa, Homo Sapiens
LTRFLSRV

SEQ ID NO: 80609 - protein, 8 aa, Homo Sapiens
RFLSRVIK

SEQ ID NO: 80610 - protein, 8 aa, Homo Sapiens
FLSRVIKC

SEQ ID NO: 80611 - protein, 8 aa, Homo Sapiens
QEQIEALL

SEQ ID NO: 80612 - protein, 8 aa, Homo Sapiens
ALLESSLR

SEQ ID NO: 80613 - protein, 8 aa, Homo Sapiens
AQQNMDPK

SEQ ID NO: 80614 - protein, 8 aa, Homo Sapiens
EEEEEEEV

SEQ ID NO: 80615 - protein, 8 aa, Homo Sapiens
EEEEEVDL

SEQ ID NO: 80616 - protein, 8 aa, Homo Sapiens
EEVDLACT

SEQ ID NO: 80617 - protein, 9 aa, Homo Sapiens
LLCCEVETI

SEQ ID NO: 80618 - protein, 9 aa, Homo Sapiens
EVETIRRAY

SEQ ID NO: 80619 - protein, 9 aa, Homo Sapiens
RRAYPDANL

SEQ ID NO: 80620 - protein, 9 aa, Homo Sapiens
RAYPDANLL

SEQ ID NO: 80621 - protein, 9 aa, Homo Sapiens
DANLLNDRV

SEQ ID NO: 80622 - protein, 9 aa, Homo Sapiens
NLLNDRVLR

SEQ ID NO: 80623 - protein, 9 aa, Homo Sapiens
LLNDRVLRA

SEQ ID NO: 80624 - protein, 9 aa, Homo Sapiens
RVLRAMLKA

SEQ ID NO: 80625 - protein, 9 aa, Homo Sapiens
AMLKAEETC

SEQ ID NO: 80626 - protein, 9 aa, Homo Sapiens
MLKAEETCA

SEQ ID NO: 80627 - protein, 9 aa, Homo Sapiens
AEETCAPSV

SEQ ID NO: 80628 - protein, 9 aa, Homo Sapiens
ETCAPSVSY

SEQ ID NO: 80629 - protein, 9 aa, Homo Sapiens
TCAPSVSYF

SEQ ID NO: 80630 - protein, 9 aa, Homo Sapiens
CAPSVSYFK

SEQ ID NO: 80631 - protein, 9 aa, Homo Sapiens
VSYFKCVQK

SEQ ID NO: 80632 - protein, 9 aa, Homo Sapiens
VQKEVLPSM

SEQ ID NO: 80633 - protein, 9 aa, Homo Sapiens
EVLPSMRKI

SEQ ID NO: 80634 - protein, 9 aa, Homo Sapiens
VLPSMRKIV

SEQ ID NO: 80635 - protein, 9 aa, Homo Sapiens
LPSMRKIVA

SEQ ID NO: 80636 - protein, 9 aa, Homo Sapiens
RKIVATWML

SEQ ID NO: 80637 - protein, 9 aa, Homo Sapiens
IVATWMLEV

SEQ ID NO: 80638 - protein, 9 aa, Homo Sapiens
WMLEVCEEQ

SEQ ID NO: 80639 - protein, 9 aa, Homo Sapiens
MLEVCEEQK

SEQ ID NO: 80640 - protein, 9 aa, Homo Sapiens
EEQKCEEEV

SEQ ID NO: 80641 - protein, 9 aa, Homo Sapiens
EEEVFPLAM

SEQ ID NO: 80642 - protein, 9 aa, Homo Sapiens
EVFPLAMNY

SEQ ID NO: 80643 - protein, 9 aa, Homo Sapiens
VFPLAMNYL

SEQ ID NO: 80644 - protein, 9 aa, Homo Sapiens
FPLAMNYLD

SEQ ID NO: 80645 - protein, 9 aa, Homo Sapiens
LAMNYLDRF

SEQ ID NO: 80646 - protein, 9 aa, Homo Sapiens
AMNYLDRFL

SEQ ID NO: 80647 - protein, 9 aa, Homo Sapiens
NYLDRFLSL

SEQ ID NO: 80648 - protein, 9 aa, Homo Sapiens
YLDRFLSLE

SEQ ID NO: 80649 - protein, 9 aa, Homo Sapiens
DRFLSLEPV

SEQ ID NO: 80650 - protein, 9 aa, Homo Sapiens
RFLSLEPVK

SEQ ID NO: 80651 - protein, 9 aa, Homo Sapiens
FLSLEPVKK

SEQ ID NO: 80652 - protein, 9 aa, Homo Sapiens
LQLLGATCM

SEQ ID NO: 80653 - protein, 9 aa, Homo Sapiens
QLLGATCMF

SEQ ID NO: 80654 - protein, 9 aa, Homo Sapiens
LLGATCMFV

SEQ ID NO: 80655 - protein, 9 aa, Homo Sapiens
LGATCMFVA

SEQ ID NO: 80656 - protein, 9 aa, Homo Sapiens
ATCMFVASK

SEQ ID NO: 80657 - protein, 9 aa, Homo Sapiens
TCMFVASKM

SEQ ID NO: 80658 - protein, 9 aa, Homo Sapiens
CMFVASKMK

SEQ ID NO: 80659 - protein, 9 aa, Homo Sapiens
FVASKMKET

SEQ ID NO: 80660 - protein, 9 aa, Homo Sapiens
SKMKETIPL

SEQ ID NO: 80661 - protein, 9 aa, Homo Sapiens
KMKETIPLT

SEQ ID NO: 80662 - protein, 9 aa, Homo Sapiens
ETIPLTAEK

SEQ ID NO: 80663 - protein, 9 aa, Homo Sapiens
PLTAEKLCI

SEQ ID NO: 80664 - protein, 9 aa, Homo Sapiens
LTAEKLCIY

SEQ ID NO: 80665 - protein, 9 aa, Homo Sapiens
KLCIYTDNS

SEQ ID NO: 80666 - protein, 9 aa, Homo Sapiens
CIYTDNSIR

SEQ ID NO: 80667 - protein, 9 aa, Homo Sapiens
PEELLQMEL

SEQ ID NO: 80668 - protein, 9 aa, Homo Sapiens
EELLQMELL

SEQ ID NO: 80669 - protein, 9 aa, Homo Sapiens
ELLQMELLL

SEQ ID NO: 80670 - protein, 9 aa, Homo Sapiens
LLQMELLLV

SEQ ID NO: 80671 - protein, 9 aa, Homo Sapiens
LQMELLLVN

SEQ ID NO: 80672 - protein, 9 aa, Homo Sapiens
QMELLLVNK

SEQ ID NO: 80673 - protein, 9 aa, Homo Sapiens
MELLLVNKL

SEQ ID NO: 80674 - protein, 9 aa, Homo Sapiens
ELLLVNKLK

SEQ ID NO: 80675 - protein, 9 aa, Homo Sapiens
LLLVNKLKW

SEQ ID NO: 80676 - protein, 9 aa, Homo Sapiens
LVNKLKWNL

SEQ ID NO: 80677 - protein, 9 aa, Homo Sapiens
KLKWNLAAM

SEQ ID NO: 80678 - protein, 9 aa, Homo Sapiens
LAAMTPHDF

SEQ ID NO: 80679 - protein, 9 aa, Homo Sapiens
AAMTPHDFI

SEQ ID NO: 80680 - protein, 9 aa, Homo Sapiens
AMTPHDFIE

SEQ ID NO: 80681 - protein, 9 aa, Homo Sapiens
TPHDFIEHF

SEQ ID NO: 80682 - protein, 9 aa, Homo Sapiens
DFIEHFLSK

SEQ ID NO: 80683 - protein, 9 aa, Homo Sapiens
FIEHFLSKM

SEQ ID NO: 80684 - protein, 9 aa, Homo Sapiens
FLSKMPEAE

SEQ ID NO: 80685 - protein, 9 aa, Homo Sapiens
IIRKHAQTF

SEQ ID NO: 80686 - protein, 9 aa, Homo Sapiens
KHAQTFVAL

SEQ ID NO: 80687 - protein, 9 aa, Homo Sapiens
AQTFVALCA

SEQ ID NO: 80688 - protein, 9 aa, Homo Sapiens
QTFVALCAT

SEQ ID NO: 80689 - protein, 9 aa, Homo Sapiens
FVALCATDV

SEQ ID NO: 80690 - protein, 9 aa, Homo Sapiens
VALCATDVK

SEQ ID NO: 80691 - protein, 9 aa, Homo Sapiens
ALCATDVKF

SEQ ID NO: 80692 - protein, 9 aa, Homo Sapiens
FISNPPSMV

SEQ ID NO: 80693 - protein, 9 aa, Homo Sapiens
NPPSMVAAG

SEQ ID NO: 80694 - protein, 9 aa, Homo Sapiens
SMVAAGSVV

SEQ ID NO: 80695 - protein, 9 aa, Homo Sapiens
MVAAGSVVA

SEQ ID NO: 80696 - protein, 9 aa, Homo Sapiens
AAGSVVAAV

SEQ ID NO: 80697 - protein, 9 aa, Homo Sapiens
SVVAAVQGL

SEQ ID NO: 80698 - protein, 9 aa, Homo Sapiens
AAVQGLNLR

SEQ ID NO: 80699 - protein, 9 aa, Homo Sapiens
NLRSPNNFL

SEQ ID NO: 80700 - protein, 9 aa, Homo Sapiens
RSPNNFLSY

SEQ ID NO: 80701 - protein, 9 aa, Homo Sapiens
SPNNFLSYY

SEQ ID NO: 80702 - protein, 9 aa, Homo Sapiens
PNNFLSYYR

SEQ ID NO: 80703 - protein, 9 aa, Homo Sapiens
NNFLSYYRL

SEQ ID NO: 80704 - protein, 9 aa, Homo Sapiens
FLSYYRLTR

SEQ ID NO: 80705 - protein, 9 aa, Homo Sapiens
LSYYRLTRF

SEQ ID NO: 80706 - protein, 9 aa, Homo Sapiens
SYYRLTRFL

SEQ ID NO: 80707 - protein, 9 aa, Homo Sapiens
YYRLTRFLS

SEQ ID NO: 80708 - protein, 9 aa, Homo Sapiens
YRLTRFLSR

SEQ ID NO: 80709 - protein, 9 aa, Homo Sapiens
RLTRFLSRV

SEQ ID NO: 80710 - protein, 9 aa, Homo Sapiens
TRFLSRVIK

SEQ ID NO: 80711 - protein, 9 aa, Homo Sapiens
CLRACQEQI

SEQ ID NO: 80712 - protein, 9 aa, Homo Sapiens
IEALLESSL

SEQ ID NO: 80713 - protein, 9 aa, Homo Sapiens
EALLESSLR

SEQ ID NO: 80714 - protein, 9 aa, Homo Sapiens
ALLESSLRQ

SEQ ID NO: 80715 - protein, 9 aa, Homo Sapiens
LLESSLRQA

SEQ ID NO: 80716 - protein, 9 aa, Homo Sapiens
SLRQAQQNM

SEQ ID NO: 80717 - protein, 9 aa, Homo Sapiens
QAQQNMDPK

SEQ ID NO: 80718 - protein, 9 aa, Homo Sapiens
AQQNMDPKA

SEQ ID NO: 80719 - protein, 9 aa, Homo Sapiens
EEEEEEEEV

SEQ ID NO: 80720 - protein, 9 aa, Homo Sapiens
EEEEEEVDL

SEQ ID NO: 80721 - protein, 9 aa, Homo Sapiens
EEVDLACTP

SEQ ID NO: 80722 - protein, 9 aa, Homo Sapiens
DLACTPTDV

SEQ ID NO: 80723 - protein, 9 aa, Homo Sapiens
LACTPTDVR

SEQ ID NO: 80724 - protein, 10 aa, Homo Sapiens
MEHQLLCCEV

SEQ ID NO: 80725 - protein, 10 aa, Homo Sapiens
QLLCCEVETI

SEQ ID NO: 80726 - protein, 10 aa, Homo Sapiens
LLCCEVETIR

SEQ ID NO: 80727 - protein, 10 aa, Homo Sapiens
LCCEVETIRR

SEQ ID NO: 80728 - protein, 10 aa, Homo Sapiens
CEVETIRRAY

SEQ ID NO: 80729 - protein, 10 aa, Homo Sapiens
ETIRRAYPDA

SEQ ID NO: 80730 - protein, 10 aa, Homo Sapiens
ANLLNDRVLR

SEQ ID NO: 80731 - protein, 10 aa, Homo Sapiens
NLLNDRVLRA

SEQ ID NO: 80732 - protein, 10 aa, Homo Sapiens
LLNDRVLRAM

SEQ ID NO: 80733 - protein, 10 aa, Homo Sapiens
AMLKAEETCA

SEQ ID NO: 80734 - protein, 10 aa, Homo Sapiens
KAEETCAPSV

SEQ ID NO: 80735 - protein, 10 aa, Homo Sapiens
AEETCAPSVS

SEQ ID NO: 80736 - protein, 10 aa, Homo Sapiens
EETCAPSVSY

SEQ ID NO: 80737 - protein, 10 aa, Homo Sapiens
ETCAPSVSYF

SEQ ID NO: 80738 - protein, 10 aa, Homo Sapiens
TCAPSVSYFK

SEQ ID NO: 80739 - protein, 10 aa, Homo Sapiens
APSVSYFKCV

SEQ ID NO: 80740 - protein, 10 aa, Homo Sapiens
SVSYFKCVQK

SEQ ID NO: 80741 - protein, 10 aa, Homo Sapiens
SYFKCVQKEV

SEQ ID NO: 80742 - protein, 10 aa, Homo Sapiens
YFKCVQKEVL

SEQ ID NO: 80743 - protein, 10 aa, Homo Sapiens
EVLPSMRKIV

SEQ ID NO: 80744 - protein, 10 aa, Homo Sapiens
VLPSMRKIVA

SEQ ID NO: 80745 - protein, 10 aa, Homo Sapiens
LPSMRKIVAT

SEQ ID NO: 80746 - protein, 10 aa, Homo Sapiens
PSMRKIVATW

SEQ ID NO: 80747 - protein, 10 aa, Homo Sapiens
SMRKIVATWM

SEQ ID NO: 80748 - protein, 10 aa, Homo Sapiens
KIVATWMLEV

SEQ ID NO: 80749 - protein, 10 aa, Homo Sapiens
WMLEVCEEQK

SEQ ID NO: 80750 - protein, 10 aa, Homo Sapiens
EEQKCEEEVF

SEQ ID NO: 80751 - protein, 10 aa, Homo Sapiens
CEEEVFPLAM

SEQ ID NO: 80752 - protein, 10 aa, Homo Sapiens
EEVFPLAMNY

SEQ ID NO: 80753 - protein, 10 aa, Homo Sapiens
EVFPLAMNYL

SEQ ID NO: 80754 - protein, 10 aa, Homo Sapiens
FPLAMNYLDR

SEQ ID NO: 80755 - protein, 10 aa, Homo Sapiens
LAMNYLDRFL

SEQ ID NO: 80756 - protein, 10 aa, Homo Sapiens
MNYLDRFLSL

SEQ ID NO: 80757 - protein, 10 aa, Homo Sapiens
YLDRFLSLEP

SEQ ID NO: 80758 - protein, 10 aa, Homo Sapiens
RFLSLEPVKK

SEQ ID NO: 80759 - protein, 10 aa, Homo Sapiens
LSLEPVKKSR

SEQ ID NO: 80760 - protein, 10 aa, Homo Sapiens
SLEPVKKSRL

SEQ ID NO: 80761 - protein, 10 aa, Homo Sapiens
EPVKKSRLQL

SEQ ID NO: 80762 - protein, 10 aa, Homo Sapiens
LQLLGATCMF

SEQ ID NO: 80763 - protein, 10 aa, Homo Sapiens
QLLGATCMFV

SEQ ID NO: 80764 - protein, 10 aa, Homo Sapiens
LLGATCMFVA

SEQ ID NO: 80765 - protein, 10 aa, Homo Sapiens
GATCMFVASK

SEQ ID NO: 80766 - protein, 10 aa, Homo Sapiens
TCMFVASKMK

SEQ ID NO: 80767 - protein, 10 aa, Homo Sapiens
FVASKMKETI

SEQ ID NO: 80768 - protein, 10 aa, Homo Sapiens
KMKETIPLTA

SEQ ID NO: 80769 - protein, 10 aa, Homo Sapiens
ETIPLTAEKL

SEQ ID NO: 80770 - protein, 10 aa, Homo Sapiens
IPLTAEKLCI

SEQ ID NO: 80771 - protein, 10 aa, Homo Sapiens
KLCIYTDNSI

SEQ ID NO: 80772 - protein, 10 aa, Homo Sapiens
SIRPEELLQM

SEQ ID NO: 80773 - protein, 10 aa, Homo Sapiens
RPEELLQMEL

SEQ ID NO: 80774 - protein, 10 aa, Homo Sapiens
PEELLQMELL

SEQ ID NO: 80775 - protein, 10 aa, Homo Sapiens
EELLQMELLL

SEQ ID NO: 80776 - protein, 10 aa, Homo Sapiens
ELLQMELLLV

SEQ ID NO: 80777 - protein, 10 aa, Homo Sapiens
LQMELLLVNK

SEQ ID NO: 80778 - protein, 10 aa, Homo Sapiens
QMELLLVNKL

SEQ ID NO: 80779 - protein, 10 aa, Homo Sapiens
LLVNKLKWNL

SEQ ID NO: 80780 - protein, 10 aa, Homo Sapiens
KLKWNLAAMT

SEQ ID NO: 80781 - protein, 10 aa, Homo Sapiens
LAAMTPHDFI

SEQ ID NO: 80782 - protein, 10 aa, Homo Sapiens
MTPHDFIEHF

SEQ ID NO: 80783 - protein, 10 aa, Homo Sapiens
TPHDFIEHFL

SEQ ID NO: 80784 - protein, 10 aa, Homo Sapiens
DFIEHFLSKM

SEQ ID NO: 80785 - protein, 10 aa, Homo Sapiens
KMPEAEENKQ

SEQ ID NO: 80786 - protein, 10 aa, Homo Sapiens
MPEAEENKQI

SEQ ID NO: 80787 - protein, 10 aa, Homo Sapiens
EAEENKQIIR

SEQ ID NO: 80788 - protein, 10 aa, Homo Sapiens
QIIRKHAQTF

SEQ ID NO: 80789 - protein, 10 aa, Homo Sapiens
IIRKHAQTFV

SEQ ID NO: 80790 - protein, 10 aa, Homo Sapiens
AQTFVALCAT

SEQ ID NO: 80791 - protein, 10 aa, Homo Sapiens
FVALCATDVK

SEQ ID NO: 80792 - protein, 10 aa, Homo Sapiens
VALCATDVKF

SEQ ID NO: 80793 - protein, 10 aa, Homo Sapiens
ALCATDVKFI

SEQ ID NO: 80794 - protein, 10 aa, Homo Sapiens
FISNPPSMVA

SEQ ID NO: 80795 - protein, 10 aa, Homo Sapiens
SMVAAGSVVA

SEQ ID NO: 80796 - protein, 10 aa, Homo Sapiens
MVAAGSVVAA

SEQ ID NO: 80797 - protein, 10 aa, Homo Sapiens
VAAGSVVAAV

SEQ ID NO: 80798 - protein, 10 aa, Homo Sapiens
VAAVQGLNLR

SEQ ID NO: 80799 - protein, 10 aa, Homo Sapiens
RSPNNFLSYY

SEQ ID NO: 80800 - protein, 10 aa, Homo Sapiens
SPNNFLSYYR

SEQ ID NO: 80801 - protein, 10 aa, Homo Sapiens
NFLSYYRLTR

SEQ ID NO: 80802 - protein, 10 aa, Homo Sapiens
FLSYYRLTRF

SEQ ID NO: 80803 - protein, 10 aa, Homo Sapiens
SYYRLTRFLS

SEQ ID NO: 80804 - protein, 10 aa, Homo Sapiens
YYRLTRFLSR

SEQ ID NO: 80805 - protein, 10 aa, Homo Sapiens
YRLTRFLSRV

SEQ ID NO: 80806 - protein, 10 aa, Homo Sapiens
RLTRFLSRVI

SEQ ID NO: 80807 - protein, 10 aa, Homo Sapiens
LTRFLSRVIK

SEQ ID NO: 80808 - protein, 10 aa, Homo Sapiens
VIKCDPDCLR

SEQ ID NO: 80809 - protein, 10 aa, Homo Sapiens
EQIEALLESS

SEQ ID NO: 80810 - protein, 10 aa, Homo Sapiens
ALLESSLRQA

SEQ ID NO: 80811 - protein, 10 aa, Homo Sapiens
RQAQQNMDPK

SEQ ID NO: 80812 - protein, 10 aa, Homo Sapiens
EEEEEEEEEV

SEQ ID NO: 80813 - protein, 10 aa, Homo Sapiens
EEEEEEEVDL

SEQ ID NO: 80814 - protein, 10 aa, Homo Sapiens
EEVDLACTPT

SEQ ID NO: 80815 - protein, 10 aa, Homo Sapiens
DLACTPTDVR

SEQ ID NO: 80816 - protein, 11 aa, Homo Sapiens
HQLLCCEVETI

SEQ ID NO: 80817 - protein, 11 aa, Homo Sapiens
LLCCEVETIRR

SEQ ID NO: 80818 - protein, 11 aa, Homo Sapiens
YPDANLLNDRV

SEQ ID NO: 80819 - protein, 11 aa, Homo Sapiens
DANLLNDRVLR

SEQ ID NO: 80820 - protein, 11 aa, Homo Sapiens
NLLNDRVLRAM

SEQ ID NO: 80821 - protein, 11 aa, Homo Sapiens
LLNDRVLRAML

SEQ ID NO: 80822 - protein, 11 aa, Homo Sapiens
VLRAMLKAEET

SEQ ID NO: 80823 - protein, 11 aa, Homo Sapiens
MLKAEETCAPS

SEQ ID NO: 80824 - protein, 11 aa, Homo Sapiens
AEETCAPSVSY

SEQ ID NO: 80825 - protein, 11 aa, Homo Sapiens
EETCAPSVSYF

SEQ ID NO: 80826 - protein, 11 aa, Homo Sapiens
ETCAPSVSYFK

SEQ ID NO: 80827 - protein, 11 aa, Homo Sapiens
CAPSVSYFKCV

SEQ ID NO: 80828 - protein, 11 aa, Homo Sapiens
SYFKCVQKEVL

SEQ ID NO: 80829 - protein, 11 aa, Homo Sapiens
CVQKEVLPSMR

SEQ ID NO: 80830 - protein, 11 aa, Homo Sapiens
VQKEVLPSMRK

SEQ ID NO: 80831 - protein, 11 aa, Homo Sapiens
EVLPSMRKIVA

SEQ ID NO: 80832 - protein, 11 aa, Homo Sapiens
VLPSMRKIVAT

SEQ ID NO: 80833 - protein, 11 aa, Homo Sapiens
LPSMRKIVATW

SEQ ID NO: 80834 - protein, 11 aa, Homo Sapiens
SMRKIVATWML

SEQ ID NO: 80835 - protein, 11 aa, Homo Sapiens
RKIVATWMLEV

SEQ ID NO: 80836 - protein, 11 aa, Homo Sapiens
TWMLEVCEEQK

SEQ ID NO: 80837 - protein, 11 aa, Homo Sapiens
WMLEVCEEQKC

SEQ ID NO: 80838 - protein, 11 aa, Homo Sapiens
EEEVFPLAMNY

SEQ ID NO: 80839 - protein, 11 aa, Homo Sapiens
EEVFPLAMNYL

SEQ ID NO: 80840 - protein, 11 aa, Homo Sapiens
EVFPLAMNYLD

SEQ ID NO: 80841 - protein, 11 aa, Homo Sapiens
FPLAMNYLDRF

SEQ ID NO: 80842 - protein, 11 aa, Homo Sapiens
PLAMNYLDRFL

SEQ ID NO: 80843 - protein, 11 aa, Homo Sapiens
AMNYLDRFLSL

SEQ ID NO: 80844 - protein, 11 aa, Homo Sapiens
YLDRFLSLEPV

SEQ ID NO: 80845 - protein, 11 aa, Homo Sapiens
LDRFLSLEPVK

SEQ ID NO: 80846 - protein, 11 aa, Homo Sapiens
FLSLEPVKKSR

SEQ ID NO: 80847 - protein, 11 aa, Homo Sapiens
SLEPVKKSRLQ

SEQ ID NO: 80848 - protein, 11 aa, Homo Sapiens
EPVKKSRLQLL

SEQ ID NO: 80849 - protein, 11 aa, Homo Sapiens
RLQLLGATCMF

SEQ ID NO: 80850 - protein, 11 aa, Homo Sapiens
LQLLGATCMFV

SEQ ID NO: 80851 - protein, 11 aa, Homo Sapiens
QLLGATCMFVA

SEQ ID NO: 80852 - protein, 11 aa, Homo Sapiens
ATCMFVASKMK

SEQ ID NO: 80853 - protein, 11 aa, Homo Sapiens
VASKMKETIPL

SEQ ID NO: 80854 - protein, 11 aa, Homo Sapiens
IPLTAEKLCIY

SEQ ID NO: 80855 - protein, 11 aa, Homo Sapiens
AEKLCIYTDNS

SEQ ID NO: 80856 - protein, 11 aa, Homo Sapiens
KLCIYTDNSIR

SEQ ID NO: 80857 - protein, 11 aa, Homo Sapiens
YTDNSIRPEEL

SEQ ID NO: 80858 - protein, 11 aa, Homo Sapiens
RPEELLQMELL

SEQ ID NO: 80859 - protein, 11 aa, Homo Sapiens
PEELLQMELLL

SEQ ID NO: 80860 - protein, 11 aa, Homo Sapiens
EELLQMELLLV

SEQ ID NO: 80861 - protein, 11 aa, Homo Sapiens
LLQMELLLVNK

SEQ ID NO: 80862 - protein, 11 aa, Homo Sapiens
LQMELLLVNKL

SEQ ID NO: 80863 - protein, 11 aa, Homo Sapiens
QMELLLVNKLK

SEQ ID NO: 80864 - protein, 11 aa, Homo Sapiens
MELLLVNKLKW

SEQ ID NO: 80865 - protein, 11 aa, Homo Sapiens
LLLVNKLKWNL

SEQ ID NO: 80866 - protein, 11 aa, Homo Sapiens
LLVNKLKWNLA

SEQ ID NO: 80867 - protein, 11 aa, Homo Sapiens
NLAAMTPHDFI

SEQ ID NO: 80868 - protein, 11 aa, Homo Sapiens
AMTPHDFIEHF

SEQ ID NO: 80869 - protein, 11 aa, Homo Sapiens
MTPHDFIEHFL

SEQ ID NO: 80870 - protein, 11 aa, Homo Sapiens
KMPEAEENKQI

SEQ ID NO: 80871 - protein, 11 aa, Homo Sapiens
MPEAEENKQII

SEQ ID NO: 80872 - protein, 11 aa, Homo Sapiens
EAEENKQIIRK

SEQ ID NO: 80873 - protein, 11 aa, Homo Sapiens
EENKQIIRKHA

SEQ ID NO: 80874 - protein, 11 aa, Homo Sapiens
KQIIRKHAQTF

SEQ ID NO: 80875 - protein, 11 aa, Homo Sapiens
QIIRKHAQTFV

SEQ ID NO: 80876 - protein, 11 aa, Homo Sapiens
QTFVALCATDV

SEQ ID NO: 80877 - protein, 11 aa, Homo Sapiens
TFVALCATDVK

SEQ ID NO: 80878 - protein, 11 aa, Homo Sapiens
FVALCATDVKF

SEQ ID NO: 80879 - protein, 11 aa, Homo Sapiens
DVKFISNPPSM

SEQ ID NO: 80880 - protein, 11 aa, Homo Sapiens
FISNPPSMVAA

SEQ ID NO: 80881 - protein, 11 aa, Homo Sapiens
NPPSMVAAGSV

SEQ ID NO: 80882 - protein, 11 aa, Homo Sapiens
SMVAAGSVVAA

SEQ ID NO: 80883 - protein, 11 aa, Homo Sapiens
MVAAGSVVAAV

SEQ ID NO: 80884 - protein, 11 aa, Homo Sapiens
SVVAAVQGLNL

SEQ ID NO: 80885 - protein, 11 aa, Homo Sapiens
VVAAVQGLNLR

SEQ ID NO: 80886 - protein, 11 aa, Homo Sapiens
GLNLRSPNNFL

SEQ ID NO: 80887 - protein, 11 aa, Homo Sapiens
NLRSPNNFLSY

SEQ ID NO: 80888 - protein, 11 aa, Homo Sapiens
RSPNNFLSYYR

SEQ ID NO: 80889 - protein, 11 aa, Homo Sapiens
SPNNFLSYYRL

SEQ ID NO: 80890 - protein, 11 aa, Homo Sapiens
NNFLSYYRLTR

SEQ ID NO: 80891 - protein, 11 aa, Homo Sapiens
NFLSYYRLTRF

SEQ ID NO: 80892 - protein, 11 aa, Homo Sapiens
FLSYYRLTRFL

SEQ ID NO: 80893 - protein, 11 aa, Homo Sapiens
SYYRLTRFLSR

SEQ ID NO: 80894 - protein, 11 aa, Homo Sapiens
YRLTRFLSRVI

SEQ ID NO: 80895 - protein, 11 aa, Homo Sapiens
RLTRFLSRVIK

SEQ ID NO: 80896 - protein, 11 aa, Homo Sapiens
RVIKCDPDCLR

SEQ ID NO: 80897 - protein, 11 aa, Homo Sapiens
CLRACQEQIEA

SEQ ID NO: 80898 - protein, 11 aa, Homo Sapiens
EQIEALLESSL

SEQ ID NO: 80899 - protein, 11 aa, Homo Sapiens
QIEALLESSLR

SEQ ID NO: 80900 - protein, 11 aa, Homo Sapiens
ALLESSLRQAQ

SEQ ID NO: 80901 - protein, 11 aa, Homo Sapiens
RQAQQNMDPKA

SEQ ID NO: 80902 - protein, 11 aa, Homo Sapiens
AEEEEEEEEEV

SEQ ID NO: 80903 - protein, 11 aa, Homo Sapiens
EEEEEEEEVDL

SEQ ID NO: 80904 - protein, 11 aa, Homo Sapiens
EEEEVDLACTP

SEQ ID NO: 80905 - protein, 11 aa, Homo Sapiens
EEVDLACTPTD

SEQ ID NO: 80906 - protein, 11 aa, Homo Sapiens
EVDLACTPTDV

SEQ ID NO: 80907 - protein, 13 aa, Homo Sapiens
MEHQLLCCEVETI

SEQ ID NO: 80908 - protein, 13 aa, Homo Sapiens
EHQLLCCEVETIR

SEQ ID NO: 80909 - protein, 13 aa, Homo Sapiens
HQLLCCEVETIRR

SEQ ID NO: 80910 - protein, 13 aa, Homo Sapiens
QLLCCEVETIRRA

SEQ ID NO: 80911 - protein, 13 aa, Homo Sapiens
LLCCEVETIRRAY

SEQ ID NO: 80912 - protein, 13 aa, Homo Sapiens
LCCEVETIRRAYP

SEQ ID NO: 80913 - protein, 13 aa, Homo Sapiens
CCEVETIRRAYPD

SEQ ID NO: 80914 - protein, 13 aa, Homo Sapiens
CEVETIRRAYPDA

SEQ ID NO: 80915 - protein, 13 aa, Homo Sapiens
EVETIRRAYPDAN

SEQ ID NO: 80916 - protein, 13 aa, Homo Sapiens
VETIRRAYPDANL

SEQ ID NO: 80917 - protein, 13 aa, Homo Sapiens
ETIRRAYPDANLL

SEQ ID NO: 80918 - protein, 13 aa, Homo Sapiens
TIRRAYPDANLLN

SEQ ID NO: 80919 - protein, 13 aa, Homo Sapiens
IRRAYPDANLLND

SEQ ID NO: 80920 - protein, 13 aa, Homo Sapiens
RRAYPDANLLNDR

SEQ ID NO: 80921 - protein, 13 aa, Homo Sapiens
RAYPDANLLNDRV

SEQ ID NO: 80922 - protein, 13 aa, Homo Sapiens
AYPDANLLNDRVL

SEQ ID NO: 80923 - protein, 13 aa, Homo Sapiens
YPDANLLNDRVLR

SEQ ID NO: 80924 - protein, 13 aa, Homo Sapiens
PDANLLNDRVLRA

SEQ ID NO: 80925 - protein, 13 aa, Homo Sapiens
DANLLNDRVLRAM

SEQ ID NO: 80926 - protein, 13 aa, Homo Sapiens
ANLLNDRVLRAML

SEQ ID NO: 80927 - protein, 13 aa, Homo Sapiens
NLLNDRVLRAMLK

SEQ ID NO: 80928 - protein, 13 aa, Homo Sapiens
LLNDRVLRAMLKA

SEQ ID NO: 80929 - protein, 13 aa, Homo Sapiens
LNDRVLRAMLKAE

SEQ ID NO: 80930 - protein, 13 aa, Homo Sapiens
NDRVLRAMLKAEE

SEQ ID NO: 80931 - protein, 13 aa, Homo Sapiens
DRVLRAMLKAEET

SEQ ID NO: 80932 - protein, 13 aa, Homo Sapiens
RVLRAMLKAEETC

SEQ ID NO: 80933 - protein, 13 aa, Homo Sapiens
VLRAMLKAEETCA

SEQ ID NO: 80934 - protein, 13 aa, Homo Sapiens
LRAMLKAEETCAP

SEQ ID NO: 80935 - protein, 13 aa, Homo Sapiens
RAMLKAEETCAPS

SEQ ID NO: 80936 - protein, 13 aa, Homo Sapiens
AMLKAEETCAPSV

SEQ ID NO: 80937 - protein, 13 aa, Homo Sapiens
MLKAEETCAPSVS

SEQ ID NO: 80938 - protein, 13 aa, Homo Sapiens
LKAEETCAPSVSY

SEQ ID NO: 80939 - protein, 13 aa, Homo Sapiens
KAEETCAPSVSYF

SEQ ID NO: 80940 - protein, 13 aa, Homo Sapiens
AEETCAPSVSYFK

SEQ ID NO: 80941 - protein, 13 aa, Homo Sapiens
EETCAPSVSYFKC

SEQ ID NO: 80942 - protein, 13 aa, Homo Sapiens
ETCAPSVSYFKCV

SEQ ID NO: 80943 - protein, 13 aa, Homo Sapiens
TCAPSVSYFKCVQ

SEQ ID NO: 80944 - protein, 13 aa, Homo Sapiens
CAPSVSYFKCVQK

SEQ ID NO: 80945 - protein, 13 aa, Homo Sapiens
APSVSYFKCVQKE

SEQ ID NO: 80946 - protein, 13 aa, Homo Sapiens
PSVSYFKCVQKEV

SEQ ID NO: 80947 - protein, 13 aa, Homo Sapiens
SVSYFKCVQKEVL

SEQ ID NO: 80948 - protein, 13 aa, Homo Sapiens
VSYFKCVQKEVLP

SEQ ID NO: 80949 - protein, 13 aa, Homo Sapiens
SYFKCVQKEVLPS

SEQ ID NO: 80950 - protein, 13 aa, Homo Sapiens
YFKCVQKEVLPSM

SEQ ID NO: 80951 - protein, 13 aa, Homo Sapiens
FKCVQKEVLPSMR

SEQ ID NO: 80952 - protein, 13 aa, Homo Sapiens
KCVQKEVLPSMRK

SEQ ID NO: 80953 - protein, 13 aa, Homo Sapiens
CVQKEVLPSMRKI

SEQ ID NO: 80954 - protein, 13 aa, Homo Sapiens
VQKEVLPSMRKIV

SEQ ID NO: 80955 - protein, 13 aa, Homo Sapiens
QKEVLPSMRKIVA

SEQ ID NO: 80956 - protein, 13 aa, Homo Sapiens
KEVLPSMRKIVAT

SEQ ID NO: 80957 - protein, 13 aa, Homo Sapiens
EVLPSMRKIVATW

SEQ ID NO: 80958 - protein, 13 aa, Homo Sapiens
VLPSMRKIVATWM

SEQ ID NO: 80959 - protein, 13 aa, Homo Sapiens
LPSMRKIVATWML

SEQ ID NO: 80960 - protein, 13 aa, Homo Sapiens
PSMRKIVATWMLE

SEQ ID NO: 80961 - protein, 13 aa, Homo Sapiens
SMRKIVATWMLEV

SEQ ID NO: 80962 - protein, 13 aa, Homo Sapiens
MRKIVATWMLEVC

SEQ ID NO: 80963 - protein, 13 aa, Homo Sapiens
RKIVATWMLEVCE

SEQ ID NO: 80964 - protein, 13 aa, Homo Sapiens
KIVATWMLEVCEE

SEQ ID NO: 80965 - protein, 13 aa, Homo Sapiens
IVATWMLEVCEEQ

SEQ ID NO: 80966 - protein, 13 aa, Homo Sapiens
VATWMLEVCEEQK

SEQ ID NO: 80967 - protein, 13 aa, Homo Sapiens
ATWMLEVCEEQKC

SEQ ID NO: 80968 - protein, 13 aa, Homo Sapiens
TWMLEVCEEQKCE

SEQ ID NO: 80969 - protein, 13 aa, Homo Sapiens
WMLEVCEEQKCEE

SEQ ID NO: 80970 - protein, 13 aa, Homo Sapiens
MLEVCEEQKCEEE

SEQ ID NO: 80971 - protein, 13 aa, Homo Sapiens
LEVCEEQKCEEEV

SEQ ID NO: 80972 - protein, 13 aa, Homo Sapiens
EVCEEQKCEEEVF

SEQ ID NO: 80973 - protein, 13 aa, Homo Sapiens
VCEEQKCEEEVFP

SEQ ID NO: 80974 - protein, 13 aa, Homo Sapiens
CEEQKCEEEVFPL

SEQ ID NO: 80975 - protein, 13 aa, Homo Sapiens
EEQKCEEEVFPLA

SEQ ID NO: 80976 - protein, 13 aa, Homo Sapiens
EQKCEEEVFPLAM

SEQ ID NO: 80977 - protein, 13 aa, Homo Sapiens
QKCEEEVFPLAMN

SEQ ID NO: 80978 - protein, 13 aa, Homo Sapiens
KCEEEVFPLAMNY

SEQ ID NO: 80979 - protein, 13 aa, Homo Sapiens
CEEEVFPLAMNYL

SEQ ID NO: 80980 - protein, 13 aa, Homo Sapiens
EEEVFPLAMNYLD

SEQ ID NO: 80981 - protein, 13 aa, Homo Sapiens
EEVFPLAMNYLDR

SEQ ID NO: 80982 - protein, 13 aa, Homo Sapiens
EVFPLAMNYLDRF

SEQ ID NO: 80983 - protein, 13 aa, Homo Sapiens
VFPLAMNYLDRFL

SEQ ID NO: 80984 - protein, 13 aa, Homo Sapiens
FPLAMNYLDRFLS

SEQ ID NO: 80985 - protein, 13 aa, Homo Sapiens
PLAMNYLDRFLSL

SEQ ID NO: 80986 - protein, 13 aa, Homo Sapiens
LAMNYLDRFLSLE

SEQ ID NO: 80987 - protein, 13 aa, Homo Sapiens
AMNYLDRFLSLEP

SEQ ID NO: 80988 - protein, 13 aa, Homo Sapiens
MNYLDRFLSLEPV

SEQ ID NO: 80989 - protein, 13 aa, Homo Sapiens
NYLDRFLSLEPVK

SEQ ID NO: 80990 - protein, 13 aa, Homo Sapiens
YLDRFLSLEPVKK

SEQ ID NO: 80991 - protein, 13 aa, Homo Sapiens
LDRFLSLEPVKKS

SEQ ID NO: 80992 - protein, 13 aa, Homo Sapiens
DRFLSLEPVKKSR

SEQ ID NO: 80993 - protein, 13 aa, Homo Sapiens
RFLSLEPVKKSRL

SEQ ID NO: 80994 - protein, 13 aa, Homo Sapiens
FLSLEPVKKSRLQ

SEQ ID NO: 80995 - protein, 13 aa, Homo Sapiens
LSLEPVKKSRLQL

SEQ ID NO: 80996 - protein, 13 aa, Homo Sapiens
SLEPVKKSRLQLL

SEQ ID NO: 80997 - protein, 13 aa, Homo Sapiens
LEPVKKSRLQLLG

SEQ ID NO: 80998 - protein, 13 aa, Homo Sapiens
EPVKKSRLQLLGA

SEQ ID NO: 80999 - protein, 13 aa, Homo Sapiens
PVKKSRLQLLGAT

SEQ ID NO: 81000 - protein, 13 aa, Homo Sapiens
VKKSRLQLLGATC

SEQ ID NO: 81001 - protein, 13 aa, Homo Sapiens
KKSRLQLLGATCM

SEQ ID NO: 81002 - protein, 13 aa, Homo Sapiens
KSRLQLLGATCMF

SEQ ID NO: 81003 - protein, 13 aa, Homo Sapiens
SRLQLLGATCMFV

SEQ ID NO: 81004 - protein, 13 aa, Homo Sapiens
RLQLLGATCMFVA

SEQ ID NO: 81005 - protein, 13 aa, Homo Sapiens
LQLLGATCMFVAS

SEQ ID NO: 81006 - protein, 13 aa, Homo Sapiens
QLLGATCMFVASK

SEQ ID NO: 81007 - protein, 13 aa, Homo Sapiens
LLGATCMFVASKM

SEQ ID NO: 81008 - protein, 13 aa, Homo Sapiens
LGATCMFVASKMK

SEQ ID NO: 81009 - protein, 13 aa, Homo Sapiens
GATCMFVASKMKE

SEQ ID NO: 81010 - protein, 13 aa, Homo Sapiens
ATCMFVASKMKET

SEQ ID NO: 81011 - protein, 13 aa, Homo Sapiens
TCMFVASKMKETI

SEQ ID NO: 81012 - protein, 13 aa, Homo Sapiens
CMFVASKMKETIP

SEQ ID NO: 81013 - protein, 13 aa, Homo Sapiens
MFVASKMKETIPL

SEQ ID NO: 81014 - protein, 13 aa, Homo Sapiens
FVASKMKETIPLT

SEQ ID NO: 81015 - protein, 13 aa, Homo Sapiens
VASKMKETIPLTA

SEQ ID NO: 81016 - protein, 13 aa, Homo Sapiens
ASKMKETIPLTAE

SEQ ID NO: 81017 - protein, 13 aa, Homo Sapiens
SKMKETIPLTAEK

SEQ ID NO: 81018 - protein, 13 aa, Homo Sapiens
KMKETIPLTAEKL

SEQ ID NO: 81019 - protein, 13 aa, Homo Sapiens
MKETIPLTAEKLC

SEQ ID NO: 81020 - protein, 13 aa, Homo Sapiens
KETIPLTAEKLCI

SEQ ID NO: 81021 - protein, 13 aa, Homo Sapiens
ETIPLTAEKLCIY

SEQ ID NO: 81022 - protein, 13 aa, Homo Sapiens
TIPLTAEKLCIYT

SEQ ID NO: 81023 - protein, 13 aa, Homo Sapiens
IPLTAEKLCIYTD

SEQ ID NO: 81024 - protein, 13 aa, Homo Sapiens
PLTAEKLCIYTDN

SEQ ID NO: 81025 - protein, 13 aa, Homo Sapiens
LTAEKLCIYTDNS

SEQ ID NO: 81026 - protein, 13 aa, Homo Sapiens
TAEKLCIYTDNSI

SEQ ID NO: 81027 - protein, 13 aa, Homo Sapiens
AEKLCIYTDNSIR

SEQ ID NO: 81028 - protein, 13 aa, Homo Sapiens
EKLCIYTDNSIRP

SEQ ID NO: 81029 - protein, 13 aa, Homo Sapiens
KLCIYTDNSIRPE

SEQ ID NO: 81030 - protein, 13 aa, Homo Sapiens
LCIYTDNSIRPEE

SEQ ID NO: 81031 - protein, 13 aa, Homo Sapiens
CIYTDNSIRPEEL

SEQ ID NO: 81032 - protein, 13 aa, Homo Sapiens
IYTDNSIRPEELL

SEQ ID NO: 81033 - protein, 13 aa, Homo Sapiens
YTDNSIRPEELLQ

SEQ ID NO: 81034 - protein, 13 aa, Homo Sapiens
TDNSIRPEELLQM

SEQ ID NO: 81035 - protein, 13 aa, Homo Sapiens
DNSIRPEELLQME

SEQ ID NO: 81036 - protein, 13 aa, Homo Sapiens
NSIRPEELLQMEL

SEQ ID NO: 81037 - protein, 13 aa, Homo Sapiens
SIRPEELLQMELL

SEQ ID NO: 81038 - protein, 13 aa, Homo Sapiens
IRPEELLQMELLL

SEQ ID NO: 81039 - protein, 13 aa, Homo Sapiens
RPEELLQMELLLV

SEQ ID NO: 81040 - protein, 13 aa, Homo Sapiens
PEELLQMELLLVN

SEQ ID NO: 81041 - protein, 13 aa, Homo Sapiens
EELLQMELLLVNK

SEQ ID NO: 81042 - protein, 13 aa, Homo Sapiens
ELLQMELLLVNKL

SEQ ID NO: 81043 - protein, 13 aa, Homo Sapiens
LLQMELLLVNKLK

SEQ ID NO: 81044 - protein, 13 aa, Homo Sapiens
LQMELLLVNKLKW

SEQ ID NO: 81045 - protein, 13 aa, Homo Sapiens
QMELLLVNKLKWN

SEQ ID NO: 81046 - protein, 13 aa, Homo Sapiens
MELLLVNKLKWNL

SEQ ID NO: 81047 - protein, 13 aa, Homo Sapiens
ELLLVNKLKWNLA

SEQ ID NO: 81048 - protein, 13 aa, Homo Sapiens
LLLVNKLKWNLAA

SEQ ID NO: 81049 - protein, 13 aa, Homo Sapiens
LLVNKLKWNLAAM

SEQ ID NO: 81050 - protein, 13 aa, Homo Sapiens
LVNKLKWNLAAMT

SEQ ID NO: 81051 - protein, 13 aa, Homo Sapiens
VNKLKWNLAAMTP

SEQ ID NO: 81052 - protein, 13 aa, Homo Sapiens
NKLKWNLAAMTPH

SEQ ID NO: 81053 - protein, 13 aa, Homo Sapiens
KLKWNLAAMTPHD

SEQ ID NO: 81054 - protein, 13 aa, Homo Sapiens
LKWNLAAMTPHDF

SEQ ID NO: 81055 - protein, 13 aa, Homo Sapiens
KWNLAAMTPHDFI

SEQ ID NO: 81056 - protein, 13 aa, Homo Sapiens
WNLAAMTPHDFIE

SEQ ID NO: 81057 - protein, 13 aa, Homo Sapiens
NLAAMTPHDFIEH

SEQ ID NO: 81058 - protein, 13 aa, Homo Sapiens
LAAMTPHDFIEHF

SEQ ID NO: 81059 - protein, 13 aa, Homo Sapiens
AAMTPHDFIEHFL

SEQ ID NO: 81060 - protein, 13 aa, Homo Sapiens
AMTPHDFIEHFLS

SEQ ID NO: 81061 - protein, 13 aa, Homo Sapiens
MTPHDFIEHFLSK

SEQ ID NO: 81062 - protein, 13 aa, Homo Sapiens
TPHDFIEHFLSKM

SEQ ID NO: 81063 - protein, 13 aa, Homo Sapiens
PHDFIEHFLSKMP

SEQ ID NO: 81064 - protein, 13 aa, Homo Sapiens
HDFIEHFLSKMPE

SEQ ID NO: 81065 - protein, 13 aa, Homo Sapiens
DFIEHFLSKMPEA

SEQ ID NO: 81066 - protein, 13 aa, Homo Sapiens
FIEHFLSKMPEAE

SEQ ID NO: 81067 - protein, 13 aa, Homo Sapiens
IEHFLSKMPEAEE

SEQ ID NO: 81068 - protein, 13 aa, Homo Sapiens
EHFLSKMPEAEEN

SEQ ID NO: 81069 - protein, 13 aa, Homo Sapiens
HFLSKMPEAEENK

SEQ ID NO: 81070 - protein, 13 aa, Homo Sapiens
FLSKMPEAEENKQ

SEQ ID NO: 81071 - protein, 13 aa, Homo Sapiens
LSKMPEAEENKQI

SEQ ID NO: 81072 - protein, 13 aa, Homo Sapiens
SKMPEAEENKQII

SEQ ID NO: 81073 - protein, 13 aa, Homo Sapiens
KMPEAEENKQIIR

SEQ ID NO: 81074 - protein, 13 aa, Homo Sapiens
MPEAEENKQIIRK

SEQ ID NO: 81075 - protein, 13 aa, Homo Sapiens
PEAEENKQIIRKH

SEQ ID NO: 81076 - protein, 13 aa, Homo Sapiens
EAEENKQIIRKHA

SEQ ID NO: 81077 - protein, 13 aa, Homo Sapiens
AEENKQIIRKHAQ

SEQ ID NO: 81078 - protein, 13 aa, Homo Sapiens
EENKQIIRKHAQT

SEQ ID NO: 81079 - protein, 13 aa, Homo Sapiens
ENKQIIRKHAQTF

SEQ ID NO: 81080 - protein, 13 aa, Homo Sapiens
NKQIIRKHAQTFV

SEQ ID NO: 81081 - protein, 13 aa, Homo Sapiens
KQIIRKHAQTFVA

SEQ ID NO: 81082 - protein, 13 aa, Homo Sapiens
QIIRKHAQTFVAL

SEQ ID NO: 81083 - protein, 13 aa, Homo Sapiens
IIRKHAQTFVALC

SEQ ID NO: 81084 - protein, 13 aa, Homo Sapiens
IRKHAQTFVALCA

SEQ ID NO: 81085 - protein, 13 aa, Homo Sapiens
RKHAQTFVALCAT

SEQ ID NO: 81086 - protein, 13 aa, Homo Sapiens
KHAQTFVALCATD

SEQ ID NO: 81087 - protein, 13 aa, Homo Sapiens
HAQTFVALCATDV

SEQ ID NO: 81088 - protein, 13 aa, Homo Sapiens
AQTFVALCATDVK

SEQ ID NO: 81089 - protein, 13 aa, Homo Sapiens
QTFVALCATDVKF

SEQ ID NO: 81090 - protein, 13 aa, Homo Sapiens
TFVALCATDVKFI

SEQ ID NO: 81091 - protein, 13 aa, Homo Sapiens
FVALCATDVKFIS

SEQ ID NO: 81092 - protein, 13 aa, Homo Sapiens
VALCATDVKFISN

SEQ ID NO: 81093 - protein, 13 aa, Homo Sapiens
ALCATDVKFISNP

SEQ ID NO: 81094 - protein, 13 aa, Homo Sapiens
LCATDVKFISNPP

SEQ ID NO: 81095 - protein, 13 aa, Homo Sapiens
CATDVKFISNPPS

SEQ ID NO: 81096 - protein, 13 aa, Homo Sapiens
ATDVKFISNPPSM

SEQ ID NO: 81097 - protein, 13 aa, Homo Sapiens
TDVKFISNPPSMV

SEQ ID NO: 81098 - protein, 13 aa, Homo Sapiens
DVKFISNPPSMVA

SEQ ID NO: 81099 - protein, 13 aa, Homo Sapiens
VKFISNPPSMVAA

SEQ ID NO: 81100 - protein, 13 aa, Homo Sapiens
KFISNPPSMVAAG

SEQ ID NO: 81101 - protein, 13 aa, Homo Sapiens
FISNPPSMVAAGS

SEQ ID NO: 81102 - protein, 13 aa, Homo Sapiens
ISNPPSMVAAGSV

SEQ ID NO: 81103 - protein, 13 aa, Homo Sapiens
SNPPSMVAAGSVV

SEQ ID NO: 81104 - protein, 13 aa, Homo Sapiens
NPPSMVAAGSVVA

SEQ ID NO: 81105 - protein, 13 aa, Homo Sapiens
PPSMVAAGSVVAA

SEQ ID NO: 81106 - protein, 13 aa, Homo Sapiens
PSMVAAGSVVAAV

SEQ ID NO: 81107 - protein, 13 aa, Homo Sapiens
SMVAAGSVVAAVQ

SEQ ID NO: 81108 - protein, 13 aa, Homo Sapiens
MVAAGSVVAAVQG

SEQ ID NO: 81109 - protein, 13 aa, Homo Sapiens
VAAGSVVAAVQGL

SEQ ID NO: 81110 - protein, 13 aa, Homo Sapiens
AAGSVVAAVQGLN

SEQ ID NO: 81111 - protein, 13 aa, Homo Sapiens
AGSVVAAVQGLNL

SEQ ID NO: 81112 - protein, 13 aa, Homo Sapiens
GSVVAAVQGLNLR

SEQ ID NO: 81113 - protein, 13 aa, Homo Sapiens
SVVAAVQGLNLRS

SEQ ID NO: 81114 - protein, 13 aa, Homo Sapiens
VVAAVQGLNLRSP

SEQ ID NO: 81115 - protein, 13 aa, Homo Sapiens
VAAVQGLNLRSPN

SEQ ID NO: 81116 - protein, 13 aa, Homo Sapiens
AAVQGLNLRSPNN

SEQ ID NO: 81117 - protein, 13 aa, Homo Sapiens
AVQGLNLRSPNNF

SEQ ID NO: 81118 - protein, 13 aa, Homo Sapiens
VQGLNLRSPNNFL

SEQ ID NO: 81119 - protein, 13 aa, Homo Sapiens
QGLNLRSPNNFLS

SEQ ID NO: 81120 - protein, 13 aa, Homo Sapiens
GLNLRSPNNFLSY

SEQ ID NO: 81121 - protein, 13 aa, Homo Sapiens
LNLRSPNNFLSYY

SEQ ID NO: 81122 - protein, 13 aa, Homo Sapiens
NLRSPNNFLSYYR

SEQ ID NO: 81123 - protein, 13 aa, Homo Sapiens
LRSPNNFLSYYRL

SEQ ID NO: 81124 - protein, 13 aa, Homo Sapiens
RSPNNFLSYYRLT

SEQ ID NO: 81125 - protein, 13 aa, Homo Sapiens
SPNNFLSYYRLTR

SEQ ID NO: 81126 - protein, 13 aa, Homo Sapiens
PNNFLSYYRLTRF

SEQ ID NO: 81127 - protein, 13 aa, Homo Sapiens
NNFLSYYRLTRFL

SEQ ID NO: 81128 - protein, 13 aa, Homo Sapiens
NFLSYYRLTRFLS

SEQ ID NO: 81129 - protein, 13 aa, Homo Sapiens
FLSYYRLTRFLSR

SEQ ID NO: 81130 - protein, 13 aa, Homo Sapiens
LSYYRLTRFLSRV

SEQ ID NO: 81131 - protein, 13 aa, Homo Sapiens
SYYRLTRFLSRVI

SEQ ID NO: 81132 - protein, 13 aa, Homo Sapiens
YYRLTRFLSRVIK

SEQ ID NO: 81133 - protein, 13 aa, Homo Sapiens
YRLTRFLSRVIKC

SEQ ID NO: 81134 - protein, 13 aa, Homo Sapiens
RLTRFLSRVIKCD

SEQ ID NO: 81135 - protein, 13 aa, Homo Sapiens
LTRFLSRVIKCDP

SEQ ID NO: 81136 - protein, 13 aa, Homo Sapiens
TRFLSRVIKCDPD

SEQ ID NO: 81137 - protein, 13 aa, Homo Sapiens
RFLSRVIKCDPDC

SEQ ID NO: 81138 - protein, 13 aa, Homo Sapiens
FLSRVIKCDPDCL

SEQ ID NO: 81139 - protein, 13 aa, Homo Sapiens
LSRVIKCDPDCLR

SEQ ID NO: 81140 - protein, 13 aa, Homo Sapiens
SRVIKCDPDCLRA

SEQ ID NO: 81141 - protein, 13 aa, Homo Sapiens
RVIKCDPDCLRAC

SEQ ID NO: 81142 - protein, 13 aa, Homo Sapiens
VIKCDPDCLRACQ

SEQ ID NO: 81143 - protein, 13 aa, Homo Sapiens
IKCDPDCLRACQE

SEQ ID NO: 81144 - protein, 13 aa, Homo Sapiens
KCDPDCLRACQEQ

SEQ ID NO: 81145 - protein, 13 aa, Homo Sapiens
CDPDCLRACQEQI

SEQ ID NO: 81146 - protein, 13 aa, Homo Sapiens
DPDCLRACQEQIE

SEQ ID NO: 81147 - protein, 13 aa, Homo Sapiens
PDCLRACQEQIEA

SEQ ID NO: 81148 - protein, 13 aa, Homo Sapiens
DCLRACQEQIEAL

SEQ ID NO: 81149 - protein, 13 aa, Homo Sapiens
CLRACQEQIEALL

SEQ ID NO: 81150 - protein, 13 aa, Homo Sapiens
LRACQEQIEALLE

SEQ ID NO: 81151 - protein, 13 aa, Homo Sapiens
RACQEQIEALLES

SEQ ID NO: 81152 - protein, 13 aa, Homo Sapiens
ACQEQIEALLESS

SEQ ID NO: 81153 - protein, 13 aa, Homo Sapiens
CQEQIEALLESSL

SEQ ID NO: 81154 - protein, 13 aa, Homo Sapiens
QEQIEALLESSLR

SEQ ID NO: 81155 - protein, 13 aa, Homo Sapiens
EQIEALLESSLRQ

SEQ ID NO: 81156 - protein, 13 aa, Homo Sapiens
QIEALLESSLRQA

SEQ ID NO: 81157 - protein, 13 aa, Homo Sapiens
IEALLESSLRQAQ

SEQ ID NO: 81158 - protein, 13 aa, Homo Sapiens
EALLESSLRQAQQ

SEQ ID NO: 81159 - protein, 13 aa, Homo Sapiens
ALLESSLRQAQQN

SEQ ID NO: 81160 - protein, 13 aa, Homo Sapiens
LLESSLRQAQQNM

SEQ ID NO: 81161 - protein, 13 aa, Homo Sapiens
LESSLRQAQQNMD

SEQ ID NO: 81162 - protein, 13 aa, Homo Sapiens
ESSLRQAQQNMDP

SEQ ID NO: 81163 - protein, 13 aa, Homo Sapiens
SSLRQAQQNMDPK

SEQ ID NO: 81164 - protein, 13 aa, Homo Sapiens
SLRQAQQNMDPKA

SEQ ID NO: 81165 - protein, 13 aa, Homo Sapiens
LRQAQQNMDPKAA

SEQ ID NO: 81166 - protein, 13 aa, Homo Sapiens
RQAQQNMDPKAAE

SEQ ID NO: 81167 - protein, 13 aa, Homo Sapiens
QAQQNMDPKAAEE

SEQ ID NO: 81168 - protein, 13 aa, Homo Sapiens
AQQNMDPKAAEEE

SEQ ID NO: 81169 - protein, 13 aa, Homo Sapiens
QQNMDPKAAEEEE

SEQ ID NO: 81170 - protein, 13 aa, Homo Sapiens
QNMDPKAAEEEEE

SEQ ID NO: 81171 - protein, 13 aa, Homo Sapiens
NMDPKAAEEEEEE

SEQ ID NO: 81172 - protein, 13 aa, Homo Sapiens
MDPKAAEEEEEEE

SEQ ID NO: 81173 - protein, 13 aa, Homo Sapiens
DPKAAEEEEEEEE

SEQ ID NO: 81174 - protein, 13 aa, Homo Sapiens
PKAAEEEEEEEEE

SEQ ID NO: 81175 - protein, 13 aa, Homo Sapiens
KAAEEEEEEEEEV

SEQ ID NO: 81176 - protein, 13 aa, Homo Sapiens
AAEEEEEEEEEVD

SEQ ID NO: 81177 - protein, 13 aa, Homo Sapiens
AEEEEEEEEEVDL

SEQ ID NO: 81178 - protein, 13 aa, Homo Sapiens
EEEEEEEEEVDLA

SEQ ID NO: 81179 - protein, 13 aa, Homo Sapiens
EEEEEEEEVDLAC

SEQ ID NO: 81180 - protein, 13 aa, Homo Sapiens
EEEEEEEVDLACT

SEQ ID NO: 81181 - protein, 13 aa, Homo Sapiens
EEEEEEVDLACTP

SEQ ID NO: 81182 - protein, 13 aa, Homo Sapiens
EEEEEVDLACTPT

SEQ ID NO: 81183 - protein, 13 aa, Homo Sapiens
EEEEVDLACTPTD

SEQ ID NO: 81184 - protein, 13 aa, Homo Sapiens
EEEVDLACTPTDV

SEQ ID NO: 81185 - protein, 13 aa, Homo Sapiens
EEVDLACTPTDVR

SEQ ID NO: 81186 - protein, 13 aa, Homo Sapiens
EVDLACTPTDVRD

SEQ ID NO: 81187 - protein, 13 aa, Homo Sapiens
VDLACTPTDVRDV

SEQ ID NO: 81188 - protein, 13 aa, Homo Sapiens
DLACTPTDVRDVD

SEQ ID NO: 81189 - protein, 13 aa, Homo Sapiens
LACTPTDVRDVDI

SEQ ID NO: 81190 - protein, 14 aa, Homo Sapiens
MEHQLLCCEVETIR

SEQ ID NO: 81191 - protein, 14 aa, Homo Sapiens
EHQLLCCEVETIRR

SEQ ID NO: 81192 - protein, 14 aa, Homo Sapiens
HQLLCCEVETIRRA

SEQ ID NO: 81193 - protein, 14 aa, Homo Sapiens
QLLCCEVETIRRAY

SEQ ID NO: 81194 - protein, 14 aa, Homo Sapiens
LLCCEVETIRRAYP

SEQ ID NO: 81195 - protein, 14 aa, Homo Sapiens
LCCEVETIRRAYPD

SEQ ID NO: 81196 - protein, 14 aa, Homo Sapiens
CCEVETIRRAYPDA

SEQ ID NO: 81197 - protein, 14 aa, Homo Sapiens
CEVETIRRAYPDAN

SEQ ID NO: 81198 - protein, 14 aa, Homo Sapiens
EVETIRRAYPDANL

SEQ ID NO: 81199 - protein, 14 aa, Homo Sapiens
VETIRRAYPDANLL

SEQ ID NO: 81200 - protein, 14 aa, Homo Sapiens
ETIRRAYPDANLLN

SEQ ID NO: 81201 - protein, 14 aa, Homo Sapiens
TIRRAYPDANLLND

SEQ ID NO: 81202 - protein, 14 aa, Homo Sapiens
IRRAYPDANLLNDR

SEQ ID NO: 81203 - protein, 14 aa, Homo Sapiens
RRAYPDANLLNDRV

SEQ ID NO: 81204 - protein, 14 aa, Homo Sapiens
RAYPDANLLNDRVL

SEQ ID NO: 81205 - protein, 14 aa, Homo Sapiens
AYPDANLLNDRVLR

SEQ ID NO: 81206 - protein, 14 aa, Homo Sapiens
YPDANLLNDRVLRA

SEQ ID NO: 81207 - protein, 14 aa, Homo Sapiens
PDANLLNDRVLRAM

SEQ ID NO: 81208 - protein, 14 aa, Homo Sapiens
DANLLNDRVLRAML

SEQ ID NO: 81209 - protein, 14 aa, Homo Sapiens
ANLLNDRVLRAMLK

SEQ ID NO: 81210 - protein, 14 aa, Homo Sapiens
NLLNDRVLRAMLKA

SEQ ID NO: 81211 - protein, 14 aa, Homo Sapiens
LLNDRVLRAMLKAE

SEQ ID NO: 81212 - protein, 14 aa, Homo Sapiens
LNDRVLRAMLKAEE

SEQ ID NO: 81213 - protein, 14 aa, Homo Sapiens
NDRVLRAMLKAEET

SEQ ID NO: 81214 - protein, 14 aa, Homo Sapiens
DRVLRAMLKAEETC

SEQ ID NO: 81215 - protein, 14 aa, Homo Sapiens
RVLRAMLKAEETCA

SEQ ID NO: 81216 - protein, 14 aa, Homo Sapiens
VLRAMLKAEETCAP

SEQ ID NO: 81217 - protein, 14 aa, Homo Sapiens
LRAMLKAEETCAPS

SEQ ID NO: 81218 - protein, 14 aa, Homo Sapiens
RAMLKAEETCAPSV

SEQ ID NO: 81219 - protein, 14 aa, Homo Sapiens
AMLKAEETCAPSVS

SEQ ID NO: 81220 - protein, 14 aa, Homo Sapiens
MLKAEETCAPSVSY

SEQ ID NO: 81221 - protein, 14 aa, Homo Sapiens
LKAEETCAPSVSYF

SEQ ID NO: 81222 - protein, 14 aa, Homo Sapiens
KAEETCAPSVSYFK

SEQ ID NO: 81223 - protein, 14 aa, Homo Sapiens
AEETCAPSVSYFKC

SEQ ID NO: 81224 - protein, 14 aa, Homo Sapiens
EETCAPSVSYFKCV

SEQ ID NO: 81225 - protein, 14 aa, Homo Sapiens
ETCAPSVSYFKCVQ

SEQ ID NO: 81226 - protein, 14 aa, Homo Sapiens
TCAPSVSYFKCVQK

SEQ ID NO: 81227 - protein, 14 aa, Homo Sapiens
CAPSVSYFKCVQKE

SEQ ID NO: 81228 - protein, 14 aa, Homo Sapiens
APSVSYFKCVQKEV

SEQ ID NO: 81229 - protein, 14 aa, Homo Sapiens
PSVSYFKCVQKEVL

SEQ ID NO: 81230 - protein, 14 aa, Homo Sapiens
SVSYFKCVQKEVLP

SEQ ID NO: 81231 - protein, 14 aa, Homo Sapiens
VSYFKCVQKEVLPS

SEQ ID NO: 81232 - protein, 14 aa, Homo Sapiens
SYFKCVQKEVLPSM

SEQ ID NO: 81233 - protein, 14 aa, Homo Sapiens
YFKCVQKEVLPSMR

SEQ ID NO: 81234 - protein, 14 aa, Homo Sapiens
FKCVQKEVLPSMRK

SEQ ID NO: 81235 - protein, 14 aa, Homo Sapiens
KCVQKEVLPSMRKI

SEQ ID NO: 81236 - protein, 14 aa, Homo Sapiens
CVQKEVLPSMRKIV

SEQ ID NO: 81237 - protein, 14 aa, Homo Sapiens
VQKEVLPSMRKIVA

SEQ ID NO: 81238 - protein, 14 aa, Homo Sapiens
QKEVLPSMRKIVAT

SEQ ID NO: 81239 - protein, 14 aa, Homo Sapiens
KEVLPSMRKIVATW

SEQ ID NO: 81240 - protein, 14 aa, Homo Sapiens
EVLPSMRKIVATWM

SEQ ID NO: 81241 - protein, 14 aa, Homo Sapiens
VLPSMRKIVATWML

SEQ ID NO: 81242 - protein, 14 aa, Homo Sapiens
LPSMRKIVATWMLE

SEQ ID NO: 81243 - protein, 14 aa, Homo Sapiens
PSMRKIVATWMLEV

SEQ ID NO: 81244 - protein, 14 aa, Homo Sapiens
SMRKIVATWMLEVC

SEQ ID NO: 81245 - protein, 14 aa, Homo Sapiens
MRKIVATWMLEVCE

SEQ ID NO: 81246 - protein, 14 aa, Homo Sapiens
RKIVATWMLEVCEE

SEQ ID NO: 81247 - protein, 14 aa, Homo Sapiens
KIVATWMLEVCEEQ

SEQ ID NO: 81248 - protein, 14 aa, Homo Sapiens
IVATWMLEVCEEQK

SEQ ID NO: 81249 - protein, 14 aa, Homo Sapiens
VATWMLEVCEEQKC

SEQ ID NO: 81250 - protein, 14 aa, Homo Sapiens
ATWMLEVCEEQKCE

SEQ ID NO: 81251 - protein, 14 aa, Homo Sapiens
TWMLEVCEEQKCEE

SEQ ID NO: 81252 - protein, 14 aa, Homo Sapiens
WMLEVCEEQKCEEE

SEQ ID NO: 81253 - protein, 14 aa, Homo Sapiens
MLEVCEEQKCEEEV

SEQ ID NO: 81254 - protein, 14 aa, Homo Sapiens
LEVCEEQKCEEEVF

SEQ ID NO: 81255 - protein, 14 aa, Homo Sapiens
EVCEEQKCEEEVFP

SEQ ID NO: 81256 - protein, 14 aa, Homo Sapiens
VCEEQKCEEEVFPL

SEQ ID NO: 81257 - protein, 14 aa, Homo Sapiens
CEEQKCEEEVFPLA

SEQ ID NO: 81258 - protein, 14 aa, Homo Sapiens
EEQKCEEEVFPLAM

SEQ ID NO: 81259 - protein, 14 aa, Homo Sapiens
EQKCEEEVFPLAMN

SEQ ID NO: 81260 - protein, 14 aa, Homo Sapiens
QKCEEEVFPLAMNY

SEQ ID NO: 81261 - protein, 14 aa, Homo Sapiens
KCEEEVFPLAMNYL

SEQ ID NO: 81262 - protein, 14 aa, Homo Sapiens
CEEEVFPLAMNYLD

SEQ ID NO: 81263 - protein, 14 aa, Homo Sapiens
EEEVFPLAMNYLDR

SEQ ID NO: 81264 - protein, 14 aa, Homo Sapiens
EEVFPLAMNYLDRF

SEQ ID NO: 81265 - protein, 14 aa, Homo Sapiens
EVFPLAMNYLDRFL

SEQ ID NO: 81266 - protein, 14 aa, Homo Sapiens
VFPLAMNYLDRFLS

SEQ ID NO: 81267 - protein, 14 aa, Homo Sapiens
FPLAMNYLDRFLSL

SEQ ID NO: 81268 - protein, 14 aa, Homo Sapiens
PLAMNYLDRFLSLE

SEQ ID NO: 81269 - protein, 14 aa, Homo Sapiens
LAMNYLDRFLSLEP

SEQ ID NO: 81270 - protein, 14 aa, Homo Sapiens
AMNYLDRFLSLEPV

SEQ ID NO: 81271 - protein, 14 aa, Homo Sapiens
MNYLDRFLSLEPVK

SEQ ID NO: 81272 - protein, 14 aa, Homo Sapiens
NYLDRFLSLEPVKK

SEQ ID NO: 81273 - protein, 14 aa, Homo Sapiens
YLDRFLSLEPVKKS

SEQ ID NO: 81274 - protein, 14 aa, Homo Sapiens
LDRFLSLEPVKKSR

SEQ ID NO: 81275 - protein, 14 aa, Homo Sapiens
DRFLSLEPVKKSRL

SEQ ID NO: 81276 - protein, 14 aa, Homo Sapiens
RFLSLEPVKKSRLQ

SEQ ID NO: 81277 - protein, 14 aa, Homo Sapiens
FLSLEPVKKSRLQL

SEQ ID NO: 81278 - protein, 14 aa, Homo Sapiens
LSLEPVKKSRLQLL

SEQ ID NO: 81279 - protein, 14 aa, Homo Sapiens
SLEPVKKSRLQLLG

SEQ ID NO: 81280 - protein, 14 aa, Homo Sapiens
LEPVKKSRLQLLGA

SEQ ID NO: 81281 - protein, 14 aa, Homo Sapiens
EPVKKSRLQLLGAT

SEQ ID NO: 81282 - protein, 14 aa, Homo Sapiens
PVKKSRLQLLGATC

SEQ ID NO: 81283 - protein, 14 aa, Homo Sapiens
VKKSRLQLLGATCM

SEQ ID NO: 81284 - protein, 14 aa, Homo Sapiens
KKSRLQLLGATCMF

SEQ ID NO: 81285 - protein, 14 aa, Homo Sapiens
KSRLQLLGATCMFV

SEQ ID NO: 81286 - protein, 14 aa, Homo Sapiens
SRLQLLGATCMFVA

SEQ ID NO: 81287 - protein, 14 aa, Homo Sapiens
RLQLLGATCMFVAS

SEQ ID NO: 81288 - protein, 14 aa, Homo Sapiens
LQLLGATCMFVASK

SEQ ID NO: 81289 - protein, 14 aa, Homo Sapiens
QLLGATCMFVASKM

SEQ ID NO: 81290 - protein, 14 aa, Homo Sapiens
LLGATCMFVASKMK

SEQ ID NO: 81291 - protein, 14 aa, Homo Sapiens
LGATCMFVASKMKE

SEQ ID NO: 81292 - protein, 14 aa, Homo Sapiens
GATCMFVASKMKET

SEQ ID NO: 81293 - protein, 14 aa, Homo Sapiens
ATCMFVASKMKETI

SEQ ID NO: 81294 - protein, 14 aa, Homo Sapiens
TCMFVASKMKETIP

SEQ ID NO: 81295 - protein, 14 aa, Homo Sapiens
CMFVASKMKETIPL

SEQ ID NO: 81296 - protein, 14 aa, Homo Sapiens
MFVASKMKETIPLT

SEQ ID NO: 81297 - protein, 14 aa, Homo Sapiens
FVASKMKETIPLTA

SEQ ID NO: 81298 - protein, 14 aa, Homo Sapiens
VASKMKETIPLTAE

SEQ ID NO: 81299 - protein, 14 aa, Homo Sapiens
ASKMKETIPLTAEK

SEQ ID NO: 81300 - protein, 14 aa, Homo Sapiens
SKMKETIPLTAEKL

SEQ ID NO: 81301 - protein, 14 aa, Homo Sapiens
KMKETIPLTAEKLC

SEQ ID NO: 81302 - protein, 14 aa, Homo Sapiens
MKETIPLTAEKLCI

SEQ ID NO: 81303 - protein, 14 aa, Homo Sapiens
KETIPLTAEKLCIY

SEQ ID NO: 81304 - protein, 14 aa, Homo Sapiens
ETIPLTAEKLCIYT

SEQ ID NO: 81305 - protein, 14 aa, Homo Sapiens
TIPLTAEKLCIYTD

SEQ ID NO: 81306 - protein, 14 aa, Homo Sapiens
IPLTAEKLCIYTDN

SEQ ID NO: 81307 - protein, 14 aa, Homo Sapiens
PLTAEKLCIYTDNS

SEQ ID NO: 81308 - protein, 14 aa, Homo Sapiens
LTAEKLCIYTDNSI

SEQ ID NO: 81309 - protein, 14 aa, Homo Sapiens
TAEKLCIYTDNSIR

SEQ ID NO: 81310 - protein, 14 aa, Homo Sapiens
AEKLCIYTDNSIRP

SEQ ID NO: 81311 - protein, 14 aa, Homo Sapiens
EKLCIYTDNSIRPE

SEQ ID NO: 81312 - protein, 14 aa, Homo Sapiens
KLCIYTDNSIRPEE

SEQ ID NO: 81313 - protein, 14 aa, Homo Sapiens
LCIYTDNSIRPEEL

SEQ ID NO: 81314 - protein, 14 aa, Homo Sapiens
CIYTDNSIRPEELL

SEQ ID NO: 81315 - protein, 14 aa, Homo Sapiens
IYTDNSIRPEELLQ

SEQ ID NO: 81316 - protein, 14 aa, Homo Sapiens
YTDNSIRPEELLQM

SEQ ID NO: 81317 - protein, 14 aa, Homo Sapiens
TDNSIRPEELLQME

SEQ ID NO: 81318 - protein, 14 aa, Homo Sapiens
DNSIRPEELLQMEL

SEQ ID NO: 81319 - protein, 14 aa, Homo Sapiens
NSIRPEELLQMELL

SEQ ID NO: 81320 - protein, 14 aa, Homo Sapiens
SIRPEELLQMELLL

SEQ ID NO: 81321 - protein, 14 aa, Homo Sapiens
IRPEELLQMELLLV

SEQ ID NO: 81322 - protein, 14 aa, Homo Sapiens
RPEELLQMELLLVN

SEQ ID NO: 81323 - protein, 14 aa, Homo Sapiens
PEELLQMELLLVNK

SEQ ID NO: 81324 - protein, 14 aa, Homo Sapiens
EELLQMELLLVNKL

SEQ ID NO: 81325 - protein, 14 aa, Homo Sapiens
ELLQMELLLVNKLK

SEQ ID NO: 81326 - protein, 14 aa, Homo Sapiens
LLQMELLLVNKLKW

SEQ ID NO: 81327 - protein, 14 aa, Homo Sapiens
LQMELLLVNKLKWN

SEQ ID NO: 81328 - protein, 14 aa, Homo Sapiens
QMELLLVNKLKWNL

SEQ ID NO: 81329 - protein, 14 aa, Homo Sapiens
MELLLVNKLKWNLA

SEQ ID NO: 81330 - protein, 14 aa, Homo Sapiens
ELLLVNKLKWNLAA

SEQ ID NO: 81331 - protein, 14 aa, Homo Sapiens
LLLVNKLKWNLAAM

SEQ ID NO: 81332 - protein, 14 aa, Homo Sapiens
LLVNKLKWNLAAMT

SEQ ID NO: 81333 - protein, 14 aa, Homo Sapiens
LVNKLKWNLAAMTP

SEQ ID NO: 81334 - protein, 14 aa, Homo Sapiens
VNKLKWNLAAMTPH

SEQ ID NO: 81335 - protein, 14 aa, Homo Sapiens
NKLKWNLAAMTPHD

SEQ ID NO: 81336 - protein, 14 aa, Homo Sapiens
KLKWNLAAMTPHDF

SEQ ID NO: 81337 - protein, 14 aa, Homo Sapiens
LKWNLAAMTPHDFI

SEQ ID NO: 81338 - protein, 14 aa, Homo Sapiens
KWNLAAMTPHDFIE

SEQ ID NO: 81339 - protein, 14 aa, Homo Sapiens
WNLAAMTPHDFIEH

SEQ ID NO: 81340 - protein, 14 aa, Homo Sapiens
NLAAMTPHDFIEHF

SEQ ID NO: 81341 - protein, 14 aa, Homo Sapiens
LAAMTPHDFIEHFL

SEQ ID NO: 81342 - protein, 14 aa, Homo Sapiens
AAMTPHDFIEHFLS

SEQ ID NO: 81343 - protein, 14 aa, Homo Sapiens
AMTPHDFIEHFLSK

SEQ ID NO: 81344 - protein, 14 aa, Homo Sapiens
MTPHDFIEHFLSKM

SEQ ID NO: 81345 - protein, 14 aa, Homo Sapiens
TPHDFIEHFLSKMP

SEQ ID NO: 81346 - protein, 14 aa, Homo Sapiens
PHDFIEHFLSKMPE

SEQ ID NO: 81347 - protein, 14 aa, Homo Sapiens
HDFIEHFLSKMPEA

SEQ ID NO: 81348 - protein, 14 aa, Homo Sapiens
DFIEHFLSKMPEAE

SEQ ID NO: 81349 - protein, 14 aa, Homo Sapiens
FIEHFLSKMPEAEE

SEQ ID NO: 81350 - protein, 14 aa, Homo Sapiens
IEHFLSKMPEAEEN

SEQ ID NO: 81351 - protein, 14 aa, Homo Sapiens
EHFLSKMPEAEENK

SEQ ID NO: 81352 - protein, 14 aa, Homo Sapiens
HFLSKMPEAEENKQ

SEQ ID NO: 81353 - protein, 14 aa, Homo Sapiens
FLSKMPEAEENKQI

SEQ ID NO: 81354 - protein, 14 aa, Homo Sapiens
LSKMPEAEENKQII

SEQ ID NO: 81355 - protein, 14 aa, Homo Sapiens
SKMPEAEENKQIIR

SEQ ID NO: 81356 - protein, 14 aa, Homo Sapiens
KMPEAEENKQIIRK

SEQ ID NO: 81357 - protein, 14 aa, Homo Sapiens
MPEAEENKQIIRKH

SEQ ID NO: 81358 - protein, 14 aa, Homo Sapiens
PEAEENKQIIRKHA

SEQ ID NO: 81359 - protein, 14 aa, Homo Sapiens
EAEENKQIIRKHAQ

SEQ ID NO: 81360 - protein, 14 aa, Homo Sapiens
AEENKQIIRKHAQT

SEQ ID NO: 81361 - protein, 14 aa, Homo Sapiens
EENKQIIRKHAQTF

SEQ ID NO: 81362 - protein, 14 aa, Homo Sapiens
ENKQIIRKHAQTFV

SEQ ID NO: 81363 - protein, 14 aa, Homo Sapiens
NKQIIRKHAQTFVA

SEQ ID NO: 81364 - protein, 14 aa, Homo Sapiens
KQIIRKHAQTFVAL

SEQ ID NO: 81365 - protein, 14 aa, Homo Sapiens
QIIRKHAQTFVALC

SEQ ID NO: 81366 - protein, 14 aa, Homo Sapiens
IIRKHAQTFVALCA

SEQ ID NO: 81367 - protein, 14 aa, Homo Sapiens
IRKHAQTFVALCAT

SEQ ID NO: 81368 - protein, 14 aa, Homo Sapiens
RKHAQTFVALCATD

SEQ ID NO: 81369 - protein, 14 aa, Homo Sapiens
KHAQTFVALCATDV

SEQ ID NO: 81370 - protein, 14 aa, Homo Sapiens
HAQTFVALCATDVK

SEQ ID NO: 81371 - protein, 14 aa, Homo Sapiens
AQTFVALCATDVKF

SEQ ID NO: 81372 - protein, 14 aa, Homo Sapiens
QTFVALCATDVKFI

SEQ ID NO: 81373 - protein, 14 aa, Homo Sapiens
TFVALCATDVKFIS

SEQ ID NO: 81374 - protein, 14 aa, Homo Sapiens
FVALCATDVKFISN

SEQ ID NO: 81375 - protein, 14 aa, Homo Sapiens
VALCATDVKFISNP

SEQ ID NO: 81376 - protein, 14 aa, Homo Sapiens
ALCATDVKFISNPP

SEQ ID NO: 81377 - protein, 14 aa, Homo Sapiens
LCATDVKFISNPPS

SEQ ID NO: 81378 - protein, 14 aa, Homo Sapiens
CATDVKFISNPPSM

SEQ ID NO: 81379 - protein, 14 aa, Homo Sapiens
ATDVKFISNPPSMV

SEQ ID NO: 81380 - protein, 14 aa, Homo Sapiens
TDVKFISNPPSMVA

SEQ ID NO: 81381 - protein, 14 aa, Homo Sapiens
DVKFISNPPSMVAA

SEQ ID NO: 81382 - protein, 14 aa, Homo Sapiens
VKFISNPPSMVAAG

SEQ ID NO: 81383 - protein, 14 aa, Homo Sapiens
KFISNPPSMVAAGS

SEQ ID NO: 81384 - protein, 14 aa, Homo Sapiens
FISNPPSMVAAGSV

SEQ ID NO: 81385 - protein, 14 aa, Homo Sapiens
ISNPPSMVAAGSVV

SEQ ID NO: 81386 - protein, 14 aa, Homo Sapiens
SNPPSMVAAGSVVA

SEQ ID NO: 81387 - protein, 14 aa, Homo Sapiens
NPPSMVAAGSVVAA

SEQ ID NO: 81388 - protein, 14 aa, Homo Sapiens
PPSMVAAGSVVAAV

SEQ ID NO: 81389 - protein, 14 aa, Homo Sapiens
PSMVAAGSVVAAVQ

SEQ ID NO: 81390 - protein, 14 aa, Homo Sapiens
SMVAAGSVVAAVQG

SEQ ID NO: 81391 - protein, 14 aa, Homo Sapiens
MVAAGSVVAAVQGL

SEQ ID NO: 81392 - protein, 14 aa, Homo Sapiens
VAAGSVVAAVQGLN

SEQ ID NO: 81393 - protein, 14 aa, Homo Sapiens
AAGSVVAAVQGLNL

SEQ ID NO: 81394 - protein, 14 aa, Homo Sapiens
AGSVVAAVQGLNLR

SEQ ID NO: 81395 - protein, 14 aa, Homo Sapiens
GSVVAAVQGLNLRS

SEQ ID NO: 81396 - protein, 14 aa, Homo Sapiens
SVVAAVQGLNLRSP

SEQ ID NO: 81397 - protein, 14 aa, Homo Sapiens
VVAAVQGLNLRSPN

SEQ ID NO: 81398 - protein, 14 aa, Homo Sapiens
VAAVQGLNLRSPNN

SEQ ID NO: 81399 - protein, 14 aa, Homo Sapiens
AAVQGLNLRSPNNF

SEQ ID NO: 81400 - protein, 14 aa, Homo Sapiens
AVQGLNLRSPNNFL

SEQ ID NO: 81401 - protein, 14 aa, Homo Sapiens
VQGLNLRSPNNFLS

SEQ ID NO: 81402 - protein, 14 aa, Homo Sapiens
QGLNLRSPNNFLSY

SEQ ID NO: 81403 - protein, 14 aa, Homo Sapiens
GLNLRSPNNFLSYY

SEQ ID NO: 81404 - protein, 14 aa, Homo Sapiens
LNLRSPNNFLSYYR

SEQ ID NO: 81405 - protein, 14 aa, Homo Sapiens
NLRSPNNFLSYYRL

SEQ ID NO: 81406 - protein, 14 aa, Homo Sapiens
LRSPNNFLSYYRLT

SEQ ID NO: 81407 - protein, 14 aa, Homo Sapiens
RSPNNFLSYYRLTR

SEQ ID NO: 81408 - protein, 14 aa, Homo Sapiens
SPNNFLSYYRLTRF

SEQ ID NO: 81409 - protein, 14 aa, Homo Sapiens
PNNFLSYYRLTRFL

SEQ ID NO: 81410 - protein, 14 aa, Homo Sapiens
NNFLSYYRLTRFLS

SEQ ID NO: 81411 - protein, 14 aa, Homo Sapiens
NFLSYYRLTRFLSR

SEQ ID NO: 81412 - protein, 14 aa, Homo Sapiens
FLSYYRLTRFLSRV

SEQ ID NO: 81413 - protein, 14 aa, Homo Sapiens
LSYYRLTRFLSRVI

SEQ ID NO: 81414 - protein, 14 aa, Homo Sapiens
SYYRLTRFLSRVIK

SEQ ID NO: 81415 - protein, 14 aa, Homo Sapiens
YYRLTRFLSRVIKC

SEQ ID NO: 81416 - protein, 14 aa, Homo Sapiens
YRLTRFLSRVIKCD

SEQ ID NO: 81417 - protein, 14 aa, Homo Sapiens
RLTRFLSRVIKCDP

SEQ ID NO: 81418 - protein, 14 aa, Homo Sapiens
LTRFLSRVIKCDPD

SEQ ID NO: 81419 - protein, 14 aa, Homo Sapiens
TRFLSRVIKCDPDC

SEQ ID NO: 81420 - protein, 14 aa, Homo Sapiens
RFLSRVIKCDPDCL

SEQ ID NO: 81421 - protein, 14 aa, Homo Sapiens
FLSRVIKCDPDCLR

SEQ ID NO: 81422 - protein, 14 aa, Homo Sapiens
LSRVIKCDPDCLRA

SEQ ID NO: 81423 - protein, 14 aa, Homo Sapiens
SRVIKCDPDCLRAC

SEQ ID NO: 81424 - protein, 14 aa, Homo Sapiens
RVIKCDPDCLRACQ

SEQ ID NO: 81425 - protein, 14 aa, Homo Sapiens
VIKCDPDCLRACQE

SEQ ID NO: 81426 - protein, 14 aa, Homo Sapiens
IKCDPDCLRACQEQ

SEQ ID NO: 81427 - protein, 14 aa, Homo Sapiens
KCDPDCLRACQEQI

SEQ ID NO: 81428 - protein, 14 aa, Homo Sapiens
CDPDCLRACQEQIE

SEQ ID NO: 81429 - protein, 14 aa, Homo Sapiens
DPDCLRACQEQIEA

SEQ ID NO: 81430 - protein, 14 aa, Homo Sapiens
PDCLRACQEQIEAL

SEQ ID NO: 81431 - protein, 14 aa, Homo Sapiens
DCLRACQEQIEALL

SEQ ID NO: 81432 - protein, 14 aa, Homo Sapiens
CLRACQEQIEALLE

SEQ ID NO: 81433 - protein, 14 aa, Homo Sapiens
LRACQEQIEALLES

SEQ ID NO: 81434 - protein, 14 aa, Homo Sapiens
RACQEQIEALLESS

SEQ ID NO: 81435 - protein, 14 aa, Homo Sapiens
ACQEQIEALLESSL

SEQ ID NO: 81436 - protein, 14 aa, Homo Sapiens
CQEQIEALLESSLR

SEQ ID NO: 81437 - protein, 14 aa, Homo Sapiens
QEQIEALLESSLRQ

SEQ ID NO: 81438 - protein, 14 aa, Homo Sapiens
EQIEALLESSLRQA

SEQ ID NO: 81439 - protein, 14 aa, Homo Sapiens
QIEALLESSLRQAQ

SEQ ID NO: 81440 - protein, 14 aa, Homo Sapiens
IEALLESSLRQAQQ

SEQ ID NO: 81441 - protein, 14 aa, Homo Sapiens
EALLESSLRQAQQN

SEQ ID NO: 81442 - protein, 14 aa, Homo Sapiens
ALLESSLRQAQQNM

SEQ ID NO: 81443 - protein, 14 aa, Homo Sapiens
LLESSLRQAQQNMD

SEQ ID NO: 81444 - protein, 14 aa, Homo Sapiens
LESSLRQAQQNMDP

SEQ ID NO: 81445 - protein, 14 aa, Homo Sapiens
ESSLRQAQQNMDPK

SEQ ID NO: 81446 - protein, 14 aa, Homo Sapiens
SSLRQAQQNMDPKA

SEQ ID NO: 81447 - protein, 14 aa, Homo Sapiens
SLRQAQQNMDPKAA

SEQ ID NO: 81448 - protein, 14 aa, Homo Sapiens
LRQAQQNMDPKAAE

SEQ ID NO: 81449 - protein, 14 aa, Homo Sapiens
RQAQQNMDPKAAEE

SEQ ID NO: 81450 - protein, 14 aa, Homo Sapiens
QAQQNMDPKAAEEE

SEQ ID NO: 81451 - protein, 14 aa, Homo Sapiens
AQQNMDPKAAEEEE

SEQ ID NO: 81452 - protein, 14 aa, Homo Sapiens
QQNMDPKAAEEEEE

SEQ ID NO: 81453 - protein, 14 aa, Homo Sapiens
QNMDPKAAEEEEEE

SEQ ID NO: 81454 - protein, 14 aa, Homo Sapiens
NMDPKAAEEEEEEE

SEQ ID NO: 81455 - protein, 14 aa, Homo Sapiens
MDPKAAEEEEEEEE

SEQ ID NO: 81456 - protein, 14 aa, Homo Sapiens
DPKAAEEEEEEEEE

SEQ ID NO: 81457 - protein, 14 aa, Homo Sapiens
PKAAEEEEEEEEEV

SEQ ID NO: 81458 - protein, 14 aa, Homo Sapiens
KAAEEEEEEEEEVD

SEQ ID NO: 81459 - protein, 14 aa, Homo Sapiens
AAEEEEEEEEEVDL

SEQ ID NO: 81460 - protein, 14 aa, Homo Sapiens
AEEEEEEEEEVDLA

SEQ ID NO: 81461 - protein, 14 aa, Homo Sapiens
EEEEEEEEEVDLAC

SEQ ID NO: 81462 - protein, 14 aa, Homo Sapiens
EEEEEEEEVDLACT

SEQ ID NO: 81463 - protein, 14 aa, Homo Sapiens
EEEEEEEVDLACTP

SEQ ID NO: 81464 - protein, 14 aa, Homo Sapiens
EEEEEEVDLACTPT

SEQ ID NO: 81465 - protein, 14 aa, Homo Sapiens
EEEEEVDLACTPTD

SEQ ID NO: 81466 - protein, 14 aa, Homo Sapiens
EEEEVDLACTPTDV

SEQ ID NO: 81467 - protein, 14 aa, Homo Sapiens
EEEVDLACTPTDVR

SEQ ID NO: 81468 - protein, 14 aa, Homo Sapiens
EEVDLACTPTDVRD

SEQ ID NO: 81469 - protein, 14 aa, Homo Sapiens
EVDLACTPTDVRDV

SEQ ID NO: 81470 - protein, 14 aa, Homo Sapiens
VDLACTPTDVRDVD

SEQ ID NO: 81471 - protein, 14 aa, Homo Sapiens
DLACTPTDVRDVDI

SEQ ID NO: 81472 - protein, 15 aa, Homo Sapiens
MEHQLLCCEVETIRR

SEQ ID NO: 81473 - protein, 15 aa, Homo Sapiens
EHQLLCCEVETIRRA

SEQ ID NO: 81474 - protein, 15 aa, Homo Sapiens
HQLLCCEVETIRRAY

SEQ ID NO: 81475 - protein, 15 aa, Homo Sapiens
QLLCCEVETIRRAYP

SEQ ID NO: 81476 - protein, 15 aa, Homo Sapiens
LLCCEVETIRRAYPD

SEQ ID NO: 81477 - protein, 15 aa, Homo Sapiens
LCCEVETIRRAYPDA

SEQ ID NO: 81478 - protein, 15 aa, Homo Sapiens
CCEVETIRRAYPDAN

SEQ ID NO: 81479 - protein, 15 aa, Homo Sapiens
CEVETIRRAYPDANL

SEQ ID NO: 81480 - protein, 15 aa, Homo Sapiens
EVETIRRAYPDANLL

SEQ ID NO: 81481 - protein, 15 aa, Homo Sapiens
VETIRRAYPDANLLN

SEQ ID NO: 81482 - protein, 15 aa, Homo Sapiens
ETIRRAYPDANLLND

SEQ ID NO: 81483 - protein, 15 aa, Homo Sapiens
TIRRAYPDANLLNDR

SEQ ID NO: 81484 - protein, 15 aa, Homo Sapiens
IRRAYPDANLLNDRV

SEQ ID NO: 81485 - protein, 15 aa, Homo Sapiens
RRAYPDANLLNDRVL

SEQ ID NO: 81486 - protein, 15 aa, Homo Sapiens
RAYPDANLLNDRVLR

SEQ ID NO: 81487 - protein, 15 aa, Homo Sapiens
AYPDANLLNDRVLRA

SEQ ID NO: 81488 - protein, 15 aa, Homo Sapiens
YPDANLLNDRVLRAM

SEQ ID NO: 81489 - protein, 15 aa, Homo Sapiens
PDANLLNDRVLRAML

SEQ ID NO: 81490 - protein, 15 aa, Homo Sapiens
DANLLNDRVLRAMLK

SEQ ID NO: 81491 - protein, 15 aa, Homo Sapiens
ANLLNDRVLRAMLKA

SEQ ID NO: 81492 - protein, 15 aa, Homo Sapiens
NLLNDRVLRAMLKAE

SEQ ID NO: 81493 - protein, 15 aa, Homo Sapiens
LLNDRVLRAMLKAEE

SEQ ID NO: 81494 - protein, 15 aa, Homo Sapiens
LNDRVLRAMLKAEET

SEQ ID NO: 81495 - protein, 15 aa, Homo Sapiens
NDRVLRAMLKAEETC

SEQ ID NO: 81496 - protein, 15 aa, Homo Sapiens
DRVLRAMLKAEETCA

SEQ ID NO: 81497 - protein, 15 aa, Homo Sapiens
RVLRAMLKAEETCAP

SEQ ID NO: 81498 - protein, 15 aa, Homo Sapiens
VLRAMLKAEETCAPS

SEQ ID NO: 81499 - protein, 15 aa, Homo Sapiens
LRAMLKAEETCAPSV

SEQ ID NO: 81500 - protein, 15 aa, Homo Sapiens
RAMLKAEETCAPSVS

SEQ ID NO: 81501 - protein, 15 aa, Homo Sapiens
AMLKAEETCAPSVSY

SEQ ID NO: 81502 - protein, 15 aa, Homo Sapiens
MLKAEETCAPSVSYF

SEQ ID NO: 81503 - protein, 15 aa, Homo Sapiens
LKAEETCAPSVSYFK

SEQ ID NO: 81504 - protein, 15 aa, Homo Sapiens
KAEETCAPSVSYFKC

SEQ ID NO: 81505 - protein, 15 aa, Homo Sapiens
AEETCAPSVSYFKCV

SEQ ID NO: 81506 - protein, 15 aa, Homo Sapiens
EETCAPSVSYFKCVQ

SEQ ID NO: 81507 - protein, 15 aa, Homo Sapiens
ETCAPSVSYFKCVQK

SEQ ID NO: 81508 - protein, 15 aa, Homo Sapiens
TCAPSVSYFKCVQKE

SEQ ID NO: 81509 - protein, 15 aa, Homo Sapiens
CAPSVSYFKCVQKEV

SEQ ID NO: 81510 - protein, 15 aa, Homo Sapiens
APSVSYFKCVQKEVL

SEQ ID NO: 81511 - protein, 15 aa, Homo Sapiens
PSVSYFKCVQKEVLP

SEQ ID NO: 81512 - protein, 15 aa, Homo Sapiens
SVSYFKCVQKEVLPS

SEQ ID NO: 81513 - protein, 15 aa, Homo Sapiens
VSYFKCVQKEVLPSM

SEQ ID NO: 81514 - protein, 15 aa, Homo Sapiens
SYFKCVQKEVLPSMR

SEQ ID NO: 81515 - protein, 15 aa, Homo Sapiens
YFKCVQKEVLPSMRK

SEQ ID NO: 81516 - protein, 15 aa, Homo Sapiens
FKCVQKEVLPSMRKI

SEQ ID NO: 81517 - protein, 15 aa, Homo Sapiens
KCVQKEVLPSMRKIV

SEQ ID NO: 81518 - protein, 15 aa, Homo Sapiens
CVQKEVLPSMRKIVA

SEQ ID NO: 81519 - protein, 15 aa, Homo Sapiens
VQKEVLPSMRKIVAT

SEQ ID NO: 81520 - protein, 15 aa, Homo Sapiens
QKEVLPSMRKIVATW

SEQ ID NO: 81521 - protein, 15 aa, Homo Sapiens
KEVLPSMRKIVATWM

SEQ ID NO: 81522 - protein, 15 aa, Homo Sapiens
EVLPSMRKIVATWML

SEQ ID NO: 81523 - protein, 15 aa, Homo Sapiens
VLPSMRKIVATWMLE

SEQ ID NO: 81524 - protein, 15 aa, Homo Sapiens
LPSMRKIVATWMLEV

SEQ ID NO: 81525 - protein, 15 aa, Homo Sapiens
PSMRKIVATWMLEVC

SEQ ID NO: 81526 - protein, 15 aa, Homo Sapiens
SMRKIVATWMLEVCE

SEQ ID NO: 81527 - protein, 15 aa, Homo Sapiens
MRKIVATWMLEVCEE

SEQ ID NO: 81528 - protein, 15 aa, Homo Sapiens
RKIVATWMLEVCEEQ

SEQ ID NO: 81529 - protein, 15 aa, Homo Sapiens
KIVATWMLEVCEEQK

SEQ ID NO: 81530 - protein, 15 aa, Homo Sapiens
IVATWMLEVCEEQKC

SEQ ID NO: 81531 - protein, 15 aa, Homo Sapiens
VATWMLEVCEEQKCE

SEQ ID NO: 81532 - protein, 15 aa, Homo Sapiens
ATWMLEVCEEQKCEE

SEQ ID NO: 81533 - protein, 15 aa, Homo Sapiens
TWMLEVCEEQKCEEE

SEQ ID NO: 81534 - protein, 15 aa, Homo Sapiens
WMLEVCEEQKCEEEV

SEQ ID NO: 81535 - protein, 15 aa, Homo Sapiens
MLEVCEEQKCEEEVF

SEQ ID NO: 81536 - protein, 15 aa, Homo Sapiens
LEVCEEQKCEEEVFP

SEQ ID NO: 81537 - protein, 15 aa, Homo Sapiens
EVCEEQKCEEEVFPL

SEQ ID NO: 81538 - protein, 15 aa, Homo Sapiens
VCEEQKCEEEVFPLA

SEQ ID NO: 81539 - protein, 15 aa, Homo Sapiens
CEEQKCEEEVFPLAM

SEQ ID NO: 81540 - protein, 15 aa, Homo Sapiens
EEQKCEEEVFPLAMN

SEQ ID NO: 81541 - protein, 15 aa, Homo Sapiens
EQKCEEEVFPLAMNY

SEQ ID NO: 81542 - protein, 15 aa, Homo Sapiens
QKCEEEVFPLAMNYL

SEQ ID NO: 81543 - protein, 15 aa, Homo Sapiens
KCEEEVFPLAMNYLD

SEQ ID NO: 81544 - protein, 15 aa, Homo Sapiens
CEEEVFPLAMNYLDR

SEQ ID NO: 81545 - protein, 15 aa, Homo Sapiens
EEEVFPLAMNYLDRF

SEQ ID NO: 81546 - protein, 15 aa, Homo Sapiens
EEVFPLAMNYLDRFL

SEQ ID NO: 81547 - protein, 15 aa, Homo Sapiens
EVFPLAMNYLDRFLS

SEQ ID NO: 81548 - protein, 15 aa, Homo Sapiens
VFPLAMNYLDRFLSL

SEQ ID NO: 81549 - protein, 15 aa, Homo Sapiens
FPLAMNYLDRFLSLE

SEQ ID NO: 81550 - protein, 15 aa, Homo Sapiens
PLAMNYLDRFLSLEP

SEQ ID NO: 81551 - protein, 15 aa, Homo Sapiens
LAMNYLDRFLSLEPV

SEQ ID NO: 81552 - protein, 15 aa, Homo Sapiens
AMNYLDRFLSLEPVK

SEQ ID NO: 81553 - protein, 15 aa, Homo Sapiens
MNYLDRFLSLEPVKK

SEQ ID NO: 81554 - protein, 15 aa, Homo Sapiens
NYLDRFLSLEPVKKS

SEQ ID NO: 81555 - protein, 15 aa, Homo Sapiens
YLDRFLSLEPVKKSR

SEQ ID NO: 81556 - protein, 15 aa, Homo Sapiens
LDRFLSLEPVKKSRL

SEQ ID NO: 81557 - protein, 15 aa, Homo Sapiens
DRFLSLEPVKKSRLQ

SEQ ID NO: 81558 - protein, 15 aa, Homo Sapiens
RFLSLEPVKKSRLQL

SEQ ID NO: 81559 - protein, 15 aa, Homo Sapiens
FLSLEPVKKSRLQLL

SEQ ID NO: 81560 - protein, 15 aa, Homo Sapiens
LSLEPVKKSRLQLLG

SEQ ID NO: 81561 - protein, 15 aa, Homo Sapiens
SLEPVKKSRLQLLGA

SEQ ID NO: 81562 - protein, 15 aa, Homo Sapiens
LEPVKKSRLQLLGAT

SEQ ID NO: 81563 - protein, 15 aa, Homo Sapiens
EPVKKSRLQLLGATC

SEQ ID NO: 81564 - protein, 15 aa, Homo Sapiens
PVKKSRLQLLGATCM

SEQ ID NO: 81565 - protein, 15 aa, Homo Sapiens
VKKSRLQLLGATCMF

SEQ ID NO: 81566 - protein, 15 aa, Homo Sapiens
KKSRLQLLGATCMFV

SEQ ID NO: 81567 - protein, 15 aa, Homo Sapiens
KSRLQLLGATCMFVA

SEQ ID NO: 81568 - protein, 15 aa, Homo Sapiens
SRLQLLGATCMFVAS

SEQ ID NO: 81569 - protein, 15 aa, Homo Sapiens
RLQLLGATCMFVASK

SEQ ID NO: 81570 - protein, 15 aa, Homo Sapiens
LQLLGATCMFVASKM

SEQ ID NO: 81571 - protein, 15 aa, Homo Sapiens
QLLGATCMFVASKMK

SEQ ID NO: 81572 - protein, 15 aa, Homo Sapiens
LLGATCMFVASKMKE

SEQ ID NO: 81573 - protein, 15 aa, Homo Sapiens
LGATCMFVASKMKET

SEQ ID NO: 81574 - protein, 15 aa, Homo Sapiens
GATCMFVASKMKETI

SEQ ID NO: 81575 - protein, 15 aa, Homo Sapiens
ATCMFVASKMKETIP

SEQ ID NO: 81576 - protein, 15 aa, Homo Sapiens
TCMFVASKMKETIPL

SEQ ID NO: 81577 - protein, 15 aa, Homo Sapiens
CMFVASKMKETIPLT

SEQ ID NO: 81578 - protein, 15 aa, Homo Sapiens
MFVASKMKETIPLTA

SEQ ID NO: 81579 - protein, 15 aa, Homo Sapiens
FVASKMKETIPLTAE

SEQ ID NO: 81580 - protein, 15 aa, Homo Sapiens
VASKMKETIPLTAEK

SEQ ID NO: 81581 - protein, 15 aa, Homo Sapiens
ASKMKETIPLTAEKL

SEQ ID NO: 81582 - protein, 15 aa, Homo Sapiens
SKMKETIPLTAEKLC

SEQ ID NO: 81583 - protein, 15 aa, Homo Sapiens
KMKETIPLTAEKLCI

SEQ ID NO: 81584 - protein, 15 aa, Homo Sapiens
MKETIPLTAEKLCIY

SEQ ID NO: 81585 - protein, 15 aa, Homo Sapiens
KETIPLTAEKLCIYT

SEQ ID NO: 81586 - protein, 15 aa, Homo Sapiens
ETIPLTAEKLCIYTD

SEQ ID NO: 81587 - protein, 15 aa, Homo Sapiens
TIPLTAEKLCIYTDN

SEQ ID NO: 81588 - protein, 15 aa, Homo Sapiens
IPLTAEKLCIYTDNS

SEQ ID NO: 81589 - protein, 15 aa, Homo Sapiens
PLTAEKLCIYTDNSI

SEQ ID NO: 81590 - protein, 15 aa, Homo Sapiens
LTAEKLCIYTDNSIR

SEQ ID NO: 81591 - protein, 15 aa, Homo Sapiens
TAEKLCIYTDNSIRP

SEQ ID NO: 81592 - protein, 15 aa, Homo Sapiens
AEKLCIYTDNSIRPE

SEQ ID NO: 81593 - protein, 15 aa, Homo Sapiens
EKLCIYTDNSIRPEE

SEQ ID NO: 81594 - protein, 15 aa, Homo Sapiens
KLCIYTDNSIRPEEL

SEQ ID NO: 81595 - protein, 15 aa, Homo Sapiens
LCIYTDNSIRPEELL

SEQ ID NO: 81596 - protein, 15 aa, Homo Sapiens
CIYTDNSIRPEELLQ

SEQ ID NO: 81597 - protein, 15 aa, Homo Sapiens
IYTDNSIRPEELLQM

SEQ ID NO: 81598 - protein, 15 aa, Homo Sapiens
YTDNSIRPEELLQME

SEQ ID NO: 81599 - protein, 15 aa, Homo Sapiens
TDNSIRPEELLQMEL

SEQ ID NO: 81600 - protein, 15 aa, Homo Sapiens
DNSIRPEELLQMELL

SEQ ID NO: 81601 - protein, 15 aa, Homo Sapiens
NSIRPEELLQMELLL

SEQ ID NO: 81602 - protein, 15 aa, Homo Sapiens
SIRPEELLQMELLLV

SEQ ID NO: 81603 - protein, 15 aa, Homo Sapiens
IRPEELLQMELLLVN

SEQ ID NO: 81604 - protein, 15 aa, Homo Sapiens
RPEELLQMELLLVNK

SEQ ID NO: 81605 - protein, 15 aa, Homo Sapiens
PEELLQMELLLVNKL

SEQ ID NO: 81606 - protein, 15 aa, Homo Sapiens
EELLQMELLLVNKLK

SEQ ID NO: 81607 - protein, 15 aa, Homo Sapiens
ELLQMELLLVNKLKW

SEQ ID NO: 81608 - protein, 15 aa, Homo Sapiens
LLQMELLLVNKLKWN

SEQ ID NO: 81609 - protein, 15 aa, Homo Sapiens
LQMELLLVNKLKWNL

SEQ ID NO: 81610 - protein, 15 aa, Homo Sapiens
QMELLLVNKLKWNLA

SEQ ID NO: 81611 - protein, 15 aa, Homo Sapiens
MELLLVNKLKWNLAA

SEQ ID NO: 81612 - protein, 15 aa, Homo Sapiens
ELLLVNKLKWNLAAM

SEQ ID NO: 81613 - protein, 15 aa, Homo Sapiens
LLLVNKLKWNLAAMT

SEQ ID NO: 81614 - protein, 15 aa, Homo Sapiens
LLVNKLKWNLAAMTP

SEQ ID NO: 81615 - protein, 15 aa, Homo Sapiens
LVNKLKWNLAAMTPH

SEQ ID NO: 81616 - protein, 15 aa, Homo Sapiens
VNKLKWNLAAMTPHD

SEQ ID NO: 81617 - protein, 15 aa, Homo Sapiens
NKLKWNLAAMTPHDF

SEQ ID NO: 81618 - protein, 15 aa, Homo Sapiens
KLKWNLAAMTPHDFI

SEQ ID NO: 81619 - protein, 15 aa, Homo Sapiens
LKWNLAAMTPHDFIE

SEQ ID NO: 81620 - protein, 15 aa, Homo Sapiens
KWNLAAMTPHDFIEH

SEQ ID NO: 81621 - protein, 15 aa, Homo Sapiens
WNLAAMTPHDFIEHF

SEQ ID NO: 81622 - protein, 15 aa, Homo Sapiens
NLAAMTPHDFIEHFL

SEQ ID NO: 81623 - protein, 15 aa, Homo Sapiens
LAAMTPHDFIEHFLS

SEQ ID NO: 81624 - protein, 15 aa, Homo Sapiens
AAMTPHDFIEHFLSK

SEQ ID NO: 81625 - protein, 15 aa, Homo Sapiens
AMTPHDFIEHFLSKM

SEQ ID NO: 81626 - protein, 15 aa, Homo Sapiens
MTPHDFIEHFLSKMP

SEQ ID NO: 81627 - protein, 15 aa, Homo Sapiens
TPHDFIEHFLSKMPE

SEQ ID NO: 81628 - protein, 15 aa, Homo Sapiens
PHDFIEHFLSKMPEA

SEQ ID NO: 81629 - protein, 15 aa, Homo Sapiens
HDFIEHFLSKMPEAE

SEQ ID NO: 81630 - protein, 15 aa, Homo Sapiens
DFIEHFLSKMPEAEE

SEQ ID NO: 81631 - protein, 15 aa, Homo Sapiens
FIEHFLSKMPEAEEN

SEQ ID NO: 81632 - protein, 15 aa, Homo Sapiens
IEHFLSKMPEAEENK

SEQ ID NO: 81633 - protein, 15 aa, Homo Sapiens
EHFLSKMPEAEENKQ

SEQ ID NO: 81634 - protein, 15 aa, Homo Sapiens
HFLSKMPEAEENKQI

SEQ ID NO: 81635 - protein, 15 aa, Homo Sapiens
FLSKMPEAEENKQII

SEQ ID NO: 81636 - protein, 15 aa, Homo Sapiens
LSKMPEAEENKQIIR

SEQ ID NO: 81637 - protein, 15 aa, Homo Sapiens
SKMPEAEENKQIIRK

SEQ ID NO: 81638 - protein, 15 aa, Homo Sapiens
KMPEAEENKQIIRKH

SEQ ID NO: 81639 - protein, 15 aa, Homo Sapiens
MPEAEENKQIIRKHA

SEQ ID NO: 81640 - protein, 15 aa, Homo Sapiens
PEAEENKQIIRKHAQ

SEQ ID NO: 81641 - protein, 15 aa, Homo Sapiens
EAEENKQIIRKHAQT

SEQ ID NO: 81642 - protein, 15 aa, Homo Sapiens
AEENKQIIRKHAQTF

SEQ ID NO: 81643 - protein, 15 aa, Homo Sapiens
EENKQIIRKHAQTFV

SEQ ID NO: 81644 - protein, 15 aa, Homo Sapiens
ENKQIIRKHAQTFVA

SEQ ID NO: 81645 - protein, 15 aa, Homo Sapiens
NKQIIRKHAQTFVAL

SEQ ID NO: 81646 - protein, 15 aa, Homo Sapiens
KQIIRKHAQTFVALC

SEQ ID NO: 81647 - protein, 15 aa, Homo Sapiens
QIIRKHAQTFVALCA

SEQ ID NO: 81648 - protein, 15 aa, Homo Sapiens
IIRKHAQTFVALCAT

SEQ ID NO: 81649 - protein, 15 aa, Homo Sapiens
IRKHAQTFVALCATD

SEQ ID NO: 81650 - protein, 15 aa, Homo Sapiens
RKHAQTFVALCATDV

SEQ ID NO: 81651 - protein, 15 aa, Homo Sapiens
KHAQTFVALCATDVK

SEQ ID NO: 81652 - protein, 15 aa, Homo Sapiens
HAQTFVALCATDVKF

SEQ ID NO: 81653 - protein, 15 aa, Homo Sapiens
AQTFVALCATDVKFI

SEQ ID NO: 81654 - protein, 15 aa, Homo Sapiens
QTFVALCATDVKFIS

SEQ ID NO: 81655 - protein, 15 aa, Homo Sapiens
TFVALCATDVKFISN

SEQ ID NO: 81656 - protein, 15 aa, Homo Sapiens
FVALCATDVKFISNP

SEQ ID NO: 81657 - protein, 15 aa, Homo Sapiens
VALCATDVKFISNPP

SEQ ID NO: 81658 - protein, 15 aa, Homo Sapiens
ALCATDVKFISNPPS

SEQ ID NO: 81659 - protein, 15 aa, Homo Sapiens
LCATDVKFISNPPSM

SEQ ID NO: 81660 - protein, 15 aa, Homo Sapiens
CATDVKFISNPPSMV

SEQ ID NO: 81661 - protein, 15 aa, Homo Sapiens
ATDVKFISNPPSMVA

SEQ ID NO: 81662 - protein, 15 aa, Homo Sapiens
TDVKFISNPPSMVAA

SEQ ID NO: 81663 - protein, 15 aa, Homo Sapiens
DVKFISNPPSMVAAG

SEQ ID NO: 81664 - protein, 15 aa, Homo Sapiens
VKFISNPPSMVAAGS

SEQ ID NO: 81665 - protein, 15 aa, Homo Sapiens
KFISNPPSMVAAGSV

SEQ ID NO: 81666 - protein, 15 aa, Homo Sapiens
FISNPPSMVAAGSVV

SEQ ID NO: 81667 - protein, 15 aa, Homo Sapiens
ISNPPSMVAAGSVVA

SEQ ID NO: 81668 - protein, 15 aa, Homo Sapiens
SNPPSMVAAGSVVAA

SEQ ID NO: 81669 - protein, 15 aa, Homo Sapiens
NPPSMVAAGSVVAAV

SEQ ID NO: 81670 - protein, 15 aa, Homo Sapiens
PPSMVAAGSVVAAVQ

SEQ ID NO: 81671 - protein, 15 aa, Homo Sapiens
PSMVAAGSVVAAVQG

SEQ ID NO: 81672 - protein, 15 aa, Homo Sapiens
SMVAAGSVVAAVQGL

SEQ ID NO: 81673 - protein, 15 aa, Homo Sapiens
MVAAGSVVAAVQGLN

SEQ ID NO: 81674 - protein, 15 aa, Homo Sapiens
VAAGSVVAAVQGLNL

SEQ ID NO: 81675 - protein, 15 aa, Homo Sapiens
AAGSVVAAVQGLNLR

SEQ ID NO: 81676 - protein, 15 aa, Homo Sapiens
AGSVVAAVQGLNLRS

SEQ ID NO: 81677 - protein, 15 aa, Homo Sapiens
GSVVAAVQGLNLRSP

SEQ ID NO: 81678 - protein, 15 aa, Homo Sapiens
SVVAAVQGLNLRSPN

SEQ ID NO: 81679 - protein, 15 aa, Homo Sapiens
VVAAVQGLNLRSPNN

SEQ ID NO: 81680 - protein, 15 aa, Homo Sapiens
VAAVQGLNLRSPNNF

SEQ ID NO: 81681 - protein, 15 aa, Homo Sapiens
AAVQGLNLRSPNNFL

SEQ ID NO: 81682 - protein, 15 aa, Homo Sapiens
AVQGLNLRSPNNFLS

SEQ ID NO: 81683 - protein, 15 aa, Homo Sapiens
VQGLNLRSPNNFLSY

SEQ ID NO: 81684 - protein, 15 aa, Homo Sapiens
QGLNLRSPNNFLSYY

SEQ ID NO: 81685 - protein, 15 aa, Homo Sapiens
GLNLRSPNNFLSYYR

SEQ ID NO: 81686 - protein, 15 aa, Homo Sapiens
LNLRSPNNFLSYYRL

SEQ ID NO: 81687 - protein, 15 aa, Homo Sapiens
NLRSPNNFLSYYRLT

SEQ ID NO: 81688 - protein, 15 aa, Homo Sapiens
LRSPNNFLSYYRLTR

SEQ ID NO: 81689 - protein, 15 aa, Homo Sapiens
RSPNNFLSYYRLTRF

SEQ ID NO: 81690 - protein, 15 aa, Homo Sapiens
SPNNFLSYYRLTRFL

SEQ ID NO: 81691 - protein, 15 aa, Homo Sapiens
PNNFLSYYRLTRFLS

SEQ ID NO: 81692 - protein, 15 aa, Homo Sapiens
NNFLSYYRLTRFLSR

SEQ ID NO: 81693 - protein, 15 aa, Homo Sapiens
NFLSYYRLTRFLSRV

SEQ ID NO: 81694 - protein, 15 aa, Homo Sapiens
FLSYYRLTRFLSRVI

SEQ ID NO: 81695 - protein, 15 aa, Homo Sapiens
LSYYRLTRFLSRVIK

SEQ ID NO: 81696 - protein, 15 aa, Homo Sapiens
SYYRLTRFLSRVIKC

SEQ ID NO: 81697 - protein, 15 aa, Homo Sapiens
YYRLTRFLSRVIKCD

SEQ ID NO: 81698 - protein, 15 aa, Homo Sapiens
YRLTRFLSRVIKCDP

SEQ ID NO: 81699 - protein, 15 aa, Homo Sapiens
RLTRFLSRVIKCDPD

SEQ ID NO: 81700 - protein, 15 aa, Homo Sapiens
LTRFLSRVIKCDPDC

SEQ ID NO: 81701 - protein, 15 aa, Homo Sapiens
TRFLSRVIKCDPDCL

SEQ ID NO: 81702 - protein, 15 aa, Homo Sapiens
RFLSRVIKCDPDCLR

SEQ ID NO: 81703 - protein, 15 aa, Homo Sapiens
FLSRVIKCDPDCLRA

SEQ ID NO: 81704 - protein, 15 aa, Homo Sapiens
LSRVIKCDPDCLRAC

SEQ ID NO: 81705 - protein, 15 aa, Homo Sapiens
SRVIKCDPDCLRACQ

SEQ ID NO: 81706 - protein, 15 aa, Homo Sapiens
RVIKCDPDCLRACQE

SEQ ID NO: 81707 - protein, 15 aa, Homo Sapiens
VIKCDPDCLRACQEQ

SEQ ID NO: 81708 - protein, 15 aa, Homo Sapiens
IKCDPDCLRACQEQI

SEQ ID NO: 81709 - protein, 15 aa, Homo Sapiens
KCDPDCLRACQEQIE

SEQ ID NO: 81710 - protein, 15 aa, Homo Sapiens
CDPDCLRACQEQIEA

SEQ ID NO: 81711 - protein, 15 aa, Homo Sapiens
DPDCLRACQEQIEAL

SEQ ID NO: 81712 - protein, 15 aa, Homo Sapiens
PDCLRACQEQIEALL

SEQ ID NO: 81713 - protein, 15 aa, Homo Sapiens
DCLRACQEQIEALLE

SEQ ID NO: 81714 - protein, 15 aa, Homo Sapiens
CLRACQEQIEALLES

SEQ ID NO: 81715 - protein, 15 aa, Homo Sapiens
LRACQEQIEALLESS

SEQ ID NO: 81716 - protein, 15 aa, Homo Sapiens
RACQEQIEALLESSL

SEQ ID NO: 81717 - protein, 15 aa, Homo Sapiens
ACQEQIEALLESSLR

SEQ ID NO: 81718 - protein, 15 aa, Homo Sapiens
CQEQIEALLESSLRQ

SEQ ID NO: 81719 - protein, 15 aa, Homo Sapiens
QEQIEALLESSLRQA

SEQ ID NO: 81720 - protein, 15 aa, Homo Sapiens
EQIEALLESSLRQAQ

SEQ ID NO: 81721 - protein, 15 aa, Homo Sapiens
QIEALLESSLRQAQQ

SEQ ID NO: 81722 - protein, 15 aa, Homo Sapiens
IEALLESSLRQAQQN

SEQ ID NO: 81723 - protein, 15 aa, Homo Sapiens
EALLESSLRQAQQNM

SEQ ID NO: 81724 - protein, 15 aa, Homo Sapiens
ALLESSLRQAQQNMD

SEQ ID NO: 81725 - protein, 15 aa, Homo Sapiens
LLESSLRQAQQNMDP

SEQ ID NO: 81726 - protein, 15 aa, Homo Sapiens
LESSLRQAQQNMDPK

SEQ ID NO: 81727 - protein, 15 aa, Homo Sapiens
ESSLRQAQQNMDPKA

SEQ ID NO: 81728 - protein, 15 aa, Homo Sapiens
SSLRQAQQNMDPKAA

SEQ ID NO: 81729 - protein, 15 aa, Homo Sapiens
SLRQAQQNMDPKAAE

SEQ ID NO: 81730 - protein, 15 aa, Homo Sapiens
LRQAQQNMDPKAAEE

SEQ ID NO: 81731 - protein, 15 aa, Homo Sapiens
RQAQQNMDPKAAEEE

SEQ ID NO: 81732 - protein, 15 aa, Homo Sapiens
QAQQNMDPKAAEEEE

SEQ ID NO: 81733 - protein, 15 aa, Homo Sapiens
AQQNMDPKAAEEEEE

SEQ ID NO: 81734 - protein, 15 aa, Homo Sapiens
QQNMDPKAAEEEEEE

SEQ ID NO: 81735 - protein, 15 aa, Homo Sapiens
QNMDPKAAEEEEEEE

SEQ ID NO: 81736 - protein, 15 aa, Homo Sapiens
NMDPKAAEEEEEEEE

SEQ ID NO: 81737 - protein, 15 aa, Homo Sapiens
MDPKAAEEEEEEEEE

SEQ ID NO: 81738 - protein, 15 aa, Homo Sapiens
DPKAAEEEEEEEEEV

SEQ ID NO: 81739 - protein, 15 aa, Homo Sapiens
PKAAEEEEEEEEEVD

SEQ ID NO: 81740 - protein, 15 aa, Homo Sapiens
KAAEEEEEEEEEVDL

SEQ ID NO: 81741 - protein, 15 aa, Homo Sapiens
AAEEEEEEEEEVDLA

SEQ ID NO: 81742 - protein, 15 aa, Homo Sapiens
AEEEEEEEEEVDLAC

SEQ ID NO: 81743 - protein, 15 aa, Homo Sapiens
EEEEEEEEEVDLACT

SEQ ID NO: 81744 - protein, 15 aa, Homo Sapiens
EEEEEEEEVDLACTP

SEQ ID NO: 81745 - protein, 15 aa, Homo Sapiens
EEEEEEEVDLACTPT

SEQ ID NO: 81746 - protein, 15 aa, Homo Sapiens
EEEEEEVDLACTPTD

SEQ ID NO: 81747 - protein, 15 aa, Homo Sapiens
EEEEEVDLACTPTDV

SEQ ID NO: 81748 - protein, 15 aa, Homo Sapiens
EEEEVDLACTPTDVR

SEQ ID NO: 81749 - protein, 15 aa, Homo Sapiens
EEEVDLACTPTDVRD

SEQ ID NO: 81750 - protein, 15 aa, Homo Sapiens
EEVDLACTPTDVRDV

SEQ ID NO: 81751 - protein, 15 aa, Homo Sapiens
EVDLACTPTDVRDVD

SEQ ID NO: 81752 - protein, 15 aa, Homo Sapiens
VDLACTPTDVRDVDI

SEQ ID NO: 81753 - protein, 16 aa, Homo Sapiens
MEHQLLCCEVETIRRA

SEQ ID NO: 81754 - protein, 16 aa, Homo Sapiens
EHQLLCCEVETIRRAY

SEQ ID NO: 81755 - protein, 16 aa, Homo Sapiens
HQLLCCEVETIRRAYP

SEQ ID NO: 81756 - protein, 16 aa, Homo Sapiens
QLLCCEVETIRRAYPD

SEQ ID NO: 81757 - protein, 16 aa, Homo Sapiens
LLCCEVETIRRAYPDA

SEQ ID NO: 81758 - protein, 16 aa, Homo Sapiens
LCCEVETIRRAYPDAN

SEQ ID NO: 81759 - protein, 16 aa, Homo Sapiens
CCEVETIRRAYPDANL

SEQ ID NO: 81760 - protein, 16 aa, Homo Sapiens
CEVETIRRAYPDANLL

SEQ ID NO: 81761 - protein, 16 aa, Homo Sapiens
EVETIRRAYPDANLLN

SEQ ID NO: 81762 - protein, 16 aa, Homo Sapiens
VETIRRAYPDANLLND

SEQ ID NO: 81763 - protein, 16 aa, Homo Sapiens
ETIRRAYPDANLLNDR

SEQ ID NO: 81764 - protein, 16 aa, Homo Sapiens
TIRRAYPDANLLNDRV

SEQ ID NO: 81765 - protein, 16 aa, Homo Sapiens
IRRAYPDANLLNDRVL

SEQ ID NO: 81766 - protein, 16 aa, Homo Sapiens
RRAYPDANLLNDRVLR

SEQ ID NO: 81767 - protein, 16 aa, Homo Sapiens
RAYPDANLLNDRVLRA

SEQ ID NO: 81768 - protein, 16 aa, Homo Sapiens
AYPDANLLNDRVLRAM

SEQ ID NO: 81769 - protein, 16 aa, Homo Sapiens
YPDANLLNDRVLRAML

SEQ ID NO: 81770 - protein, 16 aa, Homo Sapiens
PDANLLNDRVLRAMLK

SEQ ID NO: 81771 - protein, 16 aa, Homo Sapiens
DANLLNDRVLRAMLKA

SEQ ID NO: 81772 - protein, 16 aa, Homo Sapiens
ANLLNDRVLRAMLKAE

SEQ ID NO: 81773 - protein, 16 aa, Homo Sapiens
NLLNDRVLRAMLKAEE

SEQ ID NO: 81774 - protein, 16 aa, Homo Sapiens
LLNDRVLRAMLKAEET

SEQ ID NO: 81775 - protein, 16 aa, Homo Sapiens
LNDRVLRAMLKAEETC

SEQ ID NO: 81776 - protein, 16 aa, Homo Sapiens
NDRVLRAMLKAEETCA

SEQ ID NO: 81777 - protein, 16 aa, Homo Sapiens
DRVLRAMLKAEETCAP

SEQ ID NO: 81778 - protein, 16 aa, Homo Sapiens
RVLRAMLKAEETCAPS

SEQ ID NO: 81779 - protein, 16 aa, Homo Sapiens
VLRAMLKAEETCAPSV

SEQ ID NO: 81780 - protein, 16 aa, Homo Sapiens
LRAMLKAEETCAPSVS

SEQ ID NO: 81781 - protein, 16 aa, Homo Sapiens
RAMLKAEETCAPSVSY

SEQ ID NO: 81782 - protein, 16 aa, Homo Sapiens
AMLKAEETCAPSVSYF

SEQ ID NO: 81783 - protein, 16 aa, Homo Sapiens
MLKAEETCAPSVSYFK

SEQ ID NO: 81784 - protein, 16 aa, Homo Sapiens
LKAEETCAPSVSYFKC

SEQ ID NO: 81785 - protein, 16 aa, Homo Sapiens
KAEETCAPSVSYFKCV

SEQ ID NO: 81786 - protein, 16 aa, Homo Sapiens
AEETCAPSVSYFKCVQ

SEQ ID NO: 81787 - protein, 16 aa, Homo Sapiens
EETCAPSVSYFKCVQK

SEQ ID NO: 81788 - protein, 16 aa, Homo Sapiens
ETCAPSVSYFKCVQKE

SEQ ID NO: 81789 - protein, 16 aa, Homo Sapiens
TCAPSVSYFKCVQKEV

SEQ ID NO: 81790 - protein, 16 aa, Homo Sapiens
CAPSVSYFKCVQKEVL

SEQ ID NO: 81791 - protein, 16 aa, Homo Sapiens
APSVSYFKCVQKEVLP

SEQ ID NO: 81792 - protein, 16 aa, Homo Sapiens
PSVSYFKCVQKEVLPS

SEQ ID NO: 81793 - protein, 16 aa, Homo Sapiens
SVSYFKCVQKEVLPSM

SEQ ID NO: 81794 - protein, 16 aa, Homo Sapiens
VSYFKCVQKEVLPSMR

SEQ ID NO: 81795 - protein, 16 aa, Homo Sapiens
SYFKCVQKEVLPSMRK

SEQ ID NO: 81796 - protein, 16 aa, Homo Sapiens
YFKCVQKEVLPSMRKI

SEQ ID NO: 81797 - protein, 16 aa, Homo Sapiens
FKCVQKEVLPSMRKIV

SEQ ID NO: 81798 - protein, 16 aa, Homo Sapiens
KCVQKEVLPSMRKIVA

SEQ ID NO: 81799 - protein, 16 aa, Homo Sapiens
CVQKEVLPSMRKIVAT

SEQ ID NO: 81800 - protein, 16 aa, Homo Sapiens
VQKEVLPSMRKIVATW

SEQ ID NO: 81801 - protein, 16 aa, Homo Sapiens
QKEVLPSMRKIVATWM

SEQ ID NO: 81802 - protein, 16 aa, Homo Sapiens
KEVLPSMRKIVATWML

SEQ ID NO: 81803 - protein, 16 aa, Homo Sapiens
EVLPSMRKIVATWMLE

SEQ ID NO: 81804 - protein, 16 aa, Homo Sapiens
VLPSMRKIVATWMLEV

SEQ ID NO: 81805 - protein, 16 aa, Homo Sapiens
LPSMRKIVATWMLEVC

SEQ ID NO: 81806 - protein, 16 aa, Homo Sapiens
PSMRKIVATWMLEVCE

SEQ ID NO: 81807 - protein, 16 aa, Homo Sapiens
SMRKIVATWMLEVCEE

SEQ ID NO: 81808 - protein, 16 aa, Homo Sapiens
MRKIVATWMLEVCEEQ

SEQ ID NO: 81809 - protein, 16 aa, Homo Sapiens
RKIVATWMLEVCEEQK

SEQ ID NO: 81810 - protein, 16 aa, Homo Sapiens
KIVATWMLEVCEEQKC

SEQ ID NO: 81811 - protein, 16 aa, Homo Sapiens
IVATWMLEVCEEQKCE

SEQ ID NO: 81812 - protein, 16 aa, Homo Sapiens
VATWMLEVCEEQKCEE

SEQ ID NO: 81813 - protein, 16 aa, Homo Sapiens
ATWMLEVCEEQKCEEE

SEQ ID NO: 81814 - protein, 16 aa, Homo Sapiens
TWMLEVCEEQKCEEEV

SEQ ID NO: 81815 - protein, 16 aa, Homo Sapiens
WMLEVCEEQKCEEEVF

SEQ ID NO: 81816 - protein, 16 aa, Homo Sapiens
MLEVCEEQKCEEEVFP

SEQ ID NO: 81817 - protein, 16 aa, Homo Sapiens
LEVCEEQKCEEEVFPL

SEQ ID NO: 81818 - protein, 16 aa, Homo Sapiens
EVCEEQKCEEEVFPLA

SEQ ID NO: 81819 - protein, 16 aa, Homo Sapiens
VCEEQKCEEEVFPLAM

SEQ ID NO: 81820 - protein, 16 aa, Homo Sapiens
CEEQKCEEEVFPLAMN

SEQ ID NO: 81821 - protein, 16 aa, Homo Sapiens
EEQKCEEEVFPLAMNY

SEQ ID NO: 81822 - protein, 16 aa, Homo Sapiens
EQKCEEEVFPLAMNYL

SEQ ID NO: 81823 - protein, 16 aa, Homo Sapiens
QKCEEEVFPLAMNYLD

SEQ ID NO: 81824 - protein, 16 aa, Homo Sapiens
KCEEEVFPLAMNYLDR

SEQ ID NO: 81825 - protein, 16 aa, Homo Sapiens
CEEEVFPLAMNYLDRF

SEQ ID NO: 81826 - protein, 16 aa, Homo Sapiens
EEEVFPLAMNYLDRFL

SEQ ID NO: 81827 - protein, 16 aa, Homo Sapiens
EEVFPLAMNYLDRFLS

SEQ ID NO: 81828 - protein, 16 aa, Homo Sapiens
EVFPLAMNYLDRFLSL

SEQ ID NO: 81829 - protein, 16 aa, Homo Sapiens
VFPLAMNYLDRFLSLE

SEQ ID NO: 81830 - protein, 16 aa, Homo Sapiens
FPLAMNYLDRFLSLEP

SEQ ID NO: 81831 - protein, 16 aa, Homo Sapiens
PLAMNYLDRFLSLEPV

SEQ ID NO: 81832 - protein, 16 aa, Homo Sapiens
LAMNYLDRFLSLEPVK

SEQ ID NO: 81833 - protein, 16 aa, Homo Sapiens
AMNYLDRFLSLEPVKK

SEQ ID NO: 81834 - protein, 16 aa, Homo Sapiens
MNYLDRFLSLEPVKKS

SEQ ID NO: 81835 - protein, 16 aa, Homo Sapiens
NYLDRFLSLEPVKKSR

SEQ ID NO: 81836 - protein, 16 aa, Homo Sapiens
YLDRFLSLEPVKKSRL

SEQ ID NO: 81837 - protein, 16 aa, Homo Sapiens
LDRFLSLEPVKKSRLQ

SEQ ID NO: 81838 - protein, 16 aa, Homo Sapiens
DRFLSLEPVKKSRLQL

SEQ ID NO: 81839 - protein, 16 aa, Homo Sapiens
RFLSLEPVKKSRLQLL

SEQ ID NO: 81840 - protein, 16 aa, Homo Sapiens
FLSLEPVKKSRLQLLG

SEQ ID NO: 81841 - protein, 16 aa, Homo Sapiens
LSLEPVKKSRLQLLGA

SEQ ID NO: 81842 - protein, 16 aa, Homo Sapiens
SLEPVKKSRLQLLGAT

SEQ ID NO: 81843 - protein, 16 aa, Homo Sapiens
LEPVKKSRLQLLGATC

SEQ ID NO: 81844 - protein, 16 aa, Homo Sapiens
EPVKKSRLQLLGATCM

SEQ ID NO: 81845 - protein, 16 aa, Homo Sapiens
PVKKSRLQLLGATCMF

SEQ ID NO: 81846 - protein, 16 aa, Homo Sapiens
VKKSRLQLLGATCMFV

SEQ ID NO: 81847 - protein, 16 aa, Homo Sapiens
KKSRLQLLGATCMFVA

SEQ ID NO: 81848 - protein, 16 aa, Homo Sapiens
KSRLQLLGATCMFVAS

SEQ ID NO: 81849 - protein, 16 aa, Homo Sapiens
SRLQLLGATCMFVASK

SEQ ID NO: 81850 - protein, 16 aa, Homo Sapiens
RLQLLGATCMFVASKM

SEQ ID NO: 81851 - protein, 16 aa, Homo Sapiens
LQLLGATCMFVASKMK

SEQ ID NO: 81852 - protein, 16 aa, Homo Sapiens
QLLGATCMFVASKMKE

SEQ ID NO: 81853 - protein, 16 aa, Homo Sapiens
LLGATCMFVASKMKET

SEQ ID NO: 81854 - protein, 16 aa, Homo Sapiens
LGATCMFVASKMKETI

SEQ ID NO: 81855 - protein, 16 aa, Homo Sapiens
GATCMFVASKMKETIP

SEQ ID NO: 81856 - protein, 16 aa, Homo Sapiens
ATCMFVASKMKETIPL

SEQ ID NO: 81857 - protein, 16 aa, Homo Sapiens
TCMFVASKMKETIPLT

SEQ ID NO: 81858 - protein, 16 aa, Homo Sapiens
CMFVASKMKETIPLTA

SEQ ID NO: 81859 - protein, 16 aa, Homo Sapiens
MFVASKMKETIPLTAE

SEQ ID NO: 81860 - protein, 16 aa, Homo Sapiens
FVASKMKETIPLTAEK

SEQ ID NO: 81861 - protein, 16 aa, Homo Sapiens
VASKMKETIPLTAEKL

SEQ ID NO: 81862 - protein, 16 aa, Homo Sapiens
ASKMKETIPLTAEKLC

SEQ ID NO: 81863 - protein, 16 aa, Homo Sapiens
SKMKETIPLTAEKLCI

SEQ ID NO: 81864 - protein, 16 aa, Homo Sapiens
KMKETIPLTAEKLCIY

SEQ ID NO: 81865 - protein, 16 aa, Homo Sapiens
MKETIPLTAEKLCIYT

SEQ ID NO: 81866 - protein, 16 aa, Homo Sapiens
KETIPLTAEKLCIYTD

SEQ ID NO: 81867 - protein, 16 aa, Homo Sapiens
ETIPLTAEKLCIYTDN

SEQ ID NO: 81868 - protein, 16 aa, Homo Sapiens
TIPLTAEKLCIYTDNS

SEQ ID NO: 81869 - protein, 16 aa, Homo Sapiens
IPLTAEKLCIYTDNSI

SEQ ID NO: 81870 - protein, 16 aa, Homo Sapiens
PLTAEKLCIYTDNSIR

SEQ ID NO: 81871 - protein, 16 aa, Homo Sapiens
LTAEKLCIYTDNSIRP

SEQ ID NO: 81872 - protein, 16 aa, Homo Sapiens
TAEKLCIYTDNSIRPE

SEQ ID NO: 81873 - protein, 16 aa, Homo Sapiens
AEKLCIYTDNSIRPEE

SEQ ID NO: 81874 - protein, 16 aa, Homo Sapiens
EKLCIYTDNSIRPEEL

SEQ ID NO: 81875 - protein, 16 aa, Homo Sapiens
KLCIYTDNSIRPEELL

SEQ ID NO: 81876 - protein, 16 aa, Homo Sapiens
LCIYTDNSIRPEELLQ

SEQ ID NO: 81877 - protein, 16 aa, Homo Sapiens
CIYTDNSIRPEELLQM

SEQ ID NO: 81878 - protein, 16 aa, Homo Sapiens
IYTDNSIRPEELLQME

SEQ ID NO: 81879 - protein, 16 aa, Homo Sapiens
YTDNSIRPEELLQMEL

SEQ ID NO: 81880 - protein, 16 aa, Homo Sapiens
TDNSIRPEELLQMELL

SEQ ID NO: 81881 - protein, 16 aa, Homo Sapiens
DNSIRPEELLQMELLL

SEQ ID NO: 81882 - protein, 16 aa, Homo Sapiens
NSIRPEELLQMELLLV

SEQ ID NO: 81883 - protein, 16 aa, Homo Sapiens
SIRPEELLQMELLLVN

SEQ ID NO: 81884 - protein, 16 aa, Homo Sapiens
IRPEELLQMELLLVNK

SEQ ID NO: 81885 - protein, 16 aa, Homo Sapiens
RPEELLQMELLLVNKL

SEQ ID NO: 81886 - protein, 16 aa, Homo Sapiens
PEELLQMELLLVNKLK

SEQ ID NO: 81887 - protein, 16 aa, Homo Sapiens
EELLQMELLLVNKLKW

SEQ ID NO: 81888 - protein, 16 aa, Homo Sapiens
ELLQMELLLVNKLKWN

SEQ ID NO: 81889 - protein, 16 aa, Homo Sapiens
LLQMELLLVNKLKWNL

SEQ ID NO: 81890 - protein, 16 aa, Homo Sapiens
LQMELLLVNKLKWNLA

SEQ ID NO: 81891 - protein, 16 aa, Homo Sapiens
QMELLLVNKLKWNLAA

SEQ ID NO: 81892 - protein, 16 aa, Homo Sapiens
MELLLVNKLKWNLAAM

SEQ ID NO: 81893 - protein, 16 aa, Homo Sapiens
ELLLVNKLKWNLAAMT

SEQ ID NO: 81894 - protein, 16 aa, Homo Sapiens
LLLVNKLKWNLAAMTP

SEQ ID NO: 81895 - protein, 16 aa, Homo Sapiens
LLVNKLKWNLAAMTPH

SEQ ID NO: 81896 - protein, 16 aa, Homo Sapiens
LVNKLKWNLAAMTPHD

SEQ ID NO: 81897 - protein, 16 aa, Homo Sapiens
VNKLKWNLAAMTPHDF

SEQ ID NO: 81898 - protein, 16 aa, Homo Sapiens
NKLKWNLAAMTPHDFI

SEQ ID NO: 81899 - protein, 16 aa, Homo Sapiens
KLKWNLAAMTPHDFIE

SEQ ID NO: 81900 - protein, 16 aa, Homo Sapiens
LKWNLAAMTPHDFIEH

SEQ ID NO: 81901 - protein, 16 aa, Homo Sapiens
KWNLAAMTPHDFIEHF

SEQ ID NO: 81902 - protein, 16 aa, Homo Sapiens
WNLAAMTPHDFIEHFL

SEQ ID NO: 81903 - protein, 16 aa, Homo Sapiens
NLAAMTPHDFIEHFLS

SEQ ID NO: 81904 - protein, 16 aa, Homo Sapiens
LAAMTPHDFIEHFLSK

SEQ ID NO: 81905 - protein, 16 aa, Homo Sapiens
AAMTPHDFIEHFLSKM

SEQ ID NO: 81906 - protein, 16 aa, Homo Sapiens
AMTPHDFIEHFLSKMP

SEQ ID NO: 81907 - protein, 16 aa, Homo Sapiens
MTPHDFIEHFLSKMPE

SEQ ID NO: 81908 - protein, 16 aa, Homo Sapiens
TPHDFIEHFLSKMPEA

SEQ ID NO: 81909 - protein, 16 aa, Homo Sapiens
PHDFIEHFLSKMPEAE

SEQ ID NO: 81910 - protein, 16 aa, Homo Sapiens
HDFIEHFLSKMPEAEE

SEQ ID NO: 81911 - protein, 16 aa, Homo Sapiens
DFIEHFLSKMPEAEEN

SEQ ID NO: 81912 - protein, 16 aa, Homo Sapiens
FIEHFLSKMPEAEENK

SEQ ID NO: 81913 - protein, 16 aa, Homo Sapiens
IEHFLSKMPEAEENKQ

SEQ ID NO: 81914 - protein, 16 aa, Homo Sapiens
EHFLSKMPEAEENKQI

SEQ ID NO: 81915 - protein, 16 aa, Homo Sapiens
HFLSKMPEAEENKQII

SEQ ID NO: 81916 - protein, 16 aa, Homo Sapiens
FLSKMPEAEENKQIIR

SEQ ID NO: 81917 - protein, 16 aa, Homo Sapiens
LSKMPEAEENKQIIRK

SEQ ID NO: 81918 - protein, 16 aa, Homo Sapiens
SKMPEAEENKQIIRKH

SEQ ID NO: 81919 - protein, 16 aa, Homo Sapiens
KMPEAEENKQIIRKHA

SEQ ID NO: 81920 - protein, 16 aa, Homo Sapiens
MPEAEENKQIIRKHAQ

SEQ ID NO: 81921 - protein, 16 aa, Homo Sapiens
PEAEENKQIIRKHAQT

SEQ ID NO: 81922 - protein, 16 aa, Homo Sapiens
EAEENKQIIRKHAQTF

SEQ ID NO: 81923 - protein, 16 aa, Homo Sapiens
AEENKQIIRKHAQTFV

SEQ ID NO: 81924 - protein, 16 aa, Homo Sapiens
EENKQIIRKHAQTFVA

SEQ ID NO: 81925 - protein, 16 aa, Homo Sapiens
ENKQIIRKHAQTFVAL

SEQ ID NO: 81926 - protein, 16 aa, Homo Sapiens
NKQIIRKHAQTFVALC

SEQ ID NO: 81927 - protein, 16 aa, Homo Sapiens
KQIIRKHAQTFVALCA

SEQ ID NO: 81928 - protein, 16 aa, Homo Sapiens
QIIRKHAQTFVALCAT

SEQ ID NO: 81929 - protein, 16 aa, Homo Sapiens
IIRKHAQTFVALCATD

SEQ ID NO: 81930 - protein, 16 aa, Homo Sapiens
IRKHAQTFVALCATDV

SEQ ID NO: 81931 - protein, 16 aa, Homo Sapiens
RKHAQTFVALCATDVK

SEQ ID NO: 81932 - protein, 16 aa, Homo Sapiens
KHAQTFVALCATDVKF

SEQ ID NO: 81933 - protein, 16 aa, Homo Sapiens
HAQTFVALCATDVKFI

SEQ ID NO: 81934 - protein, 16 aa, Homo Sapiens
AQTFVALCATDVKFIS

SEQ ID NO: 81935 - protein, 16 aa, Homo Sapiens
QTFVALCATDVKFISN

SEQ ID NO: 81936 - protein, 16 aa, Homo Sapiens
TFVALCATDVKFISNP

SEQ ID NO: 81937 - protein, 16 aa, Homo Sapiens
FVALCATDVKFISNPP

SEQ ID NO: 81938 - protein, 16 aa, Homo Sapiens
VALCATDVKFISNPPS

SEQ ID NO: 81939 - protein, 16 aa, Homo Sapiens
ALCATDVKFISNPPSM

SEQ ID NO: 81940 - protein, 16 aa, Homo Sapiens
LCATDVKFISNPPSMV

SEQ ID NO: 81941 - protein, 16 aa, Homo Sapiens
CATDVKFISNPPSMVA

SEQ ID NO: 81942 - protein, 16 aa, Homo Sapiens
ATDVKFISNPPSMVAA

SEQ ID NO: 81943 - protein, 16 aa, Homo Sapiens
TDVKFISNPPSMVAAG

SEQ ID NO: 81944 - protein, 16 aa, Homo Sapiens
DVKFISNPPSMVAAGS

SEQ ID NO: 81945 - protein, 16 aa, Homo Sapiens
VKFISNPPSMVAAGSV

SEQ ID NO: 81946 - protein, 16 aa, Homo Sapiens
KFISNPPSMVAAGSVV

SEQ ID NO: 81947 - protein, 16 aa, Homo Sapiens
FISNPPSMVAAGSVVA

SEQ ID NO: 81948 - protein, 16 aa, Homo Sapiens
ISNPPSMVAAGSVVAA

SEQ ID NO: 81949 - protein, 16 aa, Homo Sapiens
SNPPSMVAAGSVVAAV

SEQ ID NO: 81950 - protein, 16 aa, Homo Sapiens
NPPSMVAAGSVVAAVQ

SEQ ID NO: 81951 - protein, 16 aa, Homo Sapiens
PPSMVAAGSVVAAVQG

SEQ ID NO: 81952 - protein, 16 aa, Homo Sapiens
PSMVAAGSVVAAVQGL

SEQ ID NO: 81953 - protein, 16 aa, Homo Sapiens
SMVAAGSVVAAVQGLN

SEQ ID NO: 81954 - protein, 16 aa, Homo Sapiens
MVAAGSVVAAVQGLNL

SEQ ID NO: 81955 - protein, 16 aa, Homo Sapiens
VAAGSVVAAVQGLNLR

SEQ ID NO: 81956 - protein, 16 aa, Homo Sapiens
AAGSVVAAVQGLNLRS

SEQ ID NO: 81957 - protein, 16 aa, Homo Sapiens
AGSVVAAVQGLNLRSP

SEQ ID NO: 81958 - protein, 16 aa, Homo Sapiens
GSVVAAVQGLNLRSPN

SEQ ID NO: 81959 - protein, 16 aa, Homo Sapiens
SVVAAVQGLNLRSPNN

SEQ ID NO: 81960 - protein, 16 aa, Homo Sapiens
VVAAVQGLNLRSPNNF

SEQ ID NO: 81961 - protein, 16 aa, Homo Sapiens
VAAVQGLNLRSPNNFL

SEQ ID NO: 81962 - protein, 16 aa, Homo Sapiens
AAVQGLNLRSPNNFLS

SEQ ID NO: 81963 - protein, 16 aa, Homo Sapiens
AVQGLNLRSPNNFLSY

SEQ ID NO: 81964 - protein, 16 aa, Homo Sapiens
VQGLNLRSPNNFLSYY

SEQ ID NO: 81965 - protein, 16 aa, Homo Sapiens
QGLNLRSPNNFLSYYR

SEQ ID NO: 81966 - protein, 16 aa, Homo Sapiens
GLNLRSPNNFLSYYRL

SEQ ID NO: 81967 - protein, 16 aa, Homo Sapiens
LNLRSPNNFLSYYRLT

SEQ ID NO: 81968 - protein, 16 aa, Homo Sapiens
NLRSPNNFLSYYRLTR

SEQ ID NO: 81969 - protein, 16 aa, Homo Sapiens
LRSPNNFLSYYRLTRF

SEQ ID NO: 81970 - protein, 16 aa, Homo Sapiens
RSPNNFLSYYRLTRFL

SEQ ID NO: 81971 - protein, 16 aa, Homo Sapiens
SPNNFLSYYRLTRFLS

SEQ ID NO: 81972 - protein, 16 aa, Homo Sapiens
PNNFLSYYRLTRFLSR

SEQ ID NO: 81973 - protein, 16 aa, Homo Sapiens
NNFLSYYRLTRFLSRV

SEQ ID NO: 81974 - protein, 16 aa, Homo Sapiens
NFLSYYRLTRFLSRVI

SEQ ID NO: 81975 - protein, 16 aa, Homo Sapiens
FLSYYRLTRFLSRVIK

SEQ ID NO: 81976 - protein, 16 aa, Homo Sapiens
LSYYRLTRFLSRVIKC

SEQ ID NO: 81977 - protein, 16 aa, Homo Sapiens
SYYRLTRFLSRVIKCD

SEQ ID NO: 81978 - protein, 16 aa, Homo Sapiens
YYRLTRFLSRVIKCDP

SEQ ID NO: 81979 - protein, 16 aa, Homo Sapiens
YRLTRFLSRVIKCDPD

SEQ ID NO: 81980 - protein, 16 aa, Homo Sapiens
RLTRFLSRVIKCDPDC

SEQ ID NO: 81981 - protein, 16 aa, Homo Sapiens
LTRFLSRVIKCDPDCL

SEQ ID NO: 81982 - protein, 16 aa, Homo Sapiens
TRFLSRVIKCDPDCLR

SEQ ID NO: 81983 - protein, 16 aa, Homo Sapiens
RFLSRVIKCDPDCLRA

SEQ ID NO: 81984 - protein, 16 aa, Homo Sapiens
FLSRVIKCDPDCLRAC

SEQ ID NO: 81985 - protein, 16 aa, Homo Sapiens
LSRVIKCDPDCLRACQ

SEQ ID NO: 81986 - protein, 16 aa, Homo Sapiens
SRVIKCDPDCLRACQE

SEQ ID NO: 81987 - protein, 16 aa, Homo Sapiens
RVIKCDPDCLRACQEQ

SEQ ID NO: 81988 - protein, 16 aa, Homo Sapiens
VIKCDPDCLRACQEQI

SEQ ID NO: 81989 - protein, 16 aa, Homo Sapiens
IKCDPDCLRACQEQIE

SEQ ID NO: 81990 - protein, 16 aa, Homo Sapiens
KCDPDCLRACQEQIEA

SEQ ID NO: 81991 - protein, 16 aa, Homo Sapiens
CDPDCLRACQEQIEAL

SEQ ID NO: 81992 - protein, 16 aa, Homo Sapiens
DPDCLRACQEQIEALL

SEQ ID NO: 81993 - protein, 16 aa, Homo Sapiens
PDCLRACQEQIEALLE

SEQ ID NO: 81994 - protein, 16 aa, Homo Sapiens
DCLRACQEQIEALLES

SEQ ID NO: 81995 - protein, 16 aa, Homo Sapiens
CLRACQEQIEALLESS

SEQ ID NO: 81996 - protein, 16 aa, Homo Sapiens
LRACQEQIEALLESSL

SEQ ID NO: 81997 - protein, 16 aa, Homo Sapiens
RACQEQIEALLESSLR

SEQ ID NO: 81998 - protein, 16 aa, Homo Sapiens
ACQEQIEALLESSLRQ

SEQ ID NO: 81999 - protein, 16 aa, Homo Sapiens
CQEQIEALLESSLRQA

SEQ ID NO: 82000 - protein, 16 aa, Homo Sapiens
QEQIEALLESSLRQAQ

SEQ ID NO: 82001 - protein, 16 aa, Homo Sapiens
EQIEALLESSLRQAQQ

SEQ ID NO: 82002 - protein, 16 aa, Homo Sapiens
QIEALLESSLRQAQQN

SEQ ID NO: 82003 - protein, 16 aa, Homo Sapiens
IEALLESSLRQAQQNM

SEQ ID NO: 82004 - protein, 16 aa, Homo Sapiens
EALLESSLRQAQQNMD

SEQ ID NO: 82005 - protein, 16 aa, Homo Sapiens
ALLESSLRQAQQNMDP

SEQ ID NO: 82006 - protein, 16 aa, Homo Sapiens
LLESSLRQAQQNMDPK

SEQ ID NO: 82007 - protein, 16 aa, Homo Sapiens
LESSLRQAQQNMDPKA

SEQ ID NO: 82008 - protein, 16 aa, Homo Sapiens
ESSLRQAQQNMDPKAA

SEQ ID NO: 82009 - protein, 16 aa, Homo Sapiens
SSLRQAQQNMDPKAAE

SEQ ID NO: 82010 - protein, 16 aa, Homo Sapiens
SLRQAQQNMDPKAAEE

SEQ ID NO: 82011 - protein, 16 aa, Homo Sapiens
LRQAQQNMDPKAAEEE

SEQ ID NO: 82012 - protein, 16 aa, Homo Sapiens
RQAQQNMDPKAAEEEE

SEQ ID NO: 82013 - protein, 16 aa, Homo Sapiens
QAQQNMDPKAAEEEEE

SEQ ID NO: 82014 - protein, 16 aa, Homo Sapiens
AQQNMDPKAAEEEEEE

SEQ ID NO: 82015 - protein, 16 aa, Homo Sapiens
QQNMDPKAAEEEEEEE

SEQ ID NO: 82016 - protein, 16 aa, Homo Sapiens
QNMDPKAAEEEEEEEE

SEQ ID NO: 82017 - protein, 16 aa, Homo Sapiens
NMDPKAAEEEEEEEEE

SEQ ID NO: 82018 - protein, 16 aa, Homo Sapiens
MDPKAAEEEEEEEEEV

SEQ ID NO: 82019 - protein, 16 aa, Homo Sapiens
DPKAAEEEEEEEEEVD

SEQ ID NO: 82020 - protein, 16 aa, Homo Sapiens
PKAAEEEEEEEEEVDL

SEQ ID NO: 82021 - protein, 16 aa, Homo Sapiens
KAAEEEEEEEEEVDLA

SEQ ID NO: 82022 - protein, 16 aa, Homo Sapiens
AAEEEEEEEEEVDLAC

SEQ ID NO: 82023 - protein, 16 aa, Homo Sapiens
AEEEEEEEEEVDLACT

SEQ ID NO: 82024 - protein, 16 aa, Homo Sapiens
EEEEEEEEEVDLACTP

SEQ ID NO: 82025 - protein, 16 aa, Homo Sapiens
EEEEEEEEVDLACTPT

SEQ ID NO: 82026 - protein, 16 aa, Homo Sapiens
EEEEEEEVDLACTPTD

SEQ ID NO: 82027 - protein, 16 aa, Homo Sapiens
EEEEEEVDLACTPTDV

SEQ ID NO: 82028 - protein, 16 aa, Homo Sapiens
EEEEEVDLACTPTDVR

SEQ ID NO: 82029 - protein, 16 aa, Homo Sapiens
EEEEVDLACTPTDVRD

SEQ ID NO: 82030 - protein, 16 aa, Homo Sapiens
EEEVDLACTPTDVRDV

SEQ ID NO: 82031 - protein, 16 aa, Homo Sapiens
EEVDLACTPTDVRDVD

SEQ ID NO: 82032 - protein, 16 aa, Homo Sapiens
EVDLACTPTDVRDVDI

SEQ ID NO: 82033 - protein, 1531 aa, Homo Sapiens
MEVSPLQPVNENMQVNKIKKNEDAKKRLSVERIYQKKTQLEHILLRPDTYIGSVELVTQQMWVYDEDVGINYREVTFVPGLYKIFDEILVNAADNKQRDPKMSCIRVTIDPENNLISIWNNGKGIPVVEHKVEKMYVPALIFGQLLTSSNYDDDEKKVTGGRNGYGAKLCNIFSTKFTVETASREYKKMFKQTWMDNMGRAGEMELKPFNGEDYTCITFQPDLSKFKMQSLDKDIVALMVRRAYDIAGSTKDVKVFLNGNKLPVKGFRSYVDMYLKDKLDETGNSLKVIHEQVNHRWEVCLTMSEKGFQQISFVNSIATSKGGRHVDYVADQIVTKLVDVVKKKNKGGVAVKAHQVKNHMWIFVNALIENPTFDSQTKENMTLQPKSFGSTCQLSEKFIKAAIGCGIVESILNWVKFKAQVQLNKKCSAVKHNRIKGIPKLDDANDAGGRNSTECTLILTEGDSAKTLAVSGLGVVGRDKYGVFPLRGKILNVREASHKQIMENAEINNIIKIVGLQYKKNYEDEDSLKTLRYGKIMIMTDQDQDGSHIKGLLINFIHHNWPSLLRHRFLEEFITPIVKVSKNKQEMAFYSLPEFEEWKSSTPNHKKWKVKYYKGLGTSTSKEAKEYFADMKRHRIQFKYSGPEDDAAISLAFSKKQIDDRKEWLTNFMEDRRQRKLLGLPEDYLYGQTTTYLTYNDFINKELILFSNSDNERSIPSMVDGLKPGQRKVLFTCFKRNDKREVKVAQLAGSVAEMSSYHHGEMSLMMTIINLAQNFVGSNNLNLLQPIGQFGTRLHGGKDSASPRYIFTMLSSLARLLFPPKDDHTLKFLYDDNQRVEPEWYIPIIPMVLINGAEGIGTGWSCKIPNFDVREIVNNIRRLMDGEEPLPMLPSYKNFKGTIEELAPNQYVISGEVAILNSTTIEISELPVRTWTQTYKEQVLEPMLNGTEKTPPLITDYREYHTDTTVKFVVKMTEEKLAEAERVGLHKVFKLQTSLTCNSMVLFDHVGCLKKYDTVLDILRDFFELRLKYYGLRKEWLLGMLGAESAKLNNQARFILEKIDGKIIIENKPKKELIKVLIQRGYDSDPVKAWKEAQQKVPDEEENEESDNEKETEKSDSVTDSGPTFNYLLDMPLWYLTKEKKDELCRLRNEKEQELDTLKRKSPSDLWKEDLATFIEELEAVEAKEKQDEQVGLPGKGGKAKGKKTQMAEVLPSPRGQRVIPRITIEMKAEAEKKNKKKIKNENTEGSPQEDGVELEGLKQRLEKKQKREPGTKTKKQTTLAFKPIKKGKKRNPWSDSESDRSSDESNFDVPPRETEPRRAATKTKFTMDLDSDEDFSDFDEKTDDEDFVPSDASPPKTKTSPKLSNKELKPQKSVVSDLEADDVKGSVPLSSSPPATHFPDETEITNPVPKKNVTVKKTAAKSQSSTSTTGAKKRAAPKGTKRDPALNSGVSQKPDPAKTKNRRKRKPSTSDDSDSNFEKIVSKAVTSKKSKGESDDFHMDFDSAVAPRAKSVRAKKPIKYLEESDEDDLF

SEQ ID NO: 82034 - protein, 8 aa, Homo Sapiens
EVSPLQPV

SEQ ID NO: 82035 - protein, 8 aa, Homo Sapiens
PVNENMQV

SEQ ID NO: 82036 - protein, 8 aa, Homo Sapiens
MQVNKIKK

SEQ ID NO: 82037 - protein, 8 aa, Homo Sapiens
KKRLSVER

SEQ ID NO: 82038 - protein, 8 aa, Homo Sapiens
RLSVERIY

SEQ ID NO: 82039 - protein, 8 aa, Homo Sapiens
SVERIYQK

SEQ ID NO: 82040 - protein, 8 aa, Homo Sapiens
IYQKKTQL

SEQ ID NO: 82041 - protein, 8 aa, Homo Sapiens
TQLEHILL

SEQ ID NO: 82042 - protein, 8 aa, Homo Sapiens
QLEHILLR

SEQ ID NO: 82043 - protein, 8 aa, Homo Sapiens
LLRPDTYI

SEQ ID NO: 82044 - protein, 8 aa, Homo Sapiens
TYIGSVEL

SEQ ID NO: 82045 - protein, 8 aa, Homo Sapiens
YIGSVELV

SEQ ID NO: 82046 - protein, 8 aa, Homo Sapiens
VELVTQQM

SEQ ID NO: 82047 - protein, 8 aa, Homo Sapiens
LVTQQMWV

SEQ ID NO: 82048 - protein, 8 aa, Homo Sapiens
VTQQMWVY

SEQ ID NO: 82049 - protein, 8 aa, Homo Sapiens
VYDEDVGI

SEQ ID NO: 82050 - protein, 8 aa, Homo Sapiens
DEDVGINY

SEQ ID NO: 82051 - protein, 8 aa, Homo Sapiens
EDVGINYR

SEQ ID NO: 82052 - protein, 8 aa, Homo Sapiens
NYREVTFV

SEQ ID NO: 82053 - protein, 8 aa, Homo Sapiens
EVTFVPGL

SEQ ID NO: 82054 - protein, 8 aa, Homo Sapiens
VTFVPGLY

SEQ ID NO: 82055 - protein, 8 aa, Homo Sapiens
TFVPGLYK

SEQ ID NO: 82056 - protein, 8 aa, Homo Sapiens
FVPGLYKI

SEQ ID NO: 82057 - protein, 8 aa, Homo Sapiens
VPGLYKIF

SEQ ID NO: 82058 - protein, 8 aa, Homo Sapiens
LYKIFDEI

SEQ ID NO: 82059 - protein, 8 aa, Homo Sapiens
KIFDEILV

SEQ ID NO: 82060 - protein, 8 aa, Homo Sapiens
LVNAADNK

SEQ ID NO: 82061 - protein, 8 aa, Homo Sapiens
NAADNKQR

SEQ ID NO: 82062 - protein, 8 aa, Homo Sapiens
DPKMSCIR

SEQ ID NO: 82063 - protein, 8 aa, Homo Sapiens
KMSCIRVT

SEQ ID NO: 82064 - protein, 8 aa, Homo Sapiens
TIDPENNL

SEQ ID NO: 82065 - protein, 8 aa, Homo Sapiens
ISIWNNGK

SEQ ID NO: 82066 - protein, 8 aa, Homo Sapiens
GIPVVEHK

SEQ ID NO: 82067 - protein, 8 aa, Homo Sapiens
IPVVEHKV

SEQ ID NO: 82068 - protein, 8 aa, Homo Sapiens
VVEHKVEK

SEQ ID NO: 82069 - protein, 8 aa, Homo Sapiens
EKMYVPAL

SEQ ID NO: 82070 - protein, 8 aa, Homo Sapiens
KMYVPALI

SEQ ID NO: 82071 - protein, 8 aa, Homo Sapiens
MYVPALIF

SEQ ID NO: 82072 - protein, 8 aa, Homo Sapiens
ALIFGQLL

SEQ ID NO: 82073 - protein, 8 aa, Homo Sapiens
LIFGQLLT

SEQ ID NO: 82074 - protein, 8 aa, Homo Sapiens
QLLTSSNY

SEQ ID NO: 82075 - protein, 8 aa, Homo Sapiens
NYDDDEKK

SEQ ID NO: 82076 - protein, 8 aa, Homo Sapiens
YDDDEKKV

SEQ ID NO: 82077 - protein, 8 aa, Homo Sapiens
GRNGYGAK

SEQ ID NO: 82078 - protein, 8 aa, Homo Sapiens
KLCNIFST

SEQ ID NO: 82079 - protein, 8 aa, Homo Sapiens
FTVETASR

SEQ ID NO: 82080 - protein, 8 aa, Homo Sapiens
ETASREYK

SEQ ID NO: 82081 - protein, 8 aa, Homo Sapiens
TASREYKK

SEQ ID NO: 82082 - protein, 8 aa, Homo Sapiens
REYKKMFK

SEQ ID NO: 82083 - protein, 8 aa, Homo Sapiens
KKMFKQTW

SEQ ID NO: 82084 - protein, 8 aa, Homo Sapiens
KMFKQTWM

SEQ ID NO: 82085 - protein, 8 aa, Homo Sapiens
KQTWMDNM

SEQ ID NO: 82086 - protein, 8 aa, Homo Sapiens
TWMDNMGR

SEQ ID NO: 82087 - protein, 8 aa, Homo Sapiens
WMDNMGRA

SEQ ID NO: 82088 - protein, 8 aa, Homo Sapiens
GRAGEMEL

SEQ ID NO: 82089 - protein, 8 aa, Homo Sapiens
RAGEMELK

SEQ ID NO: 82090 - protein, 8 aa, Homo Sapiens
GEMELKPF

SEQ ID NO: 82091 - protein, 8 aa, Homo Sapiens
KPFNGEDY

SEQ ID NO: 82092 - protein, 8 aa, Homo Sapiens
DYTCITFQ

SEQ ID NO: 82093 - protein, 8 aa, Homo Sapiens
TFQPDLSK

SEQ ID NO: 82094 - protein, 8 aa, Homo Sapiens
FQPDLSKF

SEQ ID NO: 82095 - protein, 8 aa, Homo Sapiens
SLDKDIVA

SEQ ID NO: 82096 - protein, 8 aa, Homo Sapiens
DIVALMVR

SEQ ID NO: 82097 - protein, 8 aa, Homo Sapiens
IVALMVRR

SEQ ID NO: 82098 - protein, 8 aa, Homo Sapiens
ALMVRRAY

SEQ ID NO: 82099 - protein, 8 aa, Homo Sapiens
MVRRAYDI

SEQ ID NO: 82100 - protein, 8 aa, Homo Sapiens
STKDVKVF

SEQ ID NO: 82101 - protein, 8 aa, Homo Sapiens
KVFLNGNK

SEQ ID NO: 82102 - protein, 8 aa, Homo Sapiens
VFLNGNKL

SEQ ID NO: 82103 - protein, 8 aa, Homo Sapiens
FLNGNKLP

SEQ ID NO: 82104 - protein, 8 aa, Homo Sapiens
KLPVKGFR

SEQ ID NO: 82105 - protein, 8 aa, Homo Sapiens
LPVKGFRS

SEQ ID NO: 82106 - protein, 8 aa, Homo Sapiens
PVKGFRSY

SEQ ID NO: 82107 - protein, 8 aa, Homo Sapiens
FRSYVDMY

SEQ ID NO: 82108 - protein, 8 aa, Homo Sapiens
RSYVDMYL

SEQ ID NO: 82109 - protein, 8 aa, Homo Sapiens
SYVDMYLK

SEQ ID NO: 82110 - protein, 8 aa, Homo Sapiens
DMYLKDKL

SEQ ID NO: 82111 - protein, 8 aa, Homo Sapiens
ETGNSLKV

SEQ ID NO: 82112 - protein, 8 aa, Homo Sapiens
SLKVIHEQ

SEQ ID NO: 82113 - protein, 8 aa, Homo Sapiens
QVNHRWEV

SEQ ID NO: 82114 - protein, 8 aa, Homo Sapiens
TMSEKGFQ

SEQ ID NO: 82115 - protein, 8 aa, Homo Sapiens
SEKGFQQI

SEQ ID NO: 82116 - protein, 8 aa, Homo Sapiens
KGFQQISF

SEQ ID NO: 82117 - protein, 8 aa, Homo Sapiens
GFQQISFV

SEQ ID NO: 82118 - protein, 8 aa, Homo Sapiens
QISFVNSI

SEQ ID NO: 82119 - protein, 8 aa, Homo Sapiens
FVNSIATS

SEQ ID NO: 82120 - protein, 8 aa, Homo Sapiens
IATSKGGR

SEQ ID NO: 82121 - protein, 8 aa, Homo Sapiens
YVADQIVT

SEQ ID NO: 82122 - protein, 8 aa, Homo Sapiens
VADQIVTK

SEQ ID NO: 82123 - protein, 8 aa, Homo Sapiens
IVTKLVDV

SEQ ID NO: 82124 - protein, 8 aa, Homo Sapiens
KLVDVVKK

SEQ ID NO: 82125 - protein, 8 aa, Homo Sapiens
DVVKKKNK

SEQ ID NO: 82126 - protein, 8 aa, Homo Sapiens
VAVKAHQV

SEQ ID NO: 82127 - protein, 8 aa, Homo Sapiens
AVKAHQVK

SEQ ID NO: 82128 - protein, 8 aa, Homo Sapiens
QVKNHMWI

SEQ ID NO: 82129 - protein, 8 aa, Homo Sapiens
HMWIFVNA

SEQ ID NO: 82130 - protein, 8 aa, Homo Sapiens
MWIFVNAL

SEQ ID NO: 82131 - protein, 8 aa, Homo Sapiens
WIFVNALI

SEQ ID NO: 82132 - protein, 8 aa, Homo Sapiens
ALIENPTF

SEQ ID NO: 82133 - protein, 8 aa, Homo Sapiens
PTFDSQTK

SEQ ID NO: 82134 - protein, 8 aa, Homo Sapiens
QTKENMTL

SEQ ID NO: 82135 - protein, 8 aa, Homo Sapiens
LQPKSFGS

SEQ ID NO: 82136 - protein, 8 aa, Homo Sapiens
STCQLSEK

SEQ ID NO: 82137 - protein, 8 aa, Homo Sapiens
QLSEKFIK

SEQ ID NO: 82138 - protein, 8 aa, Homo Sapiens
AAIGCGIV

SEQ ID NO: 82139 - protein, 8 aa, Homo Sapiens
IVESILNW

SEQ ID NO: 82140 - protein, 8 aa, Homo Sapiens
ESILNWVK

SEQ ID NO: 82141 - protein, 8 aa, Homo Sapiens
SILNWVKF

SEQ ID NO: 82142 - protein, 8 aa, Homo Sapiens
ILNWVKFK

SEQ ID NO: 82143 - protein, 8 aa, Homo Sapiens
WVKFKAQV

SEQ ID NO: 82144 - protein, 8 aa, Homo Sapiens
KFKAQVQL

SEQ ID NO: 82145 - protein, 8 aa, Homo Sapiens
KAQVQLNK

SEQ ID NO: 82146 - protein, 8 aa, Homo Sapiens
AQVQLNKK

SEQ ID NO: 82147 - protein, 8 aa, Homo Sapiens
QLNKKCSA

SEQ ID NO: 82148 - protein, 8 aa, Homo Sapiens
CSAVKHNR

SEQ ID NO: 82149 - protein, 8 aa, Homo Sapiens
AVKHNRIK

SEQ ID NO: 82150 - protein, 8 aa, Homo Sapiens
NRIKGIPK

SEQ ID NO: 82151 - protein, 8 aa, Homo Sapiens
RIKGIPKL

SEQ ID NO: 82152 - protein, 8 aa, Homo Sapiens
KLDDANDA

SEQ ID NO: 82153 - protein, 8 aa, Homo Sapiens
DANDAGGR

SEQ ID NO: 82154 - protein, 8 aa, Homo Sapiens
ILTEGDSA

SEQ ID NO: 82155 - protein, 8 aa, Homo Sapiens
LTEGDSAK

SEQ ID NO: 82156 - protein, 8 aa, Homo Sapiens
DSAKTLAV

SEQ ID NO: 82157 - protein, 8 aa, Homo Sapiens
KTLAVSGL

SEQ ID NO: 82158 - protein, 8 aa, Homo Sapiens
LAVSGLGV

SEQ ID NO: 82159 - protein, 8 aa, Homo Sapiens
AVSGLGVV

SEQ ID NO: 82160 - protein, 8 aa, Homo Sapiens
GVVGRDKY

SEQ ID NO: 82161 - protein, 8 aa, Homo Sapiens
DKYGVFPL

SEQ ID NO: 82162 - protein, 8 aa, Homo Sapiens
KYGVFPLR

SEQ ID NO: 82163 - protein, 8 aa, Homo Sapiens
GVFPLRGK

SEQ ID NO: 82164 - protein, 8 aa, Homo Sapiens
FPLRGKIL

SEQ ID NO: 82165 - protein, 8 aa, Homo Sapiens
RGKILNVR

SEQ ID NO: 82166 - protein, 8 aa, Homo Sapiens
KILNVREA

SEQ ID NO: 82167 - protein, 8 aa, Homo Sapiens
NVREASHK

SEQ ID NO: 82168 - protein, 8 aa, Homo Sapiens
REASHKQI

SEQ ID NO: 82169 - protein, 8 aa, Homo Sapiens
EASHKQIM

SEQ ID NO: 82170 - protein, 8 aa, Homo Sapiens
KQIMENAE

SEQ ID NO: 82171 - protein, 8 aa, Homo Sapiens
QIMENAEI

SEQ ID NO: 82172 - protein, 8 aa, Homo Sapiens
ENAEINNI

SEQ ID NO: 82173 - protein, 8 aa, Homo Sapiens
AEINNIIK

SEQ ID NO: 82174 - protein, 8 aa, Homo Sapiens
EINNIIKI

SEQ ID NO: 82175 - protein, 8 aa, Homo Sapiens
NIIKIVGL

SEQ ID NO: 82176 - protein, 8 aa, Homo Sapiens
KIVGLQYK

SEQ ID NO: 82177 - protein, 8 aa, Homo Sapiens
IVGLQYKK

SEQ ID NO: 82178 - protein, 8 aa, Homo Sapiens
NYEDEDSL

SEQ ID NO: 82179 - protein, 8 aa, Homo Sapiens
EDSLKTLR

SEQ ID NO: 82180 - protein, 8 aa, Homo Sapiens
RYGKIMIM

SEQ ID NO: 82181 - protein, 8 aa, Homo Sapiens
INFIHHNW

SEQ ID NO: 82182 - protein, 8 aa, Homo Sapiens
IHHNWPSL

SEQ ID NO: 82183 - protein, 8 aa, Homo Sapiens
HHNWPSLL

SEQ ID NO: 82184 - protein, 8 aa, Homo Sapiens
HNWPSLLR

SEQ ID NO: 82185 - protein, 8 aa, Homo Sapiens
SLLRHRFL

SEQ ID NO: 82186 - protein, 8 aa, Homo Sapiens
RHRFLEEF

SEQ ID NO: 82187 - protein, 8 aa, Homo Sapiens
FLEEFITP

SEQ ID NO: 82188 - protein, 8 aa, Homo Sapiens
LEEFITPI

SEQ ID NO: 82189 - protein, 8 aa, Homo Sapiens
EEFITPIV

SEQ ID NO: 82190 - protein, 8 aa, Homo Sapiens
EFITPIVK

SEQ ID NO: 82191 - protein, 8 aa, Homo Sapiens
FITPIVKV

SEQ ID NO: 82192 - protein, 8 aa, Homo Sapiens
TPIVKVSK

SEQ ID NO: 82193 - protein, 8 aa, Homo Sapiens
IVKVSKNK

SEQ ID NO: 82194 - protein, 8 aa, Homo Sapiens
QEMAFYSL

SEQ ID NO: 82195 - protein, 8 aa, Homo Sapiens
AFYSLPEF

SEQ ID NO: 82196 - protein, 8 aa, Homo Sapiens
SLPEFEEW

SEQ ID NO: 82197 - protein, 8 aa, Homo Sapiens
KSSTPNHK

SEQ ID NO: 82198 - protein, 8 aa, Homo Sapiens
SSTPNHKK

SEQ ID NO: 82199 - protein, 8 aa, Homo Sapiens
KWKVKYYK

SEQ ID NO: 82200 - protein, 8 aa, Homo Sapiens
GLGTSTSK

SEQ ID NO: 82201 - protein, 8 aa, Homo Sapiens
TSTSKEAK

SEQ ID NO: 82202 - protein, 8 aa, Homo Sapiens
TSKEAKEY

SEQ ID NO: 82203 - protein, 8 aa, Homo Sapiens
EYFADMKR

SEQ ID NO: 82204 - protein, 8 aa, Homo Sapiens
FADMKRHR

SEQ ID NO: 82205 - protein, 8 aa, Homo Sapiens
MKRHRIQF

SEQ ID NO: 82206 - protein, 8 aa, Homo Sapiens
KRHRIQFK

SEQ ID NO: 82207 - protein, 8 aa, Homo Sapiens
DAAISLAF

SEQ ID NO: 82208 - protein, 8 aa, Homo Sapiens
AISLAFSK

SEQ ID NO: 82209 - protein, 8 aa, Homo Sapiens
ISLAFSKK

SEQ ID NO: 82210 - protein, 8 aa, Homo Sapiens
LTNFMEDR

SEQ ID NO: 82211 - protein, 8 aa, Homo Sapiens
TNFMEDRR

SEQ ID NO: 82212 - protein, 8 aa, Homo Sapiens
FMEDRRQR

SEQ ID NO: 82213 - protein, 8 aa, Homo Sapiens
RQRKLLGL

SEQ ID NO: 82214 - protein, 8 aa, Homo Sapiens
GLPEDYLY

SEQ ID NO: 82215 - protein, 8 aa, Homo Sapiens
YLYGQTTT

SEQ ID NO: 82216 - protein, 8 aa, Homo Sapiens
LYGQTTTY

SEQ ID NO: 82217 - protein, 8 aa, Homo Sapiens
QTTTYLTY

SEQ ID NO: 82218 - protein, 8 aa, Homo Sapiens
TYLTYNDF

SEQ ID NO: 82219 - protein, 8 aa, Homo Sapiens
YLTYNDFI

SEQ ID NO: 82220 - protein, 8 aa, Homo Sapiens
TYNDFINK

SEQ ID NO: 82221 - protein, 8 aa, Homo Sapiens
FINKELIL

SEQ ID NO: 82222 - protein, 8 aa, Homo Sapiens
FSNSDNER

SEQ ID NO: 82223 - protein, 8 aa, Homo Sapiens
NERSIPSM

SEQ ID NO: 82224 - protein, 8 aa, Homo Sapiens
ERSIPSMV

SEQ ID NO: 82225 - protein, 8 aa, Homo Sapiens
IPSMVDGL

SEQ ID NO: 82226 - protein, 8 aa, Homo Sapiens
PSMVDGLK

SEQ ID NO: 82227 - protein, 8 aa, Homo Sapiens
SMVDGLKP

SEQ ID NO: 82228 - protein, 8 aa, Homo Sapiens
GLKPGQRK

SEQ ID NO: 82229 - protein, 8 aa, Homo Sapiens
KPGQRKVL

SEQ ID NO: 82230 - protein, 8 aa, Homo Sapiens
KVLFTCFK

SEQ ID NO: 82231 - protein, 8 aa, Homo Sapiens
VLFTCFKR

SEQ ID NO: 82232 - protein, 8 aa, Homo Sapiens
CFKRNDKR

SEQ ID NO: 82233 - protein, 8 aa, Homo Sapiens
REVKVAQL

SEQ ID NO: 82234 - protein, 8 aa, Homo Sapiens
AQLAGSVA

SEQ ID NO: 82235 - protein, 8 aa, Homo Sapiens
LAGSVAEM

SEQ ID NO: 82236 - protein, 8 aa, Homo Sapiens
SVAEMSSY

SEQ ID NO: 82237 - protein, 8 aa, Homo Sapiens
AEMSSYHH

SEQ ID NO: 82238 - protein, 8 aa, Homo Sapiens
YHHGEMSL

SEQ ID NO: 82239 - protein, 8 aa, Homo Sapiens
EMSLMMTI

SEQ ID NO: 82240 - protein, 8 aa, Homo Sapiens
LMMTIINL

SEQ ID NO: 82241 - protein, 8 aa, Homo Sapiens
MMTIINLA

SEQ ID NO: 82242 - protein, 8 aa, Homo Sapiens
MTIINLAQ

SEQ ID NO: 82243 - protein, 8 aa, Homo Sapiens
NFVGSNNL

SEQ ID NO: 82244 - protein, 8 aa, Homo Sapiens
NLNLLQPI

SEQ ID NO: 82245 - protein, 8 aa, Homo Sapiens
NLLQPIGQ

SEQ ID NO: 82246 - protein, 8 aa, Homo Sapiens
LLQPIGQF

SEQ ID NO: 82247 - protein, 8 aa, Homo Sapiens
GQFGTRLH

SEQ ID NO: 82248 - protein, 8 aa, Homo Sapiens
GTRLHGGK

SEQ ID NO: 82249 - protein, 8 aa, Homo Sapiens
DSASPRYI

SEQ ID NO: 82250 - protein, 8 aa, Homo Sapiens
SASPRYIF

SEQ ID NO: 82251 - protein, 8 aa, Homo Sapiens
SPRYIFTM

SEQ ID NO: 82252 - protein, 8 aa, Homo Sapiens
YIFTMLSS

SEQ ID NO: 82253 - protein, 8 aa, Homo Sapiens
FTMLSSLA

SEQ ID NO: 82254 - protein, 8 aa, Homo Sapiens
TMLSSLAR

SEQ ID NO: 82255 - protein, 8 aa, Homo Sapiens
MLSSLARL

SEQ ID NO: 82256 - protein, 8 aa, Homo Sapiens
SSLARLLF

SEQ ID NO: 82257 - protein, 8 aa, Homo Sapiens
SLARLLFP

SEQ ID NO: 82258 - protein, 8 aa, Homo Sapiens
ARLLFPPK

SEQ ID NO: 82259 - protein, 8 aa, Homo Sapiens
FPPKDDHT

SEQ ID NO: 82260 - protein, 8 aa, Homo Sapiens
FLYDDNQR

SEQ ID NO: 82261 - protein, 8 aa, Homo Sapiens
LYDDNQRV

SEQ ID NO: 82262 - protein, 8 aa, Homo Sapiens
RVEPEWYI

SEQ ID NO: 82263 - protein, 8 aa, Homo Sapiens
EPEWYIPI

SEQ ID NO: 82264 - protein, 8 aa, Homo Sapiens
WYIPIIPM

SEQ ID NO: 82265 - protein, 8 aa, Homo Sapiens
YIPIIPMV

SEQ ID NO: 82266 - protein, 8 aa, Homo Sapiens
IPIIPMVL

SEQ ID NO: 82267 - protein, 8 aa, Homo Sapiens
PIIPMVLI

SEQ ID NO: 82268 - protein, 8 aa, Homo Sapiens
IPMVLING

SEQ ID NO: 82269 - protein, 8 aa, Homo Sapiens
LINGAEGI

SEQ ID NO: 82270 - protein, 8 aa, Homo Sapiens
AEGIGTGW

SEQ ID NO: 82271 - protein, 8 aa, Homo Sapiens
KIPNFDVR

SEQ ID NO: 82272 - protein, 8 aa, Homo Sapiens
EIVNNIRR

SEQ ID NO: 82273 - protein, 8 aa, Homo Sapiens
RLMDGEEP

SEQ ID NO: 82274 - protein, 8 aa, Homo Sapiens
LMDGEEPL

SEQ ID NO: 82275 - protein, 8 aa, Homo Sapiens
GEEPLPML

SEQ ID NO: 82276 - protein, 8 aa, Homo Sapiens
EPLPMLPS

SEQ ID NO: 82277 - protein, 8 aa, Homo Sapiens
LPMLPSYK

SEQ ID NO: 82278 - protein, 8 aa, Homo Sapiens
LPSYKNFK

SEQ ID NO: 82279 - protein, 8 aa, Homo Sapiens
FKGTIEEL

SEQ ID NO: 82280 - protein, 8 aa, Homo Sapiens
EELAPNQY

SEQ ID NO: 82281 - protein, 8 aa, Homo Sapiens
ELAPNQYV

SEQ ID NO: 82282 - protein, 8 aa, Homo Sapiens
YVISGEVA

SEQ ID NO: 82283 - protein, 8 aa, Homo Sapiens
VISGEVAI

SEQ ID NO: 82284 - protein, 8 aa, Homo Sapiens
EVAILNST

SEQ ID NO: 82285 - protein, 8 aa, Homo Sapiens
AILNSTTI

SEQ ID NO: 82286 - protein, 8 aa, Homo Sapiens
TTIEISEL

SEQ ID NO: 82287 - protein, 8 aa, Homo Sapiens
IEISELPV

SEQ ID NO: 82288 - protein, 8 aa, Homo Sapiens
EISELPVR

SEQ ID NO: 82289 - protein, 8 aa, Homo Sapiens
SELPVRTW

SEQ ID NO: 82290 - protein, 8 aa, Homo Sapiens
RTWTQTYK

SEQ ID NO: 82291 - protein, 8 aa, Homo Sapiens
TQTYKEQV

SEQ ID NO: 82292 - protein, 8 aa, Homo Sapiens
QTYKEQVL

SEQ ID NO: 82293 - protein, 8 aa, Homo Sapiens
MLNGTEKT

SEQ ID NO: 82294 - protein, 8 aa, Homo Sapiens
TPPLITDY

SEQ ID NO: 82295 - protein, 8 aa, Homo Sapiens
LITDYREY

SEQ ID NO: 82296 - protein, 8 aa, Homo Sapiens
EYHTDTTV

SEQ ID NO: 82297 - protein, 8 aa, Homo Sapiens
HTDTTVKF

SEQ ID NO: 82298 - protein, 8 aa, Homo Sapiens
DTTVKFVV

SEQ ID NO: 82299 - protein, 8 aa, Homo Sapiens
TTVKFVVK

SEQ ID NO: 82300 - protein, 8 aa, Homo Sapiens
VVKMTEEK

SEQ ID NO: 82301 - protein, 8 aa, Homo Sapiens
KMTEEKLA

SEQ ID NO: 82302 - protein, 8 aa, Homo Sapiens
KLAEAERV

SEQ ID NO: 82303 - protein, 8 aa, Homo Sapiens
AEAERVGL

SEQ ID NO: 82304 - protein, 8 aa, Homo Sapiens
AERVGLHK

SEQ ID NO: 82305 - protein, 8 aa, Homo Sapiens
ERVGLHKV

SEQ ID NO: 82306 - protein, 8 aa, Homo Sapiens
GLHKVFKL

SEQ ID NO: 82307 - protein, 8 aa, Homo Sapiens
KLQTSLTC

SEQ ID NO: 82308 - protein, 8 aa, Homo Sapiens
SLTCNSMV

SEQ ID NO: 82309 - protein, 8 aa, Homo Sapiens
SMVLFDHV

SEQ ID NO: 82310 - protein, 8 aa, Homo Sapiens
VLFDHVGC

SEQ ID NO: 82311 - protein, 8 aa, Homo Sapiens
HVGCLKKY

SEQ ID NO: 82312 - protein, 8 aa, Homo Sapiens
CLKKYDTV

SEQ ID NO: 82313 - protein, 8 aa, Homo Sapiens
KYDTVLDI

SEQ ID NO: 82314 - protein, 8 aa, Homo Sapiens
DTVLDILR

SEQ ID NO: 82315 - protein, 8 aa, Homo Sapiens
ILRDFFEL

SEQ ID NO: 82316 - protein, 8 aa, Homo Sapiens
DFFELRLK

SEQ ID NO: 82317 - protein, 8 aa, Homo Sapiens
FFELRLKY

SEQ ID NO: 82318 - protein, 8 aa, Homo Sapiens
FELRLKYY

SEQ ID NO: 82319 - protein, 8 aa, Homo Sapiens
LRLKYYGL

SEQ ID NO: 82320 - protein, 8 aa, Homo Sapiens
RLKYYGLR

SEQ ID NO: 82321 - protein, 8 aa, Homo Sapiens
YYGLRKEW

SEQ ID NO: 82322 - protein, 8 aa, Homo Sapiens
GLRKEWLL

SEQ ID NO: 82323 - protein, 8 aa, Homo Sapiens
KEWLLGML

SEQ ID NO: 82324 - protein, 8 aa, Homo Sapiens
WLLGMLGA

SEQ ID NO: 82325 - protein, 8 aa, Homo Sapiens
GMLGAESA

SEQ ID NO: 82326 - protein, 8 aa, Homo Sapiens
MLGAESAK

SEQ ID NO: 82327 - protein, 8 aa, Homo Sapiens
QARFILEK

SEQ ID NO: 82328 - protein, 8 aa, Homo Sapiens
KIDGKIII

SEQ ID NO: 82329 - protein, 8 aa, Homo Sapiens
IIIENKPK

SEQ ID NO: 82330 - protein, 8 aa, Homo Sapiens
LIKVLIQR

SEQ ID NO: 82331 - protein, 8 aa, Homo Sapiens
RGYDSDPV

SEQ ID NO: 82332 - protein, 8 aa, Homo Sapiens
GYDSDPVK

SEQ ID NO: 82333 - protein, 8 aa, Homo Sapiens
AWKEAQQK

SEQ ID NO: 82334 - protein, 8 aa, Homo Sapiens
ETEKSDSV

SEQ ID NO: 82335 - protein, 8 aa, Homo Sapiens
VTDSGPTF

SEQ ID NO: 82336 - protein, 8 aa, Homo Sapiens
SGPTFNYL

SEQ ID NO: 82337 - protein, 8 aa, Homo Sapiens
GPTFNYLL

SEQ ID NO: 82338 - protein, 8 aa, Homo Sapiens
NYLLDMPL

SEQ ID NO: 82339 - protein, 8 aa, Homo Sapiens
YLLDMPLW

SEQ ID NO: 82340 - protein, 8 aa, Homo Sapiens
LLDMPLWY

SEQ ID NO: 82341 - protein, 8 aa, Homo Sapiens
LDMPLWYL

SEQ ID NO: 82342 - protein, 8 aa, Homo Sapiens
MPLWYLTK

SEQ ID NO: 82343 - protein, 8 aa, Homo Sapiens
LWYLTKEK

SEQ ID NO: 82344 - protein, 8 aa, Homo Sapiens
WYLTKEKK

SEQ ID NO: 82345 - protein, 8 aa, Homo Sapiens
LCRLRNEK

SEQ ID NO: 82346 - protein, 8 aa, Homo Sapiens
KEQELDTL

SEQ ID NO: 82347 - protein, 8 aa, Homo Sapiens
RKSPSDLW

SEQ ID NO: 82348 - protein, 8 aa, Homo Sapiens
KSPSDLWK

SEQ ID NO: 82349 - protein, 8 aa, Homo Sapiens
DLWKEDLA

SEQ ID NO: 82350 - protein, 8 aa, Homo Sapiens
WKEDLATF

SEQ ID NO: 82351 - protein, 8 aa, Homo Sapiens
KEDLATFI

SEQ ID NO: 82352 - protein, 8 aa, Homo Sapiens
LATFIEEL

SEQ ID NO: 82353 - protein, 8 aa, Homo Sapiens
FIEELEAV

SEQ ID NO: 82354 - protein, 8 aa, Homo Sapiens
EELEAVEA

SEQ ID NO: 82355 - protein, 8 aa, Homo Sapiens
ELEAVEAK

SEQ ID NO: 82356 - protein, 8 aa, Homo Sapiens
EAVEAKEK

SEQ ID NO: 82357 - protein, 8 aa, Homo Sapiens
KQDEQVGL

SEQ ID NO: 82358 - protein, 8 aa, Homo Sapiens
LPGKGGKA

SEQ ID NO: 82359 - protein, 8 aa, Homo Sapiens
KGGKAKGK

SEQ ID NO: 82360 - protein, 8 aa, Homo Sapiens
GGKAKGKK

SEQ ID NO: 82361 - protein, 8 aa, Homo Sapiens
QMAEVLPS

SEQ ID NO: 82362 - protein, 8 aa, Homo Sapiens
SPRGQRVI

SEQ ID NO: 82363 - protein, 8 aa, Homo Sapiens
RGQRVIPR

SEQ ID NO: 82364 - protein, 8 aa, Homo Sapiens
RVIPRITI

SEQ ID NO: 82365 - protein, 8 aa, Homo Sapiens
IPRITIEM

SEQ ID NO: 82366 - protein, 8 aa, Homo Sapiens
EMKAEAEK

SEQ ID NO: 82367 - protein, 8 aa, Homo Sapiens
KKNKKKIK

SEQ ID NO: 82368 - protein, 8 aa, Homo Sapiens
GVELEGLK

SEQ ID NO: 82369 - protein, 8 aa, Homo Sapiens
ELEGLKQR

SEQ ID NO: 82370 - protein, 8 aa, Homo Sapiens
GLKQRLEK

SEQ ID NO: 82371 - protein, 8 aa, Homo Sapiens
QRLEKKQK

SEQ ID NO: 82372 - protein, 8 aa, Homo Sapiens
RLEKKQKR

SEQ ID NO: 82373 - protein, 8 aa, Homo Sapiens
KQTTLAFK

SEQ ID NO: 82374 - protein, 8 aa, Homo Sapiens
TTLAFKPI

SEQ ID NO: 82375 - protein, 8 aa, Homo Sapiens
TLAFKPIK

SEQ ID NO: 82376 - protein, 8 aa, Homo Sapiens
LAFKPIKK

SEQ ID NO: 82377 - protein, 8 aa, Homo Sapiens
NPWSDSES

SEQ ID NO: 82378 - protein, 8 aa, Homo Sapiens
RSSDESNF

SEQ ID NO: 82379 - protein, 8 aa, Homo Sapiens
SNFDVPPR

SEQ ID NO: 82380 - protein, 8 aa, Homo Sapiens
RRAATKTK

SEQ ID NO: 82381 - protein, 8 aa, Homo Sapiens
RAATKTKF

SEQ ID NO: 82382 - protein, 8 aa, Homo Sapiens
ATKTKFTM

SEQ ID NO: 82383 - protein, 8 aa, Homo Sapiens
DFSDFDEK

SEQ ID NO: 82384 - protein, 8 aa, Homo Sapiens
KTDDEDFV

SEQ ID NO: 82385 - protein, 8 aa, Homo Sapiens
PSDASPPK

SEQ ID NO: 82386 - protein, 8 aa, Homo Sapiens
KTKTSPKL

SEQ ID NO: 82387 - protein, 8 aa, Homo Sapiens
TSPKLSNK

SEQ ID NO: 82388 - protein, 8 aa, Homo Sapiens
KLSNKELK

SEQ ID NO: 82389 - protein, 8 aa, Homo Sapiens
ELKPQKSV

SEQ ID NO: 82390 - protein, 8 aa, Homo Sapiens
SVVSDLEA

SEQ ID NO: 82391 - protein, 8 aa, Homo Sapiens
DVKGSVPL

SEQ ID NO: 82392 - protein, 8 aa, Homo Sapiens
PLSSSPPA

SEQ ID NO: 82393 - protein, 8 aa, Homo Sapiens
SSPPATHF

SEQ ID NO: 82394 - protein, 8 aa, Homo Sapiens
HFPDETEI

SEQ ID NO: 82395 - protein, 8 aa, Homo Sapiens
FPDETEIT

SEQ ID NO: 82396 - protein, 8 aa, Homo Sapiens
ETEITNPV

SEQ ID NO: 82397 - protein, 8 aa, Homo Sapiens
EITNPVPK

SEQ ID NO: 82398 - protein, 8 aa, Homo Sapiens
ITNPVPKK

SEQ ID NO: 82399 - protein, 8 aa, Homo Sapiens
VPKKNVTV

SEQ ID NO: 82400 - protein, 8 aa, Homo Sapiens
KKNVTVKK

SEQ ID NO: 82401 - protein, 8 aa, Homo Sapiens
TVKKTAAK

SEQ ID NO: 82402 - protein, 8 aa, Homo Sapiens
SQSSTSTT

SEQ ID NO: 82403 - protein, 8 aa, Homo Sapiens
STSTTGAK

SEQ ID NO: 82404 - protein, 8 aa, Homo Sapiens
TSTTGAKK

SEQ ID NO: 82405 - protein, 8 aa, Homo Sapiens
STTGAKKR

SEQ ID NO: 82406 - protein, 8 aa, Homo Sapiens
AKKRAAPK

SEQ ID NO: 82407 - protein, 8 aa, Homo Sapiens
RAAPKGTK

SEQ ID NO: 82408 - protein, 8 aa, Homo Sapiens
DPALNSGV

SEQ ID NO: 82409 - protein, 8 aa, Homo Sapiens
ALNSGVSQ

SEQ ID NO: 82410 - protein, 8 aa, Homo Sapiens
SQKPDPAK

SEQ ID NO: 82411 - protein, 8 aa, Homo Sapiens
DPAKTKNR

SEQ ID NO: 82412 - protein, 8 aa, Homo Sapiens
KTKNRRKR

SEQ ID NO: 82413 - protein, 8 aa, Homo Sapiens
DSDSNFEK

SEQ ID NO: 82414 - protein, 8 aa, Homo Sapiens
VSKAVTSK

SEQ ID NO: 82415 - protein, 8 aa, Homo Sapiens
AVTSKKSK

SEQ ID NO: 82416 - protein, 8 aa, Homo Sapiens
GESDDFHM

SEQ ID NO: 82417 - protein, 8 aa, Homo Sapiens
HMDFDSAV

SEQ ID NO: 82418 - protein, 8 aa, Homo Sapiens
SAVAPRAK

SEQ ID NO: 82419 - protein, 8 aa, Homo Sapiens
APRAKSVR

SEQ ID NO: 82420 - protein, 8 aa, Homo Sapiens
RAKSVRAK

SEQ ID NO: 82421 - protein, 8 aa, Homo Sapiens
SVRAKKPI

SEQ ID NO: 82422 - protein, 8 aa, Homo Sapiens
RAKKPIKY

SEQ ID NO: 82423 - protein, 9 aa, Homo Sapiens
MEVSPLQPV

SEQ ID NO: 82424 - protein, 9 aa, Homo Sapiens
PLQPVNENM

SEQ ID NO: 82425 - protein, 9 aa, Homo Sapiens
ENMQVNKIK

SEQ ID NO: 82426 - protein, 9 aa, Homo Sapiens
NMQVNKIKK

SEQ ID NO: 82427 - protein, 9 aa, Homo Sapiens
KIKKNEDAK

SEQ ID NO: 82428 - protein, 9 aa, Homo Sapiens
KRLSVERIY

SEQ ID NO: 82429 - protein, 9 aa, Homo Sapiens
RLSVERIYQ

SEQ ID NO: 82430 - protein, 9 aa, Homo Sapiens
LSVERIYQK

SEQ ID NO: 82431 - protein, 9 aa, Homo Sapiens
SVERIYQKK

SEQ ID NO: 82432 - protein, 9 aa, Homo Sapiens
RIYQKKTQL

SEQ ID NO: 82433 - protein, 9 aa, Homo Sapiens
YQKKTQLEH

SEQ ID NO: 82434 - protein, 9 aa, Homo Sapiens
TQLEHILLR

SEQ ID NO: 82435 - protein, 9 aa, Homo Sapiens
ILLRPDTYI

SEQ ID NO: 82436 - protein, 9 aa, Homo Sapiens
RPDTYIGSV

SEQ ID NO: 82437 - protein, 9 aa, Homo Sapiens
DTYIGSVEL

SEQ ID NO: 82438 - protein, 9 aa, Homo Sapiens
TYIGSVELV

SEQ ID NO: 82439 - protein, 9 aa, Homo Sapiens
YIGSVELVT

SEQ ID NO: 82440 - protein, 9 aa, Homo Sapiens
VELVTQQMW

SEQ ID NO: 82441 - protein, 9 aa, Homo Sapiens
ELVTQQMWV

SEQ ID NO: 82442 - protein, 9 aa, Homo Sapiens
LVTQQMWVY

SEQ ID NO: 82443 - protein, 9 aa, Homo Sapiens
QMWVYDEDV

SEQ ID NO: 82444 - protein, 9 aa, Homo Sapiens
WVYDEDVGI

SEQ ID NO: 82445 - protein, 9 aa, Homo Sapiens
REVTFVPGL

SEQ ID NO: 82446 - protein, 9 aa, Homo Sapiens
EVTFVPGLY

SEQ ID NO: 82447 - protein, 9 aa, Homo Sapiens
VTFVPGLYK

SEQ ID NO: 82448 - protein, 9 aa, Homo Sapiens
TFVPGLYKI

SEQ ID NO: 82449 - protein, 9 aa, Homo Sapiens
FVPGLYKIF

SEQ ID NO: 82450 - protein, 9 aa, Homo Sapiens
GLYKIFDEI

SEQ ID NO: 82451 - protein, 9 aa, Homo Sapiens
LYKIFDEIL

SEQ ID NO: 82452 - protein, 9 aa, Homo Sapiens
ILVNAADNK

SEQ ID NO: 82453 - protein, 9 aa, Homo Sapiens
DPKMSCIRV

SEQ ID NO: 82454 - protein, 9 aa, Homo Sapiens
KMSCIRVTI

SEQ ID NO: 82455 - protein, 9 aa, Homo Sapiens
VTIDPENNL

SEQ ID NO: 82456 - protein, 9 aa, Homo Sapiens
TIDPENNLI

SEQ ID NO: 82457 - protein, 9 aa, Homo Sapiens
DPENNLISI

SEQ ID NO: 82458 - protein, 9 aa, Homo Sapiens
LISIWNNGK

SEQ ID NO: 82459 - protein, 9 aa, Homo Sapiens
SIWNNGKGI

SEQ ID NO: 82460 - protein, 9 aa, Homo Sapiens
KGIPVVEHK

SEQ ID NO: 82461 - protein, 9 aa, Homo Sapiens
GIPVVEHKV

SEQ ID NO: 82462 - protein, 9 aa, Homo Sapiens
VEHKVEKMY

SEQ ID NO: 82463 - protein, 9 aa, Homo Sapiens
VEKMYVPAL

SEQ ID NO: 82464 - protein, 9 aa, Homo Sapiens
EKMYVPALI

SEQ ID NO: 82465 - protein, 9 aa, Homo Sapiens
KMYVPALIF

SEQ ID NO: 82466 - protein, 9 aa, Homo Sapiens
YVPALIFGQ

SEQ ID NO: 82467 - protein, 9 aa, Homo Sapiens
VPALIFGQL

SEQ ID NO: 82468 - protein, 9 aa, Homo Sapiens
ALIFGQLLT

SEQ ID NO: 82469 - protein, 9 aa, Homo Sapiens
GQLLTSSNY

SEQ ID NO: 82470 - protein, 9 aa, Homo Sapiens
SSNYDDDEK

SEQ ID NO: 82471 - protein, 9 aa, Homo Sapiens
NYDDDEKKV

SEQ ID NO: 82472 - protein, 9 aa, Homo Sapiens
DEKKVTGGR

SEQ ID NO: 82473 - protein, 9 aa, Homo Sapiens
KVTGGRNGY

SEQ ID NO: 82474 - protein, 9 aa, Homo Sapiens
GGRNGYGAK

SEQ ID NO: 82475 - protein, 9 aa, Homo Sapiens
GRNGYGAKL

SEQ ID NO: 82476 - protein, 9 aa, Homo Sapiens
GYGAKLCNI

SEQ ID NO: 82477 - protein, 9 aa, Homo Sapiens
KLCNIFSTK

SEQ ID NO: 82478 - protein, 9 aa, Homo Sapiens
NIFSTKFTV

SEQ ID NO: 82479 - protein, 9 aa, Homo Sapiens
STKFTVETA

SEQ ID NO: 82480 - protein, 9 aa, Homo Sapiens
KFTVETASR

SEQ ID NO: 82481 - protein, 9 aa, Homo Sapiens
TVETASREY

SEQ ID NO: 82482 - protein, 9 aa, Homo Sapiens
ETASREYKK

SEQ ID NO: 82483 - protein, 9 aa, Homo Sapiens
QTWMDNMGR

SEQ ID NO: 82484 - protein, 9 aa, Homo Sapiens
GRAGEMELK

SEQ ID NO: 82485 - protein, 9 aa, Homo Sapiens
GEDYTCITF

SEQ ID NO: 82486 - protein, 9 aa, Homo Sapiens
ITFQPDLSK

SEQ ID NO: 82487 - protein, 9 aa, Homo Sapiens
TFQPDLSKF

SEQ ID NO: 82488 - protein, 9 aa, Homo Sapiens
KFKMQSLDK

SEQ ID NO: 82489 - protein, 9 aa, Homo Sapiens
MQSLDKDIV

SEQ ID NO: 82490 - protein, 9 aa, Homo Sapiens
SLDKDIVAL

SEQ ID NO: 82491 - protein, 9 aa, Homo Sapiens
DIVALMVRR

SEQ ID NO: 82492 - protein, 9 aa, Homo Sapiens
VALMVRRAY

SEQ ID NO: 82493 - protein, 9 aa, Homo Sapiens
LMVRRAYDI

SEQ ID NO: 82494 - protein, 9 aa, Homo Sapiens
AYDIAGSTK

SEQ ID NO: 82495 - protein, 9 aa, Homo Sapiens
STKDVKVFL

SEQ ID NO: 82496 - protein, 9 aa, Homo Sapiens
FLNGNKLPV

SEQ ID NO: 82497 - protein, 9 aa, Homo Sapiens
NKLPVKGFR

SEQ ID NO: 82498 - protein, 9 aa, Homo Sapiens
LPVKGFRSY

SEQ ID NO: 82499 - protein, 9 aa, Homo Sapiens
PVKGFRSYV

SEQ ID NO: 82500 - protein, 9 aa, Homo Sapiens
FRSYVDMYL

SEQ ID NO: 82501 - protein, 9 aa, Homo Sapiens
RSYVDMYLK

SEQ ID NO: 82502 - protein, 9 aa, Homo Sapiens
YLKDKLDET

SEQ ID NO: 82503 - protein, 9 aa, Homo Sapiens
KLDETGNSL

SEQ ID NO: 82504 - protein, 9 aa, Homo Sapiens
ETGNSLKVI

SEQ ID NO: 82505 - protein, 9 aa, Homo Sapiens
SLKVIHEQV

SEQ ID NO: 82506 - protein, 9 aa, Homo Sapiens
VIHEQVNHR

SEQ ID NO: 82507 - protein, 9 aa, Homo Sapiens
EQVNHRWEV

SEQ ID NO: 82508 - protein, 9 aa, Homo Sapiens
HRWEVCLTM

SEQ ID NO: 82509 - protein, 9 aa, Homo Sapiens
WEVCLTMSE

SEQ ID NO: 82510 - protein, 9 aa, Homo Sapiens
EVCLTMSEK

SEQ ID NO: 82511 - protein, 9 aa, Homo Sapiens
TMSEKGFQQ

SEQ ID NO: 82512 - protein, 9 aa, Homo Sapiens
KGFQQISFV

SEQ ID NO: 82513 - protein, 9 aa, Homo Sapiens
FQQISFVNS

SEQ ID NO: 82514 - protein, 9 aa, Homo Sapiens
QQISFVNSI

SEQ ID NO: 82515 - protein, 9 aa, Homo Sapiens
QISFVNSIA

SEQ ID NO: 82516 - protein, 9 aa, Homo Sapiens
FVNSIATSK

SEQ ID NO: 82517 - protein, 9 aa, Homo Sapiens
SIATSKGGR

SEQ ID NO: 82518 - protein, 9 aa, Homo Sapiens
YVADQIVTK

SEQ ID NO: 82519 - protein, 9 aa, Homo Sapiens
VADQIVTKL

SEQ ID NO: 82520 - protein, 9 aa, Homo Sapiens
QIVTKLVDV

SEQ ID NO: 82521 - protein, 9 aa, Homo Sapiens
IVTKLVDVV

SEQ ID NO: 82522 - protein, 9 aa, Homo Sapiens
VTKLVDVVK

SEQ ID NO: 82523 - protein, 9 aa, Homo Sapiens
KLVDVVKKK

SEQ ID NO: 82524 - protein, 9 aa, Homo Sapiens
KNKGGVAVK

SEQ ID NO: 82525 - protein, 9 aa, Homo Sapiens
GVAVKAHQV

SEQ ID NO: 82526 - protein, 9 aa, Homo Sapiens
VAVKAHQVK

SEQ ID NO: 82527 - protein, 9 aa, Homo Sapiens
HQVKNHMWI

SEQ ID NO: 82528 - protein, 9 aa, Homo Sapiens
QVKNHMWIF

SEQ ID NO: 82529 - protein, 9 aa, Homo Sapiens
NHMWIFVNA

SEQ ID NO: 82530 - protein, 9 aa, Homo Sapiens
HMWIFVNAL

SEQ ID NO: 82531 - protein, 9 aa, Homo Sapiens
MWIFVNALI

SEQ ID NO: 82532 - protein, 9 aa, Homo Sapiens
NALIENPTF

SEQ ID NO: 82533 - protein, 9 aa, Homo Sapiens
NPTFDSQTK

SEQ ID NO: 82534 - protein, 9 aa, Homo Sapiens
SQTKENMTL

SEQ ID NO: 82535 - protein, 9 aa, Homo Sapiens
KENMTLQPK

SEQ ID NO: 82536 - protein, 9 aa, Homo Sapiens
TLQPKSFGS

SEQ ID NO: 82537 - protein, 9 aa, Homo Sapiens
LQPKSFGST

SEQ ID NO: 82538 - protein, 9 aa, Homo Sapiens
KSFGSTCQL

SEQ ID NO: 82539 - protein, 9 aa, Homo Sapiens
GSTCQLSEK

SEQ ID NO: 82540 - protein, 9 aa, Homo Sapiens
CQLSEKFIK

SEQ ID NO: 82541 - protein, 9 aa, Homo Sapiens
QLSEKFIKA

SEQ ID NO: 82542 - protein, 9 aa, Homo Sapiens
KAAIGCGIV

SEQ ID NO: 82543 - protein, 9 aa, Homo Sapiens
GIVESILNW

SEQ ID NO: 82544 - protein, 9 aa, Homo Sapiens
IVESILNWV

SEQ ID NO: 82545 - protein, 9 aa, Homo Sapiens
ESILNWVKF

SEQ ID NO: 82546 - protein, 9 aa, Homo Sapiens
SILNWVKFK

SEQ ID NO: 82547 - protein, 9 aa, Homo Sapiens
ILNWVKFKA

SEQ ID NO: 82548 - protein, 9 aa, Homo Sapiens
KAQVQLNKK

SEQ ID NO: 82549 - protein, 9 aa, Homo Sapiens
VQLNKKCSA

SEQ ID NO: 82550 - protein, 9 aa, Homo Sapiens
QLNKKCSAV

SEQ ID NO: 82551 - protein, 9 aa, Homo Sapiens
KCSAVKHNR

SEQ ID NO: 82552 - protein, 9 aa, Homo Sapiens
CSAVKHNRI

SEQ ID NO: 82553 - protein, 9 aa, Homo Sapiens
SAVKHNRIK

SEQ ID NO: 82554 - protein, 9 aa, Homo Sapiens
HNRIKGIPK

SEQ ID NO: 82555 - protein, 9 aa, Homo Sapiens
KLDDANDAG

SEQ ID NO: 82556 - protein, 9 aa, Homo Sapiens
ILTEGDSAK

SEQ ID NO: 82557 - protein, 9 aa, Homo Sapiens
TEGDSAKTL

SEQ ID NO: 82558 - protein, 9 aa, Homo Sapiens
TLAVSGLGV

SEQ ID NO: 82559 - protein, 9 aa, Homo Sapiens
LAVSGLGVV

SEQ ID NO: 82560 - protein, 9 aa, Homo Sapiens
VVGRDKYGV

SEQ ID NO: 82561 - protein, 9 aa, Homo Sapiens
DKYGVFPLR

SEQ ID NO: 82562 - protein, 9 aa, Homo Sapiens
GVFPLRGKI

SEQ ID NO: 82563 - protein, 9 aa, Homo Sapiens
FPLRGKILN

SEQ ID NO: 82564 - protein, 9 aa, Homo Sapiens
PLRGKILNV

SEQ ID NO: 82565 - protein, 9 aa, Homo Sapiens
REASHKQIM

SEQ ID NO: 82566 - protein, 9 aa, Homo Sapiens
KQIMENAEI

SEQ ID NO: 82567 - protein, 9 aa, Homo Sapiens
MENAEINNI

SEQ ID NO: 82568 - protein, 9 aa, Homo Sapiens
ENAEINNII

SEQ ID NO: 82569 - protein, 9 aa, Homo Sapiens
NAEINNIIK

SEQ ID NO: 82570 - protein, 9 aa, Homo Sapiens
AEINNIIKI

SEQ ID NO: 82571 - protein, 9 aa, Homo Sapiens
EINNIIKIV

SEQ ID NO: 82572 - protein, 9 aa, Homo Sapiens
IIKIVGLQY

SEQ ID NO: 82573 - protein, 9 aa, Homo Sapiens
KIVGLQYKK

SEQ ID NO: 82574 - protein, 9 aa, Homo Sapiens
NYEDEDSLK

SEQ ID NO: 82575 - protein, 9 aa, Homo Sapiens
SLKTLRYGK

SEQ ID NO: 82576 - protein, 9 aa, Homo Sapiens
KTLRYGKIM

SEQ ID NO: 82577 - protein, 9 aa, Homo Sapiens
TLRYGKIMI

SEQ ID NO: 82578 - protein, 9 aa, Homo Sapiens
LRYGKIMIM

SEQ ID NO: 82579 - protein, 9 aa, Homo Sapiens
HIKGLLINF

SEQ ID NO: 82580 - protein, 9 aa, Homo Sapiens
LINFIHHNW

SEQ ID NO: 82581 - protein, 9 aa, Homo Sapiens
FIHHNWPSL

SEQ ID NO: 82582 - protein, 9 aa, Homo Sapiens
IHHNWPSLL

SEQ ID NO: 82583 - protein, 9 aa, Homo Sapiens
HHNWPSLLR

SEQ ID NO: 82584 - protein, 9 aa, Homo Sapiens
WPSLLRHRF

SEQ ID NO: 82585 - protein, 9 aa, Homo Sapiens
SLLRHRFLE

SEQ ID NO: 82586 - protein, 9 aa, Homo Sapiens
FLEEFITPI

SEQ ID NO: 82587 - protein, 9 aa, Homo Sapiens
LEEFITPIV

SEQ ID NO: 82588 - protein, 9 aa, Homo Sapiens
EFITPIVKV

SEQ ID NO: 82589 - protein, 9 aa, Homo Sapiens
ITPIVKVSK

SEQ ID NO: 82590 - protein, 9 aa, Homo Sapiens
KNKQEMAFY

SEQ ID NO: 82591 - protein, 9 aa, Homo Sapiens
KQEMAFYSL

SEQ ID NO: 82592 - protein, 9 aa, Homo Sapiens
MAFYSLPEF

SEQ ID NO: 82593 - protein, 9 aa, Homo Sapiens
YSLPEFEEW

SEQ ID NO: 82594 - protein, 9 aa, Homo Sapiens
SLPEFEEWK

SEQ ID NO: 82595 - protein, 9 aa, Homo Sapiens
KSSTPNHKK

SEQ ID NO: 82596 - protein, 9 aa, Homo Sapiens
SSTPNHKKW

SEQ ID NO: 82597 - protein, 9 aa, Homo Sapiens
STPNHKKWK

SEQ ID NO: 82598 - protein, 9 aa, Homo Sapiens
PNHKKWKVK

SEQ ID NO: 82599 - protein, 9 aa, Homo Sapiens
KKWKVKYYK

SEQ ID NO: 82600 - protein, 9 aa, Homo Sapiens
WKVKYYKGL

SEQ ID NO: 82601 - protein, 9 aa, Homo Sapiens
KGLGTSTSK

SEQ ID NO: 82602 - protein, 9 aa, Homo Sapiens
GTSTSKEAK

SEQ ID NO: 82603 - protein, 9 aa, Homo Sapiens
STSKEAKEY

SEQ ID NO: 82604 - protein, 9 aa, Homo Sapiens
EAKEYFADM

SEQ ID NO: 82605 - protein, 9 aa, Homo Sapiens
YFADMKRHR

SEQ ID NO: 82606 - protein, 9 aa, Homo Sapiens
FADMKRHRI

SEQ ID NO: 82607 - protein, 9 aa, Homo Sapiens
MKRHRIQFK

SEQ ID NO: 82608 - protein, 9 aa, Homo Sapiens
KRHRIQFKY

SEQ ID NO: 82609 - protein, 9 aa, Homo Sapiens
IQFKYSGPE

SEQ ID NO: 82610 - protein, 9 aa, Homo Sapiens
PEDDAAISL

SEQ ID NO: 82611 - protein, 9 aa, Homo Sapiens
AAISLAFSK

SEQ ID NO: 82612 - protein, 9 aa, Homo Sapiens
AISLAFSKK

SEQ ID NO: 82613 - protein, 9 aa, Homo Sapiens
SLAFSKKQI

SEQ ID NO: 82614 - protein, 9 aa, Homo Sapiens
FSKKQIDDR

SEQ ID NO: 82615 - protein, 9 aa, Homo Sapiens
KQIDDRKEW

SEQ ID NO: 82616 - protein, 9 aa, Homo Sapiens
QIDDRKEWL

SEQ ID NO: 82617 - protein, 9 aa, Homo Sapiens
WLTNFMEDR

SEQ ID NO: 82618 - protein, 9 aa, Homo Sapiens
LTNFMEDRR

SEQ ID NO: 82619 - protein, 9 aa, Homo Sapiens
NFMEDRRQR

SEQ ID NO: 82620 - protein, 9 aa, Homo Sapiens
FMEDRRQRK

SEQ ID NO: 82621 - protein, 9 aa, Homo Sapiens
RRQRKLLGL

SEQ ID NO: 82622 - protein, 9 aa, Homo Sapiens
LLGLPEDYL

SEQ ID NO: 82623 - protein, 9 aa, Homo Sapiens
GLPEDYLYG

SEQ ID NO: 82624 - protein, 9 aa, Homo Sapiens
YLYGQTTTY

SEQ ID NO: 82625 - protein, 9 aa, Homo Sapiens
LYGQTTTYL

SEQ ID NO: 82626 - protein, 9 aa, Homo Sapiens
GQTTTYLTY

SEQ ID NO: 82627 - protein, 9 aa, Homo Sapiens
TTYLTYNDF

SEQ ID NO: 82628 - protein, 9 aa, Homo Sapiens
TYLTYNDFI

SEQ ID NO: 82629 - protein, 9 aa, Homo Sapiens
LTYNDFINK

SEQ ID NO: 82630 - protein, 9 aa, Homo Sapiens
YNDFINKEL

SEQ ID NO: 82631 - protein, 9 aa, Homo Sapiens
FINKELILF

SEQ ID NO: 82632 - protein, 9 aa, Homo Sapiens
LFSNSDNER

SEQ ID NO: 82633 - protein, 9 aa, Homo Sapiens
SIPSMVDGL

SEQ ID NO: 82634 - protein, 9 aa, Homo Sapiens
IPSMVDGLK

SEQ ID NO: 82635 - protein, 9 aa, Homo Sapiens
SMVDGLKPG

SEQ ID NO: 82636 - protein, 9 aa, Homo Sapiens
MVDGLKPGQ

SEQ ID NO: 82637 - protein, 9 aa, Homo Sapiens
GLKPGQRKV

SEQ ID NO: 82638 - protein, 9 aa, Homo Sapiens
KPGQRKVLF

SEQ ID NO: 82639 - protein, 9 aa, Homo Sapiens
GQRKVLFTC

SEQ ID NO: 82640 - protein, 9 aa, Homo Sapiens
RKVLFTCFK

SEQ ID NO: 82641 - protein, 9 aa, Homo Sapiens
KVLFTCFKR

SEQ ID NO: 82642 - protein, 9 aa, Homo Sapiens
FTCFKRNDK

SEQ ID NO: 82643 - protein, 9 aa, Homo Sapiens
KRNDKREVK

SEQ ID NO: 82644 - protein, 9 aa, Homo Sapiens
KREVKVAQL

SEQ ID NO: 82645 - protein, 9 aa, Homo Sapiens
REVKVAQLA

SEQ ID NO: 82646 - protein, 9 aa, Homo Sapiens
KVAQLAGSV

SEQ ID NO: 82647 - protein, 9 aa, Homo Sapiens
AQLAGSVAE

SEQ ID NO: 82648 - protein, 9 aa, Homo Sapiens
QLAGSVAEM

SEQ ID NO: 82649 - protein, 9 aa, Homo Sapiens
GSVAEMSSY

SEQ ID NO: 82650 - protein, 9 aa, Homo Sapiens
SVAEMSSYH

SEQ ID NO: 82651 - protein, 9 aa, Homo Sapiens
EMSSYHHGE

SEQ ID NO: 82652 - protein, 9 aa, Homo Sapiens
SYHHGEMSL

SEQ ID NO: 82653 - protein, 9 aa, Homo Sapiens
HHGEMSLMM

SEQ ID NO: 82654 - protein, 9 aa, Homo Sapiens
GEMSLMMTI

SEQ ID NO: 82655 - protein, 9 aa, Homo Sapiens
EMSLMMTII

SEQ ID NO: 82656 - protein, 9 aa, Homo Sapiens
SLMMTIINL

SEQ ID NO: 82657 - protein, 9 aa, Homo Sapiens
LMMTIINLA

SEQ ID NO: 82658 - protein, 9 aa, Homo Sapiens
MMTIINLAQ

SEQ ID NO: 82659 - protein, 9 aa, Homo Sapiens
TIINLAQNF

SEQ ID NO: 82660 - protein, 9 aa, Homo Sapiens
IINLAQNFV

SEQ ID NO: 82661 - protein, 9 aa, Homo Sapiens
NLAQNFVGS

SEQ ID NO: 82662 - protein, 9 aa, Homo Sapiens
FVGSNNLNL

SEQ ID NO: 82663 - protein, 9 aa, Homo Sapiens
LQPIGQFGT

SEQ ID NO: 82664 - protein, 9 aa, Homo Sapiens
QPIGQFGTR

SEQ ID NO: 82665 - protein, 9 aa, Homo Sapiens
PIGQFGTRL

SEQ ID NO: 82666 - protein, 9 aa, Homo Sapiens
RLHGGKDSA

SEQ ID NO: 82667 - protein, 9 aa, Homo Sapiens
SPRYIFTML

SEQ ID NO: 82668 - protein, 9 aa, Homo Sapiens
YIFTMLSSL

SEQ ID NO: 82669 - protein, 9 aa, Homo Sapiens
FTMLSSLAR

SEQ ID NO: 82670 - protein, 9 aa, Homo Sapiens
TMLSSLARL

SEQ ID NO: 82671 - protein, 9 aa, Homo Sapiens
MLSSLARLL

SEQ ID NO: 82672 - protein, 9 aa, Homo Sapiens
LSSLARLLF

SEQ ID NO: 82673 - protein, 9 aa, Homo Sapiens
SLARLLFPP

SEQ ID NO: 82674 - protein, 9 aa, Homo Sapiens
LARLLFPPK

SEQ ID NO: 82675 - protein, 9 aa, Homo Sapiens
FPPKDDHTL

SEQ ID NO: 82676 - protein, 9 aa, Homo Sapiens
KFLYDDNQR

SEQ ID NO: 82677 - protein, 9 aa, Homo Sapiens
FLYDDNQRV

SEQ ID NO: 82678 - protein, 9 aa, Homo Sapiens
VEPEWYIPI

SEQ ID NO: 82679 - protein, 9 aa, Homo Sapiens
EPEWYIPII

SEQ ID NO: 82680 - protein, 9 aa, Homo Sapiens
WYIPIIPMV

SEQ ID NO: 82681 - protein, 9 aa, Homo Sapiens
YIPIIPMVL

SEQ ID NO: 82682 - protein, 9 aa, Homo Sapiens
IPIIPMVLI

SEQ ID NO: 82683 - protein, 9 aa, Homo Sapiens
IPMVLINGA

SEQ ID NO: 82684 - protein, 9 aa, Homo Sapiens
VLINGAEGI

SEQ ID NO: 82685 - protein, 9 aa, Homo Sapiens
GIGTGWSCK

SEQ ID NO: 82686 - protein, 9 aa, Homo Sapiens
GWSCKIPNF

SEQ ID NO: 82687 - protein, 9 aa, Homo Sapiens
IPNFDVREI

SEQ ID NO: 82688 - protein, 9 aa, Homo Sapiens
DVREIVNNI

SEQ ID NO: 82689 - protein, 9 aa, Homo Sapiens
EIVNNIRRL

SEQ ID NO: 82690 - protein, 9 aa, Homo Sapiens
RLMDGEEPL

SEQ ID NO: 82691 - protein, 9 aa, Homo Sapiens
LMDGEEPLP

SEQ ID NO: 82692 - protein, 9 aa, Homo Sapiens
EPLPMLPSY

SEQ ID NO: 82693 - protein, 9 aa, Homo Sapiens
LPMLPSYKN

SEQ ID NO: 82694 - protein, 9 aa, Homo Sapiens
PMLPSYKNF

SEQ ID NO: 82695 - protein, 9 aa, Homo Sapiens
MLPSYKNFK

SEQ ID NO: 82696 - protein, 9 aa, Homo Sapiens
SYKNFKGTI

SEQ ID NO: 82697 - protein, 9 aa, Homo Sapiens
NFKGTIEEL

SEQ ID NO: 82698 - protein, 9 aa, Homo Sapiens
EELAPNQYV

SEQ ID NO: 82699 - protein, 9 aa, Homo Sapiens
ELAPNQYVI

SEQ ID NO: 82700 - protein, 9 aa, Homo Sapiens
NQYVISGEV

SEQ ID NO: 82701 - protein, 9 aa, Homo Sapiens
YVISGEVAI

SEQ ID NO: 82702 - protein, 9 aa, Homo Sapiens
VISGEVAIL

SEQ ID NO: 82703 - protein, 9 aa, Homo Sapiens
EVAILNSTT

SEQ ID NO: 82704 - protein, 9 aa, Homo Sapiens
VAILNSTTI

SEQ ID NO: 82705 - protein, 9 aa, Homo Sapiens
ILNSTTIEI

SEQ ID NO: 82706 - protein, 9 aa, Homo Sapiens
STTIEISEL

SEQ ID NO: 82707 - protein, 9 aa, Homo Sapiens
TIEISELPV

SEQ ID NO: 82708 - protein, 9 aa, Homo Sapiens
EISELPVRT

SEQ ID NO: 82709 - protein, 9 aa, Homo Sapiens
SELPVRTWT

SEQ ID NO: 82710 - protein, 9 aa, Homo Sapiens
ELPVRTWTQ

SEQ ID NO: 82711 - protein, 9 aa, Homo Sapiens
LPVRTWTQT

SEQ ID NO: 82712 - protein, 9 aa, Homo Sapiens
PVRTWTQTY

SEQ ID NO: 82713 - protein, 9 aa, Homo Sapiens
RTWTQTYKE

SEQ ID NO: 82714 - protein, 9 aa, Homo Sapiens
WTQTYKEQV

SEQ ID NO: 82715 - protein, 9 aa, Homo Sapiens
KEQVLEPML

SEQ ID NO: 82716 - protein, 9 aa, Homo Sapiens
VLEPMLNGT

SEQ ID NO: 82717 - protein, 9 aa, Homo Sapiens
EPMLNGTEK

SEQ ID NO: 82718 - protein, 9 aa, Homo Sapiens
KTPPLITDY

SEQ ID NO: 82719 - protein, 9 aa, Homo Sapiens
TPPLITDYR

SEQ ID NO: 82720 - protein, 9 aa, Homo Sapiens
PLITDYREY

SEQ ID NO: 82721 - protein, 9 aa, Homo Sapiens
REYHTDTTV

SEQ ID NO: 82722 - protein, 9 aa, Homo Sapiens
EYHTDTTVK

SEQ ID NO: 82723 - protein, 9 aa, Homo Sapiens
YHTDTTVKF

SEQ ID NO: 82724 - protein, 9 aa, Homo Sapiens
HTDTTVKFV

SEQ ID NO: 82725 - protein, 9 aa, Homo Sapiens
DTTVKFVVK

SEQ ID NO: 82726 - protein, 9 aa, Homo Sapiens
TTVKFVVKM

SEQ ID NO: 82727 - protein, 9 aa, Homo Sapiens
FVVKMTEEK

SEQ ID NO: 82728 - protein, 9 aa, Homo Sapiens
MTEEKLAEA

SEQ ID NO: 82729 - protein, 9 aa, Homo Sapiens
EEKLAEAER

SEQ ID NO: 82730 - protein, 9 aa, Homo Sapiens
EAERVGLHK

SEQ ID NO: 82731 - protein, 9 aa, Homo Sapiens
AERVGLHKV

SEQ ID NO: 82732 - protein, 9 aa, Homo Sapiens
RVGLHKVFK

SEQ ID NO: 82733 - protein, 9 aa, Homo Sapiens
KVFKLQTSL

SEQ ID NO: 82734 - protein, 9 aa, Homo Sapiens
QTSLTCNSM

SEQ ID NO: 82735 - protein, 9 aa, Homo Sapiens
TSLTCNSMV

SEQ ID NO: 82736 - protein, 9 aa, Homo Sapiens
SLTCNSMVL

SEQ ID NO: 82737 - protein, 9 aa, Homo Sapiens
LTCNSMVLF

SEQ ID NO: 82738 - protein, 9 aa, Homo Sapiens
NSMVLFDHV

SEQ ID NO: 82739 - protein, 9 aa, Homo Sapiens
VLFDHVGCL

SEQ ID NO: 82740 - protein, 9 aa, Homo Sapiens
CLKKYDTVL

SEQ ID NO: 82741 - protein, 9 aa, Homo Sapiens
KYDTVLDIL

SEQ ID NO: 82742 - protein, 9 aa, Homo Sapiens
YDTVLDILR

SEQ ID NO: 82743 - protein, 9 aa, Homo Sapiens
TVLDILRDF

SEQ ID NO: 82744 - protein, 9 aa, Homo Sapiens
VLDILRDFF

SEQ ID NO: 82745 - protein, 9 aa, Homo Sapiens
DILRDFFEL

SEQ ID NO: 82746 - protein, 9 aa, Homo Sapiens
ILRDFFELR

SEQ ID NO: 82747 - protein, 9 aa, Homo Sapiens
DFFELRLKY

SEQ ID NO: 82748 - protein, 9 aa, Homo Sapiens
FFELRLKYY

SEQ ID NO: 82749 - protein, 9 aa, Homo Sapiens
ELRLKYYGL

SEQ ID NO: 82750 - protein, 9 aa, Homo Sapiens
RLKYYGLRK

SEQ ID NO: 82751 - protein, 9 aa, Homo Sapiens
KYYGLRKEW

SEQ ID NO: 82752 - protein, 9 aa, Homo Sapiens
YYGLRKEWL

SEQ ID NO: 82753 - protein, 9 aa, Homo Sapiens
LRKEWLLGM

SEQ ID NO: 82754 - protein, 9 aa, Homo Sapiens
GMLGAESAK

SEQ ID NO: 82755 - protein, 9 aa, Homo Sapiens
MLGAESAKL

SEQ ID NO: 82756 - protein, 9 aa, Homo Sapiens
ESAKLNNQA

SEQ ID NO: 82757 - protein, 9 aa, Homo Sapiens
SAKLNNQAR

SEQ ID NO: 82758 - protein, 9 aa, Homo Sapiens
KLNNQARFI

SEQ ID NO: 82759 - protein, 9 aa, Homo Sapiens
NQARFILEK

SEQ ID NO: 82760 - protein, 9 aa, Homo Sapiens
QARFILEKI

SEQ ID NO: 82761 - protein, 9 aa, Homo Sapiens
FILEKIDGK

SEQ ID NO: 82762 - protein, 9 aa, Homo Sapiens
KIIIENKPK

SEQ ID NO: 82763 - protein, 9 aa, Homo Sapiens
IIIENKPKK

SEQ ID NO: 82764 - protein, 9 aa, Homo Sapiens
IENKPKKEL

SEQ ID NO: 82765 - protein, 9 aa, Homo Sapiens
ELIKVLIQR

SEQ ID NO: 82766 - protein, 9 aa, Homo Sapiens
RGYDSDPVK

SEQ ID NO: 82767 - protein, 9 aa, Homo Sapiens
DSDPVKAWK

SEQ ID NO: 82768 - protein, 9 aa, Homo Sapiens
KAWKEAQQK

SEQ ID NO: 82769 - protein, 9 aa, Homo Sapiens
EESDNEKET

SEQ ID NO: 82770 - protein, 9 aa, Homo Sapiens
KETEKSDSV

SEQ ID NO: 82771 - protein, 9 aa, Homo Sapiens
SVTDSGPTF

SEQ ID NO: 82772 - protein, 9 aa, Homo Sapiens
DSGPTFNYL

SEQ ID NO: 82773 - protein, 9 aa, Homo Sapiens
SGPTFNYLL

SEQ ID NO: 82774 - protein, 9 aa, Homo Sapiens
PTFNYLLDM

SEQ ID NO: 82775 - protein, 9 aa, Homo Sapiens
NYLLDMPLW

SEQ ID NO: 82776 - protein, 9 aa, Homo Sapiens
YLLDMPLWY

SEQ ID NO: 82777 - protein, 9 aa, Homo Sapiens
LLDMPLWYL

SEQ ID NO: 82778 - protein, 9 aa, Homo Sapiens
DMPLWYLTK

SEQ ID NO: 82779 - protein, 9 aa, Homo Sapiens
MPLWYLTKE

SEQ ID NO: 82780 - protein, 9 aa, Homo Sapiens
LWYLTKEKK

SEQ ID NO: 82781 - protein, 9 aa, Homo Sapiens
ELCRLRNEK

SEQ ID NO: 82782 - protein, 9 aa, Homo Sapiens
LWKEDLATF

SEQ ID NO: 82783 - protein, 9 aa, Homo Sapiens
DLATFIEEL

SEQ ID NO: 82784 - protein, 9 aa, Homo Sapiens
TFIEELEAV

SEQ ID NO: 82785 - protein, 9 aa, Homo Sapiens
GLPGKGGKA

SEQ ID NO: 82786 - protein, 9 aa, Homo Sapiens
KGGKAKGKK

SEQ ID NO: 82787 - protein, 9 aa, Homo Sapiens
TQMAEVLPS

SEQ ID NO: 82788 - protein, 9 aa, Homo Sapiens
QMAEVLPSP

SEQ ID NO: 82789 - protein, 9 aa, Homo Sapiens
MAEVLPSPR

SEQ ID NO: 82790 - protein, 9 aa, Homo Sapiens
AEVLPSPRG

SEQ ID NO: 82791 - protein, 9 aa, Homo Sapiens
LPSPRGQRV

SEQ ID NO: 82792 - protein, 9 aa, Homo Sapiens
VIPRITIEM

SEQ ID NO: 82793 - protein, 9 aa, Homo Sapiens
EMKAEAEKK

SEQ ID NO: 82794 - protein, 9 aa, Homo Sapiens
AEKKNKKKI

SEQ ID NO: 82795 - protein, 9 aa, Homo Sapiens
EGSPQEDGV

SEQ ID NO: 82796 - protein, 9 aa, Homo Sapiens
SPQEDGVEL

SEQ ID NO: 82797 - protein, 9 aa, Homo Sapiens
ELEGLKQRL

SEQ ID NO: 82798 - protein, 9 aa, Homo Sapiens
GLKQRLEKK

SEQ ID NO: 82799 - protein, 9 aa, Homo Sapiens
KQRLEKKQK

SEQ ID NO: 82800 - protein, 9 aa, Homo Sapiens
QRLEKKQKR

SEQ ID NO: 82801 - protein, 9 aa, Homo Sapiens
KQKREPGTK

SEQ ID NO: 82802 - protein, 9 aa, Homo Sapiens
KREPGTKTK

SEQ ID NO: 82803 - protein, 9 aa, Homo Sapiens
KTKKQTTLA

SEQ ID NO: 82804 - protein, 9 aa, Homo Sapiens
KKQTTLAFK

SEQ ID NO: 82805 - protein, 9 aa, Homo Sapiens
QTTLAFKPI

SEQ ID NO: 82806 - protein, 9 aa, Homo Sapiens
TTLAFKPIK

SEQ ID NO: 82807 - protein, 9 aa, Homo Sapiens
TLAFKPIKK

SEQ ID NO: 82808 - protein, 9 aa, Homo Sapiens
AFKPIKKGK

SEQ ID NO: 82809 - protein, 9 aa, Homo Sapiens
SSDESNFDV

SEQ ID NO: 82810 - protein, 9 aa, Homo Sapiens
ESNFDVPPR

SEQ ID NO: 82811 - protein, 9 aa, Homo Sapiens
ETEPRRAAT

SEQ ID NO: 82812 - protein, 9 aa, Homo Sapiens
PRRAATKTK

SEQ ID NO: 82813 - protein, 9 aa, Homo Sapiens
RRAATKTKF

SEQ ID NO: 82814 - protein, 9 aa, Homo Sapiens
EDFSDFDEK

SEQ ID NO: 82815 - protein, 9 aa, Homo Sapiens
VPSDASPPK

SEQ ID NO: 82816 - protein, 9 aa, Homo Sapiens
KTSPKLSNK

SEQ ID NO: 82817 - protein, 9 aa, Homo Sapiens
SPKLSNKEL

SEQ ID NO: 82818 - protein, 9 aa, Homo Sapiens
SNKELKPQK

SEQ ID NO: 82819 - protein, 9 aa, Homo Sapiens
ELKPQKSVV

SEQ ID NO: 82820 - protein, 9 aa, Homo Sapiens
EADDVKGSV

SEQ ID NO: 82821 - protein, 9 aa, Homo Sapiens
VPLSSSPPA

SEQ ID NO: 82822 - protein, 9 aa, Homo Sapiens
SSSPPATHF

SEQ ID NO: 82823 - protein, 9 aa, Homo Sapiens
FPDETEITN

SEQ ID NO: 82824 - protein, 9 aa, Homo Sapiens
DETEITNPV

SEQ ID NO: 82825 - protein, 9 aa, Homo Sapiens
EITNPVPKK

SEQ ID NO: 82826 - protein, 9 aa, Homo Sapiens
NPVPKKNVT

SEQ ID NO: 82827 - protein, 9 aa, Homo Sapiens
PVPKKNVTV

SEQ ID NO: 82828 - protein, 9 aa, Homo Sapiens
VTVKKTAAK

SEQ ID NO: 82829 - protein, 9 aa, Homo Sapiens
QSSTSTTGA

SEQ ID NO: 82830 - protein, 9 aa, Homo Sapiens
SSTSTTGAK

SEQ ID NO: 82831 - protein, 9 aa, Homo Sapiens
STSTTGAKK

SEQ ID NO: 82832 - protein, 9 aa, Homo Sapiens
TSTTGAKKR

SEQ ID NO: 82833 - protein, 9 aa, Homo Sapiens
GAKKRAAPK

SEQ ID NO: 82834 - protein, 9 aa, Homo Sapiens
KRAAPKGTK

SEQ ID NO: 82835 - protein, 9 aa, Homo Sapiens
RAAPKGTKR

SEQ ID NO: 82836 - protein, 9 aa, Homo Sapiens
ALNSGVSQK

SEQ ID NO: 82837 - protein, 9 aa, Homo Sapiens
VSQKPDPAK

SEQ ID NO: 82838 - protein, 9 aa, Homo Sapiens
DPAKTKNRR

SEQ ID NO: 82839 - protein, 9 aa, Homo Sapiens
KTKNRRKRK

SEQ ID NO: 82840 - protein, 9 aa, Homo Sapiens
TSDDSDSNF

SEQ ID NO: 82841 - protein, 9 aa, Homo Sapiens
SNFEKIVSK

SEQ ID NO: 82842 - protein, 9 aa, Homo Sapiens
IVSKAVTSK

SEQ ID NO: 82843 - protein, 9 aa, Homo Sapiens
VSKAVTSKK

SEQ ID NO: 82844 - protein, 9 aa, Homo Sapiens
KAVTSKKSK

SEQ ID NO: 82845 - protein, 9 aa, Homo Sapiens
ESDDFHMDF

SEQ ID NO: 82846 - protein, 9 aa, Homo Sapiens
FHMDFDSAV

SEQ ID NO: 82847 - protein, 9 aa, Homo Sapiens
HMDFDSAVA

SEQ ID NO: 82848 - protein, 9 aa, Homo Sapiens
DFDSAVAPR

SEQ ID NO: 82849 - protein, 9 aa, Homo Sapiens
AVAPRAKSV

SEQ ID NO: 82850 - protein, 9 aa, Homo Sapiens
APRAKSVRA

SEQ ID NO: 82851 - protein, 9 aa, Homo Sapiens
RAKSVRAKK

SEQ ID NO: 82852 - protein, 9 aa, Homo Sapiens
SVRAKKPIK

SEQ ID NO: 82853 - protein, 9 aa, Homo Sapiens
LEESDEDDL

SEQ ID NO: 82854 - protein, 9 aa, Homo Sapiens
EESDEDDLF

SEQ ID NO: 82855 - protein, 10 aa, Homo Sapiens
SPLQPVNENM

SEQ ID NO: 82856 - protein, 10 aa, Homo Sapiens
LQPVNENMQV

SEQ ID NO: 82857 - protein, 10 aa, Homo Sapiens
PVNENMQVNK

SEQ ID NO: 82858 - protein, 10 aa, Homo Sapiens
ENMQVNKIKK

SEQ ID NO: 82859 - protein, 10 aa, Homo Sapiens
KIKKNEDAKK

SEQ ID NO: 82860 - protein, 10 aa, Homo Sapiens
DAKKRLSVER

SEQ ID NO: 82861 - protein, 10 aa, Homo Sapiens
RLSVERIYQK

SEQ ID NO: 82862 - protein, 10 aa, Homo Sapiens
LSVERIYQKK

SEQ ID NO: 82863 - protein, 10 aa, Homo Sapiens
YQKKTQLEHI

SEQ ID NO: 82864 - protein, 10 aa, Homo Sapiens
KTQLEHILLR

SEQ ID NO: 82865 - protein, 10 aa, Homo Sapiens
TQLEHILLRP

SEQ ID NO: 82866 - protein, 10 aa, Homo Sapiens
HILLRPDTYI

SEQ ID NO: 82867 - protein, 10 aa, Homo Sapiens
LLRPDTYIGS

SEQ ID NO: 82868 - protein, 10 aa, Homo Sapiens
DTYIGSVELV

SEQ ID NO: 82869 - protein, 10 aa, Homo Sapiens
YIGSVELVTQ

SEQ ID NO: 82870 - protein, 10 aa, Homo Sapiens
VELVTQQMWV

SEQ ID NO: 82871 - protein, 10 aa, Homo Sapiens
ELVTQQMWVY

SEQ ID NO: 82872 - protein, 10 aa, Homo Sapiens
QQMWVYDEDV

SEQ ID NO: 82873 - protein, 10 aa, Homo Sapiens
VYDEDVGINY

SEQ ID NO: 82874 - protein, 10 aa, Homo Sapiens
EDVGINYREV

SEQ ID NO: 82875 - protein, 10 aa, Homo Sapiens
GINYREVTFV

SEQ ID NO: 82876 - protein, 10 aa, Homo Sapiens
YREVTFVPGL

SEQ ID NO: 82877 - protein, 10 aa, Homo Sapiens
REVTFVPGLY

SEQ ID NO: 82878 - protein, 10 aa, Homo Sapiens
EVTFVPGLYK

SEQ ID NO: 82879 - protein, 10 aa, Homo Sapiens
VTFVPGLYKI

SEQ ID NO: 82880 - protein, 10 aa, Homo Sapiens
TFVPGLYKIF

SEQ ID NO: 82881 - protein, 10 aa, Homo Sapiens
GLYKIFDEIL

SEQ ID NO: 82882 - protein, 10 aa, Homo Sapiens
KIFDEILVNA

SEQ ID NO: 82883 - protein, 10 aa, Homo Sapiens
EILVNAADNK

SEQ ID NO: 82884 - protein, 10 aa, Homo Sapiens
LVNAADNKQR

SEQ ID NO: 82885 - protein, 10 aa, Homo Sapiens
AADNKQRDPK

SEQ ID NO: 82886 - protein, 10 aa, Homo Sapiens
VTIDPENNLI

SEQ ID NO: 82887 - protein, 10 aa, Homo Sapiens
DPENNLISIW

SEQ ID NO: 82888 - protein, 10 aa, Homo Sapiens
NLISIWNNGK

SEQ ID NO: 82889 - protein, 10 aa, Homo Sapiens
KGIPVVEHKV

SEQ ID NO: 82890 - protein, 10 aa, Homo Sapiens
PVVEHKVEKM

SEQ ID NO: 82891 - protein, 10 aa, Homo Sapiens
VEHKVEKMYV

SEQ ID NO: 82892 - protein, 10 aa, Homo Sapiens
KVEKMYVPAL

SEQ ID NO: 82893 - protein, 10 aa, Homo Sapiens
KMYVPALIFG

SEQ ID NO: 82894 - protein, 10 aa, Homo Sapiens
YVPALIFGQL

SEQ ID NO: 82895 - protein, 10 aa, Homo Sapiens
VPALIFGQLL

SEQ ID NO: 82896 - protein, 10 aa, Homo Sapiens
ALIFGQLLTS

SEQ ID NO: 82897 - protein, 10 aa, Homo Sapiens
TSSNYDDDEK

SEQ ID NO: 82898 - protein, 10 aa, Homo Sapiens
SSNYDDDEKK

SEQ ID NO: 82899 - protein, 10 aa, Homo Sapiens
GYGAKLCNIF

SEQ ID NO: 82900 - protein, 10 aa, Homo Sapiens
AKLCNIFSTK

SEQ ID NO: 82901 - protein, 10 aa, Homo Sapiens
KLCNIFSTKF

SEQ ID NO: 82902 - protein, 10 aa, Homo Sapiens
TKFTVETASR

SEQ ID NO: 82903 - protein, 10 aa, Homo Sapiens
FTVETASREY

SEQ ID NO: 82904 - protein, 10 aa, Homo Sapiens
TVETASREYK

SEQ ID NO: 82905 - protein, 10 aa, Homo Sapiens
ETASREYKKM

SEQ ID NO: 82906 - protein, 10 aa, Homo Sapiens
ASREYKKMFK

SEQ ID NO: 82907 - protein, 10 aa, Homo Sapiens
EYKKMFKQTW

SEQ ID NO: 82908 - protein, 10 aa, Homo Sapiens
KQTWMDNMGR

SEQ ID NO: 82909 - protein, 10 aa, Homo Sapiens
QTWMDNMGRA

SEQ ID NO: 82910 - protein, 10 aa, Homo Sapiens
NMGRAGEMEL

SEQ ID NO: 82911 - protein, 10 aa, Homo Sapiens
MGRAGEMELK

SEQ ID NO: 82912 - protein, 10 aa, Homo Sapiens
RAGEMELKPF

SEQ ID NO: 82913 - protein, 10 aa, Homo Sapiens
ELKPFNGEDY

SEQ ID NO: 82914 - protein, 10 aa, Homo Sapiens
CITFQPDLSK

SEQ ID NO: 82915 - protein, 10 aa, Homo Sapiens
ITFQPDLSKF

SEQ ID NO: 82916 - protein, 10 aa, Homo Sapiens
TFQPDLSKFK

SEQ ID NO: 82917 - protein, 10 aa, Homo Sapiens
FQPDLSKFKM

SEQ ID NO: 82918 - protein, 10 aa, Homo Sapiens
DLSKFKMQSL

SEQ ID NO: 82919 - protein, 10 aa, Homo Sapiens
KMQSLDKDIV

SEQ ID NO: 82920 - protein, 10 aa, Homo Sapiens
MQSLDKDIVA

SEQ ID NO: 82921 - protein, 10 aa, Homo Sapiens
SLDKDIVALM

SEQ ID NO: 82922 - protein, 10 aa, Homo Sapiens
IVALMVRRAY

SEQ ID NO: 82923 - protein, 10 aa, Homo Sapiens
ALMVRRAYDI

SEQ ID NO: 82924 - protein, 10 aa, Homo Sapiens
LMVRRAYDIA

SEQ ID NO: 82925 - protein, 10 aa, Homo Sapiens
RAYDIAGSTK

SEQ ID NO: 82926 - protein, 10 aa, Homo Sapiens
DIAGSTKDVK

SEQ ID NO: 82927 - protein, 10 aa, Homo Sapiens
DVKVFLNGNK

SEQ ID NO: 82928 - protein, 10 aa, Homo Sapiens
VFLNGNKLPV

SEQ ID NO: 82929 - protein, 10 aa, Homo Sapiens
FLNGNKLPVK

SEQ ID NO: 82930 - protein, 10 aa, Homo Sapiens
GNKLPVKGFR

SEQ ID NO: 82931 - protein, 10 aa, Homo Sapiens
KLPVKGFRSY

SEQ ID NO: 82932 - protein, 10 aa, Homo Sapiens
LPVKGFRSYV

SEQ ID NO: 82933 - protein, 10 aa, Homo Sapiens
GFRSYVDMYL

SEQ ID NO: 82934 - protein, 10 aa, Homo Sapiens
FRSYVDMYLK

SEQ ID NO: 82935 - protein, 10 aa, Homo Sapiens
SYVDMYLKDK

SEQ ID NO: 82936 - protein, 10 aa, Homo Sapiens
YVDMYLKDKL

SEQ ID NO: 82937 - protein, 10 aa, Homo Sapiens
YLKDKLDETG

SEQ ID NO: 82938 - protein, 10 aa, Homo Sapiens
KLDETGNSLK

SEQ ID NO: 82939 - protein, 10 aa, Homo Sapiens
NSLKVIHEQV

SEQ ID NO: 82940 - protein, 10 aa, Homo Sapiens
KVIHEQVNHR

SEQ ID NO: 82941 - protein, 10 aa, Homo Sapiens
HEQVNHRWEV

SEQ ID NO: 82942 - protein, 10 aa, Homo Sapiens
QVNHRWEVCL

SEQ ID NO: 82943 - protein, 10 aa, Homo Sapiens
TMSEKGFQQI

SEQ ID NO: 82944 - protein, 10 aa, Homo Sapiens
SEKGFQQISF

SEQ ID NO: 82945 - protein, 10 aa, Homo Sapiens
EKGFQQISFV

SEQ ID NO: 82946 - protein, 10 aa, Homo Sapiens
FQQISFVNSI

SEQ ID NO: 82947 - protein, 10 aa, Homo Sapiens
QQISFVNSIA

SEQ ID NO: 82948 - protein, 10 aa, Homo Sapiens
SFVNSIATSK

SEQ ID NO: 82949 - protein, 10 aa, Homo Sapiens
NSIATSKGGR

SEQ ID NO: 82950 - protein, 10 aa, Homo Sapiens
TSKGGRHVDY

SEQ ID NO: 82951 - protein, 10 aa, Homo Sapiens
SKGGRHVDYV

SEQ ID NO: 82952 - protein, 10 aa, Homo Sapiens
HVDYVADQIV

SEQ ID NO: 82953 - protein, 10 aa, Homo Sapiens
DYVADQIVTK

SEQ ID NO: 82954 - protein, 10 aa, Homo Sapiens
YVADQIVTKL

SEQ ID NO: 82955 - protein, 10 aa, Homo Sapiens
VADQIVTKLV

SEQ ID NO: 82956 - protein, 10 aa, Homo Sapiens
QIVTKLVDVV

SEQ ID NO: 82957 - protein, 10 aa, Homo Sapiens
IVTKLVDVVK

SEQ ID NO: 82958 - protein, 10 aa, Homo Sapiens
VTKLVDVVKK

SEQ ID NO: 82959 - protein, 10 aa, Homo Sapiens
KKNKGGVAVK

SEQ ID NO: 82960 - protein, 10 aa, Homo Sapiens
GVAVKAHQVK

SEQ ID NO: 82961 - protein, 10 aa, Homo Sapiens
KAHQVKNHMW

SEQ ID NO: 82962 - protein, 10 aa, Homo Sapiens
HQVKNHMWIF

SEQ ID NO: 82963 - protein, 10 aa, Homo Sapiens
QVKNHMWIFV

SEQ ID NO: 82964 - protein, 10 aa, Homo Sapiens
NHMWIFVNAL

SEQ ID NO: 82965 - protein, 10 aa, Homo Sapiens
HMWIFVNALI

SEQ ID NO: 82966 - protein, 10 aa, Homo Sapiens
FVNALIENPT

SEQ ID NO: 82967 - protein, 10 aa, Homo Sapiens
TLQPKSFGST

SEQ ID NO: 82968 - protein, 10 aa, Homo Sapiens
CQLSEKFIKA

SEQ ID NO: 82969 - protein, 10 aa, Homo Sapiens
QLSEKFIKAA

SEQ ID NO: 82970 - protein, 10 aa, Homo Sapiens
FIKAAIGCGI

SEQ ID NO: 82971 - protein, 10 aa, Homo Sapiens
AIGCGIVESI

SEQ ID NO: 82972 - protein, 10 aa, Homo Sapiens
CGIVESILNW

SEQ ID NO: 82973 - protein, 10 aa, Homo Sapiens
GIVESILNWV

SEQ ID NO: 82974 - protein, 10 aa, Homo Sapiens
IVESILNWVK

SEQ ID NO: 82975 - protein, 10 aa, Homo Sapiens
VESILNWVKF

SEQ ID NO: 82976 - protein, 10 aa, Homo Sapiens
ESILNWVKFK

SEQ ID NO: 82977 - protein, 10 aa, Homo Sapiens
SILNWVKFKA

SEQ ID NO: 82978 - protein, 10 aa, Homo Sapiens
ILNWVKFKAQ

SEQ ID NO: 82979 - protein, 10 aa, Homo Sapiens
KFKAQVQLNK

SEQ ID NO: 82980 - protein, 10 aa, Homo Sapiens
VQLNKKCSAV

SEQ ID NO: 82981 - protein, 10 aa, Homo Sapiens
QLNKKCSAVK

SEQ ID NO: 82982 - protein, 10 aa, Homo Sapiens
KKCSAVKHNR

SEQ ID NO: 82983 - protein, 10 aa, Homo Sapiens
KHNRIKGIPK

SEQ ID NO: 82984 - protein, 10 aa, Homo Sapiens
IPKLDDANDA

SEQ ID NO: 82985 - protein, 10 aa, Homo Sapiens
KLDDANDAGG

SEQ ID NO: 82986 - protein, 10 aa, Homo Sapiens
LILTEGDSAK

SEQ ID NO: 82987 - protein, 10 aa, Homo Sapiens
ILTEGDSAKT

SEQ ID NO: 82988 - protein, 10 aa, Homo Sapiens
SAKTLAVSGL

SEQ ID NO: 82989 - protein, 10 aa, Homo Sapiens
KTLAVSGLGV

SEQ ID NO: 82990 - protein, 10 aa, Homo Sapiens
TLAVSGLGVV

SEQ ID NO: 82991 - protein, 10 aa, Homo Sapiens
AVSGLGVVGR

SEQ ID NO: 82992 - protein, 10 aa, Homo Sapiens
GVVGRDKYGV

SEQ ID NO: 82993 - protein, 10 aa, Homo Sapiens
GRDKYGVFPL

SEQ ID NO: 82994 - protein, 10 aa, Homo Sapiens
KYGVFPLRGK

SEQ ID NO: 82995 - protein, 10 aa, Homo Sapiens
FPLRGKILNV

SEQ ID NO: 82996 - protein, 10 aa, Homo Sapiens
PLRGKILNVR

SEQ ID NO: 82997 - protein, 10 aa, Homo Sapiens
ILNVREASHK

SEQ ID NO: 82998 - protein, 10 aa, Homo Sapiens
MENAEINNII

SEQ ID NO: 82999 - protein, 10 aa, Homo Sapiens
ENAEINNIIK

SEQ ID NO: 83000 - protein, 10 aa, Homo Sapiens
AEINNIIKIV

SEQ ID NO: 83001 - protein, 10 aa, Homo Sapiens
NIIKIVGLQY

SEQ ID NO: 83002 - protein, 10 aa, Homo Sapiens
IIKIVGLQYK

SEQ ID NO: 83003 - protein, 10 aa, Homo Sapiens
YEDEDSLKTL

SEQ ID NO: 83004 - protein, 10 aa, Homo Sapiens
DEDSLKTLRY

SEQ ID NO: 83005 - protein, 10 aa, Homo Sapiens
DSLKTLRYGK

SEQ ID NO: 83006 - protein, 10 aa, Homo Sapiens
SLKTLRYGKI

SEQ ID NO: 83007 - protein, 10 aa, Homo Sapiens
SHIKGLLINF

SEQ ID NO: 83008 - protein, 10 aa, Homo Sapiens
HIKGLLINFI

SEQ ID NO: 83009 - protein, 10 aa, Homo Sapiens
LLINFIHHNW

SEQ ID NO: 83010 - protein, 10 aa, Homo Sapiens
NFIHHNWPSL

SEQ ID NO: 83011 - protein, 10 aa, Homo Sapiens
FIHHNWPSLL

SEQ ID NO: 83012 - protein, 10 aa, Homo Sapiens
NWPSLLRHRF

SEQ ID NO: 83013 - protein, 10 aa, Homo Sapiens
WPSLLRHRFL

SEQ ID NO: 83014 - protein, 10 aa, Homo Sapiens
SLLRHRFLEE

SEQ ID NO: 83015 - protein, 10 aa, Homo Sapiens
LLRHRFLEEF

SEQ ID NO: 83016 - protein, 10 aa, Homo Sapiens
FLEEFITPIV

SEQ ID NO: 83017 - protein, 10 aa, Homo Sapiens
EEFITPIVKV

SEQ ID NO: 83018 - protein, 10 aa, Homo Sapiens
FITPIVKVSK

SEQ ID NO: 83019 - protein, 10 aa, Homo Sapiens
VSKNKQEMAF

SEQ ID NO: 83020 - protein, 10 aa, Homo Sapiens
EMAFYSLPEF

SEQ ID NO: 83021 - protein, 10 aa, Homo Sapiens
MAFYSLPEFE

SEQ ID NO: 83022 - protein, 10 aa, Homo Sapiens
FYSLPEFEEW

SEQ ID NO: 83023 - protein, 10 aa, Homo Sapiens
YSLPEFEEWK

SEQ ID NO: 83024 - protein, 10 aa, Homo Sapiens
SLPEFEEWKS

SEQ ID NO: 83025 - protein, 10 aa, Homo Sapiens
EWKSSTPNHK

SEQ ID NO: 83026 - protein, 10 aa, Homo Sapiens
KSSTPNHKKW

SEQ ID NO: 83027 - protein, 10 aa, Homo Sapiens
SSTPNHKKWK

SEQ ID NO: 83028 - protein, 10 aa, Homo Sapiens
STPNHKKWKV

SEQ ID NO: 83029 - protein, 10 aa, Homo Sapiens
HKKWKVKYYK

SEQ ID NO: 83030 - protein, 10 aa, Homo Sapiens
GLGTSTSKEA

SEQ ID NO: 83031 - protein, 10 aa, Homo Sapiens
STSKEAKEYF

SEQ ID NO: 83032 - protein, 10 aa, Homo Sapiens
KEAKEYFADM

SEQ ID NO: 83033 - protein, 10 aa, Homo Sapiens
EAKEYFADMK

SEQ ID NO: 83034 - protein, 10 aa, Homo Sapiens
EYFADMKRHR

SEQ ID NO: 83035 - protein, 10 aa, Homo Sapiens
YFADMKRHRI

SEQ ID NO: 83036 - protein, 10 aa, Homo Sapiens
DMKRHRIQFK

SEQ ID NO: 83037 - protein, 10 aa, Homo Sapiens
GPEDDAAISL

SEQ ID NO: 83038 - protein, 10 aa, Homo Sapiens
DAAISLAFSK

SEQ ID NO: 83039 - protein, 10 aa, Homo Sapiens
AAISLAFSKK

SEQ ID NO: 83040 - protein, 10 aa, Homo Sapiens
FSKKQIDDRK

SEQ ID NO: 83041 - protein, 10 aa, Homo Sapiens
KQIDDRKEWL

SEQ ID NO: 83042 - protein, 10 aa, Homo Sapiens
QIDDRKEWLT

SEQ ID NO: 83043 - protein, 10 aa, Homo Sapiens
WLTNFMEDRR

SEQ ID NO: 83044 - protein, 10 aa, Homo Sapiens
TNFMEDRRQR

SEQ ID NO: 83045 - protein, 10 aa, Homo Sapiens
NFMEDRRQRK

SEQ ID NO: 83046 - protein, 10 aa, Homo Sapiens
FMEDRRQRKL

SEQ ID NO: 83047 - protein, 10 aa, Homo Sapiens
KLLGLPEDYL

SEQ ID NO: 83048 - protein, 10 aa, Homo Sapiens
GLPEDYLYGQ

SEQ ID NO: 83049 - protein, 10 aa, Homo Sapiens
LPEDYLYGQT

SEQ ID NO: 83050 - protein, 10 aa, Homo Sapiens
DYLYGQTTTY

SEQ ID NO: 83051 - protein, 10 aa, Homo Sapiens
YLYGQTTTYL

SEQ ID NO: 83052 - protein, 10 aa, Homo Sapiens
YGQTTTYLTY

SEQ ID NO: 83053 - protein, 10 aa, Homo Sapiens
TTTYLTYNDF

SEQ ID NO: 83054 - protein, 10 aa, Homo Sapiens
TTYLTYNDFI

SEQ ID NO: 83055 - protein, 10 aa, Homo Sapiens
YLTYNDFINK

SEQ ID NO: 83056 - protein, 10 aa, Homo Sapiens
TYNDFINKEL

SEQ ID NO: 83057 - protein, 10 aa, Homo Sapiens
DFINKELILF

SEQ ID NO: 83058 - protein, 10 aa, Homo Sapiens
ILFSNSDNER

SEQ ID NO: 83059 - protein, 10 aa, Homo Sapiens
RSIPSMVDGL

SEQ ID NO: 83060 - protein, 10 aa, Homo Sapiens
SIPSMVDGLK

SEQ ID NO: 83061 - protein, 10 aa, Homo Sapiens
SMVDGLKPGQ

SEQ ID NO: 83062 - protein, 10 aa, Homo Sapiens
MVDGLKPGQR

SEQ ID NO: 83063 - protein, 10 aa, Homo Sapiens
GLKPGQRKVL

SEQ ID NO: 83064 - protein, 10 aa, Homo Sapiens
KPGQRKVLFT

SEQ ID NO: 83065 - protein, 10 aa, Homo Sapiens
GQRKVLFTCF

SEQ ID NO: 83066 - protein, 10 aa, Homo Sapiens
QRKVLFTCFK

SEQ ID NO: 83067 - protein, 10 aa, Homo Sapiens
RKVLFTCFKR

SEQ ID NO: 83068 - protein, 10 aa, Homo Sapiens
LFTCFKRNDK

SEQ ID NO: 83069 - protein, 10 aa, Homo Sapiens
FTCFKRNDKR

SEQ ID NO: 83070 - protein, 10 aa, Homo Sapiens
AQLAGSVAEM

SEQ ID NO: 83071 - protein, 10 aa, Homo Sapiens
SVAEMSSYHH

SEQ ID NO: 83072 - protein, 10 aa, Homo Sapiens
EMSSYHHGEM

SEQ ID NO: 83073 - protein, 10 aa, Homo Sapiens
SYHHGEMSLM

SEQ ID NO: 83074 - protein, 10 aa, Homo Sapiens
YHHGEMSLMM

SEQ ID NO: 83075 - protein, 10 aa, Homo Sapiens
GEMSLMMTII

SEQ ID NO: 83076 - protein, 10 aa, Homo Sapiens
SLMMTIINLA

SEQ ID NO: 83077 - protein, 10 aa, Homo Sapiens
LMMTIINLAQ

SEQ ID NO: 83078 - protein, 10 aa, Homo Sapiens
MTIINLAQNF

SEQ ID NO: 83079 - protein, 10 aa, Homo Sapiens
TIINLAQNFV

SEQ ID NO: 83080 - protein, 10 aa, Homo Sapiens
AQNFVGSNNL

SEQ ID NO: 83081 - protein, 10 aa, Homo Sapiens
NFVGSNNLNL

SEQ ID NO: 83082 - protein, 10 aa, Homo Sapiens
FVGSNNLNLL

SEQ ID NO: 83083 - protein, 10 aa, Homo Sapiens
LLQPIGQFGT

SEQ ID NO: 83084 - protein, 10 aa, Homo Sapiens
QPIGQFGTRL

SEQ ID NO: 83085 - protein, 10 aa, Homo Sapiens
SASPRYIFTM

SEQ ID NO: 83086 - protein, 10 aa, Homo Sapiens
SPRYIFTMLS

SEQ ID NO: 83087 - protein, 10 aa, Homo Sapiens
RYIFTMLSSL

SEQ ID NO: 83088 - protein, 10 aa, Homo Sapiens
YIFTMLSSLA

SEQ ID NO: 83089 - protein, 10 aa, Homo Sapiens
IFTMLSSLAR

SEQ ID NO: 83090 - protein, 10 aa, Homo Sapiens
FTMLSSLARL

SEQ ID NO: 83091 - protein, 10 aa, Homo Sapiens
TMLSSLARLL

SEQ ID NO: 83092 - protein, 10 aa, Homo Sapiens
MLSSLARLLF

SEQ ID NO: 83093 - protein, 10 aa, Homo Sapiens
SLARLLFPPK

SEQ ID NO: 83094 - protein, 10 aa, Homo Sapiens
LLFPPKDDHT

SEQ ID NO: 83095 - protein, 10 aa, Homo Sapiens
LFPPKDDHTL

SEQ ID NO: 83096 - protein, 10 aa, Homo Sapiens
FLYDDNQRVE

SEQ ID NO: 83097 - protein, 10 aa, Homo Sapiens
RVEPEWYIPI

SEQ ID NO: 83098 - protein, 10 aa, Homo Sapiens
VEPEWYIPII

SEQ ID NO: 83099 - protein, 10 aa, Homo Sapiens
EWYIPIIPMV

SEQ ID NO: 83100 - protein, 10 aa, Homo Sapiens
WYIPIIPMVL

SEQ ID NO: 83101 - protein, 10 aa, Homo Sapiens
YIPIIPMVLI

SEQ ID NO: 83102 - protein, 10 aa, Homo Sapiens
IIPMVLINGA

SEQ ID NO: 83103 - protein, 10 aa, Homo Sapiens
IPMVLINGAE

SEQ ID NO: 83104 - protein, 10 aa, Homo Sapiens
MVLINGAEGI

SEQ ID NO: 83105 - protein, 10 aa, Homo Sapiens
EGIGTGWSCK

SEQ ID NO: 83106 - protein, 10 aa, Homo Sapiens
GIGTGWSCKI

SEQ ID NO: 83107 - protein, 10 aa, Homo Sapiens
WSCKIPNFDV

SEQ ID NO: 83108 - protein, 10 aa, Homo Sapiens
KIPNFDVREI

SEQ ID NO: 83109 - protein, 10 aa, Homo Sapiens
IPNFDVREIV

SEQ ID NO: 83110 - protein, 10 aa, Homo Sapiens
DVREIVNNIR

SEQ ID NO: 83111 - protein, 10 aa, Homo Sapiens
REIVNNIRRL

SEQ ID NO: 83112 - protein, 10 aa, Homo Sapiens
EIVNNIRRLM

SEQ ID NO: 83113 - protein, 10 aa, Homo Sapiens
RRLMDGEEPL

SEQ ID NO: 83114 - protein, 10 aa, Homo Sapiens
RLMDGEEPLP

SEQ ID NO: 83115 - protein, 10 aa, Homo Sapiens
LMDGEEPLPM

SEQ ID NO: 83116 - protein, 10 aa, Homo Sapiens
EEPLPMLPSY

SEQ ID NO: 83117 - protein, 10 aa, Homo Sapiens
LPMLPSYKNF

SEQ ID NO: 83118 - protein, 10 aa, Homo Sapiens
PMLPSYKNFK

SEQ ID NO: 83119 - protein, 10 aa, Homo Sapiens
LPSYKNFKGT

SEQ ID NO: 83120 - protein, 10 aa, Homo Sapiens
EELAPNQYVI

SEQ ID NO: 83121 - protein, 10 aa, Homo Sapiens
NQYVISGEVA

SEQ ID NO: 83122 - protein, 10 aa, Homo Sapiens
QYVISGEVAI

SEQ ID NO: 83123 - protein, 10 aa, Homo Sapiens
YVISGEVAIL

SEQ ID NO: 83124 - protein, 10 aa, Homo Sapiens
EVAILNSTTI

SEQ ID NO: 83125 - protein, 10 aa, Homo Sapiens
AILNSTTIEI

SEQ ID NO: 83126 - protein, 10 aa, Homo Sapiens
NSTTIEISEL

SEQ ID NO: 83127 - protein, 10 aa, Homo Sapiens
TTIEISELPV

SEQ ID NO: 83128 - protein, 10 aa, Homo Sapiens
TIEISELPVR

SEQ ID NO: 83129 - protein, 10 aa, Homo Sapiens
LPVRTWTQTY

SEQ ID NO: 83130 - protein, 10 aa, Homo Sapiens
PVRTWTQTYK

SEQ ID NO: 83131 - protein, 10 aa, Homo Sapiens
QVLEPMLNGT

SEQ ID NO: 83132 - protein, 10 aa, Homo Sapiens
KTPPLITDYR

SEQ ID NO: 83133 - protein, 10 aa, Homo Sapiens
PPLITDYREY

SEQ ID NO: 83134 - protein, 10 aa, Homo Sapiens
EYHTDTTVKF

SEQ ID NO: 83135 - protein, 10 aa, Homo Sapiens
YHTDTTVKFV

SEQ ID NO: 83136 - protein, 10 aa, Homo Sapiens
HTDTTVKFVV

SEQ ID NO: 83137 - protein, 10 aa, Homo Sapiens
DTTVKFVVKM

SEQ ID NO: 83138 - protein, 10 aa, Homo Sapiens
KFVVKMTEEK

SEQ ID NO: 83139 - protein, 10 aa, Homo Sapiens
FVVKMTEEKL

SEQ ID NO: 83140 - protein, 10 aa, Homo Sapiens
KMTEEKLAEA

SEQ ID NO: 83141 - protein, 10 aa, Homo Sapiens
EEKLAEAERV

SEQ ID NO: 83142 - protein, 10 aa, Homo Sapiens
KLAEAERVGL

SEQ ID NO: 83143 - protein, 10 aa, Homo Sapiens
AEAERVGLHK

SEQ ID NO: 83144 - protein, 10 aa, Homo Sapiens
EAERVGLHKV

SEQ ID NO: 83145 - protein, 10 aa, Homo Sapiens
AERVGLHKVF

SEQ ID NO: 83146 - protein, 10 aa, Homo Sapiens
RVGLHKVFKL

SEQ ID NO: 83147 - protein, 10 aa, Homo Sapiens
GLHKVFKLQT

SEQ ID NO: 83148 - protein, 10 aa, Homo Sapiens
LQTSLTCNSM

SEQ ID NO: 83149 - protein, 10 aa, Homo Sapiens
QTSLTCNSMV

SEQ ID NO: 83150 - protein, 10 aa, Homo Sapiens
SLTCNSMVLF

SEQ ID NO: 83151 - protein, 10 aa, Homo Sapiens
SMVLFDHVGC

SEQ ID NO: 83152 - protein, 10 aa, Homo Sapiens
MVLFDHVGCL

SEQ ID NO: 83153 - protein, 10 aa, Homo Sapiens
VLFDHVGCLK

SEQ ID NO: 83154 - protein, 10 aa, Homo Sapiens
LFDHVGCLKK

SEQ ID NO: 83155 - protein, 10 aa, Homo Sapiens
KYDTVLDILR

SEQ ID NO: 83156 - protein, 10 aa, Homo Sapiens
DTVLDILRDF

SEQ ID NO: 83157 - protein, 10 aa, Homo Sapiens
TVLDILRDFF

SEQ ID NO: 83158 - protein, 10 aa, Homo Sapiens
DILRDFFELR

SEQ ID NO: 83159 - protein, 10 aa, Homo Sapiens
ILRDFFELRL

SEQ ID NO: 83160 - protein, 10 aa, Homo Sapiens
DFFELRLKYY

SEQ ID NO: 83161 - protein, 10 aa, Homo Sapiens
FELRLKYYGL

SEQ ID NO: 83162 - protein, 10 aa, Homo Sapiens
ELRLKYYGLR

SEQ ID NO: 83163 - protein, 10 aa, Homo Sapiens
LRLKYYGLRK

SEQ ID NO: 83164 - protein, 10 aa, Homo Sapiens
KYYGLRKEWL

SEQ ID NO: 83165 - protein, 10 aa, Homo Sapiens
YYGLRKEWLL

SEQ ID NO: 83166 - protein, 10 aa, Homo Sapiens
GLRKEWLLGM

SEQ ID NO: 83167 - protein, 10 aa, Homo Sapiens
WLLGMLGAES

SEQ ID NO: 83168 - protein, 10 aa, Homo Sapiens
LLGMLGAESA

SEQ ID NO: 83169 - protein, 10 aa, Homo Sapiens
GMLGAESAKL

SEQ ID NO: 83170 - protein, 10 aa, Homo Sapiens
AESAKLNNQA

SEQ ID NO: 83171 - protein, 10 aa, Homo Sapiens
ESAKLNNQAR

SEQ ID NO: 83172 - protein, 10 aa, Homo Sapiens
KLNNQARFIL

SEQ ID NO: 83173 - protein, 10 aa, Homo Sapiens
NQARFILEKI

SEQ ID NO: 83174 - protein, 10 aa, Homo Sapiens
RFILEKIDGK

SEQ ID NO: 83175 - protein, 10 aa, Homo Sapiens
FILEKIDGKI

SEQ ID NO: 83176 - protein, 10 aa, Homo Sapiens
KIIIENKPKK

SEQ ID NO: 83177 - protein, 10 aa, Homo Sapiens
KPKKELIKVL

SEQ ID NO: 83178 - protein, 10 aa, Homo Sapiens
KELIKVLIQR

SEQ ID NO: 83179 - protein, 10 aa, Homo Sapiens
LIKVLIQRGY

SEQ ID NO: 83180 - protein, 10 aa, Homo Sapiens
IQRGYDSDPV

SEQ ID NO: 83181 - protein, 10 aa, Homo Sapiens
GYDSDPVKAW

SEQ ID NO: 83182 - protein, 10 aa, Homo Sapiens
KAWKEAQQKV

SEQ ID NO: 83183 - protein, 10 aa, Homo Sapiens
DSVTDSGPTF

SEQ ID NO: 83184 - protein, 10 aa, Homo Sapiens
VTDSGPTFNY

SEQ ID NO: 83185 - protein, 10 aa, Homo Sapiens
TDSGPTFNYL

SEQ ID NO: 83186 - protein, 10 aa, Homo Sapiens
DSGPTFNYLL

SEQ ID NO: 83187 - protein, 10 aa, Homo Sapiens
GPTFNYLLDM

SEQ ID NO: 83188 - protein, 10 aa, Homo Sapiens
NYLLDMPLWY

SEQ ID NO: 83189 - protein, 10 aa, Homo Sapiens
YLLDMPLWYL

SEQ ID NO: 83190 - protein, 10 aa, Homo Sapiens
LLDMPLWYLT

SEQ ID NO: 83191 - protein, 10 aa, Homo Sapiens
LDMPLWYLTK

SEQ ID NO: 83192 - protein, 10 aa, Homo Sapiens
MPLWYLTKEK

SEQ ID NO: 83193 - protein, 10 aa, Homo Sapiens
YLTKEKKDEL

SEQ ID NO: 83194 - protein, 10 aa, Homo Sapiens
KEKKDELCRL

SEQ ID NO: 83195 - protein, 10 aa, Homo Sapiens
RLRNEKEQEL

SEQ ID NO: 83196 - protein, 10 aa, Homo Sapiens
TLKRKSPSDL

SEQ ID NO: 83197 - protein, 10 aa, Homo Sapiens
KRKSPSDLWK

SEQ ID NO: 83198 - protein, 10 aa, Homo Sapiens
SPSDLWKEDL

SEQ ID NO: 83199 - protein, 10 aa, Homo Sapiens
DLWKEDLATF

SEQ ID NO: 83200 - protein, 10 aa, Homo Sapiens
ATFIEELEAV

SEQ ID NO: 83201 - protein, 10 aa, Homo Sapiens
FIEELEAVEA

SEQ ID NO: 83202 - protein, 10 aa, Homo Sapiens
ELEAVEAKEK

SEQ ID NO: 83203 - protein, 10 aa, Homo Sapiens
KEKQDEQVGL

SEQ ID NO: 83204 - protein, 10 aa, Homo Sapiens
QVGLPGKGGK

SEQ ID NO: 83205 - protein, 10 aa, Homo Sapiens
GLPGKGGKAK

SEQ ID NO: 83206 - protein, 10 aa, Homo Sapiens
TQMAEVLPSP

SEQ ID NO: 83207 - protein, 10 aa, Homo Sapiens
QMAEVLPSPR

SEQ ID NO: 83208 - protein, 10 aa, Homo Sapiens
AEVLPSPRGQ

SEQ ID NO: 83209 - protein, 10 aa, Homo Sapiens
EVLPSPRGQR

SEQ ID NO: 83210 - protein, 10 aa, Homo Sapiens
VLPSPRGQRV

SEQ ID NO: 83211 - protein, 10 aa, Homo Sapiens
LPSPRGQRVI

SEQ ID NO: 83212 - protein, 10 aa, Homo Sapiens
SPRGQRVIPR

SEQ ID NO: 83213 - protein, 10 aa, Homo Sapiens
RVIPRITIEM

SEQ ID NO: 83214 - protein, 10 aa, Homo Sapiens
VIPRITIEMK

SEQ ID NO: 83215 - protein, 10 aa, Homo Sapiens
TIEMKAEAEK

SEQ ID NO: 83216 - protein, 10 aa, Homo Sapiens
QEDGVELEGL

SEQ ID NO: 83217 - protein, 10 aa, Homo Sapiens
VELEGLKQRL

SEQ ID NO: 83218 - protein, 10 aa, Homo Sapiens
KQRLEKKQKR

SEQ ID NO: 83219 - protein, 10 aa, Homo Sapiens
QKREPGTKTK

SEQ ID NO: 83220 - protein, 10 aa, Homo Sapiens
KREPGTKTKK

SEQ ID NO: 83221 - protein, 10 aa, Homo Sapiens
KTKKQTTLAF

SEQ ID NO: 83222 - protein, 10 aa, Homo Sapiens
TKKQTTLAFK

SEQ ID NO: 83223 - protein, 10 aa, Homo Sapiens
KQTTLAFKPI

SEQ ID NO: 83224 - protein, 10 aa, Homo Sapiens
QTTLAFKPIK

SEQ ID NO: 83225 - protein, 10 aa, Homo Sapiens
TTLAFKPIKK

SEQ ID NO: 83226 - protein, 10 aa, Homo Sapiens
LAFKPIKKGK

SEQ ID NO: 83227 - protein, 10 aa, Homo Sapiens
AFKPIKKGKK

SEQ ID NO: 83228 - protein, 10 aa, Homo Sapiens
DVPPRETEPR

SEQ ID NO: 83229 - protein, 10 aa, Homo Sapiens
ETEPRRAATK

SEQ ID NO: 83230 - protein, 10 aa, Homo Sapiens
EPRRAATKTK

SEQ ID NO: 83231 - protein, 10 aa, Homo Sapiens
RAATKTKFTM

SEQ ID NO: 83232 - protein, 10 aa, Homo Sapiens
FVPSDASPPK

SEQ ID NO: 83233 - protein, 10 aa, Homo Sapiens
SPKLSNKELK

SEQ ID NO: 83234 - protein, 10 aa, Homo Sapiens
LSNKELKPQK

SEQ ID NO: 83235 - protein, 10 aa, Homo Sapiens
KPQKSVVSDL

SEQ ID NO: 83236 - protein, 10 aa, Homo Sapiens
VVSDLEADDV

SEQ ID NO: 83237 - protein, 10 aa, Homo Sapiens
VPLSSSPPAT

SEQ ID NO: 83238 - protein, 10 aa, Homo Sapiens
LSSSPPATHF

SEQ ID NO: 83239 - protein, 10 aa, Homo Sapiens
ETEITNPVPK

SEQ ID NO: 83240 - protein, 10 aa, Homo Sapiens
NPVPKKNVTV

SEQ ID NO: 83241 - protein, 10 aa, Homo Sapiens
NVTVKKTAAK

SEQ ID NO: 83242 - protein, 10 aa, Homo Sapiens
SQSSTSTTGA

SEQ ID NO: 83243 - protein, 10 aa, Homo Sapiens
QSSTSTTGAK

SEQ ID NO: 83244 - protein, 10 aa, Homo Sapiens
SSTSTTGAKK

SEQ ID NO: 83245 - protein, 10 aa, Homo Sapiens
STSTTGAKKR

SEQ ID NO: 83246 - protein, 10 aa, Homo Sapiens
TGAKKRAAPK

SEQ ID NO: 83247 - protein, 10 aa, Homo Sapiens
KKRAAPKGTK

SEQ ID NO: 83248 - protein, 10 aa, Homo Sapiens
KRAAPKGTKR

SEQ ID NO: 83249 - protein, 10 aa, Homo Sapiens
APKGTKRDPA

SEQ ID NO: 83250 - protein, 10 aa, Homo Sapiens
KRDPALNSGV

SEQ ID NO: 83251 - protein, 10 aa, Homo Sapiens
GVSQKPDPAK

SEQ ID NO: 83252 - protein, 10 aa, Homo Sapiens
SQKPDPAKTK

SEQ ID NO: 83253 - protein, 10 aa, Homo Sapiens
PAKTKNRRKR

SEQ ID NO: 83254 - protein, 10 aa, Homo Sapiens
STSDDSDSNF

SEQ ID NO: 83255 - protein, 10 aa, Homo Sapiens
DSNFEKIVSK

SEQ ID NO: 83256 - protein, 10 aa, Homo Sapiens
KIVSKAVTSK

SEQ ID NO: 83257 - protein, 10 aa, Homo Sapiens
IVSKAVTSKK

SEQ ID NO: 83258 - protein, 10 aa, Homo Sapiens
GESDDFHMDF

SEQ ID NO: 83259 - protein, 10 aa, Homo Sapiens
FHMDFDSAVA

SEQ ID NO: 83260 - protein, 10 aa, Homo Sapiens
MDFDSAVAPR

SEQ ID NO: 83261 - protein, 10 aa, Homo Sapiens
SAVAPRAKSV

SEQ ID NO: 83262 - protein, 10 aa, Homo Sapiens
AVAPRAKSVR

SEQ ID NO: 83263 - protein, 10 aa, Homo Sapiens
APRAKSVRAK

SEQ ID NO: 83264 - protein, 10 aa, Homo Sapiens
KSVRAKKPIK

SEQ ID NO: 83265 - protein, 10 aa, Homo Sapiens
SVRAKKPIKY

SEQ ID NO: 83266 - protein, 10 aa, Homo Sapiens
YLEESDEDDL

SEQ ID NO: 83267 - protein, 11 aa, Homo Sapiens
PLQPVNENMQV

SEQ ID NO: 83268 - protein, 11 aa, Homo Sapiens
KIKKNEDAKKR

SEQ ID NO: 83269 - protein, 11 aa, Homo Sapiens
EDAKKRLSVER

SEQ ID NO: 83270 - protein, 11 aa, Homo Sapiens
KRLSVERIYQK

SEQ ID NO: 83271 - protein, 11 aa, Homo Sapiens
RLSVERIYQKK

SEQ ID NO: 83272 - protein, 11 aa, Homo Sapiens
VERIYQKKTQL

SEQ ID NO: 83273 - protein, 11 aa, Homo Sapiens
RIYQKKTQLEH

SEQ ID NO: 83274 - protein, 11 aa, Homo Sapiens
IYQKKTQLEHI

SEQ ID NO: 83275 - protein, 11 aa, Homo Sapiens
YQKKTQLEHIL

SEQ ID NO: 83276 - protein, 11 aa, Homo Sapiens
LLRPDTYIGSV

SEQ ID NO: 83277 - protein, 11 aa, Homo Sapiens
RPDTYIGSVEL

SEQ ID NO: 83278 - protein, 11 aa, Homo Sapiens
YIGSVELVTQQ

SEQ ID NO: 83279 - protein, 11 aa, Homo Sapiens
GSVELVTQQMW

SEQ ID NO: 83280 - protein, 11 aa, Homo Sapiens
SVELVTQQMWV

SEQ ID NO: 83281 - protein, 11 aa, Homo Sapiens
VELVTQQMWVY

SEQ ID NO: 83282 - protein, 11 aa, Homo Sapiens
TQQMWVYDEDV

SEQ ID NO: 83283 - protein, 11 aa, Homo Sapiens
QMWVYDEDVGI

SEQ ID NO: 83284 - protein, 11 aa, Homo Sapiens
WVYDEDVGINY

SEQ ID NO: 83285 - protein, 11 aa, Homo Sapiens
DVGINYREVTF

SEQ ID NO: 83286 - protein, 11 aa, Homo Sapiens
NYREVTFVPGL

SEQ ID NO: 83287 - protein, 11 aa, Homo Sapiens
REVTFVPGLYK

SEQ ID NO: 83288 - protein, 11 aa, Homo Sapiens
EVTFVPGLYKI

SEQ ID NO: 83289 - protein, 11 aa, Homo Sapiens
VTFVPGLYKIF

SEQ ID NO: 83290 - protein, 11 aa, Homo Sapiens
VPGLYKIFDEI

SEQ ID NO: 83291 - protein, 11 aa, Homo Sapiens
GLYKIFDEILV

SEQ ID NO: 83292 - protein, 11 aa, Homo Sapiens
KIFDEILVNAA

SEQ ID NO: 83293 - protein, 11 aa, Homo Sapiens
ILVNAADNKQR

SEQ ID NO: 83294 - protein, 11 aa, Homo Sapiens
NAADNKQRDPK

SEQ ID NO: 83295 - protein, 11 aa, Homo Sapiens
KQRDPKMSCIR

SEQ ID NO: 83296 - protein, 11 aa, Homo Sapiens
TIDPENNLISI

SEQ ID NO: 83297 - protein, 11 aa, Homo Sapiens
LISIWNNGKGI

SEQ ID NO: 83298 - protein, 11 aa, Homo Sapiens
SIWNNGKGIPV

SEQ ID NO: 83299 - protein, 11 aa, Homo Sapiens
GIPVVEHKVEK

SEQ ID NO: 83300 - protein, 11 aa, Homo Sapiens
IPVVEHKVEKM

SEQ ID NO: 83301 - protein, 11 aa, Homo Sapiens
PVVEHKVEKMY

SEQ ID NO: 83302 - protein, 11 aa, Homo Sapiens
VVEHKVEKMYV

SEQ ID NO: 83303 - protein, 11 aa, Homo Sapiens
HKVEKMYVPAL

SEQ ID NO: 83304 - protein, 11 aa, Homo Sapiens
VEKMYVPALIF

SEQ ID NO: 83305 - protein, 11 aa, Homo Sapiens
KMYVPALIFGQ

SEQ ID NO: 83306 - protein, 11 aa, Homo Sapiens
MYVPALIFGQL

SEQ ID NO: 83307 - protein, 11 aa, Homo Sapiens
YVPALIFGQLL

SEQ ID NO: 83308 - protein, 11 aa, Homo Sapiens
VPALIFGQLLT

SEQ ID NO: 83309 - protein, 11 aa, Homo Sapiens
ALIFGQLLTSS

SEQ ID NO: 83310 - protein, 11 aa, Homo Sapiens
IFGQLLTSSNY

SEQ ID NO: 83311 - protein, 11 aa, Homo Sapiens
LTSSNYDDDEK

SEQ ID NO: 83312 - protein, 11 aa, Homo Sapiens
TSSNYDDDEKK

SEQ ID NO: 83313 - protein, 11 aa, Homo Sapiens
KVTGGRNGYGA

SEQ ID NO: 83314 - protein, 11 aa, Homo Sapiens
VTGGRNGYGAK

SEQ ID NO: 83315 - protein, 11 aa, Homo Sapiens
GAKLCNIFSTK

SEQ ID NO: 83316 - protein, 11 aa, Homo Sapiens
KLCNIFSTKFT

SEQ ID NO: 83317 - protein, 11 aa, Homo Sapiens
LCNIFSTKFTV

SEQ ID NO: 83318 - protein, 11 aa, Homo Sapiens
STKFTVETASR

SEQ ID NO: 83319 - protein, 11 aa, Homo Sapiens
KFTVETASREY

SEQ ID NO: 83320 - protein, 11 aa, Homo Sapiens
FTVETASREYK

SEQ ID NO: 83321 - protein, 11 aa, Homo Sapiens
TVETASREYKK

SEQ ID NO: 83322 - protein, 11 aa, Homo Sapiens
ETASREYKKMF

SEQ ID NO: 83323 - protein, 11 aa, Homo Sapiens
TASREYKKMFK

SEQ ID NO: 83324 - protein, 11 aa, Homo Sapiens
REYKKMFKQTW

SEQ ID NO: 83325 - protein, 11 aa, Homo Sapiens
KMFKQTWMDNM

SEQ ID NO: 83326 - protein, 11 aa, Homo Sapiens
KQTWMDNMGRA

SEQ ID NO: 83327 - protein, 11 aa, Homo Sapiens
WMDNMGRAGEM

SEQ ID NO: 83328 - protein, 11 aa, Homo Sapiens
GRAGEMELKPF

SEQ ID NO: 83329 - protein, 11 aa, Homo Sapiens
MELKPFNGEDY

SEQ ID NO: 83330 - protein, 11 aa, Homo Sapiens
ELKPFNGEDYT

SEQ ID NO: 83331 - protein, 11 aa, Homo Sapiens
DYTCITFQPDL

SEQ ID NO: 83332 - protein, 11 aa, Homo Sapiens
ITFQPDLSKFK

SEQ ID NO: 83333 - protein, 11 aa, Homo Sapiens
TFQPDLSKFKM

SEQ ID NO: 83334 - protein, 11 aa, Homo Sapiens
FQPDLSKFKMQ

SEQ ID NO: 83335 - protein, 11 aa, Homo Sapiens
LSKFKMQSLDK

SEQ ID NO: 83336 - protein, 11 aa, Homo Sapiens
FKMQSLDKDIV

SEQ ID NO: 83337 - protein, 11 aa, Homo Sapiens
KMQSLDKDIVA

SEQ ID NO: 83338 - protein, 11 aa, Homo Sapiens
MQSLDKDIVAL

SEQ ID NO: 83339 - protein, 11 aa, Homo Sapiens
SLDKDIVALMV

SEQ ID NO: 83340 - protein, 11 aa, Homo Sapiens
DIVALMVRRAY

SEQ ID NO: 83341 - protein, 11 aa, Homo Sapiens
ALMVRRAYDIA

SEQ ID NO: 83342 - protein, 11 aa, Homo Sapiens
RRAYDIAGSTK

SEQ ID NO: 83343 - protein, 11 aa, Homo Sapiens
DIAGSTKDVKV

SEQ ID NO: 83344 - protein, 11 aa, Homo Sapiens
KVFLNGNKLPV

SEQ ID NO: 83345 - protein, 11 aa, Homo Sapiens
VFLNGNKLPVK

SEQ ID NO: 83346 - protein, 11 aa, Homo Sapiens
FLNGNKLPVKG

SEQ ID NO: 83347 - protein, 11 aa, Homo Sapiens
NGNKLPVKGFR

SEQ ID NO: 83348 - protein, 11 aa, Homo Sapiens
KLPVKGFRSYV

SEQ ID NO: 83349 - protein, 11 aa, Homo Sapiens
LPVKGFRSYVD

SEQ ID NO: 83350 - protein, 11 aa, Homo Sapiens
GFRSYVDMYLK

SEQ ID NO: 83351 - protein, 11 aa, Homo Sapiens
RSYVDMYLKDK

SEQ ID NO: 83352 - protein, 11 aa, Homo Sapiens
SYVDMYLKDKL

SEQ ID NO: 83353 - protein, 11 aa, Homo Sapiens
YLKDKLDETGN

SEQ ID NO: 83354 - protein, 11 aa, Homo Sapiens
KLDETGNSLKV

SEQ ID NO: 83355 - protein, 11 aa, Homo Sapiens
KVIHEQVNHRW

SEQ ID NO: 83356 - protein, 11 aa, Homo Sapiens
HRWEVCLTMSE

SEQ ID NO: 83357 - protein, 11 aa, Homo Sapiens
RWEVCLTMSEK

SEQ ID NO: 83358 - protein, 11 aa, Homo Sapiens
EVCLTMSEKGF

SEQ ID NO: 83359 - protein, 11 aa, Homo Sapiens
LTMSEKGFQQI

SEQ ID NO: 83360 - protein, 11 aa, Homo Sapiens
GFQQISFVNSI

SEQ ID NO: 83361 - protein, 11 aa, Homo Sapiens
FQQISFVNSIA

SEQ ID NO: 83362 - protein, 11 aa, Homo Sapiens
QQISFVNSIAT

SEQ ID NO: 83363 - protein, 11 aa, Homo Sapiens
ISFVNSIATSK

SEQ ID NO: 83364 - protein, 11 aa, Homo Sapiens
SIATSKGGRHV

SEQ ID NO: 83365 - protein, 11 aa, Homo Sapiens
ATSKGGRHVDY

SEQ ID NO: 83366 - protein, 11 aa, Homo Sapiens
TSKGGRHVDYV

SEQ ID NO: 83367 - protein, 11 aa, Homo Sapiens
DYVADQIVTKL

SEQ ID NO: 83368 - protein, 11 aa, Homo Sapiens
YVADQIVTKLV

SEQ ID NO: 83369 - protein, 11 aa, Homo Sapiens
QIVTKLVDVVK

SEQ ID NO: 83370 - protein, 11 aa, Homo Sapiens
IVTKLVDVVKK

SEQ ID NO: 83371 - protein, 11 aa, Homo Sapiens
VTKLVDVVKKK

SEQ ID NO: 83372 - protein, 11 aa, Homo Sapiens
KLVDVVKKKNK

SEQ ID NO: 83373 - protein, 11 aa, Homo Sapiens
DVVKKKNKGGV

SEQ ID NO: 83374 - protein, 11 aa, Homo Sapiens
KKKNKGGVAVK

SEQ ID NO: 83375 - protein, 11 aa, Homo Sapiens
AVKAHQVKNHM

SEQ ID NO: 83376 - protein, 11 aa, Homo Sapiens
AHQVKNHMWIF

SEQ ID NO: 83377 - protein, 11 aa, Homo Sapiens
HQVKNHMWIFV

SEQ ID NO: 83378 - protein, 11 aa, Homo Sapiens
NHMWIFVNALI

SEQ ID NO: 83379 - protein, 11 aa, Homo Sapiens
FVNALIENPTF

SEQ ID NO: 83380 - protein, 11 aa, Homo Sapiens
ALIENPTFDSQ

SEQ ID NO: 83381 - protein, 11 aa, Homo Sapiens
PTFDSQTKENM

SEQ ID NO: 83382 - protein, 11 aa, Homo Sapiens
QTKENMTLQPK

SEQ ID NO: 83383 - protein, 11 aa, Homo Sapiens
KENMTLQPKSF

SEQ ID NO: 83384 - protein, 11 aa, Homo Sapiens
MTLQPKSFGST

SEQ ID NO: 83385 - protein, 11 aa, Homo Sapiens
TLQPKSFGSTC

SEQ ID NO: 83386 - protein, 11 aa, Homo Sapiens
QPKSFGSTCQL

SEQ ID NO: 83387 - protein, 11 aa, Homo Sapiens
STCQLSEKFIK

SEQ ID NO: 83388 - protein, 11 aa, Homo Sapiens
CQLSEKFIKAA

SEQ ID NO: 83389 - protein, 11 aa, Homo Sapiens
QLSEKFIKAAI

SEQ ID NO: 83390 - protein, 11 aa, Homo Sapiens
KFIKAAIGCGI

SEQ ID NO: 83391 - protein, 11 aa, Homo Sapiens
FIKAAIGCGIV

SEQ ID NO: 83392 - protein, 11 aa, Homo Sapiens
AAIGCGIVESI

SEQ ID NO: 83393 - protein, 11 aa, Homo Sapiens
AIGCGIVESIL

SEQ ID NO: 83394 - protein, 11 aa, Homo Sapiens
CGIVESILNWV

SEQ ID NO: 83395 - protein, 11 aa, Homo Sapiens
GIVESILNWVK

SEQ ID NO: 83396 - protein, 11 aa, Homo Sapiens
IVESILNWVKF

SEQ ID NO: 83397 - protein, 11 aa, Homo Sapiens
ESILNWVKFKA

SEQ ID NO: 83398 - protein, 11 aa, Homo Sapiens
ILNWVKFKAQV

SEQ ID NO: 83399 - protein, 11 aa, Homo Sapiens
NWVKFKAQVQL

SEQ ID NO: 83400 - protein, 11 aa, Homo Sapiens
KFKAQVQLNKK

SEQ ID NO: 83401 - protein, 11 aa, Homo Sapiens
AQVQLNKKCSA

SEQ ID NO: 83402 - protein, 11 aa, Homo Sapiens
VQLNKKCSAVK

SEQ ID NO: 83403 - protein, 11 aa, Homo Sapiens
KCSAVKHNRIK

SEQ ID NO: 83404 - protein, 11 aa, Homo Sapiens
RIKGIPKLDDA

SEQ ID NO: 83405 - protein, 11 aa, Homo Sapiens
KLDDANDAGGR

SEQ ID NO: 83406 - protein, 11 aa, Homo Sapiens
TLILTEGDSAK

SEQ ID NO: 83407 - protein, 11 aa, Homo Sapiens
ILTEGDSAKTL

SEQ ID NO: 83408 - protein, 11 aa, Homo Sapiens
DSAKTLAVSGL

SEQ ID NO: 83409 - protein, 11 aa, Homo Sapiens
KTLAVSGLGVV

SEQ ID NO: 83410 - protein, 11 aa, Homo Sapiens
LAVSGLGVVGR

SEQ ID NO: 83411 - protein, 11 aa, Homo Sapiens
GVVGRDKYGVF

SEQ ID NO: 83412 - protein, 11 aa, Homo Sapiens
KYGVFPLRGKI

SEQ ID NO: 83413 - protein, 11 aa, Homo Sapiens
FPLRGKILNVR

SEQ ID NO: 83414 - protein, 11 aa, Homo Sapiens
KILNVREASHK

SEQ ID NO: 83415 - protein, 11 aa, Homo Sapiens
NVREASHKQIM

SEQ ID NO: 83416 - protein, 11 aa, Homo Sapiens
EASHKQIMENA

SEQ ID NO: 83417 - protein, 11 aa, Homo Sapiens
QIMENAEINNI

SEQ ID NO: 83418 - protein, 11 aa, Homo Sapiens
ENAEINNIIKI

SEQ ID NO: 83419 - protein, 11 aa, Homo Sapiens
AEINNIIKIVG

SEQ ID NO: 83420 - protein, 11 aa, Homo Sapiens
EINNIIKIVGL

SEQ ID NO: 83421 - protein, 11 aa, Homo Sapiens
NIIKIVGLQYK

SEQ ID NO: 83422 - protein, 11 aa, Homo Sapiens
IIKIVGLQYKK

SEQ ID NO: 83423 - protein, 11 aa, Homo Sapiens
KIVGLQYKKNY

SEQ ID NO: 83424 - protein, 11 aa, Homo Sapiens
NYEDEDSLKTL

SEQ ID NO: 83425 - protein, 11 aa, Homo Sapiens
KTLRYGKIMIM

SEQ ID NO: 83426 - protein, 11 aa, Homo Sapiens
MTDQDQDGSHI

SEQ ID NO: 83427 - protein, 11 aa, Homo Sapiens
NFIHHNWPSLL

SEQ ID NO: 83428 - protein, 11 aa, Homo Sapiens
FIHHNWPSLLR

SEQ ID NO: 83429 - protein, 11 aa, Homo Sapiens
NWPSLLRHRFL

SEQ ID NO: 83430 - protein, 11 aa, Homo Sapiens
SLLRHRFLEEF

SEQ ID NO: 83431 - protein, 11 aa, Homo Sapiens
LLRHRFLEEFI

SEQ ID NO: 83432 - protein, 11 aa, Homo Sapiens
HRFLEEFITPI

SEQ ID NO: 83433 - protein, 11 aa, Homo Sapiens
RFLEEFITPIV

SEQ ID NO: 83434 - protein, 11 aa, Homo Sapiens
FLEEFITPIVK

SEQ ID NO: 83435 - protein, 11 aa, Homo Sapiens
LEEFITPIVKV

SEQ ID NO: 83436 - protein, 11 aa, Homo Sapiens
EEFITPIVKVS

SEQ ID NO: 83437 - protein, 11 aa, Homo Sapiens
EFITPIVKVSK

SEQ ID NO: 83438 - protein, 11 aa, Homo Sapiens
ITPIVKVSKNK

SEQ ID NO: 83439 - protein, 11 aa, Homo Sapiens
KVSKNKQEMAF

SEQ ID NO: 83440 - protein, 11 aa, Homo Sapiens
VSKNKQEMAFY

SEQ ID NO: 83441 - protein, 11 aa, Homo Sapiens
QEMAFYSLPEF

SEQ ID NO: 83442 - protein, 11 aa, Homo Sapiens
MAFYSLPEFEE

SEQ ID NO: 83443 - protein, 11 aa, Homo Sapiens
AFYSLPEFEEW

SEQ ID NO: 83444 - protein, 11 aa, Homo Sapiens
FYSLPEFEEWK

SEQ ID NO: 83445 - protein, 11 aa, Homo Sapiens
SLPEFEEWKSS

SEQ ID NO: 83446 - protein, 11 aa, Homo Sapiens
EWKSSTPNHKK

SEQ ID NO: 83447 - protein, 11 aa, Homo Sapiens
KSSTPNHKKWK

SEQ ID NO: 83448 - protein, 11 aa, Homo Sapiens
SSTPNHKKWKV

SEQ ID NO: 83449 - protein, 11 aa, Homo Sapiens
STPNHKKWKVK

SEQ ID NO: 83450 - protein, 11 aa, Homo Sapiens
TPNHKKWKVKY

SEQ ID NO: 83451 - protein, 11 aa, Homo Sapiens
YYKGLGTSTSK

SEQ ID NO: 83452 - protein, 11 aa, Homo Sapiens
GLGTSTSKEAK

SEQ ID NO: 83453 - protein, 11 aa, Homo Sapiens
GTSTSKEAKEY

SEQ ID NO: 83454 - protein, 11 aa, Homo Sapiens
EAKEYFADMKR

SEQ ID NO: 83455 - protein, 11 aa, Homo Sapiens
KEYFADMKRHR

SEQ ID NO: 83456 - protein, 11 aa, Homo Sapiens
EYFADMKRHRI

SEQ ID NO: 83457 - protein, 11 aa, Homo Sapiens
ADMKRHRIQFK

SEQ ID NO: 83458 - protein, 11 aa, Homo Sapiens
DMKRHRIQFKY

SEQ ID NO: 83459 - protein, 11 aa, Homo Sapiens
KYSGPEDDAAI

SEQ ID NO: 83460 - protein, 11 aa, Homo Sapiens
PEDDAAISLAF

SEQ ID NO: 83461 - protein, 11 aa, Homo Sapiens
DDAAISLAFSK

SEQ ID NO: 83462 - protein, 11 aa, Homo Sapiens
DAAISLAFSKK

SEQ ID NO: 83463 - protein, 11 aa, Homo Sapiens
LAFSKKQIDDR

SEQ ID NO: 83464 - protein, 11 aa, Homo Sapiens
KQIDDRKEWLT

SEQ ID NO: 83465 - protein, 11 aa, Homo Sapiens
WLTNFMEDRRQ

SEQ ID NO: 83466 - protein, 11 aa, Homo Sapiens
LTNFMEDRRQR

SEQ ID NO: 83467 - protein, 11 aa, Homo Sapiens
FMEDRRQRKLL

SEQ ID NO: 83468 - protein, 11 aa, Homo Sapiens
RRQRKLLGLPE

SEQ ID NO: 83469 - protein, 11 aa, Homo Sapiens
KLLGLPEDYLY

SEQ ID NO: 83470 - protein, 11 aa, Homo Sapiens
GLPEDYLYGQT

SEQ ID NO: 83471 - protein, 11 aa, Homo Sapiens
LPEDYLYGQTT

SEQ ID NO: 83472 - protein, 11 aa, Homo Sapiens
EDYLYGQTTTY

SEQ ID NO: 83473 - protein, 11 aa, Homo Sapiens
DYLYGQTTTYL

SEQ ID NO: 83474 - protein, 11 aa, Homo Sapiens
YLYGQTTTYLT

SEQ ID NO: 83475 - protein, 11 aa, Homo Sapiens
LYGQTTTYLTY

SEQ ID NO: 83476 - protein, 11 aa, Homo Sapiens
QTTTYLTYNDF

SEQ ID NO: 83477 - protein, 11 aa, Homo Sapiens
TTTYLTYNDFI

SEQ ID NO: 83478 - protein, 11 aa, Homo Sapiens
TYLTYNDFINK

SEQ ID NO: 83479 - protein, 11 aa, Homo Sapiens
LTYNDFINKEL

SEQ ID NO: 83480 - protein, 11 aa, Homo Sapiens
TYNDFINKELI

SEQ ID NO: 83481 - protein, 11 aa, Homo Sapiens
YNDFINKELIL

SEQ ID NO: 83482 - protein, 11 aa, Homo Sapiens
LILFSNSDNER

SEQ ID NO: 83483 - protein, 11 aa, Homo Sapiens
RSIPSMVDGLK

SEQ ID NO: 83484 - protein, 11 aa, Homo Sapiens
SMVDGLKPGQR

SEQ ID NO: 83485 - protein, 11 aa, Homo Sapiens
MVDGLKPGQRK

SEQ ID NO: 83486 - protein, 11 aa, Homo Sapiens
KPGQRKVLFTC

SEQ ID NO: 83487 - protein, 11 aa, Homo Sapiens
GQRKVLFTCFK

SEQ ID NO: 83488 - protein, 11 aa, Homo Sapiens
VLFTCFKRNDK

SEQ ID NO: 83489 - protein, 11 aa, Homo Sapiens
LFTCFKRNDKR

SEQ ID NO: 83490 - protein, 11 aa, Homo Sapiens
EVKVAQLAGSV

SEQ ID NO: 83491 - protein, 11 aa, Homo Sapiens
VAQLAGSVAEM

SEQ ID NO: 83492 - protein, 11 aa, Homo Sapiens
AQLAGSVAEMS

SEQ ID NO: 83493 - protein, 11 aa, Homo Sapiens
QLAGSVAEMSS

SEQ ID NO: 83494 - protein, 11 aa, Homo Sapiens
LAGSVAEMSSY

SEQ ID NO: 83495 - protein, 11 aa, Homo Sapiens
AEMSSYHHGEM

SEQ ID NO: 83496 - protein, 11 aa, Homo Sapiens
MSSYHHGEMSL

SEQ ID NO: 83497 - protein, 11 aa, Homo Sapiens
SYHHGEMSLMM

SEQ ID NO: 83498 - protein, 11 aa, Homo Sapiens
EMSLMMTIINL

SEQ ID NO: 83499 - protein, 11 aa, Homo Sapiens
MSLMMTIINLA

SEQ ID NO: 83500 - protein, 11 aa, Homo Sapiens
SLMMTIINLAQ

SEQ ID NO: 83501 - protein, 11 aa, Homo Sapiens
MMTIINLAQNF

SEQ ID NO: 83502 - protein, 11 aa, Homo Sapiens
MTIINLAQNFV

SEQ ID NO: 83503 - protein, 11 aa, Homo Sapiens
NFVGSNNLNLL

SEQ ID NO: 83504 - protein, 11 aa, Homo Sapiens
NLLQPIGQFGT

SEQ ID NO: 83505 - protein, 11 aa, Homo Sapiens
LLQPIGQFGTR

SEQ ID NO: 83506 - protein, 11 aa, Homo Sapiens
LQPIGQFGTRL

SEQ ID NO: 83507 - protein, 11 aa, Homo Sapiens
QPIGQFGTRLH

SEQ ID NO: 83508 - protein, 11 aa, Homo Sapiens
GQFGTRLHGGK

SEQ ID NO: 83509 - protein, 11 aa, Homo Sapiens
RLHGGKDSASP

SEQ ID NO: 83510 - protein, 11 aa, Homo Sapiens
SASPRYIFTML

SEQ ID NO: 83511 - protein, 11 aa, Homo Sapiens
SPRYIFTMLSS

SEQ ID NO: 83512 - protein, 11 aa, Homo Sapiens
RYIFTMLSSLA

SEQ ID NO: 83513 - protein, 11 aa, Homo Sapiens
YIFTMLSSLAR

SEQ ID NO: 83514 - protein, 11 aa, Homo Sapiens
FTMLSSLARLL

SEQ ID NO: 83515 - protein, 11 aa, Homo Sapiens
TMLSSLARLLF

SEQ ID NO: 83516 - protein, 11 aa, Homo Sapiens
SSLARLLFPPK

SEQ ID NO: 83517 - protein, 11 aa, Homo Sapiens
LLFPPKDDHTL

SEQ ID NO: 83518 - protein, 11 aa, Homo Sapiens
FPPKDDHTLKF

SEQ ID NO: 83519 - protein, 11 aa, Homo Sapiens
TLKFLYDDNQR

SEQ ID NO: 83520 - protein, 11 aa, Homo Sapiens
FLYDDNQRVEP

SEQ ID NO: 83521 - protein, 11 aa, Homo Sapiens
EPEWYIPIIPM

SEQ ID NO: 83522 - protein, 11 aa, Homo Sapiens
EWYIPIIPMVL

SEQ ID NO: 83523 - protein, 11 aa, Homo Sapiens
WYIPIIPMVLI

SEQ ID NO: 83524 - protein, 11 aa, Homo Sapiens
IPIIPMVLING

SEQ ID NO: 83525 - protein, 11 aa, Homo Sapiens
VLINGAEGIGT

SEQ ID NO: 83526 - protein, 11 aa, Homo Sapiens
EGIGTGWSCKI

SEQ ID NO: 83527 - protein, 11 aa, Homo Sapiens
WSCKIPNFDVR

SEQ ID NO: 83528 - protein, 11 aa, Homo Sapiens
KIPNFDVREIV

SEQ ID NO: 83529 - protein, 11 aa, Homo Sapiens
DVREIVNNIRR

SEQ ID NO: 83530 - protein, 11 aa, Homo Sapiens
REIVNNIRRLM

SEQ ID NO: 83531 - protein, 11 aa, Homo Sapiens
RLMDGEEPLPM

SEQ ID NO: 83532 - protein, 11 aa, Homo Sapiens
LMDGEEPLPML

SEQ ID NO: 83533 - protein, 11 aa, Homo Sapiens
GEEPLPMLPSY

SEQ ID NO: 83534 - protein, 11 aa, Homo Sapiens
LPMLPSYKNFK

SEQ ID NO: 83535 - protein, 11 aa, Homo Sapiens
MLPSYKNFKGT

SEQ ID NO: 83536 - protein, 11 aa, Homo Sapiens
LPSYKNFKGTI

SEQ ID NO: 83537 - protein, 11 aa, Homo Sapiens
GTIEELAPNQY

SEQ ID NO: 83538 - protein, 11 aa, Homo Sapiens
TIEELAPNQYV

SEQ ID NO: 83539 - protein, 11 aa, Homo Sapiens
IEELAPNQYVI

SEQ ID NO: 83540 - protein, 11 aa, Homo Sapiens
ELAPNQYVISG

SEQ ID NO: 83541 - protein, 11 aa, Homo Sapiens
APNQYVISGEV

SEQ ID NO: 83542 - protein, 11 aa, Homo Sapiens
NQYVISGEVAI

SEQ ID NO: 83543 - protein, 11 aa, Homo Sapiens
QYVISGEVAIL

SEQ ID NO: 83544 - protein, 11 aa, Homo Sapiens
GEVAILNSTTI

SEQ ID NO: 83545 - protein, 11 aa, Homo Sapiens
VAILNSTTIEI

SEQ ID NO: 83546 - protein, 11 aa, Homo Sapiens
STTIEISELPV

SEQ ID NO: 83547 - protein, 11 aa, Homo Sapiens
TTIEISELPVR

SEQ ID NO: 83548 - protein, 11 aa, Homo Sapiens
IEISELPVRTW

SEQ ID NO: 83549 - protein, 11 aa, Homo Sapiens
ELPVRTWTQTY

SEQ ID NO: 83550 - protein, 11 aa, Homo Sapiens
RTWTQTYKEQV

SEQ ID NO: 83551 - protein, 11 aa, Homo Sapiens
QTYKEQVLEPM

SEQ ID NO: 83552 - protein, 11 aa, Homo Sapiens
TYKEQVLEPML

SEQ ID NO: 83553 - protein, 11 aa, Homo Sapiens
MLNGTEKTPPL

SEQ ID NO: 83554 - protein, 11 aa, Homo Sapiens
TEKTPPLITDY

SEQ ID NO: 83555 - protein, 11 aa, Homo Sapiens
EKTPPLITDYR

SEQ ID NO: 83556 - protein, 11 aa, Homo Sapiens
TPPLITDYREY

SEQ ID NO: 83557 - protein, 11 aa, Homo Sapiens
REYHTDTTVKF

SEQ ID NO: 83558 - protein, 11 aa, Homo Sapiens
EYHTDTTVKFV

SEQ ID NO: 83559 - protein, 11 aa, Homo Sapiens
YHTDTTVKFVV

SEQ ID NO: 83560 - protein, 11 aa, Homo Sapiens
HTDTTVKFVVK

SEQ ID NO: 83561 - protein, 11 aa, Homo Sapiens
TTVKFVVKMTE

SEQ ID NO: 83562 - protein, 11 aa, Homo Sapiens
FVVKMTEEKLA

SEQ ID NO: 83563 - protein, 11 aa, Homo Sapiens
MTEEKLAEAER

SEQ ID NO: 83564 - protein, 11 aa, Homo Sapiens
EEKLAEAERVG

SEQ ID NO: 83565 - protein, 11 aa, Homo Sapiens
LAEAERVGLHK

SEQ ID NO: 83566 - protein, 11 aa, Homo Sapiens
AEAERVGLHKV

SEQ ID NO: 83567 - protein, 11 aa, Homo Sapiens
EAERVGLHKVF

SEQ ID NO: 83568 - protein, 11 aa, Homo Sapiens
AERVGLHKVFK

SEQ ID NO: 83569 - protein, 11 aa, Homo Sapiens
GLHKVFKLQTS

SEQ ID NO: 83570 - protein, 11 aa, Homo Sapiens
KLQTSLTCNSM

SEQ ID NO: 83571 - protein, 11 aa, Homo Sapiens
LQTSLTCNSMV

SEQ ID NO: 83572 - protein, 11 aa, Homo Sapiens
QTSLTCNSMVL

SEQ ID NO: 83573 - protein, 11 aa, Homo Sapiens
TSLTCNSMVLF

SEQ ID NO: 83574 - protein, 11 aa, Homo Sapiens
TCNSMVLFDHV

SEQ ID NO: 83575 - protein, 11 aa, Homo Sapiens
SMVLFDHVGCL

SEQ ID NO: 83576 - protein, 11 aa, Homo Sapiens
MVLFDHVGCLK

SEQ ID NO: 83577 - protein, 11 aa, Homo Sapiens
VLFDHVGCLKK

SEQ ID NO: 83578 - protein, 11 aa, Homo Sapiens
HVGCLKKYDTV

SEQ ID NO: 83579 - protein, 11 aa, Homo Sapiens
CLKKYDTVLDI

SEQ ID NO: 83580 - protein, 11 aa, Homo Sapiens
DTVLDILRDFF

SEQ ID NO: 83581 - protein, 11 aa, Homo Sapiens
VLDILRDFFEL

SEQ ID NO: 83582 - protein, 11 aa, Homo Sapiens
LDILRDFFELR

SEQ ID NO: 83583 - protein, 11 aa, Homo Sapiens
DILRDFFELRL

SEQ ID NO: 83584 - protein, 11 aa, Homo Sapiens
ILRDFFELRLK

SEQ ID NO: 83585 - protein, 11 aa, Homo Sapiens
FFELRLKYYGL

SEQ ID NO: 83586 - protein, 11 aa, Homo Sapiens
ELRLKYYGLRK

SEQ ID NO: 83587 - protein, 11 aa, Homo Sapiens
KYYGLRKEWLL

SEQ ID NO: 83588 - protein, 11 aa, Homo Sapiens
GLRKEWLLGML

SEQ ID NO: 83589 - protein, 11 aa, Homo Sapiens
WLLGMLGAESA

SEQ ID NO: 83590 - protein, 11 aa, Homo Sapiens
LLGMLGAESAK

SEQ ID NO: 83591 - protein, 11 aa, Homo Sapiens
ESAKLNNQARF

SEQ ID NO: 83592 - protein, 11 aa, Homo Sapiens
FILEKIDGKII

SEQ ID NO: 83593 - protein, 11 aa, Homo Sapiens
ILEKIDGKIII

SEQ ID NO: 83594 - protein, 11 aa, Homo Sapiens
KIDGKIIIENK

SEQ ID NO: 83595 - protein, 11 aa, Homo Sapiens
IIIENKPKKEL

SEQ ID NO: 83596 - protein, 11 aa, Homo Sapiens
KPKKELIKVLI

SEQ ID NO: 83597 - protein, 11 aa, Homo Sapiens
ELIKVLIQRGY

SEQ ID NO: 83598 - protein, 11 aa, Homo Sapiens
LIQRGYDSDPV

SEQ ID NO: 83599 - protein, 11 aa, Homo Sapiens
IQRGYDSDPVK

SEQ ID NO: 83600 - protein, 11 aa, Homo Sapiens
RGYDSDPVKAW

SEQ ID NO: 83601 - protein, 11 aa, Homo Sapiens
GYDSDPVKAWK

SEQ ID NO: 83602 - protein, 11 aa, Homo Sapiens
PVKAWKEAQQK

SEQ ID NO: 83603 - protein, 11 aa, Homo Sapiens
SVTDSGPTFNY

SEQ ID NO: 83604 - protein, 11 aa, Homo Sapiens
VTDSGPTFNYL

SEQ ID NO: 83605 - protein, 11 aa, Homo Sapiens
TDSGPTFNYLL

SEQ ID NO: 83606 - protein, 11 aa, Homo Sapiens
FNYLLDMPLWY

SEQ ID NO: 83607 - protein, 11 aa, Homo Sapiens
NYLLDMPLWYL

SEQ ID NO: 83608 - protein, 11 aa, Homo Sapiens
YLLDMPLWYLT

SEQ ID NO: 83609 - protein, 11 aa, Homo Sapiens
LLDMPLWYLTK

SEQ ID NO: 83610 - protein, 11 aa, Homo Sapiens
DMPLWYLTKEK

SEQ ID NO: 83611 - protein, 11 aa, Homo Sapiens
MPLWYLTKEKK

SEQ ID NO: 83612 - protein, 11 aa, Homo Sapiens
WYLTKEKKDEL

SEQ ID NO: 83613 - protein, 11 aa, Homo Sapiens
YLTKEKKDELC

SEQ ID NO: 83614 - protein, 11 aa, Homo Sapiens
LTKEKKDELCR

SEQ ID NO: 83615 - protein, 11 aa, Homo Sapiens
LKRKSPSDLWK

SEQ ID NO: 83616 - protein, 11 aa, Homo Sapiens
DLWKEDLATFI

SEQ ID NO: 83617 - protein, 11 aa, Homo Sapiens
KEDLATFIEEL

SEQ ID NO: 83618 - protein, 11 aa, Homo Sapiens
DLATFIEELEA

SEQ ID NO: 83619 - protein, 11 aa, Homo Sapiens
LATFIEELEAV

SEQ ID NO: 83620 - protein, 11 aa, Homo Sapiens
FIEELEAVEAK

SEQ ID NO: 83621 - protein, 11 aa, Homo Sapiens
KQDEQVGLPGK

SEQ ID NO: 83622 - protein, 11 aa, Homo Sapiens
TQMAEVLPSPR

SEQ ID NO: 83623 - protein, 11 aa, Homo Sapiens
EVLPSPRGQRV

SEQ ID NO: 83624 - protein, 11 aa, Homo Sapiens
VLPSPRGQRVI

SEQ ID NO: 83625 - protein, 11 aa, Homo Sapiens
SPRGQRVIPRI

SEQ ID NO: 83626 - protein, 11 aa, Homo Sapiens
RVIPRITIEMK

SEQ ID NO: 83627 - protein, 11 aa, Homo Sapiens
VIPRITIEMKA

SEQ ID NO: 83628 - protein, 11 aa, Homo Sapiens
IPRITIEMKAE

SEQ ID NO: 83629 - protein, 11 aa, Homo Sapiens
ITIEMKAEAEK

SEQ ID NO: 83630 - protein, 11 aa, Homo Sapiens
TIEMKAEAEKK

SEQ ID NO: 83631 - protein, 11 aa, Homo Sapiens
NTEGSPQEDGV

SEQ ID NO: 83632 - protein, 11 aa, Homo Sapiens
ELEGLKQRLEK

SEQ ID NO: 83633 - protein, 11 aa, Homo Sapiens
KQKREPGTKTK

SEQ ID NO: 83634 - protein, 11 aa, Homo Sapiens
KTKKQTTLAFK

SEQ ID NO: 83635 - protein, 11 aa, Homo Sapiens
KQTTLAFKPIK

SEQ ID NO: 83636 - protein, 11 aa, Homo Sapiens
QTTLAFKPIKK

SEQ ID NO: 83637 - protein, 11 aa, Homo Sapiens
TLAFKPIKKGK

SEQ ID NO: 83638 - protein, 11 aa, Homo Sapiens
LAFKPIKKGKK

SEQ ID NO: 83639 - protein, 11 aa, Homo Sapiens
AFKPIKKGKKR

SEQ ID NO: 83640 - protein, 11 aa, Homo Sapiens
NPWSDSESDRS

SEQ ID NO: 83641 - protein, 11 aa, Homo Sapiens
ESDRSSDESNF

SEQ ID NO: 83642 - protein, 11 aa, Homo Sapiens
DVPPRETEPRR

SEQ ID NO: 83643 - protein, 11 aa, Homo Sapiens
PPRETEPRRAA

SEQ ID NO: 83644 - protein, 11 aa, Homo Sapiens
EPRRAATKTKF

SEQ ID NO: 83645 - protein, 11 aa, Homo Sapiens
RRAATKTKFTM

SEQ ID NO: 83646 - protein, 11 aa, Homo Sapiens
FTMDLDSDEDF

SEQ ID NO: 83647 - protein, 11 aa, Homo Sapiens
DFDEKTDDEDF

SEQ ID NO: 83648 - protein, 11 aa, Homo Sapiens
DFVPSDASPPK

SEQ ID NO: 83649 - protein, 11 aa, Homo Sapiens
ASPPKTKTSPK

SEQ ID NO: 83650 - protein, 11 aa, Homo Sapiens
SPPKTKTSPKL

SEQ ID NO: 83651 - protein, 11 aa, Homo Sapiens
KTKTSPKLSNK

SEQ ID NO: 83652 - protein, 11 aa, Homo Sapiens
KTSPKLSNKEL

SEQ ID NO: 83653 - protein, 11 aa, Homo Sapiens
TSPKLSNKELK

SEQ ID NO: 83654 - protein, 11 aa, Homo Sapiens
KLSNKELKPQK

SEQ ID NO: 83655 - protein, 11 aa, Homo Sapiens
SVVSDLEADDV

SEQ ID NO: 83656 - protein, 11 aa, Homo Sapiens
VVSDLEADDVK

SEQ ID NO: 83657 - protein, 11 aa, Homo Sapiens
DLEADDVKGSV

SEQ ID NO: 83658 - protein, 11 aa, Homo Sapiens
EADDVKGSVPL

SEQ ID NO: 83659 - protein, 11 aa, Homo Sapiens
VPLSSSPPATH

SEQ ID NO: 83660 - protein, 11 aa, Homo Sapiens
FPDETEITNPV

SEQ ID NO: 83661 - protein, 11 aa, Homo Sapiens
ETEITNPVPKK

SEQ ID NO: 83662 - protein, 11 aa, Homo Sapiens
EITNPVPKKNV

SEQ ID NO: 83663 - protein, 11 aa, Homo Sapiens
SQSSTSTTGAK

SEQ ID NO: 83664 - protein, 11 aa, Homo Sapiens
QSSTSTTGAKK

SEQ ID NO: 83665 - protein, 11 aa, Homo Sapiens
SSTSTTGAKKR

SEQ ID NO: 83666 - protein, 11 aa, Homo Sapiens
TTGAKKRAAPK

SEQ ID NO: 83667 - protein, 11 aa, Homo Sapiens
AKKRAAPKGTK

SEQ ID NO: 83668 - protein, 11 aa, Homo Sapiens
APKGTKRDPAL

SEQ ID NO: 83669 - protein, 11 aa, Homo Sapiens
DPALNSGVSQK

SEQ ID NO: 83670 - protein, 11 aa, Homo Sapiens
VSQKPDPAKTK

SEQ ID NO: 83671 - protein, 11 aa, Homo Sapiens
DPAKTKNRRKR

SEQ ID NO: 83672 - protein, 11 aa, Homo Sapiens
KTKNRRKRKPS

SEQ ID NO: 83673 - protein, 11 aa, Homo Sapiens
TSDDSDSNFEK

SEQ ID NO: 83674 - protein, 11 aa, Homo Sapiens
KIVSKAVTSKK

SEQ ID NO: 83675 - protein, 11 aa, Homo Sapiens
VSKAVTSKKSK

SEQ ID NO: 83676 - protein, 11 aa, Homo Sapiens
DDFHMDFDSAV

SEQ ID NO: 83677 - protein, 11 aa, Homo Sapiens
HMDFDSAVAPR

SEQ ID NO: 83678 - protein, 11 aa, Homo Sapiens
DSAVAPRAKSV

SEQ ID NO: 83679 - protein, 11 aa, Homo Sapiens
SAVAPRAKSVR

SEQ ID NO: 83680 - protein, 11 aa, Homo Sapiens
AVAPRAKSVRA

SEQ ID NO: 83681 - protein, 11 aa, Homo Sapiens
APRAKSVRAKK

SEQ ID NO: 83682 - protein, 11 aa, Homo Sapiens
RAKSVRAKKPI

SEQ ID NO: 83683 - protein, 11 aa, Homo Sapiens
KSVRAKKPIKY

SEQ ID NO: 83684 - protein, 11 aa, Homo Sapiens
SVRAKKPIKYL

SEQ ID NO: 83685 - protein, 11 aa, Homo Sapiens
KYLEESDEDDL

SEQ ID NO: 83686 - protein, 22 aa, Homo Sapiens
YLEESDEDDLFPLQPVNENMQV

SEQ ID NO: 83687 - protein, 11 aa, Homo Sapiens
KIKKNEDAKKR

SEQ ID NO: 83688 - protein, 11 aa, Homo Sapiens
EDAKKRLSVER

SEQ ID NO: 83689 - protein, 11 aa, Homo Sapiens
KRLSVERIYQK

SEQ ID NO: 83690 - protein, 11 aa, Homo Sapiens
RLSVERIYQKK

SEQ ID NO: 83691 - protein, 11 aa, Homo Sapiens
VERIYQKKTQL

SEQ ID NO: 83692 - protein, 11 aa, Homo Sapiens
RIYQKKTQLEH

SEQ ID NO: 83693 - protein, 11 aa, Homo Sapiens
IYQKKTQLEHI

SEQ ID NO: 83694 - protein, 11 aa, Homo Sapiens
YQKKTQLEHIL

SEQ ID NO: 83695 - protein, 11 aa, Homo Sapiens
LLRPDTYIGSV

SEQ ID NO: 83696 - protein, 11 aa, Homo Sapiens
RPDTYIGSVEL

SEQ ID NO: 83697 - protein, 11 aa, Homo Sapiens
YIGSVELVTQQ

SEQ ID NO: 83698 - protein, 11 aa, Homo Sapiens
GSVELVTQQMW

SEQ ID NO: 83699 - protein, 11 aa, Homo Sapiens
SVELVTQQMWV

SEQ ID NO: 83700 - protein, 11 aa, Homo Sapiens
VELVTQQMWVY

SEQ ID NO: 83701 - protein, 11 aa, Homo Sapiens
TQQMWVYDEDV

SEQ ID NO: 83702 - protein, 11 aa, Homo Sapiens
QMWVYDEDVGI

SEQ ID NO: 83703 - protein, 11 aa, Homo Sapiens
WVYDEDVGINY

SEQ ID NO: 83704 - protein, 11 aa, Homo Sapiens
DVGINYREVTF

SEQ ID NO: 83705 - protein, 11 aa, Homo Sapiens
NYREVTFVPGL

SEQ ID NO: 83706 - protein, 11 aa, Homo Sapiens
REVTFVPGLYK

SEQ ID NO: 83707 - protein, 11 aa, Homo Sapiens
EVTFVPGLYKI

SEQ ID NO: 83708 - protein, 11 aa, Homo Sapiens
VTFVPGLYKIF

SEQ ID NO: 83709 - protein, 11 aa, Homo Sapiens
VPGLYKIFDEI

SEQ ID NO: 83710 - protein, 11 aa, Homo Sapiens
GLYKIFDEILV

SEQ ID NO: 83711 - protein, 11 aa, Homo Sapiens
KIFDEILVNAA

SEQ ID NO: 83712 - protein, 11 aa, Homo Sapiens
ILVNAADNKQR

SEQ ID NO: 83713 - protein, 11 aa, Homo Sapiens
NAADNKQRDPK

SEQ ID NO: 83714 - protein, 11 aa, Homo Sapiens
KQRDPKMSCIR

SEQ ID NO: 83715 - protein, 11 aa, Homo Sapiens
TIDPENNLISI

SEQ ID NO: 83716 - protein, 11 aa, Homo Sapiens
LISIWNNGKGI

SEQ ID NO: 83717 - protein, 11 aa, Homo Sapiens
SIWNNGKGIPV

SEQ ID NO: 83718 - protein, 11 aa, Homo Sapiens
GIPVVEHKVEK

SEQ ID NO: 83719 - protein, 11 aa, Homo Sapiens
IPVVEHKVEKM

SEQ ID NO: 83720 - protein, 11 aa, Homo Sapiens
PVVEHKVEKMY

SEQ ID NO: 83721 - protein, 11 aa, Homo Sapiens
VVEHKVEKMYV

SEQ ID NO: 83722 - protein, 11 aa, Homo Sapiens
HKVEKMYVPAL

SEQ ID NO: 83723 - protein, 11 aa, Homo Sapiens
VEKMYVPALIF

SEQ ID NO: 83724 - protein, 11 aa, Homo Sapiens
KMYVPALIFGQ

SEQ ID NO: 83725 - protein, 11 aa, Homo Sapiens
MYVPALIFGQL

SEQ ID NO: 83726 - protein, 11 aa, Homo Sapiens
YVPALIFGQLL

SEQ ID NO: 83727 - protein, 11 aa, Homo Sapiens
VPALIFGQLLT

SEQ ID NO: 83728 - protein, 11 aa, Homo Sapiens
ALIFGQLLTSS

SEQ ID NO: 83729 - protein, 11 aa, Homo Sapiens
IFGQLLTSSNY

SEQ ID NO: 83730 - protein, 11 aa, Homo Sapiens
LTSSNYDDDEK

SEQ ID NO: 83731 - protein, 11 aa, Homo Sapiens
TSSNYDDDEKK

SEQ ID NO: 83732 - protein, 11 aa, Homo Sapiens
KVTGGRNGYGA

SEQ ID NO: 83733 - protein, 11 aa, Homo Sapiens
VTGGRNGYGAK

SEQ ID NO: 83734 - protein, 11 aa, Homo Sapiens
GAKLCNIFSTK

SEQ ID NO: 83735 - protein, 11 aa, Homo Sapiens
KLCNIFSTKFT

SEQ ID NO: 83736 - protein, 11 aa, Homo Sapiens
LCNIFSTKFTV

SEQ ID NO: 83737 - protein, 11 aa, Homo Sapiens
STKFTVETASR

SEQ ID NO: 83738 - protein, 11 aa, Homo Sapiens
KFTVETASREY

SEQ ID NO: 83739 - protein, 11 aa, Homo Sapiens
FTVETASREYK

SEQ ID NO: 83740 - protein, 11 aa, Homo Sapiens
TVETASREYKK

SEQ ID NO: 83741 - protein, 11 aa, Homo Sapiens
ETASREYKKMF

SEQ ID NO: 83742 - protein, 11 aa, Homo Sapiens
TASREYKKMFK

SEQ ID NO: 83743 - protein, 11 aa, Homo Sapiens
REYKKMFKQTW

SEQ ID NO: 83744 - protein, 11 aa, Homo Sapiens
KMFKQTWMDNM

SEQ ID NO: 83745 - protein, 11 aa, Homo Sapiens
KQTWMDNMGRA

SEQ ID NO: 83746 - protein, 11 aa, Homo Sapiens
WMDNMGRAGEM

SEQ ID NO: 83747 - protein, 11 aa, Homo Sapiens
GRAGEMELKPF

SEQ ID NO: 83748 - protein, 11 aa, Homo Sapiens
MELKPFNGEDY

SEQ ID NO: 83749 - protein, 11 aa, Homo Sapiens
ELKPFNGEDYT

SEQ ID NO: 83750 - protein, 11 aa, Homo Sapiens
DYTCITFQPDL

SEQ ID NO: 83751 - protein, 11 aa, Homo Sapiens
ITFQPDLSKFK

SEQ ID NO: 83752 - protein, 11 aa, Homo Sapiens
TFQPDLSKFKM

SEQ ID NO: 83753 - protein, 11 aa, Homo Sapiens
FQPDLSKFKMQ

SEQ ID NO: 83754 - protein, 11 aa, Homo Sapiens
LSKFKMQSLDK

SEQ ID NO: 83755 - protein, 11 aa, Homo Sapiens
FKMQSLDKDIV

SEQ ID NO: 83756 - protein, 11 aa, Homo Sapiens
KMQSLDKDIVA

SEQ ID NO: 83757 - protein, 11 aa, Homo Sapiens
MQSLDKDIVAL

SEQ ID NO: 83758 - protein, 11 aa, Homo Sapiens
SLDKDIVALMV

SEQ ID NO: 83759 - protein, 11 aa, Homo Sapiens
DIVALMVRRAY

SEQ ID NO: 83760 - protein, 11 aa, Homo Sapiens
ALMVRRAYDIA

SEQ ID NO: 83761 - protein, 11 aa, Homo Sapiens
RRAYDIAGSTK

SEQ ID NO: 83762 - protein, 11 aa, Homo Sapiens
DIAGSTKDVKV

SEQ ID NO: 83763 - protein, 11 aa, Homo Sapiens
KVFLNGNKLPV

SEQ ID NO: 83764 - protein, 11 aa, Homo Sapiens
VFLNGNKLPVK

SEQ ID NO: 83765 - protein, 11 aa, Homo Sapiens
FLNGNKLPVKG

SEQ ID NO: 83766 - protein, 11 aa, Homo Sapiens
NGNKLPVKGFR

SEQ ID NO: 83767 - protein, 11 aa, Homo Sapiens
KLPVKGFRSYV

SEQ ID NO: 83768 - protein, 11 aa, Homo Sapiens
LPVKGFRSYVD

SEQ ID NO: 83769 - protein, 11 aa, Homo Sapiens
GFRSYVDMYLK

SEQ ID NO: 83770 - protein, 11 aa, Homo Sapiens
RSYVDMYLKDK

SEQ ID NO: 83771 - protein, 11 aa, Homo Sapiens
SYVDMYLKDKL

SEQ ID NO: 83772 - protein, 11 aa, Homo Sapiens
YLKDKLDETGN

SEQ ID NO: 83773 - protein, 11 aa, Homo Sapiens
KLDETGNSLKV

SEQ ID NO: 83774 - protein, 11 aa, Homo Sapiens
KVIHEQVNHRW

SEQ ID NO: 83775 - protein, 11 aa, Homo Sapiens
HRWEVCLTMSE

SEQ ID NO: 83776 - protein, 11 aa, Homo Sapiens
RWEVCLTMSEK

SEQ ID NO: 83777 - protein, 11 aa, Homo Sapiens
EVCLTMSEKGF

SEQ ID NO: 83778 - protein, 11 aa, Homo Sapiens
LTMSEKGFQQI

SEQ ID NO: 83779 - protein, 11 aa, Homo Sapiens
GFQQISFVNSI

SEQ ID NO: 83780 - protein, 11 aa, Homo Sapiens
FQQISFVNSIA

SEQ ID NO: 83781 - protein, 11 aa, Homo Sapiens
QQISFVNSIAT

SEQ ID NO: 83782 - protein, 11 aa, Homo Sapiens
ISFVNSIATSK

SEQ ID NO: 83783 - protein, 11 aa, Homo Sapiens
SIATSKGGRHV

SEQ ID NO: 83784 - protein, 11 aa, Homo Sapiens
ATSKGGRHVDY

SEQ ID NO: 83785 - protein, 11 aa, Homo Sapiens
TSKGGRHVDYV

SEQ ID NO: 83786 - protein, 11 aa, Homo Sapiens
DYVADQIVTKL

SEQ ID NO: 83787 - protein, 11 aa, Homo Sapiens
YVADQIVTKLV

SEQ ID NO: 83788 - protein, 11 aa, Homo Sapiens
QIVTKLVDVVK

SEQ ID NO: 83789 - protein, 11 aa, Homo Sapiens
IVTKLVDVVKK

SEQ ID NO: 83790 - protein, 11 aa, Homo Sapiens
VTKLVDVVKKK

SEQ ID NO: 83791 - protein, 11 aa, Homo Sapiens
KLVDVVKKKNK

SEQ ID NO: 83792 - protein, 11 aa, Homo Sapiens
DVVKKKNKGGV

SEQ ID NO: 83793 - protein, 11 aa, Homo Sapiens
KKKNKGGVAVK

SEQ ID NO: 83794 - protein, 11 aa, Homo Sapiens
AVKAHQVKNHM

SEQ ID NO: 83795 - protein, 11 aa, Homo Sapiens
AHQVKNHMWIF

SEQ ID NO: 83796 - protein, 11 aa, Homo Sapiens
HQVKNHMWIFV

SEQ ID NO: 83797 - protein, 11 aa, Homo Sapiens
NHMWIFVNALI

SEQ ID NO: 83798 - protein, 11 aa, Homo Sapiens
FVNALIENPTF

SEQ ID NO: 83799 - protein, 11 aa, Homo Sapiens
ALIENPTFDSQ

SEQ ID NO: 83800 - protein, 11 aa, Homo Sapiens
PTFDSQTKENM

SEQ ID NO: 83801 - protein, 11 aa, Homo Sapiens
QTKENMTLQPK

SEQ ID NO: 83802 - protein, 11 aa, Homo Sapiens
KENMTLQPKSF

SEQ ID NO: 83803 - protein, 11 aa, Homo Sapiens
MTLQPKSFGST

SEQ ID NO: 83804 - protein, 11 aa, Homo Sapiens
TLQPKSFGSTC

SEQ ID NO: 83805 - protein, 11 aa, Homo Sapiens
QPKSFGSTCQL

SEQ ID NO: 83806 - protein, 11 aa, Homo Sapiens
STCQLSEKFIK

SEQ ID NO: 83807 - protein, 11 aa, Homo Sapiens
CQLSEKFIKAA

SEQ ID NO: 83808 - protein, 11 aa, Homo Sapiens
QLSEKFIKAAI

SEQ ID NO: 83809 - protein, 11 aa, Homo Sapiens
KFIKAAIGCGI

SEQ ID NO: 83810 - protein, 11 aa, Homo Sapiens
FIKAAIGCGIV

SEQ ID NO: 83811 - protein, 11 aa, Homo Sapiens
AAIGCGIVESI

SEQ ID NO: 83812 - protein, 11 aa, Homo Sapiens
AIGCGIVESIL

SEQ ID NO: 83813 - protein, 11 aa, Homo Sapiens
CGIVESILNWV

SEQ ID NO: 83814 - protein, 11 aa, Homo Sapiens
GIVESILNWVK

SEQ ID NO: 83815 - protein, 11 aa, Homo Sapiens
IVESILNWVKF

SEQ ID NO: 83816 - protein, 11 aa, Homo Sapiens
ESILNWVKFKA

SEQ ID NO: 83817 - protein, 11 aa, Homo Sapiens
ILNWVKFKAQV

SEQ ID NO: 83818 - protein, 11 aa, Homo Sapiens
NWVKFKAQVQL

SEQ ID NO: 83819 - protein, 11 aa, Homo Sapiens
KFKAQVQLNKK

SEQ ID NO: 83820 - protein, 11 aa, Homo Sapiens
AQVQLNKKCSA

SEQ ID NO: 83821 - protein, 11 aa, Homo Sapiens
VQLNKKCSAVK

SEQ ID NO: 83822 - protein, 11 aa, Homo Sapiens
KCSAVKHNRIK

SEQ ID NO: 83823 - protein, 11 aa, Homo Sapiens
RIKGIPKLDDA

SEQ ID NO: 83824 - protein, 11 aa, Homo Sapiens
KLDDANDAGGR

SEQ ID NO: 83825 - protein, 11 aa, Homo Sapiens
TLILTEGDSAK

SEQ ID NO: 83826 - protein, 11 aa, Homo Sapiens
ILTEGDSAKTL

SEQ ID NO: 83827 - protein, 11 aa, Homo Sapiens
DSAKTLAVSGL

SEQ ID NO: 83828 - protein, 11 aa, Homo Sapiens
KTLAVSGLGVV

SEQ ID NO: 83829 - protein, 11 aa, Homo Sapiens
LAVSGLGVVGR

SEQ ID NO: 83830 - protein, 11 aa, Homo Sapiens
GVVGRDKYGVF

SEQ ID NO: 83831 - protein, 11 aa, Homo Sapiens
KYGVFPLRGKI

SEQ ID NO: 83832 - protein, 11 aa, Homo Sapiens
FPLRGKILNVR

SEQ ID NO: 83833 - protein, 11 aa, Homo Sapiens
KILNVREASHK

SEQ ID NO: 83834 - protein, 11 aa, Homo Sapiens
NVREASHKQIM

SEQ ID NO: 83835 - protein, 11 aa, Homo Sapiens
EASHKQIMENA

SEQ ID NO: 83836 - protein, 11 aa, Homo Sapiens
QIMENAEINNI

SEQ ID NO: 83837 - protein, 11 aa, Homo Sapiens
ENAEINNIIKI

SEQ ID NO: 83838 - protein, 11 aa, Homo Sapiens
AEINNIIKIVG

SEQ ID NO: 83839 - protein, 11 aa, Homo Sapiens
EINNIIKIVGL

SEQ ID NO: 83840 - protein, 11 aa, Homo Sapiens
NIIKIVGLQYK

SEQ ID NO: 83841 - protein, 11 aa, Homo Sapiens
IIKIVGLQYKK

SEQ ID NO: 83842 - protein, 11 aa, Homo Sapiens
KIVGLQYKKNY

SEQ ID NO: 83843 - protein, 11 aa, Homo Sapiens
NYEDEDSLKTL

SEQ ID NO: 83844 - protein, 11 aa, Homo Sapiens
KTLRYGKIMIM

SEQ ID NO: 83845 - protein, 11 aa, Homo Sapiens
MTDQDQDGSHI

SEQ ID NO: 83846 - protein, 11 aa, Homo Sapiens
NFIHHNWPSLL

SEQ ID NO: 83847 - protein, 11 aa, Homo Sapiens
FIHHNWPSLLR

SEQ ID NO: 83848 - protein, 11 aa, Homo Sapiens
NWPSLLRHRFL

SEQ ID NO: 83849 - protein, 11 aa, Homo Sapiens
SLLRHRFLEEF

SEQ ID NO: 83850 - protein, 11 aa, Homo Sapiens
LLRHRFLEEFI

SEQ ID NO: 83851 - protein, 11 aa, Homo Sapiens
HRFLEEFITPI

SEQ ID NO: 83852 - protein, 11 aa, Homo Sapiens
RFLEEFITPIV

SEQ ID NO: 83853 - protein, 11 aa, Homo Sapiens
FLEEFITPIVK

SEQ ID NO: 83854 - protein, 11 aa, Homo Sapiens
LEEFITPIVKV

SEQ ID NO: 83855 - protein, 11 aa, Homo Sapiens
EEFITPIVKVS

SEQ ID NO: 83856 - protein, 11 aa, Homo Sapiens
EFITPIVKVSK

SEQ ID NO: 83857 - protein, 11 aa, Homo Sapiens
ITPIVKVSKNK

SEQ ID NO: 83858 - protein, 11 aa, Homo Sapiens
KVSKNKQEMAF

SEQ ID NO: 83859 - protein, 11 aa, Homo Sapiens
VSKNKQEMAFY

SEQ ID NO: 83860 - protein, 11 aa, Homo Sapiens
QEMAFYSLPEF

SEQ ID NO: 83861 - protein, 11 aa, Homo Sapiens
MAFYSLPEFEE

SEQ ID NO: 83862 - protein, 11 aa, Homo Sapiens
AFYSLPEFEEW

SEQ ID NO: 83863 - protein, 11 aa, Homo Sapiens
FYSLPEFEEWK

SEQ ID NO: 83864 - protein, 11 aa, Homo Sapiens
SLPEFEEWKSS

SEQ ID NO: 83865 - protein, 11 aa, Homo Sapiens
EWKSSTPNHKK

SEQ ID NO: 83866 - protein, 11 aa, Homo Sapiens
KSSTPNHKKWK

SEQ ID NO: 83867 - protein, 11 aa, Homo Sapiens
SSTPNHKKWKV

SEQ ID NO: 83868 - protein, 11 aa, Homo Sapiens
STPNHKKWKVK

SEQ ID NO: 83869 - protein, 11 aa, Homo Sapiens
TPNHKKWKVKY

SEQ ID NO: 83870 - protein, 11 aa, Homo Sapiens
YYKGLGTSTSK

SEQ ID NO: 83871 - protein, 11 aa, Homo Sapiens
GLGTSTSKEAK

SEQ ID NO: 83872 - protein, 11 aa, Homo Sapiens
GTSTSKEAKEY

SEQ ID NO: 83873 - protein, 11 aa, Homo Sapiens
EAKEYFADMKR

SEQ ID NO: 83874 - protein, 11 aa, Homo Sapiens
KEYFADMKRHR

SEQ ID NO: 83875 - protein, 11 aa, Homo Sapiens
EYFADMKRHRI

SEQ ID NO: 83876 - protein, 11 aa, Homo Sapiens
ADMKRHRIQFK

SEQ ID NO: 83877 - protein, 11 aa, Homo Sapiens
DMKRHRIQFKY

SEQ ID NO: 83878 - protein, 11 aa, Homo Sapiens
KYSGPEDDAAI

SEQ ID NO: 83879 - protein, 11 aa, Homo Sapiens
PEDDAAISLAF

SEQ ID NO: 83880 - protein, 11 aa, Homo Sapiens
DDAAISLAFSK

SEQ ID NO: 83881 - protein, 11 aa, Homo Sapiens
DAAISLAFSKK

SEQ ID NO: 83882 - protein, 11 aa, Homo Sapiens
LAFSKKQIDDR

SEQ ID NO: 83883 - protein, 11 aa, Homo Sapiens
KQIDDRKEWLT

SEQ ID NO: 83884 - protein, 11 aa, Homo Sapiens
WLTNFMEDRRQ

SEQ ID NO: 83885 - protein, 11 aa, Homo Sapiens
LTNFMEDRRQR

SEQ ID NO: 83886 - protein, 11 aa, Homo Sapiens
FMEDRRQRKLL

SEQ ID NO: 83887 - protein, 11 aa, Homo Sapiens
RRQRKLLGLPE

SEQ ID NO: 83888 - protein, 11 aa, Homo Sapiens
KLLGLPEDYLY

SEQ ID NO: 83889 - protein, 11 aa, Homo Sapiens
GLPEDYLYGQT

SEQ ID NO: 83890 - protein, 11 aa, Homo Sapiens
LPEDYLYGQTT

SEQ ID NO: 83891 - protein, 11 aa, Homo Sapiens
EDYLYGQTTTY

SEQ ID NO: 83892 - protein, 11 aa, Homo Sapiens
DYLYGQTTTYL

SEQ ID NO: 83893 - protein, 11 aa, Homo Sapiens
YLYGQTTTYLT

SEQ ID NO: 83894 - protein, 11 aa, Homo Sapiens
LYGQTTTYLTY

SEQ ID NO: 83895 - protein, 11 aa, Homo Sapiens
QTTTYLTYNDF

SEQ ID NO: 83896 - protein, 11 aa, Homo Sapiens
TTTYLTYNDFI

SEQ ID NO: 83897 - protein, 11 aa, Homo Sapiens
TYLTYNDFINK

SEQ ID NO: 83898 - protein, 11 aa, Homo Sapiens
LTYNDFINKEL

SEQ ID NO: 83899 - protein, 11 aa, Homo Sapiens
TYNDFINKELI

SEQ ID NO: 83900 - protein, 11 aa, Homo Sapiens
YNDFINKELIL

SEQ ID NO: 83901 - protein, 11 aa, Homo Sapiens
LILFSNSDNER

SEQ ID NO: 83902 - protein, 11 aa, Homo Sapiens
RSIPSMVDGLK

SEQ ID NO: 83903 - protein, 11 aa, Homo Sapiens
SMVDGLKPGQR

SEQ ID NO: 83904 - protein, 11 aa, Homo Sapiens
MVDGLKPGQRK

SEQ ID NO: 83905 - protein, 11 aa, Homo Sapiens
KPGQRKVLFTC

SEQ ID NO: 83906 - protein, 11 aa, Homo Sapiens
GQRKVLFTCFK

SEQ ID NO: 83907 - protein, 11 aa, Homo Sapiens
VLFTCFKRNDK

SEQ ID NO: 83908 - protein, 11 aa, Homo Sapiens
LFTCFKRNDKR

SEQ ID NO: 83909 - protein, 11 aa, Homo Sapiens
EVKVAQLAGSV

SEQ ID NO: 83910 - protein, 11 aa, Homo Sapiens
VAQLAGSVAEM

SEQ ID NO: 83911 - protein, 11 aa, Homo Sapiens
AQLAGSVAEMS

SEQ ID NO: 83912 - protein, 11 aa, Homo Sapiens
QLAGSVAEMSS

SEQ ID NO: 83913 - protein, 11 aa, Homo Sapiens
LAGSVAEMSSY

SEQ ID NO: 83914 - protein, 11 aa, Homo Sapiens
AEMSSYHHGEM

SEQ ID NO: 83915 - protein, 11 aa, Homo Sapiens
MSSYHHGEMSL

SEQ ID NO: 83916 - protein, 11 aa, Homo Sapiens
SYHHGEMSLMM

SEQ ID NO: 83917 - protein, 11 aa, Homo Sapiens
EMSLMMTIINL

SEQ ID NO: 83918 - protein, 11 aa, Homo Sapiens
MSLMMTIINLA

SEQ ID NO: 83919 - protein, 11 aa, Homo Sapiens
SLMMTIINLAQ

SEQ ID NO: 83920 - protein, 11 aa, Homo Sapiens
MMTIINLAQNF

SEQ ID NO: 83921 - protein, 11 aa, Homo Sapiens
MTIINLAQNFV

SEQ ID NO: 83922 - protein, 11 aa, Homo Sapiens
NFVGSNNLNLL

SEQ ID NO: 83923 - protein, 11 aa, Homo Sapiens
NLLQPIGQFGT

SEQ ID NO: 83924 - protein, 11 aa, Homo Sapiens
LLQPIGQFGTR

SEQ ID NO: 83925 - protein, 11 aa, Homo Sapiens
LQPIGQFGTRL

SEQ ID NO: 83926 - protein, 11 aa, Homo Sapiens
QPIGQFGTRLH

SEQ ID NO: 83927 - protein, 11 aa, Homo Sapiens
GQFGTRLHGGK

SEQ ID NO: 83928 - protein, 11 aa, Homo Sapiens
RLHGGKDSASP

SEQ ID NO: 83929 - protein, 11 aa, Homo Sapiens
SASPRYIFTML

SEQ ID NO: 83930 - protein, 11 aa, Homo Sapiens
SPRYIFTMLSS

SEQ ID NO: 83931 - protein, 11 aa, Homo Sapiens
RYIFTMLSSLA

SEQ ID NO: 83932 - protein, 11 aa, Homo Sapiens
YIFTMLSSLAR

SEQ ID NO: 83933 - protein, 11 aa, Homo Sapiens
FTMLSSLARLL

SEQ ID NO: 83934 - protein, 11 aa, Homo Sapiens
TMLSSLARLLF

SEQ ID NO: 83935 - protein, 11 aa, Homo Sapiens
SSLARLLFPPK

SEQ ID NO: 83936 - protein, 11 aa, Homo Sapiens
LLFPPKDDHTL

SEQ ID NO: 83937 - protein, 11 aa, Homo Sapiens
FPPKDDHTLKF

SEQ ID NO: 83938 - protein, 11 aa, Homo Sapiens
TLKFLYDDNQR

SEQ ID NO: 83939 - protein, 11 aa, Homo Sapiens
FLYDDNQRVEP

SEQ ID NO: 83940 - protein, 11 aa, Homo Sapiens
EPEWYIPIIPM

SEQ ID NO: 83941 - protein, 11 aa, Homo Sapiens
EWYIPIIPMVL

SEQ ID NO: 83942 - protein, 11 aa, Homo Sapiens
WYIPIIPMVLI

SEQ ID NO: 83943 - protein, 11 aa, Homo Sapiens
IPIIPMVLING

SEQ ID NO: 83944 - protein, 11 aa, Homo Sapiens
VLINGAEGIGT

SEQ ID NO: 83945 - protein, 11 aa, Homo Sapiens
EGIGTGWSCKI

SEQ ID NO: 83946 - protein, 11 aa, Homo Sapiens
WSCKIPNFDVR

SEQ ID NO: 83947 - protein, 11 aa, Homo Sapiens
KIPNFDVREIV

SEQ ID NO: 83948 - protein, 11 aa, Homo Sapiens
DVREIVNNIRR

SEQ ID NO: 83949 - protein, 11 aa, Homo Sapiens
REIVNNIRRLM

SEQ ID NO: 83950 - protein, 11 aa, Homo Sapiens
RLMDGEEPLPM

SEQ ID NO: 83951 - protein, 11 aa, Homo Sapiens
LMDGEEPLPML

SEQ ID NO: 83952 - protein, 11 aa, Homo Sapiens
GEEPLPMLPSY

SEQ ID NO: 83953 - protein, 11 aa, Homo Sapiens
LPMLPSYKNFK

SEQ ID NO: 83954 - protein, 11 aa, Homo Sapiens
MLPSYKNFKGT

SEQ ID NO: 83955 - protein, 11 aa, Homo Sapiens
LPSYKNFKGTI

SEQ ID NO: 83956 - protein, 11 aa, Homo Sapiens
GTIEELAPNQY

SEQ ID NO: 83957 - protein, 11 aa, Homo Sapiens
TIEELAPNQYV

SEQ ID NO: 83958 - protein, 11 aa, Homo Sapiens
IEELAPNQYVI

SEQ ID NO: 83959 - protein, 11 aa, Homo Sapiens
ELAPNQYVISG

SEQ ID NO: 83960 - protein, 11 aa, Homo Sapiens
APNQYVISGEV

SEQ ID NO: 83961 - protein, 11 aa, Homo Sapiens
NQYVISGEVAI

SEQ ID NO: 83962 - protein, 11 aa, Homo Sapiens
QYVISGEVAIL

SEQ ID NO: 83963 - protein, 11 aa, Homo Sapiens
GEVAILNSTTI

SEQ ID NO: 83964 - protein, 11 aa, Homo Sapiens
VAILNSTTIEI

SEQ ID NO: 83965 - protein, 11 aa, Homo Sapiens
STTIEISELPV

SEQ ID NO: 83966 - protein, 11 aa, Homo Sapiens
TTIEISELPVR

SEQ ID NO: 83967 - protein, 11 aa, Homo Sapiens
IEISELPVRTW

SEQ ID NO: 83968 - protein, 11 aa, Homo Sapiens
ELPVRTWTQTY

SEQ ID NO: 83969 - protein, 11 aa, Homo Sapiens
RTWTQTYKEQV

SEQ ID NO: 83970 - protein, 11 aa, Homo Sapiens
QTYKEQVLEPM

SEQ ID NO: 83971 - protein, 11 aa, Homo Sapiens
TYKEQVLEPML

SEQ ID NO: 83972 - protein, 11 aa, Homo Sapiens
MLNGTEKTPPL

SEQ ID NO: 83973 - protein, 11 aa, Homo Sapiens
TEKTPPLITDY

SEQ ID NO: 83974 - protein, 11 aa, Homo Sapiens
EKTPPLITDYR

SEQ ID NO: 83975 - protein, 11 aa, Homo Sapiens
TPPLITDYREY

SEQ ID NO: 83976 - protein, 11 aa, Homo Sapiens
REYHTDTTVKF

SEQ ID NO: 83977 - protein, 11 aa, Homo Sapiens
EYHTDTTVKFV

SEQ ID NO: 83978 - protein, 11 aa, Homo Sapiens
YHTDTTVKFVV

SEQ ID NO: 83979 - protein, 11 aa, Homo Sapiens
HTDTTVKFVVK

SEQ ID NO: 83980 - protein, 11 aa, Homo Sapiens
TTVKFVVKMTE

SEQ ID NO: 83981 - protein, 11 aa, Homo Sapiens
FVVKMTEEKLA

SEQ ID NO: 83982 - protein, 11 aa, Homo Sapiens
MTEEKLAEAER

SEQ ID NO: 83983 - protein, 11 aa, Homo Sapiens
EEKLAEAERVG

SEQ ID NO: 83984 - protein, 11 aa, Homo Sapiens
LAEAERVGLHK

SEQ ID NO: 83985 - protein, 11 aa, Homo Sapiens
AEAERVGLHKV

SEQ ID NO: 83986 - protein, 11 aa, Homo Sapiens
EAERVGLHKVF

SEQ ID NO: 83987 - protein, 11 aa, Homo Sapiens
AERVGLHKVFK

SEQ ID NO: 83988 - protein, 11 aa, Homo Sapiens
GLHKVFKLQTS

SEQ ID NO: 83989 - protein, 11 aa, Homo Sapiens
KLQTSLTCNSM

SEQ ID NO: 83990 - protein, 11 aa, Homo Sapiens
LQTSLTCNSMV

SEQ ID NO: 83991 - protein, 11 aa, Homo Sapiens
QTSLTCNSMVL

SEQ ID NO: 83992 - protein, 11 aa, Homo Sapiens
TSLTCNSMVLF

SEQ ID NO: 83993 - protein, 11 aa, Homo Sapiens
TCNSMVLFDHV

SEQ ID NO: 83994 - protein, 11 aa, Homo Sapiens
SMVLFDHVGCL

SEQ ID NO: 83995 - protein, 11 aa, Homo Sapiens
MVLFDHVGCLK

SEQ ID NO: 83996 - protein, 11 aa, Homo Sapiens
VLFDHVGCLKK

SEQ ID NO: 83997 - protein, 11 aa, Homo Sapiens
HVGCLKKYDTV

SEQ ID NO: 83998 - protein, 11 aa, Homo Sapiens
CLKKYDTVLDI

SEQ ID NO: 83999 - protein, 11 aa, Homo Sapiens
DTVLDILRDFF

SEQ ID NO: 84000 - protein, 11 aa, Homo Sapiens
VLDILRDFFEL

SEQ ID NO: 84001 - protein, 11 aa, Homo Sapiens
LDILRDFFELR

SEQ ID NO: 84002 - protein, 11 aa, Homo Sapiens
DILRDFFELRL

SEQ ID NO: 84003 - protein, 11 aa, Homo Sapiens
ILRDFFELRLK

SEQ ID NO: 84004 - protein, 11 aa, Homo Sapiens
FFELRLKYYGL

SEQ ID NO: 84005 - protein, 11 aa, Homo Sapiens
ELRLKYYGLRK

SEQ ID NO: 84006 - protein, 11 aa, Homo Sapiens
KYYGLRKEWLL

SEQ ID NO: 84007 - protein, 11 aa, Homo Sapiens
GLRKEWLLGML

SEQ ID NO: 84008 - protein, 11 aa, Homo Sapiens
WLLGMLGAESA

SEQ ID NO: 84009 - protein, 11 aa, Homo Sapiens
LLGMLGAESAK

SEQ ID NO: 84010 - protein, 11 aa, Homo Sapiens
ESAKLNNQARF

SEQ ID NO: 84011 - protein, 11 aa, Homo Sapiens
FILEKIDGKII

SEQ ID NO: 84012 - protein, 11 aa, Homo Sapiens
ILEKIDGKIII

SEQ ID NO: 84013 - protein, 11 aa, Homo Sapiens
KIDGKIIIENK

SEQ ID NO: 84014 - protein, 11 aa, Homo Sapiens
IIIENKPKKEL

SEQ ID NO: 84015 - protein, 11 aa, Homo Sapiens
KPKKELIKVLI

SEQ ID NO: 84016 - protein, 11 aa, Homo Sapiens
ELIKVLIQRGY

SEQ ID NO: 84017 - protein, 11 aa, Homo Sapiens
LIQRGYDSDPV

SEQ ID NO: 84018 - protein, 11 aa, Homo Sapiens
IQRGYDSDPVK

SEQ ID NO: 84019 - protein, 11 aa, Homo Sapiens
RGYDSDPVKAW

SEQ ID NO: 84020 - protein, 11 aa, Homo Sapiens
GYDSDPVKAWK

SEQ ID NO: 84021 - protein, 11 aa, Homo Sapiens
PVKAWKEAQQK

SEQ ID NO: 84022 - protein, 11 aa, Homo Sapiens
SVTDSGPTFNY

SEQ ID NO: 84023 - protein, 11 aa, Homo Sapiens
VTDSGPTFNYL

SEQ ID NO: 84024 - protein, 11 aa, Homo Sapiens
TDSGPTFNYLL

SEQ ID NO: 84025 - protein, 11 aa, Homo Sapiens
FNYLLDMPLWY

SEQ ID NO: 84026 - protein, 11 aa, Homo Sapiens
NYLLDMPLWYL

SEQ ID NO: 84027 - protein, 11 aa, Homo Sapiens
YLLDMPLWYLT

SEQ ID NO: 84028 - protein, 11 aa, Homo Sapiens
LLDMPLWYLTK

SEQ ID NO: 84029 - protein, 11 aa, Homo Sapiens
DMPLWYLTKEK

SEQ ID NO: 84030 - protein, 11 aa, Homo Sapiens
MPLWYLTKEKK

SEQ ID NO: 84031 - protein, 11 aa, Homo Sapiens
WYLTKEKKDEL

SEQ ID NO: 84032 - protein, 11 aa, Homo Sapiens
YLTKEKKDELC

SEQ ID NO: 84033 - protein, 11 aa, Homo Sapiens
LTKEKKDELCR

SEQ ID NO: 84034 - protein, 11 aa, Homo Sapiens
LKRKSPSDLWK

SEQ ID NO: 84035 - protein, 11 aa, Homo Sapiens
DLWKEDLATFI

SEQ ID NO: 84036 - protein, 11 aa, Homo Sapiens
KEDLATFIEEL

SEQ ID NO: 84037 - protein, 11 aa, Homo Sapiens
DLATFIEELEA

SEQ ID NO: 84038 - protein, 11 aa, Homo Sapiens
LATFIEELEAV

SEQ ID NO: 84039 - protein, 11 aa, Homo Sapiens
FIEELEAVEAK

SEQ ID NO: 84040 - protein, 11 aa, Homo Sapiens
KQDEQVGLPGK

SEQ ID NO: 84041 - protein, 11 aa, Homo Sapiens
TQMAEVLPSPR

SEQ ID NO: 84042 - protein, 11 aa, Homo Sapiens
EVLPSPRGQRV

SEQ ID NO: 84043 - protein, 11 aa, Homo Sapiens
VLPSPRGQRVI

SEQ ID NO: 84044 - protein, 11 aa, Homo Sapiens
SPRGQRVIPRI

SEQ ID NO: 84045 - protein, 11 aa, Homo Sapiens
RVIPRITIEMK

SEQ ID NO: 84046 - protein, 11 aa, Homo Sapiens
VIPRITIEMKA

SEQ ID NO: 84047 - protein, 11 aa, Homo Sapiens
IPRITIEMKAE

SEQ ID NO: 84048 - protein, 11 aa, Homo Sapiens
ITIEMKAEAEK

SEQ ID NO: 84049 - protein, 11 aa, Homo Sapiens
TIEMKAEAEKK

SEQ ID NO: 84050 - protein, 11 aa, Homo Sapiens
NTEGSPQEDGV

SEQ ID NO: 84051 - protein, 11 aa, Homo Sapiens
ELEGLKQRLEK

SEQ ID NO: 84052 - protein, 11 aa, Homo Sapiens
KQKREPGTKTK

SEQ ID NO: 84053 - protein, 11 aa, Homo Sapiens
KTKKQTTLAFK

SEQ ID NO: 84054 - protein, 11 aa, Homo Sapiens
KQTTLAFKPIK

SEQ ID NO: 84055 - protein, 11 aa, Homo Sapiens
QTTLAFKPIKK

SEQ ID NO: 84056 - protein, 11 aa, Homo Sapiens
TLAFKPIKKGK

SEQ ID NO: 84057 - protein, 11 aa, Homo Sapiens
LAFKPIKKGKK

SEQ ID NO: 84058 - protein, 11 aa, Homo Sapiens
AFKPIKKGKKR

SEQ ID NO: 84059 - protein, 11 aa, Homo Sapiens
NPWSDSESDRS

SEQ ID NO: 84060 - protein, 11 aa, Homo Sapiens
ESDRSSDESNF

SEQ ID NO: 84061 - protein, 11 aa, Homo Sapiens
DVPPRETEPRR

SEQ ID NO: 84062 - protein, 11 aa, Homo Sapiens
PPRETEPRRAA

SEQ ID NO: 84063 - protein, 11 aa, Homo Sapiens
EPRRAATKTKF

SEQ ID NO: 84064 - protein, 11 aa, Homo Sapiens
RRAATKTKFTM

SEQ ID NO: 84065 - protein, 11 aa, Homo Sapiens
FTMDLDSDEDF

SEQ ID NO: 84066 - protein, 11 aa, Homo Sapiens
DFDEKTDDEDF

SEQ ID NO: 84067 - protein, 11 aa, Homo Sapiens
DFVPSDASPPK

SEQ ID NO: 84068 - protein, 11 aa, Homo Sapiens
ASPPKTKTSPK

SEQ ID NO: 84069 - protein, 11 aa, Homo Sapiens
SPPKTKTSPKL

SEQ ID NO: 84070 - protein, 11 aa, Homo Sapiens
KTKTSPKLSNK

SEQ ID NO: 84071 - protein, 11 aa, Homo Sapiens
KTSPKLSNKEL

SEQ ID NO: 84072 - protein, 11 aa, Homo Sapiens
TSPKLSNKELK

SEQ ID NO: 84073 - protein, 11 aa, Homo Sapiens
KLSNKELKPQK

SEQ ID NO: 84074 - protein, 11 aa, Homo Sapiens
SVVSDLEADDV

SEQ ID NO: 84075 - protein, 11 aa, Homo Sapiens
VVSDLEADDVK

SEQ ID NO: 84076 - protein, 11 aa, Homo Sapiens
DLEADDVKGSV

SEQ ID NO: 84077 - protein, 11 aa, Homo Sapiens
EADDVKGSVPL

SEQ ID NO: 84078 - protein, 11 aa, Homo Sapiens
VPLSSSPPATH

SEQ ID NO: 84079 - protein, 11 aa, Homo Sapiens
FPDETEITNPV

SEQ ID NO: 84080 - protein, 11 aa, Homo Sapiens
ETEITNPVPKK

SEQ ID NO: 84081 - protein, 11 aa, Homo Sapiens
EITNPVPKKNV

SEQ ID NO: 84082 - protein, 11 aa, Homo Sapiens
SQSSTSTTGAK

SEQ ID NO: 84083 - protein, 11 aa, Homo Sapiens
QSSTSTTGAKK

SEQ ID NO: 84084 - protein, 11 aa, Homo Sapiens
SSTSTTGAKKR

SEQ ID NO: 84085 - protein, 11 aa, Homo Sapiens
TTGAKKRAAPK

SEQ ID NO: 84086 - protein, 11 aa, Homo Sapiens
AKKRAAPKGTK

SEQ ID NO: 84087 - protein, 11 aa, Homo Sapiens
APKGTKRDPAL

SEQ ID NO: 84088 - protein, 11 aa, Homo Sapiens
DPALNSGVSQK

SEQ ID NO: 84089 - protein, 11 aa, Homo Sapiens
VSQKPDPAKTK

SEQ ID NO: 84090 - protein, 11 aa, Homo Sapiens
DPAKTKNRRKR

SEQ ID NO: 84091 - protein, 11 aa, Homo Sapiens
KTKNRRKRKPS

SEQ ID NO: 84092 - protein, 11 aa, Homo Sapiens
TSDDSDSNFEK

SEQ ID NO: 84093 - protein, 11 aa, Homo Sapiens
KIVSKAVTSKK

SEQ ID NO: 84094 - protein, 11 aa, Homo Sapiens
VSKAVTSKKSK

SEQ ID NO: 84095 - protein, 11 aa, Homo Sapiens
DDFHMDFDSAV

SEQ ID NO: 84096 - protein, 11 aa, Homo Sapiens
HMDFDSAVAPR

SEQ ID NO: 84097 - protein, 11 aa, Homo Sapiens
DSAVAPRAKSV

SEQ ID NO: 84098 - protein, 11 aa, Homo Sapiens
SAVAPRAKSVR

SEQ ID NO: 84099 - protein, 11 aa, Homo Sapiens
AVAPRAKSVRA

SEQ ID NO: 84100 - protein, 11 aa, Homo Sapiens
APRAKSVRAKK

SEQ ID NO: 84101 - protein, 11 aa, Homo Sapiens
RAKSVRAKKPI

SEQ ID NO: 84102 - protein, 11 aa, Homo Sapiens
KSVRAKKPIKY

SEQ ID NO: 84103 - protein, 11 aa, Homo Sapiens
SVRAKKPIKYL

SEQ ID NO: 84104 - protein, 11 aa, Homo Sapiens
KYLEESDEDDL

SEQ ID NO: 84105 - protein, 11 aa, Homo Sapiens
YLEESDEDDLF

SEQ ID NO: 84106 - protein, 13 aa, Homo Sapiens
MEVSPLQPVNENM

SEQ ID NO: 84107 - protein, 13 aa, Homo Sapiens
EVSPLQPVNENMQ

SEQ ID NO: 84108 - protein, 13 aa, Homo Sapiens
VSPLQPVNENMQV

SEQ ID NO: 84109 - protein, 13 aa, Homo Sapiens
SPLQPVNENMQVN

SEQ ID NO: 84110 - protein, 13 aa, Homo Sapiens
PLQPVNENMQVNK

SEQ ID NO: 84111 - protein, 13 aa, Homo Sapiens
LQPVNENMQVNKI

SEQ ID NO: 84112 - protein, 13 aa, Homo Sapiens
QPVNENMQVNKIK

SEQ ID NO: 84113 - protein, 13 aa, Homo Sapiens
PVNENMQVNKIKK

SEQ ID NO: 84114 - protein, 13 aa, Homo Sapiens
VNENMQVNKIKKN

SEQ ID NO: 84115 - protein, 13 aa, Homo Sapiens
NENMQVNKIKKNE

SEQ ID NO: 84116 - protein, 13 aa, Homo Sapiens
ENMQVNKIKKNED

SEQ ID NO: 84117 - protein, 13 aa, Homo Sapiens
NMQVNKIKKNEDA

SEQ ID NO: 84118 - protein, 13 aa, Homo Sapiens
MQVNKIKKNEDAK

SEQ ID NO: 84119 - protein, 13 aa, Homo Sapiens
QVNKIKKNEDAKK

SEQ ID NO: 84120 - protein, 13 aa, Homo Sapiens
VNKIKKNEDAKKR

SEQ ID NO: 84121 - protein, 13 aa, Homo Sapiens
NKIKKNEDAKKRL

SEQ ID NO: 84122 - protein, 13 aa, Homo Sapiens
KIKKNEDAKKRLS

SEQ ID NO: 84123 - protein, 13 aa, Homo Sapiens
IKKNEDAKKRLSV

SEQ ID NO: 84124 - protein, 13 aa, Homo Sapiens
KKNEDAKKRLSVE

SEQ ID NO: 84125 - protein, 13 aa, Homo Sapiens
KNEDAKKRLSVER

SEQ ID NO: 84126 - protein, 13 aa, Homo Sapiens
NEDAKKRLSVERI

SEQ ID NO: 84127 - protein, 13 aa, Homo Sapiens
EDAKKRLSVERIY

SEQ ID NO: 84128 - protein, 13 aa, Homo Sapiens
DAKKRLSVERIYQ

SEQ ID NO: 84129 - protein, 13 aa, Homo Sapiens
AKKRLSVERIYQK

SEQ ID NO: 84130 - protein, 13 aa, Homo Sapiens
KKRLSVERIYQKK

SEQ ID NO: 84131 - protein, 13 aa, Homo Sapiens
KRLSVERIYQKKT

SEQ ID NO: 84132 - protein, 13 aa, Homo Sapiens
RLSVERIYQKKTQ

SEQ ID NO: 84133 - protein, 13 aa, Homo Sapiens
LSVERIYQKKTQL

SEQ ID NO: 84134 - protein, 13 aa, Homo Sapiens
SVERIYQKKTQLE

SEQ ID NO: 84135 - protein, 13 aa, Homo Sapiens
VERIYQKKTQLEH

SEQ ID NO: 84136 - protein, 13 aa, Homo Sapiens
ERIYQKKTQLEHI

SEQ ID NO: 84137 - protein, 13 aa, Homo Sapiens
RIYQKKTQLEHIL

SEQ ID NO: 84138 - protein, 13 aa, Homo Sapiens
IYQKKTQLEHILL

SEQ ID NO: 84139 - protein, 13 aa, Homo Sapiens
YQKKTQLEHILLR

SEQ ID NO: 84140 - protein, 13 aa, Homo Sapiens
QKKTQLEHILLRP

SEQ ID NO: 84141 - protein, 13 aa, Homo Sapiens
KKTQLEHILLRPD

SEQ ID NO: 84142 - protein, 13 aa, Homo Sapiens
KTQLEHILLRPDT

SEQ ID NO: 84143 - protein, 13 aa, Homo Sapiens
TQLEHILLRPDTY

SEQ ID NO: 84144 - protein, 13 aa, Homo Sapiens
QLEHILLRPDTYI

SEQ ID NO: 84145 - protein, 13 aa, Homo Sapiens
LEHILLRPDTYIG

SEQ ID NO: 84146 - protein, 13 aa, Homo Sapiens
EHILLRPDTYIGS

SEQ ID NO: 84147 - protein, 13 aa, Homo Sapiens
HILLRPDTYIGSV

SEQ ID NO: 84148 - protein, 13 aa, Homo Sapiens
ILLRPDTYIGSVE

SEQ ID NO: 84149 - protein, 13 aa, Homo Sapiens
LLRPDTYIGSVEL

SEQ ID NO: 84150 - protein, 13 aa, Homo Sapiens
LRPDTYIGSVELV

SEQ ID NO: 84151 - protein, 13 aa, Homo Sapiens
RPDTYIGSVELVT

SEQ ID NO: 84152 - protein, 13 aa, Homo Sapiens
PDTYIGSVELVTQ

SEQ ID NO: 84153 - protein, 13 aa, Homo Sapiens
DTYIGSVELVTQQ

SEQ ID NO: 84154 - protein, 13 aa, Homo Sapiens
TYIGSVELVTQQM

SEQ ID NO: 84155 - protein, 13 aa, Homo Sapiens
YIGSVELVTQQMW

SEQ ID NO: 84156 - protein, 13 aa, Homo Sapiens
IGSVELVTQQMWV

SEQ ID NO: 84157 - protein, 13 aa, Homo Sapiens
GSVELVTQQMWVY

SEQ ID NO: 84158 - protein, 13 aa, Homo Sapiens
SVELVTQQMWVYD

SEQ ID NO: 84159 - protein, 13 aa, Homo Sapiens
VELVTQQMWVYDE

SEQ ID NO: 84160 - protein, 13 aa, Homo Sapiens
ELVTQQMWVYDED

SEQ ID NO: 84161 - protein, 13 aa, Homo Sapiens
LVTQQMWVYDEDV

SEQ ID NO: 84162 - protein, 13 aa, Homo Sapiens
VTQQMWVYDEDVG

SEQ ID NO: 84163 - protein, 13 aa, Homo Sapiens
TQQMWVYDEDVGI

SEQ ID NO: 84164 - protein, 13 aa, Homo Sapiens
QQMWVYDEDVGIN

SEQ ID NO: 84165 - protein, 13 aa, Homo Sapiens
QMWVYDEDVGINY

SEQ ID NO: 84166 - protein, 13 aa, Homo Sapiens
MWVYDEDVGINYR

SEQ ID NO: 84167 - protein, 13 aa, Homo Sapiens
WVYDEDVGINYRE

SEQ ID NO: 84168 - protein, 13 aa, Homo Sapiens
VYDEDVGINYREV

SEQ ID NO: 84169 - protein, 13 aa, Homo Sapiens
YDEDVGINYREVT

SEQ ID NO: 84170 - protein, 13 aa, Homo Sapiens
DEDVGINYREVTF

SEQ ID NO: 84171 - protein, 13 aa, Homo Sapiens
EDVGINYREVTFV

SEQ ID NO: 84172 - protein, 13 aa, Homo Sapiens
DVGINYREVTFVP

SEQ ID NO: 84173 - protein, 13 aa, Homo Sapiens
VGINYREVTFVPG

SEQ ID NO: 84174 - protein, 13 aa, Homo Sapiens
GINYREVTFVPGL

SEQ ID NO: 84175 - protein, 13 aa, Homo Sapiens
INYREVTFVPGLY

SEQ ID NO: 84176 - protein, 13 aa, Homo Sapiens
NYREVTFVPGLYK

SEQ ID NO: 84177 - protein, 13 aa, Homo Sapiens
YREVTFVPGLYKI

SEQ ID NO: 84178 - protein, 13 aa, Homo Sapiens
REVTFVPGLYKIF

SEQ ID NO: 84179 - protein, 13 aa, Homo Sapiens
EVTFVPGLYKIFD

SEQ ID NO: 84180 - protein, 13 aa, Homo Sapiens
VTFVPGLYKIFDE

SEQ ID NO: 84181 - protein, 13 aa, Homo Sapiens
TFVPGLYKIFDEI

SEQ ID NO: 84182 - protein, 13 aa, Homo Sapiens
FVPGLYKIFDEIL

SEQ ID NO: 84183 - protein, 13 aa, Homo Sapiens
VPGLYKIFDEILV

SEQ ID NO: 84184 - protein, 13 aa, Homo Sapiens
PGLYKIFDEILVN

SEQ ID NO: 84185 - protein, 13 aa, Homo Sapiens
GLYKIFDEILVNA

SEQ ID NO: 84186 - protein, 13 aa, Homo Sapiens
LYKIFDEILVNAA

SEQ ID NO: 84187 - protein, 13 aa, Homo Sapiens
YKIFDEILVNAAD

SEQ ID NO: 84188 - protein, 13 aa, Homo Sapiens
KIFDEILVNAADN

SEQ ID NO: 84189 - protein, 13 aa, Homo Sapiens
IFDEILVNAADNK

SEQ ID NO: 84190 - protein, 13 aa, Homo Sapiens
FDEILVNAADNKQ

SEQ ID NO: 84191 - protein, 13 aa, Homo Sapiens
DEILVNAADNKQR

SEQ ID NO: 84192 - protein, 13 aa, Homo Sapiens
EILVNAADNKQRD

SEQ ID NO: 84193 - protein, 13 aa, Homo Sapiens
ILVNAADNKQRDP

SEQ ID NO: 84194 - protein, 13 aa, Homo Sapiens
LVNAADNKQRDPK

SEQ ID NO: 84195 - protein, 13 aa, Homo Sapiens
VNAADNKQRDPKM

SEQ ID NO: 84196 - protein, 13 aa, Homo Sapiens
NAADNKQRDPKMS

SEQ ID NO: 84197 - protein, 13 aa, Homo Sapiens
AADNKQRDPKMSC

SEQ ID NO: 84198 - protein, 13 aa, Homo Sapiens
ADNKQRDPKMSCI

SEQ ID NO: 84199 - protein, 13 aa, Homo Sapiens
DNKQRDPKMSCIR

SEQ ID NO: 84200 - protein, 13 aa, Homo Sapiens
NKQRDPKMSCIRV

SEQ ID NO: 84201 - protein, 13 aa, Homo Sapiens
KQRDPKMSCIRVT

SEQ ID NO: 84202 - protein, 13 aa, Homo Sapiens
QRDPKMSCIRVTI

SEQ ID NO: 84203 - protein, 13 aa, Homo Sapiens
RDPKMSCIRVTID

SEQ ID NO: 84204 - protein, 13 aa, Homo Sapiens
DPKMSCIRVTIDP

SEQ ID NO: 84205 - protein, 13 aa, Homo Sapiens
PKMSCIRVTIDPE

SEQ ID NO: 84206 - protein, 13 aa, Homo Sapiens
KMSCIRVTIDPEN

SEQ ID NO: 84207 - protein, 13 aa, Homo Sapiens
MSCIRVTIDPENN

SEQ ID NO: 84208 - protein, 13 aa, Homo Sapiens
SCIRVTIDPENNL

SEQ ID NO: 84209 - protein, 13 aa, Homo Sapiens
CIRVTIDPENNLI

SEQ ID NO: 84210 - protein, 13 aa, Homo Sapiens
IRVTIDPENNLIS

SEQ ID NO: 84211 - protein, 13 aa, Homo Sapiens
RVTIDPENNLISI

SEQ ID NO: 84212 - protein, 13 aa, Homo Sapiens
VTIDPENNLISIW

SEQ ID NO: 84213 - protein, 13 aa, Homo Sapiens
TIDPENNLISIWN

SEQ ID NO: 84214 - protein, 13 aa, Homo Sapiens
IDPENNLISIWNN

SEQ ID NO: 84215 - protein, 13 aa, Homo Sapiens
DPENNLISIWNNG

SEQ ID NO: 84216 - protein, 13 aa, Homo Sapiens
PENNLISIWNNGK

SEQ ID NO: 84217 - protein, 13 aa, Homo Sapiens
ENNLISIWNNGKG

SEQ ID NO: 84218 - protein, 13 aa, Homo Sapiens
NNLISIWNNGKGI

SEQ ID NO: 84219 - protein, 13 aa, Homo Sapiens
NLISIWNNGKGIP

SEQ ID NO: 84220 - protein, 13 aa, Homo Sapiens
LISIWNNGKGIPV

SEQ ID NO: 84221 - protein, 13 aa, Homo Sapiens
ISIWNNGKGIPVV

SEQ ID NO: 84222 - protein, 13 aa, Homo Sapiens
SIWNNGKGIPVVE

SEQ ID NO: 84223 - protein, 13 aa, Homo Sapiens
IWNNGKGIPVVEH

SEQ ID NO: 84224 - protein, 13 aa, Homo Sapiens
WNNGKGIPVVEHK

SEQ ID NO: 84225 - protein, 13 aa, Homo Sapiens
NNGKGIPVVEHKV

SEQ ID NO: 84226 - protein, 13 aa, Homo Sapiens
NGKGIPVVEHKVE

SEQ ID NO: 84227 - protein, 13 aa, Homo Sapiens
GKGIPVVEHKVEK

SEQ ID NO: 84228 - protein, 13 aa, Homo Sapiens
KGIPVVEHKVEKM

SEQ ID NO: 84229 - protein, 13 aa, Homo Sapiens
GIPVVEHKVEKMY

SEQ ID NO: 84230 - protein, 13 aa, Homo Sapiens
IPVVEHKVEKMYV

SEQ ID NO: 84231 - protein, 13 aa, Homo Sapiens
PVVEHKVEKMYVP

SEQ ID NO: 84232 - protein, 13 aa, Homo Sapiens
VVEHKVEKMYVPA

SEQ ID NO: 84233 - protein, 13 aa, Homo Sapiens
VEHKVEKMYVPAL

SEQ ID NO: 84234 - protein, 13 aa, Homo Sapiens
EHKVEKMYVPALI

SEQ ID NO: 84235 - protein, 13 aa, Homo Sapiens
HKVEKMYVPALIF

SEQ ID NO: 84236 - protein, 13 aa, Homo Sapiens
KVEKMYVPALIFG

SEQ ID NO: 84237 - protein, 13 aa, Homo Sapiens
VEKMYVPALIFGQ

SEQ ID NO: 84238 - protein, 13 aa, Homo Sapiens
EKMYVPALIFGQL

SEQ ID NO: 84239 - protein, 13 aa, Homo Sapiens
KMYVPALIFGQLL

SEQ ID NO: 84240 - protein, 13 aa, Homo Sapiens
MYVPALIFGQLLT

SEQ ID NO: 84241 - protein, 13 aa, Homo Sapiens
YVPALIFGQLLTS

SEQ ID NO: 84242 - protein, 13 aa, Homo Sapiens
VPALIFGQLLTSS

SEQ ID NO: 84243 - protein, 13 aa, Homo Sapiens
PALIFGQLLTSSN

SEQ ID NO: 84244 - protein, 13 aa, Homo Sapiens
ALIFGQLLTSSNY

SEQ ID NO: 84245 - protein, 13 aa, Homo Sapiens
LIFGQLLTSSNYD

SEQ ID NO: 84246 - protein, 13 aa, Homo Sapiens
IFGQLLTSSNYDD

SEQ ID NO: 84247 - protein, 13 aa, Homo Sapiens
FGQLLTSSNYDDD

SEQ ID NO: 84248 - protein, 13 aa, Homo Sapiens
GQLLTSSNYDDDE

SEQ ID NO: 84249 - protein, 13 aa, Homo Sapiens
QLLTSSNYDDDEK

SEQ ID NO: 84250 - protein, 13 aa, Homo Sapiens
LLTSSNYDDDEKK

SEQ ID NO: 84251 - protein, 13 aa, Homo Sapiens
LTSSNYDDDEKKV

SEQ ID NO: 84252 - protein, 13 aa, Homo Sapiens
TSSNYDDDEKKVT

SEQ ID NO: 84253 - protein, 13 aa, Homo Sapiens
SSNYDDDEKKVTG

SEQ ID NO: 84254 - protein, 13 aa, Homo Sapiens
SNYDDDEKKVTGG

SEQ ID NO: 84255 - protein, 13 aa, Homo Sapiens
NYDDDEKKVTGGR

SEQ ID NO: 84256 - protein, 13 aa, Homo Sapiens
YDDDEKKVTGGRN

SEQ ID NO: 84257 - protein, 13 aa, Homo Sapiens
DDDEKKVTGGRNG

SEQ ID NO: 84258 - protein, 13 aa, Homo Sapiens
DDEKKVTGGRNGY

SEQ ID NO: 84259 - protein, 13 aa, Homo Sapiens
DEKKVTGGRNGYG

SEQ ID NO: 84260 - protein, 13 aa, Homo Sapiens
EKKVTGGRNGYGA

SEQ ID NO: 84261 - protein, 13 aa, Homo Sapiens
KKVTGGRNGYGAK

SEQ ID NO: 84262 - protein, 13 aa, Homo Sapiens
KVTGGRNGYGAKL

SEQ ID NO: 84263 - protein, 13 aa, Homo Sapiens
VTGGRNGYGAKLC

SEQ ID NO: 84264 - protein, 13 aa, Homo Sapiens
TGGRNGYGAKLCN

SEQ ID NO: 84265 - protein, 13 aa, Homo Sapiens
GGRNGYGAKLCNI

SEQ ID NO: 84266 - protein, 13 aa, Homo Sapiens
GRNGYGAKLCNIF

SEQ ID NO: 84267 - protein, 13 aa, Homo Sapiens
RNGYGAKLCNIFS

SEQ ID NO: 84268 - protein, 13 aa, Homo Sapiens
NGYGAKLCNIFST

SEQ ID NO: 84269 - protein, 13 aa, Homo Sapiens
GYGAKLCNIFSTK

SEQ ID NO: 84270 - protein, 13 aa, Homo Sapiens
YGAKLCNIFSTKF

SEQ ID NO: 84271 - protein, 13 aa, Homo Sapiens
GAKLCNIFSTKFT

SEQ ID NO: 84272 - protein, 13 aa, Homo Sapiens
AKLCNIFSTKFTV

SEQ ID NO: 84273 - protein, 13 aa, Homo Sapiens
KLCNIFSTKFTVE

SEQ ID NO: 84274 - protein, 13 aa, Homo Sapiens
LCNIFSTKFTVET

SEQ ID NO: 84275 - protein, 13 aa, Homo Sapiens
CNIFSTKFTVETA

SEQ ID NO: 84276 - protein, 13 aa, Homo Sapiens
NIFSTKFTVETAS

SEQ ID NO: 84277 - protein, 13 aa, Homo Sapiens
IFSTKFTVETASR

SEQ ID NO: 84278 - protein, 13 aa, Homo Sapiens
FSTKFTVETASRE

SEQ ID NO: 84279 - protein, 13 aa, Homo Sapiens
STKFTVETASREY

SEQ ID NO: 84280 - protein, 13 aa, Homo Sapiens
TKFTVETASREYK

SEQ ID NO: 84281 - protein, 13 aa, Homo Sapiens
KFTVETASREYKK

SEQ ID NO: 84282 - protein, 13 aa, Homo Sapiens
FTVETASREYKKM

SEQ ID NO: 84283 - protein, 13 aa, Homo Sapiens
TVETASREYKKMF

SEQ ID NO: 84284 - protein, 13 aa, Homo Sapiens
VETASREYKKMFK

SEQ ID NO: 84285 - protein, 13 aa, Homo Sapiens
ETASREYKKMFKQ

SEQ ID NO: 84286 - protein, 13 aa, Homo Sapiens
TASREYKKMFKQT

SEQ ID NO: 84287 - protein, 13 aa, Homo Sapiens
ASREYKKMFKQTW

SEQ ID NO: 84288 - protein, 13 aa, Homo Sapiens
SREYKKMFKQTWM

SEQ ID NO: 84289 - protein, 13 aa, Homo Sapiens
REYKKMFKQTWMD

SEQ ID NO: 84290 - protein, 13 aa, Homo Sapiens
EYKKMFKQTWMDN

SEQ ID NO: 84291 - protein, 13 aa, Homo Sapiens
YKKMFKQTWMDNM

SEQ ID NO: 84292 - protein, 13 aa, Homo Sapiens
KKMFKQTWMDNMG

SEQ ID NO: 84293 - protein, 13 aa, Homo Sapiens
KMFKQTWMDNMGR

SEQ ID NO: 84294 - protein, 13 aa, Homo Sapiens
MFKQTWMDNMGRA

SEQ ID NO: 84295 - protein, 13 aa, Homo Sapiens
FKQTWMDNMGRAG

SEQ ID NO: 84296 - protein, 13 aa, Homo Sapiens
KQTWMDNMGRAGE

SEQ ID NO: 84297 - protein, 13 aa, Homo Sapiens
QTWMDNMGRAGEM

SEQ ID NO: 84298 - protein, 13 aa, Homo Sapiens
TWMDNMGRAGEME

SEQ ID NO: 84299 - protein, 13 aa, Homo Sapiens
WMDNMGRAGEMEL

SEQ ID NO: 84300 - protein, 13 aa, Homo Sapiens
MDNMGRAGEMELK

SEQ ID NO: 84301 - protein, 13 aa, Homo Sapiens
DNMGRAGEMELKP

SEQ ID NO: 84302 - protein, 13 aa, Homo Sapiens
NMGRAGEMELKPF

SEQ ID NO: 84303 - protein, 13 aa, Homo Sapiens
MGRAGEMELKPFN

SEQ ID NO: 84304 - protein, 13 aa, Homo Sapiens
GRAGEMELKPFNG

SEQ ID NO: 84305 - protein, 13 aa, Homo Sapiens
RAGEMELKPFNGE

SEQ ID NO: 84306 - protein, 13 aa, Homo Sapiens
AGEMELKPFNGED

SEQ ID NO: 84307 - protein, 13 aa, Homo Sapiens
GEMELKPFNGEDY

SEQ ID NO: 84308 - protein, 13 aa, Homo Sapiens
EMELKPFNGEDYT

SEQ ID NO: 84309 - protein, 13 aa, Homo Sapiens
MELKPFNGEDYTC

SEQ ID NO: 84310 - protein, 13 aa, Homo Sapiens
ELKPFNGEDYTCI

SEQ ID NO: 84311 - protein, 13 aa, Homo Sapiens
LKPFNGEDYTCIT

SEQ ID NO: 84312 - protein, 13 aa, Homo Sapiens
KPFNGEDYTCITF

SEQ ID NO: 84313 - protein, 13 aa, Homo Sapiens
PFNGEDYTCITFQ

SEQ ID NO: 84314 - protein, 13 aa, Homo Sapiens
FNGEDYTCITFQP

SEQ ID NO: 84315 - protein, 13 aa, Homo Sapiens
NGEDYTCITFQPD

SEQ ID NO: 84316 - protein, 13 aa, Homo Sapiens
GEDYTCITFQPDL

SEQ ID NO: 84317 - protein, 13 aa, Homo Sapiens
EDYTCITFQPDLS

SEQ ID NO: 84318 - protein, 13 aa, Homo Sapiens
DYTCITFQPDLSK

SEQ ID NO: 84319 - protein, 13 aa, Homo Sapiens
YTCITFQPDLSKF

SEQ ID NO: 84320 - protein, 13 aa, Homo Sapiens
TCITFQPDLSKFK

SEQ ID NO: 84321 - protein, 13 aa, Homo Sapiens
CITFQPDLSKFKM

SEQ ID NO: 84322 - protein, 13 aa, Homo Sapiens
ITFQPDLSKFKMQ

SEQ ID NO: 84323 - protein, 13 aa, Homo Sapiens
TFQPDLSKFKMQS

SEQ ID NO: 84324 - protein, 13 aa, Homo Sapiens
FQPDLSKFKMQSL

SEQ ID NO: 84325 - protein, 13 aa, Homo Sapiens
QPDLSKFKMQSLD

SEQ ID NO: 84326 - protein, 13 aa, Homo Sapiens
PDLSKFKMQSLDK

SEQ ID NO: 84327 - protein, 13 aa, Homo Sapiens
DLSKFKMQSLDKD

SEQ ID NO: 84328 - protein, 13 aa, Homo Sapiens
LSKFKMQSLDKDI

SEQ ID NO: 84329 - protein, 13 aa, Homo Sapiens
SKFKMQSLDKDIV

SEQ ID NO: 84330 - protein, 13 aa, Homo Sapiens
KFKMQSLDKDIVA

SEQ ID NO: 84331 - protein, 13 aa, Homo Sapiens
FKMQSLDKDIVAL

SEQ ID NO: 84332 - protein, 13 aa, Homo Sapiens
KMQSLDKDIVALM

SEQ ID NO: 84333 - protein, 13 aa, Homo Sapiens
MQSLDKDIVALMV

SEQ ID NO: 84334 - protein, 13 aa, Homo Sapiens
QSLDKDIVALMVR

SEQ ID NO: 84335 - protein, 13 aa, Homo Sapiens
SLDKDIVALMVRR

SEQ ID NO: 84336 - protein, 13 aa, Homo Sapiens
LDKDIVALMVRRA

SEQ ID NO: 84337 - protein, 13 aa, Homo Sapiens
DKDIVALMVRRAY

SEQ ID NO: 84338 - protein, 13 aa, Homo Sapiens
KDIVALMVRRAYD

SEQ ID NO: 84339 - protein, 13 aa, Homo Sapiens
DIVALMVRRAYDI

SEQ ID NO: 84340 - protein, 13 aa, Homo Sapiens
IVALMVRRAYDIA

SEQ ID NO: 84341 - protein, 13 aa, Homo Sapiens
VALMVRRAYDIAG

SEQ ID NO: 84342 - protein, 13 aa, Homo Sapiens
ALMVRRAYDIAGS

SEQ ID NO: 84343 - protein, 13 aa, Homo Sapiens
LMVRRAYDIAGST

SEQ ID NO: 84344 - protein, 13 aa, Homo Sapiens
MVRRAYDIAGSTK

SEQ ID NO: 84345 - protein, 13 aa, Homo Sapiens
VRRAYDIAGSTKD

SEQ ID NO: 84346 - protein, 13 aa, Homo Sapiens
RRAYDIAGSTKDV

SEQ ID NO: 84347 - protein, 13 aa, Homo Sapiens
RAYDIAGSTKDVK

SEQ ID NO: 84348 - protein, 13 aa, Homo Sapiens
AYDIAGSTKDVKV

SEQ ID NO: 84349 - protein, 13 aa, Homo Sapiens
YDIAGSTKDVKVF

SEQ ID NO: 84350 - protein, 13 aa, Homo Sapiens
DIAGSTKDVKVFL

SEQ ID NO: 84351 - protein, 13 aa, Homo Sapiens
IAGSTKDVKVFLN

SEQ ID NO: 84352 - protein, 13 aa, Homo Sapiens
AGSTKDVKVFLNG

SEQ ID NO: 84353 - protein, 13 aa, Homo Sapiens
GSTKDVKVFLNGN

SEQ ID NO: 84354 - protein, 13 aa, Homo Sapiens
STKDVKVFLNGNK

SEQ ID NO: 84355 - protein, 13 aa, Homo Sapiens
TKDVKVFLNGNKL

SEQ ID NO: 84356 - protein, 13 aa, Homo Sapiens
KDVKVFLNGNKLP

SEQ ID NO: 84357 - protein, 13 aa, Homo Sapiens
DVKVFLNGNKLPV

SEQ ID NO: 84358 - protein, 13 aa, Homo Sapiens
VKVFLNGNKLPVK

SEQ ID NO: 84359 - protein, 13 aa, Homo Sapiens
KVFLNGNKLPVKG

SEQ ID NO: 84360 - protein, 13 aa, Homo Sapiens
VFLNGNKLPVKGF

SEQ ID NO: 84361 - protein, 13 aa, Homo Sapiens
FLNGNKLPVKGFR

SEQ ID NO: 84362 - protein, 13 aa, Homo Sapiens
LNGNKLPVKGFRS

SEQ ID NO: 84363 - protein, 13 aa, Homo Sapiens
NGNKLPVKGFRSY

SEQ ID NO: 84364 - protein, 13 aa, Homo Sapiens
GNKLPVKGFRSYV

SEQ ID NO: 84365 - protein, 13 aa, Homo Sapiens
NKLPVKGFRSYVD

SEQ ID NO: 84366 - protein, 13 aa, Homo Sapiens
KLPVKGFRSYVDM

SEQ ID NO: 84367 - protein, 13 aa, Homo Sapiens
LPVKGFRSYVDMY

SEQ ID NO: 84368 - protein, 13 aa, Homo Sapiens
PVKGFRSYVDMYL

SEQ ID NO: 84369 - protein, 13 aa, Homo Sapiens
VKGFRSYVDMYLK

SEQ ID NO: 84370 - protein, 13 aa, Homo Sapiens
KGFRSYVDMYLKD

SEQ ID NO: 84371 - protein, 13 aa, Homo Sapiens
GFRSYVDMYLKDK

SEQ ID NO: 84372 - protein, 13 aa, Homo Sapiens
FRSYVDMYLKDKL

SEQ ID NO: 84373 - protein, 13 aa, Homo Sapiens
RSYVDMYLKDKLD

SEQ ID NO: 84374 - protein, 13 aa, Homo Sapiens
SYVDMYLKDKLDE

SEQ ID NO: 84375 - protein, 13 aa, Homo Sapiens
YVDMYLKDKLDET

SEQ ID NO: 84376 - protein, 13 aa, Homo Sapiens
VDMYLKDKLDETG

SEQ ID NO: 84377 - protein, 13 aa, Homo Sapiens
DMYLKDKLDETGN

SEQ ID NO: 84378 - protein, 13 aa, Homo Sapiens
MYLKDKLDETGNS

SEQ ID NO: 84379 - protein, 13 aa, Homo Sapiens
YLKDKLDETGNSL

SEQ ID NO: 84380 - protein, 13 aa, Homo Sapiens
LKDKLDETGNSLK

SEQ ID NO: 84381 - protein, 13 aa, Homo Sapiens
KDKLDETGNSLKV

SEQ ID NO: 84382 - protein, 13 aa, Homo Sapiens
DKLDETGNSLKVI

SEQ ID NO: 84383 - protein, 13 aa, Homo Sapiens
KLDETGNSLKVIH

SEQ ID NO: 84384 - protein, 13 aa, Homo Sapiens
LDETGNSLKVIHE

SEQ ID NO: 84385 - protein, 13 aa, Homo Sapiens
DETGNSLKVIHEQ

SEQ ID NO: 84386 - protein, 13 aa, Homo Sapiens
ETGNSLKVIHEQV

SEQ ID NO: 84387 - protein, 13 aa, Homo Sapiens
TGNSLKVIHEQVN

SEQ ID NO: 84388 - protein, 13 aa, Homo Sapiens
GNSLKVIHEQVNH

SEQ ID NO: 84389 - protein, 13 aa, Homo Sapiens
NSLKVIHEQVNHR

SEQ ID NO: 84390 - protein, 13 aa, Homo Sapiens
SLKVIHEQVNHRW

SEQ ID NO: 84391 - protein, 13 aa, Homo Sapiens
LKVIHEQVNHRWE

SEQ ID NO: 84392 - protein, 13 aa, Homo Sapiens
KVIHEQVNHRWEV

SEQ ID NO: 84393 - protein, 13 aa, Homo Sapiens
VIHEQVNHRWEVC

SEQ ID NO: 84394 - protein, 13 aa, Homo Sapiens
IHEQVNHRWEVCL

SEQ ID NO: 84395 - protein, 13 aa, Homo Sapiens
HEQVNHRWEVCLT

SEQ ID NO: 84396 - protein, 13 aa, Homo Sapiens
EQVNHRWEVCLTM

SEQ ID NO: 84397 - protein, 13 aa, Homo Sapiens
QVNHRWEVCLTMS

SEQ ID NO: 84398 - protein, 13 aa, Homo Sapiens
VNHRWEVCLTMSE

SEQ ID NO: 84399 - protein, 13 aa, Homo Sapiens
NHRWEVCLTMSEK

SEQ ID NO: 84400 - protein, 13 aa, Homo Sapiens
HRWEVCLTMSEKG

SEQ ID NO: 84401 - protein, 13 aa, Homo Sapiens
RWEVCLTMSEKGF

SEQ ID NO: 84402 - protein, 13 aa, Homo Sapiens
WEVCLTMSEKGFQ

SEQ ID NO: 84403 - protein, 13 aa, Homo Sapiens
EVCLTMSEKGFQQ

SEQ ID NO: 84404 - protein, 13 aa, Homo Sapiens
VCLTMSEKGFQQI

SEQ ID NO: 84405 - protein, 13 aa, Homo Sapiens
CLTMSEKGFQQIS

SEQ ID NO: 84406 - protein, 13 aa, Homo Sapiens
LTMSEKGFQQISF

SEQ ID NO: 84407 - protein, 13 aa, Homo Sapiens
TMSEKGFQQISFV

SEQ ID NO: 84408 - protein, 13 aa, Homo Sapiens
MSEKGFQQISFVN

SEQ ID NO: 84409 - protein, 13 aa, Homo Sapiens
SEKGFQQISFVNS

SEQ ID NO: 84410 - protein, 13 aa, Homo Sapiens
EKGFQQISFVNSI

SEQ ID NO: 84411 - protein, 13 aa, Homo Sapiens
KGFQQISFVNSIA

SEQ ID NO: 84412 - protein, 13 aa, Homo Sapiens
GFQQISFVNSIAT

SEQ ID NO: 84413 - protein, 13 aa, Homo Sapiens
FQQISFVNSIATS

SEQ ID NO: 84414 - protein, 13 aa, Homo Sapiens
QQISFVNSIATSK

SEQ ID NO: 84415 - protein, 13 aa, Homo Sapiens
QISFVNSIATSKG

SEQ ID NO: 84416 - protein, 13 aa, Homo Sapiens
ISFVNSIATSKGG

SEQ ID NO: 84417 - protein, 13 aa, Homo Sapiens
SFVNSIATSKGGR

SEQ ID NO: 84418 - protein, 13 aa, Homo Sapiens
FVNSIATSKGGRH

SEQ ID NO: 84419 - protein, 13 aa, Homo Sapiens
VNSIATSKGGRHV

SEQ ID NO: 84420 - protein, 13 aa, Homo Sapiens
NSIATSKGGRHVD

SEQ ID NO: 84421 - protein, 13 aa, Homo Sapiens
SIATSKGGRHVDY

SEQ ID NO: 84422 - protein, 13 aa, Homo Sapiens
IATSKGGRHVDYV

SEQ ID NO: 84423 - protein, 13 aa, Homo Sapiens
ATSKGGRHVDYVA

SEQ ID NO: 84424 - protein, 13 aa, Homo Sapiens
TSKGGRHVDYVAD

SEQ ID NO: 84425 - protein, 13 aa, Homo Sapiens
SKGGRHVDYVADQ

SEQ ID NO: 84426 - protein, 13 aa, Homo Sapiens
KGGRHVDYVADQI

SEQ ID NO: 84427 - protein, 13 aa, Homo Sapiens
GGRHVDYVADQIV

SEQ ID NO: 84428 - protein, 13 aa, Homo Sapiens
GRHVDYVADQIVT

SEQ ID NO: 84429 - protein, 13 aa, Homo Sapiens
RHVDYVADQIVTK

SEQ ID NO: 84430 - protein, 13 aa, Homo Sapiens
HVDYVADQIVTKL

SEQ ID NO: 84431 - protein, 13 aa, Homo Sapiens
VDYVADQIVTKLV

SEQ ID NO: 84432 - protein, 13 aa, Homo Sapiens
DYVADQIVTKLVD

SEQ ID NO: 84433 - protein, 13 aa, Homo Sapiens
YVADQIVTKLVDV

SEQ ID NO: 84434 - protein, 13 aa, Homo Sapiens
VADQIVTKLVDVV

SEQ ID NO: 84435 - protein, 13 aa, Homo Sapiens
ADQIVTKLVDVVK

SEQ ID NO: 84436 - protein, 13 aa, Homo Sapiens
DQIVTKLVDVVKK

SEQ ID NO: 84437 - protein, 13 aa, Homo Sapiens
QIVTKLVDVVKKK

SEQ ID NO: 84438 - protein, 13 aa, Homo Sapiens
IVTKLVDVVKKKN

SEQ ID NO: 84439 - protein, 13 aa, Homo Sapiens
VTKLVDVVKKKNK

SEQ ID NO: 84440 - protein, 13 aa, Homo Sapiens
TKLVDVVKKKNKG

SEQ ID NO: 84441 - protein, 13 aa, Homo Sapiens
KLVDVVKKKNKGG

SEQ ID NO: 84442 - protein, 13 aa, Homo Sapiens
LVDVVKKKNKGGV

SEQ ID NO: 84443 - protein, 13 aa, Homo Sapiens
VDVVKKKNKGGVA

SEQ ID NO: 84444 - protein, 13 aa, Homo Sapiens
DVVKKKNKGGVAV

SEQ ID NO: 84445 - protein, 13 aa, Homo Sapiens
VVKKKNKGGVAVK

SEQ ID NO: 84446 - protein, 13 aa, Homo Sapiens
VKKKNKGGVAVKA

SEQ ID NO: 84447 - protein, 13 aa, Homo Sapiens
KKKNKGGVAVKAH

SEQ ID NO: 84448 - protein, 13 aa, Homo Sapiens
KKNKGGVAVKAHQ

SEQ ID NO: 84449 - protein, 13 aa, Homo Sapiens
KNKGGVAVKAHQV

SEQ ID NO: 84450 - protein, 13 aa, Homo Sapiens
NKGGVAVKAHQVK

SEQ ID NO: 84451 - protein, 13 aa, Homo Sapiens
KGGVAVKAHQVKN

SEQ ID NO: 84452 - protein, 13 aa, Homo Sapiens
GGVAVKAHQVKNH

SEQ ID NO: 84453 - protein, 13 aa, Homo Sapiens
GVAVKAHQVKNHM

SEQ ID NO: 84454 - protein, 13 aa, Homo Sapiens
VAVKAHQVKNHMW

SEQ ID NO: 84455 - protein, 13 aa, Homo Sapiens
AVKAHQVKNHMWI

SEQ ID NO: 84456 - protein, 13 aa, Homo Sapiens
VKAHQVKNHMWIF

SEQ ID NO: 84457 - protein, 13 aa, Homo Sapiens
KAHQVKNHMWIFV

SEQ ID NO: 84458 - protein, 13 aa, Homo Sapiens
AHQVKNHMWIFVN

SEQ ID NO: 84459 - protein, 13 aa, Homo Sapiens
HQVKNHMWIFVNA

SEQ ID NO: 84460 - protein, 13 aa, Homo Sapiens
QVKNHMWIFVNAL

SEQ ID NO: 84461 - protein, 13 aa, Homo Sapiens
VKNHMWIFVNALI

SEQ ID NO: 84462 - protein, 13 aa, Homo Sapiens
KNHMWIFVNALIE

SEQ ID NO: 84463 - protein, 13 aa, Homo Sapiens
NHMWIFVNALIEN

SEQ ID NO: 84464 - protein, 13 aa, Homo Sapiens
HMWIFVNALIENP

SEQ ID NO: 84465 - protein, 13 aa, Homo Sapiens
MWIFVNALIENPT

SEQ ID NO: 84466 - protein, 13 aa, Homo Sapiens
WIFVNALIENPTF

SEQ ID NO: 84467 - protein, 13 aa, Homo Sapiens
IFVNALIENPTFD

SEQ ID NO: 84468 - protein, 13 aa, Homo Sapiens
FVNALIENPTFDS

SEQ ID NO: 84469 - protein, 13 aa, Homo Sapiens
VNALIENPTFDSQ

SEQ ID NO: 84470 - protein, 13 aa, Homo Sapiens
NALIENPTFDSQT

SEQ ID NO: 84471 - protein, 13 aa, Homo Sapiens
ALIENPTFDSQTK

SEQ ID NO: 84472 - protein, 13 aa, Homo Sapiens
LIENPTFDSQTKE

SEQ ID NO: 84473 - protein, 13 aa, Homo Sapiens
IENPTFDSQTKEN

SEQ ID NO: 84474 - protein, 13 aa, Homo Sapiens
ENPTFDSQTKENM

SEQ ID NO: 84475 - protein, 13 aa, Homo Sapiens
NPTFDSQTKENMT

SEQ ID NO: 84476 - protein, 13 aa, Homo Sapiens
PTFDSQTKENMTL

SEQ ID NO: 84477 - protein, 13 aa, Homo Sapiens
TFDSQTKENMTLQ

SEQ ID NO: 84478 - protein, 13 aa, Homo Sapiens
FDSQTKENMTLQP

SEQ ID NO: 84479 - protein, 13 aa, Homo Sapiens
DSQTKENMTLQPK

SEQ ID NO: 84480 - protein, 13 aa, Homo Sapiens
SQTKENMTLQPKS

SEQ ID NO: 84481 - protein, 13 aa, Homo Sapiens
QTKENMTLQPKSF

SEQ ID NO: 84482 - protein, 13 aa, Homo Sapiens
TKENMTLQPKSFG

SEQ ID NO: 84483 - protein, 13 aa, Homo Sapiens
KENMTLQPKSFGS

SEQ ID NO: 84484 - protein, 13 aa, Homo Sapiens
ENMTLQPKSFGST

SEQ ID NO: 84485 - protein, 13 aa, Homo Sapiens
NMTLQPKSFGSTC

SEQ ID NO: 84486 - protein, 13 aa, Homo Sapiens
MTLQPKSFGSTCQ

SEQ ID NO: 84487 - protein, 13 aa, Homo Sapiens
TLQPKSFGSTCQL

SEQ ID NO: 84488 - protein, 13 aa, Homo Sapiens
LQPKSFGSTCQLS

SEQ ID NO: 84489 - protein, 13 aa, Homo Sapiens
QPKSFGSTCQLSE

SEQ ID NO: 84490 - protein, 13 aa, Homo Sapiens
PKSFGSTCQLSEK

SEQ ID NO: 84491 - protein, 13 aa, Homo Sapiens
KSFGSTCQLSEKF

SEQ ID NO: 84492 - protein, 13 aa, Homo Sapiens
SFGSTCQLSEKFI

SEQ ID NO: 84493 - protein, 13 aa, Homo Sapiens
FGSTCQLSEKFIK

SEQ ID NO: 84494 - protein, 13 aa, Homo Sapiens
GSTCQLSEKFIKA

SEQ ID NO: 84495 - protein, 13 aa, Homo Sapiens
STCQLSEKFIKAA

SEQ ID NO: 84496 - protein, 13 aa, Homo Sapiens
TCQLSEKFIKAAI

SEQ ID NO: 84497 - protein, 13 aa, Homo Sapiens
CQLSEKFIKAAIG

SEQ ID NO: 84498 - protein, 13 aa, Homo Sapiens
QLSEKFIKAAIGC

SEQ ID NO: 84499 - protein, 13 aa, Homo Sapiens
LSEKFIKAAIGCG

SEQ ID NO: 84500 - protein, 13 aa, Homo Sapiens
SEKFIKAAIGCGI

SEQ ID NO: 84501 - protein, 13 aa, Homo Sapiens
EKFIKAAIGCGIV

SEQ ID NO: 84502 - protein, 13 aa, Homo Sapiens
KFIKAAIGCGIVE

SEQ ID NO: 84503 - protein, 13 aa, Homo Sapiens
FIKAAIGCGIVES

SEQ ID NO: 84504 - protein, 13 aa, Homo Sapiens
IKAAIGCGIVESI

SEQ ID NO: 84505 - protein, 13 aa, Homo Sapiens
KAAIGCGIVESIL

SEQ ID NO: 84506 - protein, 13 aa, Homo Sapiens
AAIGCGIVESILN

SEQ ID NO: 84507 - protein, 13 aa, Homo Sapiens
AIGCGIVESILNW

SEQ ID NO: 84508 - protein, 13 aa, Homo Sapiens
IGCGIVESILNWV

SEQ ID NO: 84509 - protein, 13 aa, Homo Sapiens
GCGIVESILNWVK

SEQ ID NO: 84510 - protein, 13 aa, Homo Sapiens
CGIVESILNWVKF

SEQ ID NO: 84511 - protein, 13 aa, Homo Sapiens
GIVESILNWVKFK

SEQ ID NO: 84512 - protein, 13 aa, Homo Sapiens
IVESILNWVKFKA

SEQ ID NO: 84513 - protein, 13 aa, Homo Sapiens
VESILNWVKFKAQ

SEQ ID NO: 84514 - protein, 13 aa, Homo Sapiens
ESILNWVKFKAQV

SEQ ID NO: 84515 - protein, 13 aa, Homo Sapiens
SILNWVKFKAQVQ

SEQ ID NO: 84516 - protein, 13 aa, Homo Sapiens
ILNWVKFKAQVQL

SEQ ID NO: 84517 - protein, 13 aa, Homo Sapiens
LNWVKFKAQVQLN

SEQ ID NO: 84518 - protein, 13 aa, Homo Sapiens
NWVKFKAQVQLNK

SEQ ID NO: 84519 - protein, 13 aa, Homo Sapiens
WVKFKAQVQLNKK

SEQ ID NO: 84520 - protein, 13 aa, Homo Sapiens
VKFKAQVQLNKKC

SEQ ID NO: 84521 - protein, 13 aa, Homo Sapiens
KFKAQVQLNKKCS

SEQ ID NO: 84522 - protein, 13 aa, Homo Sapiens
FKAQVQLNKKCSA

SEQ ID NO: 84523 - protein, 13 aa, Homo Sapiens
KAQVQLNKKCSAV

SEQ ID NO: 84524 - protein, 13 aa, Homo Sapiens
AQVQLNKKCSAVK

SEQ ID NO: 84525 - protein, 13 aa, Homo Sapiens
QVQLNKKCSAVKH

SEQ ID NO: 84526 - protein, 13 aa, Homo Sapiens
VQLNKKCSAVKHN

SEQ ID NO: 84527 - protein, 13 aa, Homo Sapiens
QLNKKCSAVKHNR

SEQ ID NO: 84528 - protein, 13 aa, Homo Sapiens
LNKKCSAVKHNRI

SEQ ID NO: 84529 - protein, 13 aa, Homo Sapiens
NKKCSAVKHNRIK

SEQ ID NO: 84530 - protein, 13 aa, Homo Sapiens
KKCSAVKHNRIKG

SEQ ID NO: 84531 - protein, 13 aa, Homo Sapiens
KCSAVKHNRIKGI

SEQ ID NO: 84532 - protein, 13 aa, Homo Sapiens
CSAVKHNRIKGIP

SEQ ID NO: 84533 - protein, 13 aa, Homo Sapiens
SAVKHNRIKGIPK

SEQ ID NO: 84534 - protein, 13 aa, Homo Sapiens
AVKHNRIKGIPKL

SEQ ID NO: 84535 - protein, 13 aa, Homo Sapiens
VKHNRIKGIPKLD

SEQ ID NO: 84536 - protein, 13 aa, Homo Sapiens
KHNRIKGIPKLDD

SEQ ID NO: 84537 - protein, 13 aa, Homo Sapiens
HNRIKGIPKLDDA

SEQ ID NO: 84538 - protein, 13 aa, Homo Sapiens
NRIKGIPKLDDAN

SEQ ID NO: 84539 - protein, 13 aa, Homo Sapiens
RIKGIPKLDDAND

SEQ ID NO: 84540 - protein, 13 aa, Homo Sapiens
IKGIPKLDDANDA

SEQ ID NO: 84541 - protein, 13 aa, Homo Sapiens
KGIPKLDDANDAG

SEQ ID NO: 84542 - protein, 13 aa, Homo Sapiens
GIPKLDDANDAGG

SEQ ID NO: 84543 - protein, 13 aa, Homo Sapiens
IPKLDDANDAGGR

SEQ ID NO: 84544 - protein, 13 aa, Homo Sapiens
PKLDDANDAGGRN

SEQ ID NO: 84545 - protein, 13 aa, Homo Sapiens
KLDDANDAGGRNS

SEQ ID NO: 84546 - protein, 13 aa, Homo Sapiens
LDDANDAGGRNST

SEQ ID NO: 84547 - protein, 13 aa, Homo Sapiens
DDANDAGGRNSTE

SEQ ID NO: 84548 - protein, 13 aa, Homo Sapiens
DANDAGGRNSTEC

SEQ ID NO: 84549 - protein, 13 aa, Homo Sapiens
ANDAGGRNSTECT

SEQ ID NO: 84550 - protein, 13 aa, Homo Sapiens
NDAGGRNSTECTL

SEQ ID NO: 84551 - protein, 13 aa, Homo Sapiens
DAGGRNSTECTLI

SEQ ID NO: 84552 - protein, 13 aa, Homo Sapiens
AGGRNSTECTLIL

SEQ ID NO: 84553 - protein, 13 aa, Homo Sapiens
GGRNSTECTLILT

SEQ ID NO: 84554 - protein, 13 aa, Homo Sapiens
GRNSTECTLILTE

SEQ ID NO: 84555 - protein, 13 aa, Homo Sapiens
RNSTECTLILTEG

SEQ ID NO: 84556 - protein, 13 aa, Homo Sapiens
NSTECTLILTEGD

SEQ ID NO: 84557 - protein, 13 aa, Homo Sapiens
STECTLILTEGDS

SEQ ID NO: 84558 - protein, 13 aa, Homo Sapiens
TECTLILTEGDSA

SEQ ID NO: 84559 - protein, 13 aa, Homo Sapiens
ECTLILTEGDSAK

SEQ ID NO: 84560 - protein, 13 aa, Homo Sapiens
CTLILTEGDSAKT

SEQ ID NO: 84561 - protein, 13 aa, Homo Sapiens
TLILTEGDSAKTL

SEQ ID NO: 84562 - protein, 13 aa, Homo Sapiens
LILTEGDSAKTLA

SEQ ID NO: 84563 - protein, 13 aa, Homo Sapiens
ILTEGDSAKTLAV

SEQ ID NO: 84564 - protein, 13 aa, Homo Sapiens
LTEGDSAKTLAVS

SEQ ID NO: 84565 - protein, 13 aa, Homo Sapiens
TEGDSAKTLAVSG

SEQ ID NO: 84566 - protein, 13 aa, Homo Sapiens
EGDSAKTLAVSGL

SEQ ID NO: 84567 - protein, 13 aa, Homo Sapiens
GDSAKTLAVSGLG

SEQ ID NO: 84568 - protein, 13 aa, Homo Sapiens
DSAKTLAVSGLGV

SEQ ID NO: 84569 - protein, 13 aa, Homo Sapiens
SAKTLAVSGLGVV

SEQ ID NO: 84570 - protein, 13 aa, Homo Sapiens
AKTLAVSGLGVVG

SEQ ID NO: 84571 - protein, 13 aa, Homo Sapiens
KTLAVSGLGVVGR

SEQ ID NO: 84572 - protein, 13 aa, Homo Sapiens
TLAVSGLGVVGRD

SEQ ID NO: 84573 - protein, 13 aa, Homo Sapiens
LAVSGLGVVGRDK

SEQ ID NO: 84574 - protein, 13 aa, Homo Sapiens
AVSGLGVVGRDKY

SEQ ID NO: 84575 - protein, 13 aa, Homo Sapiens
VSGLGVVGRDKYG

SEQ ID NO: 84576 - protein, 13 aa, Homo Sapiens
SGLGVVGRDKYGV

SEQ ID NO: 84577 - protein, 13 aa, Homo Sapiens
GLGVVGRDKYGVF

SEQ ID NO: 84578 - protein, 13 aa, Homo Sapiens
LGVVGRDKYGVFP

SEQ ID NO: 84579 - protein, 13 aa, Homo Sapiens
GVVGRDKYGVFPL

SEQ ID NO: 84580 - protein, 13 aa, Homo Sapiens
VVGRDKYGVFPLR

SEQ ID NO: 84581 - protein, 13 aa, Homo Sapiens
VGRDKYGVFPLRG

SEQ ID NO: 84582 - protein, 13 aa, Homo Sapiens
GRDKYGVFPLRGK

SEQ ID NO: 84583 - protein, 13 aa, Homo Sapiens
RDKYGVFPLRGKI

SEQ ID NO: 84584 - protein, 13 aa, Homo Sapiens
DKYGVFPLRGKIL

SEQ ID NO: 84585 - protein, 13 aa, Homo Sapiens
KYGVFPLRGKILN

SEQ ID NO: 84586 - protein, 13 aa, Homo Sapiens
YGVFPLRGKILNV

SEQ ID NO: 84587 - protein, 13 aa, Homo Sapiens
GVFPLRGKILNVR

SEQ ID NO: 84588 - protein, 13 aa, Homo Sapiens
VFPLRGKILNVRE

SEQ ID NO: 84589 - protein, 13 aa, Homo Sapiens
FPLRGKILNVREA

SEQ ID NO: 84590 - protein, 13 aa, Homo Sapiens
PLRGKILNVREAS

SEQ ID NO: 84591 - protein, 13 aa, Homo Sapiens
LRGKILNVREASH

SEQ ID NO: 84592 - protein, 13 aa, Homo Sapiens
RGKILNVREASHK

SEQ ID NO: 84593 - protein, 13 aa, Homo Sapiens
GKILNVREASHKQ

SEQ ID NO: 84594 - protein, 13 aa, Homo Sapiens
KILNVREASHKQI

SEQ ID NO: 84595 - protein, 13 aa, Homo Sapiens
ILNVREASHKQIM

SEQ ID NO: 84596 - protein, 13 aa, Homo Sapiens
LNVREASHKQIME

SEQ ID NO: 84597 - protein, 13 aa, Homo Sapiens
NVREASHKQIMEN

SEQ ID NO: 84598 - protein, 13 aa, Homo Sapiens
VREASHKQIMENA

SEQ ID NO: 84599 - protein, 13 aa, Homo Sapiens
REASHKQIMENAE

SEQ ID NO: 84600 - protein, 13 aa, Homo Sapiens
EASHKQIMENAEI

SEQ ID NO: 84601 - protein, 13 aa, Homo Sapiens
ASHKQIMENAEIN

SEQ ID NO: 84602 - protein, 13 aa, Homo Sapiens
SHKQIMENAEINN

SEQ ID NO: 84603 - protein, 13 aa, Homo Sapiens
HKQIMENAEINNI

SEQ ID NO: 84604 - protein, 13 aa, Homo Sapiens
KQIMENAEINNII

SEQ ID NO: 84605 - protein, 13 aa, Homo Sapiens
QIMENAEINNIIK

SEQ ID NO: 84606 - protein, 13 aa, Homo Sapiens
IMENAEINNIIKI

SEQ ID NO: 84607 - protein, 13 aa, Homo Sapiens
MENAEINNIIKIV

SEQ ID NO: 84608 - protein, 13 aa, Homo Sapiens
ENAEINNIIKIVG

SEQ ID NO: 84609 - protein, 13 aa, Homo Sapiens
NAEINNIIKIVGL

SEQ ID NO: 84610 - protein, 13 aa, Homo Sapiens
AEINNIIKIVGLQ

SEQ ID NO: 84611 - protein, 13 aa, Homo Sapiens
EINNIIKIVGLQY

SEQ ID NO: 84612 - protein, 13 aa, Homo Sapiens
INNIIKIVGLQYK

SEQ ID NO: 84613 - protein, 13 aa, Homo Sapiens
NNIIKIVGLQYKK

SEQ ID NO: 84614 - protein, 13 aa, Homo Sapiens
NIIKIVGLQYKKN

SEQ ID NO: 84615 - protein, 13 aa, Homo Sapiens
IIKIVGLQYKKNY

SEQ ID NO: 84616 - protein, 13 aa, Homo Sapiens
IKIVGLQYKKNYE

SEQ ID NO: 84617 - protein, 13 aa, Homo Sapiens
KIVGLQYKKNYED

SEQ ID NO: 84618 - protein, 13 aa, Homo Sapiens
IVGLQYKKNYEDE

SEQ ID NO: 84619 - protein, 13 aa, Homo Sapiens
VGLQYKKNYEDED

SEQ ID NO: 84620 - protein, 13 aa, Homo Sapiens
GLQYKKNYEDEDS

SEQ ID NO: 84621 - protein, 13 aa, Homo Sapiens
LQYKKNYEDEDSL

SEQ ID NO: 84622 - protein, 13 aa, Homo Sapiens
QYKKNYEDEDSLK

SEQ ID NO: 84623 - protein, 13 aa, Homo Sapiens
YKKNYEDEDSLKT

SEQ ID NO: 84624 - protein, 13 aa, Homo Sapiens
KKNYEDEDSLKTL

SEQ ID NO: 84625 - protein, 13 aa, Homo Sapiens
KNYEDEDSLKTLR

SEQ ID NO: 84626 - protein, 13 aa, Homo Sapiens
NYEDEDSLKTLRY

SEQ ID NO: 84627 - protein, 13 aa, Homo Sapiens
YEDEDSLKTLRYG

SEQ ID NO: 84628 - protein, 13 aa, Homo Sapiens
EDEDSLKTLRYGK

SEQ ID NO: 84629 - protein, 13 aa, Homo Sapiens
DEDSLKTLRYGKI

SEQ ID NO: 84630 - protein, 13 aa, Homo Sapiens
EDSLKTLRYGKIM

SEQ ID NO: 84631 - protein, 13 aa, Homo Sapiens
DSLKTLRYGKIMI

SEQ ID NO: 84632 - protein, 13 aa, Homo Sapiens
SLKTLRYGKIMIM

SEQ ID NO: 84633 - protein, 13 aa, Homo Sapiens
LKTLRYGKIMIMT

SEQ ID NO: 84634 - protein, 13 aa, Homo Sapiens
KTLRYGKIMIMTD

SEQ ID NO: 84635 - protein, 13 aa, Homo Sapiens
TLRYGKIMIMTDQ

SEQ ID NO: 84636 - protein, 13 aa, Homo Sapiens
LRYGKIMIMTDQD

SEQ ID NO: 84637 - protein, 13 aa, Homo Sapiens
RYGKIMIMTDQDQ

SEQ ID NO: 84638 - protein, 13 aa, Homo Sapiens
YGKIMIMTDQDQD

SEQ ID NO: 84639 - protein, 13 aa, Homo Sapiens
GKIMIMTDQDQDG

SEQ ID NO: 84640 - protein, 13 aa, Homo Sapiens
KIMIMTDQDQDGS

SEQ ID NO: 84641 - protein, 13 aa, Homo Sapiens
IMIMTDQDQDGSH

SEQ ID NO: 84642 - protein, 13 aa, Homo Sapiens
MIMTDQDQDGSHI

SEQ ID NO: 84643 - protein, 13 aa, Homo Sapiens
IMTDQDQDGSHIK

SEQ ID NO: 84644 - protein, 13 aa, Homo Sapiens
MTDQDQDGSHIKG

SEQ ID NO: 84645 - protein, 13 aa, Homo Sapiens
TDQDQDGSHIKGL

SEQ ID NO: 84646 - protein, 13 aa, Homo Sapiens
DQDQDGSHIKGLL

SEQ ID NO: 84647 - protein, 13 aa, Homo Sapiens
QDQDGSHIKGLLI

SEQ ID NO: 84648 - protein, 13 aa, Homo Sapiens
DQDGSHIKGLLIN

SEQ ID NO: 84649 - protein, 13 aa, Homo Sapiens
QDGSHIKGLLINF

SEQ ID NO: 84650 - protein, 13 aa, Homo Sapiens
DGSHIKGLLINFI

SEQ ID NO: 84651 - protein, 13 aa, Homo Sapiens
GSHIKGLLINFIH

SEQ ID NO: 84652 - protein, 13 aa, Homo Sapiens
SHIKGLLINFIHH

SEQ ID NO: 84653 - protein, 13 aa, Homo Sapiens
HIKGLLINFIHHN

SEQ ID NO: 84654 - protein, 13 aa, Homo Sapiens
IKGLLINFIHHNW

SEQ ID NO: 84655 - protein, 13 aa, Homo Sapiens
KGLLINFIHHNWP

SEQ ID NO: 84656 - protein, 13 aa, Homo Sapiens
GLLINFIHHNWPS

SEQ ID NO: 84657 - protein, 13 aa, Homo Sapiens
LLINFIHHNWPSL

SEQ ID NO: 84658 - protein, 13 aa, Homo Sapiens
LINFIHHNWPSLL

SEQ ID NO: 84659 - protein, 13 aa, Homo Sapiens
INFIHHNWPSLLR

SEQ ID NO: 84660 - protein, 13 aa, Homo Sapiens
NFIHHNWPSLLRH

SEQ ID NO: 84661 - protein, 13 aa, Homo Sapiens
FIHHNWPSLLRHR

SEQ ID NO: 84662 - protein, 13 aa, Homo Sapiens
IHHNWPSLLRHRF

SEQ ID NO: 84663 - protein, 13 aa, Homo Sapiens
HHNWPSLLRHRFL

SEQ ID NO: 84664 - protein, 13 aa, Homo Sapiens
HNWPSLLRHRFLE

SEQ ID NO: 84665 - protein, 13 aa, Homo Sapiens
NWPSLLRHRFLEE

SEQ ID NO: 84666 - protein, 13 aa, Homo Sapiens
WPSLLRHRFLEEF

SEQ ID NO: 84667 - protein, 13 aa, Homo Sapiens
PSLLRHRFLEEFI

SEQ ID NO: 84668 - protein, 13 aa, Homo Sapiens
SLLRHRFLEEFIT

SEQ ID NO: 84669 - protein, 13 aa, Homo Sapiens
LLRHRFLEEFITP

SEQ ID NO: 84670 - protein, 13 aa, Homo Sapiens
LRHRFLEEFITPI

SEQ ID NO: 84671 - protein, 13 aa, Homo Sapiens
RHRFLEEFITPIV

SEQ ID NO: 84672 - protein, 13 aa, Homo Sapiens
HRFLEEFITPIVK

SEQ ID NO: 84673 - protein, 13 aa, Homo Sapiens
RFLEEFITPIVKV

SEQ ID NO: 84674 - protein, 13 aa, Homo Sapiens
FLEEFITPIVKVS

SEQ ID NO: 84675 - protein, 13 aa, Homo Sapiens
LEEFITPIVKVSK

SEQ ID NO: 84676 - protein, 13 aa, Homo Sapiens
EEFITPIVKVSKN

SEQ ID NO: 84677 - protein, 13 aa, Homo Sapiens
EFITPIVKVSKNK

SEQ ID NO: 84678 - protein, 13 aa, Homo Sapiens
FITPIVKVSKNKQ

SEQ ID NO: 84679 - protein, 13 aa, Homo Sapiens
ITPIVKVSKNKQE

SEQ ID NO: 84680 - protein, 13 aa, Homo Sapiens
TPIVKVSKNKQEM

SEQ ID NO: 84681 - protein, 13 aa, Homo Sapiens
PIVKVSKNKQEMA

SEQ ID NO: 84682 - protein, 13 aa, Homo Sapiens
IVKVSKNKQEMAF

SEQ ID NO: 84683 - protein, 13 aa, Homo Sapiens
VKVSKNKQEMAFY

SEQ ID NO: 84684 - protein, 13 aa, Homo Sapiens
KVSKNKQEMAFYS

SEQ ID NO: 84685 - protein, 13 aa, Homo Sapiens
VSKNKQEMAFYSL

SEQ ID NO: 84686 - protein, 13 aa, Homo Sapiens
SKNKQEMAFYSLP

SEQ ID NO: 84687 - protein, 13 aa, Homo Sapiens
KNKQEMAFYSLPE

SEQ ID NO: 84688 - protein, 13 aa, Homo Sapiens
NKQEMAFYSLPEF

SEQ ID NO: 84689 - protein, 13 aa, Homo Sapiens
KQEMAFYSLPEFE

SEQ ID NO: 84690 - protein, 13 aa, Homo Sapiens
QEMAFYSLPEFEE

SEQ ID NO: 84691 - protein, 13 aa, Homo Sapiens
EMAFYSLPEFEEW

SEQ ID NO: 84692 - protein, 13 aa, Homo Sapiens
MAFYSLPEFEEWK

SEQ ID NO: 84693 - protein, 13 aa, Homo Sapiens
AFYSLPEFEEWKS

SEQ ID NO: 84694 - protein, 13 aa, Homo Sapiens
FYSLPEFEEWKSS

SEQ ID NO: 84695 - protein, 13 aa, Homo Sapiens
YSLPEFEEWKSST

SEQ ID NO: 84696 - protein, 13 aa, Homo Sapiens
SLPEFEEWKSSTP

SEQ ID NO: 84697 - protein, 13 aa, Homo Sapiens
LPEFEEWKSSTPN

SEQ ID NO: 84698 - protein, 13 aa, Homo Sapiens
PEFEEWKSSTPNH

SEQ ID NO: 84699 - protein, 13 aa, Homo Sapiens
EFEEWKSSTPNHK

SEQ ID NO: 84700 - protein, 13 aa, Homo Sapiens
FEEWKSSTPNHKK

SEQ ID NO: 84701 - protein, 13 aa, Homo Sapiens
EEWKSSTPNHKKW

SEQ ID NO: 84702 - protein, 13 aa, Homo Sapiens
EWKSSTPNHKKWK

SEQ ID NO: 84703 - protein, 13 aa, Homo Sapiens
WKSSTPNHKKWKV

SEQ ID NO: 84704 - protein, 13 aa, Homo Sapiens
KSSTPNHKKWKVK

SEQ ID NO: 84705 - protein, 13 aa, Homo Sapiens
SSTPNHKKWKVKY

SEQ ID NO: 84706 - protein, 13 aa, Homo Sapiens
STPNHKKWKVKYY

SEQ ID NO: 84707 - protein, 13 aa, Homo Sapiens
TPNHKKWKVKYYK

SEQ ID NO: 84708 - protein, 13 aa, Homo Sapiens
PNHKKWKVKYYKG

SEQ ID NO: 84709 - protein, 13 aa, Homo Sapiens
NHKKWKVKYYKGL

SEQ ID NO: 84710 - protein, 13 aa, Homo Sapiens
HKKWKVKYYKGLG

SEQ ID NO: 84711 - protein, 13 aa, Homo Sapiens
KKWKVKYYKGLGT

SEQ ID NO: 84712 - protein, 13 aa, Homo Sapiens
KWKVKYYKGLGTS

SEQ ID NO: 84713 - protein, 13 aa, Homo Sapiens
WKVKYYKGLGTST

SEQ ID NO: 84714 - protein, 13 aa, Homo Sapiens
KVKYYKGLGTSTS

SEQ ID NO: 84715 - protein, 13 aa, Homo Sapiens
VKYYKGLGTSTSK

SEQ ID NO: 84716 - protein, 13 aa, Homo Sapiens
KYYKGLGTSTSKE

SEQ ID NO: 84717 - protein, 13 aa, Homo Sapiens
YYKGLGTSTSKEA

SEQ ID NO: 84718 - protein, 13 aa, Homo Sapiens
YKGLGTSTSKEAK

SEQ ID NO: 84719 - protein, 13 aa, Homo Sapiens
KGLGTSTSKEAKE

SEQ ID NO: 84720 - protein, 13 aa, Homo Sapiens
GLGTSTSKEAKEY

SEQ ID NO: 84721 - protein, 13 aa, Homo Sapiens
LGTSTSKEAKEYF

SEQ ID NO: 84722 - protein, 13 aa, Homo Sapiens
GTSTSKEAKEYFA

SEQ ID NO: 84723 - protein, 13 aa, Homo Sapiens
TSTSKEAKEYFAD

SEQ ID NO: 84724 - protein, 13 aa, Homo Sapiens
STSKEAKEYFADM

SEQ ID NO: 84725 - protein, 13 aa, Homo Sapiens
TSKEAKEYFADMK

SEQ ID NO: 84726 - protein, 13 aa, Homo Sapiens
SKEAKEYFADMKR

SEQ ID NO: 84727 - protein, 13 aa, Homo Sapiens
KEAKEYFADMKRH

SEQ ID NO: 84728 - protein, 13 aa, Homo Sapiens
EAKEYFADMKRHR

SEQ ID NO: 84729 - protein, 13 aa, Homo Sapiens
AKEYFADMKRHRI

SEQ ID NO: 84730 - protein, 13 aa, Homo Sapiens
KEYFADMKRHRIQ

SEQ ID NO: 84731 - protein, 13 aa, Homo Sapiens
EYFADMKRHRIQF

SEQ ID NO: 84732 - protein, 13 aa, Homo Sapiens
YFADMKRHRIQFK

SEQ ID NO: 84733 - protein, 13 aa, Homo Sapiens
FADMKRHRIQFKY

SEQ ID NO: 84734 - protein, 13 aa, Homo Sapiens
ADMKRHRIQFKYS

SEQ ID NO: 84735 - protein, 13 aa, Homo Sapiens
DMKRHRIQFKYSG

SEQ ID NO: 84736 - protein, 13 aa, Homo Sapiens
MKRHRIQFKYSGP

SEQ ID NO: 84737 - protein, 13 aa, Homo Sapiens
KRHRIQFKYSGPE

SEQ ID NO: 84738 - protein, 13 aa, Homo Sapiens
RHRIQFKYSGPED

SEQ ID NO: 84739 - protein, 13 aa, Homo Sapiens
HRIQFKYSGPEDD

SEQ ID NO: 84740 - protein, 13 aa, Homo Sapiens
RIQFKYSGPEDDA

SEQ ID NO: 84741 - protein, 13 aa, Homo Sapiens
IQFKYSGPEDDAA

SEQ ID NO: 84742 - protein, 13 aa, Homo Sapiens
QFKYSGPEDDAAI

SEQ ID NO: 84743 - protein, 13 aa, Homo Sapiens
FKYSGPEDDAAIS

SEQ ID NO: 84744 - protein, 13 aa, Homo Sapiens
KYSGPEDDAAISL

SEQ ID NO: 84745 - protein, 13 aa, Homo Sapiens
YSGPEDDAAISLA

SEQ ID NO: 84746 - protein, 13 aa, Homo Sapiens
SGPEDDAAISLAF

SEQ ID NO: 84747 - protein, 13 aa, Homo Sapiens
GPEDDAAISLAFS

SEQ ID NO: 84748 - protein, 13 aa, Homo Sapiens
PEDDAAISLAFSK

SEQ ID NO: 84749 - protein, 13 aa, Homo Sapiens
EDDAAISLAFSKK

SEQ ID NO: 84750 - protein, 13 aa, Homo Sapiens
DDAAISLAFSKKQ

SEQ ID NO: 84751 - protein, 13 aa, Homo Sapiens
DAAISLAFSKKQI

SEQ ID NO: 84752 - protein, 13 aa, Homo Sapiens
AAISLAFSKKQID

SEQ ID NO: 84753 - protein, 13 aa, Homo Sapiens
AISLAFSKKQIDD

SEQ ID NO: 84754 - protein, 13 aa, Homo Sapiens
ISLAFSKKQIDDR

SEQ ID NO: 84755 - protein, 13 aa, Homo Sapiens
SLAFSKKQIDDRK

SEQ ID NO: 84756 - protein, 13 aa, Homo Sapiens
LAFSKKQIDDRKE

SEQ ID NO: 84757 - protein, 13 aa, Homo Sapiens
AFSKKQIDDRKEW

SEQ ID NO: 84758 - protein, 13 aa, Homo Sapiens
FSKKQIDDRKEWL

SEQ ID NO: 84759 - protein, 13 aa, Homo Sapiens
SKKQIDDRKEWLT

SEQ ID NO: 84760 - protein, 13 aa, Homo Sapiens
KKQIDDRKEWLTN

SEQ ID NO: 84761 - protein, 13 aa, Homo Sapiens
KQIDDRKEWLTNF

SEQ ID NO: 84762 - protein, 13 aa, Homo Sapiens
QIDDRKEWLTNFM

SEQ ID NO: 84763 - protein, 13 aa, Homo Sapiens
IDDRKEWLTNFME

SEQ ID NO: 84764 - protein, 13 aa, Homo Sapiens
DDRKEWLTNFMED

SEQ ID NO: 84765 - protein, 13 aa, Homo Sapiens
DRKEWLTNFMEDR

SEQ ID NO: 84766 - protein, 13 aa, Homo Sapiens
RKEWLTNFMEDRR

SEQ ID NO: 84767 - protein, 13 aa, Homo Sapiens
KEWLTNFMEDRRQ

SEQ ID NO: 84768 - protein, 13 aa, Homo Sapiens
EWLTNFMEDRRQR

SEQ ID NO: 84769 - protein, 13 aa, Homo Sapiens
WLTNFMEDRRQRK

SEQ ID NO: 84770 - protein, 13 aa, Homo Sapiens
LTNFMEDRRQRKL

SEQ ID NO: 84771 - protein, 13 aa, Homo Sapiens
TNFMEDRRQRKLL

SEQ ID NO: 84772 - protein, 13 aa, Homo Sapiens
NFMEDRRQRKLLG

SEQ ID NO: 84773 - protein, 13 aa, Homo Sapiens
FMEDRRQRKLLGL

SEQ ID NO: 84774 - protein, 13 aa, Homo Sapiens
MEDRRQRKLLGLP

SEQ ID NO: 84775 - protein, 13 aa, Homo Sapiens
EDRRQRKLLGLPE

SEQ ID NO: 84776 - protein, 13 aa, Homo Sapiens
DRRQRKLLGLPED

SEQ ID NO: 84777 - protein, 13 aa, Homo Sapiens
RRQRKLLGLPEDY

SEQ ID NO: 84778 - protein, 13 aa, Homo Sapiens
RQRKLLGLPEDYL

SEQ ID NO: 84779 - protein, 13 aa, Homo Sapiens
QRKLLGLPEDYLY

SEQ ID NO: 84780 - protein, 13 aa, Homo Sapiens
RKLLGLPEDYLYG

SEQ ID NO: 84781 - protein, 13 aa, Homo Sapiens
KLLGLPEDYLYGQ

SEQ ID NO: 84782 - protein, 13 aa, Homo Sapiens
LLGLPEDYLYGQT

SEQ ID NO: 84783 - protein, 13 aa, Homo Sapiens
LGLPEDYLYGQTT

SEQ ID NO: 84784 - protein, 13 aa, Homo Sapiens
GLPEDYLYGQTTT

SEQ ID NO: 84785 - protein, 13 aa, Homo Sapiens
LPEDYLYGQTTTY

SEQ ID NO: 84786 - protein, 13 aa, Homo Sapiens
PEDYLYGQTTTYL

SEQ ID NO: 84787 - protein, 13 aa, Homo Sapiens
EDYLYGQTTTYLT

SEQ ID NO: 84788 - protein, 13 aa, Homo Sapiens
DYLYGQTTTYLTY

SEQ ID NO: 84789 - protein, 13 aa, Homo Sapiens
YLYGQTTTYLTYN

SEQ ID NO: 84790 - protein, 13 aa, Homo Sapiens
LYGQTTTYLTYND

SEQ ID NO: 84791 - protein, 13 aa, Homo Sapiens
YGQTTTYLTYNDF

SEQ ID NO: 84792 - protein, 13 aa, Homo Sapiens
GQTTTYLTYNDFI

SEQ ID NO: 84793 - protein, 13 aa, Homo Sapiens
QTTTYLTYNDFIN

SEQ ID NO: 84794 - protein, 13 aa, Homo Sapiens
TTTYLTYNDFINK

SEQ ID NO: 84795 - protein, 13 aa, Homo Sapiens
TTYLTYNDFINKE

SEQ ID NO: 84796 - protein, 13 aa, Homo Sapiens
TYLTYNDFINKEL

SEQ ID NO: 84797 - protein, 13 aa, Homo Sapiens
YLTYNDFINKELI

SEQ ID NO: 84798 - protein, 13 aa, Homo Sapiens
LTYNDFINKELIL

SEQ ID NO: 84799 - protein, 13 aa, Homo Sapiens
TYNDFINKELILF

SEQ ID NO: 84800 - protein, 13 aa, Homo Sapiens
YNDFINKELILFS

SEQ ID NO: 84801 - protein, 13 aa, Homo Sapiens
NDFINKELILFSN

SEQ ID NO: 84802 - protein, 13 aa, Homo Sapiens
DFINKELILFSNS

SEQ ID NO: 84803 - protein, 13 aa, Homo Sapiens
FINKELILFSNSD

SEQ ID NO: 84804 - protein, 13 aa, Homo Sapiens
INKELILFSNSDN

SEQ ID NO: 84805 - protein, 13 aa, Homo Sapiens
NKELILFSNSDNE

SEQ ID NO: 84806 - protein, 13 aa, Homo Sapiens
KELILFSNSDNER

SEQ ID NO: 84807 - protein, 13 aa, Homo Sapiens
ELILFSNSDNERS

SEQ ID NO: 84808 - protein, 13 aa, Homo Sapiens
LILFSNSDNERSI

SEQ ID NO: 84809 - protein, 13 aa, Homo Sapiens
ILFSNSDNERSIP

SEQ ID NO: 84810 - protein, 13 aa, Homo Sapiens
LFSNSDNERSIPS

SEQ ID NO: 84811 - protein, 13 aa, Homo Sapiens
FSNSDNERSIPSM

SEQ ID NO: 84812 - protein, 13 aa, Homo Sapiens
SNSDNERSIPSMV

SEQ ID NO: 84813 - protein, 13 aa, Homo Sapiens
NSDNERSIPSMVD

SEQ ID NO: 84814 - protein, 13 aa, Homo Sapiens
SDNERSIPSMVDG

SEQ ID NO: 84815 - protein, 13 aa, Homo Sapiens
DNERSIPSMVDGL

SEQ ID NO: 84816 - protein, 13 aa, Homo Sapiens
NERSIPSMVDGLK

SEQ ID NO: 84817 - protein, 13 aa, Homo Sapiens
ERSIPSMVDGLKP

SEQ ID NO: 84818 - protein, 13 aa, Homo Sapiens
RSIPSMVDGLKPG

SEQ ID NO: 84819 - protein, 13 aa, Homo Sapiens
SIPSMVDGLKPGQ

SEQ ID NO: 84820 - protein, 13 aa, Homo Sapiens
IPSMVDGLKPGQR

SEQ ID NO: 84821 - protein, 13 aa, Homo Sapiens
PSMVDGLKPGQRK

SEQ ID NO: 84822 - protein, 13 aa, Homo Sapiens
SMVDGLKPGQRKV

SEQ ID NO: 84823 - protein, 13 aa, Homo Sapiens
MVDGLKPGQRKVL

SEQ ID NO: 84824 - protein, 13 aa, Homo Sapiens
VDGLKPGQRKVLF

SEQ ID NO: 84825 - protein, 13 aa, Homo Sapiens
DGLKPGQRKVLFT

SEQ ID NO: 84826 - protein, 13 aa, Homo Sapiens
GLKPGQRKVLFTC

SEQ ID NO: 84827 - protein, 13 aa, Homo Sapiens
LKPGQRKVLFTCF

SEQ ID NO: 84828 - protein, 13 aa, Homo Sapiens
KPGQRKVLFTCFK

SEQ ID NO: 84829 - protein, 13 aa, Homo Sapiens
PGQRKVLFTCFKR

SEQ ID NO: 84830 - protein, 13 aa, Homo Sapiens
GQRKVLFTCFKRN

SEQ ID NO: 84831 - protein, 13 aa, Homo Sapiens
QRKVLFTCFKRND

SEQ ID NO: 84832 - protein, 13 aa, Homo Sapiens
RKVLFTCFKRNDK

SEQ ID NO: 84833 - protein, 13 aa, Homo Sapiens
KVLFTCFKRNDKR

SEQ ID NO: 84834 - protein, 13 aa, Homo Sapiens
VLFTCFKRNDKRE

SEQ ID NO: 84835 - protein, 13 aa, Homo Sapiens
LFTCFKRNDKREV

SEQ ID NO: 84836 - protein, 13 aa, Homo Sapiens
FTCFKRNDKREVK

SEQ ID NO: 84837 - protein, 13 aa, Homo Sapiens
TCFKRNDKREVKV

SEQ ID NO: 84838 - protein, 13 aa, Homo Sapiens
CFKRNDKREVKVA

SEQ ID NO: 84839 - protein, 13 aa, Homo Sapiens
FKRNDKREVKVAQ

SEQ ID NO: 84840 - protein, 13 aa, Homo Sapiens
KRNDKREVKVAQL

SEQ ID NO: 84841 - protein, 13 aa, Homo Sapiens
RNDKREVKVAQLA

SEQ ID NO: 84842 - protein, 13 aa, Homo Sapiens
NDKREVKVAQLAG

SEQ ID NO: 84843 - protein, 13 aa, Homo Sapiens
DKREVKVAQLAGS

SEQ ID NO: 84844 - protein, 13 aa, Homo Sapiens
KREVKVAQLAGSV

SEQ ID NO: 84845 - protein, 13 aa, Homo Sapiens
REVKVAQLAGSVA

SEQ ID NO: 84846 - protein, 13 aa, Homo Sapiens
EVKVAQLAGSVAE

SEQ ID NO: 84847 - protein, 13 aa, Homo Sapiens
VKVAQLAGSVAEM

SEQ ID NO: 84848 - protein, 13 aa, Homo Sapiens
KVAQLAGSVAEMS

SEQ ID NO: 84849 - protein, 13 aa, Homo Sapiens
VAQLAGSVAEMSS

SEQ ID NO: 84850 - protein, 13 aa, Homo Sapiens
AQLAGSVAEMSSY

SEQ ID NO: 84851 - protein, 13 aa, Homo Sapiens
QLAGSVAEMSSYH

SEQ ID NO: 84852 - protein, 13 aa, Homo Sapiens
LAGSVAEMSSYHH

SEQ ID NO: 84853 - protein, 13 aa, Homo Sapiens
AGSVAEMSSYHHG

SEQ ID NO: 84854 - protein, 13 aa, Homo Sapiens
GSVAEMSSYHHGE

SEQ ID NO: 84855 - protein, 13 aa, Homo Sapiens
SVAEMSSYHHGEM

SEQ ID NO: 84856 - protein, 13 aa, Homo Sapiens
VAEMSSYHHGEMS

SEQ ID NO: 84857 - protein, 13 aa, Homo Sapiens
AEMSSYHHGEMSL

SEQ ID NO: 84858 - protein, 13 aa, Homo Sapiens
EMSSYHHGEMSLM

SEQ ID NO: 84859 - protein, 13 aa, Homo Sapiens
MSSYHHGEMSLMM

SEQ ID NO: 84860 - protein, 13 aa, Homo Sapiens
SSYHHGEMSLMMT

SEQ ID NO: 84861 - protein, 13 aa, Homo Sapiens
SYHHGEMSLMMTI

SEQ ID NO: 84862 - protein, 13 aa, Homo Sapiens
YHHGEMSLMMTII

SEQ ID NO: 84863 - protein, 13 aa, Homo Sapiens
HHGEMSLMMTIIN

SEQ ID NO: 84864 - protein, 13 aa, Homo Sapiens
HGEMSLMMTIINL

SEQ ID NO: 84865 - protein, 13 aa, Homo Sapiens
GEMSLMMTIINLA

SEQ ID NO: 84866 - protein, 13 aa, Homo Sapiens
EMSLMMTIINLAQ

SEQ ID NO: 84867 - protein, 13 aa, Homo Sapiens
MSLMMTIINLAQN

SEQ ID NO: 84868 - protein, 13 aa, Homo Sapiens
SLMMTIINLAQNF

SEQ ID NO: 84869 - protein, 13 aa, Homo Sapiens
LMMTIINLAQNFV

SEQ ID NO: 84870 - protein, 13 aa, Homo Sapiens
MMTIINLAQNFVG

SEQ ID NO: 84871 - protein, 13 aa, Homo Sapiens
MTIINLAQNFVGS

SEQ ID NO: 84872 - protein, 13 aa, Homo Sapiens
TIINLAQNFVGSN

SEQ ID NO: 84873 - protein, 13 aa, Homo Sapiens
IINLAQNFVGSNN

SEQ ID NO: 84874 - protein, 13 aa, Homo Sapiens
INLAQNFVGSNNL

SEQ ID NO: 84875 - protein, 13 aa, Homo Sapiens
NLAQNFVGSNNLN

SEQ ID NO: 84876 - protein, 13 aa, Homo Sapiens
LAQNFVGSNNLNL

SEQ ID NO: 84877 - protein, 13 aa, Homo Sapiens
AQNFVGSNNLNLL

SEQ ID NO: 84878 - protein, 13 aa, Homo Sapiens
QNFVGSNNLNLLQ

SEQ ID NO: 84879 - protein, 13 aa, Homo Sapiens
NFVGSNNLNLLQP

SEQ ID NO: 84880 - protein, 13 aa, Homo Sapiens
FVGSNNLNLLQPI

SEQ ID NO: 84881 - protein, 13 aa, Homo Sapiens
VGSNNLNLLQPIG

SEQ ID NO: 84882 - protein, 13 aa, Homo Sapiens
GSNNLNLLQPIGQ

SEQ ID NO: 84883 - protein, 13 aa, Homo Sapiens
SNNLNLLQPIGQF

SEQ ID NO: 84884 - protein, 13 aa, Homo Sapiens
NNLNLLQPIGQFG

SEQ ID NO: 84885 - protein, 13 aa, Homo Sapiens
NLNLLQPIGQFGT

SEQ ID NO: 84886 - protein, 13 aa, Homo Sapiens
LNLLQPIGQFGTR

SEQ ID NO: 84887 - protein, 13 aa, Homo Sapiens
NLLQPIGQFGTRL

SEQ ID NO: 84888 - protein, 13 aa, Homo Sapiens
LLQPIGQFGTRLH

SEQ ID NO: 84889 - protein, 13 aa, Homo Sapiens
LQPIGQFGTRLHG

SEQ ID NO: 84890 - protein, 13 aa, Homo Sapiens
QPIGQFGTRLHGG

SEQ ID NO: 84891 - protein, 13 aa, Homo Sapiens
PIGQFGTRLHGGK

SEQ ID NO: 84892 - protein, 13 aa, Homo Sapiens
IGQFGTRLHGGKD

SEQ ID NO: 84893 - protein, 13 aa, Homo Sapiens
GQFGTRLHGGKDS

SEQ ID NO: 84894 - protein, 13 aa, Homo Sapiens
QFGTRLHGGKDSA

SEQ ID NO: 84895 - protein, 13 aa, Homo Sapiens
FGTRLHGGKDSAS

SEQ ID NO: 84896 - protein, 13 aa, Homo Sapiens
GTRLHGGKDSASP

SEQ ID NO: 84897 - protein, 13 aa, Homo Sapiens
TRLHGGKDSASPR

SEQ ID NO: 84898 - protein, 13 aa, Homo Sapiens
RLHGGKDSASPRY

SEQ ID NO: 84899 - protein, 13 aa, Homo Sapiens
LHGGKDSASPRYI

SEQ ID NO: 84900 - protein, 13 aa, Homo Sapiens
HGGKDSASPRYIF

SEQ ID NO: 84901 - protein, 13 aa, Homo Sapiens
GGKDSASPRYIFT

SEQ ID NO: 84902 - protein, 13 aa, Homo Sapiens
GKDSASPRYIFTM

SEQ ID NO: 84903 - protein, 13 aa, Homo Sapiens
KDSASPRYIFTML

SEQ ID NO: 84904 - protein, 13 aa, Homo Sapiens
DSASPRYIFTMLS

SEQ ID NO: 84905 - protein, 13 aa, Homo Sapiens
SASPRYIFTMLSS

SEQ ID NO: 84906 - protein, 13 aa, Homo Sapiens
ASPRYIFTMLSSL

SEQ ID NO: 84907 - protein, 13 aa, Homo Sapiens
SPRYIFTMLSSLA

SEQ ID NO: 84908 - protein, 13 aa, Homo Sapiens
PRYIFTMLSSLAR

SEQ ID NO: 84909 - protein, 13 aa, Homo Sapiens
RYIFTMLSSLARL

SEQ ID NO: 84910 - protein, 13 aa, Homo Sapiens
YIFTMLSSLARLL

SEQ ID NO: 84911 - protein, 13 aa, Homo Sapiens
IFTMLSSLARLLF

SEQ ID NO: 84912 - protein, 13 aa, Homo Sapiens
FTMLSSLARLLFP

SEQ ID NO: 84913 - protein, 13 aa, Homo Sapiens
TMLSSLARLLFPP

SEQ ID NO: 84914 - protein, 13 aa, Homo Sapiens
MLSSLARLLFPPK

SEQ ID NO: 84915 - protein, 13 aa, Homo Sapiens
LSSLARLLFPPKD

SEQ ID NO: 84916 - protein, 13 aa, Homo Sapiens
SSLARLLFPPKDD

SEQ ID NO: 84917 - protein, 13 aa, Homo Sapiens
SLARLLFPPKDDH

SEQ ID NO: 84918 - protein, 13 aa, Homo Sapiens
LARLLFPPKDDHT

SEQ ID NO: 84919 - protein, 13 aa, Homo Sapiens
ARLLFPPKDDHTL

SEQ ID NO: 84920 - protein, 13 aa, Homo Sapiens
RLLFPPKDDHTLK

SEQ ID NO: 84921 - protein, 13 aa, Homo Sapiens
LLFPPKDDHTLKF

SEQ ID NO: 84922 - protein, 13 aa, Homo Sapiens
LFPPKDDHTLKFL

SEQ ID NO: 84923 - protein, 13 aa, Homo Sapiens
FPPKDDHTLKFLY

SEQ ID NO: 84924 - protein, 13 aa, Homo Sapiens
PPKDDHTLKFLYD

SEQ ID NO: 84925 - protein, 13 aa, Homo Sapiens
PKDDHTLKFLYDD

SEQ ID NO: 84926 - protein, 13 aa, Homo Sapiens
KDDHTLKFLYDDN

SEQ ID NO: 84927 - protein, 13 aa, Homo Sapiens
DDHTLKFLYDDNQ

SEQ ID NO: 84928 - protein, 13 aa, Homo Sapiens
DHTLKFLYDDNQR

SEQ ID NO: 84929 - protein, 13 aa, Homo Sapiens
HTLKFLYDDNQRV

SEQ ID NO: 84930 - protein, 13 aa, Homo Sapiens
TLKFLYDDNQRVE

SEQ ID NO: 84931 - protein, 13 aa, Homo Sapiens
LKFLYDDNQRVEP

SEQ ID NO: 84932 - protein, 13 aa, Homo Sapiens
KFLYDDNQRVEPE

SEQ ID NO: 84933 - protein, 13 aa, Homo Sapiens
FLYDDNQRVEPEW

SEQ ID NO: 84934 - protein, 13 aa, Homo Sapiens
LYDDNQRVEPEWY

SEQ ID NO: 84935 - protein, 13 aa, Homo Sapiens
YDDNQRVEPEWYI

SEQ ID NO: 84936 - protein, 13 aa, Homo Sapiens
DDNQRVEPEWYIP

SEQ ID NO: 84937 - protein, 13 aa, Homo Sapiens
DNQRVEPEWYIPI

SEQ ID NO: 84938 - protein, 13 aa, Homo Sapiens
NQRVEPEWYIPII

SEQ ID NO: 84939 - protein, 13 aa, Homo Sapiens
QRVEPEWYIPIIP

SEQ ID NO: 84940 - protein, 13 aa, Homo Sapiens
RVEPEWYIPIIPM

SEQ ID NO: 84941 - protein, 13 aa, Homo Sapiens
VEPEWYIPIIPMV

SEQ ID NO: 84942 - protein, 13 aa, Homo Sapiens
EPEWYIPIIPMVL

SEQ ID NO: 84943 - protein, 13 aa, Homo Sapiens
PEWYIPIIPMVLI

SEQ ID NO: 84944 - protein, 13 aa, Homo Sapiens
EWYIPIIPMVLIN

SEQ ID NO: 84945 - protein, 13 aa, Homo Sapiens
WYIPIIPMVLING

SEQ ID NO: 84946 - protein, 13 aa, Homo Sapiens
YIPIIPMVLINGA

SEQ ID NO: 84947 - protein, 13 aa, Homo Sapiens
IPIIPMVLINGAE

SEQ ID NO: 84948 - protein, 13 aa, Homo Sapiens
PIIPMVLINGAEG

SEQ ID NO: 84949 - protein, 13 aa, Homo Sapiens
IIPMVLINGAEGI

SEQ ID NO: 84950 - protein, 13 aa, Homo Sapiens
IPMVLINGAEGIG

SEQ ID NO: 84951 - protein, 13 aa, Homo Sapiens
PMVLINGAEGIGT

SEQ ID NO: 84952 - protein, 13 aa, Homo Sapiens
MVLINGAEGIGTG

SEQ ID NO: 84953 - protein, 13 aa, Homo Sapiens
VLINGAEGIGTGW

SEQ ID NO: 84954 - protein, 13 aa, Homo Sapiens
LINGAEGIGTGWS

SEQ ID NO: 84955 - protein, 13 aa, Homo Sapiens
INGAEGIGTGWSC

SEQ ID NO: 84956 - protein, 13 aa, Homo Sapiens
NGAEGIGTGWSCK

SEQ ID NO: 84957 - protein, 13 aa, Homo Sapiens
GAEGIGTGWSCKI

SEQ ID NO: 84958 - protein, 13 aa, Homo Sapiens
AEGIGTGWSCKIP

SEQ ID NO: 84959 - protein, 13 aa, Homo Sapiens
EGIGTGWSCKIPN

SEQ ID NO: 84960 - protein, 13 aa, Homo Sapiens
GIGTGWSCKIPNF

SEQ ID NO: 84961 - protein, 13 aa, Homo Sapiens
IGTGWSCKIPNFD

SEQ ID NO: 84962 - protein, 13 aa, Homo Sapiens
GTGWSCKIPNFDV

SEQ ID NO: 84963 - protein, 13 aa, Homo Sapiens
TGWSCKIPNFDVR

SEQ ID NO: 84964 - protein, 13 aa, Homo Sapiens
GWSCKIPNFDVRE

SEQ ID NO: 84965 - protein, 13 aa, Homo Sapiens
WSCKIPNFDVREI

SEQ ID NO: 84966 - protein, 13 aa, Homo Sapiens
SCKIPNFDVREIV

SEQ ID NO: 84967 - protein, 13 aa, Homo Sapiens
CKIPNFDVREIVN

SEQ ID NO: 84968 - protein, 13 aa, Homo Sapiens
KIPNFDVREIVNN

SEQ ID NO: 84969 - protein, 13 aa, Homo Sapiens
IPNFDVREIVNNI

SEQ ID NO: 84970 - protein, 13 aa, Homo Sapiens
PNFDVREIVNNIR

SEQ ID NO: 84971 - protein, 13 aa, Homo Sapiens
NFDVREIVNNIRR

SEQ ID NO: 84972 - protein, 13 aa, Homo Sapiens
FDVREIVNNIRRL

SEQ ID NO: 84973 - protein, 13 aa, Homo Sapiens
DVREIVNNIRRLM

SEQ ID NO: 84974 - protein, 13 aa, Homo Sapiens
VREIVNNIRRLMD

SEQ ID NO: 84975 - protein, 13 aa, Homo Sapiens
REIVNNIRRLMDG

SEQ ID NO: 84976 - protein, 13 aa, Homo Sapiens
EIVNNIRRLMDGE

SEQ ID NO: 84977 - protein, 13 aa, Homo Sapiens
IVNNIRRLMDGEE

SEQ ID NO: 84978 - protein, 13 aa, Homo Sapiens
VNNIRRLMDGEEP

SEQ ID NO: 84979 - protein, 13 aa, Homo Sapiens
NNIRRLMDGEEPL

SEQ ID NO: 84980 - protein, 13 aa, Homo Sapiens
NIRRLMDGEEPLP

SEQ ID NO: 84981 - protein, 13 aa, Homo Sapiens
IRRLMDGEEPLPM

SEQ ID NO: 84982 - protein, 13 aa, Homo Sapiens
RRLMDGEEPLPML

SEQ ID NO: 84983 - protein, 13 aa, Homo Sapiens
RLMDGEEPLPMLP

SEQ ID NO: 84984 - protein, 13 aa, Homo Sapiens
LMDGEEPLPMLPS

SEQ ID NO: 84985 - protein, 13 aa, Homo Sapiens
MDGEEPLPMLPSY

SEQ ID NO: 84986 - protein, 13 aa, Homo Sapiens
DGEEPLPMLPSYK

SEQ ID NO: 84987 - protein, 13 aa, Homo Sapiens
GEEPLPMLPSYKN

SEQ ID NO: 84988 - protein, 13 aa, Homo Sapiens
EEPLPMLPSYKNF

SEQ ID NO: 84989 - protein, 13 aa, Homo Sapiens
EPLPMLPSYKNFK

SEQ ID NO: 84990 - protein, 13 aa, Homo Sapiens
PLPMLPSYKNFKG

SEQ ID NO: 84991 - protein, 13 aa, Homo Sapiens
LPMLPSYKNFKGT

SEQ ID NO: 84992 - protein, 13 aa, Homo Sapiens
PMLPSYKNFKGTI

SEQ ID NO: 84993 - protein, 13 aa, Homo Sapiens
MLPSYKNFKGTIE

SEQ ID NO: 84994 - protein, 13 aa, Homo Sapiens
LPSYKNFKGTIEE

SEQ ID NO: 84995 - protein, 13 aa, Homo Sapiens
PSYKNFKGTIEEL

SEQ ID NO: 84996 - protein, 13 aa, Homo Sapiens
SYKNFKGTIEELA

SEQ ID NO: 84997 - protein, 13 aa, Homo Sapiens
YKNFKGTIEELAP

SEQ ID NO: 84998 - protein, 13 aa, Homo Sapiens
KNFKGTIEELAPN

SEQ ID NO: 84999 - protein, 13 aa, Homo Sapiens
NFKGTIEELAPNQ

SEQ ID NO: 85000 - protein, 13 aa, Homo Sapiens
FKGTIEELAPNQY

SEQ ID NO: 85001 - protein, 13 aa, Homo Sapiens
KGTIEELAPNQYV

SEQ ID NO: 85002 - protein, 13 aa, Homo Sapiens
GTIEELAPNQYVI

SEQ ID NO: 85003 - protein, 13 aa, Homo Sapiens
TIEELAPNQYVIS

SEQ ID NO: 85004 - protein, 13 aa, Homo Sapiens
IEELAPNQYVISG

SEQ ID NO: 85005 - protein, 13 aa, Homo Sapiens
EELAPNQYVISGE

SEQ ID NO: 85006 - protein, 13 aa, Homo Sapiens
ELAPNQYVISGEV

SEQ ID NO: 85007 - protein, 13 aa, Homo Sapiens
LAPNQYVISGEVA

SEQ ID NO: 85008 - protein, 13 aa, Homo Sapiens
APNQYVISGEVAI

SEQ ID NO: 85009 - protein, 13 aa, Homo Sapiens
PNQYVISGEVAIL

SEQ ID NO: 85010 - protein, 13 aa, Homo Sapiens
NQYVISGEVAILN

SEQ ID NO: 85011 - protein, 13 aa, Homo Sapiens
QYVISGEVAILNS

SEQ ID NO: 85012 - protein, 13 aa, Homo Sapiens
YVISGEVAILNST

SEQ ID NO: 85013 - protein, 13 aa, Homo Sapiens
VISGEVAILNSTT

SEQ ID NO: 85014 - protein, 13 aa, Homo Sapiens
ISGEVAILNSTTI

SEQ ID NO: 85015 - protein, 13 aa, Homo Sapiens
SGEVAILNSTTIE

SEQ ID NO: 85016 - protein, 13 aa, Homo Sapiens
GEVAILNSTTIEI

SEQ ID NO: 85017 - protein, 13 aa, Homo Sapiens
EVAILNSTTIEIS

SEQ ID NO: 85018 - protein, 13 aa, Homo Sapiens
VAILNSTTIEISE

SEQ ID NO: 85019 - protein, 13 aa, Homo Sapiens
AILNSTTIEISEL

SEQ ID NO: 85020 - protein, 13 aa, Homo Sapiens
ILNSTTIEISELP

SEQ ID NO: 85021 - protein, 13 aa, Homo Sapiens
LNSTTIEISELPV

SEQ ID NO: 85022 - protein, 13 aa, Homo Sapiens
NSTTIEISELPVR

SEQ ID NO: 85023 - protein, 13 aa, Homo Sapiens
STTIEISELPVRT

SEQ ID NO: 85024 - protein, 13 aa, Homo Sapiens
TTIEISELPVRTW

SEQ ID NO: 85025 - protein, 13 aa, Homo Sapiens
TIEISELPVRTWT

SEQ ID NO: 85026 - protein, 13 aa, Homo Sapiens
IEISELPVRTWTQ

SEQ ID NO: 85027 - protein, 13 aa, Homo Sapiens
EISELPVRTWTQT

SEQ ID NO: 85028 - protein, 13 aa, Homo Sapiens
ISELPVRTWTQTY

SEQ ID NO: 85029 - protein, 13 aa, Homo Sapiens
SELPVRTWTQTYK

SEQ ID NO: 85030 - protein, 13 aa, Homo Sapiens
ELPVRTWTQTYKE

SEQ ID NO: 85031 - protein, 13 aa, Homo Sapiens
LPVRTWTQTYKEQ

SEQ ID NO: 85032 - protein, 13 aa, Homo Sapiens
PVRTWTQTYKEQV

SEQ ID NO: 85033 - protein, 13 aa, Homo Sapiens
VRTWTQTYKEQVL

SEQ ID NO: 85034 - protein, 13 aa, Homo Sapiens
RTWTQTYKEQVLE

SEQ ID NO: 85035 - protein, 13 aa, Homo Sapiens
TWTQTYKEQVLEP

SEQ ID NO: 85036 - protein, 13 aa, Homo Sapiens
WTQTYKEQVLEPM

SEQ ID NO: 85037 - protein, 13 aa, Homo Sapiens
TQTYKEQVLEPML

SEQ ID NO: 85038 - protein, 13 aa, Homo Sapiens
QTYKEQVLEPMLN

SEQ ID NO: 85039 - protein, 13 aa, Homo Sapiens
TYKEQVLEPMLNG

SEQ ID NO: 85040 - protein, 13 aa, Homo Sapiens
YKEQVLEPMLNGT

SEQ ID NO: 85041 - protein, 13 aa, Homo Sapiens
KEQVLEPMLNGTE

SEQ ID NO: 85042 - protein, 13 aa, Homo Sapiens
EQVLEPMLNGTEK

SEQ ID NO: 85043 - protein, 13 aa, Homo Sapiens
QVLEPMLNGTEKT

SEQ ID NO: 85044 - protein, 13 aa, Homo Sapiens
VLEPMLNGTEKTP

SEQ ID NO: 85045 - protein, 13 aa, Homo Sapiens
LEPMLNGTEKTPP

SEQ ID NO: 85046 - protein, 13 aa, Homo Sapiens
EPMLNGTEKTPPL

SEQ ID NO: 85047 - protein, 13 aa, Homo Sapiens
PMLNGTEKTPPLI

SEQ ID NO: 85048 - protein, 13 aa, Homo Sapiens
MLNGTEKTPPLIT

SEQ ID NO: 85049 - protein, 13 aa, Homo Sapiens
LNGTEKTPPLITD

SEQ ID NO: 85050 - protein, 13 aa, Homo Sapiens
NGTEKTPPLITDY

SEQ ID NO: 85051 - protein, 13 aa, Homo Sapiens
GTEKTPPLITDYR

SEQ ID NO: 85052 - protein, 13 aa, Homo Sapiens
TEKTPPLITDYRE

SEQ ID NO: 85053 - protein, 13 aa, Homo Sapiens
EKTPPLITDYREY

SEQ ID NO: 85054 - protein, 13 aa, Homo Sapiens
KTPPLITDYREYH

SEQ ID NO: 85055 - protein, 13 aa, Homo Sapiens
TPPLITDYREYHT

SEQ ID NO: 85056 - protein, 13 aa, Homo Sapiens
PPLITDYREYHTD

SEQ ID NO: 85057 - protein, 13 aa, Homo Sapiens
PLITDYREYHTDT

SEQ ID NO: 85058 - protein, 13 aa, Homo Sapiens
LITDYREYHTDTT

SEQ ID NO: 85059 - protein, 13 aa, Homo Sapiens
ITDYREYHTDTTV

SEQ ID NO: 85060 - protein, 13 aa, Homo Sapiens
TDYREYHTDTTVK

SEQ ID NO: 85061 - protein, 13 aa, Homo Sapiens
DYREYHTDTTVKF

SEQ ID NO: 85062 - protein, 13 aa, Homo Sapiens
YREYHTDTTVKFV

SEQ ID NO: 85063 - protein, 13 aa, Homo Sapiens
REYHTDTTVKFVV

SEQ ID NO: 85064 - protein, 13 aa, Homo Sapiens
EYHTDTTVKFVVK

SEQ ID NO: 85065 - protein, 13 aa, Homo Sapiens
YHTDTTVKFVVKM

SEQ ID NO: 85066 - protein, 13 aa, Homo Sapiens
HTDTTVKFVVKMT

SEQ ID NO: 85067 - protein, 13 aa, Homo Sapiens
TDTTVKFVVKMTE

SEQ ID NO: 85068 - protein, 13 aa, Homo Sapiens
DTTVKFVVKMTEE

SEQ ID NO: 85069 - protein, 13 aa, Homo Sapiens
TTVKFVVKMTEEK

SEQ ID NO: 85070 - protein, 13 aa, Homo Sapiens
TVKFVVKMTEEKL

SEQ ID NO: 85071 - protein, 13 aa, Homo Sapiens
VKFVVKMTEEKLA

SEQ ID NO: 85072 - protein, 13 aa, Homo Sapiens
KFVVKMTEEKLAE

SEQ ID NO: 85073 - protein, 13 aa, Homo Sapiens
FVVKMTEEKLAEA

SEQ ID NO: 85074 - protein, 13 aa, Homo Sapiens
VVKMTEEKLAEAE

SEQ ID NO: 85075 - protein, 13 aa, Homo Sapiens
VKMTEEKLAEAER

SEQ ID NO: 85076 - protein, 13 aa, Homo Sapiens
KMTEEKLAEAERV

SEQ ID NO: 85077 - protein, 13 aa, Homo Sapiens
MTEEKLAEAERVG

SEQ ID NO: 85078 - protein, 13 aa, Homo Sapiens
TEEKLAEAERVGL

SEQ ID NO: 85079 - protein, 13 aa, Homo Sapiens
EEKLAEAERVGLH

SEQ ID NO: 85080 - protein, 13 aa, Homo Sapiens
EKLAEAERVGLHK

SEQ ID NO: 85081 - protein, 13 aa, Homo Sapiens
KLAEAERVGLHKV

SEQ ID NO: 85082 - protein, 13 aa, Homo Sapiens
LAEAERVGLHKVF

SEQ ID NO: 85083 - protein, 13 aa, Homo Sapiens
AEAERVGLHKVFK

SEQ ID NO: 85084 - protein, 13 aa, Homo Sapiens
EAERVGLHKVFKL

SEQ ID NO: 85085 - protein, 13 aa, Homo Sapiens
AERVGLHKVFKLQ

SEQ ID NO: 85086 - protein, 13 aa, Homo Sapiens
ERVGLHKVFKLQT

SEQ ID NO: 85087 - protein, 13 aa, Homo Sapiens
RVGLHKVFKLQTS

SEQ ID NO: 85088 - protein, 13 aa, Homo Sapiens
VGLHKVFKLQTSL

SEQ ID NO: 85089 - protein, 13 aa, Homo Sapiens
GLHKVFKLQTSLT

SEQ ID NO: 85090 - protein, 13 aa, Homo Sapiens
LHKVFKLQTSLTC

SEQ ID NO: 85091 - protein, 13 aa, Homo Sapiens
HKVFKLQTSLTCN

SEQ ID NO: 85092 - protein, 13 aa, Homo Sapiens
KVFKLQTSLTCNS

SEQ ID NO: 85093 - protein, 13 aa, Homo Sapiens
VFKLQTSLTCNSM

SEQ ID NO: 85094 - protein, 13 aa, Homo Sapiens
FKLQTSLTCNSMV

SEQ ID NO: 85095 - protein, 13 aa, Homo Sapiens
KLQTSLTCNSMVL

SEQ ID NO: 85096 - protein, 13 aa, Homo Sapiens
LQTSLTCNSMVLF

SEQ ID NO: 85097 - protein, 13 aa, Homo Sapiens
QTSLTCNSMVLFD

SEQ ID NO: 85098 - protein, 13 aa, Homo Sapiens
TSLTCNSMVLFDH

SEQ ID NO: 85099 - protein, 13 aa, Homo Sapiens
SLTCNSMVLFDHV

SEQ ID NO: 85100 - protein, 13 aa, Homo Sapiens
LTCNSMVLFDHVG

SEQ ID NO: 85101 - protein, 13 aa, Homo Sapiens
TCNSMVLFDHVGC

SEQ ID NO: 85102 - protein, 13 aa, Homo Sapiens
CNSMVLFDHVGCL

SEQ ID NO: 85103 - protein, 13 aa, Homo Sapiens
NSMVLFDHVGCLK

SEQ ID NO: 85104 - protein, 13 aa, Homo Sapiens
SMVLFDHVGCLKK

SEQ ID NO: 85105 - protein, 13 aa, Homo Sapiens
MVLFDHVGCLKKY

SEQ ID NO: 85106 - protein, 13 aa, Homo Sapiens
VLFDHVGCLKKYD

SEQ ID NO: 85107 - protein, 13 aa, Homo Sapiens
LFDHVGCLKKYDT

SEQ ID NO: 85108 - protein, 13 aa, Homo Sapiens
FDHVGCLKKYDTV

SEQ ID NO: 85109 - protein, 13 aa, Homo Sapiens
DHVGCLKKYDTVL

SEQ ID NO: 85110 - protein, 13 aa, Homo Sapiens
HVGCLKKYDTVLD

SEQ ID NO: 85111 - protein, 13 aa, Homo Sapiens
VGCLKKYDTVLDI

SEQ ID NO: 85112 - protein, 13 aa, Homo Sapiens
GCLKKYDTVLDIL

SEQ ID NO: 85113 - protein, 13 aa, Homo Sapiens
CLKKYDTVLDILR

SEQ ID NO: 85114 - protein, 13 aa, Homo Sapiens
LKKYDTVLDILRD

SEQ ID NO: 85115 - protein, 13 aa, Homo Sapiens
KKYDTVLDILRDF

SEQ ID NO: 85116 - protein, 13 aa, Homo Sapiens
KYDTVLDILRDFF

SEQ ID NO: 85117 - protein, 13 aa, Homo Sapiens
YDTVLDILRDFFE

SEQ ID NO: 85118 - protein, 13 aa, Homo Sapiens
DTVLDILRDFFEL

SEQ ID NO: 85119 - protein, 13 aa, Homo Sapiens
TVLDILRDFFELR

SEQ ID NO: 85120 - protein, 13 aa, Homo Sapiens
VLDILRDFFELRL

SEQ ID NO: 85121 - protein, 13 aa, Homo Sapiens
LDILRDFFELRLK

SEQ ID NO: 85122 - protein, 13 aa, Homo Sapiens
DILRDFFELRLKY

SEQ ID NO: 85123 - protein, 13 aa, Homo Sapiens
ILRDFFELRLKYY

SEQ ID NO: 85124 - protein, 13 aa, Homo Sapiens
LRDFFELRLKYYG

SEQ ID NO: 85125 - protein, 13 aa, Homo Sapiens
RDFFELRLKYYGL

SEQ ID NO: 85126 - protein, 13 aa, Homo Sapiens
DFFELRLKYYGLR

SEQ ID NO: 85127 - protein, 13 aa, Homo Sapiens
FFELRLKYYGLRK

SEQ ID NO: 85128 - protein, 13 aa, Homo Sapiens
FELRLKYYGLRKE

SEQ ID NO: 85129 - protein, 13 aa, Homo Sapiens
ELRLKYYGLRKEW

SEQ ID NO: 85130 - protein, 13 aa, Homo Sapiens
LRLKYYGLRKEWL

SEQ ID NO: 85131 - protein, 13 aa, Homo Sapiens
RLKYYGLRKEWLL

SEQ ID NO: 85132 - protein, 13 aa, Homo Sapiens
LKYYGLRKEWLLG

SEQ ID NO: 85133 - protein, 13 aa, Homo Sapiens
KYYGLRKEWLLGM

SEQ ID NO: 85134 - protein, 13 aa, Homo Sapiens
YYGLRKEWLLGML

SEQ ID NO: 85135 - protein, 13 aa, Homo Sapiens
YGLRKEWLLGMLG

SEQ ID NO: 85136 - protein, 13 aa, Homo Sapiens
GLRKEWLLGMLGA

SEQ ID NO: 85137 - protein, 13 aa, Homo Sapiens
LRKEWLLGMLGAE

SEQ ID NO: 85138 - protein, 13 aa, Homo Sapiens
RKEWLLGMLGAES

SEQ ID NO: 85139 - protein, 13 aa, Homo Sapiens
KEWLLGMLGAESA

SEQ ID NO: 85140 - protein, 13 aa, Homo Sapiens
EWLLGMLGAESAK

SEQ ID NO: 85141 - protein, 13 aa, Homo Sapiens
WLLGMLGAESAKL

SEQ ID NO: 85142 - protein, 13 aa, Homo Sapiens
LLGMLGAESAKLN

SEQ ID NO: 85143 - protein, 13 aa, Homo Sapiens
LGMLGAESAKLNN

SEQ ID NO: 85144 - protein, 13 aa, Homo Sapiens
GMLGAESAKLNNQ

SEQ ID NO: 85145 - protein, 13 aa, Homo Sapiens
MLGAESAKLNNQA

SEQ ID NO: 85146 - protein, 13 aa, Homo Sapiens
LGAESAKLNNQAR

SEQ ID NO: 85147 - protein, 13 aa, Homo Sapiens
GAESAKLNNQARF

SEQ ID NO: 85148 - protein, 13 aa, Homo Sapiens
AESAKLNNQARFI

SEQ ID NO: 85149 - protein, 13 aa, Homo Sapiens
ESAKLNNQARFIL

SEQ ID NO: 85150 - protein, 13 aa, Homo Sapiens
SAKLNNQARFILE

SEQ ID NO: 85151 - protein, 13 aa, Homo Sapiens
AKLNNQARFILEK

SEQ ID NO: 85152 - protein, 13 aa, Homo Sapiens
KLNNQARFILEKI

SEQ ID NO: 85153 - protein, 13 aa, Homo Sapiens
LNNQARFILEKID

SEQ ID NO: 85154 - protein, 13 aa, Homo Sapiens
NNQARFILEKIDG

SEQ ID NO: 85155 - protein, 13 aa, Homo Sapiens
NQARFILEKIDGK

SEQ ID NO: 85156 - protein, 13 aa, Homo Sapiens
QARFILEKIDGKI

SEQ ID NO: 85157 - protein, 13 aa, Homo Sapiens
ARFILEKIDGKII

SEQ ID NO: 85158 - protein, 13 aa, Homo Sapiens
RFILEKIDGKIII

SEQ ID NO: 85159 - protein, 13 aa, Homo Sapiens
FILEKIDGKIIIE

SEQ ID NO: 85160 - protein, 13 aa, Homo Sapiens
ILEKIDGKIIIEN

SEQ ID NO: 85161 - protein, 13 aa, Homo Sapiens
LEKIDGKIIIENK

SEQ ID NO: 85162 - protein, 13 aa, Homo Sapiens
EKIDGKIIIENKP

SEQ ID NO: 85163 - protein, 13 aa, Homo Sapiens
KIDGKIIIENKPK

SEQ ID NO: 85164 - protein, 13 aa, Homo Sapiens
IDGKIIIENKPKK

SEQ ID NO: 85165 - protein, 13 aa, Homo Sapiens
DGKIIIENKPKKE

SEQ ID NO: 85166 - protein, 13 aa, Homo Sapiens
GKIIIENKPKKEL

SEQ ID NO: 85167 - protein, 13 aa, Homo Sapiens
KIIIENKPKKELI

SEQ ID NO: 85168 - protein, 13 aa, Homo Sapiens
IIIENKPKKELIK

SEQ ID NO: 85169 - protein, 13 aa, Homo Sapiens
IIENKPKKELIKV

SEQ ID NO: 85170 - protein, 13 aa, Homo Sapiens
IENKPKKELIKVL

SEQ ID NO: 85171 - protein, 13 aa, Homo Sapiens
ENKPKKELIKVLI

SEQ ID NO: 85172 - protein, 13 aa, Homo Sapiens
NKPKKELIKVLIQ

SEQ ID NO: 85173 - protein, 13 aa, Homo Sapiens
KPKKELIKVLIQR

SEQ ID NO: 85174 - protein, 13 aa, Homo Sapiens
PKKELIKVLIQRG

SEQ ID NO: 85175 - protein, 13 aa, Homo Sapiens
KKELIKVLIQRGY

SEQ ID NO: 85176 - protein, 13 aa, Homo Sapiens
KELIKVLIQRGYD

SEQ ID NO: 85177 - protein, 13 aa, Homo Sapiens
ELIKVLIQRGYDS

SEQ ID NO: 85178 - protein, 13 aa, Homo Sapiens
LIKVLIQRGYDSD

SEQ ID NO: 85179 - protein, 13 aa, Homo Sapiens
IKVLIQRGYDSDP

SEQ ID NO: 85180 - protein, 13 aa, Homo Sapiens
KVLIQRGYDSDPV

SEQ ID NO: 85181 - protein, 13 aa, Homo Sapiens
VLIQRGYDSDPVK

SEQ ID NO: 85182 - protein, 13 aa, Homo Sapiens
LIQRGYDSDPVKA

SEQ ID NO: 85183 - protein, 13 aa, Homo Sapiens
IQRGYDSDPVKAW

SEQ ID NO: 85184 - protein, 13 aa, Homo Sapiens
QRGYDSDPVKAWK

SEQ ID NO: 85185 - protein, 13 aa, Homo Sapiens
RGYDSDPVKAWKE

SEQ ID NO: 85186 - protein, 13 aa, Homo Sapiens
GYDSDPVKAWKEA

SEQ ID NO: 85187 - protein, 13 aa, Homo Sapiens
YDSDPVKAWKEAQ

SEQ ID NO: 85188 - protein, 13 aa, Homo Sapiens
DSDPVKAWKEAQQ

SEQ ID NO: 85189 - protein, 13 aa, Homo Sapiens
SDPVKAWKEAQQK

SEQ ID NO: 85190 - protein, 13 aa, Homo Sapiens
DPVKAWKEAQQKV

SEQ ID NO: 85191 - protein, 13 aa, Homo Sapiens
PVKAWKEAQQKVP

SEQ ID NO: 85192 - protein, 13 aa, Homo Sapiens
VKAWKEAQQKVPD

SEQ ID NO: 85193 - protein, 13 aa, Homo Sapiens
KAWKEAQQKVPDE

SEQ ID NO: 85194 - protein, 13 aa, Homo Sapiens
AWKEAQQKVPDEE

SEQ ID NO: 85195 - protein, 13 aa, Homo Sapiens
WKEAQQKVPDEEE

SEQ ID NO: 85196 - protein, 13 aa, Homo Sapiens
KEAQQKVPDEEEN

SEQ ID NO: 85197 - protein, 13 aa, Homo Sapiens
EAQQKVPDEEENE

SEQ ID NO: 85198 - protein, 13 aa, Homo Sapiens
AQQKVPDEEENEE

SEQ ID NO: 85199 - protein, 13 aa, Homo Sapiens
QQKVPDEEENEES

SEQ ID NO: 85200 - protein, 13 aa, Homo Sapiens
QKVPDEEENEESD

SEQ ID NO: 85201 - protein, 13 aa, Homo Sapiens
KVPDEEENEESDN

SEQ ID NO: 85202 - protein, 13 aa, Homo Sapiens
VPDEEENEESDNE

SEQ ID NO: 85203 - protein, 13 aa, Homo Sapiens
PDEEENEESDNEK

SEQ ID NO: 85204 - protein, 13 aa, Homo Sapiens
DEEENEESDNEKE

SEQ ID NO: 85205 - protein, 13 aa, Homo Sapiens
EEENEESDNEKET

SEQ ID NO: 85206 - protein, 13 aa, Homo Sapiens
EENEESDNEKETE

SEQ ID NO: 85207 - protein, 13 aa, Homo Sapiens
ENEESDNEKETEK

SEQ ID NO: 85208 - protein, 13 aa, Homo Sapiens
NEESDNEKETEKS

SEQ ID NO: 85209 - protein, 13 aa, Homo Sapiens
EESDNEKETEKSD

SEQ ID NO: 85210 - protein, 13 aa, Homo Sapiens
ESDNEKETEKSDS

SEQ ID NO: 85211 - protein, 13 aa, Homo Sapiens
SDNEKETEKSDSV

SEQ ID NO: 85212 - protein, 13 aa, Homo Sapiens
DNEKETEKSDSVT

SEQ ID NO: 85213 - protein, 13 aa, Homo Sapiens
NEKETEKSDSVTD

SEQ ID NO: 85214 - protein, 13 aa, Homo Sapiens
EKETEKSDSVTDS

SEQ ID NO: 85215 - protein, 13 aa, Homo Sapiens
KETEKSDSVTDSG

SEQ ID NO: 85216 - protein, 13 aa, Homo Sapiens
ETEKSDSVTDSGP

SEQ ID NO: 85217 - protein, 13 aa, Homo Sapiens
TEKSDSVTDSGPT

SEQ ID NO: 85218 - protein, 13 aa, Homo Sapiens
EKSDSVTDSGPTF

SEQ ID NO: 85219 - protein, 13 aa, Homo Sapiens
KSDSVTDSGPTFN

SEQ ID NO: 85220 - protein, 13 aa, Homo Sapiens
SDSVTDSGPTFNY

SEQ ID NO: 85221 - protein, 13 aa, Homo Sapiens
DSVTDSGPTFNYL

SEQ ID NO: 85222 - protein, 13 aa, Homo Sapiens
SVTDSGPTFNYLL

SEQ ID NO: 85223 - protein, 13 aa, Homo Sapiens
VTDSGPTFNYLLD

SEQ ID NO: 85224 - protein, 13 aa, Homo Sapiens
TDSGPTFNYLLDM

SEQ ID NO: 85225 - protein, 13 aa, Homo Sapiens
DSGPTFNYLLDMP

SEQ ID NO: 85226 - protein, 13 aa, Homo Sapiens
SGPTFNYLLDMPL

SEQ ID NO: 85227 - protein, 13 aa, Homo Sapiens
GPTFNYLLDMPLW

SEQ ID NO: 85228 - protein, 13 aa, Homo Sapiens
PTFNYLLDMPLWY

SEQ ID NO: 85229 - protein, 13 aa, Homo Sapiens
TFNYLLDMPLWYL

SEQ ID NO: 85230 - protein, 13 aa, Homo Sapiens
FNYLLDMPLWYLT

SEQ ID NO: 85231 - protein, 13 aa, Homo Sapiens
NYLLDMPLWYLTK

SEQ ID NO: 85232 - protein, 13 aa, Homo Sapiens
YLLDMPLWYLTKE

SEQ ID NO: 85233 - protein, 13 aa, Homo Sapiens
LLDMPLWYLTKEK

SEQ ID NO: 85234 - protein, 13 aa, Homo Sapiens
LDMPLWYLTKEKK

SEQ ID NO: 85235 - protein, 13 aa, Homo Sapiens
DMPLWYLTKEKKD

SEQ ID NO: 85236 - protein, 13 aa, Homo Sapiens
MPLWYLTKEKKDE

SEQ ID NO: 85237 - protein, 13 aa, Homo Sapiens
PLWYLTKEKKDEL

SEQ ID NO: 85238 - protein, 13 aa, Homo Sapiens
LWYLTKEKKDELC

SEQ ID NO: 85239 - protein, 13 aa, Homo Sapiens
WYLTKEKKDELCR

SEQ ID NO: 85240 - protein, 13 aa, Homo Sapiens
YLTKEKKDELCRL

SEQ ID NO: 85241 - protein, 13 aa, Homo Sapiens
LTKEKKDELCRLR

SEQ ID NO: 85242 - protein, 13 aa, Homo Sapiens
TKEKKDELCRLRN

SEQ ID NO: 85243 - protein, 13 aa, Homo Sapiens
KEKKDELCRLRNE

SEQ ID NO: 85244 - protein, 13 aa, Homo Sapiens
EKKDELCRLRNEK

SEQ ID NO: 85245 - protein, 13 aa, Homo Sapiens
KKDELCRLRNEKE

SEQ ID NO: 85246 - protein, 13 aa, Homo Sapiens
KDELCRLRNEKEQ

SEQ ID NO: 85247 - protein, 13 aa, Homo Sapiens
DELCRLRNEKEQE

SEQ ID NO: 85248 - protein, 13 aa, Homo Sapiens
ELCRLRNEKEQEL

SEQ ID NO: 85249 - protein, 13 aa, Homo Sapiens
LCRLRNEKEQELD

SEQ ID NO: 85250 - protein, 13 aa, Homo Sapiens
CRLRNEKEQELDT

SEQ ID NO: 85251 - protein, 13 aa, Homo Sapiens
RLRNEKEQELDTL

SEQ ID NO: 85252 - protein, 13 aa, Homo Sapiens
LRNEKEQELDTLK

SEQ ID NO: 85253 - protein, 13 aa, Homo Sapiens
RNEKEQELDTLKR

SEQ ID NO: 85254 - protein, 13 aa, Homo Sapiens
NEKEQELDTLKRK

SEQ ID NO: 85255 - protein, 13 aa, Homo Sapiens
EKEQELDTLKRKS

SEQ ID NO: 85256 - protein, 13 aa, Homo Sapiens
KEQELDTLKRKSP

SEQ ID NO: 85257 - protein, 13 aa, Homo Sapiens
EQELDTLKRKSPS

SEQ ID NO: 85258 - protein, 13 aa, Homo Sapiens
QELDTLKRKSPSD

SEQ ID NO: 85259 - protein, 13 aa, Homo Sapiens
ELDTLKRKSPSDL

SEQ ID NO: 85260 - protein, 13 aa, Homo Sapiens
LDTLKRKSPSDLW

SEQ ID NO: 85261 - protein, 13 aa, Homo Sapiens
DTLKRKSPSDLWK

SEQ ID NO: 85262 - protein, 13 aa, Homo Sapiens
TLKRKSPSDLWKE

SEQ ID NO: 85263 - protein, 13 aa, Homo Sapiens
LKRKSPSDLWKED

SEQ ID NO: 85264 - protein, 13 aa, Homo Sapiens
KRKSPSDLWKEDL

SEQ ID NO: 85265 - protein, 13 aa, Homo Sapiens
RKSPSDLWKEDLA

SEQ ID NO: 85266 - protein, 13 aa, Homo Sapiens
KSPSDLWKEDLAT

SEQ ID NO: 85267 - protein, 13 aa, Homo Sapiens
SPSDLWKEDLATF

SEQ ID NO: 85268 - protein, 13 aa, Homo Sapiens
PSDLWKEDLATFI

SEQ ID NO: 85269 - protein, 13 aa, Homo Sapiens
SDLWKEDLATFIE

SEQ ID NO: 85270 - protein, 13 aa, Homo Sapiens
DLWKEDLATFIEE

SEQ ID NO: 85271 - protein, 13 aa, Homo Sapiens
LWKEDLATFIEEL

SEQ ID NO: 85272 - protein, 13 aa, Homo Sapiens
WKEDLATFIEELE

SEQ ID NO: 85273 - protein, 13 aa, Homo Sapiens
KEDLATFIEELEA

SEQ ID NO: 85274 - protein, 13 aa, Homo Sapiens
EDLATFIEELEAV

SEQ ID NO: 85275 - protein, 13 aa, Homo Sapiens
DLATFIEELEAVE

SEQ ID NO: 85276 - protein, 13 aa, Homo Sapiens
LATFIEELEAVEA

SEQ ID NO: 85277 - protein, 13 aa, Homo Sapiens
ATFIEELEAVEAK

SEQ ID NO: 85278 - protein, 13 aa, Homo Sapiens
TFIEELEAVEAKE

SEQ ID NO: 85279 - protein, 13 aa, Homo Sapiens
FIEELEAVEAKEK

SEQ ID NO: 85280 - protein, 13 aa, Homo Sapiens
IEELEAVEAKEKQ

SEQ ID NO: 85281 - protein, 13 aa, Homo Sapiens
EELEAVEAKEKQD

SEQ ID NO: 85282 - protein, 13 aa, Homo Sapiens
ELEAVEAKEKQDE

SEQ ID NO: 85283 - protein, 13 aa, Homo Sapiens
LEAVEAKEKQDEQ

SEQ ID NO: 85284 - protein, 13 aa, Homo Sapiens
EAVEAKEKQDEQV

SEQ ID NO: 85285 - protein, 13 aa, Homo Sapiens
AVEAKEKQDEQVG

SEQ ID NO: 85286 - protein, 13 aa, Homo Sapiens
VEAKEKQDEQVGL

SEQ ID NO: 85287 - protein, 13 aa, Homo Sapiens
EAKEKQDEQVGLP

SEQ ID NO: 85288 - protein, 13 aa, Homo Sapiens
AKEKQDEQVGLPG

SEQ ID NO: 85289 - protein, 13 aa, Homo Sapiens
KEKQDEQVGLPGK

SEQ ID NO: 85290 - protein, 13 aa, Homo Sapiens
EKQDEQVGLPGKG

SEQ ID NO: 85291 - protein, 13 aa, Homo Sapiens
KQDEQVGLPGKGG

SEQ ID NO: 85292 - protein, 13 aa, Homo Sapiens
QDEQVGLPGKGGK

SEQ ID NO: 85293 - protein, 13 aa, Homo Sapiens
DEQVGLPGKGGKA

SEQ ID NO: 85294 - protein, 13 aa, Homo Sapiens
EQVGLPGKGGKAK

SEQ ID NO: 85295 - protein, 13 aa, Homo Sapiens
QVGLPGKGGKAKG

SEQ ID NO: 85296 - protein, 13 aa, Homo Sapiens
VGLPGKGGKAKGK

SEQ ID NO: 85297 - protein, 13 aa, Homo Sapiens
GLPGKGGKAKGKK

SEQ ID NO: 85298 - protein, 13 aa, Homo Sapiens
LPGKGGKAKGKKT

SEQ ID NO: 85299 - protein, 13 aa, Homo Sapiens
PGKGGKAKGKKTQ

SEQ ID NO: 85300 - protein, 13 aa, Homo Sapiens
GKGGKAKGKKTQM

SEQ ID NO: 85301 - protein, 13 aa, Homo Sapiens
KGGKAKGKKTQMA

SEQ ID NO: 85302 - protein, 13 aa, Homo Sapiens
GGKAKGKKTQMAE

SEQ ID NO: 85303 - protein, 13 aa, Homo Sapiens
GKAKGKKTQMAEV

SEQ ID NO: 85304 - protein, 13 aa, Homo Sapiens
KAKGKKTQMAEVL

SEQ ID NO: 85305 - protein, 13 aa, Homo Sapiens
AKGKKTQMAEVLP

SEQ ID NO: 85306 - protein, 13 aa, Homo Sapiens
KGKKTQMAEVLPS

SEQ ID NO: 85307 - protein, 13 aa, Homo Sapiens
GKKTQMAEVLPSP

SEQ ID NO: 85308 - protein, 13 aa, Homo Sapiens
KKTQMAEVLPSPR

SEQ ID NO: 85309 - protein, 13 aa, Homo Sapiens
KTQMAEVLPSPRG

SEQ ID NO: 85310 - protein, 13 aa, Homo Sapiens
TQMAEVLPSPRGQ

SEQ ID NO: 85311 - protein, 13 aa, Homo Sapiens
QMAEVLPSPRGQR

SEQ ID NO: 85312 - protein, 13 aa, Homo Sapiens
MAEVLPSPRGQRV

SEQ ID NO: 85313 - protein, 13 aa, Homo Sapiens
AEVLPSPRGQRVI

SEQ ID NO: 85314 - protein, 13 aa, Homo Sapiens
EVLPSPRGQRVIP

SEQ ID NO: 85315 - protein, 13 aa, Homo Sapiens
VLPSPRGQRVIPR

SEQ ID NO: 85316 - protein, 13 aa, Homo Sapiens
LPSPRGQRVIPRI

SEQ ID NO: 85317 - protein, 13 aa, Homo Sapiens
PSPRGQRVIPRIT

SEQ ID NO: 85318 - protein, 13 aa, Homo Sapiens
SPRGQRVIPRITI

SEQ ID NO: 85319 - protein, 13 aa, Homo Sapiens
PRGQRVIPRITIE

SEQ ID NO: 85320 - protein, 13 aa, Homo Sapiens
RGQRVIPRITIEM

SEQ ID NO: 85321 - protein, 13 aa, Homo Sapiens
GQRVIPRITIEMK

SEQ ID NO: 85322 - protein, 13 aa, Homo Sapiens
QRVIPRITIEMKA

SEQ ID NO: 85323 - protein, 13 aa, Homo Sapiens
RVIPRITIEMKAE

SEQ ID NO: 85324 - protein, 13 aa, Homo Sapiens
VIPRITIEMKAEA

SEQ ID NO: 85325 - protein, 13 aa, Homo Sapiens
IPRITIEMKAEAE

SEQ ID NO: 85326 - protein, 13 aa, Homo Sapiens
PRITIEMKAEAEK

SEQ ID NO: 85327 - protein, 13 aa, Homo Sapiens
RITIEMKAEAEKK

SEQ ID NO: 85328 - protein, 13 aa, Homo Sapiens
ITIEMKAEAEKKN

SEQ ID NO: 85329 - protein, 13 aa, Homo Sapiens
TIEMKAEAEKKNK

SEQ ID NO: 85330 - protein, 13 aa, Homo Sapiens
IEMKAEAEKKNKK

SEQ ID NO: 85331 - protein, 13 aa, Homo Sapiens
EMKAEAEKKNKKK

SEQ ID NO: 85332 - protein, 13 aa, Homo Sapiens
MKAEAEKKNKKKI

SEQ ID NO: 85333 - protein, 13 aa, Homo Sapiens
KAEAEKKNKKKIK

SEQ ID NO: 85334 - protein, 13 aa, Homo Sapiens
AEAEKKNKKKIKN

SEQ ID NO: 85335 - protein, 13 aa, Homo Sapiens
EAEKKNKKKIKNE

SEQ ID NO: 85336 - protein, 13 aa, Homo Sapiens
AEKKNKKKIKNEN

SEQ ID NO: 85337 - protein, 13 aa, Homo Sapiens
EKKNKKKIKNENT

SEQ ID NO: 85338 - protein, 13 aa, Homo Sapiens
KKNKKKIKNENTE

SEQ ID NO: 85339 - protein, 13 aa, Homo Sapiens
KNKKKIKNENTEG

SEQ ID NO: 85340 - protein, 13 aa, Homo Sapiens
NKKKIKNENTEGS

SEQ ID NO: 85341 - protein, 13 aa, Homo Sapiens
KKKIKNENTEGSP

SEQ ID NO: 85342 - protein, 13 aa, Homo Sapiens
KKIKNENTEGSPQ

SEQ ID NO: 85343 - protein, 13 aa, Homo Sapiens
KIKNENTEGSPQE

SEQ ID NO: 85344 - protein, 13 aa, Homo Sapiens
IKNENTEGSPQED

SEQ ID NO: 85345 - protein, 13 aa, Homo Sapiens
KNENTEGSPQEDG

SEQ ID NO: 85346 - protein, 13 aa, Homo Sapiens
NENTEGSPQEDGV

SEQ ID NO: 85347 - protein, 13 aa, Homo Sapiens
ENTEGSPQEDGVE

SEQ ID NO: 85348 - protein, 13 aa, Homo Sapiens
NTEGSPQEDGVEL

SEQ ID NO: 85349 - protein, 13 aa, Homo Sapiens
TEGSPQEDGVELE

SEQ ID NO: 85350 - protein, 13 aa, Homo Sapiens
EGSPQEDGVELEG

SEQ ID NO: 85351 - protein, 13 aa, Homo Sapiens
GSPQEDGVELEGL

SEQ ID NO: 85352 - protein, 13 aa, Homo Sapiens
SPQEDGVELEGLK

SEQ ID NO: 85353 - protein, 13 aa, Homo Sapiens
PQEDGVELEGLKQ

SEQ ID NO: 85354 - protein, 13 aa, Homo Sapiens
QEDGVELEGLKQR

SEQ ID NO: 85355 - protein, 13 aa, Homo Sapiens
EDGVELEGLKQRL

SEQ ID NO: 85356 - protein, 13 aa, Homo Sapiens
DGVELEGLKQRLE

SEQ ID NO: 85357 - protein, 13 aa, Homo Sapiens
GVELEGLKQRLEK

SEQ ID NO: 85358 - protein, 13 aa, Homo Sapiens
VELEGLKQRLEKK

SEQ ID NO: 85359 - protein, 13 aa, Homo Sapiens
ELEGLKQRLEKKQ

SEQ ID NO: 85360 - protein, 13 aa, Homo Sapiens
LEGLKQRLEKKQK

SEQ ID NO: 85361 - protein, 13 aa, Homo Sapiens
EGLKQRLEKKQKR

SEQ ID NO: 85362 - protein, 13 aa, Homo Sapiens
GLKQRLEKKQKRE

SEQ ID NO: 85363 - protein, 13 aa, Homo Sapiens
LKQRLEKKQKREP

SEQ ID NO: 85364 - protein, 13 aa, Homo Sapiens
KQRLEKKQKREPG

SEQ ID NO: 85365 - protein, 13 aa, Homo Sapiens
QRLEKKQKREPGT

SEQ ID NO: 85366 - protein, 13 aa, Homo Sapiens
RLEKKQKREPGTK

SEQ ID NO: 85367 - protein, 13 aa, Homo Sapiens
LEKKQKREPGTKT

SEQ ID NO: 85368 - protein, 13 aa, Homo Sapiens
EKKQKREPGTKTK

SEQ ID NO: 85369 - protein, 13 aa, Homo Sapiens
KKQKREPGTKTKK

SEQ ID NO: 85370 - protein, 13 aa, Homo Sapiens
KQKREPGTKTKKQ

SEQ ID NO: 85371 - protein, 13 aa, Homo Sapiens
QKREPGTKTKKQT

SEQ ID NO: 85372 - protein, 13 aa, Homo Sapiens
KREPGTKTKKQTT

SEQ ID NO: 85373 - protein, 13 aa, Homo Sapiens
REPGTKTKKQTTL

SEQ ID NO: 85374 - protein, 13 aa, Homo Sapiens
EPGTKTKKQTTLA

SEQ ID NO: 85375 - protein, 13 aa, Homo Sapiens
PGTKTKKQTTLAF

SEQ ID NO: 85376 - protein, 13 aa, Homo Sapiens
GTKTKKQTTLAFK

SEQ ID NO: 85377 - protein, 13 aa, Homo Sapiens
TKTKKQTTLAFKP

SEQ ID NO: 85378 - protein, 13 aa, Homo Sapiens
KTKKQTTLAFKPI

SEQ ID NO: 85379 - protein, 13 aa, Homo Sapiens
TKKQTTLAFKPIK

SEQ ID NO: 85380 - protein, 13 aa, Homo Sapiens
KKQTTLAFKPIKK

SEQ ID NO: 85381 - protein, 13 aa, Homo Sapiens
KQTTLAFKPIKKG

SEQ ID NO: 85382 - protein, 13 aa, Homo Sapiens
QTTLAFKPIKKGK

SEQ ID NO: 85383 - protein, 13 aa, Homo Sapiens
TTLAFKPIKKGKK

SEQ ID NO: 85384 - protein, 13 aa, Homo Sapiens
TLAFKPIKKGKKR

SEQ ID NO: 85385 - protein, 13 aa, Homo Sapiens
LAFKPIKKGKKRN

SEQ ID NO: 85386 - protein, 13 aa, Homo Sapiens
AFKPIKKGKKRNP

SEQ ID NO: 85387 - protein, 13 aa, Homo Sapiens
FKPIKKGKKRNPW

SEQ ID NO: 85388 - protein, 13 aa, Homo Sapiens
KPIKKGKKRNPWS

SEQ ID NO: 85389 - protein, 13 aa, Homo Sapiens
PIKKGKKRNPWSD

SEQ ID NO: 85390 - protein, 13 aa, Homo Sapiens
IKKGKKRNPWSDS

SEQ ID NO: 85391 - protein, 13 aa, Homo Sapiens
KKGKKRNPWSDSE

SEQ ID NO: 85392 - protein, 13 aa, Homo Sapiens
KGKKRNPWSDSES

SEQ ID NO: 85393 - protein, 13 aa, Homo Sapiens
GKKRNPWSDSESD

SEQ ID NO: 85394 - protein, 13 aa, Homo Sapiens
KKRNPWSDSESDR

SEQ ID NO: 85395 - protein, 13 aa, Homo Sapiens
KRNPWSDSESDRS

SEQ ID NO: 85396 - protein, 13 aa, Homo Sapiens
RNPWSDSESDRSS

SEQ ID NO: 85397 - protein, 13 aa, Homo Sapiens
NPWSDSESDRSSD

SEQ ID NO: 85398 - protein, 13 aa, Homo Sapiens
PWSDSESDRSSDE

SEQ ID NO: 85399 - protein, 13 aa, Homo Sapiens
WSDSESDRSSDES

SEQ ID NO: 85400 - protein, 13 aa, Homo Sapiens
SDSESDRSSDESN

SEQ ID NO: 85401 - protein, 13 aa, Homo Sapiens
DSESDRSSDESNF

SEQ ID NO: 85402 - protein, 13 aa, Homo Sapiens
SESDRSSDESNFD

SEQ ID NO: 85403 - protein, 13 aa, Homo Sapiens
ESDRSSDESNFDV

SEQ ID NO: 85404 - protein, 13 aa, Homo Sapiens
SDRSSDESNFDVP

SEQ ID NO: 85405 - protein, 13 aa, Homo Sapiens
DRSSDESNFDVPP

SEQ ID NO: 85406 - protein, 13 aa, Homo Sapiens
RSSDESNFDVPPR

SEQ ID NO: 85407 - protein, 13 aa, Homo Sapiens
SSDESNFDVPPRE

SEQ ID NO: 85408 - protein, 13 aa, Homo Sapiens
SDESNFDVPPRET

SEQ ID NO: 85409 - protein, 13 aa, Homo Sapiens
DESNFDVPPRETE

SEQ ID NO: 85410 - protein, 13 aa, Homo Sapiens
ESNFDVPPRETEP

SEQ ID NO: 85411 - protein, 13 aa, Homo Sapiens
SNFDVPPRETEPR

SEQ ID NO: 85412 - protein, 13 aa, Homo Sapiens
NFDVPPRETEPRR

SEQ ID NO: 85413 - protein, 13 aa, Homo Sapiens
FDVPPRETEPRRA

SEQ ID NO: 85414 - protein, 13 aa, Homo Sapiens
DVPPRETEPRRAA

SEQ ID NO: 85415 - protein, 13 aa, Homo Sapiens
VPPRETEPRRAAT

SEQ ID NO: 85416 - protein, 13 aa, Homo Sapiens
PPRETEPRRAATK

SEQ ID NO: 85417 - protein, 13 aa, Homo Sapiens
PRETEPRRAATKT

SEQ ID NO: 85418 - protein, 13 aa, Homo Sapiens
RETEPRRAATKTK

SEQ ID NO: 85419 - protein, 13 aa, Homo Sapiens
ETEPRRAATKTKF

SEQ ID NO: 85420 - protein, 13 aa, Homo Sapiens
TEPRRAATKTKFT

SEQ ID NO: 85421 - protein, 13 aa, Homo Sapiens
EPRRAATKTKFTM

SEQ ID NO: 85422 - protein, 13 aa, Homo Sapiens
PRRAATKTKFTMD

SEQ ID NO: 85423 - protein, 13 aa, Homo Sapiens
RRAATKTKFTMDL

SEQ ID NO: 85424 - protein, 13 aa, Homo Sapiens
RAATKTKFTMDLD

SEQ ID NO: 85425 - protein, 13 aa, Homo Sapiens
AATKTKFTMDLDS

SEQ ID NO: 85426 - protein, 13 aa, Homo Sapiens
ATKTKFTMDLDSD

SEQ ID NO: 85427 - protein, 13 aa, Homo Sapiens
TKTKFTMDLDSDE

SEQ ID NO: 85428 - protein, 13 aa, Homo Sapiens
KTKFTMDLDSDED

SEQ ID NO: 85429 - protein, 13 aa, Homo Sapiens
TKFTMDLDSDEDF

SEQ ID NO: 85430 - protein, 13 aa, Homo Sapiens
KFTMDLDSDEDFS

SEQ ID NO: 85431 - protein, 13 aa, Homo Sapiens
FTMDLDSDEDFSD

SEQ ID NO: 85432 - protein, 13 aa, Homo Sapiens
TMDLDSDEDFSDF

SEQ ID NO: 85433 - protein, 13 aa, Homo Sapiens
MDLDSDEDFSDFD

SEQ ID NO: 85434 - protein, 13 aa, Homo Sapiens
DLDSDEDFSDFDE

SEQ ID NO: 85435 - protein, 13 aa, Homo Sapiens
LDSDEDFSDFDEK

SEQ ID NO: 85436 - protein, 13 aa, Homo Sapiens
DSDEDFSDFDEKT

SEQ ID NO: 85437 - protein, 13 aa, Homo Sapiens
SDEDFSDFDEKTD

SEQ ID NO: 85438 - protein, 13 aa, Homo Sapiens
DEDFSDFDEKTDD

SEQ ID NO: 85439 - protein, 13 aa, Homo Sapiens
EDFSDFDEKTDDE

SEQ ID NO: 85440 - protein, 13 aa, Homo Sapiens
DFSDFDEKTDDED

SEQ ID NO: 85441 - protein, 13 aa, Homo Sapiens
FSDFDEKTDDEDF

SEQ ID NO: 85442 - protein, 13 aa, Homo Sapiens
SDFDEKTDDEDFV

SEQ ID NO: 85443 - protein, 13 aa, Homo Sapiens
DFDEKTDDEDFVP

SEQ ID NO: 85444 - protein, 13 aa, Homo Sapiens
FDEKTDDEDFVPS

SEQ ID NO: 85445 - protein, 13 aa, Homo Sapiens
DEKTDDEDFVPSD

SEQ ID NO: 85446 - protein, 13 aa, Homo Sapiens
EKTDDEDFVPSDA

SEQ ID NO: 85447 - protein, 13 aa, Homo Sapiens
KTDDEDFVPSDAS

SEQ ID NO: 85448 - protein, 13 aa, Homo Sapiens
TDDEDFVPSDASP

SEQ ID NO: 85449 - protein, 13 aa, Homo Sapiens
DDEDFVPSDASPP

SEQ ID NO: 85450 - protein, 13 aa, Homo Sapiens
DEDFVPSDASPPK

SEQ ID NO: 85451 - protein, 13 aa, Homo Sapiens
EDFVPSDASPPKT

SEQ ID NO: 85452 - protein, 13 aa, Homo Sapiens
DFVPSDASPPKTK

SEQ ID NO: 85453 - protein, 13 aa, Homo Sapiens
FVPSDASPPKTKT

SEQ ID NO: 85454 - protein, 13 aa, Homo Sapiens
VPSDASPPKTKTS

SEQ ID NO: 85455 - protein, 13 aa, Homo Sapiens
PSDASPPKTKTSP

SEQ ID NO: 85456 - protein, 13 aa, Homo Sapiens
SDASPPKTKTSPK

SEQ ID NO: 85457 - protein, 13 aa, Homo Sapiens
DASPPKTKTSPKL

SEQ ID NO: 85458 - protein, 13 aa, Homo Sapiens
ASPPKTKTSPKLS

SEQ ID NO: 85459 - protein, 13 aa, Homo Sapiens
SPPKTKTSPKLSN

SEQ ID NO: 85460 - protein, 13 aa, Homo Sapiens
PPKTKTSPKLSNK

SEQ ID NO: 85461 - protein, 13 aa, Homo Sapiens
PKTKTSPKLSNKE

SEQ ID NO: 85462 - protein, 13 aa, Homo Sapiens
KTKTSPKLSNKEL

SEQ ID NO: 85463 - protein, 13 aa, Homo Sapiens
TKTSPKLSNKELK

SEQ ID NO: 85464 - protein, 13 aa, Homo Sapiens
KTSPKLSNKELKP

SEQ ID NO: 85465 - protein, 13 aa, Homo Sapiens
TSPKLSNKELKPQ

SEQ ID NO: 85466 - protein, 13 aa, Homo Sapiens
SPKLSNKELKPQK

SEQ ID NO: 85467 - protein, 13 aa, Homo Sapiens
PKLSNKELKPQKS

SEQ ID NO: 85468 - protein, 13 aa, Homo Sapiens
KLSNKELKPQKSV

SEQ ID NO: 85469 - protein, 13 aa, Homo Sapiens
LSNKELKPQKSVV

SEQ ID NO: 85470 - protein, 13 aa, Homo Sapiens
SNKELKPQKSVVS

SEQ ID NO: 85471 - protein, 13 aa, Homo Sapiens
NKELKPQKSVVSD

SEQ ID NO: 85472 - protein, 13 aa, Homo Sapiens
KELKPQKSVVSDL

SEQ ID NO: 85473 - protein, 13 aa, Homo Sapiens
ELKPQKSVVSDLE

SEQ ID NO: 85474 - protein, 13 aa, Homo Sapiens
LKPQKSVVSDLEA

SEQ ID NO: 85475 - protein, 13 aa, Homo Sapiens
KPQKSVVSDLEAD

SEQ ID NO: 85476 - protein, 13 aa, Homo Sapiens
PQKSVVSDLEADD

SEQ ID NO: 85477 - protein, 13 aa, Homo Sapiens
QKSVVSDLEADDV

SEQ ID NO: 85478 - protein, 13 aa, Homo Sapiens
KSVVSDLEADDVK

SEQ ID NO: 85479 - protein, 13 aa, Homo Sapiens
SVVSDLEADDVKG

SEQ ID NO: 85480 - protein, 13 aa, Homo Sapiens
VVSDLEADDVKGS

SEQ ID NO: 85481 - protein, 13 aa, Homo Sapiens
VSDLEADDVKGSV

SEQ ID NO: 85482 - protein, 13 aa, Homo Sapiens
SDLEADDVKGSVP

SEQ ID NO: 85483 - protein, 13 aa, Homo Sapiens
DLEADDVKGSVPL

SEQ ID NO: 85484 - protein, 13 aa, Homo Sapiens
LEADDVKGSVPLS

SEQ ID NO: 85485 - protein, 13 aa, Homo Sapiens
EADDVKGSVPLSS

SEQ ID NO: 85486 - protein, 13 aa, Homo Sapiens
ADDVKGSVPLSSS

SEQ ID NO: 85487 - protein, 13 aa, Homo Sapiens
DDVKGSVPLSSSP

SEQ ID NO: 85488 - protein, 13 aa, Homo Sapiens
DVKGSVPLSSSPP

SEQ ID NO: 85489 - protein, 13 aa, Homo Sapiens
VKGSVPLSSSPPA

SEQ ID NO: 85490 - protein, 13 aa, Homo Sapiens
KGSVPLSSSPPAT

SEQ ID NO: 85491 - protein, 13 aa, Homo Sapiens
GSVPLSSSPPATH

SEQ ID NO: 85492 - protein, 13 aa, Homo Sapiens
SVPLSSSPPATHF

SEQ ID NO: 85493 - protein, 13 aa, Homo Sapiens
VPLSSSPPATHFP

SEQ ID NO: 85494 - protein, 13 aa, Homo Sapiens
PLSSSPPATHFPD

SEQ ID NO: 85495 - protein, 13 aa, Homo Sapiens
LSSSPPATHFPDE

SEQ ID NO: 85496 - protein, 13 aa, Homo Sapiens
SSSPPATHFPDET

SEQ ID NO: 85497 - protein, 13 aa, Homo Sapiens
SSPPATHFPDETE

SEQ ID NO: 85498 - protein, 13 aa, Homo Sapiens
SPPATHFPDETEI

SEQ ID NO: 85499 - protein, 13 aa, Homo Sapiens
PPATHFPDETEIT

SEQ ID NO: 85500 - protein, 13 aa, Homo Sapiens
PATHFPDETEITN

SEQ ID NO: 85501 - protein, 13 aa, Homo Sapiens
ATHFPDETEITNP

SEQ ID NO: 85502 - protein, 13 aa, Homo Sapiens
THFPDETEITNPV

SEQ ID NO: 85503 - protein, 13 aa, Homo Sapiens
HFPDETEITNPVP

SEQ ID NO: 85504 - protein, 13 aa, Homo Sapiens
FPDETEITNPVPK

SEQ ID NO: 85505 - protein, 13 aa, Homo Sapiens
PDETEITNPVPKK

SEQ ID NO: 85506 - protein, 13 aa, Homo Sapiens
DETEITNPVPKKN

SEQ ID NO: 85507 - protein, 13 aa, Homo Sapiens
ETEITNPVPKKNV

SEQ ID NO: 85508 - protein, 13 aa, Homo Sapiens
TEITNPVPKKNVT

SEQ ID NO: 85509 - protein, 13 aa, Homo Sapiens
EITNPVPKKNVTV

SEQ ID NO: 85510 - protein, 13 aa, Homo Sapiens
ITNPVPKKNVTVK

SEQ ID NO: 85511 - protein, 13 aa, Homo Sapiens
TNPVPKKNVTVKK

SEQ ID NO: 85512 - protein, 13 aa, Homo Sapiens
NPVPKKNVTVKKT

SEQ ID NO: 85513 - protein, 13 aa, Homo Sapiens
PVPKKNVTVKKTA

SEQ ID NO: 85514 - protein, 13 aa, Homo Sapiens
VPKKNVTVKKTAA

SEQ ID NO: 85515 - protein, 13 aa, Homo Sapiens
PKKNVTVKKTAAK

SEQ ID NO: 85516 - protein, 13 aa, Homo Sapiens
KKNVTVKKTAAKS

SEQ ID NO: 85517 - protein, 13 aa, Homo Sapiens
KNVTVKKTAAKSQ

SEQ ID NO: 85518 - protein, 13 aa, Homo Sapiens
NVTVKKTAAKSQS

SEQ ID NO: 85519 - protein, 13 aa, Homo Sapiens
VTVKKTAAKSQSS

SEQ ID NO: 85520 - protein, 13 aa, Homo Sapiens
TVKKTAAKSQSST

SEQ ID NO: 85521 - protein, 13 aa, Homo Sapiens
VKKTAAKSQSSTS

SEQ ID NO: 85522 - protein, 13 aa, Homo Sapiens
KKTAAKSQSSTST

SEQ ID NO: 85523 - protein, 13 aa, Homo Sapiens
KTAAKSQSSTSTT

SEQ ID NO: 85524 - protein, 13 aa, Homo Sapiens
TAAKSQSSTSTTG

SEQ ID NO: 85525 - protein, 13 aa, Homo Sapiens
AAKSQSSTSTTGA

SEQ ID NO: 85526 - protein, 13 aa, Homo Sapiens
AKSQSSTSTTGAK

SEQ ID NO: 85527 - protein, 13 aa, Homo Sapiens
KSQSSTSTTGAKK

SEQ ID NO: 85528 - protein, 13 aa, Homo Sapiens
SQSSTSTTGAKKR

SEQ ID NO: 85529 - protein, 13 aa, Homo Sapiens
QSSTSTTGAKKRA

SEQ ID NO: 85530 - protein, 13 aa, Homo Sapiens
SSTSTTGAKKRAA

SEQ ID NO: 85531 - protein, 13 aa, Homo Sapiens
STSTTGAKKRAAP

SEQ ID NO: 85532 - protein, 13 aa, Homo Sapiens
TSTTGAKKRAAPK

SEQ ID NO: 85533 - protein, 13 aa, Homo Sapiens
STTGAKKRAAPKG

SEQ ID NO: 85534 - protein, 13 aa, Homo Sapiens
TTGAKKRAAPKGT

SEQ ID NO: 85535 - protein, 13 aa, Homo Sapiens
TGAKKRAAPKGTK

SEQ ID NO: 85536 - protein, 13 aa, Homo Sapiens
GAKKRAAPKGTKR

SEQ ID NO: 85537 - protein, 13 aa, Homo Sapiens
AKKRAAPKGTKRD

SEQ ID NO: 85538 - protein, 13 aa, Homo Sapiens
KKRAAPKGTKRDP

SEQ ID NO: 85539 - protein, 13 aa, Homo Sapiens
KRAAPKGTKRDPA

SEQ ID NO: 85540 - protein, 13 aa, Homo Sapiens
RAAPKGTKRDPAL

SEQ ID NO: 85541 - protein, 13 aa, Homo Sapiens
AAPKGTKRDPALN

SEQ ID NO: 85542 - protein, 13 aa, Homo Sapiens
APKGTKRDPALNS

SEQ ID NO: 85543 - protein, 13 aa, Homo Sapiens
PKGTKRDPALNSG

SEQ ID NO: 85544 - protein, 13 aa, Homo Sapiens
KGTKRDPALNSGV

SEQ ID NO: 85545 - protein, 13 aa, Homo Sapiens
GTKRDPALNSGVS

SEQ ID NO: 85546 - protein, 13 aa, Homo Sapiens
TKRDPALNSGVSQ

SEQ ID NO: 85547 - protein, 13 aa, Homo Sapiens
KRDPALNSGVSQK

SEQ ID NO: 85548 - protein, 13 aa, Homo Sapiens
RDPALNSGVSQKP

SEQ ID NO: 85549 - protein, 13 aa, Homo Sapiens
DPALNSGVSQKPD

SEQ ID NO: 85550 - protein, 13 aa, Homo Sapiens
PALNSGVSQKPDP

SEQ ID NO: 85551 - protein, 13 aa, Homo Sapiens
ALNSGVSQKPDPA

SEQ ID NO: 85552 - protein, 13 aa, Homo Sapiens
LNSGVSQKPDPAK

SEQ ID NO: 85553 - protein, 13 aa, Homo Sapiens
NSGVSQKPDPAKT

SEQ ID NO: 85554 - protein, 13 aa, Homo Sapiens
SGVSQKPDPAKTK

SEQ ID NO: 85555 - protein, 13 aa, Homo Sapiens
GVSQKPDPAKTKN

SEQ ID NO: 85556 - protein, 13 aa, Homo Sapiens
VSQKPDPAKTKNR

SEQ ID NO: 85557 - protein, 13 aa, Homo Sapiens
SQKPDPAKTKNRR

SEQ ID NO: 85558 - protein, 13 aa, Homo Sapiens
QKPDPAKTKNRRK

SEQ ID NO: 85559 - protein, 13 aa, Homo Sapiens
KPDPAKTKNRRKR

SEQ ID NO: 85560 - protein, 13 aa, Homo Sapiens
PDPAKTKNRRKRK

SEQ ID NO: 85561 - protein, 13 aa, Homo Sapiens
DPAKTKNRRKRKP

SEQ ID NO: 85562 - protein, 13 aa, Homo Sapiens
PAKTKNRRKRKPS

SEQ ID NO: 85563 - protein, 13 aa, Homo Sapiens
AKTKNRRKRKPST

SEQ ID NO: 85564 - protein, 13 aa, Homo Sapiens
KTKNRRKRKPSTS

SEQ ID NO: 85565 - protein, 13 aa, Homo Sapiens
TKNRRKRKPSTSD

SEQ ID NO: 85566 - protein, 13 aa, Homo Sapiens
KNRRKRKPSTSDD

SEQ ID NO: 85567 - protein, 13 aa, Homo Sapiens
NRRKRKPSTSDDS

SEQ ID NO: 85568 - protein, 13 aa, Homo Sapiens
RRKRKPSTSDDSD

SEQ ID NO: 85569 - protein, 13 aa, Homo Sapiens
RKRKPSTSDDSDS

SEQ ID NO: 85570 - protein, 13 aa, Homo Sapiens
KRKPSTSDDSDSN

SEQ ID NO: 85571 - protein, 13 aa, Homo Sapiens
RKPSTSDDSDSNF

SEQ ID NO: 85572 - protein, 13 aa, Homo Sapiens
KPSTSDDSDSNFE

SEQ ID NO: 85573 - protein, 13 aa, Homo Sapiens
PSTSDDSDSNFEK

SEQ ID NO: 85574 - protein, 13 aa, Homo Sapiens
STSDDSDSNFEKI

SEQ ID NO: 85575 - protein, 13 aa, Homo Sapiens
TSDDSDSNFEKIV

SEQ ID NO: 85576 - protein, 13 aa, Homo Sapiens
SDDSDSNFEKIVS

SEQ ID NO: 85577 - protein, 13 aa, Homo Sapiens
DDSDSNFEKIVSK

SEQ ID NO: 85578 - protein, 13 aa, Homo Sapiens
DSDSNFEKIVSKA

SEQ ID NO: 85579 - protein, 13 aa, Homo Sapiens
SDSNFEKIVSKAV

SEQ ID NO: 85580 - protein, 13 aa, Homo Sapiens
DSNFEKIVSKAVT

SEQ ID NO: 85581 - protein, 13 aa, Homo Sapiens
SNFEKIVSKAVTS

SEQ ID NO: 85582 - protein, 13 aa, Homo Sapiens
NFEKIVSKAVTSK

SEQ ID NO: 85583 - protein, 13 aa, Homo Sapiens
FEKIVSKAVTSKK

SEQ ID NO: 85584 - protein, 13 aa, Homo Sapiens
EKIVSKAVTSKKS

SEQ ID NO: 85585 - protein, 13 aa, Homo Sapiens
KIVSKAVTSKKSK

SEQ ID NO: 85586 - protein, 13 aa, Homo Sapiens
IVSKAVTSKKSKG

SEQ ID NO: 85587 - protein, 13 aa, Homo Sapiens
VSKAVTSKKSKGE

SEQ ID NO: 85588 - protein, 13 aa, Homo Sapiens
SKAVTSKKSKGES

SEQ ID NO: 85589 - protein, 13 aa, Homo Sapiens
KAVTSKKSKGESD

SEQ ID NO: 85590 - protein, 13 aa, Homo Sapiens
AVTSKKSKGESDD

SEQ ID NO: 85591 - protein, 13 aa, Homo Sapiens
VTSKKSKGESDDF

SEQ ID NO: 85592 - protein, 13 aa, Homo Sapiens
TSKKSKGESDDFH

SEQ ID NO: 85593 - protein, 13 aa, Homo Sapiens
SKKSKGESDDFHM

SEQ ID NO: 85594 - protein, 13 aa, Homo Sapiens
KKSKGESDDFHMD

SEQ ID NO: 85595 - protein, 13 aa, Homo Sapiens
KSKGESDDFHMDF

SEQ ID NO: 85596 - protein, 13 aa, Homo Sapiens
SKGESDDFHMDFD

SEQ ID NO: 85597 - protein, 13 aa, Homo Sapiens
KGESDDFHMDFDS

SEQ ID NO: 85598 - protein, 13 aa, Homo Sapiens
GESDDFHMDFDSA

SEQ ID NO: 85599 - protein, 13 aa, Homo Sapiens
ESDDFHMDFDSAV

SEQ ID NO: 85600 - protein, 13 aa, Homo Sapiens
SDDFHMDFDSAVA

SEQ ID NO: 85601 - protein, 13 aa, Homo Sapiens
DDFHMDFDSAVAP

SEQ ID NO: 85602 - protein, 13 aa, Homo Sapiens
DFHMDFDSAVAPR

SEQ ID NO: 85603 - protein, 13 aa, Homo Sapiens
FHMDFDSAVAPRA

SEQ ID NO: 85604 - protein, 13 aa, Homo Sapiens
HMDFDSAVAPRAK

SEQ ID NO: 85605 - protein, 13 aa, Homo Sapiens
MDFDSAVAPRAKS

SEQ ID NO: 85606 - protein, 13 aa, Homo Sapiens
DFDSAVAPRAKSV

SEQ ID NO: 85607 - protein, 13 aa, Homo Sapiens
FDSAVAPRAKSVR

SEQ ID NO: 85608 - protein, 13 aa, Homo Sapiens
DSAVAPRAKSVRA

SEQ ID NO: 85609 - protein, 13 aa, Homo Sapiens
SAVAPRAKSVRAK

SEQ ID NO: 85610 - protein, 13 aa, Homo Sapiens
AVAPRAKSVRAKK

SEQ ID NO: 85611 - protein, 13 aa, Homo Sapiens
VAPRAKSVRAKKP

SEQ ID NO: 85612 - protein, 13 aa, Homo Sapiens
APRAKSVRAKKPI

SEQ ID NO: 85613 - protein, 13 aa, Homo Sapiens
PRAKSVRAKKPIK

SEQ ID NO: 85614 - protein, 13 aa, Homo Sapiens
RAKSVRAKKPIKY

SEQ ID NO: 85615 - protein, 13 aa, Homo Sapiens
AKSVRAKKPIKYL

SEQ ID NO: 85616 - protein, 13 aa, Homo Sapiens
KSVRAKKPIKYLE

SEQ ID NO: 85617 - protein, 13 aa, Homo Sapiens
SVRAKKPIKYLEE

SEQ ID NO: 85618 - protein, 13 aa, Homo Sapiens
VRAKKPIKYLEES

SEQ ID NO: 85619 - protein, 13 aa, Homo Sapiens
RAKKPIKYLEESD

SEQ ID NO: 85620 - protein, 13 aa, Homo Sapiens
AKKPIKYLEESDE

SEQ ID NO: 85621 - protein, 13 aa, Homo Sapiens
KKPIKYLEESDED

SEQ ID NO: 85622 - protein, 13 aa, Homo Sapiens
KPIKYLEESDEDD

SEQ ID NO: 85623 - protein, 13 aa, Homo Sapiens
PIKYLEESDEDDL

SEQ ID NO: 85624 - protein, 13 aa, Homo Sapiens
IKYLEESDEDDLF

SEQ ID NO: 85625 - protein, 14 aa, Homo Sapiens
MEVSPLQPVNENMQ

SEQ ID NO: 85626 - protein, 14 aa, Homo Sapiens
EVSPLQPVNENMQV

SEQ ID NO: 85627 - protein, 14 aa, Homo Sapiens
VSPLQPVNENMQVN

SEQ ID NO: 85628 - protein, 14 aa, Homo Sapiens
SPLQPVNENMQVNK

SEQ ID NO: 85629 - protein, 14 aa, Homo Sapiens
PLQPVNENMQVNKI

SEQ ID NO: 85630 - protein, 14 aa, Homo Sapiens
LQPVNENMQVNKIK

SEQ ID NO: 85631 - protein, 14 aa, Homo Sapiens
QPVNENMQVNKIKK

SEQ ID NO: 85632 - protein, 14 aa, Homo Sapiens
PVNENMQVNKIKKN

SEQ ID NO: 85633 - protein, 14 aa, Homo Sapiens
VNENMQVNKIKKNE

SEQ ID NO: 85634 - protein, 14 aa, Homo Sapiens
NENMQVNKIKKNED

SEQ ID NO: 85635 - protein, 14 aa, Homo Sapiens
ENMQVNKIKKNEDA

SEQ ID NO: 85636 - protein, 14 aa, Homo Sapiens
NMQVNKIKKNEDAK

SEQ ID NO: 85637 - protein, 14 aa, Homo Sapiens
MQVNKIKKNEDAKK

SEQ ID NO: 85638 - protein, 14 aa, Homo Sapiens
QVNKIKKNEDAKKR

SEQ ID NO: 85639 - protein, 14 aa, Homo Sapiens
VNKIKKNEDAKKRL

SEQ ID NO: 85640 - protein, 14 aa, Homo Sapiens
NKIKKNEDAKKRLS

SEQ ID NO: 85641 - protein, 14 aa, Homo Sapiens
KIKKNEDAKKRLSV

SEQ ID NO: 85642 - protein, 14 aa, Homo Sapiens
IKKNEDAKKRLSVE

SEQ ID NO: 85643 - protein, 14 aa, Homo Sapiens
KKNEDAKKRLSVER

SEQ ID NO: 85644 - protein, 14 aa, Homo Sapiens
KNEDAKKRLSVERI

SEQ ID NO: 85645 - protein, 14 aa, Homo Sapiens
NEDAKKRLSVERIY

SEQ ID NO: 85646 - protein, 14 aa, Homo Sapiens
EDAKKRLSVERIYQ

SEQ ID NO: 85647 - protein, 14 aa, Homo Sapiens
DAKKRLSVERIYQK

SEQ ID NO: 85648 - protein, 14 aa, Homo Sapiens
AKKRLSVERIYQKK

SEQ ID NO: 85649 - protein, 14 aa, Homo Sapiens
KKRLSVERIYQKKT

SEQ ID NO: 85650 - protein, 14 aa, Homo Sapiens
KRLSVERIYQKKTQ

SEQ ID NO: 85651 - protein, 14 aa, Homo Sapiens
RLSVERIYQKKTQL

SEQ ID NO: 85652 - protein, 14 aa, Homo Sapiens
LSVERIYQKKTQLE

SEQ ID NO: 85653 - protein, 14 aa, Homo Sapiens
SVERIYQKKTQLEH

SEQ ID NO: 85654 - protein, 14 aa, Homo Sapiens
VERIYQKKTQLEHI

SEQ ID NO: 85655 - protein, 14 aa, Homo Sapiens
ERIYQKKTQLEHIL

SEQ ID NO: 85656 - protein, 14 aa, Homo Sapiens
RIYQKKTQLEHILL

SEQ ID NO: 85657 - protein, 14 aa, Homo Sapiens
IYQKKTQLEHILLR

SEQ ID NO: 85658 - protein, 14 aa, Homo Sapiens
YQKKTQLEHILLRP

SEQ ID NO: 85659 - protein, 14 aa, Homo Sapiens
QKKTQLEHILLRPD

SEQ ID NO: 85660 - protein, 14 aa, Homo Sapiens
KKTQLEHILLRPDT

SEQ ID NO: 85661 - protein, 14 aa, Homo Sapiens
KTQLEHILLRPDTY

SEQ ID NO: 85662 - protein, 14 aa, Homo Sapiens
TQLEHILLRPDTYI

SEQ ID NO: 85663 - protein, 14 aa, Homo Sapiens
QLEHILLRPDTYIG

SEQ ID NO: 85664 - protein, 14 aa, Homo Sapiens
LEHILLRPDTYIGS

SEQ ID NO: 85665 - protein, 14 aa, Homo Sapiens
EHILLRPDTYIGSV

SEQ ID NO: 85666 - protein, 14 aa, Homo Sapiens
HILLRPDTYIGSVE

SEQ ID NO: 85667 - protein, 14 aa, Homo Sapiens
ILLRPDTYIGSVEL

SEQ ID NO: 85668 - protein, 14 aa, Homo Sapiens
LLRPDTYIGSVELV

SEQ ID NO: 85669 - protein, 14 aa, Homo Sapiens
LRPDTYIGSVELVT

SEQ ID NO: 85670 - protein, 14 aa, Homo Sapiens
RPDTYIGSVELVTQ

SEQ ID NO: 85671 - protein, 14 aa, Homo Sapiens
PDTYIGSVELVTQQ

SEQ ID NO: 85672 - protein, 14 aa, Homo Sapiens
DTYIGSVELVTQQM

SEQ ID NO: 85673 - protein, 14 aa, Homo Sapiens
TYIGSVELVTQQMW

SEQ ID NO: 85674 - protein, 14 aa, Homo Sapiens
YIGSVELVTQQMWV

SEQ ID NO: 85675 - protein, 14 aa, Homo Sapiens
IGSVELVTQQMWVY

SEQ ID NO: 85676 - protein, 14 aa, Homo Sapiens
GSVELVTQQMWVYD

SEQ ID NO: 85677 - protein, 14 aa, Homo Sapiens
SVELVTQQMWVYDE

SEQ ID NO: 85678 - protein, 14 aa, Homo Sapiens
VELVTQQMWVYDED

SEQ ID NO: 85679 - protein, 14 aa, Homo Sapiens
ELVTQQMWVYDEDV

SEQ ID NO: 85680 - protein, 14 aa, Homo Sapiens
LVTQQMWVYDEDVG

SEQ ID NO: 85681 - protein, 14 aa, Homo Sapiens
VTQQMWVYDEDVGI

SEQ ID NO: 85682 - protein, 14 aa, Homo Sapiens
TQQMWVYDEDVGIN

SEQ ID NO: 85683 - protein, 14 aa, Homo Sapiens
QQMWVYDEDVGINY

SEQ ID NO: 85684 - protein, 14 aa, Homo Sapiens
QMWVYDEDVGINYR

SEQ ID NO: 85685 - protein, 14 aa, Homo Sapiens
MWVYDEDVGINYRE

SEQ ID NO: 85686 - protein, 14 aa, Homo Sapiens
WVYDEDVGINYREV

SEQ ID NO: 85687 - protein, 14 aa, Homo Sapiens
VYDEDVGINYREVT

SEQ ID NO: 85688 - protein, 14 aa, Homo Sapiens
YDEDVGINYREVTF

SEQ ID NO: 85689 - protein, 14 aa, Homo Sapiens
DEDVGINYREVTFV

SEQ ID NO: 85690 - protein, 14 aa, Homo Sapiens
EDVGINYREVTFVP

SEQ ID NO: 85691 - protein, 14 aa, Homo Sapiens
DVGINYREVTFVPG

SEQ ID NO: 85692 - protein, 14 aa, Homo Sapiens
VGINYREVTFVPGL

SEQ ID NO: 85693 - protein, 14 aa, Homo Sapiens
GINYREVTFVPGLY

SEQ ID NO: 85694 - protein, 14 aa, Homo Sapiens
INYREVTFVPGLYK

SEQ ID NO: 85695 - protein, 14 aa, Homo Sapiens
NYREVTFVPGLYKI

SEQ ID NO: 85696 - protein, 14 aa, Homo Sapiens
YREVTFVPGLYKIF

SEQ ID NO: 85697 - protein, 14 aa, Homo Sapiens
REVTFVPGLYKIFD

SEQ ID NO: 85698 - protein, 14 aa, Homo Sapiens
EVTFVPGLYKIFDE

SEQ ID NO: 85699 - protein, 14 aa, Homo Sapiens
VTFVPGLYKIFDEI

SEQ ID NO: 85700 - protein, 14 aa, Homo Sapiens
TFVPGLYKIFDEIL

SEQ ID NO: 85701 - protein, 14 aa, Homo Sapiens
FVPGLYKIFDEILV

SEQ ID NO: 85702 - protein, 14 aa, Homo Sapiens
VPGLYKIFDEILVN

SEQ ID NO: 85703 - protein, 14 aa, Homo Sapiens
PGLYKIFDEILVNA

SEQ ID NO: 85704 - protein, 14 aa, Homo Sapiens
GLYKIFDEILVNAA

SEQ ID NO: 85705 - protein, 14 aa, Homo Sapiens
LYKIFDEILVNAAD

SEQ ID NO: 85706 - protein, 14 aa, Homo Sapiens
YKIFDEILVNAADN

SEQ ID NO: 85707 - protein, 14 aa, Homo Sapiens
KIFDEILVNAADNK

SEQ ID NO: 85708 - protein, 14 aa, Homo Sapiens
IFDEILVNAADNKQ

SEQ ID NO: 85709 - protein, 14 aa, Homo Sapiens
FDEILVNAADNKQR

SEQ ID NO: 85710 - protein, 14 aa, Homo Sapiens
DEILVNAADNKQRD

SEQ ID NO: 85711 - protein, 14 aa, Homo Sapiens
EILVNAADNKQRDP

SEQ ID NO: 85712 - protein, 14 aa, Homo Sapiens
ILVNAADNKQRDPK

SEQ ID NO: 85713 - protein, 14 aa, Homo Sapiens
LVNAADNKQRDPKM

SEQ ID NO: 85714 - protein, 14 aa, Homo Sapiens
VNAADNKQRDPKMS

SEQ ID NO: 85715 - protein, 14 aa, Homo Sapiens
NAADNKQRDPKMSC

SEQ ID NO: 85716 - protein, 14 aa, Homo Sapiens
AADNKQRDPKMSCI

SEQ ID NO: 85717 - protein, 14 aa, Homo Sapiens
ADNKQRDPKMSCIR

SEQ ID NO: 85718 - protein, 14 aa, Homo Sapiens
DNKQRDPKMSCIRV

SEQ ID NO: 85719 - protein, 14 aa, Homo Sapiens
NKQRDPKMSCIRVT

SEQ ID NO: 85720 - protein, 14 aa, Homo Sapiens
KQRDPKMSCIRVTI

SEQ ID NO: 85721 - protein, 14 aa, Homo Sapiens
QRDPKMSCIRVTID

SEQ ID NO: 85722 - protein, 14 aa, Homo Sapiens
RDPKMSCIRVTIDP

SEQ ID NO: 85723 - protein, 14 aa, Homo Sapiens
DPKMSCIRVTIDPE

SEQ ID NO: 85724 - protein, 14 aa, Homo Sapiens
PKMSCIRVTIDPEN

SEQ ID NO: 85725 - protein, 14 aa, Homo Sapiens
KMSCIRVTIDPENN

SEQ ID NO: 85726 - protein, 14 aa, Homo Sapiens
MSCIRVTIDPENNL

SEQ ID NO: 85727 - protein, 14 aa, Homo Sapiens
SCIRVTIDPENNLI

SEQ ID NO: 85728 - protein, 14 aa, Homo Sapiens
CIRVTIDPENNLIS

SEQ ID NO: 85729 - protein, 14 aa, Homo Sapiens
IRVTIDPENNLISI

SEQ ID NO: 85730 - protein, 14 aa, Homo Sapiens
RVTIDPENNLISIW

SEQ ID NO: 85731 - protein, 14 aa, Homo Sapiens
VTIDPENNLISIWN

SEQ ID NO: 85732 - protein, 14 aa, Homo Sapiens
TIDPENNLISIWNN

SEQ ID NO: 85733 - protein, 14 aa, Homo Sapiens
IDPENNLISIWNNG

SEQ ID NO: 85734 - protein, 14 aa, Homo Sapiens
DPENNLISIWNNGK

SEQ ID NO: 85735 - protein, 14 aa, Homo Sapiens
PENNLISIWNNGKG

SEQ ID NO: 85736 - protein, 14 aa, Homo Sapiens
ENNLISIWNNGKGI

SEQ ID NO: 85737 - protein, 14 aa, Homo Sapiens
NNLISIWNNGKGIP

SEQ ID NO: 85738 - protein, 14 aa, Homo Sapiens
NLISIWNNGKGIPV

SEQ ID NO: 85739 - protein, 14 aa, Homo Sapiens
LISIWNNGKGIPVV

SEQ ID NO: 85740 - protein, 14 aa, Homo Sapiens
ISIWNNGKGIPVVE

SEQ ID NO: 85741 - protein, 14 aa, Homo Sapiens
SIWNNGKGIPVVEH

SEQ ID NO: 85742 - protein, 14 aa, Homo Sapiens
IWNNGKGIPVVEHK

SEQ ID NO: 85743 - protein, 14 aa, Homo Sapiens
WNNGKGIPVVEHKV

SEQ ID NO: 85744 - protein, 14 aa, Homo Sapiens
NNGKGIPVVEHKVE

SEQ ID NO: 85745 - protein, 14 aa, Homo Sapiens
NGKGIPVVEHKVEK

SEQ ID NO: 85746 - protein, 14 aa, Homo Sapiens
GKGIPVVEHKVEKM

SEQ ID NO: 85747 - protein, 14 aa, Homo Sapiens
KGIPVVEHKVEKMY

SEQ ID NO: 85748 - protein, 14 aa, Homo Sapiens
GIPVVEHKVEKMYV

SEQ ID NO: 85749 - protein, 14 aa, Homo Sapiens
IPVVEHKVEKMYVP

SEQ ID NO: 85750 - protein, 14 aa, Homo Sapiens
PVVEHKVEKMYVPA

SEQ ID NO: 85751 - protein, 14 aa, Homo Sapiens
VVEHKVEKMYVPAL

SEQ ID NO: 85752 - protein, 14 aa, Homo Sapiens
VEHKVEKMYVPALI

SEQ ID NO: 85753 - protein, 14 aa, Homo Sapiens
EHKVEKMYVPALIF

SEQ ID NO: 85754 - protein, 14 aa, Homo Sapiens
HKVEKMYVPALIFG

SEQ ID NO: 85755 - protein, 14 aa, Homo Sapiens
KVEKMYVPALIFGQ

SEQ ID NO: 85756 - protein, 14 aa, Homo Sapiens
VEKMYVPALIFGQL

SEQ ID NO: 85757 - protein, 14 aa, Homo Sapiens
EKMYVPALIFGQLL

SEQ ID NO: 85758 - protein, 14 aa, Homo Sapiens
KMYVPALIFGQLLT

SEQ ID NO: 85759 - protein, 14 aa, Homo Sapiens
MYVPALIFGQLLTS

SEQ ID NO: 85760 - protein, 14 aa, Homo Sapiens
YVPALIFGQLLTSS

SEQ ID NO: 85761 - protein, 14 aa, Homo Sapiens
VPALIFGQLLTSSN

SEQ ID NO: 85762 - protein, 14 aa, Homo Sapiens
PALIFGQLLTSSNY

SEQ ID NO: 85763 - protein, 14 aa, Homo Sapiens
ALIFGQLLTSSNYD

SEQ ID NO: 85764 - protein, 14 aa, Homo Sapiens
LIFGQLLTSSNYDD

SEQ ID NO: 85765 - protein, 14 aa, Homo Sapiens
IFGQLLTSSNYDDD

SEQ ID NO: 85766 - protein, 14 aa, Homo Sapiens
FGQLLTSSNYDDDE

SEQ ID NO: 85767 - protein, 14 aa, Homo Sapiens
GQLLTSSNYDDDEK

SEQ ID NO: 85768 - protein, 14 aa, Homo Sapiens
QLLTSSNYDDDEKK

SEQ ID NO: 85769 - protein, 14 aa, Homo Sapiens
LLTSSNYDDDEKKV

SEQ ID NO: 85770 - protein, 14 aa, Homo Sapiens
LTSSNYDDDEKKVT

SEQ ID NO: 85771 - protein, 14 aa, Homo Sapiens
TSSNYDDDEKKVTG

SEQ ID NO: 85772 - protein, 14 aa, Homo Sapiens
SSNYDDDEKKVTGG

SEQ ID NO: 85773 - protein, 14 aa, Homo Sapiens
SNYDDDEKKVTGGR

SEQ ID NO: 85774 - protein, 14 aa, Homo Sapiens
NYDDDEKKVTGGRN

SEQ ID NO: 85775 - protein, 14 aa, Homo Sapiens
YDDDEKKVTGGRNG

SEQ ID NO: 85776 - protein, 14 aa, Homo Sapiens
DDDEKKVTGGRNGY

SEQ ID NO: 85777 - protein, 14 aa, Homo Sapiens
DDEKKVTGGRNGYG

SEQ ID NO: 85778 - protein, 14 aa, Homo Sapiens
DEKKVTGGRNGYGA

SEQ ID NO: 85779 - protein, 14 aa, Homo Sapiens
EKKVTGGRNGYGAK

SEQ ID NO: 85780 - protein, 14 aa, Homo Sapiens
KKVTGGRNGYGAKL

SEQ ID NO: 85781 - protein, 14 aa, Homo Sapiens
KVTGGRNGYGAKLC

SEQ ID NO: 85782 - protein, 14 aa, Homo Sapiens
VTGGRNGYGAKLCN

SEQ ID NO: 85783 - protein, 14 aa, Homo Sapiens
TGGRNGYGAKLCNI

SEQ ID NO: 85784 - protein, 14 aa, Homo Sapiens
GGRNGYGAKLCNIF

SEQ ID NO: 85785 - protein, 14 aa, Homo Sapiens
GRNGYGAKLCNIFS

SEQ ID NO: 85786 - protein, 14 aa, Homo Sapiens
RNGYGAKLCNIFST

SEQ ID NO: 85787 - protein, 14 aa, Homo Sapiens
NGYGAKLCNIFSTK

SEQ ID NO: 85788 - protein, 14 aa, Homo Sapiens
GYGAKLCNIFSTKF

SEQ ID NO: 85789 - protein, 14 aa, Homo Sapiens
YGAKLCNIFSTKFT

SEQ ID NO: 85790 - protein, 14 aa, Homo Sapiens
GAKLCNIFSTKFTV

SEQ ID NO: 85791 - protein, 14 aa, Homo Sapiens
AKLCNIFSTKFTVE

SEQ ID NO: 85792 - protein, 14 aa, Homo Sapiens
KLCNIFSTKFTVET

SEQ ID NO: 85793 - protein, 14 aa, Homo Sapiens
LCNIFSTKFTVETA

SEQ ID NO: 85794 - protein, 14 aa, Homo Sapiens
CNIFSTKFTVETAS

SEQ ID NO: 85795 - protein, 14 aa, Homo Sapiens
NIFSTKFTVETASR

SEQ ID NO: 85796 - protein, 14 aa, Homo Sapiens
IFSTKFTVETASRE

SEQ ID NO: 85797 - protein, 14 aa, Homo Sapiens
FSTKFTVETASREY

SEQ ID NO: 85798 - protein, 14 aa, Homo Sapiens
STKFTVETASREYK

SEQ ID NO: 85799 - protein, 14 aa, Homo Sapiens
TKFTVETASREYKK

SEQ ID NO: 85800 - protein, 14 aa, Homo Sapiens
KFTVETASREYKKM

SEQ ID NO: 85801 - protein, 14 aa, Homo Sapiens
FTVETASREYKKMF

SEQ ID NO: 85802 - protein, 14 aa, Homo Sapiens
TVETASREYKKMFK

SEQ ID NO: 85803 - protein, 14 aa, Homo Sapiens
VETASREYKKMFKQ

SEQ ID NO: 85804 - protein, 14 aa, Homo Sapiens
ETASREYKKMFKQT

SEQ ID NO: 85805 - protein, 14 aa, Homo Sapiens
TASREYKKMFKQTW

SEQ ID NO: 85806 - protein, 14 aa, Homo Sapiens
ASREYKKMFKQTWM

SEQ ID NO: 85807 - protein, 14 aa, Homo Sapiens
SREYKKMFKQTWMD

SEQ ID NO: 85808 - protein, 14 aa, Homo Sapiens
REYKKMFKQTWMDN

SEQ ID NO: 85809 - protein, 14 aa, Homo Sapiens
EYKKMFKQTWMDNM

SEQ ID NO: 85810 - protein, 14 aa, Homo Sapiens
YKKMFKQTWMDNMG

SEQ ID NO: 85811 - protein, 14 aa, Homo Sapiens
KKMFKQTWMDNMGR

SEQ ID NO: 85812 - protein, 14 aa, Homo Sapiens
KMFKQTWMDNMGRA

SEQ ID NO: 85813 - protein, 14 aa, Homo Sapiens
MFKQTWMDNMGRAG

SEQ ID NO: 85814 - protein, 14 aa, Homo Sapiens
FKQTWMDNMGRAGE

SEQ ID NO: 85815 - protein, 14 aa, Homo Sapiens
KQTWMDNMGRAGEM

SEQ ID NO: 85816 - protein, 14 aa, Homo Sapiens
QTWMDNMGRAGEME

SEQ ID NO: 85817 - protein, 14 aa, Homo Sapiens
TWMDNMGRAGEMEL

SEQ ID NO: 85818 - protein, 14 aa, Homo Sapiens
WMDNMGRAGEMELK

SEQ ID NO: 85819 - protein, 14 aa, Homo Sapiens
MDNMGRAGEMELKP

SEQ ID NO: 85820 - protein, 14 aa, Homo Sapiens
DNMGRAGEMELKPF

SEQ ID NO: 85821 - protein, 14 aa, Homo Sapiens
NMGRAGEMELKPFN

SEQ ID NO: 85822 - protein, 14 aa, Homo Sapiens
MGRAGEMELKPFNG

SEQ ID NO: 85823 - protein, 14 aa, Homo Sapiens
GRAGEMELKPFNGE

SEQ ID NO: 85824 - protein, 14 aa, Homo Sapiens
RAGEMELKPFNGED

SEQ ID NO: 85825 - protein, 14 aa, Homo Sapiens
AGEMELKPFNGEDY

SEQ ID NO: 85826 - protein, 14 aa, Homo Sapiens
GEMELKPFNGEDYT

SEQ ID NO: 85827 - protein, 14 aa, Homo Sapiens
EMELKPFNGEDYTC

SEQ ID NO: 85828 - protein, 14 aa, Homo Sapiens
MELKPFNGEDYTCI

SEQ ID NO: 85829 - protein, 14 aa, Homo Sapiens
ELKPFNGEDYTCIT

SEQ ID NO: 85830 - protein, 14 aa, Homo Sapiens
LKPFNGEDYTCITF

SEQ ID NO: 85831 - protein, 14 aa, Homo Sapiens
KPFNGEDYTCITFQ

SEQ ID NO: 85832 - protein, 14 aa, Homo Sapiens
PFNGEDYTCITFQP

SEQ ID NO: 85833 - protein, 14 aa, Homo Sapiens
FNGEDYTCITFQPD

SEQ ID NO: 85834 - protein, 14 aa, Homo Sapiens
NGEDYTCITFQPDL

SEQ ID NO: 85835 - protein, 14 aa, Homo Sapiens
GEDYTCITFQPDLS

SEQ ID NO: 85836 - protein, 14 aa, Homo Sapiens
EDYTCITFQPDLSK

SEQ ID NO: 85837 - protein, 14 aa, Homo Sapiens
DYTCITFQPDLSKF

SEQ ID NO: 85838 - protein, 14 aa, Homo Sapiens
YTCITFQPDLSKFK

SEQ ID NO: 85839 - protein, 14 aa, Homo Sapiens
TCITFQPDLSKFKM

SEQ ID NO: 85840 - protein, 14 aa, Homo Sapiens
CITFQPDLSKFKMQ

SEQ ID NO: 85841 - protein, 14 aa, Homo Sapiens
ITFQPDLSKFKMQS

SEQ ID NO: 85842 - protein, 14 aa, Homo Sapiens
TFQPDLSKFKMQSL

SEQ ID NO: 85843 - protein, 14 aa, Homo Sapiens
FQPDLSKFKMQSLD

SEQ ID NO: 85844 - protein, 14 aa, Homo Sapiens
QPDLSKFKMQSLDK

SEQ ID NO: 85845 - protein, 14 aa, Homo Sapiens
PDLSKFKMQSLDKD

SEQ ID NO: 85846 - protein, 14 aa, Homo Sapiens
DLSKFKMQSLDKDI

SEQ ID NO: 85847 - protein, 14 aa, Homo Sapiens
LSKFKMQSLDKDIV

SEQ ID NO: 85848 - protein, 14 aa, Homo Sapiens
SKFKMQSLDKDIVA

SEQ ID NO: 85849 - protein, 14 aa, Homo Sapiens
KFKMQSLDKDIVAL

SEQ ID NO: 85850 - protein, 14 aa, Homo Sapiens
FKMQSLDKDIVALM

SEQ ID NO: 85851 - protein, 14 aa, Homo Sapiens
KMQSLDKDIVALMV

SEQ ID NO: 85852 - protein, 14 aa, Homo Sapiens
MQSLDKDIVALMVR

SEQ ID NO: 85853 - protein, 14 aa, Homo Sapiens
QSLDKDIVALMVRR

SEQ ID NO: 85854 - protein, 14 aa, Homo Sapiens
SLDKDIVALMVRRA

SEQ ID NO: 85855 - protein, 14 aa, Homo Sapiens
LDKDIVALMVRRAY

SEQ ID NO: 85856 - protein, 14 aa, Homo Sapiens
DKDIVALMVRRAYD

SEQ ID NO: 85857 - protein, 14 aa, Homo Sapiens
KDIVALMVRRAYDI

SEQ ID NO: 85858 - protein, 14 aa, Homo Sapiens
DIVALMVRRAYDIA

SEQ ID NO: 85859 - protein, 14 aa, Homo Sapiens
IVALMVRRAYDIAG

SEQ ID NO: 85860 - protein, 14 aa, Homo Sapiens
VALMVRRAYDIAGS

SEQ ID NO: 85861 - protein, 14 aa, Homo Sapiens
ALMVRRAYDIAGST

SEQ ID NO: 85862 - protein, 14 aa, Homo Sapiens
LMVRRAYDIAGSTK

SEQ ID NO: 85863 - protein, 14 aa, Homo Sapiens
MVRRAYDIAGSTKD

SEQ ID NO: 85864 - protein, 14 aa, Homo Sapiens
VRRAYDIAGSTKDV

SEQ ID NO: 85865 - protein, 14 aa, Homo Sapiens
RRAYDIAGSTKDVK

SEQ ID NO: 85866 - protein, 14 aa, Homo Sapiens
RAYDIAGSTKDVKV

SEQ ID NO: 85867 - protein, 14 aa, Homo Sapiens
AYDIAGSTKDVKVF

SEQ ID NO: 85868 - protein, 14 aa, Homo Sapiens
YDIAGSTKDVKVFL

SEQ ID NO: 85869 - protein, 14 aa, Homo Sapiens
DIAGSTKDVKVFLN

SEQ ID NO: 85870 - protein, 14 aa, Homo Sapiens
IAGSTKDVKVFLNG

SEQ ID NO: 85871 - protein, 14 aa, Homo Sapiens
AGSTKDVKVFLNGN

SEQ ID NO: 85872 - protein, 14 aa, Homo Sapiens
GSTKDVKVFLNGNK

SEQ ID NO: 85873 - protein, 14 aa, Homo Sapiens
STKDVKVFLNGNKL

SEQ ID NO: 85874 - protein, 14 aa, Homo Sapiens
TKDVKVFLNGNKLP

SEQ ID NO: 85875 - protein, 14 aa, Homo Sapiens
KDVKVFLNGNKLPV

SEQ ID NO: 85876 - protein, 14 aa, Homo Sapiens
DVKVFLNGNKLPVK

SEQ ID NO: 85877 - protein, 14 aa, Homo Sapiens
VKVFLNGNKLPVKG

SEQ ID NO: 85878 - protein, 14 aa, Homo Sapiens
KVFLNGNKLPVKGF

SEQ ID NO: 85879 - protein, 14 aa, Homo Sapiens
VFLNGNKLPVKGFR

SEQ ID NO: 85880 - protein, 14 aa, Homo Sapiens
FLNGNKLPVKGFRS

SEQ ID NO: 85881 - protein, 14 aa, Homo Sapiens
LNGNKLPVKGFRSY

SEQ ID NO: 85882 - protein, 14 aa, Homo Sapiens
NGNKLPVKGFRSYV

SEQ ID NO: 85883 - protein, 14 aa, Homo Sapiens
GNKLPVKGFRSYVD

SEQ ID NO: 85884 - protein, 14 aa, Homo Sapiens
NKLPVKGFRSYVDM

SEQ ID NO: 85885 - protein, 14 aa, Homo Sapiens
KLPVKGFRSYVDMY

SEQ ID NO: 85886 - protein, 14 aa, Homo Sapiens
LPVKGFRSYVDMYL

SEQ ID NO: 85887 - protein, 14 aa, Homo Sapiens
PVKGFRSYVDMYLK

SEQ ID NO: 85888 - protein, 14 aa, Homo Sapiens
VKGFRSYVDMYLKD

SEQ ID NO: 85889 - protein, 14 aa, Homo Sapiens
KGFRSYVDMYLKDK

SEQ ID NO: 85890 - protein, 14 aa, Homo Sapiens
GFRSYVDMYLKDKL

SEQ ID NO: 85891 - protein, 14 aa, Homo Sapiens
FRSYVDMYLKDKLD

SEQ ID NO: 85892 - protein, 14 aa, Homo Sapiens
RSYVDMYLKDKLDE

SEQ ID NO: 85893 - protein, 14 aa, Homo Sapiens
SYVDMYLKDKLDET

SEQ ID NO: 85894 - protein, 14 aa, Homo Sapiens
YVDMYLKDKLDETG

SEQ ID NO: 85895 - protein, 14 aa, Homo Sapiens
VDMYLKDKLDETGN

SEQ ID NO: 85896 - protein, 14 aa, Homo Sapiens
DMYLKDKLDETGNS

SEQ ID NO: 85897 - protein, 14 aa, Homo Sapiens
MYLKDKLDETGNSL

SEQ ID NO: 85898 - protein, 14 aa, Homo Sapiens
YLKDKLDETGNSLK

SEQ ID NO: 85899 - protein, 14 aa, Homo Sapiens
LKDKLDETGNSLKV

SEQ ID NO: 85900 - protein, 14 aa, Homo Sapiens
KDKLDETGNSLKVI

SEQ ID NO: 85901 - protein, 14 aa, Homo Sapiens
DKLDETGNSLKVIH

SEQ ID NO: 85902 - protein, 14 aa, Homo Sapiens
KLDETGNSLKVIHE

SEQ ID NO: 85903 - protein, 14 aa, Homo Sapiens
LDETGNSLKVIHEQ

SEQ ID NO: 85904 - protein, 14 aa, Homo Sapiens
DETGNSLKVIHEQV

SEQ ID NO: 85905 - protein, 14 aa, Homo Sapiens
ETGNSLKVIHEQVN

SEQ ID NO: 85906 - protein, 14 aa, Homo Sapiens
TGNSLKVIHEQVNH

SEQ ID NO: 85907 - protein, 14 aa, Homo Sapiens
GNSLKVIHEQVNHR

SEQ ID NO: 85908 - protein, 14 aa, Homo Sapiens
NSLKVIHEQVNHRW

SEQ ID NO: 85909 - protein, 14 aa, Homo Sapiens
SLKVIHEQVNHRWE

SEQ ID NO: 85910 - protein, 14 aa, Homo Sapiens
LKVIHEQVNHRWEV

SEQ ID NO: 85911 - protein, 14 aa, Homo Sapiens
KVIHEQVNHRWEVC

SEQ ID NO: 85912 - protein, 14 aa, Homo Sapiens
VIHEQVNHRWEVCL

SEQ ID NO: 85913 - protein, 14 aa, Homo Sapiens
IHEQVNHRWEVCLT

SEQ ID NO: 85914 - protein, 14 aa, Homo Sapiens
HEQVNHRWEVCLTM

SEQ ID NO: 85915 - protein, 14 aa, Homo Sapiens
EQVNHRWEVCLTMS

SEQ ID NO: 85916 - protein, 14 aa, Homo Sapiens
QVNHRWEVCLTMSE

SEQ ID NO: 85917 - protein, 14 aa, Homo Sapiens
VNHRWEVCLTMSEK

SEQ ID NO: 85918 - protein, 14 aa, Homo Sapiens
NHRWEVCLTMSEKG

SEQ ID NO: 85919 - protein, 14 aa, Homo Sapiens
HRWEVCLTMSEKGF

SEQ ID NO: 85920 - protein, 14 aa, Homo Sapiens
RWEVCLTMSEKGFQ

SEQ ID NO: 85921 - protein, 14 aa, Homo Sapiens
WEVCLTMSEKGFQQ

SEQ ID NO: 85922 - protein, 14 aa, Homo Sapiens
EVCLTMSEKGFQQI

SEQ ID NO: 85923 - protein, 14 aa, Homo Sapiens
VCLTMSEKGFQQIS

SEQ ID NO: 85924 - protein, 14 aa, Homo Sapiens
CLTMSEKGFQQISF

SEQ ID NO: 85925 - protein, 14 aa, Homo Sapiens
LTMSEKGFQQISFV

SEQ ID NO: 85926 - protein, 14 aa, Homo Sapiens
TMSEKGFQQISFVN

SEQ ID NO: 85927 - protein, 14 aa, Homo Sapiens
MSEKGFQQISFVNS

SEQ ID NO: 85928 - protein, 14 aa, Homo Sapiens
SEKGFQQISFVNSI

SEQ ID NO: 85929 - protein, 14 aa, Homo Sapiens
EKGFQQISFVNSIA

SEQ ID NO: 85930 - protein, 14 aa, Homo Sapiens
KGFQQISFVNSIAT

SEQ ID NO: 85931 - protein, 14 aa, Homo Sapiens
GFQQISFVNSIATS

SEQ ID NO: 85932 - protein, 14 aa, Homo Sapiens
FQQISFVNSIATSK

SEQ ID NO: 85933 - protein, 14 aa, Homo Sapiens
QQISFVNSIATSKG

SEQ ID NO: 85934 - protein, 14 aa, Homo Sapiens
QISFVNSIATSKGG

SEQ ID NO: 85935 - protein, 14 aa, Homo Sapiens
ISFVNSIATSKGGR

SEQ ID NO: 85936 - protein, 14 aa, Homo Sapiens
SFVNSIATSKGGRH

SEQ ID NO: 85937 - protein, 14 aa, Homo Sapiens
FVNSIATSKGGRHV

SEQ ID NO: 85938 - protein, 14 aa, Homo Sapiens
VNSIATSKGGRHVD

SEQ ID NO: 85939 - protein, 14 aa, Homo Sapiens
NSIATSKGGRHVDY

SEQ ID NO: 85940 - protein, 14 aa, Homo Sapiens
SIATSKGGRHVDYV

SEQ ID NO: 85941 - protein, 14 aa, Homo Sapiens
IATSKGGRHVDYVA

SEQ ID NO: 85942 - protein, 14 aa, Homo Sapiens
ATSKGGRHVDYVAD

SEQ ID NO: 85943 - protein, 14 aa, Homo Sapiens
TSKGGRHVDYVADQ

SEQ ID NO: 85944 - protein, 14 aa, Homo Sapiens
SKGGRHVDYVADQI

SEQ ID NO: 85945 - protein, 14 aa, Homo Sapiens
KGGRHVDYVADQIV

SEQ ID NO: 85946 - protein, 14 aa, Homo Sapiens
GGRHVDYVADQIVT

SEQ ID NO: 85947 - protein, 14 aa, Homo Sapiens
GRHVDYVADQIVTK

SEQ ID NO: 85948 - protein, 14 aa, Homo Sapiens
RHVDYVADQIVTKL

SEQ ID NO: 85949 - protein, 14 aa, Homo Sapiens
HVDYVADQIVTKLV

SEQ ID NO: 85950 - protein, 14 aa, Homo Sapiens
VDYVADQIVTKLVD

SEQ ID NO: 85951 - protein, 14 aa, Homo Sapiens
DYVADQIVTKLVDV

SEQ ID NO: 85952 - protein, 14 aa, Homo Sapiens
YVADQIVTKLVDVV

SEQ ID NO: 85953 - protein, 14 aa, Homo Sapiens
VADQIVTKLVDVVK

SEQ ID NO: 85954 - protein, 14 aa, Homo Sapiens
ADQIVTKLVDVVKK

SEQ ID NO: 85955 - protein, 14 aa, Homo Sapiens
DQIVTKLVDVVKKK

SEQ ID NO: 85956 - protein, 14 aa, Homo Sapiens
QIVTKLVDVVKKKN

SEQ ID NO: 85957 - protein, 14 aa, Homo Sapiens
IVTKLVDVVKKKNK

SEQ ID NO: 85958 - protein, 14 aa, Homo Sapiens
VTKLVDVVKKKNKG

SEQ ID NO: 85959 - protein, 14 aa, Homo Sapiens
TKLVDVVKKKNKGG

SEQ ID NO: 85960 - protein, 14 aa, Homo Sapiens
KLVDVVKKKNKGGV

SEQ ID NO: 85961 - protein, 14 aa, Homo Sapiens
LVDVVKKKNKGGVA

SEQ ID NO: 85962 - protein, 14 aa, Homo Sapiens
VDVVKKKNKGGVAV

SEQ ID NO: 85963 - protein, 14 aa, Homo Sapiens
DVVKKKNKGGVAVK

SEQ ID NO: 85964 - protein, 14 aa, Homo Sapiens
VVKKKNKGGVAVKA

SEQ ID NO: 85965 - protein, 14 aa, Homo Sapiens
VKKKNKGGVAVKAH

SEQ ID NO: 85966 - protein, 14 aa, Homo Sapiens
KKKNKGGVAVKAHQ

SEQ ID NO: 85967 - protein, 14 aa, Homo Sapiens
KKNKGGVAVKAHQV

SEQ ID NO: 85968 - protein, 14 aa, Homo Sapiens
KNKGGVAVKAHQVK

SEQ ID NO: 85969 - protein, 14 aa, Homo Sapiens
NKGGVAVKAHQVKN

SEQ ID NO: 85970 - protein, 14 aa, Homo Sapiens
KGGVAVKAHQVKNH

SEQ ID NO: 85971 - protein, 14 aa, Homo Sapiens
GGVAVKAHQVKNHM

SEQ ID NO: 85972 - protein, 14 aa, Homo Sapiens
GVAVKAHQVKNHMW

SEQ ID NO: 85973 - protein, 14 aa, Homo Sapiens
VAVKAHQVKNHMWI

SEQ ID NO: 85974 - protein, 14 aa, Homo Sapiens
AVKAHQVKNHMWIF

SEQ ID NO: 85975 - protein, 14 aa, Homo Sapiens
VKAHQVKNHMWIFV

SEQ ID NO: 85976 - protein, 14 aa, Homo Sapiens
KAHQVKNHMWIFVN

SEQ ID NO: 85977 - protein, 14 aa, Homo Sapiens
AHQVKNHMWIFVNA

SEQ ID NO: 85978 - protein, 14 aa, Homo Sapiens
HQVKNHMWIFVNAL

SEQ ID NO: 85979 - protein, 14 aa, Homo Sapiens
QVKNHMWIFVNALI

SEQ ID NO: 85980 - protein, 14 aa, Homo Sapiens
VKNHMWIFVNALIE

SEQ ID NO: 85981 - protein, 14 aa, Homo Sapiens
KNHMWIFVNALIEN

SEQ ID NO: 85982 - protein, 14 aa, Homo Sapiens
NHMWIFVNALIENP

SEQ ID NO: 85983 - protein, 14 aa, Homo Sapiens
HMWIFVNALIENPT

SEQ ID NO: 85984 - protein, 14 aa, Homo Sapiens
MWIFVNALIENPTF

SEQ ID NO: 85985 - protein, 14 aa, Homo Sapiens
WIFVNALIENPTFD

SEQ ID NO: 85986 - protein, 14 aa, Homo Sapiens
IFVNALIENPTFDS

SEQ ID NO: 85987 - protein, 14 aa, Homo Sapiens
FVNALIENPTFDSQ

SEQ ID NO: 85988 - protein, 14 aa, Homo Sapiens
VNALIENPTFDSQT

SEQ ID NO: 85989 - protein, 14 aa, Homo Sapiens
NALIENPTFDSQTK

SEQ ID NO: 85990 - protein, 14 aa, Homo Sapiens
ALIENPTFDSQTKE

SEQ ID NO: 85991 - protein, 14 aa, Homo Sapiens
LIENPTFDSQTKEN

SEQ ID NO: 85992 - protein, 14 aa, Homo Sapiens
IENPTFDSQTKENM

SEQ ID NO: 85993 - protein, 14 aa, Homo Sapiens
ENPTFDSQTKENMT

SEQ ID NO: 85994 - protein, 14 aa, Homo Sapiens
NPTFDSQTKENMTL

SEQ ID NO: 85995 - protein, 14 aa, Homo Sapiens
PTFDSQTKENMTLQ

SEQ ID NO: 85996 - protein, 14 aa, Homo Sapiens
TFDSQTKENMTLQP

SEQ ID NO: 85997 - protein, 14 aa, Homo Sapiens
FDSQTKENMTLQPK

SEQ ID NO: 85998 - protein, 14 aa, Homo Sapiens
DSQTKENMTLQPKS

SEQ ID NO: 85999 - protein, 14 aa, Homo Sapiens
SQTKENMTLQPKSF

SEQ ID NO: 86000 - protein, 14 aa, Homo Sapiens
QTKENMTLQPKSFG

SEQ ID NO: 86001 - protein, 14 aa, Homo Sapiens
TKENMTLQPKSFGS

SEQ ID NO: 86002 - protein, 14 aa, Homo Sapiens
KENMTLQPKSFGST

SEQ ID NO: 86003 - protein, 14 aa, Homo Sapiens
ENMTLQPKSFGSTC

SEQ ID NO: 86004 - protein, 14 aa, Homo Sapiens
NMTLQPKSFGSTCQ

SEQ ID NO: 86005 - protein, 14 aa, Homo Sapiens
MTLQPKSFGSTCQL

SEQ ID NO: 86006 - protein, 14 aa, Homo Sapiens
TLQPKSFGSTCQLS

SEQ ID NO: 86007 - protein, 14 aa, Homo Sapiens
LQPKSFGSTCQLSE

SEQ ID NO: 86008 - protein, 14 aa, Homo Sapiens
QPKSFGSTCQLSEK

SEQ ID NO: 86009 - protein, 14 aa, Homo Sapiens
PKSFGSTCQLSEKF

SEQ ID NO: 86010 - protein, 14 aa, Homo Sapiens
KSFGSTCQLSEKFI

SEQ ID NO: 86011 - protein, 14 aa, Homo Sapiens
SFGSTCQLSEKFIK

SEQ ID NO: 86012 - protein, 14 aa, Homo Sapiens
FGSTCQLSEKFIKA

SEQ ID NO: 86013 - protein, 14 aa, Homo Sapiens
GSTCQLSEKFIKAA

SEQ ID NO: 86014 - protein, 14 aa, Homo Sapiens
STCQLSEKFIKAAI

SEQ ID NO: 86015 - protein, 14 aa, Homo Sapiens
TCQLSEKFIKAAIG

SEQ ID NO: 86016 - protein, 14 aa, Homo Sapiens
CQLSEKFIKAAIGC

SEQ ID NO: 86017 - protein, 14 aa, Homo Sapiens
QLSEKFIKAAIGCG

SEQ ID NO: 86018 - protein, 14 aa, Homo Sapiens
LSEKFIKAAIGCGI

SEQ ID NO: 86019 - protein, 14 aa, Homo Sapiens
SEKFIKAAIGCGIV

SEQ ID NO: 86020 - protein, 14 aa, Homo Sapiens
EKFIKAAIGCGIVE

SEQ ID NO: 86021 - protein, 14 aa, Homo Sapiens
KFIKAAIGCGIVES

SEQ ID NO: 86022 - protein, 14 aa, Homo Sapiens
FIKAAIGCGIVESI

SEQ ID NO: 86023 - protein, 14 aa, Homo Sapiens
IKAAIGCGIVESIL

SEQ ID NO: 86024 - protein, 14 aa, Homo Sapiens
KAAIGCGIVESILN

SEQ ID NO: 86025 - protein, 14 aa, Homo Sapiens
AAIGCGIVESILNW

SEQ ID NO: 86026 - protein, 14 aa, Homo Sapiens
AIGCGIVESILNWV

SEQ ID NO: 86027 - protein, 14 aa, Homo Sapiens
IGCGIVESILNWVK

SEQ ID NO: 86028 - protein, 14 aa, Homo Sapiens
GCGIVESILNWVKF

SEQ ID NO: 86029 - protein, 14 aa, Homo Sapiens
CGIVESILNWVKFK

SEQ ID NO: 86030 - protein, 14 aa, Homo Sapiens
GIVESILNWVKFKA

SEQ ID NO: 86031 - protein, 14 aa, Homo Sapiens
IVESILNWVKFKAQ

SEQ ID NO: 86032 - protein, 14 aa, Homo Sapiens
VESILNWVKFKAQV

SEQ ID NO: 86033 - protein, 14 aa, Homo Sapiens
ESILNWVKFKAQVQ

SEQ ID NO: 86034 - protein, 14 aa, Homo Sapiens
SILNWVKFKAQVQL

SEQ ID NO: 86035 - protein, 14 aa, Homo Sapiens
ILNWVKFKAQVQLN

SEQ ID NO: 86036 - protein, 14 aa, Homo Sapiens
LNWVKFKAQVQLNK

SEQ ID NO: 86037 - protein, 14 aa, Homo Sapiens
NWVKFKAQVQLNKK

SEQ ID NO: 86038 - protein, 14 aa, Homo Sapiens
WVKFKAQVQLNKKC

SEQ ID NO: 86039 - protein, 14 aa, Homo Sapiens
VKFKAQVQLNKKCS

SEQ ID NO: 86040 - protein, 14 aa, Homo Sapiens
KFKAQVQLNKKCSA

SEQ ID NO: 86041 - protein, 14 aa, Homo Sapiens
FKAQVQLNKKCSAV

SEQ ID NO: 86042 - protein, 14 aa, Homo Sapiens
KAQVQLNKKCSAVK

SEQ ID NO: 86043 - protein, 14 aa, Homo Sapiens
AQVQLNKKCSAVKH

SEQ ID NO: 86044 - protein, 14 aa, Homo Sapiens
QVQLNKKCSAVKHN

SEQ ID NO: 86045 - protein, 14 aa, Homo Sapiens
VQLNKKCSAVKHNR

SEQ ID NO: 86046 - protein, 14 aa, Homo Sapiens
QLNKKCSAVKHNRI

SEQ ID NO: 86047 - protein, 14 aa, Homo Sapiens
LNKKCSAVKHNRIK

SEQ ID NO: 86048 - protein, 14 aa, Homo Sapiens
NKKCSAVKHNRIKG

SEQ ID NO: 86049 - protein, 14 aa, Homo Sapiens
KKCSAVKHNRIKGI

SEQ ID NO: 86050 - protein, 14 aa, Homo Sapiens
KCSAVKHNRIKGIP

SEQ ID NO: 86051 - protein, 14 aa, Homo Sapiens
CSAVKHNRIKGIPK

SEQ ID NO: 86052 - protein, 14 aa, Homo Sapiens
SAVKHNRIKGIPKL

SEQ ID NO: 86053 - protein, 14 aa, Homo Sapiens
AVKHNRIKGIPKLD

SEQ ID NO: 86054 - protein, 14 aa, Homo Sapiens
VKHNRIKGIPKLDD

SEQ ID NO: 86055 - protein, 14 aa, Homo Sapiens
KHNRIKGIPKLDDA

SEQ ID NO: 86056 - protein, 14 aa, Homo Sapiens
HNRIKGIPKLDDAN

SEQ ID NO: 86057 - protein, 14 aa, Homo Sapiens
NRIKGIPKLDDAND

SEQ ID NO: 86058 - protein, 14 aa, Homo Sapiens
RIKGIPKLDDANDA

SEQ ID NO: 86059 - protein, 14 aa, Homo Sapiens
IKGIPKLDDANDAG

SEQ ID NO: 86060 - protein, 14 aa, Homo Sapiens
KGIPKLDDANDAGG

SEQ ID NO: 86061 - protein, 14 aa, Homo Sapiens
GIPKLDDANDAGGR

SEQ ID NO: 86062 - protein, 14 aa, Homo Sapiens
IPKLDDANDAGGRN

SEQ ID NO: 86063 - protein, 14 aa, Homo Sapiens
PKLDDANDAGGRNS

SEQ ID NO: 86064 - protein, 14 aa, Homo Sapiens
KLDDANDAGGRNST

SEQ ID NO: 86065 - protein, 14 aa, Homo Sapiens
LDDANDAGGRNSTE

SEQ ID NO: 86066 - protein, 14 aa, Homo Sapiens
DDANDAGGRNSTEC

SEQ ID NO: 86067 - protein, 14 aa, Homo Sapiens
DANDAGGRNSTECT

SEQ ID NO: 86068 - protein, 14 aa, Homo Sapiens
ANDAGGRNSTECTL

SEQ ID NO: 86069 - protein, 14 aa, Homo Sapiens
NDAGGRNSTECTLI

SEQ ID NO: 86070 - protein, 14 aa, Homo Sapiens
DAGGRNSTECTLIL

SEQ ID NO: 86071 - protein, 14 aa, Homo Sapiens
AGGRNSTECTLILT

SEQ ID NO: 86072 - protein, 14 aa, Homo Sapiens
GGRNSTECTLILTE

SEQ ID NO: 86073 - protein, 14 aa, Homo Sapiens
GRNSTECTLILTEG

SEQ ID NO: 86074 - protein, 14 aa, Homo Sapiens
RNSTECTLILTEGD

SEQ ID NO: 86075 - protein, 14 aa, Homo Sapiens
NSTECTLILTEGDS

SEQ ID NO: 86076 - protein, 14 aa, Homo Sapiens
STECTLILTEGDSA

SEQ ID NO: 86077 - protein, 14 aa, Homo Sapiens
TECTLILTEGDSAK

SEQ ID NO: 86078 - protein, 14 aa, Homo Sapiens
ECTLILTEGDSAKT

SEQ ID NO: 86079 - protein, 14 aa, Homo Sapiens
CTLILTEGDSAKTL

SEQ ID NO: 86080 - protein, 14 aa, Homo Sapiens
TLILTEGDSAKTLA

SEQ ID NO: 86081 - protein, 14 aa, Homo Sapiens
LILTEGDSAKTLAV

SEQ ID NO: 86082 - protein, 14 aa, Homo Sapiens
ILTEGDSAKTLAVS

SEQ ID NO: 86083 - protein, 14 aa, Homo Sapiens
LTEGDSAKTLAVSG

SEQ ID NO: 86084 - protein, 14 aa, Homo Sapiens
TEGDSAKTLAVSGL

SEQ ID NO: 86085 - protein, 14 aa, Homo Sapiens
EGDSAKTLAVSGLG

SEQ ID NO: 86086 - protein, 14 aa, Homo Sapiens
GDSAKTLAVSGLGV

SEQ ID NO: 86087 - protein, 14 aa, Homo Sapiens
DSAKTLAVSGLGVV

SEQ ID NO: 86088 - protein, 14 aa, Homo Sapiens
SAKTLAVSGLGVVG

SEQ ID NO: 86089 - protein, 14 aa, Homo Sapiens
AKTLAVSGLGVVGR

SEQ ID NO: 86090 - protein, 14 aa, Homo Sapiens
KTLAVSGLGVVGRD

SEQ ID NO: 86091 - protein, 14 aa, Homo Sapiens
TLAVSGLGVVGRDK

SEQ ID NO: 86092 - protein, 14 aa, Homo Sapiens
LAVSGLGVVGRDKY

SEQ ID NO: 86093 - protein, 14 aa, Homo Sapiens
AVSGLGVVGRDKYG

SEQ ID NO: 86094 - protein, 14 aa, Homo Sapiens
VSGLGVVGRDKYGV

SEQ ID NO: 86095 - protein, 14 aa, Homo Sapiens
SGLGVVGRDKYGVF

SEQ ID NO: 86096 - protein, 14 aa, Homo Sapiens
GLGVVGRDKYGVFP

SEQ ID NO: 86097 - protein, 14 aa, Homo Sapiens
LGVVGRDKYGVFPL

SEQ ID NO: 86098 - protein, 14 aa, Homo Sapiens
GVVGRDKYGVFPLR

SEQ ID NO: 86099 - protein, 14 aa, Homo Sapiens
VVGRDKYGVFPLRG

SEQ ID NO: 86100 - protein, 14 aa, Homo Sapiens
VGRDKYGVFPLRGK

SEQ ID NO: 86101 - protein, 14 aa, Homo Sapiens
GRDKYGVFPLRGKI

SEQ ID NO: 86102 - protein, 14 aa, Homo Sapiens
RDKYGVFPLRGKIL

SEQ ID NO: 86103 - protein, 14 aa, Homo Sapiens
DKYGVFPLRGKILN

SEQ ID NO: 86104 - protein, 14 aa, Homo Sapiens
KYGVFPLRGKILNV

SEQ ID NO: 86105 - protein, 14 aa, Homo Sapiens
YGVFPLRGKILNVR

SEQ ID NO: 86106 - protein, 14 aa, Homo Sapiens
GVFPLRGKILNVRE

SEQ ID NO: 86107 - protein, 14 aa, Homo Sapiens
VFPLRGKILNVREA

SEQ ID NO: 86108 - protein, 14 aa, Homo Sapiens
FPLRGKILNVREAS

SEQ ID NO: 86109 - protein, 14 aa, Homo Sapiens
PLRGKILNVREASH

SEQ ID NO: 86110 - protein, 14 aa, Homo Sapiens
LRGKILNVREASHK

SEQ ID NO: 86111 - protein, 14 aa, Homo Sapiens
RGKILNVREASHKQ

SEQ ID NO: 86112 - protein, 14 aa, Homo Sapiens
GKILNVREASHKQI

SEQ ID NO: 86113 - protein, 14 aa, Homo Sapiens
KILNVREASHKQIM

SEQ ID NO: 86114 - protein, 14 aa, Homo Sapiens
ILNVREASHKQIME

SEQ ID NO: 86115 - protein, 14 aa, Homo Sapiens
LNVREASHKQIMEN

SEQ ID NO: 86116 - protein, 14 aa, Homo Sapiens
NVREASHKQIMENA

SEQ ID NO: 86117 - protein, 14 aa, Homo Sapiens
VREASHKQIMENAE

SEQ ID NO: 86118 - protein, 14 aa, Homo Sapiens
REASHKQIMENAEI

SEQ ID NO: 86119 - protein, 14 aa, Homo Sapiens
EASHKQIMENAEIN

SEQ ID NO: 86120 - protein, 14 aa, Homo Sapiens
ASHKQIMENAEINN

SEQ ID NO: 86121 - protein, 14 aa, Homo Sapiens
SHKQIMENAEINNI

SEQ ID NO: 86122 - protein, 14 aa, Homo Sapiens
HKQIMENAEINNII

SEQ ID NO: 86123 - protein, 14 aa, Homo Sapiens
KQIMENAEINNIIK

SEQ ID NO: 86124 - protein, 14 aa, Homo Sapiens
QIMENAEINNIIKI

SEQ ID NO: 86125 - protein, 14 aa, Homo Sapiens
IMENAEINNIIKIV

SEQ ID NO: 86126 - protein, 14 aa, Homo Sapiens
MENAEINNIIKIVG

SEQ ID NO: 86127 - protein, 14 aa, Homo Sapiens
ENAEINNIIKIVGL

SEQ ID NO: 86128 - protein, 14 aa, Homo Sapiens
NAEINNIIKIVGLQ

SEQ ID NO: 86129 - protein, 14 aa, Homo Sapiens
AEINNIIKIVGLQY

SEQ ID NO: 86130 - protein, 14 aa, Homo Sapiens
EINNIIKIVGLQYK

SEQ ID NO: 86131 - protein, 14 aa, Homo Sapiens
INNIIKIVGLQYKK

SEQ ID NO: 86132 - protein, 14 aa, Homo Sapiens
NNIIKIVGLQYKKN

SEQ ID NO: 86133 - protein, 14 aa, Homo Sapiens
NIIKIVGLQYKKNY

SEQ ID NO: 86134 - protein, 14 aa, Homo Sapiens
IIKIVGLQYKKNYE

SEQ ID NO: 86135 - protein, 14 aa, Homo Sapiens
IKIVGLQYKKNYED

SEQ ID NO: 86136 - protein, 14 aa, Homo Sapiens
KIVGLQYKKNYEDE

SEQ ID NO: 86137 - protein, 14 aa, Homo Sapiens
IVGLQYKKNYEDED

SEQ ID NO: 86138 - protein, 14 aa, Homo Sapiens
VGLQYKKNYEDEDS

SEQ ID NO: 86139 - protein, 14 aa, Homo Sapiens
GLQYKKNYEDEDSL

SEQ ID NO: 86140 - protein, 14 aa, Homo Sapiens
LQYKKNYEDEDSLK

SEQ ID NO: 86141 - protein, 14 aa, Homo Sapiens
QYKKNYEDEDSLKT

SEQ ID NO: 86142 - protein, 14 aa, Homo Sapiens
YKKNYEDEDSLKTL

SEQ ID NO: 86143 - protein, 14 aa, Homo Sapiens
KKNYEDEDSLKTLR

SEQ ID NO: 86144 - protein, 14 aa, Homo Sapiens
KNYEDEDSLKTLRY

SEQ ID NO: 86145 - protein, 14 aa, Homo Sapiens
NYEDEDSLKTLRYG

SEQ ID NO: 86146 - protein, 14 aa, Homo Sapiens
YEDEDSLKTLRYGK

SEQ ID NO: 86147 - protein, 14 aa, Homo Sapiens
EDEDSLKTLRYGKI

SEQ ID NO: 86148 - protein, 14 aa, Homo Sapiens
DEDSLKTLRYGKIM

SEQ ID NO: 86149 - protein, 14 aa, Homo Sapiens
EDSLKTLRYGKIMI

SEQ ID NO: 86150 - protein, 14 aa, Homo Sapiens
DSLKTLRYGKIMIM

SEQ ID NO: 86151 - protein, 14 aa, Homo Sapiens
SLKTLRYGKIMIMT

SEQ ID NO: 86152 - protein, 14 aa, Homo Sapiens
LKTLRYGKIMIMTD

SEQ ID NO: 86153 - protein, 14 aa, Homo Sapiens
KTLRYGKIMIMTDQ

SEQ ID NO: 86154 - protein, 14 aa, Homo Sapiens
TLRYGKIMIMTDQD

SEQ ID NO: 86155 - protein, 14 aa, Homo Sapiens
LRYGKIMIMTDQDQ

SEQ ID NO: 86156 - protein, 14 aa, Homo Sapiens
RYGKIMIMTDQDQD

SEQ ID NO: 86157 - protein, 14 aa, Homo Sapiens
YGKIMIMTDQDQDG

SEQ ID NO: 86158 - protein, 14 aa, Homo Sapiens
GKIMIMTDQDQDGS

SEQ ID NO: 86159 - protein, 14 aa, Homo Sapiens
KIMIMTDQDQDGSH

SEQ ID NO: 86160 - protein, 14 aa, Homo Sapiens
IMIMTDQDQDGSHI

SEQ ID NO: 86161 - protein, 14 aa, Homo Sapiens
MIMTDQDQDGSHIK

SEQ ID NO: 86162 - protein, 14 aa, Homo Sapiens
IMTDQDQDGSHIKG

SEQ ID NO: 86163 - protein, 14 aa, Homo Sapiens
MTDQDQDGSHIKGL

SEQ ID NO: 86164 - protein, 14 aa, Homo Sapiens
TDQDQDGSHIKGLL

SEQ ID NO: 86165 - protein, 14 aa, Homo Sapiens
DQDQDGSHIKGLLI

SEQ ID NO: 86166 - protein, 14 aa, Homo Sapiens
QDQDGSHIKGLLIN

SEQ ID NO: 86167 - protein, 14 aa, Homo Sapiens
DQDGSHIKGLLINF

SEQ ID NO: 86168 - protein, 14 aa, Homo Sapiens
QDGSHIKGLLINFI

SEQ ID NO: 86169 - protein, 14 aa, Homo Sapiens
DGSHIKGLLINFIH

SEQ ID NO: 86170 - protein, 14 aa, Homo Sapiens
GSHIKGLLINFIHH

SEQ ID NO: 86171 - protein, 14 aa, Homo Sapiens
SHIKGLLINFIHHN

SEQ ID NO: 86172 - protein, 14 aa, Homo Sapiens
HIKGLLINFIHHNW

SEQ ID NO: 86173 - protein, 14 aa, Homo Sapiens
IKGLLINFIHHNWP

SEQ ID NO: 86174 - protein, 14 aa, Homo Sapiens
KGLLINFIHHNWPS

SEQ ID NO: 86175 - protein, 14 aa, Homo Sapiens
GLLINFIHHNWPSL

SEQ ID NO: 86176 - protein, 14 aa, Homo Sapiens
LLINFIHHNWPSLL

SEQ ID NO: 86177 - protein, 14 aa, Homo Sapiens
LINFIHHNWPSLLR

SEQ ID NO: 86178 - protein, 14 aa, Homo Sapiens
INFIHHNWPSLLRH

SEQ ID NO: 86179 - protein, 14 aa, Homo Sapiens
NFIHHNWPSLLRHR

SEQ ID NO: 86180 - protein, 14 aa, Homo Sapiens
FIHHNWPSLLRHRF

SEQ ID NO: 86181 - protein, 14 aa, Homo Sapiens
IHHNWPSLLRHRFL

SEQ ID NO: 86182 - protein, 14 aa, Homo Sapiens
HHNWPSLLRHRFLE

SEQ ID NO: 86183 - protein, 14 aa, Homo Sapiens
HNWPSLLRHRFLEE

SEQ ID NO: 86184 - protein, 14 aa, Homo Sapiens
NWPSLLRHRFLEEF

SEQ ID NO: 86185 - protein, 14 aa, Homo Sapiens
WPSLLRHRFLEEFI

SEQ ID NO: 86186 - protein, 14 aa, Homo Sapiens
PSLLRHRFLEEFIT

SEQ ID NO: 86187 - protein, 14 aa, Homo Sapiens
SLLRHRFLEEFITP

SEQ ID NO: 86188 - protein, 14 aa, Homo Sapiens
LLRHRFLEEFITPI

SEQ ID NO: 86189 - protein, 14 aa, Homo Sapiens
LRHRFLEEFITPIV

SEQ ID NO: 86190 - protein, 14 aa, Homo Sapiens
RHRFLEEFITPIVK

SEQ ID NO: 86191 - protein, 14 aa, Homo Sapiens
HRFLEEFITPIVKV

SEQ ID NO: 86192 - protein, 14 aa, Homo Sapiens
RFLEEFITPIVKVS

SEQ ID NO: 86193 - protein, 14 aa, Homo Sapiens
FLEEFITPIVKVSK

SEQ ID NO: 86194 - protein, 14 aa, Homo Sapiens
LEEFITPIVKVSKN

SEQ ID NO: 86195 - protein, 14 aa, Homo Sapiens
EEFITPIVKVSKNK

SEQ ID NO: 86196 - protein, 14 aa, Homo Sapiens
EFITPIVKVSKNKQ

SEQ ID NO: 86197 - protein, 14 aa, Homo Sapiens
FITPIVKVSKNKQE

SEQ ID NO: 86198 - protein, 14 aa, Homo Sapiens
ITPIVKVSKNKQEM

SEQ ID NO: 86199 - protein, 14 aa, Homo Sapiens
TPIVKVSKNKQEMA

SEQ ID NO: 86200 - protein, 14 aa, Homo Sapiens
PIVKVSKNKQEMAF

SEQ ID NO: 86201 - protein, 14 aa, Homo Sapiens
IVKVSKNKQEMAFY

SEQ ID NO: 86202 - protein, 14 aa, Homo Sapiens
VKVSKNKQEMAFYS

SEQ ID NO: 86203 - protein, 14 aa, Homo Sapiens
KVSKNKQEMAFYSL

SEQ ID NO: 86204 - protein, 14 aa, Homo Sapiens
VSKNKQEMAFYSLP

SEQ ID NO: 86205 - protein, 14 aa, Homo Sapiens
SKNKQEMAFYSLPE

SEQ ID NO: 86206 - protein, 14 aa, Homo Sapiens
KNKQEMAFYSLPEF

SEQ ID NO: 86207 - protein, 14 aa, Homo Sapiens
NKQEMAFYSLPEFE

SEQ ID NO: 86208 - protein, 14 aa, Homo Sapiens
KQEMAFYSLPEFEE

SEQ ID NO: 86209 - protein, 14 aa, Homo Sapiens
QEMAFYSLPEFEEW

SEQ ID NO: 86210 - protein, 14 aa, Homo Sapiens
EMAFYSLPEFEEWK

SEQ ID NO: 86211 - protein, 14 aa, Homo Sapiens
MAFYSLPEFEEWKS

SEQ ID NO: 86212 - protein, 14 aa, Homo Sapiens
AFYSLPEFEEWKSS

SEQ ID NO: 86213 - protein, 14 aa, Homo Sapiens
FYSLPEFEEWKSST

SEQ ID NO: 86214 - protein, 14 aa, Homo Sapiens
YSLPEFEEWKSSTP

SEQ ID NO: 86215 - protein, 14 aa, Homo Sapiens
SLPEFEEWKSSTPN

SEQ ID NO: 86216 - protein, 14 aa, Homo Sapiens
LPEFEEWKSSTPNH

SEQ ID NO: 86217 - protein, 14 aa, Homo Sapiens
PEFEEWKSSTPNHK

SEQ ID NO: 86218 - protein, 14 aa, Homo Sapiens
EFEEWKSSTPNHKK

SEQ ID NO: 86219 - protein, 14 aa, Homo Sapiens
FEEWKSSTPNHKKW

SEQ ID NO: 86220 - protein, 14 aa, Homo Sapiens
EEWKSSTPNHKKWK

SEQ ID NO: 86221 - protein, 14 aa, Homo Sapiens
EWKSSTPNHKKWKV

SEQ ID NO: 86222 - protein, 14 aa, Homo Sapiens
WKSSTPNHKKWKVK

SEQ ID NO: 86223 - protein, 14 aa, Homo Sapiens
KSSTPNHKKWKVKY

SEQ ID NO: 86224 - protein, 14 aa, Homo Sapiens
SSTPNHKKWKVKYY

SEQ ID NO: 86225 - protein, 14 aa, Homo Sapiens
STPNHKKWKVKYYK

SEQ ID NO: 86226 - protein, 14 aa, Homo Sapiens
TPNHKKWKVKYYKG

SEQ ID NO: 86227 - protein, 14 aa, Homo Sapiens
PNHKKWKVKYYKGL

SEQ ID NO: 86228 - protein, 14 aa, Homo Sapiens
NHKKWKVKYYKGLG

SEQ ID NO: 86229 - protein, 14 aa, Homo Sapiens
HKKWKVKYYKGLGT

SEQ ID NO: 86230 - protein, 14 aa, Homo Sapiens
KKWKVKYYKGLGTS

SEQ ID NO: 86231 - protein, 14 aa, Homo Sapiens
KWKVKYYKGLGTST

SEQ ID NO: 86232 - protein, 14 aa, Homo Sapiens
WKVKYYKGLGTSTS

SEQ ID NO: 86233 - protein, 14 aa, Homo Sapiens
KVKYYKGLGTSTSK

SEQ ID NO: 86234 - protein, 14 aa, Homo Sapiens
VKYYKGLGTSTSKE

SEQ ID NO: 86235 - protein, 14 aa, Homo Sapiens
KYYKGLGTSTSKEA

SEQ ID NO: 86236 - protein, 14 aa, Homo Sapiens
YYKGLGTSTSKEAK

SEQ ID NO: 86237 - protein, 14 aa, Homo Sapiens
YKGLGTSTSKEAKE

SEQ ID NO: 86238 - protein, 14 aa, Homo Sapiens
KGLGTSTSKEAKEY

SEQ ID NO: 86239 - protein, 14 aa, Homo Sapiens
GLGTSTSKEAKEYF

SEQ ID NO: 86240 - protein, 14 aa, Homo Sapiens
LGTSTSKEAKEYFA

SEQ ID NO: 86241 - protein, 14 aa, Homo Sapiens
GTSTSKEAKEYFAD

SEQ ID NO: 86242 - protein, 14 aa, Homo Sapiens
TSTSKEAKEYFADM

SEQ ID NO: 86243 - protein, 14 aa, Homo Sapiens
STSKEAKEYFADMK

SEQ ID NO: 86244 - protein, 14 aa, Homo Sapiens
TSKEAKEYFADMKR

SEQ ID NO: 86245 - protein, 14 aa, Homo Sapiens
SKEAKEYFADMKRH

SEQ ID NO: 86246 - protein, 14 aa, Homo Sapiens
KEAKEYFADMKRHR

SEQ ID NO: 86247 - protein, 14 aa, Homo Sapiens
EAKEYFADMKRHRI

SEQ ID NO: 86248 - protein, 14 aa, Homo Sapiens
AKEYFADMKRHRIQ

SEQ ID NO: 86249 - protein, 14 aa, Homo Sapiens
KEYFADMKRHRIQF

SEQ ID NO: 86250 - protein, 14 aa, Homo Sapiens
EYFADMKRHRIQFK

SEQ ID NO: 86251 - protein, 14 aa, Homo Sapiens
YFADMKRHRIQFKY

SEQ ID NO: 86252 - protein, 14 aa, Homo Sapiens
FADMKRHRIQFKYS

SEQ ID NO: 86253 - protein, 14 aa, Homo Sapiens
ADMKRHRIQFKYSG

SEQ ID NO: 86254 - protein, 14 aa, Homo Sapiens
DMKRHRIQFKYSGP

SEQ ID NO: 86255 - protein, 14 aa, Homo Sapiens
MKRHRIQFKYSGPE

SEQ ID NO: 86256 - protein, 14 aa, Homo Sapiens
KRHRIQFKYSGPED

SEQ ID NO: 86257 - protein, 14 aa, Homo Sapiens
RHRIQFKYSGPEDD

SEQ ID NO: 86258 - protein, 14 aa, Homo Sapiens
HRIQFKYSGPEDDA

SEQ ID NO: 86259 - protein, 14 aa, Homo Sapiens
RIQFKYSGPEDDAA

SEQ ID NO: 86260 - protein, 14 aa, Homo Sapiens
IQFKYSGPEDDAAI

SEQ ID NO: 86261 - protein, 14 aa, Homo Sapiens
QFKYSGPEDDAAIS

SEQ ID NO: 86262 - protein, 14 aa, Homo Sapiens
FKYSGPEDDAAISL

SEQ ID NO: 86263 - protein, 14 aa, Homo Sapiens
KYSGPEDDAAISLA

SEQ ID NO: 86264 - protein, 14 aa, Homo Sapiens
YSGPEDDAAISLAF

SEQ ID NO: 86265 - protein, 14 aa, Homo Sapiens
SGPEDDAAISLAFS

SEQ ID NO: 86266 - protein, 14 aa, Homo Sapiens
GPEDDAAISLAFSK

SEQ ID NO: 86267 - protein, 14 aa, Homo Sapiens
PEDDAAISLAFSKK

SEQ ID NO: 86268 - protein, 14 aa, Homo Sapiens
EDDAAISLAFSKKQ

SEQ ID NO: 86269 - protein, 14 aa, Homo Sapiens
DDAAISLAFSKKQI

SEQ ID NO: 86270 - protein, 14 aa, Homo Sapiens
DAAISLAFSKKQID

SEQ ID NO: 86271 - protein, 14 aa, Homo Sapiens
AAISLAFSKKQIDD

SEQ ID NO: 86272 - protein, 14 aa, Homo Sapiens
AISLAFSKKQIDDR

SEQ ID NO: 86273 - protein, 14 aa, Homo Sapiens
ISLAFSKKQIDDRK

SEQ ID NO: 86274 - protein, 14 aa, Homo Sapiens
SLAFSKKQIDDRKE

SEQ ID NO: 86275 - protein, 14 aa, Homo Sapiens
LAFSKKQIDDRKEW

SEQ ID NO: 86276 - protein, 14 aa, Homo Sapiens
AFSKKQIDDRKEWL

SEQ ID NO: 86277 - protein, 14 aa, Homo Sapiens
FSKKQIDDRKEWLT

SEQ ID NO: 86278 - protein, 14 aa, Homo Sapiens
SKKQIDDRKEWLTN

SEQ ID NO: 86279 - protein, 14 aa, Homo Sapiens
KKQIDDRKEWLTNF

SEQ ID NO: 86280 - protein, 14 aa, Homo Sapiens
KQIDDRKEWLTNFM

SEQ ID NO: 86281 - protein, 14 aa, Homo Sapiens
QIDDRKEWLTNFME

SEQ ID NO: 86282 - protein, 14 aa, Homo Sapiens
IDDRKEWLTNFMED

SEQ ID NO: 86283 - protein, 14 aa, Homo Sapiens
DDRKEWLTNFMEDR

SEQ ID NO: 86284 - protein, 14 aa, Homo Sapiens
DRKEWLTNFMEDRR

SEQ ID NO: 86285 - protein, 14 aa, Homo Sapiens
RKEWLTNFMEDRRQ

SEQ ID NO: 86286 - protein, 14 aa, Homo Sapiens
KEWLTNFMEDRRQR

SEQ ID NO: 86287 - protein, 14 aa, Homo Sapiens
EWLTNFMEDRRQRK

SEQ ID NO: 86288 - protein, 14 aa, Homo Sapiens
WLTNFMEDRRQRKL

SEQ ID NO: 86289 - protein, 14 aa, Homo Sapiens
LTNFMEDRRQRKLL

SEQ ID NO: 86290 - protein, 14 aa, Homo Sapiens
TNFMEDRRQRKLLG

SEQ ID NO: 86291 - protein, 14 aa, Homo Sapiens
NFMEDRRQRKLLGL

SEQ ID NO: 86292 - protein, 14 aa, Homo Sapiens
FMEDRRQRKLLGLP

SEQ ID NO: 86293 - protein, 14 aa, Homo Sapiens
MEDRRQRKLLGLPE

SEQ ID NO: 86294 - protein, 14 aa, Homo Sapiens
EDRRQRKLLGLPED

SEQ ID NO: 86295 - protein, 14 aa, Homo Sapiens
DRRQRKLLGLPEDY

SEQ ID NO: 86296 - protein, 14 aa, Homo Sapiens
RRQRKLLGLPEDYL

SEQ ID NO: 86297 - protein, 14 aa, Homo Sapiens
RQRKLLGLPEDYLY

SEQ ID NO: 86298 - protein, 14 aa, Homo Sapiens
QRKLLGLPEDYLYG

SEQ ID NO: 86299 - protein, 14 aa, Homo Sapiens
RKLLGLPEDYLYGQ

SEQ ID NO: 86300 - protein, 14 aa, Homo Sapiens
KLLGLPEDYLYGQT

SEQ ID NO: 86301 - protein, 14 aa, Homo Sapiens
LLGLPEDYLYGQTT

SEQ ID NO: 86302 - protein, 14 aa, Homo Sapiens
LGLPEDYLYGQTTT

SEQ ID NO: 86303 - protein, 14 aa, Homo Sapiens
GLPEDYLYGQTTTY

SEQ ID NO: 86304 - protein, 14 aa, Homo Sapiens
LPEDYLYGQTTTYL

SEQ ID NO: 86305 - protein, 14 aa, Homo Sapiens
PEDYLYGQTTTYLT

SEQ ID NO: 86306 - protein, 14 aa, Homo Sapiens
EDYLYGQTTTYLTY

SEQ ID NO: 86307 - protein, 14 aa, Homo Sapiens
DYLYGQTTTYLTYN

SEQ ID NO: 86308 - protein, 14 aa, Homo Sapiens
YLYGQTTTYLTYND

SEQ ID NO: 86309 - protein, 14 aa, Homo Sapiens
LYGQTTTYLTYNDF

SEQ ID NO: 86310 - protein, 14 aa, Homo Sapiens
YGQTTTYLTYNDFI

SEQ ID NO: 86311 - protein, 14 aa, Homo Sapiens
GQTTTYLTYNDFIN

SEQ ID NO: 86312 - protein, 14 aa, Homo Sapiens
QTTTYLTYNDFINK

SEQ ID NO: 86313 - protein, 14 aa, Homo Sapiens
TTTYLTYNDFINKE

SEQ ID NO: 86314 - protein, 14 aa, Homo Sapiens
TTYLTYNDFINKEL

SEQ ID NO: 86315 - protein, 14 aa, Homo Sapiens
TYLTYNDFINKELI

SEQ ID NO: 86316 - protein, 14 aa, Homo Sapiens
YLTYNDFINKELIL

SEQ ID NO: 86317 - protein, 14 aa, Homo Sapiens
LTYNDFINKELILF

SEQ ID NO: 86318 - protein, 14 aa, Homo Sapiens
TYNDFINKELILFS

SEQ ID NO: 86319 - protein, 14 aa, Homo Sapiens
YNDFINKELILFSN

SEQ ID NO: 86320 - protein, 14 aa, Homo Sapiens
NDFINKELILFSNS

SEQ ID NO: 86321 - protein, 14 aa, Homo Sapiens
DFINKELILFSNSD

SEQ ID NO: 86322 - protein, 14 aa, Homo Sapiens
FINKELILFSNSDN

SEQ ID NO: 86323 - protein, 14 aa, Homo Sapiens
INKELILFSNSDNE

SEQ ID NO: 86324 - protein, 14 aa, Homo Sapiens
NKELILFSNSDNER

SEQ ID NO: 86325 - protein, 14 aa, Homo Sapiens
KELILFSNSDNERS

SEQ ID NO: 86326 - protein, 14 aa, Homo Sapiens
ELILFSNSDNERSI

SEQ ID NO: 86327 - protein, 14 aa, Homo Sapiens
LILFSNSDNERSIP

SEQ ID NO: 86328 - protein, 14 aa, Homo Sapiens
ILFSNSDNERSIPS

SEQ ID NO: 86329 - protein, 14 aa, Homo Sapiens
LFSNSDNERSIPSM

SEQ ID NO: 86330 - protein, 14 aa, Homo Sapiens
FSNSDNERSIPSMV

SEQ ID NO: 86331 - protein, 14 aa, Homo Sapiens
SNSDNERSIPSMVD

SEQ ID NO: 86332 - protein, 14 aa, Homo Sapiens
NSDNERSIPSMVDG

SEQ ID NO: 86333 - protein, 14 aa, Homo Sapiens
SDNERSIPSMVDGL

SEQ ID NO: 86334 - protein, 14 aa, Homo Sapiens
DNERSIPSMVDGLK

SEQ ID NO: 86335 - protein, 14 aa, Homo Sapiens
NERSIPSMVDGLKP

SEQ ID NO: 86336 - protein, 14 aa, Homo Sapiens
ERSIPSMVDGLKPG

SEQ ID NO: 86337 - protein, 14 aa, Homo Sapiens
RSIPSMVDGLKPGQ

SEQ ID NO: 86338 - protein, 14 aa, Homo Sapiens
SIPSMVDGLKPGQR

SEQ ID NO: 86339 - protein, 14 aa, Homo Sapiens
IPSMVDGLKPGQRK

SEQ ID NO: 86340 - protein, 14 aa, Homo Sapiens
PSMVDGLKPGQRKV

SEQ ID NO: 86341 - protein, 14 aa, Homo Sapiens
SMVDGLKPGQRKVL

SEQ ID NO: 86342 - protein, 14 aa, Homo Sapiens
MVDGLKPGQRKVLF

SEQ ID NO: 86343 - protein, 14 aa, Homo Sapiens
VDGLKPGQRKVLFT

SEQ ID NO: 86344 - protein, 14 aa, Homo Sapiens
DGLKPGQRKVLFTC

SEQ ID NO: 86345 - protein, 14 aa, Homo Sapiens
GLKPGQRKVLFTCF

SEQ ID NO: 86346 - protein, 14 aa, Homo Sapiens
LKPGQRKVLFTCFK

SEQ ID NO: 86347 - protein, 14 aa, Homo Sapiens
KPGQRKVLFTCFKR

SEQ ID NO: 86348 - protein, 14 aa, Homo Sapiens
PGQRKVLFTCFKRN

SEQ ID NO: 86349 - protein, 14 aa, Homo Sapiens
GQRKVLFTCFKRND

SEQ ID NO: 86350 - protein, 14 aa, Homo Sapiens
QRKVLFTCFKRNDK

SEQ ID NO: 86351 - protein, 14 aa, Homo Sapiens
RKVLFTCFKRNDKR

SEQ ID NO: 86352 - protein, 14 aa, Homo Sapiens
KVLFTCFKRNDKRE

SEQ ID NO: 86353 - protein, 14 aa, Homo Sapiens
VLFTCFKRNDKREV

SEQ ID NO: 86354 - protein, 14 aa, Homo Sapiens
LFTCFKRNDKREVK

SEQ ID NO: 86355 - protein, 14 aa, Homo Sapiens
FTCFKRNDKREVKV

SEQ ID NO: 86356 - protein, 14 aa, Homo Sapiens
TCFKRNDKREVKVA

SEQ ID NO: 86357 - protein, 14 aa, Homo Sapiens
CFKRNDKREVKVAQ

SEQ ID NO: 86358 - protein, 14 aa, Homo Sapiens
FKRNDKREVKVAQL

SEQ ID NO: 86359 - protein, 14 aa, Homo Sapiens
KRNDKREVKVAQLA

SEQ ID NO: 86360 - protein, 14 aa, Homo Sapiens
RNDKREVKVAQLAG

SEQ ID NO: 86361 - protein, 14 aa, Homo Sapiens
NDKREVKVAQLAGS

SEQ ID NO: 86362 - protein, 14 aa, Homo Sapiens
DKREVKVAQLAGSV

SEQ ID NO: 86363 - protein, 14 aa, Homo Sapiens
KREVKVAQLAGSVA

SEQ ID NO: 86364 - protein, 14 aa, Homo Sapiens
REVKVAQLAGSVAE

SEQ ID NO: 86365 - protein, 14 aa, Homo Sapiens
EVKVAQLAGSVAEM

SEQ ID NO: 86366 - protein, 14 aa, Homo Sapiens
VKVAQLAGSVAEMS

SEQ ID NO: 86367 - protein, 14 aa, Homo Sapiens
KVAQLAGSVAEMSS

SEQ ID NO: 86368 - protein, 14 aa, Homo Sapiens
VAQLAGSVAEMSSY

SEQ ID NO: 86369 - protein, 14 aa, Homo Sapiens
AQLAGSVAEMSSYH

SEQ ID NO: 86370 - protein, 14 aa, Homo Sapiens
QLAGSVAEMSSYHH

SEQ ID NO: 86371 - protein, 14 aa, Homo Sapiens
LAGSVAEMSSYHHG

SEQ ID NO: 86372 - protein, 14 aa, Homo Sapiens
AGSVAEMSSYHHGE

SEQ ID NO: 86373 - protein, 14 aa, Homo Sapiens
GSVAEMSSYHHGEM

SEQ ID NO: 86374 - protein, 14 aa, Homo Sapiens
SVAEMSSYHHGEMS

SEQ ID NO: 86375 - protein, 14 aa, Homo Sapiens
VAEMSSYHHGEMSL

SEQ ID NO: 86376 - protein, 14 aa, Homo Sapiens
AEMSSYHHGEMSLM

SEQ ID NO: 86377 - protein, 14 aa, Homo Sapiens
EMSSYHHGEMSLMM

SEQ ID NO: 86378 - protein, 14 aa, Homo Sapiens
MSSYHHGEMSLMMT

SEQ ID NO: 86379 - protein, 14 aa, Homo Sapiens
SSYHHGEMSLMMTI

SEQ ID NO: 86380 - protein, 14 aa, Homo Sapiens
SYHHGEMSLMMTII

SEQ ID NO: 86381 - protein, 14 aa, Homo Sapiens
YHHGEMSLMMTIIN

SEQ ID NO: 86382 - protein, 14 aa, Homo Sapiens
HHGEMSLMMTIINL

SEQ ID NO: 86383 - protein, 14 aa, Homo Sapiens
HGEMSLMMTIINLA

SEQ ID NO: 86384 - protein, 14 aa, Homo Sapiens
GEMSLMMTIINLAQ

SEQ ID NO: 86385 - protein, 14 aa, Homo Sapiens
EMSLMMTIINLAQN

SEQ ID NO: 86386 - protein, 14 aa, Homo Sapiens
MSLMMTIINLAQNF

SEQ ID NO: 86387 - protein, 14 aa, Homo Sapiens
SLMMTIINLAQNFV

SEQ ID NO: 86388 - protein, 14 aa, Homo Sapiens
LMMTIINLAQNFVG

SEQ ID NO: 86389 - protein, 14 aa, Homo Sapiens
MMTIINLAQNFVGS

SEQ ID NO: 86390 - protein, 14 aa, Homo Sapiens
MTIINLAQNFVGSN

SEQ ID NO: 86391 - protein, 14 aa, Homo Sapiens
TIINLAQNFVGSNN

SEQ ID NO: 86392 - protein, 14 aa, Homo Sapiens
IINLAQNFVGSNNL

SEQ ID NO: 86393 - protein, 14 aa, Homo Sapiens
INLAQNFVGSNNLN

SEQ ID NO: 86394 - protein, 14 aa, Homo Sapiens
NLAQNFVGSNNLNL

SEQ ID NO: 86395 - protein, 14 aa, Homo Sapiens
LAQNFVGSNNLNLL

SEQ ID NO: 86396 - protein, 14 aa, Homo Sapiens
AQNFVGSNNLNLLQ

SEQ ID NO: 86397 - protein, 14 aa, Homo Sapiens
QNFVGSNNLNLLQP

SEQ ID NO: 86398 - protein, 14 aa, Homo Sapiens
NFVGSNNLNLLQPI

SEQ ID NO: 86399 - protein, 14 aa, Homo Sapiens
FVGSNNLNLLQPIG

SEQ ID NO: 86400 - protein, 14 aa, Homo Sapiens
VGSNNLNLLQPIGQ

SEQ ID NO: 86401 - protein, 14 aa, Homo Sapiens
GSNNLNLLQPIGQF

SEQ ID NO: 86402 - protein, 14 aa, Homo Sapiens
SNNLNLLQPIGQFG

SEQ ID NO: 86403 - protein, 14 aa, Homo Sapiens
NNLNLLQPIGQFGT

SEQ ID NO: 86404 - protein, 14 aa, Homo Sapiens
NLNLLQPIGQFGTR

SEQ ID NO: 86405 - protein, 14 aa, Homo Sapiens
LNLLQPIGQFGTRL

SEQ ID NO: 86406 - protein, 14 aa, Homo Sapiens
NLLQPIGQFGTRLH

SEQ ID NO: 86407 - protein, 14 aa, Homo Sapiens
LLQPIGQFGTRLHG

SEQ ID NO: 86408 - protein, 14 aa, Homo Sapiens
LQPIGQFGTRLHGG

SEQ ID NO: 86409 - protein, 14 aa, Homo Sapiens
QPIGQFGTRLHGGK

SEQ ID NO: 86410 - protein, 14 aa, Homo Sapiens
PIGQFGTRLHGGKD

SEQ ID NO: 86411 - protein, 14 aa, Homo Sapiens
IGQFGTRLHGGKDS

SEQ ID NO: 86412 - protein, 14 aa, Homo Sapiens
GQFGTRLHGGKDSA

SEQ ID NO: 86413 - protein, 14 aa, Homo Sapiens
QFGTRLHGGKDSAS

SEQ ID NO: 86414 - protein, 14 aa, Homo Sapiens
FGTRLHGGKDSASP

SEQ ID NO: 86415 - protein, 14 aa, Homo Sapiens
GTRLHGGKDSASPR

SEQ ID NO: 86416 - protein, 14 aa, Homo Sapiens
TRLHGGKDSASPRY

SEQ ID NO: 86417 - protein, 14 aa, Homo Sapiens
RLHGGKDSASPRYI

SEQ ID NO: 86418 - protein, 14 aa, Homo Sapiens
LHGGKDSASPRYIF

SEQ ID NO: 86419 - protein, 14 aa, Homo Sapiens
HGGKDSASPRYIFT

SEQ ID NO: 86420 - protein, 14 aa, Homo Sapiens
GGKDSASPRYIFTM

SEQ ID NO: 86421 - protein, 14 aa, Homo Sapiens
GKDSASPRYIFTML

SEQ ID NO: 86422 - protein, 14 aa, Homo Sapiens
KDSASPRYIFTMLS

SEQ ID NO: 86423 - protein, 14 aa, Homo Sapiens
DSASPRYIFTMLSS

SEQ ID NO: 86424 - protein, 14 aa, Homo Sapiens
SASPRYIFTMLSSL

SEQ ID NO: 86425 - protein, 14 aa, Homo Sapiens
ASPRYIFTMLSSLA

SEQ ID NO: 86426 - protein, 14 aa, Homo Sapiens
SPRYIFTMLSSLAR

SEQ ID NO: 86427 - protein, 14 aa, Homo Sapiens
PRYIFTMLSSLARL

SEQ ID NO: 86428 - protein, 14 aa, Homo Sapiens
RYIFTMLSSLARLL

SEQ ID NO: 86429 - protein, 14 aa, Homo Sapiens
YIFTMLSSLARLLF

SEQ ID NO: 86430 - protein, 14 aa, Homo Sapiens
IFTMLSSLARLLFP

SEQ ID NO: 86431 - protein, 14 aa, Homo Sapiens
FTMLSSLARLLFPP

SEQ ID NO: 86432 - protein, 14 aa, Homo Sapiens
TMLSSLARLLFPPK

SEQ ID NO: 86433 - protein, 14 aa, Homo Sapiens
MLSSLARLLFPPKD

SEQ ID NO: 86434 - protein, 14 aa, Homo Sapiens
LSSLARLLFPPKDD

SEQ ID NO: 86435 - protein, 14 aa, Homo Sapiens
SSLARLLFPPKDDH

SEQ ID NO: 86436 - protein, 14 aa, Homo Sapiens
SLARLLFPPKDDHT

SEQ ID NO: 86437 - protein, 14 aa, Homo Sapiens
LARLLFPPKDDHTL

SEQ ID NO: 86438 - protein, 14 aa, Homo Sapiens
ARLLFPPKDDHTLK

SEQ ID NO: 86439 - protein, 14 aa, Homo Sapiens
RLLFPPKDDHTLKF

SEQ ID NO: 86440 - protein, 14 aa, Homo Sapiens
LLFPPKDDHTLKFL

SEQ ID NO: 86441 - protein, 14 aa, Homo Sapiens
LFPPKDDHTLKFLY

SEQ ID NO: 86442 - protein, 14 aa, Homo Sapiens
FPPKDDHTLKFLYD

SEQ ID NO: 86443 - protein, 14 aa, Homo Sapiens
PPKDDHTLKFLYDD

SEQ ID NO: 86444 - protein, 14 aa, Homo Sapiens
PKDDHTLKFLYDDN

SEQ ID NO: 86445 - protein, 14 aa, Homo Sapiens
KDDHTLKFLYDDNQ

SEQ ID NO: 86446 - protein, 14 aa, Homo Sapiens
DDHTLKFLYDDNQR

SEQ ID NO: 86447 - protein, 14 aa, Homo Sapiens
DHTLKFLYDDNQRV

SEQ ID NO: 86448 - protein, 14 aa, Homo Sapiens
HTLKFLYDDNQRVE

SEQ ID NO: 86449 - protein, 14 aa, Homo Sapiens
TLKFLYDDNQRVEP

SEQ ID NO: 86450 - protein, 14 aa, Homo Sapiens
LKFLYDDNQRVEPE

SEQ ID NO: 86451 - protein, 14 aa, Homo Sapiens
KFLYDDNQRVEPEW

SEQ ID NO: 86452 - protein, 14 aa, Homo Sapiens
FLYDDNQRVEPEWY

SEQ ID NO: 86453 - protein, 14 aa, Homo Sapiens
LYDDNQRVEPEWYI

SEQ ID NO: 86454 - protein, 14 aa, Homo Sapiens
YDDNQRVEPEWYIP

SEQ ID NO: 86455 - protein, 14 aa, Homo Sapiens
DDNQRVEPEWYIPI

SEQ ID NO: 86456 - protein, 14 aa, Homo Sapiens
DNQRVEPEWYIPII

SEQ ID NO: 86457 - protein, 14 aa, Homo Sapiens
NQRVEPEWYIPIIP

SEQ ID NO: 86458 - protein, 14 aa, Homo Sapiens
QRVEPEWYIPIIPM

SEQ ID NO: 86459 - protein, 14 aa, Homo Sapiens
RVEPEWYIPIIPMV

SEQ ID NO: 86460 - protein, 14 aa, Homo Sapiens
VEPEWYIPIIPMVL

SEQ ID NO: 86461 - protein, 14 aa, Homo Sapiens
EPEWYIPIIPMVLI

SEQ ID NO: 86462 - protein, 14 aa, Homo Sapiens
PEWYIPIIPMVLIN

SEQ ID NO: 86463 - protein, 14 aa, Homo Sapiens
EWYIPIIPMVLING

SEQ ID NO: 86464 - protein, 14 aa, Homo Sapiens
WYIPIIPMVLINGA

SEQ ID NO: 86465 - protein, 14 aa, Homo Sapiens
YIPIIPMVLINGAE

SEQ ID NO: 86466 - protein, 14 aa, Homo Sapiens
IPIIPMVLINGAEG

SEQ ID NO: 86467 - protein, 14 aa, Homo Sapiens
PIIPMVLINGAEGI

SEQ ID NO: 86468 - protein, 14 aa, Homo Sapiens
IIPMVLINGAEGIG

SEQ ID NO: 86469 - protein, 14 aa, Homo Sapiens
IPMVLINGAEGIGT

SEQ ID NO: 86470 - protein, 14 aa, Homo Sapiens
PMVLINGAEGIGTG

SEQ ID NO: 86471 - protein, 14 aa, Homo Sapiens
MVLINGAEGIGTGW

SEQ ID NO: 86472 - protein, 14 aa, Homo Sapiens
VLINGAEGIGTGWS

SEQ ID NO: 86473 - protein, 14 aa, Homo Sapiens
LINGAEGIGTGWSC

SEQ ID NO: 86474 - protein, 14 aa, Homo Sapiens
INGAEGIGTGWSCK

SEQ ID NO: 86475 - protein, 14 aa, Homo Sapiens
NGAEGIGTGWSCKI

SEQ ID NO: 86476 - protein, 14 aa, Homo Sapiens
GAEGIGTGWSCKIP

SEQ ID NO: 86477 - protein, 14 aa, Homo Sapiens
AEGIGTGWSCKIPN

SEQ ID NO: 86478 - protein, 14 aa, Homo Sapiens
EGIGTGWSCKIPNF

SEQ ID NO: 86479 - protein, 14 aa, Homo Sapiens
GIGTGWSCKIPNFD

SEQ ID NO: 86480 - protein, 14 aa, Homo Sapiens
IGTGWSCKIPNFDV

SEQ ID NO: 86481 - protein, 14 aa, Homo Sapiens
GTGWSCKIPNFDVR

SEQ ID NO: 86482 - protein, 14 aa, Homo Sapiens
TGWSCKIPNFDVRE

SEQ ID NO: 86483 - protein, 14 aa, Homo Sapiens
GWSCKIPNFDVREI

SEQ ID NO: 86484 - protein, 14 aa, Homo Sapiens
WSCKIPNFDVREIV

SEQ ID NO: 86485 - protein, 14 aa, Homo Sapiens
SCKIPNFDVREIVN

SEQ ID NO: 86486 - protein, 14 aa, Homo Sapiens
CKIPNFDVREIVNN

SEQ ID NO: 86487 - protein, 14 aa, Homo Sapiens
KIPNFDVREIVNNI

SEQ ID NO: 86488 - protein, 14 aa, Homo Sapiens
IPNFDVREIVNNIR

SEQ ID NO: 86489 - protein, 14 aa, Homo Sapiens
PNFDVREIVNNIRR

SEQ ID NO: 86490 - protein, 14 aa, Homo Sapiens
NFDVREIVNNIRRL

SEQ ID NO: 86491 - protein, 14 aa, Homo Sapiens
FDVREIVNNIRRLM

SEQ ID NO: 86492 - protein, 14 aa, Homo Sapiens
DVREIVNNIRRLMD

SEQ ID NO: 86493 - protein, 14 aa, Homo Sapiens
VREIVNNIRRLMDG

SEQ ID NO: 86494 - protein, 14 aa, Homo Sapiens
REIVNNIRRLMDGE

SEQ ID NO: 86495 - protein, 14 aa, Homo Sapiens
EIVNNIRRLMDGEE

SEQ ID NO: 86496 - protein, 14 aa, Homo Sapiens
IVNNIRRLMDGEEP

SEQ ID NO: 86497 - protein, 14 aa, Homo Sapiens
VNNIRRLMDGEEPL

SEQ ID NO: 86498 - protein, 14 aa, Homo Sapiens
NNIRRLMDGEEPLP

SEQ ID NO: 86499 - protein, 14 aa, Homo Sapiens
NIRRLMDGEEPLPM

SEQ ID NO: 86500 - protein, 14 aa, Homo Sapiens
IRRLMDGEEPLPML

SEQ ID NO: 86501 - protein, 14 aa, Homo Sapiens
RRLMDGEEPLPMLP

SEQ ID NO: 86502 - protein, 14 aa, Homo Sapiens
RLMDGEEPLPMLPS

SEQ ID NO: 86503 - protein, 14 aa, Homo Sapiens
LMDGEEPLPMLPSY

SEQ ID NO: 86504 - protein, 14 aa, Homo Sapiens
MDGEEPLPMLPSYK

SEQ ID NO: 86505 - protein, 14 aa, Homo Sapiens
DGEEPLPMLPSYKN

SEQ ID NO: 86506 - protein, 14 aa, Homo Sapiens
GEEPLPMLPSYKNF

SEQ ID NO: 86507 - protein, 14 aa, Homo Sapiens
EEPLPMLPSYKNFK

SEQ ID NO: 86508 - protein, 14 aa, Homo Sapiens
EPLPMLPSYKNFKG

SEQ ID NO: 86509 - protein, 14 aa, Homo Sapiens
PLPMLPSYKNFKGT

SEQ ID NO: 86510 - protein, 14 aa, Homo Sapiens
LPMLPSYKNFKGTI

SEQ ID NO: 86511 - protein, 14 aa, Homo Sapiens
PMLPSYKNFKGTIE

SEQ ID NO: 86512 - protein, 14 aa, Homo Sapiens
MLPSYKNFKGTIEE

SEQ ID NO: 86513 - protein, 14 aa, Homo Sapiens
LPSYKNFKGTIEEL

SEQ ID NO: 86514 - protein, 14 aa, Homo Sapiens
PSYKNFKGTIEELA

SEQ ID NO: 86515 - protein, 14 aa, Homo Sapiens
SYKNFKGTIEELAP

SEQ ID NO: 86516 - protein, 14 aa, Homo Sapiens
YKNFKGTIEELAPN

SEQ ID NO: 86517 - protein, 14 aa, Homo Sapiens
KNFKGTIEELAPNQ

SEQ ID NO: 86518 - protein, 14 aa, Homo Sapiens
NFKGTIEELAPNQY

SEQ ID NO: 86519 - protein, 14 aa, Homo Sapiens
FKGTIEELAPNQYV

SEQ ID NO: 86520 - protein, 14 aa, Homo Sapiens
KGTIEELAPNQYVI

SEQ ID NO: 86521 - protein, 14 aa, Homo Sapiens
GTIEELAPNQYVIS

SEQ ID NO: 86522 - protein, 14 aa, Homo Sapiens
TIEELAPNQYVISG

SEQ ID NO: 86523 - protein, 14 aa, Homo Sapiens
IEELAPNQYVISGE

SEQ ID NO: 86524 - protein, 14 aa, Homo Sapiens
EELAPNQYVISGEV

SEQ ID NO: 86525 - protein, 14 aa, Homo Sapiens
ELAPNQYVISGEVA

SEQ ID NO: 86526 - protein, 14 aa, Homo Sapiens
LAPNQYVISGEVAI

SEQ ID NO: 86527 - protein, 14 aa, Homo Sapiens
APNQYVISGEVAIL

SEQ ID NO: 86528 - protein, 14 aa, Homo Sapiens
PNQYVISGEVAILN

SEQ ID NO: 86529 - protein, 14 aa, Homo Sapiens
NQYVISGEVAILNS

SEQ ID NO: 86530 - protein, 14 aa, Homo Sapiens
QYVISGEVAILNST

SEQ ID NO: 86531 - protein, 14 aa, Homo Sapiens
YVISGEVAILNSTT

SEQ ID NO: 86532 - protein, 14 aa, Homo Sapiens
VISGEVAILNSTTI

SEQ ID NO: 86533 - protein, 14 aa, Homo Sapiens
ISGEVAILNSTTIE

SEQ ID NO: 86534 - protein, 14 aa, Homo Sapiens
SGEVAILNSTTIEI

SEQ ID NO: 86535 - protein, 14 aa, Homo Sapiens
GEVAILNSTTIEIS

SEQ ID NO: 86536 - protein, 14 aa, Homo Sapiens
EVAILNSTTIEISE

SEQ ID NO: 86537 - protein, 14 aa, Homo Sapiens
VAILNSTTIEISEL

SEQ ID NO: 86538 - protein, 14 aa, Homo Sapiens
AILNSTTIEISELP

SEQ ID NO: 86539 - protein, 14 aa, Homo Sapiens
ILNSTTIEISELPV

SEQ ID NO: 86540 - protein, 14 aa, Homo Sapiens
LNSTTIEISELPVR

SEQ ID NO: 86541 - protein, 14 aa, Homo Sapiens
NSTTIEISELPVRT

SEQ ID NO: 86542 - protein, 14 aa, Homo Sapiens
STTIEISELPVRTW

SEQ ID NO: 86543 - protein, 14 aa, Homo Sapiens
TTIEISELPVRTWT

SEQ ID NO: 86544 - protein, 14 aa, Homo Sapiens
TIEISELPVRTWTQ

SEQ ID NO: 86545 - protein, 14 aa, Homo Sapiens
IEISELPVRTWTQT

SEQ ID NO: 86546 - protein, 14 aa, Homo Sapiens
EISELPVRTWTQTY

SEQ ID NO: 86547 - protein, 14 aa, Homo Sapiens
ISELPVRTWTQTYK

SEQ ID NO: 86548 - protein, 14 aa, Homo Sapiens
SELPVRTWTQTYKE

SEQ ID NO: 86549 - protein, 14 aa, Homo Sapiens
ELPVRTWTQTYKEQ

SEQ ID NO: 86550 - protein, 14 aa, Homo Sapiens
LPVRTWTQTYKEQV

SEQ ID NO: 86551 - protein, 14 aa, Homo Sapiens
PVRTWTQTYKEQVL

SEQ ID NO: 86552 - protein, 14 aa, Homo Sapiens
VRTWTQTYKEQVLE

SEQ ID NO: 86553 - protein, 14 aa, Homo Sapiens
RTWTQTYKEQVLEP

SEQ ID NO: 86554 - protein, 14 aa, Homo Sapiens
TWTQTYKEQVLEPM

SEQ ID NO: 86555 - protein, 14 aa, Homo Sapiens
WTQTYKEQVLEPML

SEQ ID NO: 86556 - protein, 14 aa, Homo Sapiens
TQTYKEQVLEPMLN

SEQ ID NO: 86557 - protein, 14 aa, Homo Sapiens
QTYKEQVLEPMLNG

SEQ ID NO: 86558 - protein, 14 aa, Homo Sapiens
TYKEQVLEPMLNGT

SEQ ID NO: 86559 - protein, 14 aa, Homo Sapiens
YKEQVLEPMLNGTE

SEQ ID NO: 86560 - protein, 14 aa, Homo Sapiens
KEQVLEPMLNGTEK

SEQ ID NO: 86561 - protein, 14 aa, Homo Sapiens
EQVLEPMLNGTEKT

SEQ ID NO: 86562 - protein, 14 aa, Homo Sapiens
QVLEPMLNGTEKTP

SEQ ID NO: 86563 - protein, 14 aa, Homo Sapiens
VLEPMLNGTEKTPP

SEQ ID NO: 86564 - protein, 14 aa, Homo Sapiens
LEPMLNGTEKTPPL

SEQ ID NO: 86565 - protein, 14 aa, Homo Sapiens
EPMLNGTEKTPPLI

SEQ ID NO: 86566 - protein, 14 aa, Homo Sapiens
PMLNGTEKTPPLIT

SEQ ID NO: 86567 - protein, 14 aa, Homo Sapiens
MLNGTEKTPPLITD

SEQ ID NO: 86568 - protein, 14 aa, Homo Sapiens
LNGTEKTPPLITDY

SEQ ID NO: 86569 - protein, 14 aa, Homo Sapiens
NGTEKTPPLITDYR

SEQ ID NO: 86570 - protein, 14 aa, Homo Sapiens
GTEKTPPLITDYRE

SEQ ID NO: 86571 - protein, 14 aa, Homo Sapiens
TEKTPPLITDYREY

SEQ ID NO: 86572 - protein, 14 aa, Homo Sapiens
EKTPPLITDYREYH

SEQ ID NO: 86573 - protein, 14 aa, Homo Sapiens
KTPPLITDYREYHT

SEQ ID NO: 86574 - protein, 14 aa, Homo Sapiens
TPPLITDYREYHTD

SEQ ID NO: 86575 - protein, 14 aa, Homo Sapiens
PPLITDYREYHTDT

SEQ ID NO: 86576 - protein, 14 aa, Homo Sapiens
PLITDYREYHTDTT

SEQ ID NO: 86577 - protein, 14 aa, Homo Sapiens
LITDYREYHTDTTV

SEQ ID NO: 86578 - protein, 14 aa, Homo Sapiens
ITDYREYHTDTTVK

SEQ ID NO: 86579 - protein, 14 aa, Homo Sapiens
TDYREYHTDTTVKF

SEQ ID NO: 86580 - protein, 14 aa, Homo Sapiens
DYREYHTDTTVKFV

SEQ ID NO: 86581 - protein, 14 aa, Homo Sapiens
YREYHTDTTVKFVV

SEQ ID NO: 86582 - protein, 14 aa, Homo Sapiens
REYHTDTTVKFVVK

SEQ ID NO: 86583 - protein, 14 aa, Homo Sapiens
EYHTDTTVKFVVKM

SEQ ID NO: 86584 - protein, 14 aa, Homo Sapiens
YHTDTTVKFVVKMT

SEQ ID NO: 86585 - protein, 14 aa, Homo Sapiens
HTDTTVKFVVKMTE

SEQ ID NO: 86586 - protein, 14 aa, Homo Sapiens
TDTTVKFVVKMTEE

SEQ ID NO: 86587 - protein, 14 aa, Homo Sapiens
DTTVKFVVKMTEEK

SEQ ID NO: 86588 - protein, 14 aa, Homo Sapiens
TTVKFVVKMTEEKL

SEQ ID NO: 86589 - protein, 14 aa, Homo Sapiens
TVKFVVKMTEEKLA

SEQ ID NO: 86590 - protein, 14 aa, Homo Sapiens
VKFVVKMTEEKLAE

SEQ ID NO: 86591 - protein, 14 aa, Homo Sapiens
KFVVKMTEEKLAEA

SEQ ID NO: 86592 - protein, 14 aa, Homo Sapiens
FVVKMTEEKLAEAE

SEQ ID NO: 86593 - protein, 14 aa, Homo Sapiens
VVKMTEEKLAEAER

SEQ ID NO: 86594 - protein, 14 aa, Homo Sapiens
VKMTEEKLAEAERV

SEQ ID NO: 86595 - protein, 14 aa, Homo Sapiens
KMTEEKLAEAERVG

SEQ ID NO: 86596 - protein, 14 aa, Homo Sapiens
MTEEKLAEAERVGL

SEQ ID NO: 86597 - protein, 14 aa, Homo Sapiens
TEEKLAEAERVGLH

SEQ ID NO: 86598 - protein, 14 aa, Homo Sapiens
EEKLAEAERVGLHK

SEQ ID NO: 86599 - protein, 14 aa, Homo Sapiens
EKLAEAERVGLHKV

SEQ ID NO: 86600 - protein, 14 aa, Homo Sapiens
KLAEAERVGLHKVF

SEQ ID NO: 86601 - protein, 14 aa, Homo Sapiens
LAEAERVGLHKVFK

SEQ ID NO: 86602 - protein, 14 aa, Homo Sapiens
AEAERVGLHKVFKL

SEQ ID NO: 86603 - protein, 14 aa, Homo Sapiens
EAERVGLHKVFKLQ

SEQ ID NO: 86604 - protein, 14 aa, Homo Sapiens
AERVGLHKVFKLQT

SEQ ID NO: 86605 - protein, 14 aa, Homo Sapiens
ERVGLHKVFKLQTS

SEQ ID NO: 86606 - protein, 14 aa, Homo Sapiens
RVGLHKVFKLQTSL

SEQ ID NO: 86607 - protein, 14 aa, Homo Sapiens
VGLHKVFKLQTSLT

SEQ ID NO: 86608 - protein, 14 aa, Homo Sapiens
GLHKVFKLQTSLTC

SEQ ID NO: 86609 - protein, 14 aa, Homo Sapiens
LHKVFKLQTSLTCN

SEQ ID NO: 86610 - protein, 14 aa, Homo Sapiens
HKVFKLQTSLTCNS

SEQ ID NO: 86611 - protein, 14 aa, Homo Sapiens
KVFKLQTSLTCNSM

SEQ ID NO: 86612 - protein, 14 aa, Homo Sapiens
VFKLQTSLTCNSMV

SEQ ID NO: 86613 - protein, 14 aa, Homo Sapiens
FKLQTSLTCNSMVL

SEQ ID NO: 86614 - protein, 14 aa, Homo Sapiens
KLQTSLTCNSMVLF

SEQ ID NO: 86615 - protein, 14 aa, Homo Sapiens
LQTSLTCNSMVLFD

SEQ ID NO: 86616 - protein, 14 aa, Homo Sapiens
QTSLTCNSMVLFDH

SEQ ID NO: 86617 - protein, 14 aa, Homo Sapiens
TSLTCNSMVLFDHV

SEQ ID NO: 86618 - protein, 14 aa, Homo Sapiens
SLTCNSMVLFDHVG

SEQ ID NO: 86619 - protein, 14 aa, Homo Sapiens
LTCNSMVLFDHVGC

SEQ ID NO: 86620 - protein, 14 aa, Homo Sapiens
TCNSMVLFDHVGCL

SEQ ID NO: 86621 - protein, 14 aa, Homo Sapiens
CNSMVLFDHVGCLK

SEQ ID NO: 86622 - protein, 14 aa, Homo Sapiens
NSMVLFDHVGCLKK

SEQ ID NO: 86623 - protein, 14 aa, Homo Sapiens
SMVLFDHVGCLKKY

SEQ ID NO: 86624 - protein, 14 aa, Homo Sapiens
MVLFDHVGCLKKYD

SEQ ID NO: 86625 - protein, 14 aa, Homo Sapiens
VLFDHVGCLKKYDT

SEQ ID NO: 86626 - protein, 14 aa, Homo Sapiens
LFDHVGCLKKYDTV

SEQ ID NO: 86627 - protein, 14 aa, Homo Sapiens
FDHVGCLKKYDTVL

SEQ ID NO: 86628 - protein, 14 aa, Homo Sapiens
DHVGCLKKYDTVLD

SEQ ID NO: 86629 - protein, 14 aa, Homo Sapiens
HVGCLKKYDTVLDI

SEQ ID NO: 86630 - protein, 14 aa, Homo Sapiens
VGCLKKYDTVLDIL

SEQ ID NO: 86631 - protein, 14 aa, Homo Sapiens
GCLKKYDTVLDILR

SEQ ID NO: 86632 - protein, 14 aa, Homo Sapiens
CLKKYDTVLDILRD

SEQ ID NO: 86633 - protein, 14 aa, Homo Sapiens
LKKYDTVLDILRDF

SEQ ID NO: 86634 - protein, 14 aa, Homo Sapiens
KKYDTVLDILRDFF

SEQ ID NO: 86635 - protein, 14 aa, Homo Sapiens
KYDTVLDILRDFFE

SEQ ID NO: 86636 - protein, 14 aa, Homo Sapiens
YDTVLDILRDFFEL

SEQ ID NO: 86637 - protein, 14 aa, Homo Sapiens
DTVLDILRDFFELR

SEQ ID NO: 86638 - protein, 14 aa, Homo Sapiens
TVLDILRDFFELRL

SEQ ID NO: 86639 - protein, 14 aa, Homo Sapiens
VLDILRDFFELRLK

SEQ ID NO: 86640 - protein, 14 aa, Homo Sapiens
LDILRDFFELRLKY

SEQ ID NO: 86641 - protein, 14 aa, Homo Sapiens
DILRDFFELRLKYY

SEQ ID NO: 86642 - protein, 14 aa, Homo Sapiens
ILRDFFELRLKYYG

SEQ ID NO: 86643 - protein, 14 aa, Homo Sapiens
LRDFFELRLKYYGL

SEQ ID NO: 86644 - protein, 14 aa, Homo Sapiens
RDFFELRLKYYGLR

SEQ ID NO: 86645 - protein, 14 aa, Homo Sapiens
DFFELRLKYYGLRK

SEQ ID NO: 86646 - protein, 14 aa, Homo Sapiens
FFELRLKYYGLRKE

SEQ ID NO: 86647 - protein, 14 aa, Homo Sapiens
FELRLKYYGLRKEW

SEQ ID NO: 86648 - protein, 14 aa, Homo Sapiens
ELRLKYYGLRKEWL

SEQ ID NO: 86649 - protein, 14 aa, Homo Sapiens
LRLKYYGLRKEWLL

SEQ ID NO: 86650 - protein, 14 aa, Homo Sapiens
RLKYYGLRKEWLLG

SEQ ID NO: 86651 - protein, 14 aa, Homo Sapiens
LKYYGLRKEWLLGM

SEQ ID NO: 86652 - protein, 14 aa, Homo Sapiens
KYYGLRKEWLLGML

SEQ ID NO: 86653 - protein, 14 aa, Homo Sapiens
YYGLRKEWLLGMLG

SEQ ID NO: 86654 - protein, 14 aa, Homo Sapiens
YGLRKEWLLGMLGA

SEQ ID NO: 86655 - protein, 14 aa, Homo Sapiens
GLRKEWLLGMLGAE

SEQ ID NO: 86656 - protein, 14 aa, Homo Sapiens
LRKEWLLGMLGAES

SEQ ID NO: 86657 - protein, 14 aa, Homo Sapiens
RKEWLLGMLGAESA

SEQ ID NO: 86658 - protein, 14 aa, Homo Sapiens
KEWLLGMLGAESAK

SEQ ID NO: 86659 - protein, 14 aa, Homo Sapiens
EWLLGMLGAESAKL

SEQ ID NO: 86660 - protein, 14 aa, Homo Sapiens
WLLGMLGAESAKLN

SEQ ID NO: 86661 - protein, 14 aa, Homo Sapiens
LLGMLGAESAKLNN

SEQ ID NO: 86662 - protein, 14 aa, Homo Sapiens
LGMLGAESAKLNNQ

SEQ ID NO: 86663 - protein, 14 aa, Homo Sapiens
GMLGAESAKLNNQA

SEQ ID NO: 86664 - protein, 14 aa, Homo Sapiens
MLGAESAKLNNQAR

SEQ ID NO: 86665 - protein, 14 aa, Homo Sapiens
LGAESAKLNNQARF

SEQ ID NO: 86666 - protein, 14 aa, Homo Sapiens
GAESAKLNNQARFI

SEQ ID NO: 86667 - protein, 14 aa, Homo Sapiens
AESAKLNNQARFIL

SEQ ID NO: 86668 - protein, 14 aa, Homo Sapiens
ESAKLNNQARFILE

SEQ ID NO: 86669 - protein, 14 aa, Homo Sapiens
SAKLNNQARFILEK

SEQ ID NO: 86670 - protein, 14 aa, Homo Sapiens
AKLNNQARFILEKI

SEQ ID NO: 86671 - protein, 14 aa, Homo Sapiens
KLNNQARFILEKID

SEQ ID NO: 86672 - protein, 14 aa, Homo Sapiens
LNNQARFILEKIDG

SEQ ID NO: 86673 - protein, 14 aa, Homo Sapiens
NNQARFILEKIDGK

SEQ ID NO: 86674 - protein, 14 aa, Homo Sapiens
NQARFILEKIDGKI

SEQ ID NO: 86675 - protein, 14 aa, Homo Sapiens
QARFILEKIDGKII

SEQ ID NO: 86676 - protein, 14 aa, Homo Sapiens
ARFILEKIDGKIII

SEQ ID NO: 86677 - protein, 14 aa, Homo Sapiens
RFILEKIDGKIIIE

SEQ ID NO: 86678 - protein, 14 aa, Homo Sapiens
FILEKIDGKIIIEN

SEQ ID NO: 86679 - protein, 14 aa, Homo Sapiens
ILEKIDGKIIIENK

SEQ ID NO: 86680 - protein, 14 aa, Homo Sapiens
LEKIDGKIIIENKP

SEQ ID NO: 86681 - protein, 14 aa, Homo Sapiens
EKIDGKIIIENKPK

SEQ ID NO: 86682 - protein, 14 aa, Homo Sapiens
KIDGKIIIENKPKK

SEQ ID NO: 86683 - protein, 14 aa, Homo Sapiens
IDGKIIIENKPKKE

SEQ ID NO: 86684 - protein, 14 aa, Homo Sapiens
DGKIIIENKPKKEL

SEQ ID NO: 86685 - protein, 14 aa, Homo Sapiens
GKIIIENKPKKELI

SEQ ID NO: 86686 - protein, 14 aa, Homo Sapiens
KIIIENKPKKELIK

SEQ ID NO: 86687 - protein, 14 aa, Homo Sapiens
IIIENKPKKELIKV

SEQ ID NO: 86688 - protein, 14 aa, Homo Sapiens
IIENKPKKELIKVL

SEQ ID NO: 86689 - protein, 14 aa, Homo Sapiens
IENKPKKELIKVLI

SEQ ID NO: 86690 - protein, 14 aa, Homo Sapiens
ENKPKKELIKVLIQ

SEQ ID NO: 86691 - protein, 14 aa, Homo Sapiens
NKPKKELIKVLIQR

SEQ ID NO: 86692 - protein, 14 aa, Homo Sapiens
KPKKELIKVLIQRG

SEQ ID NO: 86693 - protein, 14 aa, Homo Sapiens
PKKELIKVLIQRGY

SEQ ID NO: 86694 - protein, 14 aa, Homo Sapiens
KKELIKVLIQRGYD

SEQ ID NO: 86695 - protein, 14 aa, Homo Sapiens
KELIKVLIQRGYDS

SEQ ID NO: 86696 - protein, 14 aa, Homo Sapiens
ELIKVLIQRGYDSD

SEQ ID NO: 86697 - protein, 14 aa, Homo Sapiens
LIKVLIQRGYDSDP

SEQ ID NO: 86698 - protein, 14 aa, Homo Sapiens
IKVLIQRGYDSDPV

SEQ ID NO: 86699 - protein, 14 aa, Homo Sapiens
KVLIQRGYDSDPVK

SEQ ID NO: 86700 - protein, 14 aa, Homo Sapiens
VLIQRGYDSDPVKA

SEQ ID NO: 86701 - protein, 14 aa, Homo Sapiens
LIQRGYDSDPVKAW

SEQ ID NO: 86702 - protein, 14 aa, Homo Sapiens
IQRGYDSDPVKAWK

SEQ ID NO: 86703 - protein, 14 aa, Homo Sapiens
QRGYDSDPVKAWKE

SEQ ID NO: 86704 - protein, 14 aa, Homo Sapiens
RGYDSDPVKAWKEA

SEQ ID NO: 86705 - protein, 14 aa, Homo Sapiens
GYDSDPVKAWKEAQ

SEQ ID NO: 86706 - protein, 14 aa, Homo Sapiens
YDSDPVKAWKEAQQ

SEQ ID NO: 86707 - protein, 14 aa, Homo Sapiens
DSDPVKAWKEAQQK

SEQ ID NO: 86708 - protein, 14 aa, Homo Sapiens
SDPVKAWKEAQQKV

SEQ ID NO: 86709 - protein, 14 aa, Homo Sapiens
DPVKAWKEAQQKVP

SEQ ID NO: 86710 - protein, 14 aa, Homo Sapiens
PVKAWKEAQQKVPD

SEQ ID NO: 86711 - protein, 14 aa, Homo Sapiens
VKAWKEAQQKVPDE

SEQ ID NO: 86712 - protein, 14 aa, Homo Sapiens
KAWKEAQQKVPDEE

SEQ ID NO: 86713 - protein, 14 aa, Homo Sapiens
AWKEAQQKVPDEEE

SEQ ID NO: 86714 - protein, 14 aa, Homo Sapiens
WKEAQQKVPDEEEN

SEQ ID NO: 86715 - protein, 14 aa, Homo Sapiens
KEAQQKVPDEEENE

SEQ ID NO: 86716 - protein, 14 aa, Homo Sapiens
EAQQKVPDEEENEE

SEQ ID NO: 86717 - protein, 14 aa, Homo Sapiens
AQQKVPDEEENEES

SEQ ID NO: 86718 - protein, 14 aa, Homo Sapiens
QQKVPDEEENEESD

SEQ ID NO: 86719 - protein, 14 aa, Homo Sapiens
QKVPDEEENEESDN

SEQ ID NO: 86720 - protein, 14 aa, Homo Sapiens
KVPDEEENEESDNE

SEQ ID NO: 86721 - protein, 14 aa, Homo Sapiens
VPDEEENEESDNEK

SEQ ID NO: 86722 - protein, 14 aa, Homo Sapiens
PDEEENEESDNEKE

SEQ ID NO: 86723 - protein, 14 aa, Homo Sapiens
DEEENEESDNEKET

SEQ ID NO: 86724 - protein, 14 aa, Homo Sapiens
EEENEESDNEKETE

SEQ ID NO: 86725 - protein, 14 aa, Homo Sapiens
EENEESDNEKETEK

SEQ ID NO: 86726 - protein, 14 aa, Homo Sapiens
ENEESDNEKETEKS

SEQ ID NO: 86727 - protein, 14 aa, Homo Sapiens
NEESDNEKETEKSD

SEQ ID NO: 86728 - protein, 14 aa, Homo Sapiens
EESDNEKETEKSDS

SEQ ID NO: 86729 - protein, 14 aa, Homo Sapiens
ESDNEKETEKSDSV

SEQ ID NO: 86730 - protein, 14 aa, Homo Sapiens
SDNEKETEKSDSVT

SEQ ID NO: 86731 - protein, 14 aa, Homo Sapiens
DNEKETEKSDSVTD

SEQ ID NO: 86732 - protein, 14 aa, Homo Sapiens
NEKETEKSDSVTDS

SEQ ID NO: 86733 - protein, 14 aa, Homo Sapiens
EKETEKSDSVTDSG

SEQ ID NO: 86734 - protein, 14 aa, Homo Sapiens
KETEKSDSVTDSGP

SEQ ID NO: 86735 - protein, 14 aa, Homo Sapiens
ETEKSDSVTDSGPT

SEQ ID NO: 86736 - protein, 14 aa, Homo Sapiens
TEKSDSVTDSGPTF

SEQ ID NO: 86737 - protein, 14 aa, Homo Sapiens
EKSDSVTDSGPTFN

SEQ ID NO: 86738 - protein, 14 aa, Homo Sapiens
KSDSVTDSGPTFNY

SEQ ID NO: 86739 - protein, 14 aa, Homo Sapiens
SDSVTDSGPTFNYL

SEQ ID NO: 86740 - protein, 14 aa, Homo Sapiens
DSVTDSGPTFNYLL

SEQ ID NO: 86741 - protein, 14 aa, Homo Sapiens
SVTDSGPTFNYLLD

SEQ ID NO: 86742 - protein, 14 aa, Homo Sapiens
VTDSGPTFNYLLDM

SEQ ID NO: 86743 - protein, 14 aa, Homo Sapiens
TDSGPTFNYLLDMP

SEQ ID NO: 86744 - protein, 14 aa, Homo Sapiens
DSGPTFNYLLDMPL

SEQ ID NO: 86745 - protein, 14 aa, Homo Sapiens
SGPTFNYLLDMPLW

SEQ ID NO: 86746 - protein, 14 aa, Homo Sapiens
GPTFNYLLDMPLWY

SEQ ID NO: 86747 - protein, 14 aa, Homo Sapiens
PTFNYLLDMPLWYL

SEQ ID NO: 86748 - protein, 14 aa, Homo Sapiens
TFNYLLDMPLWYLT

SEQ ID NO: 86749 - protein, 14 aa, Homo Sapiens
FNYLLDMPLWYLTK

SEQ ID NO: 86750 - protein, 14 aa, Homo Sapiens
NYLLDMPLWYLTKE

SEQ ID NO: 86751 - protein, 14 aa, Homo Sapiens
YLLDMPLWYLTKEK

SEQ ID NO: 86752 - protein, 14 aa, Homo Sapiens
LLDMPLWYLTKEKK

SEQ ID NO: 86753 - protein, 14 aa, Homo Sapiens
LDMPLWYLTKEKKD

SEQ ID NO: 86754 - protein, 14 aa, Homo Sapiens
DMPLWYLTKEKKDE

SEQ ID NO: 86755 - protein, 14 aa, Homo Sapiens
MPLWYLTKEKKDEL

SEQ ID NO: 86756 - protein, 14 aa, Homo Sapiens
PLWYLTKEKKDELC

SEQ ID NO: 86757 - protein, 14 aa, Homo Sapiens
LWYLTKEKKDELCR

SEQ ID NO: 86758 - protein, 14 aa, Homo Sapiens
WYLTKEKKDELCRL

SEQ ID NO: 86759 - protein, 14 aa, Homo Sapiens
YLTKEKKDELCRLR

SEQ ID NO: 86760 - protein, 14 aa, Homo Sapiens
LTKEKKDELCRLRN

SEQ ID NO: 86761 - protein, 14 aa, Homo Sapiens
TKEKKDELCRLRNE

SEQ ID NO: 86762 - protein, 14 aa, Homo Sapiens
KEKKDELCRLRNEK

SEQ ID NO: 86763 - protein, 14 aa, Homo Sapiens
EKKDELCRLRNEKE

SEQ ID NO: 86764 - protein, 14 aa, Homo Sapiens
KKDELCRLRNEKEQ

SEQ ID NO: 86765 - protein, 14 aa, Homo Sapiens
KDELCRLRNEKEQE

SEQ ID NO: 86766 - protein, 14 aa, Homo Sapiens
DELCRLRNEKEQEL

SEQ ID NO: 86767 - protein, 14 aa, Homo Sapiens
ELCRLRNEKEQELD

SEQ ID NO: 86768 - protein, 14 aa, Homo Sapiens
LCRLRNEKEQELDT

SEQ ID NO: 86769 - protein, 14 aa, Homo Sapiens
CRLRNEKEQELDTL

SEQ ID NO: 86770 - protein, 14 aa, Homo Sapiens
RLRNEKEQELDTLK

SEQ ID NO: 86771 - protein, 14 aa, Homo Sapiens
LRNEKEQELDTLKR

SEQ ID NO: 86772 - protein, 14 aa, Homo Sapiens
RNEKEQELDTLKRK

SEQ ID NO: 86773 - protein, 14 aa, Homo Sapiens
NEKEQELDTLKRKS

SEQ ID NO: 86774 - protein, 14 aa, Homo Sapiens
EKEQELDTLKRKSP

SEQ ID NO: 86775 - protein, 14 aa, Homo Sapiens
KEQELDTLKRKSPS

SEQ ID NO: 86776 - protein, 14 aa, Homo Sapiens
EQELDTLKRKSPSD

SEQ ID NO: 86777 - protein, 14 aa, Homo Sapiens
QELDTLKRKSPSDL

SEQ ID NO: 86778 - protein, 14 aa, Homo Sapiens
ELDTLKRKSPSDLW

SEQ ID NO: 86779 - protein, 14 aa, Homo Sapiens
LDTLKRKSPSDLWK

SEQ ID NO: 86780 - protein, 14 aa, Homo Sapiens
DTLKRKSPSDLWKE

SEQ ID NO: 86781 - protein, 14 aa, Homo Sapiens
TLKRKSPSDLWKED

SEQ ID NO: 86782 - protein, 14 aa, Homo Sapiens
LKRKSPSDLWKEDL

SEQ ID NO: 86783 - protein, 14 aa, Homo Sapiens
KRKSPSDLWKEDLA

SEQ ID NO: 86784 - protein, 14 aa, Homo Sapiens
RKSPSDLWKEDLAT

SEQ ID NO: 86785 - protein, 14 aa, Homo Sapiens
KSPSDLWKEDLATF

SEQ ID NO: 86786 - protein, 14 aa, Homo Sapiens
SPSDLWKEDLATFI

SEQ ID NO: 86787 - protein, 14 aa, Homo Sapiens
PSDLWKEDLATFIE

SEQ ID NO: 86788 - protein, 14 aa, Homo Sapiens
SDLWKEDLATFIEE

SEQ ID NO: 86789 - protein, 14 aa, Homo Sapiens
DLWKEDLATFIEEL

SEQ ID NO: 86790 - protein, 14 aa, Homo Sapiens
LWKEDLATFIEELE

SEQ ID NO: 86791 - protein, 14 aa, Homo Sapiens
WKEDLATFIEELEA

SEQ ID NO: 86792 - protein, 14 aa, Homo Sapiens
KEDLATFIEELEAV

SEQ ID NO: 86793 - protein, 14 aa, Homo Sapiens
EDLATFIEELEAVE

SEQ ID NO: 86794 - protein, 14 aa, Homo Sapiens
DLATFIEELEAVEA

SEQ ID NO: 86795 - protein, 14 aa, Homo Sapiens
LATFIEELEAVEAK

SEQ ID NO: 86796 - protein, 14 aa, Homo Sapiens
ATFIEELEAVEAKE

SEQ ID NO: 86797 - protein, 14 aa, Homo Sapiens
TFIEELEAVEAKEK

SEQ ID NO: 86798 - protein, 14 aa, Homo Sapiens
FIEELEAVEAKEKQ

SEQ ID NO: 86799 - protein, 14 aa, Homo Sapiens
IEELEAVEAKEKQD

SEQ ID NO: 86800 - protein, 14 aa, Homo Sapiens
EELEAVEAKEKQDE

SEQ ID NO: 86801 - protein, 14 aa, Homo Sapiens
ELEAVEAKEKQDEQ

SEQ ID NO: 86802 - protein, 14 aa, Homo Sapiens
LEAVEAKEKQDEQV

SEQ ID NO: 86803 - protein, 14 aa, Homo Sapiens
EAVEAKEKQDEQVG

SEQ ID NO: 86804 - protein, 14 aa, Homo Sapiens
AVEAKEKQDEQVGL

SEQ ID NO: 86805 - protein, 14 aa, Homo Sapiens
VEAKEKQDEQVGLP

SEQ ID NO: 86806 - protein, 14 aa, Homo Sapiens
EAKEKQDEQVGLPG

SEQ ID NO: 86807 - protein, 14 aa, Homo Sapiens
AKEKQDEQVGLPGK

SEQ ID NO: 86808 - protein, 14 aa, Homo Sapiens
KEKQDEQVGLPGKG

SEQ ID NO: 86809 - protein, 14 aa, Homo Sapiens
EKQDEQVGLPGKGG

SEQ ID NO: 86810 - protein, 14 aa, Homo Sapiens
KQDEQVGLPGKGGK

SEQ ID NO: 86811 - protein, 14 aa, Homo Sapiens
QDEQVGLPGKGGKA

SEQ ID NO: 86812 - protein, 14 aa, Homo Sapiens
DEQVGLPGKGGKAK

SEQ ID NO: 86813 - protein, 14 aa, Homo Sapiens
EQVGLPGKGGKAKG

SEQ ID NO: 86814 - protein, 14 aa, Homo Sapiens
QVGLPGKGGKAKGK

SEQ ID NO: 86815 - protein, 14 aa, Homo Sapiens
VGLPGKGGKAKGKK

SEQ ID NO: 86816 - protein, 14 aa, Homo Sapiens
GLPGKGGKAKGKKT

SEQ ID NO: 86817 - protein, 14 aa, Homo Sapiens
LPGKGGKAKGKKTQ

SEQ ID NO: 86818 - protein, 14 aa, Homo Sapiens
PGKGGKAKGKKTQM

SEQ ID NO: 86819 - protein, 14 aa, Homo Sapiens
GKGGKAKGKKTQMA

SEQ ID NO: 86820 - protein, 14 aa, Homo Sapiens
KGGKAKGKKTQMAE

SEQ ID NO: 86821 - protein, 14 aa, Homo Sapiens
GGKAKGKKTQMAEV

SEQ ID NO: 86822 - protein, 14 aa, Homo Sapiens
GKAKGKKTQMAEVL

SEQ ID NO: 86823 - protein, 14 aa, Homo Sapiens
KAKGKKTQMAEVLP

SEQ ID NO: 86824 - protein, 14 aa, Homo Sapiens
AKGKKTQMAEVLPS

SEQ ID NO: 86825 - protein, 14 aa, Homo Sapiens
KGKKTQMAEVLPSP

SEQ ID NO: 86826 - protein, 14 aa, Homo Sapiens
GKKTQMAEVLPSPR

SEQ ID NO: 86827 - protein, 14 aa, Homo Sapiens
KKTQMAEVLPSPRG

SEQ ID NO: 86828 - protein, 14 aa, Homo Sapiens
KTQMAEVLPSPRGQ

SEQ ID NO: 86829 - protein, 14 aa, Homo Sapiens
TQMAEVLPSPRGQR

SEQ ID NO: 86830 - protein, 14 aa, Homo Sapiens
QMAEVLPSPRGQRV

SEQ ID NO: 86831 - protein, 14 aa, Homo Sapiens
MAEVLPSPRGQRVI

SEQ ID NO: 86832 - protein, 14 aa, Homo Sapiens
AEVLPSPRGQRVIP

SEQ ID NO: 86833 - protein, 14 aa, Homo Sapiens
EVLPSPRGQRVIPR

SEQ ID NO: 86834 - protein, 14 aa, Homo Sapiens
VLPSPRGQRVIPRI

SEQ ID NO: 86835 - protein, 14 aa, Homo Sapiens
LPSPRGQRVIPRIT

SEQ ID NO: 86836 - protein, 14 aa, Homo Sapiens
PSPRGQRVIPRITI

SEQ ID NO: 86837 - protein, 14 aa, Homo Sapiens
SPRGQRVIPRITIE

SEQ ID NO: 86838 - protein, 14 aa, Homo Sapiens
PRGQRVIPRITIEM

SEQ ID NO: 86839 - protein, 14 aa, Homo Sapiens
RGQRVIPRITIEMK

SEQ ID NO: 86840 - protein, 14 aa, Homo Sapiens
GQRVIPRITIEMKA

SEQ ID NO: 86841 - protein, 14 aa, Homo Sapiens
QRVIPRITIEMKAE

SEQ ID NO: 86842 - protein, 14 aa, Homo Sapiens
RVIPRITIEMKAEA

SEQ ID NO: 86843 - protein, 14 aa, Homo Sapiens
VIPRITIEMKAEAE

SEQ ID NO: 86844 - protein, 14 aa, Homo Sapiens
IPRITIEMKAEAEK

SEQ ID NO: 86845 - protein, 14 aa, Homo Sapiens
PRITIEMKAEAEKK

SEQ ID NO: 86846 - protein, 14 aa, Homo Sapiens
RITIEMKAEAEKKN

SEQ ID NO: 86847 - protein, 14 aa, Homo Sapiens
ITIEMKAEAEKKNK

SEQ ID NO: 86848 - protein, 14 aa, Homo Sapiens
TIEMKAEAEKKNKK

SEQ ID NO: 86849 - protein, 14 aa, Homo Sapiens
IEMKAEAEKKNKKK

SEQ ID NO: 86850 - protein, 14 aa, Homo Sapiens
EMKAEAEKKNKKKI

SEQ ID NO: 86851 - protein, 14 aa, Homo Sapiens
MKAEAEKKNKKKIK

SEQ ID NO: 86852 - protein, 14 aa, Homo Sapiens
KAEAEKKNKKKIKN

SEQ ID NO: 86853 - protein, 14 aa, Homo Sapiens
AEAEKKNKKKIKNE

SEQ ID NO: 86854 - protein, 14 aa, Homo Sapiens
EAEKKNKKKIKNEN

SEQ ID NO: 86855 - protein, 14 aa, Homo Sapiens
AEKKNKKKIKNENT

SEQ ID NO: 86856 - protein, 14 aa, Homo Sapiens
EKKNKKKIKNENTE

SEQ ID NO: 86857 - protein, 14 aa, Homo Sapiens
KKNKKKIKNENTEG

SEQ ID NO: 86858 - protein, 14 aa, Homo Sapiens
KNKKKIKNENTEGS

SEQ ID NO: 86859 - protein, 14 aa, Homo Sapiens
NKKKIKNENTEGSP

SEQ ID NO: 86860 - protein, 14 aa, Homo Sapiens
KKKIKNENTEGSPQ

SEQ ID NO: 86861 - protein, 14 aa, Homo Sapiens
KKIKNENTEGSPQE

SEQ ID NO: 86862 - protein, 14 aa, Homo Sapiens
KIKNENTEGSPQED

SEQ ID NO: 86863 - protein, 14 aa, Homo Sapiens
IKNENTEGSPQEDG

SEQ ID NO: 86864 - protein, 14 aa, Homo Sapiens
KNENTEGSPQEDGV

SEQ ID NO: 86865 - protein, 14 aa, Homo Sapiens
NENTEGSPQEDGVE

SEQ ID NO: 86866 - protein, 14 aa, Homo Sapiens
ENTEGSPQEDGVEL

SEQ ID NO: 86867 - protein, 14 aa, Homo Sapiens
NTEGSPQEDGVELE

SEQ ID NO: 86868 - protein, 14 aa, Homo Sapiens
TEGSPQEDGVELEG

SEQ ID NO: 86869 - protein, 14 aa, Homo Sapiens
EGSPQEDGVELEGL

SEQ ID NO: 86870 - protein, 14 aa, Homo Sapiens
GSPQEDGVELEGLK

SEQ ID NO: 86871 - protein, 14 aa, Homo Sapiens
SPQEDGVELEGLKQ

SEQ ID NO: 86872 - protein, 14 aa, Homo Sapiens
PQEDGVELEGLKQR

SEQ ID NO: 86873 - protein, 14 aa, Homo Sapiens
QEDGVELEGLKQRL

SEQ ID NO: 86874 - protein, 14 aa, Homo Sapiens
EDGVELEGLKQRLE

SEQ ID NO: 86875 - protein, 14 aa, Homo Sapiens
DGVELEGLKQRLEK

SEQ ID NO: 86876 - protein, 14 aa, Homo Sapiens
GVELEGLKQRLEKK

SEQ ID NO: 86877 - protein, 14 aa, Homo Sapiens
VELEGLKQRLEKKQ

SEQ ID NO: 86878 - protein, 14 aa, Homo Sapiens
ELEGLKQRLEKKQK

SEQ ID NO: 86879 - protein, 14 aa, Homo Sapiens
LEGLKQRLEKKQKR

SEQ ID NO: 86880 - protein, 14 aa, Homo Sapiens
EGLKQRLEKKQKRE

SEQ ID NO: 86881 - protein, 14 aa, Homo Sapiens
GLKQRLEKKQKREP

SEQ ID NO: 86882 - protein, 14 aa, Homo Sapiens
LKQRLEKKQKREPG

SEQ ID NO: 86883 - protein, 14 aa, Homo Sapiens
KQRLEKKQKREPGT

SEQ ID NO: 86884 - protein, 14 aa, Homo Sapiens
QRLEKKQKREPGTK

SEQ ID NO: 86885 - protein, 14 aa, Homo Sapiens
RLEKKQKREPGTKT

SEQ ID NO: 86886 - protein, 14 aa, Homo Sapiens
LEKKQKREPGTKTK

SEQ ID NO: 86887 - protein, 14 aa, Homo Sapiens
EKKQKREPGTKTKK

SEQ ID NO: 86888 - protein, 14 aa, Homo Sapiens
KKQKREPGTKTKKQ

SEQ ID NO: 86889 - protein, 14 aa, Homo Sapiens
KQKREPGTKTKKQT

SEQ ID NO: 86890 - protein, 14 aa, Homo Sapiens
QKREPGTKTKKQTT

SEQ ID NO: 86891 - protein, 14 aa, Homo Sapiens
KREPGTKTKKQTTL

SEQ ID NO: 86892 - protein, 14 aa, Homo Sapiens
REPGTKTKKQTTLA

SEQ ID NO: 86893 - protein, 14 aa, Homo Sapiens
EPGTKTKKQTTLAF

SEQ ID NO: 86894 - protein, 14 aa, Homo Sapiens
PGTKTKKQTTLAFK

SEQ ID NO: 86895 - protein, 14 aa, Homo Sapiens
GTKTKKQTTLAFKP

SEQ ID NO: 86896 - protein, 14 aa, Homo Sapiens
TKTKKQTTLAFKPI

SEQ ID NO: 86897 - protein, 14 aa, Homo Sapiens
KTKKQTTLAFKPIK

SEQ ID NO: 86898 - protein, 14 aa, Homo Sapiens
TKKQTTLAFKPIKK

SEQ ID NO: 86899 - protein, 14 aa, Homo Sapiens
KKQTTLAFKPIKKG

SEQ ID NO: 86900 - protein, 14 aa, Homo Sapiens
KQTTLAFKPIKKGK

SEQ ID NO: 86901 - protein, 14 aa, Homo Sapiens
QTTLAFKPIKKGKK

SEQ ID NO: 86902 - protein, 14 aa, Homo Sapiens
TTLAFKPIKKGKKR

SEQ ID NO: 86903 - protein, 14 aa, Homo Sapiens
TLAFKPIKKGKKRN

SEQ ID NO: 86904 - protein, 14 aa, Homo Sapiens
LAFKPIKKGKKRNP

SEQ ID NO: 86905 - protein, 14 aa, Homo Sapiens
AFKPIKKGKKRNPW

SEQ ID NO: 86906 - protein, 14 aa, Homo Sapiens
FKPIKKGKKRNPWS

SEQ ID NO: 86907 - protein, 14 aa, Homo Sapiens
KPIKKGKKRNPWSD

SEQ ID NO: 86908 - protein, 14 aa, Homo Sapiens
PIKKGKKRNPWSDS

SEQ ID NO: 86909 - protein, 14 aa, Homo Sapiens
IKKGKKRNPWSDSE

SEQ ID NO: 86910 - protein, 14 aa, Homo Sapiens
KKGKKRNPWSDSES

SEQ ID NO: 86911 - protein, 14 aa, Homo Sapiens
KGKKRNPWSDSESD

SEQ ID NO: 86912 - protein, 14 aa, Homo Sapiens
GKKRNPWSDSESDR

SEQ ID NO: 86913 - protein, 14 aa, Homo Sapiens
KKRNPWSDSESDRS

SEQ ID NO: 86914 - protein, 14 aa, Homo Sapiens
KRNPWSDSESDRSS

SEQ ID NO: 86915 - protein, 14 aa, Homo Sapiens
RNPWSDSESDRSSD

SEQ ID NO: 86916 - protein, 14 aa, Homo Sapiens
NPWSDSESDRSSDE

SEQ ID NO: 86917 - protein, 14 aa, Homo Sapiens
PWSDSESDRSSDES

SEQ ID NO: 86918 - protein, 14 aa, Homo Sapiens
WSDSESDRSSDESN

SEQ ID NO: 86919 - protein, 14 aa, Homo Sapiens
SDSESDRSSDESNF

SEQ ID NO: 86920 - protein, 14 aa, Homo Sapiens
DSESDRSSDESNFD

SEQ ID NO: 86921 - protein, 14 aa, Homo Sapiens
SESDRSSDESNFDV

SEQ ID NO: 86922 - protein, 14 aa, Homo Sapiens
ESDRSSDESNFDVP

SEQ ID NO: 86923 - protein, 14 aa, Homo Sapiens
SDRSSDESNFDVPP

SEQ ID NO: 86924 - protein, 14 aa, Homo Sapiens
DRSSDESNFDVPPR

SEQ ID NO: 86925 - protein, 14 aa, Homo Sapiens
RSSDESNFDVPPRE

SEQ ID NO: 86926 - protein, 14 aa, Homo Sapiens
SSDESNFDVPPRET

SEQ ID NO: 86927 - protein, 14 aa, Homo Sapiens
SDESNFDVPPRETE

SEQ ID NO: 86928 - protein, 14 aa, Homo Sapiens
DESNFDVPPRETEP

SEQ ID NO: 86929 - protein, 14 aa, Homo Sapiens
ESNFDVPPRETEPR

SEQ ID NO: 86930 - protein, 14 aa, Homo Sapiens
SNFDVPPRETEPRR

SEQ ID NO: 86931 - protein, 14 aa, Homo Sapiens
NFDVPPRETEPRRA

SEQ ID NO: 86932 - protein, 14 aa, Homo Sapiens
FDVPPRETEPRRAA

SEQ ID NO: 86933 - protein, 14 aa, Homo Sapiens
DVPPRETEPRRAAT

SEQ ID NO: 86934 - protein, 14 aa, Homo Sapiens
VPPRETEPRRAATK

SEQ ID NO: 86935 - protein, 14 aa, Homo Sapiens
PPRETEPRRAATKT

SEQ ID NO: 86936 - protein, 14 aa, Homo Sapiens
PRETEPRRAATKTK

SEQ ID NO: 86937 - protein, 14 aa, Homo Sapiens
RETEPRRAATKTKF

SEQ ID NO: 86938 - protein, 14 aa, Homo Sapiens
ETEPRRAATKTKFT

SEQ ID NO: 86939 - protein, 14 aa, Homo Sapiens
TEPRRAATKTKFTM

SEQ ID NO: 86940 - protein, 14 aa, Homo Sapiens
EPRRAATKTKFTMD

SEQ ID NO: 86941 - protein, 14 aa, Homo Sapiens
PRRAATKTKFTMDL

SEQ ID NO: 86942 - protein, 14 aa, Homo Sapiens
RRAATKTKFTMDLD

SEQ ID NO: 86943 - protein, 14 aa, Homo Sapiens
RAATKTKFTMDLDS

SEQ ID NO: 86944 - protein, 14 aa, Homo Sapiens
AATKTKFTMDLDSD

SEQ ID NO: 86945 - protein, 14 aa, Homo Sapiens
ATKTKFTMDLDSDE

SEQ ID NO: 86946 - protein, 14 aa, Homo Sapiens
TKTKFTMDLDSDED

SEQ ID NO: 86947 - protein, 14 aa, Homo Sapiens
KTKFTMDLDSDEDF

SEQ ID NO: 86948 - protein, 14 aa, Homo Sapiens
TKFTMDLDSDEDFS

SEQ ID NO: 86949 - protein, 14 aa, Homo Sapiens
KFTMDLDSDEDFSD

SEQ ID NO: 86950 - protein, 14 aa, Homo Sapiens
FTMDLDSDEDFSDF

SEQ ID NO: 86951 - protein, 14 aa, Homo Sapiens
TMDLDSDEDFSDFD

SEQ ID NO: 86952 - protein, 14 aa, Homo Sapiens
MDLDSDEDFSDFDE

SEQ ID NO: 86953 - protein, 14 aa, Homo Sapiens
DLDSDEDFSDFDEK

SEQ ID NO: 86954 - protein, 14 aa, Homo Sapiens
LDSDEDFSDFDEKT

SEQ ID NO: 86955 - protein, 14 aa, Homo Sapiens
DSDEDFSDFDEKTD

SEQ ID NO: 86956 - protein, 14 aa, Homo Sapiens
SDEDFSDFDEKTDD

SEQ ID NO: 86957 - protein, 14 aa, Homo Sapiens
DEDFSDFDEKTDDE

SEQ ID NO: 86958 - protein, 14 aa, Homo Sapiens
EDFSDFDEKTDDED

SEQ ID NO: 86959 - protein, 14 aa, Homo Sapiens
DFSDFDEKTDDEDF

SEQ ID NO: 86960 - protein, 14 aa, Homo Sapiens
FSDFDEKTDDEDFV

SEQ ID NO: 86961 - protein, 14 aa, Homo Sapiens
SDFDEKTDDEDFVP

SEQ ID NO: 86962 - protein, 14 aa, Homo Sapiens
DFDEKTDDEDFVPS

SEQ ID NO: 86963 - protein, 14 aa, Homo Sapiens
FDEKTDDEDFVPSD

SEQ ID NO: 86964 - protein, 14 aa, Homo Sapiens
DEKTDDEDFVPSDA

SEQ ID NO: 86965 - protein, 14 aa, Homo Sapiens
EKTDDEDFVPSDAS

SEQ ID NO: 86966 - protein, 14 aa, Homo Sapiens
KTDDEDFVPSDASP

SEQ ID NO: 86967 - protein, 14 aa, Homo Sapiens
TDDEDFVPSDASPP

SEQ ID NO: 86968 - protein, 14 aa, Homo Sapiens
DDEDFVPSDASPPK

SEQ ID NO: 86969 - protein, 14 aa, Homo Sapiens
DEDFVPSDASPPKT

SEQ ID NO: 86970 - protein, 14 aa, Homo Sapiens
EDFVPSDASPPKTK

SEQ ID NO: 86971 - protein, 14 aa, Homo Sapiens
DFVPSDASPPKTKT

SEQ ID NO: 86972 - protein, 14 aa, Homo Sapiens
FVPSDASPPKTKTS

SEQ ID NO: 86973 - protein, 14 aa, Homo Sapiens
VPSDASPPKTKTSP

SEQ ID NO: 86974 - protein, 14 aa, Homo Sapiens
PSDASPPKTKTSPK

SEQ ID NO: 86975 - protein, 14 aa, Homo Sapiens
SDASPPKTKTSPKL

SEQ ID NO: 86976 - protein, 14 aa, Homo Sapiens
DASPPKTKTSPKLS

SEQ ID NO: 86977 - protein, 14 aa, Homo Sapiens
ASPPKTKTSPKLSN

SEQ ID NO: 86978 - protein, 14 aa, Homo Sapiens
SPPKTKTSPKLSNK

SEQ ID NO: 86979 - protein, 14 aa, Homo Sapiens
PPKTKTSPKLSNKE

SEQ ID NO: 86980 - protein, 14 aa, Homo Sapiens
PKTKTSPKLSNKEL

SEQ ID NO: 86981 - protein, 14 aa, Homo Sapiens
KTKTSPKLSNKELK

SEQ ID NO: 86982 - protein, 14 aa, Homo Sapiens
TKTSPKLSNKELKP

SEQ ID NO: 86983 - protein, 14 aa, Homo Sapiens
KTSPKLSNKELKPQ

SEQ ID NO: 86984 - protein, 14 aa, Homo Sapiens
TSPKLSNKELKPQK

SEQ ID NO: 86985 - protein, 14 aa, Homo Sapiens
SPKLSNKELKPQKS

SEQ ID NO: 86986 - protein, 14 aa, Homo Sapiens
PKLSNKELKPQKSV

SEQ ID NO: 86987 - protein, 14 aa, Homo Sapiens
KLSNKELKPQKSVV

SEQ ID NO: 86988 - protein, 14 aa, Homo Sapiens
LSNKELKPQKSVVS

SEQ ID NO: 86989 - protein, 14 aa, Homo Sapiens
SNKELKPQKSVVSD

SEQ ID NO: 86990 - protein, 14 aa, Homo Sapiens
NKELKPQKSVVSDL

SEQ ID NO: 86991 - protein, 14 aa, Homo Sapiens
KELKPQKSVVSDLE

SEQ ID NO: 86992 - protein, 14 aa, Homo Sapiens
ELKPQKSVVSDLEA

SEQ ID NO: 86993 - protein, 14 aa, Homo Sapiens
LKPQKSVVSDLEAD

SEQ ID NO: 86994 - protein, 14 aa, Homo Sapiens
KPQKSVVSDLEADD

SEQ ID NO: 86995 - protein, 14 aa, Homo Sapiens
PQKSVVSDLEADDV

SEQ ID NO: 86996 - protein, 14 aa, Homo Sapiens
QKSVVSDLEADDVK

SEQ ID NO: 86997 - protein, 14 aa, Homo Sapiens
KSVVSDLEADDVKG

SEQ ID NO: 86998 - protein, 14 aa, Homo Sapiens
SVVSDLEADDVKGS

SEQ ID NO: 86999 - protein, 14 aa, Homo Sapiens
VVSDLEADDVKGSV

SEQ ID NO: 87000 - protein, 14 aa, Homo Sapiens
VSDLEADDVKGSVP

SEQ ID NO: 87001 - protein, 14 aa, Homo Sapiens
SDLEADDVKGSVPL

SEQ ID NO: 87002 - protein, 14 aa, Homo Sapiens
DLEADDVKGSVPLS

SEQ ID NO: 87003 - protein, 14 aa, Homo Sapiens
LEADDVKGSVPLSS

SEQ ID NO: 87004 - protein, 14 aa, Homo Sapiens
EADDVKGSVPLSSS

SEQ ID NO: 87005 - protein, 14 aa, Homo Sapiens
ADDVKGSVPLSSSP

SEQ ID NO: 87006 - protein, 14 aa, Homo Sapiens
DDVKGSVPLSSSPP

SEQ ID NO: 87007 - protein, 14 aa, Homo Sapiens
DVKGSVPLSSSPPA

SEQ ID NO: 87008 - protein, 14 aa, Homo Sapiens
VKGSVPLSSSPPAT

SEQ ID NO: 87009 - protein, 14 aa, Homo Sapiens
KGSVPLSSSPPATH

SEQ ID NO: 87010 - protein, 14 aa, Homo Sapiens
GSVPLSSSPPATHF

SEQ ID NO: 87011 - protein, 14 aa, Homo Sapiens
SVPLSSSPPATHFP

SEQ ID NO: 87012 - protein, 14 aa, Homo Sapiens
VPLSSSPPATHFPD

SEQ ID NO: 87013 - protein, 14 aa, Homo Sapiens
PLSSSPPATHFPDE

SEQ ID NO: 87014 - protein, 14 aa, Homo Sapiens
LSSSPPATHFPDET

SEQ ID NO: 87015 - protein, 14 aa, Homo Sapiens
SSSPPATHFPDETE

SEQ ID NO: 87016 - protein, 14 aa, Homo Sapiens
SSPPATHFPDETEI

SEQ ID NO: 87017 - protein, 14 aa, Homo Sapiens
SPPATHFPDETEIT

SEQ ID NO: 87018 - protein, 14 aa, Homo Sapiens
PPATHFPDETEITN

SEQ ID NO: 87019 - protein, 14 aa, Homo Sapiens
PATHFPDETEITNP

SEQ ID NO: 87020 - protein, 14 aa, Homo Sapiens
ATHFPDETEITNPV

SEQ ID NO: 87021 - protein, 14 aa, Homo Sapiens
THFPDETEITNPVP

SEQ ID NO: 87022 - protein, 14 aa, Homo Sapiens
HFPDETEITNPVPK

SEQ ID NO: 87023 - protein, 14 aa, Homo Sapiens
FPDETEITNPVPKK

SEQ ID NO: 87024 - protein, 14 aa, Homo Sapiens
PDETEITNPVPKKN

SEQ ID NO: 87025 - protein, 14 aa, Homo Sapiens
DETEITNPVPKKNV

SEQ ID NO: 87026 - protein, 14 aa, Homo Sapiens
ETEITNPVPKKNVT

SEQ ID NO: 87027 - protein, 14 aa, Homo Sapiens
TEITNPVPKKNVTV

SEQ ID NO: 87028 - protein, 14 aa, Homo Sapiens
EITNPVPKKNVTVK

SEQ ID NO: 87029 - protein, 14 aa, Homo Sapiens
ITNPVPKKNVTVKK

SEQ ID NO: 87030 - protein, 14 aa, Homo Sapiens
TNPVPKKNVTVKKT

SEQ ID NO: 87031 - protein, 14 aa, Homo Sapiens
NPVPKKNVTVKKTA

SEQ ID NO: 87032 - protein, 14 aa, Homo Sapiens
PVPKKNVTVKKTAA

SEQ ID NO: 87033 - protein, 14 aa, Homo Sapiens
VPKKNVTVKKTAAK

SEQ ID NO: 87034 - protein, 14 aa, Homo Sapiens
PKKNVTVKKTAAKS

SEQ ID NO: 87035 - protein, 14 aa, Homo Sapiens
KKNVTVKKTAAKSQ

SEQ ID NO: 87036 - protein, 14 aa, Homo Sapiens
KNVTVKKTAAKSQS

SEQ ID NO: 87037 - protein, 14 aa, Homo Sapiens
NVTVKKTAAKSQSS

SEQ ID NO: 87038 - protein, 14 aa, Homo Sapiens
VTVKKTAAKSQSST

SEQ ID NO: 87039 - protein, 14 aa, Homo Sapiens
TVKKTAAKSQSSTS

SEQ ID NO: 87040 - protein, 14 aa, Homo Sapiens
VKKTAAKSQSSTST

SEQ ID NO: 87041 - protein, 14 aa, Homo Sapiens
KKTAAKSQSSTSTT

SEQ ID NO: 87042 - protein, 14 aa, Homo Sapiens
KTAAKSQSSTSTTG

SEQ ID NO: 87043 - protein, 14 aa, Homo Sapiens
TAAKSQSSTSTTGA

SEQ ID NO: 87044 - protein, 14 aa, Homo Sapiens
AAKSQSSTSTTGAK

SEQ ID NO: 87045 - protein, 14 aa, Homo Sapiens
AKSQSSTSTTGAKK

SEQ ID NO: 87046 - protein, 14 aa, Homo Sapiens
KSQSSTSTTGAKKR

SEQ ID NO: 87047 - protein, 14 aa, Homo Sapiens
SQSSTSTTGAKKRA

SEQ ID NO: 87048 - protein, 14 aa, Homo Sapiens
QSSTSTTGAKKRAA

SEQ ID NO: 87049 - protein, 14 aa, Homo Sapiens
SSTSTTGAKKRAAP

SEQ ID NO: 87050 - protein, 14 aa, Homo Sapiens
STSTTGAKKRAAPK

SEQ ID NO: 87051 - protein, 14 aa, Homo Sapiens
TSTTGAKKRAAPKG

SEQ ID NO: 87052 - protein, 14 aa, Homo Sapiens
STTGAKKRAAPKGT

SEQ ID NO: 87053 - protein, 14 aa, Homo Sapiens
TTGAKKRAAPKGTK

SEQ ID NO: 87054 - protein, 14 aa, Homo Sapiens
TGAKKRAAPKGTKR

SEQ ID NO: 87055 - protein, 14 aa, Homo Sapiens
GAKKRAAPKGTKRD

SEQ ID NO: 87056 - protein, 14 aa, Homo Sapiens
AKKRAAPKGTKRDP

SEQ ID NO: 87057 - protein, 14 aa, Homo Sapiens
KKRAAPKGTKRDPA

SEQ ID NO: 87058 - protein, 14 aa, Homo Sapiens
KRAAPKGTKRDPAL

SEQ ID NO: 87059 - protein, 14 aa, Homo Sapiens
RAAPKGTKRDPALN

SEQ ID NO: 87060 - protein, 14 aa, Homo Sapiens
AAPKGTKRDPALNS

SEQ ID NO: 87061 - protein, 14 aa, Homo Sapiens
APKGTKRDPALNSG

SEQ ID NO: 87062 - protein, 14 aa, Homo Sapiens
PKGTKRDPALNSGV

SEQ ID NO: 87063 - protein, 14 aa, Homo Sapiens
KGTKRDPALNSGVS

SEQ ID NO: 87064 - protein, 14 aa, Homo Sapiens
GTKRDPALNSGVSQ

SEQ ID NO: 87065 - protein, 14 aa, Homo Sapiens
TKRDPALNSGVSQK

SEQ ID NO: 87066 - protein, 14 aa, Homo Sapiens
KRDPALNSGVSQKP

SEQ ID NO: 87067 - protein, 14 aa, Homo Sapiens
RDPALNSGVSQKPD

SEQ ID NO: 87068 - protein, 14 aa, Homo Sapiens
DPALNSGVSQKPDP

SEQ ID NO: 87069 - protein, 14 aa, Homo Sapiens
PALNSGVSQKPDPA

SEQ ID NO: 87070 - protein, 14 aa, Homo Sapiens
ALNSGVSQKPDPAK

SEQ ID NO: 87071 - protein, 14 aa, Homo Sapiens
LNSGVSQKPDPAKT

SEQ ID NO: 87072 - protein, 14 aa, Homo Sapiens
NSGVSQKPDPAKTK

SEQ ID NO: 87073 - protein, 14 aa, Homo Sapiens
SGVSQKPDPAKTKN

SEQ ID NO: 87074 - protein, 14 aa, Homo Sapiens
GVSQKPDPAKTKNR

SEQ ID NO: 87075 - protein, 14 aa, Homo Sapiens
VSQKPDPAKTKNRR

SEQ ID NO: 87076 - protein, 14 aa, Homo Sapiens
SQKPDPAKTKNRRK

SEQ ID NO: 87077 - protein, 14 aa, Homo Sapiens
QKPDPAKTKNRRKR

SEQ ID NO: 87078 - protein, 14 aa, Homo Sapiens
KPDPAKTKNRRKRK

SEQ ID NO: 87079 - protein, 14 aa, Homo Sapiens
PDPAKTKNRRKRKP

SEQ ID NO: 87080 - protein, 14 aa, Homo Sapiens
DPAKTKNRRKRKPS

SEQ ID NO: 87081 - protein, 14 aa, Homo Sapiens
PAKTKNRRKRKPST

SEQ ID NO: 87082 - protein, 14 aa, Homo Sapiens
AKTKNRRKRKPSTS

SEQ ID NO: 87083 - protein, 14 aa, Homo Sapiens
KTKNRRKRKPSTSD

SEQ ID NO: 87084 - protein, 14 aa, Homo Sapiens
TKNRRKRKPSTSDD

SEQ ID NO: 87085 - protein, 14 aa, Homo Sapiens
KNRRKRKPSTSDDS

SEQ ID NO: 87086 - protein, 14 aa, Homo Sapiens
NRRKRKPSTSDDSD

SEQ ID NO: 87087 - protein, 14 aa, Homo Sapiens
RRKRKPSTSDDSDS

SEQ ID NO: 87088 - protein, 14 aa, Homo Sapiens
RKRKPSTSDDSDSN

SEQ ID NO: 87089 - protein, 14 aa, Homo Sapiens
KRKPSTSDDSDSNF

SEQ ID NO: 87090 - protein, 14 aa, Homo Sapiens
RKPSTSDDSDSNFE

SEQ ID NO: 87091 - protein, 14 aa, Homo Sapiens
KPSTSDDSDSNFEK

SEQ ID NO: 87092 - protein, 14 aa, Homo Sapiens
PSTSDDSDSNFEKI

SEQ ID NO: 87093 - protein, 14 aa, Homo Sapiens
STSDDSDSNFEKIV

SEQ ID NO: 87094 - protein, 14 aa, Homo Sapiens
TSDDSDSNFEKIVS

SEQ ID NO: 87095 - protein, 14 aa, Homo Sapiens
SDDSDSNFEKIVSK

SEQ ID NO: 87096 - protein, 14 aa, Homo Sapiens
DDSDSNFEKIVSKA

SEQ ID NO: 87097 - protein, 14 aa, Homo Sapiens
DSDSNFEKIVSKAV

SEQ ID NO: 87098 - protein, 14 aa, Homo Sapiens
SDSNFEKIVSKAVT

SEQ ID NO: 87099 - protein, 14 aa, Homo Sapiens
DSNFEKIVSKAVTS

SEQ ID NO: 87100 - protein, 14 aa, Homo Sapiens
SNFEKIVSKAVTSK

SEQ ID NO: 87101 - protein, 14 aa, Homo Sapiens
NFEKIVSKAVTSKK

SEQ ID NO: 87102 - protein, 14 aa, Homo Sapiens
FEKIVSKAVTSKKS

SEQ ID NO: 87103 - protein, 14 aa, Homo Sapiens
EKIVSKAVTSKKSK

SEQ ID NO: 87104 - protein, 14 aa, Homo Sapiens
KIVSKAVTSKKSKG

SEQ ID NO: 87105 - protein, 14 aa, Homo Sapiens
IVSKAVTSKKSKGE

SEQ ID NO: 87106 - protein, 14 aa, Homo Sapiens
VSKAVTSKKSKGES

SEQ ID NO: 87107 - protein, 14 aa, Homo Sapiens
SKAVTSKKSKGESD

SEQ ID NO: 87108 - protein, 14 aa, Homo Sapiens
KAVTSKKSKGESDD

SEQ ID NO: 87109 - protein, 14 aa, Homo Sapiens
AVTSKKSKGESDDF

SEQ ID NO: 87110 - protein, 14 aa, Homo Sapiens
VTSKKSKGESDDFH

SEQ ID NO: 87111 - protein, 14 aa, Homo Sapiens
TSKKSKGESDDFHM

SEQ ID NO: 87112 - protein, 14 aa, Homo Sapiens
SKKSKGESDDFHMD

SEQ ID NO: 87113 - protein, 14 aa, Homo Sapiens
KKSKGESDDFHMDF

SEQ ID NO: 87114 - protein, 14 aa, Homo Sapiens
KSKGESDDFHMDFD

SEQ ID NO: 87115 - protein, 14 aa, Homo Sapiens
SKGESDDFHMDFDS

SEQ ID NO: 87116 - protein, 14 aa, Homo Sapiens
KGESDDFHMDFDSA

SEQ ID NO: 87117 - protein, 14 aa, Homo Sapiens
GESDDFHMDFDSAV

SEQ ID NO: 87118 - protein, 14 aa, Homo Sapiens
ESDDFHMDFDSAVA

SEQ ID NO: 87119 - protein, 14 aa, Homo Sapiens
SDDFHMDFDSAVAP

SEQ ID NO: 87120 - protein, 14 aa, Homo Sapiens
DDFHMDFDSAVAPR

SEQ ID NO: 87121 - protein, 14 aa, Homo Sapiens
DFHMDFDSAVAPRA

SEQ ID NO: 87122 - protein, 14 aa, Homo Sapiens
FHMDFDSAVAPRAK

SEQ ID NO: 87123 - protein, 14 aa, Homo Sapiens
HMDFDSAVAPRAKS

SEQ ID NO: 87124 - protein, 14 aa, Homo Sapiens
MDFDSAVAPRAKSV

SEQ ID NO: 87125 - protein, 14 aa, Homo Sapiens
DFDSAVAPRAKSVR

SEQ ID NO: 87126 - protein, 14 aa, Homo Sapiens
FDSAVAPRAKSVRA

SEQ ID NO: 87127 - protein, 14 aa, Homo Sapiens
DSAVAPRAKSVRAK

SEQ ID NO: 87128 - protein, 14 aa, Homo Sapiens
SAVAPRAKSVRAKK

SEQ ID NO: 87129 - protein, 14 aa, Homo Sapiens
AVAPRAKSVRAKKP

SEQ ID NO: 87130 - protein, 14 aa, Homo Sapiens
VAPRAKSVRAKKPI

SEQ ID NO: 87131 - protein, 14 aa, Homo Sapiens
APRAKSVRAKKPIK

SEQ ID NO: 87132 - protein, 14 aa, Homo Sapiens
PRAKSVRAKKPIKY

SEQ ID NO: 87133 - protein, 14 aa, Homo Sapiens
RAKSVRAKKPIKYL

SEQ ID NO: 87134 - protein, 14 aa, Homo Sapiens
AKSVRAKKPIKYLE

SEQ ID NO: 87135 - protein, 14 aa, Homo Sapiens
KSVRAKKPIKYLEE

SEQ ID NO: 87136 - protein, 14 aa, Homo Sapiens
SVRAKKPIKYLEES

SEQ ID NO: 87137 - protein, 14 aa, Homo Sapiens
VRAKKPIKYLEESD

SEQ ID NO: 87138 - protein, 14 aa, Homo Sapiens
RAKKPIKYLEESDE

SEQ ID NO: 87139 - protein, 14 aa, Homo Sapiens
AKKPIKYLEESDED

SEQ ID NO: 87140 - protein, 14 aa, Homo Sapiens
KKPIKYLEESDEDD

SEQ ID NO: 87141 - protein, 14 aa, Homo Sapiens
KPIKYLEESDEDDL

SEQ ID NO: 87142 - protein, 14 aa, Homo Sapiens
PIKYLEESDEDDLF

SEQ ID NO: 87143 - protein, 15 aa, Homo Sapiens
MEVSPLQPVNENMQV

SEQ ID NO: 87144 - protein, 15 aa, Homo Sapiens
EVSPLQPVNENMQVN

SEQ ID NO: 87145 - protein, 15 aa, Homo Sapiens
VSPLQPVNENMQVNK

SEQ ID NO: 87146 - protein, 15 aa, Homo Sapiens
SPLQPVNENMQVNKI

SEQ ID NO: 87147 - protein, 15 aa, Homo Sapiens
PLQPVNENMQVNKIK

SEQ ID NO: 87148 - protein, 15 aa, Homo Sapiens
LQPVNENMQVNKIKK

SEQ ID NO: 87149 - protein, 15 aa, Homo Sapiens
QPVNENMQVNKIKKN

SEQ ID NO: 87150 - protein, 15 aa, Homo Sapiens
PVNENMQVNKIKKNE

SEQ ID NO: 87151 - protein, 15 aa, Homo Sapiens
VNENMQVNKIKKNED

SEQ ID NO: 87152 - protein, 15 aa, Homo Sapiens
NENMQVNKIKKNEDA

SEQ ID NO: 87153 - protein, 15 aa, Homo Sapiens
ENMQVNKIKKNEDAK

SEQ ID NO: 87154 - protein, 15 aa, Homo Sapiens
NMQVNKIKKNEDAKK

SEQ ID NO: 87155 - protein, 15 aa, Homo Sapiens
MQVNKIKKNEDAKKR

SEQ ID NO: 87156 - protein, 15 aa, Homo Sapiens
QVNKIKKNEDAKKRL

SEQ ID NO: 87157 - protein, 15 aa, Homo Sapiens
VNKIKKNEDAKKRLS

SEQ ID NO: 87158 - protein, 15 aa, Homo Sapiens
NKIKKNEDAKKRLSV

SEQ ID NO: 87159 - protein, 15 aa, Homo Sapiens
KIKKNEDAKKRLSVE

SEQ ID NO: 87160 - protein, 15 aa, Homo Sapiens
IKKNEDAKKRLSVER

SEQ ID NO: 87161 - protein, 15 aa, Homo Sapiens
KKNEDAKKRLSVERI

SEQ ID NO: 87162 - protein, 15 aa, Homo Sapiens
KNEDAKKRLSVERIY

SEQ ID NO: 87163 - protein, 15 aa, Homo Sapiens
NEDAKKRLSVERIYQ

SEQ ID NO: 87164 - protein, 15 aa, Homo Sapiens
EDAKKRLSVERIYQK

SEQ ID NO: 87165 - protein, 15 aa, Homo Sapiens
DAKKRLSVERIYQKK

SEQ ID NO: 87166 - protein, 15 aa, Homo Sapiens
AKKRLSVERIYQKKT

SEQ ID NO: 87167 - protein, 15 aa, Homo Sapiens
KKRLSVERIYQKKTQ

SEQ ID NO: 87168 - protein, 15 aa, Homo Sapiens
KRLSVERIYQKKTQL

SEQ ID NO: 87169 - protein, 15 aa, Homo Sapiens
RLSVERIYQKKTQLE

SEQ ID NO: 87170 - protein, 15 aa, Homo Sapiens
LSVERIYQKKTQLEH

SEQ ID NO: 87171 - protein, 15 aa, Homo Sapiens
SVERIYQKKTQLEHI

SEQ ID NO: 87172 - protein, 15 aa, Homo Sapiens
VERIYQKKTQLEHIL

SEQ ID NO: 87173 - protein, 15 aa, Homo Sapiens
ERIYQKKTQLEHILL

SEQ ID NO: 87174 - protein, 15 aa, Homo Sapiens
RIYQKKTQLEHILLR

SEQ ID NO: 87175 - protein, 15 aa, Homo Sapiens
IYQKKTQLEHILLRP

SEQ ID NO: 87176 - protein, 15 aa, Homo Sapiens
YQKKTQLEHILLRPD

SEQ ID NO: 87177 - protein, 15 aa, Homo Sapiens
QKKTQLEHILLRPDT

SEQ ID NO: 87178 - protein, 15 aa, Homo Sapiens
KKTQLEHILLRPDTY

SEQ ID NO: 87179 - protein, 15 aa, Homo Sapiens
KTQLEHILLRPDTYI

SEQ ID NO: 87180 - protein, 15 aa, Homo Sapiens
TQLEHILLRPDTYIG

SEQ ID NO: 87181 - protein, 15 aa, Homo Sapiens
QLEHILLRPDTYIGS

SEQ ID NO: 87182 - protein, 15 aa, Homo Sapiens
LEHILLRPDTYIGSV

SEQ ID NO: 87183 - protein, 15 aa, Homo Sapiens
EHILLRPDTYIGSVE

SEQ ID NO: 87184 - protein, 15 aa, Homo Sapiens
HILLRPDTYIGSVEL

SEQ ID NO: 87185 - protein, 15 aa, Homo Sapiens
ILLRPDTYIGSVELV

SEQ ID NO: 87186 - protein, 15 aa, Homo Sapiens
LLRPDTYIGSVELVT

SEQ ID NO: 87187 - protein, 15 aa, Homo Sapiens
LRPDTYIGSVELVTQ

SEQ ID NO: 87188 - protein, 15 aa, Homo Sapiens
RPDTYIGSVELVTQQ

SEQ ID NO: 87189 - protein, 15 aa, Homo Sapiens
PDTYIGSVELVTQQM

SEQ ID NO: 87190 - protein, 15 aa, Homo Sapiens
DTYIGSVELVTQQMW

SEQ ID NO: 87191 - protein, 15 aa, Homo Sapiens
TYIGSVELVTQQMWV

SEQ ID NO: 87192 - protein, 15 aa, Homo Sapiens
YIGSVELVTQQMWVY

SEQ ID NO: 87193 - protein, 15 aa, Homo Sapiens
IGSVELVTQQMWVYD

SEQ ID NO: 87194 - protein, 15 aa, Homo Sapiens
GSVELVTQQMWVYDE

SEQ ID NO: 87195 - protein, 15 aa, Homo Sapiens
SVELVTQQMWVYDED

SEQ ID NO: 87196 - protein, 15 aa, Homo Sapiens
VELVTQQMWVYDEDV

SEQ ID NO: 87197 - protein, 15 aa, Homo Sapiens
ELVTQQMWVYDEDVG

SEQ ID NO: 87198 - protein, 15 aa, Homo Sapiens
LVTQQMWVYDEDVGI

SEQ ID NO: 87199 - protein, 15 aa, Homo Sapiens
VTQQMWVYDEDVGIN

SEQ ID NO: 87200 - protein, 15 aa, Homo Sapiens
TQQMWVYDEDVGINY

SEQ ID NO: 87201 - protein, 15 aa, Homo Sapiens
QQMWVYDEDVGINYR

SEQ ID NO: 87202 - protein, 15 aa, Homo Sapiens
QMWVYDEDVGINYRE

SEQ ID NO: 87203 - protein, 15 aa, Homo Sapiens
MWVYDEDVGINYREV

SEQ ID NO: 87204 - protein, 15 aa, Homo Sapiens
WVYDEDVGINYREVT

SEQ ID NO: 87205 - protein, 15 aa, Homo Sapiens
VYDEDVGINYREVTF

SEQ ID NO: 87206 - protein, 15 aa, Homo Sapiens
YDEDVGINYREVTFV

SEQ ID NO: 87207 - protein, 15 aa, Homo Sapiens
DEDVGINYREVTFVP

SEQ ID NO: 87208 - protein, 15 aa, Homo Sapiens
EDVGINYREVTFVPG

SEQ ID NO: 87209 - protein, 15 aa, Homo Sapiens
DVGINYREVTFVPGL

SEQ ID NO: 87210 - protein, 15 aa, Homo Sapiens
VGINYREVTFVPGLY

SEQ ID NO: 87211 - protein, 15 aa, Homo Sapiens
GINYREVTFVPGLYK

SEQ ID NO: 87212 - protein, 15 aa, Homo Sapiens
INYREVTFVPGLYKI

SEQ ID NO: 87213 - protein, 15 aa, Homo Sapiens
NYREVTFVPGLYKIF

SEQ ID NO: 87214 - protein, 15 aa, Homo Sapiens
YREVTFVPGLYKIFD

SEQ ID NO: 87215 - protein, 15 aa, Homo Sapiens
REVTFVPGLYKIFDE

SEQ ID NO: 87216 - protein, 15 aa, Homo Sapiens
EVTFVPGLYKIFDEI

SEQ ID NO: 87217 - protein, 15 aa, Homo Sapiens
VTFVPGLYKIFDEIL

SEQ ID NO: 87218 - protein, 15 aa, Homo Sapiens
TFVPGLYKIFDEILV

SEQ ID NO: 87219 - protein, 15 aa, Homo Sapiens
FVPGLYKIFDEILVN

SEQ ID NO: 87220 - protein, 15 aa, Homo Sapiens
VPGLYKIFDEILVNA

SEQ ID NO: 87221 - protein, 15 aa, Homo Sapiens
PGLYKIFDEILVNAA

SEQ ID NO: 87222 - protein, 15 aa, Homo Sapiens
GLYKIFDEILVNAAD

SEQ ID NO: 87223 - protein, 15 aa, Homo Sapiens
LYKIFDEILVNAADN

SEQ ID NO: 87224 - protein, 15 aa, Homo Sapiens
YKIFDEILVNAADNK

SEQ ID NO: 87225 - protein, 15 aa, Homo Sapiens
KIFDEILVNAADNKQ

SEQ ID NO: 87226 - protein, 15 aa, Homo Sapiens
IFDEILVNAADNKQR

SEQ ID NO: 87227 - protein, 15 aa, Homo Sapiens
FDEILVNAADNKQRD

SEQ ID NO: 87228 - protein, 15 aa, Homo Sapiens
DEILVNAADNKQRDP

SEQ ID NO: 87229 - protein, 15 aa, Homo Sapiens
EILVNAADNKQRDPK

SEQ ID NO: 87230 - protein, 15 aa, Homo Sapiens
ILVNAADNKQRDPKM

SEQ ID NO: 87231 - protein, 15 aa, Homo Sapiens
LVNAADNKQRDPKMS

SEQ ID NO: 87232 - protein, 15 aa, Homo Sapiens
VNAADNKQRDPKMSC

SEQ ID NO: 87233 - protein, 15 aa, Homo Sapiens
NAADNKQRDPKMSCI

SEQ ID NO: 87234 - protein, 15 aa, Homo Sapiens
AADNKQRDPKMSCIR

SEQ ID NO: 87235 - protein, 15 aa, Homo Sapiens
ADNKQRDPKMSCIRV

SEQ ID NO: 87236 - protein, 15 aa, Homo Sapiens
DNKQRDPKMSCIRVT

SEQ ID NO: 87237 - protein, 15 aa, Homo Sapiens
NKQRDPKMSCIRVTI

SEQ ID NO: 87238 - protein, 15 aa, Homo Sapiens
KQRDPKMSCIRVTID

SEQ ID NO: 87239 - protein, 15 aa, Homo Sapiens
QRDPKMSCIRVTIDP

SEQ ID NO: 87240 - protein, 15 aa, Homo Sapiens
RDPKMSCIRVTIDPE

SEQ ID NO: 87241 - protein, 15 aa, Homo Sapiens
DPKMSCIRVTIDPEN

SEQ ID NO: 87242 - protein, 15 aa, Homo Sapiens
PKMSCIRVTIDPENN

SEQ ID NO: 87243 - protein, 15 aa, Homo Sapiens
KMSCIRVTIDPENNL

SEQ ID NO: 87244 - protein, 15 aa, Homo Sapiens
MSCIRVTIDPENNLI

SEQ ID NO: 87245 - protein, 15 aa, Homo Sapiens
SCIRVTIDPENNLIS

SEQ ID NO: 87246 - protein, 15 aa, Homo Sapiens
CIRVTIDPENNLISI

SEQ ID NO: 87247 - protein, 15 aa, Homo Sapiens
IRVTIDPENNLISIW

SEQ ID NO: 87248 - protein, 15 aa, Homo Sapiens
RVTIDPENNLISIWN

SEQ ID NO: 87249 - protein, 15 aa, Homo Sapiens
VTIDPENNLISIWNN

SEQ ID NO: 87250 - protein, 15 aa, Homo Sapiens
TIDPENNLISIWNNG

SEQ ID NO: 87251 - protein, 15 aa, Homo Sapiens
IDPENNLISIWNNGK

SEQ ID NO: 87252 - protein, 15 aa, Homo Sapiens
DPENNLISIWNNGKG

SEQ ID NO: 87253 - protein, 15 aa, Homo Sapiens
PENNLISIWNNGKGI

SEQ ID NO: 87254 - protein, 15 aa, Homo Sapiens
ENNLISIWNNGKGIP

SEQ ID NO: 87255 - protein, 15 aa, Homo Sapiens
NNLISIWNNGKGIPV

SEQ ID NO: 87256 - protein, 15 aa, Homo Sapiens
NLISIWNNGKGIPVV

SEQ ID NO: 87257 - protein, 15 aa, Homo Sapiens
LISIWNNGKGIPVVE

SEQ ID NO: 87258 - protein, 15 aa, Homo Sapiens
ISIWNNGKGIPVVEH

SEQ ID NO: 87259 - protein, 15 aa, Homo Sapiens
SIWNNGKGIPVVEHK

SEQ ID NO: 87260 - protein, 15 aa, Homo Sapiens
IWNNGKGIPVVEHKV

SEQ ID NO: 87261 - protein, 15 aa, Homo Sapiens
WNNGKGIPVVEHKVE

SEQ ID NO: 87262 - protein, 15 aa, Homo Sapiens
NNGKGIPVVEHKVEK

SEQ ID NO: 87263 - protein, 15 aa, Homo Sapiens
NGKGIPVVEHKVEKM

SEQ ID NO: 87264 - protein, 15 aa, Homo Sapiens
GKGIPVVEHKVEKMY

SEQ ID NO: 87265 - protein, 15 aa, Homo Sapiens
KGIPVVEHKVEKMYV

SEQ ID NO: 87266 - protein, 15 aa, Homo Sapiens
GIPVVEHKVEKMYVP

SEQ ID NO: 87267 - protein, 15 aa, Homo Sapiens
IPVVEHKVEKMYVPA

SEQ ID NO: 87268 - protein, 15 aa, Homo Sapiens
PVVEHKVEKMYVPAL

SEQ ID NO: 87269 - protein, 15 aa, Homo Sapiens
VVEHKVEKMYVPALI

SEQ ID NO: 87270 - protein, 15 aa, Homo Sapiens
VEHKVEKMYVPALIF

SEQ ID NO: 87271 - protein, 15 aa, Homo Sapiens
EHKVEKMYVPALIFG

SEQ ID NO: 87272 - protein, 15 aa, Homo Sapiens
HKVEKMYVPALIFGQ

SEQ ID NO: 87273 - protein, 15 aa, Homo Sapiens
KVEKMYVPALIFGQL

SEQ ID NO: 87274 - protein, 15 aa, Homo Sapiens
VEKMYVPALIFGQLL

SEQ ID NO: 87275 - protein, 15 aa, Homo Sapiens
EKMYVPALIFGQLLT

SEQ ID NO: 87276 - protein, 15 aa, Homo Sapiens
KMYVPALIFGQLLTS

SEQ ID NO: 87277 - protein, 15 aa, Homo Sapiens
MYVPALIFGQLLTSS

SEQ ID NO: 87278 - protein, 15 aa, Homo Sapiens
YVPALIFGQLLTSSN

SEQ ID NO: 87279 - protein, 15 aa, Homo Sapiens
VPALIFGQLLTSSNY

SEQ ID NO: 87280 - protein, 15 aa, Homo Sapiens
PALIFGQLLTSSNYD

SEQ ID NO: 87281 - protein, 15 aa, Homo Sapiens
ALIFGQLLTSSNYDD

SEQ ID NO: 87282 - protein, 15 aa, Homo Sapiens
LIFGQLLTSSNYDDD

SEQ ID NO: 87283 - protein, 15 aa, Homo Sapiens
IFGQLLTSSNYDDDE

SEQ ID NO: 87284 - protein, 15 aa, Homo Sapiens
FGQLLTSSNYDDDEK

SEQ ID NO: 87285 - protein, 15 aa, Homo Sapiens
GQLLTSSNYDDDEKK

SEQ ID NO: 87286 - protein, 15 aa, Homo Sapiens
QLLTSSNYDDDEKKV

SEQ ID NO: 87287 - protein, 15 aa, Homo Sapiens
LLTSSNYDDDEKKVT

SEQ ID NO: 87288 - protein, 15 aa, Homo Sapiens
LTSSNYDDDEKKVTG

SEQ ID NO: 87289 - protein, 15 aa, Homo Sapiens
TSSNYDDDEKKVTGG

SEQ ID NO: 87290 - protein, 15 aa, Homo Sapiens
SSNYDDDEKKVTGGR

SEQ ID NO: 87291 - protein, 15 aa, Homo Sapiens
SNYDDDEKKVTGGRN

SEQ ID NO: 87292 - protein, 15 aa, Homo Sapiens
NYDDDEKKVTGGRNG

SEQ ID NO: 87293 - protein, 15 aa, Homo Sapiens
YDDDEKKVTGGRNGY

SEQ ID NO: 87294 - protein, 15 aa, Homo Sapiens
DDDEKKVTGGRNGYG

SEQ ID NO: 87295 - protein, 15 aa, Homo Sapiens
DDEKKVTGGRNGYGA

SEQ ID NO: 87296 - protein, 15 aa, Homo Sapiens
DEKKVTGGRNGYGAK

SEQ ID NO: 87297 - protein, 15 aa, Homo Sapiens
EKKVTGGRNGYGAKL

SEQ ID NO: 87298 - protein, 15 aa, Homo Sapiens
KKVTGGRNGYGAKLC

SEQ ID NO: 87299 - protein, 15 aa, Homo Sapiens
KVTGGRNGYGAKLCN

SEQ ID NO: 87300 - protein, 15 aa, Homo Sapiens
VTGGRNGYGAKLCNI

SEQ ID NO: 87301 - protein, 15 aa, Homo Sapiens
TGGRNGYGAKLCNIF

SEQ ID NO: 87302 - protein, 15 aa, Homo Sapiens
GGRNGYGAKLCNIFS

SEQ ID NO: 87303 - protein, 15 aa, Homo Sapiens
GRNGYGAKLCNIFST

SEQ ID NO: 87304 - protein, 15 aa, Homo Sapiens
RNGYGAKLCNIFSTK

SEQ ID NO: 87305 - protein, 15 aa, Homo Sapiens
NGYGAKLCNIFSTKF

SEQ ID NO: 87306 - protein, 15 aa, Homo Sapiens
GYGAKLCNIFSTKFT

SEQ ID NO: 87307 - protein, 15 aa, Homo Sapiens
YGAKLCNIFSTKFTV

SEQ ID NO: 87308 - protein, 15 aa, Homo Sapiens
GAKLCNIFSTKFTVE

SEQ ID NO: 87309 - protein, 15 aa, Homo Sapiens
AKLCNIFSTKFTVET

SEQ ID NO: 87310 - protein, 15 aa, Homo Sapiens
KLCNIFSTKFTVETA

SEQ ID NO: 87311 - protein, 15 aa, Homo Sapiens
LCNIFSTKFTVETAS

SEQ ID NO: 87312 - protein, 15 aa, Homo Sapiens
CNIFSTKFTVETASR

SEQ ID NO: 87313 - protein, 15 aa, Homo Sapiens
NIFSTKFTVETASRE

SEQ ID NO: 87314 - protein, 15 aa, Homo Sapiens
IFSTKFTVETASREY

SEQ ID NO: 87315 - protein, 15 aa, Homo Sapiens
FSTKFTVETASREYK

SEQ ID NO: 87316 - protein, 15 aa, Homo Sapiens
STKFTVETASREYKK

SEQ ID NO: 87317 - protein, 15 aa, Homo Sapiens
TKFTVETASREYKKM

SEQ ID NO: 87318 - protein, 15 aa, Homo Sapiens
KFTVETASREYKKMF

SEQ ID NO: 87319 - protein, 15 aa, Homo Sapiens
FTVETASREYKKMFK

SEQ ID NO: 87320 - protein, 15 aa, Homo Sapiens
TVETASREYKKMFKQ

SEQ ID NO: 87321 - protein, 15 aa, Homo Sapiens
VETASREYKKMFKQT

SEQ ID NO: 87322 - protein, 15 aa, Homo Sapiens
ETASREYKKMFKQTW

SEQ ID NO: 87323 - protein, 15 aa, Homo Sapiens
TASREYKKMFKQTWM

SEQ ID NO: 87324 - protein, 15 aa, Homo Sapiens
ASREYKKMFKQTWMD

SEQ ID NO: 87325 - protein, 15 aa, Homo Sapiens
SREYKKMFKQTWMDN

SEQ ID NO: 87326 - protein, 15 aa, Homo Sapiens
REYKKMFKQTWMDNM

SEQ ID NO: 87327 - protein, 15 aa, Homo Sapiens
EYKKMFKQTWMDNMG

SEQ ID NO: 87328 - protein, 15 aa, Homo Sapiens
YKKMFKQTWMDNMGR

SEQ ID NO: 87329 - protein, 15 aa, Homo Sapiens
KKMFKQTWMDNMGRA

SEQ ID NO: 87330 - protein, 15 aa, Homo Sapiens
KMFKQTWMDNMGRAG

SEQ ID NO: 87331 - protein, 15 aa, Homo Sapiens
MFKQTWMDNMGRAGE

SEQ ID NO: 87332 - protein, 15 aa, Homo Sapiens
FKQTWMDNMGRAGEM

SEQ ID NO: 87333 - protein, 15 aa, Homo Sapiens
KQTWMDNMGRAGEME

SEQ ID NO: 87334 - protein, 15 aa, Homo Sapiens
QTWMDNMGRAGEMEL

SEQ ID NO: 87335 - protein, 15 aa, Homo Sapiens
TWMDNMGRAGEMELK

SEQ ID NO: 87336 - protein, 15 aa, Homo Sapiens
WMDNMGRAGEMELKP

SEQ ID NO: 87337 - protein, 15 aa, Homo Sapiens
MDNMGRAGEMELKPF

SEQ ID NO: 87338 - protein, 15 aa, Homo Sapiens
DNMGRAGEMELKPFN

SEQ ID NO: 87339 - protein, 15 aa, Homo Sapiens
NMGRAGEMELKPFNG

SEQ ID NO: 87340 - protein, 15 aa, Homo Sapiens
MGRAGEMELKPFNGE

SEQ ID NO: 87341 - protein, 15 aa, Homo Sapiens
GRAGEMELKPFNGED

SEQ ID NO: 87342 - protein, 15 aa, Homo Sapiens
RAGEMELKPFNGEDY

SEQ ID NO: 87343 - protein, 15 aa, Homo Sapiens
AGEMELKPFNGEDYT

SEQ ID NO: 87344 - protein, 15 aa, Homo Sapiens
GEMELKPFNGEDYTC

SEQ ID NO: 87345 - protein, 15 aa, Homo Sapiens
EMELKPFNGEDYTCI

SEQ ID NO: 87346 - protein, 15 aa, Homo Sapiens
MELKPFNGEDYTCIT

SEQ ID NO: 87347 - protein, 15 aa, Homo Sapiens
ELKPFNGEDYTCITF

SEQ ID NO: 87348 - protein, 15 aa, Homo Sapiens
LKPFNGEDYTCITFQ

SEQ ID NO: 87349 - protein, 15 aa, Homo Sapiens
KPFNGEDYTCITFQP

SEQ ID NO: 87350 - protein, 15 aa, Homo Sapiens
PFNGEDYTCITFQPD

SEQ ID NO: 87351 - protein, 15 aa, Homo Sapiens
FNGEDYTCITFQPDL

SEQ ID NO: 87352 - protein, 15 aa, Homo Sapiens
NGEDYTCITFQPDLS

SEQ ID NO: 87353 - protein, 15 aa, Homo Sapiens
GEDYTCITFQPDLSK

SEQ ID NO: 87354 - protein, 15 aa, Homo Sapiens
EDYTCITFQPDLSKF

SEQ ID NO: 87355 - protein, 15 aa, Homo Sapiens
DYTCITFQPDLSKFK

SEQ ID NO: 87356 - protein, 15 aa, Homo Sapiens
YTCITFQPDLSKFKM

SEQ ID NO: 87357 - protein, 15 aa, Homo Sapiens
TCITFQPDLSKFKMQ

SEQ ID NO: 87358 - protein, 15 aa, Homo Sapiens
CITFQPDLSKFKMQS

SEQ ID NO: 87359 - protein, 15 aa, Homo Sapiens
ITFQPDLSKFKMQSL

SEQ ID NO: 87360 - protein, 15 aa, Homo Sapiens
TFQPDLSKFKMQSLD

SEQ ID NO: 87361 - protein, 15 aa, Homo Sapiens
FQPDLSKFKMQSLDK

SEQ ID NO: 87362 - protein, 15 aa, Homo Sapiens
QPDLSKFKMQSLDKD

SEQ ID NO: 87363 - protein, 15 aa, Homo Sapiens
PDLSKFKMQSLDKDI

SEQ ID NO: 87364 - protein, 15 aa, Homo Sapiens
DLSKFKMQSLDKDIV

SEQ ID NO: 87365 - protein, 15 aa, Homo Sapiens
LSKFKMQSLDKDIVA

SEQ ID NO: 87366 - protein, 15 aa, Homo Sapiens
SKFKMQSLDKDIVAL

SEQ ID NO: 87367 - protein, 15 aa, Homo Sapiens
KFKMQSLDKDIVALM

SEQ ID NO: 87368 - protein, 15 aa, Homo Sapiens
FKMQSLDKDIVALMV

SEQ ID NO: 87369 - protein, 15 aa, Homo Sapiens
KMQSLDKDIVALMVR

SEQ ID NO: 87370 - protein, 15 aa, Homo Sapiens
MQSLDKDIVALMVRR

SEQ ID NO: 87371 - protein, 15 aa, Homo Sapiens
QSLDKDIVALMVRRA

SEQ ID NO: 87372 - protein, 15 aa, Homo Sapiens
SLDKDIVALMVRRAY

SEQ ID NO: 87373 - protein, 15 aa, Homo Sapiens
LDKDIVALMVRRAYD

SEQ ID NO: 87374 - protein, 15 aa, Homo Sapiens
DKDIVALMVRRAYDI

SEQ ID NO: 87375 - protein, 15 aa, Homo Sapiens
KDIVALMVRRAYDIA

SEQ ID NO: 87376 - protein, 15 aa, Homo Sapiens
DIVALMVRRAYDIAG

SEQ ID NO: 87377 - protein, 15 aa, Homo Sapiens
IVALMVRRAYDIAGS

SEQ ID NO: 87378 - protein, 15 aa, Homo Sapiens
VALMVRRAYDIAGST

SEQ ID NO: 87379 - protein, 15 aa, Homo Sapiens
ALMVRRAYDIAGSTK

SEQ ID NO: 87380 - protein, 15 aa, Homo Sapiens
LMVRRAYDIAGSTKD

SEQ ID NO: 87381 - protein, 15 aa, Homo Sapiens
MVRRAYDIAGSTKDV

SEQ ID NO: 87382 - protein, 15 aa, Homo Sapiens
VRRAYDIAGSTKDVK

SEQ ID NO: 87383 - protein, 15 aa, Homo Sapiens
RRAYDIAGSTKDVKV

SEQ ID NO: 87384 - protein, 15 aa, Homo Sapiens
RAYDIAGSTKDVKVF

SEQ ID NO: 87385 - protein, 15 aa, Homo Sapiens
AYDIAGSTKDVKVFL

SEQ ID NO: 87386 - protein, 15 aa, Homo Sapiens
YDIAGSTKDVKVFLN

SEQ ID NO: 87387 - protein, 15 aa, Homo Sapiens
DIAGSTKDVKVFLNG

SEQ ID NO: 87388 - protein, 15 aa, Homo Sapiens
IAGSTKDVKVFLNGN

SEQ ID NO: 87389 - protein, 15 aa, Homo Sapiens
AGSTKDVKVFLNGNK

SEQ ID NO: 87390 - protein, 15 aa, Homo Sapiens
GSTKDVKVFLNGNKL

SEQ ID NO: 87391 - protein, 15 aa, Homo Sapiens
STKDVKVFLNGNKLP

SEQ ID NO: 87392 - protein, 15 aa, Homo Sapiens
TKDVKVFLNGNKLPV

SEQ ID NO: 87393 - protein, 15 aa, Homo Sapiens
KDVKVFLNGNKLPVK

SEQ ID NO: 87394 - protein, 15 aa, Homo Sapiens
DVKVFLNGNKLPVKG

SEQ ID NO: 87395 - protein, 15 aa, Homo Sapiens
VKVFLNGNKLPVKGF

SEQ ID NO: 87396 - protein, 15 aa, Homo Sapiens
KVFLNGNKLPVKGFR

SEQ ID NO: 87397 - protein, 15 aa, Homo Sapiens
VFLNGNKLPVKGFRS

SEQ ID NO: 87398 - protein, 15 aa, Homo Sapiens
FLNGNKLPVKGFRSY

SEQ ID NO: 87399 - protein, 15 aa, Homo Sapiens
LNGNKLPVKGFRSYV

SEQ ID NO: 87400 - protein, 15 aa, Homo Sapiens
NGNKLPVKGFRSYVD

SEQ ID NO: 87401 - protein, 15 aa, Homo Sapiens
GNKLPVKGFRSYVDM

SEQ ID NO: 87402 - protein, 15 aa, Homo Sapiens
NKLPVKGFRSYVDMY

SEQ ID NO: 87403 - protein, 15 aa, Homo Sapiens
KLPVKGFRSYVDMYL

SEQ ID NO: 87404 - protein, 15 aa, Homo Sapiens
LPVKGFRSYVDMYLK

SEQ ID NO: 87405 - protein, 15 aa, Homo Sapiens
PVKGFRSYVDMYLKD

SEQ ID NO: 87406 - protein, 15 aa, Homo Sapiens
VKGFRSYVDMYLKDK

SEQ ID NO: 87407 - protein, 15 aa, Homo Sapiens
KGFRSYVDMYLKDKL

SEQ ID NO: 87408 - protein, 15 aa, Homo Sapiens
GFRSYVDMYLKDKLD

SEQ ID NO: 87409 - protein, 15 aa, Homo Sapiens
FRSYVDMYLKDKLDE

SEQ ID NO: 87410 - protein, 15 aa, Homo Sapiens
RSYVDMYLKDKLDET

SEQ ID NO: 87411 - protein, 15 aa, Homo Sapiens
SYVDMYLKDKLDETG

SEQ ID NO: 87412 - protein, 15 aa, Homo Sapiens
YVDMYLKDKLDETGN

SEQ ID NO: 87413 - protein, 15 aa, Homo Sapiens
VDMYLKDKLDETGNS

SEQ ID NO: 87414 - protein, 15 aa, Homo Sapiens
DMYLKDKLDETGNSL

SEQ ID NO: 87415 - protein, 15 aa, Homo Sapiens
MYLKDKLDETGNSLK

SEQ ID NO: 87416 - protein, 15 aa, Homo Sapiens
YLKDKLDETGNSLKV

SEQ ID NO: 87417 - protein, 15 aa, Homo Sapiens
LKDKLDETGNSLKVI

SEQ ID NO: 87418 - protein, 15 aa, Homo Sapiens
KDKLDETGNSLKVIH

SEQ ID NO: 87419 - protein, 15 aa, Homo Sapiens
DKLDETGNSLKVIHE

SEQ ID NO: 87420 - protein, 15 aa, Homo Sapiens
KLDETGNSLKVIHEQ

SEQ ID NO: 87421 - protein, 15 aa, Homo Sapiens
LDETGNSLKVIHEQV

SEQ ID NO: 87422 - protein, 15 aa, Homo Sapiens
DETGNSLKVIHEQVN

SEQ ID NO: 87423 - protein, 15 aa, Homo Sapiens
ETGNSLKVIHEQVNH

SEQ ID NO: 87424 - protein, 15 aa, Homo Sapiens
TGNSLKVIHEQVNHR

SEQ ID NO: 87425 - protein, 15 aa, Homo Sapiens
GNSLKVIHEQVNHRW

SEQ ID NO: 87426 - protein, 15 aa, Homo Sapiens
NSLKVIHEQVNHRWE

SEQ ID NO: 87427 - protein, 15 aa, Homo Sapiens
SLKVIHEQVNHRWEV

SEQ ID NO: 87428 - protein, 15 aa, Homo Sapiens
LKVIHEQVNHRWEVC

SEQ ID NO: 87429 - protein, 15 aa, Homo Sapiens
KVIHEQVNHRWEVCL

SEQ ID NO: 87430 - protein, 15 aa, Homo Sapiens
VIHEQVNHRWEVCLT

SEQ ID NO: 87431 - protein, 15 aa, Homo Sapiens
IHEQVNHRWEVCLTM

SEQ ID NO: 87432 - protein, 15 aa, Homo Sapiens
HEQVNHRWEVCLTMS

SEQ ID NO: 87433 - protein, 15 aa, Homo Sapiens
EQVNHRWEVCLTMSE

SEQ ID NO: 87434 - protein, 15 aa, Homo Sapiens
QVNHRWEVCLTMSEK

SEQ ID NO: 87435 - protein, 15 aa, Homo Sapiens
VNHRWEVCLTMSEKG

SEQ ID NO: 87436 - protein, 15 aa, Homo Sapiens
NHRWEVCLTMSEKGF

SEQ ID NO: 87437 - protein, 15 aa, Homo Sapiens
HRWEVCLTMSEKGFQ

SEQ ID NO: 87438 - protein, 15 aa, Homo Sapiens
RWEVCLTMSEKGFQQ

SEQ ID NO: 87439 - protein, 15 aa, Homo Sapiens
WEVCLTMSEKGFQQI

SEQ ID NO: 87440 - protein, 15 aa, Homo Sapiens
EVCLTMSEKGFQQIS

SEQ ID NO: 87441 - protein, 15 aa, Homo Sapiens
VCLTMSEKGFQQISF

SEQ ID NO: 87442 - protein, 15 aa, Homo Sapiens
CLTMSEKGFQQISFV

SEQ ID NO: 87443 - protein, 15 aa, Homo Sapiens
LTMSEKGFQQISFVN

SEQ ID NO: 87444 - protein, 15 aa, Homo Sapiens
TMSEKGFQQISFVNS

SEQ ID NO: 87445 - protein, 15 aa, Homo Sapiens
MSEKGFQQISFVNSI

SEQ ID NO: 87446 - protein, 15 aa, Homo Sapiens
SEKGFQQISFVNSIA

SEQ ID NO: 87447 - protein, 15 aa, Homo Sapiens
EKGFQQISFVNSIAT

SEQ ID NO: 87448 - protein, 15 aa, Homo Sapiens
KGFQQISFVNSIATS

SEQ ID NO: 87449 - protein, 15 aa, Homo Sapiens
GFQQISFVNSIATSK

SEQ ID NO: 87450 - protein, 15 aa, Homo Sapiens
FQQISFVNSIATSKG

SEQ ID NO: 87451 - protein, 15 aa, Homo Sapiens
QQISFVNSIATSKGG

SEQ ID NO: 87452 - protein, 15 aa, Homo Sapiens
QISFVNSIATSKGGR

SEQ ID NO: 87453 - protein, 15 aa, Homo Sapiens
ISFVNSIATSKGGRH

SEQ ID NO: 87454 - protein, 15 aa, Homo Sapiens
SFVNSIATSKGGRHV

SEQ ID NO: 87455 - protein, 15 aa, Homo Sapiens
FVNSIATSKGGRHVD

SEQ ID NO: 87456 - protein, 15 aa, Homo Sapiens
VNSIATSKGGRHVDY

SEQ ID NO: 87457 - protein, 15 aa, Homo Sapiens
NSIATSKGGRHVDYV

SEQ ID NO: 87458 - protein, 15 aa, Homo Sapiens
SIATSKGGRHVDYVA

SEQ ID NO: 87459 - protein, 15 aa, Homo Sapiens
IATSKGGRHVDYVAD

SEQ ID NO: 87460 - protein, 15 aa, Homo Sapiens
ATSKGGRHVDYVADQ

SEQ ID NO: 87461 - protein, 15 aa, Homo Sapiens
TSKGGRHVDYVADQI

SEQ ID NO: 87462 - protein, 15 aa, Homo Sapiens
SKGGRHVDYVADQIV

SEQ ID NO: 87463 - protein, 15 aa, Homo Sapiens
KGGRHVDYVADQIVT

SEQ ID NO: 87464 - protein, 15 aa, Homo Sapiens
GGRHVDYVADQIVTK

SEQ ID NO: 87465 - protein, 15 aa, Homo Sapiens
GRHVDYVADQIVTKL

SEQ ID NO: 87466 - protein, 15 aa, Homo Sapiens
RHVDYVADQIVTKLV

SEQ ID NO: 87467 - protein, 15 aa, Homo Sapiens
HVDYVADQIVTKLVD

SEQ ID NO: 87468 - protein, 15 aa, Homo Sapiens
VDYVADQIVTKLVDV

SEQ ID NO: 87469 - protein, 15 aa, Homo Sapiens
DYVADQIVTKLVDVV

SEQ ID NO: 87470 - protein, 15 aa, Homo Sapiens
YVADQIVTKLVDVVK

SEQ ID NO: 87471 - protein, 15 aa, Homo Sapiens
VADQIVTKLVDVVKK

SEQ ID NO: 87472 - protein, 15 aa, Homo Sapiens
ADQIVTKLVDVVKKK

SEQ ID NO: 87473 - protein, 15 aa, Homo Sapiens
DQIVTKLVDVVKKKN

SEQ ID NO: 87474 - protein, 15 aa, Homo Sapiens
QIVTKLVDVVKKKNK

SEQ ID NO: 87475 - protein, 15 aa, Homo Sapiens
IVTKLVDVVKKKNKG

SEQ ID NO: 87476 - protein, 15 aa, Homo Sapiens
VTKLVDVVKKKNKGG

SEQ ID NO: 87477 - protein, 15 aa, Homo Sapiens
TKLVDVVKKKNKGGV

SEQ ID NO: 87478 - protein, 15 aa, Homo Sapiens
KLVDVVKKKNKGGVA

SEQ ID NO: 87479 - protein, 15 aa, Homo Sapiens
LVDVVKKKNKGGVAV

SEQ ID NO: 87480 - protein, 15 aa, Homo Sapiens
VDVVKKKNKGGVAVK

SEQ ID NO: 87481 - protein, 15 aa, Homo Sapiens
DVVKKKNKGGVAVKA

SEQ ID NO: 87482 - protein, 15 aa, Homo Sapiens
VVKKKNKGGVAVKAH

SEQ ID NO: 87483 - protein, 15 aa, Homo Sapiens
VKKKNKGGVAVKAHQ

SEQ ID NO: 87484 - protein, 15 aa, Homo Sapiens
KKKNKGGVAVKAHQV

SEQ ID NO: 87485 - protein, 15 aa, Homo Sapiens
KKNKGGVAVKAHQVK

SEQ ID NO: 87486 - protein, 15 aa, Homo Sapiens
KNKGGVAVKAHQVKN

SEQ ID NO: 87487 - protein, 15 aa, Homo Sapiens
NKGGVAVKAHQVKNH

SEQ ID NO: 87488 - protein, 15 aa, Homo Sapiens
KGGVAVKAHQVKNHM

SEQ ID NO: 87489 - protein, 15 aa, Homo Sapiens
GGVAVKAHQVKNHMW

SEQ ID NO: 87490 - protein, 15 aa, Homo Sapiens
GVAVKAHQVKNHMWI

SEQ ID NO: 87491 - protein, 15 aa, Homo Sapiens
VAVKAHQVKNHMWIF

SEQ ID NO: 87492 - protein, 15 aa, Homo Sapiens
AVKAHQVKNHMWIFV

SEQ ID NO: 87493 - protein, 15 aa, Homo Sapiens
VKAHQVKNHMWIFVN

SEQ ID NO: 87494 - protein, 15 aa, Homo Sapiens
KAHQVKNHMWIFVNA

SEQ ID NO: 87495 - protein, 15 aa, Homo Sapiens
AHQVKNHMWIFVNAL

SEQ ID NO: 87496 - protein, 15 aa, Homo Sapiens
HQVKNHMWIFVNALI

SEQ ID NO: 87497 - protein, 15 aa, Homo Sapiens
QVKNHMWIFVNALIE

SEQ ID NO: 87498 - protein, 15 aa, Homo Sapiens
VKNHMWIFVNALIEN

SEQ ID NO: 87499 - protein, 15 aa, Homo Sapiens
KNHMWIFVNALIENP

SEQ ID NO: 87500 - protein, 15 aa, Homo Sapiens
NHMWIFVNALIENPT

SEQ ID NO: 87501 - protein, 15 aa, Homo Sapiens
HMWIFVNALIENPTF

SEQ ID NO: 87502 - protein, 15 aa, Homo Sapiens
MWIFVNALIENPTFD

SEQ ID NO: 87503 - protein, 15 aa, Homo Sapiens
WIFVNALIENPTFDS

SEQ ID NO: 87504 - protein, 15 aa, Homo Sapiens
IFVNALIENPTFDSQ

SEQ ID NO: 87505 - protein, 15 aa, Homo Sapiens
FVNALIENPTFDSQT

SEQ ID NO: 87506 - protein, 15 aa, Homo Sapiens
VNALIENPTFDSQTK

SEQ ID NO: 87507 - protein, 15 aa, Homo Sapiens
NALIENPTFDSQTKE

SEQ ID NO: 87508 - protein, 15 aa, Homo Sapiens
ALIENPTFDSQTKEN

SEQ ID NO: 87509 - protein, 15 aa, Homo Sapiens
LIENPTFDSQTKENM

SEQ ID NO: 87510 - protein, 15 aa, Homo Sapiens
IENPTFDSQTKENMT

SEQ ID NO: 87511 - protein, 15 aa, Homo Sapiens
ENPTFDSQTKENMTL

SEQ ID NO: 87512 - protein, 15 aa, Homo Sapiens
NPTFDSQTKENMTLQ

SEQ ID NO: 87513 - protein, 15 aa, Homo Sapiens
PTFDSQTKENMTLQP

SEQ ID NO: 87514 - protein, 15 aa, Homo Sapiens
TFDSQTKENMTLQPK

SEQ ID NO: 87515 - protein, 15 aa, Homo Sapiens
FDSQTKENMTLQPKS

SEQ ID NO: 87516 - protein, 15 aa, Homo Sapiens
DSQTKENMTLQPKSF

SEQ ID NO: 87517 - protein, 15 aa, Homo Sapiens
SQTKENMTLQPKSFG

SEQ ID NO: 87518 - protein, 15 aa, Homo Sapiens
QTKENMTLQPKSFGS

SEQ ID NO: 87519 - protein, 15 aa, Homo Sapiens
TKENMTLQPKSFGST

SEQ ID NO: 87520 - protein, 15 aa, Homo Sapiens
KENMTLQPKSFGSTC

SEQ ID NO: 87521 - protein, 15 aa, Homo Sapiens
ENMTLQPKSFGSTCQ

SEQ ID NO: 87522 - protein, 15 aa, Homo Sapiens
NMTLQPKSFGSTCQL

SEQ ID NO: 87523 - protein, 15 aa, Homo Sapiens
MTLQPKSFGSTCQLS

SEQ ID NO: 87524 - protein, 15 aa, Homo Sapiens
TLQPKSFGSTCQLSE

SEQ ID NO: 87525 - protein, 15 aa, Homo Sapiens
LQPKSFGSTCQLSEK

SEQ ID NO: 87526 - protein, 15 aa, Homo Sapiens
QPKSFGSTCQLSEKF

SEQ ID NO: 87527 - protein, 15 aa, Homo Sapiens
PKSFGSTCQLSEKFI

SEQ ID NO: 87528 - protein, 15 aa, Homo Sapiens
KSFGSTCQLSEKFIK

SEQ ID NO: 87529 - protein, 15 aa, Homo Sapiens
SFGSTCQLSEKFIKA

SEQ ID NO: 87530 - protein, 15 aa, Homo Sapiens
FGSTCQLSEKFIKAA

SEQ ID NO: 87531 - protein, 15 aa, Homo Sapiens
GSTCQLSEKFIKAAI

SEQ ID NO: 87532 - protein, 15 aa, Homo Sapiens
STCQLSEKFIKAAIG

SEQ ID NO: 87533 - protein, 15 aa, Homo Sapiens
TCQLSEKFIKAAIGC

SEQ ID NO: 87534 - protein, 15 aa, Homo Sapiens
CQLSEKFIKAAIGCG

SEQ ID NO: 87535 - protein, 15 aa, Homo Sapiens
QLSEKFIKAAIGCGI

SEQ ID NO: 87536 - protein, 15 aa, Homo Sapiens
LSEKFIKAAIGCGIV

SEQ ID NO: 87537 - protein, 15 aa, Homo Sapiens
SEKFIKAAIGCGIVE

SEQ ID NO: 87538 - protein, 15 aa, Homo Sapiens
EKFIKAAIGCGIVES

SEQ ID NO: 87539 - protein, 15 aa, Homo Sapiens
KFIKAAIGCGIVESI

SEQ ID NO: 87540 - protein, 15 aa, Homo Sapiens
FIKAAIGCGIVESIL

SEQ ID NO: 87541 - protein, 15 aa, Homo Sapiens
IKAAIGCGIVESILN

SEQ ID NO: 87542 - protein, 15 aa, Homo Sapiens
KAAIGCGIVESILNW

SEQ ID NO: 87543 - protein, 15 aa, Homo Sapiens
AAIGCGIVESILNWV

SEQ ID NO: 87544 - protein, 15 aa, Homo Sapiens
AIGCGIVESILNWVK

SEQ ID NO: 87545 - protein, 15 aa, Homo Sapiens
IGCGIVESILNWVKF

SEQ ID NO: 87546 - protein, 15 aa, Homo Sapiens
GCGIVESILNWVKFK

SEQ ID NO: 87547 - protein, 15 aa, Homo Sapiens
CGIVESILNWVKFKA

SEQ ID NO: 87548 - protein, 15 aa, Homo Sapiens
GIVESILNWVKFKAQ

SEQ ID NO: 87549 - protein, 15 aa, Homo Sapiens
IVESILNWVKFKAQV

SEQ ID NO: 87550 - protein, 15 aa, Homo Sapiens
VESILNWVKFKAQVQ

SEQ ID NO: 87551 - protein, 15 aa, Homo Sapiens
ESILNWVKFKAQVQL

SEQ ID NO: 87552 - protein, 15 aa, Homo Sapiens
SILNWVKFKAQVQLN

SEQ ID NO: 87553 - protein, 15 aa, Homo Sapiens
ILNWVKFKAQVQLNK

SEQ ID NO: 87554 - protein, 15 aa, Homo Sapiens
LNWVKFKAQVQLNKK

SEQ ID NO: 87555 - protein, 15 aa, Homo Sapiens
NWVKFKAQVQLNKKC

SEQ ID NO: 87556 - protein, 15 aa, Homo Sapiens
WVKFKAQVQLNKKCS

SEQ ID NO: 87557 - protein, 15 aa, Homo Sapiens
VKFKAQVQLNKKCSA

SEQ ID NO: 87558 - protein, 15 aa, Homo Sapiens
KFKAQVQLNKKCSAV

SEQ ID NO: 87559 - protein, 15 aa, Homo Sapiens
FKAQVQLNKKCSAVK

SEQ ID NO: 87560 - protein, 15 aa, Homo Sapiens
KAQVQLNKKCSAVKH

SEQ ID NO: 87561 - protein, 15 aa, Homo Sapiens
AQVQLNKKCSAVKHN

SEQ ID NO: 87562 - protein, 15 aa, Homo Sapiens
QVQLNKKCSAVKHNR

SEQ ID NO: 87563 - protein, 15 aa, Homo Sapiens
VQLNKKCSAVKHNRI

SEQ ID NO: 87564 - protein, 15 aa, Homo Sapiens
QLNKKCSAVKHNRIK

SEQ ID NO: 87565 - protein, 15 aa, Homo Sapiens
LNKKCSAVKHNRIKG

SEQ ID NO: 87566 - protein, 15 aa, Homo Sapiens
NKKCSAVKHNRIKGI

SEQ ID NO: 87567 - protein, 15 aa, Homo Sapiens
KKCSAVKHNRIKGIP

SEQ ID NO: 87568 - protein, 15 aa, Homo Sapiens
KCSAVKHNRIKGIPK

SEQ ID NO: 87569 - protein, 15 aa, Homo Sapiens
CSAVKHNRIKGIPKL

SEQ ID NO: 87570 - protein, 15 aa, Homo Sapiens
SAVKHNRIKGIPKLD

SEQ ID NO: 87571 - protein, 15 aa, Homo Sapiens
AVKHNRIKGIPKLDD

SEQ ID NO: 87572 - protein, 15 aa, Homo Sapiens
VKHNRIKGIPKLDDA

SEQ ID NO: 87573 - protein, 15 aa, Homo Sapiens
KHNRIKGIPKLDDAN

SEQ ID NO: 87574 - protein, 15 aa, Homo Sapiens
HNRIKGIPKLDDAND

SEQ ID NO: 87575 - protein, 15 aa, Homo Sapiens
NRIKGIPKLDDANDA

SEQ ID NO: 87576 - protein, 15 aa, Homo Sapiens
RIKGIPKLDDANDAG

SEQ ID NO: 87577 - protein, 15 aa, Homo Sapiens
IKGIPKLDDANDAGG

SEQ ID NO: 87578 - protein, 15 aa, Homo Sapiens
KGIPKLDDANDAGGR

SEQ ID NO: 87579 - protein, 15 aa, Homo Sapiens
GIPKLDDANDAGGRN

SEQ ID NO: 87580 - protein, 15 aa, Homo Sapiens
IPKLDDANDAGGRNS

SEQ ID NO: 87581 - protein, 15 aa, Homo Sapiens
PKLDDANDAGGRNST

SEQ ID NO: 87582 - protein, 15 aa, Homo Sapiens
KLDDANDAGGRNSTE

SEQ ID NO: 87583 - protein, 15 aa, Homo Sapiens
LDDANDAGGRNSTEC

SEQ ID NO: 87584 - protein, 15 aa, Homo Sapiens
DDANDAGGRNSTECT

SEQ ID NO: 87585 - protein, 15 aa, Homo Sapiens
DANDAGGRNSTECTL

SEQ ID NO: 87586 - protein, 15 aa, Homo Sapiens
ANDAGGRNSTECTLI

SEQ ID NO: 87587 - protein, 15 aa, Homo Sapiens
NDAGGRNSTECTLIL

SEQ ID NO: 87588 - protein, 15 aa, Homo Sapiens
DAGGRNSTECTLILT

SEQ ID NO: 87589 - protein, 15 aa, Homo Sapiens
AGGRNSTECTLILTE

SEQ ID NO: 87590 - protein, 15 aa, Homo Sapiens
GGRNSTECTLILTEG

SEQ ID NO: 87591 - protein, 15 aa, Homo Sapiens
GRNSTECTLILTEGD

SEQ ID NO: 87592 - protein, 15 aa, Homo Sapiens
RNSTECTLILTEGDS

SEQ ID NO: 87593 - protein, 15 aa, Homo Sapiens
NSTECTLILTEGDSA

SEQ ID NO: 87594 - protein, 15 aa, Homo Sapiens
STECTLILTEGDSAK

SEQ ID NO: 87595 - protein, 15 aa, Homo Sapiens
TECTLILTEGDSAKT

SEQ ID NO: 87596 - protein, 15 aa, Homo Sapiens
ECTLILTEGDSAKTL

SEQ ID NO: 87597 - protein, 15 aa, Homo Sapiens
CTLILTEGDSAKTLA

SEQ ID NO: 87598 - protein, 15 aa, Homo Sapiens
TLILTEGDSAKTLAV

SEQ ID NO: 87599 - protein, 15 aa, Homo Sapiens
LILTEGDSAKTLAVS

SEQ ID NO: 87600 - protein, 15 aa, Homo Sapiens
ILTEGDSAKTLAVSG

SEQ ID NO: 87601 - protein, 15 aa, Homo Sapiens
LTEGDSAKTLAVSGL

SEQ ID NO: 87602 - protein, 15 aa, Homo Sapiens
TEGDSAKTLAVSGLG

SEQ ID NO: 87603 - protein, 15 aa, Homo Sapiens
EGDSAKTLAVSGLGV

SEQ ID NO: 87604 - protein, 15 aa, Homo Sapiens
GDSAKTLAVSGLGVV

SEQ ID NO: 87605 - protein, 15 aa, Homo Sapiens
DSAKTLAVSGLGVVG

SEQ ID NO: 87606 - protein, 15 aa, Homo Sapiens
SAKTLAVSGLGVVGR

SEQ ID NO: 87607 - protein, 15 aa, Homo Sapiens
AKTLAVSGLGVVGRD

SEQ ID NO: 87608 - protein, 15 aa, Homo Sapiens
KTLAVSGLGVVGRDK

SEQ ID NO: 87609 - protein, 15 aa, Homo Sapiens
TLAVSGLGVVGRDKY

SEQ ID NO: 87610 - protein, 15 aa, Homo Sapiens
LAVSGLGVVGRDKYG

SEQ ID NO: 87611 - protein, 15 aa, Homo Sapiens
AVSGLGVVGRDKYGV

SEQ ID NO: 87612 - protein, 15 aa, Homo Sapiens
VSGLGVVGRDKYGVF

SEQ ID NO: 87613 - protein, 15 aa, Homo Sapiens
SGLGVVGRDKYGVFP

SEQ ID NO: 87614 - protein, 15 aa, Homo Sapiens
GLGVVGRDKYGVFPL

SEQ ID NO: 87615 - protein, 15 aa, Homo Sapiens
LGVVGRDKYGVFPLR

SEQ ID NO: 87616 - protein, 15 aa, Homo Sapiens
GVVGRDKYGVFPLRG

SEQ ID NO: 87617 - protein, 15 aa, Homo Sapiens
VVGRDKYGVFPLRGK

SEQ ID NO: 87618 - protein, 15 aa, Homo Sapiens
VGRDKYGVFPLRGKI

SEQ ID NO: 87619 - protein, 15 aa, Homo Sapiens
GRDKYGVFPLRGKIL

SEQ ID NO: 87620 - protein, 15 aa, Homo Sapiens
RDKYGVFPLRGKILN

SEQ ID NO: 87621 - protein, 15 aa, Homo Sapiens
DKYGVFPLRGKILNV

SEQ ID NO: 87622 - protein, 15 aa, Homo Sapiens
KYGVFPLRGKILNVR

SEQ ID NO: 87623 - protein, 15 aa, Homo Sapiens
YGVFPLRGKILNVRE

SEQ ID NO: 87624 - protein, 15 aa, Homo Sapiens
GVFPLRGKILNVREA

SEQ ID NO: 87625 - protein, 15 aa, Homo Sapiens
VFPLRGKILNVREAS

SEQ ID NO: 87626 - protein, 15 aa, Homo Sapiens
FPLRGKILNVREASH

SEQ ID NO: 87627 - protein, 15 aa, Homo Sapiens
PLRGKILNVREASHK

SEQ ID NO: 87628 - protein, 15 aa, Homo Sapiens
LRGKILNVREASHKQ

SEQ ID NO: 87629 - protein, 15 aa, Homo Sapiens
RGKILNVREASHKQI

SEQ ID NO: 87630 - protein, 15 aa, Homo Sapiens
GKILNVREASHKQIM

SEQ ID NO: 87631 - protein, 15 aa, Homo Sapiens
KILNVREASHKQIME

SEQ ID NO: 87632 - protein, 15 aa, Homo Sapiens
ILNVREASHKQIMEN

SEQ ID NO: 87633 - protein, 15 aa, Homo Sapiens
LNVREASHKQIMENA

SEQ ID NO: 87634 - protein, 15 aa, Homo Sapiens
NVREASHKQIMENAE

SEQ ID NO: 87635 - protein, 15 aa, Homo Sapiens
VREASHKQIMENAEI

SEQ ID NO: 87636 - protein, 15 aa, Homo Sapiens
REASHKQIMENAEIN

SEQ ID NO: 87637 - protein, 15 aa, Homo Sapiens
EASHKQIMENAEINN

SEQ ID NO: 87638 - protein, 15 aa, Homo Sapiens
ASHKQIMENAEINNI

SEQ ID NO: 87639 - protein, 15 aa, Homo Sapiens
SHKQIMENAEINNII

SEQ ID NO: 87640 - protein, 15 aa, Homo Sapiens
HKQIMENAEINNIIK

SEQ ID NO: 87641 - protein, 15 aa, Homo Sapiens
KQIMENAEINNIIKI

SEQ ID NO: 87642 - protein, 15 aa, Homo Sapiens
QIMENAEINNIIKIV

SEQ ID NO: 87643 - protein, 15 aa, Homo Sapiens
IMENAEINNIIKIVG

SEQ ID NO: 87644 - protein, 15 aa, Homo Sapiens
MENAEINNIIKIVGL

SEQ ID NO: 87645 - protein, 15 aa, Homo Sapiens
ENAEINNIIKIVGLQ

SEQ ID NO: 87646 - protein, 15 aa, Homo Sapiens
NAEINNIIKIVGLQY

SEQ ID NO: 87647 - protein, 15 aa, Homo Sapiens
AEINNIIKIVGLQYK

SEQ ID NO: 87648 - protein, 15 aa, Homo Sapiens
EINNIIKIVGLQYKK

SEQ ID NO: 87649 - protein, 15 aa, Homo Sapiens
INNIIKIVGLQYKKN

SEQ ID NO: 87650 - protein, 15 aa, Homo Sapiens
NNIIKIVGLQYKKNY

SEQ ID NO: 87651 - protein, 15 aa, Homo Sapiens
NIIKIVGLQYKKNYE

SEQ ID NO: 87652 - protein, 15 aa, Homo Sapiens
IIKIVGLQYKKNYED

SEQ ID NO: 87653 - protein, 15 aa, Homo Sapiens
IKIVGLQYKKNYEDE

SEQ ID NO: 87654 - protein, 15 aa, Homo Sapiens
KIVGLQYKKNYEDED

SEQ ID NO: 87655 - protein, 15 aa, Homo Sapiens
IVGLQYKKNYEDEDS

SEQ ID NO: 87656 - protein, 15 aa, Homo Sapiens
VGLQYKKNYEDEDSL

SEQ ID NO: 87657 - protein, 15 aa, Homo Sapiens
GLQYKKNYEDEDSLK

SEQ ID NO: 87658 - protein, 15 aa, Homo Sapiens
LQYKKNYEDEDSLKT

SEQ ID NO: 87659 - protein, 15 aa, Homo Sapiens
QYKKNYEDEDSLKTL

SEQ ID NO: 87660 - protein, 15 aa, Homo Sapiens
YKKNYEDEDSLKTLR

SEQ ID NO: 87661 - protein, 15 aa, Homo Sapiens
KKNYEDEDSLKTLRY

SEQ ID NO: 87662 - protein, 15 aa, Homo Sapiens
KNYEDEDSLKTLRYG

SEQ ID NO: 87663 - protein, 15 aa, Homo Sapiens
NYEDEDSLKTLRYGK

SEQ ID NO: 87664 - protein, 15 aa, Homo Sapiens
YEDEDSLKTLRYGKI

SEQ ID NO: 87665 - protein, 15 aa, Homo Sapiens
EDEDSLKTLRYGKIM

SEQ ID NO: 87666 - protein, 15 aa, Homo Sapiens
DEDSLKTLRYGKIMI

SEQ ID NO: 87667 - protein, 15 aa, Homo Sapiens
EDSLKTLRYGKIMIM

SEQ ID NO: 87668 - protein, 15 aa, Homo Sapiens
DSLKTLRYGKIMIMT

SEQ ID NO: 87669 - protein, 15 aa, Homo Sapiens
SLKTLRYGKIMIMTD

SEQ ID NO: 87670 - protein, 15 aa, Homo Sapiens
LKTLRYGKIMIMTDQ

SEQ ID NO: 87671 - protein, 15 aa, Homo Sapiens
KTLRYGKIMIMTDQD

SEQ ID NO: 87672 - protein, 15 aa, Homo Sapiens
TLRYGKIMIMTDQDQ

SEQ ID NO: 87673 - protein, 15 aa, Homo Sapiens
LRYGKIMIMTDQDQD

SEQ ID NO: 87674 - protein, 15 aa, Homo Sapiens
RYGKIMIMTDQDQDG

SEQ ID NO: 87675 - protein, 15 aa, Homo Sapiens
YGKIMIMTDQDQDGS

SEQ ID NO: 87676 - protein, 15 aa, Homo Sapiens
GKIMIMTDQDQDGSH

SEQ ID NO: 87677 - protein, 15 aa, Homo Sapiens
KIMIMTDQDQDGSHI

SEQ ID NO: 87678 - protein, 15 aa, Homo Sapiens
IMIMTDQDQDGSHIK

SEQ ID NO: 87679 - protein, 15 aa, Homo Sapiens
MIMTDQDQDGSHIKG

SEQ ID NO: 87680 - protein, 15 aa, Homo Sapiens
IMTDQDQDGSHIKGL

SEQ ID NO: 87681 - protein, 15 aa, Homo Sapiens
MTDQDQDGSHIKGLL

SEQ ID NO: 87682 - protein, 15 aa, Homo Sapiens
TDQDQDGSHIKGLLI

SEQ ID NO: 87683 - protein, 15 aa, Homo Sapiens
DQDQDGSHIKGLLIN

SEQ ID NO: 87684 - protein, 15 aa, Homo Sapiens
QDQDGSHIKGLLINF

SEQ ID NO: 87685 - protein, 15 aa, Homo Sapiens
DQDGSHIKGLLINFI

SEQ ID NO: 87686 - protein, 15 aa, Homo Sapiens
QDGSHIKGLLINFIH

SEQ ID NO: 87687 - protein, 15 aa, Homo Sapiens
DGSHIKGLLINFIHH

SEQ ID NO: 87688 - protein, 15 aa, Homo Sapiens
GSHIKGLLINFIHHN

SEQ ID NO: 87689 - protein, 15 aa, Homo Sapiens
SHIKGLLINFIHHNW

SEQ ID NO: 87690 - protein, 15 aa, Homo Sapiens
HIKGLLINFIHHNWP

SEQ ID NO: 87691 - protein, 15 aa, Homo Sapiens
IKGLLINFIHHNWPS

SEQ ID NO: 87692 - protein, 15 aa, Homo Sapiens
KGLLINFIHHNWPSL

SEQ ID NO: 87693 - protein, 15 aa, Homo Sapiens
GLLINFIHHNWPSLL

SEQ ID NO: 87694 - protein, 15 aa, Homo Sapiens
LLINFIHHNWPSLLR

SEQ ID NO: 87695 - protein, 15 aa, Homo Sapiens
LINFIHHNWPSLLRH

SEQ ID NO: 87696 - protein, 15 aa, Homo Sapiens
INFIHHNWPSLLRHR

SEQ ID NO: 87697 - protein, 15 aa, Homo Sapiens
NFIHHNWPSLLRHRF

SEQ ID NO: 87698 - protein, 15 aa, Homo Sapiens
FIHHNWPSLLRHRFL

SEQ ID NO: 87699 - protein, 15 aa, Homo Sapiens
IHHNWPSLLRHRFLE

SEQ ID NO: 87700 - protein, 15 aa, Homo Sapiens
HHNWPSLLRHRFLEE

SEQ ID NO: 87701 - protein, 15 aa, Homo Sapiens
HNWPSLLRHRFLEEF

SEQ ID NO: 87702 - protein, 15 aa, Homo Sapiens
NWPSLLRHRFLEEFI

SEQ ID NO: 87703 - protein, 15 aa, Homo Sapiens
WPSLLRHRFLEEFIT

SEQ ID NO: 87704 - protein, 15 aa, Homo Sapiens
PSLLRHRFLEEFITP

SEQ ID NO: 87705 - protein, 15 aa, Homo Sapiens
SLLRHRFLEEFITPI

SEQ ID NO: 87706 - protein, 15 aa, Homo Sapiens
LLRHRFLEEFITPIV

SEQ ID NO: 87707 - protein, 15 aa, Homo Sapiens
LRHRFLEEFITPIVK

SEQ ID NO: 87708 - protein, 15 aa, Homo Sapiens
RHRFLEEFITPIVKV

SEQ ID NO: 87709 - protein, 15 aa, Homo Sapiens
HRFLEEFITPIVKVS

SEQ ID NO: 87710 - protein, 15 aa, Homo Sapiens
RFLEEFITPIVKVSK

SEQ ID NO: 87711 - protein, 15 aa, Homo Sapiens
FLEEFITPIVKVSKN

SEQ ID NO: 87712 - protein, 15 aa, Homo Sapiens
LEEFITPIVKVSKNK

SEQ ID NO: 87713 - protein, 15 aa, Homo Sapiens
EEFITPIVKVSKNKQ

SEQ ID NO: 87714 - protein, 15 aa, Homo Sapiens
EFITPIVKVSKNKQE

SEQ ID NO: 87715 - protein, 15 aa, Homo Sapiens
FITPIVKVSKNKQEM

SEQ ID NO: 87716 - protein, 15 aa, Homo Sapiens
ITPIVKVSKNKQEMA

SEQ ID NO: 87717 - protein, 15 aa, Homo Sapiens
TPIVKVSKNKQEMAF

SEQ ID NO: 87718 - protein, 15 aa, Homo Sapiens
PIVKVSKNKQEMAFY

SEQ ID NO: 87719 - protein, 15 aa, Homo Sapiens
IVKVSKNKQEMAFYS

SEQ ID NO: 87720 - protein, 15 aa, Homo Sapiens
VKVSKNKQEMAFYSL

SEQ ID NO: 87721 - protein, 15 aa, Homo Sapiens
KVSKNKQEMAFYSLP

SEQ ID NO: 87722 - protein, 15 aa, Homo Sapiens
VSKNKQEMAFYSLPE

SEQ ID NO: 87723 - protein, 15 aa, Homo Sapiens
SKNKQEMAFYSLPEF

SEQ ID NO: 87724 - protein, 15 aa, Homo Sapiens
KNKQEMAFYSLPEFE

SEQ ID NO: 87725 - protein, 15 aa, Homo Sapiens
NKQEMAFYSLPEFEE

SEQ ID NO: 87726 - protein, 15 aa, Homo Sapiens
KQEMAFYSLPEFEEW

SEQ ID NO: 87727 - protein, 15 aa, Homo Sapiens
QEMAFYSLPEFEEWK

SEQ ID NO: 87728 - protein, 15 aa, Homo Sapiens
EMAFYSLPEFEEWKS

SEQ ID NO: 87729 - protein, 15 aa, Homo Sapiens
MAFYSLPEFEEWKSS

SEQ ID NO: 87730 - protein, 15 aa, Homo Sapiens
AFYSLPEFEEWKSST

SEQ ID NO: 87731 - protein, 15 aa, Homo Sapiens
FYSLPEFEEWKSSTP

SEQ ID NO: 87732 - protein, 15 aa, Homo Sapiens
YSLPEFEEWKSSTPN

SEQ ID NO: 87733 - protein, 15 aa, Homo Sapiens
SLPEFEEWKSSTPNH

SEQ ID NO: 87734 - protein, 15 aa, Homo Sapiens
LPEFEEWKSSTPNHK

SEQ ID NO: 87735 - protein, 15 aa, Homo Sapiens
PEFEEWKSSTPNHKK

SEQ ID NO: 87736 - protein, 15 aa, Homo Sapiens
EFEEWKSSTPNHKKW

SEQ ID NO: 87737 - protein, 15 aa, Homo Sapiens
FEEWKSSTPNHKKWK

SEQ ID NO: 87738 - protein, 15 aa, Homo Sapiens
EEWKSSTPNHKKWKV

SEQ ID NO: 87739 - protein, 15 aa, Homo Sapiens
EWKSSTPNHKKWKVK

SEQ ID NO: 87740 - protein, 15 aa, Homo Sapiens
WKSSTPNHKKWKVKY

SEQ ID NO: 87741 - protein, 15 aa, Homo Sapiens
KSSTPNHKKWKVKYY

SEQ ID NO: 87742 - protein, 15 aa, Homo Sapiens
SSTPNHKKWKVKYYK

SEQ ID NO: 87743 - protein, 15 aa, Homo Sapiens
STPNHKKWKVKYYKG

SEQ ID NO: 87744 - protein, 15 aa, Homo Sapiens
TPNHKKWKVKYYKGL

SEQ ID NO: 87745 - protein, 15 aa, Homo Sapiens
PNHKKWKVKYYKGLG

SEQ ID NO: 87746 - protein, 15 aa, Homo Sapiens
NHKKWKVKYYKGLGT

SEQ ID NO: 87747 - protein, 15 aa, Homo Sapiens
HKKWKVKYYKGLGTS

SEQ ID NO: 87748 - protein, 15 aa, Homo Sapiens
KKWKVKYYKGLGTST

SEQ ID NO: 87749 - protein, 15 aa, Homo Sapiens
KWKVKYYKGLGTSTS

SEQ ID NO: 87750 - protein, 15 aa, Homo Sapiens
WKVKYYKGLGTSTSK

SEQ ID NO: 87751 - protein, 15 aa, Homo Sapiens
KVKYYKGLGTSTSKE

SEQ ID NO: 87752 - protein, 15 aa, Homo Sapiens
VKYYKGLGTSTSKEA

SEQ ID NO: 87753 - protein, 15 aa, Homo Sapiens
KYYKGLGTSTSKEAK

SEQ ID NO: 87754 - protein, 15 aa, Homo Sapiens
YYKGLGTSTSKEAKE

SEQ ID NO: 87755 - protein, 15 aa, Homo Sapiens
YKGLGTSTSKEAKEY

SEQ ID NO: 87756 - protein, 15 aa, Homo Sapiens
KGLGTSTSKEAKEYF

SEQ ID NO: 87757 - protein, 15 aa, Homo Sapiens
GLGTSTSKEAKEYFA

SEQ ID NO: 87758 - protein, 15 aa, Homo Sapiens
LGTSTSKEAKEYFAD

SEQ ID NO: 87759 - protein, 15 aa, Homo Sapiens
GTSTSKEAKEYFADM

SEQ ID NO: 87760 - protein, 15 aa, Homo Sapiens
TSTSKEAKEYFADMK

SEQ ID NO: 87761 - protein, 15 aa, Homo Sapiens
STSKEAKEYFADMKR

SEQ ID NO: 87762 - protein, 15 aa, Homo Sapiens
TSKEAKEYFADMKRH

SEQ ID NO: 87763 - protein, 15 aa, Homo Sapiens
SKEAKEYFADMKRHR

SEQ ID NO: 87764 - protein, 15 aa, Homo Sapiens
KEAKEYFADMKRHRI

SEQ ID NO: 87765 - protein, 15 aa, Homo Sapiens
EAKEYFADMKRHRIQ

SEQ ID NO: 87766 - protein, 15 aa, Homo Sapiens
AKEYFADMKRHRIQF

SEQ ID NO: 87767 - protein, 15 aa, Homo Sapiens
KEYFADMKRHRIQFK

SEQ ID NO: 87768 - protein, 15 aa, Homo Sapiens
EYFADMKRHRIQFKY

SEQ ID NO: 87769 - protein, 15 aa, Homo Sapiens
YFADMKRHRIQFKYS

SEQ ID NO: 87770 - protein, 15 aa, Homo Sapiens
FADMKRHRIQFKYSG

SEQ ID NO: 87771 - protein, 15 aa, Homo Sapiens
ADMKRHRIQFKYSGP

SEQ ID NO: 87772 - protein, 15 aa, Homo Sapiens
DMKRHRIQFKYSGPE

SEQ ID NO: 87773 - protein, 15 aa, Homo Sapiens
MKRHRIQFKYSGPED

SEQ ID NO: 87774 - protein, 15 aa, Homo Sapiens
KRHRIQFKYSGPEDD

SEQ ID NO: 87775 - protein, 15 aa, Homo Sapiens
RHRIQFKYSGPEDDA

SEQ ID NO: 87776 - protein, 15 aa, Homo Sapiens
HRIQFKYSGPEDDAA

SEQ ID NO: 87777 - protein, 15 aa, Homo Sapiens
RIQFKYSGPEDDAAI

SEQ ID NO: 87778 - protein, 15 aa, Homo Sapiens
IQFKYSGPEDDAAIS

SEQ ID NO: 87779 - protein, 15 aa, Homo Sapiens
QFKYSGPEDDAAISL

SEQ ID NO: 87780 - protein, 15 aa, Homo Sapiens
FKYSGPEDDAAISLA

SEQ ID NO: 87781 - protein, 15 aa, Homo Sapiens
KYSGPEDDAAISLAF

SEQ ID NO: 87782 - protein, 15 aa, Homo Sapiens
YSGPEDDAAISLAFS

SEQ ID NO: 87783 - protein, 15 aa, Homo Sapiens
SGPEDDAAISLAFSK

SEQ ID NO: 87784 - protein, 15 aa, Homo Sapiens
GPEDDAAISLAFSKK

SEQ ID NO: 87785 - protein, 15 aa, Homo Sapiens
PEDDAAISLAFSKKQ

SEQ ID NO: 87786 - protein, 15 aa, Homo Sapiens
EDDAAISLAFSKKQI

SEQ ID NO: 87787 - protein, 15 aa, Homo Sapiens
DDAAISLAFSKKQID

SEQ ID NO: 87788 - protein, 15 aa, Homo Sapiens
DAAISLAFSKKQIDD

SEQ ID NO: 87789 - protein, 15 aa, Homo Sapiens
AAISLAFSKKQIDDR

SEQ ID NO: 87790 - protein, 15 aa, Homo Sapiens
AISLAFSKKQIDDRK

SEQ ID NO: 87791 - protein, 15 aa, Homo Sapiens
ISLAFSKKQIDDRKE

SEQ ID NO: 87792 - protein, 15 aa, Homo Sapiens
SLAFSKKQIDDRKEW

SEQ ID NO: 87793 - protein, 15 aa, Homo Sapiens
LAFSKKQIDDRKEWL

SEQ ID NO: 87794 - protein, 15 aa, Homo Sapiens
AFSKKQIDDRKEWLT

SEQ ID NO: 87795 - protein, 15 aa, Homo Sapiens
FSKKQIDDRKEWLTN

SEQ ID NO: 87796 - protein, 15 aa, Homo Sapiens
SKKQIDDRKEWLTNF

SEQ ID NO: 87797 - protein, 15 aa, Homo Sapiens
KKQIDDRKEWLTNFM

SEQ ID NO: 87798 - protein, 15 aa, Homo Sapiens
KQIDDRKEWLTNFME

SEQ ID NO: 87799 - protein, 15 aa, Homo Sapiens
QIDDRKEWLTNFMED

SEQ ID NO: 87800 - protein, 15 aa, Homo Sapiens
IDDRKEWLTNFMEDR

SEQ ID NO: 87801 - protein, 15 aa, Homo Sapiens
DDRKEWLTNFMEDRR

SEQ ID NO: 87802 - protein, 15 aa, Homo Sapiens
DRKEWLTNFMEDRRQ

SEQ ID NO: 87803 - protein, 15 aa, Homo Sapiens
RKEWLTNFMEDRRQR

SEQ ID NO: 87804 - protein, 15 aa, Homo Sapiens
KEWLTNFMEDRRQRK

SEQ ID NO: 87805 - protein, 15 aa, Homo Sapiens
EWLTNFMEDRRQRKL

SEQ ID NO: 87806 - protein, 15 aa, Homo Sapiens
WLTNFMEDRRQRKLL

SEQ ID NO: 87807 - protein, 15 aa, Homo Sapiens
LTNFMEDRRQRKLLG

SEQ ID NO: 87808 - protein, 15 aa, Homo Sapiens
TNFMEDRRQRKLLGL

SEQ ID NO: 87809 - protein, 15 aa, Homo Sapiens
NFMEDRRQRKLLGLP

SEQ ID NO: 87810 - protein, 15 aa, Homo Sapiens
FMEDRRQRKLLGLPE

SEQ ID NO: 87811 - protein, 15 aa, Homo Sapiens
MEDRRQRKLLGLPED

SEQ ID NO: 87812 - protein, 15 aa, Homo Sapiens
EDRRQRKLLGLPEDY

SEQ ID NO: 87813 - protein, 15 aa, Homo Sapiens
DRRQRKLLGLPEDYL

SEQ ID NO: 87814 - protein, 15 aa, Homo Sapiens
RRQRKLLGLPEDYLY

SEQ ID NO: 87815 - protein, 15 aa, Homo Sapiens
RQRKLLGLPEDYLYG

SEQ ID NO: 87816 - protein, 15 aa, Homo Sapiens
QRKLLGLPEDYLYGQ

SEQ ID NO: 87817 - protein, 15 aa, Homo Sapiens
RKLLGLPEDYLYGQT

SEQ ID NO: 87818 - protein, 15 aa, Homo Sapiens
KLLGLPEDYLYGQTT

SEQ ID NO: 87819 - protein, 15 aa, Homo Sapiens
LLGLPEDYLYGQTTT

SEQ ID NO: 87820 - protein, 15 aa, Homo Sapiens
LGLPEDYLYGQTTTY

SEQ ID NO: 87821 - protein, 15 aa, Homo Sapiens
GLPEDYLYGQTTTYL

SEQ ID NO: 87822 - protein, 15 aa, Homo Sapiens
LPEDYLYGQTTTYLT

SEQ ID NO: 87823 - protein, 15 aa, Homo Sapiens
PEDYLYGQTTTYLTY

SEQ ID NO: 87824 - protein, 15 aa, Homo Sapiens
EDYLYGQTTTYLTYN

SEQ ID NO: 87825 - protein, 15 aa, Homo Sapiens
DYLYGQTTTYLTYND

SEQ ID NO: 87826 - protein, 15 aa, Homo Sapiens
YLYGQTTTYLTYNDF

SEQ ID NO: 87827 - protein, 15 aa, Homo Sapiens
LYGQTTTYLTYNDFI

SEQ ID NO: 87828 - protein, 15 aa, Homo Sapiens
YGQTTTYLTYNDFIN

SEQ ID NO: 87829 - protein, 15 aa, Homo Sapiens
GQTTTYLTYNDFINK

SEQ ID NO: 87830 - protein, 15 aa, Homo Sapiens
QTTTYLTYNDFINKE

SEQ ID NO: 87831 - protein, 15 aa, Homo Sapiens
TTTYLTYNDFINKEL

SEQ ID NO: 87832 - protein, 15 aa, Homo Sapiens
TTYLTYNDFINKELI

SEQ ID NO: 87833 - protein, 15 aa, Homo Sapiens
TYLTYNDFINKELIL

SEQ ID NO: 87834 - protein, 15 aa, Homo Sapiens
YLTYNDFINKELILF

SEQ ID NO: 87835 - protein, 15 aa, Homo Sapiens
LTYNDFINKELILFS

SEQ ID NO: 87836 - protein, 15 aa, Homo Sapiens
TYNDFINKELILFSN

SEQ ID NO: 87837 - protein, 15 aa, Homo Sapiens
YNDFINKELILFSNS

SEQ ID NO: 87838 - protein, 15 aa, Homo Sapiens
NDFINKELILFSNSD

SEQ ID NO: 87839 - protein, 15 aa, Homo Sapiens
DFINKELILFSNSDN

SEQ ID NO: 87840 - protein, 15 aa, Homo Sapiens
FINKELILFSNSDNE

SEQ ID NO: 87841 - protein, 15 aa, Homo Sapiens
INKELILFSNSDNER

SEQ ID NO: 87842 - protein, 15 aa, Homo Sapiens
NKELILFSNSDNERS

SEQ ID NO: 87843 - protein, 15 aa, Homo Sapiens
KELILFSNSDNERSI

SEQ ID NO: 87844 - protein, 15 aa, Homo Sapiens
ELILFSNSDNERSIP

SEQ ID NO: 87845 - protein, 15 aa, Homo Sapiens
LILFSNSDNERSIPS

SEQ ID NO: 87846 - protein, 15 aa, Homo Sapiens
ILFSNSDNERSIPSM

SEQ ID NO: 87847 - protein, 15 aa, Homo Sapiens
LFSNSDNERSIPSMV

SEQ ID NO: 87848 - protein, 15 aa, Homo Sapiens
FSNSDNERSIPSMVD

SEQ ID NO: 87849 - protein, 15 aa, Homo Sapiens
SNSDNERSIPSMVDG

SEQ ID NO: 87850 - protein, 15 aa, Homo Sapiens
NSDNERSIPSMVDGL

SEQ ID NO: 87851 - protein, 15 aa, Homo Sapiens
SDNERSIPSMVDGLK

SEQ ID NO: 87852 - protein, 15 aa, Homo Sapiens
DNERSIPSMVDGLKP

SEQ ID NO: 87853 - protein, 15 aa, Homo Sapiens
NERSIPSMVDGLKPG

SEQ ID NO: 87854 - protein, 15 aa, Homo Sapiens
ERSIPSMVDGLKPGQ

SEQ ID NO: 87855 - protein, 15 aa, Homo Sapiens
RSIPSMVDGLKPGQR

SEQ ID NO: 87856 - protein, 15 aa, Homo Sapiens
SIPSMVDGLKPGQRK

SEQ ID NO: 87857 - protein, 15 aa, Homo Sapiens
IPSMVDGLKPGQRKV

SEQ ID NO: 87858 - protein, 15 aa, Homo Sapiens
PSMVDGLKPGQRKVL

SEQ ID NO: 87859 - protein, 15 aa, Homo Sapiens
SMVDGLKPGQRKVLF

SEQ ID NO: 87860 - protein, 15 aa, Homo Sapiens
MVDGLKPGQRKVLFT

SEQ ID NO: 87861 - protein, 15 aa, Homo Sapiens
VDGLKPGQRKVLFTC

SEQ ID NO: 87862 - protein, 15 aa, Homo Sapiens
DGLKPGQRKVLFTCF

SEQ ID NO: 87863 - protein, 15 aa, Homo Sapiens
GLKPGQRKVLFTCFK

SEQ ID NO: 87864 - protein, 15 aa, Homo Sapiens
LKPGQRKVLFTCFKR

SEQ ID NO: 87865 - protein, 15 aa, Homo Sapiens
KPGQRKVLFTCFKRN

SEQ ID NO: 87866 - protein, 15 aa, Homo Sapiens
PGQRKVLFTCFKRND

SEQ ID NO: 87867 - protein, 15 aa, Homo Sapiens
GQRKVLFTCFKRNDK

SEQ ID NO: 87868 - protein, 15 aa, Homo Sapiens
QRKVLFTCFKRNDKR

SEQ ID NO: 87869 - protein, 15 aa, Homo Sapiens
RKVLFTCFKRNDKRE

SEQ ID NO: 87870 - protein, 15 aa, Homo Sapiens
KVLFTCFKRNDKREV

SEQ ID NO: 87871 - protein, 15 aa, Homo Sapiens
VLFTCFKRNDKREVK

SEQ ID NO: 87872 - protein, 15 aa, Homo Sapiens
LFTCFKRNDKREVKV

SEQ ID NO: 87873 - protein, 15 aa, Homo Sapiens
FTCFKRNDKREVKVA

SEQ ID NO: 87874 - protein, 15 aa, Homo Sapiens
TCFKRNDKREVKVAQ

SEQ ID NO: 87875 - protein, 15 aa, Homo Sapiens
CFKRNDKREVKVAQL

SEQ ID NO: 87876 - protein, 15 aa, Homo Sapiens
FKRNDKREVKVAQLA

SEQ ID NO: 87877 - protein, 15 aa, Homo Sapiens
KRNDKREVKVAQLAG

SEQ ID NO: 87878 - protein, 15 aa, Homo Sapiens
RNDKREVKVAQLAGS

SEQ ID NO: 87879 - protein, 15 aa, Homo Sapiens
NDKREVKVAQLAGSV

SEQ ID NO: 87880 - protein, 15 aa, Homo Sapiens
DKREVKVAQLAGSVA

SEQ ID NO: 87881 - protein, 15 aa, Homo Sapiens
KREVKVAQLAGSVAE

SEQ ID NO: 87882 - protein, 15 aa, Homo Sapiens
REVKVAQLAGSVAEM

SEQ ID NO: 87883 - protein, 15 aa, Homo Sapiens
EVKVAQLAGSVAEMS

SEQ ID NO: 87884 - protein, 15 aa, Homo Sapiens
VKVAQLAGSVAEMSS

SEQ ID NO: 87885 - protein, 15 aa, Homo Sapiens
KVAQLAGSVAEMSSY

SEQ ID NO: 87886 - protein, 15 aa, Homo Sapiens
VAQLAGSVAEMSSYH

SEQ ID NO: 87887 - protein, 15 aa, Homo Sapiens
AQLAGSVAEMSSYHH

SEQ ID NO: 87888 - protein, 15 aa, Homo Sapiens
QLAGSVAEMSSYHHG

SEQ ID NO: 87889 - protein, 15 aa, Homo Sapiens
LAGSVAEMSSYHHGE

SEQ ID NO: 87890 - protein, 15 aa, Homo Sapiens
AGSVAEMSSYHHGEM

SEQ ID NO: 87891 - protein, 15 aa, Homo Sapiens
GSVAEMSSYHHGEMS

SEQ ID NO: 87892 - protein, 15 aa, Homo Sapiens
SVAEMSSYHHGEMSL

SEQ ID NO: 87893 - protein, 15 aa, Homo Sapiens
VAEMSSYHHGEMSLM

SEQ ID NO: 87894 - protein, 15 aa, Homo Sapiens
AEMSSYHHGEMSLMM

SEQ ID NO: 87895 - protein, 15 aa, Homo Sapiens
EMSSYHHGEMSLMMT

SEQ ID NO: 87896 - protein, 15 aa, Homo Sapiens
MSSYHHGEMSLMMTI

SEQ ID NO: 87897 - protein, 15 aa, Homo Sapiens
SSYHHGEMSLMMTII

SEQ ID NO: 87898 - protein, 15 aa, Homo Sapiens
SYHHGEMSLMMTIIN

SEQ ID NO: 87899 - protein, 15 aa, Homo Sapiens
YHHGEMSLMMTIINL

SEQ ID NO: 87900 - protein, 15 aa, Homo Sapiens
HHGEMSLMMTIINLA

SEQ ID NO: 87901 - protein, 15 aa, Homo Sapiens
HGEMSLMMTIINLAQ

SEQ ID NO: 87902 - protein, 15 aa, Homo Sapiens
GEMSLMMTIINLAQN

SEQ ID NO: 87903 - protein, 15 aa, Homo Sapiens
EMSLMMTIINLAQNF

SEQ ID NO: 87904 - protein, 15 aa, Homo Sapiens
MSLMMTIINLAQNFV

SEQ ID NO: 87905 - protein, 15 aa, Homo Sapiens
SLMMTIINLAQNFVG

SEQ ID NO: 87906 - protein, 15 aa, Homo Sapiens
LMMTIINLAQNFVGS

SEQ ID NO: 87907 - protein, 15 aa, Homo Sapiens
MMTIINLAQNFVGSN

SEQ ID NO: 87908 - protein, 15 aa, Homo Sapiens
MTIINLAQNFVGSNN

SEQ ID NO: 87909 - protein, 15 aa, Homo Sapiens
TIINLAQNFVGSNNL

SEQ ID NO: 87910 - protein, 15 aa, Homo Sapiens
IINLAQNFVGSNNLN

SEQ ID NO: 87911 - protein, 15 aa, Homo Sapiens
INLAQNFVGSNNLNL

SEQ ID NO: 87912 - protein, 15 aa, Homo Sapiens
NLAQNFVGSNNLNLL

SEQ ID NO: 87913 - protein, 15 aa, Homo Sapiens
LAQNFVGSNNLNLLQ

SEQ ID NO: 87914 - protein, 15 aa, Homo Sapiens
AQNFVGSNNLNLLQP

SEQ ID NO: 87915 - protein, 15 aa, Homo Sapiens
QNFVGSNNLNLLQPI

SEQ ID NO: 87916 - protein, 15 aa, Homo Sapiens
NFVGSNNLNLLQPIG

SEQ ID NO: 87917 - protein, 15 aa, Homo Sapiens
FVGSNNLNLLQPIGQ

SEQ ID NO: 87918 - protein, 15 aa, Homo Sapiens
VGSNNLNLLQPIGQF

SEQ ID NO: 87919 - protein, 15 aa, Homo Sapiens
GSNNLNLLQPIGQFG

SEQ ID NO: 87920 - protein, 15 aa, Homo Sapiens
SNNLNLLQPIGQFGT

SEQ ID NO: 87921 - protein, 15 aa, Homo Sapiens
NNLNLLQPIGQFGTR

SEQ ID NO: 87922 - protein, 15 aa, Homo Sapiens
NLNLLQPIGQFGTRL

SEQ ID NO: 87923 - protein, 15 aa, Homo Sapiens
LNLLQPIGQFGTRLH

SEQ ID NO: 87924 - protein, 15 aa, Homo Sapiens
NLLQPIGQFGTRLHG

SEQ ID NO: 87925 - protein, 15 aa, Homo Sapiens
LLQPIGQFGTRLHGG

SEQ ID NO: 87926 - protein, 15 aa, Homo Sapiens
LQPIGQFGTRLHGGK

SEQ ID NO: 87927 - protein, 15 aa, Homo Sapiens
QPIGQFGTRLHGGKD

SEQ ID NO: 87928 - protein, 15 aa, Homo Sapiens
PIGQFGTRLHGGKDS

SEQ ID NO: 87929 - protein, 15 aa, Homo Sapiens
IGQFGTRLHGGKDSA

SEQ ID NO: 87930 - protein, 15 aa, Homo Sapiens
GQFGTRLHGGKDSAS

SEQ ID NO: 87931 - protein, 15 aa, Homo Sapiens
QFGTRLHGGKDSASP

SEQ ID NO: 87932 - protein, 15 aa, Homo Sapiens
FGTRLHGGKDSASPR

SEQ ID NO: 87933 - protein, 15 aa, Homo Sapiens
GTRLHGGKDSASPRY

SEQ ID NO: 87934 - protein, 15 aa, Homo Sapiens
TRLHGGKDSASPRYI

SEQ ID NO: 87935 - protein, 15 aa, Homo Sapiens
RLHGGKDSASPRYIF

SEQ ID NO: 87936 - protein, 15 aa, Homo Sapiens
LHGGKDSASPRYIFT

SEQ ID NO: 87937 - protein, 15 aa, Homo Sapiens
HGGKDSASPRYIFTM

SEQ ID NO: 87938 - protein, 15 aa, Homo Sapiens
GGKDSASPRYIFTML

SEQ ID NO: 87939 - protein, 15 aa, Homo Sapiens
GKDSASPRYIFTMLS

SEQ ID NO: 87940 - protein, 15 aa, Homo Sapiens
KDSASPRYIFTMLSS

SEQ ID NO: 87941 - protein, 15 aa, Homo Sapiens
DSASPRYIFTMLSSL

SEQ ID NO: 87942 - protein, 15 aa, Homo Sapiens
SASPRYIFTMLSSLA

SEQ ID NO: 87943 - protein, 15 aa, Homo Sapiens
ASPRYIFTMLSSLAR

SEQ ID NO: 87944 - protein, 15 aa, Homo Sapiens
SPRYIFTMLSSLARL

SEQ ID NO: 87945 - protein, 15 aa, Homo Sapiens
PRYIFTMLSSLARLL

SEQ ID NO: 87946 - protein, 15 aa, Homo Sapiens
RYIFTMLSSLARLLF

SEQ ID NO: 87947 - protein, 15 aa, Homo Sapiens
YIFTMLSSLARLLFP

SEQ ID NO: 87948 - protein, 15 aa, Homo Sapiens
IFTMLSSLARLLFPP

SEQ ID NO: 87949 - protein, 15 aa, Homo Sapiens
FTMLSSLARLLFPPK

SEQ ID NO: 87950 - protein, 15 aa, Homo Sapiens
TMLSSLARLLFPPKD

SEQ ID NO: 87951 - protein, 15 aa, Homo Sapiens
MLSSLARLLFPPKDD

SEQ ID NO: 87952 - protein, 15 aa, Homo Sapiens
LSSLARLLFPPKDDH

SEQ ID NO: 87953 - protein, 15 aa, Homo Sapiens
SSLARLLFPPKDDHT

SEQ ID NO: 87954 - protein, 15 aa, Homo Sapiens
SLARLLFPPKDDHTL

SEQ ID NO: 87955 - protein, 15 aa, Homo Sapiens
LARLLFPPKDDHTLK

SEQ ID NO: 87956 - protein, 15 aa, Homo Sapiens
ARLLFPPKDDHTLKF

SEQ ID NO: 87957 - protein, 15 aa, Homo Sapiens
RLLFPPKDDHTLKFL

SEQ ID NO: 87958 - protein, 15 aa, Homo Sapiens
LLFPPKDDHTLKFLY

SEQ ID NO: 87959 - protein, 15 aa, Homo Sapiens
LFPPKDDHTLKFLYD

SEQ ID NO: 87960 - protein, 15 aa, Homo Sapiens
FPPKDDHTLKFLYDD

SEQ ID NO: 87961 - protein, 15 aa, Homo Sapiens
PPKDDHTLKFLYDDN

SEQ ID NO: 87962 - protein, 15 aa, Homo Sapiens
PKDDHTLKFLYDDNQ

SEQ ID NO: 87963 - protein, 15 aa, Homo Sapiens
KDDHTLKFLYDDNQR

SEQ ID NO: 87964 - protein, 15 aa, Homo Sapiens
DDHTLKFLYDDNQRV

SEQ ID NO: 87965 - protein, 15 aa, Homo Sapiens
DHTLKFLYDDNQRVE

SEQ ID NO: 87966 - protein, 15 aa, Homo Sapiens
HTLKFLYDDNQRVEP

SEQ ID NO: 87967 - protein, 15 aa, Homo Sapiens
TLKFLYDDNQRVEPE

SEQ ID NO: 87968 - protein, 15 aa, Homo Sapiens
LKFLYDDNQRVEPEW

SEQ ID NO: 87969 - protein, 15 aa, Homo Sapiens
KFLYDDNQRVEPEWY

SEQ ID NO: 87970 - protein, 15 aa, Homo Sapiens
FLYDDNQRVEPEWYI

SEQ ID NO: 87971 - protein, 15 aa, Homo Sapiens
LYDDNQRVEPEWYIP

SEQ ID NO: 87972 - protein, 15 aa, Homo Sapiens
YDDNQRVEPEWYIPI

SEQ ID NO: 87973 - protein, 15 aa, Homo Sapiens
DDNQRVEPEWYIPII

SEQ ID NO: 87974 - protein, 15 aa, Homo Sapiens
DNQRVEPEWYIPIIP

SEQ ID NO: 87975 - protein, 15 aa, Homo Sapiens
NQRVEPEWYIPIIPM

SEQ ID NO: 87976 - protein, 15 aa, Homo Sapiens
QRVEPEWYIPIIPMV

SEQ ID NO: 87977 - protein, 15 aa, Homo Sapiens
RVEPEWYIPIIPMVL

SEQ ID NO: 87978 - protein, 15 aa, Homo Sapiens
VEPEWYIPIIPMVLI

SEQ ID NO: 87979 - protein, 15 aa, Homo Sapiens
EPEWYIPIIPMVLIN

SEQ ID NO: 87980 - protein, 15 aa, Homo Sapiens
PEWYIPIIPMVLING

SEQ ID NO: 87981 - protein, 15 aa, Homo Sapiens
EWYIPIIPMVLINGA

SEQ ID NO: 87982 - protein, 15 aa, Homo Sapiens
WYIPIIPMVLINGAE

SEQ ID NO: 87983 - protein, 15 aa, Homo Sapiens
YIPIIPMVLINGAEG

SEQ ID NO: 87984 - protein, 15 aa, Homo Sapiens
IPIIPMVLINGAEGI

SEQ ID NO: 87985 - protein, 15 aa, Homo Sapiens
PIIPMVLINGAEGIG

SEQ ID NO: 87986 - protein, 15 aa, Homo Sapiens
IIPMVLINGAEGIGT

SEQ ID NO: 87987 - protein, 15 aa, Homo Sapiens
IPMVLINGAEGIGTG

SEQ ID NO: 87988 - protein, 15 aa, Homo Sapiens
PMVLINGAEGIGTGW

SEQ ID NO: 87989 - protein, 15 aa, Homo Sapiens
MVLINGAEGIGTGWS

SEQ ID NO: 87990 - protein, 15 aa, Homo Sapiens
VLINGAEGIGTGWSC

SEQ ID NO: 87991 - protein, 15 aa, Homo Sapiens
LINGAEGIGTGWSCK

SEQ ID NO: 87992 - protein, 15 aa, Homo Sapiens
INGAEGIGTGWSCKI

SEQ ID NO: 87993 - protein, 15 aa, Homo Sapiens
NGAEGIGTGWSCKIP

SEQ ID NO: 87994 - protein, 15 aa, Homo Sapiens
GAEGIGTGWSCKIPN

SEQ ID NO: 87995 - protein, 15 aa, Homo Sapiens
AEGIGTGWSCKIPNF

SEQ ID NO: 87996 - protein, 15 aa, Homo Sapiens
EGIGTGWSCKIPNFD

SEQ ID NO: 87997 - protein, 15 aa, Homo Sapiens
GIGTGWSCKIPNFDV

SEQ ID NO: 87998 - protein, 15 aa, Homo Sapiens
IGTGWSCKIPNFDVR

SEQ ID NO: 87999 - protein, 15 aa, Homo Sapiens
GTGWSCKIPNFDVRE

SEQ ID NO: 88000 - protein, 15 aa, Homo Sapiens
TGWSCKIPNFDVREI

SEQ ID NO: 88001 - protein, 15 aa, Homo Sapiens
GWSCKIPNFDVREIV

SEQ ID NO: 88002 - protein, 15 aa, Homo Sapiens
WSCKIPNFDVREIVN

SEQ ID NO: 88003 - protein, 15 aa, Homo Sapiens
SCKIPNFDVREIVNN

SEQ ID NO: 88004 - protein, 15 aa, Homo Sapiens
CKIPNFDVREIVNNI

SEQ ID NO: 88005 - protein, 15 aa, Homo Sapiens
KIPNFDVREIVNNIR

SEQ ID NO: 88006 - protein, 15 aa, Homo Sapiens
IPNFDVREIVNNIRR

SEQ ID NO: 88007 - protein, 15 aa, Homo Sapiens
PNFDVREIVNNIRRL

SEQ ID NO: 88008 - protein, 15 aa, Homo Sapiens
NFDVREIVNNIRRLM

SEQ ID NO: 88009 - protein, 15 aa, Homo Sapiens
FDVREIVNNIRRLMD

SEQ ID NO: 88010 - protein, 15 aa, Homo Sapiens
DVREIVNNIRRLMDG

SEQ ID NO: 88011 - protein, 15 aa, Homo Sapiens
VREIVNNIRRLMDGE

SEQ ID NO: 88012 - protein, 15 aa, Homo Sapiens
REIVNNIRRLMDGEE

SEQ ID NO: 88013 - protein, 15 aa, Homo Sapiens
EIVNNIRRLMDGEEP

SEQ ID NO: 88014 - protein, 15 aa, Homo Sapiens
IVNNIRRLMDGEEPL

SEQ ID NO: 88015 - protein, 15 aa, Homo Sapiens
VNNIRRLMDGEEPLP

SEQ ID NO: 88016 - protein, 15 aa, Homo Sapiens
NNIRRLMDGEEPLPM

SEQ ID NO: 88017 - protein, 15 aa, Homo Sapiens
NIRRLMDGEEPLPML

SEQ ID NO: 88018 - protein, 15 aa, Homo Sapiens
IRRLMDGEEPLPMLP

SEQ ID NO: 88019 - protein, 15 aa, Homo Sapiens
RRLMDGEEPLPMLPS

SEQ ID NO: 88020 - protein, 15 aa, Homo Sapiens
RLMDGEEPLPMLPSY

SEQ ID NO: 88021 - protein, 15 aa, Homo Sapiens
LMDGEEPLPMLPSYK

SEQ ID NO: 88022 - protein, 15 aa, Homo Sapiens
MDGEEPLPMLPSYKN

SEQ ID NO: 88023 - protein, 15 aa, Homo Sapiens
DGEEPLPMLPSYKNF

SEQ ID NO: 88024 - protein, 15 aa, Homo Sapiens
GEEPLPMLPSYKNFK

SEQ ID NO: 88025 - protein, 15 aa, Homo Sapiens
EEPLPMLPSYKNFKG

SEQ ID NO: 88026 - protein, 15 aa, Homo Sapiens
EPLPMLPSYKNFKGT

SEQ ID NO: 88027 - protein, 15 aa, Homo Sapiens
PLPMLPSYKNFKGTI

SEQ ID NO: 88028 - protein, 15 aa, Homo Sapiens
LPMLPSYKNFKGTIE

SEQ ID NO: 88029 - protein, 15 aa, Homo Sapiens
PMLPSYKNFKGTIEE

SEQ ID NO: 88030 - protein, 15 aa, Homo Sapiens
MLPSYKNFKGTIEEL

SEQ ID NO: 88031 - protein, 15 aa, Homo Sapiens
LPSYKNFKGTIEELA

SEQ ID NO: 88032 - protein, 15 aa, Homo Sapiens
PSYKNFKGTIEELAP

SEQ ID NO: 88033 - protein, 15 aa, Homo Sapiens
SYKNFKGTIEELAPN

SEQ ID NO: 88034 - protein, 15 aa, Homo Sapiens
YKNFKGTIEELAPNQ

SEQ ID NO: 88035 - protein, 15 aa, Homo Sapiens
KNFKGTIEELAPNQY

SEQ ID NO: 88036 - protein, 15 aa, Homo Sapiens
NFKGTIEELAPNQYV

SEQ ID NO: 88037 - protein, 15 aa, Homo Sapiens
FKGTIEELAPNQYVI

SEQ ID NO: 88038 - protein, 15 aa, Homo Sapiens
KGTIEELAPNQYVIS

SEQ ID NO: 88039 - protein, 15 aa, Homo Sapiens
GTIEELAPNQYVISG

SEQ ID NO: 88040 - protein, 15 aa, Homo Sapiens
TIEELAPNQYVISGE

SEQ ID NO: 88041 - protein, 15 aa, Homo Sapiens
IEELAPNQYVISGEV

SEQ ID NO: 88042 - protein, 15 aa, Homo Sapiens
EELAPNQYVISGEVA

SEQ ID NO: 88043 - protein, 15 aa, Homo Sapiens
ELAPNQYVISGEVAI

SEQ ID NO: 88044 - protein, 15 aa, Homo Sapiens
LAPNQYVISGEVAIL

SEQ ID NO: 88045 - protein, 15 aa, Homo Sapiens
APNQYVISGEVAILN

SEQ ID NO: 88046 - protein, 15 aa, Homo Sapiens
PNQYVISGEVAILNS

SEQ ID NO: 88047 - protein, 15 aa, Homo Sapiens
NQYVISGEVAILNST

SEQ ID NO: 88048 - protein, 15 aa, Homo Sapiens
QYVISGEVAILNSTT

SEQ ID NO: 88049 - protein, 15 aa, Homo Sapiens
YVISGEVAILNSTTI

SEQ ID NO: 88050 - protein, 15 aa, Homo Sapiens
VISGEVAILNSTTIE

SEQ ID NO: 88051 - protein, 15 aa, Homo Sapiens
ISGEVAILNSTTIEI

SEQ ID NO: 88052 - protein, 15 aa, Homo Sapiens
SGEVAILNSTTIEIS

SEQ ID NO: 88053 - protein, 15 aa, Homo Sapiens
GEVAILNSTTIEISE

SEQ ID NO: 88054 - protein, 15 aa, Homo Sapiens
EVAILNSTTIEISEL

SEQ ID NO: 88055 - protein, 15 aa, Homo Sapiens
VAILNSTTIEISELP

SEQ ID NO: 88056 - protein, 15 aa, Homo Sapiens
AILNSTTIEISELPV

SEQ ID NO: 88057 - protein, 15 aa, Homo Sapiens
ILNSTTIEISELPVR

SEQ ID NO: 88058 - protein, 15 aa, Homo Sapiens
LNSTTIEISELPVRT

SEQ ID NO: 88059 - protein, 15 aa, Homo Sapiens
NSTTIEISELPVRTW

SEQ ID NO: 88060 - protein, 15 aa, Homo Sapiens
STTIEISELPVRTWT

SEQ ID NO: 88061 - protein, 15 aa, Homo Sapiens
TTIEISELPVRTWTQ

SEQ ID NO: 88062 - protein, 15 aa, Homo Sapiens
TIEISELPVRTWTQT

SEQ ID NO: 88063 - protein, 15 aa, Homo Sapiens
IEISELPVRTWTQTY

SEQ ID NO: 88064 - protein, 15 aa, Homo Sapiens
EISELPVRTWTQTYK

SEQ ID NO: 88065 - protein, 15 aa, Homo Sapiens
ISELPVRTWTQTYKE

SEQ ID NO: 88066 - protein, 15 aa, Homo Sapiens
SELPVRTWTQTYKEQ

SEQ ID NO: 88067 - protein, 15 aa, Homo Sapiens
ELPVRTWTQTYKEQV

SEQ ID NO: 88068 - protein, 15 aa, Homo Sapiens
LPVRTWTQTYKEQVL

SEQ ID NO: 88069 - protein, 15 aa, Homo Sapiens
PVRTWTQTYKEQVLE

SEQ ID NO: 88070 - protein, 15 aa, Homo Sapiens
VRTWTQTYKEQVLEP

SEQ ID NO: 88071 - protein, 15 aa, Homo Sapiens
RTWTQTYKEQVLEPM

SEQ ID NO: 88072 - protein, 15 aa, Homo Sapiens
TWTQTYKEQVLEPML

SEQ ID NO: 88073 - protein, 15 aa, Homo Sapiens
WTQTYKEQVLEPMLN

SEQ ID NO: 88074 - protein, 15 aa, Homo Sapiens
TQTYKEQVLEPMLNG

SEQ ID NO: 88075 - protein, 15 aa, Homo Sapiens
QTYKEQVLEPMLNGT

SEQ ID NO: 88076 - protein, 15 aa, Homo Sapiens
TYKEQVLEPMLNGTE

SEQ ID NO: 88077 - protein, 15 aa, Homo Sapiens
YKEQVLEPMLNGTEK

SEQ ID NO: 88078 - protein, 15 aa, Homo Sapiens
KEQVLEPMLNGTEKT

SEQ ID NO: 88079 - protein, 15 aa, Homo Sapiens
EQVLEPMLNGTEKTP

SEQ ID NO: 88080 - protein, 15 aa, Homo Sapiens
QVLEPMLNGTEKTPP

SEQ ID NO: 88081 - protein, 15 aa, Homo Sapiens
VLEPMLNGTEKTPPL

SEQ ID NO: 88082 - protein, 15 aa, Homo Sapiens
LEPMLNGTEKTPPLI

SEQ ID NO: 88083 - protein, 15 aa, Homo Sapiens
EPMLNGTEKTPPLIT

SEQ ID NO: 88084 - protein, 15 aa, Homo Sapiens
PMLNGTEKTPPLITD

SEQ ID NO: 88085 - protein, 15 aa, Homo Sapiens
MLNGTEKTPPLITDY

SEQ ID NO: 88086 - protein, 15 aa, Homo Sapiens
LNGTEKTPPLITDYR

SEQ ID NO: 88087 - protein, 15 aa, Homo Sapiens
NGTEKTPPLITDYRE

SEQ ID NO: 88088 - protein, 15 aa, Homo Sapiens
GTEKTPPLITDYREY

SEQ ID NO: 88089 - protein, 15 aa, Homo Sapiens
TEKTPPLITDYREYH

SEQ ID NO: 88090 - protein, 15 aa, Homo Sapiens
EKTPPLITDYREYHT

SEQ ID NO: 88091 - protein, 15 aa, Homo Sapiens
KTPPLITDYREYHTD

SEQ ID NO: 88092 - protein, 15 aa, Homo Sapiens
TPPLITDYREYHTDT

SEQ ID NO: 88093 - protein, 15 aa, Homo Sapiens
PPLITDYREYHTDTT

SEQ ID NO: 88094 - protein, 15 aa, Homo Sapiens
PLITDYREYHTDTTV

SEQ ID NO: 88095 - protein, 15 aa, Homo Sapiens
LITDYREYHTDTTVK

SEQ ID NO: 88096 - protein, 15 aa, Homo Sapiens
ITDYREYHTDTTVKF

SEQ ID NO: 88097 - protein, 15 aa, Homo Sapiens
TDYREYHTDTTVKFV

SEQ ID NO: 88098 - protein, 15 aa, Homo Sapiens
DYREYHTDTTVKFVV

SEQ ID NO: 88099 - protein, 15 aa, Homo Sapiens
YREYHTDTTVKFVVK

SEQ ID NO: 88100 - protein, 15 aa, Homo Sapiens
REYHTDTTVKFVVKM

SEQ ID NO: 88101 - protein, 15 aa, Homo Sapiens
EYHTDTTVKFVVKMT

SEQ ID NO: 88102 - protein, 15 aa, Homo Sapiens
YHTDTTVKFVVKMTE

SEQ ID NO: 88103 - protein, 15 aa, Homo Sapiens
HTDTTVKFVVKMTEE

SEQ ID NO: 88104 - protein, 15 aa, Homo Sapiens
TDTTVKFVVKMTEEK

SEQ ID NO: 88105 - protein, 15 aa, Homo Sapiens
DTTVKFVVKMTEEKL

SEQ ID NO: 88106 - protein, 15 aa, Homo Sapiens
TTVKFVVKMTEEKLA

SEQ ID NO: 88107 - protein, 15 aa, Homo Sapiens
TVKFVVKMTEEKLAE

SEQ ID NO: 88108 - protein, 15 aa, Homo Sapiens
VKFVVKMTEEKLAEA

SEQ ID NO: 88109 - protein, 15 aa, Homo Sapiens
KFVVKMTEEKLAEAE

SEQ ID NO: 88110 - protein, 15 aa, Homo Sapiens
FVVKMTEEKLAEAER

SEQ ID NO: 88111 - protein, 15 aa, Homo Sapiens
VVKMTEEKLAEAERV

SEQ ID NO: 88112 - protein, 15 aa, Homo Sapiens
VKMTEEKLAEAERVG

SEQ ID NO: 88113 - protein, 15 aa, Homo Sapiens
KMTEEKLAEAERVGL

SEQ ID NO: 88114 - protein, 15 aa, Homo Sapiens
MTEEKLAEAERVGLH

SEQ ID NO: 88115 - protein, 15 aa, Homo Sapiens
TEEKLAEAERVGLHK

SEQ ID NO: 88116 - protein, 15 aa, Homo Sapiens
EEKLAEAERVGLHKV

SEQ ID NO: 88117 - protein, 15 aa, Homo Sapiens
EKLAEAERVGLHKVF

SEQ ID NO: 88118 - protein, 15 aa, Homo Sapiens
KLAEAERVGLHKVFK

SEQ ID NO: 88119 - protein, 15 aa, Homo Sapiens
LAEAERVGLHKVFKL

SEQ ID NO: 88120 - protein, 15 aa, Homo Sapiens
AEAERVGLHKVFKLQ

SEQ ID NO: 88121 - protein, 15 aa, Homo Sapiens
EAERVGLHKVFKLQT

SEQ ID NO: 88122 - protein, 15 aa, Homo Sapiens
AERVGLHKVFKLQTS

SEQ ID NO: 88123 - protein, 15 aa, Homo Sapiens
ERVGLHKVFKLQTSL

SEQ ID NO: 88124 - protein, 15 aa, Homo Sapiens
RVGLHKVFKLQTSLT

SEQ ID NO: 88125 - protein, 15 aa, Homo Sapiens
VGLHKVFKLQTSLTC

SEQ ID NO: 88126 - protein, 15 aa, Homo Sapiens
GLHKVFKLQTSLTCN

SEQ ID NO: 88127 - protein, 15 aa, Homo Sapiens
LHKVFKLQTSLTCNS

SEQ ID NO: 88128 - protein, 15 aa, Homo Sapiens
HKVFKLQTSLTCNSM

SEQ ID NO: 88129 - protein, 15 aa, Homo Sapiens
KVFKLQTSLTCNSMV

SEQ ID NO: 88130 - protein, 15 aa, Homo Sapiens
VFKLQTSLTCNSMVL

SEQ ID NO: 88131 - protein, 15 aa, Homo Sapiens
FKLQTSLTCNSMVLF

SEQ ID NO: 88132 - protein, 15 aa, Homo Sapiens
KLQTSLTCNSMVLFD

SEQ ID NO: 88133 - protein, 15 aa, Homo Sapiens
LQTSLTCNSMVLFDH

SEQ ID NO: 88134 - protein, 15 aa, Homo Sapiens
QTSLTCNSMVLFDHV

SEQ ID NO: 88135 - protein, 15 aa, Homo Sapiens
TSLTCNSMVLFDHVG

SEQ ID NO: 88136 - protein, 15 aa, Homo Sapiens
SLTCNSMVLFDHVGC

SEQ ID NO: 88137 - protein, 15 aa, Homo Sapiens
LTCNSMVLFDHVGCL

SEQ ID NO: 88138 - protein, 15 aa, Homo Sapiens
TCNSMVLFDHVGCLK

SEQ ID NO: 88139 - protein, 15 aa, Homo Sapiens
CNSMVLFDHVGCLKK

SEQ ID NO: 88140 - protein, 15 aa, Homo Sapiens
NSMVLFDHVGCLKKY

SEQ ID NO: 88141 - protein, 15 aa, Homo Sapiens
SMVLFDHVGCLKKYD

SEQ ID NO: 88142 - protein, 15 aa, Homo Sapiens
MVLFDHVGCLKKYDT

SEQ ID NO: 88143 - protein, 15 aa, Homo Sapiens
VLFDHVGCLKKYDTV

SEQ ID NO: 88144 - protein, 15 aa, Homo Sapiens
LFDHVGCLKKYDTVL

SEQ ID NO: 88145 - protein, 15 aa, Homo Sapiens
FDHVGCLKKYDTVLD

SEQ ID NO: 88146 - protein, 15 aa, Homo Sapiens
DHVGCLKKYDTVLDI

SEQ ID NO: 88147 - protein, 15 aa, Homo Sapiens
HVGCLKKYDTVLDIL

SEQ ID NO: 88148 - protein, 15 aa, Homo Sapiens
VGCLKKYDTVLDILR

SEQ ID NO: 88149 - protein, 15 aa, Homo Sapiens
GCLKKYDTVLDILRD

SEQ ID NO: 88150 - protein, 15 aa, Homo Sapiens
CLKKYDTVLDILRDF

SEQ ID NO: 88151 - protein, 15 aa, Homo Sapiens
LKKYDTVLDILRDFF

SEQ ID NO: 88152 - protein, 15 aa, Homo Sapiens
KKYDTVLDILRDFFE

SEQ ID NO: 88153 - protein, 15 aa, Homo Sapiens
KYDTVLDILRDFFEL

SEQ ID NO: 88154 - protein, 15 aa, Homo Sapiens
YDTVLDILRDFFELR

SEQ ID NO: 88155 - protein, 15 aa, Homo Sapiens
DTVLDILRDFFELRL

SEQ ID NO: 88156 - protein, 15 aa, Homo Sapiens
TVLDILRDFFELRLK

SEQ ID NO: 88157 - protein, 15 aa, Homo Sapiens
VLDILRDFFELRLKY

SEQ ID NO: 88158 - protein, 15 aa, Homo Sapiens
LDILRDFFELRLKYY

SEQ ID NO: 88159 - protein, 15 aa, Homo Sapiens
DILRDFFELRLKYYG

SEQ ID NO: 88160 - protein, 15 aa, Homo Sapiens
ILRDFFELRLKYYGL

SEQ ID NO: 88161 - protein, 15 aa, Homo Sapiens
LRDFFELRLKYYGLR

SEQ ID NO: 88162 - protein, 15 aa, Homo Sapiens
RDFFELRLKYYGLRK

SEQ ID NO: 88163 - protein, 15 aa, Homo Sapiens
DFFELRLKYYGLRKE

SEQ ID NO: 88164 - protein, 15 aa, Homo Sapiens
FFELRLKYYGLRKEW

SEQ ID NO: 88165 - protein, 15 aa, Homo Sapiens
FELRLKYYGLRKEWL

SEQ ID NO: 88166 - protein, 15 aa, Homo Sapiens
ELRLKYYGLRKEWLL

SEQ ID NO: 88167 - protein, 15 aa, Homo Sapiens
LRLKYYGLRKEWLLG

SEQ ID NO: 88168 - protein, 15 aa, Homo Sapiens
RLKYYGLRKEWLLGM

SEQ ID NO: 88169 - protein, 15 aa, Homo Sapiens
LKYYGLRKEWLLGML

SEQ ID NO: 88170 - protein, 15 aa, Homo Sapiens
KYYGLRKEWLLGMLG

SEQ ID NO: 88171 - protein, 15 aa, Homo Sapiens
YYGLRKEWLLGMLGA

SEQ ID NO: 88172 - protein, 15 aa, Homo Sapiens
YGLRKEWLLGMLGAE

SEQ ID NO: 88173 - protein, 15 aa, Homo Sapiens
GLRKEWLLGMLGAES

SEQ ID NO: 88174 - protein, 15 aa, Homo Sapiens
LRKEWLLGMLGAESA

SEQ ID NO: 88175 - protein, 15 aa, Homo Sapiens
RKEWLLGMLGAESAK

SEQ ID NO: 88176 - protein, 15 aa, Homo Sapiens
KEWLLGMLGAESAKL

SEQ ID NO: 88177 - protein, 15 aa, Homo Sapiens
EWLLGMLGAESAKLN

SEQ ID NO: 88178 - protein, 15 aa, Homo Sapiens
WLLGMLGAESAKLNN

SEQ ID NO: 88179 - protein, 15 aa, Homo Sapiens
LLGMLGAESAKLNNQ

SEQ ID NO: 88180 - protein, 15 aa, Homo Sapiens
LGMLGAESAKLNNQA

SEQ ID NO: 88181 - protein, 15 aa, Homo Sapiens
GMLGAESAKLNNQAR

SEQ ID NO: 88182 - protein, 15 aa, Homo Sapiens
MLGAESAKLNNQARF

SEQ ID NO: 88183 - protein, 15 aa, Homo Sapiens
LGAESAKLNNQARFI

SEQ ID NO: 88184 - protein, 15 aa, Homo Sapiens
GAESAKLNNQARFIL

SEQ ID NO: 88185 - protein, 15 aa, Homo Sapiens
AESAKLNNQARFILE

SEQ ID NO: 88186 - protein, 15 aa, Homo Sapiens
ESAKLNNQARFILEK

SEQ ID NO: 88187 - protein, 15 aa, Homo Sapiens
SAKLNNQARFILEKI

SEQ ID NO: 88188 - protein, 15 aa, Homo Sapiens
AKLNNQARFILEKID

SEQ ID NO: 88189 - protein, 15 aa, Homo Sapiens
KLNNQARFILEKIDG

SEQ ID NO: 88190 - protein, 15 aa, Homo Sapiens
LNNQARFILEKIDGK

SEQ ID NO: 88191 - protein, 15 aa, Homo Sapiens
NNQARFILEKIDGKI

SEQ ID NO: 88192 - protein, 15 aa, Homo Sapiens
NQARFILEKIDGKII

SEQ ID NO: 88193 - protein, 15 aa, Homo Sapiens
QARFILEKIDGKIII

SEQ ID NO: 88194 - protein, 15 aa, Homo Sapiens
ARFILEKIDGKIIIE

SEQ ID NO: 88195 - protein, 15 aa, Homo Sapiens
RFILEKIDGKIIIEN

SEQ ID NO: 88196 - protein, 15 aa, Homo Sapiens
FILEKIDGKIIIENK

SEQ ID NO: 88197 - protein, 15 aa, Homo Sapiens
ILEKIDGKIIIENKP

SEQ ID NO: 88198 - protein, 15 aa, Homo Sapiens
LEKIDGKIIIENKPK

SEQ ID NO: 88199 - protein, 15 aa, Homo Sapiens
EKIDGKIIIENKPKK

SEQ ID NO: 88200 - protein, 15 aa, Homo Sapiens
KIDGKIIIENKPKKE

SEQ ID NO: 88201 - protein, 15 aa, Homo Sapiens
IDGKIIIENKPKKEL

SEQ ID NO: 88202 - protein, 15 aa, Homo Sapiens
DGKIIIENKPKKELI

SEQ ID NO: 88203 - protein, 15 aa, Homo Sapiens
GKIIIENKPKKELIK

SEQ ID NO: 88204 - protein, 15 aa, Homo Sapiens
KIIIENKPKKELIKV

SEQ ID NO: 88205 - protein, 15 aa, Homo Sapiens
IIIENKPKKELIKVL

SEQ ID NO: 88206 - protein, 15 aa, Homo Sapiens
IIENKPKKELIKVLI

SEQ ID NO: 88207 - protein, 15 aa, Homo Sapiens
IENKPKKELIKVLIQ

SEQ ID NO: 88208 - protein, 15 aa, Homo Sapiens
ENKPKKELIKVLIQR

SEQ ID NO: 88209 - protein, 15 aa, Homo Sapiens
NKPKKELIKVLIQRG

SEQ ID NO: 88210 - protein, 15 aa, Homo Sapiens
KPKKELIKVLIQRGY

SEQ ID NO: 88211 - protein, 15 aa, Homo Sapiens
PKKELIKVLIQRGYD

SEQ ID NO: 88212 - protein, 15 aa, Homo Sapiens
KKELIKVLIQRGYDS

SEQ ID NO: 88213 - protein, 15 aa, Homo Sapiens
KELIKVLIQRGYDSD

SEQ ID NO: 88214 - protein, 15 aa, Homo Sapiens
ELIKVLIQRGYDSDP

SEQ ID NO: 88215 - protein, 15 aa, Homo Sapiens
LIKVLIQRGYDSDPV

SEQ ID NO: 88216 - protein, 15 aa, Homo Sapiens
IKVLIQRGYDSDPVK

SEQ ID NO: 88217 - protein, 15 aa, Homo Sapiens
KVLIQRGYDSDPVKA

SEQ ID NO: 88218 - protein, 15 aa, Homo Sapiens
VLIQRGYDSDPVKAW

SEQ ID NO: 88219 - protein, 15 aa, Homo Sapiens
LIQRGYDSDPVKAWK

SEQ ID NO: 88220 - protein, 15 aa, Homo Sapiens
IQRGYDSDPVKAWKE

SEQ ID NO: 88221 - protein, 15 aa, Homo Sapiens
QRGYDSDPVKAWKEA

SEQ ID NO: 88222 - protein, 15 aa, Homo Sapiens
RGYDSDPVKAWKEAQ

SEQ ID NO: 88223 - protein, 15 aa, Homo Sapiens
GYDSDPVKAWKEAQQ

SEQ ID NO: 88224 - protein, 15 aa, Homo Sapiens
YDSDPVKAWKEAQQK

SEQ ID NO: 88225 - protein, 15 aa, Homo Sapiens
DSDPVKAWKEAQQKV

SEQ ID NO: 88226 - protein, 15 aa, Homo Sapiens
SDPVKAWKEAQQKVP

SEQ ID NO: 88227 - protein, 15 aa, Homo Sapiens
DPVKAWKEAQQKVPD

SEQ ID NO: 88228 - protein, 15 aa, Homo Sapiens
PVKAWKEAQQKVPDE

SEQ ID NO: 88229 - protein, 15 aa, Homo Sapiens
VKAWKEAQQKVPDEE

SEQ ID NO: 88230 - protein, 15 aa, Homo Sapiens
KAWKEAQQKVPDEEE

SEQ ID NO: 88231 - protein, 15 aa, Homo Sapiens
AWKEAQQKVPDEEEN

SEQ ID NO: 88232 - protein, 15 aa, Homo Sapiens
WKEAQQKVPDEEENE

SEQ ID NO: 88233 - protein, 15 aa, Homo Sapiens
KEAQQKVPDEEENEE

SEQ ID NO: 88234 - protein, 15 aa, Homo Sapiens
EAQQKVPDEEENEES

SEQ ID NO: 88235 - protein, 15 aa, Homo Sapiens
AQQKVPDEEENEESD

SEQ ID NO: 88236 - protein, 15 aa, Homo Sapiens
QQKVPDEEENEESDN

SEQ ID NO: 88237 - protein, 15 aa, Homo Sapiens
QKVPDEEENEESDNE

SEQ ID NO: 88238 - protein, 15 aa, Homo Sapiens
KVPDEEENEESDNEK

SEQ ID NO: 88239 - protein, 15 aa, Homo Sapiens
VPDEEENEESDNEKE

SEQ ID NO: 88240 - protein, 15 aa, Homo Sapiens
PDEEENEESDNEKET

SEQ ID NO: 88241 - protein, 15 aa, Homo Sapiens
DEEENEESDNEKETE

SEQ ID NO: 88242 - protein, 15 aa, Homo Sapiens
EEENEESDNEKETEK

SEQ ID NO: 88243 - protein, 15 aa, Homo Sapiens
EENEESDNEKETEKS

SEQ ID NO: 88244 - protein, 15 aa, Homo Sapiens
ENEESDNEKETEKSD

SEQ ID NO: 88245 - protein, 15 aa, Homo Sapiens
NEESDNEKETEKSDS

SEQ ID NO: 88246 - protein, 15 aa, Homo Sapiens
EESDNEKETEKSDSV

SEQ ID NO: 88247 - protein, 15 aa, Homo Sapiens
ESDNEKETEKSDSVT

SEQ ID NO: 88248 - protein, 15 aa, Homo Sapiens
SDNEKETEKSDSVTD

SEQ ID NO: 88249 - protein, 15 aa, Homo Sapiens
DNEKETEKSDSVTDS

SEQ ID NO: 88250 - protein, 15 aa, Homo Sapiens
NEKETEKSDSVTDSG

SEQ ID NO: 88251 - protein, 15 aa, Homo Sapiens
EKETEKSDSVTDSGP

SEQ ID NO: 88252 - protein, 15 aa, Homo Sapiens
KETEKSDSVTDSGPT

SEQ ID NO: 88253 - protein, 15 aa, Homo Sapiens
ETEKSDSVTDSGPTF

SEQ ID NO: 88254 - protein, 15 aa, Homo Sapiens
TEKSDSVTDSGPTFN

SEQ ID NO: 88255 - protein, 15 aa, Homo Sapiens
EKSDSVTDSGPTFNY

SEQ ID NO: 88256 - protein, 15 aa, Homo Sapiens
KSDSVTDSGPTFNYL

SEQ ID NO: 88257 - protein, 15 aa, Homo Sapiens
SDSVTDSGPTFNYLL

SEQ ID NO: 88258 - protein, 15 aa, Homo Sapiens
DSVTDSGPTFNYLLD

SEQ ID NO: 88259 - protein, 15 aa, Homo Sapiens
SVTDSGPTFNYLLDM

SEQ ID NO: 88260 - protein, 15 aa, Homo Sapiens
VTDSGPTFNYLLDMP

SEQ ID NO: 88261 - protein, 15 aa, Homo Sapiens
TDSGPTFNYLLDMPL

SEQ ID NO: 88262 - protein, 15 aa, Homo Sapiens
DSGPTFNYLLDMPLW

SEQ ID NO: 88263 - protein, 15 aa, Homo Sapiens
SGPTFNYLLDMPLWY

SEQ ID NO: 88264 - protein, 15 aa, Homo Sapiens
GPTFNYLLDMPLWYL

SEQ ID NO: 88265 - protein, 15 aa, Homo Sapiens
PTFNYLLDMPLWYLT

SEQ ID NO: 88266 - protein, 15 aa, Homo Sapiens
TFNYLLDMPLWYLTK

SEQ ID NO: 88267 - protein, 15 aa, Homo Sapiens
FNYLLDMPLWYLTKE

SEQ ID NO: 88268 - protein, 15 aa, Homo Sapiens
NYLLDMPLWYLTKEK

SEQ ID NO: 88269 - protein, 15 aa, Homo Sapiens
YLLDMPLWYLTKEKK

SEQ ID NO: 88270 - protein, 15 aa, Homo Sapiens
LLDMPLWYLTKEKKD

SEQ ID NO: 88271 - protein, 15 aa, Homo Sapiens
LDMPLWYLTKEKKDE

SEQ ID NO: 88272 - protein, 15 aa, Homo Sapiens
DMPLWYLTKEKKDEL

SEQ ID NO: 88273 - protein, 15 aa, Homo Sapiens
MPLWYLTKEKKDELC

SEQ ID NO: 88274 - protein, 15 aa, Homo Sapiens
PLWYLTKEKKDELCR

SEQ ID NO: 88275 - protein, 15 aa, Homo Sapiens
LWYLTKEKKDELCRL

SEQ ID NO: 88276 - protein, 15 aa, Homo Sapiens
WYLTKEKKDELCRLR

SEQ ID NO: 88277 - protein, 15 aa, Homo Sapiens
YLTKEKKDELCRLRN

SEQ ID NO: 88278 - protein, 15 aa, Homo Sapiens
LTKEKKDELCRLRNE

SEQ ID NO: 88279 - protein, 15 aa, Homo Sapiens
TKEKKDELCRLRNEK

SEQ ID NO: 88280 - protein, 15 aa, Homo Sapiens
KEKKDELCRLRNEKE

SEQ ID NO: 88281 - protein, 15 aa, Homo Sapiens
EKKDELCRLRNEKEQ

SEQ ID NO: 88282 - protein, 15 aa, Homo Sapiens
KKDELCRLRNEKEQE

SEQ ID NO: 88283 - protein, 15 aa, Homo Sapiens
KDELCRLRNEKEQEL

SEQ ID NO: 88284 - protein, 15 aa, Homo Sapiens
DELCRLRNEKEQELD

SEQ ID NO: 88285 - protein, 15 aa, Homo Sapiens
ELCRLRNEKEQELDT

SEQ ID NO: 88286 - protein, 15 aa, Homo Sapiens
LCRLRNEKEQELDTL

SEQ ID NO: 88287 - protein, 15 aa, Homo Sapiens
CRLRNEKEQELDTLK

SEQ ID NO: 88288 - protein, 15 aa, Homo Sapiens
RLRNEKEQELDTLKR

SEQ ID NO: 88289 - protein, 15 aa, Homo Sapiens
LRNEKEQELDTLKRK

SEQ ID NO: 88290 - protein, 15 aa, Homo Sapiens
RNEKEQELDTLKRKS

SEQ ID NO: 88291 - protein, 15 aa, Homo Sapiens
NEKEQELDTLKRKSP

SEQ ID NO: 88292 - protein, 15 aa, Homo Sapiens
EKEQELDTLKRKSPS

SEQ ID NO: 88293 - protein, 15 aa, Homo Sapiens
KEQELDTLKRKSPSD

SEQ ID NO: 88294 - protein, 15 aa, Homo Sapiens
EQELDTLKRKSPSDL

SEQ ID NO: 88295 - protein, 15 aa, Homo Sapiens
QELDTLKRKSPSDLW

SEQ ID NO: 88296 - protein, 15 aa, Homo Sapiens
ELDTLKRKSPSDLWK

SEQ ID NO: 88297 - protein, 15 aa, Homo Sapiens
LDTLKRKSPSDLWKE

SEQ ID NO: 88298 - protein, 15 aa, Homo Sapiens
DTLKRKSPSDLWKED

SEQ ID NO: 88299 - protein, 15 aa, Homo Sapiens
TLKRKSPSDLWKEDL

SEQ ID NO: 88300 - protein, 15 aa, Homo Sapiens
LKRKSPSDLWKEDLA

SEQ ID NO: 88301 - protein, 15 aa, Homo Sapiens
KRKSPSDLWKEDLAT

SEQ ID NO: 88302 - protein, 15 aa, Homo Sapiens
RKSPSDLWKEDLATF

SEQ ID NO: 88303 - protein, 15 aa, Homo Sapiens
KSPSDLWKEDLATFI

SEQ ID NO: 88304 - protein, 15 aa, Homo Sapiens
SPSDLWKEDLATFIE

SEQ ID NO: 88305 - protein, 15 aa, Homo Sapiens
PSDLWKEDLATFIEE

SEQ ID NO: 88306 - protein, 15 aa, Homo Sapiens
SDLWKEDLATFIEEL

SEQ ID NO: 88307 - protein, 15 aa, Homo Sapiens
DLWKEDLATFIEELE

SEQ ID NO: 88308 - protein, 15 aa, Homo Sapiens
LWKEDLATFIEELEA

SEQ ID NO: 88309 - protein, 15 aa, Homo Sapiens
WKEDLATFIEELEAV

SEQ ID NO: 88310 - protein, 15 aa, Homo Sapiens
KEDLATFIEELEAVE

SEQ ID NO: 88311 - protein, 15 aa, Homo Sapiens
EDLATFIEELEAVEA

SEQ ID NO: 88312 - protein, 15 aa, Homo Sapiens
DLATFIEELEAVEAK

SEQ ID NO: 88313 - protein, 15 aa, Homo Sapiens
LATFIEELEAVEAKE

SEQ ID NO: 88314 - protein, 15 aa, Homo Sapiens
ATFIEELEAVEAKEK

SEQ ID NO: 88315 - protein, 15 aa, Homo Sapiens
TFIEELEAVEAKEKQ

SEQ ID NO: 88316 - protein, 15 aa, Homo Sapiens
FIEELEAVEAKEKQD

SEQ ID NO: 88317 - protein, 15 aa, Homo Sapiens
IEELEAVEAKEKQDE

SEQ ID NO: 88318 - protein, 15 aa, Homo Sapiens
EELEAVEAKEKQDEQ

SEQ ID NO: 88319 - protein, 15 aa, Homo Sapiens
ELEAVEAKEKQDEQV

SEQ ID NO: 88320 - protein, 15 aa, Homo Sapiens
LEAVEAKEKQDEQVG

SEQ ID NO: 88321 - protein, 15 aa, Homo Sapiens
EAVEAKEKQDEQVGL

SEQ ID NO: 88322 - protein, 15 aa, Homo Sapiens
AVEAKEKQDEQVGLP

SEQ ID NO: 88323 - protein, 15 aa, Homo Sapiens
VEAKEKQDEQVGLPG

SEQ ID NO: 88324 - protein, 15 aa, Homo Sapiens
EAKEKQDEQVGLPGK

SEQ ID NO: 88325 - protein, 15 aa, Homo Sapiens
AKEKQDEQVGLPGKG

SEQ ID NO: 88326 - protein, 15 aa, Homo Sapiens
KEKQDEQVGLPGKGG

SEQ ID NO: 88327 - protein, 15 aa, Homo Sapiens
EKQDEQVGLPGKGGK

SEQ ID NO: 88328 - protein, 15 aa, Homo Sapiens
KQDEQVGLPGKGGKA

SEQ ID NO: 88329 - protein, 15 aa, Homo Sapiens
QDEQVGLPGKGGKAK

SEQ ID NO: 88330 - protein, 15 aa, Homo Sapiens
DEQVGLPGKGGKAKG

SEQ ID NO: 88331 - protein, 15 aa, Homo Sapiens
EQVGLPGKGGKAKGK

SEQ ID NO: 88332 - protein, 15 aa, Homo Sapiens
QVGLPGKGGKAKGKK

SEQ ID NO: 88333 - protein, 15 aa, Homo Sapiens
VGLPGKGGKAKGKKT

SEQ ID NO: 88334 - protein, 15 aa, Homo Sapiens
GLPGKGGKAKGKKTQ

SEQ ID NO: 88335 - protein, 15 aa, Homo Sapiens
LPGKGGKAKGKKTQM

SEQ ID NO: 88336 - protein, 15 aa, Homo Sapiens
PGKGGKAKGKKTQMA

SEQ ID NO: 88337 - protein, 15 aa, Homo Sapiens
GKGGKAKGKKTQMAE

SEQ ID NO: 88338 - protein, 15 aa, Homo Sapiens
KGGKAKGKKTQMAEV

SEQ ID NO: 88339 - protein, 15 aa, Homo Sapiens
GGKAKGKKTQMAEVL

SEQ ID NO: 88340 - protein, 15 aa, Homo Sapiens
GKAKGKKTQMAEVLP

SEQ ID NO: 88341 - protein, 15 aa, Homo Sapiens
KAKGKKTQMAEVLPS

SEQ ID NO: 88342 - protein, 15 aa, Homo Sapiens
AKGKKTQMAEVLPSP

SEQ ID NO: 88343 - protein, 15 aa, Homo Sapiens
KGKKTQMAEVLPSPR

SEQ ID NO: 88344 - protein, 15 aa, Homo Sapiens
GKKTQMAEVLPSPRG

SEQ ID NO: 88345 - protein, 15 aa, Homo Sapiens
KKTQMAEVLPSPRGQ

SEQ ID NO: 88346 - protein, 15 aa, Homo Sapiens
KTQMAEVLPSPRGQR

SEQ ID NO: 88347 - protein, 15 aa, Homo Sapiens
TQMAEVLPSPRGQRV

SEQ ID NO: 88348 - protein, 15 aa, Homo Sapiens
QMAEVLPSPRGQRVI

SEQ ID NO: 88349 - protein, 15 aa, Homo Sapiens
MAEVLPSPRGQRVIP

SEQ ID NO: 88350 - protein, 15 aa, Homo Sapiens
AEVLPSPRGQRVIPR

SEQ ID NO: 88351 - protein, 15 aa, Homo Sapiens
EVLPSPRGQRVIPRI

SEQ ID NO: 88352 - protein, 15 aa, Homo Sapiens
VLPSPRGQRVIPRIT

SEQ ID NO: 88353 - protein, 15 aa, Homo Sapiens
LPSPRGQRVIPRITI

SEQ ID NO: 88354 - protein, 15 aa, Homo Sapiens
PSPRGQRVIPRITIE

SEQ ID NO: 88355 - protein, 15 aa, Homo Sapiens
SPRGQRVIPRITIEM

SEQ ID NO: 88356 - protein, 15 aa, Homo Sapiens
PRGQRVIPRITIEMK

SEQ ID NO: 88357 - protein, 15 aa, Homo Sapiens
RGQRVIPRITIEMKA

SEQ ID NO: 88358 - protein, 15 aa, Homo Sapiens
GQRVIPRITIEMKAE

SEQ ID NO: 88359 - protein, 15 aa, Homo Sapiens
QRVIPRITIEMKAEA

SEQ ID NO: 88360 - protein, 15 aa, Homo Sapiens
RVIPRITIEMKAEAE

SEQ ID NO: 88361 - protein, 15 aa, Homo Sapiens
VIPRITIEMKAEAEK

SEQ ID NO: 88362 - protein, 15 aa, Homo Sapiens
IPRITIEMKAEAEKK

SEQ ID NO: 88363 - protein, 15 aa, Homo Sapiens
PRITIEMKAEAEKKN

SEQ ID NO: 88364 - protein, 15 aa, Homo Sapiens
RITIEMKAEAEKKNK

SEQ ID NO: 88365 - protein, 15 aa, Homo Sapiens
ITIEMKAEAEKKNKK

SEQ ID NO: 88366 - protein, 15 aa, Homo Sapiens
TIEMKAEAEKKNKKK

SEQ ID NO: 88367 - protein, 15 aa, Homo Sapiens
IEMKAEAEKKNKKKI

SEQ ID NO: 88368 - protein, 15 aa, Homo Sapiens
EMKAEAEKKNKKKIK

SEQ ID NO: 88369 - protein, 15 aa, Homo Sapiens
MKAEAEKKNKKKIKN

SEQ ID NO: 88370 - protein, 15 aa, Homo Sapiens
KAEAEKKNKKKIKNE

SEQ ID NO: 88371 - protein, 15 aa, Homo Sapiens
AEAEKKNKKKIKNEN

SEQ ID NO: 88372 - protein, 15 aa, Homo Sapiens
EAEKKNKKKIKNENT

SEQ ID NO: 88373 - protein, 15 aa, Homo Sapiens
AEKKNKKKIKNENTE

SEQ ID NO: 88374 - protein, 15 aa, Homo Sapiens
EKKNKKKIKNENTEG

SEQ ID NO: 88375 - protein, 15 aa, Homo Sapiens
KKNKKKIKNENTEGS

SEQ ID NO: 88376 - protein, 15 aa, Homo Sapiens
KNKKKIKNENTEGSP

SEQ ID NO: 88377 - protein, 15 aa, Homo Sapiens
NKKKIKNENTEGSPQ

SEQ ID NO: 88378 - protein, 15 aa, Homo Sapiens
KKKIKNENTEGSPQE

SEQ ID NO: 88379 - protein, 15 aa, Homo Sapiens
KKIKNENTEGSPQED

SEQ ID NO: 88380 - protein, 15 aa, Homo Sapiens
KIKNENTEGSPQEDG

SEQ ID NO: 88381 - protein, 15 aa, Homo Sapiens
IKNENTEGSPQEDGV

SEQ ID NO: 88382 - protein, 15 aa, Homo Sapiens
KNENTEGSPQEDGVE

SEQ ID NO: 88383 - protein, 15 aa, Homo Sapiens
NENTEGSPQEDGVEL

SEQ ID NO: 88384 - protein, 15 aa, Homo Sapiens
ENTEGSPQEDGVELE

SEQ ID NO: 88385 - protein, 15 aa, Homo Sapiens
NTEGSPQEDGVELEG

SEQ ID NO: 88386 - protein, 15 aa, Homo Sapiens
TEGSPQEDGVELEGL

SEQ ID NO: 88387 - protein, 15 aa, Homo Sapiens
EGSPQEDGVELEGLK

SEQ ID NO: 88388 - protein, 15 aa, Homo Sapiens
GSPQEDGVELEGLKQ

SEQ ID NO: 88389 - protein, 15 aa, Homo Sapiens
SPQEDGVELEGLKQR

SEQ ID NO: 88390 - protein, 15 aa, Homo Sapiens
PQEDGVELEGLKQRL

SEQ ID NO: 88391 - protein, 15 aa, Homo Sapiens
QEDGVELEGLKQRLE

SEQ ID NO: 88392 - protein, 15 aa, Homo Sapiens
EDGVELEGLKQRLEK

SEQ ID NO: 88393 - protein, 15 aa, Homo Sapiens
DGVELEGLKQRLEKK

SEQ ID NO: 88394 - protein, 15 aa, Homo Sapiens
GVELEGLKQRLEKKQ

SEQ ID NO: 88395 - protein, 15 aa, Homo Sapiens
VELEGLKQRLEKKQK

SEQ ID NO: 88396 - protein, 15 aa, Homo Sapiens
ELEGLKQRLEKKQKR

SEQ ID NO: 88397 - protein, 15 aa, Homo Sapiens
LEGLKQRLEKKQKRE

SEQ ID NO: 88398 - protein, 15 aa, Homo Sapiens
EGLKQRLEKKQKREP

SEQ ID NO: 88399 - protein, 15 aa, Homo Sapiens
GLKQRLEKKQKREPG

SEQ ID NO: 88400 - protein, 15 aa, Homo Sapiens
LKQRLEKKQKREPGT

SEQ ID NO: 88401 - protein, 15 aa, Homo Sapiens
KQRLEKKQKREPGTK

SEQ ID NO: 88402 - protein, 15 aa, Homo Sapiens
QRLEKKQKREPGTKT

SEQ ID NO: 88403 - protein, 15 aa, Homo Sapiens
RLEKKQKREPGTKTK

SEQ ID NO: 88404 - protein, 15 aa, Homo Sapiens
LEKKQKREPGTKTKK

SEQ ID NO: 88405 - protein, 15 aa, Homo Sapiens
EKKQKREPGTKTKKQ

SEQ ID NO: 88406 - protein, 15 aa, Homo Sapiens
KKQKREPGTKTKKQT

SEQ ID NO: 88407 - protein, 15 aa, Homo Sapiens
KQKREPGTKTKKQTT

SEQ ID NO: 88408 - protein, 15 aa, Homo Sapiens
QKREPGTKTKKQTTL

SEQ ID NO: 88409 - protein, 15 aa, Homo Sapiens
KREPGTKTKKQTTLA

SEQ ID NO: 88410 - protein, 15 aa, Homo Sapiens
REPGTKTKKQTTLAF

SEQ ID NO: 88411 - protein, 15 aa, Homo Sapiens
EPGTKTKKQTTLAFK

SEQ ID NO: 88412 - protein, 15 aa, Homo Sapiens
PGTKTKKQTTLAFKP

SEQ ID NO: 88413 - protein, 15 aa, Homo Sapiens
GTKTKKQTTLAFKPI

SEQ ID NO: 88414 - protein, 15 aa, Homo Sapiens
TKTKKQTTLAFKPIK

SEQ ID NO: 88415 - protein, 15 aa, Homo Sapiens
KTKKQTTLAFKPIKK

SEQ ID NO: 88416 - protein, 15 aa, Homo Sapiens
TKKQTTLAFKPIKKG

SEQ ID NO: 88417 - protein, 15 aa, Homo Sapiens
KKQTTLAFKPIKKGK

SEQ ID NO: 88418 - protein, 15 aa, Homo Sapiens
KQTTLAFKPIKKGKK

SEQ ID NO: 88419 - protein, 15 aa, Homo Sapiens
QTTLAFKPIKKGKKR

SEQ ID NO: 88420 - protein, 15 aa, Homo Sapiens
TTLAFKPIKKGKKRN

SEQ ID NO: 88421 - protein, 15 aa, Homo Sapiens
TLAFKPIKKGKKRNP

SEQ ID NO: 88422 - protein, 15 aa, Homo Sapiens
LAFKPIKKGKKRNPW

SEQ ID NO: 88423 - protein, 15 aa, Homo Sapiens
AFKPIKKGKKRNPWS

SEQ ID NO: 88424 - protein, 15 aa, Homo Sapiens
FKPIKKGKKRNPWSD

SEQ ID NO: 88425 - protein, 15 aa, Homo Sapiens
KPIKKGKKRNPWSDS

SEQ ID NO: 88426 - protein, 15 aa, Homo Sapiens
PIKKGKKRNPWSDSE

SEQ ID NO: 88427 - protein, 15 aa, Homo Sapiens
IKKGKKRNPWSDSES

SEQ ID NO: 88428 - protein, 15 aa, Homo Sapiens
KKGKKRNPWSDSESD

SEQ ID NO: 88429 - protein, 15 aa, Homo Sapiens
KGKKRNPWSDSESDR

SEQ ID NO: 88430 - protein, 15 aa, Homo Sapiens
GKKRNPWSDSESDRS

SEQ ID NO: 88431 - protein, 15 aa, Homo Sapiens
KKRNPWSDSESDRSS

SEQ ID NO: 88432 - protein, 15 aa, Homo Sapiens
KRNPWSDSESDRSSD

SEQ ID NO: 88433 - protein, 15 aa, Homo Sapiens
RNPWSDSESDRSSDE

SEQ ID NO: 88434 - protein, 15 aa, Homo Sapiens
NPWSDSESDRSSDES

SEQ ID NO: 88435 - protein, 15 aa, Homo Sapiens
PWSDSESDRSSDESN

SEQ ID NO: 88436 - protein, 15 aa, Homo Sapiens
WSDSESDRSSDESNF

SEQ ID NO: 88437 - protein, 15 aa, Homo Sapiens
SDSESDRSSDESNFD

SEQ ID NO: 88438 - protein, 15 aa, Homo Sapiens
DSESDRSSDESNFDV

SEQ ID NO: 88439 - protein, 15 aa, Homo Sapiens
SESDRSSDESNFDVP

SEQ ID NO: 88440 - protein, 15 aa, Homo Sapiens
ESDRSSDESNFDVPP

SEQ ID NO: 88441 - protein, 15 aa, Homo Sapiens
SDRSSDESNFDVPPR

SEQ ID NO: 88442 - protein, 15 aa, Homo Sapiens
DRSSDESNFDVPPRE

SEQ ID NO: 88443 - protein, 15 aa, Homo Sapiens
RSSDESNFDVPPRET

SEQ ID NO: 88444 - protein, 15 aa, Homo Sapiens
SSDESNFDVPPRETE

SEQ ID NO: 88445 - protein, 15 aa, Homo Sapiens
SDESNFDVPPRETEP

SEQ ID NO: 88446 - protein, 15 aa, Homo Sapiens
DESNFDVPPRETEPR

SEQ ID NO: 88447 - protein, 15 aa, Homo Sapiens
ESNFDVPPRETEPRR

SEQ ID NO: 88448 - protein, 15 aa, Homo Sapiens
SNFDVPPRETEPRRA

SEQ ID NO: 88449 - protein, 15 aa, Homo Sapiens
NFDVPPRETEPRRAA

SEQ ID NO: 88450 - protein, 15 aa, Homo Sapiens
FDVPPRETEPRRAAT

SEQ ID NO: 88451 - protein, 15 aa, Homo Sapiens
DVPPRETEPRRAATK

SEQ ID NO: 88452 - protein, 15 aa, Homo Sapiens
VPPRETEPRRAATKT

SEQ ID NO: 88453 - protein, 15 aa, Homo Sapiens
PPRETEPRRAATKTK

SEQ ID NO: 88454 - protein, 15 aa, Homo Sapiens
PRETEPRRAATKTKF

SEQ ID NO: 88455 - protein, 15 aa, Homo Sapiens
RETEPRRAATKTKFT

SEQ ID NO: 88456 - protein, 15 aa, Homo Sapiens
ETEPRRAATKTKFTM

SEQ ID NO: 88457 - protein, 15 aa, Homo Sapiens
TEPRRAATKTKFTMD

SEQ ID NO: 88458 - protein, 15 aa, Homo Sapiens
EPRRAATKTKFTMDL

SEQ ID NO: 88459 - protein, 15 aa, Homo Sapiens
PRRAATKTKFTMDLD

SEQ ID NO: 88460 - protein, 15 aa, Homo Sapiens
RRAATKTKFTMDLDS

SEQ ID NO: 88461 - protein, 15 aa, Homo Sapiens
RAATKTKFTMDLDSD

SEQ ID NO: 88462 - protein, 15 aa, Homo Sapiens
AATKTKFTMDLDSDE

SEQ ID NO: 88463 - protein, 15 aa, Homo Sapiens
ATKTKFTMDLDSDED

SEQ ID NO: 88464 - protein, 15 aa, Homo Sapiens
TKTKFTMDLDSDEDF

SEQ ID NO: 88465 - protein, 15 aa, Homo Sapiens
KTKFTMDLDSDEDFS

SEQ ID NO: 88466 - protein, 15 aa, Homo Sapiens
TKFTMDLDSDEDFSD

SEQ ID NO: 88467 - protein, 15 aa, Homo Sapiens
KFTMDLDSDEDFSDF

SEQ ID NO: 88468 - protein, 15 aa, Homo Sapiens
FTMDLDSDEDFSDFD

SEQ ID NO: 88469 - protein, 15 aa, Homo Sapiens
TMDLDSDEDFSDFDE

SEQ ID NO: 88470 - protein, 15 aa, Homo Sapiens
MDLDSDEDFSDFDEK

SEQ ID NO: 88471 - protein, 15 aa, Homo Sapiens
DLDSDEDFSDFDEKT

SEQ ID NO: 88472 - protein, 15 aa, Homo Sapiens
LDSDEDFSDFDEKTD

SEQ ID NO: 88473 - protein, 15 aa, Homo Sapiens
DSDEDFSDFDEKTDD

SEQ ID NO: 88474 - protein, 15 aa, Homo Sapiens
SDEDFSDFDEKTDDE

SEQ ID NO: 88475 - protein, 15 aa, Homo Sapiens
DEDFSDFDEKTDDED

SEQ ID NO: 88476 - protein, 15 aa, Homo Sapiens
EDFSDFDEKTDDEDF

SEQ ID NO: 88477 - protein, 15 aa, Homo Sapiens
DFSDFDEKTDDEDFV

SEQ ID NO: 88478 - protein, 15 aa, Homo Sapiens
FSDFDEKTDDEDFVP

SEQ ID NO: 88479 - protein, 15 aa, Homo Sapiens
SDFDEKTDDEDFVPS

SEQ ID NO: 88480 - protein, 15 aa, Homo Sapiens
DFDEKTDDEDFVPSD

SEQ ID NO: 88481 - protein, 15 aa, Homo Sapiens
FDEKTDDEDFVPSDA

SEQ ID NO: 88482 - protein, 15 aa, Homo Sapiens
DEKTDDEDFVPSDAS

SEQ ID NO: 88483 - protein, 15 aa, Homo Sapiens
EKTDDEDFVPSDASP

SEQ ID NO: 88484 - protein, 15 aa, Homo Sapiens
KTDDEDFVPSDASPP

SEQ ID NO: 88485 - protein, 15 aa, Homo Sapiens
TDDEDFVPSDASPPK

SEQ ID NO: 88486 - protein, 15 aa, Homo Sapiens
DDEDFVPSDASPPKT

SEQ ID NO: 88487 - protein, 15 aa, Homo Sapiens
DEDFVPSDASPPKTK

SEQ ID NO: 88488 - protein, 15 aa, Homo Sapiens
EDFVPSDASPPKTKT

SEQ ID NO: 88489 - protein, 15 aa, Homo Sapiens
DFVPSDASPPKTKTS

SEQ ID NO: 88490 - protein, 15 aa, Homo Sapiens
FVPSDASPPKTKTSP

SEQ ID NO: 88491 - protein, 15 aa, Homo Sapiens
VPSDASPPKTKTSPK

SEQ ID NO: 88492 - protein, 15 aa, Homo Sapiens
PSDASPPKTKTSPKL

SEQ ID NO: 88493 - protein, 15 aa, Homo Sapiens
SDASPPKTKTSPKLS

SEQ ID NO: 88494 - protein, 15 aa, Homo Sapiens
DASPPKTKTSPKLSN

SEQ ID NO: 88495 - protein, 15 aa, Homo Sapiens
ASPPKTKTSPKLSNK

SEQ ID NO: 88496 - protein, 15 aa, Homo Sapiens
SPPKTKTSPKLSNKE

SEQ ID NO: 88497 - protein, 15 aa, Homo Sapiens
PPKTKTSPKLSNKEL

SEQ ID NO: 88498 - protein, 15 aa, Homo Sapiens
PKTKTSPKLSNKELK

SEQ ID NO: 88499 - protein, 15 aa, Homo Sapiens
KTKTSPKLSNKELKP

SEQ ID NO: 88500 - protein, 15 aa, Homo Sapiens
TKTSPKLSNKELKPQ

SEQ ID NO: 88501 - protein, 15 aa, Homo Sapiens
KTSPKLSNKELKPQK

SEQ ID NO: 88502 - protein, 15 aa, Homo Sapiens
TSPKLSNKELKPQKS

SEQ ID NO: 88503 - protein, 15 aa, Homo Sapiens
SPKLSNKELKPQKSV

SEQ ID NO: 88504 - protein, 15 aa, Homo Sapiens
PKLSNKELKPQKSVV

SEQ ID NO: 88505 - protein, 15 aa, Homo Sapiens
KLSNKELKPQKSVVS

SEQ ID NO: 88506 - protein, 15 aa, Homo Sapiens
LSNKELKPQKSVVSD

SEQ ID NO: 88507 - protein, 15 aa, Homo Sapiens
SNKELKPQKSVVSDL

SEQ ID NO: 88508 - protein, 15 aa, Homo Sapiens
NKELKPQKSVVSDLE

SEQ ID NO: 88509 - protein, 15 aa, Homo Sapiens
KELKPQKSVVSDLEA

SEQ ID NO: 88510 - protein, 15 aa, Homo Sapiens
ELKPQKSVVSDLEAD

SEQ ID NO: 88511 - protein, 15 aa, Homo Sapiens
LKPQKSVVSDLEADD

SEQ ID NO: 88512 - protein, 15 aa, Homo Sapiens
KPQKSVVSDLEADDV

SEQ ID NO: 88513 - protein, 15 aa, Homo Sapiens
PQKSVVSDLEADDVK

SEQ ID NO: 88514 - protein, 15 aa, Homo Sapiens
QKSVVSDLEADDVKG

SEQ ID NO: 88515 - protein, 15 aa, Homo Sapiens
KSVVSDLEADDVKGS

SEQ ID NO: 88516 - protein, 15 aa, Homo Sapiens
SVVSDLEADDVKGSV

SEQ ID NO: 88517 - protein, 15 aa, Homo Sapiens
VVSDLEADDVKGSVP

SEQ ID NO: 88518 - protein, 15 aa, Homo Sapiens
VSDLEADDVKGSVPL

SEQ ID NO: 88519 - protein, 15 aa, Homo Sapiens
SDLEADDVKGSVPLS

SEQ ID NO: 88520 - protein, 15 aa, Homo Sapiens
DLEADDVKGSVPLSS

SEQ ID NO: 88521 - protein, 15 aa, Homo Sapiens
LEADDVKGSVPLSSS

SEQ ID NO: 88522 - protein, 15 aa, Homo Sapiens
EADDVKGSVPLSSSP

SEQ ID NO: 88523 - protein, 15 aa, Homo Sapiens
ADDVKGSVPLSSSPP

SEQ ID NO: 88524 - protein, 15 aa, Homo Sapiens
DDVKGSVPLSSSPPA

SEQ ID NO: 88525 - protein, 15 aa, Homo Sapiens
DVKGSVPLSSSPPAT

SEQ ID NO: 88526 - protein, 15 aa, Homo Sapiens
VKGSVPLSSSPPATH

SEQ ID NO: 88527 - protein, 15 aa, Homo Sapiens
KGSVPLSSSPPATHF

SEQ ID NO: 88528 - protein, 15 aa, Homo Sapiens
GSVPLSSSPPATHFP

SEQ ID NO: 88529 - protein, 15 aa, Homo Sapiens
SVPLSSSPPATHFPD

SEQ ID NO: 88530 - protein, 15 aa, Homo Sapiens
VPLSSSPPATHFPDE

SEQ ID NO: 88531 - protein, 15 aa, Homo Sapiens
PLSSSPPATHFPDET

SEQ ID NO: 88532 - protein, 15 aa, Homo Sapiens
LSSSPPATHFPDETE

SEQ ID NO: 88533 - protein, 15 aa, Homo Sapiens
SSSPPATHFPDETEI

SEQ ID NO: 88534 - protein, 15 aa, Homo Sapiens
SSPPATHFPDETEIT

SEQ ID NO: 88535 - protein, 15 aa, Homo Sapiens
SPPATHFPDETEITN

SEQ ID NO: 88536 - protein, 15 aa, Homo Sapiens
PPATHFPDETEITNP

SEQ ID NO: 88537 - protein, 15 aa, Homo Sapiens
PATHFPDETEITNPV

SEQ ID NO: 88538 - protein, 15 aa, Homo Sapiens
ATHFPDETEITNPVP

SEQ ID NO: 88539 - protein, 15 aa, Homo Sapiens
THFPDETEITNPVPK

SEQ ID NO: 88540 - protein, 15 aa, Homo Sapiens
HFPDETEITNPVPKK

SEQ ID NO: 88541 - protein, 15 aa, Homo Sapiens
FPDETEITNPVPKKN

SEQ ID NO: 88542 - protein, 15 aa, Homo Sapiens
PDETEITNPVPKKNV

SEQ ID NO: 88543 - protein, 15 aa, Homo Sapiens
DETEITNPVPKKNVT

SEQ ID NO: 88544 - protein, 15 aa, Homo Sapiens
ETEITNPVPKKNVTV

SEQ ID NO: 88545 - protein, 15 aa, Homo Sapiens
TEITNPVPKKNVTVK

SEQ ID NO: 88546 - protein, 15 aa, Homo Sapiens
EITNPVPKKNVTVKK

SEQ ID NO: 88547 - protein, 15 aa, Homo Sapiens
ITNPVPKKNVTVKKT

SEQ ID NO: 88548 - protein, 15 aa, Homo Sapiens
TNPVPKKNVTVKKTA

SEQ ID NO: 88549 - protein, 15 aa, Homo Sapiens
NPVPKKNVTVKKTAA

SEQ ID NO: 88550 - protein, 15 aa, Homo Sapiens
PVPKKNVTVKKTAAK

SEQ ID NO: 88551 - protein, 15 aa, Homo Sapiens
VPKKNVTVKKTAAKS

SEQ ID NO: 88552 - protein, 15 aa, Homo Sapiens
PKKNVTVKKTAAKSQ

SEQ ID NO: 88553 - protein, 15 aa, Homo Sapiens
KKNVTVKKTAAKSQS

SEQ ID NO: 88554 - protein, 15 aa, Homo Sapiens
KNVTVKKTAAKSQSS

SEQ ID NO: 88555 - protein, 15 aa, Homo Sapiens
NVTVKKTAAKSQSST

SEQ ID NO: 88556 - protein, 15 aa, Homo Sapiens
VTVKKTAAKSQSSTS

SEQ ID NO: 88557 - protein, 15 aa, Homo Sapiens
TVKKTAAKSQSSTST

SEQ ID NO: 88558 - protein, 15 aa, Homo Sapiens
VKKTAAKSQSSTSTT

SEQ ID NO: 88559 - protein, 15 aa, Homo Sapiens
KKTAAKSQSSTSTTG

SEQ ID NO: 88560 - protein, 15 aa, Homo Sapiens
KTAAKSQSSTSTTGA

SEQ ID NO: 88561 - protein, 15 aa, Homo Sapiens
TAAKSQSSTSTTGAK

SEQ ID NO: 88562 - protein, 15 aa, Homo Sapiens
AAKSQSSTSTTGAKK

SEQ ID NO: 88563 - protein, 15 aa, Homo Sapiens
AKSQSSTSTTGAKKR

SEQ ID NO: 88564 - protein, 15 aa, Homo Sapiens
KSQSSTSTTGAKKRA

SEQ ID NO: 88565 - protein, 15 aa, Homo Sapiens
SQSSTSTTGAKKRAA

SEQ ID NO: 88566 - protein, 15 aa, Homo Sapiens
QSSTSTTGAKKRAAP

SEQ ID NO: 88567 - protein, 15 aa, Homo Sapiens
SSTSTTGAKKRAAPK

SEQ ID NO: 88568 - protein, 15 aa, Homo Sapiens
STSTTGAKKRAAPKG

SEQ ID NO: 88569 - protein, 15 aa, Homo Sapiens
TSTTGAKKRAAPKGT

SEQ ID NO: 88570 - protein, 15 aa, Homo Sapiens
STTGAKKRAAPKGTK

SEQ ID NO: 88571 - protein, 15 aa, Homo Sapiens
TTGAKKRAAPKGTKR

SEQ ID NO: 88572 - protein, 15 aa, Homo Sapiens
TGAKKRAAPKGTKRD

SEQ ID NO: 88573 - protein, 15 aa, Homo Sapiens
GAKKRAAPKGTKRDP

SEQ ID NO: 88574 - protein, 15 aa, Homo Sapiens
AKKRAAPKGTKRDPA

SEQ ID NO: 88575 - protein, 15 aa, Homo Sapiens
KKRAAPKGTKRDPAL

SEQ ID NO: 88576 - protein, 15 aa, Homo Sapiens
KRAAPKGTKRDPALN

SEQ ID NO: 88577 - protein, 15 aa, Homo Sapiens
RAAPKGTKRDPALNS

SEQ ID NO: 88578 - protein, 15 aa, Homo Sapiens
AAPKGTKRDPALNSG

SEQ ID NO: 88579 - protein, 15 aa, Homo Sapiens
APKGTKRDPALNSGV

SEQ ID NO: 88580 - protein, 15 aa, Homo Sapiens
PKGTKRDPALNSGVS

SEQ ID NO: 88581 - protein, 15 aa, Homo Sapiens
KGTKRDPALNSGVSQ

SEQ ID NO: 88582 - protein, 15 aa, Homo Sapiens
GTKRDPALNSGVSQK

SEQ ID NO: 88583 - protein, 15 aa, Homo Sapiens
TKRDPALNSGVSQKP

SEQ ID NO: 88584 - protein, 15 aa, Homo Sapiens
KRDPALNSGVSQKPD

SEQ ID NO: 88585 - protein, 15 aa, Homo Sapiens
RDPALNSGVSQKPDP

SEQ ID NO: 88586 - protein, 15 aa, Homo Sapiens
DPALNSGVSQKPDPA

SEQ ID NO: 88587 - protein, 15 aa, Homo Sapiens
PALNSGVSQKPDPAK

SEQ ID NO: 88588 - protein, 15 aa, Homo Sapiens
ALNSGVSQKPDPAKT

SEQ ID NO: 88589 - protein, 15 aa, Homo Sapiens
LNSGVSQKPDPAKTK

SEQ ID NO: 88590 - protein, 15 aa, Homo Sapiens
NSGVSQKPDPAKTKN

SEQ ID NO: 88591 - protein, 15 aa, Homo Sapiens
SGVSQKPDPAKTKNR

SEQ ID NO: 88592 - protein, 15 aa, Homo Sapiens
GVSQKPDPAKTKNRR

SEQ ID NO: 88593 - protein, 15 aa, Homo Sapiens
VSQKPDPAKTKNRRK

SEQ ID NO: 88594 - protein, 15 aa, Homo Sapiens
SQKPDPAKTKNRRKR

SEQ ID NO: 88595 - protein, 15 aa, Homo Sapiens
QKPDPAKTKNRRKRK

SEQ ID NO: 88596 - protein, 15 aa, Homo Sapiens
KPDPAKTKNRRKRKP

SEQ ID NO: 88597 - protein, 15 aa, Homo Sapiens
PDPAKTKNRRKRKPS

SEQ ID NO: 88598 - protein, 15 aa, Homo Sapiens
DPAKTKNRRKRKPST

SEQ ID NO: 88599 - protein, 15 aa, Homo Sapiens
PAKTKNRRKRKPSTS

SEQ ID NO: 88600 - protein, 15 aa, Homo Sapiens
AKTKNRRKRKPSTSD

SEQ ID NO: 88601 - protein, 15 aa, Homo Sapiens
KTKNRRKRKPSTSDD

SEQ ID NO: 88602 - protein, 15 aa, Homo Sapiens
TKNRRKRKPSTSDDS

SEQ ID NO: 88603 - protein, 15 aa, Homo Sapiens
KNRRKRKPSTSDDSD

SEQ ID NO: 88604 - protein, 15 aa, Homo Sapiens
NRRKRKPSTSDDSDS

SEQ ID NO: 88605 - protein, 15 aa, Homo Sapiens
RRKRKPSTSDDSDSN

SEQ ID NO: 88606 - protein, 15 aa, Homo Sapiens
RKRKPSTSDDSDSNF

SEQ ID NO: 88607 - protein, 15 aa, Homo Sapiens
KRKPSTSDDSDSNFE

SEQ ID NO: 88608 - protein, 15 aa, Homo Sapiens
RKPSTSDDSDSNFEK

SEQ ID NO: 88609 - protein, 15 aa, Homo Sapiens
KPSTSDDSDSNFEKI

SEQ ID NO: 88610 - protein, 15 aa, Homo Sapiens
PSTSDDSDSNFEKIV

SEQ ID NO: 88611 - protein, 15 aa, Homo Sapiens
STSDDSDSNFEKIVS

SEQ ID NO: 88612 - protein, 15 aa, Homo Sapiens
TSDDSDSNFEKIVSK

SEQ ID NO: 88613 - protein, 15 aa, Homo Sapiens
SDDSDSNFEKIVSKA

SEQ ID NO: 88614 - protein, 15 aa, Homo Sapiens
DDSDSNFEKIVSKAV

SEQ ID NO: 88615 - protein, 15 aa, Homo Sapiens
DSDSNFEKIVSKAVT

SEQ ID NO: 88616 - protein, 15 aa, Homo Sapiens
SDSNFEKIVSKAVTS

SEQ ID NO: 88617 - protein, 15 aa, Homo Sapiens
DSNFEKIVSKAVTSK

SEQ ID NO: 88618 - protein, 15 aa, Homo Sapiens
SNFEKIVSKAVTSKK

SEQ ID NO: 88619 - protein, 15 aa, Homo Sapiens
NFEKIVSKAVTSKKS

SEQ ID NO: 88620 - protein, 15 aa, Homo Sapiens
FEKIVSKAVTSKKSK

SEQ ID NO: 88621 - protein, 15 aa, Homo Sapiens
EKIVSKAVTSKKSKG

SEQ ID NO: 88622 - protein, 15 aa, Homo Sapiens
KIVSKAVTSKKSKGE

SEQ ID NO: 88623 - protein, 15 aa, Homo Sapiens
IVSKAVTSKKSKGES

SEQ ID NO: 88624 - protein, 15 aa, Homo Sapiens
VSKAVTSKKSKGESD

SEQ ID NO: 88625 - protein, 15 aa, Homo Sapiens
SKAVTSKKSKGESDD

SEQ ID NO: 88626 - protein, 15 aa, Homo Sapiens
KAVTSKKSKGESDDF

SEQ ID NO: 88627 - protein, 15 aa, Homo Sapiens
AVTSKKSKGESDDFH

SEQ ID NO: 88628 - protein, 15 aa, Homo Sapiens
VTSKKSKGESDDFHM

SEQ ID NO: 88629 - protein, 15 aa, Homo Sapiens
TSKKSKGESDDFHMD

SEQ ID NO: 88630 - protein, 15 aa, Homo Sapiens
SKKSKGESDDFHMDF

SEQ ID NO: 88631 - protein, 15 aa, Homo Sapiens
KKSKGESDDFHMDFD

SEQ ID NO: 88632 - protein, 15 aa, Homo Sapiens
KSKGESDDFHMDFDS

SEQ ID NO: 88633 - protein, 15 aa, Homo Sapiens
SKGESDDFHMDFDSA

SEQ ID NO: 88634 - protein, 15 aa, Homo Sapiens
KGESDDFHMDFDSAV

SEQ ID NO: 88635 - protein, 15 aa, Homo Sapiens
GESDDFHMDFDSAVA

SEQ ID NO: 88636 - protein, 15 aa, Homo Sapiens
ESDDFHMDFDSAVAP

SEQ ID NO: 88637 - protein, 15 aa, Homo Sapiens
SDDFHMDFDSAVAPR

SEQ ID NO: 88638 - protein, 15 aa, Homo Sapiens
DDFHMDFDSAVAPRA

SEQ ID NO: 88639 - protein, 15 aa, Homo Sapiens
DFHMDFDSAVAPRAK

SEQ ID NO: 88640 - protein, 15 aa, Homo Sapiens
FHMDFDSAVAPRAKS

SEQ ID NO: 88641 - protein, 15 aa, Homo Sapiens
HMDFDSAVAPRAKSV

SEQ ID NO: 88642 - protein, 15 aa, Homo Sapiens
MDFDSAVAPRAKSVR

SEQ ID NO: 88643 - protein, 15 aa, Homo Sapiens
DFDSAVAPRAKSVRA

SEQ ID NO: 88644 - protein, 15 aa, Homo Sapiens
FDSAVAPRAKSVRAK

SEQ ID NO: 88645 - protein, 15 aa, Homo Sapiens
DSAVAPRAKSVRAKK

SEQ ID NO: 88646 - protein, 15 aa, Homo Sapiens
SAVAPRAKSVRAKKP

SEQ ID NO: 88647 - protein, 15 aa, Homo Sapiens
AVAPRAKSVRAKKPI

SEQ ID NO: 88648 - protein, 15 aa, Homo Sapiens
VAPRAKSVRAKKPIK

SEQ ID NO: 88649 - protein, 15 aa, Homo Sapiens
APRAKSVRAKKPIKY

SEQ ID NO: 88650 - protein, 15 aa, Homo Sapiens
PRAKSVRAKKPIKYL

SEQ ID NO: 88651 - protein, 15 aa, Homo Sapiens
RAKSVRAKKPIKYLE

SEQ ID NO: 88652 - protein, 15 aa, Homo Sapiens
AKSVRAKKPIKYLEE

SEQ ID NO: 88653 - protein, 15 aa, Homo Sapiens
KSVRAKKPIKYLEES

SEQ ID NO: 88654 - protein, 15 aa, Homo Sapiens
SVRAKKPIKYLEESD

SEQ ID NO: 88655 - protein, 15 aa, Homo Sapiens
VRAKKPIKYLEESDE

SEQ ID NO: 88656 - protein, 15 aa, Homo Sapiens
RAKKPIKYLEESDED

SEQ ID NO: 88657 - protein, 15 aa, Homo Sapiens
AKKPIKYLEESDEDD

SEQ ID NO: 88658 - protein, 15 aa, Homo Sapiens
KKPIKYLEESDEDDL

SEQ ID NO: 88659 - protein, 15 aa, Homo Sapiens
KPIKYLEESDEDDLF

SEQ ID NO: 88660 - protein, 16 aa, Homo Sapiens
MEVSPLQPVNENMQVN

SEQ ID NO: 88661 - protein, 16 aa, Homo Sapiens
EVSPLQPVNENMQVNK

SEQ ID NO: 88662 - protein, 16 aa, Homo Sapiens
VSPLQPVNENMQVNKI

SEQ ID NO: 88663 - protein, 16 aa, Homo Sapiens
SPLQPVNENMQVNKIK

SEQ ID NO: 88664 - protein, 16 aa, Homo Sapiens
PLQPVNENMQVNKIKK

SEQ ID NO: 88665 - protein, 16 aa, Homo Sapiens
LQPVNENMQVNKIKKN

SEQ ID NO: 88666 - protein, 16 aa, Homo Sapiens
QPVNENMQVNKIKKNE

SEQ ID NO: 88667 - protein, 16 aa, Homo Sapiens
PVNENMQVNKIKKNED

SEQ ID NO: 88668 - protein, 16 aa, Homo Sapiens
VNENMQVNKIKKNEDA

SEQ ID NO: 88669 - protein, 16 aa, Homo Sapiens
NENMQVNKIKKNEDAK

SEQ ID NO: 88670 - protein, 16 aa, Homo Sapiens
ENMQVNKIKKNEDAKK

SEQ ID NO: 88671 - protein, 16 aa, Homo Sapiens
NMQVNKIKKNEDAKKR

SEQ ID NO: 88672 - protein, 16 aa, Homo Sapiens
MQVNKIKKNEDAKKRL

SEQ ID NO: 88673 - protein, 16 aa, Homo Sapiens
QVNKIKKNEDAKKRLS

SEQ ID NO: 88674 - protein, 16 aa, Homo Sapiens
VNKIKKNEDAKKRLSV

SEQ ID NO: 88675 - protein, 16 aa, Homo Sapiens
NKIKKNEDAKKRLSVE

SEQ ID NO: 88676 - protein, 16 aa, Homo Sapiens
KIKKNEDAKKRLSVER

SEQ ID NO: 88677 - protein, 16 aa, Homo Sapiens
IKKNEDAKKRLSVERI

SEQ ID NO: 88678 - protein, 16 aa, Homo Sapiens
KKNEDAKKRLSVERIY

SEQ ID NO: 88679 - protein, 16 aa, Homo Sapiens
KNEDAKKRLSVERIYQ

SEQ ID NO: 88680 - protein, 16 aa, Homo Sapiens
NEDAKKRLSVERIYQK

SEQ ID NO: 88681 - protein, 16 aa, Homo Sapiens
EDAKKRLSVERIYQKK

SEQ ID NO: 88682 - protein, 16 aa, Homo Sapiens
DAKKRLSVERIYQKKT

SEQ ID NO: 88683 - protein, 16 aa, Homo Sapiens
AKKRLSVERIYQKKTQ

SEQ ID NO: 88684 - protein, 16 aa, Homo Sapiens
KKRLSVERIYQKKTQL

SEQ ID NO: 88685 - protein, 16 aa, Homo Sapiens
KRLSVERIYQKKTQLE

SEQ ID NO: 88686 - protein, 16 aa, Homo Sapiens
RLSVERIYQKKTQLEH

SEQ ID NO: 88687 - protein, 16 aa, Homo Sapiens
LSVERIYQKKTQLEHI

SEQ ID NO: 88688 - protein, 16 aa, Homo Sapiens
SVERIYQKKTQLEHIL

SEQ ID NO: 88689 - protein, 16 aa, Homo Sapiens
VERIYQKKTQLEHILL

SEQ ID NO: 88690 - protein, 16 aa, Homo Sapiens
ERIYQKKTQLEHILLR

SEQ ID NO: 88691 - protein, 16 aa, Homo Sapiens
RIYQKKTQLEHILLRP

SEQ ID NO: 88692 - protein, 16 aa, Homo Sapiens
IYQKKTQLEHILLRPD

SEQ ID NO: 88693 - protein, 16 aa, Homo Sapiens
YQKKTQLEHILLRPDT

SEQ ID NO: 88694 - protein, 16 aa, Homo Sapiens
QKKTQLEHILLRPDTY

SEQ ID NO: 88695 - protein, 16 aa, Homo Sapiens
KKTQLEHILLRPDTYI

SEQ ID NO: 88696 - protein, 16 aa, Homo Sapiens
KTQLEHILLRPDTYIG

SEQ ID NO: 88697 - protein, 16 aa, Homo Sapiens
TQLEHILLRPDTYIGS

SEQ ID NO: 88698 - protein, 16 aa, Homo Sapiens
QLEHILLRPDTYIGSV

SEQ ID NO: 88699 - protein, 16 aa, Homo Sapiens
LEHILLRPDTYIGSVE

SEQ ID NO: 88700 - protein, 16 aa, Homo Sapiens
EHILLRPDTYIGSVEL

SEQ ID NO: 88701 - protein, 16 aa, Homo Sapiens
HILLRPDTYIGSVELV

SEQ ID NO: 88702 - protein, 16 aa, Homo Sapiens
ILLRPDTYIGSVELVT

SEQ ID NO: 88703 - protein, 16 aa, Homo Sapiens
LLRPDTYIGSVELVTQ

SEQ ID NO: 88704 - protein, 16 aa, Homo Sapiens
LRPDTYIGSVELVTQQ

SEQ ID NO: 88705 - protein, 16 aa, Homo Sapiens
RPDTYIGSVELVTQQM

SEQ ID NO: 88706 - protein, 16 aa, Homo Sapiens
PDTYIGSVELVTQQMW

SEQ ID NO: 88707 - protein, 16 aa, Homo Sapiens
DTYIGSVELVTQQMWV

SEQ ID NO: 88708 - protein, 16 aa, Homo Sapiens
TYIGSVELVTQQMWVY

SEQ ID NO: 88709 - protein, 16 aa, Homo Sapiens
YIGSVELVTQQMWVYD

SEQ ID NO: 88710 - protein, 16 aa, Homo Sapiens
IGSVELVTQQMWVYDE

SEQ ID NO: 88711 - protein, 16 aa, Homo Sapiens
GSVELVTQQMWVYDED

SEQ ID NO: 88712 - protein, 16 aa, Homo Sapiens
SVELVTQQMWVYDEDV

SEQ ID NO: 88713 - protein, 16 aa, Homo Sapiens
VELVTQQMWVYDEDVG

SEQ ID NO: 88714 - protein, 16 aa, Homo Sapiens
ELVTQQMWVYDEDVGI

SEQ ID NO: 88715 - protein, 16 aa, Homo Sapiens
LVTQQMWVYDEDVGIN

SEQ ID NO: 88716 - protein, 16 aa, Homo Sapiens
VTQQMWVYDEDVGINY

SEQ ID NO: 88717 - protein, 16 aa, Homo Sapiens
TQQMWVYDEDVGINYR

SEQ ID NO: 88718 - protein, 16 aa, Homo Sapiens
QQMWVYDEDVGINYRE

SEQ ID NO: 88719 - protein, 16 aa, Homo Sapiens
QMWVYDEDVGINYREV

SEQ ID NO: 88720 - protein, 16 aa, Homo Sapiens
MWVYDEDVGINYREVT

SEQ ID NO: 88721 - protein, 16 aa, Homo Sapiens
WVYDEDVGINYREVTF

SEQ ID NO: 88722 - protein, 16 aa, Homo Sapiens
VYDEDVGINYREVTFV

SEQ ID NO: 88723 - protein, 16 aa, Homo Sapiens
YDEDVGINYREVTFVP

SEQ ID NO: 88724 - protein, 16 aa, Homo Sapiens
DEDVGINYREVTFVPG

SEQ ID NO: 88725 - protein, 16 aa, Homo Sapiens
EDVGINYREVTFVPGL

SEQ ID NO: 88726 - protein, 16 aa, Homo Sapiens
DVGINYREVTFVPGLY

SEQ ID NO: 88727 - protein, 16 aa, Homo Sapiens
VGINYREVTFVPGLYK

SEQ ID NO: 88728 - protein, 16 aa, Homo Sapiens
GINYREVTFVPGLYKI

SEQ ID NO: 88729 - protein, 16 aa, Homo Sapiens
INYREVTFVPGLYKIF

SEQ ID NO: 88730 - protein, 16 aa, Homo Sapiens
NYREVTFVPGLYKIFD

SEQ ID NO: 88731 - protein, 16 aa, Homo Sapiens
YREVTFVPGLYKIFDE

SEQ ID NO: 88732 - protein, 16 aa, Homo Sapiens
REVTFVPGLYKIFDEI

SEQ ID NO: 88733 - protein, 16 aa, Homo Sapiens
EVTFVPGLYKIFDEIL

SEQ ID NO: 88734 - protein, 16 aa, Homo Sapiens
VTFVPGLYKIFDEILV

SEQ ID NO: 88735 - protein, 16 aa, Homo Sapiens
TFVPGLYKIFDEILVN

SEQ ID NO: 88736 - protein, 16 aa, Homo Sapiens
FVPGLYKIFDEILVNA

SEQ ID NO: 88737 - protein, 16 aa, Homo Sapiens
VPGLYKIFDEILVNAA

SEQ ID NO: 88738 - protein, 16 aa, Homo Sapiens
PGLYKIFDEILVNAAD

SEQ ID NO: 88739 - protein, 16 aa, Homo Sapiens
GLYKIFDEILVNAADN

SEQ ID NO: 88740 - protein, 16 aa, Homo Sapiens
LYKIFDEILVNAADNK

SEQ ID NO: 88741 - protein, 16 aa, Homo Sapiens
YKIFDEILVNAADNKQ

SEQ ID NO: 88742 - protein, 16 aa, Homo Sapiens
KIFDEILVNAADNKQR

SEQ ID NO: 88743 - protein, 16 aa, Homo Sapiens
IFDEILVNAADNKQRD

SEQ ID NO: 88744 - protein, 16 aa, Homo Sapiens
FDEILVNAADNKQRDP

SEQ ID NO: 88745 - protein, 16 aa, Homo Sapiens
DEILVNAADNKQRDPK

SEQ ID NO: 88746 - protein, 16 aa, Homo Sapiens
EILVNAADNKQRDPKM

SEQ ID NO: 88747 - protein, 16 aa, Homo Sapiens
ILVNAADNKQRDPKMS

SEQ ID NO: 88748 - protein, 16 aa, Homo Sapiens
LVNAADNKQRDPKMSC

SEQ ID NO: 88749 - protein, 16 aa, Homo Sapiens
VNAADNKQRDPKMSCI

SEQ ID NO: 88750 - protein, 16 aa, Homo Sapiens
NAADNKQRDPKMSCIR

SEQ ID NO: 88751 - protein, 16 aa, Homo Sapiens
AADNKQRDPKMSCIRV

SEQ ID NO: 88752 - protein, 16 aa, Homo Sapiens
ADNKQRDPKMSCIRVT

SEQ ID NO: 88753 - protein, 16 aa, Homo Sapiens
DNKQRDPKMSCIRVTI

SEQ ID NO: 88754 - protein, 16 aa, Homo Sapiens
NKQRDPKMSCIRVTID

SEQ ID NO: 88755 - protein, 16 aa, Homo Sapiens
KQRDPKMSCIRVTIDP

SEQ ID NO: 88756 - protein, 16 aa, Homo Sapiens
QRDPKMSCIRVTIDPE

SEQ ID NO: 88757 - protein, 16 aa, Homo Sapiens
RDPKMSCIRVTIDPEN

SEQ ID NO: 88758 - protein, 16 aa, Homo Sapiens
DPKMSCIRVTIDPENN

SEQ ID NO: 88759 - protein, 16 aa, Homo Sapiens
PKMSCIRVTIDPENNL

SEQ ID NO: 88760 - protein, 16 aa, Homo Sapiens
KMSCIRVTIDPENNLI

SEQ ID NO: 88761 - protein, 16 aa, Homo Sapiens
MSCIRVTIDPENNLIS

SEQ ID NO: 88762 - protein, 16 aa, Homo Sapiens
SCIRVTIDPENNLISI

SEQ ID NO: 88763 - protein, 16 aa, Homo Sapiens
CIRVTIDPENNLISIW

SEQ ID NO: 88764 - protein, 16 aa, Homo Sapiens
IRVTIDPENNLISIWN

SEQ ID NO: 88765 - protein, 16 aa, Homo Sapiens
RVTIDPENNLISIWNN

SEQ ID NO: 88766 - protein, 16 aa, Homo Sapiens
VTIDPENNLISIWNNG

SEQ ID NO: 88767 - protein, 16 aa, Homo Sapiens
TIDPENNLISIWNNGK

SEQ ID NO: 88768 - protein, 16 aa, Homo Sapiens
IDPENNLISIWNNGKG

SEQ ID NO: 88769 - protein, 16 aa, Homo Sapiens
DPENNLISIWNNGKGI

SEQ ID NO: 88770 - protein, 16 aa, Homo Sapiens
PENNLISIWNNGKGIP

SEQ ID NO: 88771 - protein, 16 aa, Homo Sapiens
ENNLISIWNNGKGIPV

SEQ ID NO: 88772 - protein, 16 aa, Homo Sapiens
NNLISIWNNGKGIPVV

SEQ ID NO: 88773 - protein, 16 aa, Homo Sapiens
NLISIWNNGKGIPVVE

SEQ ID NO: 88774 - protein, 16 aa, Homo Sapiens
LISIWNNGKGIPVVEH

SEQ ID NO: 88775 - protein, 16 aa, Homo Sapiens
ISIWNNGKGIPVVEHK

SEQ ID NO: 88776 - protein, 16 aa, Homo Sapiens
SIWNNGKGIPVVEHKV

SEQ ID NO: 88777 - protein, 16 aa, Homo Sapiens
IWNNGKGIPVVEHKVE

SEQ ID NO: 88778 - protein, 16 aa, Homo Sapiens
WNNGKGIPVVEHKVEK

SEQ ID NO: 88779 - protein, 16 aa, Homo Sapiens
NNGKGIPVVEHKVEKM

SEQ ID NO: 88780 - protein, 16 aa, Homo Sapiens
NGKGIPVVEHKVEKMY

SEQ ID NO: 88781 - protein, 16 aa, Homo Sapiens
GKGIPVVEHKVEKMYV

SEQ ID NO: 88782 - protein, 16 aa, Homo Sapiens
KGIPVVEHKVEKMYVP

SEQ ID NO: 88783 - protein, 16 aa, Homo Sapiens
GIPVVEHKVEKMYVPA

SEQ ID NO: 88784 - protein, 16 aa, Homo Sapiens
IPVVEHKVEKMYVPAL

SEQ ID NO: 88785 - protein, 16 aa, Homo Sapiens
PVVEHKVEKMYVPALI

SEQ ID NO: 88786 - protein, 16 aa, Homo Sapiens
VVEHKVEKMYVPALIF

SEQ ID NO: 88787 - protein, 16 aa, Homo Sapiens
VEHKVEKMYVPALIFG

SEQ ID NO: 88788 - protein, 16 aa, Homo Sapiens
EHKVEKMYVPALIFGQ

SEQ ID NO: 88789 - protein, 16 aa, Homo Sapiens
HKVEKMYVPALIFGQL

SEQ ID NO: 88790 - protein, 16 aa, Homo Sapiens
KVEKMYVPALIFGQLL

SEQ ID NO: 88791 - protein, 16 aa, Homo Sapiens
VEKMYVPALIFGQLLT

SEQ ID NO: 88792 - protein, 16 aa, Homo Sapiens
EKMYVPALIFGQLLTS

SEQ ID NO: 88793 - protein, 16 aa, Homo Sapiens
KMYVPALIFGQLLTSS

SEQ ID NO: 88794 - protein, 16 aa, Homo Sapiens
MYVPALIFGQLLTSSN

SEQ ID NO: 88795 - protein, 16 aa, Homo Sapiens
YVPALIFGQLLTSSNY

SEQ ID NO: 88796 - protein, 16 aa, Homo Sapiens
VPALIFGQLLTSSNYD

SEQ ID NO: 88797 - protein, 16 aa, Homo Sapiens
PALIFGQLLTSSNYDD

SEQ ID NO: 88798 - protein, 16 aa, Homo Sapiens
ALIFGQLLTSSNYDDD

SEQ ID NO: 88799 - protein, 16 aa, Homo Sapiens
LIFGQLLTSSNYDDDE

SEQ ID NO: 88800 - protein, 16 aa, Homo Sapiens
IFGQLLTSSNYDDDEK

SEQ ID NO: 88801 - protein, 16 aa, Homo Sapiens
FGQLLTSSNYDDDEKK

SEQ ID NO: 88802 - protein, 16 aa, Homo Sapiens
GQLLTSSNYDDDEKKV

SEQ ID NO: 88803 - protein, 16 aa, Homo Sapiens
QLLTSSNYDDDEKKVT

SEQ ID NO: 88804 - protein, 16 aa, Homo Sapiens
LLTSSNYDDDEKKVTG

SEQ ID NO: 88805 - protein, 16 aa, Homo Sapiens
LTSSNYDDDEKKVTGG

SEQ ID NO: 88806 - protein, 16 aa, Homo Sapiens
TSSNYDDDEKKVTGGR

SEQ ID NO: 88807 - protein, 16 aa, Homo Sapiens
SSNYDDDEKKVTGGRN

SEQ ID NO: 88808 - protein, 16 aa, Homo Sapiens
SNYDDDEKKVTGGRNG

SEQ ID NO: 88809 - protein, 16 aa, Homo Sapiens
NYDDDEKKVTGGRNGY

SEQ ID NO: 88810 - protein, 16 aa, Homo Sapiens
YDDDEKKVTGGRNGYG

SEQ ID NO: 88811 - protein, 16 aa, Homo Sapiens
DDDEKKVTGGRNGYGA

SEQ ID NO: 88812 - protein, 16 aa, Homo Sapiens
DDEKKVTGGRNGYGAK

SEQ ID NO: 88813 - protein, 16 aa, Homo Sapiens
DEKKVTGGRNGYGAKL

SEQ ID NO: 88814 - protein, 16 aa, Homo Sapiens
EKKVTGGRNGYGAKLC

SEQ ID NO: 88815 - protein, 16 aa, Homo Sapiens
KKVTGGRNGYGAKLCN

SEQ ID NO: 88816 - protein, 16 aa, Homo Sapiens
KVTGGRNGYGAKLCNI

SEQ ID NO: 88817 - protein, 16 aa, Homo Sapiens
VTGGRNGYGAKLCNIF

SEQ ID NO: 88818 - protein, 16 aa, Homo Sapiens
TGGRNGYGAKLCNIFS

SEQ ID NO: 88819 - protein, 16 aa, Homo Sapiens
GGRNGYGAKLCNIFST

SEQ ID NO: 88820 - protein, 16 aa, Homo Sapiens
GRNGYGAKLCNIFSTK

SEQ ID NO: 88821 - protein, 16 aa, Homo Sapiens
RNGYGAKLCNIFSTKF

SEQ ID NO: 88822 - protein, 16 aa, Homo Sapiens
NGYGAKLCNIFSTKFT

SEQ ID NO: 88823 - protein, 16 aa, Homo Sapiens
GYGAKLCNIFSTKFTV

SEQ ID NO: 88824 - protein, 16 aa, Homo Sapiens
YGAKLCNIFSTKFTVE

SEQ ID NO: 88825 - protein, 16 aa, Homo Sapiens
GAKLCNIFSTKFTVET

SEQ ID NO: 88826 - protein, 16 aa, Homo Sapiens
AKLCNIFSTKFTVETA

SEQ ID NO: 88827 - protein, 16 aa, Homo Sapiens
KLCNIFSTKFTVETAS

SEQ ID NO: 88828 - protein, 16 aa, Homo Sapiens
LCNIFSTKFTVETASR

SEQ ID NO: 88829 - protein, 16 aa, Homo Sapiens
CNIFSTKFTVETASRE

SEQ ID NO: 88830 - protein, 16 aa, Homo Sapiens
NIFSTKFTVETASREY

SEQ ID NO: 88831 - protein, 16 aa, Homo Sapiens
IFSTKFTVETASREYK

SEQ ID NO: 88832 - protein, 16 aa, Homo Sapiens
FSTKFTVETASREYKK

SEQ ID NO: 88833 - protein, 16 aa, Homo Sapiens
STKFTVETASREYKKM

SEQ ID NO: 88834 - protein, 16 aa, Homo Sapiens
TKFTVETASREYKKMF

SEQ ID NO: 88835 - protein, 16 aa, Homo Sapiens
KFTVETASREYKKMFK

SEQ ID NO: 88836 - protein, 16 aa, Homo Sapiens
FTVETASREYKKMFKQ

SEQ ID NO: 88837 - protein, 16 aa, Homo Sapiens
TVETASREYKKMFKQT

SEQ ID NO: 88838 - protein, 16 aa, Homo Sapiens
VETASREYKKMFKQTW

SEQ ID NO: 88839 - protein, 16 aa, Homo Sapiens
ETASREYKKMFKQTWM

SEQ ID NO: 88840 - protein, 16 aa, Homo Sapiens
TASREYKKMFKQTWMD

SEQ ID NO: 88841 - protein, 16 aa, Homo Sapiens
ASREYKKMFKQTWMDN

SEQ ID NO: 88842 - protein, 16 aa, Homo Sapiens
SREYKKMFKQTWMDNM

SEQ ID NO: 88843 - protein, 16 aa, Homo Sapiens
REYKKMFKQTWMDNMG

SEQ ID NO: 88844 - protein, 16 aa, Homo Sapiens
EYKKMFKQTWMDNMGR

SEQ ID NO: 88845 - protein, 16 aa, Homo Sapiens
YKKMFKQTWMDNMGRA

SEQ ID NO: 88846 - protein, 16 aa, Homo Sapiens
KKMFKQTWMDNMGRAG

SEQ ID NO: 88847 - protein, 16 aa, Homo Sapiens
KMFKQTWMDNMGRAGE

SEQ ID NO: 88848 - protein, 16 aa, Homo Sapiens
MFKQTWMDNMGRAGEM

SEQ ID NO: 88849 - protein, 16 aa, Homo Sapiens
FKQTWMDNMGRAGEME

SEQ ID NO: 88850 - protein, 16 aa, Homo Sapiens
KQTWMDNMGRAGEMEL

SEQ ID NO: 88851 - protein, 16 aa, Homo Sapiens
QTWMDNMGRAGEMELK

SEQ ID NO: 88852 - protein, 16 aa, Homo Sapiens
TWMDNMGRAGEMELKP

SEQ ID NO: 88853 - protein, 16 aa, Homo Sapiens
WMDNMGRAGEMELKPF

SEQ ID NO: 88854 - protein, 16 aa, Homo Sapiens
MDNMGRAGEMELKPFN

SEQ ID NO: 88855 - protein, 16 aa, Homo Sapiens
DNMGRAGEMELKPFNG

SEQ ID NO: 88856 - protein, 16 aa, Homo Sapiens
NMGRAGEMELKPFNGE

SEQ ID NO: 88857 - protein, 16 aa, Homo Sapiens
MGRAGEMELKPFNGED

SEQ ID NO: 88858 - protein, 16 aa, Homo Sapiens
GRAGEMELKPFNGEDY

SEQ ID NO: 88859 - protein, 16 aa, Homo Sapiens
RAGEMELKPFNGEDYT

SEQ ID NO: 88860 - protein, 16 aa, Homo Sapiens
AGEMELKPFNGEDYTC

SEQ ID NO: 88861 - protein, 16 aa, Homo Sapiens
GEMELKPFNGEDYTCI

SEQ ID NO: 88862 - protein, 16 aa, Homo Sapiens
EMELKPFNGEDYTCIT

SEQ ID NO: 88863 - protein, 16 aa, Homo Sapiens
MELKPFNGEDYTCITF

SEQ ID NO: 88864 - protein, 16 aa, Homo Sapiens
ELKPFNGEDYTCITFQ

SEQ ID NO: 88865 - protein, 16 aa, Homo Sapiens
LKPFNGEDYTCITFQP

SEQ ID NO: 88866 - protein, 16 aa, Homo Sapiens
KPFNGEDYTCITFQPD

SEQ ID NO: 88867 - protein, 16 aa, Homo Sapiens
PFNGEDYTCITFQPDL

SEQ ID NO: 88868 - protein, 16 aa, Homo Sapiens
FNGEDYTCITFQPDLS

SEQ ID NO: 88869 - protein, 16 aa, Homo Sapiens
NGEDYTCITFQPDLSK

SEQ ID NO: 88870 - protein, 16 aa, Homo Sapiens
GEDYTCITFQPDLSKF

SEQ ID NO: 88871 - protein, 16 aa, Homo Sapiens
EDYTCITFQPDLSKFK

SEQ ID NO: 88872 - protein, 16 aa, Homo Sapiens
DYTCITFQPDLSKFKM

SEQ ID NO: 88873 - protein, 16 aa, Homo Sapiens
YTCITFQPDLSKFKMQ

SEQ ID NO: 88874 - protein, 16 aa, Homo Sapiens
TCITFQPDLSKFKMQS

SEQ ID NO: 88875 - protein, 16 aa, Homo Sapiens
CITFQPDLSKFKMQSL

SEQ ID NO: 88876 - protein, 16 aa, Homo Sapiens
ITFQPDLSKFKMQSLD

SEQ ID NO: 88877 - protein, 16 aa, Homo Sapiens
TFQPDLSKFKMQSLDK

SEQ ID NO: 88878 - protein, 16 aa, Homo Sapiens
FQPDLSKFKMQSLDKD

SEQ ID NO: 88879 - protein, 16 aa, Homo Sapiens
QPDLSKFKMQSLDKDI

SEQ ID NO: 88880 - protein, 16 aa, Homo Sapiens
PDLSKFKMQSLDKDIV

SEQ ID NO: 88881 - protein, 16 aa, Homo Sapiens
DLSKFKMQSLDKDIVA

SEQ ID NO: 88882 - protein, 16 aa, Homo Sapiens
LSKFKMQSLDKDIVAL

SEQ ID NO: 88883 - protein, 16 aa, Homo Sapiens
SKFKMQSLDKDIVALM

SEQ ID NO: 88884 - protein, 16 aa, Homo Sapiens
KFKMQSLDKDIVALMV

SEQ ID NO: 88885 - protein, 16 aa, Homo Sapiens
FKMQSLDKDIVALMVR

SEQ ID NO: 88886 - protein, 16 aa, Homo Sapiens
KMQSLDKDIVALMVRR

SEQ ID NO: 88887 - protein, 16 aa, Homo Sapiens
MQSLDKDIVALMVRRA

SEQ ID NO: 88888 - protein, 16 aa, Homo Sapiens
QSLDKDIVALMVRRAY

SEQ ID NO: 88889 - protein, 16 aa, Homo Sapiens
SLDKDIVALMVRRAYD

SEQ ID NO: 88890 - protein, 16 aa, Homo Sapiens
LDKDIVALMVRRAYDI

SEQ ID NO: 88891 - protein, 16 aa, Homo Sapiens
DKDIVALMVRRAYDIA

SEQ ID NO: 88892 - protein, 16 aa, Homo Sapiens
KDIVALMVRRAYDIAG

SEQ ID NO: 88893 - protein, 16 aa, Homo Sapiens
DIVALMVRRAYDIAGS

SEQ ID NO: 88894 - protein, 16 aa, Homo Sapiens
IVALMVRRAYDIAGST

SEQ ID NO: 88895 - protein, 16 aa, Homo Sapiens
VALMVRRAYDIAGSTK

SEQ ID NO: 88896 - protein, 16 aa, Homo Sapiens
ALMVRRAYDIAGSTKD

SEQ ID NO: 88897 - protein, 16 aa, Homo Sapiens
LMVRRAYDIAGSTKDV

SEQ ID NO: 88898 - protein, 16 aa, Homo Sapiens
MVRRAYDIAGSTKDVK

SEQ ID NO: 88899 - protein, 16 aa, Homo Sapiens
VRRAYDIAGSTKDVKV

SEQ ID NO: 88900 - protein, 16 aa, Homo Sapiens
RRAYDIAGSTKDVKVF

SEQ ID NO: 88901 - protein, 16 aa, Homo Sapiens
RAYDIAGSTKDVKVFL

SEQ ID NO: 88902 - protein, 16 aa, Homo Sapiens
AYDIAGSTKDVKVFLN

SEQ ID NO: 88903 - protein, 16 aa, Homo Sapiens
YDIAGSTKDVKVFLNG

SEQ ID NO: 88904 - protein, 16 aa, Homo Sapiens
DIAGSTKDVKVFLNGN

SEQ ID NO: 88905 - protein, 16 aa, Homo Sapiens
IAGSTKDVKVFLNGNK

SEQ ID NO: 88906 - protein, 16 aa, Homo Sapiens
AGSTKDVKVFLNGNKL

SEQ ID NO: 88907 - protein, 16 aa, Homo Sapiens
GSTKDVKVFLNGNKLP

SEQ ID NO: 88908 - protein, 16 aa, Homo Sapiens
STKDVKVFLNGNKLPV

SEQ ID NO: 88909 - protein, 16 aa, Homo Sapiens
TKDVKVFLNGNKLPVK

SEQ ID NO: 88910 - protein, 16 aa, Homo Sapiens
KDVKVFLNGNKLPVKG

SEQ ID NO: 88911 - protein, 16 aa, Homo Sapiens
DVKVFLNGNKLPVKGF

SEQ ID NO: 88912 - protein, 16 aa, Homo Sapiens
VKVFLNGNKLPVKGFR

SEQ ID NO: 88913 - protein, 16 aa, Homo Sapiens
KVFLNGNKLPVKGFRS

SEQ ID NO: 88914 - protein, 16 aa, Homo Sapiens
VFLNGNKLPVKGFRSY

SEQ ID NO: 88915 - protein, 16 aa, Homo Sapiens
FLNGNKLPVKGFRSYV

SEQ ID NO: 88916 - protein, 16 aa, Homo Sapiens
LNGNKLPVKGFRSYVD

SEQ ID NO: 88917 - protein, 16 aa, Homo Sapiens
NGNKLPVKGFRSYVDM

SEQ ID NO: 88918 - protein, 16 aa, Homo Sapiens
GNKLPVKGFRSYVDMY

SEQ ID NO: 88919 - protein, 16 aa, Homo Sapiens
NKLPVKGFRSYVDMYL

SEQ ID NO: 88920 - protein, 16 aa, Homo Sapiens
KLPVKGFRSYVDMYLK

SEQ ID NO: 88921 - protein, 16 aa, Homo Sapiens
LPVKGFRSYVDMYLKD

SEQ ID NO: 88922 - protein, 16 aa, Homo Sapiens
PVKGFRSYVDMYLKDK

SEQ ID NO: 88923 - protein, 16 aa, Homo Sapiens
VKGFRSYVDMYLKDKL

SEQ ID NO: 88924 - protein, 16 aa, Homo Sapiens
KGFRSYVDMYLKDKLD

SEQ ID NO: 88925 - protein, 16 aa, Homo Sapiens
GFRSYVDMYLKDKLDE

SEQ ID NO: 88926 - protein, 16 aa, Homo Sapiens
FRSYVDMYLKDKLDET

SEQ ID NO: 88927 - protein, 16 aa, Homo Sapiens
RSYVDMYLKDKLDETG

SEQ ID NO: 88928 - protein, 16 aa, Homo Sapiens
SYVDMYLKDKLDETGN

SEQ ID NO: 88929 - protein, 16 aa, Homo Sapiens
YVDMYLKDKLDETGNS

SEQ ID NO: 88930 - protein, 16 aa, Homo Sapiens
VDMYLKDKLDETGNSL

SEQ ID NO: 88931 - protein, 16 aa, Homo Sapiens
DMYLKDKLDETGNSLK

SEQ ID NO: 88932 - protein, 16 aa, Homo Sapiens
MYLKDKLDETGNSLKV

SEQ ID NO: 88933 - protein, 16 aa, Homo Sapiens
YLKDKLDETGNSLKVI

SEQ ID NO: 88934 - protein, 16 aa, Homo Sapiens
LKDKLDETGNSLKVIH

SEQ ID NO: 88935 - protein, 16 aa, Homo Sapiens
KDKLDETGNSLKVIHE

SEQ ID NO: 88936 - protein, 16 aa, Homo Sapiens
DKLDETGNSLKVIHEQ

SEQ ID NO: 88937 - protein, 16 aa, Homo Sapiens
KLDETGNSLKVIHEQV

SEQ ID NO: 88938 - protein, 16 aa, Homo Sapiens
LDETGNSLKVIHEQVN

SEQ ID NO: 88939 - protein, 16 aa, Homo Sapiens
DETGNSLKVIHEQVNH

SEQ ID NO: 88940 - protein, 16 aa, Homo Sapiens
ETGNSLKVIHEQVNHR

SEQ ID NO: 88941 - protein, 16 aa, Homo Sapiens
TGNSLKVIHEQVNHRW

SEQ ID NO: 88942 - protein, 16 aa, Homo Sapiens
GNSLKVIHEQVNHRWE

SEQ ID NO: 88943 - protein, 16 aa, Homo Sapiens
NSLKVIHEQVNHRWEV

SEQ ID NO: 88944 - protein, 16 aa, Homo Sapiens
SLKVIHEQVNHRWEVC

SEQ ID NO: 88945 - protein, 16 aa, Homo Sapiens
LKVIHEQVNHRWEVCL

SEQ ID NO: 88946 - protein, 16 aa, Homo Sapiens
KVIHEQVNHRWEVCLT

SEQ ID NO: 88947 - protein, 16 aa, Homo Sapiens
VIHEQVNHRWEVCLTM

SEQ ID NO: 88948 - protein, 16 aa, Homo Sapiens
IHEQVNHRWEVCLTMS

SEQ ID NO: 88949 - protein, 16 aa, Homo Sapiens
HEQVNHRWEVCLTMSE

SEQ ID NO: 88950 - protein, 16 aa, Homo Sapiens
EQVNHRWEVCLTMSEK

SEQ ID NO: 88951 - protein, 16 aa, Homo Sapiens
QVNHRWEVCLTMSEKG

SEQ ID NO: 88952 - protein, 16 aa, Homo Sapiens
VNHRWEVCLTMSEKGF

SEQ ID NO: 88953 - protein, 16 aa, Homo Sapiens
NHRWEVCLTMSEKGFQ

SEQ ID NO: 88954 - protein, 16 aa, Homo Sapiens
HRWEVCLTMSEKGFQQ

SEQ ID NO: 88955 - protein, 16 aa, Homo Sapiens
RWEVCLTMSEKGFQQI

SEQ ID NO: 88956 - protein, 16 aa, Homo Sapiens
WEVCLTMSEKGFQQIS

SEQ ID NO: 88957 - protein, 16 aa, Homo Sapiens
EVCLTMSEKGFQQISF

SEQ ID NO: 88958 - protein, 16 aa, Homo Sapiens
VCLTMSEKGFQQISFV

SEQ ID NO: 88959 - protein, 16 aa, Homo Sapiens
CLTMSEKGFQQISFVN

SEQ ID NO: 88960 - protein, 16 aa, Homo Sapiens
LTMSEKGFQQISFVNS

SEQ ID NO: 88961 - protein, 16 aa, Homo Sapiens
TMSEKGFQQISFVNSI

SEQ ID NO: 88962 - protein, 16 aa, Homo Sapiens
MSEKGFQQISFVNSIA

SEQ ID NO: 88963 - protein, 16 aa, Homo Sapiens
SEKGFQQISFVNSIAT

SEQ ID NO: 88964 - protein, 16 aa, Homo Sapiens
EKGFQQISFVNSIATS

SEQ ID NO: 88965 - protein, 16 aa, Homo Sapiens
KGFQQISFVNSIATSK

SEQ ID NO: 88966 - protein, 16 aa, Homo Sapiens
GFQQISFVNSIATSKG

SEQ ID NO: 88967 - protein, 16 aa, Homo Sapiens
FQQISFVNSIATSKGG

SEQ ID NO: 88968 - protein, 16 aa, Homo Sapiens
QQISFVNSIATSKGGR

SEQ ID NO: 88969 - protein, 16 aa, Homo Sapiens
QISFVNSIATSKGGRH

SEQ ID NO: 88970 - protein, 16 aa, Homo Sapiens
ISFVNSIATSKGGRHV

SEQ ID NO: 88971 - protein, 16 aa, Homo Sapiens
SFVNSIATSKGGRHVD

SEQ ID NO: 88972 - protein, 16 aa, Homo Sapiens
FVNSIATSKGGRHVDY

SEQ ID NO: 88973 - protein, 16 aa, Homo Sapiens
VNSIATSKGGRHVDYV

SEQ ID NO: 88974 - protein, 16 aa, Homo Sapiens
NSIATSKGGRHVDYVA

SEQ ID NO: 88975 - protein, 16 aa, Homo Sapiens
SIATSKGGRHVDYVAD

SEQ ID NO: 88976 - protein, 16 aa, Homo Sapiens
IATSKGGRHVDYVADQ

SEQ ID NO: 88977 - protein, 16 aa, Homo Sapiens
ATSKGGRHVDYVADQI

SEQ ID NO: 88978 - protein, 16 aa, Homo Sapiens
TSKGGRHVDYVADQIV

SEQ ID NO: 88979 - protein, 16 aa, Homo Sapiens
SKGGRHVDYVADQIVT

SEQ ID NO: 88980 - protein, 16 aa, Homo Sapiens
KGGRHVDYVADQIVTK

SEQ ID NO: 88981 - protein, 16 aa, Homo Sapiens
GGRHVDYVADQIVTKL

SEQ ID NO: 88982 - protein, 16 aa, Homo Sapiens
GRHVDYVADQIVTKLV

SEQ ID NO: 88983 - protein, 16 aa, Homo Sapiens
RHVDYVADQIVTKLVD

SEQ ID NO: 88984 - protein, 16 aa, Homo Sapiens
HVDYVADQIVTKLVDV

SEQ ID NO: 88985 - protein, 16 aa, Homo Sapiens
VDYVADQIVTKLVDVV

SEQ ID NO: 88986 - protein, 16 aa, Homo Sapiens
DYVADQIVTKLVDVVK

SEQ ID NO: 88987 - protein, 16 aa, Homo Sapiens
YVADQIVTKLVDVVKK

SEQ ID NO: 88988 - protein, 16 aa, Homo Sapiens
VADQIVTKLVDVVKKK

SEQ ID NO: 88989 - protein, 16 aa, Homo Sapiens
ADQIVTKLVDVVKKKN

SEQ ID NO: 88990 - protein, 16 aa, Homo Sapiens
DQIVTKLVDVVKKKNK

SEQ ID NO: 88991 - protein, 16 aa, Homo Sapiens
QIVTKLVDVVKKKNKG

SEQ ID NO: 88992 - protein, 16 aa, Homo Sapiens
IVTKLVDVVKKKNKGG

SEQ ID NO: 88993 - protein, 16 aa, Homo Sapiens
VTKLVDVVKKKNKGGV

SEQ ID NO: 88994 - protein, 16 aa, Homo Sapiens
TKLVDVVKKKNKGGVA

SEQ ID NO: 88995 - protein, 16 aa, Homo Sapiens
KLVDVVKKKNKGGVAV

SEQ ID NO: 88996 - protein, 16 aa, Homo Sapiens
LVDVVKKKNKGGVAVK

SEQ ID NO: 88997 - protein, 16 aa, Homo Sapiens
VDVVKKKNKGGVAVKA

SEQ ID NO: 88998 - protein, 16 aa, Homo Sapiens
DVVKKKNKGGVAVKAH

SEQ ID NO: 88999 - protein, 16 aa, Homo Sapiens
VVKKKNKGGVAVKAHQ

SEQ ID NO: 89000 - protein, 16 aa, Homo Sapiens
VKKKNKGGVAVKAHQV

SEQ ID NO: 89001 - protein, 16 aa, Homo Sapiens
KKKNKGGVAVKAHQVK

SEQ ID NO: 89002 - protein, 16 aa, Homo Sapiens
KKNKGGVAVKAHQVKN

SEQ ID NO: 89003 - protein, 16 aa, Homo Sapiens
KNKGGVAVKAHQVKNH

SEQ ID NO: 89004 - protein, 16 aa, Homo Sapiens
NKGGVAVKAHQVKNHM

SEQ ID NO: 89005 - protein, 16 aa, Homo Sapiens
KGGVAVKAHQVKNHMW

SEQ ID NO: 89006 - protein, 16 aa, Homo Sapiens
GGVAVKAHQVKNHMWI

SEQ ID NO: 89007 - protein, 16 aa, Homo Sapiens
GVAVKAHQVKNHMWIF

SEQ ID NO: 89008 - protein, 16 aa, Homo Sapiens
VAVKAHQVKNHMWIFV

SEQ ID NO: 89009 - protein, 16 aa, Homo Sapiens
AVKAHQVKNHMWIFVN

SEQ ID NO: 89010 - protein, 16 aa, Homo Sapiens
VKAHQVKNHMWIFVNA

SEQ ID NO: 89011 - protein, 16 aa, Homo Sapiens
KAHQVKNHMWIFVNAL

SEQ ID NO: 89012 - protein, 16 aa, Homo Sapiens
AHQVKNHMWIFVNALI

SEQ ID NO: 89013 - protein, 16 aa, Homo Sapiens
HQVKNHMWIFVNALIE

SEQ ID NO: 89014 - protein, 16 aa, Homo Sapiens
QVKNHMWIFVNALIEN

SEQ ID NO: 89015 - protein, 16 aa, Homo Sapiens
VKNHMWIFVNALIENP

SEQ ID NO: 89016 - protein, 16 aa, Homo Sapiens
KNHMWIFVNALIENPT

SEQ ID NO: 89017 - protein, 16 aa, Homo Sapiens
NHMWIFVNALIENPTF

SEQ ID NO: 89018 - protein, 16 aa, Homo Sapiens
HMWIFVNALIENPTFD

SEQ ID NO: 89019 - protein, 16 aa, Homo Sapiens
MWIFVNALIENPTFDS

SEQ ID NO: 89020 - protein, 16 aa, Homo Sapiens
WIFVNALIENPTFDSQ

SEQ ID NO: 89021 - protein, 16 aa, Homo Sapiens
IFVNALIENPTFDSQT

SEQ ID NO: 89022 - protein, 16 aa, Homo Sapiens
FVNALIENPTFDSQTK

SEQ ID NO: 89023 - protein, 16 aa, Homo Sapiens
VNALIENPTFDSQTKE

SEQ ID NO: 89024 - protein, 16 aa, Homo Sapiens
NALIENPTFDSQTKEN

SEQ ID NO: 89025 - protein, 16 aa, Homo Sapiens
ALIENPTFDSQTKENM

SEQ ID NO: 89026 - protein, 16 aa, Homo Sapiens
LIENPTFDSQTKENMT

SEQ ID NO: 89027 - protein, 16 aa, Homo Sapiens
IENPTFDSQTKENMTL

SEQ ID NO: 89028 - protein, 16 aa, Homo Sapiens
ENPTFDSQTKENMTLQ

SEQ ID NO: 89029 - protein, 16 aa, Homo Sapiens
NPTFDSQTKENMTLQP

SEQ ID NO: 89030 - protein, 16 aa, Homo Sapiens
PTFDSQTKENMTLQPK

SEQ ID NO: 89031 - protein, 16 aa, Homo Sapiens
TFDSQTKENMTLQPKS

SEQ ID NO: 89032 - protein, 16 aa, Homo Sapiens
FDSQTKENMTLQPKSF

SEQ ID NO: 89033 - protein, 16 aa, Homo Sapiens
DSQTKENMTLQPKSFG

SEQ ID NO: 89034 - protein, 16 aa, Homo Sapiens
SQTKENMTLQPKSFGS

SEQ ID NO: 89035 - protein, 16 aa, Homo Sapiens
QTKENMTLQPKSFGST

SEQ ID NO: 89036 - protein, 16 aa, Homo Sapiens
TKENMTLQPKSFGSTC

SEQ ID NO: 89037 - protein, 16 aa, Homo Sapiens
KENMTLQPKSFGSTCQ

SEQ ID NO: 89038 - protein, 16 aa, Homo Sapiens
ENMTLQPKSFGSTCQL

SEQ ID NO: 89039 - protein, 16 aa, Homo Sapiens
NMTLQPKSFGSTCQLS

SEQ ID NO: 89040 - protein, 16 aa, Homo Sapiens
MTLQPKSFGSTCQLSE

SEQ ID NO: 89041 - protein, 16 aa, Homo Sapiens
TLQPKSFGSTCQLSEK

SEQ ID NO: 89042 - protein, 16 aa, Homo Sapiens
LQPKSFGSTCQLSEKF

SEQ ID NO: 89043 - protein, 16 aa, Homo Sapiens
QPKSFGSTCQLSEKFI

SEQ ID NO: 89044 - protein, 16 aa, Homo Sapiens
PKSFGSTCQLSEKFIK

SEQ ID NO: 89045 - protein, 16 aa, Homo Sapiens
KSFGSTCQLSEKFIKA

SEQ ID NO: 89046 - protein, 16 aa, Homo Sapiens
SFGSTCQLSEKFIKAA

SEQ ID NO: 89047 - protein, 16 aa, Homo Sapiens
FGSTCQLSEKFIKAAI

SEQ ID NO: 89048 - protein, 16 aa, Homo Sapiens
GSTCQLSEKFIKAAIG

SEQ ID NO: 89049 - protein, 16 aa, Homo Sapiens
STCQLSEKFIKAAIGC

SEQ ID NO: 89050 - protein, 16 aa, Homo Sapiens
TCQLSEKFIKAAIGCG

SEQ ID NO: 89051 - protein, 16 aa, Homo Sapiens
CQLSEKFIKAAIGCGI

SEQ ID NO: 89052 - protein, 16 aa, Homo Sapiens
QLSEKFIKAAIGCGIV

SEQ ID NO: 89053 - protein, 16 aa, Homo Sapiens
LSEKFIKAAIGCGIVE

SEQ ID NO: 89054 - protein, 16 aa, Homo Sapiens
SEKFIKAAIGCGIVES

SEQ ID NO: 89055 - protein, 16 aa, Homo Sapiens
EKFIKAAIGCGIVESI

SEQ ID NO: 89056 - protein, 16 aa, Homo Sapiens
KFIKAAIGCGIVESIL

SEQ ID NO: 89057 - protein, 16 aa, Homo Sapiens
FIKAAIGCGIVESILN

SEQ ID NO: 89058 - protein, 16 aa, Homo Sapiens
IKAAIGCGIVESILNW

SEQ ID NO: 89059 - protein, 16 aa, Homo Sapiens
KAAIGCGIVESILNWV

SEQ ID NO: 89060 - protein, 16 aa, Homo Sapiens
AAIGCGIVESILNWVK

SEQ ID NO: 89061 - protein, 16 aa, Homo Sapiens
AIGCGIVESILNWVKF

SEQ ID NO: 89062 - protein, 16 aa, Homo Sapiens
IGCGIVESILNWVKFK

SEQ ID NO: 89063 - protein, 16 aa, Homo Sapiens
GCGIVESILNWVKFKA

SEQ ID NO: 89064 - protein, 16 aa, Homo Sapiens
CGIVESILNWVKFKAQ

SEQ ID NO: 89065 - protein, 16 aa, Homo Sapiens
GIVESILNWVKFKAQV

SEQ ID NO: 89066 - protein, 16 aa, Homo Sapiens
IVESILNWVKFKAQVQ

SEQ ID NO: 89067 - protein, 16 aa, Homo Sapiens
VESILNWVKFKAQVQL

SEQ ID NO: 89068 - protein, 16 aa, Homo Sapiens
ESILNWVKFKAQVQLN

SEQ ID NO: 89069 - protein, 16 aa, Homo Sapiens
SILNWVKFKAQVQLNK

SEQ ID NO: 89070 - protein, 16 aa, Homo Sapiens
ILNWVKFKAQVQLNKK

SEQ ID NO: 89071 - protein, 16 aa, Homo Sapiens
LNWVKFKAQVQLNKKC

SEQ ID NO: 89072 - protein, 16 aa, Homo Sapiens
NWVKFKAQVQLNKKCS

SEQ ID NO: 89073 - protein, 16 aa, Homo Sapiens
WVKFKAQVQLNKKCSA

SEQ ID NO: 89074 - protein, 16 aa, Homo Sapiens
VKFKAQVQLNKKCSAV

SEQ ID NO: 89075 - protein, 16 aa, Homo Sapiens
KFKAQVQLNKKCSAVK

SEQ ID NO: 89076 - protein, 16 aa, Homo Sapiens
FKAQVQLNKKCSAVKH

SEQ ID NO: 89077 - protein, 16 aa, Homo Sapiens
KAQVQLNKKCSAVKHN

SEQ ID NO: 89078 - protein, 16 aa, Homo Sapiens
AQVQLNKKCSAVKHNR

SEQ ID NO: 89079 - protein, 16 aa, Homo Sapiens
QVQLNKKCSAVKHNRI

SEQ ID NO: 89080 - protein, 16 aa, Homo Sapiens
VQLNKKCSAVKHNRIK

SEQ ID NO: 89081 - protein, 16 aa, Homo Sapiens
QLNKKCSAVKHNRIKG

SEQ ID NO: 89082 - protein, 16 aa, Homo Sapiens
LNKKCSAVKHNRIKGI

SEQ ID NO: 89083 - protein, 16 aa, Homo Sapiens
NKKCSAVKHNRIKGIP

SEQ ID NO: 89084 - protein, 16 aa, Homo Sapiens
KKCSAVKHNRIKGIPK

SEQ ID NO: 89085 - protein, 16 aa, Homo Sapiens
KCSAVKHNRIKGIPKL

SEQ ID NO: 89086 - protein, 16 aa, Homo Sapiens
CSAVKHNRIKGIPKLD

SEQ ID NO: 89087 - protein, 16 aa, Homo Sapiens
SAVKHNRIKGIPKLDD

SEQ ID NO: 89088 - protein, 16 aa, Homo Sapiens
AVKHNRIKGIPKLDDA

SEQ ID NO: 89089 - protein, 16 aa, Homo Sapiens
VKHNRIKGIPKLDDAN

SEQ ID NO: 89090 - protein, 16 aa, Homo Sapiens
KHNRIKGIPKLDDAND

SEQ ID NO: 89091 - protein, 16 aa, Homo Sapiens
HNRIKGIPKLDDANDA

SEQ ID NO: 89092 - protein, 16 aa, Homo Sapiens
NRIKGIPKLDDANDAG

SEQ ID NO: 89093 - protein, 16 aa, Homo Sapiens
RIKGIPKLDDANDAGG

SEQ ID NO: 89094 - protein, 16 aa, Homo Sapiens
IKGIPKLDDANDAGGR

SEQ ID NO: 89095 - protein, 16 aa, Homo Sapiens
KGIPKLDDANDAGGRN

SEQ ID NO: 89096 - protein, 16 aa, Homo Sapiens
GIPKLDDANDAGGRNS

SEQ ID NO: 89097 - protein, 16 aa, Homo Sapiens
IPKLDDANDAGGRNST

SEQ ID NO: 89098 - protein, 16 aa, Homo Sapiens
PKLDDANDAGGRNSTE

SEQ ID NO: 89099 - protein, 16 aa, Homo Sapiens
KLDDANDAGGRNSTEC

SEQ ID NO: 89100 - protein, 16 aa, Homo Sapiens
LDDANDAGGRNSTECT

SEQ ID NO: 89101 - protein, 16 aa, Homo Sapiens
DDANDAGGRNSTECTL

SEQ ID NO: 89102 - protein, 16 aa, Homo Sapiens
DANDAGGRNSTECTLI

SEQ ID NO: 89103 - protein, 16 aa, Homo Sapiens
ANDAGGRNSTECTLIL

SEQ ID NO: 89104 - protein, 16 aa, Homo Sapiens
NDAGGRNSTECTLILT

SEQ ID NO: 89105 - protein, 16 aa, Homo Sapiens
DAGGRNSTECTLILTE

SEQ ID NO: 89106 - protein, 16 aa, Homo Sapiens
AGGRNSTECTLILTEG

SEQ ID NO: 89107 - protein, 16 aa, Homo Sapiens
GGRNSTECTLILTEGD

SEQ ID NO: 89108 - protein, 16 aa, Homo Sapiens
GRNSTECTLILTEGDS

SEQ ID NO: 89109 - protein, 16 aa, Homo Sapiens
RNSTECTLILTEGDSA

SEQ ID NO: 89110 - protein, 16 aa, Homo Sapiens
NSTECTLILTEGDSAK

SEQ ID NO: 89111 - protein, 16 aa, Homo Sapiens
STECTLILTEGDSAKT

SEQ ID NO: 89112 - protein, 16 aa, Homo Sapiens
TECTLILTEGDSAKTL

SEQ ID NO: 89113 - protein, 16 aa, Homo Sapiens
ECTLILTEGDSAKTLA

SEQ ID NO: 89114 - protein, 16 aa, Homo Sapiens
CTLILTEGDSAKTLAV

SEQ ID NO: 89115 - protein, 16 aa, Homo Sapiens
TLILTEGDSAKTLAVS

SEQ ID NO: 89116 - protein, 16 aa, Homo Sapiens
LILTEGDSAKTLAVSG

SEQ ID NO: 89117 - protein, 16 aa, Homo Sapiens
ILTEGDSAKTLAVSGL

SEQ ID NO: 89118 - protein, 16 aa, Homo Sapiens
LTEGDSAKTLAVSGLG

SEQ ID NO: 89119 - protein, 16 aa, Homo Sapiens
TEGDSAKTLAVSGLGV

SEQ ID NO: 89120 - protein, 16 aa, Homo Sapiens
EGDSAKTLAVSGLGVV

SEQ ID NO: 89121 - protein, 16 aa, Homo Sapiens
GDSAKTLAVSGLGVVG

SEQ ID NO: 89122 - protein, 16 aa, Homo Sapiens
DSAKTLAVSGLGVVGR

SEQ ID NO: 89123 - protein, 16 aa, Homo Sapiens
SAKTLAVSGLGVVGRD

SEQ ID NO: 89124 - protein, 16 aa, Homo Sapiens
AKTLAVSGLGVVGRDK

SEQ ID NO: 89125 - protein, 16 aa, Homo Sapiens
KTLAVSGLGVVGRDKY

SEQ ID NO: 89126 - protein, 16 aa, Homo Sapiens
TLAVSGLGVVGRDKYG

SEQ ID NO: 89127 - protein, 16 aa, Homo Sapiens
LAVSGLGVVGRDKYGV

SEQ ID NO: 89128 - protein, 16 aa, Homo Sapiens
AVSGLGVVGRDKYGVF

SEQ ID NO: 89129 - protein, 16 aa, Homo Sapiens
VSGLGVVGRDKYGVFP

SEQ ID NO: 89130 - protein, 16 aa, Homo Sapiens
SGLGVVGRDKYGVFPL

SEQ ID NO: 89131 - protein, 16 aa, Homo Sapiens
GLGVVGRDKYGVFPLR

SEQ ID NO: 89132 - protein, 16 aa, Homo Sapiens
LGVVGRDKYGVFPLRG

SEQ ID NO: 89133 - protein, 16 aa, Homo Sapiens
GVVGRDKYGVFPLRGK

SEQ ID NO: 89134 - protein, 16 aa, Homo Sapiens
VVGRDKYGVFPLRGKI

SEQ ID NO: 89135 - protein, 16 aa, Homo Sapiens
VGRDKYGVFPLRGKIL

SEQ ID NO: 89136 - protein, 16 aa, Homo Sapiens
GRDKYGVFPLRGKILN

SEQ ID NO: 89137 - protein, 16 aa, Homo Sapiens
RDKYGVFPLRGKILNV

SEQ ID NO: 89138 - protein, 16 aa, Homo Sapiens
DKYGVFPLRGKILNVR

SEQ ID NO: 89139 - protein, 16 aa, Homo Sapiens
KYGVFPLRGKILNVRE

SEQ ID NO: 89140 - protein, 16 aa, Homo Sapiens
YGVFPLRGKILNVREA

SEQ ID NO: 89141 - protein, 16 aa, Homo Sapiens
GVFPLRGKILNVREAS

SEQ ID NO: 89142 - protein, 16 aa, Homo Sapiens
VFPLRGKILNVREASH

SEQ ID NO: 89143 - protein, 16 aa, Homo Sapiens
FPLRGKILNVREASHK

SEQ ID NO: 89144 - protein, 16 aa, Homo Sapiens
PLRGKILNVREASHKQ

SEQ ID NO: 89145 - protein, 16 aa, Homo Sapiens
LRGKILNVREASHKQI

SEQ ID NO: 89146 - protein, 16 aa, Homo Sapiens
RGKILNVREASHKQIM

SEQ ID NO: 89147 - protein, 16 aa, Homo Sapiens
GKILNVREASHKQIME

SEQ ID NO: 89148 - protein, 16 aa, Homo Sapiens
KILNVREASHKQIMEN

SEQ ID NO: 89149 - protein, 16 aa, Homo Sapiens
ILNVREASHKQIMENA

SEQ ID NO: 89150 - protein, 16 aa, Homo Sapiens
LNVREASHKQIMENAE

SEQ ID NO: 89151 - protein, 16 aa, Homo Sapiens
NVREASHKQIMENAEI

SEQ ID NO: 89152 - protein, 16 aa, Homo Sapiens
VREASHKQIMENAEIN

SEQ ID NO: 89153 - protein, 16 aa, Homo Sapiens
REASHKQIMENAEINN

SEQ ID NO: 89154 - protein, 16 aa, Homo Sapiens
EASHKQIMENAEINNI

SEQ ID NO: 89155 - protein, 16 aa, Homo Sapiens
ASHKQIMENAEINNII

SEQ ID NO: 89156 - protein, 16 aa, Homo Sapiens
SHKQIMENAEINNIIK

SEQ ID NO: 89157 - protein, 16 aa, Homo Sapiens
HKQIMENAEINNIIKI

SEQ ID NO: 89158 - protein, 16 aa, Homo Sapiens
KQIMENAEINNIIKIV

SEQ ID NO: 89159 - protein, 16 aa, Homo Sapiens
QIMENAEINNIIKIVG

SEQ ID NO: 89160 - protein, 16 aa, Homo Sapiens
IMENAEINNIIKIVGL

SEQ ID NO: 89161 - protein, 16 aa, Homo Sapiens
MENAEINNIIKIVGLQ

SEQ ID NO: 89162 - protein, 16 aa, Homo Sapiens
ENAEINNIIKIVGLQY

SEQ ID NO: 89163 - protein, 16 aa, Homo Sapiens
NAEINNIIKIVGLQYK

SEQ ID NO: 89164 - protein, 16 aa, Homo Sapiens
AEINNIIKIVGLQYKK

SEQ ID NO: 89165 - protein, 16 aa, Homo Sapiens
EINNIIKIVGLQYKKN

SEQ ID NO: 89166 - protein, 16 aa, Homo Sapiens
INNIIKIVGLQYKKNY

SEQ ID NO: 89167 - protein, 16 aa, Homo Sapiens
NNIIKIVGLQYKKNYE

SEQ ID NO: 89168 - protein, 16 aa, Homo Sapiens
NIIKIVGLQYKKNYED

SEQ ID NO: 89169 - protein, 16 aa, Homo Sapiens
IIKIVGLQYKKNYEDE

SEQ ID NO: 89170 - protein, 16 aa, Homo Sapiens
IKIVGLQYKKNYEDED

SEQ ID NO: 89171 - protein, 16 aa, Homo Sapiens
KIVGLQYKKNYEDEDS

SEQ ID NO: 89172 - protein, 16 aa, Homo Sapiens
IVGLQYKKNYEDEDSL

SEQ ID NO: 89173 - protein, 16 aa, Homo Sapiens
VGLQYKKNYEDEDSLK

SEQ ID NO: 89174 - protein, 16 aa, Homo Sapiens
GLQYKKNYEDEDSLKT

SEQ ID NO: 89175 - protein, 16 aa, Homo Sapiens
LQYKKNYEDEDSLKTL

SEQ ID NO: 89176 - protein, 16 aa, Homo Sapiens
QYKKNYEDEDSLKTLR

SEQ ID NO: 89177 - protein, 16 aa, Homo Sapiens
YKKNYEDEDSLKTLRY

SEQ ID NO: 89178 - protein, 16 aa, Homo Sapiens
KKNYEDEDSLKTLRYG

SEQ ID NO: 89179 - protein, 16 aa, Homo Sapiens
KNYEDEDSLKTLRYGK

SEQ ID NO: 89180 - protein, 16 aa, Homo Sapiens
NYEDEDSLKTLRYGKI

SEQ ID NO: 89181 - protein, 16 aa, Homo Sapiens
YEDEDSLKTLRYGKIM

SEQ ID NO: 89182 - protein, 16 aa, Homo Sapiens
EDEDSLKTLRYGKIMI

SEQ ID NO: 89183 - protein, 16 aa, Homo Sapiens
DEDSLKTLRYGKIMIM

SEQ ID NO: 89184 - protein, 16 aa, Homo Sapiens
EDSLKTLRYGKIMIMT

SEQ ID NO: 89185 - protein, 16 aa, Homo Sapiens
DSLKTLRYGKIMIMTD

SEQ ID NO: 89186 - protein, 16 aa, Homo Sapiens
SLKTLRYGKIMIMTDQ

SEQ ID NO: 89187 - protein, 16 aa, Homo Sapiens
LKTLRYGKIMIMTDQD

SEQ ID NO: 89188 - protein, 16 aa, Homo Sapiens
KTLRYGKIMIMTDQDQ

SEQ ID NO: 89189 - protein, 16 aa, Homo Sapiens
TLRYGKIMIMTDQDQD

SEQ ID NO: 89190 - protein, 16 aa, Homo Sapiens
LRYGKIMIMTDQDQDG

SEQ ID NO: 89191 - protein, 16 aa, Homo Sapiens
RYGKIMIMTDQDQDGS

SEQ ID NO: 89192 - protein, 16 aa, Homo Sapiens
YGKIMIMTDQDQDGSH

SEQ ID NO: 89193 - protein, 16 aa, Homo Sapiens
GKIMIMTDQDQDGSHI

SEQ ID NO: 89194 - protein, 16 aa, Homo Sapiens
KIMIMTDQDQDGSHIK

SEQ ID NO: 89195 - protein, 16 aa, Homo Sapiens
IMIMTDQDQDGSHIKG

SEQ ID NO: 89196 - protein, 16 aa, Homo Sapiens
MIMTDQDQDGSHIKGL

SEQ ID NO: 89197 - protein, 16 aa, Homo Sapiens
IMTDQDQDGSHIKGLL

SEQ ID NO: 89198 - protein, 16 aa, Homo Sapiens
MTDQDQDGSHIKGLLI

SEQ ID NO: 89199 - protein, 16 aa, Homo Sapiens
TDQDQDGSHIKGLLIN

SEQ ID NO: 89200 - protein, 16 aa, Homo Sapiens
DQDQDGSHIKGLLINF

SEQ ID NO: 89201 - protein, 16 aa, Homo Sapiens
QDQDGSHIKGLLINFI

SEQ ID NO: 89202 - protein, 16 aa, Homo Sapiens
DQDGSHIKGLLINFIH

SEQ ID NO: 89203 - protein, 16 aa, Homo Sapiens
QDGSHIKGLLINFIHH

SEQ ID NO: 89204 - protein, 16 aa, Homo Sapiens
DGSHIKGLLINFIHHN

SEQ ID NO: 89205 - protein, 16 aa, Homo Sapiens
GSHIKGLLINFIHHNW

SEQ ID NO: 89206 - protein, 16 aa, Homo Sapiens
SHIKGLLINFIHHNWP

SEQ ID NO: 89207 - protein, 16 aa, Homo Sapiens
HIKGLLINFIHHNWPS

SEQ ID NO: 89208 - protein, 16 aa, Homo Sapiens
IKGLLINFIHHNWPSL

SEQ ID NO: 89209 - protein, 16 aa, Homo Sapiens
KGLLINFIHHNWPSLL

SEQ ID NO: 89210 - protein, 16 aa, Homo Sapiens
GLLINFIHHNWPSLLR

SEQ ID NO: 89211 - protein, 16 aa, Homo Sapiens
LLINFIHHNWPSLLRH

SEQ ID NO: 89212 - protein, 16 aa, Homo Sapiens
LINFIHHNWPSLLRHR

SEQ ID NO: 89213 - protein, 16 aa, Homo Sapiens
INFIHHNWPSLLRHRF

SEQ ID NO: 89214 - protein, 16 aa, Homo Sapiens
NFIHHNWPSLLRHRFL

SEQ ID NO: 89215 - protein, 16 aa, Homo Sapiens
FIHHNWPSLLRHRFLE

SEQ ID NO: 89216 - protein, 16 aa, Homo Sapiens
IHHNWPSLLRHRFLEE

SEQ ID NO: 89217 - protein, 16 aa, Homo Sapiens
HHNWPSLLRHRFLEEF

SEQ ID NO: 89218 - protein, 16 aa, Homo Sapiens
HNWPSLLRHRFLEEFI

SEQ ID NO: 89219 - protein, 16 aa, Homo Sapiens
NWPSLLRHRFLEEFIT

SEQ ID NO: 89220 - protein, 16 aa, Homo Sapiens
WPSLLRHRFLEEFITP

SEQ ID NO: 89221 - protein, 16 aa, Homo Sapiens
PSLLRHRFLEEFITPI

SEQ ID NO: 89222 - protein, 16 aa, Homo Sapiens
SLLRHRFLEEFITPIV

SEQ ID NO: 89223 - protein, 16 aa, Homo Sapiens
LLRHRFLEEFITPIVK

SEQ ID NO: 89224 - protein, 16 aa, Homo Sapiens
LRHRFLEEFITPIVKV

SEQ ID NO: 89225 - protein, 16 aa, Homo Sapiens
RHRFLEEFITPIVKVS

SEQ ID NO: 89226 - protein, 16 aa, Homo Sapiens
HRFLEEFITPIVKVSK

SEQ ID NO: 89227 - protein, 16 aa, Homo Sapiens
RFLEEFITPIVKVSKN

SEQ ID NO: 89228 - protein, 16 aa, Homo Sapiens
FLEEFITPIVKVSKNK

SEQ ID NO: 89229 - protein, 16 aa, Homo Sapiens
LEEFITPIVKVSKNKQ

SEQ ID NO: 89230 - protein, 16 aa, Homo Sapiens
EEFITPIVKVSKNKQE

SEQ ID NO: 89231 - protein, 16 aa, Homo Sapiens
EFITPIVKVSKNKQEM

SEQ ID NO: 89232 - protein, 16 aa, Homo Sapiens
FITPIVKVSKNKQEMA

SEQ ID NO: 89233 - protein, 16 aa, Homo Sapiens
ITPIVKVSKNKQEMAF

SEQ ID NO: 89234 - protein, 16 aa, Homo Sapiens
TPIVKVSKNKQEMAFY

SEQ ID NO: 89235 - protein, 16 aa, Homo Sapiens
PIVKVSKNKQEMAFYS

SEQ ID NO: 89236 - protein, 16 aa, Homo Sapiens
IVKVSKNKQEMAFYSL

SEQ ID NO: 89237 - protein, 16 aa, Homo Sapiens
VKVSKNKQEMAFYSLP

SEQ ID NO: 89238 - protein, 16 aa, Homo Sapiens
KVSKNKQEMAFYSLPE

SEQ ID NO: 89239 - protein, 16 aa, Homo Sapiens
VSKNKQEMAFYSLPEF

SEQ ID NO: 89240 - protein, 16 aa, Homo Sapiens
SKNKQEMAFYSLPEFE

SEQ ID NO: 89241 - protein, 16 aa, Homo Sapiens
KNKQEMAFYSLPEFEE

SEQ ID NO: 89242 - protein, 16 aa, Homo Sapiens
NKQEMAFYSLPEFEEW

SEQ ID NO: 89243 - protein, 16 aa, Homo Sapiens
KQEMAFYSLPEFEEWK

SEQ ID NO: 89244 - protein, 16 aa, Homo Sapiens
QEMAFYSLPEFEEWKS

SEQ ID NO: 89245 - protein, 16 aa, Homo Sapiens
EMAFYSLPEFEEWKSS

SEQ ID NO: 89246 - protein, 16 aa, Homo Sapiens
MAFYSLPEFEEWKSST

SEQ ID NO: 89247 - protein, 16 aa, Homo Sapiens
AFYSLPEFEEWKSSTP

SEQ ID NO: 89248 - protein, 16 aa, Homo Sapiens
FYSLPEFEEWKSSTPN

SEQ ID NO: 89249 - protein, 16 aa, Homo Sapiens
YSLPEFEEWKSSTPNH

SEQ ID NO: 89250 - protein, 16 aa, Homo Sapiens
SLPEFEEWKSSTPNHK

SEQ ID NO: 89251 - protein, 16 aa, Homo Sapiens
LPEFEEWKSSTPNHKK

SEQ ID NO: 89252 - protein, 16 aa, Homo Sapiens
PEFEEWKSSTPNHKKW

SEQ ID NO: 89253 - protein, 16 aa, Homo Sapiens
EFEEWKSSTPNHKKWK

SEQ ID NO: 89254 - protein, 16 aa, Homo Sapiens
FEEWKSSTPNHKKWKV

SEQ ID NO: 89255 - protein, 16 aa, Homo Sapiens
EEWKSSTPNHKKWKVK

SEQ ID NO: 89256 - protein, 16 aa, Homo Sapiens
EWKSSTPNHKKWKVKY

SEQ ID NO: 89257 - protein, 16 aa, Homo Sapiens
WKSSTPNHKKWKVKYY

SEQ ID NO: 89258 - protein, 16 aa, Homo Sapiens
KSSTPNHKKWKVKYYK

SEQ ID NO: 89259 - protein, 16 aa, Homo Sapiens
SSTPNHKKWKVKYYKG

SEQ ID NO: 89260 - protein, 16 aa, Homo Sapiens
STPNHKKWKVKYYKGL

SEQ ID NO: 89261 - protein, 16 aa, Homo Sapiens
TPNHKKWKVKYYKGLG

SEQ ID NO: 89262 - protein, 16 aa, Homo Sapiens
PNHKKWKVKYYKGLGT

SEQ ID NO: 89263 - protein, 16 aa, Homo Sapiens
NHKKWKVKYYKGLGTS

SEQ ID NO: 89264 - protein, 16 aa, Homo Sapiens
HKKWKVKYYKGLGTST

SEQ ID NO: 89265 - protein, 16 aa, Homo Sapiens
KKWKVKYYKGLGTSTS

SEQ ID NO: 89266 - protein, 16 aa, Homo Sapiens
KWKVKYYKGLGTSTSK

SEQ ID NO: 89267 - protein, 16 aa, Homo Sapiens
WKVKYYKGLGTSTSKE

SEQ ID NO: 89268 - protein, 16 aa, Homo Sapiens
KVKYYKGLGTSTSKEA

SEQ ID NO: 89269 - protein, 16 aa, Homo Sapiens
VKYYKGLGTSTSKEAK

SEQ ID NO: 89270 - protein, 16 aa, Homo Sapiens
KYYKGLGTSTSKEAKE

SEQ ID NO: 89271 - protein, 16 aa, Homo Sapiens
YYKGLGTSTSKEAKEY

SEQ ID NO: 89272 - protein, 16 aa, Homo Sapiens
YKGLGTSTSKEAKEYF

SEQ ID NO: 89273 - protein, 16 aa, Homo Sapiens
KGLGTSTSKEAKEYFA

SEQ ID NO: 89274 - protein, 16 aa, Homo Sapiens
GLGTSTSKEAKEYFAD

SEQ ID NO: 89275 - protein, 16 aa, Homo Sapiens
LGTSTSKEAKEYFADM

SEQ ID NO: 89276 - protein, 16 aa, Homo Sapiens
GTSTSKEAKEYFADMK

SEQ ID NO: 89277 - protein, 16 aa, Homo Sapiens
TSTSKEAKEYFADMKR

SEQ ID NO: 89278 - protein, 16 aa, Homo Sapiens
STSKEAKEYFADMKRH

SEQ ID NO: 89279 - protein, 16 aa, Homo Sapiens
TSKEAKEYFADMKRHR

SEQ ID NO: 89280 - protein, 16 aa, Homo Sapiens
SKEAKEYFADMKRHRI

SEQ ID NO: 89281 - protein, 16 aa, Homo Sapiens
KEAKEYFADMKRHRIQ

SEQ ID NO: 89282 - protein, 16 aa, Homo Sapiens
EAKEYFADMKRHRIQF

SEQ ID NO: 89283 - protein, 16 aa, Homo Sapiens
AKEYFADMKRHRIQFK

SEQ ID NO: 89284 - protein, 16 aa, Homo Sapiens
KEYFADMKRHRIQFKY

SEQ ID NO: 89285 - protein, 16 aa, Homo Sapiens
EYFADMKRHRIQFKYS

SEQ ID NO: 89286 - protein, 16 aa, Homo Sapiens
YFADMKRHRIQFKYSG

SEQ ID NO: 89287 - protein, 16 aa, Homo Sapiens
FADMKRHRIQFKYSGP

SEQ ID NO: 89288 - protein, 16 aa, Homo Sapiens
ADMKRHRIQFKYSGPE

SEQ ID NO: 89289 - protein, 16 aa, Homo Sapiens
DMKRHRIQFKYSGPED

SEQ ID NO: 89290 - protein, 16 aa, Homo Sapiens
MKRHRIQFKYSGPEDD

SEQ ID NO: 89291 - protein, 16 aa, Homo Sapiens
KRHRIQFKYSGPEDDA

SEQ ID NO: 89292 - protein, 16 aa, Homo Sapiens
RHRIQFKYSGPEDDAA

SEQ ID NO: 89293 - protein, 16 aa, Homo Sapiens
HRIQFKYSGPEDDAAI

SEQ ID NO: 89294 - protein, 16 aa, Homo Sapiens
RIQFKYSGPEDDAAIS

SEQ ID NO: 89295 - protein, 16 aa, Homo Sapiens
IQFKYSGPEDDAAISL

SEQ ID NO: 89296 - protein, 16 aa, Homo Sapiens
QFKYSGPEDDAAISLA

SEQ ID NO: 89297 - protein, 16 aa, Homo Sapiens
FKYSGPEDDAAISLAF

SEQ ID NO: 89298 - protein, 16 aa, Homo Sapiens
KYSGPEDDAAISLAFS

SEQ ID NO: 89299 - protein, 16 aa, Homo Sapiens
YSGPEDDAAISLAFSK

SEQ ID NO: 89300 - protein, 16 aa, Homo Sapiens
SGPEDDAAISLAFSKK

SEQ ID NO: 89301 - protein, 16 aa, Homo Sapiens
GPEDDAAISLAFSKKQ

SEQ ID NO: 89302 - protein, 16 aa, Homo Sapiens
PEDDAAISLAFSKKQI

SEQ ID NO: 89303 - protein, 16 aa, Homo Sapiens
EDDAAISLAFSKKQID

SEQ ID NO: 89304 - protein, 16 aa, Homo Sapiens
DDAAISLAFSKKQIDD

SEQ ID NO: 89305 - protein, 16 aa, Homo Sapiens
DAAISLAFSKKQIDDR

SEQ ID NO: 89306 - protein, 16 aa, Homo Sapiens
AAISLAFSKKQIDDRK

SEQ ID NO: 89307 - protein, 16 aa, Homo Sapiens
AISLAFSKKQIDDRKE

SEQ ID NO: 89308 - protein, 16 aa, Homo Sapiens
ISLAFSKKQIDDRKEW

SEQ ID NO: 89309 - protein, 16 aa, Homo Sapiens
SLAFSKKQIDDRKEWL

SEQ ID NO: 89310 - protein, 16 aa, Homo Sapiens
LAFSKKQIDDRKEWLT

SEQ ID NO: 89311 - protein, 16 aa, Homo Sapiens
AFSKKQIDDRKEWLTN

SEQ ID NO: 89312 - protein, 16 aa, Homo Sapiens
FSKKQIDDRKEWLTNF

SEQ ID NO: 89313 - protein, 16 aa, Homo Sapiens
SKKQIDDRKEWLTNFM

SEQ ID NO: 89314 - protein, 16 aa, Homo Sapiens
KKQIDDRKEWLTNFME

SEQ ID NO: 89315 - protein, 16 aa, Homo Sapiens
KQIDDRKEWLTNFMED

SEQ ID NO: 89316 - protein, 16 aa, Homo Sapiens
QIDDRKEWLTNFMEDR

SEQ ID NO: 89317 - protein, 16 aa, Homo Sapiens
IDDRKEWLTNFMEDRR

SEQ ID NO: 89318 - protein, 16 aa, Homo Sapiens
DDRKEWLTNFMEDRRQ

SEQ ID NO: 89319 - protein, 16 aa, Homo Sapiens
DRKEWLTNFMEDRRQR

SEQ ID NO: 89320 - protein, 16 aa, Homo Sapiens
RKEWLTNFMEDRRQRK

SEQ ID NO: 89321 - protein, 16 aa, Homo Sapiens
KEWLTNFMEDRRQRKL

SEQ ID NO: 89322 - protein, 16 aa, Homo Sapiens
EWLTNFMEDRRQRKLL

SEQ ID NO: 89323 - protein, 16 aa, Homo Sapiens
WLTNFMEDRRQRKLLG

SEQ ID NO: 89324 - protein, 16 aa, Homo Sapiens
LTNFMEDRRQRKLLGL

SEQ ID NO: 89325 - protein, 16 aa, Homo Sapiens
TNFMEDRRQRKLLGLP

SEQ ID NO: 89326 - protein, 16 aa, Homo Sapiens
NFMEDRRQRKLLGLPE

SEQ ID NO: 89327 - protein, 16 aa, Homo Sapiens
FMEDRRQRKLLGLPED

SEQ ID NO: 89328 - protein, 16 aa, Homo Sapiens
MEDRRQRKLLGLPEDY

SEQ ID NO: 89329 - protein, 16 aa, Homo Sapiens
EDRRQRKLLGLPEDYL

SEQ ID NO: 89330 - protein, 16 aa, Homo Sapiens
DRRQRKLLGLPEDYLY

SEQ ID NO: 89331 - protein, 16 aa, Homo Sapiens
RRQRKLLGLPEDYLYG

SEQ ID NO: 89332 - protein, 16 aa, Homo Sapiens
RQRKLLGLPEDYLYGQ

SEQ ID NO: 89333 - protein, 16 aa, Homo Sapiens
QRKLLGLPEDYLYGQT

SEQ ID NO: 89334 - protein, 16 aa, Homo Sapiens
RKLLGLPEDYLYGQTT

SEQ ID NO: 89335 - protein, 16 aa, Homo Sapiens
KLLGLPEDYLYGQTTT

SEQ ID NO: 89336 - protein, 16 aa, Homo Sapiens
LLGLPEDYLYGQTTTY

SEQ ID NO: 89337 - protein, 16 aa, Homo Sapiens
LGLPEDYLYGQTTTYL

SEQ ID NO: 89338 - protein, 16 aa, Homo Sapiens
GLPEDYLYGQTTTYLT

SEQ ID NO: 89339 - protein, 16 aa, Homo Sapiens
LPEDYLYGQTTTYLTY

SEQ ID NO: 89340 - protein, 16 aa, Homo Sapiens
PEDYLYGQTTTYLTYN

SEQ ID NO: 89341 - protein, 16 aa, Homo Sapiens
EDYLYGQTTTYLTYND

SEQ ID NO: 89342 - protein, 16 aa, Homo Sapiens
DYLYGQTTTYLTYNDF

SEQ ID NO: 89343 - protein, 16 aa, Homo Sapiens
YLYGQTTTYLTYNDFI

SEQ ID NO: 89344 - protein, 16 aa, Homo Sapiens
LYGQTTTYLTYNDFIN

SEQ ID NO: 89345 - protein, 16 aa, Homo Sapiens
YGQTTTYLTYNDFINK

SEQ ID NO: 89346 - protein, 16 aa, Homo Sapiens
GQTTTYLTYNDFINKE

SEQ ID NO: 89347 - protein, 16 aa, Homo Sapiens
QTTTYLTYNDFINKEL

SEQ ID NO: 89348 - protein, 16 aa, Homo Sapiens
TTTYLTYNDFINKELI

SEQ ID NO: 89349 - protein, 16 aa, Homo Sapiens
TTYLTYNDFINKELIL

SEQ ID NO: 89350 - protein, 16 aa, Homo Sapiens
TYLTYNDFINKELILF

SEQ ID NO: 89351 - protein, 16 aa, Homo Sapiens
YLTYNDFINKELILFS

SEQ ID NO: 89352 - protein, 16 aa, Homo Sapiens
LTYNDFINKELILFSN

SEQ ID NO: 89353 - protein, 16 aa, Homo Sapiens
TYNDFINKELILFSNS

SEQ ID NO: 89354 - protein, 16 aa, Homo Sapiens
YNDFINKELILFSNSD

SEQ ID NO: 89355 - protein, 16 aa, Homo Sapiens
NDFINKELILFSNSDN

SEQ ID NO: 89356 - protein, 16 aa, Homo Sapiens
DFINKELILFSNSDNE

SEQ ID NO: 89357 - protein, 16 aa, Homo Sapiens
FINKELILFSNSDNER

SEQ ID NO: 89358 - protein, 16 aa, Homo Sapiens
INKELILFSNSDNERS

SEQ ID NO: 89359 - protein, 16 aa, Homo Sapiens
NKELILFSNSDNERSI

SEQ ID NO: 89360 - protein, 16 aa, Homo Sapiens
KELILFSNSDNERSIP

SEQ ID NO: 89361 - protein, 16 aa, Homo Sapiens
ELILFSNSDNERSIPS

SEQ ID NO: 89362 - protein, 16 aa, Homo Sapiens
LILFSNSDNERSIPSM

SEQ ID NO: 89363 - protein, 16 aa, Homo Sapiens
ILFSNSDNERSIPSMV

SEQ ID NO: 89364 - protein, 16 aa, Homo Sapiens
LFSNSDNERSIPSMVD

SEQ ID NO: 89365 - protein, 16 aa, Homo Sapiens
FSNSDNERSIPSMVDG

SEQ ID NO: 89366 - protein, 16 aa, Homo Sapiens
SNSDNERSIPSMVDGL

SEQ ID NO: 89367 - protein, 16 aa, Homo Sapiens
NSDNERSIPSMVDGLK

SEQ ID NO: 89368 - protein, 16 aa, Homo Sapiens
SDNERSIPSMVDGLKP

SEQ ID NO: 89369 - protein, 16 aa, Homo Sapiens
DNERSIPSMVDGLKPG

SEQ ID NO: 89370 - protein, 16 aa, Homo Sapiens
NERSIPSMVDGLKPGQ

SEQ ID NO: 89371 - protein, 16 aa, Homo Sapiens
ERSIPSMVDGLKPGQR

SEQ ID NO: 89372 - protein, 16 aa, Homo Sapiens
RSIPSMVDGLKPGQRK

SEQ ID NO: 89373 - protein, 16 aa, Homo Sapiens
SIPSMVDGLKPGQRKV

SEQ ID NO: 89374 - protein, 16 aa, Homo Sapiens
IPSMVDGLKPGQRKVL

SEQ ID NO: 89375 - protein, 16 aa, Homo Sapiens
PSMVDGLKPGQRKVLF

SEQ ID NO: 89376 - protein, 16 aa, Homo Sapiens
SMVDGLKPGQRKVLFT

SEQ ID NO: 89377 - protein, 16 aa, Homo Sapiens
MVDGLKPGQRKVLFTC

SEQ ID NO: 89378 - protein, 16 aa, Homo Sapiens
VDGLKPGQRKVLFTCF

SEQ ID NO: 89379 - protein, 16 aa, Homo Sapiens
DGLKPGQRKVLFTCFK

SEQ ID NO: 89380 - protein, 16 aa, Homo Sapiens
GLKPGQRKVLFTCFKR

SEQ ID NO: 89381 - protein, 16 aa, Homo Sapiens
LKPGQRKVLFTCFKRN

SEQ ID NO: 89382 - protein, 16 aa, Homo Sapiens
KPGQRKVLFTCFKRND

SEQ ID NO: 89383 - protein, 16 aa, Homo Sapiens
PGQRKVLFTCFKRNDK

SEQ ID NO: 89384 - protein, 16 aa, Homo Sapiens
GQRKVLFTCFKRNDKR

SEQ ID NO: 89385 - protein, 16 aa, Homo Sapiens
QRKVLFTCFKRNDKRE

SEQ ID NO: 89386 - protein, 16 aa, Homo Sapiens
RKVLFTCFKRNDKREV

SEQ ID NO: 89387 - protein, 16 aa, Homo Sapiens
KVLFTCFKRNDKREVK

SEQ ID NO: 89388 - protein, 16 aa, Homo Sapiens
VLFTCFKRNDKREVKV

SEQ ID NO: 89389 - protein, 16 aa, Homo Sapiens
LFTCFKRNDKREVKVA

SEQ ID NO: 89390 - protein, 16 aa, Homo Sapiens
FTCFKRNDKREVKVAQ

SEQ ID NO: 89391 - protein, 16 aa, Homo Sapiens
TCFKRNDKREVKVAQL

SEQ ID NO: 89392 - protein, 16 aa, Homo Sapiens
CFKRNDKREVKVAQLA

SEQ ID NO: 89393 - protein, 16 aa, Homo Sapiens
FKRNDKREVKVAQLAG

SEQ ID NO: 89394 - protein, 16 aa, Homo Sapiens
KRNDKREVKVAQLAGS

SEQ ID NO: 89395 - protein, 16 aa, Homo Sapiens
RNDKREVKVAQLAGSV

SEQ ID NO: 89396 - protein, 16 aa, Homo Sapiens
NDKREVKVAQLAGSVA

SEQ ID NO: 89397 - protein, 16 aa, Homo Sapiens
DKREVKVAQLAGSVAE

SEQ ID NO: 89398 - protein, 16 aa, Homo Sapiens
KREVKVAQLAGSVAEM

SEQ ID NO: 89399 - protein, 16 aa, Homo Sapiens
REVKVAQLAGSVAEMS

SEQ ID NO: 89400 - protein, 16 aa, Homo Sapiens
EVKVAQLAGSVAEMSS

SEQ ID NO: 89401 - protein, 16 aa, Homo Sapiens
VKVAQLAGSVAEMSSY

SEQ ID NO: 89402 - protein, 16 aa, Homo Sapiens
KVAQLAGSVAEMSSYH

SEQ ID NO: 89403 - protein, 16 aa, Homo Sapiens
VAQLAGSVAEMSSYHH

SEQ ID NO: 89404 - protein, 16 aa, Homo Sapiens
AQLAGSVAEMSSYHHG

SEQ ID NO: 89405 - protein, 16 aa, Homo Sapiens
QLAGSVAEMSSYHHGE

SEQ ID NO: 89406 - protein, 16 aa, Homo Sapiens
LAGSVAEMSSYHHGEM

SEQ ID NO: 89407 - protein, 16 aa, Homo Sapiens
AGSVAEMSSYHHGEMS

SEQ ID NO: 89408 - protein, 16 aa, Homo Sapiens
GSVAEMSSYHHGEMSL

SEQ ID NO: 89409 - protein, 16 aa, Homo Sapiens
SVAEMSSYHHGEMSLM

SEQ ID NO: 89410 - protein, 16 aa, Homo Sapiens
VAEMSSYHHGEMSLMM

SEQ ID NO: 89411 - protein, 16 aa, Homo Sapiens
AEMSSYHHGEMSLMMT

SEQ ID NO: 89412 - protein, 16 aa, Homo Sapiens
EMSSYHHGEMSLMMTI

SEQ ID NO: 89413 - protein, 16 aa, Homo Sapiens
MSSYHHGEMSLMMTII

SEQ ID NO: 89414 - protein, 16 aa, Homo Sapiens
SSYHHGEMSLMMTIIN

SEQ ID NO: 89415 - protein, 16 aa, Homo Sapiens
SYHHGEMSLMMTIINL

SEQ ID NO: 89416 - protein, 16 aa, Homo Sapiens
YHHGEMSLMMTIINLA

SEQ ID NO: 89417 - protein, 16 aa, Homo Sapiens
HHGEMSLMMTIINLAQ

SEQ ID NO: 89418 - protein, 16 aa, Homo Sapiens
HGEMSLMMTIINLAQN

SEQ ID NO: 89419 - protein, 16 aa, Homo Sapiens
GEMSLMMTIINLAQNF

SEQ ID NO: 89420 - protein, 16 aa, Homo Sapiens
EMSLMMTIINLAQNFV

SEQ ID NO: 89421 - protein, 16 aa, Homo Sapiens
MSLMMTIINLAQNFVG

SEQ ID NO: 89422 - protein, 16 aa, Homo Sapiens
SLMMTIINLAQNFVGS

SEQ ID NO: 89423 - protein, 16 aa, Homo Sapiens
LMMTIINLAQNFVGSN

SEQ ID NO: 89424 - protein, 16 aa, Homo Sapiens
MMTIINLAQNFVGSNN

SEQ ID NO: 89425 - protein, 16 aa, Homo Sapiens
MTIINLAQNFVGSNNL

SEQ ID NO: 89426 - protein, 16 aa, Homo Sapiens
TIINLAQNFVGSNNLN

SEQ ID NO: 89427 - protein, 16 aa, Homo Sapiens
IINLAQNFVGSNNLNL

SEQ ID NO: 89428 - protein, 16 aa, Homo Sapiens
INLAQNFVGSNNLNLL

SEQ ID NO: 89429 - protein, 16 aa, Homo Sapiens
NLAQNFVGSNNLNLLQ

SEQ ID NO: 89430 - protein, 16 aa, Homo Sapiens
LAQNFVGSNNLNLLQP

SEQ ID NO: 89431 - protein, 16 aa, Homo Sapiens
AQNFVGSNNLNLLQPI

SEQ ID NO: 89432 - protein, 16 aa, Homo Sapiens
QNFVGSNNLNLLQPIG

SEQ ID NO: 89433 - protein, 16 aa, Homo Sapiens
NFVGSNNLNLLQPIGQ

SEQ ID NO: 89434 - protein, 16 aa, Homo Sapiens
FVGSNNLNLLQPIGQF

SEQ ID NO: 89435 - protein, 16 aa, Homo Sapiens
VGSNNLNLLQPIGQFG

SEQ ID NO: 89436 - protein, 16 aa, Homo Sapiens
GSNNLNLLQPIGQFGT

SEQ ID NO: 89437 - protein, 16 aa, Homo Sapiens
SNNLNLLQPIGQFGTR

SEQ ID NO: 89438 - protein, 16 aa, Homo Sapiens
NNLNLLQPIGQFGTRL

SEQ ID NO: 89439 - protein, 16 aa, Homo Sapiens
NLNLLQPIGQFGTRLH

SEQ ID NO: 89440 - protein, 16 aa, Homo Sapiens
LNLLQPIGQFGTRLHG

SEQ ID NO: 89441 - protein, 16 aa, Homo Sapiens
NLLQPIGQFGTRLHGG

SEQ ID NO: 89442 - protein, 16 aa, Homo Sapiens
LLQPIGQFGTRLHGGK

SEQ ID NO: 89443 - protein, 16 aa, Homo Sapiens
LQPIGQFGTRLHGGKD

SEQ ID NO: 89444 - protein, 16 aa, Homo Sapiens
QPIGQFGTRLHGGKDS

SEQ ID NO: 89445 - protein, 16 aa, Homo Sapiens
PIGQFGTRLHGGKDSA

SEQ ID NO: 89446 - protein, 16 aa, Homo Sapiens
IGQFGTRLHGGKDSAS

SEQ ID NO: 89447 - protein, 16 aa, Homo Sapiens
GQFGTRLHGGKDSASP

SEQ ID NO: 89448 - protein, 16 aa, Homo Sapiens
QFGTRLHGGKDSASPR

SEQ ID NO: 89449 - protein, 16 aa, Homo Sapiens
FGTRLHGGKDSASPRY

SEQ ID NO: 89450 - protein, 16 aa, Homo Sapiens
GTRLHGGKDSASPRYI

SEQ ID NO: 89451 - protein, 16 aa, Homo Sapiens
TRLHGGKDSASPRYIF

SEQ ID NO: 89452 - protein, 16 aa, Homo Sapiens
RLHGGKDSASPRYIFT

SEQ ID NO: 89453 - protein, 16 aa, Homo Sapiens
LHGGKDSASPRYIFTM

SEQ ID NO: 89454 - protein, 16 aa, Homo Sapiens
HGGKDSASPRYIFTML

SEQ ID NO: 89455 - protein, 16 aa, Homo Sapiens
GGKDSASPRYIFTMLS

SEQ ID NO: 89456 - protein, 16 aa, Homo Sapiens
GKDSASPRYIFTMLSS

SEQ ID NO: 89457 - protein, 16 aa, Homo Sapiens
KDSASPRYIFTMLSSL

SEQ ID NO: 89458 - protein, 16 aa, Homo Sapiens
DSASPRYIFTMLSSLA

SEQ ID NO: 89459 - protein, 16 aa, Homo Sapiens
SASPRYIFTMLSSLAR

SEQ ID NO: 89460 - protein, 16 aa, Homo Sapiens
ASPRYIFTMLSSLARL

SEQ ID NO: 89461 - protein, 16 aa, Homo Sapiens
SPRYIFTMLSSLARLL

SEQ ID NO: 89462 - protein, 16 aa, Homo Sapiens
PRYIFTMLSSLARLLF

SEQ ID NO: 89463 - protein, 16 aa, Homo Sapiens
RYIFTMLSSLARLLFP

SEQ ID NO: 89464 - protein, 16 aa, Homo Sapiens
YIFTMLSSLARLLFPP

SEQ ID NO: 89465 - protein, 16 aa, Homo Sapiens
IFTMLSSLARLLFPPK

SEQ ID NO: 89466 - protein, 16 aa, Homo Sapiens
FTMLSSLARLLFPPKD

SEQ ID NO: 89467 - protein, 16 aa, Homo Sapiens
TMLSSLARLLFPPKDD

SEQ ID NO: 89468 - protein, 16 aa, Homo Sapiens
MLSSLARLLFPPKDDH

SEQ ID NO: 89469 - protein, 16 aa, Homo Sapiens
LSSLARLLFPPKDDHT

SEQ ID NO: 89470 - protein, 16 aa, Homo Sapiens
SSLARLLFPPKDDHTL

SEQ ID NO: 89471 - protein, 16 aa, Homo Sapiens
SLARLLFPPKDDHTLK

SEQ ID NO: 89472 - protein, 16 aa, Homo Sapiens
LARLLFPPKDDHTLKF

SEQ ID NO: 89473 - protein, 16 aa, Homo Sapiens
ARLLFPPKDDHTLKFL

SEQ ID NO: 89474 - protein, 16 aa, Homo Sapiens
RLLFPPKDDHTLKFLY

SEQ ID NO: 89475 - protein, 16 aa, Homo Sapiens
LLFPPKDDHTLKFLYD

SEQ ID NO: 89476 - protein, 16 aa, Homo Sapiens
LFPPKDDHTLKFLYDD

SEQ ID NO: 89477 - protein, 16 aa, Homo Sapiens
FPPKDDHTLKFLYDDN

SEQ ID NO: 89478 - protein, 16 aa, Homo Sapiens
PPKDDHTLKFLYDDNQ

SEQ ID NO: 89479 - protein, 16 aa, Homo Sapiens
PKDDHTLKFLYDDNQR

SEQ ID NO: 89480 - protein, 16 aa, Homo Sapiens
KDDHTLKFLYDDNQRV

SEQ ID NO: 89481 - protein, 16 aa, Homo Sapiens
DDHTLKFLYDDNQRVE

SEQ ID NO: 89482 - protein, 16 aa, Homo Sapiens
DHTLKFLYDDNQRVEP

SEQ ID NO: 89483 - protein, 16 aa, Homo Sapiens
HTLKFLYDDNQRVEPE

SEQ ID NO: 89484 - protein, 16 aa, Homo Sapiens
TLKFLYDDNQRVEPEW

SEQ ID NO: 89485 - protein, 16 aa, Homo Sapiens
LKFLYDDNQRVEPEWY

SEQ ID NO: 89486 - protein, 16 aa, Homo Sapiens
KFLYDDNQRVEPEWYI

SEQ ID NO: 89487 - protein, 16 aa, Homo Sapiens
FLYDDNQRVEPEWYIP

SEQ ID NO: 89488 - protein, 16 aa, Homo Sapiens
LYDDNQRVEPEWYIPI

SEQ ID NO: 89489 - protein, 16 aa, Homo Sapiens
YDDNQRVEPEWYIPII

SEQ ID NO: 89490 - protein, 16 aa, Homo Sapiens
DDNQRVEPEWYIPIIP

SEQ ID NO: 89491 - protein, 16 aa, Homo Sapiens
DNQRVEPEWYIPIIPM

SEQ ID NO: 89492 - protein, 16 aa, Homo Sapiens
NQRVEPEWYIPIIPMV

SEQ ID NO: 89493 - protein, 16 aa, Homo Sapiens
QRVEPEWYIPIIPMVL

SEQ ID NO: 89494 - protein, 16 aa, Homo Sapiens
RVEPEWYIPIIPMVLI

SEQ ID NO: 89495 - protein, 16 aa, Homo Sapiens
VEPEWYIPIIPMVLIN

SEQ ID NO: 89496 - protein, 16 aa, Homo Sapiens
EPEWYIPIIPMVLING

SEQ ID NO: 89497 - protein, 16 aa, Homo Sapiens
PEWYIPIIPMVLINGA

SEQ ID NO: 89498 - protein, 16 aa, Homo Sapiens
EWYIPIIPMVLINGAE

SEQ ID NO: 89499 - protein, 16 aa, Homo Sapiens
WYIPIIPMVLINGAEG

SEQ ID NO: 89500 - protein, 16 aa, Homo Sapiens
YIPIIPMVLINGAEGI

SEQ ID NO: 89501 - protein, 16 aa, Homo Sapiens
IPIIPMVLINGAEGIG

SEQ ID NO: 89502 - protein, 16 aa, Homo Sapiens
PIIPMVLINGAEGIGT

SEQ ID NO: 89503 - protein, 16 aa, Homo Sapiens
IIPMVLINGAEGIGTG

SEQ ID NO: 89504 - protein, 16 aa, Homo Sapiens
IPMVLINGAEGIGTGW

SEQ ID NO: 89505 - protein, 16 aa, Homo Sapiens
PMVLINGAEGIGTGWS

SEQ ID NO: 89506 - protein, 16 aa, Homo Sapiens
MVLINGAEGIGTGWSC

SEQ ID NO: 89507 - protein, 16 aa, Homo Sapiens
VLINGAEGIGTGWSCK

SEQ ID NO: 89508 - protein, 16 aa, Homo Sapiens
LINGAEGIGTGWSCKI

SEQ ID NO: 89509 - protein, 16 aa, Homo Sapiens
INGAEGIGTGWSCKIP

SEQ ID NO: 89510 - protein, 16 aa, Homo Sapiens
NGAEGIGTGWSCKIPN

SEQ ID NO: 89511 - protein, 16 aa, Homo Sapiens
GAEGIGTGWSCKIPNF

SEQ ID NO: 89512 - protein, 16 aa, Homo Sapiens
AEGIGTGWSCKIPNFD

SEQ ID NO: 89513 - protein, 16 aa, Homo Sapiens
EGIGTGWSCKIPNFDV

SEQ ID NO: 89514 - protein, 16 aa, Homo Sapiens
GIGTGWSCKIPNFDVR

SEQ ID NO: 89515 - protein, 16 aa, Homo Sapiens
IGTGWSCKIPNFDVRE

SEQ ID NO: 89516 - protein, 16 aa, Homo Sapiens
GTGWSCKIPNFDVREI

SEQ ID NO: 89517 - protein, 16 aa, Homo Sapiens
TGWSCKIPNFDVREIV

SEQ ID NO: 89518 - protein, 16 aa, Homo Sapiens
GWSCKIPNFDVREIVN

SEQ ID NO: 89519 - protein, 16 aa, Homo Sapiens
WSCKIPNFDVREIVNN

SEQ ID NO: 89520 - protein, 16 aa, Homo Sapiens
SCKIPNFDVREIVNNI

SEQ ID NO: 89521 - protein, 16 aa, Homo Sapiens
CKIPNFDVREIVNNIR

SEQ ID NO: 89522 - protein, 16 aa, Homo Sapiens
KIPNFDVREIVNNIRR

SEQ ID NO: 89523 - protein, 16 aa, Homo Sapiens
IPNFDVREIVNNIRRL

SEQ ID NO: 89524 - protein, 16 aa, Homo Sapiens
PNFDVREIVNNIRRLM

SEQ ID NO: 89525 - protein, 16 aa, Homo Sapiens
NFDVREIVNNIRRLMD

SEQ ID NO: 89526 - protein, 16 aa, Homo Sapiens
FDVREIVNNIRRLMDG

SEQ ID NO: 89527 - protein, 16 aa, Homo Sapiens
DVREIVNNIRRLMDGE

SEQ ID NO: 89528 - protein, 16 aa, Homo Sapiens
VREIVNNIRRLMDGEE

SEQ ID NO: 89529 - protein, 16 aa, Homo Sapiens
REIVNNIRRLMDGEEP

SEQ ID NO: 89530 - protein, 16 aa, Homo Sapiens
EIVNNIRRLMDGEEPL

SEQ ID NO: 89531 - protein, 16 aa, Homo Sapiens
IVNNIRRLMDGEEPLP

SEQ ID NO: 89532 - protein, 16 aa, Homo Sapiens
VNNIRRLMDGEEPLPM

SEQ ID NO: 89533 - protein, 16 aa, Homo Sapiens
NNIRRLMDGEEPLPML

SEQ ID NO: 89534 - protein, 16 aa, Homo Sapiens
NIRRLMDGEEPLPMLP

SEQ ID NO: 89535 - protein, 16 aa, Homo Sapiens
IRRLMDGEEPLPMLPS

SEQ ID NO: 89536 - protein, 16 aa, Homo Sapiens
RRLMDGEEPLPMLPSY

SEQ ID NO: 89537 - protein, 16 aa, Homo Sapiens
RLMDGEEPLPMLPSYK

SEQ ID NO: 89538 - protein, 16 aa, Homo Sapiens
LMDGEEPLPMLPSYKN

SEQ ID NO: 89539 - protein, 16 aa, Homo Sapiens
MDGEEPLPMLPSYKNF

SEQ ID NO: 89540 - protein, 16 aa, Homo Sapiens
DGEEPLPMLPSYKNFK

SEQ ID NO: 89541 - protein, 16 aa, Homo Sapiens
GEEPLPMLPSYKNFKG

SEQ ID NO: 89542 - protein, 16 aa, Homo Sapiens
EEPLPMLPSYKNFKGT

SEQ ID NO: 89543 - protein, 16 aa, Homo Sapiens
EPLPMLPSYKNFKGTI

SEQ ID NO: 89544 - protein, 16 aa, Homo Sapiens
PLPMLPSYKNFKGTIE

SEQ ID NO: 89545 - protein, 16 aa, Homo Sapiens
LPMLPSYKNFKGTIEE

SEQ ID NO: 89546 - protein, 16 aa, Homo Sapiens
PMLPSYKNFKGTIEEL

SEQ ID NO: 89547 - protein, 16 aa, Homo Sapiens
MLPSYKNFKGTIEELA

SEQ ID NO: 89548 - protein, 16 aa, Homo Sapiens
LPSYKNFKGTIEELAP

SEQ ID NO: 89549 - protein, 16 aa, Homo Sapiens
PSYKNFKGTIEELAPN

SEQ ID NO: 89550 - protein, 16 aa, Homo Sapiens
SYKNFKGTIEELAPNQ

SEQ ID NO: 89551 - protein, 16 aa, Homo Sapiens
YKNFKGTIEELAPNQY

SEQ ID NO: 89552 - protein, 16 aa, Homo Sapiens
KNFKGTIEELAPNQYV

SEQ ID NO: 89553 - protein, 16 aa, Homo Sapiens
NFKGTIEELAPNQYVI

SEQ ID NO: 89554 - protein, 16 aa, Homo Sapiens
FKGTIEELAPNQYVIS

SEQ ID NO: 89555 - protein, 16 aa, Homo Sapiens
KGTIEELAPNQYVISG

SEQ ID NO: 89556 - protein, 16 aa, Homo Sapiens
GTIEELAPNQYVISGE

SEQ ID NO: 89557 - protein, 16 aa, Homo Sapiens
TIEELAPNQYVISGEV

SEQ ID NO: 89558 - protein, 16 aa, Homo Sapiens
IEELAPNQYVISGEVA

SEQ ID NO: 89559 - protein, 16 aa, Homo Sapiens
EELAPNQYVISGEVAI

SEQ ID NO: 89560 - protein, 16 aa, Homo Sapiens
ELAPNQYVISGEVAIL

SEQ ID NO: 89561 - protein, 16 aa, Homo Sapiens
LAPNQYVISGEVAILN

SEQ ID NO: 89562 - protein, 16 aa, Homo Sapiens
APNQYVISGEVAILNS

SEQ ID NO: 89563 - protein, 16 aa, Homo Sapiens
PNQYVISGEVAILNST

SEQ ID NO: 89564 - protein, 16 aa, Homo Sapiens
NQYVISGEVAILNSTT

SEQ ID NO: 89565 - protein, 16 aa, Homo Sapiens
QYVISGEVAILNSTTI

SEQ ID NO: 89566 - protein, 16 aa, Homo Sapiens
YVISGEVAILNSTTIE

SEQ ID NO: 89567 - protein, 16 aa, Homo Sapiens
VISGEVAILNSTTIEI

SEQ ID NO: 89568 - protein, 16 aa, Homo Sapiens
ISGEVAILNSTTIEIS

SEQ ID NO: 89569 - protein, 16 aa, Homo Sapiens
SGEVAILNSTTIEISE

SEQ ID NO: 89570 - protein, 16 aa, Homo Sapiens
GEVAILNSTTIEISEL

SEQ ID NO: 89571 - protein, 16 aa, Homo Sapiens
EVAILNSTTIEISELP

SEQ ID NO: 89572 - protein, 16 aa, Homo Sapiens
VAILNSTTIEISELPV

SEQ ID NO: 89573 - protein, 16 aa, Homo Sapiens
AILNSTTIEISELPVR

SEQ ID NO: 89574 - protein, 16 aa, Homo Sapiens
ILNSTTIEISELPVRT

SEQ ID NO: 89575 - protein, 16 aa, Homo Sapiens
LNSTTIEISELPVRTW

SEQ ID NO: 89576 - protein, 16 aa, Homo Sapiens
NSTTIEISELPVRTWT

SEQ ID NO: 89577 - protein, 16 aa, Homo Sapiens
STTIEISELPVRTWTQ

SEQ ID NO: 89578 - protein, 16 aa, Homo Sapiens
TTIEISELPVRTWTQT

SEQ ID NO: 89579 - protein, 16 aa, Homo Sapiens
TIEISELPVRTWTQTY

SEQ ID NO: 89580 - protein, 16 aa, Homo Sapiens
IEISELPVRTWTQTYK

SEQ ID NO: 89581 - protein, 16 aa, Homo Sapiens
EISELPVRTWTQTYKE

SEQ ID NO: 89582 - protein, 16 aa, Homo Sapiens
ISELPVRTWTQTYKEQ

SEQ ID NO: 89583 - protein, 16 aa, Homo Sapiens
SELPVRTWTQTYKEQV

SEQ ID NO: 89584 - protein, 16 aa, Homo Sapiens
ELPVRTWTQTYKEQVL

SEQ ID NO: 89585 - protein, 16 aa, Homo Sapiens
LPVRTWTQTYKEQVLE

SEQ ID NO: 89586 - protein, 16 aa, Homo Sapiens
PVRTWTQTYKEQVLEP

SEQ ID NO: 89587 - protein, 16 aa, Homo Sapiens
VRTWTQTYKEQVLEPM

SEQ ID NO: 89588 - protein, 16 aa, Homo Sapiens
RTWTQTYKEQVLEPML

SEQ ID NO: 89589 - protein, 16 aa, Homo Sapiens
TWTQTYKEQVLEPMLN

SEQ ID NO: 89590 - protein, 16 aa, Homo Sapiens
WTQTYKEQVLEPMLNG

SEQ ID NO: 89591 - protein, 16 aa, Homo Sapiens
TQTYKEQVLEPMLNGT

SEQ ID NO: 89592 - protein, 16 aa, Homo Sapiens
QTYKEQVLEPMLNGTE

SEQ ID NO: 89593 - protein, 16 aa, Homo Sapiens
TYKEQVLEPMLNGTEK

SEQ ID NO: 89594 - protein, 16 aa, Homo Sapiens
YKEQVLEPMLNGTEKT

SEQ ID NO: 89595 - protein, 16 aa, Homo Sapiens
KEQVLEPMLNGTEKTP

SEQ ID NO: 89596 - protein, 16 aa, Homo Sapiens
EQVLEPMLNGTEKTPP

SEQ ID NO: 89597 - protein, 16 aa, Homo Sapiens
QVLEPMLNGTEKTPPL

SEQ ID NO: 89598 - protein, 16 aa, Homo Sapiens
VLEPMLNGTEKTPPLI

SEQ ID NO: 89599 - protein, 16 aa, Homo Sapiens
LEPMLNGTEKTPPLIT

SEQ ID NO: 89600 - protein, 16 aa, Homo Sapiens
EPMLNGTEKTPPLITD

SEQ ID NO: 89601 - protein, 16 aa, Homo Sapiens
PMLNGTEKTPPLITDY

SEQ ID NO: 89602 - protein, 16 aa, Homo Sapiens
MLNGTEKTPPLITDYR

SEQ ID NO: 89603 - protein, 16 aa, Homo Sapiens
LNGTEKTPPLITDYRE

SEQ ID NO: 89604 - protein, 16 aa, Homo Sapiens
NGTEKTPPLITDYREY

SEQ ID NO: 89605 - protein, 16 aa, Homo Sapiens
GTEKTPPLITDYREYH

SEQ ID NO: 89606 - protein, 16 aa, Homo Sapiens
TEKTPPLITDYREYHT

SEQ ID NO: 89607 - protein, 16 aa, Homo Sapiens
EKTPPLITDYREYHTD

SEQ ID NO: 89608 - protein, 16 aa, Homo Sapiens
KTPPLITDYREYHTDT

SEQ ID NO: 89609 - protein, 16 aa, Homo Sapiens
TPPLITDYREYHTDTT

SEQ ID NO: 89610 - protein, 16 aa, Homo Sapiens
PPLITDYREYHTDTTV

SEQ ID NO: 89611 - protein, 16 aa, Homo Sapiens
PLITDYREYHTDTTVK

SEQ ID NO: 89612 - protein, 16 aa, Homo Sapiens
LITDYREYHTDTTVKF

SEQ ID NO: 89613 - protein, 16 aa, Homo Sapiens
ITDYREYHTDTTVKFV

SEQ ID NO: 89614 - protein, 16 aa, Homo Sapiens
TDYREYHTDTTVKFVV

SEQ ID NO: 89615 - protein, 16 aa, Homo Sapiens
DYREYHTDTTVKFVVK

SEQ ID NO: 89616 - protein, 16 aa, Homo Sapiens
YREYHTDTTVKFVVKM

SEQ ID NO: 89617 - protein, 16 aa, Homo Sapiens
REYHTDTTVKFVVKMT

SEQ ID NO: 89618 - protein, 16 aa, Homo Sapiens
EYHTDTTVKFVVKMTE

SEQ ID NO: 89619 - protein, 16 aa, Homo Sapiens
YHTDTTVKFVVKMTEE

SEQ ID NO: 89620 - protein, 16 aa, Homo Sapiens
HTDTTVKFVVKMTEEK

SEQ ID NO: 89621 - protein, 16 aa, Homo Sapiens
TDTTVKFVVKMTEEKL

SEQ ID NO: 89622 - protein, 16 aa, Homo Sapiens
DTTVKFVVKMTEEKLA

SEQ ID NO: 89623 - protein, 16 aa, Homo Sapiens
TTVKFVVKMTEEKLAE

SEQ ID NO: 89624 - protein, 16 aa, Homo Sapiens
TVKFVVKMTEEKLAEA

SEQ ID NO: 89625 - protein, 16 aa, Homo Sapiens
VKFVVKMTEEKLAEAE

SEQ ID NO: 89626 - protein, 16 aa, Homo Sapiens
KFVVKMTEEKLAEAER

SEQ ID NO: 89627 - protein, 16 aa, Homo Sapiens
FVVKMTEEKLAEAERV

SEQ ID NO: 89628 - protein, 16 aa, Homo Sapiens
VVKMTEEKLAEAERVG

SEQ ID NO: 89629 - protein, 16 aa, Homo Sapiens
VKMTEEKLAEAERVGL

SEQ ID NO: 89630 - protein, 16 aa, Homo Sapiens
KMTEEKLAEAERVGLH

SEQ ID NO: 89631 - protein, 16 aa, Homo Sapiens
MTEEKLAEAERVGLHK

SEQ ID NO: 89632 - protein, 16 aa, Homo Sapiens
TEEKLAEAERVGLHKV

SEQ ID NO: 89633 - protein, 16 aa, Homo Sapiens
EEKLAEAERVGLHKVF

SEQ ID NO: 89634 - protein, 16 aa, Homo Sapiens
EKLAEAERVGLHKVFK

SEQ ID NO: 89635 - protein, 16 aa, Homo Sapiens
KLAEAERVGLHKVFKL

SEQ ID NO: 89636 - protein, 16 aa, Homo Sapiens
LAEAERVGLHKVFKLQ

SEQ ID NO: 89637 - protein, 16 aa, Homo Sapiens
AEAERVGLHKVFKLQT

SEQ ID NO: 89638 - protein, 16 aa, Homo Sapiens
EAERVGLHKVFKLQTS

SEQ ID NO: 89639 - protein, 16 aa, Homo Sapiens
AERVGLHKVFKLQTSL

SEQ ID NO: 89640 - protein, 16 aa, Homo Sapiens
ERVGLHKVFKLQTSLT

SEQ ID NO: 89641 - protein, 16 aa, Homo Sapiens
RVGLHKVFKLQTSLTC

SEQ ID NO: 89642 - protein, 16 aa, Homo Sapiens
VGLHKVFKLQTSLTCN

SEQ ID NO: 89643 - protein, 16 aa, Homo Sapiens
GLHKVFKLQTSLTCNS

SEQ ID NO: 89644 - protein, 16 aa, Homo Sapiens
LHKVFKLQTSLTCNSM

SEQ ID NO: 89645 - protein, 16 aa, Homo Sapiens
HKVFKLQTSLTCNSMV

SEQ ID NO: 89646 - protein, 16 aa, Homo Sapiens
KVFKLQTSLTCNSMVL

SEQ ID NO: 89647 - protein, 16 aa, Homo Sapiens
VFKLQTSLTCNSMVLF

SEQ ID NO: 89648 - protein, 16 aa, Homo Sapiens
FKLQTSLTCNSMVLFD

SEQ ID NO: 89649 - protein, 16 aa, Homo Sapiens
KLQTSLTCNSMVLFDH

SEQ ID NO: 89650 - protein, 16 aa, Homo Sapiens
LQTSLTCNSMVLFDHV

SEQ ID NO: 89651 - protein, 16 aa, Homo Sapiens
QTSLTCNSMVLFDHVG

SEQ ID NO: 89652 - protein, 16 aa, Homo Sapiens
TSLTCNSMVLFDHVGC

SEQ ID NO: 89653 - protein, 16 aa, Homo Sapiens
SLTCNSMVLFDHVGCL

SEQ ID NO: 89654 - protein, 16 aa, Homo Sapiens
LTCNSMVLFDHVGCLK

SEQ ID NO: 89655 - protein, 16 aa, Homo Sapiens
TCNSMVLFDHVGCLKK

SEQ ID NO: 89656 - protein, 16 aa, Homo Sapiens
CNSMVLFDHVGCLKKY

SEQ ID NO: 89657 - protein, 16 aa, Homo Sapiens
NSMVLFDHVGCLKKYD

SEQ ID NO: 89658 - protein, 16 aa, Homo Sapiens
SMVLFDHVGCLKKYDT

SEQ ID NO: 89659 - protein, 16 aa, Homo Sapiens
MVLFDHVGCLKKYDTV

SEQ ID NO: 89660 - protein, 16 aa, Homo Sapiens
VLFDHVGCLKKYDTVL

SEQ ID NO: 89661 - protein, 16 aa, Homo Sapiens
LFDHVGCLKKYDTVLD

SEQ ID NO: 89662 - protein, 16 aa, Homo Sapiens
FDHVGCLKKYDTVLDI

SEQ ID NO: 89663 - protein, 16 aa, Homo Sapiens
DHVGCLKKYDTVLDIL

SEQ ID NO: 89664 - protein, 16 aa, Homo Sapiens
HVGCLKKYDTVLDILR

SEQ ID NO: 89665 - protein, 16 aa, Homo Sapiens
VGCLKKYDTVLDILRD

SEQ ID NO: 89666 - protein, 16 aa, Homo Sapiens
GCLKKYDTVLDILRDF

SEQ ID NO: 89667 - protein, 16 aa, Homo Sapiens
CLKKYDTVLDILRDFF

SEQ ID NO: 89668 - protein, 16 aa, Homo Sapiens
LKKYDTVLDILRDFFE

SEQ ID NO: 89669 - protein, 16 aa, Homo Sapiens
KKYDTVLDILRDFFEL

SEQ ID NO: 89670 - protein, 16 aa, Homo Sapiens
KYDTVLDILRDFFELR

SEQ ID NO: 89671 - protein, 16 aa, Homo Sapiens
YDTVLDILRDFFELRL

SEQ ID NO: 89672 - protein, 16 aa, Homo Sapiens
DTVLDILRDFFELRLK

SEQ ID NO: 89673 - protein, 16 aa, Homo Sapiens
TVLDILRDFFELRLKY

SEQ ID NO: 89674 - protein, 16 aa, Homo Sapiens
VLDILRDFFELRLKYY

SEQ ID NO: 89675 - protein, 16 aa, Homo Sapiens
LDILRDFFELRLKYYG

SEQ ID NO: 89676 - protein, 16 aa, Homo Sapiens
DILRDFFELRLKYYGL

SEQ ID NO: 89677 - protein, 16 aa, Homo Sapiens
ILRDFFELRLKYYGLR

SEQ ID NO: 89678 - protein, 16 aa, Homo Sapiens
LRDFFELRLKYYGLRK

SEQ ID NO: 89679 - protein, 16 aa, Homo Sapiens
RDFFELRLKYYGLRKE

SEQ ID NO: 89680 - protein, 16 aa, Homo Sapiens
DFFELRLKYYGLRKEW

SEQ ID NO: 89681 - protein, 16 aa, Homo Sapiens
FFELRLKYYGLRKEWL

SEQ ID NO: 89682 - protein, 16 aa, Homo Sapiens
FELRLKYYGLRKEWLL

SEQ ID NO: 89683 - protein, 16 aa, Homo Sapiens
ELRLKYYGLRKEWLLG

SEQ ID NO: 89684 - protein, 16 aa, Homo Sapiens
LRLKYYGLRKEWLLGM

SEQ ID NO: 89685 - protein, 16 aa, Homo Sapiens
RLKYYGLRKEWLLGML

SEQ ID NO: 89686 - protein, 16 aa, Homo Sapiens
LKYYGLRKEWLLGMLG

SEQ ID NO: 89687 - protein, 16 aa, Homo Sapiens
KYYGLRKEWLLGMLGA

SEQ ID NO: 89688 - protein, 16 aa, Homo Sapiens
YYGLRKEWLLGMLGAE

SEQ ID NO: 89689 - protein, 16 aa, Homo Sapiens
YGLRKEWLLGMLGAES

SEQ ID NO: 89690 - protein, 16 aa, Homo Sapiens
GLRKEWLLGMLGAESA

SEQ ID NO: 89691 - protein, 16 aa, Homo Sapiens
LRKEWLLGMLGAESAK

SEQ ID NO: 89692 - protein, 16 aa, Homo Sapiens
RKEWLLGMLGAESAKL

SEQ ID NO: 89693 - protein, 16 aa, Homo Sapiens
KEWLLGMLGAESAKLN

SEQ ID NO: 89694 - protein, 16 aa, Homo Sapiens
EWLLGMLGAESAKLNN

SEQ ID NO: 89695 - protein, 16 aa, Homo Sapiens
WLLGMLGAESAKLNNQ

SEQ ID NO: 89696 - protein, 16 aa, Homo Sapiens
LLGMLGAESAKLNNQA

SEQ ID NO: 89697 - protein, 16 aa, Homo Sapiens
LGMLGAESAKLNNQAR

SEQ ID NO: 89698 - protein, 16 aa, Homo Sapiens
GMLGAESAKLNNQARF

SEQ ID NO: 89699 - protein, 16 aa, Homo Sapiens
MLGAESAKLNNQARFI

SEQ ID NO: 89700 - protein, 16 aa, Homo Sapiens
LGAESAKLNNQARFIL

SEQ ID NO: 89701 - protein, 16 aa, Homo Sapiens
GAESAKLNNQARFILE

SEQ ID NO: 89702 - protein, 16 aa, Homo Sapiens
AESAKLNNQARFILEK

SEQ ID NO: 89703 - protein, 16 aa, Homo Sapiens
ESAKLNNQARFILEKI

SEQ ID NO: 89704 - protein, 16 aa, Homo Sapiens
SAKLNNQARFILEKID

SEQ ID NO: 89705 - protein, 16 aa, Homo Sapiens
AKLNNQARFILEKIDG

SEQ ID NO: 89706 - protein, 16 aa, Homo Sapiens
KLNNQARFILEKIDGK

SEQ ID NO: 89707 - protein, 16 aa, Homo Sapiens
LNNQARFILEKIDGKI

SEQ ID NO: 89708 - protein, 16 aa, Homo Sapiens
NNQARFILEKIDGKII

SEQ ID NO: 89709 - protein, 16 aa, Homo Sapiens
NQARFILEKIDGKIII

SEQ ID NO: 89710 - protein, 16 aa, Homo Sapiens
QARFILEKIDGKIIIE

SEQ ID NO: 89711 - protein, 16 aa, Homo Sapiens
ARFILEKIDGKIIIEN

SEQ ID NO: 89712 - protein, 16 aa, Homo Sapiens
RFILEKIDGKIIIENK

SEQ ID NO: 89713 - protein, 16 aa, Homo Sapiens
FILEKIDGKIIIENKP

SEQ ID NO: 89714 - protein, 16 aa, Homo Sapiens
ILEKIDGKIIIENKPK

SEQ ID NO: 89715 - protein, 16 aa, Homo Sapiens
LEKIDGKIIIENKPKK

SEQ ID NO: 89716 - protein, 16 aa, Homo Sapiens
EKIDGKIIIENKPKKE

SEQ ID NO: 89717 - protein, 16 aa, Homo Sapiens
KIDGKIIIENKPKKEL

SEQ ID NO: 89718 - protein, 16 aa, Homo Sapiens
IDGKIIIENKPKKELI

SEQ ID NO: 89719 - protein, 16 aa, Homo Sapiens
DGKIIIENKPKKELIK

SEQ ID NO: 89720 - protein, 16 aa, Homo Sapiens
GKIIIENKPKKELIKV

SEQ ID NO: 89721 - protein, 16 aa, Homo Sapiens
KIIIENKPKKELIKVL

SEQ ID NO: 89722 - protein, 16 aa, Homo Sapiens
IIIENKPKKELIKVLI

SEQ ID NO: 89723 - protein, 16 aa, Homo Sapiens
IIENKPKKELIKVLIQ

SEQ ID NO: 89724 - protein, 16 aa, Homo Sapiens
IENKPKKELIKVLIQR

SEQ ID NO: 89725 - protein, 16 aa, Homo Sapiens
ENKPKKELIKVLIQRG

SEQ ID NO: 89726 - protein, 16 aa, Homo Sapiens
NKPKKELIKVLIQRGY

SEQ ID NO: 89727 - protein, 16 aa, Homo Sapiens
KPKKELIKVLIQRGYD

SEQ ID NO: 89728 - protein, 16 aa, Homo Sapiens
PKKELIKVLIQRGYDS

SEQ ID NO: 89729 - protein, 16 aa, Homo Sapiens
KKELIKVLIQRGYDSD

SEQ ID NO: 89730 - protein, 16 aa, Homo Sapiens
KELIKVLIQRGYDSDP

SEQ ID NO: 89731 - protein, 16 aa, Homo Sapiens
ELIKVLIQRGYDSDPV

SEQ ID NO: 89732 - protein, 16 aa, Homo Sapiens
LIKVLIQRGYDSDPVK

SEQ ID NO: 89733 - protein, 16 aa, Homo Sapiens
IKVLIQRGYDSDPVKA

SEQ ID NO: 89734 - protein, 16 aa, Homo Sapiens
KVLIQRGYDSDPVKAW

SEQ ID NO: 89735 - protein, 16 aa, Homo Sapiens
VLIQRGYDSDPVKAWK

SEQ ID NO: 89736 - protein, 16 aa, Homo Sapiens
LIQRGYDSDPVKAWKE

SEQ ID NO: 89737 - protein, 16 aa, Homo Sapiens
IQRGYDSDPVKAWKEA

SEQ ID NO: 89738 - protein, 16 aa, Homo Sapiens
QRGYDSDPVKAWKEAQ

SEQ ID NO: 89739 - protein, 16 aa, Homo Sapiens
RGYDSDPVKAWKEAQQ

SEQ ID NO: 89740 - protein, 16 aa, Homo Sapiens
GYDSDPVKAWKEAQQK

SEQ ID NO: 89741 - protein, 16 aa, Homo Sapiens
YDSDPVKAWKEAQQKV

SEQ ID NO: 89742 - protein, 16 aa, Homo Sapiens
DSDPVKAWKEAQQKVP

SEQ ID NO: 89743 - protein, 16 aa, Homo Sapiens
SDPVKAWKEAQQKVPD

SEQ ID NO: 89744 - protein, 16 aa, Homo Sapiens
DPVKAWKEAQQKVPDE

SEQ ID NO: 89745 - protein, 16 aa, Homo Sapiens
PVKAWKEAQQKVPDEE

SEQ ID NO: 89746 - protein, 16 aa, Homo Sapiens
VKAWKEAQQKVPDEEE

SEQ ID NO: 89747 - protein, 16 aa, Homo Sapiens
KAWKEAQQKVPDEEEN

SEQ ID NO: 89748 - protein, 16 aa, Homo Sapiens
AWKEAQQKVPDEEENE

SEQ ID NO: 89749 - protein, 16 aa, Homo Sapiens
WKEAQQKVPDEEENEE

SEQ ID NO: 89750 - protein, 16 aa, Homo Sapiens
KEAQQKVPDEEENEES

SEQ ID NO: 89751 - protein, 16 aa, Homo Sapiens
EAQQKVPDEEENEESD

SEQ ID NO: 89752 - protein, 16 aa, Homo Sapiens
AQQKVPDEEENEESDN

SEQ ID NO: 89753 - protein, 16 aa, Homo Sapiens
QQKVPDEEENEESDNE

SEQ ID NO: 89754 - protein, 16 aa, Homo Sapiens
QKVPDEEENEESDNEK

SEQ ID NO: 89755 - protein, 16 aa, Homo Sapiens
KVPDEEENEESDNEKE

SEQ ID NO: 89756 - protein, 16 aa, Homo Sapiens
VPDEEENEESDNEKET

SEQ ID NO: 89757 - protein, 16 aa, Homo Sapiens
PDEEENEESDNEKETE

SEQ ID NO: 89758 - protein, 16 aa, Homo Sapiens
DEEENEESDNEKETEK

SEQ ID NO: 89759 - protein, 16 aa, Homo Sapiens
EEENEESDNEKETEKS

SEQ ID NO: 89760 - protein, 16 aa, Homo Sapiens
EENEESDNEKETEKSD

SEQ ID NO: 89761 - protein, 16 aa, Homo Sapiens
ENEESDNEKETEKSDS

SEQ ID NO: 89762 - protein, 16 aa, Homo Sapiens
NEESDNEKETEKSDSV

SEQ ID NO: 89763 - protein, 16 aa, Homo Sapiens
EESDNEKETEKSDSVT

SEQ ID NO: 89764 - protein, 16 aa, Homo Sapiens
ESDNEKETEKSDSVTD

SEQ ID NO: 89765 - protein, 16 aa, Homo Sapiens
SDNEKETEKSDSVTDS

SEQ ID NO: 89766 - protein, 16 aa, Homo Sapiens
DNEKETEKSDSVTDSG

SEQ ID NO: 89767 - protein, 16 aa, Homo Sapiens
NEKETEKSDSVTDSGP

SEQ ID NO: 89768 - protein, 16 aa, Homo Sapiens
EKETEKSDSVTDSGPT

SEQ ID NO: 89769 - protein, 16 aa, Homo Sapiens
KETEKSDSVTDSGPTF

SEQ ID NO: 89770 - protein, 16 aa, Homo Sapiens
ETEKSDSVTDSGPTFN

SEQ ID NO: 89771 - protein, 16 aa, Homo Sapiens
TEKSDSVTDSGPTFNY

SEQ ID NO: 89772 - protein, 16 aa, Homo Sapiens
EKSDSVTDSGPTFNYL

SEQ ID NO: 89773 - protein, 16 aa, Homo Sapiens
KSDSVTDSGPTFNYLL

SEQ ID NO: 89774 - protein, 16 aa, Homo Sapiens
SDSVTDSGPTFNYLLD

SEQ ID NO: 89775 - protein, 16 aa, Homo Sapiens
DSVTDSGPTFNYLLDM

SEQ ID NO: 89776 - protein, 16 aa, Homo Sapiens
SVTDSGPTFNYLLDMP

SEQ ID NO: 89777 - protein, 16 aa, Homo Sapiens
VTDSGPTFNYLLDMPL

SEQ ID NO: 89778 - protein, 16 aa, Homo Sapiens
TDSGPTFNYLLDMPLW

SEQ ID NO: 89779 - protein, 16 aa, Homo Sapiens
DSGPTFNYLLDMPLWY

SEQ ID NO: 89780 - protein, 16 aa, Homo Sapiens
SGPTFNYLLDMPLWYL

SEQ ID NO: 89781 - protein, 16 aa, Homo Sapiens
GPTFNYLLDMPLWYLT

SEQ ID NO: 89782 - protein, 16 aa, Homo Sapiens
PTFNYLLDMPLWYLTK

SEQ ID NO: 89783 - protein, 16 aa, Homo Sapiens
TFNYLLDMPLWYLTKE

SEQ ID NO: 89784 - protein, 16 aa, Homo Sapiens
FNYLLDMPLWYLTKEK

SEQ ID NO: 89785 - protein, 16 aa, Homo Sapiens
NYLLDMPLWYLTKEKK

SEQ ID NO: 89786 - protein, 16 aa, Homo Sapiens
YLLDMPLWYLTKEKKD

SEQ ID NO: 89787 - protein, 16 aa, Homo Sapiens
LLDMPLWYLTKEKKDE

SEQ ID NO: 89788 - protein, 16 aa, Homo Sapiens
LDMPLWYLTKEKKDEL

SEQ ID NO: 89789 - protein, 16 aa, Homo Sapiens
DMPLWYLTKEKKDELC

SEQ ID NO: 89790 - protein, 16 aa, Homo Sapiens
MPLWYLTKEKKDELCR

SEQ ID NO: 89791 - protein, 16 aa, Homo Sapiens
PLWYLTKEKKDELCRL

SEQ ID NO: 89792 - protein, 16 aa, Homo Sapiens
LWYLTKEKKDELCRLR

SEQ ID NO: 89793 - protein, 16 aa, Homo Sapiens
WYLTKEKKDELCRLRN

SEQ ID NO: 89794 - protein, 16 aa, Homo Sapiens
YLTKEKKDELCRLRNE

SEQ ID NO: 89795 - protein, 16 aa, Homo Sapiens
LTKEKKDELCRLRNEK

SEQ ID NO: 89796 - protein, 16 aa, Homo Sapiens
TKEKKDELCRLRNEKE

SEQ ID NO: 89797 - protein, 16 aa, Homo Sapiens
KEKKDELCRLRNEKEQ

SEQ ID NO: 89798 - protein, 16 aa, Homo Sapiens
EKKDELCRLRNEKEQE

SEQ ID NO: 89799 - protein, 16 aa, Homo Sapiens
KKDELCRLRNEKEQEL

SEQ ID NO: 89800 - protein, 16 aa, Homo Sapiens
KDELCRLRNEKEQELD

SEQ ID NO: 89801 - protein, 16 aa, Homo Sapiens
DELCRLRNEKEQELDT

SEQ ID NO: 89802 - protein, 16 aa, Homo Sapiens
ELCRLRNEKEQELDTL

SEQ ID NO: 89803 - protein, 16 aa, Homo Sapiens
LCRLRNEKEQELDTLK

SEQ ID NO: 89804 - protein, 16 aa, Homo Sapiens
CRLRNEKEQELDTLKR

SEQ ID NO: 89805 - protein, 16 aa, Homo Sapiens
RLRNEKEQELDTLKRK

SEQ ID NO: 89806 - protein, 16 aa, Homo Sapiens
LRNEKEQELDTLKRKS

SEQ ID NO: 89807 - protein, 16 aa, Homo Sapiens
RNEKEQELDTLKRKSP

SEQ ID NO: 89808 - protein, 16 aa, Homo Sapiens
NEKEQELDTLKRKSPS

SEQ ID NO: 89809 - protein, 16 aa, Homo Sapiens
EKEQELDTLKRKSPSD

SEQ ID NO: 89810 - protein, 16 aa, Homo Sapiens
KEQELDTLKRKSPSDL

SEQ ID NO: 89811 - protein, 16 aa, Homo Sapiens
EQELDTLKRKSPSDLW

SEQ ID NO: 89812 - protein, 16 aa, Homo Sapiens
QELDTLKRKSPSDLWK

SEQ ID NO: 89813 - protein, 16 aa, Homo Sapiens
ELDTLKRKSPSDLWKE

SEQ ID NO: 89814 - protein, 16 aa, Homo Sapiens
LDTLKRKSPSDLWKED

SEQ ID NO: 89815 - protein, 16 aa, Homo Sapiens
DTLKRKSPSDLWKEDL

SEQ ID NO: 89816 - protein, 16 aa, Homo Sapiens
TLKRKSPSDLWKEDLA

SEQ ID NO: 89817 - protein, 16 aa, Homo Sapiens
LKRKSPSDLWKEDLAT

SEQ ID NO: 89818 - protein, 16 aa, Homo Sapiens
KRKSPSDLWKEDLATF

SEQ ID NO: 89819 - protein, 16 aa, Homo Sapiens
RKSPSDLWKEDLATFI

SEQ ID NO: 89820 - protein, 16 aa, Homo Sapiens
KSPSDLWKEDLATFIE

SEQ ID NO: 89821 - protein, 16 aa, Homo Sapiens
SPSDLWKEDLATFIEE

SEQ ID NO: 89822 - protein, 16 aa, Homo Sapiens
PSDLWKEDLATFIEEL

SEQ ID NO: 89823 - protein, 16 aa, Homo Sapiens
SDLWKEDLATFIEELE

SEQ ID NO: 89824 - protein, 16 aa, Homo Sapiens
DLWKEDLATFIEELEA

SEQ ID NO: 89825 - protein, 16 aa, Homo Sapiens
LWKEDLATFIEELEAV

SEQ ID NO: 89826 - protein, 16 aa, Homo Sapiens
WKEDLATFIEELEAVE

SEQ ID NO: 89827 - protein, 16 aa, Homo Sapiens
KEDLATFIEELEAVEA

SEQ ID NO: 89828 - protein, 16 aa, Homo Sapiens
EDLATFIEELEAVEAK

SEQ ID NO: 89829 - protein, 16 aa, Homo Sapiens
DLATFIEELEAVEAKE

SEQ ID NO: 89830 - protein, 16 aa, Homo Sapiens
LATFIEELEAVEAKEK

SEQ ID NO: 89831 - protein, 16 aa, Homo Sapiens
ATFIEELEAVEAKEKQ

SEQ ID NO: 89832 - protein, 16 aa, Homo Sapiens
TFIEELEAVEAKEKQD

SEQ ID NO: 89833 - protein, 16 aa, Homo Sapiens
FIEELEAVEAKEKQDE

SEQ ID NO: 89834 - protein, 16 aa, Homo Sapiens
IEELEAVEAKEKQDEQ

SEQ ID NO: 89835 - protein, 16 aa, Homo Sapiens
EELEAVEAKEKQDEQV

SEQ ID NO: 89836 - protein, 16 aa, Homo Sapiens
ELEAVEAKEKQDEQVG

SEQ ID NO: 89837 - protein, 16 aa, Homo Sapiens
LEAVEAKEKQDEQVGL

SEQ ID NO: 89838 - protein, 16 aa, Homo Sapiens
EAVEAKEKQDEQVGLP

SEQ ID NO: 89839 - protein, 16 aa, Homo Sapiens
AVEAKEKQDEQVGLPG

SEQ ID NO: 89840 - protein, 16 aa, Homo Sapiens
VEAKEKQDEQVGLPGK

SEQ ID NO: 89841 - protein, 16 aa, Homo Sapiens
EAKEKQDEQVGLPGKG

SEQ ID NO: 89842 - protein, 16 aa, Homo Sapiens
AKEKQDEQVGLPGKGG

SEQ ID NO: 89843 - protein, 16 aa, Homo Sapiens
KEKQDEQVGLPGKGGK

SEQ ID NO: 89844 - protein, 16 aa, Homo Sapiens
EKQDEQVGLPGKGGKA

SEQ ID NO: 89845 - protein, 16 aa, Homo Sapiens
KQDEQVGLPGKGGKAK

SEQ ID NO: 89846 - protein, 16 aa, Homo Sapiens
QDEQVGLPGKGGKAKG

SEQ ID NO: 89847 - protein, 16 aa, Homo Sapiens
DEQVGLPGKGGKAKGK

SEQ ID NO: 89848 - protein, 16 aa, Homo Sapiens
EQVGLPGKGGKAKGKK

SEQ ID NO: 89849 - protein, 16 aa, Homo Sapiens
QVGLPGKGGKAKGKKT

SEQ ID NO: 89850 - protein, 16 aa, Homo Sapiens
VGLPGKGGKAKGKKTQ

SEQ ID NO: 89851 - protein, 16 aa, Homo Sapiens
GLPGKGGKAKGKKTQM

SEQ ID NO: 89852 - protein, 16 aa, Homo Sapiens
LPGKGGKAKGKKTQMA

SEQ ID NO: 89853 - protein, 16 aa, Homo Sapiens
PGKGGKAKGKKTQMAE

SEQ ID NO: 89854 - protein, 16 aa, Homo Sapiens
GKGGKAKGKKTQMAEV

SEQ ID NO: 89855 - protein, 16 aa, Homo Sapiens
KGGKAKGKKTQMAEVL

SEQ ID NO: 89856 - protein, 16 aa, Homo Sapiens
GGKAKGKKTQMAEVLP

SEQ ID NO: 89857 - protein, 16 aa, Homo Sapiens
GKAKGKKTQMAEVLPS

SEQ ID NO: 89858 - protein, 16 aa, Homo Sapiens
KAKGKKTQMAEVLPSP

SEQ ID NO: 89859 - protein, 16 aa, Homo Sapiens
AKGKKTQMAEVLPSPR

SEQ ID NO: 89860 - protein, 16 aa, Homo Sapiens
KGKKTQMAEVLPSPRG

SEQ ID NO: 89861 - protein, 16 aa, Homo Sapiens
GKKTQMAEVLPSPRGQ

SEQ ID NO: 89862 - protein, 16 aa, Homo Sapiens
KKTQMAEVLPSPRGQR

SEQ ID NO: 89863 - protein, 16 aa, Homo Sapiens
KTQMAEVLPSPRGQRV

SEQ ID NO: 89864 - protein, 16 aa, Homo Sapiens
TQMAEVLPSPRGQRVI

SEQ ID NO: 89865 - protein, 16 aa, Homo Sapiens
QMAEVLPSPRGQRVIP

SEQ ID NO: 89866 - protein, 16 aa, Homo Sapiens
MAEVLPSPRGQRVIPR

SEQ ID NO: 89867 - protein, 16 aa, Homo Sapiens
AEVLPSPRGQRVIPRI

SEQ ID NO: 89868 - protein, 16 aa, Homo Sapiens
EVLPSPRGQRVIPRIT

SEQ ID NO: 89869 - protein, 16 aa, Homo Sapiens
VLPSPRGQRVIPRITI

SEQ ID NO: 89870 - protein, 16 aa, Homo Sapiens
LPSPRGQRVIPRITIE

SEQ ID NO: 89871 - protein, 16 aa, Homo Sapiens
PSPRGQRVIPRITIEM

SEQ ID NO: 89872 - protein, 16 aa, Homo Sapiens
SPRGQRVIPRITIEMK

SEQ ID NO: 89873 - protein, 16 aa, Homo Sapiens
PRGQRVIPRITIEMKA

SEQ ID NO: 89874 - protein, 16 aa, Homo Sapiens
RGQRVIPRITIEMKAE

SEQ ID NO: 89875 - protein, 16 aa, Homo Sapiens
GQRVIPRITIEMKAEA

SEQ ID NO: 89876 - protein, 16 aa, Homo Sapiens
QRVIPRITIEMKAEAE

SEQ ID NO: 89877 - protein, 16 aa, Homo Sapiens
RVIPRITIEMKAEAEK

SEQ ID NO: 89878 - protein, 16 aa, Homo Sapiens
VIPRITIEMKAEAEKK

SEQ ID NO: 89879 - protein, 16 aa, Homo Sapiens
IPRITIEMKAEAEKKN

SEQ ID NO: 89880 - protein, 16 aa, Homo Sapiens
PRITIEMKAEAEKKNK

SEQ ID NO: 89881 - protein, 16 aa, Homo Sapiens
RITIEMKAEAEKKNKK

SEQ ID NO: 89882 - protein, 16 aa, Homo Sapiens
ITIEMKAEAEKKNKKK

SEQ ID NO: 89883 - protein, 16 aa, Homo Sapiens
TIEMKAEAEKKNKKKI

SEQ ID NO: 89884 - protein, 16 aa, Homo Sapiens
IEMKAEAEKKNKKKIK

SEQ ID NO: 89885 - protein, 16 aa, Homo Sapiens
EMKAEAEKKNKKKIKN

SEQ ID NO: 89886 - protein, 16 aa, Homo Sapiens
MKAEAEKKNKKKIKNE

SEQ ID NO: 89887 - protein, 16 aa, Homo Sapiens
KAEAEKKNKKKIKNEN

SEQ ID NO: 89888 - protein, 16 aa, Homo Sapiens
AEAEKKNKKKIKNENT

SEQ ID NO: 89889 - protein, 16 aa, Homo Sapiens
EAEKKNKKKIKNENTE

SEQ ID NO: 89890 - protein, 16 aa, Homo Sapiens
AEKKNKKKIKNENTEG

SEQ ID NO: 89891 - protein, 16 aa, Homo Sapiens
EKKNKKKIKNENTEGS

SEQ ID NO: 89892 - protein, 16 aa, Homo Sapiens
KKNKKKIKNENTEGSP

SEQ ID NO: 89893 - protein, 16 aa, Homo Sapiens
KNKKKIKNENTEGSPQ

SEQ ID NO: 89894 - protein, 16 aa, Homo Sapiens
NKKKIKNENTEGSPQE

SEQ ID NO: 89895 - protein, 16 aa, Homo Sapiens
KKKIKNENTEGSPQED

SEQ ID NO: 89896 - protein, 16 aa, Homo Sapiens
KKIKNENTEGSPQEDG

SEQ ID NO: 89897 - protein, 16 aa, Homo Sapiens
KIKNENTEGSPQEDGV

SEQ ID NO: 89898 - protein, 16 aa, Homo Sapiens
IKNENTEGSPQEDGVE

SEQ ID NO: 89899 - protein, 16 aa, Homo Sapiens
KNENTEGSPQEDGVEL

SEQ ID NO: 89900 - protein, 16 aa, Homo Sapiens
NENTEGSPQEDGVELE

SEQ ID NO: 89901 - protein, 16 aa, Homo Sapiens
ENTEGSPQEDGVELEG

SEQ ID NO: 89902 - protein, 16 aa, Homo Sapiens
NTEGSPQEDGVELEGL

SEQ ID NO: 89903 - protein, 16 aa, Homo Sapiens
TEGSPQEDGVELEGLK

SEQ ID NO: 89904 - protein, 16 aa, Homo Sapiens
EGSPQEDGVELEGLKQ

SEQ ID NO: 89905 - protein, 16 aa, Homo Sapiens
GSPQEDGVELEGLKQR

SEQ ID NO: 89906 - protein, 16 aa, Homo Sapiens
SPQEDGVELEGLKQRL

SEQ ID NO: 89907 - protein, 16 aa, Homo Sapiens
PQEDGVELEGLKQRLE

SEQ ID NO: 89908 - protein, 16 aa, Homo Sapiens
QEDGVELEGLKQRLEK

SEQ ID NO: 89909 - protein, 16 aa, Homo Sapiens
EDGVELEGLKQRLEKK

SEQ ID NO: 89910 - protein, 16 aa, Homo Sapiens
DGVELEGLKQRLEKKQ

SEQ ID NO: 89911 - protein, 16 aa, Homo Sapiens
GVELEGLKQRLEKKQK

SEQ ID NO: 89912 - protein, 16 aa, Homo Sapiens
VELEGLKQRLEKKQKR

SEQ ID NO: 89913 - protein, 16 aa, Homo Sapiens
ELEGLKQRLEKKQKRE

SEQ ID NO: 89914 - protein, 16 aa, Homo Sapiens
LEGLKQRLEKKQKREP

SEQ ID NO: 89915 - protein, 16 aa, Homo Sapiens
EGLKQRLEKKQKREPG

SEQ ID NO: 89916 - protein, 16 aa, Homo Sapiens
GLKQRLEKKQKREPGT

SEQ ID NO: 89917 - protein, 16 aa, Homo Sapiens
LKQRLEKKQKREPGTK

SEQ ID NO: 89918 - protein, 16 aa, Homo Sapiens
KQRLEKKQKREPGTKT

SEQ ID NO: 89919 - protein, 16 aa, Homo Sapiens
QRLEKKQKREPGTKTK

SEQ ID NO: 89920 - protein, 16 aa, Homo Sapiens
RLEKKQKREPGTKTKK

SEQ ID NO: 89921 - protein, 16 aa, Homo Sapiens
LEKKQKREPGTKTKKQ

SEQ ID NO: 89922 - protein, 16 aa, Homo Sapiens
EKKQKREPGTKTKKQT

SEQ ID NO: 89923 - protein, 16 aa, Homo Sapiens
KKQKREPGTKTKKQTT

SEQ ID NO: 89924 - protein, 16 aa, Homo Sapiens
KQKREPGTKTKKQTTL

SEQ ID NO: 89925 - protein, 16 aa, Homo Sapiens
QKREPGTKTKKQTTLA

SEQ ID NO: 89926 - protein, 16 aa, Homo Sapiens
KREPGTKTKKQTTLAF

SEQ ID NO: 89927 - protein, 16 aa, Homo Sapiens
REPGTKTKKQTTLAFK

SEQ ID NO: 89928 - protein, 16 aa, Homo Sapiens
EPGTKTKKQTTLAFKP

SEQ ID NO: 89929 - protein, 16 aa, Homo Sapiens
PGTKTKKQTTLAFKPI

SEQ ID NO: 89930 - protein, 16 aa, Homo Sapiens
GTKTKKQTTLAFKPIK

SEQ ID NO: 89931 - protein, 16 aa, Homo Sapiens
TKTKKQTTLAFKPIKK

SEQ ID NO: 89932 - protein, 16 aa, Homo Sapiens
KTKKQTTLAFKPIKKG

SEQ ID NO: 89933 - protein, 16 aa, Homo Sapiens
TKKQTTLAFKPIKKGK

SEQ ID NO: 89934 - protein, 16 aa, Homo Sapiens
KKQTTLAFKPIKKGKK

SEQ ID NO: 89935 - protein, 16 aa, Homo Sapiens
KQTTLAFKPIKKGKKR

SEQ ID NO: 89936 - protein, 16 aa, Homo Sapiens
QTTLAFKPIKKGKKRN

SEQ ID NO: 89937 - protein, 16 aa, Homo Sapiens
TTLAFKPIKKGKKRNP

SEQ ID NO: 89938 - protein, 16 aa, Homo Sapiens
TLAFKPIKKGKKRNPW

SEQ ID NO: 89939 - protein, 16 aa, Homo Sapiens
LAFKPIKKGKKRNPWS

SEQ ID NO: 89940 - protein, 16 aa, Homo Sapiens
AFKPIKKGKKRNPWSD

SEQ ID NO: 89941 - protein, 16 aa, Homo Sapiens
FKPIKKGKKRNPWSDS

SEQ ID NO: 89942 - protein, 16 aa, Homo Sapiens
KPIKKGKKRNPWSDSE

SEQ ID NO: 89943 - protein, 16 aa, Homo Sapiens
PIKKGKKRNPWSDSES

SEQ ID NO: 89944 - protein, 16 aa, Homo Sapiens
IKKGKKRNPWSDSESD

SEQ ID NO: 89945 - protein, 16 aa, Homo Sapiens
KKGKKRNPWSDSESDR

SEQ ID NO: 89946 - protein, 16 aa, Homo Sapiens
KGKKRNPWSDSESDRS

SEQ ID NO: 89947 - protein, 16 aa, Homo Sapiens
GKKRNPWSDSESDRSS

SEQ ID NO: 89948 - protein, 16 aa, Homo Sapiens
KKRNPWSDSESDRSSD

SEQ ID NO: 89949 - protein, 16 aa, Homo Sapiens
KRNPWSDSESDRSSDE

SEQ ID NO: 89950 - protein, 16 aa, Homo Sapiens
RNPWSDSESDRSSDES

SEQ ID NO: 89951 - protein, 16 aa, Homo Sapiens
NPWSDSESDRSSDESN

SEQ ID NO: 89952 - protein, 16 aa, Homo Sapiens
PWSDSESDRSSDESNF

SEQ ID NO: 89953 - protein, 16 aa, Homo Sapiens
WSDSESDRSSDESNFD

SEQ ID NO: 89954 - protein, 16 aa, Homo Sapiens
SDSESDRSSDESNFDV

SEQ ID NO: 89955 - protein, 16 aa, Homo Sapiens
DSESDRSSDESNFDVP

SEQ ID NO: 89956 - protein, 16 aa, Homo Sapiens
SESDRSSDESNFDVPP

SEQ ID NO: 89957 - protein, 16 aa, Homo Sapiens
ESDRSSDESNFDVPPR

SEQ ID NO: 89958 - protein, 16 aa, Homo Sapiens
SDRSSDESNFDVPPRE

SEQ ID NO: 89959 - protein, 16 aa, Homo Sapiens
DRSSDESNFDVPPRET

SEQ ID NO: 89960 - protein, 16 aa, Homo Sapiens
RSSDESNFDVPPRETE

SEQ ID NO: 89961 - protein, 16 aa, Homo Sapiens
SSDESNFDVPPRETEP

SEQ ID NO: 89962 - protein, 16 aa, Homo Sapiens
SDESNFDVPPRETEPR

SEQ ID NO: 89963 - protein, 16 aa, Homo Sapiens
DESNFDVPPRETEPRR

SEQ ID NO: 89964 - protein, 16 aa, Homo Sapiens
ESNFDVPPRETEPRRA

SEQ ID NO: 89965 - protein, 16 aa, Homo Sapiens
SNFDVPPRETEPRRAA

SEQ ID NO: 89966 - protein, 16 aa, Homo Sapiens
NFDVPPRETEPRRAAT

SEQ ID NO: 89967 - protein, 16 aa, Homo Sapiens
FDVPPRETEPRRAATK

SEQ ID NO: 89968 - protein, 16 aa, Homo Sapiens
DVPPRETEPRRAATKT

SEQ ID NO: 89969 - protein, 16 aa, Homo Sapiens
VPPRETEPRRAATKTK

SEQ ID NO: 89970 - protein, 16 aa, Homo Sapiens
PPRETEPRRAATKTKF

SEQ ID NO: 89971 - protein, 16 aa, Homo Sapiens
PRETEPRRAATKTKFT

SEQ ID NO: 89972 - protein, 16 aa, Homo Sapiens
RETEPRRAATKTKFTM

SEQ ID NO: 89973 - protein, 16 aa, Homo Sapiens
ETEPRRAATKTKFTMD

SEQ ID NO: 89974 - protein, 16 aa, Homo Sapiens
TEPRRAATKTKFTMDL

SEQ ID NO: 89975 - protein, 16 aa, Homo Sapiens
EPRRAATKTKFTMDLD

SEQ ID NO: 89976 - protein, 16 aa, Homo Sapiens
PRRAATKTKFTMDLDS

SEQ ID NO: 89977 - protein, 16 aa, Homo Sapiens
RRAATKTKFTMDLDSD

SEQ ID NO: 89978 - protein, 16 aa, Homo Sapiens
RAATKTKFTMDLDSDE

SEQ ID NO: 89979 - protein, 16 aa, Homo Sapiens
AATKTKFTMDLDSDED

SEQ ID NO: 89980 - protein, 16 aa, Homo Sapiens
ATKTKFTMDLDSDEDF

SEQ ID NO: 89981 - protein, 16 aa, Homo Sapiens
TKTKFTMDLDSDEDFS

SEQ ID NO: 89982 - protein, 16 aa, Homo Sapiens
KTKFTMDLDSDEDFSD

SEQ ID NO: 89983 - protein, 16 aa, Homo Sapiens
TKFTMDLDSDEDFSDF

SEQ ID NO: 89984 - protein, 16 aa, Homo Sapiens
KFTMDLDSDEDFSDFD

SEQ ID NO: 89985 - protein, 16 aa, Homo Sapiens
FTMDLDSDEDFSDFDE

SEQ ID NO: 89986 - protein, 16 aa, Homo Sapiens
TMDLDSDEDFSDFDEK

SEQ ID NO: 89987 - protein, 16 aa, Homo Sapiens
MDLDSDEDFSDFDEKT

SEQ ID NO: 89988 - protein, 16 aa, Homo Sapiens
DLDSDEDFSDFDEKTD

SEQ ID NO: 89989 - protein, 16 aa, Homo Sapiens
LDSDEDFSDFDEKTDD

SEQ ID NO: 89990 - protein, 16 aa, Homo Sapiens
DSDEDFSDFDEKTDDE

SEQ ID NO: 89991 - protein, 16 aa, Homo Sapiens
SDEDFSDFDEKTDDED

SEQ ID NO: 89992 - protein, 16 aa, Homo Sapiens
DEDFSDFDEKTDDEDF

SEQ ID NO: 89993 - protein, 16 aa, Homo Sapiens
EDFSDFDEKTDDEDFV

SEQ ID NO: 89994 - protein, 16 aa, Homo Sapiens
DFSDFDEKTDDEDFVP

SEQ ID NO: 89995 - protein, 16 aa, Homo Sapiens
FSDFDEKTDDEDFVPS

SEQ ID NO: 89996 - protein, 16 aa, Homo Sapiens
SDFDEKTDDEDFVPSD

SEQ ID NO: 89997 - protein, 16 aa, Homo Sapiens
DFDEKTDDEDFVPSDA

SEQ ID NO: 89998 - protein, 16 aa, Homo Sapiens
FDEKTDDEDFVPSDAS

SEQ ID NO: 89999 - protein, 16 aa, Homo Sapiens
DEKTDDEDFVPSDASP

SEQ ID NO: 90000 - protein, 16 aa, Homo Sapiens
EKTDDEDFVPSDASPP

SEQ ID NO: 90001 - protein, 16 aa, Homo Sapiens
KTDDEDFVPSDASPPK

SEQ ID NO: 90002 - protein, 16 aa, Homo Sapiens
TDDEDFVPSDASPPKT

SEQ ID NO: 90003 - protein, 16 aa, Homo Sapiens
DDEDFVPSDASPPKTK

SEQ ID NO: 90004 - protein, 16 aa, Homo Sapiens
DEDFVPSDASPPKTKT

SEQ ID NO: 90005 - protein, 16 aa, Homo Sapiens
EDFVPSDASPPKTKTS

SEQ ID NO: 90006 - protein, 16 aa, Homo Sapiens
DFVPSDASPPKTKTSP

SEQ ID NO: 90007 - protein, 16 aa, Homo Sapiens
FVPSDASPPKTKTSPK

SEQ ID NO: 90008 - protein, 16 aa, Homo Sapiens
VPSDASPPKTKTSPKL

SEQ ID NO: 90009 - protein, 16 aa, Homo Sapiens
PSDASPPKTKTSPKLS

SEQ ID NO: 90010 - protein, 16 aa, Homo Sapiens
SDASPPKTKTSPKLSN

SEQ ID NO: 90011 - protein, 16 aa, Homo Sapiens
DASPPKTKTSPKLSNK

SEQ ID NO: 90012 - protein, 16 aa, Homo Sapiens
ASPPKTKTSPKLSNKE

SEQ ID NO: 90013 - protein, 16 aa, Homo Sapiens
SPPKTKTSPKLSNKEL

SEQ ID NO: 90014 - protein, 16 aa, Homo Sapiens
PPKTKTSPKLSNKELK

SEQ ID NO: 90015 - protein, 16 aa, Homo Sapiens
PKTKTSPKLSNKELKP

SEQ ID NO: 90016 - protein, 16 aa, Homo Sapiens
KTKTSPKLSNKELKPQ

SEQ ID NO: 90017 - protein, 16 aa, Homo Sapiens
TKTSPKLSNKELKPQK

SEQ ID NO: 90018 - protein, 16 aa, Homo Sapiens
KTSPKLSNKELKPQKS

SEQ ID NO: 90019 - protein, 16 aa, Homo Sapiens
TSPKLSNKELKPQKSV

SEQ ID NO: 90020 - protein, 16 aa, Homo Sapiens
SPKLSNKELKPQKSVV

SEQ ID NO: 90021 - protein, 16 aa, Homo Sapiens
PKLSNKELKPQKSVVS

SEQ ID NO: 90022 - protein, 16 aa, Homo Sapiens
KLSNKELKPQKSVVSD

SEQ ID NO: 90023 - protein, 16 aa, Homo Sapiens
LSNKELKPQKSVVSDL

SEQ ID NO: 90024 - protein, 16 aa, Homo Sapiens
SNKELKPQKSVVSDLE

SEQ ID NO: 90025 - protein, 16 aa, Homo Sapiens
NKELKPQKSVVSDLEA

SEQ ID NO: 90026 - protein, 16 aa, Homo Sapiens
KELKPQKSVVSDLEAD

SEQ ID NO: 90027 - protein, 16 aa, Homo Sapiens
ELKPQKSVVSDLEADD

SEQ ID NO: 90028 - protein, 16 aa, Homo Sapiens
LKPQKSVVSDLEADDV

SEQ ID NO: 90029 - protein, 16 aa, Homo Sapiens
KPQKSVVSDLEADDVK

SEQ ID NO: 90030 - protein, 16 aa, Homo Sapiens
PQKSVVSDLEADDVKG

SEQ ID NO: 90031 - protein, 16 aa, Homo Sapiens
QKSVVSDLEADDVKGS

SEQ ID NO: 90032 - protein, 16 aa, Homo Sapiens
KSVVSDLEADDVKGSV

SEQ ID NO: 90033 - protein, 16 aa, Homo Sapiens
SVVSDLEADDVKGSVP

SEQ ID NO: 90034 - protein, 16 aa, Homo Sapiens
VVSDLEADDVKGSVPL

SEQ ID NO: 90035 - protein, 16 aa, Homo Sapiens
VSDLEADDVKGSVPLS

SEQ ID NO: 90036 - protein, 16 aa, Homo Sapiens
SDLEADDVKGSVPLSS

SEQ ID NO: 90037 - protein, 16 aa, Homo Sapiens
DLEADDVKGSVPLSSS

SEQ ID NO: 90038 - protein, 16 aa, Homo Sapiens
LEADDVKGSVPLSSSP

SEQ ID NO: 90039 - protein, 16 aa, Homo Sapiens
EADDVKGSVPLSSSPP

SEQ ID NO: 90040 - protein, 16 aa, Homo Sapiens
ADDVKGSVPLSSSPPA

SEQ ID NO: 90041 - protein, 16 aa, Homo Sapiens
DDVKGSVPLSSSPPAT

SEQ ID NO: 90042 - protein, 16 aa, Homo Sapiens
DVKGSVPLSSSPPATH

SEQ ID NO: 90043 - protein, 16 aa, Homo Sapiens
VKGSVPLSSSPPATHF

SEQ ID NO: 90044 - protein, 16 aa, Homo Sapiens
KGSVPLSSSPPATHFP

SEQ ID NO: 90045 - protein, 16 aa, Homo Sapiens
GSVPLSSSPPATHFPD

SEQ ID NO: 90046 - protein, 16 aa, Homo Sapiens
SVPLSSSPPATHFPDE

SEQ ID NO: 90047 - protein, 16 aa, Homo Sapiens
VPLSSSPPATHFPDET

SEQ ID NO: 90048 - protein, 16 aa, Homo Sapiens
PLSSSPPATHFPDETE

SEQ ID NO: 90049 - protein, 16 aa, Homo Sapiens
LSSSPPATHFPDETEI

SEQ ID NO: 90050 - protein, 16 aa, Homo Sapiens
SSSPPATHFPDETEIT

SEQ ID NO: 90051 - protein, 16 aa, Homo Sapiens
SSPPATHFPDETEITN

SEQ ID NO: 90052 - protein, 16 aa, Homo Sapiens
SPPATHFPDETEITNP

SEQ ID NO: 90053 - protein, 16 aa, Homo Sapiens
PPATHFPDETEITNPV

SEQ ID NO: 90054 - protein, 16 aa, Homo Sapiens
PATHFPDETEITNPVP

SEQ ID NO: 90055 - protein, 16 aa, Homo Sapiens
ATHFPDETEITNPVPK

SEQ ID NO: 90056 - protein, 16 aa, Homo Sapiens
THFPDETEITNPVPKK

SEQ ID NO: 90057 - protein, 16 aa, Homo Sapiens
HFPDETEITNPVPKKN

SEQ ID NO: 90058 - protein, 16 aa, Homo Sapiens
FPDETEITNPVPKKNV

SEQ ID NO: 90059 - protein, 16 aa, Homo Sapiens
PDETEITNPVPKKNVT

SEQ ID NO: 90060 - protein, 16 aa, Homo Sapiens
DETEITNPVPKKNVTV

SEQ ID NO: 90061 - protein, 16 aa, Homo Sapiens
ETEITNPVPKKNVTVK

SEQ ID NO: 90062 - protein, 16 aa, Homo Sapiens
TEITNPVPKKNVTVKK

SEQ ID NO: 90063 - protein, 16 aa, Homo Sapiens
EITNPVPKKNVTVKKT

SEQ ID NO: 90064 - protein, 16 aa, Homo Sapiens
ITNPVPKKNVTVKKTA

SEQ ID NO: 90065 - protein, 16 aa, Homo Sapiens
TNPVPKKNVTVKKTAA

SEQ ID NO: 90066 - protein, 16 aa, Homo Sapiens
NPVPKKNVTVKKTAAK

SEQ ID NO: 90067 - protein, 16 aa, Homo Sapiens
PVPKKNVTVKKTAAKS

SEQ ID NO: 90068 - protein, 16 aa, Homo Sapiens
VPKKNVTVKKTAAKSQ

SEQ ID NO: 90069 - protein, 16 aa, Homo Sapiens
PKKNVTVKKTAAKSQS

SEQ ID NO: 90070 - protein, 16 aa, Homo Sapiens
KKNVTVKKTAAKSQSS

SEQ ID NO: 90071 - protein, 16 aa, Homo Sapiens
KNVTVKKTAAKSQSST

SEQ ID NO: 90072 - protein, 16 aa, Homo Sapiens
NVTVKKTAAKSQSSTS

SEQ ID NO: 90073 - protein, 16 aa, Homo Sapiens
VTVKKTAAKSQSSTST

SEQ ID NO: 90074 - protein, 16 aa, Homo Sapiens
TVKKTAAKSQSSTSTT

SEQ ID NO: 90075 - protein, 16 aa, Homo Sapiens
VKKTAAKSQSSTSTTG

SEQ ID NO: 90076 - protein, 16 aa, Homo Sapiens
KKTAAKSQSSTSTTGA

SEQ ID NO: 90077 - protein, 16 aa, Homo Sapiens
KTAAKSQSSTSTTGAK

SEQ ID NO: 90078 - protein, 16 aa, Homo Sapiens
TAAKSQSSTSTTGAKK

SEQ ID NO: 90079 - protein, 16 aa, Homo Sapiens
AAKSQSSTSTTGAKKR

SEQ ID NO: 90080 - protein, 16 aa, Homo Sapiens
AKSQSSTSTTGAKKRA

SEQ ID NO: 90081 - protein, 16 aa, Homo Sapiens
KSQSSTSTTGAKKRAA

SEQ ID NO: 90082 - protein, 16 aa, Homo Sapiens
SQSSTSTTGAKKRAAP

SEQ ID NO: 90083 - protein, 16 aa, Homo Sapiens
QSSTSTTGAKKRAAPK

SEQ ID NO: 90084 - protein, 16 aa, Homo Sapiens
SSTSTTGAKKRAAPKG

SEQ ID NO: 90085 - protein, 16 aa, Homo Sapiens
STSTTGAKKRAAPKGT

SEQ ID NO: 90086 - protein, 16 aa, Homo Sapiens
TSTTGAKKRAAPKGTK

SEQ ID NO: 90087 - protein, 16 aa, Homo Sapiens
STTGAKKRAAPKGTKR

SEQ ID NO: 90088 - protein, 16 aa, Homo Sapiens
TTGAKKRAAPKGTKRD

SEQ ID NO: 90089 - protein, 16 aa, Homo Sapiens
TGAKKRAAPKGTKRDP

SEQ ID NO: 90090 - protein, 16 aa, Homo Sapiens
GAKKRAAPKGTKRDPA

SEQ ID NO: 90091 - protein, 16 aa, Homo Sapiens
AKKRAAPKGTKRDPAL

SEQ ID NO: 90092 - protein, 16 aa, Homo Sapiens
KKRAAPKGTKRDPALN

SEQ ID NO: 90093 - protein, 16 aa, Homo Sapiens
KRAAPKGTKRDPALNS

SEQ ID NO: 90094 - protein, 16 aa, Homo Sapiens
RAAPKGTKRDPALNSG

SEQ ID NO: 90095 - protein, 16 aa, Homo Sapiens
AAPKGTKRDPALNSGV

SEQ ID NO: 90096 - protein, 16 aa, Homo Sapiens
APKGTKRDPALNSGVS

SEQ ID NO: 90097 - protein, 16 aa, Homo Sapiens
PKGTKRDPALNSGVSQ

SEQ ID NO: 90098 - protein, 16 aa, Homo Sapiens
KGTKRDPALNSGVSQK

SEQ ID NO: 90099 - protein, 16 aa, Homo Sapiens
GTKRDPALNSGVSQKP

SEQ ID NO: 90100 - protein, 16 aa, Homo Sapiens
TKRDPALNSGVSQKPD

SEQ ID NO: 90101 - protein, 16 aa, Homo Sapiens
KRDPALNSGVSQKPDP

SEQ ID NO: 90102 - protein, 16 aa, Homo Sapiens
RDPALNSGVSQKPDPA

SEQ ID NO: 90103 - protein, 16 aa, Homo Sapiens
DPALNSGVSQKPDPAK

SEQ ID NO: 90104 - protein, 16 aa, Homo Sapiens
PALNSGVSQKPDPAKT

SEQ ID NO: 90105 - protein, 16 aa, Homo Sapiens
ALNSGVSQKPDPAKTK

SEQ ID NO: 90106 - protein, 16 aa, Homo Sapiens
LNSGVSQKPDPAKTKN

SEQ ID NO: 90107 - protein, 16 aa, Homo Sapiens
NSGVSQKPDPAKTKNR

SEQ ID NO: 90108 - protein, 16 aa, Homo Sapiens
SGVSQKPDPAKTKNRR

SEQ ID NO: 90109 - protein, 16 aa, Homo Sapiens
GVSQKPDPAKTKNRRK

SEQ ID NO: 90110 - protein, 16 aa, Homo Sapiens
VSQKPDPAKTKNRRKR

SEQ ID NO: 90111 - protein, 16 aa, Homo Sapiens
SQKPDPAKTKNRRKRK

SEQ ID NO: 90112 - protein, 16 aa, Homo Sapiens
QKPDPAKTKNRRKRKP

SEQ ID NO: 90113 - protein, 16 aa, Homo Sapiens
KPDPAKTKNRRKRKPS

SEQ ID NO: 90114 - protein, 16 aa, Homo Sapiens
PDPAKTKNRRKRKPST

SEQ ID NO: 90115 - protein, 16 aa, Homo Sapiens
DPAKTKNRRKRKPSTS

SEQ ID NO: 90116 - protein, 16 aa, Homo Sapiens
PAKTKNRRKRKPSTSD

SEQ ID NO: 90117 - protein, 16 aa, Homo Sapiens
AKTKNRRKRKPSTSDD

SEQ ID NO: 90118 - protein, 16 aa, Homo Sapiens
KTKNRRKRKPSTSDDS

SEQ ID NO: 90119 - protein, 16 aa, Homo Sapiens
TKNRRKRKPSTSDDSD

SEQ ID NO: 90120 - protein, 16 aa, Homo Sapiens
KNRRKRKPSTSDDSDS

SEQ ID NO: 90121 - protein, 16 aa, Homo Sapiens
NRRKRKPSTSDDSDSN

SEQ ID NO: 90122 - protein, 16 aa, Homo Sapiens
RRKRKPSTSDDSDSNF

SEQ ID NO: 90123 - protein, 16 aa, Homo Sapiens
RKRKPSTSDDSDSNFE

SEQ ID NO: 90124 - protein, 16 aa, Homo Sapiens
KRKPSTSDDSDSNFEK

SEQ ID NO: 90125 - protein, 16 aa, Homo Sapiens
RKPSTSDDSDSNFEKI

SEQ ID NO: 90126 - protein, 16 aa, Homo Sapiens
KPSTSDDSDSNFEKIV

SEQ ID NO: 90127 - protein, 16 aa, Homo Sapiens
PSTSDDSDSNFEKIVS

SEQ ID NO: 90128 - protein, 16 aa, Homo Sapiens
STSDDSDSNFEKIVSK

SEQ ID NO: 90129 - protein, 16 aa, Homo Sapiens
TSDDSDSNFEKIVSKA

SEQ ID NO: 90130 - protein, 16 aa, Homo Sapiens
SDDSDSNFEKIVSKAV

SEQ ID NO: 90131 - protein, 16 aa, Homo Sapiens
DDSDSNFEKIVSKAVT

SEQ ID NO: 90132 - protein, 16 aa, Homo Sapiens
DSDSNFEKIVSKAVTS

SEQ ID NO: 90133 - protein, 16 aa, Homo Sapiens
SDSNFEKIVSKAVTSK

SEQ ID NO: 90134 - protein, 16 aa, Homo Sapiens
DSNFEKIVSKAVTSKK

SEQ ID NO: 90135 - protein, 16 aa, Homo Sapiens
SNFEKIVSKAVTSKKS

SEQ ID NO: 90136 - protein, 16 aa, Homo Sapiens
NFEKIVSKAVTSKKSK

SEQ ID NO: 90137 - protein, 16 aa, Homo Sapiens
FEKIVSKAVTSKKSKG

SEQ ID NO: 90138 - protein, 16 aa, Homo Sapiens
EKIVSKAVTSKKSKGE

SEQ ID NO: 90139 - protein, 16 aa, Homo Sapiens
KIVSKAVTSKKSKGES

SEQ ID NO: 90140 - protein, 16 aa, Homo Sapiens
IVSKAVTSKKSKGESD

SEQ ID NO: 90141 - protein, 16 aa, Homo Sapiens
VSKAVTSKKSKGESDD

SEQ ID NO: 90142 - protein, 16 aa, Homo Sapiens
SKAVTSKKSKGESDDF

SEQ ID NO: 90143 - protein, 16 aa, Homo Sapiens
KAVTSKKSKGESDDFH

SEQ ID NO: 90144 - protein, 16 aa, Homo Sapiens
AVTSKKSKGESDDFHM

SEQ ID NO: 90145 - protein, 16 aa, Homo Sapiens
VTSKKSKGESDDFHMD

SEQ ID NO: 90146 - protein, 16 aa, Homo Sapiens
TSKKSKGESDDFHMDF

SEQ ID NO: 90147 - protein, 16 aa, Homo Sapiens
SKKSKGESDDFHMDFD

SEQ ID NO: 90148 - protein, 16 aa, Homo Sapiens
KKSKGESDDFHMDFDS

SEQ ID NO: 90149 - protein, 16 aa, Homo Sapiens
KSKGESDDFHMDFDSA

SEQ ID NO: 90150 - protein, 16 aa, Homo Sapiens
SKGESDDFHMDFDSAV

SEQ ID NO: 90151 - protein, 16 aa, Homo Sapiens
KGESDDFHMDFDSAVA

SEQ ID NO: 90152 - protein, 16 aa, Homo Sapiens
GESDDFHMDFDSAVAP

SEQ ID NO: 90153 - protein, 16 aa, Homo Sapiens
ESDDFHMDFDSAVAPR

SEQ ID NO: 90154 - protein, 16 aa, Homo Sapiens
SDDFHMDFDSAVAPRA

SEQ ID NO: 90155 - protein, 16 aa, Homo Sapiens
DDFHMDFDSAVAPRAK

SEQ ID NO: 90156 - protein, 16 aa, Homo Sapiens
DFHMDFDSAVAPRAKS

SEQ ID NO: 90157 - protein, 16 aa, Homo Sapiens
FHMDFDSAVAPRAKSV

SEQ ID NO: 90158 - protein, 16 aa, Homo Sapiens
HMDFDSAVAPRAKSVR

SEQ ID NO: 90159 - protein, 16 aa, Homo Sapiens
MDFDSAVAPRAKSVRA

SEQ ID NO: 90160 - protein, 16 aa, Homo Sapiens
DFDSAVAPRAKSVRAK

SEQ ID NO: 90161 - protein, 16 aa, Homo Sapiens
FDSAVAPRAKSVRAKK

SEQ ID NO: 90162 - protein, 16 aa, Homo Sapiens
DSAVAPRAKSVRAKKP

SEQ ID NO: 90163 - protein, 16 aa, Homo Sapiens
SAVAPRAKSVRAKKPI

SEQ ID NO: 90164 - protein, 16 aa, Homo Sapiens
AVAPRAKSVRAKKPIK

SEQ ID NO: 90165 - protein, 16 aa, Homo Sapiens
VAPRAKSVRAKKPIKY

SEQ ID NO: 90166 - protein, 16 aa, Homo Sapiens
APRAKSVRAKKPIKYL

SEQ ID NO: 90167 - protein, 16 aa, Homo Sapiens
PRAKSVRAKKPIKYLE

SEQ ID NO: 90168 - protein, 16 aa, Homo Sapiens
RAKSVRAKKPIKYLEE

SEQ ID NO: 90169 - protein, 16 aa, Homo Sapiens
AKSVRAKKPIKYLEES

SEQ ID NO: 90170 - protein, 16 aa, Homo Sapiens
KSVRAKKPIKYLEESD

SEQ ID NO: 90171 - protein, 16 aa, Homo Sapiens
SVRAKKPIKYLEESDE

SEQ ID NO: 90172 - protein, 16 aa, Homo Sapiens
VRAKKPIKYLEESDED

SEQ ID NO: 90173 - protein, 16 aa, Homo Sapiens
RAKKPIKYLEESDEDD

SEQ ID NO: 90174 - protein, 16 aa, Homo Sapiens
AKKPIKYLEESDEDDL

SEQ ID NO: 90175 - protein, 16 aa, Homo Sapiens
KKPIKYLEESDEDDLF

SEQ ID NO: 90176 - protein, 824 aa, Homo Sapiens
MRQSLLFLTSVVPFVLAPRPPDDPGFGPHQRLEKLDSLLSDYDILSLSNIQQHSVRKRDLQTSTHVETLLTFSALKRHFKLYLTSSTERFSQNFKVVVVDGKNESEYTVKWQDFFTGHVVGEPDSRVLAHIRDDDVIIRINTDGAEYNIEPLWRFVNDTKDKRMLVYKSEDIKNVSRLQSPKVCGYLKVDNEELLPKGLVDREPPEELVHRVKRRADPDPMKNTCKLLVVADHRFYRYMGRGEESTTTNYLIELIDRVDDIYRNTSWDNAGFKGYGIQIEQIRILKSPQEVKPGEKHYNMAKSYPNEEKDAWDVKMLLEQFSFDIAEEASKVCLAHLFTYQDFDMGTLGLAYVGSPRANSHGGVCPKAYYSPVGKKNIYLNSGLTSTKNYGKTILTKEADLVTTHELGHNFGAEHDPDGLAECAPNEDQGGKYVMYPIAVSGDHENNKMFSNCSKQSIYKTIESKAQECFQERSNKVCGNSRVDEGEECDPGIMYLNNDTCCNSDCTLKEGVQCSDRNSPCCKNCQFETAQKKCQEAINATCKGVSYCTGNSSECPPPGNAEDDTVCLDLGKCKDGKCIPFCEREQQLESCACNETDNSCKVCCRDLSGRCVPYVDAEQKNLFLRKGKPCTVGFCDMNGKCEKRVQDVIERFWDFIDQLSINTFGKFLADNIVGSVLVFSLIFWIPFSILVHCVDKKLDKQYESLSLFHPSNVEMLSSMDSASVRIIKPFPAPQTPGRLQPAPVIPSAPAAPKLDHQRMDTIQEDPSTDSHMDEDGFEKDPFPNSSTAAKSFEDLTDHPVTRSEKAASFKLQRQNRVDSKETEC

SEQ ID NO: 90177 - protein, 8 aa, Homo Sapiens
RQSLLFLT

SEQ ID NO: 90178 - protein, 8 aa, Homo Sapiens
SLLFLTSV

SEQ ID NO: 90179 - protein, 8 aa, Homo Sapiens
LLFLTSVV

SEQ ID NO: 90180 - protein, 8 aa, Homo Sapiens
FLTSVVPF

SEQ ID NO: 90181 - protein, 8 aa, Homo Sapiens
LTSVVPFV

SEQ ID NO: 90182 - protein, 8 aa, Homo Sapiens
TSVVPFVL

SEQ ID NO: 90183 - protein, 8 aa, Homo Sapiens
SVVPFVLA

SEQ ID NO: 90184 - protein, 8 aa, Homo Sapiens
VPFVLAPR

SEQ ID NO: 90185 - protein, 8 aa, Homo Sapiens
RPPDDPGF

SEQ ID NO: 90186 - protein, 8 aa, Homo Sapiens
RLEKLDSL

SEQ ID NO: 90187 - protein, 8 aa, Homo Sapiens
LEKLDSLL

SEQ ID NO: 90188 - protein, 8 aa, Homo Sapiens
KLDSLLSD

SEQ ID NO: 90189 - protein, 8 aa, Homo Sapiens
SLLSDYDI

SEQ ID NO: 90190 - protein, 8 aa, Homo Sapiens
LLSDYDIL

SEQ ID NO: 90191 - protein, 8 aa, Homo Sapiens
SDYDILSL

SEQ ID NO: 90192 - protein, 8 aa, Homo Sapiens
DILSLSNI

SEQ ID NO: 90193 - protein, 8 aa, Homo Sapiens
NIQQHSVR

SEQ ID NO: 90194 - protein, 8 aa, Homo Sapiens
IQQHSVRK

SEQ ID NO: 90195 - protein, 8 aa, Homo Sapiens
QQHSVRKR

SEQ ID NO: 90196 - protein, 8 aa, Homo Sapiens
DLQTSTHV

SEQ ID NO: 90197 - protein, 8 aa, Homo Sapiens
HVETLLTF

SEQ ID NO: 90198 - protein, 8 aa, Homo Sapiens
ETLLTFSA

SEQ ID NO: 90199 - protein, 8 aa, Homo Sapiens
TLLTFSAL

SEQ ID NO: 90200 - protein, 8 aa, Homo Sapiens
LLTFSALK

SEQ ID NO: 90201 - protein, 8 aa, Homo Sapiens
LTFSALKR

SEQ ID NO: 90202 - protein, 8 aa, Homo Sapiens
SALKRHFK

SEQ ID NO: 90203 - protein, 8 aa, Homo Sapiens
ALKRHFKL

SEQ ID NO: 90204 - protein, 8 aa, Homo Sapiens
KRHFKLYL

SEQ ID NO: 90205 - protein, 8 aa, Homo Sapiens
KLYLTSST

SEQ ID NO: 90206 - protein, 8 aa, Homo Sapiens
YLTSSTER

SEQ ID NO: 90207 - protein, 8 aa, Homo Sapiens
LTSSTERF

SEQ ID NO: 90208 - protein, 8 aa, Homo Sapiens
TERFSQNF

SEQ ID NO: 90209 - protein, 8 aa, Homo Sapiens
ERFSQNFK

SEQ ID NO: 90210 - protein, 8 aa, Homo Sapiens
RFSQNFKV

SEQ ID NO: 90211 - protein, 8 aa, Homo Sapiens
SQNFKVVV

SEQ ID NO: 90212 - protein, 8 aa, Homo Sapiens
KVVVVDGK

SEQ ID NO: 90213 - protein, 8 aa, Homo Sapiens
ESEYTVKW

SEQ ID NO: 90214 - protein, 8 aa, Homo Sapiens
YTVKWQDF

SEQ ID NO: 90215 - protein, 8 aa, Homo Sapiens
TVKWQDFF

SEQ ID NO: 90216 - protein, 8 aa, Homo Sapiens
DFFTGHVV

SEQ ID NO: 90217 - protein, 8 aa, Homo Sapiens
GEPDSRVL

SEQ ID NO: 90218 - protein, 8 aa, Homo Sapiens
AEYNIEPL

SEQ ID NO: 90219 - protein, 8 aa, Homo Sapiens
EYNIEPLW

SEQ ID NO: 90220 - protein, 8 aa, Homo Sapiens
NIEPLWRF

SEQ ID NO: 90221 - protein, 8 aa, Homo Sapiens
WRFVNDTK

SEQ ID NO: 90222 - protein, 8 aa, Homo Sapiens
FVNDTKDK

SEQ ID NO: 90223 - protein, 8 aa, Homo Sapiens
DTKDKRML

SEQ ID NO: 90224 - protein, 8 aa, Homo Sapiens
KRMLVYKS

SEQ ID NO: 90225 - protein, 8 aa, Homo Sapiens
VYKSEDIK

SEQ ID NO: 90226 - protein, 8 aa, Homo Sapiens
EDIKNVSR

SEQ ID NO: 90227 - protein, 8 aa, Homo Sapiens
VSRLQSPK

SEQ ID NO: 90228 - protein, 8 aa, Homo Sapiens
SPKVCGYL

SEQ ID NO: 90229 - protein, 8 aa, Homo Sapiens
KVCGYLKV

SEQ ID NO: 90230 - protein, 8 aa, Homo Sapiens
KVDNEELL

SEQ ID NO: 90231 - protein, 8 aa, Homo Sapiens
EELLPKGL

SEQ ID NO: 90232 - protein, 8 aa, Homo Sapiens
ELLPKGLV

SEQ ID NO: 90233 - protein, 8 aa, Homo Sapiens
EPPEELVH

SEQ ID NO: 90234 - protein, 8 aa, Homo Sapiens
ELVHRVKR

SEQ ID NO: 90235 - protein, 8 aa, Homo Sapiens
LVHRVKRR

SEQ ID NO: 90236 - protein, 8 aa, Homo Sapiens
RRADPDPM

SEQ ID NO: 90237 - protein, 8 aa, Homo Sapiens
RADPDPMK

SEQ ID NO: 90238 - protein, 8 aa, Homo Sapiens
DPMKNTCK

SEQ ID NO: 90239 - protein, 8 aa, Homo Sapiens
PMKNTCKL

SEQ ID NO: 90240 - protein, 8 aa, Homo Sapiens
NTCKLLVV

SEQ ID NO: 90241 - protein, 8 aa, Homo Sapiens
LLVVADHR

SEQ ID NO: 90242 - protein, 8 aa, Homo Sapiens
LVVADHRF

SEQ ID NO: 90243 - protein, 8 aa, Homo Sapiens
VVADHRFY

SEQ ID NO: 90244 - protein, 8 aa, Homo Sapiens
VADHRFYR

SEQ ID NO: 90245 - protein, 8 aa, Homo Sapiens
RFYRYMGR

SEQ ID NO: 90246 - protein, 8 aa, Homo Sapiens
YMGRGEES

SEQ ID NO: 90247 - protein, 8 aa, Homo Sapiens
EESTTTNY

SEQ ID NO: 90248 - protein, 8 aa, Homo Sapiens
ESTTTNYL

SEQ ID NO: 90249 - protein, 8 aa, Homo Sapiens
STTTNYLI

SEQ ID NO: 90250 - protein, 8 aa, Homo Sapiens
TTNYLIEL

SEQ ID NO: 90251 - protein, 8 aa, Homo Sapiens
YLIELIDR

SEQ ID NO: 90252 - protein, 8 aa, Homo Sapiens
LIELIDRV

SEQ ID NO: 90253 - protein, 8 aa, Homo Sapiens
TSWDNAGF

SEQ ID NO: 90254 - protein, 8 aa, Homo Sapiens
SWDNAGFK

SEQ ID NO: 90255 - protein, 8 aa, Homo Sapiens
IQIEQIRI

SEQ ID NO: 90256 - protein, 8 aa, Homo Sapiens
ILKSPQEV

SEQ ID NO: 90257 - protein, 8 aa, Homo Sapiens
EKHYNMAK

SEQ ID NO: 90258 - protein, 8 aa, Homo Sapiens
HYNMAKSY

SEQ ID NO: 90259 - protein, 8 aa, Homo Sapiens
KSYPNEEK

SEQ ID NO: 90260 - protein, 8 aa, Homo Sapiens
YPNEEKDA

SEQ ID NO: 90261 - protein, 8 aa, Homo Sapiens
EEKDAWDV

SEQ ID NO: 90262 - protein, 8 aa, Homo Sapiens
DAWDVKML

SEQ ID NO: 90263 - protein, 8 aa, Homo Sapiens
MLLEQFSF

SEQ ID NO: 90264 - protein, 8 aa, Homo Sapiens
LEQFSFDI

SEQ ID NO: 90265 - protein, 8 aa, Homo Sapiens
DIAEEASK

SEQ ID NO: 90266 - protein, 8 aa, Homo Sapiens
EEASKVCL

SEQ ID NO: 90267 - protein, 8 aa, Homo Sapiens
EASKVCLA

SEQ ID NO: 90268 - protein, 8 aa, Homo Sapiens
KVCLAHLF

SEQ ID NO: 90269 - protein, 8 aa, Homo Sapiens
CLAHLFTY

SEQ ID NO: 90270 - protein, 8 aa, Homo Sapiens
HLFTYQDF

SEQ ID NO: 90271 - protein, 8 aa, Homo Sapiens
FTYQDFDM

SEQ ID NO: 90272 - protein, 8 aa, Homo Sapiens
YQDFDMGT

SEQ ID NO: 90273 - protein, 8 aa, Homo Sapiens
FDMGTLGL

SEQ ID NO: 90274 - protein, 8 aa, Homo Sapiens
MGTLGLAY

SEQ ID NO: 90275 - protein, 8 aa, Homo Sapiens
GTLGLAYV

SEQ ID NO: 90276 - protein, 8 aa, Homo Sapiens
LAYVGSPR

SEQ ID NO: 90277 - protein, 8 aa, Homo Sapiens
SPRANSHG

SEQ ID NO: 90278 - protein, 8 aa, Homo Sapiens
RANSHGGV

SEQ ID NO: 90279 - protein, 8 aa, Homo Sapiens
GVCPKAYY

SEQ ID NO: 90280 - protein, 8 aa, Homo Sapiens
AYYSPVGK

SEQ ID NO: 90281 - protein, 8 aa, Homo Sapiens
YYSPVGKK

SEQ ID NO: 90282 - protein, 8 aa, Homo Sapiens
SPVGKKNI

SEQ ID NO: 90283 - protein, 8 aa, Homo Sapiens
NIYLNSGL

SEQ ID NO: 90284 - protein, 8 aa, Homo Sapiens
YLNSGLTS

SEQ ID NO: 90285 - protein, 8 aa, Homo Sapiens
NSGLTSTK

SEQ ID NO: 90286 - protein, 8 aa, Homo Sapiens
GLTSTKNY

SEQ ID NO: 90287 - protein, 8 aa, Homo Sapiens
TSTKNYGK

SEQ ID NO: 90288 - protein, 8 aa, Homo Sapiens
ILTKEADL

SEQ ID NO: 90289 - protein, 8 aa, Homo Sapiens
LTKEADLV

SEQ ID NO: 90290 - protein, 8 aa, Homo Sapiens
DLVTTHEL

SEQ ID NO: 90291 - protein, 8 aa, Homo Sapiens
ELGHNFGA

SEQ ID NO: 90292 - protein, 8 aa, Homo Sapiens
AEHDPDGL

SEQ ID NO: 90293 - protein, 8 aa, Homo Sapiens
NEDQGGKY

SEQ ID NO: 90294 - protein, 8 aa, Homo Sapiens
YVMYPIAV

SEQ ID NO: 90295 - protein, 8 aa, Homo Sapiens
VMYPIAVS

SEQ ID NO: 90296 - protein, 8 aa, Homo Sapiens
YPIAVSGD

SEQ ID NO: 90297 - protein, 8 aa, Homo Sapiens
KMFSNCSK

SEQ ID NO: 90298 - protein, 8 aa, Homo Sapiens
CSKQSIYK

SEQ ID NO: 90299 - protein, 8 aa, Homo Sapiens
KQSIYKTI

SEQ ID NO: 90300 - protein, 8 aa, Homo Sapiens
IYKTIESK

SEQ ID NO: 90301 - protein, 8 aa, Homo Sapiens
ESKAQECF

SEQ ID NO: 90302 - protein, 8 aa, Homo Sapiens
AQECFQER

SEQ ID NO: 90303 - protein, 8 aa, Homo Sapiens
CFQERSNK

SEQ ID NO: 90304 - protein, 8 aa, Homo Sapiens
FQERSNKV

SEQ ID NO: 90305 - protein, 8 aa, Homo Sapiens
KVCGNSRV

SEQ ID NO: 90306 - protein, 8 aa, Homo Sapiens
RVDEGEEC

SEQ ID NO: 90307 - protein, 8 aa, Homo Sapiens
GEECDPGI

SEQ ID NO: 90308 - protein, 8 aa, Homo Sapiens
ECDPGIMY

SEQ ID NO: 90309 - protein, 8 aa, Homo Sapiens
YLNNDTCC

SEQ ID NO: 90310 - protein, 8 aa, Homo Sapiens
TLKEGVQC

SEQ ID NO: 90311 - protein, 8 aa, Homo Sapiens
EGVQCSDR

SEQ ID NO: 90312 - protein, 8 aa, Homo Sapiens
CQFETAQK

SEQ ID NO: 90313 - protein, 8 aa, Homo Sapiens
EAINATCK

SEQ ID NO: 90314 - protein, 8 aa, Homo Sapiens
ATCKGVSY

SEQ ID NO: 90315 - protein, 8 aa, Homo Sapiens
AEDDTVCL

SEQ ID NO: 90316 - protein, 8 aa, Homo Sapiens
TVCLDLGK

SEQ ID NO: 90317 - protein, 8 aa, Homo Sapiens
KCIPFCER

SEQ ID NO: 90318 - protein, 8 aa, Homo Sapiens
QQLESCAC

SEQ ID NO: 90319 - protein, 8 aa, Homo Sapiens
ETDNSCKV

SEQ ID NO: 90320 - protein, 8 aa, Homo Sapiens
NSCKVCCR

SEQ ID NO: 90321 - protein, 8 aa, Homo Sapiens
SGRCVPYV

SEQ ID NO: 90322 - protein, 8 aa, Homo Sapiens
PYVDAEQK

SEQ ID NO: 90323 - protein, 8 aa, Homo Sapiens
DAEQKNLF

SEQ ID NO: 90324 - protein, 8 aa, Homo Sapiens
AEQKNLFL

SEQ ID NO: 90325 - protein, 8 aa, Homo Sapiens
EQKNLFLR

SEQ ID NO: 90326 - protein, 8 aa, Homo Sapiens
NLFLRKGK

SEQ ID NO: 90327 - protein, 8 aa, Homo Sapiens
FLRKGKPC

SEQ ID NO: 90328 - protein, 8 aa, Homo Sapiens
DMNGKCEK

SEQ ID NO: 90329 - protein, 8 aa, Homo Sapiens
RVQDVIER

SEQ ID NO: 90330 - protein, 8 aa, Homo Sapiens
FWDFIDQL

SEQ ID NO: 90331 - protein, 8 aa, Homo Sapiens
DQLSINTF

SEQ ID NO: 90332 - protein, 8 aa, Homo Sapiens
LSINTFGK

SEQ ID NO: 90333 - protein, 8 aa, Homo Sapiens
SINTFGKF

SEQ ID NO: 90334 - protein, 8 aa, Homo Sapiens
NTFGKFLA

SEQ ID NO: 90335 - protein, 8 aa, Homo Sapiens
FLADNIVG

SEQ ID NO: 90336 - protein, 8 aa, Homo Sapiens
NIVGSVLV

SEQ ID NO: 90337 - protein, 8 aa, Homo Sapiens
SVLVFSLI

SEQ ID NO: 90338 - protein, 8 aa, Homo Sapiens
VLVFSLIF

SEQ ID NO: 90339 - protein, 8 aa, Homo Sapiens
LVFSLIFW

SEQ ID NO: 90340 - protein, 8 aa, Homo Sapiens
VFSLIFWI

SEQ ID NO: 90341 - protein, 8 aa, Homo Sapiens
SLIFWIPF

SEQ ID NO: 90342 - protein, 8 aa, Homo Sapiens
IFWIPFSI

SEQ ID NO: 90343 - protein, 8 aa, Homo Sapiens
FWIPFSIL

SEQ ID NO: 90344 - protein, 8 aa, Homo Sapiens
WIPFSILV

SEQ ID NO: 90345 - protein, 8 aa, Homo Sapiens
IPFSILVH

SEQ ID NO: 90346 - protein, 8 aa, Homo Sapiens
FSILVHCV

SEQ ID NO: 90347 - protein, 8 aa, Homo Sapiens
ILVHCVDK

SEQ ID NO: 90348 - protein, 8 aa, Homo Sapiens
LVHCVDKK

SEQ ID NO: 90349 - protein, 8 aa, Homo Sapiens
KLDKQYES

SEQ ID NO: 90350 - protein, 8 aa, Homo Sapiens
KQYESLSL

SEQ ID NO: 90351 - protein, 8 aa, Homo Sapiens
QYESLSLF

SEQ ID NO: 90352 - protein, 8 aa, Homo Sapiens
SLSLFHPS

SEQ ID NO: 90353 - protein, 8 aa, Homo Sapiens
SLFHPSNV

SEQ ID NO: 90354 - protein, 8 aa, Homo Sapiens
HPSNVEML

SEQ ID NO: 90355 - protein, 8 aa, Homo Sapiens
NVEMLSSM

SEQ ID NO: 90356 - protein, 8 aa, Homo Sapiens
MLSSMDSA

SEQ ID NO: 90357 - protein, 8 aa, Homo Sapiens
SSMDSASV

SEQ ID NO: 90358 - protein, 8 aa, Homo Sapiens
SMDSASVR

SEQ ID NO: 90359 - protein, 8 aa, Homo Sapiens
SASVRIIK

SEQ ID NO: 90360 - protein, 8 aa, Homo Sapiens
SVRIIKPF

SEQ ID NO: 90361 - protein, 8 aa, Homo Sapiens
RIIKPFPA

SEQ ID NO: 90362 - protein, 8 aa, Homo Sapiens
FPAPQTPG

SEQ ID NO: 90363 - protein, 8 aa, Homo Sapiens
APQTPGRL

SEQ ID NO: 90364 - protein, 8 aa, Homo Sapiens
TPGRLQPA

SEQ ID NO: 90365 - protein, 8 aa, Homo Sapiens
RLQPAPVI

SEQ ID NO: 90366 - protein, 8 aa, Homo Sapiens
PSAPAAPK

SEQ ID NO: 90367 - protein, 8 aa, Homo Sapiens
DPSTDSHM

SEQ ID NO: 90368 - protein, 8 aa, Homo Sapiens
FPNSSTAA

SEQ ID NO: 90369 - protein, 8 aa, Homo Sapiens
DLTDHPVT

SEQ ID NO: 90370 - protein, 8 aa, Homo Sapiens
LTDHPVTR

SEQ ID NO: 90371 - protein, 8 aa, Homo Sapiens
HPVTRSEK

SEQ ID NO: 90372 - protein, 8 aa, Homo Sapiens
SEKAASFK

SEQ ID NO: 90373 - protein, 8 aa, Homo Sapiens
EKAASFKL

SEQ ID NO: 90374 - protein, 8 aa, Homo Sapiens
AASFKLQR

SEQ ID NO: 90375 - protein, 8 aa, Homo Sapiens
KLQRQNRV

SEQ ID NO: 90376 - protein, 8 aa, Homo Sapiens
RQNRVDSK

SEQ ID NO: 90377 - protein, 9 aa, Homo Sapiens
RQSLLFLTS

SEQ ID NO: 90378 - protein, 9 aa, Homo Sapiens
QSLLFLTSV

SEQ ID NO: 90379 - protein, 9 aa, Homo Sapiens
SLLFLTSVV

SEQ ID NO: 90380 - protein, 9 aa, Homo Sapiens
LFLTSVVPF

SEQ ID NO: 90381 - protein, 9 aa, Homo Sapiens
FLTSVVPFV

SEQ ID NO: 90382 - protein, 9 aa, Homo Sapiens
LTSVVPFVL

SEQ ID NO: 90383 - protein, 9 aa, Homo Sapiens
TSVVPFVLA

SEQ ID NO: 90384 - protein, 9 aa, Homo Sapiens
VVPFVLAPR

SEQ ID NO: 90385 - protein, 9 aa, Homo Sapiens
VPFVLAPRP

SEQ ID NO: 90386 - protein, 9 aa, Homo Sapiens
DPGFGPHQR

SEQ ID NO: 90387 - protein, 9 aa, Homo Sapiens
GPHQRLEKL

SEQ ID NO: 90388 - protein, 9 aa, Homo Sapiens
QRLEKLDSL

SEQ ID NO: 90389 - protein, 9 aa, Homo Sapiens
RLEKLDSLL

SEQ ID NO: 90390 - protein, 9 aa, Homo Sapiens
KLDSLLSDY

SEQ ID NO: 90391 - protein, 9 aa, Homo Sapiens
SLLSDYDIL

SEQ ID NO: 90392 - protein, 9 aa, Homo Sapiens
LLSDYDILS

SEQ ID NO: 90393 - protein, 9 aa, Homo Sapiens
ILSLSNIQQ

SEQ ID NO: 90394 - protein, 9 aa, Homo Sapiens
SLSNIQQHS

SEQ ID NO: 90395 - protein, 9 aa, Homo Sapiens
SNIQQHSVR

SEQ ID NO: 90396 - protein, 9 aa, Homo Sapiens
NIQQHSVRK

SEQ ID NO: 90397 - protein, 9 aa, Homo Sapiens
IQQHSVRKR

SEQ ID NO: 90398 - protein, 9 aa, Homo Sapiens
QTSTHVETL

SEQ ID NO: 90399 - protein, 9 aa, Homo Sapiens
THVETLLTF

SEQ ID NO: 90400 - protein, 9 aa, Homo Sapiens
ETLLTFSAL

SEQ ID NO: 90401 - protein, 9 aa, Homo Sapiens
TLLTFSALK

SEQ ID NO: 90402 - protein, 9 aa, Homo Sapiens
LLTFSALKR

SEQ ID NO: 90403 - protein, 9 aa, Homo Sapiens
TFSALKRHF

SEQ ID NO: 90404 - protein, 9 aa, Homo Sapiens
FSALKRHFK

SEQ ID NO: 90405 - protein, 9 aa, Homo Sapiens
SALKRHFKL

SEQ ID NO: 90406 - protein, 9 aa, Homo Sapiens
ALKRHFKLY

SEQ ID NO: 90407 - protein, 9 aa, Homo Sapiens
LKRHFKLYL

SEQ ID NO: 90408 - protein, 9 aa, Homo Sapiens
LYLTSSTER

SEQ ID NO: 90409 - protein, 9 aa, Homo Sapiens
YLTSSTERF

SEQ ID NO: 90410 - protein, 9 aa, Homo Sapiens
STERFSQNF

SEQ ID NO: 90411 - protein, 9 aa, Homo Sapiens
TERFSQNFK

SEQ ID NO: 90412 - protein, 9 aa, Homo Sapiens
ERFSQNFKV

SEQ ID NO: 90413 - protein, 9 aa, Homo Sapiens
FSQNFKVVV

SEQ ID NO: 90414 - protein, 9 aa, Homo Sapiens
SQNFKVVVV

SEQ ID NO: 90415 - protein, 9 aa, Homo Sapiens
GKNESEYTV

SEQ ID NO: 90416 - protein, 9 aa, Homo Sapiens
NESEYTVKW

SEQ ID NO: 90417 - protein, 9 aa, Homo Sapiens
EYTVKWQDF

SEQ ID NO: 90418 - protein, 9 aa, Homo Sapiens
YTVKWQDFF

SEQ ID NO: 90419 - protein, 9 aa, Homo Sapiens
WQDFFTGHV

SEQ ID NO: 90420 - protein, 9 aa, Homo Sapiens
HVVGEPDSR

SEQ ID NO: 90421 - protein, 9 aa, Homo Sapiens
VVGEPDSRV

SEQ ID NO: 90422 - protein, 9 aa, Homo Sapiens
EPDSRVLAH

SEQ ID NO: 90423 - protein, 9 aa, Homo Sapiens
DSRVLAHIR

SEQ ID NO: 90424 - protein, 9 aa, Homo Sapiens
RINTDGAEY

SEQ ID NO: 90425 - protein, 9 aa, Homo Sapiens
NTDGAEYNI

SEQ ID NO: 90426 - protein, 9 aa, Homo Sapiens
AEYNIEPLW

SEQ ID NO: 90427 - protein, 9 aa, Homo Sapiens
EYNIEPLWR

SEQ ID NO: 90428 - protein, 9 aa, Homo Sapiens
YNIEPLWRF

SEQ ID NO: 90429 - protein, 9 aa, Homo Sapiens
NIEPLWRFV

SEQ ID NO: 90430 - protein, 9 aa, Homo Sapiens
LWRFVNDTK

SEQ ID NO: 90431 - protein, 9 aa, Homo Sapiens
RFVNDTKDK

SEQ ID NO: 90432 - protein, 9 aa, Homo Sapiens
FVNDTKDKR

SEQ ID NO: 90433 - protein, 9 aa, Homo Sapiens
DTKDKRMLV

SEQ ID NO: 90434 - protein, 9 aa, Homo Sapiens
KDKRMLVYK

SEQ ID NO: 90435 - protein, 9 aa, Homo Sapiens
KRMLVYKSE

SEQ ID NO: 90436 - protein, 9 aa, Homo Sapiens
MLVYKSEDI

SEQ ID NO: 90437 - protein, 9 aa, Homo Sapiens
LVYKSEDIK

SEQ ID NO: 90438 - protein, 9 aa, Homo Sapiens
NVSRLQSPK

SEQ ID NO: 90439 - protein, 9 aa, Homo Sapiens
LQSPKVCGY

SEQ ID NO: 90440 - protein, 9 aa, Homo Sapiens
SPKVCGYLK

SEQ ID NO: 90441 - protein, 9 aa, Homo Sapiens
YLKVDNEEL

SEQ ID NO: 90442 - protein, 9 aa, Homo Sapiens
NEELLPKGL

SEQ ID NO: 90443 - protein, 9 aa, Homo Sapiens
EPPEELVHR

SEQ ID NO: 90444 - protein, 9 aa, Homo Sapiens
PPEELVHRV

SEQ ID NO: 90445 - protein, 9 aa, Homo Sapiens
ELVHRVKRR

SEQ ID NO: 90446 - protein, 9 aa, Homo Sapiens
RRADPDPMK

SEQ ID NO: 90447 - protein, 9 aa, Homo Sapiens
DPMKNTCKL

SEQ ID NO: 90448 - protein, 9 aa, Homo Sapiens
KLLVVADHR

SEQ ID NO: 90449 - protein, 9 aa, Homo Sapiens
LLVVADHRF

SEQ ID NO: 90450 - protein, 9 aa, Homo Sapiens
LVVADHRFY

SEQ ID NO: 90451 - protein, 9 aa, Homo Sapiens
VVADHRFYR

SEQ ID NO: 90452 - protein, 9 aa, Homo Sapiens
HRFYRYMGR

SEQ ID NO: 90453 - protein, 9 aa, Homo Sapiens
YMGRGEEST

SEQ ID NO: 90454 - protein, 9 aa, Homo Sapiens
EESTTTNYL

SEQ ID NO: 90455 - protein, 9 aa, Homo Sapiens
ESTTTNYLI

SEQ ID NO: 90456 - protein, 9 aa, Homo Sapiens
TTTNYLIEL

SEQ ID NO: 90457 - protein, 9 aa, Homo Sapiens
TTNYLIELI

SEQ ID NO: 90458 - protein, 9 aa, Homo Sapiens
NYLIELIDR

SEQ ID NO: 90459 - protein, 9 aa, Homo Sapiens
YLIELIDRV

SEQ ID NO: 90460 - protein, 9 aa, Homo Sapiens
ELIDRVDDI

SEQ ID NO: 90461 - protein, 9 aa, Homo Sapiens
LIDRVDDIY

SEQ ID NO: 90462 - protein, 9 aa, Homo Sapiens
NTSWDNAGF

SEQ ID NO: 90463 - protein, 9 aa, Homo Sapiens
TSWDNAGFK

SEQ ID NO: 90464 - protein, 9 aa, Homo Sapiens
GYGIQIEQI

SEQ ID NO: 90465 - protein, 9 aa, Homo Sapiens
YGIQIEQIR

SEQ ID NO: 90466 - protein, 9 aa, Homo Sapiens
IQIEQIRIL

SEQ ID NO: 90467 - protein, 9 aa, Homo Sapiens
QIEQIRILK

SEQ ID NO: 90468 - protein, 9 aa, Homo Sapiens
RILKSPQEV

SEQ ID NO: 90469 - protein, 9 aa, Homo Sapiens
ILKSPQEVK

SEQ ID NO: 90470 - protein, 9 aa, Homo Sapiens
EVKPGEKHY

SEQ ID NO: 90471 - protein, 9 aa, Homo Sapiens
KPGEKHYNM

SEQ ID NO: 90472 - protein, 9 aa, Homo Sapiens
YPNEEKDAW

SEQ ID NO: 90473 - protein, 9 aa, Homo Sapiens
DAWDVKMLL

SEQ ID NO: 90474 - protein, 9 aa, Homo Sapiens
DVKMLLEQF

SEQ ID NO: 90475 - protein, 9 aa, Homo Sapiens
KMLLEQFSF

SEQ ID NO: 90476 - protein, 9 aa, Homo Sapiens
LLEQFSFDI

SEQ ID NO: 90477 - protein, 9 aa, Homo Sapiens
FSFDIAEEA

SEQ ID NO: 90478 - protein, 9 aa, Homo Sapiens
DIAEEASKV

SEQ ID NO: 90479 - protein, 9 aa, Homo Sapiens
AEEASKVCL

SEQ ID NO: 90480 - protein, 9 aa, Homo Sapiens
EEASKVCLA

SEQ ID NO: 90481 - protein, 9 aa, Homo Sapiens
KVCLAHLFT

SEQ ID NO: 90482 - protein, 9 aa, Homo Sapiens
VCLAHLFTY

SEQ ID NO: 90483 - protein, 9 aa, Homo Sapiens
CLAHLFTYQ

SEQ ID NO: 90484 - protein, 9 aa, Homo Sapiens
AHLFTYQDF

SEQ ID NO: 90485 - protein, 9 aa, Homo Sapiens
YQDFDMGTL

SEQ ID NO: 90486 - protein, 9 aa, Homo Sapiens
DMGTLGLAY

SEQ ID NO: 90487 - protein, 9 aa, Homo Sapiens
MGTLGLAYV

SEQ ID NO: 90488 - protein, 9 aa, Homo Sapiens
GLAYVGSPR

SEQ ID NO: 90489 - protein, 9 aa, Homo Sapiens
LAYVGSPRA

SEQ ID NO: 90490 - protein, 9 aa, Homo Sapiens
NSHGGVCPK

SEQ ID NO: 90491 - protein, 9 aa, Homo Sapiens
CPKAYYSPV

SEQ ID NO: 90492 - protein, 9 aa, Homo Sapiens
KAYYSPVGK

SEQ ID NO: 90493 - protein, 9 aa, Homo Sapiens
AYYSPVGKK

SEQ ID NO: 90494 - protein, 9 aa, Homo Sapiens
SPVGKKNIY

SEQ ID NO: 90495 - protein, 9 aa, Homo Sapiens
PVGKKNIYL

SEQ ID NO: 90496 - protein, 9 aa, Homo Sapiens
YLNSGLTST

SEQ ID NO: 90497 - protein, 9 aa, Homo Sapiens
LTSTKNYGK

SEQ ID NO: 90498 - protein, 9 aa, Homo Sapiens
NYGKTILTK

SEQ ID NO: 90499 - protein, 9 aa, Homo Sapiens
ILTKEADLV

SEQ ID NO: 90500 - protein, 9 aa, Homo Sapiens
TTHELGHNF

SEQ ID NO: 90501 - protein, 9 aa, Homo Sapiens
AEHDPDGLA

SEQ ID NO: 90502 - protein, 9 aa, Homo Sapiens
KYVMYPIAV

SEQ ID NO: 90503 - protein, 9 aa, Homo Sapiens
YVMYPIAVS

SEQ ID NO: 90504 - protein, 9 aa, Homo Sapiens
VMYPIAVSG

SEQ ID NO: 90505 - protein, 9 aa, Homo Sapiens
YPIAVSGDH

SEQ ID NO: 90506 - protein, 9 aa, Homo Sapiens
VSGDHENNK

SEQ ID NO: 90507 - protein, 9 aa, Homo Sapiens
NKMFSNCSK

SEQ ID NO: 90508 - protein, 9 aa, Homo Sapiens
FSNCSKQSI

SEQ ID NO: 90509 - protein, 9 aa, Homo Sapiens
SIYKTIESK

SEQ ID NO: 90510 - protein, 9 aa, Homo Sapiens
IESKAQECF

SEQ ID NO: 90511 - protein, 9 aa, Homo Sapiens
KAQECFQER

SEQ ID NO: 90512 - protein, 9 aa, Homo Sapiens
ECFQERSNK

SEQ ID NO: 90513 - protein, 9 aa, Homo Sapiens
NKVCGNSRV

SEQ ID NO: 90514 - protein, 9 aa, Homo Sapiens
EECDPGIMY

SEQ ID NO: 90515 - protein, 9 aa, Homo Sapiens
ECDPGIMYL

SEQ ID NO: 90516 - protein, 9 aa, Homo Sapiens
IMYLNNDTC

SEQ ID NO: 90517 - protein, 9 aa, Homo Sapiens
TLKEGVQCS

SEQ ID NO: 90518 - protein, 9 aa, Homo Sapiens
SPCCKNCQF

SEQ ID NO: 90519 - protein, 9 aa, Homo Sapiens
CQFETAQKK

SEQ ID NO: 90520 - protein, 9 aa, Homo Sapiens
AINATCKGV

SEQ ID NO: 90521 - protein, 9 aa, Homo Sapiens
NATCKGVSY

SEQ ID NO: 90522 - protein, 9 aa, Homo Sapiens
NAEDDTVCL

SEQ ID NO: 90523 - protein, 9 aa, Homo Sapiens
DTVCLDLGK

SEQ ID NO: 90524 - protein, 9 aa, Homo Sapiens
REQQLESCA

SEQ ID NO: 90525 - protein, 9 aa, Homo Sapiens
DNSCKVCCR

SEQ ID NO: 90526 - protein, 9 aa, Homo Sapiens
DLSGRCVPY

SEQ ID NO: 90527 - protein, 9 aa, Homo Sapiens
YVDAEQKNL

SEQ ID NO: 90528 - protein, 9 aa, Homo Sapiens
AEQKNLFLR

SEQ ID NO: 90529 - protein, 9 aa, Homo Sapiens
EQKNLFLRK

SEQ ID NO: 90530 - protein, 9 aa, Homo Sapiens
KNLFLRKGK

SEQ ID NO: 90531 - protein, 9 aa, Homo Sapiens
FLRKGKPCT

SEQ ID NO: 90532 - protein, 9 aa, Homo Sapiens
DMNGKCEKR

SEQ ID NO: 90533 - protein, 9 aa, Homo Sapiens
RVQDVIERF

SEQ ID NO: 90534 - protein, 9 aa, Homo Sapiens
DVIERFWDF

SEQ ID NO: 90535 - protein, 9 aa, Homo Sapiens
RFWDFIDQL

SEQ ID NO: 90536 - protein, 9 aa, Homo Sapiens
FIDQLSINT

SEQ ID NO: 90537 - protein, 9 aa, Homo Sapiens
QLSINTFGK

SEQ ID NO: 90538 - protein, 9 aa, Homo Sapiens
LSINTFGKF

SEQ ID NO: 90539 - protein, 9 aa, Homo Sapiens
SINTFGKFL

SEQ ID NO: 90540 - protein, 9 aa, Homo Sapiens
FLADNIVGS

SEQ ID NO: 90541 - protein, 9 aa, Homo Sapiens
LADNIVGSV

SEQ ID NO: 90542 - protein, 9 aa, Homo Sapiens
NIVGSVLVF

SEQ ID NO: 90543 - protein, 9 aa, Homo Sapiens
SVLVFSLIF

SEQ ID NO: 90544 - protein, 9 aa, Homo Sapiens
LVFSLIFWI

SEQ ID NO: 90545 - protein, 9 aa, Homo Sapiens
FSLIFWIPF

SEQ ID NO: 90546 - protein, 9 aa, Homo Sapiens
SLIFWIPFS

SEQ ID NO: 90547 - protein, 9 aa, Homo Sapiens
LIFWIPFSI

SEQ ID NO: 90548 - protein, 9 aa, Homo Sapiens
FWIPFSILV

SEQ ID NO: 90549 - protein, 9 aa, Homo Sapiens
IPFSILVHC

SEQ ID NO: 90550 - protein, 9 aa, Homo Sapiens
SILVHCVDK

SEQ ID NO: 90551 - protein, 9 aa, Homo Sapiens
ILVHCVDKK

SEQ ID NO: 90552 - protein, 9 aa, Homo Sapiens
KLDKQYESL

SEQ ID NO: 90553 - protein, 9 aa, Homo Sapiens
KQYESLSLF

SEQ ID NO: 90554 - protein, 9 aa, Homo Sapiens
QYESLSLFH

SEQ ID NO: 90555 - protein, 9 aa, Homo Sapiens
LSLFHPSNV

SEQ ID NO: 90556 - protein, 9 aa, Homo Sapiens
LFHPSNVEM

SEQ ID NO: 90557 - protein, 9 aa, Homo Sapiens
FHPSNVEML

SEQ ID NO: 90558 - protein, 9 aa, Homo Sapiens
EMLSSMDSA

SEQ ID NO: 90559 - protein, 9 aa, Homo Sapiens
MLSSMDSAS

SEQ ID NO: 90560 - protein, 9 aa, Homo Sapiens
LSSMDSASV

SEQ ID NO: 90561 - protein, 9 aa, Homo Sapiens
SSMDSASVR

SEQ ID NO: 90562 - protein, 9 aa, Homo Sapiens
SMDSASVRI

SEQ ID NO: 90563 - protein, 9 aa, Homo Sapiens
DSASVRIIK

SEQ ID NO: 90564 - protein, 9 aa, Homo Sapiens
ASVRIIKPF

SEQ ID NO: 90565 - protein, 9 aa, Homo Sapiens
FPAPQTPGR

SEQ ID NO: 90566 - protein, 9 aa, Homo Sapiens
QTPGRLQPA

SEQ ID NO: 90567 - protein, 9 aa, Homo Sapiens
QPAPVIPSA

SEQ ID NO: 90568 - protein, 9 aa, Homo Sapiens
APVIPSAPA

SEQ ID NO: 90569 - protein, 9 aa, Homo Sapiens
IPSAPAAPK

SEQ ID NO: 90570 - protein, 9 aa, Homo Sapiens
APKLDHQRM

SEQ ID NO: 90571 - protein, 9 aa, Homo Sapiens
KLDHQRMDT

SEQ ID NO: 90572 - protein, 9 aa, Homo Sapiens
HMDEDGFEK

SEQ ID NO: 90573 - protein, 9 aa, Homo Sapiens
FPNSSTAAK

SEQ ID NO: 90574 - protein, 9 aa, Homo Sapiens
TAAKSFEDL

SEQ ID NO: 90575 - protein, 9 aa, Homo Sapiens
FEDLTDHPV

SEQ ID NO: 90576 - protein, 9 aa, Homo Sapiens
DLTDHPVTR

SEQ ID NO: 90577 - protein, 9 aa, Homo Sapiens
HPVTRSEKA

SEQ ID NO: 90578 - protein, 9 aa, Homo Sapiens
TRSEKAASF

SEQ ID NO: 90579 - protein, 9 aa, Homo Sapiens
RSEKAASFK

SEQ ID NO: 90580 - protein, 9 aa, Homo Sapiens
SEKAASFKL

SEQ ID NO: 90581 - protein, 9 aa, Homo Sapiens
KAASFKLQR

SEQ ID NO: 90582 - protein, 9 aa, Homo Sapiens
SFKLQRQNR

SEQ ID NO: 90583 - protein, 9 aa, Homo Sapiens
FKLQRQNRV

SEQ ID NO: 90584 - protein, 9 aa, Homo Sapiens
QRQNRVDSK

SEQ ID NO: 90585 - protein, 10 aa, Homo Sapiens
RQSLLFLTSV

SEQ ID NO: 90586 - protein, 10 aa, Homo Sapiens
QSLLFLTSVV

SEQ ID NO: 90587 - protein, 10 aa, Homo Sapiens
LLFLTSVVPF

SEQ ID NO: 90588 - protein, 10 aa, Homo Sapiens
LFLTSVVPFV

SEQ ID NO: 90589 - protein, 10 aa, Homo Sapiens
FLTSVVPFVL

SEQ ID NO: 90590 - protein, 10 aa, Homo Sapiens
LTSVVPFVLA

SEQ ID NO: 90591 - protein, 10 aa, Homo Sapiens
SVVPFVLAPR

SEQ ID NO: 90592 - protein, 10 aa, Homo Sapiens
VPFVLAPRPP

SEQ ID NO: 90593 - protein, 10 aa, Homo Sapiens
APRPPDDPGF

SEQ ID NO: 90594 - protein, 10 aa, Homo Sapiens
GFGPHQRLEK

SEQ ID NO: 90595 - protein, 10 aa, Homo Sapiens
SLLSDYDILS

SEQ ID NO: 90596 - protein, 10 aa, Homo Sapiens
LLSDYDILSL

SEQ ID NO: 90597 - protein, 10 aa, Homo Sapiens
DYDILSLSNI

SEQ ID NO: 90598 - protein, 10 aa, Homo Sapiens
SLSNIQQHSV

SEQ ID NO: 90599 - protein, 10 aa, Homo Sapiens
LSNIQQHSVR

SEQ ID NO: 90600 - protein, 10 aa, Homo Sapiens
NIQQHSVRKR

SEQ ID NO: 90601 - protein, 10 aa, Homo Sapiens
LQTSTHVETL

SEQ ID NO: 90602 - protein, 10 aa, Homo Sapiens
QTSTHVETLL

SEQ ID NO: 90603 - protein, 10 aa, Homo Sapiens
STHVETLLTF

SEQ ID NO: 90604 - protein, 10 aa, Homo Sapiens
VETLLTFSAL

SEQ ID NO: 90605 - protein, 10 aa, Homo Sapiens
ETLLTFSALK

SEQ ID NO: 90606 - protein, 10 aa, Homo Sapiens
TLLTFSALKR

SEQ ID NO: 90607 - protein, 10 aa, Homo Sapiens
LTFSALKRHF

SEQ ID NO: 90608 - protein, 10 aa, Homo Sapiens
TFSALKRHFK

SEQ ID NO: 90609 - protein, 10 aa, Homo Sapiens
FSALKRHFKL

SEQ ID NO: 90610 - protein, 10 aa, Homo Sapiens
SALKRHFKLY

SEQ ID NO: 90611 - protein, 10 aa, Homo Sapiens
ALKRHFKLYL

SEQ ID NO: 90612 - protein, 10 aa, Homo Sapiens
KLYLTSSTER

SEQ ID NO: 90613 - protein, 10 aa, Homo Sapiens
LYLTSSTERF

SEQ ID NO: 90614 - protein, 10 aa, Homo Sapiens
YLTSSTERFS

SEQ ID NO: 90615 - protein, 10 aa, Homo Sapiens
STERFSQNFK

SEQ ID NO: 90616 - protein, 10 aa, Homo Sapiens
ERFSQNFKVV

SEQ ID NO: 90617 - protein, 10 aa, Homo Sapiens
RFSQNFKVVV

SEQ ID NO: 90618 - protein, 10 aa, Homo Sapiens
FSQNFKVVVV

SEQ ID NO: 90619 - protein, 10 aa, Homo Sapiens
VVDGKNESEY

SEQ ID NO: 90620 - protein, 10 aa, Homo Sapiens
SEYTVKWQDF

SEQ ID NO: 90621 - protein, 10 aa, Homo Sapiens
EYTVKWQDFF

SEQ ID NO: 90622 - protein, 10 aa, Homo Sapiens
YTVKWQDFFT

SEQ ID NO: 90623 - protein, 10 aa, Homo Sapiens
WQDFFTGHVV

SEQ ID NO: 90624 - protein, 10 aa, Homo Sapiens
HVVGEPDSRV

SEQ ID NO: 90625 - protein, 10 aa, Homo Sapiens
EPDSRVLAHI

SEQ ID NO: 90626 - protein, 10 aa, Homo Sapiens
VLAHIRDDDV

SEQ ID NO: 90627 - protein, 10 aa, Homo Sapiens
HIRDDDVIIR

SEQ ID NO: 90628 - protein, 10 aa, Homo Sapiens
VIIRINTDGA

SEQ ID NO: 90629 - protein, 10 aa, Homo Sapiens
DGAEYNIEPL

SEQ ID NO: 90630 - protein, 10 aa, Homo Sapiens
AEYNIEPLWR

SEQ ID NO: 90631 - protein, 10 aa, Homo Sapiens
EYNIEPLWRF

SEQ ID NO: 90632 - protein, 10 aa, Homo Sapiens
YNIEPLWRFV

SEQ ID NO: 90633 - protein, 10 aa, Homo Sapiens
EPLWRFVNDT

SEQ ID NO: 90634 - protein, 10 aa, Homo Sapiens
RFVNDTKDKR

SEQ ID NO: 90635 - protein, 10 aa, Homo Sapiens
FVNDTKDKRM

SEQ ID NO: 90636 - protein, 10 aa, Homo Sapiens
DTKDKRMLVY

SEQ ID NO: 90637 - protein, 10 aa, Homo Sapiens
RMLVYKSEDI

SEQ ID NO: 90638 - protein, 10 aa, Homo Sapiens
MLVYKSEDIK

SEQ ID NO: 90639 - protein, 10 aa, Homo Sapiens
KSEDIKNVSR

SEQ ID NO: 90640 - protein, 10 aa, Homo Sapiens
SEDIKNVSRL

SEQ ID NO: 90641 - protein, 10 aa, Homo Sapiens
KNVSRLQSPK

SEQ ID NO: 90642 - protein, 10 aa, Homo Sapiens
NVSRLQSPKV

SEQ ID NO: 90643 - protein, 10 aa, Homo Sapiens
RLQSPKVCGY

SEQ ID NO: 90644 - protein, 10 aa, Homo Sapiens
LQSPKVCGYL

SEQ ID NO: 90645 - protein, 10 aa, Homo Sapiens
QSPKVCGYLK

SEQ ID NO: 90646 - protein, 10 aa, Homo Sapiens
SPKVCGYLKV

SEQ ID NO: 90647 - protein, 10 aa, Homo Sapiens
GYLKVDNEEL

SEQ ID NO: 90648 - protein, 10 aa, Homo Sapiens
YLKVDNEELL

SEQ ID NO: 90649 - protein, 10 aa, Homo Sapiens
KVDNEELLPK

SEQ ID NO: 90650 - protein, 10 aa, Homo Sapiens
LVDREPPEEL

SEQ ID NO: 90651 - protein, 10 aa, Homo Sapiens
EPPEELVHRV

SEQ ID NO: 90652 - protein, 10 aa, Homo Sapiens
KRRADPDPMK

SEQ ID NO: 90653 - protein, 10 aa, Homo Sapiens
PMKNTCKLLV

SEQ ID NO: 90654 - protein, 10 aa, Homo Sapiens
KLLVVADHRF

SEQ ID NO: 90655 - protein, 10 aa, Homo Sapiens
LLVVADHRFY

SEQ ID NO: 90656 - protein, 10 aa, Homo Sapiens
LVVADHRFYR

SEQ ID NO: 90657 - protein, 10 aa, Homo Sapiens
VVADHRFYRY

SEQ ID NO: 90658 - protein, 10 aa, Homo Sapiens
DHRFYRYMGR

SEQ ID NO: 90659 - protein, 10 aa, Homo Sapiens
YMGRGEESTT

SEQ ID NO: 90660 - protein, 10 aa, Homo Sapiens
GEESTTTNYL

SEQ ID NO: 90661 - protein, 10 aa, Homo Sapiens
EESTTTNYLI

SEQ ID NO: 90662 - protein, 10 aa, Homo Sapiens
STTTNYLIEL

SEQ ID NO: 90663 - protein, 10 aa, Homo Sapiens
TTTNYLIELI

SEQ ID NO: 90664 - protein, 10 aa, Homo Sapiens
TNYLIELIDR

SEQ ID NO: 90665 - protein, 10 aa, Homo Sapiens
ELIDRVDDIY

SEQ ID NO: 90666 - protein, 10 aa, Homo Sapiens
LIDRVDDIYR

SEQ ID NO: 90667 - protein, 10 aa, Homo Sapiens
NTSWDNAGFK

SEQ ID NO: 90668 - protein, 10 aa, Homo Sapiens
GYGIQIEQIR

SEQ ID NO: 90669 - protein, 10 aa, Homo Sapiens
IQIEQIRILK

SEQ ID NO: 90670 - protein, 10 aa, Homo Sapiens
RILKSPQEVK

SEQ ID NO: 90671 - protein, 10 aa, Homo Sapiens
QEVKPGEKHY

SEQ ID NO: 90672 - protein, 10 aa, Homo Sapiens
KPGEKHYNMA

SEQ ID NO: 90673 - protein, 10 aa, Homo Sapiens
MAKSYPNEEK

SEQ ID NO: 90674 - protein, 10 aa, Homo Sapiens
SYPNEEKDAW

SEQ ID NO: 90675 - protein, 10 aa, Homo Sapiens
EEKDAWDVKM

SEQ ID NO: 90676 - protein, 10 aa, Homo Sapiens
WDVKMLLEQF

SEQ ID NO: 90677 - protein, 10 aa, Homo Sapiens
MLLEQFSFDI

SEQ ID NO: 90678 - protein, 10 aa, Homo Sapiens
LLEQFSFDIA

SEQ ID NO: 90679 - protein, 10 aa, Homo Sapiens
FSFDIAEEAS

SEQ ID NO: 90680 - protein, 10 aa, Homo Sapiens
AEEASKVCLA

SEQ ID NO: 90681 - protein, 10 aa, Homo Sapiens
EASKVCLAHL

SEQ ID NO: 90682 - protein, 10 aa, Homo Sapiens
KVCLAHLFTY

SEQ ID NO: 90683 - protein, 10 aa, Homo Sapiens
LAHLFTYQDF

SEQ ID NO: 90684 - protein, 10 aa, Homo Sapiens
HLFTYQDFDM

SEQ ID NO: 90685 - protein, 10 aa, Homo Sapiens
FTYQDFDMGT

SEQ ID NO: 90686 - protein, 10 aa, Homo Sapiens
TYQDFDMGTL

SEQ ID NO: 90687 - protein, 10 aa, Homo Sapiens
FDMGTLGLAY

SEQ ID NO: 90688 - protein, 10 aa, Homo Sapiens
DMGTLGLAYV

SEQ ID NO: 90689 - protein, 10 aa, Homo Sapiens
LGLAYVGSPR

SEQ ID NO: 90690 - protein, 10 aa, Homo Sapiens
GLAYVGSPRA

SEQ ID NO: 90691 - protein, 10 aa, Homo Sapiens
SPRANSHGGV

SEQ ID NO: 90692 - protein, 10 aa, Homo Sapiens
VCPKAYYSPV

SEQ ID NO: 90693 - protein, 10 aa, Homo Sapiens
KAYYSPVGKK

SEQ ID NO: 90694 - protein, 10 aa, Homo Sapiens
YYSPVGKKNI

SEQ ID NO: 90695 - protein, 10 aa, Homo Sapiens
YSPVGKKNIY

SEQ ID NO: 90696 - protein, 10 aa, Homo Sapiens
SPVGKKNIYL

SEQ ID NO: 90697 - protein, 10 aa, Homo Sapiens
YLNSGLTSTK

SEQ ID NO: 90698 - protein, 10 aa, Homo Sapiens
GLTSTKNYGK

SEQ ID NO: 90699 - protein, 10 aa, Homo Sapiens
KNYGKTILTK

SEQ ID NO: 90700 - protein, 10 aa, Homo Sapiens
KTILTKEADL

SEQ ID NO: 90701 - protein, 10 aa, Homo Sapiens
TILTKEADLV

SEQ ID NO: 90702 - protein, 10 aa, Homo Sapiens
EADLVTTHEL

SEQ ID NO: 90703 - protein, 10 aa, Homo Sapiens
VTTHELGHNF

SEQ ID NO: 90704 - protein, 10 aa, Homo Sapiens
APNEDQGGKY

SEQ ID NO: 90705 - protein, 10 aa, Homo Sapiens
VMYPIAVSGD

SEQ ID NO: 90706 - protein, 10 aa, Homo Sapiens
AVSGDHENNK

SEQ ID NO: 90707 - protein, 10 aa, Homo Sapiens
FSNCSKQSIY

SEQ ID NO: 90708 - protein, 10 aa, Homo Sapiens
SNCSKQSIYK

SEQ ID NO: 90709 - protein, 10 aa, Homo Sapiens
QSIYKTIESK

SEQ ID NO: 90710 - protein, 10 aa, Homo Sapiens
SIYKTIESKA

SEQ ID NO: 90711 - protein, 10 aa, Homo Sapiens
ECFQERSNKV

SEQ ID NO: 90712 - protein, 10 aa, Homo Sapiens
RSNKVCGNSR

SEQ ID NO: 90713 - protein, 10 aa, Homo Sapiens
EECDPGIMYL

SEQ ID NO: 90714 - protein, 10 aa, Homo Sapiens
IMYLNNDTCC

SEQ ID NO: 90715 - protein, 10 aa, Homo Sapiens
YLNNDTCCNS

SEQ ID NO: 90716 - protein, 10 aa, Homo Sapiens
DTCCNSDCTL

SEQ ID NO: 90717 - protein, 10 aa, Homo Sapiens
NSDCTLKEGV

SEQ ID NO: 90718 - protein, 10 aa, Homo Sapiens
CSDRNSPCCK

SEQ ID NO: 90719 - protein, 10 aa, Homo Sapiens
ETAQKKCQEA

SEQ ID NO: 90720 - protein, 10 aa, Homo Sapiens
EAINATCKGV

SEQ ID NO: 90721 - protein, 10 aa, Homo Sapiens
AEDDTVCLDL

SEQ ID NO: 90722 - protein, 10 aa, Homo Sapiens
TVCLDLGKCK

SEQ ID NO: 90723 - protein, 10 aa, Homo Sapiens
DGKCIPFCER

SEQ ID NO: 90724 - protein, 10 aa, Homo Sapiens
TDNSCKVCCR

SEQ ID NO: 90725 - protein, 10 aa, Homo Sapiens
KVCCRDLSGR

SEQ ID NO: 90726 - protein, 10 aa, Homo Sapiens
DLSGRCVPYV

SEQ ID NO: 90727 - protein, 10 aa, Homo Sapiens
CVPYVDAEQK

SEQ ID NO: 90728 - protein, 10 aa, Homo Sapiens
PYVDAEQKNL

SEQ ID NO: 90729 - protein, 10 aa, Homo Sapiens
YVDAEQKNLF

SEQ ID NO: 90730 - protein, 10 aa, Homo Sapiens
DAEQKNLFLR

SEQ ID NO: 90731 - protein, 10 aa, Homo Sapiens
AEQKNLFLRK

SEQ ID NO: 90732 - protein, 10 aa, Homo Sapiens
FLRKGKPCTV

SEQ ID NO: 90733 - protein, 10 aa, Homo Sapiens
KPCTVGFCDM

SEQ ID NO: 90734 - protein, 10 aa, Homo Sapiens
TVGFCDMNGK

SEQ ID NO: 90735 - protein, 10 aa, Homo Sapiens
DMNGKCEKRV

SEQ ID NO: 90736 - protein, 10 aa, Homo Sapiens
KRVQDVIERF

SEQ ID NO: 90737 - protein, 10 aa, Homo Sapiens
DVIERFWDFI

SEQ ID NO: 90738 - protein, 10 aa, Homo Sapiens
ERFWDFIDQL

SEQ ID NO: 90739 - protein, 10 aa, Homo Sapiens
FIDQLSINTF

SEQ ID NO: 90740 - protein, 10 aa, Homo Sapiens
DQLSINTFGK

SEQ ID NO: 90741 - protein, 10 aa, Homo Sapiens
SINTFGKFLA

SEQ ID NO: 90742 - protein, 10 aa, Homo Sapiens
FLADNIVGSV

SEQ ID NO: 90743 - protein, 10 aa, Homo Sapiens
IVGSVLVFSL

SEQ ID NO: 90744 - protein, 10 aa, Homo Sapiens
SVLVFSLIFW

SEQ ID NO: 90745 - protein, 10 aa, Homo Sapiens
VLVFSLIFWI

SEQ ID NO: 90746 - protein, 10 aa, Homo Sapiens
VFSLIFWIPF

SEQ ID NO: 90747 - protein, 10 aa, Homo Sapiens
SLIFWIPFSI

SEQ ID NO: 90748 - protein, 10 aa, Homo Sapiens
LIFWIPFSIL

SEQ ID NO: 90749 - protein, 10 aa, Homo Sapiens
IFWIPFSILV

SEQ ID NO: 90750 - protein, 10 aa, Homo Sapiens
IPFSILVHCV

SEQ ID NO: 90751 - protein, 10 aa, Homo Sapiens
FSILVHCVDK

SEQ ID NO: 90752 - protein, 10 aa, Homo Sapiens
SILVHCVDKK

SEQ ID NO: 90753 - protein, 10 aa, Homo Sapiens
ILVHCVDKKL

SEQ ID NO: 90754 - protein, 10 aa, Homo Sapiens
KLDKQYESLS

SEQ ID NO: 90755 - protein, 10 aa, Homo Sapiens
KQYESLSLFH

SEQ ID NO: 90756 - protein, 10 aa, Homo Sapiens
SLSLFHPSNV

SEQ ID NO: 90757 - protein, 10 aa, Homo Sapiens
SLFHPSNVEM

SEQ ID NO: 90758 - protein, 10 aa, Homo Sapiens
LFHPSNVEML

SEQ ID NO: 90759 - protein, 10 aa, Homo Sapiens
MLSSMDSASV

SEQ ID NO: 90760 - protein, 10 aa, Homo Sapiens
LSSMDSASVR

SEQ ID NO: 90761 - protein, 10 aa, Homo Sapiens
SSMDSASVRI

SEQ ID NO: 90762 - protein, 10 aa, Homo Sapiens
SMDSASVRII

SEQ ID NO: 90763 - protein, 10 aa, Homo Sapiens
SASVRIIKPF

SEQ ID NO: 90764 - protein, 10 aa, Homo Sapiens
SVRIIKPFPA

SEQ ID NO: 90765 - protein, 10 aa, Homo Sapiens
FPAPQTPGRL

SEQ ID NO: 90766 - protein, 10 aa, Homo Sapiens
TPGRLQPAPV

SEQ ID NO: 90767 - protein, 10 aa, Homo Sapiens
LQPAPVIPSA

SEQ ID NO: 90768 - protein, 10 aa, Homo Sapiens
APVIPSAPAA

SEQ ID NO: 90769 - protein, 10 aa, Homo Sapiens
VIPSAPAAPK

SEQ ID NO: 90770 - protein, 10 aa, Homo Sapiens
IPSAPAAPKL

SEQ ID NO: 90771 - protein, 10 aa, Homo Sapiens
KLDHQRMDTI

SEQ ID NO: 90772 - protein, 10 aa, Homo Sapiens
DEDGFEKDPF

SEQ ID NO: 90773 - protein, 10 aa, Homo Sapiens
DPFPNSSTAA

SEQ ID NO: 90774 - protein, 10 aa, Homo Sapiens
FPNSSTAAKS

SEQ ID NO: 90775 - protein, 10 aa, Homo Sapiens
STAAKSFEDL

SEQ ID NO: 90776 - protein, 10 aa, Homo Sapiens
SFEDLTDHPV

SEQ ID NO: 90777 - protein, 10 aa, Homo Sapiens
TDHPVTRSEK

SEQ ID NO: 90778 - protein, 10 aa, Homo Sapiens
HPVTRSEKAA

SEQ ID NO: 90779 - protein, 10 aa, Homo Sapiens
VTRSEKAASF

SEQ ID NO: 90780 - protein, 10 aa, Homo Sapiens
EKAASFKLQR

SEQ ID NO: 90781 - protein, 10 aa, Homo Sapiens
ASFKLQRQNR

SEQ ID NO: 90782 - protein, 10 aa, Homo Sapiens
LQRQNRVDSK

SEQ ID NO: 90783 - protein, 11 aa, Homo Sapiens
MRQSLLFLTSV

SEQ ID NO: 90784 - protein, 11 aa, Homo Sapiens
RQSLLFLTSVV

SEQ ID NO: 90785 - protein, 11 aa, Homo Sapiens
SLLFLTSVVPF

SEQ ID NO: 90786 - protein, 11 aa, Homo Sapiens
LLFLTSVVPFV

SEQ ID NO: 90787 - protein, 11 aa, Homo Sapiens
LFLTSVVPFVL

SEQ ID NO: 90788 - protein, 11 aa, Homo Sapiens
FLTSVVPFVLA

SEQ ID NO: 90789 - protein, 11 aa, Homo Sapiens
TSVVPFVLAPR

SEQ ID NO: 90790 - protein, 11 aa, Homo Sapiens
VPFVLAPRPPD

SEQ ID NO: 90791 - protein, 11 aa, Homo Sapiens
KLDSLLSDYDI

SEQ ID NO: 90792 - protein, 11 aa, Homo Sapiens
SLLSDYDILSL

SEQ ID NO: 90793 - protein, 11 aa, Homo Sapiens
LLSDYDILSLS

SEQ ID NO: 90794 - protein, 11 aa, Homo Sapiens
LSLSNIQQHSV

SEQ ID NO: 90795 - protein, 11 aa, Homo Sapiens
SLSNIQQHSVR

SEQ ID NO: 90796 - protein, 11 aa, Homo Sapiens
LSNIQQHSVRK

SEQ ID NO: 90797 - protein, 11 aa, Homo Sapiens
SVRKRDLQTST

SEQ ID NO: 90798 - protein, 11 aa, Homo Sapiens
DLQTSTHVETL

SEQ ID NO: 90799 - protein, 11 aa, Homo Sapiens
LQTSTHVETLL

SEQ ID NO: 90800 - protein, 11 aa, Homo Sapiens
TSTHVETLLTF

SEQ ID NO: 90801 - protein, 11 aa, Homo Sapiens
HVETLLTFSAL

SEQ ID NO: 90802 - protein, 11 aa, Homo Sapiens
ETLLTFSALKR

SEQ ID NO: 90803 - protein, 11 aa, Homo Sapiens
LTFSALKRHFK

SEQ ID NO: 90804 - protein, 11 aa, Homo Sapiens
FSALKRHFKLY

SEQ ID NO: 90805 - protein, 11 aa, Homo Sapiens
SALKRHFKLYL

SEQ ID NO: 90806 - protein, 11 aa, Homo Sapiens
ALKRHFKLYLT

SEQ ID NO: 90807 - protein, 11 aa, Homo Sapiens
KLYLTSSTERF

SEQ ID NO: 90808 - protein, 11 aa, Homo Sapiens
YLTSSTERFSQ

SEQ ID NO: 90809 - protein, 11 aa, Homo Sapiens
TSSTERFSQNF

SEQ ID NO: 90810 - protein, 11 aa, Homo Sapiens
SSTERFSQNFK

SEQ ID NO: 90811 - protein, 11 aa, Homo Sapiens
STERFSQNFKV

SEQ ID NO: 90812 - protein, 11 aa, Homo Sapiens
ERFSQNFKVVV

SEQ ID NO: 90813 - protein, 11 aa, Homo Sapiens
QNFKVVVVDGK

SEQ ID NO: 90814 - protein, 11 aa, Homo Sapiens
VVVDGKNESEY

SEQ ID NO: 90815 - protein, 11 aa, Homo Sapiens
SEYTVKWQDFF

SEQ ID NO: 90816 - protein, 11 aa, Homo Sapiens
KWQDFFTGHVV

SEQ ID NO: 90817 - protein, 11 aa, Homo Sapiens
RVLAHIRDDDV

SEQ ID NO: 90818 - protein, 11 aa, Homo Sapiens
VLAHIRDDDVI

SEQ ID NO: 90819 - protein, 11 aa, Homo Sapiens
HIRDDDVIIRI

SEQ ID NO: 90820 - protein, 11 aa, Homo Sapiens
DVIIRINTDGA

SEQ ID NO: 90821 - protein, 11 aa, Homo Sapiens
IIRINTDGAEY

SEQ ID NO: 90822 - protein, 11 aa, Homo Sapiens
RINTDGAEYNI

SEQ ID NO: 90823 - protein, 11 aa, Homo Sapiens
AEYNIEPLWRF

SEQ ID NO: 90824 - protein, 11 aa, Homo Sapiens
EPLWRFVNDTK

SEQ ID NO: 90825 - protein, 11 aa, Homo Sapiens
LWRFVNDTKDK

SEQ ID NO: 90826 - protein, 11 aa, Homo Sapiens
FVNDTKDKRML

SEQ ID NO: 90827 - protein, 11 aa, Homo Sapiens
DTKDKRMLVYK

SEQ ID NO: 90828 - protein, 11 aa, Homo Sapiens
RMLVYKSEDIK

SEQ ID NO: 90829 - protein, 11 aa, Homo Sapiens
LVYKSEDIKNV

SEQ ID NO: 90830 - protein, 11 aa, Homo Sapiens
IKNVSRLQSPK

SEQ ID NO: 90831 - protein, 11 aa, Homo Sapiens
RLQSPKVCGYL

SEQ ID NO: 90832 - protein, 11 aa, Homo Sapiens
LQSPKVCGYLK

SEQ ID NO: 90833 - protein, 11 aa, Homo Sapiens
GYLKVDNEELL

SEQ ID NO: 90834 - protein, 11 aa, Homo Sapiens
LPKGLVDREPP

SEQ ID NO: 90835 - protein, 11 aa, Homo Sapiens
GLVDREPPEEL

SEQ ID NO: 90836 - protein, 11 aa, Homo Sapiens
LVDREPPEELV

SEQ ID NO: 90837 - protein, 11 aa, Homo Sapiens
REPPEELVHRV

SEQ ID NO: 90838 - protein, 11 aa, Homo Sapiens
RVKRRADPDPM

SEQ ID NO: 90839 - protein, 11 aa, Homo Sapiens
VKRRADPDPMK

SEQ ID NO: 90840 - protein, 11 aa, Homo Sapiens
DPMKNTCKLLV

SEQ ID NO: 90841 - protein, 11 aa, Homo Sapiens
PMKNTCKLLVV

SEQ ID NO: 90842 - protein, 11 aa, Homo Sapiens
KLLVVADHRFY

SEQ ID NO: 90843 - protein, 11 aa, Homo Sapiens
LLVVADHRFYR

SEQ ID NO: 90844 - protein, 11 aa, Homo Sapiens
LVVADHRFYRY

SEQ ID NO: 90845 - protein, 11 aa, Homo Sapiens
VVADHRFYRYM

SEQ ID NO: 90846 - protein, 11 aa, Homo Sapiens
YMGRGEESTTT

SEQ ID NO: 90847 - protein, 11 aa, Homo Sapiens
GEESTTTNYLI

SEQ ID NO: 90848 - protein, 11 aa, Homo Sapiens
ESTTTNYLIEL

SEQ ID NO: 90849 - protein, 11 aa, Homo Sapiens
STTTNYLIELI

SEQ ID NO: 90850 - protein, 11 aa, Homo Sapiens
TTNYLIELIDR

SEQ ID NO: 90851 - protein, 11 aa, Homo Sapiens
IELIDRVDDIY

SEQ ID NO: 90852 - protein, 11 aa, Homo Sapiens
ELIDRVDDIYR

SEQ ID NO: 90853 - protein, 11 aa, Homo Sapiens
RVDDIYRNTSW

SEQ ID NO: 90854 - protein, 11 aa, Homo Sapiens
YRNTSWDNAGF

SEQ ID NO: 90855 - protein, 11 aa, Homo Sapiens
TSWDNAGFKGY

SEQ ID NO: 90856 - protein, 11 aa, Homo Sapiens
KGYGIQIEQIR

SEQ ID NO: 90857 - protein, 11 aa, Homo Sapiens
GYGIQIEQIRI

SEQ ID NO: 90858 - protein, 11 aa, Homo Sapiens
GIQIEQIRILK

SEQ ID NO: 90859 - protein, 11 aa, Homo Sapiens
IQIEQIRILKS

SEQ ID NO: 90860 - protein, 11 aa, Homo Sapiens
QIRILKSPQEV

SEQ ID NO: 90861 - protein, 11 aa, Homo Sapiens
KSPQEVKPGEK

SEQ ID NO: 90862 - protein, 11 aa, Homo Sapiens
EVKPGEKHYNM

SEQ ID NO: 90863 - protein, 11 aa, Homo Sapiens
GEKHYNMAKSY

SEQ ID NO: 90864 - protein, 11 aa, Homo Sapiens
NMAKSYPNEEK

SEQ ID NO: 90865 - protein, 11 aa, Homo Sapiens
KSYPNEEKDAW

SEQ ID NO: 90866 - protein, 11 aa, Homo Sapiens
YPNEEKDAWDV

SEQ ID NO: 90867 - protein, 11 aa, Homo Sapiens
EEKDAWDVKML

SEQ ID NO: 90868 - protein, 11 aa, Homo Sapiens
AWDVKMLLEQF

SEQ ID NO: 90869 - protein, 11 aa, Homo Sapiens
DVKMLLEQFSF

SEQ ID NO: 90870 - protein, 11 aa, Homo Sapiens
KMLLEQFSFDI

SEQ ID NO: 90871 - protein, 11 aa, Homo Sapiens
MLLEQFSFDIA

SEQ ID NO: 90872 - protein, 11 aa, Homo Sapiens
EQFSFDIAEEA

SEQ ID NO: 90873 - protein, 11 aa, Homo Sapiens
FSFDIAEEASK

SEQ ID NO: 90874 - protein, 11 aa, Homo Sapiens
SFDIAEEASKV

SEQ ID NO: 90875 - protein, 11 aa, Homo Sapiens
DIAEEASKVCL

SEQ ID NO: 90876 - protein, 11 aa, Homo Sapiens
AEEASKVCLAH

SEQ ID NO: 90877 - protein, 11 aa, Homo Sapiens
EASKVCLAHLF

SEQ ID NO: 90878 - protein, 11 aa, Homo Sapiens
CLAHLFTYQDF

SEQ ID NO: 90879 - protein, 11 aa, Homo Sapiens
FTYQDFDMGTL

SEQ ID NO: 90880 - protein, 11 aa, Homo Sapiens
YQDFDMGTLGL

SEQ ID NO: 90881 - protein, 11 aa, Homo Sapiens
DFDMGTLGLAY

SEQ ID NO: 90882 - protein, 11 aa, Homo Sapiens
FDMGTLGLAYV

SEQ ID NO: 90883 - protein, 11 aa, Homo Sapiens
TLGLAYVGSPR

SEQ ID NO: 90884 - protein, 11 aa, Homo Sapiens
SPRANSHGGVC

SEQ ID NO: 90885 - protein, 11 aa, Homo Sapiens
RANSHGGVCPK

SEQ ID NO: 90886 - protein, 11 aa, Homo Sapiens
NSHGGVCPKAY

SEQ ID NO: 90887 - protein, 11 aa, Homo Sapiens
GVCPKAYYSPV

SEQ ID NO: 90888 - protein, 11 aa, Homo Sapiens
AYYSPVGKKNI

SEQ ID NO: 90889 - protein, 11 aa, Homo Sapiens
YYSPVGKKNIY

SEQ ID NO: 90890 - protein, 11 aa, Homo Sapiens
NIYLNSGLTST

SEQ ID NO: 90891 - protein, 11 aa, Homo Sapiens
IYLNSGLTSTK

SEQ ID NO: 90892 - protein, 11 aa, Homo Sapiens
KTILTKEADLV

SEQ ID NO: 90893 - protein, 11 aa, Homo Sapiens
ILTKEADLVTT

SEQ ID NO: 90894 - protein, 11 aa, Homo Sapiens
KEADLVTTHEL

SEQ ID NO: 90895 - protein, 11 aa, Homo Sapiens
TTHELGHNFGA

SEQ ID NO: 90896 - protein, 11 aa, Homo Sapiens
APNEDQGGKYV

SEQ ID NO: 90897 - protein, 11 aa, Homo Sapiens
NEDQGGKYVMY

SEQ ID NO: 90898 - protein, 11 aa, Homo Sapiens
VMYPIAVSGDH

SEQ ID NO: 90899 - protein, 11 aa, Homo Sapiens
YPIAVSGDHEN

SEQ ID NO: 90900 - protein, 11 aa, Homo Sapiens
IAVSGDHENNK

SEQ ID NO: 90901 - protein, 11 aa, Homo Sapiens
ENNKMFSNCSK

SEQ ID NO: 90902 - protein, 11 aa, Homo Sapiens
KMFSNCSKQSI

SEQ ID NO: 90903 - protein, 11 aa, Homo Sapiens
MFSNCSKQSIY

SEQ ID NO: 90904 - protein, 11 aa, Homo Sapiens
FSNCSKQSIYK

SEQ ID NO: 90905 - protein, 11 aa, Homo Sapiens
KQSIYKTIESK

SEQ ID NO: 90906 - protein, 11 aa, Homo Sapiens
KTIESKAQECF

SEQ ID NO: 90907 - protein, 11 aa, Homo Sapiens
ESKAQECFQER

SEQ ID NO: 90908 - protein, 11 aa, Homo Sapiens
AQECFQERSNK

SEQ ID NO: 90909 - protein, 11 aa, Homo Sapiens
GEECDPGIMYL

SEQ ID NO: 90910 - protein, 11 aa, Homo Sapiens
DTCCNSDCTLK

SEQ ID NO: 90911 - protein, 11 aa, Homo Sapiens
TLKEGVQCSDR

SEQ ID NO: 90912 - protein, 11 aa, Homo Sapiens
ETAQKKCQEAI

SEQ ID NO: 90913 - protein, 11 aa, Homo Sapiens
KCQEAINATCK

SEQ ID NO: 90914 - protein, 11 aa, Homo Sapiens
AINATCKGVSY

SEQ ID NO: 90915 - protein, 11 aa, Homo Sapiens
DTVCLDLGKCK

SEQ ID NO: 90916 - protein, 11 aa, Homo Sapiens
QQLESCACNET

SEQ ID NO: 90917 - protein, 11 aa, Homo Sapiens
CACNETDNSCK

SEQ ID NO: 90918 - protein, 11 aa, Homo Sapiens
ACNETDNSCKV

SEQ ID NO: 90919 - protein, 11 aa, Homo Sapiens
ETDNSCKVCCR

SEQ ID NO: 90920 - protein, 11 aa, Homo Sapiens
RCVPYVDAEQK

SEQ ID NO: 90921 - protein, 11 aa, Homo Sapiens
VPYVDAEQKNL

SEQ ID NO: 90922 - protein, 11 aa, Homo Sapiens
PYVDAEQKNLF

SEQ ID NO: 90923 - protein, 11 aa, Homo Sapiens
YVDAEQKNLFL

SEQ ID NO: 90924 - protein, 11 aa, Homo Sapiens
LFLRKGKPCTV

SEQ ID NO: 90925 - protein, 11 aa, Homo Sapiens
CTVGFCDMNGK

SEQ ID NO: 90926 - protein, 11 aa, Homo Sapiens
IERFWDFIDQL

SEQ ID NO: 90927 - protein, 11 aa, Homo Sapiens
RFWDFIDQLSI

SEQ ID NO: 90928 - protein, 11 aa, Homo Sapiens
DFIDQLSINTF

SEQ ID NO: 90929 - protein, 11 aa, Homo Sapiens
QLSINTFGKFL

SEQ ID NO: 90930 - protein, 11 aa, Homo Sapiens
NTFGKFLADNI

SEQ ID NO: 90931 - protein, 11 aa, Homo Sapiens
KFLADNIVGSV

SEQ ID NO: 90932 - protein, 11 aa, Homo Sapiens
FLADNIVGSVL

SEQ ID NO: 90933 - protein, 11 aa, Homo Sapiens
LADNIVGSVLV

SEQ ID NO: 90934 - protein, 11 aa, Homo Sapiens
NIVGSVLVFSL

SEQ ID NO: 90935 - protein, 11 aa, Homo Sapiens
IVGSVLVFSLI

SEQ ID NO: 90936 - protein, 11 aa, Homo Sapiens
VGSVLVFSLIF

SEQ ID NO: 90937 - protein, 11 aa, Homo Sapiens
GSVLVFSLIFW

SEQ ID NO: 90938 - protein, 11 aa, Homo Sapiens
SVLVFSLIFWI

SEQ ID NO: 90939 - protein, 11 aa, Homo Sapiens
LVFSLIFWIPF

SEQ ID NO: 90940 - protein, 11 aa, Homo Sapiens
FSLIFWIPFSI

SEQ ID NO: 90941 - protein, 11 aa, Homo Sapiens
SLIFWIPFSIL

SEQ ID NO: 90942 - protein, 11 aa, Homo Sapiens
LIFWIPFSILV

SEQ ID NO: 90943 - protein, 11 aa, Homo Sapiens
WIPFSILVHCV

SEQ ID NO: 90944 - protein, 11 aa, Homo Sapiens
IPFSILVHCVD

SEQ ID NO: 90945 - protein, 11 aa, Homo Sapiens
FSILVHCVDKK

SEQ ID NO: 90946 - protein, 11 aa, Homo Sapiens
SILVHCVDKKL

SEQ ID NO: 90947 - protein, 11 aa, Homo Sapiens
LVHCVDKKLDK

SEQ ID NO: 90948 - protein, 11 aa, Homo Sapiens
KLDKQYESLSL

SEQ ID NO: 90949 - protein, 11 aa, Homo Sapiens
KQYESLSLFHP

SEQ ID NO: 90950 - protein, 11 aa, Homo Sapiens
ESLSLFHPSNV

SEQ ID NO: 90951 - protein, 11 aa, Homo Sapiens
SLFHPSNVEML

SEQ ID NO: 90952 - protein, 11 aa, Homo Sapiens
HPSNVEMLSSM

SEQ ID NO: 90953 - protein, 11 aa, Homo Sapiens
EMLSSMDSASV

SEQ ID NO: 90954 - protein, 11 aa, Homo Sapiens
MLSSMDSASVR

SEQ ID NO: 90955 - protein, 11 aa, Homo Sapiens
SMDSASVRIIK

SEQ ID NO: 90956 - protein, 11 aa, Homo Sapiens
FPAPQTPGRLQ

SEQ ID NO: 90957 - protein, 11 aa, Homo Sapiens
APQTPGRLQPA

SEQ ID NO: 90958 - protein, 11 aa, Homo Sapiens
QTPGRLQPAPV

SEQ ID NO: 90959 - protein, 11 aa, Homo Sapiens
TPGRLQPAPVI

SEQ ID NO: 90960 - protein, 11 aa, Homo Sapiens
RLQPAPVIPSA

SEQ ID NO: 90961 - protein, 11 aa, Homo Sapiens
QPAPVIPSAPA

SEQ ID NO: 90962 - protein, 11 aa, Homo Sapiens
APVIPSAPAAP

SEQ ID NO: 90963 - protein, 11 aa, Homo Sapiens
PVIPSAPAAPK

SEQ ID NO: 90964 - protein, 11 aa, Homo Sapiens
VIPSAPAAPKL

SEQ ID NO: 90965 - protein, 11 aa, Homo Sapiens
KLDHQRMDTIQ

SEQ ID NO: 90966 - protein, 11 aa, Homo Sapiens
RMDTIQEDPST

SEQ ID NO: 90967 - protein, 11 aa, Homo Sapiens
STDSHMDEDGF

SEQ ID NO: 90968 - protein, 11 aa, Homo Sapiens
DSHMDEDGFEK

SEQ ID NO: 90969 - protein, 11 aa, Homo Sapiens
MDEDGFEKDPF

SEQ ID NO: 90970 - protein, 11 aa, Homo Sapiens
DPFPNSSTAAK

SEQ ID NO: 90971 - protein, 11 aa, Homo Sapiens
FPNSSTAAKSF

SEQ ID NO: 90972 - protein, 11 aa, Homo Sapiens
STAAKSFEDLT

SEQ ID NO: 90973 - protein, 11 aa, Homo Sapiens
KSFEDLTDHPV

SEQ ID NO: 90974 - protein, 11 aa, Homo Sapiens
LTDHPVTRSEK

SEQ ID NO: 90975 - protein, 11 aa, Homo Sapiens
HPVTRSEKAAS

SEQ ID NO: 90976 - protein, 11 aa, Homo Sapiens
PVTRSEKAASF

SEQ ID NO: 90977 - protein, 11 aa, Homo Sapiens
VTRSEKAASFK

SEQ ID NO: 90978 - protein, 11 aa, Homo Sapiens
TRSEKAASFKL

SEQ ID NO: 90979 - protein, 11 aa, Homo Sapiens
AASFKLQRQNR

SEQ ID NO: 90980 - protein, 11 aa, Homo Sapiens
KLQRQNRVDSK

SEQ ID NO: 90981 - protein, 13 aa, Homo Sapiens
MRQSLLFLTSVVP

SEQ ID NO: 90982 - protein, 13 aa, Homo Sapiens
RQSLLFLTSVVPF

SEQ ID NO: 90983 - protein, 13 aa, Homo Sapiens
QSLLFLTSVVPFV

SEQ ID NO: 90984 - protein, 13 aa, Homo Sapiens
SLLFLTSVVPFVL

SEQ ID NO: 90985 - protein, 13 aa, Homo Sapiens
LLFLTSVVPFVLA

SEQ ID NO: 90986 - protein, 13 aa, Homo Sapiens
LFLTSVVPFVLAP

SEQ ID NO: 90987 - protein, 13 aa, Homo Sapiens
FLTSVVPFVLAPR

SEQ ID NO: 90988 - protein, 13 aa, Homo Sapiens
LTSVVPFVLAPRP

SEQ ID NO: 90989 - protein, 13 aa, Homo Sapiens
TSVVPFVLAPRPP

SEQ ID NO: 90990 - protein, 13 aa, Homo Sapiens
SVVPFVLAPRPPD

SEQ ID NO: 90991 - protein, 13 aa, Homo Sapiens
VVPFVLAPRPPDD

SEQ ID NO: 90992 - protein, 13 aa, Homo Sapiens
VPFVLAPRPPDDP

SEQ ID NO: 90993 - protein, 13 aa, Homo Sapiens
PFVLAPRPPDDPG

SEQ ID NO: 90994 - protein, 13 aa, Homo Sapiens
FVLAPRPPDDPGF

SEQ ID NO: 90995 - protein, 13 aa, Homo Sapiens
VLAPRPPDDPGFG

SEQ ID NO: 90996 - protein, 13 aa, Homo Sapiens
LAPRPPDDPGFGP

SEQ ID NO: 90997 - protein, 13 aa, Homo Sapiens
APRPPDDPGFGPH

SEQ ID NO: 90998 - protein, 13 aa, Homo Sapiens
PRPPDDPGFGPHQ

SEQ ID NO: 90999 - protein, 13 aa, Homo Sapiens
RPPDDPGFGPHQR

SEQ ID NO: 91000 - protein, 13 aa, Homo Sapiens
PPDDPGFGPHQRL

SEQ ID NO: 91001 - protein, 13 aa, Homo Sapiens
PDDPGFGPHQRLE

SEQ ID NO: 91002 - protein, 13 aa, Homo Sapiens
DDPGFGPHQRLEK

SEQ ID NO: 91003 - protein, 13 aa, Homo Sapiens
DPGFGPHQRLEKL

SEQ ID NO: 91004 - protein, 13 aa, Homo Sapiens
PGFGPHQRLEKLD

SEQ ID NO: 91005 - protein, 13 aa, Homo Sapiens
GFGPHQRLEKLDS

SEQ ID NO: 91006 - protein, 13 aa, Homo Sapiens
FGPHQRLEKLDSL

SEQ ID NO: 91007 - protein, 13 aa, Homo Sapiens
GPHQRLEKLDSLL

SEQ ID NO: 91008 - protein, 13 aa, Homo Sapiens
PHQRLEKLDSLLS

SEQ ID NO: 91009 - protein, 13 aa, Homo Sapiens
HQRLEKLDSLLSD

SEQ ID NO: 91010 - protein, 13 aa, Homo Sapiens
QRLEKLDSLLSDY

SEQ ID NO: 91011 - protein, 13 aa, Homo Sapiens
RLEKLDSLLSDYD

SEQ ID NO: 91012 - protein, 13 aa, Homo Sapiens
LEKLDSLLSDYDI

SEQ ID NO: 91013 - protein, 13 aa, Homo Sapiens
EKLDSLLSDYDIL

SEQ ID NO: 91014 - protein, 13 aa, Homo Sapiens
KLDSLLSDYDILS

SEQ ID NO: 91015 - protein, 13 aa, Homo Sapiens
LDSLLSDYDILSL

SEQ ID NO: 91016 - protein, 13 aa, Homo Sapiens
DSLLSDYDILSLS

SEQ ID NO: 91017 - protein, 13 aa, Homo Sapiens
SLLSDYDILSLSN

SEQ ID NO: 91018 - protein, 13 aa, Homo Sapiens
LLSDYDILSLSNI

SEQ ID NO: 91019 - protein, 13 aa, Homo Sapiens
LSDYDILSLSNIQ

SEQ ID NO: 91020 - protein, 13 aa, Homo Sapiens
SDYDILSLSNIQQ

SEQ ID NO: 91021 - protein, 13 aa, Homo Sapiens
DYDILSLSNIQQH

SEQ ID NO: 91022 - protein, 13 aa, Homo Sapiens
YDILSLSNIQQHS

SEQ ID NO: 91023 - protein, 13 aa, Homo Sapiens
DILSLSNIQQHSV

SEQ ID NO: 91024 - protein, 13 aa, Homo Sapiens
ILSLSNIQQHSVR

SEQ ID NO: 91025 - protein, 13 aa, Homo Sapiens
LSLSNIQQHSVRK

SEQ ID NO: 91026 - protein, 13 aa, Homo Sapiens
SLSNIQQHSVRKR

SEQ ID NO: 91027 - protein, 13 aa, Homo Sapiens
LSNIQQHSVRKRD

SEQ ID NO: 91028 - protein, 13 aa, Homo Sapiens
SNIQQHSVRKRDL

SEQ ID NO: 91029 - protein, 13 aa, Homo Sapiens
NIQQHSVRKRDLQ

SEQ ID NO: 91030 - protein, 13 aa, Homo Sapiens
IQQHSVRKRDLQT

SEQ ID NO: 91031 - protein, 13 aa, Homo Sapiens
QQHSVRKRDLQTS

SEQ ID NO: 91032 - protein, 13 aa, Homo Sapiens
QHSVRKRDLQTST

SEQ ID NO: 91033 - protein, 13 aa, Homo Sapiens
HSVRKRDLQTSTH

SEQ ID NO: 91034 - protein, 13 aa, Homo Sapiens
SVRKRDLQTSTHV

SEQ ID NO: 91035 - protein, 13 aa, Homo Sapiens
VRKRDLQTSTHVE

SEQ ID NO: 91036 - protein, 13 aa, Homo Sapiens
RKRDLQTSTHVET

SEQ ID NO: 91037 - protein, 13 aa, Homo Sapiens
KRDLQTSTHVETL

SEQ ID NO: 91038 - protein, 13 aa, Homo Sapiens
RDLQTSTHVETLL

SEQ ID NO: 91039 - protein, 13 aa, Homo Sapiens
DLQTSTHVETLLT

SEQ ID NO: 91040 - protein, 13 aa, Homo Sapiens
LQTSTHVETLLTF

SEQ ID NO: 91041 - protein, 13 aa, Homo Sapiens
QTSTHVETLLTFS

SEQ ID NO: 91042 - protein, 13 aa, Homo Sapiens
TSTHVETLLTFSA

SEQ ID NO: 91043 - protein, 13 aa, Homo Sapiens
STHVETLLTFSAL

SEQ ID NO: 91044 - protein, 13 aa, Homo Sapiens
THVETLLTFSALK

SEQ ID NO: 91045 - protein, 13 aa, Homo Sapiens
HVETLLTFSALKR

SEQ ID NO: 91046 - protein, 13 aa, Homo Sapiens
VETLLTFSALKRH

SEQ ID NO: 91047 - protein, 13 aa, Homo Sapiens
ETLLTFSALKRHF

SEQ ID NO: 91048 - protein, 13 aa, Homo Sapiens
TLLTFSALKRHFK

SEQ ID NO: 91049 - protein, 13 aa, Homo Sapiens
LLTFSALKRHFKL

SEQ ID NO: 91050 - protein, 13 aa, Homo Sapiens
LTFSALKRHFKLY

SEQ ID NO: 91051 - protein, 13 aa, Homo Sapiens
TFSALKRHFKLYL

SEQ ID NO: 91052 - protein, 13 aa, Homo Sapiens
FSALKRHFKLYLT

SEQ ID NO: 91053 - protein, 13 aa, Homo Sapiens
SALKRHFKLYLTS

SEQ ID NO: 91054 - protein, 13 aa, Homo Sapiens
ALKRHFKLYLTSS

SEQ ID NO: 91055 - protein, 13 aa, Homo Sapiens
LKRHFKLYLTSST

SEQ ID NO: 91056 - protein, 13 aa, Homo Sapiens
KRHFKLYLTSSTE

SEQ ID NO: 91057 - protein, 13 aa, Homo Sapiens
RHFKLYLTSSTER

SEQ ID NO: 91058 - protein, 13 aa, Homo Sapiens
HFKLYLTSSTERF

SEQ ID NO: 91059 - protein, 13 aa, Homo Sapiens
FKLYLTSSTERFS

SEQ ID NO: 91060 - protein, 13 aa, Homo Sapiens
KLYLTSSTERFSQ

SEQ ID NO: 91061 - protein, 13 aa, Homo Sapiens
LYLTSSTERFSQN

SEQ ID NO: 91062 - protein, 13 aa, Homo Sapiens
YLTSSTERFSQNF

SEQ ID NO: 91063 - protein, 13 aa, Homo Sapiens
LTSSTERFSQNFK

SEQ ID NO: 91064 - protein, 13 aa, Homo Sapiens
TSSTERFSQNFKV

SEQ ID NO: 91065 - protein, 13 aa, Homo Sapiens
SSTERFSQNFKVV

SEQ ID NO: 91066 - protein, 13 aa, Homo Sapiens
STERFSQNFKVVV

SEQ ID NO: 91067 - protein, 13 aa, Homo Sapiens
TERFSQNFKVVVV

SEQ ID NO: 91068 - protein, 13 aa, Homo Sapiens
ERFSQNFKVVVVD

SEQ ID NO: 91069 - protein, 13 aa, Homo Sapiens
RFSQNFKVVVVDG

SEQ ID NO: 91070 - protein, 13 aa, Homo Sapiens
FSQNFKVVVVDGK

SEQ ID NO: 91071 - protein, 13 aa, Homo Sapiens
SQNFKVVVVDGKN

SEQ ID NO: 91072 - protein, 13 aa, Homo Sapiens
QNFKVVVVDGKNE

SEQ ID NO: 91073 - protein, 13 aa, Homo Sapiens
NFKVVVVDGKNES

SEQ ID NO: 91074 - protein, 13 aa, Homo Sapiens
FKVVVVDGKNESE

SEQ ID NO: 91075 - protein, 13 aa, Homo Sapiens
KVVVVDGKNESEY

SEQ ID NO: 91076 - protein, 13 aa, Homo Sapiens
VVVVDGKNESEYT

SEQ ID NO: 91077 - protein, 13 aa, Homo Sapiens
VVVDGKNESEYTV

SEQ ID NO: 91078 - protein, 13 aa, Homo Sapiens
VVDGKNESEYTVK

SEQ ID NO: 91079 - protein, 13 aa, Homo Sapiens
VDGKNESEYTVKW

SEQ ID NO: 91080 - protein, 13 aa, Homo Sapiens
DGKNESEYTVKWQ

SEQ ID NO: 91081 - protein, 13 aa, Homo Sapiens
GKNESEYTVKWQD

SEQ ID NO: 91082 - protein, 13 aa, Homo Sapiens
KNESEYTVKWQDF

SEQ ID NO: 91083 - protein, 13 aa, Homo Sapiens
NESEYTVKWQDFF

SEQ ID NO: 91084 - protein, 13 aa, Homo Sapiens
ESEYTVKWQDFFT

SEQ ID NO: 91085 - protein, 13 aa, Homo Sapiens
SEYTVKWQDFFTG

SEQ ID NO: 91086 - protein, 13 aa, Homo Sapiens
EYTVKWQDFFTGH

SEQ ID NO: 91087 - protein, 13 aa, Homo Sapiens
YTVKWQDFFTGHV

SEQ ID NO: 91088 - protein, 13 aa, Homo Sapiens
TVKWQDFFTGHVV

SEQ ID NO: 91089 - protein, 13 aa, Homo Sapiens
VKWQDFFTGHVVG

SEQ ID NO: 91090 - protein, 13 aa, Homo Sapiens
KWQDFFTGHVVGE

SEQ ID NO: 91091 - protein, 13 aa, Homo Sapiens
WQDFFTGHVVGEP

SEQ ID NO: 91092 - protein, 13 aa, Homo Sapiens
QDFFTGHVVGEPD

SEQ ID NO: 91093 - protein, 13 aa, Homo Sapiens
DFFTGHVVGEPDS

SEQ ID NO: 91094 - protein, 13 aa, Homo Sapiens
FFTGHVVGEPDSR

SEQ ID NO: 91095 - protein, 13 aa, Homo Sapiens
FTGHVVGEPDSRV

SEQ ID NO: 91096 - protein, 13 aa, Homo Sapiens
TGHVVGEPDSRVL

SEQ ID NO: 91097 - protein, 13 aa, Homo Sapiens
GHVVGEPDSRVLA

SEQ ID NO: 91098 - protein, 13 aa, Homo Sapiens
HVVGEPDSRVLAH

SEQ ID NO: 91099 - protein, 13 aa, Homo Sapiens
VVGEPDSRVLAHI

SEQ ID NO: 91100 - protein, 13 aa, Homo Sapiens
VGEPDSRVLAHIR

SEQ ID NO: 91101 - protein, 13 aa, Homo Sapiens
GEPDSRVLAHIRD

SEQ ID NO: 91102 - protein, 13 aa, Homo Sapiens
EPDSRVLAHIRDD

SEQ ID NO: 91103 - protein, 13 aa, Homo Sapiens
PDSRVLAHIRDDD

SEQ ID NO: 91104 - protein, 13 aa, Homo Sapiens
DSRVLAHIRDDDV

SEQ ID NO: 91105 - protein, 13 aa, Homo Sapiens
SRVLAHIRDDDVI

SEQ ID NO: 91106 - protein, 13 aa, Homo Sapiens
RVLAHIRDDDVII

SEQ ID NO: 91107 - protein, 13 aa, Homo Sapiens
VLAHIRDDDVIIR

SEQ ID NO: 91108 - protein, 13 aa, Homo Sapiens
LAHIRDDDVIIRI

SEQ ID NO: 91109 - protein, 13 aa, Homo Sapiens
AHIRDDDVIIRIN

SEQ ID NO: 91110 - protein, 13 aa, Homo Sapiens
HIRDDDVIIRINT

SEQ ID NO: 91111 - protein, 13 aa, Homo Sapiens
IRDDDVIIRINTD

SEQ ID NO: 91112 - protein, 13 aa, Homo Sapiens
RDDDVIIRINTDG

SEQ ID NO: 91113 - protein, 13 aa, Homo Sapiens
DDDVIIRINTDGA

SEQ ID NO: 91114 - protein, 13 aa, Homo Sapiens
DDVIIRINTDGAE

SEQ ID NO: 91115 - protein, 13 aa, Homo Sapiens
DVIIRINTDGAEY

SEQ ID NO: 91116 - protein, 13 aa, Homo Sapiens
VIIRINTDGAEYN

SEQ ID NO: 91117 - protein, 13 aa, Homo Sapiens
IIRINTDGAEYNI

SEQ ID NO: 91118 - protein, 13 aa, Homo Sapiens
IRINTDGAEYNIE

SEQ ID NO: 91119 - protein, 13 aa, Homo Sapiens
RINTDGAEYNIEP

SEQ ID NO: 91120 - protein, 13 aa, Homo Sapiens
INTDGAEYNIEPL

SEQ ID NO: 91121 - protein, 13 aa, Homo Sapiens
NTDGAEYNIEPLW

SEQ ID NO: 91122 - protein, 13 aa, Homo Sapiens
TDGAEYNIEPLWR

SEQ ID NO: 91123 - protein, 13 aa, Homo Sapiens
DGAEYNIEPLWRF

SEQ ID NO: 91124 - protein, 13 aa, Homo Sapiens
GAEYNIEPLWRFV

SEQ ID NO: 91125 - protein, 13 aa, Homo Sapiens
AEYNIEPLWRFVN

SEQ ID NO: 91126 - protein, 13 aa, Homo Sapiens
EYNIEPLWRFVND

SEQ ID NO: 91127 - protein, 13 aa, Homo Sapiens
YNIEPLWRFVNDT

SEQ ID NO: 91128 - protein, 13 aa, Homo Sapiens
NIEPLWRFVNDTK

SEQ ID NO: 91129 - protein, 13 aa, Homo Sapiens
IEPLWRFVNDTKD

SEQ ID NO: 91130 - protein, 13 aa, Homo Sapiens
EPLWRFVNDTKDK

SEQ ID NO: 91131 - protein, 13 aa, Homo Sapiens
PLWRFVNDTKDKR

SEQ ID NO: 91132 - protein, 13 aa, Homo Sapiens
LWRFVNDTKDKRM

SEQ ID NO: 91133 - protein, 13 aa, Homo Sapiens
WRFVNDTKDKRML

SEQ ID NO: 91134 - protein, 13 aa, Homo Sapiens
RFVNDTKDKRMLV

SEQ ID NO: 91135 - protein, 13 aa, Homo Sapiens
FVNDTKDKRMLVY

SEQ ID NO: 91136 - protein, 13 aa, Homo Sapiens
VNDTKDKRMLVYK

SEQ ID NO: 91137 - protein, 13 aa, Homo Sapiens
NDTKDKRMLVYKS

SEQ ID NO: 91138 - protein, 13 aa, Homo Sapiens
DTKDKRMLVYKSE

SEQ ID NO: 91139 - protein, 13 aa, Homo Sapiens
TKDKRMLVYKSED

SEQ ID NO: 91140 - protein, 13 aa, Homo Sapiens
KDKRMLVYKSEDI

SEQ ID NO: 91141 - protein, 13 aa, Homo Sapiens
DKRMLVYKSEDIK

SEQ ID NO: 91142 - protein, 13 aa, Homo Sapiens
KRMLVYKSEDIKN

SEQ ID NO: 91143 - protein, 13 aa, Homo Sapiens
RMLVYKSEDIKNV

SEQ ID NO: 91144 - protein, 13 aa, Homo Sapiens
MLVYKSEDIKNVS

SEQ ID NO: 91145 - protein, 13 aa, Homo Sapiens
LVYKSEDIKNVSR

SEQ ID NO: 91146 - protein, 13 aa, Homo Sapiens
VYKSEDIKNVSRL

SEQ ID NO: 91147 - protein, 13 aa, Homo Sapiens
YKSEDIKNVSRLQ

SEQ ID NO: 91148 - protein, 13 aa, Homo Sapiens
KSEDIKNVSRLQS

SEQ ID NO: 91149 - protein, 13 aa, Homo Sapiens
SEDIKNVSRLQSP

SEQ ID NO: 91150 - protein, 13 aa, Homo Sapiens
EDIKNVSRLQSPK

SEQ ID NO: 91151 - protein, 13 aa, Homo Sapiens
DIKNVSRLQSPKV

SEQ ID NO: 91152 - protein, 13 aa, Homo Sapiens
IKNVSRLQSPKVC

SEQ ID NO: 91153 - protein, 13 aa, Homo Sapiens
KNVSRLQSPKVCG

SEQ ID NO: 91154 - protein, 13 aa, Homo Sapiens
NVSRLQSPKVCGY

SEQ ID NO: 91155 - protein, 13 aa, Homo Sapiens
VSRLQSPKVCGYL

SEQ ID NO: 91156 - protein, 13 aa, Homo Sapiens
SRLQSPKVCGYLK

SEQ ID NO: 91157 - protein, 13 aa, Homo Sapiens
RLQSPKVCGYLKV

SEQ ID NO: 91158 - protein, 13 aa, Homo Sapiens
LQSPKVCGYLKVD

SEQ ID NO: 91159 - protein, 13 aa, Homo Sapiens
QSPKVCGYLKVDN

SEQ ID NO: 91160 - protein, 13 aa, Homo Sapiens
SPKVCGYLKVDNE

SEQ ID NO: 91161 - protein, 13 aa, Homo Sapiens
PKVCGYLKVDNEE

SEQ ID NO: 91162 - protein, 13 aa, Homo Sapiens
KVCGYLKVDNEEL

SEQ ID NO: 91163 - protein, 13 aa, Homo Sapiens
VCGYLKVDNEELL

SEQ ID NO: 91164 - protein, 13 aa, Homo Sapiens
CGYLKVDNEELLP

SEQ ID NO: 91165 - protein, 13 aa, Homo Sapiens
GYLKVDNEELLPK

SEQ ID NO: 91166 - protein, 13 aa, Homo Sapiens
YLKVDNEELLPKG

SEQ ID NO: 91167 - protein, 13 aa, Homo Sapiens
LKVDNEELLPKGL

SEQ ID NO: 91168 - protein, 13 aa, Homo Sapiens
KVDNEELLPKGLV

SEQ ID NO: 91169 - protein, 13 aa, Homo Sapiens
VDNEELLPKGLVD

SEQ ID NO: 91170 - protein, 13 aa, Homo Sapiens
DNEELLPKGLVDR

SEQ ID NO: 91171 - protein, 13 aa, Homo Sapiens
NEELLPKGLVDRE

SEQ ID NO: 91172 - protein, 13 aa, Homo Sapiens
EELLPKGLVDREP

SEQ ID NO: 91173 - protein, 13 aa, Homo Sapiens
ELLPKGLVDREPP

SEQ ID NO: 91174 - protein, 13 aa, Homo Sapiens
LLPKGLVDREPPE

SEQ ID NO: 91175 - protein, 13 aa, Homo Sapiens
LPKGLVDREPPEE

SEQ ID NO: 91176 - protein, 13 aa, Homo Sapiens
PKGLVDREPPEEL

SEQ ID NO: 91177 - protein, 13 aa, Homo Sapiens
KGLVDREPPEELV

SEQ ID NO: 91178 - protein, 13 aa, Homo Sapiens
GLVDREPPEELVH

SEQ ID NO: 91179 - protein, 13 aa, Homo Sapiens
LVDREPPEELVHR

SEQ ID NO: 91180 - protein, 13 aa, Homo Sapiens
VDREPPEELVHRV

SEQ ID NO: 91181 - protein, 13 aa, Homo Sapiens
DREPPEELVHRVK

SEQ ID NO: 91182 - protein, 13 aa, Homo Sapiens
REPPEELVHRVKR

SEQ ID NO: 91183 - protein, 13 aa, Homo Sapiens
EPPEELVHRVKRR

SEQ ID NO: 91184 - protein, 13 aa, Homo Sapiens
PPEELVHRVKRRA

SEQ ID NO: 91185 - protein, 13 aa, Homo Sapiens
PEELVHRVKRRAD

SEQ ID NO: 91186 - protein, 13 aa, Homo Sapiens
EELVHRVKRRADP

SEQ ID NO: 91187 - protein, 13 aa, Homo Sapiens
ELVHRVKRRADPD

SEQ ID NO: 91188 - protein, 13 aa, Homo Sapiens
LVHRVKRRADPDP

SEQ ID NO: 91189 - protein, 13 aa, Homo Sapiens
VHRVKRRADPDPM

SEQ ID NO: 91190 - protein, 13 aa, Homo Sapiens
HRVKRRADPDPMK

SEQ ID NO: 91191 - protein, 13 aa, Homo Sapiens
RVKRRADPDPMKN

SEQ ID NO: 91192 - protein, 13 aa, Homo Sapiens
VKRRADPDPMKNT

SEQ ID NO: 91193 - protein, 13 aa, Homo Sapiens
KRRADPDPMKNTC

SEQ ID NO: 91194 - protein, 13 aa, Homo Sapiens
RRADPDPMKNTCK

SEQ ID NO: 91195 - protein, 13 aa, Homo Sapiens
RADPDPMKNTCKL

SEQ ID NO: 91196 - protein, 13 aa, Homo Sapiens
ADPDPMKNTCKLL

SEQ ID NO: 91197 - protein, 13 aa, Homo Sapiens
DPDPMKNTCKLLV

SEQ ID NO: 91198 - protein, 13 aa, Homo Sapiens
PDPMKNTCKLLVV

SEQ ID NO: 91199 - protein, 13 aa, Homo Sapiens
DPMKNTCKLLVVA

SEQ ID NO: 91200 - protein, 13 aa, Homo Sapiens
PMKNTCKLLVVAD

SEQ ID NO: 91201 - protein, 13 aa, Homo Sapiens
MKNTCKLLVVADH

SEQ ID NO: 91202 - protein, 13 aa, Homo Sapiens
KNTCKLLVVADHR

SEQ ID NO: 91203 - protein, 13 aa, Homo Sapiens
NTCKLLVVADHRF

SEQ ID NO: 91204 - protein, 13 aa, Homo Sapiens
TCKLLVVADHRFY

SEQ ID NO: 91205 - protein, 13 aa, Homo Sapiens
CKLLVVADHRFYR

SEQ ID NO: 91206 - protein, 13 aa, Homo Sapiens
KLLVVADHRFYRY

SEQ ID NO: 91207 - protein, 13 aa, Homo Sapiens
LLVVADHRFYRYM

SEQ ID NO: 91208 - protein, 13 aa, Homo Sapiens
LVVADHRFYRYMG

SEQ ID NO: 91209 - protein, 13 aa, Homo Sapiens
VVADHRFYRYMGR

SEQ ID NO: 91210 - protein, 13 aa, Homo Sapiens
VADHRFYRYMGRG

SEQ ID NO: 91211 - protein, 13 aa, Homo Sapiens
ADHRFYRYMGRGE

SEQ ID NO: 91212 - protein, 13 aa, Homo Sapiens
DHRFYRYMGRGEE

SEQ ID NO: 91213 - protein, 13 aa, Homo Sapiens
HRFYRYMGRGEES

SEQ ID NO: 91214 - protein, 13 aa, Homo Sapiens
RFYRYMGRGEEST

SEQ ID NO: 91215 - protein, 13 aa, Homo Sapiens
FYRYMGRGEESTT

SEQ ID NO: 91216 - protein, 13 aa, Homo Sapiens
YRYMGRGEESTTT

SEQ ID NO: 91217 - protein, 13 aa, Homo Sapiens
RYMGRGEESTTTN

SEQ ID NO: 91218 - protein, 13 aa, Homo Sapiens
YMGRGEESTTTNY

SEQ ID NO: 91219 - protein, 13 aa, Homo Sapiens
MGRGEESTTTNYL

SEQ ID NO: 91220 - protein, 13 aa, Homo Sapiens
GRGEESTTTNYLI

SEQ ID NO: 91221 - protein, 13 aa, Homo Sapiens
RGEESTTTNYLIE

SEQ ID NO: 91222 - protein, 13 aa, Homo Sapiens
GEESTTTNYLIEL

SEQ ID NO: 91223 - protein, 13 aa, Homo Sapiens
EESTTTNYLIELI

SEQ ID NO: 91224 - protein, 13 aa, Homo Sapiens
ESTTTNYLIELID

SEQ ID NO: 91225 - protein, 13 aa, Homo Sapiens
STTTNYLIELIDR

SEQ ID NO: 91226 - protein, 13 aa, Homo Sapiens
TTTNYLIELIDRV

SEQ ID NO: 91227 - protein, 13 aa, Homo Sapiens
TTNYLIELIDRVD

SEQ ID NO: 91228 - protein, 13 aa, Homo Sapiens
TNYLIELIDRVDD

SEQ ID NO: 91229 - protein, 13 aa, Homo Sapiens
NYLIELIDRVDDI

SEQ ID NO: 91230 - protein, 13 aa, Homo Sapiens
YLIELIDRVDDIY

SEQ ID NO: 91231 - protein, 13 aa, Homo Sapiens
LIELIDRVDDIYR

SEQ ID NO: 91232 - protein, 13 aa, Homo Sapiens
IELIDRVDDIYRN

SEQ ID NO: 91233 - protein, 13 aa, Homo Sapiens
ELIDRVDDIYRNT

SEQ ID NO: 91234 - protein, 13 aa, Homo Sapiens
LIDRVDDIYRNTS

SEQ ID NO: 91235 - protein, 13 aa, Homo Sapiens
IDRVDDIYRNTSW

SEQ ID NO: 91236 - protein, 13 aa, Homo Sapiens
DRVDDIYRNTSWD

SEQ ID NO: 91237 - protein, 13 aa, Homo Sapiens
RVDDIYRNTSWDN

SEQ ID NO: 91238 - protein, 13 aa, Homo Sapiens
VDDIYRNTSWDNA

SEQ ID NO: 91239 - protein, 13 aa, Homo Sapiens
DDIYRNTSWDNAG

SEQ ID NO: 91240 - protein, 13 aa, Homo Sapiens
DIYRNTSWDNAGF

SEQ ID NO: 91241 - protein, 13 aa, Homo Sapiens
IYRNTSWDNAGFK

SEQ ID NO: 91242 - protein, 13 aa, Homo Sapiens
YRNTSWDNAGFKG

SEQ ID NO: 91243 - protein, 13 aa, Homo Sapiens
RNTSWDNAGFKGY

SEQ ID NO: 91244 - protein, 13 aa, Homo Sapiens
NTSWDNAGFKGYG

SEQ ID NO: 91245 - protein, 13 aa, Homo Sapiens
TSWDNAGFKGYGI

SEQ ID NO: 91246 - protein, 13 aa, Homo Sapiens
SWDNAGFKGYGIQ

SEQ ID NO: 91247 - protein, 13 aa, Homo Sapiens
WDNAGFKGYGIQI

SEQ ID NO: 91248 - protein, 13 aa, Homo Sapiens
DNAGFKGYGIQIE

SEQ ID NO: 91249 - protein, 13 aa, Homo Sapiens
NAGFKGYGIQIEQ

SEQ ID NO: 91250 - protein, 13 aa, Homo Sapiens
AGFKGYGIQIEQI

SEQ ID NO: 91251 - protein, 13 aa, Homo Sapiens
GFKGYGIQIEQIR

SEQ ID NO: 91252 - protein, 13 aa, Homo Sapiens
FKGYGIQIEQIRI

SEQ ID NO: 91253 - protein, 13 aa, Homo Sapiens
KGYGIQIEQIRIL

SEQ ID NO: 91254 - protein, 13 aa, Homo Sapiens
GYGIQIEQIRILK

SEQ ID NO: 91255 - protein, 13 aa, Homo Sapiens
YGIQIEQIRILKS

SEQ ID NO: 91256 - protein, 13 aa, Homo Sapiens
GIQIEQIRILKSP

SEQ ID NO: 91257 - protein, 13 aa, Homo Sapiens
IQIEQIRILKSPQ

SEQ ID NO: 91258 - protein, 13 aa, Homo Sapiens
QIEQIRILKSPQE

SEQ ID NO: 91259 - protein, 13 aa, Homo Sapiens
IEQIRILKSPQEV

SEQ ID NO: 91260 - protein, 13 aa, Homo Sapiens
EQIRILKSPQEVK

SEQ ID NO: 91261 - protein, 13 aa, Homo Sapiens
QIRILKSPQEVKP

SEQ ID NO: 91262 - protein, 13 aa, Homo Sapiens
IRILKSPQEVKPG

SEQ ID NO: 91263 - protein, 13 aa, Homo Sapiens
RILKSPQEVKPGE

SEQ ID NO: 91264 - protein, 13 aa, Homo Sapiens
ILKSPQEVKPGEK

SEQ ID NO: 91265 - protein, 13 aa, Homo Sapiens
LKSPQEVKPGEKH

SEQ ID NO: 91266 - protein, 13 aa, Homo Sapiens
KSPQEVKPGEKHY

SEQ ID NO: 91267 - protein, 13 aa, Homo Sapiens
SPQEVKPGEKHYN

SEQ ID NO: 91268 - protein, 13 aa, Homo Sapiens
PQEVKPGEKHYNM

SEQ ID NO: 91269 - protein, 13 aa, Homo Sapiens
QEVKPGEKHYNMA

SEQ ID NO: 91270 - protein, 13 aa, Homo Sapiens
EVKPGEKHYNMAK

SEQ ID NO: 91271 - protein, 13 aa, Homo Sapiens
VKPGEKHYNMAKS

SEQ ID NO: 91272 - protein, 13 aa, Homo Sapiens
KPGEKHYNMAKSY

SEQ ID NO: 91273 - protein, 13 aa, Homo Sapiens
PGEKHYNMAKSYP

SEQ ID NO: 91274 - protein, 13 aa, Homo Sapiens
GEKHYNMAKSYPN

SEQ ID NO: 91275 - protein, 13 aa, Homo Sapiens
EKHYNMAKSYPNE

SEQ ID NO: 91276 - protein, 13 aa, Homo Sapiens
KHYNMAKSYPNEE

SEQ ID NO: 91277 - protein, 13 aa, Homo Sapiens
HYNMAKSYPNEEK

SEQ ID NO: 91278 - protein, 13 aa, Homo Sapiens
YNMAKSYPNEEKD

SEQ ID NO: 91279 - protein, 13 aa, Homo Sapiens
NMAKSYPNEEKDA

SEQ ID NO: 91280 - protein, 13 aa, Homo Sapiens
MAKSYPNEEKDAW

SEQ ID NO: 91281 - protein, 13 aa, Homo Sapiens
AKSYPNEEKDAWD

SEQ ID NO: 91282 - protein, 13 aa, Homo Sapiens
KSYPNEEKDAWDV

SEQ ID NO: 91283 - protein, 13 aa, Homo Sapiens
SYPNEEKDAWDVK

SEQ ID NO: 91284 - protein, 13 aa, Homo Sapiens
YPNEEKDAWDVKM

SEQ ID NO: 91285 - protein, 13 aa, Homo Sapiens
PNEEKDAWDVKML

SEQ ID NO: 91286 - protein, 13 aa, Homo Sapiens
NEEKDAWDVKMLL

SEQ ID NO: 91287 - protein, 13 aa, Homo Sapiens
EEKDAWDVKMLLE

SEQ ID NO: 91288 - protein, 13 aa, Homo Sapiens
EKDAWDVKMLLEQ

SEQ ID NO: 91289 - protein, 13 aa, Homo Sapiens
KDAWDVKMLLEQF

SEQ ID NO: 91290 - protein, 13 aa, Homo Sapiens
DAWDVKMLLEQFS

SEQ ID NO: 91291 - protein, 13 aa, Homo Sapiens
AWDVKMLLEQFSF

SEQ ID NO: 91292 - protein, 13 aa, Homo Sapiens
WDVKMLLEQFSFD

SEQ ID NO: 91293 - protein, 13 aa, Homo Sapiens
DVKMLLEQFSFDI

SEQ ID NO: 91294 - protein, 13 aa, Homo Sapiens
VKMLLEQFSFDIA

SEQ ID NO: 91295 - protein, 13 aa, Homo Sapiens
KMLLEQFSFDIAE

SEQ ID NO: 91296 - protein, 13 aa, Homo Sapiens
MLLEQFSFDIAEE

SEQ ID NO: 91297 - protein, 13 aa, Homo Sapiens
LLEQFSFDIAEEA

SEQ ID NO: 91298 - protein, 13 aa, Homo Sapiens
LEQFSFDIAEEAS

SEQ ID NO: 91299 - protein, 13 aa, Homo Sapiens
EQFSFDIAEEASK

SEQ ID NO: 91300 - protein, 13 aa, Homo Sapiens
QFSFDIAEEASKV

SEQ ID NO: 91301 - protein, 13 aa, Homo Sapiens
FSFDIAEEASKVC

SEQ ID NO: 91302 - protein, 13 aa, Homo Sapiens
SFDIAEEASKVCL

SEQ ID NO: 91303 - protein, 13 aa, Homo Sapiens
FDIAEEASKVCLA

SEQ ID NO: 91304 - protein, 13 aa, Homo Sapiens
DIAEEASKVCLAH

SEQ ID NO: 91305 - protein, 13 aa, Homo Sapiens
IAEEASKVCLAHL

SEQ ID NO: 91306 - protein, 13 aa, Homo Sapiens
AEEASKVCLAHLF

SEQ ID NO: 91307 - protein, 13 aa, Homo Sapiens
EEASKVCLAHLFT

SEQ ID NO: 91308 - protein, 13 aa, Homo Sapiens
EASKVCLAHLFTY

SEQ ID NO: 91309 - protein, 13 aa, Homo Sapiens
ASKVCLAHLFTYQ

SEQ ID NO: 91310 - protein, 13 aa, Homo Sapiens
SKVCLAHLFTYQD

SEQ ID NO: 91311 - protein, 13 aa, Homo Sapiens
KVCLAHLFTYQDF

SEQ ID NO: 91312 - protein, 13 aa, Homo Sapiens
VCLAHLFTYQDFD

SEQ ID NO: 91313 - protein, 13 aa, Homo Sapiens
CLAHLFTYQDFDM

SEQ ID NO: 91314 - protein, 13 aa, Homo Sapiens
LAHLFTYQDFDMG

SEQ ID NO: 91315 - protein, 13 aa, Homo Sapiens
AHLFTYQDFDMGT

SEQ ID NO: 91316 - protein, 13 aa, Homo Sapiens
HLFTYQDFDMGTL

SEQ ID NO: 91317 - protein, 13 aa, Homo Sapiens
LFTYQDFDMGTLG

SEQ ID NO: 91318 - protein, 13 aa, Homo Sapiens
FTYQDFDMGTLGL

SEQ ID NO: 91319 - protein, 13 aa, Homo Sapiens
TYQDFDMGTLGLA

SEQ ID NO: 91320 - protein, 13 aa, Homo Sapiens
YQDFDMGTLGLAY

SEQ ID NO: 91321 - protein, 13 aa, Homo Sapiens
QDFDMGTLGLAYV

SEQ ID NO: 91322 - protein, 13 aa, Homo Sapiens
DFDMGTLGLAYVG

SEQ ID NO: 91323 - protein, 13 aa, Homo Sapiens
FDMGTLGLAYVGS

SEQ ID NO: 91324 - protein, 13 aa, Homo Sapiens
DMGTLGLAYVGSP

SEQ ID NO: 91325 - protein, 13 aa, Homo Sapiens
MGTLGLAYVGSPR

SEQ ID NO: 91326 - protein, 13 aa, Homo Sapiens
GTLGLAYVGSPRA

SEQ ID NO: 91327 - protein, 13 aa, Homo Sapiens
TLGLAYVGSPRAN

SEQ ID NO: 91328 - protein, 13 aa, Homo Sapiens
LGLAYVGSPRANS

SEQ ID NO: 91329 - protein, 13 aa, Homo Sapiens
GLAYVGSPRANSH

SEQ ID NO: 91330 - protein, 13 aa, Homo Sapiens
LAYVGSPRANSHG

SEQ ID NO: 91331 - protein, 13 aa, Homo Sapiens
AYVGSPRANSHGG

SEQ ID NO: 91332 - protein, 13 aa, Homo Sapiens
YVGSPRANSHGGV

SEQ ID NO: 91333 - protein, 13 aa, Homo Sapiens
VGSPRANSHGGVC

SEQ ID NO: 91334 - protein, 13 aa, Homo Sapiens
GSPRANSHGGVCP

SEQ ID NO: 91335 - protein, 13 aa, Homo Sapiens
SPRANSHGGVCPK

SEQ ID NO: 91336 - protein, 13 aa, Homo Sapiens
PRANSHGGVCPKA

SEQ ID NO: 91337 - protein, 13 aa, Homo Sapiens
RANSHGGVCPKAY

SEQ ID NO: 91338 - protein, 13 aa, Homo Sapiens
ANSHGGVCPKAYY

SEQ ID NO: 91339 - protein, 13 aa, Homo Sapiens
NSHGGVCPKAYYS

SEQ ID NO: 91340 - protein, 13 aa, Homo Sapiens
SHGGVCPKAYYSP

SEQ ID NO: 91341 - protein, 13 aa, Homo Sapiens
HGGVCPKAYYSPV

SEQ ID NO: 91342 - protein, 13 aa, Homo Sapiens
GGVCPKAYYSPVG

SEQ ID NO: 91343 - protein, 13 aa, Homo Sapiens
GVCPKAYYSPVGK

SEQ ID NO: 91344 - protein, 13 aa, Homo Sapiens
VCPKAYYSPVGKK

SEQ ID NO: 91345 - protein, 13 aa, Homo Sapiens
CPKAYYSPVGKKN

SEQ ID NO: 91346 - protein, 13 aa, Homo Sapiens
PKAYYSPVGKKNI

SEQ ID NO: 91347 - protein, 13 aa, Homo Sapiens
KAYYSPVGKKNIY

SEQ ID NO: 91348 - protein, 13 aa, Homo Sapiens
AYYSPVGKKNIYL

SEQ ID NO: 91349 - protein, 13 aa, Homo Sapiens
YYSPVGKKNIYLN

SEQ ID NO: 91350 - protein, 13 aa, Homo Sapiens
YSPVGKKNIYLNS

SEQ ID NO: 91351 - protein, 13 aa, Homo Sapiens
SPVGKKNIYLNSG

SEQ ID NO: 91352 - protein, 13 aa, Homo Sapiens
PVGKKNIYLNSGL

SEQ ID NO: 91353 - protein, 13 aa, Homo Sapiens
VGKKNIYLNSGLT

SEQ ID NO: 91354 - protein, 13 aa, Homo Sapiens
GKKNIYLNSGLTS

SEQ ID NO: 91355 - protein, 13 aa, Homo Sapiens
KKNIYLNSGLTST

SEQ ID NO: 91356 - protein, 13 aa, Homo Sapiens
KNIYLNSGLTSTK

SEQ ID NO: 91357 - protein, 13 aa, Homo Sapiens
NIYLNSGLTSTKN

SEQ ID NO: 91358 - protein, 13 aa, Homo Sapiens
IYLNSGLTSTKNY

SEQ ID NO: 91359 - protein, 13 aa, Homo Sapiens
YLNSGLTSTKNYG

SEQ ID NO: 91360 - protein, 13 aa, Homo Sapiens
LNSGLTSTKNYGK

SEQ ID NO: 91361 - protein, 13 aa, Homo Sapiens
NSGLTSTKNYGKT

SEQ ID NO: 91362 - protein, 13 aa, Homo Sapiens
SGLTSTKNYGKTI

SEQ ID NO: 91363 - protein, 13 aa, Homo Sapiens
GLTSTKNYGKTIL

SEQ ID NO: 91364 - protein, 13 aa, Homo Sapiens
LTSTKNYGKTILT

SEQ ID NO: 91365 - protein, 13 aa, Homo Sapiens
TSTKNYGKTILTK

SEQ ID NO: 91366 - protein, 13 aa, Homo Sapiens
STKNYGKTILTKE

SEQ ID NO: 91367 - protein, 13 aa, Homo Sapiens
TKNYGKTILTKEA

SEQ ID NO: 91368 - protein, 13 aa, Homo Sapiens
KNYGKTILTKEAD

SEQ ID NO: 91369 - protein, 13 aa, Homo Sapiens
NYGKTILTKEADL

SEQ ID NO: 91370 - protein, 13 aa, Homo Sapiens
YGKTILTKEADLV

SEQ ID NO: 91371 - protein, 13 aa, Homo Sapiens
GKTILTKEADLVT

SEQ ID NO: 91372 - protein, 13 aa, Homo Sapiens
KTILTKEADLVTT

SEQ ID NO: 91373 - protein, 13 aa, Homo Sapiens
TILTKEADLVTTH

SEQ ID NO: 91374 - protein, 13 aa, Homo Sapiens
ILTKEADLVTTHE

SEQ ID NO: 91375 - protein, 13 aa, Homo Sapiens
LTKEADLVTTHEL

SEQ ID NO: 91376 - protein, 13 aa, Homo Sapiens
TKEADLVTTHELG

SEQ ID NO: 91377 - protein, 13 aa, Homo Sapiens
KEADLVTTHELGH

SEQ ID NO: 91378 - protein, 13 aa, Homo Sapiens
EADLVTTHELGHN

SEQ ID NO: 91379 - protein, 13 aa, Homo Sapiens
ADLVTTHELGHNF

SEQ ID NO: 91380 - protein, 13 aa, Homo Sapiens
DLVTTHELGHNFG

SEQ ID NO: 91381 - protein, 13 aa, Homo Sapiens
LVTTHELGHNFGA

SEQ ID NO: 91382 - protein, 13 aa, Homo Sapiens
VTTHELGHNFGAE

SEQ ID NO: 91383 - protein, 13 aa, Homo Sapiens
TTHELGHNFGAEH

SEQ ID NO: 91384 - protein, 13 aa, Homo Sapiens
THELGHNFGAEHD

SEQ ID NO: 91385 - protein, 13 aa, Homo Sapiens
HELGHNFGAEHDP

SEQ ID NO: 91386 - protein, 13 aa, Homo Sapiens
ELGHNFGAEHDPD

SEQ ID NO: 91387 - protein, 13 aa, Homo Sapiens
LGHNFGAEHDPDG

SEQ ID NO: 91388 - protein, 13 aa, Homo Sapiens
GHNFGAEHDPDGL

SEQ ID NO: 91389 - protein, 13 aa, Homo Sapiens
HNFGAEHDPDGLA

SEQ ID NO: 91390 - protein, 13 aa, Homo Sapiens
NFGAEHDPDGLAE

SEQ ID NO: 91391 - protein, 13 aa, Homo Sapiens
FGAEHDPDGLAEC

SEQ ID NO: 91392 - protein, 13 aa, Homo Sapiens
GAEHDPDGLAECA

SEQ ID NO: 91393 - protein, 13 aa, Homo Sapiens
AEHDPDGLAECAP

SEQ ID NO: 91394 - protein, 13 aa, Homo Sapiens
EHDPDGLAECAPN

SEQ ID NO: 91395 - protein, 13 aa, Homo Sapiens
HDPDGLAECAPNE

SEQ ID NO: 91396 - protein, 13 aa, Homo Sapiens
DPDGLAECAPNED

SEQ ID NO: 91397 - protein, 13 aa, Homo Sapiens
PDGLAECAPNEDQ

SEQ ID NO: 91398 - protein, 13 aa, Homo Sapiens
DGLAECAPNEDQG

SEQ ID NO: 91399 - protein, 13 aa, Homo Sapiens
GLAECAPNEDQGG

SEQ ID NO: 91400 - protein, 13 aa, Homo Sapiens
LAECAPNEDQGGK

SEQ ID NO: 91401 - protein, 13 aa, Homo Sapiens
AECAPNEDQGGKY

SEQ ID NO: 91402 - protein, 13 aa, Homo Sapiens
ECAPNEDQGGKYV

SEQ ID NO: 91403 - protein, 13 aa, Homo Sapiens
CAPNEDQGGKYVM

SEQ ID NO: 91404 - protein, 13 aa, Homo Sapiens
APNEDQGGKYVMY

SEQ ID NO: 91405 - protein, 13 aa, Homo Sapiens
PNEDQGGKYVMYP

SEQ ID NO: 91406 - protein, 13 aa, Homo Sapiens
NEDQGGKYVMYPI

SEQ ID NO: 91407 - protein, 13 aa, Homo Sapiens
EDQGGKYVMYPIA

SEQ ID NO: 91408 - protein, 13 aa, Homo Sapiens
DQGGKYVMYPIAV

SEQ ID NO: 91409 - protein, 13 aa, Homo Sapiens
QGGKYVMYPIAVS

SEQ ID NO: 91410 - protein, 13 aa, Homo Sapiens
GGKYVMYPIAVSG

SEQ ID NO: 91411 - protein, 13 aa, Homo Sapiens
GKYVMYPIAVSGD

SEQ ID NO: 91412 - protein, 13 aa, Homo Sapiens
KYVMYPIAVSGDH

SEQ ID NO: 91413 - protein, 13 aa, Homo Sapiens
YVMYPIAVSGDHE

SEQ ID NO: 91414 - protein, 13 aa, Homo Sapiens
VMYPIAVSGDHEN

SEQ ID NO: 91415 - protein, 13 aa, Homo Sapiens
MYPIAVSGDHENN

SEQ ID NO: 91416 - protein, 13 aa, Homo Sapiens
YPIAVSGDHENNK

SEQ ID NO: 91417 - protein, 13 aa, Homo Sapiens
PIAVSGDHENNKM

SEQ ID NO: 91418 - protein, 13 aa, Homo Sapiens
IAVSGDHENNKMF

SEQ ID NO: 91419 - protein, 13 aa, Homo Sapiens
AVSGDHENNKMFS

SEQ ID NO: 91420 - protein, 13 aa, Homo Sapiens
VSGDHENNKMFSN

SEQ ID NO: 91421 - protein, 13 aa, Homo Sapiens
SGDHENNKMFSNC

SEQ ID NO: 91422 - protein, 13 aa, Homo Sapiens
GDHENNKMFSNCS

SEQ ID NO: 91423 - protein, 13 aa, Homo Sapiens
DHENNKMFSNCSK

SEQ ID NO: 91424 - protein, 13 aa, Homo Sapiens
HENNKMFSNCSKQ

SEQ ID NO: 91425 - protein, 13 aa, Homo Sapiens
ENNKMFSNCSKQS

SEQ ID NO: 91426 - protein, 13 aa, Homo Sapiens
NNKMFSNCSKQSI

SEQ ID NO: 91427 - protein, 13 aa, Homo Sapiens
NKMFSNCSKQSIY

SEQ ID NO: 91428 - protein, 13 aa, Homo Sapiens
KMFSNCSKQSIYK

SEQ ID NO: 91429 - protein, 13 aa, Homo Sapiens
MFSNCSKQSIYKT

SEQ ID NO: 91430 - protein, 13 aa, Homo Sapiens
FSNCSKQSIYKTI

SEQ ID NO: 91431 - protein, 13 aa, Homo Sapiens
SNCSKQSIYKTIE

SEQ ID NO: 91432 - protein, 13 aa, Homo Sapiens
NCSKQSIYKTIES

SEQ ID NO: 91433 - protein, 13 aa, Homo Sapiens
CSKQSIYKTIESK

SEQ ID NO: 91434 - protein, 13 aa, Homo Sapiens
SKQSIYKTIESKA

SEQ ID NO: 91435 - protein, 13 aa, Homo Sapiens
KQSIYKTIESKAQ

SEQ ID NO: 91436 - protein, 13 aa, Homo Sapiens
QSIYKTIESKAQE

SEQ ID NO: 91437 - protein, 13 aa, Homo Sapiens
SIYKTIESKAQEC

SEQ ID NO: 91438 - protein, 13 aa, Homo Sapiens
IYKTIESKAQECF

SEQ ID NO: 91439 - protein, 13 aa, Homo Sapiens
YKTIESKAQECFQ

SEQ ID NO: 91440 - protein, 13 aa, Homo Sapiens
KTIESKAQECFQE

SEQ ID NO: 91441 - protein, 13 aa, Homo Sapiens
TIESKAQECFQER

SEQ ID NO: 91442 - protein, 13 aa, Homo Sapiens
IESKAQECFQERS

SEQ ID NO: 91443 - protein, 13 aa, Homo Sapiens
ESKAQECFQERSN

SEQ ID NO: 91444 - protein, 13 aa, Homo Sapiens
SKAQECFQERSNK

SEQ ID NO: 91445 - protein, 13 aa, Homo Sapiens
KAQECFQERSNKV

SEQ ID NO: 91446 - protein, 13 aa, Homo Sapiens
AQECFQERSNKVC

SEQ ID NO: 91447 - protein, 13 aa, Homo Sapiens
QECFQERSNKVCG

SEQ ID NO: 91448 - protein, 13 aa, Homo Sapiens
ECFQERSNKVCGN

SEQ ID NO: 91449 - protein, 13 aa, Homo Sapiens
CFQERSNKVCGNS

SEQ ID NO: 91450 - protein, 13 aa, Homo Sapiens
FQERSNKVCGNSR

SEQ ID NO: 91451 - protein, 13 aa, Homo Sapiens
QERSNKVCGNSRV

SEQ ID NO: 91452 - protein, 13 aa, Homo Sapiens
ERSNKVCGNSRVD

SEQ ID NO: 91453 - protein, 13 aa, Homo Sapiens
RSNKVCGNSRVDE

SEQ ID NO: 91454 - protein, 13 aa, Homo Sapiens
SNKVCGNSRVDEG

SEQ ID NO: 91455 - protein, 13 aa, Homo Sapiens
NKVCGNSRVDEGE

SEQ ID NO: 91456 - protein, 13 aa, Homo Sapiens
KVCGNSRVDEGEE

SEQ ID NO: 91457 - protein, 13 aa, Homo Sapiens
VCGNSRVDEGEEC

SEQ ID NO: 91458 - protein, 13 aa, Homo Sapiens
CGNSRVDEGEECD

SEQ ID NO: 91459 - protein, 13 aa, Homo Sapiens
GNSRVDEGEECDP

SEQ ID NO: 91460 - protein, 13 aa, Homo Sapiens
NSRVDEGEECDPG

SEQ ID NO: 91461 - protein, 13 aa, Homo Sapiens
SRVDEGEECDPGI

SEQ ID NO: 91462 - protein, 13 aa, Homo Sapiens
RVDEGEECDPGIM

SEQ ID NO: 91463 - protein, 13 aa, Homo Sapiens
VDEGEECDPGIMY

SEQ ID NO: 91464 - protein, 13 aa, Homo Sapiens
DEGEECDPGIMYL

SEQ ID NO: 91465 - protein, 13 aa, Homo Sapiens
EGEECDPGIMYLN

SEQ ID NO: 91466 - protein, 13 aa, Homo Sapiens
GEECDPGIMYLNN

SEQ ID NO: 91467 - protein, 13 aa, Homo Sapiens
EECDPGIMYLNND

SEQ ID NO: 91468 - protein, 13 aa, Homo Sapiens
ECDPGIMYLNNDT

SEQ ID NO: 91469 - protein, 13 aa, Homo Sapiens
CDPGIMYLNNDTC

SEQ ID NO: 91470 - protein, 13 aa, Homo Sapiens
DPGIMYLNNDTCC

SEQ ID NO: 91471 - protein, 13 aa, Homo Sapiens
PGIMYLNNDTCCN

SEQ ID NO: 91472 - protein, 13 aa, Homo Sapiens
GIMYLNNDTCCNS

SEQ ID NO: 91473 - protein, 13 aa, Homo Sapiens
IMYLNNDTCCNSD

SEQ ID NO: 91474 - protein, 13 aa, Homo Sapiens
MYLNNDTCCNSDC

SEQ ID NO: 91475 - protein, 13 aa, Homo Sapiens
YLNNDTCCNSDCT

SEQ ID NO: 91476 - protein, 13 aa, Homo Sapiens
LNNDTCCNSDCTL

SEQ ID NO: 91477 - protein, 13 aa, Homo Sapiens
NNDTCCNSDCTLK

SEQ ID NO: 91478 - protein, 13 aa, Homo Sapiens
NDTCCNSDCTLKE

SEQ ID NO: 91479 - protein, 13 aa, Homo Sapiens
DTCCNSDCTLKEG

SEQ ID NO: 91480 - protein, 13 aa, Homo Sapiens
TCCNSDCTLKEGV

SEQ ID NO: 91481 - protein, 13 aa, Homo Sapiens
CCNSDCTLKEGVQ

SEQ ID NO: 91482 - protein, 13 aa, Homo Sapiens
CNSDCTLKEGVQC

SEQ ID NO: 91483 - protein, 13 aa, Homo Sapiens
NSDCTLKEGVQCS

SEQ ID NO: 91484 - protein, 13 aa, Homo Sapiens
SDCTLKEGVQCSD

SEQ ID NO: 91485 - protein, 13 aa, Homo Sapiens
DCTLKEGVQCSDR

SEQ ID NO: 91486 - protein, 13 aa, Homo Sapiens
CTLKEGVQCSDRN

SEQ ID NO: 91487 - protein, 13 aa, Homo Sapiens
TLKEGVQCSDRNS

SEQ ID NO: 91488 - protein, 13 aa, Homo Sapiens
LKEGVQCSDRNSP

SEQ ID NO: 91489 - protein, 13 aa, Homo Sapiens
KEGVQCSDRNSPC

SEQ ID NO: 91490 - protein, 13 aa, Homo Sapiens
EGVQCSDRNSPCC

SEQ ID NO: 91491 - protein, 13 aa, Homo Sapiens
GVQCSDRNSPCCK

SEQ ID NO: 91492 - protein, 13 aa, Homo Sapiens
VQCSDRNSPCCKN

SEQ ID NO: 91493 - protein, 13 aa, Homo Sapiens
QCSDRNSPCCKNC

SEQ ID NO: 91494 - protein, 13 aa, Homo Sapiens
CSDRNSPCCKNCQ

SEQ ID NO: 91495 - protein, 13 aa, Homo Sapiens
SDRNSPCCKNCQF

SEQ ID NO: 91496 - protein, 13 aa, Homo Sapiens
DRNSPCCKNCQFE

SEQ ID NO: 91497 - protein, 13 aa, Homo Sapiens
RNSPCCKNCQFET

SEQ ID NO: 91498 - protein, 13 aa, Homo Sapiens
NSPCCKNCQFETA

SEQ ID NO: 91499 - protein, 13 aa, Homo Sapiens
SPCCKNCQFETAQ

SEQ ID NO: 91500 - protein, 13 aa, Homo Sapiens
PCCKNCQFETAQK

SEQ ID NO: 91501 - protein, 13 aa, Homo Sapiens
CCKNCQFETAQKK

SEQ ID NO: 91502 - protein, 13 aa, Homo Sapiens
CKNCQFETAQKKC

SEQ ID NO: 91503 - protein, 13 aa, Homo Sapiens
KNCQFETAQKKCQ

SEQ ID NO: 91504 - protein, 13 aa, Homo Sapiens
NCQFETAQKKCQE

SEQ ID NO: 91505 - protein, 13 aa, Homo Sapiens
CQFETAQKKCQEA

SEQ ID NO: 91506 - protein, 13 aa, Homo Sapiens
QFETAQKKCQEAI

SEQ ID NO: 91507 - protein, 13 aa, Homo Sapiens
FETAQKKCQEAIN

SEQ ID NO: 91508 - protein, 13 aa, Homo Sapiens
ETAQKKCQEAINA

SEQ ID NO: 91509 - protein, 13 aa, Homo Sapiens
TAQKKCQEAINAT

SEQ ID NO: 91510 - protein, 13 aa, Homo Sapiens
AQKKCQEAINATC

SEQ ID NO: 91511 - protein, 13 aa, Homo Sapiens
QKKCQEAINATCK

SEQ ID NO: 91512 - protein, 13 aa, Homo Sapiens
KKCQEAINATCKG

SEQ ID NO: 91513 - protein, 13 aa, Homo Sapiens
KCQEAINATCKGV

SEQ ID NO: 91514 - protein, 13 aa, Homo Sapiens
CQEAINATCKGVS

SEQ ID NO: 91515 - protein, 13 aa, Homo Sapiens
QEAINATCKGVSY

SEQ ID NO: 91516 - protein, 13 aa, Homo Sapiens
EAINATCKGVSYC

SEQ ID NO: 91517 - protein, 13 aa, Homo Sapiens
AINATCKGVSYCT

SEQ ID NO: 91518 - protein, 13 aa, Homo Sapiens
INATCKGVSYCTG

SEQ ID NO: 91519 - protein, 13 aa, Homo Sapiens
NATCKGVSYCTGN

SEQ ID NO: 91520 - protein, 13 aa, Homo Sapiens
ATCKGVSYCTGNS

SEQ ID NO: 91521 - protein, 13 aa, Homo Sapiens
TCKGVSYCTGNSS

SEQ ID NO: 91522 - protein, 13 aa, Homo Sapiens
CKGVSYCTGNSSE

SEQ ID NO: 91523 - protein, 13 aa, Homo Sapiens
KGVSYCTGNSSEC

SEQ ID NO: 91524 - protein, 13 aa, Homo Sapiens
GVSYCTGNSSECP

SEQ ID NO: 91525 - protein, 13 aa, Homo Sapiens
VSYCTGNSSECPP

SEQ ID NO: 91526 - protein, 13 aa, Homo Sapiens
SYCTGNSSECPPP

SEQ ID NO: 91527 - protein, 13 aa, Homo Sapiens
YCTGNSSECPPPG

SEQ ID NO: 91528 - protein, 13 aa, Homo Sapiens
CTGNSSECPPPGN

SEQ ID NO: 91529 - protein, 13 aa, Homo Sapiens
TGNSSECPPPGNA

SEQ ID NO: 91530 - protein, 13 aa, Homo Sapiens
GNSSECPPPGNAE

SEQ ID NO: 91531 - protein, 13 aa, Homo Sapiens
NSSECPPPGNAED

SEQ ID NO: 91532 - protein, 13 aa, Homo Sapiens
SSECPPPGNAEDD

SEQ ID NO: 91533 - protein, 13 aa, Homo Sapiens
SECPPPGNAEDDT

SEQ ID NO: 91534 - protein, 13 aa, Homo Sapiens
ECPPPGNAEDDTV

SEQ ID NO: 91535 - protein, 13 aa, Homo Sapiens
CPPPGNAEDDTVC

SEQ ID NO: 91536 - protein, 13 aa, Homo Sapiens
PPPGNAEDDTVCL

SEQ ID NO: 91537 - protein, 13 aa, Homo Sapiens
PPGNAEDDTVCLD

SEQ ID NO: 91538 - protein, 13 aa, Homo Sapiens
PGNAEDDTVCLDL

SEQ ID NO: 91539 - protein, 13 aa, Homo Sapiens
GNAEDDTVCLDLG

SEQ ID NO: 91540 - protein, 13 aa, Homo Sapiens
NAEDDTVCLDLGK

SEQ ID NO: 91541 - protein, 13 aa, Homo Sapiens
AEDDTVCLDLGKC

SEQ ID NO: 91542 - protein, 13 aa, Homo Sapiens
EDDTVCLDLGKCK

SEQ ID NO: 91543 - protein, 13 aa, Homo Sapiens
DDTVCLDLGKCKD

SEQ ID NO: 91544 - protein, 13 aa, Homo Sapiens
DTVCLDLGKCKDG

SEQ ID NO: 91545 - protein, 13 aa, Homo Sapiens
TVCLDLGKCKDGK

SEQ ID NO: 91546 - protein, 13 aa, Homo Sapiens
VCLDLGKCKDGKC

SEQ ID NO: 91547 - protein, 13 aa, Homo Sapiens
CLDLGKCKDGKCI

SEQ ID NO: 91548 - protein, 13 aa, Homo Sapiens
LDLGKCKDGKCIP

SEQ ID NO: 91549 - protein, 13 aa, Homo Sapiens
DLGKCKDGKCIPF

SEQ ID NO: 91550 - protein, 13 aa, Homo Sapiens
LGKCKDGKCIPFC

SEQ ID NO: 91551 - protein, 13 aa, Homo Sapiens
GKCKDGKCIPFCE

SEQ ID NO: 91552 - protein, 13 aa, Homo Sapiens
KCKDGKCIPFCER

SEQ ID NO: 91553 - protein, 13 aa, Homo Sapiens
CKDGKCIPFCERE

SEQ ID NO: 91554 - protein, 13 aa, Homo Sapiens
KDGKCIPFCEREQ

SEQ ID NO: 91555 - protein, 13 aa, Homo Sapiens
DGKCIPFCEREQQ

SEQ ID NO: 91556 - protein, 13 aa, Homo Sapiens
GKCIPFCEREQQL

SEQ ID NO: 91557 - protein, 13 aa, Homo Sapiens
KCIPFCEREQQLE

SEQ ID NO: 91558 - protein, 13 aa, Homo Sapiens
CIPFCEREQQLES

SEQ ID NO: 91559 - protein, 13 aa, Homo Sapiens
IPFCEREQQLESC

SEQ ID NO: 91560 - protein, 13 aa, Homo Sapiens
PFCEREQQLESCA

SEQ ID NO: 91561 - protein, 13 aa, Homo Sapiens
FCEREQQLESCAC

SEQ ID NO: 91562 - protein, 13 aa, Homo Sapiens
CEREQQLESCACN

SEQ ID NO: 91563 - protein, 13 aa, Homo Sapiens
EREQQLESCACNE

SEQ ID NO: 91564 - protein, 13 aa, Homo Sapiens
REQQLESCACNET

SEQ ID NO: 91565 - protein, 13 aa, Homo Sapiens
EQQLESCACNETD

SEQ ID NO: 91566 - protein, 13 aa, Homo Sapiens
QQLESCACNETDN

SEQ ID NO: 91567 - protein, 13 aa, Homo Sapiens
QLESCACNETDNS

SEQ ID NO: 91568 - protein, 13 aa, Homo Sapiens
LESCACNETDNSC

SEQ ID NO: 91569 - protein, 13 aa, Homo Sapiens
ESCACNETDNSCK

SEQ ID NO: 91570 - protein, 13 aa, Homo Sapiens
SCACNETDNSCKV

SEQ ID NO: 91571 - protein, 13 aa, Homo Sapiens
CACNETDNSCKVC

SEQ ID NO: 91572 - protein, 13 aa, Homo Sapiens
ACNETDNSCKVCC

SEQ ID NO: 91573 - protein, 13 aa, Homo Sapiens
CNETDNSCKVCCR

SEQ ID NO: 91574 - protein, 13 aa, Homo Sapiens
NETDNSCKVCCRD

SEQ ID NO: 91575 - protein, 13 aa, Homo Sapiens
ETDNSCKVCCRDL

SEQ ID NO: 91576 - protein, 13 aa, Homo Sapiens
TDNSCKVCCRDLS

SEQ ID NO: 91577 - protein, 13 aa, Homo Sapiens
DNSCKVCCRDLSG

SEQ ID NO: 91578 - protein, 13 aa, Homo Sapiens
NSCKVCCRDLSGR

SEQ ID NO: 91579 - protein, 13 aa, Homo Sapiens
SCKVCCRDLSGRC

SEQ ID NO: 91580 - protein, 13 aa, Homo Sapiens
CKVCCRDLSGRCV

SEQ ID NO: 91581 - protein, 13 aa, Homo Sapiens
KVCCRDLSGRCVP

SEQ ID NO: 91582 - protein, 13 aa, Homo Sapiens
VCCRDLSGRCVPY

SEQ ID NO: 91583 - protein, 13 aa, Homo Sapiens
CCRDLSGRCVPYV

SEQ ID NO: 91584 - protein, 13 aa, Homo Sapiens
CRDLSGRCVPYVD

SEQ ID NO: 91585 - protein, 13 aa, Homo Sapiens
RDLSGRCVPYVDA

SEQ ID NO: 91586 - protein, 13 aa, Homo Sapiens
DLSGRCVPYVDAE

SEQ ID NO: 91587 - protein, 13 aa, Homo Sapiens
LSGRCVPYVDAEQ

SEQ ID NO: 91588 - protein, 13 aa, Homo Sapiens
SGRCVPYVDAEQK

SEQ ID NO: 91589 - protein, 13 aa, Homo Sapiens
GRCVPYVDAEQKN

SEQ ID NO: 91590 - protein, 13 aa, Homo Sapiens
RCVPYVDAEQKNL

SEQ ID NO: 91591 - protein, 13 aa, Homo Sapiens
CVPYVDAEQKNLF

SEQ ID NO: 91592 - protein, 13 aa, Homo Sapiens
VPYVDAEQKNLFL

SEQ ID NO: 91593 - protein, 13 aa, Homo Sapiens
PYVDAEQKNLFLR

SEQ ID NO: 91594 - protein, 13 aa, Homo Sapiens
YVDAEQKNLFLRK

SEQ ID NO: 91595 - protein, 13 aa, Homo Sapiens
VDAEQKNLFLRKG

SEQ ID NO: 91596 - protein, 13 aa, Homo Sapiens
DAEQKNLFLRKGK

SEQ ID NO: 91597 - protein, 13 aa, Homo Sapiens
AEQKNLFLRKGKP

SEQ ID NO: 91598 - protein, 13 aa, Homo Sapiens
EQKNLFLRKGKPC

SEQ ID NO: 91599 - protein, 13 aa, Homo Sapiens
QKNLFLRKGKPCT

SEQ ID NO: 91600 - protein, 13 aa, Homo Sapiens
KNLFLRKGKPCTV

SEQ ID NO: 91601 - protein, 13 aa, Homo Sapiens
NLFLRKGKPCTVG

SEQ ID NO: 91602 - protein, 13 aa, Homo Sapiens
LFLRKGKPCTVGF

SEQ ID NO: 91603 - protein, 13 aa, Homo Sapiens
FLRKGKPCTVGFC

SEQ ID NO: 91604 - protein, 13 aa, Homo Sapiens
LRKGKPCTVGFCD

SEQ ID NO: 91605 - protein, 13 aa, Homo Sapiens
RKGKPCTVGFCDM

SEQ ID NO: 91606 - protein, 13 aa, Homo Sapiens
KGKPCTVGFCDMN

SEQ ID NO: 91607 - protein, 13 aa, Homo Sapiens
GKPCTVGFCDMNG

SEQ ID NO: 91608 - protein, 13 aa, Homo Sapiens
KPCTVGFCDMNGK

SEQ ID NO: 91609 - protein, 13 aa, Homo Sapiens
PCTVGFCDMNGKC

SEQ ID NO: 91610 - protein, 13 aa, Homo Sapiens
CTVGFCDMNGKCE

SEQ ID NO: 91611 - protein, 13 aa, Homo Sapiens
TVGFCDMNGKCEK

SEQ ID NO: 91612 - protein, 13 aa, Homo Sapiens
VGFCDMNGKCEKR

SEQ ID NO: 91613 - protein, 13 aa, Homo Sapiens
GFCDMNGKCEKRV

SEQ ID NO: 91614 - protein, 13 aa, Homo Sapiens
FCDMNGKCEKRVQ

SEQ ID NO: 91615 - protein, 13 aa, Homo Sapiens
CDMNGKCEKRVQD

SEQ ID NO: 91616 - protein, 13 aa, Homo Sapiens
DMNGKCEKRVQDV

SEQ ID NO: 91617 - protein, 13 aa, Homo Sapiens
MNGKCEKRVQDVI

SEQ ID NO: 91618 - protein, 13 aa, Homo Sapiens
NGKCEKRVQDVIE

SEQ ID NO: 91619 - protein, 13 aa, Homo Sapiens
GKCEKRVQDVIER

SEQ ID NO: 91620 - protein, 13 aa, Homo Sapiens
KCEKRVQDVIERF

SEQ ID NO: 91621 - protein, 13 aa, Homo Sapiens
CEKRVQDVIERFW

SEQ ID NO: 91622 - protein, 13 aa, Homo Sapiens
EKRVQDVIERFWD

SEQ ID NO: 91623 - protein, 13 aa, Homo Sapiens
KRVQDVIERFWDF

SEQ ID NO: 91624 - protein, 13 aa, Homo Sapiens
RVQDVIERFWDFI

SEQ ID NO: 91625 - protein, 13 aa, Homo Sapiens
VQDVIERFWDFID

SEQ ID NO: 91626 - protein, 13 aa, Homo Sapiens
QDVIERFWDFIDQ

SEQ ID NO: 91627 - protein, 13 aa, Homo Sapiens
DVIERFWDFIDQL

SEQ ID NO: 91628 - protein, 13 aa, Homo Sapiens
VIERFWDFIDQLS

SEQ ID NO: 91629 - protein, 13 aa, Homo Sapiens
IERFWDFIDQLSI

SEQ ID NO: 91630 - protein, 13 aa, Homo Sapiens
ERFWDFIDQLSIN

SEQ ID NO: 91631 - protein, 13 aa, Homo Sapiens
RFWDFIDQLSINT

SEQ ID NO: 91632 - protein, 13 aa, Homo Sapiens
FWDFIDQLSINTF

SEQ ID NO: 91633 - protein, 13 aa, Homo Sapiens
WDFIDQLSINTFG

SEQ ID NO: 91634 - protein, 13 aa, Homo Sapiens
DFIDQLSINTFGK

SEQ ID NO: 91635 - protein, 13 aa, Homo Sapiens
FIDQLSINTFGKF

SEQ ID NO: 91636 - protein, 13 aa, Homo Sapiens
IDQLSINTFGKFL

SEQ ID NO: 91637 - protein, 13 aa, Homo Sapiens
DQLSINTFGKFLA

SEQ ID NO: 91638 - protein, 13 aa, Homo Sapiens
QLSINTFGKFLAD

SEQ ID NO: 91639 - protein, 13 aa, Homo Sapiens
LSINTFGKFLADN

SEQ ID NO: 91640 - protein, 13 aa, Homo Sapiens
SINTFGKFLADNI

SEQ ID NO: 91641 - protein, 13 aa, Homo Sapiens
INTFGKFLADNIV

SEQ ID NO: 91642 - protein, 13 aa, Homo Sapiens
NTFGKFLADNIVG

SEQ ID NO: 91643 - protein, 13 aa, Homo Sapiens
TFGKFLADNIVGS

SEQ ID NO: 91644 - protein, 13 aa, Homo Sapiens
FGKFLADNIVGSV

SEQ ID NO: 91645 - protein, 13 aa, Homo Sapiens
GKFLADNIVGSVL

SEQ ID NO: 91646 - protein, 13 aa, Homo Sapiens
KFLADNIVGSVLV

SEQ ID NO: 91647 - protein, 13 aa, Homo Sapiens
FLADNIVGSVLVF

SEQ ID NO: 91648 - protein, 13 aa, Homo Sapiens
LADNIVGSVLVFS

SEQ ID NO: 91649 - protein, 13 aa, Homo Sapiens
ADNIVGSVLVFSL

SEQ ID NO: 91650 - protein, 13 aa, Homo Sapiens
DNIVGSVLVFSLI

SEQ ID NO: 91651 - protein, 13 aa, Homo Sapiens
NIVGSVLVFSLIF

SEQ ID NO: 91652 - protein, 13 aa, Homo Sapiens
IVGSVLVFSLIFW

SEQ ID NO: 91653 - protein, 13 aa, Homo Sapiens
VGSVLVFSLIFWI

SEQ ID NO: 91654 - protein, 13 aa, Homo Sapiens
GSVLVFSLIFWIP

SEQ ID NO: 91655 - protein, 13 aa, Homo Sapiens
SVLVFSLIFWIPF

SEQ ID NO: 91656 - protein, 13 aa, Homo Sapiens
VLVFSLIFWIPFS

SEQ ID NO: 91657 - protein, 13 aa, Homo Sapiens
LVFSLIFWIPFSI

SEQ ID NO: 91658 - protein, 13 aa, Homo Sapiens
VFSLIFWIPFSIL

SEQ ID NO: 91659 - protein, 13 aa, Homo Sapiens
FSLIFWIPFSILV

SEQ ID NO: 91660 - protein, 13 aa, Homo Sapiens
SLIFWIPFSILVH

SEQ ID NO: 91661 - protein, 13 aa, Homo Sapiens
LIFWIPFSILVHC

SEQ ID NO: 91662 - protein, 13 aa, Homo Sapiens
IFWIPFSILVHCV

SEQ ID NO: 91663 - protein, 13 aa, Homo Sapiens
FWIPFSILVHCVD

SEQ ID NO: 91664 - protein, 13 aa, Homo Sapiens
WIPFSILVHCVDK

SEQ ID NO: 91665 - protein, 13 aa, Homo Sapiens
IPFSILVHCVDKK

SEQ ID NO: 91666 - protein, 13 aa, Homo Sapiens
PFSILVHCVDKKL

SEQ ID NO: 91667 - protein, 13 aa, Homo Sapiens
FSILVHCVDKKLD

SEQ ID NO: 91668 - protein, 13 aa, Homo Sapiens
SILVHCVDKKLDK

SEQ ID NO: 91669 - protein, 13 aa, Homo Sapiens
ILVHCVDKKLDKQ

SEQ ID NO: 91670 - protein, 13 aa, Homo Sapiens
LVHCVDKKLDKQY

SEQ ID NO: 91671 - protein, 13 aa, Homo Sapiens
VHCVDKKLDKQYE

SEQ ID NO: 91672 - protein, 13 aa, Homo Sapiens
HCVDKKLDKQYES

SEQ ID NO: 91673 - protein, 13 aa, Homo Sapiens
CVDKKLDKQYESL

SEQ ID NO: 91674 - protein, 13 aa, Homo Sapiens
VDKKLDKQYESLS

SEQ ID NO: 91675 - protein, 13 aa, Homo Sapiens
DKKLDKQYESLSL

SEQ ID NO: 91676 - protein, 13 aa, Homo Sapiens
KKLDKQYESLSLF

SEQ ID NO: 91677 - protein, 13 aa, Homo Sapiens
KLDKQYESLSLFH

SEQ ID NO: 91678 - protein, 13 aa, Homo Sapiens
LDKQYESLSLFHP

SEQ ID NO: 91679 - protein, 13 aa, Homo Sapiens
DKQYESLSLFHPS

SEQ ID NO: 91680 - protein, 13 aa, Homo Sapiens
KQYESLSLFHPSN

SEQ ID NO: 91681 - protein, 13 aa, Homo Sapiens
QYESLSLFHPSNV

SEQ ID NO: 91682 - protein, 13 aa, Homo Sapiens
YESLSLFHPSNVE

SEQ ID NO: 91683 - protein, 13 aa, Homo Sapiens
ESLSLFHPSNVEM

SEQ ID NO: 91684 - protein, 13 aa, Homo Sapiens
SLSLFHPSNVEML

SEQ ID NO: 91685 - protein, 13 aa, Homo Sapiens
LSLFHPSNVEMLS

SEQ ID NO: 91686 - protein, 13 aa, Homo Sapiens
SLFHPSNVEMLSS

SEQ ID NO: 91687 - protein, 13 aa, Homo Sapiens
LFHPSNVEMLSSM

SEQ ID NO: 91688 - protein, 13 aa, Homo Sapiens
FHPSNVEMLSSMD

SEQ ID NO: 91689 - protein, 13 aa, Homo Sapiens
HPSNVEMLSSMDS

SEQ ID NO: 91690 - protein, 13 aa, Homo Sapiens
PSNVEMLSSMDSA

SEQ ID NO: 91691 - protein, 13 aa, Homo Sapiens
SNVEMLSSMDSAS

SEQ ID NO: 91692 - protein, 13 aa, Homo Sapiens
NVEMLSSMDSASV

SEQ ID NO: 91693 - protein, 13 aa, Homo Sapiens
VEMLSSMDSASVR

SEQ ID NO: 91694 - protein, 13 aa, Homo Sapiens
EMLSSMDSASVRI

SEQ ID NO: 91695 - protein, 13 aa, Homo Sapiens
MLSSMDSASVRII

SEQ ID NO: 91696 - protein, 13 aa, Homo Sapiens
LSSMDSASVRIIK

SEQ ID NO: 91697 - protein, 13 aa, Homo Sapiens
SSMDSASVRIIKP

SEQ ID NO: 91698 - protein, 13 aa, Homo Sapiens
SMDSASVRIIKPF

SEQ ID NO: 91699 - protein, 13 aa, Homo Sapiens
MDSASVRIIKPFP

SEQ ID NO: 91700 - protein, 13 aa, Homo Sapiens
DSASVRIIKPFPA

SEQ ID NO: 91701 - protein, 13 aa, Homo Sapiens
SASVRIIKPFPAP

SEQ ID NO: 91702 - protein, 13 aa, Homo Sapiens
ASVRIIKPFPAPQ

SEQ ID NO: 91703 - protein, 13 aa, Homo Sapiens
SVRIIKPFPAPQT

SEQ ID NO: 91704 - protein, 13 aa, Homo Sapiens
VRIIKPFPAPQTP

SEQ ID NO: 91705 - protein, 13 aa, Homo Sapiens
RIIKPFPAPQTPG

SEQ ID NO: 91706 - protein, 13 aa, Homo Sapiens
IIKPFPAPQTPGR

SEQ ID NO: 91707 - protein, 13 aa, Homo Sapiens
IKPFPAPQTPGRL

SEQ ID NO: 91708 - protein, 13 aa, Homo Sapiens
KPFPAPQTPGRLQ

SEQ ID NO: 91709 - protein, 13 aa, Homo Sapiens
PFPAPQTPGRLQP

SEQ ID NO: 91710 - protein, 13 aa, Homo Sapiens
FPAPQTPGRLQPA

SEQ ID NO: 91711 - protein, 13 aa, Homo Sapiens
PAPQTPGRLQPAP

SEQ ID NO: 91712 - protein, 13 aa, Homo Sapiens
APQTPGRLQPAPV

SEQ ID NO: 91713 - protein, 13 aa, Homo Sapiens
PQTPGRLQPAPVI

SEQ ID NO: 91714 - protein, 13 aa, Homo Sapiens
QTPGRLQPAPVIP

SEQ ID NO: 91715 - protein, 13 aa, Homo Sapiens
TPGRLQPAPVIPS

SEQ ID NO: 91716 - protein, 13 aa, Homo Sapiens
PGRLQPAPVIPSA

SEQ ID NO: 91717 - protein, 13 aa, Homo Sapiens
GRLQPAPVIPSAP

SEQ ID NO: 91718 - protein, 13 aa, Homo Sapiens
RLQPAPVIPSAPA

SEQ ID NO: 91719 - protein, 13 aa, Homo Sapiens
LQPAPVIPSAPAA

SEQ ID NO: 91720 - protein, 13 aa, Homo Sapiens
QPAPVIPSAPAAP

SEQ ID NO: 91721 - protein, 13 aa, Homo Sapiens
PAPVIPSAPAAPK

SEQ ID NO: 91722 - protein, 13 aa, Homo Sapiens
APVIPSAPAAPKL

SEQ ID NO: 91723 - protein, 13 aa, Homo Sapiens
PVIPSAPAAPKLD

SEQ ID NO: 91724 - protein, 13 aa, Homo Sapiens
VIPSAPAAPKLDH

SEQ ID NO: 91725 - protein, 13 aa, Homo Sapiens
IPSAPAAPKLDHQ

SEQ ID NO: 91726 - protein, 13 aa, Homo Sapiens
PSAPAAPKLDHQR

SEQ ID NO: 91727 - protein, 13 aa, Homo Sapiens
SAPAAPKLDHQRM

SEQ ID NO: 91728 - protein, 13 aa, Homo Sapiens
APAAPKLDHQRMD

SEQ ID NO: 91729 - protein, 13 aa, Homo Sapiens
PAAPKLDHQRMDT

SEQ ID NO: 91730 - protein, 13 aa, Homo Sapiens
AAPKLDHQRMDTI

SEQ ID NO: 91731 - protein, 13 aa, Homo Sapiens
APKLDHQRMDTIQ

SEQ ID NO: 91732 - protein, 13 aa, Homo Sapiens
PKLDHQRMDTIQE

SEQ ID NO: 91733 - protein, 13 aa, Homo Sapiens
KLDHQRMDTIQED

SEQ ID NO: 91734 - protein, 13 aa, Homo Sapiens
LDHQRMDTIQEDP

SEQ ID NO: 91735 - protein, 13 aa, Homo Sapiens
DHQRMDTIQEDPS

SEQ ID NO: 91736 - protein, 13 aa, Homo Sapiens
HQRMDTIQEDPST

SEQ ID NO: 91737 - protein, 13 aa, Homo Sapiens
QRMDTIQEDPSTD

SEQ ID NO: 91738 - protein, 13 aa, Homo Sapiens
RMDTIQEDPSTDS

SEQ ID NO: 91739 - protein, 13 aa, Homo Sapiens
MDTIQEDPSTDSH

SEQ ID NO: 91740 - protein, 13 aa, Homo Sapiens
DTIQEDPSTDSHM

SEQ ID NO: 91741 - protein, 13 aa, Homo Sapiens
TIQEDPSTDSHMD

SEQ ID NO: 91742 - protein, 13 aa, Homo Sapiens
IQEDPSTDSHMDE

SEQ ID NO: 91743 - protein, 13 aa, Homo Sapiens
QEDPSTDSHMDED

SEQ ID NO: 91744 - protein, 13 aa, Homo Sapiens
EDPSTDSHMDEDG

SEQ ID NO: 91745 - protein, 13 aa, Homo Sapiens
DPSTDSHMDEDGF

SEQ ID NO: 91746 - protein, 13 aa, Homo Sapiens
PSTDSHMDEDGFE

SEQ ID NO: 91747 - protein, 13 aa, Homo Sapiens
STDSHMDEDGFEK

SEQ ID NO: 91748 - protein, 13 aa, Homo Sapiens
TDSHMDEDGFEKD

SEQ ID NO: 91749 - protein, 13 aa, Homo Sapiens
DSHMDEDGFEKDP

SEQ ID NO: 91750 - protein, 13 aa, Homo Sapiens
SHMDEDGFEKDPF

SEQ ID NO: 91751 - protein, 13 aa, Homo Sapiens
HMDEDGFEKDPFP

SEQ ID NO: 91752 - protein, 13 aa, Homo Sapiens
MDEDGFEKDPFPN

SEQ ID NO: 91753 - protein, 13 aa, Homo Sapiens
DEDGFEKDPFPNS

SEQ ID NO: 91754 - protein, 13 aa, Homo Sapiens
EDGFEKDPFPNSS

SEQ ID NO: 91755 - protein, 13 aa, Homo Sapiens
DGFEKDPFPNSST

SEQ ID NO: 91756 - protein, 13 aa, Homo Sapiens
GFEKDPFPNSSTA

SEQ ID NO: 91757 - protein, 13 aa, Homo Sapiens
FEKDPFPNSSTAA

SEQ ID NO: 91758 - protein, 13 aa, Homo Sapiens
EKDPFPNSSTAAK

SEQ ID NO: 91759 - protein, 13 aa, Homo Sapiens
KDPFPNSSTAAKS

SEQ ID NO: 91760 - protein, 13 aa, Homo Sapiens
DPFPNSSTAAKSF

SEQ ID NO: 91761 - protein, 13 aa, Homo Sapiens
PFPNSSTAAKSFE

SEQ ID NO: 91762 - protein, 13 aa, Homo Sapiens
FPNSSTAAKSFED

SEQ ID NO: 91763 - protein, 13 aa, Homo Sapiens
PNSSTAAKSFEDL

SEQ ID NO: 91764 - protein, 13 aa, Homo Sapiens
NSSTAAKSFEDLT

SEQ ID NO: 91765 - protein, 13 aa, Homo Sapiens
SSTAAKSFEDLTD

SEQ ID NO: 91766 - protein, 13 aa, Homo Sapiens
STAAKSFEDLTDH

SEQ ID NO: 91767 - protein, 13 aa, Homo Sapiens
TAAKSFEDLTDHP

SEQ ID NO: 91768 - protein, 13 aa, Homo Sapiens
AAKSFEDLTDHPV

SEQ ID NO: 91769 - protein, 13 aa, Homo Sapiens
AKSFEDLTDHPVT

SEQ ID NO: 91770 - protein, 13 aa, Homo Sapiens
KSFEDLTDHPVTR

SEQ ID NO: 91771 - protein, 13 aa, Homo Sapiens
SFEDLTDHPVTRS

SEQ ID NO: 91772 - protein, 13 aa, Homo Sapiens
FEDLTDHPVTRSE

SEQ ID NO: 91773 - protein, 13 aa, Homo Sapiens
EDLTDHPVTRSEK

SEQ ID NO: 91774 - protein, 13 aa, Homo Sapiens
DLTDHPVTRSEKA

SEQ ID NO: 91775 - protein, 13 aa, Homo Sapiens
LTDHPVTRSEKAA

SEQ ID NO: 91776 - protein, 13 aa, Homo Sapiens
TDHPVTRSEKAAS

SEQ ID NO: 91777 - protein, 13 aa, Homo Sapiens
DHPVTRSEKAASF

SEQ ID NO: 91778 - protein, 13 aa, Homo Sapiens
HPVTRSEKAASFK

SEQ ID NO: 91779 - protein, 13 aa, Homo Sapiens
PVTRSEKAASFKL

SEQ ID NO: 91780 - protein, 13 aa, Homo Sapiens
VTRSEKAASFKLQ

SEQ ID NO: 91781 - protein, 13 aa, Homo Sapiens
TRSEKAASFKLQR

SEQ ID NO: 91782 - protein, 13 aa, Homo Sapiens
RSEKAASFKLQRQ

SEQ ID NO: 91783 - protein, 13 aa, Homo Sapiens
SEKAASFKLQRQN

SEQ ID NO: 91784 - protein, 13 aa, Homo Sapiens
EKAASFKLQRQNR

SEQ ID NO: 91785 - protein, 13 aa, Homo Sapiens
KAASFKLQRQNRV

SEQ ID NO: 91786 - protein, 13 aa, Homo Sapiens
AASFKLQRQNRVD

SEQ ID NO: 91787 - protein, 13 aa, Homo Sapiens
ASFKLQRQNRVDS

SEQ ID NO: 91788 - protein, 13 aa, Homo Sapiens
SFKLQRQNRVDSK

SEQ ID NO: 91789 - protein, 13 aa, Homo Sapiens
FKLQRQNRVDSKE

SEQ ID NO: 91790 - protein, 13 aa, Homo Sapiens
KLQRQNRVDSKET

SEQ ID NO: 91791 - protein, 13 aa, Homo Sapiens
LQRQNRVDSKETE

SEQ ID NO: 91792 - protein, 13 aa, Homo Sapiens
QRQNRVDSKETEC

SEQ ID NO: 91793 - protein, 14 aa, Homo Sapiens
MRQSLLFLTSVVPF

SEQ ID NO: 91794 - protein, 14 aa, Homo Sapiens
RQSLLFLTSVVPFV

SEQ ID NO: 91795 - protein, 14 aa, Homo Sapiens
QSLLFLTSVVPFVL

SEQ ID NO: 91796 - protein, 14 aa, Homo Sapiens
SLLFLTSVVPFVLA

SEQ ID NO: 91797 - protein, 14 aa, Homo Sapiens
LLFLTSVVPFVLAP

SEQ ID NO: 91798 - protein, 14 aa, Homo Sapiens
LFLTSVVPFVLAPR

SEQ ID NO: 91799 - protein, 14 aa, Homo Sapiens
FLTSVVPFVLAPRP

SEQ ID NO: 91800 - protein, 14 aa, Homo Sapiens
LTSVVPFVLAPRPP

SEQ ID NO: 91801 - protein, 14 aa, Homo Sapiens
TSVVPFVLAPRPPD

SEQ ID NO: 91802 - protein, 14 aa, Homo Sapiens
SVVPFVLAPRPPDD

SEQ ID NO: 91803 - protein, 14 aa, Homo Sapiens
VVPFVLAPRPPDDP

SEQ ID NO: 91804 - protein, 14 aa, Homo Sapiens
VPFVLAPRPPDDPG

SEQ ID NO: 91805 - protein, 14 aa, Homo Sapiens
PFVLAPRPPDDPGF

SEQ ID NO: 91806 - protein, 14 aa, Homo Sapiens
FVLAPRPPDDPGFG

SEQ ID NO: 91807 - protein, 14 aa, Homo Sapiens
VLAPRPPDDPGFGP

SEQ ID NO: 91808 - protein, 14 aa, Homo Sapiens
LAPRPPDDPGFGPH

SEQ ID NO: 91809 - protein, 14 aa, Homo Sapiens
APRPPDDPGFGPHQ

SEQ ID NO: 91810 - protein, 14 aa, Homo Sapiens
PRPPDDPGFGPHQR

SEQ ID NO: 91811 - protein, 14 aa, Homo Sapiens
RPPDDPGFGPHQRL

SEQ ID NO: 91812 - protein, 14 aa, Homo Sapiens
PPDDPGFGPHQRLE

SEQ ID NO: 91813 - protein, 14 aa, Homo Sapiens
PDDPGFGPHQRLEK

SEQ ID NO: 91814 - protein, 14 aa, Homo Sapiens
DDPGFGPHQRLEKL

SEQ ID NO: 91815 - protein, 14 aa, Homo Sapiens
DPGFGPHQRLEKLD

SEQ ID NO: 91816 - protein, 14 aa, Homo Sapiens
PGFGPHQRLEKLDS

SEQ ID NO: 91817 - protein, 14 aa, Homo Sapiens
GFGPHQRLEKLDSL

SEQ ID NO: 91818 - protein, 14 aa, Homo Sapiens
FGPHQRLEKLDSLL

SEQ ID NO: 91819 - protein, 14 aa, Homo Sapiens
GPHQRLEKLDSLLS

SEQ ID NO: 91820 - protein, 14 aa, Homo Sapiens
PHQRLEKLDSLLSD

SEQ ID NO: 91821 - protein, 14 aa, Homo Sapiens
HQRLEKLDSLLSDY

SEQ ID NO: 91822 - protein, 14 aa, Homo Sapiens
QRLEKLDSLLSDYD

SEQ ID NO: 91823 - protein, 14 aa, Homo Sapiens
RLEKLDSLLSDYDI

SEQ ID NO: 91824 - protein, 14 aa, Homo Sapiens
LEKLDSLLSDYDIL

SEQ ID NO: 91825 - protein, 14 aa, Homo Sapiens
EKLDSLLSDYDILS

SEQ ID NO: 91826 - protein, 14 aa, Homo Sapiens
KLDSLLSDYDILSL

SEQ ID NO: 91827 - protein, 14 aa, Homo Sapiens
LDSLLSDYDILSLS

SEQ ID NO: 91828 - protein, 14 aa, Homo Sapiens
DSLLSDYDILSLSN

SEQ ID NO: 91829 - protein, 14 aa, Homo Sapiens
SLLSDYDILSLSNI

SEQ ID NO: 91830 - protein, 14 aa, Homo Sapiens
LLSDYDILSLSNIQ

SEQ ID NO: 91831 - protein, 14 aa, Homo Sapiens
LSDYDILSLSNIQQ

SEQ ID NO: 91832 - protein, 14 aa, Homo Sapiens
SDYDILSLSNIQQH

SEQ ID NO: 91833 - protein, 14 aa, Homo Sapiens
DYDILSLSNIQQHS

SEQ ID NO: 91834 - protein, 14 aa, Homo Sapiens
YDILSLSNIQQHSV

SEQ ID NO: 91835 - protein, 14 aa, Homo Sapiens
DILSLSNIQQHSVR

SEQ ID NO: 91836 - protein, 14 aa, Homo Sapiens
ILSLSNIQQHSVRK

SEQ ID NO: 91837 - protein, 14 aa, Homo Sapiens
LSLSNIQQHSVRKR

SEQ ID NO: 91838 - protein, 14 aa, Homo Sapiens
SLSNIQQHSVRKRD

SEQ ID NO: 91839 - protein, 14 aa, Homo Sapiens
LSNIQQHSVRKRDL

SEQ ID NO: 91840 - protein, 14 aa, Homo Sapiens
SNIQQHSVRKRDLQ

SEQ ID NO: 91841 - protein, 14 aa, Homo Sapiens
NIQQHSVRKRDLQT

SEQ ID NO: 91842 - protein, 14 aa, Homo Sapiens
IQQHSVRKRDLQTS

SEQ ID NO: 91843 - protein, 14 aa, Homo Sapiens
QQHSVRKRDLQTST

SEQ ID NO: 91844 - protein, 14 aa, Homo Sapiens
QHSVRKRDLQTSTH

SEQ ID NO: 91845 - protein, 14 aa, Homo Sapiens
HSVRKRDLQTSTHV

SEQ ID NO: 91846 - protein, 14 aa, Homo Sapiens
SVRKRDLQTSTHVE

SEQ ID NO: 91847 - protein, 14 aa, Homo Sapiens
VRKRDLQTSTHVET

SEQ ID NO: 91848 - protein, 14 aa, Homo Sapiens
RKRDLQTSTHVETL

SEQ ID NO: 91849 - protein, 14 aa, Homo Sapiens
KRDLQTSTHVETLL

SEQ ID NO: 91850 - protein, 14 aa, Homo Sapiens
RDLQTSTHVETLLT

SEQ ID NO: 91851 - protein, 14 aa, Homo Sapiens
DLQTSTHVETLLTF

SEQ ID NO: 91852 - protein, 14 aa, Homo Sapiens
LQTSTHVETLLTFS

SEQ ID NO: 91853 - protein, 14 aa, Homo Sapiens
QTSTHVETLLTFSA

SEQ ID NO: 91854 - protein, 14 aa, Homo Sapiens
TSTHVETLLTFSAL

SEQ ID NO: 91855 - protein, 14 aa, Homo Sapiens
STHVETLLTFSALK

SEQ ID NO: 91856 - protein, 14 aa, Homo Sapiens
THVETLLTFSALKR

SEQ ID NO: 91857 - protein, 14 aa, Homo Sapiens
HVETLLTFSALKRH

SEQ ID NO: 91858 - protein, 14 aa, Homo Sapiens
VETLLTFSALKRHF

SEQ ID NO: 91859 - protein, 14 aa, Homo Sapiens
ETLLTFSALKRHFK

SEQ ID NO: 91860 - protein, 14 aa, Homo Sapiens
TLLTFSALKRHFKL

SEQ ID NO: 91861 - protein, 14 aa, Homo Sapiens
LLTFSALKRHFKLY

SEQ ID NO: 91862 - protein, 14 aa, Homo Sapiens
LTFSALKRHFKLYL

SEQ ID NO: 91863 - protein, 14 aa, Homo Sapiens
TFSALKRHFKLYLT

SEQ ID NO: 91864 - protein, 14 aa, Homo Sapiens
FSALKRHFKLYLTS

SEQ ID NO: 91865 - protein, 14 aa, Homo Sapiens
SALKRHFKLYLTSS

SEQ ID NO: 91866 - protein, 14 aa, Homo Sapiens
ALKRHFKLYLTSST

SEQ ID NO: 91867 - protein, 14 aa, Homo Sapiens
LKRHFKLYLTSSTE

SEQ ID NO: 91868 - protein, 14 aa, Homo Sapiens
KRHFKLYLTSSTER

SEQ ID NO: 91869 - protein, 14 aa, Homo Sapiens
RHFKLYLTSSTERF

SEQ ID NO: 91870 - protein, 14 aa, Homo Sapiens
HFKLYLTSSTERFS

SEQ ID NO: 91871 - protein, 14 aa, Homo Sapiens
FKLYLTSSTERFSQ

SEQ ID NO: 91872 - protein, 14 aa, Homo Sapiens
KLYLTSSTERFSQN

SEQ ID NO: 91873 - protein, 14 aa, Homo Sapiens
LYLTSSTERFSQNF

SEQ ID NO: 91874 - protein, 14 aa, Homo Sapiens
YLTSSTERFSQNFK

SEQ ID NO: 91875 - protein, 14 aa, Homo Sapiens
LTSSTERFSQNFKV

SEQ ID NO: 91876 - protein, 14 aa, Homo Sapiens
TSSTERFSQNFKVV

SEQ ID NO: 91877 - protein, 14 aa, Homo Sapiens
SSTERFSQNFKVVV

SEQ ID NO: 91878 - protein, 14 aa, Homo Sapiens
STERFSQNFKVVVV

SEQ ID NO: 91879 - protein, 14 aa, Homo Sapiens
TERFSQNFKVVVVD

SEQ ID NO: 91880 - protein, 14 aa, Homo Sapiens
ERFSQNFKVVVVDG

SEQ ID NO: 91881 - protein, 14 aa, Homo Sapiens
RFSQNFKVVVVDGK

SEQ ID NO: 91882 - protein, 14 aa, Homo Sapiens
FSQNFKVVVVDGKN

SEQ ID NO: 91883 - protein, 14 aa, Homo Sapiens
SQNFKVVVVDGKNE

SEQ ID NO: 91884 - protein, 14 aa, Homo Sapiens
QNFKVVVVDGKNES

SEQ ID NO: 91885 - protein, 14 aa, Homo Sapiens
NFKVVVVDGKNESE

SEQ ID NO: 91886 - protein, 14 aa, Homo Sapiens
FKVVVVDGKNESEY

SEQ ID NO: 91887 - protein, 14 aa, Homo Sapiens
KVVVVDGKNESEYT

SEQ ID NO: 91888 - protein, 14 aa, Homo Sapiens
VVVVDGKNESEYTV

SEQ ID NO: 91889 - protein, 14 aa, Homo Sapiens
VVVDGKNESEYTVK

SEQ ID NO: 91890 - protein, 14 aa, Homo Sapiens
VVDGKNESEYTVKW

SEQ ID NO: 91891 - protein, 14 aa, Homo Sapiens
VDGKNESEYTVKWQ

SEQ ID NO: 91892 - protein, 14 aa, Homo Sapiens
DGKNESEYTVKWQD

SEQ ID NO: 91893 - protein, 14 aa, Homo Sapiens
GKNESEYTVKWQDF

SEQ ID NO: 91894 - protein, 14 aa, Homo Sapiens
KNESEYTVKWQDFF

SEQ ID NO: 91895 - protein, 14 aa, Homo Sapiens
NESEYTVKWQDFFT

SEQ ID NO: 91896 - protein, 14 aa, Homo Sapiens
ESEYTVKWQDFFTG

SEQ ID NO: 91897 - protein, 14 aa, Homo Sapiens
SEYTVKWQDFFTGH

SEQ ID NO: 91898 - protein, 14 aa, Homo Sapiens
EYTVKWQDFFTGHV

SEQ ID NO: 91899 - protein, 14 aa, Homo Sapiens
YTVKWQDFFTGHVV

SEQ ID NO: 91900 - protein, 14 aa, Homo Sapiens
TVKWQDFFTGHVVG

SEQ ID NO: 91901 - protein, 14 aa, Homo Sapiens
VKWQDFFTGHVVGE

SEQ ID NO: 91902 - protein, 14 aa, Homo Sapiens
KWQDFFTGHVVGEP

SEQ ID NO: 91903 - protein, 14 aa, Homo Sapiens
WQDFFTGHVVGEPD

SEQ ID NO: 91904 - protein, 14 aa, Homo Sapiens
QDFFTGHVVGEPDS

SEQ ID NO: 91905 - protein, 14 aa, Homo Sapiens
DFFTGHVVGEPDSR

SEQ ID NO: 91906 - protein, 14 aa, Homo Sapiens
FFTGHVVGEPDSRV

SEQ ID NO: 91907 - protein, 14 aa, Homo Sapiens
FTGHVVGEPDSRVL

SEQ ID NO: 91908 - protein, 14 aa, Homo Sapiens
TGHVVGEPDSRVLA

SEQ ID NO: 91909 - protein, 14 aa, Homo Sapiens
GHVVGEPDSRVLAH

SEQ ID NO: 91910 - protein, 14 aa, Homo Sapiens
HVVGEPDSRVLAHI

SEQ ID NO: 91911 - protein, 14 aa, Homo Sapiens
VVGEPDSRVLAHIR

SEQ ID NO: 91912 - protein, 14 aa, Homo Sapiens
VGEPDSRVLAHIRD

SEQ ID NO: 91913 - protein, 14 aa, Homo Sapiens
GEPDSRVLAHIRDD

SEQ ID NO: 91914 - protein, 14 aa, Homo Sapiens
EPDSRVLAHIRDDD

SEQ ID NO: 91915 - protein, 14 aa, Homo Sapiens
PDSRVLAHIRDDDV

SEQ ID NO: 91916 - protein, 14 aa, Homo Sapiens
DSRVLAHIRDDDVI

SEQ ID NO: 91917 - protein, 14 aa, Homo Sapiens
SRVLAHIRDDDVII

SEQ ID NO: 91918 - protein, 14 aa, Homo Sapiens
RVLAHIRDDDVIIR

SEQ ID NO: 91919 - protein, 14 aa, Homo Sapiens
VLAHIRDDDVIIRI

SEQ ID NO: 91920 - protein, 14 aa, Homo Sapiens
LAHIRDDDVIIRIN

SEQ ID NO: 91921 - protein, 14 aa, Homo Sapiens
AHIRDDDVIIRINT

SEQ ID NO: 91922 - protein, 14 aa, Homo Sapiens
HIRDDDVIIRINTD

SEQ ID NO: 91923 - protein, 14 aa, Homo Sapiens
IRDDDVIIRINTDG

SEQ ID NO: 91924 - protein, 14 aa, Homo Sapiens
RDDDVIIRINTDGA

SEQ ID NO: 91925 - protein, 14 aa, Homo Sapiens
DDDVIIRINTDGAE

SEQ ID NO: 91926 - protein, 14 aa, Homo Sapiens
DDVIIRINTDGAEY

SEQ ID NO: 91927 - protein, 14 aa, Homo Sapiens
DVIIRINTDGAEYN

SEQ ID NO: 91928 - protein, 14 aa, Homo Sapiens
VIIRINTDGAEYNI

SEQ ID NO: 91929 - protein, 14 aa, Homo Sapiens
IIRINTDGAEYNIE

SEQ ID NO: 91930 - protein, 14 aa, Homo Sapiens
IRINTDGAEYNIEP

SEQ ID NO: 91931 - protein, 14 aa, Homo Sapiens
RINTDGAEYNIEPL

SEQ ID NO: 91932 - protein, 14 aa, Homo Sapiens
INTDGAEYNIEPLW

SEQ ID NO: 91933 - protein, 14 aa, Homo Sapiens
NTDGAEYNIEPLWR

SEQ ID NO: 91934 - protein, 14 aa, Homo Sapiens
TDGAEYNIEPLWRF

SEQ ID NO: 91935 - protein, 14 aa, Homo Sapiens
DGAEYNIEPLWRFV

SEQ ID NO: 91936 - protein, 14 aa, Homo Sapiens
GAEYNIEPLWRFVN

SEQ ID NO: 91937 - protein, 14 aa, Homo Sapiens
AEYNIEPLWRFVND

SEQ ID NO: 91938 - protein, 14 aa, Homo Sapiens
EYNIEPLWRFVNDT

SEQ ID NO: 91939 - protein, 14 aa, Homo Sapiens
YNIEPLWRFVNDTK

SEQ ID NO: 91940 - protein, 14 aa, Homo Sapiens
NIEPLWRFVNDTKD

SEQ ID NO: 91941 - protein, 14 aa, Homo Sapiens
IEPLWRFVNDTKDK

SEQ ID NO: 91942 - protein, 14 aa, Homo Sapiens
EPLWRFVNDTKDKR

SEQ ID NO: 91943 - protein, 14 aa, Homo Sapiens
PLWRFVNDTKDKRM

SEQ ID NO: 91944 - protein, 14 aa, Homo Sapiens
LWRFVNDTKDKRML

SEQ ID NO: 91945 - protein, 14 aa, Homo Sapiens
WRFVNDTKDKRMLV

SEQ ID NO: 91946 - protein, 14 aa, Homo Sapiens
RFVNDTKDKRMLVY

SEQ ID NO: 91947 - protein, 14 aa, Homo Sapiens
FVNDTKDKRMLVYK

SEQ ID NO: 91948 - protein, 14 aa, Homo Sapiens
VNDTKDKRMLVYKS

SEQ ID NO: 91949 - protein, 14 aa, Homo Sapiens
NDTKDKRMLVYKSE

SEQ ID NO: 91950 - protein, 14 aa, Homo Sapiens
DTKDKRMLVYKSED

SEQ ID NO: 91951 - protein, 14 aa, Homo Sapiens
TKDKRMLVYKSEDI

SEQ ID NO: 91952 - protein, 14 aa, Homo Sapiens
KDKRMLVYKSEDIK

SEQ ID NO: 91953 - protein, 14 aa, Homo Sapiens
DKRMLVYKSEDIKN

SEQ ID NO: 91954 - protein, 14 aa, Homo Sapiens
KRMLVYKSEDIKNV

SEQ ID NO: 91955 - protein, 14 aa, Homo Sapiens
RMLVYKSEDIKNVS

SEQ ID NO: 91956 - protein, 14 aa, Homo Sapiens
MLVYKSEDIKNVSR

SEQ ID NO: 91957 - protein, 14 aa, Homo Sapiens
LVYKSEDIKNVSRL

SEQ ID NO: 91958 - protein, 14 aa, Homo Sapiens
VYKSEDIKNVSRLQ

SEQ ID NO: 91959 - protein, 14 aa, Homo Sapiens
YKSEDIKNVSRLQS

SEQ ID NO: 91960 - protein, 14 aa, Homo Sapiens
KSEDIKNVSRLQSP

SEQ ID NO: 91961 - protein, 14 aa, Homo Sapiens
SEDIKNVSRLQSPK

SEQ ID NO: 91962 - protein, 14 aa, Homo Sapiens
EDIKNVSRLQSPKV

SEQ ID NO: 91963 - protein, 14 aa, Homo Sapiens
DIKNVSRLQSPKVC

SEQ ID NO: 91964 - protein, 14 aa, Homo Sapiens
IKNVSRLQSPKVCG

SEQ ID NO: 91965 - protein, 14 aa, Homo Sapiens
KNVSRLQSPKVCGY

SEQ ID NO: 91966 - protein, 14 aa, Homo Sapiens
NVSRLQSPKVCGYL

SEQ ID NO: 91967 - protein, 14 aa, Homo Sapiens
VSRLQSPKVCGYLK

SEQ ID NO: 91968 - protein, 14 aa, Homo Sapiens
SRLQSPKVCGYLKV

SEQ ID NO: 91969 - protein, 14 aa, Homo Sapiens
RLQSPKVCGYLKVD

SEQ ID NO: 91970 - protein, 14 aa, Homo Sapiens
LQSPKVCGYLKVDN

SEQ ID NO: 91971 - protein, 14 aa, Homo Sapiens
QSPKVCGYLKVDNE

SEQ ID NO: 91972 - protein, 14 aa, Homo Sapiens
SPKVCGYLKVDNEE

SEQ ID NO: 91973 - protein, 14 aa, Homo Sapiens
PKVCGYLKVDNEEL

SEQ ID NO: 91974 - protein, 14 aa, Homo Sapiens
KVCGYLKVDNEELL

SEQ ID NO: 91975 - protein, 14 aa, Homo Sapiens
VCGYLKVDNEELLP

SEQ ID NO: 91976 - protein, 14 aa, Homo Sapiens
CGYLKVDNEELLPK

SEQ ID NO: 91977 - protein, 14 aa, Homo Sapiens
GYLKVDNEELLPKG

SEQ ID NO: 91978 - protein, 14 aa, Homo Sapiens
YLKVDNEELLPKGL

SEQ ID NO: 91979 - protein, 14 aa, Homo Sapiens
LKVDNEELLPKGLV

SEQ ID NO: 91980 - protein, 14 aa, Homo Sapiens
KVDNEELLPKGLVD

SEQ ID NO: 91981 - protein, 14 aa, Homo Sapiens
VDNEELLPKGLVDR

SEQ ID NO: 91982 - protein, 14 aa, Homo Sapiens
DNEELLPKGLVDRE

SEQ ID NO: 91983 - protein, 14 aa, Homo Sapiens
NEELLPKGLVDREP

SEQ ID NO: 91984 - protein, 14 aa, Homo Sapiens
EELLPKGLVDREPP

SEQ ID NO: 91985 - protein, 14 aa, Homo Sapiens
ELLPKGLVDREPPE

SEQ ID NO: 91986 - protein, 14 aa, Homo Sapiens
LLPKGLVDREPPEE

SEQ ID NO: 91987 - protein, 14 aa, Homo Sapiens
LPKGLVDREPPEEL

SEQ ID NO: 91988 - protein, 14 aa, Homo Sapiens
PKGLVDREPPEELV

SEQ ID NO: 91989 - protein, 14 aa, Homo Sapiens
KGLVDREPPEELVH

SEQ ID NO: 91990 - protein, 14 aa, Homo Sapiens
GLVDREPPEELVHR

SEQ ID NO: 91991 - protein, 14 aa, Homo Sapiens
LVDREPPEELVHRV

SEQ ID NO: 91992 - protein, 14 aa, Homo Sapiens
VDREPPEELVHRVK

SEQ ID NO: 91993 - protein, 14 aa, Homo Sapiens
DREPPEELVHRVKR

SEQ ID NO: 91994 - protein, 14 aa, Homo Sapiens
REPPEELVHRVKRR

SEQ ID NO: 91995 - protein, 14 aa, Homo Sapiens
EPPEELVHRVKRRA

SEQ ID NO: 91996 - protein, 14 aa, Homo Sapiens
PPEELVHRVKRRAD

SEQ ID NO: 91997 - protein, 14 aa, Homo Sapiens
PEELVHRVKRRADP

SEQ ID NO: 91998 - protein, 14 aa, Homo Sapiens
EELVHRVKRRADPD

SEQ ID NO: 91999 - protein, 14 aa, Homo Sapiens
ELVHRVKRRADPDP

SEQ ID NO: 92000 - protein, 14 aa, Homo Sapiens
LVHRVKRRADPDPM

SEQ ID NO: 92001 - protein, 14 aa, Homo Sapiens
VHRVKRRADPDPMK

SEQ ID NO: 92002 - protein, 14 aa, Homo Sapiens
HRVKRRADPDPMKN

SEQ ID NO: 92003 - protein, 14 aa, Homo Sapiens
RVKRRADPDPMKNT

SEQ ID NO: 92004 - protein, 14 aa, Homo Sapiens
VKRRADPDPMKNTC

SEQ ID NO: 92005 - protein, 14 aa, Homo Sapiens
KRRADPDPMKNTCK

SEQ ID NO: 92006 - protein, 14 aa, Homo Sapiens
RRADPDPMKNTCKL

SEQ ID NO: 92007 - protein, 14 aa, Homo Sapiens
RADPDPMKNTCKLL

SEQ ID NO: 92008 - protein, 14 aa, Homo Sapiens
ADPDPMKNTCKLLV

SEQ ID NO: 92009 - protein, 14 aa, Homo Sapiens
DPDPMKNTCKLLVV

SEQ ID NO: 92010 - protein, 14 aa, Homo Sapiens
PDPMKNTCKLLVVA

SEQ ID NO: 92011 - protein, 14 aa, Homo Sapiens
DPMKNTCKLLVVAD

SEQ ID NO: 92012 - protein, 14 aa, Homo Sapiens
PMKNTCKLLVVADH

SEQ ID NO: 92013 - protein, 14 aa, Homo Sapiens
MKNTCKLLVVADHR

SEQ ID NO: 92014 - protein, 14 aa, Homo Sapiens
KNTCKLLVVADHRF

SEQ ID NO: 92015 - protein, 14 aa, Homo Sapiens
NTCKLLVVADHRFY

SEQ ID NO: 92016 - protein, 14 aa, Homo Sapiens
TCKLLVVADHRFYR

SEQ ID NO: 92017 - protein, 14 aa, Homo Sapiens
CKLLVVADHRFYRY

SEQ ID NO: 92018 - protein, 14 aa, Homo Sapiens
KLLVVADHRFYRYM

SEQ ID NO: 92019 - protein, 14 aa, Homo Sapiens
LLVVADHRFYRYMG

SEQ ID NO: 92020 - protein, 14 aa, Homo Sapiens
LVVADHRFYRYMGR

SEQ ID NO: 92021 - protein, 14 aa, Homo Sapiens
VVADHRFYRYMGRG

SEQ ID NO: 92022 - protein, 14 aa, Homo Sapiens
VADHRFYRYMGRGE

SEQ ID NO: 92023 - protein, 14 aa, Homo Sapiens
ADHRFYRYMGRGEE

SEQ ID NO: 92024 - protein, 14 aa, Homo Sapiens
DHRFYRYMGRGEES

SEQ ID NO: 92025 - protein, 14 aa, Homo Sapiens
HRFYRYMGRGEEST

SEQ ID NO: 92026 - protein, 14 aa, Homo Sapiens
RFYRYMGRGEESTT

SEQ ID NO: 92027 - protein, 14 aa, Homo Sapiens
FYRYMGRGEESTTT

SEQ ID NO: 92028 - protein, 14 aa, Homo Sapiens
YRYMGRGEESTTTN

SEQ ID NO: 92029 - protein, 14 aa, Homo Sapiens
RYMGRGEESTTTNY

SEQ ID NO: 92030 - protein, 14 aa, Homo Sapiens
YMGRGEESTTTNYL

SEQ ID NO: 92031 - protein, 14 aa, Homo Sapiens
MGRGEESTTTNYLI

SEQ ID NO: 92032 - protein, 14 aa, Homo Sapiens
GRGEESTTTNYLIE

SEQ ID NO: 92033 - protein, 14 aa, Homo Sapiens
RGEESTTTNYLIEL

SEQ ID NO: 92034 - protein, 14 aa, Homo Sapiens
GEESTTTNYLIELI

SEQ ID NO: 92035 - protein, 14 aa, Homo Sapiens
EESTTTNYLIELID

SEQ ID NO: 92036 - protein, 14 aa, Homo Sapiens
ESTTTNYLIELIDR

SEQ ID NO: 92037 - protein, 14 aa, Homo Sapiens
STTTNYLIELIDRV

SEQ ID NO: 92038 - protein, 14 aa, Homo Sapiens
TTTNYLIELIDRVD

SEQ ID NO: 92039 - protein, 14 aa, Homo Sapiens
TTNYLIELIDRVDD

SEQ ID NO: 92040 - protein, 14 aa, Homo Sapiens
TNYLIELIDRVDDI

SEQ ID NO: 92041 - protein, 14 aa, Homo Sapiens
NYLIELIDRVDDIY

SEQ ID NO: 92042 - protein, 14 aa, Homo Sapiens
YLIELIDRVDDIYR

SEQ ID NO: 92043 - protein, 14 aa, Homo Sapiens
LIELIDRVDDIYRN

SEQ ID NO: 92044 - protein, 14 aa, Homo Sapiens
IELIDRVDDIYRNT

SEQ ID NO: 92045 - protein, 14 aa, Homo Sapiens
ELIDRVDDIYRNTS

SEQ ID NO: 92046 - protein, 14 aa, Homo Sapiens
LIDRVDDIYRNTSW

SEQ ID NO: 92047 - protein, 14 aa, Homo Sapiens
IDRVDDIYRNTSWD

SEQ ID NO: 92048 - protein, 14 aa, Homo Sapiens
DRVDDIYRNTSWDN

SEQ ID NO: 92049 - protein, 14 aa, Homo Sapiens
RVDDIYRNTSWDNA

SEQ ID NO: 92050 - protein, 14 aa, Homo Sapiens
VDDIYRNTSWDNAG

SEQ ID NO: 92051 - protein, 14 aa, Homo Sapiens
DDIYRNTSWDNAGF

SEQ ID NO: 92052 - protein, 14 aa, Homo Sapiens
DIYRNTSWDNAGFK

SEQ ID NO: 92053 - protein, 14 aa, Homo Sapiens
IYRNTSWDNAGFKG

SEQ ID NO: 92054 - protein, 14 aa, Homo Sapiens
YRNTSWDNAGFKGY

SEQ ID NO: 92055 - protein, 14 aa, Homo Sapiens
RNTSWDNAGFKGYG

SEQ ID NO: 92056 - protein, 14 aa, Homo Sapiens
NTSWDNAGFKGYGI

SEQ ID NO: 92057 - protein, 14 aa, Homo Sapiens
TSWDNAGFKGYGIQ

SEQ ID NO: 92058 - protein, 14 aa, Homo Sapiens
SWDNAGFKGYGIQI

SEQ ID NO: 92059 - protein, 14 aa, Homo Sapiens
WDNAGFKGYGIQIE

SEQ ID NO: 92060 - protein, 14 aa, Homo Sapiens
DNAGFKGYGIQIEQ

SEQ ID NO: 92061 - protein, 14 aa, Homo Sapiens
NAGFKGYGIQIEQI

SEQ ID NO: 92062 - protein, 14 aa, Homo Sapiens
AGFKGYGIQIEQIR

SEQ ID NO: 92063 - protein, 14 aa, Homo Sapiens
GFKGYGIQIEQIRI

SEQ ID NO: 92064 - protein, 14 aa, Homo Sapiens
FKGYGIQIEQIRIL

SEQ ID NO: 92065 - protein, 14 aa, Homo Sapiens
KGYGIQIEQIRILK

SEQ ID NO: 92066 - protein, 14 aa, Homo Sapiens
GYGIQIEQIRILKS

SEQ ID NO: 92067 - protein, 14 aa, Homo Sapiens
YGIQIEQIRILKSP

SEQ ID NO: 92068 - protein, 14 aa, Homo Sapiens
GIQIEQIRILKSPQ

SEQ ID NO: 92069 - protein, 14 aa, Homo Sapiens
IQIEQIRILKSPQE

SEQ ID NO: 92070 - protein, 14 aa, Homo Sapiens
QIEQIRILKSPQEV

SEQ ID NO: 92071 - protein, 14 aa, Homo Sapiens
IEQIRILKSPQEVK

SEQ ID NO: 92072 - protein, 14 aa, Homo Sapiens
EQIRILKSPQEVKP

SEQ ID NO: 92073 - protein, 14 aa, Homo Sapiens
QIRILKSPQEVKPG

SEQ ID NO: 92074 - protein, 14 aa, Homo Sapiens
IRILKSPQEVKPGE

SEQ ID NO: 92075 - protein, 14 aa, Homo Sapiens
RILKSPQEVKPGEK

SEQ ID NO: 92076 - protein, 14 aa, Homo Sapiens
ILKSPQEVKPGEKH

SEQ ID NO: 92077 - protein, 14 aa, Homo Sapiens
LKSPQEVKPGEKHY

SEQ ID NO: 92078 - protein, 14 aa, Homo Sapiens
KSPQEVKPGEKHYN

SEQ ID NO: 92079 - protein, 14 aa, Homo Sapiens
SPQEVKPGEKHYNM

SEQ ID NO: 92080 - protein, 14 aa, Homo Sapiens
PQEVKPGEKHYNMA

SEQ ID NO: 92081 - protein, 14 aa, Homo Sapiens
QEVKPGEKHYNMAK

SEQ ID NO: 92082 - protein, 14 aa, Homo Sapiens
EVKPGEKHYNMAKS

SEQ ID NO: 92083 - protein, 14 aa, Homo Sapiens
VKPGEKHYNMAKSY

SEQ ID NO: 92084 - protein, 14 aa, Homo Sapiens
KPGEKHYNMAKSYP

SEQ ID NO: 92085 - protein, 14 aa, Homo Sapiens
PGEKHYNMAKSYPN

SEQ ID NO: 92086 - protein, 14 aa, Homo Sapiens
GEKHYNMAKSYPNE

SEQ ID NO: 92087 - protein, 14 aa, Homo Sapiens
EKHYNMAKSYPNEE

SEQ ID NO: 92088 - protein, 14 aa, Homo Sapiens
KHYNMAKSYPNEEK

SEQ ID NO: 92089 - protein, 14 aa, Homo Sapiens
HYNMAKSYPNEEKD

SEQ ID NO: 92090 - protein, 14 aa, Homo Sapiens
YNMAKSYPNEEKDA

SEQ ID NO: 92091 - protein, 14 aa, Homo Sapiens
NMAKSYPNEEKDAW

SEQ ID NO: 92092 - protein, 14 aa, Homo Sapiens
MAKSYPNEEKDAWD

SEQ ID NO: 92093 - protein, 14 aa, Homo Sapiens
AKSYPNEEKDAWDV

SEQ ID NO: 92094 - protein, 14 aa, Homo Sapiens
KSYPNEEKDAWDVK

SEQ ID NO: 92095 - protein, 14 aa, Homo Sapiens
SYPNEEKDAWDVKM

SEQ ID NO: 92096 - protein, 14 aa, Homo Sapiens
YPNEEKDAWDVKML

SEQ ID NO: 92097 - protein, 14 aa, Homo Sapiens
PNEEKDAWDVKMLL

SEQ ID NO: 92098 - protein, 14 aa, Homo Sapiens
NEEKDAWDVKMLLE

SEQ ID NO: 92099 - protein, 14 aa, Homo Sapiens
EEKDAWDVKMLLEQ

SEQ ID NO: 92100 - protein, 14 aa, Homo Sapiens
EKDAWDVKMLLEQF

SEQ ID NO: 92101 - protein, 14 aa, Homo Sapiens
KDAWDVKMLLEQFS

SEQ ID NO: 92102 - protein, 14 aa, Homo Sapiens
DAWDVKMLLEQFSF

SEQ ID NO: 92103 - protein, 14 aa, Homo Sapiens
AWDVKMLLEQFSFD

SEQ ID NO: 92104 - protein, 14 aa, Homo Sapiens
WDVKMLLEQFSFDI

SEQ ID NO: 92105 - protein, 14 aa, Homo Sapiens
DVKMLLEQFSFDIA

SEQ ID NO: 92106 - protein, 14 aa, Homo Sapiens
VKMLLEQFSFDIAE

SEQ ID NO: 92107 - protein, 14 aa, Homo Sapiens
KMLLEQFSFDIAEE

SEQ ID NO: 92108 - protein, 14 aa, Homo Sapiens
MLLEQFSFDIAEEA

SEQ ID NO: 92109 - protein, 14 aa, Homo Sapiens
LLEQFSFDIAEEAS

SEQ ID NO: 92110 - protein, 14 aa, Homo Sapiens
LEQFSFDIAEEASK

SEQ ID NO: 92111 - protein, 14 aa, Homo Sapiens
EQFSFDIAEEASKV

SEQ ID NO: 92112 - protein, 14 aa, Homo Sapiens
QFSFDIAEEASKVC

SEQ ID NO: 92113 - protein, 14 aa, Homo Sapiens
FSFDIAEEASKVCL

SEQ ID NO: 92114 - protein, 14 aa, Homo Sapiens
SFDIAEEASKVCLA

SEQ ID NO: 92115 - protein, 14 aa, Homo Sapiens
FDIAEEASKVCLAH

SEQ ID NO: 92116 - protein, 14 aa, Homo Sapiens
DIAEEASKVCLAHL

SEQ ID NO: 92117 - protein, 14 aa, Homo Sapiens
IAEEASKVCLAHLF

SEQ ID NO: 92118 - protein, 14 aa, Homo Sapiens
AEEASKVCLAHLFT

SEQ ID NO: 92119 - protein, 14 aa, Homo Sapiens
EEASKVCLAHLFTY

SEQ ID NO: 92120 - protein, 14 aa, Homo Sapiens
EASKVCLAHLFTYQ

SEQ ID NO: 92121 - protein, 14 aa, Homo Sapiens
ASKVCLAHLFTYQD

SEQ ID NO: 92122 - protein, 14 aa, Homo Sapiens
SKVCLAHLFTYQDF

SEQ ID NO: 92123 - protein, 14 aa, Homo Sapiens
KVCLAHLFTYQDFD

SEQ ID NO: 92124 - protein, 14 aa, Homo Sapiens
VCLAHLFTYQDFDM

SEQ ID NO: 92125 - protein, 14 aa, Homo Sapiens
CLAHLFTYQDFDMG

SEQ ID NO: 92126 - protein, 14 aa, Homo Sapiens
LAHLFTYQDFDMGT

SEQ ID NO: 92127 - protein, 14 aa, Homo Sapiens
AHLFTYQDFDMGTL

SEQ ID NO: 92128 - protein, 14 aa, Homo Sapiens
HLFTYQDFDMGTLG

SEQ ID NO: 92129 - protein, 14 aa, Homo Sapiens
LFTYQDFDMGTLGL

SEQ ID NO: 92130 - protein, 14 aa, Homo Sapiens
FTYQDFDMGTLGLA

SEQ ID NO: 92131 - protein, 14 aa, Homo Sapiens
TYQDFDMGTLGLAY

SEQ ID NO: 92132 - protein, 14 aa, Homo Sapiens
YQDFDMGTLGLAYV

SEQ ID NO: 92133 - protein, 14 aa, Homo Sapiens
QDFDMGTLGLAYVG

SEQ ID NO: 92134 - protein, 14 aa, Homo Sapiens
DFDMGTLGLAYVGS

SEQ ID NO: 92135 - protein, 14 aa, Homo Sapiens
FDMGTLGLAYVGSP

SEQ ID NO: 92136 - protein, 14 aa, Homo Sapiens
DMGTLGLAYVGSPR

SEQ ID NO: 92137 - protein, 14 aa, Homo Sapiens
MGTLGLAYVGSPRA

SEQ ID NO: 92138 - protein, 14 aa, Homo Sapiens
GTLGLAYVGSPRAN

SEQ ID NO: 92139 - protein, 14 aa, Homo Sapiens
TLGLAYVGSPRANS

SEQ ID NO: 92140 - protein, 14 aa, Homo Sapiens
LGLAYVGSPRANSH

SEQ ID NO: 92141 - protein, 14 aa, Homo Sapiens
GLAYVGSPRANSHG

SEQ ID NO: 92142 - protein, 14 aa, Homo Sapiens
LAYVGSPRANSHGG

SEQ ID NO: 92143 - protein, 14 aa, Homo Sapiens
AYVGSPRANSHGGV

SEQ ID NO: 92144 - protein, 14 aa, Homo Sapiens
YVGSPRANSHGGVC

SEQ ID NO: 92145 - protein, 14 aa, Homo Sapiens
VGSPRANSHGGVCP

SEQ ID NO: 92146 - protein, 14 aa, Homo Sapiens
GSPRANSHGGVCPK

SEQ ID NO: 92147 - protein, 14 aa, Homo Sapiens
SPRANSHGGVCPKA

SEQ ID NO: 92148 - protein, 14 aa, Homo Sapiens
PRANSHGGVCPKAY

SEQ ID NO: 92149 - protein, 14 aa, Homo Sapiens
RANSHGGVCPKAYY

SEQ ID NO: 92150 - protein, 14 aa, Homo Sapiens
ANSHGGVCPKAYYS

SEQ ID NO: 92151 - protein, 14 aa, Homo Sapiens
NSHGGVCPKAYYSP

SEQ ID NO: 92152 - protein, 14 aa, Homo Sapiens
SHGGVCPKAYYSPV

SEQ ID NO: 92153 - protein, 14 aa, Homo Sapiens
HGGVCPKAYYSPVG

SEQ ID NO: 92154 - protein, 14 aa, Homo Sapiens
GGVCPKAYYSPVGK

SEQ ID NO: 92155 - protein, 14 aa, Homo Sapiens
GVCPKAYYSPVGKK

SEQ ID NO: 92156 - protein, 14 aa, Homo Sapiens
VCPKAYYSPVGKKN

SEQ ID NO: 92157 - protein, 14 aa, Homo Sapiens
CPKAYYSPVGKKNI

SEQ ID NO: 92158 - protein, 14 aa, Homo Sapiens
PKAYYSPVGKKNIY

SEQ ID NO: 92159 - protein, 14 aa, Homo Sapiens
KAYYSPVGKKNIYL

SEQ ID NO: 92160 - protein, 14 aa, Homo Sapiens
AYYSPVGKKNIYLN

SEQ ID NO: 92161 - protein, 14 aa, Homo Sapiens
YYSPVGKKNIYLNS

SEQ ID NO: 92162 - protein, 14 aa, Homo Sapiens
YSPVGKKNIYLNSG

SEQ ID NO: 92163 - protein, 14 aa, Homo Sapiens
SPVGKKNIYLNSGL

SEQ ID NO: 92164 - protein, 14 aa, Homo Sapiens
PVGKKNIYLNSGLT

SEQ ID NO: 92165 - protein, 14 aa, Homo Sapiens
VGKKNIYLNSGLTS

SEQ ID NO: 92166 - protein, 14 aa, Homo Sapiens
GKKNIYLNSGLTST

SEQ ID NO: 92167 - protein, 14 aa, Homo Sapiens
KKNIYLNSGLTSTK

SEQ ID NO: 92168 - protein, 14 aa, Homo Sapiens
KNIYLNSGLTSTKN

SEQ ID NO: 92169 - protein, 14 aa, Homo Sapiens
NIYLNSGLTSTKNY

SEQ ID NO: 92170 - protein, 14 aa, Homo Sapiens
IYLNSGLTSTKNYG

SEQ ID NO: 92171 - protein, 14 aa, Homo Sapiens
YLNSGLTSTKNYGK

SEQ ID NO: 92172 - protein, 14 aa, Homo Sapiens
LNSGLTSTKNYGKT

SEQ ID NO: 92173 - protein, 14 aa, Homo Sapiens
NSGLTSTKNYGKTI

SEQ ID NO: 92174 - protein, 14 aa, Homo Sapiens
SGLTSTKNYGKTIL

SEQ ID NO: 92175 - protein, 14 aa, Homo Sapiens
GLTSTKNYGKTILT

SEQ ID NO: 92176 - protein, 14 aa, Homo Sapiens
LTSTKNYGKTILTK

SEQ ID NO: 92177 - protein, 14 aa, Homo Sapiens
TSTKNYGKTILTKE

SEQ ID NO: 92178 - protein, 14 aa, Homo Sapiens
STKNYGKTILTKEA

SEQ ID NO: 92179 - protein, 14 aa, Homo Sapiens
TKNYGKTILTKEAD

SEQ ID NO: 92180 - protein, 14 aa, Homo Sapiens
KNYGKTILTKEADL

SEQ ID NO: 92181 - protein, 14 aa, Homo Sapiens
NYGKTILTKEADLV

SEQ ID NO: 92182 - protein, 14 aa, Homo Sapiens
YGKTILTKEADLVT

SEQ ID NO: 92183 - protein, 14 aa, Homo Sapiens
GKTILTKEADLVTT

SEQ ID NO: 92184 - protein, 14 aa, Homo Sapiens
KTILTKEADLVTTH

SEQ ID NO: 92185 - protein, 14 aa, Homo Sapiens
TILTKEADLVTTHE

SEQ ID NO: 92186 - protein, 14 aa, Homo Sapiens
ILTKEADLVTTHEL

SEQ ID NO: 92187 - protein, 14 aa, Homo Sapiens
LTKEADLVTTHELG

SEQ ID NO: 92188 - protein, 14 aa, Homo Sapiens
TKEADLVTTHELGH

SEQ ID NO: 92189 - protein, 14 aa, Homo Sapiens
KEADLVTTHELGHN

SEQ ID NO: 92190 - protein, 14 aa, Homo Sapiens
EADLVTTHELGHNF

SEQ ID NO: 92191 - protein, 14 aa, Homo Sapiens
ADLVTTHELGHNFG

SEQ ID NO: 92192 - protein, 14 aa, Homo Sapiens
DLVTTHELGHNFGA

SEQ ID NO: 92193 - protein, 14 aa, Homo Sapiens
LVTTHELGHNFGAE

SEQ ID NO: 92194 - protein, 14 aa, Homo Sapiens
VTTHELGHNFGAEH

SEQ ID NO: 92195 - protein, 14 aa, Homo Sapiens
TTHELGHNFGAEHD

SEQ ID NO: 92196 - protein, 14 aa, Homo Sapiens
THELGHNFGAEHDP

SEQ ID NO: 92197 - protein, 14 aa, Homo Sapiens
HELGHNFGAEHDPD

SEQ ID NO: 92198 - protein, 14 aa, Homo Sapiens
ELGHNFGAEHDPDG

SEQ ID NO: 92199 - protein, 14 aa, Homo Sapiens
LGHNFGAEHDPDGL

SEQ ID NO: 92200 - protein, 14 aa, Homo Sapiens
GHNFGAEHDPDGLA

SEQ ID NO: 92201 - protein, 14 aa, Homo Sapiens
HNFGAEHDPDGLAE

SEQ ID NO: 92202 - protein, 14 aa, Homo Sapiens
NFGAEHDPDGLAEC

SEQ ID NO: 92203 - protein, 14 aa, Homo Sapiens
FGAEHDPDGLAECA

SEQ ID NO: 92204 - protein, 14 aa, Homo Sapiens
GAEHDPDGLAECAP

SEQ ID NO: 92205 - protein, 14 aa, Homo Sapiens
AEHDPDGLAECAPN

SEQ ID NO: 92206 - protein, 14 aa, Homo Sapiens
EHDPDGLAECAPNE

SEQ ID NO: 92207 - protein, 14 aa, Homo Sapiens
HDPDGLAECAPNED

SEQ ID NO: 92208 - protein, 14 aa, Homo Sapiens
DPDGLAECAPNEDQ

SEQ ID NO: 92209 - protein, 14 aa, Homo Sapiens
PDGLAECAPNEDQG

SEQ ID NO: 92210 - protein, 14 aa, Homo Sapiens
DGLAECAPNEDQGG

SEQ ID NO: 92211 - protein, 14 aa, Homo Sapiens
GLAECAPNEDQGGK

SEQ ID NO: 92212 - protein, 14 aa, Homo Sapiens
LAECAPNEDQGGKY

SEQ ID NO: 92213 - protein, 14 aa, Homo Sapiens
AECAPNEDQGGKYV

SEQ ID NO: 92214 - protein, 14 aa, Homo Sapiens
ECAPNEDQGGKYVM

SEQ ID NO: 92215 - protein, 14 aa, Homo Sapiens
CAPNEDQGGKYVMY

SEQ ID NO: 92216 - protein, 14 aa, Homo Sapiens
APNEDQGGKYVMYP

SEQ ID NO: 92217 - protein, 14 aa, Homo Sapiens
PNEDQGGKYVMYPI

SEQ ID NO: 92218 - protein, 14 aa, Homo Sapiens
NEDQGGKYVMYPIA

SEQ ID NO: 92219 - protein, 14 aa, Homo Sapiens
EDQGGKYVMYPIAV

SEQ ID NO: 92220 - protein, 14 aa, Homo Sapiens
DQGGKYVMYPIAVS

SEQ ID NO: 92221 - protein, 14 aa, Homo Sapiens
QGGKYVMYPIAVSG

SEQ ID NO: 92222 - protein, 14 aa, Homo Sapiens
GGKYVMYPIAVSGD

SEQ ID NO: 92223 - protein, 14 aa, Homo Sapiens
GKYVMYPIAVSGDH

SEQ ID NO: 92224 - protein, 14 aa, Homo Sapiens
KYVMYPIAVSGDHE

SEQ ID NO: 92225 - protein, 14 aa, Homo Sapiens
YVMYPIAVSGDHEN

SEQ ID NO: 92226 - protein, 14 aa, Homo Sapiens
VMYPIAVSGDHENN

SEQ ID NO: 92227 - protein, 14 aa, Homo Sapiens
MYPIAVSGDHENNK

SEQ ID NO: 92228 - protein, 14 aa, Homo Sapiens
YPIAVSGDHENNKM

SEQ ID NO: 92229 - protein, 14 aa, Homo Sapiens
PIAVSGDHENNKMF

SEQ ID NO: 92230 - protein, 14 aa, Homo Sapiens
IAVSGDHENNKMFS

SEQ ID NO: 92231 - protein, 14 aa, Homo Sapiens
AVSGDHENNKMFSN

SEQ ID NO: 92232 - protein, 14 aa, Homo Sapiens
VSGDHENNKMFSNC

SEQ ID NO: 92233 - protein, 14 aa, Homo Sapiens
SGDHENNKMFSNCS

SEQ ID NO: 92234 - protein, 14 aa, Homo Sapiens
GDHENNKMFSNCSK

SEQ ID NO: 92235 - protein, 14 aa, Homo Sapiens
DHENNKMFSNCSKQ

SEQ ID NO: 92236 - protein, 14 aa, Homo Sapiens
HENNKMFSNCSKQS

SEQ ID NO: 92237 - protein, 14 aa, Homo Sapiens
ENNKMFSNCSKQSI

SEQ ID NO: 92238 - protein, 14 aa, Homo Sapiens
NNKMFSNCSKQSIY

SEQ ID NO: 92239 - protein, 14 aa, Homo Sapiens
NKMFSNCSKQSIYK

SEQ ID NO: 92240 - protein, 14 aa, Homo Sapiens
KMFSNCSKQSIYKT

SEQ ID NO: 92241 - protein, 14 aa, Homo Sapiens
MFSNCSKQSIYKTI

SEQ ID NO: 92242 - protein, 14 aa, Homo Sapiens
FSNCSKQSIYKTIE

SEQ ID NO: 92243 - protein, 14 aa, Homo Sapiens
SNCSKQSIYKTIES

SEQ ID NO: 92244 - protein, 14 aa, Homo Sapiens
NCSKQSIYKTIESK

SEQ ID NO: 92245 - protein, 14 aa, Homo Sapiens
CSKQSIYKTIESKA

SEQ ID NO: 92246 - protein, 14 aa, Homo Sapiens
SKQSIYKTIESKAQ

SEQ ID NO: 92247 - protein, 14 aa, Homo Sapiens
KQSIYKTIESKAQE

SEQ ID NO: 92248 - protein, 14 aa, Homo Sapiens
QSIYKTIESKAQEC

SEQ ID NO: 92249 - protein, 14 aa, Homo Sapiens
SIYKTIESKAQECF

SEQ ID NO: 92250 - protein, 14 aa, Homo Sapiens
IYKTIESKAQECFQ

SEQ ID NO: 92251 - protein, 14 aa, Homo Sapiens
YKTIESKAQECFQE

SEQ ID NO: 92252 - protein, 14 aa, Homo Sapiens
KTIESKAQECFQER

SEQ ID NO: 92253 - protein, 14 aa, Homo Sapiens
TIESKAQECFQERS

SEQ ID NO: 92254 - protein, 14 aa, Homo Sapiens
IESKAQECFQERSN

SEQ ID NO: 92255 - protein, 14 aa, Homo Sapiens
ESKAQECFQERSNK

SEQ ID NO: 92256 - protein, 14 aa, Homo Sapiens
SKAQECFQERSNKV

SEQ ID NO: 92257 - protein, 14 aa, Homo Sapiens
KAQECFQERSNKVC

SEQ ID NO: 92258 - protein, 14 aa, Homo Sapiens
AQECFQERSNKVCG

SEQ ID NO: 92259 - protein, 14 aa, Homo Sapiens
QECFQERSNKVCGN

SEQ ID NO: 92260 - protein, 14 aa, Homo Sapiens
ECFQERSNKVCGNS

SEQ ID NO: 92261 - protein, 14 aa, Homo Sapiens
CFQERSNKVCGNSR

SEQ ID NO: 92262 - protein, 14 aa, Homo Sapiens
FQERSNKVCGNSRV

SEQ ID NO: 92263 - protein, 14 aa, Homo Sapiens
QERSNKVCGNSRVD

SEQ ID NO: 92264 - protein, 14 aa, Homo Sapiens
ERSNKVCGNSRVDE

SEQ ID NO: 92265 - protein, 14 aa, Homo Sapiens
RSNKVCGNSRVDEG

SEQ ID NO: 92266 - protein, 14 aa, Homo Sapiens
SNKVCGNSRVDEGE

SEQ ID NO: 92267 - protein, 14 aa, Homo Sapiens
NKVCGNSRVDEGEE

SEQ ID NO: 92268 - protein, 14 aa, Homo Sapiens
KVCGNSRVDEGEEC

SEQ ID NO: 92269 - protein, 14 aa, Homo Sapiens
VCGNSRVDEGEECD

SEQ ID NO: 92270 - protein, 14 aa, Homo Sapiens
CGNSRVDEGEECDP

SEQ ID NO: 92271 - protein, 14 aa, Homo Sapiens
GNSRVDEGEECDPG

SEQ ID NO: 92272 - protein, 14 aa, Homo Sapiens
NSRVDEGEECDPGI

SEQ ID NO: 92273 - protein, 14 aa, Homo Sapiens
SRVDEGEECDPGIM

SEQ ID NO: 92274 - protein, 14 aa, Homo Sapiens
RVDEGEECDPGIMY

SEQ ID NO: 92275 - protein, 14 aa, Homo Sapiens
VDEGEECDPGIMYL

SEQ ID NO: 92276 - protein, 14 aa, Homo Sapiens
DEGEECDPGIMYLN

SEQ ID NO: 92277 - protein, 14 aa, Homo Sapiens
EGEECDPGIMYLNN

SEQ ID NO: 92278 - protein, 14 aa, Homo Sapiens
GEECDPGIMYLNND

SEQ ID NO: 92279 - protein, 14 aa, Homo Sapiens
EECDPGIMYLNNDT

SEQ ID NO: 92280 - protein, 14 aa, Homo Sapiens
ECDPGIMYLNNDTC

SEQ ID NO: 92281 - protein, 14 aa, Homo Sapiens
CDPGIMYLNNDTCC

SEQ ID NO: 92282 - protein, 14 aa, Homo Sapiens
DPGIMYLNNDTCCN

SEQ ID NO: 92283 - protein, 14 aa, Homo Sapiens
PGIMYLNNDTCCNS

SEQ ID NO: 92284 - protein, 14 aa, Homo Sapiens
GIMYLNNDTCCNSD

SEQ ID NO: 92285 - protein, 14 aa, Homo Sapiens
IMYLNNDTCCNSDC

SEQ ID NO: 92286 - protein, 14 aa, Homo Sapiens
MYLNNDTCCNSDCT

SEQ ID NO: 92287 - protein, 14 aa, Homo Sapiens
YLNNDTCCNSDCTL

SEQ ID NO: 92288 - protein, 14 aa, Homo Sapiens
LNNDTCCNSDCTLK

SEQ ID NO: 92289 - protein, 14 aa, Homo Sapiens
NNDTCCNSDCTLKE

SEQ ID NO: 92290 - protein, 14 aa, Homo Sapiens
NDTCCNSDCTLKEG

SEQ ID NO: 92291 - protein, 14 aa, Homo Sapiens
DTCCNSDCTLKEGV

SEQ ID NO: 92292 - protein, 14 aa, Homo Sapiens
TCCNSDCTLKEGVQ

SEQ ID NO: 92293 - protein, 14 aa, Homo Sapiens
CCNSDCTLKEGVQC

SEQ ID NO: 92294 - protein, 14 aa, Homo Sapiens
CNSDCTLKEGVQCS

SEQ ID NO: 92295 - protein, 14 aa, Homo Sapiens
NSDCTLKEGVQCSD

SEQ ID NO: 92296 - protein, 14 aa, Homo Sapiens
SDCTLKEGVQCSDR

SEQ ID NO: 92297 - protein, 14 aa, Homo Sapiens
DCTLKEGVQCSDRN

SEQ ID NO: 92298 - protein, 14 aa, Homo Sapiens
CTLKEGVQCSDRNS

SEQ ID NO: 92299 - protein, 14 aa, Homo Sapiens
TLKEGVQCSDRNSP

SEQ ID NO: 92300 - protein, 14 aa, Homo Sapiens
LKEGVQCSDRNSPC

SEQ ID NO: 92301 - protein, 14 aa, Homo Sapiens
KEGVQCSDRNSPCC

SEQ ID NO: 92302 - protein, 14 aa, Homo Sapiens
EGVQCSDRNSPCCK

SEQ ID NO: 92303 - protein, 14 aa, Homo Sapiens
GVQCSDRNSPCCKN

SEQ ID NO: 92304 - protein, 14 aa, Homo Sapiens
VQCSDRNSPCCKNC

SEQ ID NO: 92305 - protein, 14 aa, Homo Sapiens
QCSDRNSPCCKNCQ

SEQ ID NO: 92306 - protein, 14 aa, Homo Sapiens
CSDRNSPCCKNCQF

SEQ ID NO: 92307 - protein, 14 aa, Homo Sapiens
SDRNSPCCKNCQFE

SEQ ID NO: 92308 - protein, 14 aa, Homo Sapiens
DRNSPCCKNCQFET

SEQ ID NO: 92309 - protein, 14 aa, Homo Sapiens
RNSPCCKNCQFETA

SEQ ID NO: 92310 - protein, 14 aa, Homo Sapiens
NSPCCKNCQFETAQ

SEQ ID NO: 92311 - protein, 14 aa, Homo Sapiens
SPCCKNCQFETAQK

SEQ ID NO: 92312 - protein, 14 aa, Homo Sapiens
PCCKNCQFETAQKK

SEQ ID NO: 92313 - protein, 14 aa, Homo Sapiens
CCKNCQFETAQKKC

SEQ ID NO: 92314 - protein, 14 aa, Homo Sapiens
CKNCQFETAQKKCQ

SEQ ID NO: 92315 - protein, 14 aa, Homo Sapiens
KNCQFETAQKKCQE

SEQ ID NO: 92316 - protein, 14 aa, Homo Sapiens
NCQFETAQKKCQEA

SEQ ID NO: 92317 - protein, 14 aa, Homo Sapiens
CQFETAQKKCQEAI

SEQ ID NO: 92318 - protein, 14 aa, Homo Sapiens
QFETAQKKCQEAIN

SEQ ID NO: 92319 - protein, 14 aa, Homo Sapiens
FETAQKKCQEAINA

SEQ ID NO: 92320 - protein, 14 aa, Homo Sapiens
ETAQKKCQEAINAT

SEQ ID NO: 92321 - protein, 14 aa, Homo Sapiens
TAQKKCQEAINATC

SEQ ID NO: 92322 - protein, 14 aa, Homo Sapiens
AQKKCQEAINATCK

SEQ ID NO: 92323 - protein, 14 aa, Homo Sapiens
QKKCQEAINATCKG

SEQ ID NO: 92324 - protein, 14 aa, Homo Sapiens
KKCQEAINATCKGV

SEQ ID NO: 92325 - protein, 14 aa, Homo Sapiens
KCQEAINATCKGVS

SEQ ID NO: 92326 - protein, 14 aa, Homo Sapiens
CQEAINATCKGVSY

SEQ ID NO: 92327 - protein, 14 aa, Homo Sapiens
QEAINATCKGVSYC

SEQ ID NO: 92328 - protein, 14 aa, Homo Sapiens
EAINATCKGVSYCT

SEQ ID NO: 92329 - protein, 14 aa, Homo Sapiens
AINATCKGVSYCTG

SEQ ID NO: 92330 - protein, 14 aa, Homo Sapiens
INATCKGVSYCTGN

SEQ ID NO: 92331 - protein, 14 aa, Homo Sapiens
NATCKGVSYCTGNS

SEQ ID NO: 92332 - protein, 14 aa, Homo Sapiens
ATCKGVSYCTGNSS

SEQ ID NO: 92333 - protein, 14 aa, Homo Sapiens
TCKGVSYCTGNSSE

SEQ ID NO: 92334 - protein, 14 aa, Homo Sapiens
CKGVSYCTGNSSEC

SEQ ID NO: 92335 - protein, 14 aa, Homo Sapiens
KGVSYCTGNSSECP

SEQ ID NO: 92336 - protein, 14 aa, Homo Sapiens
GVSYCTGNSSECPP

SEQ ID NO: 92337 - protein, 14 aa, Homo Sapiens
VSYCTGNSSECPPP

SEQ ID NO: 92338 - protein, 14 aa, Homo Sapiens
SYCTGNSSECPPPG

SEQ ID NO: 92339 - protein, 14 aa, Homo Sapiens
YCTGNSSECPPPGN

SEQ ID NO: 92340 - protein, 14 aa, Homo Sapiens
CTGNSSECPPPGNA

SEQ ID NO: 92341 - protein, 14 aa, Homo Sapiens
TGNSSECPPPGNAE

SEQ ID NO: 92342 - protein, 14 aa, Homo Sapiens
GNSSECPPPGNAED

SEQ ID NO: 92343 - protein, 14 aa, Homo Sapiens
NSSECPPPGNAEDD

SEQ ID NO: 92344 - protein, 14 aa, Homo Sapiens
SSECPPPGNAEDDT

SEQ ID NO: 92345 - protein, 14 aa, Homo Sapiens
SECPPPGNAEDDTV

SEQ ID NO: 92346 - protein, 14 aa, Homo Sapiens
ECPPPGNAEDDTVC

SEQ ID NO: 92347 - protein, 14 aa, Homo Sapiens
CPPPGNAEDDTVCL

SEQ ID NO: 92348 - protein, 14 aa, Homo Sapiens
PPPGNAEDDTVCLD

SEQ ID NO: 92349 - protein, 14 aa, Homo Sapiens
PPGNAEDDTVCLDL

SEQ ID NO: 92350 - protein, 14 aa, Homo Sapiens
PGNAEDDTVCLDLG

SEQ ID NO: 92351 - protein, 14 aa, Homo Sapiens
GNAEDDTVCLDLGK

SEQ ID NO: 92352 - protein, 14 aa, Homo Sapiens
NAEDDTVCLDLGKC

SEQ ID NO: 92353 - protein, 14 aa, Homo Sapiens
AEDDTVCLDLGKCK

SEQ ID NO: 92354 - protein, 14 aa, Homo Sapiens
EDDTVCLDLGKCKD

SEQ ID NO: 92355 - protein, 14 aa, Homo Sapiens
DDTVCLDLGKCKDG

SEQ ID NO: 92356 - protein, 14 aa, Homo Sapiens
DTVCLDLGKCKDGK

SEQ ID NO: 92357 - protein, 14 aa, Homo Sapiens
TVCLDLGKCKDGKC

SEQ ID NO: 92358 - protein, 14 aa, Homo Sapiens
VCLDLGKCKDGKCI

SEQ ID NO: 92359 - protein, 14 aa, Homo Sapiens
CLDLGKCKDGKCIP

SEQ ID NO: 92360 - protein, 14 aa, Homo Sapiens
LDLGKCKDGKCIPF

SEQ ID NO: 92361 - protein, 14 aa, Homo Sapiens
DLGKCKDGKCIPFC

SEQ ID NO: 92362 - protein, 14 aa, Homo Sapiens
LGKCKDGKCIPFCE

SEQ ID NO: 92363 - protein, 14 aa, Homo Sapiens
GKCKDGKCIPFCER

SEQ ID NO: 92364 - protein, 14 aa, Homo Sapiens
KCKDGKCIPFCERE

SEQ ID NO: 92365 - protein, 14 aa, Homo Sapiens
CKDGKCIPFCEREQ

SEQ ID NO: 92366 - protein, 14 aa, Homo Sapiens
KDGKCIPFCEREQQ

SEQ ID NO: 92367 - protein, 14 aa, Homo Sapiens
DGKCIPFCEREQQL

SEQ ID NO: 92368 - protein, 14 aa, Homo Sapiens
GKCIPFCEREQQLE

SEQ ID NO: 92369 - protein, 14 aa, Homo Sapiens
KCIPFCEREQQLES

SEQ ID NO: 92370 - protein, 14 aa, Homo Sapiens
CIPFCEREQQLESC

SEQ ID NO: 92371 - protein, 14 aa, Homo Sapiens
IPFCEREQQLESCA

SEQ ID NO: 92372 - protein, 14 aa, Homo Sapiens
PFCEREQQLESCAC

SEQ ID NO: 92373 - protein, 14 aa, Homo Sapiens
FCEREQQLESCACN

SEQ ID NO: 92374 - protein, 14 aa, Homo Sapiens
CEREQQLESCACNE

SEQ ID NO: 92375 - protein, 14 aa, Homo Sapiens
EREQQLESCACNET

SEQ ID NO: 92376 - protein, 14 aa, Homo Sapiens
REQQLESCACNETD

SEQ ID NO: 92377 - protein, 14 aa, Homo Sapiens
EQQLESCACNETDN

SEQ ID NO: 92378 - protein, 14 aa, Homo Sapiens
QQLESCACNETDNS

SEQ ID NO: 92379 - protein, 14 aa, Homo Sapiens
QLESCACNETDNSC

SEQ ID NO: 92380 - protein, 14 aa, Homo Sapiens
LESCACNETDNSCK

SEQ ID NO: 92381 - protein, 14 aa, Homo Sapiens
ESCACNETDNSCKV

SEQ ID NO: 92382 - protein, 14 aa, Homo Sapiens
SCACNETDNSCKVC

SEQ ID NO: 92383 - protein, 14 aa, Homo Sapiens
CACNETDNSCKVCC

SEQ ID NO: 92384 - protein, 14 aa, Homo Sapiens
ACNETDNSCKVCCR

SEQ ID NO: 92385 - protein, 14 aa, Homo Sapiens
CNETDNSCKVCCRD

SEQ ID NO: 92386 - protein, 14 aa, Homo Sapiens
NETDNSCKVCCRDL

SEQ ID NO: 92387 - protein, 14 aa, Homo Sapiens
ETDNSCKVCCRDLS

SEQ ID NO: 92388 - protein, 14 aa, Homo Sapiens
TDNSCKVCCRDLSG

SEQ ID NO: 92389 - protein, 14 aa, Homo Sapiens
DNSCKVCCRDLSGR

SEQ ID NO: 92390 - protein, 14 aa, Homo Sapiens
NSCKVCCRDLSGRC

SEQ ID NO: 92391 - protein, 14 aa, Homo Sapiens
SCKVCCRDLSGRCV

SEQ ID NO: 92392 - protein, 14 aa, Homo Sapiens
CKVCCRDLSGRCVP

SEQ ID NO: 92393 - protein, 14 aa, Homo Sapiens
KVCCRDLSGRCVPY

SEQ ID NO: 92394 - protein, 14 aa, Homo Sapiens
VCCRDLSGRCVPYV

SEQ ID NO: 92395 - protein, 14 aa, Homo Sapiens
CCRDLSGRCVPYVD

SEQ ID NO: 92396 - protein, 14 aa, Homo Sapiens
CRDLSGRCVPYVDA

SEQ ID NO: 92397 - protein, 14 aa, Homo Sapiens
RDLSGRCVPYVDAE

SEQ ID NO: 92398 - protein, 14 aa, Homo Sapiens
DLSGRCVPYVDAEQ

SEQ ID NO: 92399 - protein, 14 aa, Homo Sapiens
LSGRCVPYVDAEQK

SEQ ID NO: 92400 - protein, 14 aa, Homo Sapiens
SGRCVPYVDAEQKN

SEQ ID NO: 92401 - protein, 14 aa, Homo Sapiens
GRCVPYVDAEQKNL

SEQ ID NO: 92402 - protein, 14 aa, Homo Sapiens
RCVPYVDAEQKNLF

SEQ ID NO: 92403 - protein, 14 aa, Homo Sapiens
CVPYVDAEQKNLFL

SEQ ID NO: 92404 - protein, 14 aa, Homo Sapiens
VPYVDAEQKNLFLR

SEQ ID NO: 92405 - protein, 14 aa, Homo Sapiens
PYVDAEQKNLFLRK

SEQ ID NO: 92406 - protein, 14 aa, Homo Sapiens
YVDAEQKNLFLRKG

SEQ ID NO: 92407 - protein, 14 aa, Homo Sapiens
VDAEQKNLFLRKGK

SEQ ID NO: 92408 - protein, 14 aa, Homo Sapiens
DAEQKNLFLRKGKP

SEQ ID NO: 92409 - protein, 14 aa, Homo Sapiens
AEQKNLFLRKGKPC

SEQ ID NO: 92410 - protein, 14 aa, Homo Sapiens
EQKNLFLRKGKPCT

SEQ ID NO: 92411 - protein, 14 aa, Homo Sapiens
QKNLFLRKGKPCTV

SEQ ID NO: 92412 - protein, 14 aa, Homo Sapiens
KNLFLRKGKPCTVG

SEQ ID NO: 92413 - protein, 14 aa, Homo Sapiens
NLFLRKGKPCTVGF

SEQ ID NO: 92414 - protein, 14 aa, Homo Sapiens
LFLRKGKPCTVGFC

SEQ ID NO: 92415 - protein, 14 aa, Homo Sapiens
FLRKGKPCTVGFCD

SEQ ID NO: 92416 - protein, 14 aa, Homo Sapiens
LRKGKPCTVGFCDM

SEQ ID NO: 92417 - protein, 14 aa, Homo Sapiens
RKGKPCTVGFCDMN

SEQ ID NO: 92418 - protein, 14 aa, Homo Sapiens
KGKPCTVGFCDMNG

SEQ ID NO: 92419 - protein, 14 aa, Homo Sapiens
GKPCTVGFCDMNGK

SEQ ID NO: 92420 - protein, 14 aa, Homo Sapiens
KPCTVGFCDMNGKC

SEQ ID NO: 92421 - protein, 14 aa, Homo Sapiens
PCTVGFCDMNGKCE

SEQ ID NO: 92422 - protein, 14 aa, Homo Sapiens
CTVGFCDMNGKCEK

SEQ ID NO: 92423 - protein, 14 aa, Homo Sapiens
TVGFCDMNGKCEKR

SEQ ID NO: 92424 - protein, 14 aa, Homo Sapiens
VGFCDMNGKCEKRV

SEQ ID NO: 92425 - protein, 14 aa, Homo Sapiens
GFCDMNGKCEKRVQ

SEQ ID NO: 92426 - protein, 14 aa, Homo Sapiens
FCDMNGKCEKRVQD

SEQ ID NO: 92427 - protein, 14 aa, Homo Sapiens
CDMNGKCEKRVQDV

SEQ ID NO: 92428 - protein, 14 aa, Homo Sapiens
DMNGKCEKRVQDVI

SEQ ID NO: 92429 - protein, 14 aa, Homo Sapiens
MNGKCEKRVQDVIE

SEQ ID NO: 92430 - protein, 14 aa, Homo Sapiens
NGKCEKRVQDVIER

SEQ ID NO: 92431 - protein, 14 aa, Homo Sapiens
GKCEKRVQDVIERF

SEQ ID NO: 92432 - protein, 14 aa, Homo Sapiens
KCEKRVQDVIERFW

SEQ ID NO: 92433 - protein, 14 aa, Homo Sapiens
CEKRVQDVIERFWD

SEQ ID NO: 92434 - protein, 14 aa, Homo Sapiens
EKRVQDVIERFWDF

SEQ ID NO: 92435 - protein, 14 aa, Homo Sapiens
KRVQDVIERFWDFI

SEQ ID NO: 92436 - protein, 14 aa, Homo Sapiens
RVQDVIERFWDFID

SEQ ID NO: 92437 - protein, 14 aa, Homo Sapiens
VQDVIERFWDFIDQ

SEQ ID NO: 92438 - protein, 14 aa, Homo Sapiens
QDVIERFWDFIDQL

SEQ ID NO: 92439 - protein, 14 aa, Homo Sapiens
DVIERFWDFIDQLS

SEQ ID NO: 92440 - protein, 14 aa, Homo Sapiens
VIERFWDFIDQLSI

SEQ ID NO: 92441 - protein, 14 aa, Homo Sapiens
IERFWDFIDQLSIN

SEQ ID NO: 92442 - protein, 14 aa, Homo Sapiens
ERFWDFIDQLSINT

SEQ ID NO: 92443 - protein, 14 aa, Homo Sapiens
RFWDFIDQLSINTF

SEQ ID NO: 92444 - protein, 14 aa, Homo Sapiens
FWDFIDQLSINTFG

SEQ ID NO: 92445 - protein, 14 aa, Homo Sapiens
WDFIDQLSINTFGK

SEQ ID NO: 92446 - protein, 14 aa, Homo Sapiens
DFIDQLSINTFGKF

SEQ ID NO: 92447 - protein, 14 aa, Homo Sapiens
FIDQLSINTFGKFL

SEQ ID NO: 92448 - protein, 14 aa, Homo Sapiens
IDQLSINTFGKFLA

SEQ ID NO: 92449 - protein, 14 aa, Homo Sapiens
DQLSINTFGKFLAD

SEQ ID NO: 92450 - protein, 14 aa, Homo Sapiens
QLSINTFGKFLADN

SEQ ID NO: 92451 - protein, 14 aa, Homo Sapiens
LSINTFGKFLADNI

SEQ ID NO: 92452 - protein, 14 aa, Homo Sapiens
SINTFGKFLADNIV

SEQ ID NO: 92453 - protein, 14 aa, Homo Sapiens
INTFGKFLADNIVG

SEQ ID NO: 92454 - protein, 14 aa, Homo Sapiens
NTFGKFLADNIVGS

SEQ ID NO: 92455 - protein, 14 aa, Homo Sapiens
TFGKFLADNIVGSV

SEQ ID NO: 92456 - protein, 14 aa, Homo Sapiens
FGKFLADNIVGSVL

SEQ ID NO: 92457 - protein, 14 aa, Homo Sapiens
GKFLADNIVGSVLV

SEQ ID NO: 92458 - protein, 14 aa, Homo Sapiens
KFLADNIVGSVLVF

SEQ ID NO: 92459 - protein, 14 aa, Homo Sapiens
FLADNIVGSVLVFS

SEQ ID NO: 92460 - protein, 14 aa, Homo Sapiens
LADNIVGSVLVFSL

SEQ ID NO: 92461 - protein, 14 aa, Homo Sapiens
ADNIVGSVLVFSLI

SEQ ID NO: 92462 - protein, 14 aa, Homo Sapiens
DNIVGSVLVFSLIF

SEQ ID NO: 92463 - protein, 14 aa, Homo Sapiens
NIVGSVLVFSLIFW

SEQ ID NO: 92464 - protein, 14 aa, Homo Sapiens
IVGSVLVFSLIFWI

SEQ ID NO: 92465 - protein, 14 aa, Homo Sapiens
VGSVLVFSLIFWIP

SEQ ID NO: 92466 - protein, 14 aa, Homo Sapiens
GSVLVFSLIFWIPF

SEQ ID NO: 92467 - protein, 14 aa, Homo Sapiens
SVLVFSLIFWIPFS

SEQ ID NO: 92468 - protein, 14 aa, Homo Sapiens
VLVFSLIFWIPFSI

SEQ ID NO: 92469 - protein, 14 aa, Homo Sapiens
LVFSLIFWIPFSIL

SEQ ID NO: 92470 - protein, 14 aa, Homo Sapiens
VFSLIFWIPFSILV

SEQ ID NO: 92471 - protein, 14 aa, Homo Sapiens
FSLIFWIPFSILVH

SEQ ID NO: 92472 - protein, 14 aa, Homo Sapiens
SLIFWIPFSILVHC

SEQ ID NO: 92473 - protein, 14 aa, Homo Sapiens
LIFWIPFSILVHCV

SEQ ID NO: 92474 - protein, 14 aa, Homo Sapiens
IFWIPFSILVHCVD

SEQ ID NO: 92475 - protein, 14 aa, Homo Sapiens
FWIPFSILVHCVDK

SEQ ID NO: 92476 - protein, 14 aa, Homo Sapiens
WIPFSILVHCVDKK

SEQ ID NO: 92477 - protein, 14 aa, Homo Sapiens
IPFSILVHCVDKKL

SEQ ID NO: 92478 - protein, 14 aa, Homo Sapiens
PFSILVHCVDKKLD

SEQ ID NO: 92479 - protein, 14 aa, Homo Sapiens
FSILVHCVDKKLDK

SEQ ID NO: 92480 - protein, 14 aa, Homo Sapiens
SILVHCVDKKLDKQ

SEQ ID NO: 92481 - protein, 14 aa, Homo Sapiens
ILVHCVDKKLDKQY

SEQ ID NO: 92482 - protein, 14 aa, Homo Sapiens
LVHCVDKKLDKQYE

SEQ ID NO: 92483 - protein, 14 aa, Homo Sapiens
VHCVDKKLDKQYES

SEQ ID NO: 92484 - protein, 14 aa, Homo Sapiens
HCVDKKLDKQYESL

SEQ ID NO: 92485 - protein, 14 aa, Homo Sapiens
CVDKKLDKQYESLS

SEQ ID NO: 92486 - protein, 14 aa, Homo Sapiens
VDKKLDKQYESLSL

SEQ ID NO: 92487 - protein, 14 aa, Homo Sapiens
DKKLDKQYESLSLF

SEQ ID NO: 92488 - protein, 14 aa, Homo Sapiens
KKLDKQYESLSLFH

SEQ ID NO: 92489 - protein, 14 aa, Homo Sapiens
KLDKQYESLSLFHP

SEQ ID NO: 92490 - protein, 14 aa, Homo Sapiens
LDKQYESLSLFHPS

SEQ ID NO: 92491 - protein, 14 aa, Homo Sapiens
DKQYESLSLFHPSN

SEQ ID NO: 92492 - protein, 14 aa, Homo Sapiens
KQYESLSLFHPSNV

SEQ ID NO: 92493 - protein, 14 aa, Homo Sapiens
QYESLSLFHPSNVE

SEQ ID NO: 92494 - protein, 14 aa, Homo Sapiens
YESLSLFHPSNVEM

SEQ ID NO: 92495 - protein, 14 aa, Homo Sapiens
ESLSLFHPSNVEML

SEQ ID NO: 92496 - protein, 14 aa, Homo Sapiens
SLSLFHPSNVEMLS

SEQ ID NO: 92497 - protein, 14 aa, Homo Sapiens
LSLFHPSNVEMLSS

SEQ ID NO: 92498 - protein, 14 aa, Homo Sapiens
SLFHPSNVEMLSSM

SEQ ID NO: 92499 - protein, 14 aa, Homo Sapiens
LFHPSNVEMLSSMD

SEQ ID NO: 92500 - protein, 14 aa, Homo Sapiens
FHPSNVEMLSSMDS

SEQ ID NO: 92501 - protein, 14 aa, Homo Sapiens
HPSNVEMLSSMDSA

SEQ ID NO: 92502 - protein, 14 aa, Homo Sapiens
PSNVEMLSSMDSAS

SEQ ID NO: 92503 - protein, 14 aa, Homo Sapiens
SNVEMLSSMDSASV

SEQ ID NO: 92504 - protein, 14 aa, Homo Sapiens
NVEMLSSMDSASVR

SEQ ID NO: 92505 - protein, 14 aa, Homo Sapiens
VEMLSSMDSASVRI

SEQ ID NO: 92506 - protein, 14 aa, Homo Sapiens
EMLSSMDSASVRII

SEQ ID NO: 92507 - protein, 14 aa, Homo Sapiens
MLSSMDSASVRIIK

SEQ ID NO: 92508 - protein, 14 aa, Homo Sapiens
LSSMDSASVRIIKP

SEQ ID NO: 92509 - protein, 14 aa, Homo Sapiens
SSMDSASVRIIKPF

SEQ ID NO: 92510 - protein, 14 aa, Homo Sapiens
SMDSASVRIIKPFP

SEQ ID NO: 92511 - protein, 14 aa, Homo Sapiens
MDSASVRIIKPFPA

SEQ ID NO: 92512 - protein, 14 aa, Homo Sapiens
DSASVRIIKPFPAP

SEQ ID NO: 92513 - protein, 14 aa, Homo Sapiens
SASVRIIKPFPAPQ

SEQ ID NO: 92514 - protein, 14 aa, Homo Sapiens
ASVRIIKPFPAPQT

SEQ ID NO: 92515 - protein, 14 aa, Homo Sapiens
SVRIIKPFPAPQTP

SEQ ID NO: 92516 - protein, 14 aa, Homo Sapiens
VRIIKPFPAPQTPG

SEQ ID NO: 92517 - protein, 14 aa, Homo Sapiens
RIIKPFPAPQTPGR

SEQ ID NO: 92518 - protein, 14 aa, Homo Sapiens
IIKPFPAPQTPGRL

SEQ ID NO: 92519 - protein, 14 aa, Homo Sapiens
IKPFPAPQTPGRLQ

SEQ ID NO: 92520 - protein, 14 aa, Homo Sapiens
KPFPAPQTPGRLQP

SEQ ID NO: 92521 - protein, 14 aa, Homo Sapiens
PFPAPQTPGRLQPA

SEQ ID NO: 92522 - protein, 14 aa, Homo Sapiens
FPAPQTPGRLQPAP

SEQ ID NO: 92523 - protein, 14 aa, Homo Sapiens
PAPQTPGRLQPAPV

SEQ ID NO: 92524 - protein, 14 aa, Homo Sapiens
APQTPGRLQPAPVI

SEQ ID NO: 92525 - protein, 14 aa, Homo Sapiens
PQTPGRLQPAPVIP

SEQ ID NO: 92526 - protein, 14 aa, Homo Sapiens
QTPGRLQPAPVIPS

SEQ ID NO: 92527 - protein, 14 aa, Homo Sapiens
TPGRLQPAPVIPSA

SEQ ID NO: 92528 - protein, 14 aa, Homo Sapiens
PGRLQPAPVIPSAP

SEQ ID NO: 92529 - protein, 14 aa, Homo Sapiens
GRLQPAPVIPSAPA

SEQ ID NO: 92530 - protein, 14 aa, Homo Sapiens
RLQPAPVIPSAPAA

SEQ ID NO: 92531 - protein, 14 aa, Homo Sapiens
LQPAPVIPSAPAAP

SEQ ID NO: 92532 - protein, 14 aa, Homo Sapiens
QPAPVIPSAPAAPK

SEQ ID NO: 92533 - protein, 14 aa, Homo Sapiens
PAPVIPSAPAAPKL

SEQ ID NO: 92534 - protein, 14 aa, Homo Sapiens
APVIPSAPAAPKLD

SEQ ID NO: 92535 - protein, 14 aa, Homo Sapiens
PVIPSAPAAPKLDH

SEQ ID NO: 92536 - protein, 14 aa, Homo Sapiens
VIPSAPAAPKLDHQ

SEQ ID NO: 92537 - protein, 14 aa, Homo Sapiens
IPSAPAAPKLDHQR

SEQ ID NO: 92538 - protein, 14 aa, Homo Sapiens
PSAPAAPKLDHQRM

SEQ ID NO: 92539 - protein, 14 aa, Homo Sapiens
SAPAAPKLDHQRMD

SEQ ID NO: 92540 - protein, 14 aa, Homo Sapiens
APAAPKLDHQRMDT

SEQ ID NO: 92541 - protein, 14 aa, Homo Sapiens
PAAPKLDHQRMDTI

SEQ ID NO: 92542 - protein, 14 aa, Homo Sapiens
AAPKLDHQRMDTIQ

SEQ ID NO: 92543 - protein, 14 aa, Homo Sapiens
APKLDHQRMDTIQE

SEQ ID NO: 92544 - protein, 14 aa, Homo Sapiens
PKLDHQRMDTIQED

SEQ ID NO: 92545 - protein, 14 aa, Homo Sapiens
KLDHQRMDTIQEDP

SEQ ID NO: 92546 - protein, 14 aa, Homo Sapiens
LDHQRMDTIQEDPS

SEQ ID NO: 92547 - protein, 14 aa, Homo Sapiens
DHQRMDTIQEDPST

SEQ ID NO: 92548 - protein, 14 aa, Homo Sapiens
HQRMDTIQEDPSTD

SEQ ID NO: 92549 - protein, 14 aa, Homo Sapiens
QRMDTIQEDPSTDS

SEQ ID NO: 92550 - protein, 14 aa, Homo Sapiens
RMDTIQEDPSTDSH

SEQ ID NO: 92551 - protein, 14 aa, Homo Sapiens
MDTIQEDPSTDSHM

SEQ ID NO: 92552 - protein, 14 aa, Homo Sapiens
DTIQEDPSTDSHMD

SEQ ID NO: 92553 - protein, 14 aa, Homo Sapiens
TIQEDPSTDSHMDE

SEQ ID NO: 92554 - protein, 14 aa, Homo Sapiens
IQEDPSTDSHMDED

SEQ ID NO: 92555 - protein, 14 aa, Homo Sapiens
QEDPSTDSHMDEDG

SEQ ID NO: 92556 - protein, 14 aa, Homo Sapiens
EDPSTDSHMDEDGF

SEQ ID NO: 92557 - protein, 14 aa, Homo Sapiens
DPSTDSHMDEDGFE

SEQ ID NO: 92558 - protein, 14 aa, Homo Sapiens
PSTDSHMDEDGFEK

SEQ ID NO: 92559 - protein, 14 aa, Homo Sapiens
STDSHMDEDGFEKD

SEQ ID NO: 92560 - protein, 14 aa, Homo Sapiens
TDSHMDEDGFEKDP

SEQ ID NO: 92561 - protein, 14 aa, Homo Sapiens
DSHMDEDGFEKDPF

SEQ ID NO: 92562 - protein, 14 aa, Homo Sapiens
SHMDEDGFEKDPFP

SEQ ID NO: 92563 - protein, 14 aa, Homo Sapiens
HMDEDGFEKDPFPN

SEQ ID NO: 92564 - protein, 14 aa, Homo Sapiens
MDEDGFEKDPFPNS

SEQ ID NO: 92565 - protein, 14 aa, Homo Sapiens
DEDGFEKDPFPNSS

SEQ ID NO: 92566 - protein, 14 aa, Homo Sapiens
EDGFEKDPFPNSST

SEQ ID NO: 92567 - protein, 14 aa, Homo Sapiens
DGFEKDPFPNSSTA

SEQ ID NO: 92568 - protein, 14 aa, Homo Sapiens
GFEKDPFPNSSTAA

SEQ ID NO: 92569 - protein, 14 aa, Homo Sapiens
FEKDPFPNSSTAAK

SEQ ID NO: 92570 - protein, 14 aa, Homo Sapiens
EKDPFPNSSTAAKS

SEQ ID NO: 92571 - protein, 14 aa, Homo Sapiens
KDPFPNSSTAAKSF

SEQ ID NO: 92572 - protein, 14 aa, Homo Sapiens
DPFPNSSTAAKSFE

SEQ ID NO: 92573 - protein, 14 aa, Homo Sapiens
PFPNSSTAAKSFED

SEQ ID NO: 92574 - protein, 14 aa, Homo Sapiens
FPNSSTAAKSFEDL

SEQ ID NO: 92575 - protein, 14 aa, Homo Sapiens
PNSSTAAKSFEDLT

SEQ ID NO: 92576 - protein, 14 aa, Homo Sapiens
NSSTAAKSFEDLTD

SEQ ID NO: 92577 - protein, 14 aa, Homo Sapiens
SSTAAKSFEDLTDH

SEQ ID NO: 92578 - protein, 14 aa, Homo Sapiens
STAAKSFEDLTDHP

SEQ ID NO: 92579 - protein, 14 aa, Homo Sapiens
TAAKSFEDLTDHPV

SEQ ID NO: 92580 - protein, 14 aa, Homo Sapiens
AAKSFEDLTDHPVT

SEQ ID NO: 92581 - protein, 14 aa, Homo Sapiens
AKSFEDLTDHPVTR

SEQ ID NO: 92582 - protein, 14 aa, Homo Sapiens
KSFEDLTDHPVTRS

SEQ ID NO: 92583 - protein, 14 aa, Homo Sapiens
SFEDLTDHPVTRSE

SEQ ID NO: 92584 - protein, 14 aa, Homo Sapiens
FEDLTDHPVTRSEK

SEQ ID NO: 92585 - protein, 14 aa, Homo Sapiens
EDLTDHPVTRSEKA

SEQ ID NO: 92586 - protein, 14 aa, Homo Sapiens
DLTDHPVTRSEKAA

SEQ ID NO: 92587 - protein, 14 aa, Homo Sapiens
LTDHPVTRSEKAAS

SEQ ID NO: 92588 - protein, 14 aa, Homo Sapiens
TDHPVTRSEKAASF

SEQ ID NO: 92589 - protein, 14 aa, Homo Sapiens
DHPVTRSEKAASFK

SEQ ID NO: 92590 - protein, 14 aa, Homo Sapiens
HPVTRSEKAASFKL

SEQ ID NO: 92591 - protein, 14 aa, Homo Sapiens
PVTRSEKAASFKLQ

SEQ ID NO: 92592 - protein, 14 aa, Homo Sapiens
VTRSEKAASFKLQR

SEQ ID NO: 92593 - protein, 14 aa, Homo Sapiens
TRSEKAASFKLQRQ

SEQ ID NO: 92594 - protein, 14 aa, Homo Sapiens
RSEKAASFKLQRQN

SEQ ID NO: 92595 - protein, 14 aa, Homo Sapiens
SEKAASFKLQRQNR

SEQ ID NO: 92596 - protein, 14 aa, Homo Sapiens
EKAASFKLQRQNRV

SEQ ID NO: 92597 - protein, 14 aa, Homo Sapiens
KAASFKLQRQNRVD

SEQ ID NO: 92598 - protein, 14 aa, Homo Sapiens
AASFKLQRQNRVDS

SEQ ID NO: 92599 - protein, 14 aa, Homo Sapiens
ASFKLQRQNRVDSK

SEQ ID NO: 92600 - protein, 14 aa, Homo Sapiens
SFKLQRQNRVDSKE

SEQ ID NO: 92601 - protein, 14 aa, Homo Sapiens
FKLQRQNRVDSKET

SEQ ID NO: 92602 - protein, 14 aa, Homo Sapiens
KLQRQNRVDSKETE

SEQ ID NO: 92603 - protein, 14 aa, Homo Sapiens
LQRQNRVDSKETEC

SEQ ID NO: 92604 - protein, 15 aa, Homo Sapiens
MRQSLLFLTSVVPFV

SEQ ID NO: 92605 - protein, 15 aa, Homo Sapiens
RQSLLFLTSVVPFVL

SEQ ID NO: 92606 - protein, 15 aa, Homo Sapiens
QSLLFLTSVVPFVLA

SEQ ID NO: 92607 - protein, 15 aa, Homo Sapiens
SLLFLTSVVPFVLAP

SEQ ID NO: 92608 - protein, 15 aa, Homo Sapiens
LLFLTSVVPFVLAPR

SEQ ID NO: 92609 - protein, 15 aa, Homo Sapiens
LFLTSVVPFVLAPRP

SEQ ID NO: 92610 - protein, 15 aa, Homo Sapiens
FLTSVVPFVLAPRPP

SEQ ID NO: 92611 - protein, 15 aa, Homo Sapiens
LTSVVPFVLAPRPPD

SEQ ID NO: 92612 - protein, 15 aa, Homo Sapiens
TSVVPFVLAPRPPDD

SEQ ID NO: 92613 - protein, 15 aa, Homo Sapiens
SVVPFVLAPRPPDDP

SEQ ID NO: 92614 - protein, 15 aa, Homo Sapiens
VVPFVLAPRPPDDPG

SEQ ID NO: 92615 - protein, 15 aa, Homo Sapiens
VPFVLAPRPPDDPGF

SEQ ID NO: 92616 - protein, 15 aa, Homo Sapiens
PFVLAPRPPDDPGFG

SEQ ID NO: 92617 - protein, 15 aa, Homo Sapiens
FVLAPRPPDDPGFGP

SEQ ID NO: 92618 - protein, 15 aa, Homo Sapiens
VLAPRPPDDPGFGPH

SEQ ID NO: 92619 - protein, 15 aa, Homo Sapiens
LAPRPPDDPGFGPHQ

SEQ ID NO: 92620 - protein, 15 aa, Homo Sapiens
APRPPDDPGFGPHQR

SEQ ID NO: 92621 - protein, 15 aa, Homo Sapiens
PRPPDDPGFGPHQRL

SEQ ID NO: 92622 - protein, 15 aa, Homo Sapiens
RPPDDPGFGPHQRLE

SEQ ID NO: 92623 - protein, 15 aa, Homo Sapiens
PPDDPGFGPHQRLEK

SEQ ID NO: 92624 - protein, 15 aa, Homo Sapiens
PDDPGFGPHQRLEKL

SEQ ID NO: 92625 - protein, 15 aa, Homo Sapiens
DDPGFGPHQRLEKLD

SEQ ID NO: 92626 - protein, 15 aa, Homo Sapiens
DPGFGPHQRLEKLDS

SEQ ID NO: 92627 - protein, 15 aa, Homo Sapiens
PGFGPHQRLEKLDSL

SEQ ID NO: 92628 - protein, 15 aa, Homo Sapiens
GFGPHQRLEKLDSLL

SEQ ID NO: 92629 - protein, 15 aa, Homo Sapiens
FGPHQRLEKLDSLLS

SEQ ID NO: 92630 - protein, 15 aa, Homo Sapiens
GPHQRLEKLDSLLSD

SEQ ID NO: 92631 - protein, 15 aa, Homo Sapiens
PHQRLEKLDSLLSDY

SEQ ID NO: 92632 - protein, 15 aa, Homo Sapiens
HQRLEKLDSLLSDYD

SEQ ID NO: 92633 - protein, 15 aa, Homo Sapiens
QRLEKLDSLLSDYDI

SEQ ID NO: 92634 - protein, 15 aa, Homo Sapiens
RLEKLDSLLSDYDIL

SEQ ID NO: 92635 - protein, 15 aa, Homo Sapiens
LEKLDSLLSDYDILS

SEQ ID NO: 92636 - protein, 15 aa, Homo Sapiens
EKLDSLLSDYDILSL

SEQ ID NO: 92637 - protein, 15 aa, Homo Sapiens
KLDSLLSDYDILSLS

SEQ ID NO: 92638 - protein, 15 aa, Homo Sapiens
LDSLLSDYDILSLSN

SEQ ID NO: 92639 - protein, 15 aa, Homo Sapiens
DSLLSDYDILSLSNI

SEQ ID NO: 92640 - protein, 15 aa, Homo Sapiens
SLLSDYDILSLSNIQ

SEQ ID NO: 92641 - protein, 15 aa, Homo Sapiens
LLSDYDILSLSNIQQ

SEQ ID NO: 92642 - protein, 15 aa, Homo Sapiens
LSDYDILSLSNIQQH

SEQ ID NO: 92643 - protein, 15 aa, Homo Sapiens
SDYDILSLSNIQQHS

SEQ ID NO: 92644 - protein, 15 aa, Homo Sapiens
DYDILSLSNIQQHSV

SEQ ID NO: 92645 - protein, 15 aa, Homo Sapiens
YDILSLSNIQQHSVR

SEQ ID NO: 92646 - protein, 15 aa, Homo Sapiens
DILSLSNIQQHSVRK

SEQ ID NO: 92647 - protein, 15 aa, Homo Sapiens
ILSLSNIQQHSVRKR

SEQ ID NO: 92648 - protein, 15 aa, Homo Sapiens
LSLSNIQQHSVRKRD

SEQ ID NO: 92649 - protein, 15 aa, Homo Sapiens
SLSNIQQHSVRKRDL

SEQ ID NO: 92650 - protein, 15 aa, Homo Sapiens
LSNIQQHSVRKRDLQ

SEQ ID NO: 92651 - protein, 15 aa, Homo Sapiens
SNIQQHSVRKRDLQT

SEQ ID NO: 92652 - protein, 15 aa, Homo Sapiens
NIQQHSVRKRDLQTS

SEQ ID NO: 92653 - protein, 15 aa, Homo Sapiens
IQQHSVRKRDLQTST

SEQ ID NO: 92654 - protein, 15 aa, Homo Sapiens
QQHSVRKRDLQTSTH

SEQ ID NO: 92655 - protein, 15 aa, Homo Sapiens
QHSVRKRDLQTSTHV

SEQ ID NO: 92656 - protein, 15 aa, Homo Sapiens
HSVRKRDLQTSTHVE

SEQ ID NO: 92657 - protein, 15 aa, Homo Sapiens
SVRKRDLQTSTHVET

SEQ ID NO: 92658 - protein, 15 aa, Homo Sapiens
VRKRDLQTSTHVETL

SEQ ID NO: 92659 - protein, 15 aa, Homo Sapiens
RKRDLQTSTHVETLL

SEQ ID NO: 92660 - protein, 15 aa, Homo Sapiens
KRDLQTSTHVETLLT

SEQ ID NO: 92661 - protein, 15 aa, Homo Sapiens
RDLQTSTHVETLLTF

SEQ ID NO: 92662 - protein, 15 aa, Homo Sapiens
DLQTSTHVETLLTFS

SEQ ID NO: 92663 - protein, 15 aa, Homo Sapiens
LQTSTHVETLLTFSA

SEQ ID NO: 92664 - protein, 15 aa, Homo Sapiens
QTSTHVETLLTFSAL

SEQ ID NO: 92665 - protein, 15 aa, Homo Sapiens
TSTHVETLLTFSALK

SEQ ID NO: 92666 - protein, 15 aa, Homo Sapiens
STHVETLLTFSALKR

SEQ ID NO: 92667 - protein, 15 aa, Homo Sapiens
THVETLLTFSALKRH

SEQ ID NO: 92668 - protein, 15 aa, Homo Sapiens
HVETLLTFSALKRHF

SEQ ID NO: 92669 - protein, 15 aa, Homo Sapiens
VETLLTFSALKRHFK

SEQ ID NO: 92670 - protein, 15 aa, Homo Sapiens
ETLLTFSALKRHFKL

SEQ ID NO: 92671 - protein, 15 aa, Homo Sapiens
TLLTFSALKRHFKLY

SEQ ID NO: 92672 - protein, 15 aa, Homo Sapiens
LLTFSALKRHFKLYL

SEQ ID NO: 92673 - protein, 15 aa, Homo Sapiens
LTFSALKRHFKLYLT

SEQ ID NO: 92674 - protein, 15 aa, Homo Sapiens
TFSALKRHFKLYLTS

SEQ ID NO: 92675 - protein, 15 aa, Homo Sapiens
FSALKRHFKLYLTSS

SEQ ID NO: 92676 - protein, 15 aa, Homo Sapiens
SALKRHFKLYLTSST

SEQ ID NO: 92677 - protein, 15 aa, Homo Sapiens
ALKRHFKLYLTSSTE

SEQ ID NO: 92678 - protein, 15 aa, Homo Sapiens
LKRHFKLYLTSSTER

SEQ ID NO: 92679 - protein, 15 aa, Homo Sapiens
KRHFKLYLTSSTERF

SEQ ID NO: 92680 - protein, 15 aa, Homo Sapiens
RHFKLYLTSSTERFS

SEQ ID NO: 92681 - protein, 15 aa, Homo Sapiens
HFKLYLTSSTERFSQ

SEQ ID NO: 92682 - protein, 15 aa, Homo Sapiens
FKLYLTSSTERFSQN

SEQ ID NO: 92683 - protein, 15 aa, Homo Sapiens
KLYLTSSTERFSQNF

SEQ ID NO: 92684 - protein, 15 aa, Homo Sapiens
LYLTSSTERFSQNFK

SEQ ID NO: 92685 - protein, 15 aa, Homo Sapiens
YLTSSTERFSQNFKV

SEQ ID NO: 92686 - protein, 15 aa, Homo Sapiens
LTSSTERFSQNFKVV

SEQ ID NO: 92687 - protein, 15 aa, Homo Sapiens
TSSTERFSQNFKVVV

SEQ ID NO: 92688 - protein, 15 aa, Homo Sapiens
SSTERFSQNFKVVVV

SEQ ID NO: 92689 - protein, 15 aa, Homo Sapiens
STERFSQNFKVVVVD

SEQ ID NO: 92690 - protein, 15 aa, Homo Sapiens
TERFSQNFKVVVVDG

SEQ ID NO: 92691 - protein, 15 aa, Homo Sapiens
ERFSQNFKVVVVDGK

SEQ ID NO: 92692 - protein, 15 aa, Homo Sapiens
RFSQNFKVVVVDGKN

SEQ ID NO: 92693 - protein, 15 aa, Homo Sapiens
FSQNFKVVVVDGKNE

SEQ ID NO: 92694 - protein, 15 aa, Homo Sapiens
SQNFKVVVVDGKNES

SEQ ID NO: 92695 - protein, 15 aa, Homo Sapiens
QNFKVVVVDGKNESE

SEQ ID NO: 92696 - protein, 15 aa, Homo Sapiens
NFKVVVVDGKNESEY

SEQ ID NO: 92697 - protein, 15 aa, Homo Sapiens
FKVVVVDGKNESEYT

SEQ ID NO: 92698 - protein, 15 aa, Homo Sapiens
KVVVVDGKNESEYTV

SEQ ID NO: 92699 - protein, 15 aa, Homo Sapiens
VVVVDGKNESEYTVK

SEQ ID NO: 92700 - protein, 15 aa, Homo Sapiens
VVVDGKNESEYTVKW

SEQ ID NO: 92701 - protein, 15 aa, Homo Sapiens
VVDGKNESEYTVKWQ

SEQ ID NO: 92702 - protein, 15 aa, Homo Sapiens
VDGKNESEYTVKWQD

SEQ ID NO: 92703 - protein, 15 aa, Homo Sapiens
DGKNESEYTVKWQDF

SEQ ID NO: 92704 - protein, 15 aa, Homo Sapiens
GKNESEYTVKWQDFF

SEQ ID NO: 92705 - protein, 15 aa, Homo Sapiens
KNESEYTVKWQDFFT

SEQ ID NO: 92706 - protein, 15 aa, Homo Sapiens
NESEYTVKWQDFFTG

SEQ ID NO: 92707 - protein, 15 aa, Homo Sapiens
ESEYTVKWQDFFTGH

SEQ ID NO: 92708 - protein, 15 aa, Homo Sapiens
SEYTVKWQDFFTGHV

SEQ ID NO: 92709 - protein, 15 aa, Homo Sapiens
EYTVKWQDFFTGHVV

SEQ ID NO: 92710 - protein, 15 aa, Homo Sapiens
YTVKWQDFFTGHVVG

SEQ ID NO: 92711 - protein, 15 aa, Homo Sapiens
TVKWQDFFTGHVVGE

SEQ ID NO: 92712 - protein, 15 aa, Homo Sapiens
VKWQDFFTGHVVGEP

SEQ ID NO: 92713 - protein, 15 aa, Homo Sapiens
KWQDFFTGHVVGEPD

SEQ ID NO: 92714 - protein, 15 aa, Homo Sapiens
WQDFFTGHVVGEPDS

SEQ ID NO: 92715 - protein, 15 aa, Homo Sapiens
QDFFTGHVVGEPDSR

SEQ ID NO: 92716 - protein, 15 aa, Homo Sapiens
DFFTGHVVGEPDSRV

SEQ ID NO: 92717 - protein, 15 aa, Homo Sapiens
FFTGHVVGEPDSRVL

SEQ ID NO: 92718 - protein, 15 aa, Homo Sapiens
FTGHVVGEPDSRVLA

SEQ ID NO: 92719 - protein, 15 aa, Homo Sapiens
TGHVVGEPDSRVLAH

SEQ ID NO: 92720 - protein, 15 aa, Homo Sapiens
GHVVGEPDSRVLAHI

SEQ ID NO: 92721 - protein, 15 aa, Homo Sapiens
HVVGEPDSRVLAHIR

SEQ ID NO: 92722 - protein, 15 aa, Homo Sapiens
VVGEPDSRVLAHIRD

SEQ ID NO: 92723 - protein, 15 aa, Homo Sapiens
VGEPDSRVLAHIRDD

SEQ ID NO: 92724 - protein, 15 aa, Homo Sapiens
GEPDSRVLAHIRDDD

SEQ ID NO: 92725 - protein, 15 aa, Homo Sapiens
EPDSRVLAHIRDDDV

SEQ ID NO: 92726 - protein, 15 aa, Homo Sapiens
PDSRVLAHIRDDDVI

SEQ ID NO: 92727 - protein, 15 aa, Homo Sapiens
DSRVLAHIRDDDVII

SEQ ID NO: 92728 - protein, 15 aa, Homo Sapiens
SRVLAHIRDDDVIIR

SEQ ID NO: 92729 - protein, 15 aa, Homo Sapiens
RVLAHIRDDDVIIRI

SEQ ID NO: 92730 - protein, 15 aa, Homo Sapiens
VLAHIRDDDVIIRIN

SEQ ID NO: 92731 - protein, 15 aa, Homo Sapiens
LAHIRDDDVIIRINT

SEQ ID NO: 92732 - protein, 15 aa, Homo Sapiens
AHIRDDDVIIRINTD

SEQ ID NO: 92733 - protein, 15 aa, Homo Sapiens
HIRDDDVIIRINTDG

SEQ ID NO: 92734 - protein, 15 aa, Homo Sapiens
IRDDDVIIRINTDGA

SEQ ID NO: 92735 - protein, 15 aa, Homo Sapiens
RDDDVIIRINTDGAE

SEQ ID NO: 92736 - protein, 15 aa, Homo Sapiens
DDDVIIRINTDGAEY

SEQ ID NO: 92737 - protein, 15 aa, Homo Sapiens
DDVIIRINTDGAEYN

SEQ ID NO: 92738 - protein, 15 aa, Homo Sapiens
DVIIRINTDGAEYNI

SEQ ID NO: 92739 - protein, 15 aa, Homo Sapiens
VIIRINTDGAEYNIE

SEQ ID NO: 92740 - protein, 15 aa, Homo Sapiens
IIRINTDGAEYNIEP

SEQ ID NO: 92741 - protein, 15 aa, Homo Sapiens
IRINTDGAEYNIEPL

SEQ ID NO: 92742 - protein, 15 aa, Homo Sapiens
RINTDGAEYNIEPLW

SEQ ID NO: 92743 - protein, 15 aa, Homo Sapiens
INTDGAEYNIEPLWR

SEQ ID NO: 92744 - protein, 15 aa, Homo Sapiens
NTDGAEYNIEPLWRF

SEQ ID NO: 92745 - protein, 15 aa, Homo Sapiens
TDGAEYNIEPLWRFV

SEQ ID NO: 92746 - protein, 15 aa, Homo Sapiens
DGAEYNIEPLWRFVN

SEQ ID NO: 92747 - protein, 15 aa, Homo Sapiens
GAEYNIEPLWRFVND

SEQ ID NO: 92748 - protein, 15 aa, Homo Sapiens
AEYNIEPLWRFVNDT

SEQ ID NO: 92749 - protein, 15 aa, Homo Sapiens
EYNIEPLWRFVNDTK

SEQ ID NO: 92750 - protein, 15 aa, Homo Sapiens
YNIEPLWRFVNDTKD

SEQ ID NO: 92751 - protein, 15 aa, Homo Sapiens
NIEPLWRFVNDTKDK

SEQ ID NO: 92752 - protein, 15 aa, Homo Sapiens
IEPLWRFVNDTKDKR

SEQ ID NO: 92753 - protein, 15 aa, Homo Sapiens
EPLWRFVNDTKDKRM

SEQ ID NO: 92754 - protein, 15 aa, Homo Sapiens
PLWRFVNDTKDKRML

SEQ ID NO: 92755 - protein, 15 aa, Homo Sapiens
LWRFVNDTKDKRMLV

SEQ ID NO: 92756 - protein, 15 aa, Homo Sapiens
WRFVNDTKDKRMLVY

SEQ ID NO: 92757 - protein, 15 aa, Homo Sapiens
RFVNDTKDKRMLVYK

SEQ ID NO: 92758 - protein, 15 aa, Homo Sapiens
FVNDTKDKRMLVYKS

SEQ ID NO: 92759 - protein, 15 aa, Homo Sapiens
VNDTKDKRMLVYKSE

SEQ ID NO: 92760 - protein, 15 aa, Homo Sapiens
NDTKDKRMLVYKSED

SEQ ID NO: 92761 - protein, 15 aa, Homo Sapiens
DTKDKRMLVYKSEDI

SEQ ID NO: 92762 - protein, 15 aa, Homo Sapiens
TKDKRMLVYKSEDIK

SEQ ID NO: 92763 - protein, 15 aa, Homo Sapiens
KDKRMLVYKSEDIKN

SEQ ID NO: 92764 - protein, 15 aa, Homo Sapiens
DKRMLVYKSEDIKNV

SEQ ID NO: 92765 - protein, 15 aa, Homo Sapiens
KRMLVYKSEDIKNVS

SEQ ID NO: 92766 - protein, 15 aa, Homo Sapiens
RMLVYKSEDIKNVSR

SEQ ID NO: 92767 - protein, 15 aa, Homo Sapiens
MLVYKSEDIKNVSRL

SEQ ID NO: 92768 - protein, 15 aa, Homo Sapiens
LVYKSEDIKNVSRLQ

SEQ ID NO: 92769 - protein, 15 aa, Homo Sapiens
VYKSEDIKNVSRLQS

SEQ ID NO: 92770 - protein, 15 aa, Homo Sapiens
YKSEDIKNVSRLQSP

SEQ ID NO: 92771 - protein, 15 aa, Homo Sapiens
KSEDIKNVSRLQSPK

SEQ ID NO: 92772 - protein, 15 aa, Homo Sapiens
SEDIKNVSRLQSPKV

SEQ ID NO: 92773 - protein, 15 aa, Homo Sapiens
EDIKNVSRLQSPKVC

SEQ ID NO: 92774 - protein, 15 aa, Homo Sapiens
DIKNVSRLQSPKVCG

SEQ ID NO: 92775 - protein, 15 aa, Homo Sapiens
IKNVSRLQSPKVCGY

SEQ ID NO: 92776 - protein, 15 aa, Homo Sapiens
KNVSRLQSPKVCGYL

SEQ ID NO: 92777 - protein, 15 aa, Homo Sapiens
NVSRLQSPKVCGYLK

SEQ ID NO: 92778 - protein, 15 aa, Homo Sapiens
VSRLQSPKVCGYLKV

SEQ ID NO: 92779 - protein, 15 aa, Homo Sapiens
SRLQSPKVCGYLKVD

SEQ ID NO: 92780 - protein, 15 aa, Homo Sapiens
RLQSPKVCGYLKVDN

SEQ ID NO: 92781 - protein, 15 aa, Homo Sapiens
LQSPKVCGYLKVDNE

SEQ ID NO: 92782 - protein, 15 aa, Homo Sapiens
QSPKVCGYLKVDNEE

SEQ ID NO: 92783 - protein, 15 aa, Homo Sapiens
SPKVCGYLKVDNEEL

SEQ ID NO: 92784 - protein, 15 aa, Homo Sapiens
PKVCGYLKVDNEELL

SEQ ID NO: 92785 - protein, 15 aa, Homo Sapiens
KVCGYLKVDNEELLP

SEQ ID NO: 92786 - protein, 15 aa, Homo Sapiens
VCGYLKVDNEELLPK

SEQ ID NO: 92787 - protein, 15 aa, Homo Sapiens
CGYLKVDNEELLPKG

SEQ ID NO: 92788 - protein, 15 aa, Homo Sapiens
GYLKVDNEELLPKGL

SEQ ID NO: 92789 - protein, 15 aa, Homo Sapiens
YLKVDNEELLPKGLV

SEQ ID NO: 92790 - protein, 15 aa, Homo Sapiens
LKVDNEELLPKGLVD

SEQ ID NO: 92791 - protein, 15 aa, Homo Sapiens
KVDNEELLPKGLVDR

SEQ ID NO: 92792 - protein, 15 aa, Homo Sapiens
VDNEELLPKGLVDRE

SEQ ID NO: 92793 - protein, 15 aa, Homo Sapiens
DNEELLPKGLVDREP

SEQ ID NO: 92794 - protein, 15 aa, Homo Sapiens
NEELLPKGLVDREPP

SEQ ID NO: 92795 - protein, 15 aa, Homo Sapiens
EELLPKGLVDREPPE

SEQ ID NO: 92796 - protein, 15 aa, Homo Sapiens
ELLPKGLVDREPPEE

SEQ ID NO: 92797 - protein, 15 aa, Homo Sapiens
LLPKGLVDREPPEEL

SEQ ID NO: 92798 - protein, 15 aa, Homo Sapiens
LPKGLVDREPPEELV

SEQ ID NO: 92799 - protein, 15 aa, Homo Sapiens
PKGLVDREPPEELVH

SEQ ID NO: 92800 - protein, 15 aa, Homo Sapiens
KGLVDREPPEELVHR

SEQ ID NO: 92801 - protein, 15 aa, Homo Sapiens
GLVDREPPEELVHRV

SEQ ID NO: 92802 - protein, 15 aa, Homo Sapiens
LVDREPPEELVHRVK

SEQ ID NO: 92803 - protein, 15 aa, Homo Sapiens
VDREPPEELVHRVKR

SEQ ID NO: 92804 - protein, 15 aa, Homo Sapiens
DREPPEELVHRVKRR

SEQ ID NO: 92805 - protein, 15 aa, Homo Sapiens
REPPEELVHRVKRRA

SEQ ID NO: 92806 - protein, 15 aa, Homo Sapiens
EPPEELVHRVKRRAD

SEQ ID NO: 92807 - protein, 15 aa, Homo Sapiens
PPEELVHRVKRRADP

SEQ ID NO: 92808 - protein, 15 aa, Homo Sapiens
PEELVHRVKRRADPD

SEQ ID NO: 92809 - protein, 15 aa, Homo Sapiens
EELVHRVKRRADPDP

SEQ ID NO: 92810 - protein, 15 aa, Homo Sapiens
ELVHRVKRRADPDPM

SEQ ID NO: 92811 - protein, 15 aa, Homo Sapiens
LVHRVKRRADPDPMK

SEQ ID NO: 92812 - protein, 15 aa, Homo Sapiens
VHRVKRRADPDPMKN

SEQ ID NO: 92813 - protein, 15 aa, Homo Sapiens
HRVKRRADPDPMKNT

SEQ ID NO: 92814 - protein, 15 aa, Homo Sapiens
RVKRRADPDPMKNTC

SEQ ID NO: 92815 - protein, 15 aa, Homo Sapiens
VKRRADPDPMKNTCK

SEQ ID NO: 92816 - protein, 15 aa, Homo Sapiens
KRRADPDPMKNTCKL

SEQ ID NO: 92817 - protein, 15 aa, Homo Sapiens
RRADPDPMKNTCKLL

SEQ ID NO: 92818 - protein, 15 aa, Homo Sapiens
RADPDPMKNTCKLLV

SEQ ID NO: 92819 - protein, 15 aa, Homo Sapiens
ADPDPMKNTCKLLVV

SEQ ID NO: 92820 - protein, 15 aa, Homo Sapiens
DPDPMKNTCKLLVVA

SEQ ID NO: 92821 - protein, 15 aa, Homo Sapiens
PDPMKNTCKLLVVAD

SEQ ID NO: 92822 - protein, 15 aa, Homo Sapiens
DPMKNTCKLLVVADH

SEQ ID NO: 92823 - protein, 15 aa, Homo Sapiens
PMKNTCKLLVVADHR

SEQ ID NO: 92824 - protein, 15 aa, Homo Sapiens
MKNTCKLLVVADHRF

SEQ ID NO: 92825 - protein, 15 aa, Homo Sapiens
KNTCKLLVVADHRFY

SEQ ID NO: 92826 - protein, 15 aa, Homo Sapiens
NTCKLLVVADHRFYR

SEQ ID NO: 92827 - protein, 15 aa, Homo Sapiens
TCKLLVVADHRFYRY

SEQ ID NO: 92828 - protein, 15 aa, Homo Sapiens
CKLLVVADHRFYRYM

SEQ ID NO: 92829 - protein, 15 aa, Homo Sapiens
KLLVVADHRFYRYMG

SEQ ID NO: 92830 - protein, 15 aa, Homo Sapiens
LLVVADHRFYRYMGR

SEQ ID NO: 92831 - protein, 15 aa, Homo Sapiens
LVVADHRFYRYMGRG

SEQ ID NO: 92832 - protein, 15 aa, Homo Sapiens
VVADHRFYRYMGRGE

SEQ ID NO: 92833 - protein, 15 aa, Homo Sapiens
VADHRFYRYMGRGEE

SEQ ID NO: 92834 - protein, 15 aa, Homo Sapiens
ADHRFYRYMGRGEES

SEQ ID NO: 92835 - protein, 15 aa, Homo Sapiens
DHRFYRYMGRGEEST

SEQ ID NO: 92836 - protein, 15 aa, Homo Sapiens
HRFYRYMGRGEESTT

SEQ ID NO: 92837 - protein, 15 aa, Homo Sapiens
RFYRYMGRGEESTTT

SEQ ID NO: 92838 - protein, 15 aa, Homo Sapiens
FYRYMGRGEESTTTN

SEQ ID NO: 92839 - protein, 15 aa, Homo Sapiens
YRYMGRGEESTTTNY

SEQ ID NO: 92840 - protein, 15 aa, Homo Sapiens
RYMGRGEESTTTNYL

SEQ ID NO: 92841 - protein, 15 aa, Homo Sapiens
YMGRGEESTTTNYLI

SEQ ID NO: 92842 - protein, 15 aa, Homo Sapiens
MGRGEESTTTNYLIE

SEQ ID NO: 92843 - protein, 15 aa, Homo Sapiens
GRGEESTTTNYLIEL

SEQ ID NO: 92844 - protein, 15 aa, Homo Sapiens
RGEESTTTNYLIELI

SEQ ID NO: 92845 - protein, 15 aa, Homo Sapiens
GEESTTTNYLIELID

SEQ ID NO: 92846 - protein, 15 aa, Homo Sapiens
EESTTTNYLIELIDR

SEQ ID NO: 92847 - protein, 15 aa, Homo Sapiens
ESTTTNYLIELIDRV

SEQ ID NO: 92848 - protein, 15 aa, Homo Sapiens
STTTNYLIELIDRVD

SEQ ID NO: 92849 - protein, 15 aa, Homo Sapiens
TTTNYLIELIDRVDD

SEQ ID NO: 92850 - protein, 15 aa, Homo Sapiens
TTNYLIELIDRVDDI

SEQ ID NO: 92851 - protein, 15 aa, Homo Sapiens
TNYLIELIDRVDDIY

SEQ ID NO: 92852 - protein, 15 aa, Homo Sapiens
NYLIELIDRVDDIYR

SEQ ID NO: 92853 - protein, 15 aa, Homo Sapiens
YLIELIDRVDDIYRN

SEQ ID NO: 92854 - protein, 15 aa, Homo Sapiens
LIELIDRVDDIYRNT

SEQ ID NO: 92855 - protein, 15 aa, Homo Sapiens
IELIDRVDDIYRNTS

SEQ ID NO: 92856 - protein, 15 aa, Homo Sapiens
ELIDRVDDIYRNTSW

SEQ ID NO: 92857 - protein, 15 aa, Homo Sapiens
LIDRVDDIYRNTSWD

SEQ ID NO: 92858 - protein, 15 aa, Homo Sapiens
IDRVDDIYRNTSWDN

SEQ ID NO: 92859 - protein, 15 aa, Homo Sapiens
DRVDDIYRNTSWDNA

SEQ ID NO: 92860 - protein, 15 aa, Homo Sapiens
RVDDIYRNTSWDNAG

SEQ ID NO: 92861 - protein, 15 aa, Homo Sapiens
VDDIYRNTSWDNAGF

SEQ ID NO: 92862 - protein, 15 aa, Homo Sapiens
DDIYRNTSWDNAGFK

SEQ ID NO: 92863 - protein, 15 aa, Homo Sapiens
DIYRNTSWDNAGFKG

SEQ ID NO: 92864 - protein, 15 aa, Homo Sapiens
IYRNTSWDNAGFKGY

SEQ ID NO: 92865 - protein, 15 aa, Homo Sapiens
YRNTSWDNAGFKGYG

SEQ ID NO: 92866 - protein, 15 aa, Homo Sapiens
RNTSWDNAGFKGYGI

SEQ ID NO: 92867 - protein, 15 aa, Homo Sapiens
NTSWDNAGFKGYGIQ

SEQ ID NO: 92868 - protein, 15 aa, Homo Sapiens
TSWDNAGFKGYGIQI

SEQ ID NO: 92869 - protein, 15 aa, Homo Sapiens
SWDNAGFKGYGIQIE

SEQ ID NO: 92870 - protein, 15 aa, Homo Sapiens
WDNAGFKGYGIQIEQ

SEQ ID NO: 92871 - protein, 15 aa, Homo Sapiens
DNAGFKGYGIQIEQI

SEQ ID NO: 92872 - protein, 15 aa, Homo Sapiens
NAGFKGYGIQIEQIR

SEQ ID NO: 92873 - protein, 15 aa, Homo Sapiens
AGFKGYGIQIEQIRI

SEQ ID NO: 92874 - protein, 15 aa, Homo Sapiens
GFKGYGIQIEQIRIL

SEQ ID NO: 92875 - protein, 15 aa, Homo Sapiens
FKGYGIQIEQIRILK

SEQ ID NO: 92876 - protein, 15 aa, Homo Sapiens
KGYGIQIEQIRILKS

SEQ ID NO: 92877 - protein, 15 aa, Homo Sapiens
GYGIQIEQIRILKSP

SEQ ID NO: 92878 - protein, 15 aa, Homo Sapiens
YGIQIEQIRILKSPQ

SEQ ID NO: 92879 - protein, 15 aa, Homo Sapiens
GIQIEQIRILKSPQE

SEQ ID NO: 92880 - protein, 15 aa, Homo Sapiens
IQIEQIRILKSPQEV

SEQ ID NO: 92881 - protein, 15 aa, Homo Sapiens
QIEQIRILKSPQEVK

SEQ ID NO: 92882 - protein, 15 aa, Homo Sapiens
IEQIRILKSPQEVKP

SEQ ID NO: 92883 - protein, 15 aa, Homo Sapiens
EQIRILKSPQEVKPG

SEQ ID NO: 92884 - protein, 15 aa, Homo Sapiens
QIRILKSPQEVKPGE

SEQ ID NO: 92885 - protein, 15 aa, Homo Sapiens
IRILKSPQEVKPGEK

SEQ ID NO: 92886 - protein, 15 aa, Homo Sapiens
RILKSPQEVKPGEKH

SEQ ID NO: 92887 - protein, 15 aa, Homo Sapiens
ILKSPQEVKPGEKHY

SEQ ID NO: 92888 - protein, 15 aa, Homo Sapiens
LKSPQEVKPGEKHYN

SEQ ID NO: 92889 - protein, 15 aa, Homo Sapiens
KSPQEVKPGEKHYNM

SEQ ID NO: 92890 - protein, 15 aa, Homo Sapiens
SPQEVKPGEKHYNMA

SEQ ID NO: 92891 - protein, 15 aa, Homo Sapiens
PQEVKPGEKHYNMAK

SEQ ID NO: 92892 - protein, 15 aa, Homo Sapiens
QEVKPGEKHYNMAKS

SEQ ID NO: 92893 - protein, 15 aa, Homo Sapiens
EVKPGEKHYNMAKSY

SEQ ID NO: 92894 - protein, 15 aa, Homo Sapiens
VKPGEKHYNMAKSYP

SEQ ID NO: 92895 - protein, 15 aa, Homo Sapiens
KPGEKHYNMAKSYPN

SEQ ID NO: 92896 - protein, 15 aa, Homo Sapiens
PGEKHYNMAKSYPNE

SEQ ID NO: 92897 - protein, 15 aa, Homo Sapiens
GEKHYNMAKSYPNEE

SEQ ID NO: 92898 - protein, 15 aa, Homo Sapiens
EKHYNMAKSYPNEEK

SEQ ID NO: 92899 - protein, 15 aa, Homo Sapiens
KHYNMAKSYPNEEKD

SEQ ID NO: 92900 - protein, 15 aa, Homo Sapiens
HYNMAKSYPNEEKDA

SEQ ID NO: 92901 - protein, 15 aa, Homo Sapiens
YNMAKSYPNEEKDAW

SEQ ID NO: 92902 - protein, 15 aa, Homo Sapiens
NMAKSYPNEEKDAWD

SEQ ID NO: 92903 - protein, 15 aa, Homo Sapiens
MAKSYPNEEKDAWDV

SEQ ID NO: 92904 - protein, 15 aa, Homo Sapiens
AKSYPNEEKDAWDVK

SEQ ID NO: 92905 - protein, 15 aa, Homo Sapiens
KSYPNEEKDAWDVKM

SEQ ID NO: 92906 - protein, 15 aa, Homo Sapiens
SYPNEEKDAWDVKML

SEQ ID NO: 92907 - protein, 15 aa, Homo Sapiens
YPNEEKDAWDVKMLL

SEQ ID NO: 92908 - protein, 15 aa, Homo Sapiens
PNEEKDAWDVKMLLE

SEQ ID NO: 92909 - protein, 15 aa, Homo Sapiens
NEEKDAWDVKMLLEQ

SEQ ID NO: 92910 - protein, 15 aa, Homo Sapiens
EEKDAWDVKMLLEQF

SEQ ID NO: 92911 - protein, 15 aa, Homo Sapiens
EKDAWDVKMLLEQFS

SEQ ID NO: 92912 - protein, 15 aa, Homo Sapiens
KDAWDVKMLLEQFSF

SEQ ID NO: 92913 - protein, 15 aa, Homo Sapiens
DAWDVKMLLEQFSFD

SEQ ID NO: 92914 - protein, 15 aa, Homo Sapiens
AWDVKMLLEQFSFDI

SEQ ID NO: 92915 - protein, 15 aa, Homo Sapiens
WDVKMLLEQFSFDIA

SEQ ID NO: 92916 - protein, 15 aa, Homo Sapiens
DVKMLLEQFSFDIAE

SEQ ID NO: 92917 - protein, 15 aa, Homo Sapiens
VKMLLEQFSFDIAEE

SEQ ID NO: 92918 - protein, 15 aa, Homo Sapiens
KMLLEQFSFDIAEEA

SEQ ID NO: 92919 - protein, 15 aa, Homo Sapiens
MLLEQFSFDIAEEAS

SEQ ID NO: 92920 - protein, 15 aa, Homo Sapiens
LLEQFSFDIAEEASK

SEQ ID NO: 92921 - protein, 15 aa, Homo Sapiens
LEQFSFDIAEEASKV

SEQ ID NO: 92922 - protein, 15 aa, Homo Sapiens
EQFSFDIAEEASKVC

SEQ ID NO: 92923 - protein, 15 aa, Homo Sapiens
QFSFDIAEEASKVCL

SEQ ID NO: 92924 - protein, 15 aa, Homo Sapiens
FSFDIAEEASKVCLA

SEQ ID NO: 92925 - protein, 15 aa, Homo Sapiens
SFDIAEEASKVCLAH

SEQ ID NO: 92926 - protein, 15 aa, Homo Sapiens
FDIAEEASKVCLAHL

SEQ ID NO: 92927 - protein, 15 aa, Homo Sapiens
DIAEEASKVCLAHLF

SEQ ID NO: 92928 - protein, 15 aa, Homo Sapiens
IAEEASKVCLAHLFT

SEQ ID NO: 92929 - protein, 15 aa, Homo Sapiens
AEEASKVCLAHLFTY

SEQ ID NO: 92930 - protein, 15 aa, Homo Sapiens
EEASKVCLAHLFTYQ

SEQ ID NO: 92931 - protein, 15 aa, Homo Sapiens
EASKVCLAHLFTYQD

SEQ ID NO: 92932 - protein, 15 aa, Homo Sapiens
ASKVCLAHLFTYQDF

SEQ ID NO: 92933 - protein, 15 aa, Homo Sapiens
SKVCLAHLFTYQDFD

SEQ ID NO: 92934 - protein, 15 aa, Homo Sapiens
KVCLAHLFTYQDFDM

SEQ ID NO: 92935 - protein, 15 aa, Homo Sapiens
VCLAHLFTYQDFDMG

SEQ ID NO: 92936 - protein, 15 aa, Homo Sapiens
CLAHLFTYQDFDMGT

SEQ ID NO: 92937 - protein, 15 aa, Homo Sapiens
LAHLFTYQDFDMGTL

SEQ ID NO: 92938 - protein, 15 aa, Homo Sapiens
AHLFTYQDFDMGTLG

SEQ ID NO: 92939 - protein, 15 aa, Homo Sapiens
HLFTYQDFDMGTLGL

SEQ ID NO: 92940 - protein, 15 aa, Homo Sapiens
LFTYQDFDMGTLGLA

SEQ ID NO: 92941 - protein, 15 aa, Homo Sapiens
FTYQDFDMGTLGLAY

SEQ ID NO: 92942 - protein, 15 aa, Homo Sapiens
TYQDFDMGTLGLAYV

SEQ ID NO: 92943 - protein, 15 aa, Homo Sapiens
YQDFDMGTLGLAYVG

SEQ ID NO: 92944 - protein, 15 aa, Homo Sapiens
QDFDMGTLGLAYVGS

SEQ ID NO: 92945 - protein, 15 aa, Homo Sapiens
DFDMGTLGLAYVGSP

SEQ ID NO: 92946 - protein, 15 aa, Homo Sapiens
FDMGTLGLAYVGSPR

SEQ ID NO: 92947 - protein, 15 aa, Homo Sapiens
DMGTLGLAYVGSPRA

SEQ ID NO: 92948 - protein, 15 aa, Homo Sapiens
MGTLGLAYVGSPRAN

SEQ ID NO: 92949 - protein, 15 aa, Homo Sapiens
GTLGLAYVGSPRANS

SEQ ID NO: 92950 - protein, 15 aa, Homo Sapiens
TLGLAYVGSPRANSH

SEQ ID NO: 92951 - protein, 15 aa, Homo Sapiens
LGLAYVGSPRANSHG

SEQ ID NO: 92952 - protein, 15 aa, Homo Sapiens
GLAYVGSPRANSHGG

SEQ ID NO: 92953 - protein, 15 aa, Homo Sapiens
LAYVGSPRANSHGGV

SEQ ID NO: 92954 - protein, 15 aa, Homo Sapiens
AYVGSPRANSHGGVC

SEQ ID NO: 92955 - protein, 15 aa, Homo Sapiens
YVGSPRANSHGGVCP

SEQ ID NO: 92956 - protein, 15 aa, Homo Sapiens
VGSPRANSHGGVCPK

SEQ ID NO: 92957 - protein, 15 aa, Homo Sapiens
GSPRANSHGGVCPKA

SEQ ID NO: 92958 - protein, 15 aa, Homo Sapiens
SPRANSHGGVCPKAY

SEQ ID NO: 92959 - protein, 15 aa, Homo Sapiens
PRANSHGGVCPKAYY

SEQ ID NO: 92960 - protein, 15 aa, Homo Sapiens
RANSHGGVCPKAYYS

SEQ ID NO: 92961 - protein, 15 aa, Homo Sapiens
ANSHGGVCPKAYYSP

SEQ ID NO: 92962 - protein, 15 aa, Homo Sapiens
NSHGGVCPKAYYSPV

SEQ ID NO: 92963 - protein, 15 aa, Homo Sapiens
SHGGVCPKAYYSPVG

SEQ ID NO: 92964 - protein, 15 aa, Homo Sapiens
HGGVCPKAYYSPVGK

SEQ ID NO: 92965 - protein, 15 aa, Homo Sapiens
GGVCPKAYYSPVGKK

SEQ ID NO: 92966 - protein, 15 aa, Homo Sapiens
GVCPKAYYSPVGKKN

SEQ ID NO: 92967 - protein, 15 aa, Homo Sapiens
VCPKAYYSPVGKKNI

SEQ ID NO: 92968 - protein, 15 aa, Homo Sapiens
CPKAYYSPVGKKNIY

SEQ ID NO: 92969 - protein, 15 aa, Homo Sapiens
PKAYYSPVGKKNIYL

SEQ ID NO: 92970 - protein, 15 aa, Homo Sapiens
KAYYSPVGKKNIYLN

SEQ ID NO: 92971 - protein, 15 aa, Homo Sapiens
AYYSPVGKKNIYLNS

SEQ ID NO: 92972 - protein, 15 aa, Homo Sapiens
YYSPVGKKNIYLNSG

SEQ ID NO: 92973 - protein, 15 aa, Homo Sapiens
YSPVGKKNIYLNSGL

SEQ ID NO: 92974 - protein, 15 aa, Homo Sapiens
SPVGKKNIYLNSGLT

SEQ ID NO: 92975 - protein, 15 aa, Homo Sapiens
PVGKKNIYLNSGLTS

SEQ ID NO: 92976 - protein, 15 aa, Homo Sapiens
VGKKNIYLNSGLTST

SEQ ID NO: 92977 - protein, 15 aa, Homo Sapiens
GKKNIYLNSGLTSTK

SEQ ID NO: 92978 - protein, 15 aa, Homo Sapiens
KKNIYLNSGLTSTKN

SEQ ID NO: 92979 - protein, 15 aa, Homo Sapiens
KNIYLNSGLTSTKNY

SEQ ID NO: 92980 - protein, 15 aa, Homo Sapiens
NIYLNSGLTSTKNYG

SEQ ID NO: 92981 - protein, 15 aa, Homo Sapiens
IYLNSGLTSTKNYGK

SEQ ID NO: 92982 - protein, 15 aa, Homo Sapiens
YLNSGLTSTKNYGKT

SEQ ID NO: 92983 - protein, 15 aa, Homo Sapiens
LNSGLTSTKNYGKTI

SEQ ID NO: 92984 - protein, 15 aa, Homo Sapiens
NSGLTSTKNYGKTIL

SEQ ID NO: 92985 - protein, 15 aa, Homo Sapiens
SGLTSTKNYGKTILT

SEQ ID NO: 92986 - protein, 15 aa, Homo Sapiens
GLTSTKNYGKTILTK

SEQ ID NO: 92987 - protein, 15 aa, Homo Sapiens
LTSTKNYGKTILTKE

SEQ ID NO: 92988 - protein, 15 aa, Homo Sapiens
TSTKNYGKTILTKEA

SEQ ID NO: 92989 - protein, 15 aa, Homo Sapiens
STKNYGKTILTKEAD

SEQ ID NO: 92990 - protein, 15 aa, Homo Sapiens
TKNYGKTILTKEADL

SEQ ID NO: 92991 - protein, 15 aa, Homo Sapiens
KNYGKTILTKEADLV

SEQ ID NO: 92992 - protein, 15 aa, Homo Sapiens
NYGKTILTKEADLVT

SEQ ID NO: 92993 - protein, 15 aa, Homo Sapiens
YGKTILTKEADLVTT

SEQ ID NO: 92994 - protein, 15 aa, Homo Sapiens
GKTILTKEADLVTTH

SEQ ID NO: 92995 - protein, 15 aa, Homo Sapiens
KTILTKEADLVTTHE

SEQ ID NO: 92996 - protein, 15 aa, Homo Sapiens
TILTKEADLVTTHEL

SEQ ID NO: 92997 - protein, 15 aa, Homo Sapiens
ILTKEADLVTTHELG

SEQ ID NO: 92998 - protein, 15 aa, Homo Sapiens
LTKEADLVTTHELGH

SEQ ID NO: 92999 - protein, 15 aa, Homo Sapiens
TKEADLVTTHELGHN

SEQ ID NO: 93000 - protein, 15 aa, Homo Sapiens
KEADLVTTHELGHNF

SEQ ID NO: 93001 - protein, 15 aa, Homo Sapiens
EADLVTTHELGHNFG

SEQ ID NO: 93002 - protein, 15 aa, Homo Sapiens
ADLVTTHELGHNFGA

SEQ ID NO: 93003 - protein, 15 aa, Homo Sapiens
DLVTTHELGHNFGAE

SEQ ID NO: 93004 - protein, 15 aa, Homo Sapiens
LVTTHELGHNFGAEH

SEQ ID NO: 93005 - protein, 15 aa, Homo Sapiens
VTTHELGHNFGAEHD

SEQ ID NO: 93006 - protein, 15 aa, Homo Sapiens
TTHELGHNFGAEHDP

SEQ ID NO: 93007 - protein, 15 aa, Homo Sapiens
THELGHNFGAEHDPD

SEQ ID NO: 93008 - protein, 15 aa, Homo Sapiens
HELGHNFGAEHDPDG

SEQ ID NO: 93009 - protein, 15 aa, Homo Sapiens
ELGHNFGAEHDPDGL

SEQ ID NO: 93010 - protein, 15 aa, Homo Sapiens
LGHNFGAEHDPDGLA

SEQ ID NO: 93011 - protein, 15 aa, Homo Sapiens
GHNFGAEHDPDGLAE

SEQ ID NO: 93012 - protein, 15 aa, Homo Sapiens
HNFGAEHDPDGLAEC

SEQ ID NO: 93013 - protein, 15 aa, Homo Sapiens
NFGAEHDPDGLAECA

SEQ ID NO: 93014 - protein, 15 aa, Homo Sapiens
FGAEHDPDGLAECAP

SEQ ID NO: 93015 - protein, 15 aa, Homo Sapiens
GAEHDPDGLAECAPN

SEQ ID NO: 93016 - protein, 15 aa, Homo Sapiens
AEHDPDGLAECAPNE

SEQ ID NO: 93017 - protein, 15 aa, Homo Sapiens
EHDPDGLAECAPNED

SEQ ID NO: 93018 - protein, 15 aa, Homo Sapiens
HDPDGLAECAPNEDQ

SEQ ID NO: 93019 - protein, 15 aa, Homo Sapiens
DPDGLAECAPNEDQG

SEQ ID NO: 93020 - protein, 15 aa, Homo Sapiens
PDGLAECAPNEDQGG

SEQ ID NO: 93021 - protein, 15 aa, Homo Sapiens
DGLAECAPNEDQGGK

SEQ ID NO: 93022 - protein, 15 aa, Homo Sapiens
GLAECAPNEDQGGKY

SEQ ID NO: 93023 - protein, 15 aa, Homo Sapiens
LAECAPNEDQGGKYV

SEQ ID NO: 93024 - protein, 15 aa, Homo Sapiens
AECAPNEDQGGKYVM

SEQ ID NO: 93025 - protein, 15 aa, Homo Sapiens
ECAPNEDQGGKYVMY

SEQ ID NO: 93026 - protein, 15 aa, Homo Sapiens
CAPNEDQGGKYVMYP

SEQ ID NO: 93027 - protein, 15 aa, Homo Sapiens
APNEDQGGKYVMYPI

SEQ ID NO: 93028 - protein, 15 aa, Homo Sapiens
PNEDQGGKYVMYPIA

SEQ ID NO: 93029 - protein, 15 aa, Homo Sapiens
NEDQGGKYVMYPIAV

SEQ ID NO: 93030 - protein, 15 aa, Homo Sapiens
EDQGGKYVMYPIAVS

SEQ ID NO: 93031 - protein, 15 aa, Homo Sapiens
DQGGKYVMYPIAVSG

SEQ ID NO: 93032 - protein, 15 aa, Homo Sapiens
QGGKYVMYPIAVSGD

SEQ ID NO: 93033 - protein, 15 aa, Homo Sapiens
GGKYVMYPIAVSGDH

SEQ ID NO: 93034 - protein, 15 aa, Homo Sapiens
GKYVMYPIAVSGDHE

SEQ ID NO: 93035 - protein, 15 aa, Homo Sapiens
KYVMYPIAVSGDHEN

SEQ ID NO: 93036 - protein, 15 aa, Homo Sapiens
YVMYPIAVSGDHENN

SEQ ID NO: 93037 - protein, 15 aa, Homo Sapiens
VMYPIAVSGDHENNK

SEQ ID NO: 93038 - protein, 15 aa, Homo Sapiens
MYPIAVSGDHENNKM

SEQ ID NO: 93039 - protein, 15 aa, Homo Sapiens
YPIAVSGDHENNKMF

SEQ ID NO: 93040 - protein, 15 aa, Homo Sapiens
PIAVSGDHENNKMFS

SEQ ID NO: 93041 - protein, 15 aa, Homo Sapiens
IAVSGDHENNKMFSN

SEQ ID NO: 93042 - protein, 15 aa, Homo Sapiens
AVSGDHENNKMFSNC

SEQ ID NO: 93043 - protein, 15 aa, Homo Sapiens
VSGDHENNKMFSNCS

SEQ ID NO: 93044 - protein, 15 aa, Homo Sapiens
SGDHENNKMFSNCSK

SEQ ID NO: 93045 - protein, 15 aa, Homo Sapiens
GDHENNKMFSNCSKQ

SEQ ID NO: 93046 - protein, 15 aa, Homo Sapiens
DHENNKMFSNCSKQS

SEQ ID NO: 93047 - protein, 15 aa, Homo Sapiens
HENNKMFSNCSKQSI

SEQ ID NO: 93048 - protein, 15 aa, Homo Sapiens
ENNKMFSNCSKQSIY

SEQ ID NO: 93049 - protein, 15 aa, Homo Sapiens
NNKMFSNCSKQSIYK

SEQ ID NO: 93050 - protein, 15 aa, Homo Sapiens
NKMFSNCSKQSIYKT

SEQ ID NO: 93051 - protein, 15 aa, Homo Sapiens
KMFSNCSKQSIYKTI

SEQ ID NO: 93052 - protein, 15 aa, Homo Sapiens
MFSNCSKQSIYKTIE

SEQ ID NO: 93053 - protein, 15 aa, Homo Sapiens
FSNCSKQSIYKTIES

SEQ ID NO: 93054 - protein, 15 aa, Homo Sapiens
SNCSKQSIYKTIESK

SEQ ID NO: 93055 - protein, 15 aa, Homo Sapiens
NCSKQSIYKTIESKA

SEQ ID NO: 93056 - protein, 15 aa, Homo Sapiens
CSKQSIYKTIESKAQ

SEQ ID NO: 93057 - protein, 15 aa, Homo Sapiens
SKQSIYKTIESKAQE

SEQ ID NO: 93058 - protein, 15 aa, Homo Sapiens
KQSIYKTIESKAQEC

SEQ ID NO: 93059 - protein, 15 aa, Homo Sapiens
QSIYKTIESKAQECF

SEQ ID NO: 93060 - protein, 15 aa, Homo Sapiens
SIYKTIESKAQECFQ

SEQ ID NO: 93061 - protein, 15 aa, Homo Sapiens
IYKTIESKAQECFQE

SEQ ID NO: 93062 - protein, 15 aa, Homo Sapiens
YKTIESKAQECFQER

SEQ ID NO: 93063 - protein, 15 aa, Homo Sapiens
KTIESKAQECFQERS

SEQ ID NO: 93064 - protein, 15 aa, Homo Sapiens
TIESKAQECFQERSN

SEQ ID NO: 93065 - protein, 15 aa, Homo Sapiens
IESKAQECFQERSNK

SEQ ID NO: 93066 - protein, 15 aa, Homo Sapiens
ESKAQECFQERSNKV

SEQ ID NO: 93067 - protein, 15 aa, Homo Sapiens
SKAQECFQERSNKVC

SEQ ID NO: 93068 - protein, 15 aa, Homo Sapiens
KAQECFQERSNKVCG

SEQ ID NO: 93069 - protein, 15 aa, Homo Sapiens
AQECFQERSNKVCGN

SEQ ID NO: 93070 - protein, 15 aa, Homo Sapiens
QECFQERSNKVCGNS

SEQ ID NO: 93071 - protein, 15 aa, Homo Sapiens
ECFQERSNKVCGNSR

SEQ ID NO: 93072 - protein, 15 aa, Homo Sapiens
CFQERSNKVCGNSRV

SEQ ID NO: 93073 - protein, 15 aa, Homo Sapiens
FQERSNKVCGNSRVD

SEQ ID NO: 93074 - protein, 15 aa, Homo Sapiens
QERSNKVCGNSRVDE

SEQ ID NO: 93075 - protein, 15 aa, Homo Sapiens
ERSNKVCGNSRVDEG

SEQ ID NO: 93076 - protein, 15 aa, Homo Sapiens
RSNKVCGNSRVDEGE

SEQ ID NO: 93077 - protein, 15 aa, Homo Sapiens
SNKVCGNSRVDEGEE

SEQ ID NO: 93078 - protein, 15 aa, Homo Sapiens
NKVCGNSRVDEGEEC

SEQ ID NO: 93079 - protein, 15 aa, Homo Sapiens
KVCGNSRVDEGEECD

SEQ ID NO: 93080 - protein, 15 aa, Homo Sapiens
VCGNSRVDEGEECDP

SEQ ID NO: 93081 - protein, 15 aa, Homo Sapiens
CGNSRVDEGEECDPG

SEQ ID NO: 93082 - protein, 15 aa, Homo Sapiens
GNSRVDEGEECDPGI

SEQ ID NO: 93083 - protein, 15 aa, Homo Sapiens
NSRVDEGEECDPGIM

SEQ ID NO: 93084 - protein, 15 aa, Homo Sapiens
SRVDEGEECDPGIMY

SEQ ID NO: 93085 - protein, 15 aa, Homo Sapiens
RVDEGEECDPGIMYL

SEQ ID NO: 93086 - protein, 15 aa, Homo Sapiens
VDEGEECDPGIMYLN

SEQ ID NO: 93087 - protein, 15 aa, Homo Sapiens
DEGEECDPGIMYLNN

SEQ ID NO: 93088 - protein, 15 aa, Homo Sapiens
EGEECDPGIMYLNND

SEQ ID NO: 93089 - protein, 15 aa, Homo Sapiens
GEECDPGIMYLNNDT

SEQ ID NO: 93090 - protein, 15 aa, Homo Sapiens
EECDPGIMYLNNDTC

SEQ ID NO: 93091 - protein, 15 aa, Homo Sapiens
ECDPGIMYLNNDTCC

SEQ ID NO: 93092 - protein, 15 aa, Homo Sapiens
CDPGIMYLNNDTCCN

SEQ ID NO: 93093 - protein, 15 aa, Homo Sapiens
DPGIMYLNNDTCCNS

SEQ ID NO: 93094 - protein, 15 aa, Homo Sapiens
PGIMYLNNDTCCNSD

SEQ ID NO: 93095 - protein, 15 aa, Homo Sapiens
GIMYLNNDTCCNSDC

SEQ ID NO: 93096 - protein, 15 aa, Homo Sapiens
IMYLNNDTCCNSDCT

SEQ ID NO: 93097 - protein, 15 aa, Homo Sapiens
MYLNNDTCCNSDCTL

SEQ ID NO: 93098 - protein, 15 aa, Homo Sapiens
YLNNDTCCNSDCTLK

SEQ ID NO: 93099 - protein, 15 aa, Homo Sapiens
LNNDTCCNSDCTLKE

SEQ ID NO: 93100 - protein, 15 aa, Homo Sapiens
NNDTCCNSDCTLKEG

SEQ ID NO: 93101 - protein, 15 aa, Homo Sapiens
NDTCCNSDCTLKEGV

SEQ ID NO: 93102 - protein, 15 aa, Homo Sapiens
DTCCNSDCTLKEGVQ

SEQ ID NO: 93103 - protein, 15 aa, Homo Sapiens
TCCNSDCTLKEGVQC

SEQ ID NO: 93104 - protein, 15 aa, Homo Sapiens
CCNSDCTLKEGVQCS

SEQ ID NO: 93105 - protein, 15 aa, Homo Sapiens
CNSDCTLKEGVQCSD

SEQ ID NO: 93106 - protein, 15 aa, Homo Sapiens
NSDCTLKEGVQCSDR

SEQ ID NO: 93107 - protein, 15 aa, Homo Sapiens
SDCTLKEGVQCSDRN

SEQ ID NO: 93108 - protein, 15 aa, Homo Sapiens
DCTLKEGVQCSDRNS

SEQ ID NO: 93109 - protein, 15 aa, Homo Sapiens
CTLKEGVQCSDRNSP

SEQ ID NO: 93110 - protein, 15 aa, Homo Sapiens
TLKEGVQCSDRNSPC

SEQ ID NO: 93111 - protein, 15 aa, Homo Sapiens
LKEGVQCSDRNSPCC

SEQ ID NO: 93112 - protein, 15 aa, Homo Sapiens
KEGVQCSDRNSPCCK

SEQ ID NO: 93113 - protein, 15 aa, Homo Sapiens
EGVQCSDRNSPCCKN

SEQ ID NO: 93114 - protein, 15 aa, Homo Sapiens
GVQCSDRNSPCCKNC

SEQ ID NO: 93115 - protein, 15 aa, Homo Sapiens
VQCSDRNSPCCKNCQ

SEQ ID NO: 93116 - protein, 15 aa, Homo Sapiens
QCSDRNSPCCKNCQF

SEQ ID NO: 93117 - protein, 15 aa, Homo Sapiens
CSDRNSPCCKNCQFE

SEQ ID NO: 93118 - protein, 15 aa, Homo Sapiens
SDRNSPCCKNCQFET

SEQ ID NO: 93119 - protein, 15 aa, Homo Sapiens
DRNSPCCKNCQFETA

SEQ ID NO: 93120 - protein, 15 aa, Homo Sapiens
RNSPCCKNCQFETAQ

SEQ ID NO: 93121 - protein, 15 aa, Homo Sapiens
NSPCCKNCQFETAQK

SEQ ID NO: 93122 - protein, 15 aa, Homo Sapiens
SPCCKNCQFETAQKK

SEQ ID NO: 93123 - protein, 15 aa, Homo Sapiens
PCCKNCQFETAQKKC

SEQ ID NO: 93124 - protein, 15 aa, Homo Sapiens
CCKNCQFETAQKKCQ

SEQ ID NO: 93125 - protein, 15 aa, Homo Sapiens
CKNCQFETAQKKCQE

SEQ ID NO: 93126 - protein, 15 aa, Homo Sapiens
KNCQFETAQKKCQEA

SEQ ID NO: 93127 - protein, 15 aa, Homo Sapiens
NCQFETAQKKCQEAI

SEQ ID NO: 93128 - protein, 15 aa, Homo Sapiens
CQFETAQKKCQEAIN

SEQ ID NO: 93129 - protein, 15 aa, Homo Sapiens
QFETAQKKCQEAINA

SEQ ID NO: 93130 - protein, 15 aa, Homo Sapiens
FETAQKKCQEAINAT

SEQ ID NO: 93131 - protein, 15 aa, Homo Sapiens
ETAQKKCQEAINATC

SEQ ID NO: 93132 - protein, 15 aa, Homo Sapiens
TAQKKCQEAINATCK

SEQ ID NO: 93133 - protein, 15 aa, Homo Sapiens
AQKKCQEAINATCKG

SEQ ID NO: 93134 - protein, 15 aa, Homo Sapiens
QKKCQEAINATCKGV

SEQ ID NO: 93135 - protein, 15 aa, Homo Sapiens
KKCQEAINATCKGVS

SEQ ID NO: 93136 - protein, 15 aa, Homo Sapiens
KCQEAINATCKGVSY

SEQ ID NO: 93137 - protein, 15 aa, Homo Sapiens
CQEAINATCKGVSYC

SEQ ID NO: 93138 - protein, 15 aa, Homo Sapiens
QEAINATCKGVSYCT

SEQ ID NO: 93139 - protein, 15 aa, Homo Sapiens
EAINATCKGVSYCTG

SEQ ID NO: 93140 - protein, 15 aa, Homo Sapiens
AINATCKGVSYCTGN

SEQ ID NO: 93141 - protein, 15 aa, Homo Sapiens
INATCKGVSYCTGNS

SEQ ID NO: 93142 - protein, 15 aa, Homo Sapiens
NATCKGVSYCTGNSS

SEQ ID NO: 93143 - protein, 15 aa, Homo Sapiens
ATCKGVSYCTGNSSE

SEQ ID NO: 93144 - protein, 15 aa, Homo Sapiens
TCKGVSYCTGNSSEC

SEQ ID NO: 93145 - protein, 15 aa, Homo Sapiens
CKGVSYCTGNSSECP

SEQ ID NO: 93146 - protein, 15 aa, Homo Sapiens
KGVSYCTGNSSECPP

SEQ ID NO: 93147 - protein, 15 aa, Homo Sapiens
GVSYCTGNSSECPPP

SEQ ID NO: 93148 - protein, 15 aa, Homo Sapiens
VSYCTGNSSECPPPG

SEQ ID NO: 93149 - protein, 15 aa, Homo Sapiens
SYCTGNSSECPPPGN

SEQ ID NO: 93150 - protein, 15 aa, Homo Sapiens
YCTGNSSECPPPGNA

SEQ ID NO: 93151 - protein, 15 aa, Homo Sapiens
CTGNSSECPPPGNAE

SEQ ID NO: 93152 - protein, 15 aa, Homo Sapiens
TGNSSECPPPGNAED

SEQ ID NO: 93153 - protein, 15 aa, Homo Sapiens
GNSSECPPPGNAEDD

SEQ ID NO: 93154 - protein, 15 aa, Homo Sapiens
NSSECPPPGNAEDDT

SEQ ID NO: 93155 - protein, 15 aa, Homo Sapiens
SSECPPPGNAEDDTV

SEQ ID NO: 93156 - protein, 15 aa, Homo Sapiens
SECPPPGNAEDDTVC

SEQ ID NO: 93157 - protein, 15 aa, Homo Sapiens
ECPPPGNAEDDTVCL

SEQ ID NO: 93158 - protein, 15 aa, Homo Sapiens
CPPPGNAEDDTVCLD

SEQ ID NO: 93159 - protein, 15 aa, Homo Sapiens
PPPGNAEDDTVCLDL

SEQ ID NO: 93160 - protein, 15 aa, Homo Sapiens
PPGNAEDDTVCLDLG

SEQ ID NO: 93161 - protein, 15 aa, Homo Sapiens
PGNAEDDTVCLDLGK

SEQ ID NO: 93162 - protein, 15 aa, Homo Sapiens
GNAEDDTVCLDLGKC

SEQ ID NO: 93163 - protein, 15 aa, Homo Sapiens
NAEDDTVCLDLGKCK

SEQ ID NO: 93164 - protein, 15 aa, Homo Sapiens
AEDDTVCLDLGKCKD

SEQ ID NO: 93165 - protein, 15 aa, Homo Sapiens
EDDTVCLDLGKCKDG

SEQ ID NO: 93166 - protein, 15 aa, Homo Sapiens
DDTVCLDLGKCKDGK

SEQ ID NO: 93167 - protein, 15 aa, Homo Sapiens
DTVCLDLGKCKDGKC

SEQ ID NO: 93168 - protein, 15 aa, Homo Sapiens
TVCLDLGKCKDGKCI

SEQ ID NO: 93169 - protein, 15 aa, Homo Sapiens
VCLDLGKCKDGKCIP

SEQ ID NO: 93170 - protein, 15 aa, Homo Sapiens
CLDLGKCKDGKCIPF

SEQ ID NO: 93171 - protein, 15 aa, Homo Sapiens
LDLGKCKDGKCIPFC

SEQ ID NO: 93172 - protein, 15 aa, Homo Sapiens
DLGKCKDGKCIPFCE

SEQ ID NO: 93173 - protein, 15 aa, Homo Sapiens
LGKCKDGKCIPFCER

SEQ ID NO: 93174 - protein, 15 aa, Homo Sapiens
GKCKDGKCIPFCERE

SEQ ID NO: 93175 - protein, 15 aa, Homo Sapiens
KCKDGKCIPFCEREQ

SEQ ID NO: 93176 - protein, 15 aa, Homo Sapiens
CKDGKCIPFCEREQQ

SEQ ID NO: 93177 - protein, 15 aa, Homo Sapiens
KDGKCIPFCEREQQL

SEQ ID NO: 93178 - protein, 15 aa, Homo Sapiens
DGKCIPFCEREQQLE

SEQ ID NO: 93179 - protein, 15 aa, Homo Sapiens
GKCIPFCEREQQLES

SEQ ID NO: 93180 - protein, 15 aa, Homo Sapiens
KCIPFCEREQQLESC

SEQ ID NO: 93181 - protein, 15 aa, Homo Sapiens
CIPFCEREQQLESCA

SEQ ID NO: 93182 - protein, 15 aa, Homo Sapiens
IPFCEREQQLESCAC

SEQ ID NO: 93183 - protein, 15 aa, Homo Sapiens
PFCEREQQLESCACN

SEQ ID NO: 93184 - protein, 15 aa, Homo Sapiens
FCEREQQLESCACNE

SEQ ID NO: 93185 - protein, 15 aa, Homo Sapiens
CEREQQLESCACNET

SEQ ID NO: 93186 - protein, 15 aa, Homo Sapiens
EREQQLESCACNETD

SEQ ID NO: 93187 - protein, 15 aa, Homo Sapiens
REQQLESCACNETDN

SEQ ID NO: 93188 - protein, 15 aa, Homo Sapiens
EQQLESCACNETDNS

SEQ ID NO: 93189 - protein, 15 aa, Homo Sapiens
QQLESCACNETDNSC

SEQ ID NO: 93190 - protein, 15 aa, Homo Sapiens
QLESCACNETDNSCK

SEQ ID NO: 93191 - protein, 15 aa, Homo Sapiens
LESCACNETDNSCKV

SEQ ID NO: 93192 - protein, 15 aa, Homo Sapiens
ESCACNETDNSCKVC

SEQ ID NO: 93193 - protein, 15 aa, Homo Sapiens
SCACNETDNSCKVCC

SEQ ID NO: 93194 - protein, 15 aa, Homo Sapiens
CACNETDNSCKVCCR

SEQ ID NO: 93195 - protein, 15 aa, Homo Sapiens
ACNETDNSCKVCCRD

SEQ ID NO: 93196 - protein, 15 aa, Homo Sapiens
CNETDNSCKVCCRDL

SEQ ID NO: 93197 - protein, 15 aa, Homo Sapiens
NETDNSCKVCCRDLS

SEQ ID NO: 93198 - protein, 15 aa, Homo Sapiens
ETDNSCKVCCRDLSG

SEQ ID NO: 93199 - protein, 15 aa, Homo Sapiens
TDNSCKVCCRDLSGR

SEQ ID NO: 93200 - protein, 15 aa, Homo Sapiens
DNSCKVCCRDLSGRC

SEQ ID NO: 93201 - protein, 15 aa, Homo Sapiens
NSCKVCCRDLSGRCV

SEQ ID NO: 93202 - protein, 15 aa, Homo Sapiens
SCKVCCRDLSGRCVP

SEQ ID NO: 93203 - protein, 15 aa, Homo Sapiens
CKVCCRDLSGRCVPY

SEQ ID NO: 93204 - protein, 15 aa, Homo Sapiens
KVCCRDLSGRCVPYV

SEQ ID NO: 93205 - protein, 15 aa, Homo Sapiens
VCCRDLSGRCVPYVD

SEQ ID NO: 93206 - protein, 15 aa, Homo Sapiens
CCRDLSGRCVPYVDA

SEQ ID NO: 93207 - protein, 15 aa, Homo Sapiens
CRDLSGRCVPYVDAE

SEQ ID NO: 93208 - protein, 15 aa, Homo Sapiens
RDLSGRCVPYVDAEQ

SEQ ID NO: 93209 - protein, 15 aa, Homo Sapiens
DLSGRCVPYVDAEQK

SEQ ID NO: 93210 - protein, 15 aa, Homo Sapiens
LSGRCVPYVDAEQKN

SEQ ID NO: 93211 - protein, 15 aa, Homo Sapiens
SGRCVPYVDAEQKNL

SEQ ID NO: 93212 - protein, 15 aa, Homo Sapiens
GRCVPYVDAEQKNLF

SEQ ID NO: 93213 - protein, 15 aa, Homo Sapiens
RCVPYVDAEQKNLFL

SEQ ID NO: 93214 - protein, 15 aa, Homo Sapiens
CVPYVDAEQKNLFLR

SEQ ID NO: 93215 - protein, 15 aa, Homo Sapiens
VPYVDAEQKNLFLRK

SEQ ID NO: 93216 - protein, 15 aa, Homo Sapiens
PYVDAEQKNLFLRKG

SEQ ID NO: 93217 - protein, 15 aa, Homo Sapiens
YVDAEQKNLFLRKGK

SEQ ID NO: 93218 - protein, 15 aa, Homo Sapiens
VDAEQKNLFLRKGKP

SEQ ID NO: 93219 - protein, 15 aa, Homo Sapiens
DAEQKNLFLRKGKPC

SEQ ID NO: 93220 - protein, 15 aa, Homo Sapiens
AEQKNLFLRKGKPCT

SEQ ID NO: 93221 - protein, 15 aa, Homo Sapiens
EQKNLFLRKGKPCTV

SEQ ID NO: 93222 - protein, 15 aa, Homo Sapiens
QKNLFLRKGKPCTVG

SEQ ID NO: 93223 - protein, 15 aa, Homo Sapiens
KNLFLRKGKPCTVGF

SEQ ID NO: 93224 - protein, 15 aa, Homo Sapiens
NLFLRKGKPCTVGFC

SEQ ID NO: 93225 - protein, 15 aa, Homo Sapiens
LFLRKGKPCTVGFCD

SEQ ID NO: 93226 - protein, 15 aa, Homo Sapiens
FLRKGKPCTVGFCDM

SEQ ID NO: 93227 - protein, 15 aa, Homo Sapiens
LRKGKPCTVGFCDMN

SEQ ID NO: 93228 - protein, 15 aa, Homo Sapiens
RKGKPCTVGFCDMNG

SEQ ID NO: 93229 - protein, 15 aa, Homo Sapiens
KGKPCTVGFCDMNGK

SEQ ID NO: 93230 - protein, 15 aa, Homo Sapiens
GKPCTVGFCDMNGKC

SEQ ID NO: 93231 - protein, 15 aa, Homo Sapiens
KPCTVGFCDMNGKCE

SEQ ID NO: 93232 - protein, 15 aa, Homo Sapiens
PCTVGFCDMNGKCEK

SEQ ID NO: 93233 - protein, 15 aa, Homo Sapiens
CTVGFCDMNGKCEKR

SEQ ID NO: 93234 - protein, 15 aa, Homo Sapiens
TVGFCDMNGKCEKRV

SEQ ID NO: 93235 - protein, 15 aa, Homo Sapiens
VGFCDMNGKCEKRVQ

SEQ ID NO: 93236 - protein, 15 aa, Homo Sapiens
GFCDMNGKCEKRVQD

SEQ ID NO: 93237 - protein, 15 aa, Homo Sapiens
FCDMNGKCEKRVQDV

SEQ ID NO: 93238 - protein, 15 aa, Homo Sapiens
CDMNGKCEKRVQDVI

SEQ ID NO: 93239 - protein, 15 aa, Homo Sapiens
DMNGKCEKRVQDVIE

SEQ ID NO: 93240 - protein, 15 aa, Homo Sapiens
MNGKCEKRVQDVIER

SEQ ID NO: 93241 - protein, 15 aa, Homo Sapiens
NGKCEKRVQDVIERF

SEQ ID NO: 93242 - protein, 15 aa, Homo Sapiens
GKCEKRVQDVIERFW

SEQ ID NO: 93243 - protein, 15 aa, Homo Sapiens
KCEKRVQDVIERFWD

SEQ ID NO: 93244 - protein, 15 aa, Homo Sapiens
CEKRVQDVIERFWDF

SEQ ID NO: 93245 - protein, 15 aa, Homo Sapiens
EKRVQDVIERFWDFI

SEQ ID NO: 93246 - protein, 15 aa, Homo Sapiens
KRVQDVIERFWDFID

SEQ ID NO: 93247 - protein, 15 aa, Homo Sapiens
RVQDVIERFWDFIDQ

SEQ ID NO: 93248 - protein, 15 aa, Homo Sapiens
VQDVIERFWDFIDQL

SEQ ID NO: 93249 - protein, 15 aa, Homo Sapiens
QDVIERFWDFIDQLS

SEQ ID NO: 93250 - protein, 15 aa, Homo Sapiens
DVIERFWDFIDQLSI

SEQ ID NO: 93251 - protein, 15 aa, Homo Sapiens
VIERFWDFIDQLSIN

SEQ ID NO: 93252 - protein, 15 aa, Homo Sapiens
IERFWDFIDQLSINT

SEQ ID NO: 93253 - protein, 15 aa, Homo Sapiens
ERFWDFIDQLSINTF

SEQ ID NO: 93254 - protein, 15 aa, Homo Sapiens
RFWDFIDQLSINTFG

SEQ ID NO: 93255 - protein, 15 aa, Homo Sapiens
FWDFIDQLSINTFGK

SEQ ID NO: 93256 - protein, 15 aa, Homo Sapiens
WDFIDQLSINTFGKF

SEQ ID NO: 93257 - protein, 15 aa, Homo Sapiens
DFIDQLSINTFGKFL

SEQ ID NO: 93258 - protein, 15 aa, Homo Sapiens
FIDQLSINTFGKFLA

SEQ ID NO: 93259 - protein, 15 aa, Homo Sapiens
IDQLSINTFGKFLAD

SEQ ID NO: 93260 - protein, 15 aa, Homo Sapiens
DQLSINTFGKFLADN

SEQ ID NO: 93261 - protein, 15 aa, Homo Sapiens
QLSINTFGKFLADNI

SEQ ID NO: 93262 - protein, 15 aa, Homo Sapiens
LSINTFGKFLADNIV

SEQ ID NO: 93263 - protein, 15 aa, Homo Sapiens
SINTFGKFLADNIVG

SEQ ID NO: 93264 - protein, 15 aa, Homo Sapiens
INTFGKFLADNIVGS

SEQ ID NO: 93265 - protein, 15 aa, Homo Sapiens
NTFGKFLADNIVGSV

SEQ ID NO: 93266 - protein, 15 aa, Homo Sapiens
TFGKFLADNIVGSVL

SEQ ID NO: 93267 - protein, 15 aa, Homo Sapiens
FGKFLADNIVGSVLV

SEQ ID NO: 93268 - protein, 15 aa, Homo Sapiens
GKFLADNIVGSVLVF

SEQ ID NO: 93269 - protein, 15 aa, Homo Sapiens
KFLADNIVGSVLVFS

SEQ ID NO: 93270 - protein, 15 aa, Homo Sapiens
FLADNIVGSVLVFSL

SEQ ID NO: 93271 - protein, 15 aa, Homo Sapiens
LADNIVGSVLVFSLI

SEQ ID NO: 93272 - protein, 15 aa, Homo Sapiens
ADNIVGSVLVFSLIF

SEQ ID NO: 93273 - protein, 15 aa, Homo Sapiens
DNIVGSVLVFSLIFW

SEQ ID NO: 93274 - protein, 15 aa, Homo Sapiens
NIVGSVLVFSLIFWI

SEQ ID NO: 93275 - protein, 15 aa, Homo Sapiens
IVGSVLVFSLIFWIP

SEQ ID NO: 93276 - protein, 15 aa, Homo Sapiens
VGSVLVFSLIFWIPF

SEQ ID NO: 93277 - protein, 15 aa, Homo Sapiens
GSVLVFSLIFWIPFS

SEQ ID NO: 93278 - protein, 15 aa, Homo Sapiens
SVLVFSLIFWIPFSI

SEQ ID NO: 93279 - protein, 15 aa, Homo Sapiens
VLVFSLIFWIPFSIL

SEQ ID NO: 93280 - protein, 15 aa, Homo Sapiens
LVFSLIFWIPFSILV

SEQ ID NO: 93281 - protein, 15 aa, Homo Sapiens
VFSLIFWIPFSILVH

SEQ ID NO: 93282 - protein, 15 aa, Homo Sapiens
FSLIFWIPFSILVHC

SEQ ID NO: 93283 - protein, 15 aa, Homo Sapiens
SLIFWIPFSILVHCV

SEQ ID NO: 93284 - protein, 15 aa, Homo Sapiens
LIFWIPFSILVHCVD

SEQ ID NO: 93285 - protein, 15 aa, Homo Sapiens
IFWIPFSILVHCVDK

SEQ ID NO: 93286 - protein, 15 aa, Homo Sapiens
FWIPFSILVHCVDKK

SEQ ID NO: 93287 - protein, 15 aa, Homo Sapiens
WIPFSILVHCVDKKL

SEQ ID NO: 93288 - protein, 15 aa, Homo Sapiens
IPFSILVHCVDKKLD

SEQ ID NO: 93289 - protein, 15 aa, Homo Sapiens
PFSILVHCVDKKLDK

SEQ ID NO: 93290 - protein, 15 aa, Homo Sapiens
FSILVHCVDKKLDKQ

SEQ ID NO: 93291 - protein, 15 aa, Homo Sapiens
SILVHCVDKKLDKQY

SEQ ID NO: 93292 - protein, 15 aa, Homo Sapiens
ILVHCVDKKLDKQYE

SEQ ID NO: 93293 - protein, 15 aa, Homo Sapiens
LVHCVDKKLDKQYES

SEQ ID NO: 93294 - protein, 15 aa, Homo Sapiens
VHCVDKKLDKQYESL

SEQ ID NO: 93295 - protein, 15 aa, Homo Sapiens
HCVDKKLDKQYESLS

SEQ ID NO: 93296 - protein, 15 aa, Homo Sapiens
CVDKKLDKQYESLSL

SEQ ID NO: 93297 - protein, 15 aa, Homo Sapiens
VDKKLDKQYESLSLF

SEQ ID NO: 93298 - protein, 15 aa, Homo Sapiens
DKKLDKQYESLSLFH

SEQ ID NO: 93299 - protein, 15 aa, Homo Sapiens
KKLDKQYESLSLFHP

SEQ ID NO: 93300 - protein, 15 aa, Homo Sapiens
KLDKQYESLSLFHPS

SEQ ID NO: 93301 - protein, 15 aa, Homo Sapiens
LDKQYESLSLFHPSN

SEQ ID NO: 93302 - protein, 15 aa, Homo Sapiens
DKQYESLSLFHPSNV

SEQ ID NO: 93303 - protein, 15 aa, Homo Sapiens
KQYESLSLFHPSNVE

SEQ ID NO: 93304 - protein, 15 aa, Homo Sapiens
QYESLSLFHPSNVEM

SEQ ID NO: 93305 - protein, 15 aa, Homo Sapiens
YESLSLFHPSNVEML

SEQ ID NO: 93306 - protein, 15 aa, Homo Sapiens
ESLSLFHPSNVEMLS

SEQ ID NO: 93307 - protein, 15 aa, Homo Sapiens
SLSLFHPSNVEMLSS

SEQ ID NO: 93308 - protein, 15 aa, Homo Sapiens
LSLFHPSNVEMLSSM

SEQ ID NO: 93309 - protein, 15 aa, Homo Sapiens
SLFHPSNVEMLSSMD

SEQ ID NO: 93310 - protein, 15 aa, Homo Sapiens
LFHPSNVEMLSSMDS

SEQ ID NO: 93311 - protein, 15 aa, Homo Sapiens
FHPSNVEMLSSMDSA

SEQ ID NO: 93312 - protein, 15 aa, Homo Sapiens
HPSNVEMLSSMDSAS

SEQ ID NO: 93313 - protein, 15 aa, Homo Sapiens
PSNVEMLSSMDSASV

SEQ ID NO: 93314 - protein, 15 aa, Homo Sapiens
SNVEMLSSMDSASVR

SEQ ID NO: 93315 - protein, 15 aa, Homo Sapiens
NVEMLSSMDSASVRI

SEQ ID NO: 93316 - protein, 15 aa, Homo Sapiens
VEMLSSMDSASVRII

SEQ ID NO: 93317 - protein, 15 aa, Homo Sapiens
EMLSSMDSASVRIIK

SEQ ID NO: 93318 - protein, 15 aa, Homo Sapiens
MLSSMDSASVRIIKP

SEQ ID NO: 93319 - protein, 15 aa, Homo Sapiens
LSSMDSASVRIIKPF

SEQ ID NO: 93320 - protein, 15 aa, Homo Sapiens
SSMDSASVRIIKPFP

SEQ ID NO: 93321 - protein, 15 aa, Homo Sapiens
SMDSASVRIIKPFPA

SEQ ID NO: 93322 - protein, 15 aa, Homo Sapiens
MDSASVRIIKPFPAP

SEQ ID NO: 93323 - protein, 15 aa, Homo Sapiens
DSASVRIIKPFPAPQ

SEQ ID NO: 93324 - protein, 15 aa, Homo Sapiens
SASVRIIKPFPAPQT

SEQ ID NO: 93325 - protein, 15 aa, Homo Sapiens
ASVRIIKPFPAPQTP

SEQ ID NO: 93326 - protein, 15 aa, Homo Sapiens
SVRIIKPFPAPQTPG

SEQ ID NO: 93327 - protein, 15 aa, Homo Sapiens
VRIIKPFPAPQTPGR

SEQ ID NO: 93328 - protein, 15 aa, Homo Sapiens
RIIKPFPAPQTPGRL

SEQ ID NO: 93329 - protein, 15 aa, Homo Sapiens
IIKPFPAPQTPGRLQ

SEQ ID NO: 93330 - protein, 15 aa, Homo Sapiens
IKPFPAPQTPGRLQP

SEQ ID NO: 93331 - protein, 15 aa, Homo Sapiens
KPFPAPQTPGRLQPA

SEQ ID NO: 93332 - protein, 15 aa, Homo Sapiens
PFPAPQTPGRLQPAP

SEQ ID NO: 93333 - protein, 15 aa, Homo Sapiens
FPAPQTPGRLQPAPV

SEQ ID NO: 93334 - protein, 15 aa, Homo Sapiens
PAPQTPGRLQPAPVI

SEQ ID NO: 93335 - protein, 15 aa, Homo Sapiens
APQTPGRLQPAPVIP

SEQ ID NO: 93336 - protein, 15 aa, Homo Sapiens
PQTPGRLQPAPVIPS

SEQ ID NO: 93337 - protein, 15 aa, Homo Sapiens
QTPGRLQPAPVIPSA

SEQ ID NO: 93338 - protein, 15 aa, Homo Sapiens
TPGRLQPAPVIPSAP

SEQ ID NO: 93339 - protein, 15 aa, Homo Sapiens
PGRLQPAPVIPSAPA

SEQ ID NO: 93340 - protein, 15 aa, Homo Sapiens
GRLQPAPVIPSAPAA

SEQ ID NO: 93341 - protein, 15 aa, Homo Sapiens
RLQPAPVIPSAPAAP

SEQ ID NO: 93342 - protein, 15 aa, Homo Sapiens
LQPAPVIPSAPAAPK

SEQ ID NO: 93343 - protein, 15 aa, Homo Sapiens
QPAPVIPSAPAAPKL

SEQ ID NO: 93344 - protein, 15 aa, Homo Sapiens
PAPVIPSAPAAPKLD

SEQ ID NO: 93345 - protein, 15 aa, Homo Sapiens
APVIPSAPAAPKLDH

SEQ ID NO: 93346 - protein, 15 aa, Homo Sapiens
PVIPSAPAAPKLDHQ

SEQ ID NO: 93347 - protein, 15 aa, Homo Sapiens
VIPSAPAAPKLDHQR

SEQ ID NO: 93348 - protein, 15 aa, Homo Sapiens
IPSAPAAPKLDHQRM

SEQ ID NO: 93349 - protein, 15 aa, Homo Sapiens
PSAPAAPKLDHQRMD

SEQ ID NO: 93350 - protein, 15 aa, Homo Sapiens
SAPAAPKLDHQRMDT

SEQ ID NO: 93351 - protein, 15 aa, Homo Sapiens
APAAPKLDHQRMDTI

SEQ ID NO: 93352 - protein, 15 aa, Homo Sapiens
PAAPKLDHQRMDTIQ

SEQ ID NO: 93353 - protein, 15 aa, Homo Sapiens
AAPKLDHQRMDTIQE

SEQ ID NO: 93354 - protein, 15 aa, Homo Sapiens
APKLDHQRMDTIQED

SEQ ID NO: 93355 - protein, 15 aa, Homo Sapiens
PKLDHQRMDTIQEDP

SEQ ID NO: 93356 - protein, 15 aa, Homo Sapiens
KLDHQRMDTIQEDPS

SEQ ID NO: 93357 - protein, 15 aa, Homo Sapiens
LDHQRMDTIQEDPST

SEQ ID NO: 93358 - protein, 15 aa, Homo Sapiens
DHQRMDTIQEDPSTD

SEQ ID NO: 93359 - protein, 15 aa, Homo Sapiens
HQRMDTIQEDPSTDS

SEQ ID NO: 93360 - protein, 15 aa, Homo Sapiens
QRMDTIQEDPSTDSH

SEQ ID NO: 93361 - protein, 15 aa, Homo Sapiens
RMDTIQEDPSTDSHM

SEQ ID NO: 93362 - protein, 15 aa, Homo Sapiens
MDTIQEDPSTDSHMD

SEQ ID NO: 93363 - protein, 15 aa, Homo Sapiens
DTIQEDPSTDSHMDE

SEQ ID NO: 93364 - protein, 15 aa, Homo Sapiens
TIQEDPSTDSHMDED

SEQ ID NO: 93365 - protein, 15 aa, Homo Sapiens
IQEDPSTDSHMDEDG

SEQ ID NO: 93366 - protein, 15 aa, Homo Sapiens
QEDPSTDSHMDEDGF

SEQ ID NO: 93367 - protein, 15 aa, Homo Sapiens
EDPSTDSHMDEDGFE

SEQ ID NO: 93368 - protein, 15 aa, Homo Sapiens
DPSTDSHMDEDGFEK

SEQ ID NO: 93369 - protein, 15 aa, Homo Sapiens
PSTDSHMDEDGFEKD

SEQ ID NO: 93370 - protein, 15 aa, Homo Sapiens
STDSHMDEDGFEKDP

SEQ ID NO: 93371 - protein, 15 aa, Homo Sapiens
TDSHMDEDGFEKDPF

SEQ ID NO: 93372 - protein, 15 aa, Homo Sapiens
DSHMDEDGFEKDPFP

SEQ ID NO: 93373 - protein, 15 aa, Homo Sapiens
SHMDEDGFEKDPFPN

SEQ ID NO: 93374 - protein, 15 aa, Homo Sapiens
HMDEDGFEKDPFPNS

SEQ ID NO: 93375 - protein, 15 aa, Homo Sapiens
MDEDGFEKDPFPNSS

SEQ ID NO: 93376 - protein, 15 aa, Homo Sapiens
DEDGFEKDPFPNSST

SEQ ID NO: 93377 - protein, 15 aa, Homo Sapiens
EDGFEKDPFPNSSTA

SEQ ID NO: 93378 - protein, 15 aa, Homo Sapiens
DGFEKDPFPNSSTAA

SEQ ID NO: 93379 - protein, 15 aa, Homo Sapiens
GFEKDPFPNSSTAAK

SEQ ID NO: 93380 - protein, 15 aa, Homo Sapiens
FEKDPFPNSSTAAKS

SEQ ID NO: 93381 - protein, 15 aa, Homo Sapiens
EKDPFPNSSTAAKSF

SEQ ID NO: 93382 - protein, 15 aa, Homo Sapiens
KDPFPNSSTAAKSFE

SEQ ID NO: 93383 - protein, 15 aa, Homo Sapiens
DPFPNSSTAAKSFED

SEQ ID NO: 93384 - protein, 15 aa, Homo Sapiens
PFPNSSTAAKSFEDL

SEQ ID NO: 93385 - protein, 15 aa, Homo Sapiens
FPNSSTAAKSFEDLT

SEQ ID NO: 93386 - protein, 15 aa, Homo Sapiens
PNSSTAAKSFEDLTD

SEQ ID NO: 93387 - protein, 15 aa, Homo Sapiens
NSSTAAKSFEDLTDH

SEQ ID NO: 93388 - protein, 15 aa, Homo Sapiens
SSTAAKSFEDLTDHP

SEQ ID NO: 93389 - protein, 15 aa, Homo Sapiens
STAAKSFEDLTDHPV

SEQ ID NO: 93390 - protein, 15 aa, Homo Sapiens
TAAKSFEDLTDHPVT

SEQ ID NO: 93391 - protein, 15 aa, Homo Sapiens
AAKSFEDLTDHPVTR

SEQ ID NO: 93392 - protein, 15 aa, Homo Sapiens
AKSFEDLTDHPVTRS

SEQ ID NO: 93393 - protein, 15 aa, Homo Sapiens
KSFEDLTDHPVTRSE

SEQ ID NO: 93394 - protein, 15 aa, Homo Sapiens
SFEDLTDHPVTRSEK

SEQ ID NO: 93395 - protein, 15 aa, Homo Sapiens
FEDLTDHPVTRSEKA

SEQ ID NO: 93396 - protein, 15 aa, Homo Sapiens
EDLTDHPVTRSEKAA

SEQ ID NO: 93397 - protein, 15 aa, Homo Sapiens
DLTDHPVTRSEKAAS

SEQ ID NO: 93398 - protein, 15 aa, Homo Sapiens
LTDHPVTRSEKAASF

SEQ ID NO: 93399 - protein, 15 aa, Homo Sapiens
TDHPVTRSEKAASFK

SEQ ID NO: 93400 - protein, 15 aa, Homo Sapiens
DHPVTRSEKAASFKL

SEQ ID NO: 93401 - protein, 15 aa, Homo Sapiens
HPVTRSEKAASFKLQ

SEQ ID NO: 93402 - protein, 15 aa, Homo Sapiens
PVTRSEKAASFKLQR

SEQ ID NO: 93403 - protein, 15 aa, Homo Sapiens
VTRSEKAASFKLQRQ

SEQ ID NO: 93404 - protein, 15 aa, Homo Sapiens
TRSEKAASFKLQRQN

SEQ ID NO: 93405 - protein, 15 aa, Homo Sapiens
RSEKAASFKLQRQNR

SEQ ID NO: 93406 - protein, 15 aa, Homo Sapiens
SEKAASFKLQRQNRV

SEQ ID NO: 93407 - protein, 15 aa, Homo Sapiens
EKAASFKLQRQNRVD

SEQ ID NO: 93408 - protein, 15 aa, Homo Sapiens
KAASFKLQRQNRVDS

SEQ ID NO: 93409 - protein, 15 aa, Homo Sapiens
AASFKLQRQNRVDSK

SEQ ID NO: 93410 - protein, 15 aa, Homo Sapiens
ASFKLQRQNRVDSKE

SEQ ID NO: 93411 - protein, 15 aa, Homo Sapiens
SFKLQRQNRVDSKET

SEQ ID NO: 93412 - protein, 15 aa, Homo Sapiens
FKLQRQNRVDSKETE

SEQ ID NO: 93413 - protein, 15 aa, Homo Sapiens
KLQRQNRVDSKETEC

SEQ ID NO: 93414 - protein, 16 aa, Homo Sapiens
MRQSLLFLTSVVPFVL

SEQ ID NO: 93415 - protein, 16 aa, Homo Sapiens
RQSLLFLTSVVPFVLA

SEQ ID NO: 93416 - protein, 16 aa, Homo Sapiens
QSLLFLTSVVPFVLAP

SEQ ID NO: 93417 - protein, 16 aa, Homo Sapiens
SLLFLTSVVPFVLAPR

SEQ ID NO: 93418 - protein, 16 aa, Homo Sapiens
LLFLTSVVPFVLAPRP

SEQ ID NO: 93419 - protein, 16 aa, Homo Sapiens
LFLTSVVPFVLAPRPP

SEQ ID NO: 93420 - protein, 16 aa, Homo Sapiens
FLTSVVPFVLAPRPPD

SEQ ID NO: 93421 - protein, 16 aa, Homo Sapiens
LTSVVPFVLAPRPPDD

SEQ ID NO: 93422 - protein, 16 aa, Homo Sapiens
TSVVPFVLAPRPPDDP

SEQ ID NO: 93423 - protein, 16 aa, Homo Sapiens
SVVPFVLAPRPPDDPG

SEQ ID NO: 93424 - protein, 16 aa, Homo Sapiens
VVPFVLAPRPPDDPGF

SEQ ID NO: 93425 - protein, 16 aa, Homo Sapiens
VPFVLAPRPPDDPGFG

SEQ ID NO: 93426 - protein, 16 aa, Homo Sapiens
PFVLAPRPPDDPGFGP

SEQ ID NO: 93427 - protein, 16 aa, Homo Sapiens
FVLAPRPPDDPGFGPH

SEQ ID NO: 93428 - protein, 16 aa, Homo Sapiens
VLAPRPPDDPGFGPHQ

SEQ ID NO: 93429 - protein, 16 aa, Homo Sapiens
LAPRPPDDPGFGPHQR

SEQ ID NO: 93430 - protein, 16 aa, Homo Sapiens
APRPPDDPGFGPHQRL

SEQ ID NO: 93431 - protein, 16 aa, Homo Sapiens
PRPPDDPGFGPHQRLE

SEQ ID NO: 93432 - protein, 16 aa, Homo Sapiens
RPPDDPGFGPHQRLEK

SEQ ID NO: 93433 - protein, 16 aa, Homo Sapiens
PPDDPGFGPHQRLEKL

SEQ ID NO: 93434 - protein, 16 aa, Homo Sapiens
PDDPGFGPHQRLEKLD

SEQ ID NO: 93435 - protein, 16 aa, Homo Sapiens
DDPGFGPHQRLEKLDS

SEQ ID NO: 93436 - protein, 16 aa, Homo Sapiens
DPGFGPHQRLEKLDSL

SEQ ID NO: 93437 - protein, 16 aa, Homo Sapiens
PGFGPHQRLEKLDSLL

SEQ ID NO: 93438 - protein, 16 aa, Homo Sapiens
GFGPHQRLEKLDSLLS

SEQ ID NO: 93439 - protein, 16 aa, Homo Sapiens
FGPHQRLEKLDSLLSD

SEQ ID NO: 93440 - protein, 16 aa, Homo Sapiens
GPHQRLEKLDSLLSDY

SEQ ID NO: 93441 - protein, 16 aa, Homo Sapiens
PHQRLEKLDSLLSDYD

SEQ ID NO: 93442 - protein, 16 aa, Homo Sapiens
HQRLEKLDSLLSDYDI

SEQ ID NO: 93443 - protein, 16 aa, Homo Sapiens
QRLEKLDSLLSDYDIL

SEQ ID NO: 93444 - protein, 16 aa, Homo Sapiens
RLEKLDSLLSDYDILS

SEQ ID NO: 93445 - protein, 16 aa, Homo Sapiens
LEKLDSLLSDYDILSL

SEQ ID NO: 93446 - protein, 16 aa, Homo Sapiens
EKLDSLLSDYDILSLS

SEQ ID NO: 93447 - protein, 16 aa, Homo Sapiens
KLDSLLSDYDILSLSN

SEQ ID NO: 93448 - protein, 16 aa, Homo Sapiens
LDSLLSDYDILSLSNI

SEQ ID NO: 93449 - protein, 16 aa, Homo Sapiens
DSLLSDYDILSLSNIQ

SEQ ID NO: 93450 - protein, 16 aa, Homo Sapiens
SLLSDYDILSLSNIQQ

SEQ ID NO: 93451 - protein, 16 aa, Homo Sapiens
LLSDYDILSLSNIQQH

SEQ ID NO: 93452 - protein, 16 aa, Homo Sapiens
LSDYDILSLSNIQQHS

SEQ ID NO: 93453 - protein, 16 aa, Homo Sapiens
SDYDILSLSNIQQHSV

SEQ ID NO: 93454 - protein, 16 aa, Homo Sapiens
DYDILSLSNIQQHSVR

SEQ ID NO: 93455 - protein, 16 aa, Homo Sapiens
YDILSLSNIQQHSVRK

SEQ ID NO: 93456 - protein, 16 aa, Homo Sapiens
DILSLSNIQQHSVRKR

SEQ ID NO: 93457 - protein, 16 aa, Homo Sapiens
ILSLSNIQQHSVRKRD

SEQ ID NO: 93458 - protein, 16 aa, Homo Sapiens
LSLSNIQQHSVRKRDL

SEQ ID NO: 93459 - protein, 16 aa, Homo Sapiens
SLSNIQQHSVRKRDLQ

SEQ ID NO: 93460 - protein, 16 aa, Homo Sapiens
LSNIQQHSVRKRDLQT

SEQ ID NO: 93461 - protein, 16 aa, Homo Sapiens
SNIQQHSVRKRDLQTS

SEQ ID NO: 93462 - protein, 16 aa, Homo Sapiens
NIQQHSVRKRDLQTST

SEQ ID NO: 93463 - protein, 16 aa, Homo Sapiens
IQQHSVRKRDLQTSTH

SEQ ID NO: 93464 - protein, 16 aa, Homo Sapiens
QQHSVRKRDLQTSTHV

SEQ ID NO: 93465 - protein, 16 aa, Homo Sapiens
QHSVRKRDLQTSTHVE

SEQ ID NO: 93466 - protein, 16 aa, Homo Sapiens
HSVRKRDLQTSTHVET

SEQ ID NO: 93467 - protein, 16 aa, Homo Sapiens
SVRKRDLQTSTHVETL

SEQ ID NO: 93468 - protein, 16 aa, Homo Sapiens
VRKRDLQTSTHVETLL

SEQ ID NO: 93469 - protein, 16 aa, Homo Sapiens
RKRDLQTSTHVETLLT

SEQ ID NO: 93470 - protein, 16 aa, Homo Sapiens
KRDLQTSTHVETLLTF

SEQ ID NO: 93471 - protein, 16 aa, Homo Sapiens
RDLQTSTHVETLLTFS

SEQ ID NO: 93472 - protein, 16 aa, Homo Sapiens
DLQTSTHVETLLTFSA

SEQ ID NO: 93473 - protein, 16 aa, Homo Sapiens
LQTSTHVETLLTFSAL

SEQ ID NO: 93474 - protein, 16 aa, Homo Sapiens
QTSTHVETLLTFSALK

SEQ ID NO: 93475 - protein, 16 aa, Homo Sapiens
TSTHVETLLTFSALKR

SEQ ID NO: 93476 - protein, 16 aa, Homo Sapiens
STHVETLLTFSALKRH

SEQ ID NO: 93477 - protein, 16 aa, Homo Sapiens
THVETLLTFSALKRHF

SEQ ID NO: 93478 - protein, 16 aa, Homo Sapiens
HVETLLTFSALKRHFK

SEQ ID NO: 93479 - protein, 16 aa, Homo Sapiens
VETLLTFSALKRHFKL

SEQ ID NO: 93480 - protein, 16 aa, Homo Sapiens
ETLLTFSALKRHFKLY

SEQ ID NO: 93481 - protein, 16 aa, Homo Sapiens
TLLTFSALKRHFKLYL

SEQ ID NO: 93482 - protein, 16 aa, Homo Sapiens
LLTFSALKRHFKLYLT

SEQ ID NO: 93483 - protein, 16 aa, Homo Sapiens
LTFSALKRHFKLYLTS

SEQ ID NO: 93484 - protein, 16 aa, Homo Sapiens
TFSALKRHFKLYLTSS

SEQ ID NO: 93485 - protein, 16 aa, Homo Sapiens
FSALKRHFKLYLTSST

SEQ ID NO: 93486 - protein, 16 aa, Homo Sapiens
SALKRHFKLYLTSSTE

SEQ ID NO: 93487 - protein, 16 aa, Homo Sapiens
ALKRHFKLYLTSSTER

SEQ ID NO: 93488 - protein, 16 aa, Homo Sapiens
LKRHFKLYLTSSTERF

SEQ ID NO: 93489 - protein, 16 aa, Homo Sapiens
KRHFKLYLTSSTERFS

SEQ ID NO: 93490 - protein, 16 aa, Homo Sapiens
RHFKLYLTSSTERFSQ

SEQ ID NO: 93491 - protein, 16 aa, Homo Sapiens
HFKLYLTSSTERFSQN

SEQ ID NO: 93492 - protein, 16 aa, Homo Sapiens
FKLYLTSSTERFSQNF

SEQ ID NO: 93493 - protein, 16 aa, Homo Sapiens
KLYLTSSTERFSQNFK

SEQ ID NO: 93494 - protein, 16 aa, Homo Sapiens
LYLTSSTERFSQNFKV

SEQ ID NO: 93495 - protein, 16 aa, Homo Sapiens
YLTSSTERFSQNFKVV

SEQ ID NO: 93496 - protein, 16 aa, Homo Sapiens
LTSSTERFSQNFKVVV

SEQ ID NO: 93497 - protein, 16 aa, Homo Sapiens
TSSTERFSQNFKVVVV

SEQ ID NO: 93498 - protein, 16 aa, Homo Sapiens
SSTERFSQNFKVVVVD

SEQ ID NO: 93499 - protein, 16 aa, Homo Sapiens
STERFSQNFKVVVVDG

SEQ ID NO: 93500 - protein, 16 aa, Homo Sapiens
TERFSQNFKVVVVDGK

SEQ ID NO: 93501 - protein, 16 aa, Homo Sapiens
ERFSQNFKVVVVDGKN

SEQ ID NO: 93502 - protein, 16 aa, Homo Sapiens
RFSQNFKVVVVDGKNE

SEQ ID NO: 93503 - protein, 16 aa, Homo Sapiens
FSQNFKVVVVDGKNES

SEQ ID NO: 93504 - protein, 16 aa, Homo Sapiens
SQNFKVVVVDGKNESE

SEQ ID NO: 93505 - protein, 16 aa, Homo Sapiens
QNFKVVVVDGKNESEY

SEQ ID NO: 93506 - protein, 16 aa, Homo Sapiens
NFKVVVVDGKNESEYT

SEQ ID NO: 93507 - protein, 16 aa, Homo Sapiens
FKVVVVDGKNESEYTV

SEQ ID NO: 93508 - protein, 16 aa, Homo Sapiens
KVVVVDGKNESEYTVK

SEQ ID NO: 93509 - protein, 16 aa, Homo Sapiens
VVVVDGKNESEYTVKW

SEQ ID NO: 93510 - protein, 16 aa, Homo Sapiens
VVVDGKNESEYTVKWQ

SEQ ID NO: 93511 - protein, 16 aa, Homo Sapiens
VVDGKNESEYTVKWQD

SEQ ID NO: 93512 - protein, 16 aa, Homo Sapiens
VDGKNESEYTVKWQDF

SEQ ID NO: 93513 - protein, 16 aa, Homo Sapiens
DGKNESEYTVKWQDFF

SEQ ID NO: 93514 - protein, 16 aa, Homo Sapiens
GKNESEYTVKWQDFFT

SEQ ID NO: 93515 - protein, 16 aa, Homo Sapiens
KNESEYTVKWQDFFTG

SEQ ID NO: 93516 - protein, 16 aa, Homo Sapiens
NESEYTVKWQDFFTGH

SEQ ID NO: 93517 - protein, 16 aa, Homo Sapiens
ESEYTVKWQDFFTGHV

SEQ ID NO: 93518 - protein, 16 aa, Homo Sapiens
SEYTVKWQDFFTGHVV

SEQ ID NO: 93519 - protein, 16 aa, Homo Sapiens
EYTVKWQDFFTGHVVG

SEQ ID NO: 93520 - protein, 16 aa, Homo Sapiens
YTVKWQDFFTGHVVGE

SEQ ID NO: 93521 - protein, 16 aa, Homo Sapiens
TVKWQDFFTGHVVGEP

SEQ ID NO: 93522 - protein, 16 aa, Homo Sapiens
VKWQDFFTGHVVGEPD

SEQ ID NO: 93523 - protein, 16 aa, Homo Sapiens
KWQDFFTGHVVGEPDS

SEQ ID NO: 93524 - protein, 16 aa, Homo Sapiens
WQDFFTGHVVGEPDSR

SEQ ID NO: 93525 - protein, 16 aa, Homo Sapiens
QDFFTGHVVGEPDSRV

SEQ ID NO: 93526 - protein, 16 aa, Homo Sapiens
DFFTGHVVGEPDSRVL

SEQ ID NO: 93527 - protein, 16 aa, Homo Sapiens
FFTGHVVGEPDSRVLA

SEQ ID NO: 93528 - protein, 16 aa, Homo Sapiens
FTGHVVGEPDSRVLAH

SEQ ID NO: 93529 - protein, 16 aa, Homo Sapiens
TGHVVGEPDSRVLAHI

SEQ ID NO: 93530 - protein, 16 aa, Homo Sapiens
GHVVGEPDSRVLAHIR

SEQ ID NO: 93531 - protein, 16 aa, Homo Sapiens
HVVGEPDSRVLAHIRD

SEQ ID NO: 93532 - protein, 16 aa, Homo Sapiens
VVGEPDSRVLAHIRDD

SEQ ID NO: 93533 - protein, 16 aa, Homo Sapiens
VGEPDSRVLAHIRDDD

SEQ ID NO: 93534 - protein, 16 aa, Homo Sapiens
GEPDSRVLAHIRDDDV

SEQ ID NO: 93535 - protein, 16 aa, Homo Sapiens
EPDSRVLAHIRDDDVI

SEQ ID NO: 93536 - protein, 16 aa, Homo Sapiens
PDSRVLAHIRDDDVII

SEQ ID NO: 93537 - protein, 16 aa, Homo Sapiens
DSRVLAHIRDDDVIIR

SEQ ID NO: 93538 - protein, 16 aa, Homo Sapiens
SRVLAHIRDDDVIIRI

SEQ ID NO: 93539 - protein, 16 aa, Homo Sapiens
RVLAHIRDDDVIIRIN

SEQ ID NO: 93540 - protein, 16 aa, Homo Sapiens
VLAHIRDDDVIIRINT

SEQ ID NO: 93541 - protein, 16 aa, Homo Sapiens
LAHIRDDDVIIRINTD

SEQ ID NO: 93542 - protein, 16 aa, Homo Sapiens
AHIRDDDVIIRINTDG

SEQ ID NO: 93543 - protein, 16 aa, Homo Sapiens
HIRDDDVIIRINTDGA

SEQ ID NO: 93544 - protein, 16 aa, Homo Sapiens
IRDDDVIIRINTDGAE

SEQ ID NO: 93545 - protein, 16 aa, Homo Sapiens
RDDDVIIRINTDGAEY

SEQ ID NO: 93546 - protein, 16 aa, Homo Sapiens
DDDVIIRINTDGAEYN

SEQ ID NO: 93547 - protein, 16 aa, Homo Sapiens
DDVIIRINTDGAEYNI

SEQ ID NO: 93548 - protein, 16 aa, Homo Sapiens
DVIIRINTDGAEYNIE

SEQ ID NO: 93549 - protein, 16 aa, Homo Sapiens
VIIRINTDGAEYNIEP

SEQ ID NO: 93550 - protein, 16 aa, Homo Sapiens
IIRINTDGAEYNIEPL

SEQ ID NO: 93551 - protein, 16 aa, Homo Sapiens
IRINTDGAEYNIEPLW

SEQ ID NO: 93552 - protein, 16 aa, Homo Sapiens
RINTDGAEYNIEPLWR

SEQ ID NO: 93553 - protein, 16 aa, Homo Sapiens
INTDGAEYNIEPLWRF

SEQ ID NO: 93554 - protein, 16 aa, Homo Sapiens
NTDGAEYNIEPLWRFV

SEQ ID NO: 93555 - protein, 16 aa, Homo Sapiens
TDGAEYNIEPLWRFVN

SEQ ID NO: 93556 - protein, 16 aa, Homo Sapiens
DGAEYNIEPLWRFVND

SEQ ID NO: 93557 - protein, 16 aa, Homo Sapiens
GAEYNIEPLWRFVNDT

SEQ ID NO: 93558 - protein, 16 aa, Homo Sapiens
AEYNIEPLWRFVNDTK

SEQ ID NO: 93559 - protein, 16 aa, Homo Sapiens
EYNIEPLWRFVNDTKD

SEQ ID NO: 93560 - protein, 16 aa, Homo Sapiens
YNIEPLWRFVNDTKDK

SEQ ID NO: 93561 - protein, 16 aa, Homo Sapiens
NIEPLWRFVNDTKDKR

SEQ ID NO: 93562 - protein, 16 aa, Homo Sapiens
IEPLWRFVNDTKDKRM

SEQ ID NO: 93563 - protein, 16 aa, Homo Sapiens
EPLWRFVNDTKDKRML

SEQ ID NO: 93564 - protein, 16 aa, Homo Sapiens
PLWRFVNDTKDKRMLV

SEQ ID NO: 93565 - protein, 16 aa, Homo Sapiens
LWRFVNDTKDKRMLVY

SEQ ID NO: 93566 - protein, 16 aa, Homo Sapiens
WRFVNDTKDKRMLVYK

SEQ ID NO: 93567 - protein, 16 aa, Homo Sapiens
RFVNDTKDKRMLVYKS

SEQ ID NO: 93568 - protein, 16 aa, Homo Sapiens
FVNDTKDKRMLVYKSE

SEQ ID NO: 93569 - protein, 16 aa, Homo Sapiens
VNDTKDKRMLVYKSED

SEQ ID NO: 93570 - protein, 16 aa, Homo Sapiens
NDTKDKRMLVYKSEDI

SEQ ID NO: 93571 - protein, 16 aa, Homo Sapiens
DTKDKRMLVYKSEDIK

SEQ ID NO: 93572 - protein, 16 aa, Homo Sapiens
TKDKRMLVYKSEDIKN

SEQ ID NO: 93573 - protein, 16 aa, Homo Sapiens
KDKRMLVYKSEDIKNV

SEQ ID NO: 93574 - protein, 16 aa, Homo Sapiens
DKRMLVYKSEDIKNVS

SEQ ID NO: 93575 - protein, 16 aa, Homo Sapiens
KRMLVYKSEDIKNVSR

SEQ ID NO: 93576 - protein, 16 aa, Homo Sapiens
RMLVYKSEDIKNVSRL

SEQ ID NO: 93577 - protein, 16 aa, Homo Sapiens
MLVYKSEDIKNVSRLQ

SEQ ID NO: 93578 - protein, 16 aa, Homo Sapiens
LVYKSEDIKNVSRLQS

SEQ ID NO: 93579 - protein, 16 aa, Homo Sapiens
VYKSEDIKNVSRLQSP

SEQ ID NO: 93580 - protein, 16 aa, Homo Sapiens
YKSEDIKNVSRLQSPK

SEQ ID NO: 93581 - protein, 16 aa, Homo Sapiens
KSEDIKNVSRLQSPKV

SEQ ID NO: 93582 - protein, 16 aa, Homo Sapiens
SEDIKNVSRLQSPKVC

SEQ ID NO: 93583 - protein, 16 aa, Homo Sapiens
EDIKNVSRLQSPKVCG

SEQ ID NO: 93584 - protein, 16 aa, Homo Sapiens
DIKNVSRLQSPKVCGY

SEQ ID NO: 93585 - protein, 16 aa, Homo Sapiens
IKNVSRLQSPKVCGYL

SEQ ID NO: 93586 - protein, 16 aa, Homo Sapiens
KNVSRLQSPKVCGYLK

SEQ ID NO: 93587 - protein, 16 aa, Homo Sapiens
NVSRLQSPKVCGYLKV

SEQ ID NO: 93588 - protein, 16 aa, Homo Sapiens
VSRLQSPKVCGYLKVD

SEQ ID NO: 93589 - protein, 16 aa, Homo Sapiens
SRLQSPKVCGYLKVDN

SEQ ID NO: 93590 - protein, 16 aa, Homo Sapiens
RLQSPKVCGYLKVDNE

SEQ ID NO: 93591 - protein, 16 aa, Homo Sapiens
LQSPKVCGYLKVDNEE

SEQ ID NO: 93592 - protein, 16 aa, Homo Sapiens
QSPKVCGYLKVDNEEL

SEQ ID NO: 93593 - protein, 16 aa, Homo Sapiens
SPKVCGYLKVDNEELL

SEQ ID NO: 93594 - protein, 16 aa, Homo Sapiens
PKVCGYLKVDNEELLP

SEQ ID NO: 93595 - protein, 16 aa, Homo Sapiens
KVCGYLKVDNEELLPK

SEQ ID NO: 93596 - protein, 16 aa, Homo Sapiens
VCGYLKVDNEELLPKG

SEQ ID NO: 93597 - protein, 16 aa, Homo Sapiens
CGYLKVDNEELLPKGL

SEQ ID NO: 93598 - protein, 16 aa, Homo Sapiens
GYLKVDNEELLPKGLV

SEQ ID NO: 93599 - protein, 16 aa, Homo Sapiens
YLKVDNEELLPKGLVD

SEQ ID NO: 93600 - protein, 16 aa, Homo Sapiens
LKVDNEELLPKGLVDR

SEQ ID NO: 93601 - protein, 16 aa, Homo Sapiens
KVDNEELLPKGLVDRE

SEQ ID NO: 93602 - protein, 16 aa, Homo Sapiens
VDNEELLPKGLVDREP

SEQ ID NO: 93603 - protein, 16 aa, Homo Sapiens
DNEELLPKGLVDREPP

SEQ ID NO: 93604 - protein, 16 aa, Homo Sapiens
NEELLPKGLVDREPPE

SEQ ID NO: 93605 - protein, 16 aa, Homo Sapiens
EELLPKGLVDREPPEE

SEQ ID NO: 93606 - protein, 16 aa, Homo Sapiens
ELLPKGLVDREPPEEL

SEQ ID NO: 93607 - protein, 16 aa, Homo Sapiens
LLPKGLVDREPPEELV

SEQ ID NO: 93608 - protein, 16 aa, Homo Sapiens
LPKGLVDREPPEELVH

SEQ ID NO: 93609 - protein, 16 aa, Homo Sapiens
PKGLVDREPPEELVHR

SEQ ID NO: 93610 - protein, 16 aa, Homo Sapiens
KGLVDREPPEELVHRV

SEQ ID NO: 93611 - protein, 16 aa, Homo Sapiens
GLVDREPPEELVHRVK

SEQ ID NO: 93612 - protein, 16 aa, Homo Sapiens
LVDREPPEELVHRVKR

SEQ ID NO: 93613 - protein, 16 aa, Homo Sapiens
VDREPPEELVHRVKRR

SEQ ID NO: 93614 - protein, 16 aa, Homo Sapiens
DREPPEELVHRVKRRA

SEQ ID NO: 93615 - protein, 16 aa, Homo Sapiens
REPPEELVHRVKRRAD

SEQ ID NO: 93616 - protein, 16 aa, Homo Sapiens
EPPEELVHRVKRRADP

SEQ ID NO: 93617 - protein, 16 aa, Homo Sapiens
PPEELVHRVKRRADPD

SEQ ID NO: 93618 - protein, 16 aa, Homo Sapiens
PEELVHRVKRRADPDP

SEQ ID NO: 93619 - protein, 16 aa, Homo Sapiens
EELVHRVKRRADPDPM

SEQ ID NO: 93620 - protein, 16 aa, Homo Sapiens
ELVHRVKRRADPDPMK

SEQ ID NO: 93621 - protein, 16 aa, Homo Sapiens
LVHRVKRRADPDPMKN

SEQ ID NO: 93622 - protein, 16 aa, Homo Sapiens
VHRVKRRADPDPMKNT

SEQ ID NO: 93623 - protein, 16 aa, Homo Sapiens
HRVKRRADPDPMKNTC

SEQ ID NO: 93624 - protein, 16 aa, Homo Sapiens
RVKRRADPDPMKNTCK

SEQ ID NO: 93625 - protein, 16 aa, Homo Sapiens
VKRRADPDPMKNTCKL

SEQ ID NO: 93626 - protein, 16 aa, Homo Sapiens
KRRADPDPMKNTCKLL

SEQ ID NO: 93627 - protein, 16 aa, Homo Sapiens
RRADPDPMKNTCKLLV

SEQ ID NO: 93628 - protein, 16 aa, Homo Sapiens
RADPDPMKNTCKLLVV

SEQ ID NO: 93629 - protein, 16 aa, Homo Sapiens
ADPDPMKNTCKLLVVA

SEQ ID NO: 93630 - protein, 16 aa, Homo Sapiens
DPDPMKNTCKLLVVAD

SEQ ID NO: 93631 - protein, 16 aa, Homo Sapiens
PDPMKNTCKLLVVADH

SEQ ID NO: 93632 - protein, 16 aa, Homo Sapiens
DPMKNTCKLLVVADHR

SEQ ID NO: 93633 - protein, 16 aa, Homo Sapiens
PMKNTCKLLVVADHRF

SEQ ID NO: 93634 - protein, 16 aa, Homo Sapiens
MKNTCKLLVVADHRFY

SEQ ID NO: 93635 - protein, 16 aa, Homo Sapiens
KNTCKLLVVADHRFYR

SEQ ID NO: 93636 - protein, 16 aa, Homo Sapiens
NTCKLLVVADHRFYRY

SEQ ID NO: 93637 - protein, 16 aa, Homo Sapiens
TCKLLVVADHRFYRYM

SEQ ID NO: 93638 - protein, 16 aa, Homo Sapiens
CKLLVVADHRFYRYMG

SEQ ID NO: 93639 - protein, 16 aa, Homo Sapiens
KLLVVADHRFYRYMGR

SEQ ID NO: 93640 - protein, 16 aa, Homo Sapiens
LLVVADHRFYRYMGRG

SEQ ID NO: 93641 - protein, 16 aa, Homo Sapiens
LVVADHRFYRYMGRGE

SEQ ID NO: 93642 - protein, 16 aa, Homo Sapiens
VVADHRFYRYMGRGEE

SEQ ID NO: 93643 - protein, 16 aa, Homo Sapiens
VADHRFYRYMGRGEES

SEQ ID NO: 93644 - protein, 16 aa, Homo Sapiens
ADHRFYRYMGRGEEST

SEQ ID NO: 93645 - protein, 16 aa, Homo Sapiens
DHRFYRYMGRGEESTT

SEQ ID NO: 93646 - protein, 16 aa, Homo Sapiens
HRFYRYMGRGEESTTT

SEQ ID NO: 93647 - protein, 16 aa, Homo Sapiens
RFYRYMGRGEESTTTN

SEQ ID NO: 93648 - protein, 16 aa, Homo Sapiens
FYRYMGRGEESTTTNY

SEQ ID NO: 93649 - protein, 16 aa, Homo Sapiens
YRYMGRGEESTTTNYL

SEQ ID NO: 93650 - protein, 16 aa, Homo Sapiens
RYMGRGEESTTTNYLI

SEQ ID NO: 93651 - protein, 16 aa, Homo Sapiens
YMGRGEESTTTNYLIE

SEQ ID NO: 93652 - protein, 16 aa, Homo Sapiens
MGRGEESTTTNYLIEL

SEQ ID NO: 93653 - protein, 16 aa, Homo Sapiens
GRGEESTTTNYLIELI

SEQ ID NO: 93654 - protein, 16 aa, Homo Sapiens
RGEESTTTNYLIELID

SEQ ID NO: 93655 - protein, 16 aa, Homo Sapiens
GEESTTTNYLIELIDR

SEQ ID NO: 93656 - protein, 16 aa, Homo Sapiens
EESTTTNYLIELIDRV

SEQ ID NO: 93657 - protein, 16 aa, Homo Sapiens
ESTTTNYLIELIDRVD

SEQ ID NO: 93658 - protein, 16 aa, Homo Sapiens
STTTNYLIELIDRVDD

SEQ ID NO: 93659 - protein, 16 aa, Homo Sapiens
TTTNYLIELIDRVDDI

SEQ ID NO: 93660 - protein, 16 aa, Homo Sapiens
TTNYLIELIDRVDDIY

SEQ ID NO: 93661 - protein, 16 aa, Homo Sapiens
TNYLIELIDRVDDIYR

SEQ ID NO: 93662 - protein, 16 aa, Homo Sapiens
NYLIELIDRVDDIYRN

SEQ ID NO: 93663 - protein, 16 aa, Homo Sapiens
YLIELIDRVDDIYRNT

SEQ ID NO: 93664 - protein, 16 aa, Homo Sapiens
LIELIDRVDDIYRNTS

SEQ ID NO: 93665 - protein, 16 aa, Homo Sapiens
IELIDRVDDIYRNTSW

SEQ ID NO: 93666 - protein, 16 aa, Homo Sapiens
ELIDRVDDIYRNTSWD

SEQ ID NO: 93667 - protein, 16 aa, Homo Sapiens
LIDRVDDIYRNTSWDN

SEQ ID NO: 93668 - protein, 16 aa, Homo Sapiens
IDRVDDIYRNTSWDNA

SEQ ID NO: 93669 - protein, 16 aa, Homo Sapiens
DRVDDIYRNTSWDNAG

SEQ ID NO: 93670 - protein, 16 aa, Homo Sapiens
RVDDIYRNTSWDNAGF

SEQ ID NO: 93671 - protein, 16 aa, Homo Sapiens
VDDIYRNTSWDNAGFK

SEQ ID NO: 93672 - protein, 16 aa, Homo Sapiens
DDIYRNTSWDNAGFKG

SEQ ID NO: 93673 - protein, 16 aa, Homo Sapiens
DIYRNTSWDNAGFKGY

SEQ ID NO: 93674 - protein, 16 aa, Homo Sapiens
IYRNTSWDNAGFKGYG

SEQ ID NO: 93675 - protein, 16 aa, Homo Sapiens
YRNTSWDNAGFKGYGI

SEQ ID NO: 93676 - protein, 16 aa, Homo Sapiens
RNTSWDNAGFKGYGIQ

SEQ ID NO: 93677 - protein, 16 aa, Homo Sapiens
NTSWDNAGFKGYGIQI

SEQ ID NO: 93678 - protein, 16 aa, Homo Sapiens
TSWDNAGFKGYGIQIE

SEQ ID NO: 93679 - protein, 16 aa, Homo Sapiens
SWDNAGFKGYGIQIEQ

SEQ ID NO: 93680 - protein, 16 aa, Homo Sapiens
WDNAGFKGYGIQIEQI

SEQ ID NO: 93681 - protein, 16 aa, Homo Sapiens
DNAGFKGYGIQIEQIR

SEQ ID NO: 93682 - protein, 16 aa, Homo Sapiens
NAGFKGYGIQIEQIRI

SEQ ID NO: 93683 - protein, 16 aa, Homo Sapiens
AGFKGYGIQIEQIRIL

SEQ ID NO: 93684 - protein, 16 aa, Homo Sapiens
GFKGYGIQIEQIRILK

SEQ ID NO: 93685 - protein, 16 aa, Homo Sapiens
FKGYGIQIEQIRILKS

SEQ ID NO: 93686 - protein, 16 aa, Homo Sapiens
KGYGIQIEQIRILKSP

SEQ ID NO: 93687 - protein, 16 aa, Homo Sapiens
GYGIQIEQIRILKSPQ

SEQ ID NO: 93688 - protein, 16 aa, Homo Sapiens
YGIQIEQIRILKSPQE

SEQ ID NO: 93689 - protein, 16 aa, Homo Sapiens
GIQIEQIRILKSPQEV

SEQ ID NO: 93690 - protein, 16 aa, Homo Sapiens
IQIEQIRILKSPQEVK

SEQ ID NO: 93691 - protein, 16 aa, Homo Sapiens
QIEQIRILKSPQEVKP

SEQ ID NO: 93692 - protein, 16 aa, Homo Sapiens
IEQIRILKSPQEVKPG

SEQ ID NO: 93693 - protein, 16 aa, Homo Sapiens
EQIRILKSPQEVKPGE

SEQ ID NO: 93694 - protein, 16 aa, Homo Sapiens
QIRILKSPQEVKPGEK

SEQ ID NO: 93695 - protein, 16 aa, Homo Sapiens
IRILKSPQEVKPGEKH

SEQ ID NO: 93696 - protein, 16 aa, Homo Sapiens
RILKSPQEVKPGEKHY

SEQ ID NO: 93697 - protein, 16 aa, Homo Sapiens
ILKSPQEVKPGEKHYN

SEQ ID NO: 93698 - protein, 16 aa, Homo Sapiens
LKSPQEVKPGEKHYNM

SEQ ID NO: 93699 - protein, 16 aa, Homo Sapiens
KSPQEVKPGEKHYNMA

SEQ ID NO: 93700 - protein, 16 aa, Homo Sapiens
SPQEVKPGEKHYNMAK

SEQ ID NO: 93701 - protein, 16 aa, Homo Sapiens
PQEVKPGEKHYNMAKS

SEQ ID NO: 93702 - protein, 16 aa, Homo Sapiens
QEVKPGEKHYNMAKSY

SEQ ID NO: 93703 - protein, 16 aa, Homo Sapiens
EVKPGEKHYNMAKSYP

SEQ ID NO: 93704 - protein, 16 aa, Homo Sapiens
VKPGEKHYNMAKSYPN

SEQ ID NO: 93705 - protein, 16 aa, Homo Sapiens
KPGEKHYNMAKSYPNE

SEQ ID NO: 93706 - protein, 16 aa, Homo Sapiens
PGEKHYNMAKSYPNEE

SEQ ID NO: 93707 - protein, 16 aa, Homo Sapiens
GEKHYNMAKSYPNEEK

SEQ ID NO: 93708 - protein, 16 aa, Homo Sapiens
EKHYNMAKSYPNEEKD

SEQ ID NO: 93709 - protein, 16 aa, Homo Sapiens
KHYNMAKSYPNEEKDA

SEQ ID NO: 93710 - protein, 16 aa, Homo Sapiens
HYNMAKSYPNEEKDAW

SEQ ID NO: 93711 - protein, 16 aa, Homo Sapiens
YNMAKSYPNEEKDAWD

SEQ ID NO: 93712 - protein, 16 aa, Homo Sapiens
NMAKSYPNEEKDAWDV

SEQ ID NO: 93713 - protein, 16 aa, Homo Sapiens
MAKSYPNEEKDAWDVK

SEQ ID NO: 93714 - protein, 16 aa, Homo Sapiens
AKSYPNEEKDAWDVKM

SEQ ID NO: 93715 - protein, 16 aa, Homo Sapiens
KSYPNEEKDAWDVKML

SEQ ID NO: 93716 - protein, 16 aa, Homo Sapiens
SYPNEEKDAWDVKMLL

SEQ ID NO: 93717 - protein, 16 aa, Homo Sapiens
YPNEEKDAWDVKMLLE

SEQ ID NO: 93718 - protein, 16 aa, Homo Sapiens
PNEEKDAWDVKMLLEQ

SEQ ID NO: 93719 - protein, 16 aa, Homo Sapiens
NEEKDAWDVKMLLEQF

SEQ ID NO: 93720 - protein, 16 aa, Homo Sapiens
EEKDAWDVKMLLEQFS

SEQ ID NO: 93721 - protein, 16 aa, Homo Sapiens
EKDAWDVKMLLEQFSF

SEQ ID NO: 93722 - protein, 16 aa, Homo Sapiens
KDAWDVKMLLEQFSFD

SEQ ID NO: 93723 - protein, 16 aa, Homo Sapiens
DAWDVKMLLEQFSFDI

SEQ ID NO: 93724 - protein, 16 aa, Homo Sapiens
AWDVKMLLEQFSFDIA

SEQ ID NO: 93725 - protein, 16 aa, Homo Sapiens
WDVKMLLEQFSFDIAE

SEQ ID NO: 93726 - protein, 16 aa, Homo Sapiens
DVKMLLEQFSFDIAEE

SEQ ID NO: 93727 - protein, 16 aa, Homo Sapiens
VKMLLEQFSFDIAEEA

SEQ ID NO: 93728 - protein, 16 aa, Homo Sapiens
KMLLEQFSFDIAEEAS

SEQ ID NO: 93729 - protein, 16 aa, Homo Sapiens
MLLEQFSFDIAEEASK

SEQ ID NO: 93730 - protein, 16 aa, Homo Sapiens
LLEQFSFDIAEEASKV

SEQ ID NO: 93731 - protein, 16 aa, Homo Sapiens
LEQFSFDIAEEASKVC

SEQ ID NO: 93732 - protein, 16 aa, Homo Sapiens
EQFSFDIAEEASKVCL

SEQ ID NO: 93733 - protein, 16 aa, Homo Sapiens
QFSFDIAEEASKVCLA

SEQ ID NO: 93734 - protein, 16 aa, Homo Sapiens
FSFDIAEEASKVCLAH

SEQ ID NO: 93735 - protein, 16 aa, Homo Sapiens
SFDIAEEASKVCLAHL

SEQ ID NO: 93736 - protein, 16 aa, Homo Sapiens
FDIAEEASKVCLAHLF

SEQ ID NO: 93737 - protein, 16 aa, Homo Sapiens
DIAEEASKVCLAHLFT

SEQ ID NO: 93738 - protein, 16 aa, Homo Sapiens
IAEEASKVCLAHLFTY

SEQ ID NO: 93739 - protein, 16 aa, Homo Sapiens
AEEASKVCLAHLFTYQ

SEQ ID NO: 93740 - protein, 16 aa, Homo Sapiens
EEASKVCLAHLFTYQD

SEQ ID NO: 93741 - protein, 16 aa, Homo Sapiens
EASKVCLAHLFTYQDF

SEQ ID NO: 93742 - protein, 16 aa, Homo Sapiens
ASKVCLAHLFTYQDFD

SEQ ID NO: 93743 - protein, 16 aa, Homo Sapiens
SKVCLAHLFTYQDFDM

SEQ ID NO: 93744 - protein, 16 aa, Homo Sapiens
KVCLAHLFTYQDFDMG

SEQ ID NO: 93745 - protein, 16 aa, Homo Sapiens
VCLAHLFTYQDFDMGT

SEQ ID NO: 93746 - protein, 16 aa, Homo Sapiens
CLAHLFTYQDFDMGTL

SEQ ID NO: 93747 - protein, 16 aa, Homo Sapiens
LAHLFTYQDFDMGTLG

SEQ ID NO: 93748 - protein, 16 aa, Homo Sapiens
AHLFTYQDFDMGTLGL

SEQ ID NO: 93749 - protein, 16 aa, Homo Sapiens
HLFTYQDFDMGTLGLA

SEQ ID NO: 93750 - protein, 16 aa, Homo Sapiens
LFTYQDFDMGTLGLAY

SEQ ID NO: 93751 - protein, 16 aa, Homo Sapiens
FTYQDFDMGTLGLAYV

SEQ ID NO: 93752 - protein, 16 aa, Homo Sapiens
TYQDFDMGTLGLAYVG

SEQ ID NO: 93753 - protein, 16 aa, Homo Sapiens
YQDFDMGTLGLAYVGS

SEQ ID NO: 93754 - protein, 16 aa, Homo Sapiens
QDFDMGTLGLAYVGSP

SEQ ID NO: 93755 - protein, 16 aa, Homo Sapiens
DFDMGTLGLAYVGSPR

SEQ ID NO: 93756 - protein, 16 aa, Homo Sapiens
FDMGTLGLAYVGSPRA

SEQ ID NO: 93757 - protein, 16 aa, Homo Sapiens
DMGTLGLAYVGSPRAN

SEQ ID NO: 93758 - protein, 16 aa, Homo Sapiens
MGTLGLAYVGSPRANS

SEQ ID NO: 93759 - protein, 16 aa, Homo Sapiens
GTLGLAYVGSPRANSH

SEQ ID NO: 93760 - protein, 16 aa, Homo Sapiens
TLGLAYVGSPRANSHG

SEQ ID NO: 93761 - protein, 16 aa, Homo Sapiens
LGLAYVGSPRANSHGG

SEQ ID NO: 93762 - protein, 16 aa, Homo Sapiens
GLAYVGSPRANSHGGV

SEQ ID NO: 93763 - protein, 16 aa, Homo Sapiens
LAYVGSPRANSHGGVC

SEQ ID NO: 93764 - protein, 16 aa, Homo Sapiens
AYVGSPRANSHGGVCP

SEQ ID NO: 93765 - protein, 16 aa, Homo Sapiens
YVGSPRANSHGGVCPK

SEQ ID NO: 93766 - protein, 16 aa, Homo Sapiens
VGSPRANSHGGVCPKA

SEQ ID NO: 93767 - protein, 16 aa, Homo Sapiens
GSPRANSHGGVCPKAY

SEQ ID NO: 93768 - protein, 16 aa, Homo Sapiens
SPRANSHGGVCPKAYY

SEQ ID NO: 93769 - protein, 16 aa, Homo Sapiens
PRANSHGGVCPKAYYS

SEQ ID NO: 93770 - protein, 16 aa, Homo Sapiens
RANSHGGVCPKAYYSP

SEQ ID NO: 93771 - protein, 16 aa, Homo Sapiens
ANSHGGVCPKAYYSPV

SEQ ID NO: 93772 - protein, 16 aa, Homo Sapiens
NSHGGVCPKAYYSPVG

SEQ ID NO: 93773 - protein, 16 aa, Homo Sapiens
SHGGVCPKAYYSPVGK

SEQ ID NO: 93774 - protein, 16 aa, Homo Sapiens
HGGVCPKAYYSPVGKK

SEQ ID NO: 93775 - protein, 16 aa, Homo Sapiens
GGVCPKAYYSPVGKKN

SEQ ID NO: 93776 - protein, 16 aa, Homo Sapiens
GVCPKAYYSPVGKKNI

SEQ ID NO: 93777 - protein, 16 aa, Homo Sapiens
VCPKAYYSPVGKKNIY

SEQ ID NO: 93778 - protein, 16 aa, Homo Sapiens
CPKAYYSPVGKKNIYL

SEQ ID NO: 93779 - protein, 16 aa, Homo Sapiens
PKAYYSPVGKKNIYLN

SEQ ID NO: 93780 - protein, 16 aa, Homo Sapiens
KAYYSPVGKKNIYLNS

SEQ ID NO: 93781 - protein, 16 aa, Homo Sapiens
AYYSPVGKKNIYLNSG

SEQ ID NO: 93782 - protein, 16 aa, Homo Sapiens
YYSPVGKKNIYLNSGL

SEQ ID NO: 93783 - protein, 16 aa, Homo Sapiens
YSPVGKKNIYLNSGLT

SEQ ID NO: 93784 - protein, 16 aa, Homo Sapiens
SPVGKKNIYLNSGLTS

SEQ ID NO: 93785 - protein, 16 aa, Homo Sapiens
PVGKKNIYLNSGLTST

SEQ ID NO: 93786 - protein, 16 aa, Homo Sapiens
VGKKNIYLNSGLTSTK

SEQ ID NO: 93787 - protein, 16 aa, Homo Sapiens
GKKNIYLNSGLTSTKN

SEQ ID NO: 93788 - protein, 16 aa, Homo Sapiens
KKNIYLNSGLTSTKNY

SEQ ID NO: 93789 - protein, 16 aa, Homo Sapiens
KNIYLNSGLTSTKNYG

SEQ ID NO: 93790 - protein, 16 aa, Homo Sapiens
NIYLNSGLTSTKNYGK

SEQ ID NO: 93791 - protein, 16 aa, Homo Sapiens
IYLNSGLTSTKNYGKT

SEQ ID NO: 93792 - protein, 16 aa, Homo Sapiens
YLNSGLTSTKNYGKTI

SEQ ID NO: 93793 - protein, 16 aa, Homo Sapiens
LNSGLTSTKNYGKTIL

SEQ ID NO: 93794 - protein, 16 aa, Homo Sapiens
NSGLTSTKNYGKTILT

SEQ ID NO: 93795 - protein, 16 aa, Homo Sapiens
SGLTSTKNYGKTILTK

SEQ ID NO: 93796 - protein, 16 aa, Homo Sapiens
GLTSTKNYGKTILTKE

SEQ ID NO: 93797 - protein, 16 aa, Homo Sapiens
LTSTKNYGKTILTKEA

SEQ ID NO: 93798 - protein, 16 aa, Homo Sapiens
TSTKNYGKTILTKEAD

SEQ ID NO: 93799 - protein, 16 aa, Homo Sapiens
STKNYGKTILTKEADL

SEQ ID NO: 93800 - protein, 16 aa, Homo Sapiens
TKNYGKTILTKEADLV

SEQ ID NO: 93801 - protein, 16 aa, Homo Sapiens
KNYGKTILTKEADLVT

SEQ ID NO: 93802 - protein, 16 aa, Homo Sapiens
NYGKTILTKEADLVTT

SEQ ID NO: 93803 - protein, 16 aa, Homo Sapiens
YGKTILTKEADLVTTH

SEQ ID NO: 93804 - protein, 16 aa, Homo Sapiens
GKTILTKEADLVTTHE

SEQ ID NO: 93805 - protein, 16 aa, Homo Sapiens
KTILTKEADLVTTHEL

SEQ ID NO: 93806 - protein, 16 aa, Homo Sapiens
TILTKEADLVTTHELG

SEQ ID NO: 93807 - protein, 16 aa, Homo Sapiens
ILTKEADLVTTHELGH

SEQ ID NO: 93808 - protein, 16 aa, Homo Sapiens
LTKEADLVTTHELGHN

SEQ ID NO: 93809 - protein, 16 aa, Homo Sapiens
TKEADLVTTHELGHNF

SEQ ID NO: 93810 - protein, 16 aa, Homo Sapiens
KEADLVTTHELGHNFG

SEQ ID NO: 93811 - protein, 16 aa, Homo Sapiens
EADLVTTHELGHNFGA

SEQ ID NO: 93812 - protein, 16 aa, Homo Sapiens
ADLVTTHELGHNFGAE

SEQ ID NO: 93813 - protein, 16 aa, Homo Sapiens
DLVTTHELGHNFGAEH

SEQ ID NO: 93814 - protein, 16 aa, Homo Sapiens
LVTTHELGHNFGAEHD

SEQ ID NO: 93815 - protein, 16 aa, Homo Sapiens
VTTHELGHNFGAEHDP

SEQ ID NO: 93816 - protein, 16 aa, Homo Sapiens
TTHELGHNFGAEHDPD

SEQ ID NO: 93817 - protein, 16 aa, Homo Sapiens
THELGHNFGAEHDPDG

SEQ ID NO: 93818 - protein, 16 aa, Homo Sapiens
HELGHNFGAEHDPDGL

SEQ ID NO: 93819 - protein, 16 aa, Homo Sapiens
ELGHNFGAEHDPDGLA

SEQ ID NO: 93820 - protein, 16 aa, Homo Sapiens
LGHNFGAEHDPDGLAE

SEQ ID NO: 93821 - protein, 16 aa, Homo Sapiens
GHNFGAEHDPDGLAEC

SEQ ID NO: 93822 - protein, 16 aa, Homo Sapiens
HNFGAEHDPDGLAECA

SEQ ID NO: 93823 - protein, 16 aa, Homo Sapiens
NFGAEHDPDGLAECAP

SEQ ID NO: 93824 - protein, 16 aa, Homo Sapiens
FGAEHDPDGLAECAPN

SEQ ID NO: 93825 - protein, 16 aa, Homo Sapiens
GAEHDPDGLAECAPNE

SEQ ID NO: 93826 - protein, 16 aa, Homo Sapiens
AEHDPDGLAECAPNED

SEQ ID NO: 93827 - protein, 16 aa, Homo Sapiens
EHDPDGLAECAPNEDQ

SEQ ID NO: 93828 - protein, 16 aa, Homo Sapiens
HDPDGLAECAPNEDQG

SEQ ID NO: 93829 - protein, 16 aa, Homo Sapiens
DPDGLAECAPNEDQGG

SEQ ID NO: 93830 - protein, 16 aa, Homo Sapiens
PDGLAECAPNEDQGGK

SEQ ID NO: 93831 - protein, 16 aa, Homo Sapiens
DGLAECAPNEDQGGKY

SEQ ID NO: 93832 - protein, 16 aa, Homo Sapiens
GLAECAPNEDQGGKYV

SEQ ID NO: 93833 - protein, 16 aa, Homo Sapiens
LAECAPNEDQGGKYVM

SEQ ID NO: 93834 - protein, 16 aa, Homo Sapiens
AECAPNEDQGGKYVMY

SEQ ID NO: 93835 - protein, 16 aa, Homo Sapiens
ECAPNEDQGGKYVMYP

SEQ ID NO: 93836 - protein, 16 aa, Homo Sapiens
CAPNEDQGGKYVMYPI

SEQ ID NO: 93837 - protein, 16 aa, Homo Sapiens
APNEDQGGKYVMYPIA

SEQ ID NO: 93838 - protein, 16 aa, Homo Sapiens
PNEDQGGKYVMYPIAV

SEQ ID NO: 93839 - protein, 16 aa, Homo Sapiens
NEDQGGKYVMYPIAVS

SEQ ID NO: 93840 - protein, 16 aa, Homo Sapiens
EDQGGKYVMYPIAVSG

SEQ ID NO: 93841 - protein, 16 aa, Homo Sapiens
DQGGKYVMYPIAVSGD

SEQ ID NO: 93842 - protein, 16 aa, Homo Sapiens
QGGKYVMYPIAVSGDH

SEQ ID NO: 93843 - protein, 16 aa, Homo Sapiens
GGKYVMYPIAVSGDHE

SEQ ID NO: 93844 - protein, 16 aa, Homo Sapiens
GKYVMYPIAVSGDHEN

SEQ ID NO: 93845 - protein, 16 aa, Homo Sapiens
KYVMYPIAVSGDHENN

SEQ ID NO: 93846 - protein, 16 aa, Homo Sapiens
YVMYPIAVSGDHENNK

SEQ ID NO: 93847 - protein, 16 aa, Homo Sapiens
VMYPIAVSGDHENNKM

SEQ ID NO: 93848 - protein, 16 aa, Homo Sapiens
MYPIAVSGDHENNKMF

SEQ ID NO: 93849 - protein, 16 aa, Homo Sapiens
YPIAVSGDHENNKMFS

SEQ ID NO: 93850 - protein, 16 aa, Homo Sapiens
PIAVSGDHENNKMFSN

SEQ ID NO: 93851 - protein, 16 aa, Homo Sapiens
IAVSGDHENNKMFSNC

SEQ ID NO: 93852 - protein, 16 aa, Homo Sapiens
AVSGDHENNKMFSNCS

SEQ ID NO: 93853 - protein, 16 aa, Homo Sapiens
VSGDHENNKMFSNCSK

SEQ ID NO: 93854 - protein, 16 aa, Homo Sapiens
SGDHENNKMFSNCSKQ

SEQ ID NO: 93855 - protein, 16 aa, Homo Sapiens
GDHENNKMFSNCSKQS

SEQ ID NO: 93856 - protein, 16 aa, Homo Sapiens
DHENNKMFSNCSKQSI

SEQ ID NO: 93857 - protein, 16 aa, Homo Sapiens
HENNKMFSNCSKQSIY

SEQ ID NO: 93858 - protein, 16 aa, Homo Sapiens
ENNKMFSNCSKQSIYK

SEQ ID NO: 93859 - protein, 16 aa, Homo Sapiens
NNKMFSNCSKQSIYKT

SEQ ID NO: 93860 - protein, 16 aa, Homo Sapiens
NKMFSNCSKQSIYKTI

SEQ ID NO: 93861 - protein, 16 aa, Homo Sapiens
KMFSNCSKQSIYKTIE

SEQ ID NO: 93862 - protein, 16 aa, Homo Sapiens
MFSNCSKQSIYKTIES

SEQ ID NO: 93863 - protein, 16 aa, Homo Sapiens
FSNCSKQSIYKTIESK

SEQ ID NO: 93864 - protein, 16 aa, Homo Sapiens
SNCSKQSIYKTIESKA

SEQ ID NO: 93865 - protein, 16 aa, Homo Sapiens
NCSKQSIYKTIESKAQ

SEQ ID NO: 93866 - protein, 16 aa, Homo Sapiens
CSKQSIYKTIESKAQE

SEQ ID NO: 93867 - protein, 16 aa, Homo Sapiens
SKQSIYKTIESKAQEC

SEQ ID NO: 93868 - protein, 16 aa, Homo Sapiens
KQSIYKTIESKAQECF

SEQ ID NO: 93869 - protein, 16 aa, Homo Sapiens
QSIYKTIESKAQECFQ

SEQ ID NO: 93870 - protein, 16 aa, Homo Sapiens
SIYKTIESKAQECFQE

SEQ ID NO: 93871 - protein, 16 aa, Homo Sapiens
IYKTIESKAQECFQER

SEQ ID NO: 93872 - protein, 16 aa, Homo Sapiens
YKTIESKAQECFQERS

SEQ ID NO: 93873 - protein, 16 aa, Homo Sapiens
KTIESKAQECFQERSN

SEQ ID NO: 93874 - protein, 16 aa, Homo Sapiens
TIESKAQECFQERSNK

SEQ ID NO: 93875 - protein, 16 aa, Homo Sapiens
IESKAQECFQERSNKV

SEQ ID NO: 93876 - protein, 16 aa, Homo Sapiens
ESKAQECFQERSNKVC

SEQ ID NO: 93877 - protein, 16 aa, Homo Sapiens
SKAQECFQERSNKVCG

SEQ ID NO: 93878 - protein, 16 aa, Homo Sapiens
KAQECFQERSNKVCGN

SEQ ID NO: 93879 - protein, 16 aa, Homo Sapiens
AQECFQERSNKVCGNS

SEQ ID NO: 93880 - protein, 16 aa, Homo Sapiens
QECFQERSNKVCGNSR

SEQ ID NO: 93881 - protein, 16 aa, Homo Sapiens
ECFQERSNKVCGNSRV

SEQ ID NO: 93882 - protein, 16 aa, Homo Sapiens
CFQERSNKVCGNSRVD

SEQ ID NO: 93883 - protein, 16 aa, Homo Sapiens
FQERSNKVCGNSRVDE

SEQ ID NO: 93884 - protein, 16 aa, Homo Sapiens
QERSNKVCGNSRVDEG

SEQ ID NO: 93885 - protein, 16 aa, Homo Sapiens
ERSNKVCGNSRVDEGE

SEQ ID NO: 93886 - protein, 16 aa, Homo Sapiens
RSNKVCGNSRVDEGEE

SEQ ID NO: 93887 - protein, 16 aa, Homo Sapiens
SNKVCGNSRVDEGEEC

SEQ ID NO: 93888 - protein, 16 aa, Homo Sapiens
NKVCGNSRVDEGEECD

SEQ ID NO: 93889 - protein, 16 aa, Homo Sapiens
KVCGNSRVDEGEECDP

SEQ ID NO: 93890 - protein, 16 aa, Homo Sapiens
VCGNSRVDEGEECDPG

SEQ ID NO: 93891 - protein, 16 aa, Homo Sapiens
CGNSRVDEGEECDPGI

SEQ ID NO: 93892 - protein, 16 aa, Homo Sapiens
GNSRVDEGEECDPGIM

SEQ ID NO: 93893 - protein, 16 aa, Homo Sapiens
NSRVDEGEECDPGIMY

SEQ ID NO: 93894 - protein, 16 aa, Homo Sapiens
SRVDEGEECDPGIMYL

SEQ ID NO: 93895 - protein, 16 aa, Homo Sapiens
RVDEGEECDPGIMYLN

SEQ ID NO: 93896 - protein, 16 aa, Homo Sapiens
VDEGEECDPGIMYLNN

SEQ ID NO: 93897 - protein, 16 aa, Homo Sapiens
DEGEECDPGIMYLNND

SEQ ID NO: 93898 - protein, 16 aa, Homo Sapiens
EGEECDPGIMYLNNDT

SEQ ID NO: 93899 - protein, 16 aa, Homo Sapiens
GEECDPGIMYLNNDTC

SEQ ID NO: 93900 - protein, 16 aa, Homo Sapiens
EECDPGIMYLNNDTCC

SEQ ID NO: 93901 - protein, 16 aa, Homo Sapiens
ECDPGIMYLNNDTCCN

SEQ ID NO: 93902 - protein, 16 aa, Homo Sapiens
CDPGIMYLNNDTCCNS

SEQ ID NO: 93903 - protein, 16 aa, Homo Sapiens
DPGIMYLNNDTCCNSD

SEQ ID NO: 93904 - protein, 16 aa, Homo Sapiens
PGIMYLNNDTCCNSDC

SEQ ID NO: 93905 - protein, 16 aa, Homo Sapiens
GIMYLNNDTCCNSDCT

SEQ ID NO: 93906 - protein, 16 aa, Homo Sapiens
IMYLNNDTCCNSDCTL

SEQ ID NO: 93907 - protein, 16 aa, Homo Sapiens
MYLNNDTCCNSDCTLK

SEQ ID NO: 93908 - protein, 16 aa, Homo Sapiens
YLNNDTCCNSDCTLKE

SEQ ID NO: 93909 - protein, 16 aa, Homo Sapiens
LNNDTCCNSDCTLKEG

SEQ ID NO: 93910 - protein, 16 aa, Homo Sapiens
NNDTCCNSDCTLKEGV

SEQ ID NO: 93911 - protein, 16 aa, Homo Sapiens
NDTCCNSDCTLKEGVQ

SEQ ID NO: 93912 - protein, 16 aa, Homo Sapiens
DTCCNSDCTLKEGVQC

SEQ ID NO: 93913 - protein, 16 aa, Homo Sapiens
TCCNSDCTLKEGVQCS

SEQ ID NO: 93914 - protein, 16 aa, Homo Sapiens
CCNSDCTLKEGVQCSD

SEQ ID NO: 93915 - protein, 16 aa, Homo Sapiens
CNSDCTLKEGVQCSDR

SEQ ID NO: 93916 - protein, 16 aa, Homo Sapiens
NSDCTLKEGVQCSDRN

SEQ ID NO: 93917 - protein, 16 aa, Homo Sapiens
SDCTLKEGVQCSDRNS

SEQ ID NO: 93918 - protein, 16 aa, Homo Sapiens
DCTLKEGVQCSDRNSP

SEQ ID NO: 93919 - protein, 16 aa, Homo Sapiens
CTLKEGVQCSDRNSPC

SEQ ID NO: 93920 - protein, 16 aa, Homo Sapiens
TLKEGVQCSDRNSPCC

SEQ ID NO: 93921 - protein, 16 aa, Homo Sapiens
LKEGVQCSDRNSPCCK

SEQ ID NO: 93922 - protein, 16 aa, Homo Sapiens
KEGVQCSDRNSPCCKN

SEQ ID NO: 93923 - protein, 16 aa, Homo Sapiens
EGVQCSDRNSPCCKNC

SEQ ID NO: 93924 - protein, 16 aa, Homo Sapiens
GVQCSDRNSPCCKNCQ

SEQ ID NO: 93925 - protein, 16 aa, Homo Sapiens
VQCSDRNSPCCKNCQF

SEQ ID NO: 93926 - protein, 16 aa, Homo Sapiens
QCSDRNSPCCKNCQFE

SEQ ID NO: 93927 - protein, 16 aa, Homo Sapiens
CSDRNSPCCKNCQFET

SEQ ID NO: 93928 - protein, 16 aa, Homo Sapiens
SDRNSPCCKNCQFETA

SEQ ID NO: 93929 - protein, 16 aa, Homo Sapiens
DRNSPCCKNCQFETAQ

SEQ ID NO: 93930 - protein, 16 aa, Homo Sapiens
RNSPCCKNCQFETAQK

SEQ ID NO: 93931 - protein, 16 aa, Homo Sapiens
NSPCCKNCQFETAQKK

SEQ ID NO: 93932 - protein, 16 aa, Homo Sapiens
SPCCKNCQFETAQKKC

SEQ ID NO: 93933 - protein, 16 aa, Homo Sapiens
PCCKNCQFETAQKKCQ

SEQ ID NO: 93934 - protein, 16 aa, Homo Sapiens
CCKNCQFETAQKKCQE

SEQ ID NO: 93935 - protein, 16 aa, Homo Sapiens
CKNCQFETAQKKCQEA

SEQ ID NO: 93936 - protein, 16 aa, Homo Sapiens
KNCQFETAQKKCQEAI

SEQ ID NO: 93937 - protein, 16 aa, Homo Sapiens
NCQFETAQKKCQEAIN

SEQ ID NO: 93938 - protein, 16 aa, Homo Sapiens
CQFETAQKKCQEAINA

SEQ ID NO: 93939 - protein, 16 aa, Homo Sapiens
QFETAQKKCQEAINAT

SEQ ID NO: 93940 - protein, 16 aa, Homo Sapiens
FETAQKKCQEAINATC

SEQ ID NO: 93941 - protein, 16 aa, Homo Sapiens
ETAQKKCQEAINATCK

SEQ ID NO: 93942 - protein, 16 aa, Homo Sapiens
TAQKKCQEAINATCKG

SEQ ID NO: 93943 - protein, 16 aa, Homo Sapiens
AQKKCQEAINATCKGV

SEQ ID NO: 93944 - protein, 16 aa, Homo Sapiens
QKKCQEAINATCKGVS

SEQ ID NO: 93945 - protein, 16 aa, Homo Sapiens
KKCQEAINATCKGVSY

SEQ ID NO: 93946 - protein, 16 aa, Homo Sapiens
KCQEAINATCKGVSYC

SEQ ID NO: 93947 - protein, 16 aa, Homo Sapiens
CQEAINATCKGVSYCT

SEQ ID NO: 93948 - protein, 16 aa, Homo Sapiens
QEAINATCKGVSYCTG

SEQ ID NO: 93949 - protein, 16 aa, Homo Sapiens
EAINATCKGVSYCTGN

SEQ ID NO: 93950 - protein, 16 aa, Homo Sapiens
AINATCKGVSYCTGNS

SEQ ID NO: 93951 - protein, 16 aa, Homo Sapiens
INATCKGVSYCTGNSS

SEQ ID NO: 93952 - protein, 16 aa, Homo Sapiens
NATCKGVSYCTGNSSE

SEQ ID NO: 93953 - protein, 16 aa, Homo Sapiens
ATCKGVSYCTGNSSEC

SEQ ID NO: 93954 - protein, 16 aa, Homo Sapiens
TCKGVSYCTGNSSECP

SEQ ID NO: 93955 - protein, 16 aa, Homo Sapiens
CKGVSYCTGNSSECPP

SEQ ID NO: 93956 - protein, 16 aa, Homo Sapiens
KGVSYCTGNSSECPPP

SEQ ID NO: 93957 - protein, 16 aa, Homo Sapiens
GVSYCTGNSSECPPPG

SEQ ID NO: 93958 - protein, 16 aa, Homo Sapiens
VSYCTGNSSECPPPGN

SEQ ID NO: 93959 - protein, 16 aa, Homo Sapiens
SYCTGNSSECPPPGNA

SEQ ID NO: 93960 - protein, 16 aa, Homo Sapiens
YCTGNSSECPPPGNAE

SEQ ID NO: 93961 - protein, 16 aa, Homo Sapiens
CTGNSSECPPPGNAED

SEQ ID NO: 93962 - protein, 16 aa, Homo Sapiens
TGNSSECPPPGNAEDD

SEQ ID NO: 93963 - protein, 16 aa, Homo Sapiens
GNSSECPPPGNAEDDT

SEQ ID NO: 93964 - protein, 16 aa, Homo Sapiens
NSSECPPPGNAEDDTV

SEQ ID NO: 93965 - protein, 16 aa, Homo Sapiens
SSECPPPGNAEDDTVC

SEQ ID NO: 93966 - protein, 16 aa, Homo Sapiens
SECPPPGNAEDDTVCL

SEQ ID NO: 93967 - protein, 16 aa, Homo Sapiens
ECPPPGNAEDDTVCLD

SEQ ID NO: 93968 - protein, 16 aa, Homo Sapiens
CPPPGNAEDDTVCLDL

SEQ ID NO: 93969 - protein, 16 aa, Homo Sapiens
PPPGNAEDDTVCLDLG

SEQ ID NO: 93970 - protein, 16 aa, Homo Sapiens
PPGNAEDDTVCLDLGK

SEQ ID NO: 93971 - protein, 16 aa, Homo Sapiens
PGNAEDDTVCLDLGKC

SEQ ID NO: 93972 - protein, 16 aa, Homo Sapiens
GNAEDDTVCLDLGKCK

SEQ ID NO: 93973 - protein, 16 aa, Homo Sapiens
NAEDDTVCLDLGKCKD

SEQ ID NO: 93974 - protein, 16 aa, Homo Sapiens
AEDDTVCLDLGKCKDG

SEQ ID NO: 93975 - protein, 16 aa, Homo Sapiens
EDDTVCLDLGKCKDGK

SEQ ID NO: 93976 - protein, 16 aa, Homo Sapiens
DDTVCLDLGKCKDGKC

SEQ ID NO: 93977 - protein, 16 aa, Homo Sapiens
DTVCLDLGKCKDGKCI

SEQ ID NO: 93978 - protein, 16 aa, Homo Sapiens
TVCLDLGKCKDGKCIP

SEQ ID NO: 93979 - protein, 16 aa, Homo Sapiens
VCLDLGKCKDGKCIPF

SEQ ID NO: 93980 - protein, 16 aa, Homo Sapiens
CLDLGKCKDGKCIPFC

SEQ ID NO: 93981 - protein, 16 aa, Homo Sapiens
LDLGKCKDGKCIPFCE

SEQ ID NO: 93982 - protein, 16 aa, Homo Sapiens
DLGKCKDGKCIPFCER

SEQ ID NO: 93983 - protein, 16 aa, Homo Sapiens
LGKCKDGKCIPFCERE

SEQ ID NO: 93984 - protein, 16 aa, Homo Sapiens
GKCKDGKCIPFCEREQ

SEQ ID NO: 93985 - protein, 16 aa, Homo Sapiens
KCKDGKCIPFCEREQQ

SEQ ID NO: 93986 - protein, 16 aa, Homo Sapiens
CKDGKCIPFCEREQQL

SEQ ID NO: 93987 - protein, 16 aa, Homo Sapiens
KDGKCIPFCEREQQLE

SEQ ID NO: 93988 - protein, 16 aa, Homo Sapiens
DGKCIPFCEREQQLES

SEQ ID NO: 93989 - protein, 16 aa, Homo Sapiens
GKCIPFCEREQQLESC

SEQ ID NO: 93990 - protein, 16 aa, Homo Sapiens
KCIPFCEREQQLESCA

SEQ ID NO: 93991 - protein, 16 aa, Homo Sapiens
CIPFCEREQQLESCAC

SEQ ID NO: 93992 - protein, 16 aa, Homo Sapiens
IPFCEREQQLESCACN

SEQ ID NO: 93993 - protein, 16 aa, Homo Sapiens
PFCEREQQLESCACNE

SEQ ID NO: 93994 - protein, 16 aa, Homo Sapiens
FCEREQQLESCACNET

SEQ ID NO: 93995 - protein, 16 aa, Homo Sapiens
CEREQQLESCACNETD

SEQ ID NO: 93996 - protein, 16 aa, Homo Sapiens
EREQQLESCACNETDN

SEQ ID NO: 93997 - protein, 16 aa, Homo Sapiens
REQQLESCACNETDNS

SEQ ID NO: 93998 - protein, 16 aa, Homo Sapiens
EQQLESCACNETDNSC

SEQ ID NO: 93999 - protein, 16 aa, Homo Sapiens
QQLESCACNETDNSCK

SEQ ID NO: 94000 - protein, 16 aa, Homo Sapiens
QLESCACNETDNSCKV

SEQ ID NO: 94001 - protein, 16 aa, Homo Sapiens
LESCACNETDNSCKVC

SEQ ID NO: 94002 - protein, 16 aa, Homo Sapiens
ESCACNETDNSCKVCC

SEQ ID NO: 94003 - protein, 16 aa, Homo Sapiens
SCACNETDNSCKVCCR

SEQ ID NO: 94004 - protein, 16 aa, Homo Sapiens
CACNETDNSCKVCCRD

SEQ ID NO: 94005 - protein, 16 aa, Homo Sapiens
ACNETDNSCKVCCRDL

SEQ ID NO: 94006 - protein, 16 aa, Homo Sapiens
CNETDNSCKVCCRDLS

SEQ ID NO: 94007 - protein, 16 aa, Homo Sapiens
NETDNSCKVCCRDLSG

SEQ ID NO: 94008 - protein, 16 aa, Homo Sapiens
ETDNSCKVCCRDLSGR

SEQ ID NO: 94009 - protein, 16 aa, Homo Sapiens
TDNSCKVCCRDLSGRC

SEQ ID NO: 94010 - protein, 16 aa, Homo Sapiens
DNSCKVCCRDLSGRCV

SEQ ID NO: 94011 - protein, 16 aa, Homo Sapiens
NSCKVCCRDLSGRCVP

SEQ ID NO: 94012 - protein, 16 aa, Homo Sapiens
SCKVCCRDLSGRCVPY

SEQ ID NO: 94013 - protein, 16 aa, Homo Sapiens
CKVCCRDLSGRCVPYV

SEQ ID NO: 94014 - protein, 16 aa, Homo Sapiens
KVCCRDLSGRCVPYVD

SEQ ID NO: 94015 - protein, 16 aa, Homo Sapiens
VCCRDLSGRCVPYVDA

SEQ ID NO: 94016 - protein, 16 aa, Homo Sapiens
CCRDLSGRCVPYVDAE

SEQ ID NO: 94017 - protein, 16 aa, Homo Sapiens
CRDLSGRCVPYVDAEQ

SEQ ID NO: 94018 - protein, 16 aa, Homo Sapiens
RDLSGRCVPYVDAEQK

SEQ ID NO: 94019 - protein, 16 aa, Homo Sapiens
DLSGRCVPYVDAEQKN

SEQ ID NO: 94020 - protein, 16 aa, Homo Sapiens
LSGRCVPYVDAEQKNL

SEQ ID NO: 94021 - protein, 16 aa, Homo Sapiens
SGRCVPYVDAEQKNLF

SEQ ID NO: 94022 - protein, 16 aa, Homo Sapiens
GRCVPYVDAEQKNLFL

SEQ ID NO: 94023 - protein, 16 aa, Homo Sapiens
RCVPYVDAEQKNLFLR

SEQ ID NO: 94024 - protein, 16 aa, Homo Sapiens
CVPYVDAEQKNLFLRK

SEQ ID NO: 94025 - protein, 16 aa, Homo Sapiens
VPYVDAEQKNLFLRKG

SEQ ID NO: 94026 - protein, 16 aa, Homo Sapiens
PYVDAEQKNLFLRKGK

SEQ ID NO: 94027 - protein, 16 aa, Homo Sapiens
YVDAEQKNLFLRKGKP

SEQ ID NO: 94028 - protein, 16 aa, Homo Sapiens
VDAEQKNLFLRKGKPC

SEQ ID NO: 94029 - protein, 16 aa, Homo Sapiens
DAEQKNLFLRKGKPCT

SEQ ID NO: 94030 - protein, 16 aa, Homo Sapiens
AEQKNLFLRKGKPCTV

SEQ ID NO: 94031 - protein, 16 aa, Homo Sapiens
EQKNLFLRKGKPCTVG

SEQ ID NO: 94032 - protein, 16 aa, Homo Sapiens
QKNLFLRKGKPCTVGF

SEQ ID NO: 94033 - protein, 16 aa, Homo Sapiens
KNLFLRKGKPCTVGFC

SEQ ID NO: 94034 - protein, 16 aa, Homo Sapiens
NLFLRKGKPCTVGFCD

SEQ ID NO: 94035 - protein, 16 aa, Homo Sapiens
LFLRKGKPCTVGFCDM

SEQ ID NO: 94036 - protein, 16 aa, Homo Sapiens
FLRKGKPCTVGFCDMN

SEQ ID NO: 94037 - protein, 16 aa, Homo Sapiens
LRKGKPCTVGFCDMNG

SEQ ID NO: 94038 - protein, 16 aa, Homo Sapiens
RKGKPCTVGFCDMNGK

SEQ ID NO: 94039 - protein, 16 aa, Homo Sapiens
KGKPCTVGFCDMNGKC

SEQ ID NO: 94040 - protein, 16 aa, Homo Sapiens
GKPCTVGFCDMNGKCE

SEQ ID NO: 94041 - protein, 16 aa, Homo Sapiens
KPCTVGFCDMNGKCEK

SEQ ID NO: 94042 - protein, 16 aa, Homo Sapiens
PCTVGFCDMNGKCEKR

SEQ ID NO: 94043 - protein, 16 aa, Homo Sapiens
CTVGFCDMNGKCEKRV

SEQ ID NO: 94044 - protein, 16 aa, Homo Sapiens
TVGFCDMNGKCEKRVQ

SEQ ID NO: 94045 - protein, 16 aa, Homo Sapiens
VGFCDMNGKCEKRVQD

SEQ ID NO: 94046 - protein, 16 aa, Homo Sapiens
GFCDMNGKCEKRVQDV

SEQ ID NO: 94047 - protein, 16 aa, Homo Sapiens
FCDMNGKCEKRVQDVI

SEQ ID NO: 94048 - protein, 16 aa, Homo Sapiens
CDMNGKCEKRVQDVIE

SEQ ID NO: 94049 - protein, 16 aa, Homo Sapiens
DMNGKCEKRVQDVIER

SEQ ID NO: 94050 - protein, 16 aa, Homo Sapiens
MNGKCEKRVQDVIERF

SEQ ID NO: 94051 - protein, 16 aa, Homo Sapiens
NGKCEKRVQDVIERFW

SEQ ID NO: 94052 - protein, 16 aa, Homo Sapiens
GKCEKRVQDVIERFWD

SEQ ID NO: 94053 - protein, 16 aa, Homo Sapiens
KCEKRVQDVIERFWDF

SEQ ID NO: 94054 - protein, 16 aa, Homo Sapiens
CEKRVQDVIERFWDFI

SEQ ID NO: 94055 - protein, 16 aa, Homo Sapiens
EKRVQDVIERFWDFID

SEQ ID NO: 94056 - protein, 16 aa, Homo Sapiens
KRVQDVIERFWDFIDQ

SEQ ID NO: 94057 - protein, 16 aa, Homo Sapiens
RVQDVIERFWDFIDQL

SEQ ID NO: 94058 - protein, 16 aa, Homo Sapiens
VQDVIERFWDFIDQLS

SEQ ID NO: 94059 - protein, 16 aa, Homo Sapiens
QDVIERFWDFIDQLSI

SEQ ID NO: 94060 - protein, 16 aa, Homo Sapiens
DVIERFWDFIDQLSIN

SEQ ID NO: 94061 - protein, 16 aa, Homo Sapiens
VIERFWDFIDQLSINT

SEQ ID NO: 94062 - protein, 16 aa, Homo Sapiens
IERFWDFIDQLSINTF

SEQ ID NO: 94063 - protein, 16 aa, Homo Sapiens
ERFWDFIDQLSINTFG

SEQ ID NO: 94064 - protein, 16 aa, Homo Sapiens
RFWDFIDQLSINTFGK

SEQ ID NO: 94065 - protein, 16 aa, Homo Sapiens
FWDFIDQLSINTFGKF

SEQ ID NO: 94066 - protein, 16 aa, Homo Sapiens
WDFIDQLSINTFGKFL

SEQ ID NO: 94067 - protein, 16 aa, Homo Sapiens
DFIDQLSINTFGKFLA

SEQ ID NO: 94068 - protein, 16 aa, Homo Sapiens
FIDQLSINTFGKFLAD

SEQ ID NO: 94069 - protein, 16 aa, Homo Sapiens
IDQLSINTFGKFLADN

SEQ ID NO: 94070 - protein, 16 aa, Homo Sapiens
DQLSINTFGKFLADNI

SEQ ID NO: 94071 - protein, 16 aa, Homo Sapiens
QLSINTFGKFLADNIV

SEQ ID NO: 94072 - protein, 16 aa, Homo Sapiens
LSINTFGKFLADNIVG

SEQ ID NO: 94073 - protein, 16 aa, Homo Sapiens
SINTFGKFLADNIVGS

SEQ ID NO: 94074 - protein, 16 aa, Homo Sapiens
INTFGKFLADNIVGSV

SEQ ID NO: 94075 - protein, 16 aa, Homo Sapiens
NTFGKFLADNIVGSVL

SEQ ID NO: 94076 - protein, 16 aa, Homo Sapiens
TFGKFLADNIVGSVLV

SEQ ID NO: 94077 - protein, 16 aa, Homo Sapiens
FGKFLADNIVGSVLVF

SEQ ID NO: 94078 - protein, 16 aa, Homo Sapiens
GKFLADNIVGSVLVFS

SEQ ID NO: 94079 - protein, 16 aa, Homo Sapiens
KFLADNIVGSVLVFSL

SEQ ID NO: 94080 - protein, 16 aa, Homo Sapiens
FLADNIVGSVLVFSLI

SEQ ID NO: 94081 - protein, 16 aa, Homo Sapiens
LADNIVGSVLVFSLIF

SEQ ID NO: 94082 - protein, 16 aa, Homo Sapiens
ADNIVGSVLVFSLIFW

SEQ ID NO: 94083 - protein, 16 aa, Homo Sapiens
DNIVGSVLVFSLIFWI

SEQ ID NO: 94084 - protein, 16 aa, Homo Sapiens
NIVGSVLVFSLIFWIP

SEQ ID NO: 94085 - protein, 16 aa, Homo Sapiens
IVGSVLVFSLIFWIPF

SEQ ID NO: 94086 - protein, 16 aa, Homo Sapiens
VGSVLVFSLIFWIPFS

SEQ ID NO: 94087 - protein, 16 aa, Homo Sapiens
GSVLVFSLIFWIPFSI

SEQ ID NO: 94088 - protein, 16 aa, Homo Sapiens
SVLVFSLIFWIPFSIL

SEQ ID NO: 94089 - protein, 16 aa, Homo Sapiens
VLVFSLIFWIPFSILV

SEQ ID NO: 94090 - protein, 16 aa, Homo Sapiens
LVFSLIFWIPFSILVH

SEQ ID NO: 94091 - protein, 16 aa, Homo Sapiens
VFSLIFWIPFSILVHC

SEQ ID NO: 94092 - protein, 16 aa, Homo Sapiens
FSLIFWIPFSILVHCV

SEQ ID NO: 94093 - protein, 16 aa, Homo Sapiens
SLIFWIPFSILVHCVD

SEQ ID NO: 94094 - protein, 16 aa, Homo Sapiens
LIFWIPFSILVHCVDK

SEQ ID NO: 94095 - protein, 16 aa, Homo Sapiens
IFWIPFSILVHCVDKK

SEQ ID NO: 94096 - protein, 16 aa, Homo Sapiens
FWIPFSILVHCVDKKL

SEQ ID NO: 94097 - protein, 16 aa, Homo Sapiens
WIPFSILVHCVDKKLD

SEQ ID NO: 94098 - protein, 16 aa, Homo Sapiens
IPFSILVHCVDKKLDK

SEQ ID NO: 94099 - protein, 16 aa, Homo Sapiens
PFSILVHCVDKKLDKQ

SEQ ID NO: 94100 - protein, 16 aa, Homo Sapiens
FSILVHCVDKKLDKQY

SEQ ID NO: 94101 - protein, 16 aa, Homo Sapiens
SILVHCVDKKLDKQYE

SEQ ID NO: 94102 - protein, 16 aa, Homo Sapiens
ILVHCVDKKLDKQYES

SEQ ID NO: 94103 - protein, 16 aa, Homo Sapiens
LVHCVDKKLDKQYESL

SEQ ID NO: 94104 - protein, 16 aa, Homo Sapiens
VHCVDKKLDKQYESLS

SEQ ID NO: 94105 - protein, 16 aa, Homo Sapiens
HCVDKKLDKQYESLSL

SEQ ID NO: 94106 - protein, 16 aa, Homo Sapiens
CVDKKLDKQYESLSLF

SEQ ID NO: 94107 - protein, 16 aa, Homo Sapiens
VDKKLDKQYESLSLFH

SEQ ID NO: 94108 - protein, 16 aa, Homo Sapiens
DKKLDKQYESLSLFHP

SEQ ID NO: 94109 - protein, 16 aa, Homo Sapiens
KKLDKQYESLSLFHPS

SEQ ID NO: 94110 - protein, 16 aa, Homo Sapiens
KLDKQYESLSLFHPSN

SEQ ID NO: 94111 - protein, 16 aa, Homo Sapiens
LDKQYESLSLFHPSNV

SEQ ID NO: 94112 - protein, 16 aa, Homo Sapiens
DKQYESLSLFHPSNVE

SEQ ID NO: 94113 - protein, 16 aa, Homo Sapiens
KQYESLSLFHPSNVEM

SEQ ID NO: 94114 - protein, 16 aa, Homo Sapiens
QYESLSLFHPSNVEML

SEQ ID NO: 94115 - protein, 16 aa, Homo Sapiens
YESLSLFHPSNVEMLS

SEQ ID NO: 94116 - protein, 16 aa, Homo Sapiens
ESLSLFHPSNVEMLSS

SEQ ID NO: 94117 - protein, 16 aa, Homo Sapiens
SLSLFHPSNVEMLSSM

SEQ ID NO: 94118 - protein, 16 aa, Homo Sapiens
LSLFHPSNVEMLSSMD

SEQ ID NO: 94119 - protein, 16 aa, Homo Sapiens
SLFHPSNVEMLSSMDS

SEQ ID NO: 94120 - protein, 16 aa, Homo Sapiens
LFHPSNVEMLSSMDSA

SEQ ID NO: 94121 - protein, 16 aa, Homo Sapiens
FHPSNVEMLSSMDSAS

SEQ ID NO: 94122 - protein, 16 aa, Homo Sapiens
HPSNVEMLSSMDSASV

SEQ ID NO: 94123 - protein, 16 aa, Homo Sapiens
PSNVEMLSSMDSASVR

SEQ ID NO: 94124 - protein, 16 aa, Homo Sapiens
SNVEMLSSMDSASVRI

SEQ ID NO: 94125 - protein, 16 aa, Homo Sapiens
NVEMLSSMDSASVRII

SEQ ID NO: 94126 - protein, 16 aa, Homo Sapiens
VEMLSSMDSASVRIIK

SEQ ID NO: 94127 - protein, 16 aa, Homo Sapiens
EMLSSMDSASVRIIKP

SEQ ID NO: 94128 - protein, 16 aa, Homo Sapiens
MLSSMDSASVRIIKPF

SEQ ID NO: 94129 - protein, 16 aa, Homo Sapiens
LSSMDSASVRIIKPFP

SEQ ID NO: 94130 - protein, 16 aa, Homo Sapiens
SSMDSASVRIIKPFPA

SEQ ID NO: 94131 - protein, 16 aa, Homo Sapiens
SMDSASVRIIKPFPAP

SEQ ID NO: 94132 - protein, 16 aa, Homo Sapiens
MDSASVRIIKPFPAPQ

SEQ ID NO: 94133 - protein, 16 aa, Homo Sapiens
DSASVRIIKPFPAPQT

SEQ ID NO: 94134 - protein, 16 aa, Homo Sapiens
SASVRIIKPFPAPQTP

SEQ ID NO: 94135 - protein, 16 aa, Homo Sapiens
ASVRIIKPFPAPQTPG

SEQ ID NO: 94136 - protein, 16 aa, Homo Sapiens
SVRIIKPFPAPQTPGR

SEQ ID NO: 94137 - protein, 16 aa, Homo Sapiens
VRIIKPFPAPQTPGRL

SEQ ID NO: 94138 - protein, 16 aa, Homo Sapiens
RIIKPFPAPQTPGRLQ

SEQ ID NO: 94139 - protein, 16 aa, Homo Sapiens
IIKPFPAPQTPGRLQP

SEQ ID NO: 94140 - protein, 16 aa, Homo Sapiens
IKPFPAPQTPGRLQPA

SEQ ID NO: 94141 - protein, 16 aa, Homo Sapiens
KPFPAPQTPGRLQPAP

SEQ ID NO: 94142 - protein, 16 aa, Homo Sapiens
PFPAPQTPGRLQPAPV

SEQ ID NO: 94143 - protein, 16 aa, Homo Sapiens
FPAPQTPGRLQPAPVI

SEQ ID NO: 94144 - protein, 16 aa, Homo Sapiens
PAPQTPGRLQPAPVIP

SEQ ID NO: 94145 - protein, 16 aa, Homo Sapiens
APQTPGRLQPAPVIPS

SEQ ID NO: 94146 - protein, 16 aa, Homo Sapiens
PQTPGRLQPAPVIPSA

SEQ ID NO: 94147 - protein, 16 aa, Homo Sapiens
QTPGRLQPAPVIPSAP

SEQ ID NO: 94148 - protein, 16 aa, Homo Sapiens
TPGRLQPAPVIPSAPA

SEQ ID NO: 94149 - protein, 16 aa, Homo Sapiens
PGRLQPAPVIPSAPAA

SEQ ID NO: 94150 - protein, 16 aa, Homo Sapiens
GRLQPAPVIPSAPAAP

SEQ ID NO: 94151 - protein, 16 aa, Homo Sapiens
RLQPAPVIPSAPAAPK

SEQ ID NO: 94152 - protein, 16 aa, Homo Sapiens
LQPAPVIPSAPAAPKL

SEQ ID NO: 94153 - protein, 16 aa, Homo Sapiens
QPAPVIPSAPAAPKLD

SEQ ID NO: 94154 - protein, 16 aa, Homo Sapiens
PAPVIPSAPAAPKLDH

SEQ ID NO: 94155 - protein, 16 aa, Homo Sapiens
APVIPSAPAAPKLDHQ

SEQ ID NO: 94156 - protein, 16 aa, Homo Sapiens
PVIPSAPAAPKLDHQR

SEQ ID NO: 94157 - protein, 16 aa, Homo Sapiens
VIPSAPAAPKLDHQRM

SEQ ID NO: 94158 - protein, 16 aa, Homo Sapiens
IPSAPAAPKLDHQRMD

SEQ ID NO: 94159 - protein, 16 aa, Homo Sapiens
PSAPAAPKLDHQRMDT

SEQ ID NO: 94160 - protein, 16 aa, Homo Sapiens
SAPAAPKLDHQRMDTI

SEQ ID NO: 94161 - protein, 16 aa, Homo Sapiens
APAAPKLDHQRMDTIQ

SEQ ID NO: 94162 - protein, 16 aa, Homo Sapiens
PAAPKLDHQRMDTIQE

SEQ ID NO: 94163 - protein, 16 aa, Homo Sapiens
AAPKLDHQRMDTIQED

SEQ ID NO: 94164 - protein, 16 aa, Homo Sapiens
APKLDHQRMDTIQEDP

SEQ ID NO: 94165 - protein, 16 aa, Homo Sapiens
PKLDHQRMDTIQEDPS

SEQ ID NO: 94166 - protein, 16 aa, Homo Sapiens
KLDHQRMDTIQEDPST

SEQ ID NO: 94167 - protein, 16 aa, Homo Sapiens
LDHQRMDTIQEDPSTD

SEQ ID NO: 94168 - protein, 16 aa, Homo Sapiens
DHQRMDTIQEDPSTDS

SEQ ID NO: 94169 - protein, 16 aa, Homo Sapiens
HQRMDTIQEDPSTDSH

SEQ ID NO: 94170 - protein, 16 aa, Homo Sapiens
QRMDTIQEDPSTDSHM

SEQ ID NO: 94171 - protein, 16 aa, Homo Sapiens
RMDTIQEDPSTDSHMD

SEQ ID NO: 94172 - protein, 16 aa, Homo Sapiens
MDTIQEDPSTDSHMDE

SEQ ID NO: 94173 - protein, 16 aa, Homo Sapiens
DTIQEDPSTDSHMDED

SEQ ID NO: 94174 - protein, 16 aa, Homo Sapiens
TIQEDPSTDSHMDEDG

SEQ ID NO: 94175 - protein, 16 aa, Homo Sapiens
IQEDPSTDSHMDEDGF

SEQ ID NO: 94176 - protein, 16 aa, Homo Sapiens
QEDPSTDSHMDEDGFE

SEQ ID NO: 94177 - protein, 16 aa, Homo Sapiens
EDPSTDSHMDEDGFEK

SEQ ID NO: 94178 - protein, 16 aa, Homo Sapiens
DPSTDSHMDEDGFEKD

SEQ ID NO: 94179 - protein, 16 aa, Homo Sapiens
PSTDSHMDEDGFEKDP

SEQ ID NO: 94180 - protein, 16 aa, Homo Sapiens
STDSHMDEDGFEKDPF

SEQ ID NO: 94181 - protein, 16 aa, Homo Sapiens
TDSHMDEDGFEKDPFP

SEQ ID NO: 94182 - protein, 16 aa, Homo Sapiens
DSHMDEDGFEKDPFPN

SEQ ID NO: 94183 - protein, 16 aa, Homo Sapiens
SHMDEDGFEKDPFPNS

SEQ ID NO: 94184 - protein, 16 aa, Homo Sapiens
HMDEDGFEKDPFPNSS

SEQ ID NO: 94185 - protein, 16 aa, Homo Sapiens
MDEDGFEKDPFPNSST

SEQ ID NO: 94186 - protein, 16 aa, Homo Sapiens
DEDGFEKDPFPNSSTA

SEQ ID NO: 94187 - protein, 16 aa, Homo Sapiens
EDGFEKDPFPNSSTAA

SEQ ID NO: 94188 - protein, 16 aa, Homo Sapiens
DGFEKDPFPNSSTAAK

SEQ ID NO: 94189 - protein, 16 aa, Homo Sapiens
GFEKDPFPNSSTAAKS

SEQ ID NO: 94190 - protein, 16 aa, Homo Sapiens
FEKDPFPNSSTAAKSF

SEQ ID NO: 94191 - protein, 16 aa, Homo Sapiens
EKDPFPNSSTAAKSFE

SEQ ID NO: 94192 - protein, 16 aa, Homo Sapiens
KDPFPNSSTAAKSFED

SEQ ID NO: 94193 - protein, 16 aa, Homo Sapiens
DPFPNSSTAAKSFEDL

SEQ ID NO: 94194 - protein, 16 aa, Homo Sapiens
PFPNSSTAAKSFEDLT

SEQ ID NO: 94195 - protein, 16 aa, Homo Sapiens
FPNSSTAAKSFEDLTD

SEQ ID NO: 94196 - protein, 16 aa, Homo Sapiens
PNSSTAAKSFEDLTDH

SEQ ID NO: 94197 - protein, 16 aa, Homo Sapiens
NSSTAAKSFEDLTDHP

SEQ ID NO: 94198 - protein, 16 aa, Homo Sapiens
SSTAAKSFEDLTDHPV

SEQ ID NO: 94199 - protein, 16 aa, Homo Sapiens
STAAKSFEDLTDHPVT

SEQ ID NO: 94200 - protein, 16 aa, Homo Sapiens
TAAKSFEDLTDHPVTR

SEQ ID NO: 94201 - protein, 16 aa, Homo Sapiens
AAKSFEDLTDHPVTRS

SEQ ID NO: 94202 - protein, 16 aa, Homo Sapiens
AKSFEDLTDHPVTRSE

SEQ ID NO: 94203 - protein, 16 aa, Homo Sapiens
KSFEDLTDHPVTRSEK

SEQ ID NO: 94204 - protein, 16 aa, Homo Sapiens
SFEDLTDHPVTRSEKA

SEQ ID NO: 94205 - protein, 16 aa, Homo Sapiens
FEDLTDHPVTRSEKAA

SEQ ID NO: 94206 - protein, 16 aa, Homo Sapiens
EDLTDHPVTRSEKAAS

SEQ ID NO: 94207 - protein, 16 aa, Homo Sapiens
DLTDHPVTRSEKAASF

SEQ ID NO: 94208 - protein, 16 aa, Homo Sapiens
LTDHPVTRSEKAASFK

SEQ ID NO: 94209 - protein, 16 aa, Homo Sapiens
TDHPVTRSEKAASFKL

SEQ ID NO: 94210 - protein, 16 aa, Homo Sapiens
DHPVTRSEKAASFKLQ

SEQ ID NO: 94211 - protein, 16 aa, Homo Sapiens
HPVTRSEKAASFKLQR

SEQ ID NO: 94212 - protein, 16 aa, Homo Sapiens
PVTRSEKAASFKLQRQ

SEQ ID NO: 94213 - protein, 16 aa, Homo Sapiens
VTRSEKAASFKLQRQN

SEQ ID NO: 94214 - protein, 16 aa, Homo Sapiens
TRSEKAASFKLQRQNR

SEQ ID NO: 94215 - protein, 16 aa, Homo Sapiens
RSEKAASFKLQRQNRV

SEQ ID NO: 94216 - protein, 16 aa, Homo Sapiens
SEKAASFKLQRQNRVD

SEQ ID NO: 94217 - protein, 16 aa, Homo Sapiens
EKAASFKLQRQNRVDS

SEQ ID NO: 94218 - protein, 16 aa, Homo Sapiens
KAASFKLQRQNRVDSK

SEQ ID NO: 94219 - protein, 16 aa, Homo Sapiens
AASFKLQRQNRVDSKE

SEQ ID NO: 94220 - protein, 16 aa, Homo Sapiens
ASFKLQRQNRVDSKET

SEQ ID NO: 94221 - protein, 16 aa, Homo Sapiens
SFKLQRQNRVDSKETE

SEQ ID NO: 94222 - protein, 16 aa, Homo Sapiens
FKLQRQNRVDSKETEC

SEQ ID NO: 94223 - protein, 297 aa, Homo Sapiens
MEDYTKIEKIGEGTYGVVYKGRHKTTGQVVAMKKIRLESEEEGVPSTAIREISLLKELRHPNIVSLQDVLMQDSRLYLIFEFLSMDLKKYLDSIPPGQYMDSSLVKSYLYQILQGIVFCHSRRVLHRDLKPQNLLIDDKGTIKLADFGLARAFGIPIRVYTHEVVTLWYRSPEVLLGSARYSTPVDIWSIGTIFAELATKKPLFHGDSEIDQLFRIFRALGTPNNEVWPEVESLQDYKNTFPKWKPGSLASHVKNLDENGLDLLSKMLIYDPAKRISGKMALNHPYFNDLDNQIKKM

SEQ ID NO: 94224 - protein, 8 aa, Homo Sapiens
EDYTKIEK

SEQ ID NO: 94225 - protein, 8 aa, Homo Sapiens
DYTKIEKI

SEQ ID NO: 94226 - protein, 8 aa, Homo Sapiens
EKIGEGTY

SEQ ID NO: 94227 - protein, 8 aa, Homo Sapiens
EGTYGVVY

SEQ ID NO: 94228 - protein, 8 aa, Homo Sapiens
GTYGVVYK

SEQ ID NO: 94229 - protein, 8 aa, Homo Sapiens
VVYKGRHK

SEQ ID NO: 94230 - protein, 8 aa, Homo Sapiens
TTGQVVAM

SEQ ID NO: 94231 - protein, 8 aa, Homo Sapiens
GQVVAMKK

SEQ ID NO: 94232 - protein, 8 aa, Homo Sapiens
VVAMKKIR

SEQ ID NO: 94233 - protein, 8 aa, Homo Sapiens
EGVPSTAI

SEQ ID NO: 94234 - protein, 8 aa, Homo Sapiens
GVPSTAIR

SEQ ID NO: 94235 - protein, 8 aa, Homo Sapiens
TAIREISL

SEQ ID NO: 94236 - protein, 8 aa, Homo Sapiens
AIREISLL

SEQ ID NO: 94237 - protein, 8 aa, Homo Sapiens
EISLLKEL

SEQ ID NO: 94238 - protein, 8 aa, Homo Sapiens
ISLLKELR

SEQ ID NO: 94239 - protein, 8 aa, Homo Sapiens
KELRHPNI

SEQ ID NO: 94240 - protein, 8 aa, Homo Sapiens
ELRHPNIV

SEQ ID NO: 94241 - protein, 8 aa, Homo Sapiens
NIVSLQDV

SEQ ID NO: 94242 - protein, 8 aa, Homo Sapiens
SLQDVLMQ

SEQ ID NO: 94243 - protein, 8 aa, Homo Sapiens
DVLMQDSR

SEQ ID NO: 94244 - protein, 8 aa, Homo Sapiens
VLMQDSRL

SEQ ID NO: 94245 - protein, 8 aa, Homo Sapiens
LMQDSRLY

SEQ ID NO: 94246 - protein, 8 aa, Homo Sapiens
MQDSRLYL

SEQ ID NO: 94247 - protein, 8 aa, Homo Sapiens
RLYLIFEF

SEQ ID NO: 94248 - protein, 8 aa, Homo Sapiens
LYLIFEFL

SEQ ID NO: 94249 - protein, 8 aa, Homo Sapiens
YLIFEFLS

SEQ ID NO: 94250 - protein, 8 aa, Homo Sapiens
LIFEFLSM

SEQ ID NO: 94251 - protein, 8 aa, Homo Sapiens
FEFLSMDL

SEQ ID NO: 94252 - protein, 8 aa, Homo Sapiens
EFLSMDLK

SEQ ID NO: 94253 - protein, 8 aa, Homo Sapiens
FLSMDLKK

SEQ ID NO: 94254 - protein, 8 aa, Homo Sapiens
SMDLKKYL

SEQ ID NO: 94255 - protein, 8 aa, Homo Sapiens
YLDSIPPG

SEQ ID NO: 94256 - protein, 8 aa, Homo Sapiens
DSIPPGQY

SEQ ID NO: 94257 - protein, 8 aa, Homo Sapiens
SIPPGQYM

SEQ ID NO: 94258 - protein, 8 aa, Homo Sapiens
GQYMDSSL

SEQ ID NO: 94259 - protein, 8 aa, Homo Sapiens
QYMDSSLV

SEQ ID NO: 94260 - protein, 8 aa, Homo Sapiens
YMDSSLVK

SEQ ID NO: 94261 - protein, 8 aa, Homo Sapiens
SLVKSYLY

SEQ ID NO: 94262 - protein, 8 aa, Homo Sapiens
YLYQILQG

SEQ ID NO: 94263 - protein, 8 aa, Homo Sapiens
LYQILQGI

SEQ ID NO: 94264 - protein, 8 aa, Homo Sapiens
YQILQGIV

SEQ ID NO: 94265 - protein, 8 aa, Homo Sapiens
QILQGIVF

SEQ ID NO: 94266 - protein, 8 aa, Homo Sapiens
ILQGIVFC

SEQ ID NO: 94267 - protein, 8 aa, Homo Sapiens
GIVFCHSR

SEQ ID NO: 94268 - protein, 8 aa, Homo Sapiens
IVFCHSRR

SEQ ID NO: 94269 - protein, 8 aa, Homo Sapiens
FCHSRRVL

SEQ ID NO: 94270 - protein, 8 aa, Homo Sapiens
HSRRVLHR

SEQ ID NO: 94271 - protein, 8 aa, Homo Sapiens
RRVLHRDL

SEQ ID NO: 94272 - protein, 8 aa, Homo Sapiens
RVLHRDLK

SEQ ID NO: 94273 - protein, 8 aa, Homo Sapiens
DLKPQNLL

SEQ ID NO: 94274 - protein, 8 aa, Homo Sapiens
LLIDDKGT

SEQ ID NO: 94275 - protein, 8 aa, Homo Sapiens
LIDDKGTI

SEQ ID NO: 94276 - protein, 8 aa, Homo Sapiens
GTIKLADF

SEQ ID NO: 94277 - protein, 8 aa, Homo Sapiens
KLADFGLA

SEQ ID NO: 94278 - protein, 8 aa, Homo Sapiens
DFGLARAF

SEQ ID NO: 94279 - protein, 8 aa, Homo Sapiens
GLARAFGI

SEQ ID NO: 94280 - protein, 8 aa, Homo Sapiens
RAFGIPIR

SEQ ID NO: 94281 - protein, 8 aa, Homo Sapiens
AFGIPIRV

SEQ ID NO: 94282 - protein, 8 aa, Homo Sapiens
FGIPIRVY

SEQ ID NO: 94283 - protein, 8 aa, Homo Sapiens
RVYTHEVV

SEQ ID NO: 94284 - protein, 8 aa, Homo Sapiens
YTHEVVTL

SEQ ID NO: 94285 - protein, 8 aa, Homo Sapiens
HEVVTLWY

SEQ ID NO: 94286 - protein, 8 aa, Homo Sapiens
EVVTLWYR

SEQ ID NO: 94287 - protein, 8 aa, Homo Sapiens
WYRSPEVL

SEQ ID NO: 94288 - protein, 8 aa, Homo Sapiens
YRSPEVLL

SEQ ID NO: 94289 - protein, 8 aa, Homo Sapiens
EVLLGSAR

SEQ ID NO: 94290 - protein, 8 aa, Homo Sapiens
VLLGSARY

SEQ ID NO: 94291 - protein, 8 aa, Homo Sapiens
SARYSTPV

SEQ ID NO: 94292 - protein, 8 aa, Homo Sapiens
RYSTPVDI

SEQ ID NO: 94293 - protein, 8 aa, Homo Sapiens
YSTPVDIW

SEQ ID NO: 94294 - protein, 8 aa, Homo Sapiens
TPVDIWSI

SEQ ID NO: 94295 - protein, 8 aa, Homo Sapiens
DIWSIGTI

SEQ ID NO: 94296 - protein, 8 aa, Homo Sapiens
IWSIGTIF

SEQ ID NO: 94297 - protein, 8 aa, Homo Sapiens
WSIGTIFA

SEQ ID NO: 94298 - protein, 8 aa, Homo Sapiens
FAELATKK

SEQ ID NO: 94299 - protein, 8 aa, Homo Sapiens
ELATKKPL

SEQ ID NO: 94300 - protein, 8 aa, Homo Sapiens
SEIDQLFR

SEQ ID NO: 94301 - protein, 8 aa, Homo Sapiens
EIDQLFRI

SEQ ID NO: 94302 - protein, 8 aa, Homo Sapiens
DQLFRIFR

SEQ ID NO: 94303 - protein, 8 aa, Homo Sapiens
QLFRIFRA

SEQ ID NO: 94304 - protein, 8 aa, Homo Sapiens
LFRIFRAL

SEQ ID NO: 94305 - protein, 8 aa, Homo Sapiens
GTPNNEVW

SEQ ID NO: 94306 - protein, 8 aa, Homo Sapiens
VWPEVESL

SEQ ID NO: 94307 - protein, 8 aa, Homo Sapiens
EVESLQDY

SEQ ID NO: 94308 - protein, 8 aa, Homo Sapiens
SLQDYKNT

SEQ ID NO: 94309 - protein, 8 aa, Homo Sapiens
LQDYKNTF

SEQ ID NO: 94310 - protein, 8 aa, Homo Sapiens
DYKNTFPK

SEQ ID NO: 94311 - protein, 8 aa, Homo Sapiens
FPKWKPGS

SEQ ID NO: 94312 - protein, 8 aa, Homo Sapiens
GSLASHVK

SEQ ID NO: 94313 - protein, 8 aa, Homo Sapiens
DENGLDLL

SEQ ID NO: 94314 - protein, 8 aa, Homo Sapiens
GLDLLSKM

SEQ ID NO: 94315 - protein, 8 aa, Homo Sapiens
DLLSKMLI

SEQ ID NO: 94316 - protein, 8 aa, Homo Sapiens
LLSKMLIY

SEQ ID NO: 94317 - protein, 8 aa, Homo Sapiens
KMLIYDPA

SEQ ID NO: 94318 - protein, 8 aa, Homo Sapiens
MLIYDPAK

SEQ ID NO: 94319 - protein, 8 aa, Homo Sapiens
LIYDPAKR

SEQ ID NO: 94320 - protein, 8 aa, Homo Sapiens
IYDPAKRI

SEQ ID NO: 94321 - protein, 8 aa, Homo Sapiens
RISGKMAL

SEQ ID NO: 94322 - protein, 8 aa, Homo Sapiens
KMALNHPY

SEQ ID NO: 94323 - protein, 8 aa, Homo Sapiens
MALNHPYF

SEQ ID NO: 94324 - protein, 9 aa, Homo Sapiens
KIGEGTYGV

SEQ ID NO: 94325 - protein, 9 aa, Homo Sapiens
GEGTYGVVY

SEQ ID NO: 94326 - protein, 9 aa, Homo Sapiens
EGTYGVVYK

SEQ ID NO: 94327 - protein, 9 aa, Homo Sapiens
TYGVVYKGR

SEQ ID NO: 94328 - protein, 9 aa, Homo Sapiens
VVYKGRHKT

SEQ ID NO: 94329 - protein, 9 aa, Homo Sapiens
KTTGQVVAM

SEQ ID NO: 94330 - protein, 9 aa, Homo Sapiens
TTGQVVAMK

SEQ ID NO: 94331 - protein, 9 aa, Homo Sapiens
TGQVVAMKK

SEQ ID NO: 94332 - protein, 9 aa, Homo Sapiens
QVVAMKKIR

SEQ ID NO: 94333 - protein, 9 aa, Homo Sapiens
VVAMKKIRL

SEQ ID NO: 94334 - protein, 9 aa, Homo Sapiens
RLESEEEGV

SEQ ID NO: 94335 - protein, 9 aa, Homo Sapiens
EGVPSTAIR

SEQ ID NO: 94336 - protein, 9 aa, Homo Sapiens
VPSTAIREI

SEQ ID NO: 94337 - protein, 9 aa, Homo Sapiens
STAIREISL

SEQ ID NO: 94338 - protein, 9 aa, Homo Sapiens
TAIREISLL

SEQ ID NO: 94339 - protein, 9 aa, Homo Sapiens
AIREISLLK

SEQ ID NO: 94340 - protein, 9 aa, Homo Sapiens
REISLLKEL

SEQ ID NO: 94341 - protein, 9 aa, Homo Sapiens
EISLLKELR

SEQ ID NO: 94342 - protein, 9 aa, Homo Sapiens
KELRHPNIV

SEQ ID NO: 94343 - protein, 9 aa, Homo Sapiens
NIVSLQDVL

SEQ ID NO: 94344 - protein, 9 aa, Homo Sapiens
IVSLQDVLM

SEQ ID NO: 94345 - protein, 9 aa, Homo Sapiens
SLQDVLMQD

SEQ ID NO: 94346 - protein, 9 aa, Homo Sapiens
VLMQDSRLY

SEQ ID NO: 94347 - protein, 9 aa, Homo Sapiens
LMQDSRLYL

SEQ ID NO: 94348 - protein, 9 aa, Homo Sapiens
MQDSRLYLI

SEQ ID NO: 94349 - protein, 9 aa, Homo Sapiens
DSRLYLIFE

SEQ ID NO: 94350 - protein, 9 aa, Homo Sapiens
SRLYLIFEF

SEQ ID NO: 94351 - protein, 9 aa, Homo Sapiens
RLYLIFEFL

SEQ ID NO: 94352 - protein, 9 aa, Homo Sapiens
YLIFEFLSM

SEQ ID NO: 94353 - protein, 9 aa, Homo Sapiens
FEFLSMDLK

SEQ ID NO: 94354 - protein, 9 aa, Homo Sapiens
EFLSMDLKK

SEQ ID NO: 94355 - protein, 9 aa, Homo Sapiens
FLSMDLKKY

SEQ ID NO: 94356 - protein, 9 aa, Homo Sapiens
DLKKYLDSI

SEQ ID NO: 94357 - protein, 9 aa, Homo Sapiens
YLDSIPPGQ

SEQ ID NO: 94358 - protein, 9 aa, Homo Sapiens
DSIPPGQYM

SEQ ID NO: 94359 - protein, 9 aa, Homo Sapiens
SIPPGQYMD

SEQ ID NO: 94360 - protein, 9 aa, Homo Sapiens
GQYMDSSLV

SEQ ID NO: 94361 - protein, 9 aa, Homo Sapiens
QYMDSSLVK

SEQ ID NO: 94362 - protein, 9 aa, Homo Sapiens
YMDSSLVKS

SEQ ID NO: 94363 - protein, 9 aa, Homo Sapiens
DSSLVKSYL

SEQ ID NO: 94364 - protein, 9 aa, Homo Sapiens
SSLVKSYLY

SEQ ID NO: 94365 - protein, 9 aa, Homo Sapiens
SLVKSYLYQ

SEQ ID NO: 94366 - protein, 9 aa, Homo Sapiens
LVKSYLYQI

SEQ ID NO: 94367 - protein, 9 aa, Homo Sapiens
YLYQILQGI

SEQ ID NO: 94368 - protein, 9 aa, Homo Sapiens
YQILQGIVF

SEQ ID NO: 94369 - protein, 9 aa, Homo Sapiens
QILQGIVFC

SEQ ID NO: 94370 - protein, 9 aa, Homo Sapiens
QGIVFCHSR

SEQ ID NO: 94371 - protein, 9 aa, Homo Sapiens
GIVFCHSRR

SEQ ID NO: 94372 - protein, 9 aa, Homo Sapiens
IVFCHSRRV

SEQ ID NO: 94373 - protein, 9 aa, Homo Sapiens
RRVLHRDLK

SEQ ID NO: 94374 - protein, 9 aa, Homo Sapiens
HRDLKPQNL

SEQ ID NO: 94375 - protein, 9 aa, Homo Sapiens
DLKPQNLLI

SEQ ID NO: 94376 - protein, 9 aa, Homo Sapiens
LLIDDKGTI

SEQ ID NO: 94377 - protein, 9 aa, Homo Sapiens
TIKLADFGL

SEQ ID NO: 94378 - protein, 9 aa, Homo Sapiens
KLADFGLAR

SEQ ID NO: 94379 - protein, 9 aa, Homo Sapiens
LADFGLARA

SEQ ID NO: 94380 - protein, 9 aa, Homo Sapiens
FGLARAFGI

SEQ ID NO: 94381 - protein, 9 aa, Homo Sapiens
LARAFGIPI

SEQ ID NO: 94382 - protein, 9 aa, Homo Sapiens
RAFGIPIRV

SEQ ID NO: 94383 - protein, 9 aa, Homo Sapiens
FGIPIRVYT

SEQ ID NO: 94384 - protein, 9 aa, Homo Sapiens
PIRVYTHEV

SEQ ID NO: 94385 - protein, 9 aa, Homo Sapiens
VYTHEVVTL

SEQ ID NO: 94386 - protein, 9 aa, Homo Sapiens
YTHEVVTLW

SEQ ID NO: 94387 - protein, 9 aa, Homo Sapiens
HEVVTLWYR

SEQ ID NO: 94388 - protein, 9 aa, Homo Sapiens
EVVTLWYRS

SEQ ID NO: 94389 - protein, 9 aa, Homo Sapiens
TLWYRSPEV

SEQ ID NO: 94390 - protein, 9 aa, Homo Sapiens
LWYRSPEVL

SEQ ID NO: 94391 - protein, 9 aa, Homo Sapiens
WYRSPEVLL

SEQ ID NO: 94392 - protein, 9 aa, Homo Sapiens
SPEVLLGSA

SEQ ID NO: 94393 - protein, 9 aa, Homo Sapiens
EVLLGSARY

SEQ ID NO: 94394 - protein, 9 aa, Homo Sapiens
LLGSARYST

SEQ ID NO: 94395 - protein, 9 aa, Homo Sapiens
GSARYSTPV

SEQ ID NO: 94396 - protein, 9 aa, Homo Sapiens
RYSTPVDIW

SEQ ID NO: 94397 - protein, 9 aa, Homo Sapiens
STPVDIWSI

SEQ ID NO: 94398 - protein, 9 aa, Homo Sapiens
DIWSIGTIF

SEQ ID NO: 94399 - protein, 9 aa, Homo Sapiens
SIGTIFAEL

SEQ ID NO: 94400 - protein, 9 aa, Homo Sapiens
TIFAELATK

SEQ ID NO: 94401 - protein, 9 aa, Homo Sapiens
IFAELATKK

SEQ ID NO: 94402 - protein, 9 aa, Homo Sapiens
AELATKKPL

SEQ ID NO: 94403 - protein, 9 aa, Homo Sapiens
ELATKKPLF

SEQ ID NO: 94404 - protein, 9 aa, Homo Sapiens
PLFHGDSEI

SEQ ID NO: 94405 - protein, 9 aa, Homo Sapiens
DSEIDQLFR

SEQ ID NO: 94406 - protein, 9 aa, Homo Sapiens
SEIDQLFRI

SEQ ID NO: 94407 - protein, 9 aa, Homo Sapiens
EIDQLFRIF

SEQ ID NO: 94408 - protein, 9 aa, Homo Sapiens
IDQLFRIFR

SEQ ID NO: 94409 - protein, 9 aa, Homo Sapiens
QLFRIFRAL

SEQ ID NO: 94410 - protein, 9 aa, Homo Sapiens
ALGTPNNEV

SEQ ID NO: 94411 - protein, 9 aa, Homo Sapiens
LGTPNNEVW

SEQ ID NO: 94412 - protein, 9 aa, Homo Sapiens
TPNNEVWPE

SEQ ID NO: 94413 - protein, 9 aa, Homo Sapiens
EVWPEVESL

SEQ ID NO: 94414 - protein, 9 aa, Homo Sapiens
EVESLQDYK

SEQ ID NO: 94415 - protein, 9 aa, Homo Sapiens
SLQDYKNTF

SEQ ID NO: 94416 - protein, 9 aa, Homo Sapiens
QDYKNTFPK

SEQ ID NO: 94417 - protein, 9 aa, Homo Sapiens
DYKNTFPKW

SEQ ID NO: 94418 - protein, 9 aa, Homo Sapiens
FPKWKPGSL

SEQ ID NO: 94419 - protein, 9 aa, Homo Sapiens
KPGSLASHV

SEQ ID NO: 94420 - protein, 9 aa, Homo Sapiens
SLASHVKNL

SEQ ID NO: 94421 - protein, 9 aa, Homo Sapiens
NLDENGLDL

SEQ ID NO: 94422 - protein, 9 aa, Homo Sapiens
GLDLLSKML

SEQ ID NO: 94423 - protein, 9 aa, Homo Sapiens
DLLSKMLIY

SEQ ID NO: 94424 - protein, 9 aa, Homo Sapiens
SKMLIYDPA

SEQ ID NO: 94425 - protein, 9 aa, Homo Sapiens
KMLIYDPAK

SEQ ID NO: 94426 - protein, 9 aa, Homo Sapiens
MLIYDPAKR

SEQ ID NO: 94427 - protein, 9 aa, Homo Sapiens
LIYDPAKRI

SEQ ID NO: 94428 - protein, 9 aa, Homo Sapiens
DPAKRISGK

SEQ ID NO: 94429 - protein, 9 aa, Homo Sapiens
KRISGKMAL

SEQ ID NO: 94430 - protein, 9 aa, Homo Sapiens
GKMALNHPY

SEQ ID NO: 94431 - protein, 9 aa, Homo Sapiens
KMALNHPYF

SEQ ID NO: 94432 - protein, 9 aa, Homo Sapiens
YFNDLDNQI

SEQ ID NO: 94433 - protein, 9 aa, Homo Sapiens
DLDNQIKKM

SEQ ID NO: 94434 - protein, 10 aa, Homo Sapiens
EKIGEGTYGV

SEQ ID NO: 94435 - protein, 10 aa, Homo Sapiens
KIGEGTYGVV

SEQ ID NO: 94436 - protein, 10 aa, Homo Sapiens
GTYGVVYKGR

SEQ ID NO: 94437 - protein, 10 aa, Homo Sapiens
KTTGQVVAMK

SEQ ID NO: 94438 - protein, 10 aa, Homo Sapiens
TTGQVVAMKK

SEQ ID NO: 94439 - protein, 10 aa, Homo Sapiens
QVVAMKKIRL

SEQ ID NO: 94440 - protein, 10 aa, Homo Sapiens
STAIREISLL

SEQ ID NO: 94441 - protein, 10 aa, Homo Sapiens
TAIREISLLK

SEQ ID NO: 94442 - protein, 10 aa, Homo Sapiens
REISLLKELR

SEQ ID NO: 94443 - protein, 10 aa, Homo Sapiens
LLKELRHPNI

SEQ ID NO: 94444 - protein, 10 aa, Homo Sapiens
ELRHPNIVSL

SEQ ID NO: 94445 - protein, 10 aa, Homo Sapiens
NIVSLQDVLM

SEQ ID NO: 94446 - protein, 10 aa, Homo Sapiens
SLQDVLMQDS

SEQ ID NO: 94447 - protein, 10 aa, Homo Sapiens
DVLMQDSRLY

SEQ ID NO: 94448 - protein, 10 aa, Homo Sapiens
VLMQDSRLYL

SEQ ID NO: 94449 - protein, 10 aa, Homo Sapiens
LMQDSRLYLI

SEQ ID NO: 94450 - protein, 10 aa, Homo Sapiens
MQDSRLYLIF

SEQ ID NO: 94451 - protein, 10 aa, Homo Sapiens
DSRLYLIFEF

SEQ ID NO: 94452 - protein, 10 aa, Homo Sapiens
RLYLIFEFLS

SEQ ID NO: 94453 - protein, 10 aa, Homo Sapiens
LYLIFEFLSM

SEQ ID NO: 94454 - protein, 10 aa, Homo Sapiens
LIFEFLSMDL

SEQ ID NO: 94455 - protein, 10 aa, Homo Sapiens
IFEFLSMDLK

SEQ ID NO: 94456 - protein, 10 aa, Homo Sapiens
EFLSMDLKKY

SEQ ID NO: 94457 - protein, 10 aa, Homo Sapiens
FLSMDLKKYL

SEQ ID NO: 94458 - protein, 10 aa, Homo Sapiens
YLDSIPPGQY

SEQ ID NO: 94459 - protein, 10 aa, Homo Sapiens
PPGQYMDSSL

SEQ ID NO: 94460 - protein, 10 aa, Homo Sapiens
GQYMDSSLVK

SEQ ID NO: 94461 - protein, 10 aa, Homo Sapiens
YMDSSLVKSY

SEQ ID NO: 94462 - protein, 10 aa, Homo Sapiens
DSSLVKSYLY

SEQ ID NO: 94463 - protein, 10 aa, Homo Sapiens
SLVKSYLYQI

SEQ ID NO: 94464 - protein, 10 aa, Homo Sapiens
LVKSYLYQIL

SEQ ID NO: 94465 - protein, 10 aa, Homo Sapiens
SYLYQILQGI

SEQ ID NO: 94466 - protein, 10 aa, Homo Sapiens
YLYQILQGIV

SEQ ID NO: 94467 - protein, 10 aa, Homo Sapiens
LYQILQGIVF

SEQ ID NO: 94468 - protein, 10 aa, Homo Sapiens
YQILQGIVFC

SEQ ID NO: 94469 - protein, 10 aa, Homo Sapiens
LQGIVFCHSR

SEQ ID NO: 94470 - protein, 10 aa, Homo Sapiens
QGIVFCHSRR

SEQ ID NO: 94471 - protein, 10 aa, Homo Sapiens
GIVFCHSRRV

SEQ ID NO: 94472 - protein, 10 aa, Homo Sapiens
VFCHSRRVLH

SEQ ID NO: 94473 - protein, 10 aa, Homo Sapiens
FCHSRRVLHR

SEQ ID NO: 94474 - protein, 10 aa, Homo Sapiens
SRRVLHRDLK

SEQ ID NO: 94475 - protein, 10 aa, Homo Sapiens
RRVLHRDLKP

SEQ ID NO: 94476 - protein, 10 aa, Homo Sapiens
HRDLKPQNLL

SEQ ID NO: 94477 - protein, 10 aa, Homo Sapiens
NLLIDDKGTI

SEQ ID NO: 94478 - protein, 10 aa, Homo Sapiens
LLIDDKGTIK

SEQ ID NO: 94479 - protein, 10 aa, Homo Sapiens
LIDDKGTIKL

SEQ ID NO: 94480 - protein, 10 aa, Homo Sapiens
GTIKLADFGL

SEQ ID NO: 94481 - protein, 10 aa, Homo Sapiens
KLADFGLARA

SEQ ID NO: 94482 - protein, 10 aa, Homo Sapiens
LADFGLARAF

SEQ ID NO: 94483 - protein, 10 aa, Homo Sapiens
GLARAFGIPI

SEQ ID NO: 94484 - protein, 10 aa, Homo Sapiens
LARAFGIPIR

SEQ ID NO: 94485 - protein, 10 aa, Homo Sapiens
RAFGIPIRVY

SEQ ID NO: 94486 - protein, 10 aa, Homo Sapiens
IPIRVYTHEV

SEQ ID NO: 94487 - protein, 10 aa, Homo Sapiens
PIRVYTHEVV

SEQ ID NO: 94488 - protein, 10 aa, Homo Sapiens
RVYTHEVVTL

SEQ ID NO: 94489 - protein, 10 aa, Homo Sapiens
VYTHEVVTLW

SEQ ID NO: 94490 - protein, 10 aa, Homo Sapiens
YTHEVVTLWY

SEQ ID NO: 94491 - protein, 10 aa, Homo Sapiens
THEVVTLWYR

SEQ ID NO: 94492 - protein, 10 aa, Homo Sapiens
VTLWYRSPEV

SEQ ID NO: 94493 - protein, 10 aa, Homo Sapiens
TLWYRSPEVL

SEQ ID NO: 94494 - protein, 10 aa, Homo Sapiens
LWYRSPEVLL

SEQ ID NO: 94495 - protein, 10 aa, Homo Sapiens
PEVLLGSARY

SEQ ID NO: 94496 - protein, 10 aa, Homo Sapiens
VLLGSARYST

SEQ ID NO: 94497 - protein, 10 aa, Homo Sapiens
LGSARYSTPV

SEQ ID NO: 94498 - protein, 10 aa, Homo Sapiens
SARYSTPVDI

SEQ ID NO: 94499 - protein, 10 aa, Homo Sapiens
YSTPVDIWSI

SEQ ID NO: 94500 - protein, 10 aa, Homo Sapiens
TPVDIWSIGT

SEQ ID NO: 94501 - protein, 10 aa, Homo Sapiens
VDIWSIGTIF

SEQ ID NO: 94502 - protein, 10 aa, Homo Sapiens
DIWSIGTIFA

SEQ ID NO: 94503 - protein, 10 aa, Homo Sapiens
WSIGTIFAEL

SEQ ID NO: 94504 - protein, 10 aa, Homo Sapiens
SIGTIFAELA

SEQ ID NO: 94505 - protein, 10 aa, Homo Sapiens
GTIFAELATK

SEQ ID NO: 94506 - protein, 10 aa, Homo Sapiens
TIFAELATKK

SEQ ID NO: 94507 - protein, 10 aa, Homo Sapiens
FAELATKKPL

SEQ ID NO: 94508 - protein, 10 aa, Homo Sapiens
AELATKKPLF

SEQ ID NO: 94509 - protein, 10 aa, Homo Sapiens
KPLFHGDSEI

SEQ ID NO: 94510 - protein, 10 aa, Homo Sapiens
FHGDSEIDQL

SEQ ID NO: 94511 - protein, 10 aa, Homo Sapiens
SEIDQLFRIF

SEQ ID NO: 94512 - protein, 10 aa, Homo Sapiens
EIDQLFRIFR

SEQ ID NO: 94513 - protein, 10 aa, Homo Sapiens
RALGTPNNEV

SEQ ID NO: 94514 - protein, 10 aa, Homo Sapiens
TPNNEVWPEV

SEQ ID NO: 94515 - protein, 10 aa, Homo Sapiens
NEVWPEVESL

SEQ ID NO: 94516 - protein, 10 aa, Homo Sapiens
WPEVESLQDY

SEQ ID NO: 94517 - protein, 10 aa, Homo Sapiens
ESLQDYKNTF

SEQ ID NO: 94518 - protein, 10 aa, Homo Sapiens
SLQDYKNTFP

SEQ ID NO: 94519 - protein, 10 aa, Homo Sapiens
LQDYKNTFPK

SEQ ID NO: 94520 - protein, 10 aa, Homo Sapiens
DYKNTFPKWK

SEQ ID NO: 94521 - protein, 10 aa, Homo Sapiens
TFPKWKPGSL

SEQ ID NO: 94522 - protein, 10 aa, Homo Sapiens
FPKWKPGSLA

SEQ ID NO: 94523 - protein, 10 aa, Homo Sapiens
NLDENGLDLL

SEQ ID NO: 94524 - protein, 10 aa, Homo Sapiens
GLDLLSKMLI

SEQ ID NO: 94525 - protein, 10 aa, Homo Sapiens
KMLIYDPAKR

SEQ ID NO: 94526 - protein, 10 aa, Homo Sapiens
MLIYDPAKRI

SEQ ID NO: 94527 - protein, 10 aa, Homo Sapiens
DPAKRISGKM

SEQ ID NO: 94528 - protein, 10 aa, Homo Sapiens
AKRISGKMAL

SEQ ID NO: 94529 - protein, 10 aa, Homo Sapiens
SGKMALNHPY

SEQ ID NO: 94530 - protein, 10 aa, Homo Sapiens
ALNHPYFNDL

SEQ ID NO: 94531 - protein, 10 aa, Homo Sapiens
PYFNDLDNQI

SEQ ID NO: 94532 - protein, 11 aa, Homo Sapiens
KIGEGTYGVVY

SEQ ID NO: 94533 - protein, 11 aa, Homo Sapiens
EGTYGVVYKGR

SEQ ID NO: 94534 - protein, 11 aa, Homo Sapiens
TYGVVYKGRHK

SEQ ID NO: 94535 - protein, 11 aa, Homo Sapiens
YKGRHKTTGQV

SEQ ID NO: 94536 - protein, 11 aa, Homo Sapiens
KTTGQVVAMKK

SEQ ID NO: 94537 - protein, 11 aa, Homo Sapiens
GQVVAMKKIRL

SEQ ID NO: 94538 - protein, 11 aa, Homo Sapiens
KIRLESEEEGV

SEQ ID NO: 94539 - protein, 11 aa, Homo Sapiens
SEEEGVPSTAI

SEQ ID NO: 94540 - protein, 11 aa, Homo Sapiens
EGVPSTAIREI

SEQ ID NO: 94541 - protein, 11 aa, Homo Sapiens
VPSTAIREISL

SEQ ID NO: 94542 - protein, 11 aa, Homo Sapiens
STAIREISLLK

SEQ ID NO: 94543 - protein, 11 aa, Homo Sapiens
AIREISLLKEL

SEQ ID NO: 94544 - protein, 11 aa, Homo Sapiens
SLLKELRHPNI

SEQ ID NO: 94545 - protein, 11 aa, Homo Sapiens
LLKELRHPNIV

SEQ ID NO: 94546 - protein, 11 aa, Homo Sapiens
KELRHPNIVSL

SEQ ID NO: 94547 - protein, 11 aa, Homo Sapiens
HPNIVSLQDVL

SEQ ID NO: 94548 - protein, 11 aa, Homo Sapiens
SLQDVLMQDSR

SEQ ID NO: 94549 - protein, 11 aa, Homo Sapiens
LQDVLMQDSRL

SEQ ID NO: 94550 - protein, 11 aa, Homo Sapiens
DVLMQDSRLYL

SEQ ID NO: 94551 - protein, 11 aa, Homo Sapiens
VLMQDSRLYLI

SEQ ID NO: 94552 - protein, 11 aa, Homo Sapiens
LMQDSRLYLIF

SEQ ID NO: 94553 - protein, 11 aa, Homo Sapiens
MQDSRLYLIFE

SEQ ID NO: 94554 - protein, 11 aa, Homo Sapiens
DSRLYLIFEFL

SEQ ID NO: 94555 - protein, 11 aa, Homo Sapiens
RLYLIFEFLSM

SEQ ID NO: 94556 - protein, 11 aa, Homo Sapiens
YLIFEFLSMDL

SEQ ID NO: 94557 - protein, 11 aa, Homo Sapiens
LIFEFLSMDLK

SEQ ID NO: 94558 - protein, 11 aa, Homo Sapiens
IFEFLSMDLKK

SEQ ID NO: 94559 - protein, 11 aa, Homo Sapiens
FEFLSMDLKKY

SEQ ID NO: 94560 - protein, 11 aa, Homo Sapiens
SMDLKKYLDSI

SEQ ID NO: 94561 - protein, 11 aa, Homo Sapiens
KYLDSIPPGQY

SEQ ID NO: 94562 - protein, 11 aa, Homo Sapiens
YLDSIPPGQYM

SEQ ID NO: 94563 - protein, 11 aa, Homo Sapiens
SIPPGQYMDSS

SEQ ID NO: 94564 - protein, 11 aa, Homo Sapiens
IPPGQYMDSSL

SEQ ID NO: 94565 - protein, 11 aa, Homo Sapiens
QYMDSSLVKSY

SEQ ID NO: 94566 - protein, 11 aa, Homo Sapiens
YMDSSLVKSYL

SEQ ID NO: 94567 - protein, 11 aa, Homo Sapiens
SLVKSYLYQIL

SEQ ID NO: 94568 - protein, 11 aa, Homo Sapiens
KSYLYQILQGI

SEQ ID NO: 94569 - protein, 11 aa, Homo Sapiens
SYLYQILQGIV

SEQ ID NO: 94570 - protein, 11 aa, Homo Sapiens
YLYQILQGIVF

SEQ ID NO: 94571 - protein, 11 aa, Homo Sapiens
YQILQGIVFCH

SEQ ID NO: 94572 - protein, 11 aa, Homo Sapiens
ILQGIVFCHSR

SEQ ID NO: 94573 - protein, 11 aa, Homo Sapiens
LQGIVFCHSRR

SEQ ID NO: 94574 - protein, 11 aa, Homo Sapiens
QGIVFCHSRRV

SEQ ID NO: 94575 - protein, 11 aa, Homo Sapiens
IVFCHSRRVLH

SEQ ID NO: 94576 - protein, 11 aa, Homo Sapiens
VFCHSRRVLHR

SEQ ID NO: 94577 - protein, 11 aa, Homo Sapiens
HSRRVLHRDLK

SEQ ID NO: 94578 - protein, 11 aa, Homo Sapiens
RRVLHRDLKPQ

SEQ ID NO: 94579 - protein, 11 aa, Homo Sapiens
VLHRDLKPQNL

SEQ ID NO: 94580 - protein, 11 aa, Homo Sapiens
LLIDDKGTIKL

SEQ ID NO: 94581 - protein, 11 aa, Homo Sapiens
LIDDKGTIKLA

SEQ ID NO: 94582 - protein, 11 aa, Homo Sapiens
TIKLADFGLAR

SEQ ID NO: 94583 - protein, 11 aa, Homo Sapiens
KLADFGLARAF

SEQ ID NO: 94584 - protein, 11 aa, Homo Sapiens
LARAFGIPIRV

SEQ ID NO: 94585 - protein, 11 aa, Homo Sapiens
RAFGIPIRVYT

SEQ ID NO: 94586 - protein, 11 aa, Homo Sapiens
GIPIRVYTHEV

SEQ ID NO: 94587 - protein, 11 aa, Homo Sapiens
IPIRVYTHEVV

SEQ ID NO: 94588 - protein, 11 aa, Homo Sapiens
IRVYTHEVVTL

SEQ ID NO: 94589 - protein, 11 aa, Homo Sapiens
RVYTHEVVTLW

SEQ ID NO: 94590 - protein, 11 aa, Homo Sapiens
VYTHEVVTLWY

SEQ ID NO: 94591 - protein, 11 aa, Homo Sapiens
YTHEVVTLWYR

SEQ ID NO: 94592 - protein, 11 aa, Homo Sapiens
VVTLWYRSPEV

SEQ ID NO: 94593 - protein, 11 aa, Homo Sapiens
TLWYRSPEVLL

SEQ ID NO: 94594 - protein, 11 aa, Homo Sapiens
RSPEVLLGSAR

SEQ ID NO: 94595 - protein, 11 aa, Homo Sapiens
SPEVLLGSARY

SEQ ID NO: 94596 - protein, 11 aa, Homo Sapiens
LLGSARYSTPV

SEQ ID NO: 94597 - protein, 11 aa, Homo Sapiens
RYSTPVDIWSI

SEQ ID NO: 94598 - protein, 11 aa, Homo Sapiens
TPVDIWSIGTI

SEQ ID NO: 94599 - protein, 11 aa, Homo Sapiens
IWSIGTIFAEL

SEQ ID NO: 94600 - protein, 11 aa, Homo Sapiens
WSIGTIFAELA

SEQ ID NO: 94601 - protein, 11 aa, Homo Sapiens
GTIFAELATKK

SEQ ID NO: 94602 - protein, 11 aa, Homo Sapiens
FAELATKKPLF

SEQ ID NO: 94603 - protein, 11 aa, Homo Sapiens
SEIDQLFRIFR

SEQ ID NO: 94604 - protein, 11 aa, Homo Sapiens
EIDQLFRIFRA

SEQ ID NO: 94605 - protein, 11 aa, Homo Sapiens
QLFRIFRALGT

SEQ ID NO: 94606 - protein, 11 aa, Homo Sapiens
FRALGTPNNEV

SEQ ID NO: 94607 - protein, 11 aa, Homo Sapiens
RALGTPNNEVW

SEQ ID NO: 94608 - protein, 11 aa, Homo Sapiens
GTPNNEVWPEV

SEQ ID NO: 94609 - protein, 11 aa, Homo Sapiens
VWPEVESLQDY

SEQ ID NO: 94610 - protein, 11 aa, Homo Sapiens
VESLQDYKNTF

SEQ ID NO: 94611 - protein, 11 aa, Homo Sapiens
SLQDYKNTFPK

SEQ ID NO: 94612 - protein, 11 aa, Homo Sapiens
NTFPKWKPGSL

SEQ ID NO: 94613 - protein, 11 aa, Homo Sapiens
FPKWKPGSLAS

SEQ ID NO: 94614 - protein, 11 aa, Homo Sapiens
NLDENGLDLLS

SEQ ID NO: 94615 - protein, 11 aa, Homo Sapiens
GLDLLSKMLIY

SEQ ID NO: 94616 - protein, 11 aa, Homo Sapiens
LLSKMLIYDPA

SEQ ID NO: 94617 - protein, 11 aa, Homo Sapiens
LSKMLIYDPAK

SEQ ID NO: 94618 - protein, 11 aa, Homo Sapiens
KMLIYDPAKRI

SEQ ID NO: 94619 - protein, 11 aa, Homo Sapiens
IYDPAKRISGK

SEQ ID NO: 94620 - protein, 11 aa, Homo Sapiens
KRISGKMALNH

SEQ ID NO: 94621 - protein, 11 aa, Homo Sapiens
ISGKMALNHPY

SEQ ID NO: 94622 - protein, 11 aa, Homo Sapiens
MALNHPYFNDL

SEQ ID NO: 94623 - protein, 11 aa, Homo Sapiens
HPYFNDLDNQI

SEQ ID NO: 94624 - protein, 11 aa, Homo Sapiens
PYFNDLDNQIK

SEQ ID NO: 94625 - protein, 13 aa, Homo Sapiens
MEDYTKIEKIGEG

SEQ ID NO: 94626 - protein, 13 aa, Homo Sapiens
EDYTKIEKIGEGT

SEQ ID NO: 94627 - protein, 13 aa, Homo Sapiens
DYTKIEKIGEGTY

SEQ ID NO: 94628 - protein, 13 aa, Homo Sapiens
YTKIEKIGEGTYG

SEQ ID NO: 94629 - protein, 13 aa, Homo Sapiens
TKIEKIGEGTYGV

SEQ ID NO: 94630 - protein, 13 aa, Homo Sapiens
KIEKIGEGTYGVV

SEQ ID NO: 94631 - protein, 13 aa, Homo Sapiens
IEKIGEGTYGVVY

SEQ ID NO: 94632 - protein, 13 aa, Homo Sapiens
EKIGEGTYGVVYK

SEQ ID NO: 94633 - protein, 13 aa, Homo Sapiens
KIGEGTYGVVYKG

SEQ ID NO: 94634 - protein, 13 aa, Homo Sapiens
IGEGTYGVVYKGR

SEQ ID NO: 94635 - protein, 13 aa, Homo Sapiens
GEGTYGVVYKGRH

SEQ ID NO: 94636 - protein, 13 aa, Homo Sapiens
EGTYGVVYKGRHK

SEQ ID NO: 94637 - protein, 13 aa, Homo Sapiens
GTYGVVYKGRHKT

SEQ ID NO: 94638 - protein, 13 aa, Homo Sapiens
TYGVVYKGRHKTT

SEQ ID NO: 94639 - protein, 13 aa, Homo Sapiens
YGVVYKGRHKTTG

SEQ ID NO: 94640 - protein, 13 aa, Homo Sapiens
GVVYKGRHKTTGQ

SEQ ID NO: 94641 - protein, 13 aa, Homo Sapiens
VVYKGRHKTTGQV

SEQ ID NO: 94642 - protein, 13 aa, Homo Sapiens
VYKGRHKTTGQVV

SEQ ID NO: 94643 - protein, 13 aa, Homo Sapiens
YKGRHKTTGQVVA

SEQ ID NO: 94644 - protein, 13 aa, Homo Sapiens
KGRHKTTGQVVAM

SEQ ID NO: 94645 - protein, 13 aa, Homo Sapiens
GRHKTTGQVVAMK

SEQ ID NO: 94646 - protein, 13 aa, Homo Sapiens
RHKTTGQVVAMKK

SEQ ID NO: 94647 - protein, 13 aa, Homo Sapiens
HKTTGQVVAMKKI

SEQ ID NO: 94648 - protein, 13 aa, Homo Sapiens
KTTGQVVAMKKIR

SEQ ID NO: 94649 - protein, 13 aa, Homo Sapiens
TTGQVVAMKKIRL

SEQ ID NO: 94650 - protein, 13 aa, Homo Sapiens
TGQVVAMKKIRLE

SEQ ID NO: 94651 - protein, 13 aa, Homo Sapiens
GQVVAMKKIRLES

SEQ ID NO: 94652 - protein, 13 aa, Homo Sapiens
QVVAMKKIRLESE

SEQ ID NO: 94653 - protein, 13 aa, Homo Sapiens
VVAMKKIRLESEE

SEQ ID NO: 94654 - protein, 13 aa, Homo Sapiens
VAMKKIRLESEEE

SEQ ID NO: 94655 - protein, 13 aa, Homo Sapiens
AMKKIRLESEEEG

SEQ ID NO: 94656 - protein, 13 aa, Homo Sapiens
MKKIRLESEEEGV

SEQ ID NO: 94657 - protein, 13 aa, Homo Sapiens
KKIRLESEEEGVP

SEQ ID NO: 94658 - protein, 13 aa, Homo Sapiens
KIRLESEEEGVPS

SEQ ID NO: 94659 - protein, 13 aa, Homo Sapiens
IRLESEEEGVPST

SEQ ID NO: 94660 - protein, 13 aa, Homo Sapiens
RLESEEEGVPSTA

SEQ ID NO: 94661 - protein, 13 aa, Homo Sapiens
LESEEEGVPSTAI

SEQ ID NO: 94662 - protein, 13 aa, Homo Sapiens
ESEEEGVPSTAIR

SEQ ID NO: 94663 - protein, 13 aa, Homo Sapiens
SEEEGVPSTAIRE

SEQ ID NO: 94664 - protein, 13 aa, Homo Sapiens
EEEGVPSTAIREI

SEQ ID NO: 94665 - protein, 13 aa, Homo Sapiens
EEGVPSTAIREIS

SEQ ID NO: 94666 - protein, 13 aa, Homo Sapiens
EGVPSTAIREISL

SEQ ID NO: 94667 - protein, 13 aa, Homo Sapiens
GVPSTAIREISLL

SEQ ID NO: 94668 - protein, 13 aa, Homo Sapiens
VPSTAIREISLLK

SEQ ID NO: 94669 - protein, 13 aa, Homo Sapiens
PSTAIREISLLKE

SEQ ID NO: 94670 - protein, 13 aa, Homo Sapiens
STAIREISLLKEL

SEQ ID NO: 94671 - protein, 13 aa, Homo Sapiens
TAIREISLLKELR

SEQ ID NO: 94672 - protein, 13 aa, Homo Sapiens
AIREISLLKELRH

SEQ ID NO: 94673 - protein, 13 aa, Homo Sapiens
IREISLLKELRHP

SEQ ID NO: 94674 - protein, 13 aa, Homo Sapiens
REISLLKELRHPN

SEQ ID NO: 94675 - protein, 13 aa, Homo Sapiens
EISLLKELRHPNI

SEQ ID NO: 94676 - protein, 13 aa, Homo Sapiens
ISLLKELRHPNIV

SEQ ID NO: 94677 - protein, 13 aa, Homo Sapiens
SLLKELRHPNIVS

SEQ ID NO: 94678 - protein, 13 aa, Homo Sapiens
LLKELRHPNIVSL

SEQ ID NO: 94679 - protein, 13 aa, Homo Sapiens
LKELRHPNIVSLQ

SEQ ID NO: 94680 - protein, 13 aa, Homo Sapiens
KELRHPNIVSLQD

SEQ ID NO: 94681 - protein, 13 aa, Homo Sapiens
ELRHPNIVSLQDV

SEQ ID NO: 94682 - protein, 13 aa, Homo Sapiens
LRHPNIVSLQDVL

SEQ ID NO: 94683 - protein, 13 aa, Homo Sapiens
RHPNIVSLQDVLM

SEQ ID NO: 94684 - protein, 13 aa, Homo Sapiens
HPNIVSLQDVLMQ

SEQ ID NO: 94685 - protein, 13 aa, Homo Sapiens
PNIVSLQDVLMQD

SEQ ID NO: 94686 - protein, 13 aa, Homo Sapiens
NIVSLQDVLMQDS

SEQ ID NO: 94687 - protein, 13 aa, Homo Sapiens
IVSLQDVLMQDSR

SEQ ID NO: 94688 - protein, 13 aa, Homo Sapiens
VSLQDVLMQDSRL

SEQ ID NO: 94689 - protein, 13 aa, Homo Sapiens
SLQDVLMQDSRLY

SEQ ID NO: 94690 - protein, 13 aa, Homo Sapiens
LQDVLMQDSRLYL

SEQ ID NO: 94691 - protein, 13 aa, Homo Sapiens
QDVLMQDSRLYLI

SEQ ID NO: 94692 - protein, 13 aa, Homo Sapiens
DVLMQDSRLYLIF

SEQ ID NO: 94693 - protein, 13 aa, Homo Sapiens
VLMQDSRLYLIFE

SEQ ID NO: 94694 - protein, 13 aa, Homo Sapiens
LMQDSRLYLIFEF

SEQ ID NO: 94695 - protein, 13 aa, Homo Sapiens
MQDSRLYLIFEFL

SEQ ID NO: 94696 - protein, 13 aa, Homo Sapiens
QDSRLYLIFEFLS

SEQ ID NO: 94697 - protein, 13 aa, Homo Sapiens
DSRLYLIFEFLSM

SEQ ID NO: 94698 - protein, 13 aa, Homo Sapiens
SRLYLIFEFLSMD

SEQ ID NO: 94699 - protein, 13 aa, Homo Sapiens
RLYLIFEFLSMDL

SEQ ID NO: 94700 - protein, 13 aa, Homo Sapiens
LYLIFEFLSMDLK

SEQ ID NO: 94701 - protein, 13 aa, Homo Sapiens
YLIFEFLSMDLKK

SEQ ID NO: 94702 - protein, 13 aa, Homo Sapiens
LIFEFLSMDLKKY

SEQ ID NO: 94703 - protein, 13 aa, Homo Sapiens
IFEFLSMDLKKYL

SEQ ID NO: 94704 - protein, 13 aa, Homo Sapiens
FEFLSMDLKKYLD

SEQ ID NO: 94705 - protein, 13 aa, Homo Sapiens
EFLSMDLKKYLDS

SEQ ID NO: 94706 - protein, 13 aa, Homo Sapiens
FLSMDLKKYLDSI

SEQ ID NO: 94707 - protein, 13 aa, Homo Sapiens
LSMDLKKYLDSIP

SEQ ID NO: 94708 - protein, 13 aa, Homo Sapiens
SMDLKKYLDSIPP

SEQ ID NO: 94709 - protein, 13 aa, Homo Sapiens
MDLKKYLDSIPPG

SEQ ID NO: 94710 - protein, 13 aa, Homo Sapiens
DLKKYLDSIPPGQ

SEQ ID NO: 94711 - protein, 13 aa, Homo Sapiens
LKKYLDSIPPGQY

SEQ ID NO: 94712 - protein, 13 aa, Homo Sapiens
KKYLDSIPPGQYM

SEQ ID NO: 94713 - protein, 13 aa, Homo Sapiens
KYLDSIPPGQYMD

SEQ ID NO: 94714 - protein, 13 aa, Homo Sapiens
YLDSIPPGQYMDS

SEQ ID NO: 94715 - protein, 13 aa, Homo Sapiens
LDSIPPGQYMDSS

SEQ ID NO: 94716 - protein, 13 aa, Homo Sapiens
DSIPPGQYMDSSL

SEQ ID NO: 94717 - protein, 13 aa, Homo Sapiens
SIPPGQYMDSSLV

SEQ ID NO: 94718 - protein, 13 aa, Homo Sapiens
IPPGQYMDSSLVK

SEQ ID NO: 94719 - protein, 13 aa, Homo Sapiens
PPGQYMDSSLVKS

SEQ ID NO: 94720 - protein, 13 aa, Homo Sapiens
PGQYMDSSLVKSY

SEQ ID NO: 94721 - protein, 13 aa, Homo Sapiens
GQYMDSSLVKSYL

SEQ ID NO: 94722 - protein, 13 aa, Homo Sapiens
QYMDSSLVKSYLY

SEQ ID NO: 94723 - protein, 13 aa, Homo Sapiens
YMDSSLVKSYLYQ

SEQ ID NO: 94724 - protein, 13 aa, Homo Sapiens
MDSSLVKSYLYQI

SEQ ID NO: 94725 - protein, 13 aa, Homo Sapiens
DSSLVKSYLYQIL

SEQ ID NO: 94726 - protein, 13 aa, Homo Sapiens
SSLVKSYLYQILQ

SEQ ID NO: 94727 - protein, 13 aa, Homo Sapiens
SLVKSYLYQILQG

SEQ ID NO: 94728 - protein, 13 aa, Homo Sapiens
LVKSYLYQILQGI

SEQ ID NO: 94729 - protein, 13 aa, Homo Sapiens
VKSYLYQILQGIV

SEQ ID NO: 94730 - protein, 13 aa, Homo Sapiens
KSYLYQILQGIVF

SEQ ID NO: 94731 - protein, 13 aa, Homo Sapiens
SYLYQILQGIVFC

SEQ ID NO: 94732 - protein, 13 aa, Homo Sapiens
YLYQILQGIVFCH

SEQ ID NO: 94733 - protein, 13 aa, Homo Sapiens
LYQILQGIVFCHS

SEQ ID NO: 94734 - protein, 13 aa, Homo Sapiens
YQILQGIVFCHSR

SEQ ID NO: 94735 - protein, 13 aa, Homo Sapiens
QILQGIVFCHSRR

SEQ ID NO: 94736 - protein, 13 aa, Homo Sapiens
ILQGIVFCHSRRV

SEQ ID NO: 94737 - protein, 13 aa, Homo Sapiens
LQGIVFCHSRRVL

SEQ ID NO: 94738 - protein, 13 aa, Homo Sapiens
QGIVFCHSRRVLH

SEQ ID NO: 94739 - protein, 13 aa, Homo Sapiens
GIVFCHSRRVLHR

SEQ ID NO: 94740 - protein, 13 aa, Homo Sapiens
IVFCHSRRVLHRD

SEQ ID NO: 94741 - protein, 13 aa, Homo Sapiens
VFCHSRRVLHRDL

SEQ ID NO: 94742 - protein, 13 aa, Homo Sapiens
FCHSRRVLHRDLK

SEQ ID NO: 94743 - protein, 13 aa, Homo Sapiens
CHSRRVLHRDLKP

SEQ ID NO: 94744 - protein, 13 aa, Homo Sapiens
HSRRVLHRDLKPQ

SEQ ID NO: 94745 - protein, 13 aa, Homo Sapiens
SRRVLHRDLKPQN

SEQ ID NO: 94746 - protein, 13 aa, Homo Sapiens
RRVLHRDLKPQNL

SEQ ID NO: 94747 - protein, 13 aa, Homo Sapiens
RVLHRDLKPQNLL

SEQ ID NO: 94748 - protein, 13 aa, Homo Sapiens
VLHRDLKPQNLLI

SEQ ID NO: 94749 - protein, 13 aa, Homo Sapiens
LHRDLKPQNLLID

SEQ ID NO: 94750 - protein, 13 aa, Homo Sapiens
HRDLKPQNLLIDD

SEQ ID NO: 94751 - protein, 13 aa, Homo Sapiens
RDLKPQNLLIDDK

SEQ ID NO: 94752 - protein, 13 aa, Homo Sapiens
DLKPQNLLIDDKG

SEQ ID NO: 94753 - protein, 13 aa, Homo Sapiens
LKPQNLLIDDKGT

SEQ ID NO: 94754 - protein, 13 aa, Homo Sapiens
KPQNLLIDDKGTI

SEQ ID NO: 94755 - protein, 13 aa, Homo Sapiens
PQNLLIDDKGTIK

SEQ ID NO: 94756 - protein, 13 aa, Homo Sapiens
QNLLIDDKGTIKL

SEQ ID NO: 94757 - protein, 13 aa, Homo Sapiens
NLLIDDKGTIKLA

SEQ ID NO: 94758 - protein, 13 aa, Homo Sapiens
LLIDDKGTIKLAD

SEQ ID NO: 94759 - protein, 13 aa, Homo Sapiens
LIDDKGTIKLADF

SEQ ID NO: 94760 - protein, 13 aa, Homo Sapiens
IDDKGTIKLADFG

SEQ ID NO: 94761 - protein, 13 aa, Homo Sapiens
DDKGTIKLADFGL

SEQ ID NO: 94762 - protein, 13 aa, Homo Sapiens
DKGTIKLADFGLA

SEQ ID NO: 94763 - protein, 13 aa, Homo Sapiens
KGTIKLADFGLAR

SEQ ID NO: 94764 - protein, 13 aa, Homo Sapiens
GTIKLADFGLARA

SEQ ID NO: 94765 - protein, 13 aa, Homo Sapiens
TIKLADFGLARAF

SEQ ID NO: 94766 - protein, 13 aa, Homo Sapiens
IKLADFGLARAFG

SEQ ID NO: 94767 - protein, 13 aa, Homo Sapiens
KLADFGLARAFGI

SEQ ID NO: 94768 - protein, 13 aa, Homo Sapiens
LADFGLARAFGIP

SEQ ID NO: 94769 - protein, 13 aa, Homo Sapiens
ADFGLARAFGIPI

SEQ ID NO: 94770 - protein, 13 aa, Homo Sapiens
DFGLARAFGIPIR

SEQ ID NO: 94771 - protein, 13 aa, Homo Sapiens
FGLARAFGIPIRV

SEQ ID NO: 94772 - protein, 13 aa, Homo Sapiens
GLARAFGIPIRVY

SEQ ID NO: 94773 - protein, 13 aa, Homo Sapiens
LARAFGIPIRVYT

SEQ ID NO: 94774 - protein, 13 aa, Homo Sapiens
ARAFGIPIRVYTH

SEQ ID NO: 94775 - protein, 13 aa, Homo Sapiens
RAFGIPIRVYTHE

SEQ ID NO: 94776 - protein, 13 aa, Homo Sapiens
AFGIPIRVYTHEV

SEQ ID NO: 94777 - protein, 13 aa, Homo Sapiens
FGIPIRVYTHEVV

SEQ ID NO: 94778 - protein, 13 aa, Homo Sapiens
GIPIRVYTHEVVT

SEQ ID NO: 94779 - protein, 13 aa, Homo Sapiens
IPIRVYTHEVVTL

SEQ ID NO: 94780 - protein, 13 aa, Homo Sapiens
PIRVYTHEVVTLW

SEQ ID NO: 94781 - protein, 13 aa, Homo Sapiens
IRVYTHEVVTLWY

SEQ ID NO: 94782 - protein, 13 aa, Homo Sapiens
RVYTHEVVTLWYR

SEQ ID NO: 94783 - protein, 13 aa, Homo Sapiens
VYTHEVVTLWYRS

SEQ ID NO: 94784 - protein, 13 aa, Homo Sapiens
YTHEVVTLWYRSP

SEQ ID NO: 94785 - protein, 13 aa, Homo Sapiens
THEVVTLWYRSPE

SEQ ID NO: 94786 - protein, 13 aa, Homo Sapiens
HEVVTLWYRSPEV

SEQ ID NO: 94787 - protein, 13 aa, Homo Sapiens
EVVTLWYRSPEVL

SEQ ID NO: 94788 - protein, 13 aa, Homo Sapiens
VVTLWYRSPEVLL

SEQ ID NO: 94789 - protein, 13 aa, Homo Sapiens
VTLWYRSPEVLLG

SEQ ID NO: 94790 - protein, 13 aa, Homo Sapiens
TLWYRSPEVLLGS

SEQ ID NO: 94791 - protein, 13 aa, Homo Sapiens
LWYRSPEVLLGSA

SEQ ID NO: 94792 - protein, 13 aa, Homo Sapiens
WYRSPEVLLGSAR

SEQ ID NO: 94793 - protein, 13 aa, Homo Sapiens
YRSPEVLLGSARY

SEQ ID NO: 94794 - protein, 13 aa, Homo Sapiens
RSPEVLLGSARYS

SEQ ID NO: 94795 - protein, 13 aa, Homo Sapiens
SPEVLLGSARYST

SEQ ID NO: 94796 - protein, 13 aa, Homo Sapiens
PEVLLGSARYSTP

SEQ ID NO: 94797 - protein, 13 aa, Homo Sapiens
EVLLGSARYSTPV

SEQ ID NO: 94798 - protein, 13 aa, Homo Sapiens
VLLGSARYSTPVD

SEQ ID NO: 94799 - protein, 13 aa, Homo Sapiens
LLGSARYSTPVDI

SEQ ID NO: 94800 - protein, 13 aa, Homo Sapiens
LGSARYSTPVDIW

SEQ ID NO: 94801 - protein, 13 aa, Homo Sapiens
GSARYSTPVDIWS

SEQ ID NO: 94802 - protein, 13 aa, Homo Sapiens
SARYSTPVDIWSI

SEQ ID NO: 94803 - protein, 13 aa, Homo Sapiens
ARYSTPVDIWSIG

SEQ ID NO: 94804 - protein, 13 aa, Homo Sapiens
RYSTPVDIWSIGT

SEQ ID NO: 94805 - protein, 13 aa, Homo Sapiens
YSTPVDIWSIGTI

SEQ ID NO: 94806 - protein, 13 aa, Homo Sapiens
STPVDIWSIGTIF

SEQ ID NO: 94807 - protein, 13 aa, Homo Sapiens
TPVDIWSIGTIFA

SEQ ID NO: 94808 - protein, 13 aa, Homo Sapiens
PVDIWSIGTIFAE

SEQ ID NO: 94809 - protein, 13 aa, Homo Sapiens
VDIWSIGTIFAEL

SEQ ID NO: 94810 - protein, 13 aa, Homo Sapiens
DIWSIGTIFAELA

SEQ ID NO: 94811 - protein, 13 aa, Homo Sapiens
IWSIGTIFAELAT

SEQ ID NO: 94812 - protein, 13 aa, Homo Sapiens
WSIGTIFAELATK

SEQ ID NO: 94813 - protein, 13 aa, Homo Sapiens
SIGTIFAELATKK

SEQ ID NO: 94814 - protein, 13 aa, Homo Sapiens
IGTIFAELATKKP

SEQ ID NO: 94815 - protein, 13 aa, Homo Sapiens
GTIFAELATKKPL

SEQ ID NO: 94816 - protein, 13 aa, Homo Sapiens
TIFAELATKKPLF

SEQ ID NO: 94817 - protein, 13 aa, Homo Sapiens
IFAELATKKPLFH

SEQ ID NO: 94818 - protein, 13 aa, Homo Sapiens
FAELATKKPLFHG

SEQ ID NO: 94819 - protein, 13 aa, Homo Sapiens
AELATKKPLFHGD

SEQ ID NO: 94820 - protein, 13 aa, Homo Sapiens
ELATKKPLFHGDS

SEQ ID NO: 94821 - protein, 13 aa, Homo Sapiens
LATKKPLFHGDSE

SEQ ID NO: 94822 - protein, 13 aa, Homo Sapiens
ATKKPLFHGDSEI

SEQ ID NO: 94823 - protein, 13 aa, Homo Sapiens
TKKPLFHGDSEID

SEQ ID NO: 94824 - protein, 13 aa, Homo Sapiens
KKPLFHGDSEIDQ

SEQ ID NO: 94825 - protein, 13 aa, Homo Sapiens
KPLFHGDSEIDQL

SEQ ID NO: 94826 - protein, 13 aa, Homo Sapiens
PLFHGDSEIDQLF

SEQ ID NO: 94827 - protein, 13 aa, Homo Sapiens
LFHGDSEIDQLFR

SEQ ID NO: 94828 - protein, 13 aa, Homo Sapiens
FHGDSEIDQLFRI

SEQ ID NO: 94829 - protein, 13 aa, Homo Sapiens
HGDSEIDQLFRIF

SEQ ID NO: 94830 - protein, 13 aa, Homo Sapiens
GDSEIDQLFRIFR

SEQ ID NO: 94831 - protein, 13 aa, Homo Sapiens
DSEIDQLFRIFRA

SEQ ID NO: 94832 - protein, 13 aa, Homo Sapiens
SEIDQLFRIFRAL

SEQ ID NO: 94833 - protein, 13 aa, Homo Sapiens
EIDQLFRIFRALG

SEQ ID NO: 94834 - protein, 13 aa, Homo Sapiens
IDQLFRIFRALGT

SEQ ID NO: 94835 - protein, 13 aa, Homo Sapiens
DQLFRIFRALGTP

SEQ ID NO: 94836 - protein, 13 aa, Homo Sapiens
QLFRIFRALGTPN

SEQ ID NO: 94837 - protein, 13 aa, Homo Sapiens
LFRIFRALGTPNN

SEQ ID NO: 94838 - protein, 13 aa, Homo Sapiens
FRIFRALGTPNNE

SEQ ID NO: 94839 - protein, 13 aa, Homo Sapiens
RIFRALGTPNNEV

SEQ ID NO: 94840 - protein, 13 aa, Homo Sapiens
IFRALGTPNNEVW

SEQ ID NO: 94841 - protein, 13 aa, Homo Sapiens
FRALGTPNNEVWP

SEQ ID NO: 94842 - protein, 13 aa, Homo Sapiens
RALGTPNNEVWPE

SEQ ID NO: 94843 - protein, 13 aa, Homo Sapiens
ALGTPNNEVWPEV

SEQ ID NO: 94844 - protein, 13 aa, Homo Sapiens
LGTPNNEVWPEVE

SEQ ID NO: 94845 - protein, 13 aa, Homo Sapiens
GTPNNEVWPEVES

SEQ ID NO: 94846 - protein, 13 aa, Homo Sapiens
TPNNEVWPEVESL

SEQ ID NO: 94847 - protein, 13 aa, Homo Sapiens
PNNEVWPEVESLQ

SEQ ID NO: 94848 - protein, 13 aa, Homo Sapiens
NNEVWPEVESLQD

SEQ ID NO: 94849 - protein, 13 aa, Homo Sapiens
NEVWPEVESLQDY

SEQ ID NO: 94850 - protein, 13 aa, Homo Sapiens
EVWPEVESLQDYK

SEQ ID NO: 94851 - protein, 13 aa, Homo Sapiens
VWPEVESLQDYKN

SEQ ID NO: 94852 - protein, 13 aa, Homo Sapiens
WPEVESLQDYKNT

SEQ ID NO: 94853 - protein, 13 aa, Homo Sapiens
PEVESLQDYKNTF

SEQ ID NO: 94854 - protein, 13 aa, Homo Sapiens
EVESLQDYKNTFP

SEQ ID NO: 94855 - protein, 13 aa, Homo Sapiens
VESLQDYKNTFPK

SEQ ID NO: 94856 - protein, 13 aa, Homo Sapiens
ESLQDYKNTFPKW

SEQ ID NO: 94857 - protein, 13 aa, Homo Sapiens
SLQDYKNTFPKWK

SEQ ID NO: 94858 - protein, 13 aa, Homo Sapiens
LQDYKNTFPKWKP

SEQ ID NO: 94859 - protein, 13 aa, Homo Sapiens
QDYKNTFPKWKPG

SEQ ID NO: 94860 - protein, 13 aa, Homo Sapiens
DYKNTFPKWKPGS

SEQ ID NO: 94861 - protein, 13 aa, Homo Sapiens
YKNTFPKWKPGSL

SEQ ID NO: 94862 - protein, 13 aa, Homo Sapiens
KNTFPKWKPGSLA

SEQ ID NO: 94863 - protein, 13 aa, Homo Sapiens
NTFPKWKPGSLAS

SEQ ID NO: 94864 - protein, 13 aa, Homo Sapiens
TFPKWKPGSLASH

SEQ ID NO: 94865 - protein, 13 aa, Homo Sapiens
FPKWKPGSLASHV

SEQ ID NO: 94866 - protein, 13 aa, Homo Sapiens
PKWKPGSLASHVK

SEQ ID NO: 94867 - protein, 13 aa, Homo Sapiens
KWKPGSLASHVKN

SEQ ID NO: 94868 - protein, 13 aa, Homo Sapiens
WKPGSLASHVKNL

SEQ ID NO: 94869 - protein, 13 aa, Homo Sapiens
KPGSLASHVKNLD

SEQ ID NO: 94870 - protein, 13 aa, Homo Sapiens
PGSLASHVKNLDE

SEQ ID NO: 94871 - protein, 13 aa, Homo Sapiens
GSLASHVKNLDEN

SEQ ID NO: 94872 - protein, 13 aa, Homo Sapiens
SLASHVKNLDENG

SEQ ID NO: 94873 - protein, 13 aa, Homo Sapiens
LASHVKNLDENGL

SEQ ID NO: 94874 - protein, 13 aa, Homo Sapiens
ASHVKNLDENGLD

SEQ ID NO: 94875 - protein, 13 aa, Homo Sapiens
SHVKNLDENGLDL

SEQ ID NO: 94876 - protein, 13 aa, Homo Sapiens
HVKNLDENGLDLL

SEQ ID NO: 94877 - protein, 13 aa, Homo Sapiens
VKNLDENGLDLLS

SEQ ID NO: 94878 - protein, 13 aa, Homo Sapiens
KNLDENGLDLLSK

SEQ ID NO: 94879 - protein, 13 aa, Homo Sapiens
NLDENGLDLLSKM

SEQ ID NO: 94880 - protein, 13 aa, Homo Sapiens
LDENGLDLLSKML

SEQ ID NO: 94881 - protein, 13 aa, Homo Sapiens
DENGLDLLSKMLI

SEQ ID NO: 94882 - protein, 13 aa, Homo Sapiens
ENGLDLLSKMLIY

SEQ ID NO: 94883 - protein, 13 aa, Homo Sapiens
NGLDLLSKMLIYD

SEQ ID NO: 94884 - protein, 13 aa, Homo Sapiens
GLDLLSKMLIYDP

SEQ ID NO: 94885 - protein, 13 aa, Homo Sapiens
LDLLSKMLIYDPA

SEQ ID NO: 94886 - protein, 13 aa, Homo Sapiens
DLLSKMLIYDPAK

SEQ ID NO: 94887 - protein, 13 aa, Homo Sapiens
LLSKMLIYDPAKR

SEQ ID NO: 94888 - protein, 13 aa, Homo Sapiens
LSKMLIYDPAKRI

SEQ ID NO: 94889 - protein, 13 aa, Homo Sapiens
SKMLIYDPAKRIS

SEQ ID NO: 94890 - protein, 13 aa, Homo Sapiens
KMLIYDPAKRISG

SEQ ID NO: 94891 - protein, 13 aa, Homo Sapiens
MLIYDPAKRISGK

SEQ ID NO: 94892 - protein, 13 aa, Homo Sapiens
LIYDPAKRISGKM

SEQ ID NO: 94893 - protein, 13 aa, Homo Sapiens
IYDPAKRISGKMA

SEQ ID NO: 94894 - protein, 13 aa, Homo Sapiens
YDPAKRISGKMAL

SEQ ID NO: 94895 - protein, 13 aa, Homo Sapiens
DPAKRISGKMALN

SEQ ID NO: 94896 - protein, 13 aa, Homo Sapiens
PAKRISGKMALNH

SEQ ID NO: 94897 - protein, 13 aa, Homo Sapiens
AKRISGKMALNHP

SEQ ID NO: 94898 - protein, 13 aa, Homo Sapiens
KRISGKMALNHPY

SEQ ID NO: 94899 - protein, 13 aa, Homo Sapiens
RISGKMALNHPYF

SEQ ID NO: 94900 - protein, 13 aa, Homo Sapiens
ISGKMALNHPYFN

SEQ ID NO: 94901 - protein, 13 aa, Homo Sapiens
SGKMALNHPYFND

SEQ ID NO: 94902 - protein, 13 aa, Homo Sapiens
GKMALNHPYFNDL

SEQ ID NO: 94903 - protein, 13 aa, Homo Sapiens
KMALNHPYFNDLD

SEQ ID NO: 94904 - protein, 13 aa, Homo Sapiens
MALNHPYFNDLDN

SEQ ID NO: 94905 - protein, 13 aa, Homo Sapiens
ALNHPYFNDLDNQ

SEQ ID NO: 94906 - protein, 13 aa, Homo Sapiens
LNHPYFNDLDNQI

SEQ ID NO: 94907 - protein, 13 aa, Homo Sapiens
NHPYFNDLDNQIK

SEQ ID NO: 94908 - protein, 13 aa, Homo Sapiens
HPYFNDLDNQIKK

SEQ ID NO: 94909 - protein, 13 aa, Homo Sapiens
PYFNDLDNQIKKM

SEQ ID NO: 94910 - protein, 14 aa, Homo Sapiens
MEDYTKIEKIGEGT

SEQ ID NO: 94911 - protein, 14 aa, Homo Sapiens
EDYTKIEKIGEGTY

SEQ ID NO: 94912 - protein, 14 aa, Homo Sapiens
DYTKIEKIGEGTYG

SEQ ID NO: 94913 - protein, 14 aa, Homo Sapiens
YTKIEKIGEGTYGV

SEQ ID NO: 94914 - protein, 14 aa, Homo Sapiens
TKIEKIGEGTYGVV

SEQ ID NO: 94915 - protein, 14 aa, Homo Sapiens
KIEKIGEGTYGVVY

SEQ ID NO: 94916 - protein, 14 aa, Homo Sapiens
IEKIGEGTYGVVYK

SEQ ID NO: 94917 - protein, 14 aa, Homo Sapiens
EKIGEGTYGVVYKG

SEQ ID NO: 94918 - protein, 14 aa, Homo Sapiens
KIGEGTYGVVYKGR

SEQ ID NO: 94919 - protein, 14 aa, Homo Sapiens
IGEGTYGVVYKGRH

SEQ ID NO: 94920 - protein, 14 aa, Homo Sapiens
GEGTYGVVYKGRHK

SEQ ID NO: 94921 - protein, 14 aa, Homo Sapiens
EGTYGVVYKGRHKT

SEQ ID NO: 94922 - protein, 14 aa, Homo Sapiens
GTYGVVYKGRHKTT

SEQ ID NO: 94923 - protein, 14 aa, Homo Sapiens
TYGVVYKGRHKTTG

SEQ ID NO: 94924 - protein, 14 aa, Homo Sapiens
YGVVYKGRHKTTGQ

SEQ ID NO: 94925 - protein, 14 aa, Homo Sapiens
GVVYKGRHKTTGQV

SEQ ID NO: 94926 - protein, 14 aa, Homo Sapiens
VVYKGRHKTTGQVV

SEQ ID NO: 94927 - protein, 14 aa, Homo Sapiens
VYKGRHKTTGQVVA

SEQ ID NO: 94928 - protein, 14 aa, Homo Sapiens
YKGRHKTTGQVVAM

SEQ ID NO: 94929 - protein, 14 aa, Homo Sapiens
KGRHKTTGQVVAMK

SEQ ID NO: 94930 - protein, 14 aa, Homo Sapiens
GRHKTTGQVVAMKK

SEQ ID NO: 94931 - protein, 14 aa, Homo Sapiens
RHKTTGQVVAMKKI

SEQ ID NO: 94932 - protein, 14 aa, Homo Sapiens
HKTTGQVVAMKKIR

SEQ ID NO: 94933 - protein, 14 aa, Homo Sapiens
KTTGQVVAMKKIRL

SEQ ID NO: 94934 - protein, 14 aa, Homo Sapiens
TTGQVVAMKKIRLE

SEQ ID NO: 94935 - protein, 14 aa, Homo Sapiens
TGQVVAMKKIRLES

SEQ ID NO: 94936 - protein, 14 aa, Homo Sapiens
GQVVAMKKIRLESE

SEQ ID NO: 94937 - protein, 14 aa, Homo Sapiens
QVVAMKKIRLESEE

SEQ ID NO: 94938 - protein, 14 aa, Homo Sapiens
VVAMKKIRLESEEE

SEQ ID NO: 94939 - protein, 14 aa, Homo Sapiens
VAMKKIRLESEEEG

SEQ ID NO: 94940 - protein, 14 aa, Homo Sapiens
AMKKIRLESEEEGV

SEQ ID NO: 94941 - protein, 14 aa, Homo Sapiens
MKKIRLESEEEGVP

SEQ ID NO: 94942 - protein, 14 aa, Homo Sapiens
KKIRLESEEEGVPS

SEQ ID NO: 94943 - protein, 14 aa, Homo Sapiens
KIRLESEEEGVPST

SEQ ID NO: 94944 - protein, 14 aa, Homo Sapiens
IRLESEEEGVPSTA

SEQ ID NO: 94945 - protein, 14 aa, Homo Sapiens
RLESEEEGVPSTAI

SEQ ID NO: 94946 - protein, 14 aa, Homo Sapiens
LESEEEGVPSTAIR

SEQ ID NO: 94947 - protein, 14 aa, Homo Sapiens
ESEEEGVPSTAIRE

SEQ ID NO: 94948 - protein, 14 aa, Homo Sapiens
SEEEGVPSTAIREI

SEQ ID NO: 94949 - protein, 14 aa, Homo Sapiens
EEEGVPSTAIREIS

SEQ ID NO: 94950 - protein, 14 aa, Homo Sapiens
EEGVPSTAIREISL

SEQ ID NO: 94951 - protein, 14 aa, Homo Sapiens
EGVPSTAIREISLL

SEQ ID NO: 94952 - protein, 14 aa, Homo Sapiens
GVPSTAIREISLLK

SEQ ID NO: 94953 - protein, 14 aa, Homo Sapiens
VPSTAIREISLLKE

SEQ ID NO: 94954 - protein, 14 aa, Homo Sapiens
PSTAIREISLLKEL

SEQ ID NO: 94955 - protein, 14 aa, Homo Sapiens
STAIREISLLKELR

SEQ ID NO: 94956 - protein, 14 aa, Homo Sapiens
TAIREISLLKELRH

SEQ ID NO: 94957 - protein, 14 aa, Homo Sapiens
AIREISLLKELRHP

SEQ ID NO: 94958 - protein, 14 aa, Homo Sapiens
IREISLLKELRHPN

SEQ ID NO: 94959 - protein, 14 aa, Homo Sapiens
REISLLKELRHPNI

SEQ ID NO: 94960 - protein, 14 aa, Homo Sapiens
EISLLKELRHPNIV

SEQ ID NO: 94961 - protein, 14 aa, Homo Sapiens
ISLLKELRHPNIVS

SEQ ID NO: 94962 - protein, 14 aa, Homo Sapiens
SLLKELRHPNIVSL

SEQ ID NO: 94963 - protein, 14 aa, Homo Sapiens
LLKELRHPNIVSLQ

SEQ ID NO: 94964 - protein, 14 aa, Homo Sapiens
LKELRHPNIVSLQD

SEQ ID NO: 94965 - protein, 14 aa, Homo Sapiens
KELRHPNIVSLQDV

SEQ ID NO: 94966 - protein, 14 aa, Homo Sapiens
ELRHPNIVSLQDVL

SEQ ID NO: 94967 - protein, 14 aa, Homo Sapiens
LRHPNIVSLQDVLM

SEQ ID NO: 94968 - protein, 14 aa, Homo Sapiens
RHPNIVSLQDVLMQ

SEQ ID NO: 94969 - protein, 14 aa, Homo Sapiens
HPNIVSLQDVLMQD

SEQ ID NO: 94970 - protein, 14 aa, Homo Sapiens
PNIVSLQDVLMQDS

SEQ ID NO: 94971 - protein, 14 aa, Homo Sapiens
NIVSLQDVLMQDSR

SEQ ID NO: 94972 - protein, 14 aa, Homo Sapiens
IVSLQDVLMQDSRL

SEQ ID NO: 94973 - protein, 14 aa, Homo Sapiens
VSLQDVLMQDSRLY

SEQ ID NO: 94974 - protein, 14 aa, Homo Sapiens
SLQDVLMQDSRLYL

SEQ ID NO: 94975 - protein, 14 aa, Homo Sapiens
LQDVLMQDSRLYLI

SEQ ID NO: 94976 - protein, 14 aa, Homo Sapiens
QDVLMQDSRLYLIF

SEQ ID NO: 94977 - protein, 14 aa, Homo Sapiens
DVLMQDSRLYLIFE

SEQ ID NO: 94978 - protein, 14 aa, Homo Sapiens
VLMQDSRLYLIFEF

SEQ ID NO: 94979 - protein, 14 aa, Homo Sapiens
LMQDSRLYLIFEFL

SEQ ID NO: 94980 - protein, 14 aa, Homo Sapiens
MQDSRLYLIFEFLS

SEQ ID NO: 94981 - protein, 14 aa, Homo Sapiens
QDSRLYLIFEFLSM

SEQ ID NO: 94982 - protein, 14 aa, Homo Sapiens
DSRLYLIFEFLSMD

SEQ ID NO: 94983 - protein, 14 aa, Homo Sapiens
SRLYLIFEFLSMDL

SEQ ID NO: 94984 - protein, 14 aa, Homo Sapiens
RLYLIFEFLSMDLK

SEQ ID NO: 94985 - protein, 14 aa, Homo Sapiens
LYLIFEFLSMDLKK

SEQ ID NO: 94986 - protein, 14 aa, Homo Sapiens
YLIFEFLSMDLKKY

SEQ ID NO: 94987 - protein, 14 aa, Homo Sapiens
LIFEFLSMDLKKYL

SEQ ID NO: 94988 - protein, 14 aa, Homo Sapiens
IFEFLSMDLKKYLD

SEQ ID NO: 94989 - protein, 14 aa, Homo Sapiens
FEFLSMDLKKYLDS

SEQ ID NO: 94990 - protein, 14 aa, Homo Sapiens
EFLSMDLKKYLDSI

SEQ ID NO: 94991 - protein, 14 aa, Homo Sapiens
FLSMDLKKYLDSIP

SEQ ID NO: 94992 - protein, 14 aa, Homo Sapiens
LSMDLKKYLDSIPP

SEQ ID NO: 94993 - protein, 14 aa, Homo Sapiens
SMDLKKYLDSIPPG

SEQ ID NO: 94994 - protein, 14 aa, Homo Sapiens
MDLKKYLDSIPPGQ

SEQ ID NO: 94995 - protein, 14 aa, Homo Sapiens
DLKKYLDSIPPGQY

SEQ ID NO: 94996 - protein, 14 aa, Homo Sapiens
LKKYLDSIPPGQYM

SEQ ID NO: 94997 - protein, 14 aa, Homo Sapiens
KKYLDSIPPGQYMD

SEQ ID NO: 94998 - protein, 14 aa, Homo Sapiens
KYLDSIPPGQYMDS

SEQ ID NO: 94999 - protein, 14 aa, Homo Sapiens
YLDSIPPGQYMDSS

SEQ ID NO: 95000 - protein, 14 aa, Homo Sapiens
LDSIPPGQYMDSSL

SEQ ID NO: 95001 - protein, 14 aa, Homo Sapiens
DSIPPGQYMDSSLV

SEQ ID NO: 95002 - protein, 14 aa, Homo Sapiens
SIPPGQYMDSSLVK

SEQ ID NO: 95003 - protein, 14 aa, Homo Sapiens
IPPGQYMDSSLVKS

SEQ ID NO: 95004 - protein, 14 aa, Homo Sapiens
PPGQYMDSSLVKSY

SEQ ID NO: 95005 - protein, 14 aa, Homo Sapiens
PGQYMDSSLVKSYL

SEQ ID NO: 95006 - protein, 14 aa, Homo Sapiens
GQYMDSSLVKSYLY

SEQ ID NO: 95007 - protein, 14 aa, Homo Sapiens
QYMDSSLVKSYLYQ

SEQ ID NO: 95008 - protein, 14 aa, Homo Sapiens
YMDSSLVKSYLYQI

SEQ ID NO: 95009 - protein, 14 aa, Homo Sapiens
MDSSLVKSYLYQIL

SEQ ID NO: 95010 - protein, 14 aa, Homo Sapiens
DSSLVKSYLYQILQ

SEQ ID NO: 95011 - protein, 14 aa, Homo Sapiens
SSLVKSYLYQILQG

SEQ ID NO: 95012 - protein, 14 aa, Homo Sapiens
SLVKSYLYQILQGI

SEQ ID NO: 95013 - protein, 14 aa, Homo Sapiens
LVKSYLYQILQGIV

SEQ ID NO: 95014 - protein, 14 aa, Homo Sapiens
VKSYLYQILQGIVF

SEQ ID NO: 95015 - protein, 14 aa, Homo Sapiens
KSYLYQILQGIVFC

SEQ ID NO: 95016 - protein, 14 aa, Homo Sapiens
SYLYQILQGIVFCH

SEQ ID NO: 95017 - protein, 14 aa, Homo Sapiens
YLYQILQGIVFCHS

SEQ ID NO: 95018 - protein, 14 aa, Homo Sapiens
LYQILQGIVFCHSR

SEQ ID NO: 95019 - protein, 14 aa, Homo Sapiens
YQILQGIVFCHSRR

SEQ ID NO: 95020 - protein, 14 aa, Homo Sapiens
QILQGIVFCHSRRV

SEQ ID NO: 95021 - protein, 14 aa, Homo Sapiens
ILQGIVFCHSRRVL

SEQ ID NO: 95022 - protein, 14 aa, Homo Sapiens
LQGIVFCHSRRVLH

SEQ ID NO: 95023 - protein, 14 aa, Homo Sapiens
QGIVFCHSRRVLHR

SEQ ID NO: 95024 - protein, 14 aa, Homo Sapiens
GIVFCHSRRVLHRD

SEQ ID NO: 95025 - protein, 14 aa, Homo Sapiens
IVFCHSRRVLHRDL

SEQ ID NO: 95026 - protein, 14 aa, Homo Sapiens
VFCHSRRVLHRDLK

SEQ ID NO: 95027 - protein, 14 aa, Homo Sapiens
FCHSRRVLHRDLKP

SEQ ID NO: 95028 - protein, 14 aa, Homo Sapiens
CHSRRVLHRDLKPQ

SEQ ID NO: 95029 - protein, 14 aa, Homo Sapiens
HSRRVLHRDLKPQN

SEQ ID NO: 95030 - protein, 14 aa, Homo Sapiens
SRRVLHRDLKPQNL

SEQ ID NO: 95031 - protein, 14 aa, Homo Sapiens
RRVLHRDLKPQNLL

SEQ ID NO: 95032 - protein, 14 aa, Homo Sapiens
RVLHRDLKPQNLLI

SEQ ID NO: 95033 - protein, 14 aa, Homo Sapiens
VLHRDLKPQNLLID

SEQ ID NO: 95034 - protein, 14 aa, Homo Sapiens
LHRDLKPQNLLIDD

SEQ ID NO: 95035 - protein, 14 aa, Homo Sapiens
HRDLKPQNLLIDDK

SEQ ID NO: 95036 - protein, 14 aa, Homo Sapiens
RDLKPQNLLIDDKG

SEQ ID NO: 95037 - protein, 14 aa, Homo Sapiens
DLKPQNLLIDDKGT

SEQ ID NO: 95038 - protein, 14 aa, Homo Sapiens
LKPQNLLIDDKGTI

SEQ ID NO: 95039 - protein, 14 aa, Homo Sapiens
KPQNLLIDDKGTIK

SEQ ID NO: 95040 - protein, 14 aa, Homo Sapiens
PQNLLIDDKGTIKL

SEQ ID NO: 95041 - protein, 14 aa, Homo Sapiens
QNLLIDDKGTIKLA

SEQ ID NO: 95042 - protein, 14 aa, Homo Sapiens
NLLIDDKGTIKLAD

SEQ ID NO: 95043 - protein, 14 aa, Homo Sapiens
LLIDDKGTIKLADF

SEQ ID NO: 95044 - protein, 14 aa, Homo Sapiens
LIDDKGTIKLADFG

SEQ ID NO: 95045 - protein, 14 aa, Homo Sapiens
IDDKGTIKLADFGL

SEQ ID NO: 95046 - protein, 14 aa, Homo Sapiens
DDKGTIKLADFGLA

SEQ ID NO: 95047 - protein, 14 aa, Homo Sapiens
DKGTIKLADFGLAR

SEQ ID NO: 95048 - protein, 14 aa, Homo Sapiens
KGTIKLADFGLARA

SEQ ID NO: 95049 - protein, 14 aa, Homo Sapiens
GTIKLADFGLARAF

SEQ ID NO: 95050 - protein, 14 aa, Homo Sapiens
TIKLADFGLARAFG

SEQ ID NO: 95051 - protein, 14 aa, Homo Sapiens
IKLADFGLARAFGI

SEQ ID NO: 95052 - protein, 14 aa, Homo Sapiens
KLADFGLARAFGIP

SEQ ID NO: 95053 - protein, 14 aa, Homo Sapiens
LADFGLARAFGIPI

SEQ ID NO: 95054 - protein, 14 aa, Homo Sapiens
ADFGLARAFGIPIR

SEQ ID NO: 95055 - protein, 14 aa, Homo Sapiens
DFGLARAFGIPIRV

SEQ ID NO: 95056 - protein, 14 aa, Homo Sapiens
FGLARAFGIPIRVY

SEQ ID NO: 95057 - protein, 14 aa, Homo Sapiens
GLARAFGIPIRVYT

SEQ ID NO: 95058 - protein, 14 aa, Homo Sapiens
LARAFGIPIRVYTH

SEQ ID NO: 95059 - protein, 14 aa, Homo Sapiens
ARAFGIPIRVYTHE

SEQ ID NO: 95060 - protein, 14 aa, Homo Sapiens
RAFGIPIRVYTHEV

SEQ ID NO: 95061 - protein, 14 aa, Homo Sapiens
AFGIPIRVYTHEVV

SEQ ID NO: 95062 - protein, 14 aa, Homo Sapiens
FGIPIRVYTHEVVT

SEQ ID NO: 95063 - protein, 14 aa, Homo Sapiens
GIPIRVYTHEVVTL

SEQ ID NO: 95064 - protein, 14 aa, Homo Sapiens
IPIRVYTHEVVTLW

SEQ ID NO: 95065 - protein, 14 aa, Homo Sapiens
PIRVYTHEVVTLWY

SEQ ID NO: 95066 - protein, 14 aa, Homo Sapiens
IRVYTHEVVTLWYR

SEQ ID NO: 95067 - protein, 14 aa, Homo Sapiens
RVYTHEVVTLWYRS

SEQ ID NO: 95068 - protein, 14 aa, Homo Sapiens
VYTHEVVTLWYRSP

SEQ ID NO: 95069 - protein, 14 aa, Homo Sapiens
YTHEVVTLWYRSPE

SEQ ID NO: 95070 - protein, 14 aa, Homo Sapiens
THEVVTLWYRSPEV

SEQ ID NO: 95071 - protein, 14 aa, Homo Sapiens
HEVVTLWYRSPEVL

SEQ ID NO: 95072 - protein, 14 aa, Homo Sapiens
EVVTLWYRSPEVLL

SEQ ID NO: 95073 - protein, 14 aa, Homo Sapiens
VVTLWYRSPEVLLG

SEQ ID NO: 95074 - protein, 14 aa, Homo Sapiens
VTLWYRSPEVLLGS

SEQ ID NO: 95075 - protein, 14 aa, Homo Sapiens
TLWYRSPEVLLGSA

SEQ ID NO: 95076 - protein, 14 aa, Homo Sapiens
LWYRSPEVLLGSAR

SEQ ID NO: 95077 - protein, 14 aa, Homo Sapiens
WYRSPEVLLGSARY

SEQ ID NO: 95078 - protein, 14 aa, Homo Sapiens
YRSPEVLLGSARYS

SEQ ID NO: 95079 - protein, 14 aa, Homo Sapiens
RSPEVLLGSARYST

SEQ ID NO: 95080 - protein, 14 aa, Homo Sapiens
SPEVLLGSARYSTP

SEQ ID NO: 95081 - protein, 14 aa, Homo Sapiens
PEVLLGSARYSTPV

SEQ ID NO: 95082 - protein, 14 aa, Homo Sapiens
EVLLGSARYSTPVD

SEQ ID NO: 95083 - protein, 14 aa, Homo Sapiens
VLLGSARYSTPVDI

SEQ ID NO: 95084 - protein, 14 aa, Homo Sapiens
LLGSARYSTPVDIW

SEQ ID NO: 95085 - protein, 14 aa, Homo Sapiens
LGSARYSTPVDIWS

SEQ ID NO: 95086 - protein, 14 aa, Homo Sapiens
GSARYSTPVDIWSI

SEQ ID NO: 95087 - protein, 14 aa, Homo Sapiens
SARYSTPVDIWSIG

SEQ ID NO: 95088 - protein, 14 aa, Homo Sapiens
ARYSTPVDIWSIGT

SEQ ID NO: 95089 - protein, 14 aa, Homo Sapiens
RYSTPVDIWSIGTI

SEQ ID NO: 95090 - protein, 14 aa, Homo Sapiens
YSTPVDIWSIGTIF

SEQ ID NO: 95091 - protein, 14 aa, Homo Sapiens
STPVDIWSIGTIFA

SEQ ID NO: 95092 - protein, 14 aa, Homo Sapiens
TPVDIWSIGTIFAE

SEQ ID NO: 95093 - protein, 14 aa, Homo Sapiens
PVDIWSIGTIFAEL

SEQ ID NO: 95094 - protein, 14 aa, Homo Sapiens
VDIWSIGTIFAELA

SEQ ID NO: 95095 - protein, 14 aa, Homo Sapiens
DIWSIGTIFAELAT

SEQ ID NO: 95096 - protein, 14 aa, Homo Sapiens
IWSIGTIFAELATK

SEQ ID NO: 95097 - protein, 14 aa, Homo Sapiens
WSIGTIFAELATKK

SEQ ID NO: 95098 - protein, 14 aa, Homo Sapiens
SIGTIFAELATKKP

SEQ ID NO: 95099 - protein, 14 aa, Homo Sapiens
IGTIFAELATKKPL

SEQ ID NO: 95100 - protein, 14 aa, Homo Sapiens
GTIFAELATKKPLF

SEQ ID NO: 95101 - protein, 14 aa, Homo Sapiens
TIFAELATKKPLFH

SEQ ID NO: 95102 - protein, 14 aa, Homo Sapiens
IFAELATKKPLFHG

SEQ ID NO: 95103 - protein, 14 aa, Homo Sapiens
FAELATKKPLFHGD

SEQ ID NO: 95104 - protein, 14 aa, Homo Sapiens
AELATKKPLFHGDS

SEQ ID NO: 95105 - protein, 14 aa, Homo Sapiens
ELATKKPLFHGDSE

SEQ ID NO: 95106 - protein, 14 aa, Homo Sapiens
LATKKPLFHGDSEI

SEQ ID NO: 95107 - protein, 14 aa, Homo Sapiens
ATKKPLFHGDSEID

SEQ ID NO: 95108 - protein, 14 aa, Homo Sapiens
TKKPLFHGDSEIDQ

SEQ ID NO: 95109 - protein, 14 aa, Homo Sapiens
KKPLFHGDSEIDQL

SEQ ID NO: 95110 - protein, 14 aa, Homo Sapiens
KPLFHGDSEIDQLF

SEQ ID NO: 95111 - protein, 14 aa, Homo Sapiens
PLFHGDSEIDQLFR

SEQ ID NO: 95112 - protein, 14 aa, Homo Sapiens
LFHGDSEIDQLFRI

SEQ ID NO: 95113 - protein, 14 aa, Homo Sapiens
FHGDSEIDQLFRIF

SEQ ID NO: 95114 - protein, 14 aa, Homo Sapiens
HGDSEIDQLFRIFR

SEQ ID NO: 95115 - protein, 14 aa, Homo Sapiens
GDSEIDQLFRIFRA

SEQ ID NO: 95116 - protein, 14 aa, Homo Sapiens
DSEIDQLFRIFRAL

SEQ ID NO: 95117 - protein, 14 aa, Homo Sapiens
SEIDQLFRIFRALG

SEQ ID NO: 95118 - protein, 14 aa, Homo Sapiens
EIDQLFRIFRALGT

SEQ ID NO: 95119 - protein, 14 aa, Homo Sapiens
IDQLFRIFRALGTP

SEQ ID NO: 95120 - protein, 14 aa, Homo Sapiens
DQLFRIFRALGTPN

SEQ ID NO: 95121 - protein, 14 aa, Homo Sapiens
QLFRIFRALGTPNN

SEQ ID NO: 95122 - protein, 14 aa, Homo Sapiens
LFRIFRALGTPNNE

SEQ ID NO: 95123 - protein, 14 aa, Homo Sapiens
FRIFRALGTPNNEV

SEQ ID NO: 95124 - protein, 14 aa, Homo Sapiens
RIFRALGTPNNEVW

SEQ ID NO: 95125 - protein, 14 aa, Homo Sapiens
IFRALGTPNNEVWP

SEQ ID NO: 95126 - protein, 14 aa, Homo Sapiens
FRALGTPNNEVWPE

SEQ ID NO: 95127 - protein, 14 aa, Homo Sapiens
RALGTPNNEVWPEV

SEQ ID NO: 95128 - protein, 14 aa, Homo Sapiens
ALGTPNNEVWPEVE

SEQ ID NO: 95129 - protein, 14 aa, Homo Sapiens
LGTPNNEVWPEVES

SEQ ID NO: 95130 - protein, 14 aa, Homo Sapiens
GTPNNEVWPEVESL

SEQ ID NO: 95131 - protein, 14 aa, Homo Sapiens
TPNNEVWPEVESLQ

SEQ ID NO: 95132 - protein, 14 aa, Homo Sapiens
PNNEVWPEVESLQD

SEQ ID NO: 95133 - protein, 14 aa, Homo Sapiens
NNEVWPEVESLQDY

SEQ ID NO: 95134 - protein, 14 aa, Homo Sapiens
NEVWPEVESLQDYK

SEQ ID NO: 95135 - protein, 14 aa, Homo Sapiens
EVWPEVESLQDYKN

SEQ ID NO: 95136 - protein, 14 aa, Homo Sapiens
VWPEVESLQDYKNT

SEQ ID NO: 95137 - protein, 14 aa, Homo Sapiens
WPEVESLQDYKNTF

SEQ ID NO: 95138 - protein, 14 aa, Homo Sapiens
PEVESLQDYKNTFP

SEQ ID NO: 95139 - protein, 14 aa, Homo Sapiens
EVESLQDYKNTFPK

SEQ ID NO: 95140 - protein, 14 aa, Homo Sapiens
VESLQDYKNTFPKW

SEQ ID NO: 95141 - protein, 14 aa, Homo Sapiens
ESLQDYKNTFPKWK

SEQ ID NO: 95142 - protein, 14 aa, Homo Sapiens
SLQDYKNTFPKWKP

SEQ ID NO: 95143 - protein, 14 aa, Homo Sapiens
LQDYKNTFPKWKPG

SEQ ID NO: 95144 - protein, 14 aa, Homo Sapiens
QDYKNTFPKWKPGS

SEQ ID NO: 95145 - protein, 14 aa, Homo Sapiens
DYKNTFPKWKPGSL

SEQ ID NO: 95146 - protein, 14 aa, Homo Sapiens
YKNTFPKWKPGSLA

SEQ ID NO: 95147 - protein, 14 aa, Homo Sapiens
KNTFPKWKPGSLAS

SEQ ID NO: 95148 - protein, 14 aa, Homo Sapiens
NTFPKWKPGSLASH

SEQ ID NO: 95149 - protein, 14 aa, Homo Sapiens
TFPKWKPGSLASHV

SEQ ID NO: 95150 - protein, 14 aa, Homo Sapiens
FPKWKPGSLASHVK

SEQ ID NO: 95151 - protein, 14 aa, Homo Sapiens
PKWKPGSLASHVKN

SEQ ID NO: 95152 - protein, 14 aa, Homo Sapiens
KWKPGSLASHVKNL

SEQ ID NO: 95153 - protein, 14 aa, Homo Sapiens
WKPGSLASHVKNLD

SEQ ID NO: 95154 - protein, 14 aa, Homo Sapiens
KPGSLASHVKNLDE

SEQ ID NO: 95155 - protein, 14 aa, Homo Sapiens
PGSLASHVKNLDEN

SEQ ID NO: 95156 - protein, 14 aa, Homo Sapiens
GSLASHVKNLDENG

SEQ ID NO: 95157 - protein, 14 aa, Homo Sapiens
SLASHVKNLDENGL

SEQ ID NO: 95158 - protein, 14 aa, Homo Sapiens
LASHVKNLDENGLD

SEQ ID NO: 95159 - protein, 14 aa, Homo Sapiens
ASHVKNLDENGLDL

SEQ ID NO: 95160 - protein, 14 aa, Homo Sapiens
SHVKNLDENGLDLL

SEQ ID NO: 95161 - protein, 14 aa, Homo Sapiens
HVKNLDENGLDLLS

SEQ ID NO: 95162 - protein, 14 aa, Homo Sapiens
VKNLDENGLDLLSK

SEQ ID NO: 95163 - protein, 14 aa, Homo Sapiens
KNLDENGLDLLSKM

SEQ ID NO: 95164 - protein, 14 aa, Homo Sapiens
NLDENGLDLLSKML

SEQ ID NO: 95165 - protein, 14 aa, Homo Sapiens
LDENGLDLLSKMLI

SEQ ID NO: 95166 - protein, 14 aa, Homo Sapiens
DENGLDLLSKMLIY

SEQ ID NO: 95167 - protein, 14 aa, Homo Sapiens
ENGLDLLSKMLIYD

SEQ ID NO: 95168 - protein, 14 aa, Homo Sapiens
NGLDLLSKMLIYDP

SEQ ID NO: 95169 - protein, 14 aa, Homo Sapiens
GLDLLSKMLIYDPA

SEQ ID NO: 95170 - protein, 14 aa, Homo Sapiens
LDLLSKMLIYDPAK

SEQ ID NO: 95171 - protein, 14 aa, Homo Sapiens
DLLSKMLIYDPAKR

SEQ ID NO: 95172 - protein, 14 aa, Homo Sapiens
LLSKMLIYDPAKRI

SEQ ID NO: 95173 - protein, 14 aa, Homo Sapiens
LSKMLIYDPAKRIS

SEQ ID NO: 95174 - protein, 14 aa, Homo Sapiens
SKMLIYDPAKRISG

SEQ ID NO: 95175 - protein, 14 aa, Homo Sapiens
KMLIYDPAKRISGK

SEQ ID NO: 95176 - protein, 14 aa, Homo Sapiens
MLIYDPAKRISGKM

SEQ ID NO: 95177 - protein, 14 aa, Homo Sapiens
LIYDPAKRISGKMA

SEQ ID NO: 95178 - protein, 14 aa, Homo Sapiens
IYDPAKRISGKMAL

SEQ ID NO: 95179 - protein, 14 aa, Homo Sapiens
YDPAKRISGKMALN

SEQ ID NO: 95180 - protein, 14 aa, Homo Sapiens
DPAKRISGKMALNH

SEQ ID NO: 95181 - protein, 14 aa, Homo Sapiens
PAKRISGKMALNHP

SEQ ID NO: 95182 - protein, 14 aa, Homo Sapiens
AKRISGKMALNHPY

SEQ ID NO: 95183 - protein, 14 aa, Homo Sapiens
KRISGKMALNHPYF

SEQ ID NO: 95184 - protein, 14 aa, Homo Sapiens
RISGKMALNHPYFN

SEQ ID NO: 95185 - protein, 14 aa, Homo Sapiens
ISGKMALNHPYFND

SEQ ID NO: 95186 - protein, 14 aa, Homo Sapiens
SGKMALNHPYFNDL

SEQ ID NO: 95187 - protein, 14 aa, Homo Sapiens
GKMALNHPYFNDLD

SEQ ID NO: 95188 - protein, 14 aa, Homo Sapiens
KMALNHPYFNDLDN

SEQ ID NO: 95189 - protein, 14 aa, Homo Sapiens
MALNHPYFNDLDNQ

SEQ ID NO: 95190 - protein, 14 aa, Homo Sapiens
ALNHPYFNDLDNQI

SEQ ID NO: 95191 - protein, 14 aa, Homo Sapiens
LNHPYFNDLDNQIK

SEQ ID NO: 95192 - protein, 14 aa, Homo Sapiens
NHPYFNDLDNQIKK

SEQ ID NO: 95193 - protein, 14 aa, Homo Sapiens
HPYFNDLDNQIKKM

SEQ ID NO: 95194 - protein, 15 aa, Homo Sapiens
MEDYTKIEKIGEGTY

SEQ ID NO: 95195 - protein, 15 aa, Homo Sapiens
EDYTKIEKIGEGTYG

SEQ ID NO: 95196 - protein, 15 aa, Homo Sapiens
DYTKIEKIGEGTYGV

SEQ ID NO: 95197 - protein, 15 aa, Homo Sapiens
YTKIEKIGEGTYGVV

SEQ ID NO: 95198 - protein, 15 aa, Homo Sapiens
TKIEKIGEGTYGVVY

SEQ ID NO: 95199 - protein, 15 aa, Homo Sapiens
KIEKIGEGTYGVVYK

SEQ ID NO: 95200 - protein, 15 aa, Homo Sapiens
IEKIGEGTYGVVYKG

SEQ ID NO: 95201 - protein, 15 aa, Homo Sapiens
EKIGEGTYGVVYKGR

SEQ ID NO: 95202 - protein, 15 aa, Homo Sapiens
KIGEGTYGVVYKGRH

SEQ ID NO: 95203 - protein, 15 aa, Homo Sapiens
IGEGTYGVVYKGRHK

SEQ ID NO: 95204 - protein, 15 aa, Homo Sapiens
GEGTYGVVYKGRHKT

SEQ ID NO: 95205 - protein, 15 aa, Homo Sapiens
EGTYGVVYKGRHKTT

SEQ ID NO: 95206 - protein, 15 aa, Homo Sapiens
GTYGVVYKGRHKTTG

SEQ ID NO: 95207 - protein, 15 aa, Homo Sapiens
TYGVVYKGRHKTTGQ

SEQ ID NO: 95208 - protein, 15 aa, Homo Sapiens
YGVVYKGRHKTTGQV

SEQ ID NO: 95209 - protein, 15 aa, Homo Sapiens
GVVYKGRHKTTGQVV

SEQ ID NO: 95210 - protein, 15 aa, Homo Sapiens
VVYKGRHKTTGQVVA

SEQ ID NO: 95211 - protein, 15 aa, Homo Sapiens
VYKGRHKTTGQVVAM

SEQ ID NO: 95212 - protein, 15 aa, Homo Sapiens
YKGRHKTTGQVVAMK

SEQ ID NO: 95213 - protein, 15 aa, Homo Sapiens
KGRHKTTGQVVAMKK

SEQ ID NO: 95214 - protein, 15 aa, Homo Sapiens
GRHKTTGQVVAMKKI

SEQ ID NO: 95215 - protein, 15 aa, Homo Sapiens
RHKTTGQVVAMKKIR

SEQ ID NO: 95216 - protein, 15 aa, Homo Sapiens
HKTTGQVVAMKKIRL

SEQ ID NO: 95217 - protein, 15 aa, Homo Sapiens
KTTGQVVAMKKIRLE

SEQ ID NO: 95218 - protein, 15 aa, Homo Sapiens
TTGQVVAMKKIRLES

SEQ ID NO: 95219 - protein, 15 aa, Homo Sapiens
TGQVVAMKKIRLESE

SEQ ID NO: 95220 - protein, 15 aa, Homo Sapiens
GQVVAMKKIRLESEE

SEQ ID NO: 95221 - protein, 15 aa, Homo Sapiens
QVVAMKKIRLESEEE

SEQ ID NO: 95222 - protein, 15 aa, Homo Sapiens
VVAMKKIRLESEEEG

SEQ ID NO: 95223 - protein, 15 aa, Homo Sapiens
VAMKKIRLESEEEGV

SEQ ID NO: 95224 - protein, 15 aa, Homo Sapiens
AMKKIRLESEEEGVP

SEQ ID NO: 95225 - protein, 15 aa, Homo Sapiens
MKKIRLESEEEGVPS

SEQ ID NO: 95226 - protein, 15 aa, Homo Sapiens
KKIRLESEEEGVPST

SEQ ID NO: 95227 - protein, 15 aa, Homo Sapiens
KIRLESEEEGVPSTA

SEQ ID NO: 95228 - protein, 15 aa, Homo Sapiens
IRLESEEEGVPSTAI

SEQ ID NO: 95229 - protein, 15 aa, Homo Sapiens
RLESEEEGVPSTAIR

SEQ ID NO: 95230 - protein, 15 aa, Homo Sapiens
LESEEEGVPSTAIRE

SEQ ID NO: 95231 - protein, 15 aa, Homo Sapiens
ESEEEGVPSTAIREI

SEQ ID NO: 95232 - protein, 15 aa, Homo Sapiens
SEEEGVPSTAIREIS

SEQ ID NO: 95233 - protein, 15 aa, Homo Sapiens
EEEGVPSTAIREISL

SEQ ID NO: 95234 - protein, 15 aa, Homo Sapiens
EEGVPSTAIREISLL

SEQ ID NO: 95235 - protein, 15 aa, Homo Sapiens
EGVPSTAIREISLLK

SEQ ID NO: 95236 - protein, 15 aa, Homo Sapiens
GVPSTAIREISLLKE

SEQ ID NO: 95237 - protein, 15 aa, Homo Sapiens
VPSTAIREISLLKEL

SEQ ID NO: 95238 - protein, 15 aa, Homo Sapiens
PSTAIREISLLKELR

SEQ ID NO: 95239 - protein, 15 aa, Homo Sapiens
STAIREISLLKELRH

SEQ ID NO: 95240 - protein, 15 aa, Homo Sapiens
TAIREISLLKELRHP

SEQ ID NO: 95241 - protein, 15 aa, Homo Sapiens
AIREISLLKELRHPN

SEQ ID NO: 95242 - protein, 15 aa, Homo Sapiens
IREISLLKELRHPNI

SEQ ID NO: 95243 - protein, 15 aa, Homo Sapiens
REISLLKELRHPNIV

SEQ ID NO: 95244 - protein, 15 aa, Homo Sapiens
EISLLKELRHPNIVS

SEQ ID NO: 95245 - protein, 15 aa, Homo Sapiens
ISLLKELRHPNIVSL

SEQ ID NO: 95246 - protein, 15 aa, Homo Sapiens
SLLKELRHPNIVSLQ

SEQ ID NO: 95247 - protein, 15 aa, Homo Sapiens
LLKELRHPNIVSLQD

SEQ ID NO: 95248 - protein, 15 aa, Homo Sapiens
LKELRHPNIVSLQDV

SEQ ID NO: 95249 - protein, 15 aa, Homo Sapiens
KELRHPNIVSLQDVL

SEQ ID NO: 95250 - protein, 15 aa, Homo Sapiens
ELRHPNIVSLQDVLM

SEQ ID NO: 95251 - protein, 15 aa, Homo Sapiens
LRHPNIVSLQDVLMQ

SEQ ID NO: 95252 - protein, 15 aa, Homo Sapiens
RHPNIVSLQDVLMQD

SEQ ID NO: 95253 - protein, 15 aa, Homo Sapiens
HPNIVSLQDVLMQDS

SEQ ID NO: 95254 - protein, 15 aa, Homo Sapiens
PNIVSLQDVLMQDSR

SEQ ID NO: 95255 - protein, 15 aa, Homo Sapiens
NIVSLQDVLMQDSRL

SEQ ID NO: 95256 - protein, 15 aa, Homo Sapiens
IVSLQDVLMQDSRLY

SEQ ID NO: 95257 - protein, 15 aa, Homo Sapiens
VSLQDVLMQDSRLYL

SEQ ID NO: 95258 - protein, 15 aa, Homo Sapiens
SLQDVLMQDSRLYLI

SEQ ID NO: 95259 - protein, 15 aa, Homo Sapiens
LQDVLMQDSRLYLIF

SEQ ID NO: 95260 - protein, 15 aa, Homo Sapiens
QDVLMQDSRLYLIFE

SEQ ID NO: 95261 - protein, 15 aa, Homo Sapiens
DVLMQDSRLYLIFEF

SEQ ID NO: 95262 - protein, 15 aa, Homo Sapiens
VLMQDSRLYLIFEFL

SEQ ID NO: 95263 - protein, 15 aa, Homo Sapiens
LMQDSRLYLIFEFLS

SEQ ID NO: 95264 - protein, 15 aa, Homo Sapiens
MQDSRLYLIFEFLSM

SEQ ID NO: 95265 - protein, 15 aa, Homo Sapiens
QDSRLYLIFEFLSMD

SEQ ID NO: 95266 - protein, 15 aa, Homo Sapiens
DSRLYLIFEFLSMDL

SEQ ID NO: 95267 - protein, 15 aa, Homo Sapiens
SRLYLIFEFLSMDLK

SEQ ID NO: 95268 - protein, 15 aa, Homo Sapiens
RLYLIFEFLSMDLKK

SEQ ID NO: 95269 - protein, 15 aa, Homo Sapiens
LYLIFEFLSMDLKKY

SEQ ID NO: 95270 - protein, 15 aa, Homo Sapiens
YLIFEFLSMDLKKYL

SEQ ID NO: 95271 - protein, 15 aa, Homo Sapiens
LIFEFLSMDLKKYLD

SEQ ID NO: 95272 - protein, 15 aa, Homo Sapiens
IFEFLSMDLKKYLDS

SEQ ID NO: 95273 - protein, 15 aa, Homo Sapiens
FEFLSMDLKKYLDSI

SEQ ID NO: 95274 - protein, 15 aa, Homo Sapiens
EFLSMDLKKYLDSIP

SEQ ID NO: 95275 - protein, 15 aa, Homo Sapiens
FLSMDLKKYLDSIPP

SEQ ID NO: 95276 - protein, 15 aa, Homo Sapiens
LSMDLKKYLDSIPPG

SEQ ID NO: 95277 - protein, 15 aa, Homo Sapiens
SMDLKKYLDSIPPGQ

SEQ ID NO: 95278 - protein, 15 aa, Homo Sapiens
MDLKKYLDSIPPGQY

SEQ ID NO: 95279 - protein, 15 aa, Homo Sapiens
DLKKYLDSIPPGQYM

SEQ ID NO: 95280 - protein, 15 aa, Homo Sapiens
LKKYLDSIPPGQYMD

SEQ ID NO: 95281 - protein, 15 aa, Homo Sapiens
KKYLDSIPPGQYMDS

SEQ ID NO: 95282 - protein, 15 aa, Homo Sapiens
KYLDSIPPGQYMDSS

SEQ ID NO: 95283 - protein, 15 aa, Homo Sapiens
YLDSIPPGQYMDSSL

SEQ ID NO: 95284 - protein, 15 aa, Homo Sapiens
LDSIPPGQYMDSSLV

SEQ ID NO: 95285 - protein, 15 aa, Homo Sapiens
DSIPPGQYMDSSLVK

SEQ ID NO: 95286 - protein, 15 aa, Homo Sapiens
SIPPGQYMDSSLVKS

SEQ ID NO: 95287 - protein, 15 aa, Homo Sapiens
IPPGQYMDSSLVKSY

SEQ ID NO: 95288 - protein, 15 aa, Homo Sapiens
PPGQYMDSSLVKSYL

SEQ ID NO: 95289 - protein, 15 aa, Homo Sapiens
PGQYMDSSLVKSYLY

SEQ ID NO: 95290 - protein, 15 aa, Homo Sapiens
GQYMDSSLVKSYLYQ

SEQ ID NO: 95291 - protein, 15 aa, Homo Sapiens
QYMDSSLVKSYLYQI

SEQ ID NO: 95292 - protein, 15 aa, Homo Sapiens
YMDSSLVKSYLYQIL

SEQ ID NO: 95293 - protein, 15 aa, Homo Sapiens
MDSSLVKSYLYQILQ

SEQ ID NO: 95294 - protein, 15 aa, Homo Sapiens
DSSLVKSYLYQILQG

SEQ ID NO: 95295 - protein, 15 aa, Homo Sapiens
SSLVKSYLYQILQGI

SEQ ID NO: 95296 - protein, 15 aa, Homo Sapiens
SLVKSYLYQILQGIV

SEQ ID NO: 95297 - protein, 15 aa, Homo Sapiens
LVKSYLYQILQGIVF

SEQ ID NO: 95298 - protein, 15 aa, Homo Sapiens
VKSYLYQILQGIVFC

SEQ ID NO: 95299 - protein, 15 aa, Homo Sapiens
KSYLYQILQGIVFCH

SEQ ID NO: 95300 - protein, 15 aa, Homo Sapiens
SYLYQILQGIVFCHS

SEQ ID NO: 95301 - protein, 15 aa, Homo Sapiens
YLYQILQGIVFCHSR

SEQ ID NO: 95302 - protein, 15 aa, Homo Sapiens
LYQILQGIVFCHSRR

SEQ ID NO: 95303 - protein, 15 aa, Homo Sapiens
YQILQGIVFCHSRRV

SEQ ID NO: 95304 - protein, 15 aa, Homo Sapiens
QILQGIVFCHSRRVL

SEQ ID NO: 95305 - protein, 15 aa, Homo Sapiens
ILQGIVFCHSRRVLH

SEQ ID NO: 95306 - protein, 15 aa, Homo Sapiens
LQGIVFCHSRRVLHR

SEQ ID NO: 95307 - protein, 15 aa, Homo Sapiens
QGIVFCHSRRVLHRD

SEQ ID NO: 95308 - protein, 15 aa, Homo Sapiens
GIVFCHSRRVLHRDL

SEQ ID NO: 95309 - protein, 15 aa, Homo Sapiens
IVFCHSRRVLHRDLK

SEQ ID NO: 95310 - protein, 15 aa, Homo Sapiens
VFCHSRRVLHRDLKP

SEQ ID NO: 95311 - protein, 15 aa, Homo Sapiens
FCHSRRVLHRDLKPQ

SEQ ID NO: 95312 - protein, 15 aa, Homo Sapiens
CHSRRVLHRDLKPQN

SEQ ID NO: 95313 - protein, 15 aa, Homo Sapiens
HSRRVLHRDLKPQNL

SEQ ID NO: 95314 - protein, 15 aa, Homo Sapiens
SRRVLHRDLKPQNLL

SEQ ID NO: 95315 - protein, 15 aa, Homo Sapiens
RRVLHRDLKPQNLLI

SEQ ID NO: 95316 - protein, 15 aa, Homo Sapiens
RVLHRDLKPQNLLID

SEQ ID NO: 95317 - protein, 15 aa, Homo Sapiens
VLHRDLKPQNLLIDD

SEQ ID NO: 95318 - protein, 15 aa, Homo Sapiens
LHRDLKPQNLLIDDK

SEQ ID NO: 95319 - protein, 15 aa, Homo Sapiens
HRDLKPQNLLIDDKG

SEQ ID NO: 95320 - protein, 15 aa, Homo Sapiens
RDLKPQNLLIDDKGT

SEQ ID NO: 95321 - protein, 15 aa, Homo Sapiens
DLKPQNLLIDDKGTI

SEQ ID NO: 95322 - protein, 15 aa, Homo Sapiens
LKPQNLLIDDKGTIK

SEQ ID NO: 95323 - protein, 15 aa, Homo Sapiens
KPQNLLIDDKGTIKL

SEQ ID NO: 95324 - protein, 15 aa, Homo Sapiens
PQNLLIDDKGTIKLA

SEQ ID NO: 95325 - protein, 15 aa, Homo Sapiens
QNLLIDDKGTIKLAD

SEQ ID NO: 95326 - protein, 15 aa, Homo Sapiens
NLLIDDKGTIKLADF

SEQ ID NO: 95327 - protein, 15 aa, Homo Sapiens
LLIDDKGTIKLADFG

SEQ ID NO: 95328 - protein, 15 aa, Homo Sapiens
LIDDKGTIKLADFGL

SEQ ID NO: 95329 - protein, 15 aa, Homo Sapiens
IDDKGTIKLADFGLA

SEQ ID NO: 95330 - protein, 15 aa, Homo Sapiens
DDKGTIKLADFGLAR

SEQ ID NO: 95331 - protein, 15 aa, Homo Sapiens
DKGTIKLADFGLARA

SEQ ID NO: 95332 - protein, 15 aa, Homo Sapiens
KGTIKLADFGLARAF

SEQ ID NO: 95333 - protein, 15 aa, Homo Sapiens
GTIKLADFGLARAFG

SEQ ID NO: 95334 - protein, 15 aa, Homo Sapiens
TIKLADFGLARAFGI

SEQ ID NO: 95335 - protein, 15 aa, Homo Sapiens
IKLADFGLARAFGIP

SEQ ID NO: 95336 - protein, 15 aa, Homo Sapiens
KLADFGLARAFGIPI

SEQ ID NO: 95337 - protein, 15 aa, Homo Sapiens
LADFGLARAFGIPIR

SEQ ID NO: 95338 - protein, 15 aa, Homo Sapiens
ADFGLARAFGIPIRV

SEQ ID NO: 95339 - protein, 15 aa, Homo Sapiens
DFGLARAFGIPIRVY

SEQ ID NO: 95340 - protein, 15 aa, Homo Sapiens
FGLARAFGIPIRVYT

SEQ ID NO: 95341 - protein, 15 aa, Homo Sapiens
GLARAFGIPIRVYTH

SEQ ID NO: 95342 - protein, 15 aa, Homo Sapiens
LARAFGIPIRVYTHE

SEQ ID NO: 95343 - protein, 15 aa, Homo Sapiens
ARAFGIPIRVYTHEV

SEQ ID NO: 95344 - protein, 15 aa, Homo Sapiens
RAFGIPIRVYTHEVV

SEQ ID NO: 95345 - protein, 15 aa, Homo Sapiens
AFGIPIRVYTHEVVT

SEQ ID NO: 95346 - protein, 15 aa, Homo Sapiens
FGIPIRVYTHEVVTL

SEQ ID NO: 95347 - protein, 15 aa, Homo Sapiens
GIPIRVYTHEVVTLW

SEQ ID NO: 95348 - protein, 15 aa, Homo Sapiens
IPIRVYTHEVVTLWY

SEQ ID NO: 95349 - protein, 15 aa, Homo Sapiens
PIRVYTHEVVTLWYR

SEQ ID NO: 95350 - protein, 15 aa, Homo Sapiens
IRVYTHEVVTLWYRS

SEQ ID NO: 95351 - protein, 15 aa, Homo Sapiens
RVYTHEVVTLWYRSP

SEQ ID NO: 95352 - protein, 15 aa, Homo Sapiens
VYTHEVVTLWYRSPE

SEQ ID NO: 95353 - protein, 15 aa, Homo Sapiens
YTHEVVTLWYRSPEV

SEQ ID NO: 95354 - protein, 15 aa, Homo Sapiens
THEVVTLWYRSPEVL

SEQ ID NO: 95355 - protein, 15 aa, Homo Sapiens
HEVVTLWYRSPEVLL

SEQ ID NO: 95356 - protein, 15 aa, Homo Sapiens
EVVTLWYRSPEVLLG

SEQ ID NO: 95357 - protein, 15 aa, Homo Sapiens
VVTLWYRSPEVLLGS

SEQ ID NO: 95358 - protein, 15 aa, Homo Sapiens
VTLWYRSPEVLLGSA

SEQ ID NO: 95359 - protein, 15 aa, Homo Sapiens
TLWYRSPEVLLGSAR

SEQ ID NO: 95360 - protein, 15 aa, Homo Sapiens
LWYRSPEVLLGSARY

SEQ ID NO: 95361 - protein, 15 aa, Homo Sapiens
WYRSPEVLLGSARYS

SEQ ID NO: 95362 - protein, 15 aa, Homo Sapiens
YRSPEVLLGSARYST

SEQ ID NO: 95363 - protein, 15 aa, Homo Sapiens
RSPEVLLGSARYSTP

SEQ ID NO: 95364 - protein, 15 aa, Homo Sapiens
SPEVLLGSARYSTPV

SEQ ID NO: 95365 - protein, 15 aa, Homo Sapiens
PEVLLGSARYSTPVD

SEQ ID NO: 95366 - protein, 15 aa, Homo Sapiens
EVLLGSARYSTPVDI

SEQ ID NO: 95367 - protein, 15 aa, Homo Sapiens
VLLGSARYSTPVDIW

SEQ ID NO: 95368 - protein, 15 aa, Homo Sapiens
LLGSARYSTPVDIWS

SEQ ID NO: 95369 - protein, 15 aa, Homo Sapiens
LGSARYSTPVDIWSI

SEQ ID NO: 95370 - protein, 15 aa, Homo Sapiens
GSARYSTPVDIWSIG

SEQ ID NO: 95371 - protein, 15 aa, Homo Sapiens
SARYSTPVDIWSIGT

SEQ ID NO: 95372 - protein, 15 aa, Homo Sapiens
ARYSTPVDIWSIGTI

SEQ ID NO: 95373 - protein, 15 aa, Homo Sapiens
RYSTPVDIWSIGTIF

SEQ ID NO: 95374 - protein, 15 aa, Homo Sapiens
YSTPVDIWSIGTIFA

SEQ ID NO: 95375 - protein, 15 aa, Homo Sapiens
STPVDIWSIGTIFAE

SEQ ID NO: 95376 - protein, 15 aa, Homo Sapiens
TPVDIWSIGTIFAEL

SEQ ID NO: 95377 - protein, 15 aa, Homo Sapiens
PVDIWSIGTIFAELA

SEQ ID NO: 95378 - protein, 15 aa, Homo Sapiens
VDIWSIGTIFAELAT

SEQ ID NO: 95379 - protein, 15 aa, Homo Sapiens
DIWSIGTIFAELATK

SEQ ID NO: 95380 - protein, 15 aa, Homo Sapiens
IWSIGTIFAELATKK

SEQ ID NO: 95381 - protein, 15 aa, Homo Sapiens
WSIGTIFAELATKKP

SEQ ID NO: 95382 - protein, 15 aa, Homo Sapiens
SIGTIFAELATKKPL

SEQ ID NO: 95383 - protein, 15 aa, Homo Sapiens
IGTIFAELATKKPLF

SEQ ID NO: 95384 - protein, 15 aa, Homo Sapiens
GTIFAELATKKPLFH

SEQ ID NO: 95385 - protein, 15 aa, Homo Sapiens
TIFAELATKKPLFHG

SEQ ID NO: 95386 - protein, 15 aa, Homo Sapiens
IFAELATKKPLFHGD

SEQ ID NO: 95387 - protein, 15 aa, Homo Sapiens
FAELATKKPLFHGDS

SEQ ID NO: 95388 - protein, 15 aa, Homo Sapiens
AELATKKPLFHGDSE

SEQ ID NO: 95389 - protein, 15 aa, Homo Sapiens
ELATKKPLFHGDSEI

SEQ ID NO: 95390 - protein, 15 aa, Homo Sapiens
LATKKPLFHGDSEID

SEQ ID NO: 95391 - protein, 15 aa, Homo Sapiens
ATKKPLFHGDSEIDQ

SEQ ID NO: 95392 - protein, 15 aa, Homo Sapiens
TKKPLFHGDSEIDQL

SEQ ID NO: 95393 - protein, 15 aa, Homo Sapiens
KKPLFHGDSEIDQLF

SEQ ID NO: 95394 - protein, 15 aa, Homo Sapiens
KPLFHGDSEIDQLFR

SEQ ID NO: 95395 - protein, 15 aa, Homo Sapiens
PLFHGDSEIDQLFRI

SEQ ID NO: 95396 - protein, 15 aa, Homo Sapiens
LFHGDSEIDQLFRIF

SEQ ID NO: 95397 - protein, 15 aa, Homo Sapiens
FHGDSEIDQLFRIFR

SEQ ID NO: 95398 - protein, 15 aa, Homo Sapiens
HGDSEIDQLFRIFRA

SEQ ID NO: 95399 - protein, 15 aa, Homo Sapiens
GDSEIDQLFRIFRAL

SEQ ID NO: 95400 - protein, 15 aa, Homo Sapiens
DSEIDQLFRIFRALG

SEQ ID NO: 95401 - protein, 15 aa, Homo Sapiens
SEIDQLFRIFRALGT

SEQ ID NO: 95402 - protein, 15 aa, Homo Sapiens
EIDQLFRIFRALGTP

SEQ ID NO: 95403 - protein, 15 aa, Homo Sapiens
IDQLFRIFRALGTPN

SEQ ID NO: 95404 - protein, 15 aa, Homo Sapiens
DQLFRIFRALGTPNN

SEQ ID NO: 95405 - protein, 15 aa, Homo Sapiens
QLFRIFRALGTPNNE

SEQ ID NO: 95406 - protein, 15 aa, Homo Sapiens
LFRIFRALGTPNNEV

SEQ ID NO: 95407 - protein, 15 aa, Homo Sapiens
FRIFRALGTPNNEVW

SEQ ID NO: 95408 - protein, 15 aa, Homo Sapiens
RIFRALGTPNNEVWP

SEQ ID NO: 95409 - protein, 15 aa, Homo Sapiens
IFRALGTPNNEVWPE

SEQ ID NO: 95410 - protein, 15 aa, Homo Sapiens
FRALGTPNNEVWPEV

SEQ ID NO: 95411 - protein, 15 aa, Homo Sapiens
RALGTPNNEVWPEVE

SEQ ID NO: 95412 - protein, 15 aa, Homo Sapiens
ALGTPNNEVWPEVES

SEQ ID NO: 95413 - protein, 15 aa, Homo Sapiens
LGTPNNEVWPEVESL

SEQ ID NO: 95414 - protein, 15 aa, Homo Sapiens
GTPNNEVWPEVESLQ

SEQ ID NO: 95415 - protein, 15 aa, Homo Sapiens
TPNNEVWPEVESLQD

SEQ ID NO: 95416 - protein, 15 aa, Homo Sapiens
PNNEVWPEVESLQDY

SEQ ID NO: 95417 - protein, 15 aa, Homo Sapiens
NNEVWPEVESLQDYK

SEQ ID NO: 95418 - protein, 15 aa, Homo Sapiens
NEVWPEVESLQDYKN

SEQ ID NO: 95419 - protein, 15 aa, Homo Sapiens
EVWPEVESLQDYKNT

SEQ ID NO: 95420 - protein, 15 aa, Homo Sapiens
VWPEVESLQDYKNTF

SEQ ID NO: 95421 - protein, 15 aa, Homo Sapiens
WPEVESLQDYKNTFP

SEQ ID NO: 95422 - protein, 15 aa, Homo Sapiens
PEVESLQDYKNTFPK

SEQ ID NO: 95423 - protein, 15 aa, Homo Sapiens
EVESLQDYKNTFPKW

SEQ ID NO: 95424 - protein, 15 aa, Homo Sapiens
VESLQDYKNTFPKWK

SEQ ID NO: 95425 - protein, 15 aa, Homo Sapiens
ESLQDYKNTFPKWKP

SEQ ID NO: 95426 - protein, 15 aa, Homo Sapiens
SLQDYKNTFPKWKPG

SEQ ID NO: 95427 - protein, 15 aa, Homo Sapiens
LQDYKNTFPKWKPGS

SEQ ID NO: 95428 - protein, 15 aa, Homo Sapiens
QDYKNTFPKWKPGSL

SEQ ID NO: 95429 - protein, 15 aa, Homo Sapiens
DYKNTFPKWKPGSLA

SEQ ID NO: 95430 - protein, 15 aa, Homo Sapiens
YKNTFPKWKPGSLAS

SEQ ID NO: 95431 - protein, 15 aa, Homo Sapiens
KNTFPKWKPGSLASH

SEQ ID NO: 95432 - protein, 15 aa, Homo Sapiens
NTFPKWKPGSLASHV

SEQ ID NO: 95433 - protein, 15 aa, Homo Sapiens
TFPKWKPGSLASHVK

SEQ ID NO: 95434 - protein, 15 aa, Homo Sapiens
FPKWKPGSLASHVKN

SEQ ID NO: 95435 - protein, 15 aa, Homo Sapiens
PKWKPGSLASHVKNL

SEQ ID NO: 95436 - protein, 15 aa, Homo Sapiens
KWKPGSLASHVKNLD

SEQ ID NO: 95437 - protein, 15 aa, Homo Sapiens
WKPGSLASHVKNLDE

SEQ ID NO: 95438 - protein, 15 aa, Homo Sapiens
KPGSLASHVKNLDEN

SEQ ID NO: 95439 - protein, 15 aa, Homo Sapiens
PGSLASHVKNLDENG

SEQ ID NO: 95440 - protein, 15 aa, Homo Sapiens
GSLASHVKNLDENGL

SEQ ID NO: 95441 - protein, 15 aa, Homo Sapiens
SLASHVKNLDENGLD

SEQ ID NO: 95442 - protein, 15 aa, Homo Sapiens
LASHVKNLDENGLDL

SEQ ID NO: 95443 - protein, 15 aa, Homo Sapiens
ASHVKNLDENGLDLL

SEQ ID NO: 95444 - protein, 15 aa, Homo Sapiens
SHVKNLDENGLDLLS

SEQ ID NO: 95445 - protein, 15 aa, Homo Sapiens
HVKNLDENGLDLLSK

SEQ ID NO: 95446 - protein, 15 aa, Homo Sapiens
VKNLDENGLDLLSKM

SEQ ID NO: 95447 - protein, 15 aa, Homo Sapiens
KNLDENGLDLLSKML

SEQ ID NO: 95448 - protein, 15 aa, Homo Sapiens
NLDENGLDLLSKMLI

SEQ ID NO: 95449 - protein, 15 aa, Homo Sapiens
LDENGLDLLSKMLIY

SEQ ID NO: 95450 - protein, 15 aa, Homo Sapiens
DENGLDLLSKMLIYD

SEQ ID NO: 95451 - protein, 15 aa, Homo Sapiens
ENGLDLLSKMLIYDP

SEQ ID NO: 95452 - protein, 15 aa, Homo Sapiens
NGLDLLSKMLIYDPA

SEQ ID NO: 95453 - protein, 15 aa, Homo Sapiens
GLDLLSKMLIYDPAK

SEQ ID NO: 95454 - protein, 15 aa, Homo Sapiens
LDLLSKMLIYDPAKR

SEQ ID NO: 95455 - protein, 15 aa, Homo Sapiens
DLLSKMLIYDPAKRI

SEQ ID NO: 95456 - protein, 15 aa, Homo Sapiens
LLSKMLIYDPAKRIS

SEQ ID NO: 95457 - protein, 15 aa, Homo Sapiens
LSKMLIYDPAKRISG

SEQ ID NO: 95458 - protein, 15 aa, Homo Sapiens
SKMLIYDPAKRISGK

SEQ ID NO: 95459 - protein, 15 aa, Homo Sapiens
KMLIYDPAKRISGKM

SEQ ID NO: 95460 - protein, 15 aa, Homo Sapiens
MLIYDPAKRISGKMA

SEQ ID NO: 95461 - protein, 15 aa, Homo Sapiens
LIYDPAKRISGKMAL

SEQ ID NO: 95462 - protein, 15 aa, Homo Sapiens
IYDPAKRISGKMALN

SEQ ID NO: 95463 - protein, 15 aa, Homo Sapiens
YDPAKRISGKMALNH

SEQ ID NO: 95464 - protein, 15 aa, Homo Sapiens
DPAKRISGKMALNHP

SEQ ID NO: 95465 - protein, 15 aa, Homo Sapiens
PAKRISGKMALNHPY

SEQ ID NO: 95466 - protein, 15 aa, Homo Sapiens
AKRISGKMALNHPYF

SEQ ID NO: 95467 - protein, 15 aa, Homo Sapiens
KRISGKMALNHPYFN

SEQ ID NO: 95468 - protein, 15 aa, Homo Sapiens
RISGKMALNHPYFND

SEQ ID NO: 95469 - protein, 15 aa, Homo Sapiens
ISGKMALNHPYFNDL

SEQ ID NO: 95470 - protein, 15 aa, Homo Sapiens
SGKMALNHPYFNDLD

SEQ ID NO: 95471 - protein, 15 aa, Homo Sapiens
GKMALNHPYFNDLDN

SEQ ID NO: 95472 - protein, 15 aa, Homo Sapiens
KMALNHPYFNDLDNQ

SEQ ID NO: 95473 - protein, 15 aa, Homo Sapiens
MALNHPYFNDLDNQI

SEQ ID NO: 95474 - protein, 15 aa, Homo Sapiens
ALNHPYFNDLDNQIK

SEQ ID NO: 95475 - protein, 15 aa, Homo Sapiens
LNHPYFNDLDNQIKK

SEQ ID NO: 95476 - protein, 15 aa, Homo Sapiens
NHPYFNDLDNQIKKM

SEQ ID NO: 95477 - protein, 16 aa, Homo Sapiens
MEDYTKIEKIGEGTYG

SEQ ID NO: 95478 - protein, 16 aa, Homo Sapiens
EDYTKIEKIGEGTYGV

SEQ ID NO: 95479 - protein, 16 aa, Homo Sapiens
DYTKIEKIGEGTYGVV

SEQ ID NO: 95480 - protein, 16 aa, Homo Sapiens
YTKIEKIGEGTYGVVY

SEQ ID NO: 95481 - protein, 16 aa, Homo Sapiens
TKIEKIGEGTYGVVYK

SEQ ID NO: 95482 - protein, 16 aa, Homo Sapiens
KIEKIGEGTYGVVYKG

SEQ ID NO: 95483 - protein, 16 aa, Homo Sapiens
IEKIGEGTYGVVYKGR

SEQ ID NO: 95484 - protein, 16 aa, Homo Sapiens
EKIGEGTYGVVYKGRH

SEQ ID NO: 95485 - protein, 16 aa, Homo Sapiens
KIGEGTYGVVYKGRHK

SEQ ID NO: 95486 - protein, 16 aa, Homo Sapiens
IGEGTYGVVYKGRHKT

SEQ ID NO: 95487 - protein, 16 aa, Homo Sapiens
GEGTYGVVYKGRHKTT

SEQ ID NO: 95488 - protein, 16 aa, Homo Sapiens
EGTYGVVYKGRHKTTG

SEQ ID NO: 95489 - protein, 16 aa, Homo Sapiens
GTYGVVYKGRHKTTGQ

SEQ ID NO: 95490 - protein, 16 aa, Homo Sapiens
TYGVVYKGRHKTTGQV

SEQ ID NO: 95491 - protein, 16 aa, Homo Sapiens
YGVVYKGRHKTTGQVV

SEQ ID NO: 95492 - protein, 16 aa, Homo Sapiens
GVVYKGRHKTTGQVVA

SEQ ID NO: 95493 - protein, 16 aa, Homo Sapiens
VVYKGRHKTTGQVVAM

SEQ ID NO: 95494 - protein, 16 aa, Homo Sapiens
VYKGRHKTTGQVVAMK

SEQ ID NO: 95495 - protein, 16 aa, Homo Sapiens
YKGRHKTTGQVVAMKK

SEQ ID NO: 95496 - protein, 16 aa, Homo Sapiens
KGRHKTTGQVVAMKKI

SEQ ID NO: 95497 - protein, 16 aa, Homo Sapiens
GRHKTTGQVVAMKKIR

SEQ ID NO: 95498 - protein, 16 aa, Homo Sapiens
RHKTTGQVVAMKKIRL

SEQ ID NO: 95499 - protein, 16 aa, Homo Sapiens
HKTTGQVVAMKKIRLE

SEQ ID NO: 95500 - protein, 16 aa, Homo Sapiens
KTTGQVVAMKKIRLES

SEQ ID NO: 95501 - protein, 16 aa, Homo Sapiens
TTGQVVAMKKIRLESE

SEQ ID NO: 95502 - protein, 16 aa, Homo Sapiens
TGQVVAMKKIRLESEE

SEQ ID NO: 95503 - protein, 16 aa, Homo Sapiens
GQVVAMKKIRLESEEE

SEQ ID NO: 95504 - protein, 16 aa, Homo Sapiens
QVVAMKKIRLESEEEG

SEQ ID NO: 95505 - protein, 16 aa, Homo Sapiens
VVAMKKIRLESEEEGV

SEQ ID NO: 95506 - protein, 16 aa, Homo Sapiens
VAMKKIRLESEEEGVP

SEQ ID NO: 95507 - protein, 16 aa, Homo Sapiens
AMKKIRLESEEEGVPS

SEQ ID NO: 95508 - protein, 16 aa, Homo Sapiens
MKKIRLESEEEGVPST

SEQ ID NO: 95509 - protein, 16 aa, Homo Sapiens
KKIRLESEEEGVPSTA

SEQ ID NO: 95510 - protein, 16 aa, Homo Sapiens
KIRLESEEEGVPSTAI

SEQ ID NO: 95511 - protein, 16 aa, Homo Sapiens
IRLESEEEGVPSTAIR

SEQ ID NO: 95512 - protein, 16 aa, Homo Sapiens
RLESEEEGVPSTAIRE

SEQ ID NO: 95513 - protein, 16 aa, Homo Sapiens
LESEEEGVPSTAIREI

SEQ ID NO: 95514 - protein, 16 aa, Homo Sapiens
ESEEEGVPSTAIREIS

SEQ ID NO: 95515 - protein, 16 aa, Homo Sapiens
SEEEGVPSTAIREISL

SEQ ID NO: 95516 - protein, 16 aa, Homo Sapiens
EEEGVPSTAIREISLL

SEQ ID NO: 95517 - protein, 16 aa, Homo Sapiens
EEGVPSTAIREISLLK

SEQ ID NO: 95518 - protein, 16 aa, Homo Sapiens
EGVPSTAIREISLLKE

SEQ ID NO: 95519 - protein, 16 aa, Homo Sapiens
GVPSTAIREISLLKEL

SEQ ID NO: 95520 - protein, 16 aa, Homo Sapiens
VPSTAIREISLLKELR

SEQ ID NO: 95521 - protein, 16 aa, Homo Sapiens
PSTAIREISLLKELRH

SEQ ID NO: 95522 - protein, 16 aa, Homo Sapiens
STAIREISLLKELRHP

SEQ ID NO: 95523 - protein, 16 aa, Homo Sapiens
TAIREISLLKELRHPN

SEQ ID NO: 95524 - protein, 16 aa, Homo Sapiens
AIREISLLKELRHPNI

SEQ ID NO: 95525 - protein, 16 aa, Homo Sapiens
IREISLLKELRHPNIV

SEQ ID NO: 95526 - protein, 16 aa, Homo Sapiens
REISLLKELRHPNIVS

SEQ ID NO: 95527 - protein, 16 aa, Homo Sapiens
EISLLKELRHPNIVSL

SEQ ID NO: 95528 - protein, 16 aa, Homo Sapiens
ISLLKELRHPNIVSLQ

SEQ ID NO: 95529 - protein, 16 aa, Homo Sapiens
SLLKELRHPNIVSLQD

SEQ ID NO: 95530 - protein, 16 aa, Homo Sapiens
LLKELRHPNIVSLQDV

SEQ ID NO: 95531 - protein, 16 aa, Homo Sapiens
LKELRHPNIVSLQDVL

SEQ ID NO: 95532 - protein, 16 aa, Homo Sapiens
KELRHPNIVSLQDVLM

SEQ ID NO: 95533 - protein, 16 aa, Homo Sapiens
ELRHPNIVSLQDVLMQ

SEQ ID NO: 95534 - protein, 16 aa, Homo Sapiens
LRHPNIVSLQDVLMQD

SEQ ID NO: 95535 - protein, 16 aa, Homo Sapiens
RHPNIVSLQDVLMQDS

SEQ ID NO: 95536 - protein, 16 aa, Homo Sapiens
HPNIVSLQDVLMQDSR

SEQ ID NO: 95537 - protein, 16 aa, Homo Sapiens
PNIVSLQDVLMQDSRL

SEQ ID NO: 95538 - protein, 16 aa, Homo Sapiens
NIVSLQDVLMQDSRLY

SEQ ID NO: 95539 - protein, 16 aa, Homo Sapiens
IVSLQDVLMQDSRLYL

SEQ ID NO: 95540 - protein, 16 aa, Homo Sapiens
VSLQDVLMQDSRLYLI

SEQ ID NO: 95541 - protein, 16 aa, Homo Sapiens
SLQDVLMQDSRLYLIF

SEQ ID NO: 95542 - protein, 16 aa, Homo Sapiens
LQDVLMQDSRLYLIFE

SEQ ID NO: 95543 - protein, 16 aa, Homo Sapiens
QDVLMQDSRLYLIFEF

SEQ ID NO: 95544 - protein, 16 aa, Homo Sapiens
DVLMQDSRLYLIFEFL

SEQ ID NO: 95545 - protein, 16 aa, Homo Sapiens
VLMQDSRLYLIFEFLS

SEQ ID NO: 95546 - protein, 16 aa, Homo Sapiens
LMQDSRLYLIFEFLSM

SEQ ID NO: 95547 - protein, 16 aa, Homo Sapiens
MQDSRLYLIFEFLSMD

SEQ ID NO: 95548 - protein, 16 aa, Homo Sapiens
QDSRLYLIFEFLSMDL

SEQ ID NO: 95549 - protein, 16 aa, Homo Sapiens
DSRLYLIFEFLSMDLK

SEQ ID NO: 95550 - protein, 16 aa, Homo Sapiens
SRLYLIFEFLSMDLKK

SEQ ID NO: 95551 - protein, 16 aa, Homo Sapiens
RLYLIFEFLSMDLKKY

SEQ ID NO: 95552 - protein, 16 aa, Homo Sapiens
LYLIFEFLSMDLKKYL

SEQ ID NO: 95553 - protein, 16 aa, Homo Sapiens
YLIFEFLSMDLKKYLD

SEQ ID NO: 95554 - protein, 16 aa, Homo Sapiens
LIFEFLSMDLKKYLDS

SEQ ID NO: 95555 - protein, 16 aa, Homo Sapiens
IFEFLSMDLKKYLDSI

SEQ ID NO: 95556 - protein, 16 aa, Homo Sapiens
FEFLSMDLKKYLDSIP

SEQ ID NO: 95557 - protein, 16 aa, Homo Sapiens
EFLSMDLKKYLDSIPP

SEQ ID NO: 95558 - protein, 16 aa, Homo Sapiens
FLSMDLKKYLDSIPPG

SEQ ID NO: 95559 - protein, 16 aa, Homo Sapiens
LSMDLKKYLDSIPPGQ

SEQ ID NO: 95560 - protein, 16 aa, Homo Sapiens
SMDLKKYLDSIPPGQY

SEQ ID NO: 95561 - protein, 16 aa, Homo Sapiens
MDLKKYLDSIPPGQYM

SEQ ID NO: 95562 - protein, 16 aa, Homo Sapiens
DLKKYLDSIPPGQYMD

SEQ ID NO: 95563 - protein, 16 aa, Homo Sapiens
LKKYLDSIPPGQYMDS

SEQ ID NO: 95564 - protein, 16 aa, Homo Sapiens
KKYLDSIPPGQYMDSS

SEQ ID NO: 95565 - protein, 16 aa, Homo Sapiens
KYLDSIPPGQYMDSSL

SEQ ID NO: 95566 - protein, 16 aa, Homo Sapiens
YLDSIPPGQYMDSSLV

SEQ ID NO: 95567 - protein, 16 aa, Homo Sapiens
LDSIPPGQYMDSSLVK

SEQ ID NO: 95568 - protein, 16 aa, Homo Sapiens
DSIPPGQYMDSSLVKS

SEQ ID NO: 95569 - protein, 16 aa, Homo Sapiens
SIPPGQYMDSSLVKSY

SEQ ID NO: 95570 - protein, 16 aa, Homo Sapiens
IPPGQYMDSSLVKSYL

SEQ ID NO: 95571 - protein, 16 aa, Homo Sapiens
PPGQYMDSSLVKSYLY

SEQ ID NO: 95572 - protein, 16 aa, Homo Sapiens
PGQYMDSSLVKSYLYQ

SEQ ID NO: 95573 - protein, 16 aa, Homo Sapiens
GQYMDSSLVKSYLYQI

SEQ ID NO: 95574 - protein, 16 aa, Homo Sapiens
QYMDSSLVKSYLYQIL

SEQ ID NO: 95575 - protein, 16 aa, Homo Sapiens
YMDSSLVKSYLYQILQ

SEQ ID NO: 95576 - protein, 16 aa, Homo Sapiens
MDSSLVKSYLYQILQG

SEQ ID NO: 95577 - protein, 16 aa, Homo Sapiens
DSSLVKSYLYQILQGI

SEQ ID NO: 95578 - protein, 16 aa, Homo Sapiens
SSLVKSYLYQILQGIV

SEQ ID NO: 95579 - protein, 16 aa, Homo Sapiens
SLVKSYLYQILQGIVF

SEQ ID NO: 95580 - protein, 16 aa, Homo Sapiens
LVKSYLYQILQGIVFC

SEQ ID NO: 95581 - protein, 16 aa, Homo Sapiens
VKSYLYQILQGIVFCH

SEQ ID NO: 95582 - protein, 16 aa, Homo Sapiens
KSYLYQILQGIVFCHS

SEQ ID NO: 95583 - protein, 16 aa, Homo Sapiens
SYLYQILQGIVFCHSR

SEQ ID NO: 95584 - protein, 16 aa, Homo Sapiens
YLYQILQGIVFCHSRR

SEQ ID NO: 95585 - protein, 16 aa, Homo Sapiens
LYQILQGIVFCHSRRV

SEQ ID NO: 95586 - protein, 16 aa, Homo Sapiens
YQILQGIVFCHSRRVL

SEQ ID NO: 95587 - protein, 16 aa, Homo Sapiens
QILQGIVFCHSRRVLH

SEQ ID NO: 95588 - protein, 16 aa, Homo Sapiens
ILQGIVFCHSRRVLHR

SEQ ID NO: 95589 - protein, 16 aa, Homo Sapiens
LQGIVFCHSRRVLHRD

SEQ ID NO: 95590 - protein, 16 aa, Homo Sapiens
QGIVFCHSRRVLHRDL

SEQ ID NO: 95591 - protein, 16 aa, Homo Sapiens
GIVFCHSRRVLHRDLK

SEQ ID NO: 95592 - protein, 16 aa, Homo Sapiens
IVFCHSRRVLHRDLKP

SEQ ID NO: 95593 - protein, 16 aa, Homo Sapiens
VFCHSRRVLHRDLKPQ

SEQ ID NO: 95594 - protein, 16 aa, Homo Sapiens
FCHSRRVLHRDLKPQN

SEQ ID NO: 95595 - protein, 16 aa, Homo Sapiens
CHSRRVLHRDLKPQNL

SEQ ID NO: 95596 - protein, 16 aa, Homo Sapiens
HSRRVLHRDLKPQNLL

SEQ ID NO: 95597 - protein, 16 aa, Homo Sapiens
SRRVLHRDLKPQNLLI

SEQ ID NO: 95598 - protein, 16 aa, Homo Sapiens
RRVLHRDLKPQNLLID

SEQ ID NO: 95599 - protein, 16 aa, Homo Sapiens
RVLHRDLKPQNLLIDD

SEQ ID NO: 95600 - protein, 16 aa, Homo Sapiens
VLHRDLKPQNLLIDDK

SEQ ID NO: 95601 - protein, 16 aa, Homo Sapiens
LHRDLKPQNLLIDDKG

SEQ ID NO: 95602 - protein, 16 aa, Homo Sapiens
HRDLKPQNLLIDDKGT

SEQ ID NO: 95603 - protein, 16 aa, Homo Sapiens
RDLKPQNLLIDDKGTI

SEQ ID NO: 95604 - protein, 16 aa, Homo Sapiens
DLKPQNLLIDDKGTIK

SEQ ID NO: 95605 - protein, 16 aa, Homo Sapiens
LKPQNLLIDDKGTIKL

SEQ ID NO: 95606 - protein, 16 aa, Homo Sapiens
KPQNLLIDDKGTIKLA

SEQ ID NO: 95607 - protein, 16 aa, Homo Sapiens
PQNLLIDDKGTIKLAD

SEQ ID NO: 95608 - protein, 16 aa, Homo Sapiens
QNLLIDDKGTIKLADF

SEQ ID NO: 95609 - protein, 16 aa, Homo Sapiens
NLLIDDKGTIKLADFG

SEQ ID NO: 95610 - protein, 16 aa, Homo Sapiens
LLIDDKGTIKLADFGL

SEQ ID NO: 95611 - protein, 16 aa, Homo Sapiens
LIDDKGTIKLADFGLA

SEQ ID NO: 95612 - protein, 16 aa, Homo Sapiens
IDDKGTIKLADFGLAR

SEQ ID NO: 95613 - protein, 16 aa, Homo Sapiens
DDKGTIKLADFGLARA

SEQ ID NO: 95614 - protein, 16 aa, Homo Sapiens
DKGTIKLADFGLARAF

SEQ ID NO: 95615 - protein, 16 aa, Homo Sapiens
KGTIKLADFGLARAFG

SEQ ID NO: 95616 - protein, 16 aa, Homo Sapiens
GTIKLADFGLARAFGI

SEQ ID NO: 95617 - protein, 16 aa, Homo Sapiens
TIKLADFGLARAFGIP

SEQ ID NO: 95618 - protein, 16 aa, Homo Sapiens
IKLADFGLARAFGIPI

SEQ ID NO: 95619 - protein, 16 aa, Homo Sapiens
KLADFGLARAFGIPIR

SEQ ID NO: 95620 - protein, 16 aa, Homo Sapiens
LADFGLARAFGIPIRV

SEQ ID NO: 95621 - protein, 16 aa, Homo Sapiens
ADFGLARAFGIPIRVY

SEQ ID NO: 95622 - protein, 16 aa, Homo Sapiens
DFGLARAFGIPIRVYT

SEQ ID NO: 95623 - protein, 16 aa, Homo Sapiens
FGLARAFGIPIRVYTH

SEQ ID NO: 95624 - protein, 16 aa, Homo Sapiens
GLARAFGIPIRVYTHE

SEQ ID NO: 95625 - protein, 16 aa, Homo Sapiens
LARAFGIPIRVYTHEV

SEQ ID NO: 95626 - protein, 16 aa, Homo Sapiens
ARAFGIPIRVYTHEVV

SEQ ID NO: 95627 - protein, 16 aa, Homo Sapiens
RAFGIPIRVYTHEVVT

SEQ ID NO: 95628 - protein, 16 aa, Homo Sapiens
AFGIPIRVYTHEVVTL

SEQ ID NO: 95629 - protein, 16 aa, Homo Sapiens
FGIPIRVYTHEVVTLW

SEQ ID NO: 95630 - protein, 16 aa, Homo Sapiens
GIPIRVYTHEVVTLWY

SEQ ID NO: 95631 - protein, 16 aa, Homo Sapiens
IPIRVYTHEVVTLWYR

SEQ ID NO: 95632 - protein, 16 aa, Homo Sapiens
PIRVYTHEVVTLWYRS

SEQ ID NO: 95633 - protein, 16 aa, Homo Sapiens
IRVYTHEVVTLWYRSP

SEQ ID NO: 95634 - protein, 16 aa, Homo Sapiens
RVYTHEVVTLWYRSPE

SEQ ID NO: 95635 - protein, 16 aa, Homo Sapiens
VYTHEVVTLWYRSPEV

SEQ ID NO: 95636 - protein, 16 aa, Homo Sapiens
YTHEVVTLWYRSPEVL

SEQ ID NO: 95637 - protein, 16 aa, Homo Sapiens
THEVVTLWYRSPEVLL

SEQ ID NO: 95638 - protein, 16 aa, Homo Sapiens
HEVVTLWYRSPEVLLG

SEQ ID NO: 95639 - protein, 16 aa, Homo Sapiens
EVVTLWYRSPEVLLGS

SEQ ID NO: 95640 - protein, 16 aa, Homo Sapiens
VVTLWYRSPEVLLGSA

SEQ ID NO: 95641 - protein, 16 aa, Homo Sapiens
VTLWYRSPEVLLGSAR

SEQ ID NO: 95642 - protein, 16 aa, Homo Sapiens
TLWYRSPEVLLGSARY

SEQ ID NO: 95643 - protein, 16 aa, Homo Sapiens
LWYRSPEVLLGSARYS

SEQ ID NO: 95644 - protein, 16 aa, Homo Sapiens
WYRSPEVLLGSARYST

SEQ ID NO: 95645 - protein, 16 aa, Homo Sapiens
YRSPEVLLGSARYSTP

SEQ ID NO: 95646 - protein, 16 aa, Homo Sapiens
RSPEVLLGSARYSTPV

SEQ ID NO: 95647 - protein, 16 aa, Homo Sapiens
SPEVLLGSARYSTPVD

SEQ ID NO: 95648 - protein, 16 aa, Homo Sapiens
PEVLLGSARYSTPVDI

SEQ ID NO: 95649 - protein, 16 aa, Homo Sapiens
EVLLGSARYSTPVDIW

SEQ ID NO: 95650 - protein, 16 aa, Homo Sapiens
VLLGSARYSTPVDIWS

SEQ ID NO: 95651 - protein, 16 aa, Homo Sapiens
LLGSARYSTPVDIWSI

SEQ ID NO: 95652 - protein, 16 aa, Homo Sapiens
LGSARYSTPVDIWSIG

SEQ ID NO: 95653 - protein, 16 aa, Homo Sapiens
GSARYSTPVDIWSIGT

SEQ ID NO: 95654 - protein, 16 aa, Homo Sapiens
SARYSTPVDIWSIGTI

SEQ ID NO: 95655 - protein, 16 aa, Homo Sapiens
ARYSTPVDIWSIGTIF

SEQ ID NO: 95656 - protein, 16 aa, Homo Sapiens
RYSTPVDIWSIGTIFA

SEQ ID NO: 95657 - protein, 16 aa, Homo Sapiens
YSTPVDIWSIGTIFAE

SEQ ID NO: 95658 - protein, 16 aa, Homo Sapiens
STPVDIWSIGTIFAEL

SEQ ID NO: 95659 - protein, 16 aa, Homo Sapiens
TPVDIWSIGTIFAELA

SEQ ID NO: 95660 - protein, 16 aa, Homo Sapiens
PVDIWSIGTIFAELAT

SEQ ID NO: 95661 - protein, 16 aa, Homo Sapiens
VDIWSIGTIFAELATK

SEQ ID NO: 95662 - protein, 16 aa, Homo Sapiens
DIWSIGTIFAELATKK

SEQ ID NO: 95663 - protein, 16 aa, Homo Sapiens
IWSIGTIFAELATKKP

SEQ ID NO: 95664 - protein, 16 aa, Homo Sapiens
WSIGTIFAELATKKPL

SEQ ID NO: 95665 - protein, 16 aa, Homo Sapiens
SIGTIFAELATKKPLF

SEQ ID NO: 95666 - protein, 16 aa, Homo Sapiens
IGTIFAELATKKPLFH

SEQ ID NO: 95667 - protein, 16 aa, Homo Sapiens
GTIFAELATKKPLFHG

SEQ ID NO: 95668 - protein, 16 aa, Homo Sapiens
TIFAELATKKPLFHGD

SEQ ID NO: 95669 - protein, 16 aa, Homo Sapiens
IFAELATKKPLFHGDS

SEQ ID NO: 95670 - protein, 16 aa, Homo Sapiens
FAELATKKPLFHGDSE

SEQ ID NO: 95671 - protein, 16 aa, Homo Sapiens
AELATKKPLFHGDSEI

SEQ ID NO: 95672 - protein, 16 aa, Homo Sapiens
ELATKKPLFHGDSEID

SEQ ID NO: 95673 - protein, 16 aa, Homo Sapiens
LATKKPLFHGDSEIDQ

SEQ ID NO: 95674 - protein, 16 aa, Homo Sapiens
ATKKPLFHGDSEIDQL

SEQ ID NO: 95675 - protein, 16 aa, Homo Sapiens
TKKPLFHGDSEIDQLF

SEQ ID NO: 95676 - protein, 16 aa, Homo Sapiens
KKPLFHGDSEIDQLFR

SEQ ID NO: 95677 - protein, 16 aa, Homo Sapiens
KPLFHGDSEIDQLFRI

SEQ ID NO: 95678 - protein, 16 aa, Homo Sapiens
PLFHGDSEIDQLFRIF

SEQ ID NO: 95679 - protein, 16 aa, Homo Sapiens
LFHGDSEIDQLFRIFR

SEQ ID NO: 95680 - protein, 16 aa, Homo Sapiens
FHGDSEIDQLFRIFRA

SEQ ID NO: 95681 - protein, 16 aa, Homo Sapiens
HGDSEIDQLFRIFRAL

SEQ ID NO: 95682 - protein, 16 aa, Homo Sapiens
GDSEIDQLFRIFRALG

SEQ ID NO: 95683 - protein, 16 aa, Homo Sapiens
DSEIDQLFRIFRALGT

SEQ ID NO: 95684 - protein, 16 aa, Homo Sapiens
SEIDQLFRIFRALGTP

SEQ ID NO: 95685 - protein, 16 aa, Homo Sapiens
EIDQLFRIFRALGTPN

SEQ ID NO: 95686 - protein, 16 aa, Homo Sapiens
IDQLFRIFRALGTPNN

SEQ ID NO: 95687 - protein, 16 aa, Homo Sapiens
DQLFRIFRALGTPNNE

SEQ ID NO: 95688 - protein, 16 aa, Homo Sapiens
QLFRIFRALGTPNNEV

SEQ ID NO: 95689 - protein, 16 aa, Homo Sapiens
LFRIFRALGTPNNEVW

SEQ ID NO: 95690 - protein, 16 aa, Homo Sapiens
FRIFRALGTPNNEVWP

SEQ ID NO: 95691 - protein, 16 aa, Homo Sapiens
RIFRALGTPNNEVWPE

SEQ ID NO: 95692 - protein, 16 aa, Homo Sapiens
IFRALGTPNNEVWPEV

SEQ ID NO: 95693 - protein, 16 aa, Homo Sapiens
FRALGTPNNEVWPEVE

SEQ ID NO: 95694 - protein, 16 aa, Homo Sapiens
RALGTPNNEVWPEVES

SEQ ID NO: 95695 - protein, 16 aa, Homo Sapiens
ALGTPNNEVWPEVESL

SEQ ID NO: 95696 - protein, 16 aa, Homo Sapiens
LGTPNNEVWPEVESLQ

SEQ ID NO: 95697 - protein, 16 aa, Homo Sapiens
GTPNNEVWPEVESLQD

SEQ ID NO: 95698 - protein, 16 aa, Homo Sapiens
TPNNEVWPEVESLQDY

SEQ ID NO: 95699 - protein, 16 aa, Homo Sapiens
PNNEVWPEVESLQDYK

SEQ ID NO: 95700 - protein, 16 aa, Homo Sapiens
NNEVWPEVESLQDYKN

SEQ ID NO: 95701 - protein, 16 aa, Homo Sapiens
NEVWPEVESLQDYKNT

SEQ ID NO: 95702 - protein, 16 aa, Homo Sapiens
EVWPEVESLQDYKNTF

SEQ ID NO: 95703 - protein, 16 aa, Homo Sapiens
VWPEVESLQDYKNTFP

SEQ ID NO: 95704 - protein, 16 aa, Homo Sapiens
WPEVESLQDYKNTFPK

SEQ ID NO: 95705 - protein, 16 aa, Homo Sapiens
PEVESLQDYKNTFPKW

SEQ ID NO: 95706 - protein, 16 aa, Homo Sapiens
EVESLQDYKNTFPKWK

SEQ ID NO: 95707 - protein, 16 aa, Homo Sapiens
VESLQDYKNTFPKWKP

SEQ ID NO: 95708 - protein, 16 aa, Homo Sapiens
ESLQDYKNTFPKWKPG

SEQ ID NO: 95709 - protein, 16 aa, Homo Sapiens
SLQDYKNTFPKWKPGS

SEQ ID NO: 95710 - protein, 16 aa, Homo Sapiens
LQDYKNTFPKWKPGSL

SEQ ID NO: 95711 - protein, 16 aa, Homo Sapiens
QDYKNTFPKWKPGSLA

SEQ ID NO: 95712 - protein, 16 aa, Homo Sapiens
DYKNTFPKWKPGSLAS

SEQ ID NO: 95713 - protein, 16 aa, Homo Sapiens
YKNTFPKWKPGSLASH

SEQ ID NO: 95714 - protein, 16 aa, Homo Sapiens
KNTFPKWKPGSLASHV

SEQ ID NO: 95715 - protein, 16 aa, Homo Sapiens
NTFPKWKPGSLASHVK

SEQ ID NO: 95716 - protein, 16 aa, Homo Sapiens
TFPKWKPGSLASHVKN

SEQ ID NO: 95717 - protein, 16 aa, Homo Sapiens
FPKWKPGSLASHVKNL

SEQ ID NO: 95718 - protein, 16 aa, Homo Sapiens
PKWKPGSLASHVKNLD

SEQ ID NO: 95719 - protein, 16 aa, Homo Sapiens
KWKPGSLASHVKNLDE

SEQ ID NO: 95720 - protein, 16 aa, Homo Sapiens
WKPGSLASHVKNLDEN

SEQ ID NO: 95721 - protein, 16 aa, Homo Sapiens
KPGSLASHVKNLDENG

SEQ ID NO: 95722 - protein, 16 aa, Homo Sapiens
PGSLASHVKNLDENGL

SEQ ID NO: 95723 - protein, 16 aa, Homo Sapiens
GSLASHVKNLDENGLD

SEQ ID NO: 95724 - protein, 16 aa, Homo Sapiens
SLASHVKNLDENGLDL

SEQ ID NO: 95725 - protein, 16 aa, Homo Sapiens
LASHVKNLDENGLDLL

SEQ ID NO: 95726 - protein, 16 aa, Homo Sapiens
ASHVKNLDENGLDLLS

SEQ ID NO: 95727 - protein, 16 aa, Homo Sapiens
SHVKNLDENGLDLLSK

SEQ ID NO: 95728 - protein, 16 aa, Homo Sapiens
HVKNLDENGLDLLSKM

SEQ ID NO: 95729 - protein, 16 aa, Homo Sapiens
VKNLDENGLDLLSKML

SEQ ID NO: 95730 - protein, 16 aa, Homo Sapiens
KNLDENGLDLLSKMLI

SEQ ID NO: 95731 - protein, 16 aa, Homo Sapiens
NLDENGLDLLSKMLIY

SEQ ID NO: 95732 - protein, 16 aa, Homo Sapiens
LDENGLDLLSKMLIYD

SEQ ID NO: 95733 - protein, 16 aa, Homo Sapiens
DENGLDLLSKMLIYDP

SEQ ID NO: 95734 - protein, 16 aa, Homo Sapiens
ENGLDLLSKMLIYDPA

SEQ ID NO: 95735 - protein, 16 aa, Homo Sapiens
NGLDLLSKMLIYDPAK

SEQ ID NO: 95736 - protein, 16 aa, Homo Sapiens
GLDLLSKMLIYDPAKR

SEQ ID NO: 95737 - protein, 16 aa, Homo Sapiens
LDLLSKMLIYDPAKRI

SEQ ID NO: 95738 - protein, 16 aa, Homo Sapiens
DLLSKMLIYDPAKRIS

SEQ ID NO: 95739 - protein, 16 aa, Homo Sapiens
LLSKMLIYDPAKRISG

SEQ ID NO: 95740 - protein, 16 aa, Homo Sapiens
LSKMLIYDPAKRISGK

SEQ ID NO: 95741 - protein, 16 aa, Homo Sapiens
SKMLIYDPAKRISGKM

SEQ ID NO: 95742 - protein, 16 aa, Homo Sapiens
KMLIYDPAKRISGKMA

SEQ ID NO: 95743 - protein, 16 aa, Homo Sapiens
MLIYDPAKRISGKMAL

SEQ ID NO: 95744 - protein, 16 aa, Homo Sapiens
LIYDPAKRISGKMALN

SEQ ID NO: 95745 - protein, 16 aa, Homo Sapiens
IYDPAKRISGKMALNH

SEQ ID NO: 95746 - protein, 16 aa, Homo Sapiens
YDPAKRISGKMALNHP

SEQ ID NO: 95747 - protein, 16 aa, Homo Sapiens
DPAKRISGKMALNHPY

SEQ ID NO: 95748 - protein, 16 aa, Homo Sapiens
PAKRISGKMALNHPYF

SEQ ID NO: 95749 - protein, 16 aa, Homo Sapiens
AKRISGKMALNHPYFN

SEQ ID NO: 95750 - protein, 16 aa, Homo Sapiens
KRISGKMALNHPYFND

SEQ ID NO: 95751 - protein, 16 aa, Homo Sapiens
RISGKMALNHPYFNDL

SEQ ID NO: 95752 - protein, 16 aa, Homo Sapiens
ISGKMALNHPYFNDLD

SEQ ID NO: 95753 - protein, 16 aa, Homo Sapiens
SGKMALNHPYFNDLDN

SEQ ID NO: 95754 - protein, 16 aa, Homo Sapiens
GKMALNHPYFNDLDNQ

SEQ ID NO: 95755 - protein, 16 aa, Homo Sapiens
KMALNHPYFNDLDNQI

SEQ ID NO: 95756 - protein, 16 aa, Homo Sapiens
MALNHPYFNDLDNQIK

SEQ ID NO: 95757 - protein, 16 aa, Homo Sapiens
ALNHPYFNDLDNQIKK

SEQ ID NO: 95758 - protein, 16 aa, Homo Sapiens
LNHPYFNDLDNQIKKM

SEQ ID NO: 95759 - protein, 270 aa, Homo Sapiens
MWNSGFESYGSSSYGGAGGYTQSPGGFGSPAPSQAEKKSRARAQHIVPCTISQLLSATLVDEVFRIGNVEISQVTIVGIIRHAEKAPTNIVYKIDDMTAAPMDVRQWVDTDDTSSENTVVPPETYVKVAGHLRSFQNKKSLVAFKIMPLEDMNEFTTHILEVINAHMVLSKANSQPSAGRAPISNPGMSEAGNFGGNSFMPANGLTVAQNQVLNLIKACPRPEGLNFQDLKNQLKHMSVSSIKQAVDFLSNEGHIYSTVDDDHFKSTDAE

SEQ ID NO: 95760 - protein, 8 aa, Homo Sapiens
ESYGSSSY

SEQ ID NO: 95761 - protein, 8 aa, Homo Sapiens
YTQSPGGF

SEQ ID NO: 95762 - protein, 8 aa, Homo Sapiens
SQAEKKSR

SEQ ID NO: 95763 - protein, 8 aa, Homo Sapiens
KSRARAQH

SEQ ID NO: 95764 - protein, 8 aa, Homo Sapiens
RARAQHIV

SEQ ID NO: 95765 - protein, 8 aa, Homo Sapiens
VPCTISQL

SEQ ID NO: 95766 - protein, 8 aa, Homo Sapiens
TISQLLSA

SEQ ID NO: 95767 - protein, 8 aa, Homo Sapiens
SQLLSATL

SEQ ID NO: 95768 - protein, 8 aa, Homo Sapiens
QLLSATLV

SEQ ID NO: 95769 - protein, 8 aa, Homo Sapiens
SATLVDEV

SEQ ID NO: 95770 - protein, 8 aa, Homo Sapiens
ATLVDEVF

SEQ ID NO: 95771 - protein, 8 aa, Homo Sapiens
TLVDEVFR

SEQ ID NO: 95772 - protein, 8 aa, Homo Sapiens
LVDEVFRI

SEQ ID NO: 95773 - protein, 8 aa, Homo Sapiens
EVFRIGNV

SEQ ID NO: 95774 - protein, 8 aa, Homo Sapiens
VEISQVTI

SEQ ID NO: 95775 - protein, 8 aa, Homo Sapiens
EISQVTIV

SEQ ID NO: 95776 - protein, 8 aa, Homo Sapiens
SQVTIVGI

SEQ ID NO: 95777 - protein, 8 aa, Homo Sapiens
QVTIVGII

SEQ ID NO: 95778 - protein, 8 aa, Homo Sapiens
VTIVGIIR

SEQ ID NO: 95779 - protein, 8 aa, Homo Sapiens
GIIRHAEK

SEQ ID NO: 95780 - protein, 8 aa, Homo Sapiens
AEKAPTNI

SEQ ID NO: 95781 - protein, 8 aa, Homo Sapiens
EKAPTNIV

SEQ ID NO: 95782 - protein, 8 aa, Homo Sapiens
KAPTNIVY

SEQ ID NO: 95783 - protein, 8 aa, Homo Sapiens
YKIDDMTA

SEQ ID NO: 95784 - protein, 8 aa, Homo Sapiens
KIDDMTAA

SEQ ID NO: 95785 - protein, 8 aa, Homo Sapiens
MTAAPMDV

SEQ ID NO: 95786 - protein, 8 aa, Homo Sapiens
TAAPMDVR

SEQ ID NO: 95787 - protein, 8 aa, Homo Sapiens
APMDVRQW

SEQ ID NO: 95788 - protein, 8 aa, Homo Sapiens
PMDVRQWV

SEQ ID NO: 95789 - protein, 8 aa, Homo Sapiens
DTSSENTV

SEQ ID NO: 95790 - protein, 8 aa, Homo Sapiens
TSSENTVV

SEQ ID NO: 95791 - protein, 8 aa, Homo Sapiens
TVVPPETY

SEQ ID NO: 95792 - protein, 8 aa, Homo Sapiens
VVPPETYV

SEQ ID NO: 95793 - protein, 8 aa, Homo Sapiens
YVKVAGHL

SEQ ID NO: 95794 - protein, 8 aa, Homo Sapiens
HLRSFQNK

SEQ ID NO: 95795 - protein, 8 aa, Homo Sapiens
SFQNKKSL

SEQ ID NO: 95796 - protein, 8 aa, Homo Sapiens
FQNKKSLV

SEQ ID NO: 95797 - protein, 8 aa, Homo Sapiens
KKSLVAFK

SEQ ID NO: 95798 - protein, 8 aa, Homo Sapiens
KSLVAFKI

SEQ ID NO: 95799 - protein, 8 aa, Homo Sapiens
SLVAFKIM

SEQ ID NO: 95800 - protein, 8 aa, Homo Sapiens
VAFKIMPL

SEQ ID NO: 95801 - protein, 8 aa, Homo Sapiens
KIMPLEDM

SEQ ID NO: 95802 - protein, 8 aa, Homo Sapiens
NEFTTHIL

SEQ ID NO: 95803 - protein, 8 aa, Homo Sapiens
FTTHILEV

SEQ ID NO: 95804 - protein, 8 aa, Homo Sapiens
TTHILEVI

SEQ ID NO: 95805 - protein, 8 aa, Homo Sapiens
HILEVINA

SEQ ID NO: 95806 - protein, 8 aa, Homo Sapiens
EVINAHMV

SEQ ID NO: 95807 - protein, 8 aa, Homo Sapiens
VINAHMVL

SEQ ID NO: 95808 - protein, 8 aa, Homo Sapiens
NAHMVLSK

SEQ ID NO: 95809 - protein, 8 aa, Homo Sapiens
VLSKANSQ

SEQ ID NO: 95810 - protein, 8 aa, Homo Sapiens
NSQPSAGR

SEQ ID NO: 95811 - protein, 8 aa, Homo Sapiens
APISNPGM

SEQ ID NO: 95812 - protein, 8 aa, Homo Sapiens
GMSEAGNF

SEQ ID NO: 95813 - protein, 8 aa, Homo Sapiens
GNFGGNSF

SEQ ID NO: 95814 - protein, 8 aa, Homo Sapiens
SFMPANGL

SEQ ID NO: 95815 - protein, 8 aa, Homo Sapiens
FMPANGLT

SEQ ID NO: 95816 - protein, 8 aa, Homo Sapiens
MPANGLTV

SEQ ID NO: 95817 - protein, 8 aa, Homo Sapiens
LTVAQNQV

SEQ ID NO: 95818 - protein, 8 aa, Homo Sapiens
TVAQNQVL

SEQ ID NO: 95819 - protein, 8 aa, Homo Sapiens
AQNQVLNL

SEQ ID NO: 95820 - protein, 8 aa, Homo Sapiens
QVLNLIKA

SEQ ID NO: 95821 - protein, 8 aa, Homo Sapiens
NLIKACPR

SEQ ID NO: 95822 - protein, 8 aa, Homo Sapiens
GLNFQDLK

SEQ ID NO: 95823 - protein, 8 aa, Homo Sapiens
FQDLKNQL

SEQ ID NO: 95824 - protein, 8 aa, Homo Sapiens
NQLKHMSV

SEQ ID NO: 95825 - protein, 8 aa, Homo Sapiens
HMSVSSIK

SEQ ID NO: 95826 - protein, 8 aa, Homo Sapiens
KQAVDFLS

SEQ ID NO: 95827 - protein, 8 aa, Homo Sapiens
FLSNEGHI

SEQ ID NO: 95828 - protein, 8 aa, Homo Sapiens
LSNEGHIY

SEQ ID NO: 95829 - protein, 8 aa, Homo Sapiens
EGHIYSTV

SEQ ID NO: 95830 - protein, 8 aa, Homo Sapiens
STVDDDHF

SEQ ID NO: 95831 - protein, 8 aa, Homo Sapiens
TVDDDHFK

SEQ ID NO: 95832 - protein, 9 aa, Homo Sapiens
MWNSGFESY

SEQ ID NO: 95833 - protein, 9 aa, Homo Sapiens
FESYGSSSY

SEQ ID NO: 95834 - protein, 9 aa, Homo Sapiens
SSYGGAGGY

SEQ ID NO: 95835 - protein, 9 aa, Homo Sapiens
GYTQSPGGF

SEQ ID NO: 95836 - protein, 9 aa, Homo Sapiens
TQSPGGFGS

SEQ ID NO: 95837 - protein, 9 aa, Homo Sapiens
SPGGFGSPA

SEQ ID NO: 95838 - protein, 9 aa, Homo Sapiens
SPAPSQAEK

SEQ ID NO: 95839 - protein, 9 aa, Homo Sapiens
SQAEKKSRA

SEQ ID NO: 95840 - protein, 9 aa, Homo Sapiens
AEKKSRARA

SEQ ID NO: 95841 - protein, 9 aa, Homo Sapiens
KSRARAQHI

SEQ ID NO: 95842 - protein, 9 aa, Homo Sapiens
AQHIVPCTI

SEQ ID NO: 95843 - protein, 9 aa, Homo Sapiens
IVPCTISQL

SEQ ID NO: 95844 - protein, 9 aa, Homo Sapiens
VPCTISQLL

SEQ ID NO: 95845 - protein, 9 aa, Homo Sapiens
CTISQLLSA

SEQ ID NO: 95846 - protein, 9 aa, Homo Sapiens
TISQLLSAT

SEQ ID NO: 95847 - protein, 9 aa, Homo Sapiens
SQLLSATLV

SEQ ID NO: 95848 - protein, 9 aa, Homo Sapiens
LSATLVDEV

SEQ ID NO: 95849 - protein, 9 aa, Homo Sapiens
SATLVDEVF

SEQ ID NO: 95850 - protein, 9 aa, Homo Sapiens
ATLVDEVFR

SEQ ID NO: 95851 - protein, 9 aa, Homo Sapiens
TLVDEVFRI

SEQ ID NO: 95852 - protein, 9 aa, Homo Sapiens
VEISQVTIV

SEQ ID NO: 95853 - protein, 9 aa, Homo Sapiens
SQVTIVGII

SEQ ID NO: 95854 - protein, 9 aa, Homo Sapiens
QVTIVGIIR

SEQ ID NO: 95855 - protein, 9 aa, Homo Sapiens
TIVGIIRHA

SEQ ID NO: 95856 - protein, 9 aa, Homo Sapiens
AEKAPTNIV

SEQ ID NO: 95857 - protein, 9 aa, Homo Sapiens
EKAPTNIVY

SEQ ID NO: 95858 - protein, 9 aa, Homo Sapiens
KAPTNIVYK

SEQ ID NO: 95859 - protein, 9 aa, Homo Sapiens
APTNIVYKI

SEQ ID NO: 95860 - protein, 9 aa, Homo Sapiens
NIVYKIDDM

SEQ ID NO: 95861 - protein, 9 aa, Homo Sapiens
YKIDDMTAA

SEQ ID NO: 95862 - protein, 9 aa, Homo Sapiens
DMTAAPMDV

SEQ ID NO: 95863 - protein, 9 aa, Homo Sapiens
MTAAPMDVR

SEQ ID NO: 95864 - protein, 9 aa, Homo Sapiens
APMDVRQWV

SEQ ID NO: 95865 - protein, 9 aa, Homo Sapiens
DTSSENTVV

SEQ ID NO: 95866 - protein, 9 aa, Homo Sapiens
NTVVPPETY

SEQ ID NO: 95867 - protein, 9 aa, Homo Sapiens
TVVPPETYV

SEQ ID NO: 95868 - protein, 9 aa, Homo Sapiens
VVPPETYVK

SEQ ID NO: 95869 - protein, 9 aa, Homo Sapiens
VPPETYVKV

SEQ ID NO: 95870 - protein, 9 aa, Homo Sapiens
ETYVKVAGH

SEQ ID NO: 95871 - protein, 9 aa, Homo Sapiens
TYVKVAGHL

SEQ ID NO: 95872 - protein, 9 aa, Homo Sapiens
YVKVAGHLR

SEQ ID NO: 95873 - protein, 9 aa, Homo Sapiens
KVAGHLRSF

SEQ ID NO: 95874 - protein, 9 aa, Homo Sapiens
HLRSFQNKK

SEQ ID NO: 95875 - protein, 9 aa, Homo Sapiens
FQNKKSLVA

SEQ ID NO: 95876 - protein, 9 aa, Homo Sapiens
SLVAFKIMP

SEQ ID NO: 95877 - protein, 9 aa, Homo Sapiens
LVAFKIMPL

SEQ ID NO: 95878 - protein, 9 aa, Homo Sapiens
MPLEDMNEF

SEQ ID NO: 95879 - protein, 9 aa, Homo Sapiens
PLEDMNEFT

SEQ ID NO: 95880 - protein, 9 aa, Homo Sapiens
DMNEFTTHI

SEQ ID NO: 95881 - protein, 9 aa, Homo Sapiens
MNEFTTHIL

SEQ ID NO: 95882 - protein, 9 aa, Homo Sapiens
EFTTHILEV

SEQ ID NO: 95883 - protein, 9 aa, Homo Sapiens
FTTHILEVI

SEQ ID NO: 95884 - protein, 9 aa, Homo Sapiens
ILEVINAHM

SEQ ID NO: 95885 - protein, 9 aa, Homo Sapiens
LEVINAHMV

SEQ ID NO: 95886 - protein, 9 aa, Homo Sapiens
EVINAHMVL

SEQ ID NO: 95887 - protein, 9 aa, Homo Sapiens
QPSAGRAPI

SEQ ID NO: 95888 - protein, 9 aa, Homo Sapiens
APISNPGMS

SEQ ID NO: 95889 - protein, 9 aa, Homo Sapiens
AGNFGGNSF

SEQ ID NO: 95890 - protein, 9 aa, Homo Sapiens
FGGNSFMPA

SEQ ID NO: 95891 - protein, 9 aa, Homo Sapiens
NSFMPANGL

SEQ ID NO: 95892 - protein, 9 aa, Homo Sapiens
FMPANGLTV

SEQ ID NO: 95893 - protein, 9 aa, Homo Sapiens
MPANGLTVA

SEQ ID NO: 95894 - protein, 9 aa, Homo Sapiens
GLTVAQNQV

SEQ ID NO: 95895 - protein, 9 aa, Homo Sapiens
LTVAQNQVL

SEQ ID NO: 95896 - protein, 9 aa, Homo Sapiens
AQNQVLNLI

SEQ ID NO: 95897 - protein, 9 aa, Homo Sapiens
NQVLNLIKA

SEQ ID NO: 95898 - protein, 9 aa, Homo Sapiens
KACPRPEGL

SEQ ID NO: 95899 - protein, 9 aa, Homo Sapiens
CPRPEGLNF

SEQ ID NO: 95900 - protein, 9 aa, Homo Sapiens
PEGLNFQDL

SEQ ID NO: 95901 - protein, 9 aa, Homo Sapiens
DLKNQLKHM

SEQ ID NO: 95902 - protein, 9 aa, Homo Sapiens
SVSSIKQAV

SEQ ID NO: 95903 - protein, 9 aa, Homo Sapiens
SSIKQAVDF

SEQ ID NO: 95904 - protein, 9 aa, Homo Sapiens
SIKQAVDFL

SEQ ID NO: 95905 - protein, 9 aa, Homo Sapiens
FLSNEGHIY

SEQ ID NO: 95906 - protein, 9 aa, Homo Sapiens
YSTVDDDHF

SEQ ID NO: 95907 - protein, 9 aa, Homo Sapiens
STVDDDHFK

SEQ ID NO: 95908 - protein, 9 aa, Homo Sapiens
TVDDDHFKS

SEQ ID NO: 95909 - protein, 10 aa, Homo Sapiens
SSSYGGAGGY

SEQ ID NO: 95910 - protein, 10 aa, Homo Sapiens
TQSPGGFGSP

SEQ ID NO: 95911 - protein, 10 aa, Homo Sapiens
QSPGGFGSPA

SEQ ID NO: 95912 - protein, 10 aa, Homo Sapiens
GSPAPSQAEK

SEQ ID NO: 95913 - protein, 10 aa, Homo Sapiens
KSRARAQHIV

SEQ ID NO: 95914 - protein, 10 aa, Homo Sapiens
RARAQHIVPC

SEQ ID NO: 95915 - protein, 10 aa, Homo Sapiens
HIVPCTISQL

SEQ ID NO: 95916 - protein, 10 aa, Homo Sapiens
IVPCTISQLL

SEQ ID NO: 95917 - protein, 10 aa, Homo Sapiens
TISQLLSATL

SEQ ID NO: 95918 - protein, 10 aa, Homo Sapiens
LLSATLVDEV

SEQ ID NO: 95919 - protein, 10 aa, Homo Sapiens
LSATLVDEVF

SEQ ID NO: 95920 - protein, 10 aa, Homo Sapiens
SATLVDEVFR

SEQ ID NO: 95921 - protein, 10 aa, Homo Sapiens
EVFRIGNVEI

SEQ ID NO: 95922 - protein, 10 aa, Homo Sapiens
RIGNVEISQV

SEQ ID NO: 95923 - protein, 10 aa, Homo Sapiens
EISQVTIVGI

SEQ ID NO: 95924 - protein, 10 aa, Homo Sapiens
SQVTIVGIIR

SEQ ID NO: 95925 - protein, 10 aa, Homo Sapiens
IVGIIRHAEK

SEQ ID NO: 95926 - protein, 10 aa, Homo Sapiens
AEKAPTNIVY

SEQ ID NO: 95927 - protein, 10 aa, Homo Sapiens
EKAPTNIVYK

SEQ ID NO: 95928 - protein, 10 aa, Homo Sapiens
IVYKIDDMTA

SEQ ID NO: 95929 - protein, 10 aa, Homo Sapiens
KIDDMTAAPM

SEQ ID NO: 95930 - protein, 10 aa, Homo Sapiens
DMTAAPMDVR

SEQ ID NO: 95931 - protein, 10 aa, Homo Sapiens
MTAAPMDVRQ

SEQ ID NO: 95932 - protein, 10 aa, Homo Sapiens
TAAPMDVRQW

SEQ ID NO: 95933 - protein, 10 aa, Homo Sapiens
AAPMDVRQWV

SEQ ID NO: 95934 - protein, 10 aa, Homo Sapiens
RQWVDTDDTS

SEQ ID NO: 95935 - protein, 10 aa, Homo Sapiens
DTDDTSSENT

SEQ ID NO: 95936 - protein, 10 aa, Homo Sapiens
NTVVPPETYV

SEQ ID NO: 95937 - protein, 10 aa, Homo Sapiens
TVVPPETYVK

SEQ ID NO: 95938 - protein, 10 aa, Homo Sapiens
VVPPETYVKV

SEQ ID NO: 95939 - protein, 10 aa, Homo Sapiens
VPPETYVKVA

SEQ ID NO: 95940 - protein, 10 aa, Homo Sapiens
ETYVKVAGHL

SEQ ID NO: 95941 - protein, 10 aa, Homo Sapiens
TYVKVAGHLR

SEQ ID NO: 95942 - protein, 10 aa, Homo Sapiens
KVAGHLRSFQ

SEQ ID NO: 95943 - protein, 10 aa, Homo Sapiens
AGHLRSFQNK

SEQ ID NO: 95944 - protein, 10 aa, Homo Sapiens
FQNKKSLVAF

SEQ ID NO: 95945 - protein, 10 aa, Homo Sapiens
QNKKSLVAFK

SEQ ID NO: 95946 - protein, 10 aa, Homo Sapiens
SLVAFKIMPL

SEQ ID NO: 95947 - protein, 10 aa, Homo Sapiens
IMPLEDMNEF

SEQ ID NO: 95948 - protein, 10 aa, Homo Sapiens
MPLEDMNEFT

SEQ ID NO: 95949 - protein, 10 aa, Homo Sapiens
PLEDMNEFTT

SEQ ID NO: 95950 - protein, 10 aa, Homo Sapiens
DMNEFTTHIL

SEQ ID NO: 95951 - protein, 10 aa, Homo Sapiens
NEFTTHILEV

SEQ ID NO: 95952 - protein, 10 aa, Homo Sapiens
HILEVINAHM

SEQ ID NO: 95953 - protein, 10 aa, Homo Sapiens
ILEVINAHMV

SEQ ID NO: 95954 - protein, 10 aa, Homo Sapiens
LEVINAHMVL

SEQ ID NO: 95955 - protein, 10 aa, Homo Sapiens
EVINAHMVLS

SEQ ID NO: 95956 - protein, 10 aa, Homo Sapiens
VINAHMVLSK

SEQ ID NO: 95957 - protein, 10 aa, Homo Sapiens
KANSQPSAGR

SEQ ID NO: 95958 - protein, 10 aa, Homo Sapiens
SQPSAGRAPI

SEQ ID NO: 95959 - protein, 10 aa, Homo Sapiens
APISNPGMSE

SEQ ID NO: 95960 - protein, 10 aa, Homo Sapiens
NPGMSEAGNF

SEQ ID NO: 95961 - protein, 10 aa, Homo Sapiens
EAGNFGGNSF

SEQ ID NO: 95962 - protein, 10 aa, Homo Sapiens
SFMPANGLTV

SEQ ID NO: 95963 - protein, 10 aa, Homo Sapiens
FMPANGLTVA

SEQ ID NO: 95964 - protein, 10 aa, Homo Sapiens
MPANGLTVAQ

SEQ ID NO: 95965 - protein, 10 aa, Homo Sapiens
GLTVAQNQVL

SEQ ID NO: 95966 - protein, 10 aa, Homo Sapiens
TVAQNQVLNL

SEQ ID NO: 95967 - protein, 10 aa, Homo Sapiens
AQNQVLNLIK

SEQ ID NO: 95968 - protein, 10 aa, Homo Sapiens
VLNLIKACPR

SEQ ID NO: 95969 - protein, 10 aa, Homo Sapiens
RPEGLNFQDL

SEQ ID NO: 95970 - protein, 10 aa, Homo Sapiens
NQLKHMSVSS

SEQ ID NO: 95971 - protein, 10 aa, Homo Sapiens
QLKHMSVSSI

SEQ ID NO: 95972 - protein, 10 aa, Homo Sapiens
HMSVSSIKQA

SEQ ID NO: 95973 - protein, 10 aa, Homo Sapiens
MSVSSIKQAV

SEQ ID NO: 95974 - protein, 10 aa, Homo Sapiens
VSSIKQAVDF

SEQ ID NO: 95975 - protein, 10 aa, Homo Sapiens
KQAVDFLSNE

SEQ ID NO: 95976 - protein, 10 aa, Homo Sapiens
DFLSNEGHIY

SEQ ID NO: 95977 - protein, 10 aa, Homo Sapiens
FLSNEGHIYS

SEQ ID NO: 95978 - protein, 10 aa, Homo Sapiens
IYSTVDDDHF

SEQ ID NO: 95979 - protein, 10 aa, Homo Sapiens
YSTVDDDHFK

SEQ ID NO: 95980 - protein, 10 aa, Homo Sapiens
TVDDDHFKST

SEQ ID NO: 95981 - protein, 11 aa, Homo Sapiens
SGFESYGSSSY

SEQ ID NO: 95982 - protein, 11 aa, Homo Sapiens
ESYGSSSYGGA

SEQ ID NO: 95983 - protein, 11 aa, Homo Sapiens
GSSSYGGAGGY

SEQ ID NO: 95984 - protein, 11 aa, Homo Sapiens
TQSPGGFGSPA

SEQ ID NO: 95985 - protein, 11 aa, Homo Sapiens
GSPAPSQAEKK

SEQ ID NO: 95986 - protein, 11 aa, Homo Sapiens
APSQAEKKSRA

SEQ ID NO: 95987 - protein, 11 aa, Homo Sapiens
SQAEKKSRARA

SEQ ID NO: 95988 - protein, 11 aa, Homo Sapiens
HIVPCTISQLL

SEQ ID NO: 95989 - protein, 11 aa, Homo Sapiens
VPCTISQLLSA

SEQ ID NO: 95990 - protein, 11 aa, Homo Sapiens
CTISQLLSATL

SEQ ID NO: 95991 - protein, 11 aa, Homo Sapiens
TISQLLSATLV

SEQ ID NO: 95992 - protein, 11 aa, Homo Sapiens
QLLSATLVDEV

SEQ ID NO: 95993 - protein, 11 aa, Homo Sapiens
LLSATLVDEVF

SEQ ID NO: 95994 - protein, 11 aa, Homo Sapiens
LSATLVDEVFR

SEQ ID NO: 95995 - protein, 11 aa, Homo Sapiens
SATLVDEVFRI

SEQ ID NO: 95996 - protein, 11 aa, Homo Sapiens
LVDEVFRIGNV

SEQ ID NO: 95997 - protein, 11 aa, Homo Sapiens
EVFRIGNVEIS

SEQ ID NO: 95998 - protein, 11 aa, Homo Sapiens
FRIGNVEISQV

SEQ ID NO: 95999 - protein, 11 aa, Homo Sapiens
VEISQVTIVGI

SEQ ID NO: 96000 - protein, 11 aa, Homo Sapiens
EISQVTIVGII

SEQ ID NO: 96001 - protein, 11 aa, Homo Sapiens
ISQVTIVGIIR

SEQ ID NO: 96002 - protein, 11 aa, Homo Sapiens
TIVGIIRHAEK

SEQ ID NO: 96003 - protein, 11 aa, Homo Sapiens
HAEKAPTNIVY

SEQ ID NO: 96004 - protein, 11 aa, Homo Sapiens
AEKAPTNIVYK

SEQ ID NO: 96005 - protein, 11 aa, Homo Sapiens
EKAPTNIVYKI

SEQ ID NO: 96006 - protein, 11 aa, Homo Sapiens
IVYKIDDMTAA

SEQ ID NO: 96007 - protein, 11 aa, Homo Sapiens
YKIDDMTAAPM

SEQ ID NO: 96008 - protein, 11 aa, Homo Sapiens
MTAAPMDVRQW

SEQ ID NO: 96009 - protein, 11 aa, Homo Sapiens
TAAPMDVRQWV

SEQ ID NO: 96010 - protein, 11 aa, Homo Sapiens
RQWVDTDDTSS

SEQ ID NO: 96011 - protein, 11 aa, Homo Sapiens
DTDDTSSENTV

SEQ ID NO: 96012 - protein, 11 aa, Homo Sapiens
SENTVVPPETY

SEQ ID NO: 96013 - protein, 11 aa, Homo Sapiens
NTVVPPETYVK

SEQ ID NO: 96014 - protein, 11 aa, Homo Sapiens
TVVPPETYVKV

SEQ ID NO: 96015 - protein, 11 aa, Homo Sapiens
PETYVKVAGHL

SEQ ID NO: 96016 - protein, 11 aa, Homo Sapiens
ETYVKVAGHLR

SEQ ID NO: 96017 - protein, 11 aa, Homo Sapiens
YVKVAGHLRSF

SEQ ID NO: 96018 - protein, 11 aa, Homo Sapiens
VAGHLRSFQNK

SEQ ID NO: 96019 - protein, 11 aa, Homo Sapiens
AGHLRSFQNKK

SEQ ID NO: 96020 - protein, 11 aa, Homo Sapiens
HLRSFQNKKSL

SEQ ID NO: 96021 - protein, 11 aa, Homo Sapiens
SFQNKKSLVAF

SEQ ID NO: 96022 - protein, 11 aa, Homo Sapiens
FQNKKSLVAFK

SEQ ID NO: 96023 - protein, 11 aa, Homo Sapiens
SLVAFKIMPLE

SEQ ID NO: 96024 - protein, 11 aa, Homo Sapiens
KIMPLEDMNEF

SEQ ID NO: 96025 - protein, 11 aa, Homo Sapiens
MPLEDMNEFTT

SEQ ID NO: 96026 - protein, 11 aa, Homo Sapiens
LEDMNEFTTHI

SEQ ID NO: 96027 - protein, 11 aa, Homo Sapiens
NEFTTHILEVI

SEQ ID NO: 96028 - protein, 11 aa, Homo Sapiens
FTTHILEVINA

SEQ ID NO: 96029 - protein, 11 aa, Homo Sapiens
HILEVINAHMV

SEQ ID NO: 96030 - protein, 11 aa, Homo Sapiens
ILEVINAHMVL

SEQ ID NO: 96031 - protein, 11 aa, Homo Sapiens
EVINAHMVLSK

SEQ ID NO: 96032 - protein, 11 aa, Homo Sapiens
VINAHMVLSKA

SEQ ID NO: 96033 - protein, 11 aa, Homo Sapiens
VLSKANSQPSA

SEQ ID NO: 96034 - protein, 11 aa, Homo Sapiens
NSQPSAGRAPI

SEQ ID NO: 96035 - protein, 11 aa, Homo Sapiens
APISNPGMSEA

SEQ ID NO: 96036 - protein, 11 aa, Homo Sapiens
SEAGNFGGNSF

SEQ ID NO: 96037 - protein, 11 aa, Homo Sapiens
EAGNFGGNSFM

SEQ ID NO: 96038 - protein, 11 aa, Homo Sapiens
NSFMPANGLTV

SEQ ID NO: 96039 - protein, 11 aa, Homo Sapiens
FMPANGLTVAQ

SEQ ID NO: 96040 - protein, 11 aa, Homo Sapiens
MPANGLTVAQN

SEQ ID NO: 96041 - protein, 11 aa, Homo Sapiens
LTVAQNQVLNL

SEQ ID NO: 96042 - protein, 11 aa, Homo Sapiens
TVAQNQVLNLI

SEQ ID NO: 96043 - protein, 11 aa, Homo Sapiens
VAQNQVLNLIK

SEQ ID NO: 96044 - protein, 11 aa, Homo Sapiens
AQNQVLNLIKA

SEQ ID NO: 96045 - protein, 11 aa, Homo Sapiens
QVLNLIKACPR

SEQ ID NO: 96046 - protein, 11 aa, Homo Sapiens
LIKACPRPEGL

SEQ ID NO: 96047 - protein, 11 aa, Homo Sapiens
KACPRPEGLNF

SEQ ID NO: 96048 - protein, 11 aa, Homo Sapiens
GLNFQDLKNQL

SEQ ID NO: 96049 - protein, 11 aa, Homo Sapiens
FQDLKNQLKHM

SEQ ID NO: 96050 - protein, 11 aa, Homo Sapiens
DLKNQLKHMSV

SEQ ID NO: 96051 - protein, 11 aa, Homo Sapiens
NQLKHMSVSSI

SEQ ID NO: 96052 - protein, 11 aa, Homo Sapiens
QLKHMSVSSIK

SEQ ID NO: 96053 - protein, 11 aa, Homo Sapiens
HMSVSSIKQAV

SEQ ID NO: 96054 - protein, 11 aa, Homo Sapiens
SVSSIKQAVDF

SEQ ID NO: 96055 - protein, 11 aa, Homo Sapiens
FLSNEGHIYST

SEQ ID NO: 96056 - protein, 11 aa, Homo Sapiens
LSNEGHIYSTV

SEQ ID NO: 96057 - protein, 11 aa, Homo Sapiens
HIYSTVDDDHF

SEQ ID NO: 96058 - protein, 11 aa, Homo Sapiens
IYSTVDDDHFK

SEQ ID NO: 96059 - protein, 13 aa, Homo Sapiens
MWNSGFESYGSSS

SEQ ID NO: 96060 - protein, 13 aa, Homo Sapiens
WNSGFESYGSSSY

SEQ ID NO: 96061 - protein, 13 aa, Homo Sapiens
NSGFESYGSSSYG

SEQ ID NO: 96062 - protein, 13 aa, Homo Sapiens
SGFESYGSSSYGG

SEQ ID NO: 96063 - protein, 13 aa, Homo Sapiens
GFESYGSSSYGGA

SEQ ID NO: 96064 - protein, 13 aa, Homo Sapiens
FESYGSSSYGGAG

SEQ ID NO: 96065 - protein, 13 aa, Homo Sapiens
ESYGSSSYGGAGG

SEQ ID NO: 96066 - protein, 13 aa, Homo Sapiens
SYGSSSYGGAGGY

SEQ ID NO: 96067 - protein, 13 aa, Homo Sapiens
YGSSSYGGAGGYT

SEQ ID NO: 96068 - protein, 13 aa, Homo Sapiens
GSSSYGGAGGYTQ

SEQ ID NO: 96069 - protein, 13 aa, Homo Sapiens
SSSYGGAGGYTQS

SEQ ID NO: 96070 - protein, 13 aa, Homo Sapiens
SSYGGAGGYTQSP

SEQ ID NO: 96071 - protein, 13 aa, Homo Sapiens
SYGGAGGYTQSPG

SEQ ID NO: 96072 - protein, 13 aa, Homo Sapiens
YGGAGGYTQSPGG

SEQ ID NO: 96073 - protein, 13 aa, Homo Sapiens
GGAGGYTQSPGGF

SEQ ID NO: 96074 - protein, 13 aa, Homo Sapiens
GAGGYTQSPGGFG

SEQ ID NO: 96075 - protein, 13 aa, Homo Sapiens
AGGYTQSPGGFGS

SEQ ID NO: 96076 - protein, 13 aa, Homo Sapiens
GGYTQSPGGFGSP

SEQ ID NO: 96077 - protein, 13 aa, Homo Sapiens
GYTQSPGGFGSPA

SEQ ID NO: 96078 - protein, 13 aa, Homo Sapiens
YTQSPGGFGSPAP

SEQ ID NO: 96079 - protein, 13 aa, Homo Sapiens
TQSPGGFGSPAPS

SEQ ID NO: 96080 - protein, 13 aa, Homo Sapiens
QSPGGFGSPAPSQ

SEQ ID NO: 96081 - protein, 13 aa, Homo Sapiens
SPGGFGSPAPSQA

SEQ ID NO: 96082 - protein, 13 aa, Homo Sapiens
PGGFGSPAPSQAE

SEQ ID NO: 96083 - protein, 13 aa, Homo Sapiens
GGFGSPAPSQAEK

SEQ ID NO: 96084 - protein, 13 aa, Homo Sapiens
GFGSPAPSQAEKK

SEQ ID NO: 96085 - protein, 13 aa, Homo Sapiens
FGSPAPSQAEKKS

SEQ ID NO: 96086 - protein, 13 aa, Homo Sapiens
GSPAPSQAEKKSR

SEQ ID NO: 96087 - protein, 13 aa, Homo Sapiens
SPAPSQAEKKSRA

SEQ ID NO: 96088 - protein, 13 aa, Homo Sapiens
PAPSQAEKKSRAR

SEQ ID NO: 96089 - protein, 13 aa, Homo Sapiens
APSQAEKKSRARA

SEQ ID NO: 96090 - protein, 13 aa, Homo Sapiens
PSQAEKKSRARAQ

SEQ ID NO: 96091 - protein, 13 aa, Homo Sapiens
SQAEKKSRARAQH

SEQ ID NO: 96092 - protein, 13 aa, Homo Sapiens
QAEKKSRARAQHI

SEQ ID NO: 96093 - protein, 13 aa, Homo Sapiens
AEKKSRARAQHIV

SEQ ID NO: 96094 - protein, 13 aa, Homo Sapiens
EKKSRARAQHIVP

SEQ ID NO: 96095 - protein, 13 aa, Homo Sapiens
KKSRARAQHIVPC

SEQ ID NO: 96096 - protein, 13 aa, Homo Sapiens
KSRARAQHIVPCT

SEQ ID NO: 96097 - protein, 13 aa, Homo Sapiens
SRARAQHIVPCTI

SEQ ID NO: 96098 - protein, 13 aa, Homo Sapiens
RARAQHIVPCTIS

SEQ ID NO: 96099 - protein, 13 aa, Homo Sapiens
ARAQHIVPCTISQ

SEQ ID NO: 96100 - protein, 13 aa, Homo Sapiens
RAQHIVPCTISQL

SEQ ID NO: 96101 - protein, 13 aa, Homo Sapiens
AQHIVPCTISQLL

SEQ ID NO: 96102 - protein, 13 aa, Homo Sapiens
QHIVPCTISQLLS

SEQ ID NO: 96103 - protein, 13 aa, Homo Sapiens
HIVPCTISQLLSA

SEQ ID NO: 96104 - protein, 13 aa, Homo Sapiens
IVPCTISQLLSAT

SEQ ID NO: 96105 - protein, 13 aa, Homo Sapiens
VPCTISQLLSATL

SEQ ID NO: 96106 - protein, 13 aa, Homo Sapiens
PCTISQLLSATLV

SEQ ID NO: 96107 - protein, 13 aa, Homo Sapiens
CTISQLLSATLVD

SEQ ID NO: 96108 - protein, 13 aa, Homo Sapiens
TISQLLSATLVDE

SEQ ID NO: 96109 - protein, 13 aa, Homo Sapiens
ISQLLSATLVDEV

SEQ ID NO: 96110 - protein, 13 aa, Homo Sapiens
SQLLSATLVDEVF

SEQ ID NO: 96111 - protein, 13 aa, Homo Sapiens
QLLSATLVDEVFR

SEQ ID NO: 96112 - protein, 13 aa, Homo Sapiens
LLSATLVDEVFRI

SEQ ID NO: 96113 - protein, 13 aa, Homo Sapiens
LSATLVDEVFRIG

SEQ ID NO: 96114 - protein, 13 aa, Homo Sapiens
SATLVDEVFRIGN

SEQ ID NO: 96115 - protein, 13 aa, Homo Sapiens
ATLVDEVFRIGNV

SEQ ID NO: 96116 - protein, 13 aa, Homo Sapiens
TLVDEVFRIGNVE

SEQ ID NO: 96117 - protein, 13 aa, Homo Sapiens
LVDEVFRIGNVEI

SEQ ID NO: 96118 - protein, 13 aa, Homo Sapiens
VDEVFRIGNVEIS

SEQ ID NO: 96119 - protein, 13 aa, Homo Sapiens
DEVFRIGNVEISQ

SEQ ID NO: 96120 - protein, 13 aa, Homo Sapiens
EVFRIGNVEISQV

SEQ ID NO: 96121 - protein, 13 aa, Homo Sapiens
VFRIGNVEISQVT

SEQ ID NO: 96122 - protein, 13 aa, Homo Sapiens
FRIGNVEISQVTI

SEQ ID NO: 96123 - protein, 13 aa, Homo Sapiens
RIGNVEISQVTIV

SEQ ID NO: 96124 - protein, 13 aa, Homo Sapiens
IGNVEISQVTIVG

SEQ ID NO: 96125 - protein, 13 aa, Homo Sapiens
GNVEISQVTIVGI

SEQ ID NO: 96126 - protein, 13 aa, Homo Sapiens
NVEISQVTIVGII

SEQ ID NO: 96127 - protein, 13 aa, Homo Sapiens
VEISQVTIVGIIR

SEQ ID NO: 96128 - protein, 13 aa, Homo Sapiens
EISQVTIVGIIRH

SEQ ID NO: 96129 - protein, 13 aa, Homo Sapiens
ISQVTIVGIIRHA

SEQ ID NO: 96130 - protein, 13 aa, Homo Sapiens
SQVTIVGIIRHAE

SEQ ID NO: 96131 - protein, 13 aa, Homo Sapiens
QVTIVGIIRHAEK

SEQ ID NO: 96132 - protein, 13 aa, Homo Sapiens
VTIVGIIRHAEKA

SEQ ID NO: 96133 - protein, 13 aa, Homo Sapiens
TIVGIIRHAEKAP

SEQ ID NO: 96134 - protein, 13 aa, Homo Sapiens
IVGIIRHAEKAPT

SEQ ID NO: 96135 - protein, 13 aa, Homo Sapiens
VGIIRHAEKAPTN

SEQ ID NO: 96136 - protein, 13 aa, Homo Sapiens
GIIRHAEKAPTNI

SEQ ID NO: 96137 - protein, 13 aa, Homo Sapiens
IIRHAEKAPTNIV

SEQ ID NO: 96138 - protein, 13 aa, Homo Sapiens
IRHAEKAPTNIVY

SEQ ID NO: 96139 - protein, 13 aa, Homo Sapiens
RHAEKAPTNIVYK

SEQ ID NO: 96140 - protein, 13 aa, Homo Sapiens
HAEKAPTNIVYKI

SEQ ID NO: 96141 - protein, 13 aa, Homo Sapiens
AEKAPTNIVYKID

SEQ ID NO: 96142 - protein, 13 aa, Homo Sapiens
EKAPTNIVYKIDD

SEQ ID NO: 96143 - protein, 13 aa, Homo Sapiens
KAPTNIVYKIDDM

SEQ ID NO: 96144 - protein, 13 aa, Homo Sapiens
APTNIVYKIDDMT

SEQ ID NO: 96145 - protein, 13 aa, Homo Sapiens
PTNIVYKIDDMTA

SEQ ID NO: 96146 - protein, 13 aa, Homo Sapiens
TNIVYKIDDMTAA

SEQ ID NO: 96147 - protein, 13 aa, Homo Sapiens
NIVYKIDDMTAAP

SEQ ID NO: 96148 - protein, 13 aa, Homo Sapiens
IVYKIDDMTAAPM

SEQ ID NO: 96149 - protein, 13 aa, Homo Sapiens
VYKIDDMTAAPMD

SEQ ID NO: 96150 - protein, 13 aa, Homo Sapiens
YKIDDMTAAPMDV

SEQ ID NO: 96151 - protein, 13 aa, Homo Sapiens
KIDDMTAAPMDVR

SEQ ID NO: 96152 - protein, 13 aa, Homo Sapiens
IDDMTAAPMDVRQ

SEQ ID NO: 96153 - protein, 13 aa, Homo Sapiens
DDMTAAPMDVRQW

SEQ ID NO: 96154 - protein, 13 aa, Homo Sapiens
DMTAAPMDVRQWV

SEQ ID NO: 96155 - protein, 13 aa, Homo Sapiens
MTAAPMDVRQWVD

SEQ ID NO: 96156 - protein, 13 aa, Homo Sapiens
TAAPMDVRQWVDT

SEQ ID NO: 96157 - protein, 13 aa, Homo Sapiens
AAPMDVRQWVDTD

SEQ ID NO: 96158 - protein, 13 aa, Homo Sapiens
APMDVRQWVDTDD

SEQ ID NO: 96159 - protein, 13 aa, Homo Sapiens
PMDVRQWVDTDDT

SEQ ID NO: 96160 - protein, 13 aa, Homo Sapiens
MDVRQWVDTDDTS

SEQ ID NO: 96161 - protein, 13 aa, Homo Sapiens
DVRQWVDTDDTSS

SEQ ID NO: 96162 - protein, 13 aa, Homo Sapiens
VRQWVDTDDTSSE

SEQ ID NO: 96163 - protein, 13 aa, Homo Sapiens
RQWVDTDDTSSEN

SEQ ID NO: 96164 - protein, 13 aa, Homo Sapiens
QWVDTDDTSSENT

SEQ ID NO: 96165 - protein, 13 aa, Homo Sapiens
WVDTDDTSSENTV

SEQ ID NO: 96166 - protein, 13 aa, Homo Sapiens
VDTDDTSSENTVV

SEQ ID NO: 96167 - protein, 13 aa, Homo Sapiens
DTDDTSSENTVVP

SEQ ID NO: 96168 - protein, 13 aa, Homo Sapiens
TDDTSSENTVVPP

SEQ ID NO: 96169 - protein, 13 aa, Homo Sapiens
DDTSSENTVVPPE

SEQ ID NO: 96170 - protein, 13 aa, Homo Sapiens
DTSSENTVVPPET

SEQ ID NO: 96171 - protein, 13 aa, Homo Sapiens
TSSENTVVPPETY

SEQ ID NO: 96172 - protein, 13 aa, Homo Sapiens
SSENTVVPPETYV

SEQ ID NO: 96173 - protein, 13 aa, Homo Sapiens
SENTVVPPETYVK

SEQ ID NO: 96174 - protein, 13 aa, Homo Sapiens
ENTVVPPETYVKV

SEQ ID NO: 96175 - protein, 13 aa, Homo Sapiens
NTVVPPETYVKVA

SEQ ID NO: 96176 - protein, 13 aa, Homo Sapiens
TVVPPETYVKVAG

SEQ ID NO: 96177 - protein, 13 aa, Homo Sapiens
VVPPETYVKVAGH

SEQ ID NO: 96178 - protein, 13 aa, Homo Sapiens
VPPETYVKVAGHL

SEQ ID NO: 96179 - protein, 13 aa, Homo Sapiens
PPETYVKVAGHLR

SEQ ID NO: 96180 - protein, 13 aa, Homo Sapiens
PETYVKVAGHLRS

SEQ ID NO: 96181 - protein, 13 aa, Homo Sapiens
ETYVKVAGHLRSF

SEQ ID NO: 96182 - protein, 13 aa, Homo Sapiens
TYVKVAGHLRSFQ

SEQ ID NO: 96183 - protein, 13 aa, Homo Sapiens
YVKVAGHLRSFQN

SEQ ID NO: 96184 - protein, 13 aa, Homo Sapiens
VKVAGHLRSFQNK

SEQ ID NO: 96185 - protein, 13 aa, Homo Sapiens
KVAGHLRSFQNKK

SEQ ID NO: 96186 - protein, 13 aa, Homo Sapiens
VAGHLRSFQNKKS

SEQ ID NO: 96187 - protein, 13 aa, Homo Sapiens
AGHLRSFQNKKSL

SEQ ID NO: 96188 - protein, 13 aa, Homo Sapiens
GHLRSFQNKKSLV

SEQ ID NO: 96189 - protein, 13 aa, Homo Sapiens
HLRSFQNKKSLVA

SEQ ID NO: 96190 - protein, 13 aa, Homo Sapiens
LRSFQNKKSLVAF

SEQ ID NO: 96191 - protein, 13 aa, Homo Sapiens
RSFQNKKSLVAFK

SEQ ID NO: 96192 - protein, 13 aa, Homo Sapiens
SFQNKKSLVAFKI

SEQ ID NO: 96193 - protein, 13 aa, Homo Sapiens
FQNKKSLVAFKIM

SEQ ID NO: 96194 - protein, 13 aa, Homo Sapiens
QNKKSLVAFKIMP

SEQ ID NO: 96195 - protein, 13 aa, Homo Sapiens
NKKSLVAFKIMPL

SEQ ID NO: 96196 - protein, 13 aa, Homo Sapiens
KKSLVAFKIMPLE

SEQ ID NO: 96197 - protein, 13 aa, Homo Sapiens
KSLVAFKIMPLED

SEQ ID NO: 96198 - protein, 13 aa, Homo Sapiens
SLVAFKIMPLEDM

SEQ ID NO: 96199 - protein, 13 aa, Homo Sapiens
LVAFKIMPLEDMN

SEQ ID NO: 96200 - protein, 13 aa, Homo Sapiens
VAFKIMPLEDMNE

SEQ ID NO: 96201 - protein, 13 aa, Homo Sapiens
AFKIMPLEDMNEF

SEQ ID NO: 96202 - protein, 13 aa, Homo Sapiens
FKIMPLEDMNEFT

SEQ ID NO: 96203 - protein, 13 aa, Homo Sapiens
KIMPLEDMNEFTT

SEQ ID NO: 96204 - protein, 13 aa, Homo Sapiens
IMPLEDMNEFTTH

SEQ ID NO: 96205 - protein, 13 aa, Homo Sapiens
MPLEDMNEFTTHI

SEQ ID NO: 96206 - protein, 13 aa, Homo Sapiens
PLEDMNEFTTHIL

SEQ ID NO: 96207 - protein, 13 aa, Homo Sapiens
LEDMNEFTTHILE

SEQ ID NO: 96208 - protein, 13 aa, Homo Sapiens
EDMNEFTTHILEV

SEQ ID NO: 96209 - protein, 13 aa, Homo Sapiens
DMNEFTTHILEVI

SEQ ID NO: 96210 - protein, 13 aa, Homo Sapiens
MNEFTTHILEVIN

SEQ ID NO: 96211 - protein, 13 aa, Homo Sapiens
NEFTTHILEVINA

SEQ ID NO: 96212 - protein, 13 aa, Homo Sapiens
EFTTHILEVINAH

SEQ ID NO: 96213 - protein, 13 aa, Homo Sapiens
FTTHILEVINAHM

SEQ ID NO: 96214 - protein, 13 aa, Homo Sapiens
TTHILEVINAHMV

SEQ ID NO: 96215 - protein, 13 aa, Homo Sapiens
THILEVINAHMVL

SEQ ID NO: 96216 - protein, 13 aa, Homo Sapiens
HILEVINAHMVLS

SEQ ID NO: 96217 - protein, 13 aa, Homo Sapiens
ILEVINAHMVLSK

SEQ ID NO: 96218 - protein, 13 aa, Homo Sapiens
LEVINAHMVLSKA

SEQ ID NO: 96219 - protein, 13 aa, Homo Sapiens
EVINAHMVLSKAN

SEQ ID NO: 96220 - protein, 13 aa, Homo Sapiens
VINAHMVLSKANS

SEQ ID NO: 96221 - protein, 13 aa, Homo Sapiens
INAHMVLSKANSQ

SEQ ID NO: 96222 - protein, 13 aa, Homo Sapiens
NAHMVLSKANSQP

SEQ ID NO: 96223 - protein, 13 aa, Homo Sapiens
AHMVLSKANSQPS

SEQ ID NO: 96224 - protein, 13 aa, Homo Sapiens
HMVLSKANSQPSA

SEQ ID NO: 96225 - protein, 13 aa, Homo Sapiens
MVLSKANSQPSAG

SEQ ID NO: 96226 - protein, 13 aa, Homo Sapiens
VLSKANSQPSAGR

SEQ ID NO: 96227 - protein, 13 aa, Homo Sapiens
LSKANSQPSAGRA

SEQ ID NO: 96228 - protein, 13 aa, Homo Sapiens
SKANSQPSAGRAP

SEQ ID NO: 96229 - protein, 13 aa, Homo Sapiens
KANSQPSAGRAPI

SEQ ID NO: 96230 - protein, 13 aa, Homo Sapiens
ANSQPSAGRAPIS

SEQ ID NO: 96231 - protein, 13 aa, Homo Sapiens
NSQPSAGRAPISN

SEQ ID NO: 96232 - protein, 13 aa, Homo Sapiens
SQPSAGRAPISNP

SEQ ID NO: 96233 - protein, 13 aa, Homo Sapiens
QPSAGRAPISNPG

SEQ ID NO: 96234 - protein, 13 aa, Homo Sapiens
PSAGRAPISNPGM

SEQ ID NO: 96235 - protein, 13 aa, Homo Sapiens
SAGRAPISNPGMS

SEQ ID NO: 96236 - protein, 13 aa, Homo Sapiens
AGRAPISNPGMSE

SEQ ID NO: 96237 - protein, 13 aa, Homo Sapiens
GRAPISNPGMSEA

SEQ ID NO: 96238 - protein, 13 aa, Homo Sapiens
RAPISNPGMSEAG

SEQ ID NO: 96239 - protein, 13 aa, Homo Sapiens
APISNPGMSEAGN

SEQ ID NO: 96240 - protein, 13 aa, Homo Sapiens
PISNPGMSEAGNF

SEQ ID NO: 96241 - protein, 13 aa, Homo Sapiens
ISNPGMSEAGNFG

SEQ ID NO: 96242 - protein, 13 aa, Homo Sapiens
SNPGMSEAGNFGG

SEQ ID NO: 96243 - protein, 13 aa, Homo Sapiens
NPGMSEAGNFGGN

SEQ ID NO: 96244 - protein, 13 aa, Homo Sapiens
PGMSEAGNFGGNS

SEQ ID NO: 96245 - protein, 13 aa, Homo Sapiens
GMSEAGNFGGNSF

SEQ ID NO: 96246 - protein, 13 aa, Homo Sapiens
MSEAGNFGGNSFM

SEQ ID NO: 96247 - protein, 13 aa, Homo Sapiens
SEAGNFGGNSFMP

SEQ ID NO: 96248 - protein, 13 aa, Homo Sapiens
EAGNFGGNSFMPA

SEQ ID NO: 96249 - protein, 13 aa, Homo Sapiens
AGNFGGNSFMPAN

SEQ ID NO: 96250 - protein, 13 aa, Homo Sapiens
GNFGGNSFMPANG

SEQ ID NO: 96251 - protein, 13 aa, Homo Sapiens
NFGGNSFMPANGL

SEQ ID NO: 96252 - protein, 13 aa, Homo Sapiens
FGGNSFMPANGLT

SEQ ID NO: 96253 - protein, 13 aa, Homo Sapiens
GGNSFMPANGLTV

SEQ ID NO: 96254 - protein, 13 aa, Homo Sapiens
GNSFMPANGLTVA

SEQ ID NO: 96255 - protein, 13 aa, Homo Sapiens
NSFMPANGLTVAQ

SEQ ID NO: 96256 - protein, 13 aa, Homo Sapiens
SFMPANGLTVAQN

SEQ ID NO: 96257 - protein, 13 aa, Homo Sapiens
FMPANGLTVAQNQ

SEQ ID NO: 96258 - protein, 13 aa, Homo Sapiens
MPANGLTVAQNQV

SEQ ID NO: 96259 - protein, 13 aa, Homo Sapiens
PANGLTVAQNQVL

SEQ ID NO: 96260 - protein, 13 aa, Homo Sapiens
ANGLTVAQNQVLN

SEQ ID NO: 96261 - protein, 13 aa, Homo Sapiens
NGLTVAQNQVLNL

SEQ ID NO: 96262 - protein, 13 aa, Homo Sapiens
GLTVAQNQVLNLI

SEQ ID NO: 96263 - protein, 13 aa, Homo Sapiens
LTVAQNQVLNLIK

SEQ ID NO: 96264 - protein, 13 aa, Homo Sapiens
TVAQNQVLNLIKA

SEQ ID NO: 96265 - protein, 13 aa, Homo Sapiens
VAQNQVLNLIKAC

SEQ ID NO: 96266 - protein, 13 aa, Homo Sapiens
AQNQVLNLIKACP

SEQ ID NO: 96267 - protein, 13 aa, Homo Sapiens
QNQVLNLIKACPR

SEQ ID NO: 96268 - protein, 13 aa, Homo Sapiens
NQVLNLIKACPRP

SEQ ID NO: 96269 - protein, 13 aa, Homo Sapiens
QVLNLIKACPRPE

SEQ ID NO: 96270 - protein, 13 aa, Homo Sapiens
VLNLIKACPRPEG

SEQ ID NO: 96271 - protein, 13 aa, Homo Sapiens
LNLIKACPRPEGL

SEQ ID NO: 96272 - protein, 13 aa, Homo Sapiens
NLIKACPRPEGLN

SEQ ID NO: 96273 - protein, 13 aa, Homo Sapiens
LIKACPRPEGLNF

SEQ ID NO: 96274 - protein, 13 aa, Homo Sapiens
IKACPRPEGLNFQ

SEQ ID NO: 96275 - protein, 13 aa, Homo Sapiens
KACPRPEGLNFQD

SEQ ID NO: 96276 - protein, 13 aa, Homo Sapiens
ACPRPEGLNFQDL

SEQ ID NO: 96277 - protein, 13 aa, Homo Sapiens
CPRPEGLNFQDLK

SEQ ID NO: 96278 - protein, 13 aa, Homo Sapiens
PRPEGLNFQDLKN

SEQ ID NO: 96279 - protein, 13 aa, Homo Sapiens
RPEGLNFQDLKNQ

SEQ ID NO: 96280 - protein, 13 aa, Homo Sapiens
PEGLNFQDLKNQL

SEQ ID NO: 96281 - protein, 13 aa, Homo Sapiens
EGLNFQDLKNQLK

SEQ ID NO: 96282 - protein, 13 aa, Homo Sapiens
GLNFQDLKNQLKH

SEQ ID NO: 96283 - protein, 13 aa, Homo Sapiens
LNFQDLKNQLKHM

SEQ ID NO: 96284 - protein, 13 aa, Homo Sapiens
NFQDLKNQLKHMS

SEQ ID NO: 96285 - protein, 13 aa, Homo Sapiens
FQDLKNQLKHMSV

SEQ ID NO: 96286 - protein, 13 aa, Homo Sapiens
QDLKNQLKHMSVS

SEQ ID NO: 96287 - protein, 13 aa, Homo Sapiens
DLKNQLKHMSVSS

SEQ ID NO: 96288 - protein, 13 aa, Homo Sapiens
LKNQLKHMSVSSI

SEQ ID NO: 96289 - protein, 13 aa, Homo Sapiens
KNQLKHMSVSSIK

SEQ ID NO: 96290 - protein, 13 aa, Homo Sapiens
NQLKHMSVSSIKQ

SEQ ID NO: 96291 - protein, 13 aa, Homo Sapiens
QLKHMSVSSIKQA

SEQ ID NO: 96292 - protein, 13 aa, Homo Sapiens
LKHMSVSSIKQAV

SEQ ID NO: 96293 - protein, 13 aa, Homo Sapiens
KHMSVSSIKQAVD

SEQ ID NO: 96294 - protein, 13 aa, Homo Sapiens
HMSVSSIKQAVDF

SEQ ID NO: 96295 - protein, 13 aa, Homo Sapiens
MSVSSIKQAVDFL

SEQ ID NO: 96296 - protein, 13 aa, Homo Sapiens
SVSSIKQAVDFLS

SEQ ID NO: 96297 - protein, 13 aa, Homo Sapiens
VSSIKQAVDFLSN

SEQ ID NO: 96298 - protein, 13 aa, Homo Sapiens
SSIKQAVDFLSNE

SEQ ID NO: 96299 - protein, 13 aa, Homo Sapiens
SIKQAVDFLSNEG

SEQ ID NO: 96300 - protein, 13 aa, Homo Sapiens
IKQAVDFLSNEGH

SEQ ID NO: 96301 - protein, 13 aa, Homo Sapiens
KQAVDFLSNEGHI

SEQ ID NO: 96302 - protein, 13 aa, Homo Sapiens
QAVDFLSNEGHIY

SEQ ID NO: 96303 - protein, 13 aa, Homo Sapiens
AVDFLSNEGHIYS

SEQ ID NO: 96304 - protein, 13 aa, Homo Sapiens
VDFLSNEGHIYST

SEQ ID NO: 96305 - protein, 13 aa, Homo Sapiens
DFLSNEGHIYSTV

SEQ ID NO: 96306 - protein, 13 aa, Homo Sapiens
FLSNEGHIYSTVD

SEQ ID NO: 96307 - protein, 13 aa, Homo Sapiens
LSNEGHIYSTVDD

SEQ ID NO: 96308 - protein, 13 aa, Homo Sapiens
SNEGHIYSTVDDD

SEQ ID NO: 96309 - protein, 13 aa, Homo Sapiens
NEGHIYSTVDDDH

SEQ ID NO: 96310 - protein, 13 aa, Homo Sapiens
EGHIYSTVDDDHF

SEQ ID NO: 96311 - protein, 13 aa, Homo Sapiens
GHIYSTVDDDHFK

SEQ ID NO: 96312 - protein, 13 aa, Homo Sapiens
HIYSTVDDDHFKS

SEQ ID NO: 96313 - protein, 13 aa, Homo Sapiens
IYSTVDDDHFKST

SEQ ID NO: 96314 - protein, 13 aa, Homo Sapiens
YSTVDDDHFKSTD

SEQ ID NO: 96315 - protein, 13 aa, Homo Sapiens
STVDDDHFKSTDA

SEQ ID NO: 96316 - protein, 13 aa, Homo Sapiens
TVDDDHFKSTDAE

SEQ ID NO: 96317 - protein, 14 aa, Homo Sapiens
MWNSGFESYGSSSY

SEQ ID NO: 96318 - protein, 14 aa, Homo Sapiens
WNSGFESYGSSSYG

SEQ ID NO: 96319 - protein, 14 aa, Homo Sapiens
NSGFESYGSSSYGG

SEQ ID NO: 96320 - protein, 14 aa, Homo Sapiens
SGFESYGSSSYGGA

SEQ ID NO: 96321 - protein, 14 aa, Homo Sapiens
GFESYGSSSYGGAG

SEQ ID NO: 96322 - protein, 14 aa, Homo Sapiens
FESYGSSSYGGAGG

SEQ ID NO: 96323 - protein, 14 aa, Homo Sapiens
ESYGSSSYGGAGGY

SEQ ID NO: 96324 - protein, 14 aa, Homo Sapiens
SYGSSSYGGAGGYT

SEQ ID NO: 96325 - protein, 14 aa, Homo Sapiens
YGSSSYGGAGGYTQ

SEQ ID NO: 96326 - protein, 14 aa, Homo Sapiens
GSSSYGGAGGYTQS

SEQ ID NO: 96327 - protein, 14 aa, Homo Sapiens
SSSYGGAGGYTQSP

SEQ ID NO: 96328 - protein, 14 aa, Homo Sapiens
SSYGGAGGYTQSPG

SEQ ID NO: 96329 - protein, 14 aa, Homo Sapiens
SYGGAGGYTQSPGG

SEQ ID NO: 96330 - protein, 14 aa, Homo Sapiens
YGGAGGYTQSPGGF

SEQ ID NO: 96331 - protein, 14 aa, Homo Sapiens
GGAGGYTQSPGGFG

SEQ ID NO: 96332 - protein, 14 aa, Homo Sapiens
GAGGYTQSPGGFGS

SEQ ID NO: 96333 - protein, 14 aa, Homo Sapiens
AGGYTQSPGGFGSP

SEQ ID NO: 96334 - protein, 14 aa, Homo Sapiens
GGYTQSPGGFGSPA

SEQ ID NO: 96335 - protein, 14 aa, Homo Sapiens
GYTQSPGGFGSPAP

SEQ ID NO: 96336 - protein, 14 aa, Homo Sapiens
YTQSPGGFGSPAPS

SEQ ID NO: 96337 - protein, 14 aa, Homo Sapiens
TQSPGGFGSPAPSQ

SEQ ID NO: 96338 - protein, 14 aa, Homo Sapiens
QSPGGFGSPAPSQA

SEQ ID NO: 96339 - protein, 14 aa, Homo Sapiens
SPGGFGSPAPSQAE

SEQ ID NO: 96340 - protein, 14 aa, Homo Sapiens
PGGFGSPAPSQAEK

SEQ ID NO: 96341 - protein, 14 aa, Homo Sapiens
GGFGSPAPSQAEKK

SEQ ID NO: 96342 - protein, 14 aa, Homo Sapiens
GFGSPAPSQAEKKS

SEQ ID NO: 96343 - protein, 14 aa, Homo Sapiens
FGSPAPSQAEKKSR

SEQ ID NO: 96344 - protein, 14 aa, Homo Sapiens
GSPAPSQAEKKSRA

SEQ ID NO: 96345 - protein, 14 aa, Homo Sapiens
SPAPSQAEKKSRAR

SEQ ID NO: 96346 - protein, 14 aa, Homo Sapiens
PAPSQAEKKSRARA

SEQ ID NO: 96347 - protein, 14 aa, Homo Sapiens
APSQAEKKSRARAQ

SEQ ID NO: 96348 - protein, 14 aa, Homo Sapiens
PSQAEKKSRARAQH

SEQ ID NO: 96349 - protein, 14 aa, Homo Sapiens
SQAEKKSRARAQHI

SEQ ID NO: 96350 - protein, 14 aa, Homo Sapiens
QAEKKSRARAQHIV

SEQ ID NO: 96351 - protein, 14 aa, Homo Sapiens
AEKKSRARAQHIVP

SEQ ID NO: 96352 - protein, 14 aa, Homo Sapiens
EKKSRARAQHIVPC

SEQ ID NO: 96353 - protein, 14 aa, Homo Sapiens
KKSRARAQHIVPCT

SEQ ID NO: 96354 - protein, 14 aa, Homo Sapiens
KSRARAQHIVPCTI

SEQ ID NO: 96355 - protein, 14 aa, Homo Sapiens
SRARAQHIVPCTIS

SEQ ID NO: 96356 - protein, 14 aa, Homo Sapiens
RARAQHIVPCTISQ

SEQ ID NO: 96357 - protein, 14 aa, Homo Sapiens
ARAQHIVPCTISQL

SEQ ID NO: 96358 - protein, 14 aa, Homo Sapiens
RAQHIVPCTISQLL

SEQ ID NO: 96359 - protein, 14 aa, Homo Sapiens
AQHIVPCTISQLLS

SEQ ID NO: 96360 - protein, 14 aa, Homo Sapiens
QHIVPCTISQLLSA

SEQ ID NO: 96361 - protein, 14 aa, Homo Sapiens
HIVPCTISQLLSAT

SEQ ID NO: 96362 - protein, 14 aa, Homo Sapiens
IVPCTISQLLSATL

SEQ ID NO: 96363 - protein, 14 aa, Homo Sapiens
VPCTISQLLSATLV

SEQ ID NO: 96364 - protein, 14 aa, Homo Sapiens
PCTISQLLSATLVD

SEQ ID NO: 96365 - protein, 14 aa, Homo Sapiens
CTISQLLSATLVDE

SEQ ID NO: 96366 - protein, 14 aa, Homo Sapiens
TISQLLSATLVDEV

SEQ ID NO: 96367 - protein, 14 aa, Homo Sapiens
ISQLLSATLVDEVF

SEQ ID NO: 96368 - protein, 14 aa, Homo Sapiens
SQLLSATLVDEVFR

SEQ ID NO: 96369 - protein, 14 aa, Homo Sapiens
QLLSATLVDEVFRI

SEQ ID NO: 96370 - protein, 14 aa, Homo Sapiens
LLSATLVDEVFRIG

SEQ ID NO: 96371 - protein, 14 aa, Homo Sapiens
LSATLVDEVFRIGN

SEQ ID NO: 96372 - protein, 14 aa, Homo Sapiens
SATLVDEVFRIGNV

SEQ ID NO: 96373 - protein, 14 aa, Homo Sapiens
ATLVDEVFRIGNVE

SEQ ID NO: 96374 - protein, 14 aa, Homo Sapiens
TLVDEVFRIGNVEI

SEQ ID NO: 96375 - protein, 14 aa, Homo Sapiens
LVDEVFRIGNVEIS

SEQ ID NO: 96376 - protein, 14 aa, Homo Sapiens
VDEVFRIGNVEISQ

SEQ ID NO: 96377 - protein, 14 aa, Homo Sapiens
DEVFRIGNVEISQV

SEQ ID NO: 96378 - protein, 14 aa, Homo Sapiens
EVFRIGNVEISQVT

SEQ ID NO: 96379 - protein, 14 aa, Homo Sapiens
VFRIGNVEISQVTI

SEQ ID NO: 96380 - protein, 14 aa, Homo Sapiens
FRIGNVEISQVTIV

SEQ ID NO: 96381 - protein, 14 aa, Homo Sapiens
RIGNVEISQVTIVG

SEQ ID NO: 96382 - protein, 14 aa, Homo Sapiens
IGNVEISQVTIVGI

SEQ ID NO: 96383 - protein, 14 aa, Homo Sapiens
GNVEISQVTIVGII

SEQ ID NO: 96384 - protein, 14 aa, Homo Sapiens
NVEISQVTIVGIIR

SEQ ID NO: 96385 - protein, 14 aa, Homo Sapiens
VEISQVTIVGIIRH

SEQ ID NO: 96386 - protein, 14 aa, Homo Sapiens
EISQVTIVGIIRHA

SEQ ID NO: 96387 - protein, 14 aa, Homo Sapiens
ISQVTIVGIIRHAE

SEQ ID NO: 96388 - protein, 14 aa, Homo Sapiens
SQVTIVGIIRHAEK

SEQ ID NO: 96389 - protein, 14 aa, Homo Sapiens
QVTIVGIIRHAEKA

SEQ ID NO: 96390 - protein, 14 aa, Homo Sapiens
VTIVGIIRHAEKAP

SEQ ID NO: 96391 - protein, 14 aa, Homo Sapiens
TIVGIIRHAEKAPT

SEQ ID NO: 96392 - protein, 14 aa, Homo Sapiens
IVGIIRHAEKAPTN

SEQ ID NO: 96393 - protein, 14 aa, Homo Sapiens
VGIIRHAEKAPTNI

SEQ ID NO: 96394 - protein, 14 aa, Homo Sapiens
GIIRHAEKAPTNIV

SEQ ID NO: 96395 - protein, 14 aa, Homo Sapiens
IIRHAEKAPTNIVY

SEQ ID NO: 96396 - protein, 14 aa, Homo Sapiens
IRHAEKAPTNIVYK

SEQ ID NO: 96397 - protein, 14 aa, Homo Sapiens
RHAEKAPTNIVYKI

SEQ ID NO: 96398 - protein, 14 aa, Homo Sapiens
HAEKAPTNIVYKID

SEQ ID NO: 96399 - protein, 14 aa, Homo Sapiens
AEKAPTNIVYKIDD

SEQ ID NO: 96400 - protein, 14 aa, Homo Sapiens
EKAPTNIVYKIDDM

SEQ ID NO: 96401 - protein, 14 aa, Homo Sapiens
KAPTNIVYKIDDMT

SEQ ID NO: 96402 - protein, 14 aa, Homo Sapiens
APTNIVYKIDDMTA

SEQ ID NO: 96403 - protein, 14 aa, Homo Sapiens
PTNIVYKIDDMTAA

SEQ ID NO: 96404 - protein, 14 aa, Homo Sapiens
TNIVYKIDDMTAAP

SEQ ID NO: 96405 - protein, 14 aa, Homo Sapiens
NIVYKIDDMTAAPM

SEQ ID NO: 96406 - protein, 14 aa, Homo Sapiens
IVYKIDDMTAAPMD

SEQ ID NO: 96407 - protein, 14 aa, Homo Sapiens
VYKIDDMTAAPMDV

SEQ ID NO: 96408 - protein, 14 aa, Homo Sapiens
YKIDDMTAAPMDVR

SEQ ID NO: 96409 - protein, 14 aa, Homo Sapiens
KIDDMTAAPMDVRQ

SEQ ID NO: 96410 - protein, 14 aa, Homo Sapiens
IDDMTAAPMDVRQW

SEQ ID NO: 96411 - protein, 14 aa, Homo Sapiens
DDMTAAPMDVRQWV

SEQ ID NO: 96412 - protein, 14 aa, Homo Sapiens
DMTAAPMDVRQWVD

SEQ ID NO: 96413 - protein, 14 aa, Homo Sapiens
MTAAPMDVRQWVDT

SEQ ID NO: 96414 - protein, 14 aa, Homo Sapiens
TAAPMDVRQWVDTD

SEQ ID NO: 96415 - protein, 14 aa, Homo Sapiens
AAPMDVRQWVDTDD

SEQ ID NO: 96416 - protein, 14 aa, Homo Sapiens
APMDVRQWVDTDDT

SEQ ID NO: 96417 - protein, 14 aa, Homo Sapiens
PMDVRQWVDTDDTS

SEQ ID NO: 96418 - protein, 14 aa, Homo Sapiens
MDVRQWVDTDDTSS

SEQ ID NO: 96419 - protein, 14 aa, Homo Sapiens
DVRQWVDTDDTSSE

SEQ ID NO: 96420 - protein, 14 aa, Homo Sapiens
VRQWVDTDDTSSEN

SEQ ID NO: 96421 - protein, 14 aa, Homo Sapiens
RQWVDTDDTSSENT

SEQ ID NO: 96422 - protein, 14 aa, Homo Sapiens
QWVDTDDTSSENTV

SEQ ID NO: 96423 - protein, 14 aa, Homo Sapiens
WVDTDDTSSENTVV

SEQ ID NO: 96424 - protein, 14 aa, Homo Sapiens
VDTDDTSSENTVVP

SEQ ID NO: 96425 - protein, 14 aa, Homo Sapiens
DTDDTSSENTVVPP

SEQ ID NO: 96426 - protein, 14 aa, Homo Sapiens
TDDTSSENTVVPPE

SEQ ID NO: 96427 - protein, 14 aa, Homo Sapiens
DDTSSENTVVPPET

SEQ ID NO: 96428 - protein, 14 aa, Homo Sapiens
DTSSENTVVPPETY

SEQ ID NO: 96429 - protein, 14 aa, Homo Sapiens
TSSENTVVPPETYV

SEQ ID NO: 96430 - protein, 14 aa, Homo Sapiens
SSENTVVPPETYVK

SEQ ID NO: 96431 - protein, 14 aa, Homo Sapiens
SENTVVPPETYVKV

SEQ ID NO: 96432 - protein, 14 aa, Homo Sapiens
ENTVVPPETYVKVA

SEQ ID NO: 96433 - protein, 14 aa, Homo Sapiens
NTVVPPETYVKVAG

SEQ ID NO: 96434 - protein, 14 aa, Homo Sapiens
TVVPPETYVKVAGH

SEQ ID NO: 96435 - protein, 14 aa, Homo Sapiens
VVPPETYVKVAGHL

SEQ ID NO: 96436 - protein, 14 aa, Homo Sapiens
VPPETYVKVAGHLR

SEQ ID NO: 96437 - protein, 14 aa, Homo Sapiens
PPETYVKVAGHLRS

SEQ ID NO: 96438 - protein, 14 aa, Homo Sapiens
PETYVKVAGHLRSF

SEQ ID NO: 96439 - protein, 14 aa, Homo Sapiens
ETYVKVAGHLRSFQ

SEQ ID NO: 96440 - protein, 14 aa, Homo Sapiens
TYVKVAGHLRSFQN

SEQ ID NO: 96441 - protein, 14 aa, Homo Sapiens
YVKVAGHLRSFQNK

SEQ ID NO: 96442 - protein, 14 aa, Homo Sapiens
VKVAGHLRSFQNKK

SEQ ID NO: 96443 - protein, 14 aa, Homo Sapiens
KVAGHLRSFQNKKS

SEQ ID NO: 96444 - protein, 14 aa, Homo Sapiens
VAGHLRSFQNKKSL

SEQ ID NO: 96445 - protein, 14 aa, Homo Sapiens
AGHLRSFQNKKSLV

SEQ ID NO: 96446 - protein, 14 aa, Homo Sapiens
GHLRSFQNKKSLVA

SEQ ID NO: 96447 - protein, 14 aa, Homo Sapiens
HLRSFQNKKSLVAF

SEQ ID NO: 96448 - protein, 14 aa, Homo Sapiens
LRSFQNKKSLVAFK

SEQ ID NO: 96449 - protein, 14 aa, Homo Sapiens
RSFQNKKSLVAFKI

SEQ ID NO: 96450 - protein, 14 aa, Homo Sapiens
SFQNKKSLVAFKIM

SEQ ID NO: 96451 - protein, 14 aa, Homo Sapiens
FQNKKSLVAFKIMP

SEQ ID NO: 96452 - protein, 14 aa, Homo Sapiens
QNKKSLVAFKIMPL

SEQ ID NO: 96453 - protein, 14 aa, Homo Sapiens
NKKSLVAFKIMPLE

SEQ ID NO: 96454 - protein, 14 aa, Homo Sapiens
KKSLVAFKIMPLED

SEQ ID NO: 96455 - protein, 14 aa, Homo Sapiens
KSLVAFKIMPLEDM

SEQ ID NO: 96456 - protein, 14 aa, Homo Sapiens
SLVAFKIMPLEDMN

SEQ ID NO: 96457 - protein, 14 aa, Homo Sapiens
LVAFKIMPLEDMNE

SEQ ID NO: 96458 - protein, 14 aa, Homo Sapiens
VAFKIMPLEDMNEF

SEQ ID NO: 96459 - protein, 14 aa, Homo Sapiens
AFKIMPLEDMNEFT

SEQ ID NO: 96460 - protein, 14 aa, Homo Sapiens
FKIMPLEDMNEFTT

SEQ ID NO: 96461 - protein, 14 aa, Homo Sapiens
KIMPLEDMNEFTTH

SEQ ID NO: 96462 - protein, 14 aa, Homo Sapiens
IMPLEDMNEFTTHI

SEQ ID NO: 96463 - protein, 14 aa, Homo Sapiens
MPLEDMNEFTTHIL

SEQ ID NO: 96464 - protein, 14 aa, Homo Sapiens
PLEDMNEFTTHILE

SEQ ID NO: 96465 - protein, 14 aa, Homo Sapiens
LEDMNEFTTHILEV

SEQ ID NO: 96466 - protein, 14 aa, Homo Sapiens
EDMNEFTTHILEVI

SEQ ID NO: 96467 - protein, 14 aa, Homo Sapiens
DMNEFTTHILEVIN

SEQ ID NO: 96468 - protein, 14 aa, Homo Sapiens
MNEFTTHILEVINA

SEQ ID NO: 96469 - protein, 14 aa, Homo Sapiens
NEFTTHILEVINAH

SEQ ID NO: 96470 - protein, 14 aa, Homo Sapiens
EFTTHILEVINAHM

SEQ ID NO: 96471 - protein, 14 aa, Homo Sapiens
FTTHILEVINAHMV

SEQ ID NO: 96472 - protein, 14 aa, Homo Sapiens
TTHILEVINAHMVL

SEQ ID NO: 96473 - protein, 14 aa, Homo Sapiens
THILEVINAHMVLS

SEQ ID NO: 96474 - protein, 14 aa, Homo Sapiens
HILEVINAHMVLSK

SEQ ID NO: 96475 - protein, 14 aa, Homo Sapiens
ILEVINAHMVLSKA

SEQ ID NO: 96476 - protein, 14 aa, Homo Sapiens
LEVINAHMVLSKAN

SEQ ID NO: 96477 - protein, 14 aa, Homo Sapiens
EVINAHMVLSKANS

SEQ ID NO: 96478 - protein, 14 aa, Homo Sapiens
VINAHMVLSKANSQ

SEQ ID NO: 96479 - protein, 14 aa, Homo Sapiens
INAHMVLSKANSQP

SEQ ID NO: 96480 - protein, 14 aa, Homo Sapiens
NAHMVLSKANSQPS

SEQ ID NO: 96481 - protein, 14 aa, Homo Sapiens
AHMVLSKANSQPSA

SEQ ID NO: 96482 - protein, 14 aa, Homo Sapiens
HMVLSKANSQPSAG

SEQ ID NO: 96483 - protein, 14 aa, Homo Sapiens
MVLSKANSQPSAGR

SEQ ID NO: 96484 - protein, 14 aa, Homo Sapiens
VLSKANSQPSAGRA

SEQ ID NO: 96485 - protein, 14 aa, Homo Sapiens
LSKANSQPSAGRAP

SEQ ID NO: 96486 - protein, 14 aa, Homo Sapiens
SKANSQPSAGRAPI

SEQ ID NO: 96487 - protein, 14 aa, Homo Sapiens
KANSQPSAGRAPIS

SEQ ID NO: 96488 - protein, 14 aa, Homo Sapiens
ANSQPSAGRAPISN

SEQ ID NO: 96489 - protein, 14 aa, Homo Sapiens
NSQPSAGRAPISNP

SEQ ID NO: 96490 - protein, 14 aa, Homo Sapiens
SQPSAGRAPISNPG

SEQ ID NO: 96491 - protein, 14 aa, Homo Sapiens
QPSAGRAPISNPGM

SEQ ID NO: 96492 - protein, 14 aa, Homo Sapiens
PSAGRAPISNPGMS

SEQ ID NO: 96493 - protein, 14 aa, Homo Sapiens
SAGRAPISNPGMSE

SEQ ID NO: 96494 - protein, 14 aa, Homo Sapiens
AGRAPISNPGMSEA

SEQ ID NO: 96495 - protein, 14 aa, Homo Sapiens
GRAPISNPGMSEAG

SEQ ID NO: 96496 - protein, 14 aa, Homo Sapiens
RAPISNPGMSEAGN

SEQ ID NO: 96497 - protein, 14 aa, Homo Sapiens
APISNPGMSEAGNF

SEQ ID NO: 96498 - protein, 14 aa, Homo Sapiens
PISNPGMSEAGNFG

SEQ ID NO: 96499 - protein, 14 aa, Homo Sapiens
ISNPGMSEAGNFGG

SEQ ID NO: 96500 - protein, 14 aa, Homo Sapiens
SNPGMSEAGNFGGN

SEQ ID NO: 96501 - protein, 14 aa, Homo Sapiens
NPGMSEAGNFGGNS

SEQ ID NO: 96502 - protein, 14 aa, Homo Sapiens
PGMSEAGNFGGNSF

SEQ ID NO: 96503 - protein, 14 aa, Homo Sapiens
GMSEAGNFGGNSFM

SEQ ID NO: 96504 - protein, 14 aa, Homo Sapiens
MSEAGNFGGNSFMP

SEQ ID NO: 96505 - protein, 14 aa, Homo Sapiens
SEAGNFGGNSFMPA

SEQ ID NO: 96506 - protein, 14 aa, Homo Sapiens
EAGNFGGNSFMPAN

SEQ ID NO: 96507 - protein, 14 aa, Homo Sapiens
AGNFGGNSFMPANG

SEQ ID NO: 96508 - protein, 14 aa, Homo Sapiens
GNFGGNSFMPANGL

SEQ ID NO: 96509 - protein, 14 aa, Homo Sapiens
NFGGNSFMPANGLT

SEQ ID NO: 96510 - protein, 14 aa, Homo Sapiens
FGGNSFMPANGLTV

SEQ ID NO: 96511 - protein, 14 aa, Homo Sapiens
GGNSFMPANGLTVA

SEQ ID NO: 96512 - protein, 14 aa, Homo Sapiens
GNSFMPANGLTVAQ

SEQ ID NO: 96513 - protein, 14 aa, Homo Sapiens
NSFMPANGLTVAQN

SEQ ID NO: 96514 - protein, 14 aa, Homo Sapiens
SFMPANGLTVAQNQ

SEQ ID NO: 96515 - protein, 14 aa, Homo Sapiens
FMPANGLTVAQNQV

SEQ ID NO: 96516 - protein, 14 aa, Homo Sapiens
MPANGLTVAQNQVL

SEQ ID NO: 96517 - protein, 14 aa, Homo Sapiens
PANGLTVAQNQVLN

SEQ ID NO: 96518 - protein, 14 aa, Homo Sapiens
ANGLTVAQNQVLNL

SEQ ID NO: 96519 - protein, 14 aa, Homo Sapiens
NGLTVAQNQVLNLI

SEQ ID NO: 96520 - protein, 14 aa, Homo Sapiens
GLTVAQNQVLNLIK

SEQ ID NO: 96521 - protein, 14 aa, Homo Sapiens
LTVAQNQVLNLIKA

SEQ ID NO: 96522 - protein, 14 aa, Homo Sapiens
TVAQNQVLNLIKAC

SEQ ID NO: 96523 - protein, 14 aa, Homo Sapiens
VAQNQVLNLIKACP

SEQ ID NO: 96524 - protein, 14 aa, Homo Sapiens
AQNQVLNLIKACPR

SEQ ID NO: 96525 - protein, 14 aa, Homo Sapiens
QNQVLNLIKACPRP

SEQ ID NO: 96526 - protein, 14 aa, Homo Sapiens
NQVLNLIKACPRPE

SEQ ID NO: 96527 - protein, 14 aa, Homo Sapiens
QVLNLIKACPRPEG

SEQ ID NO: 96528 - protein, 14 aa, Homo Sapiens
VLNLIKACPRPEGL

SEQ ID NO: 96529 - protein, 14 aa, Homo Sapiens
LNLIKACPRPEGLN

SEQ ID NO: 96530 - protein, 14 aa, Homo Sapiens
NLIKACPRPEGLNF

SEQ ID NO: 96531 - protein, 14 aa, Homo Sapiens
LIKACPRPEGLNFQ

SEQ ID NO: 96532 - protein, 14 aa, Homo Sapiens
IKACPRPEGLNFQD

SEQ ID NO: 96533 - protein, 14 aa, Homo Sapiens
KACPRPEGLNFQDL

SEQ ID NO: 96534 - protein, 14 aa, Homo Sapiens
ACPRPEGLNFQDLK

SEQ ID NO: 96535 - protein, 14 aa, Homo Sapiens
CPRPEGLNFQDLKN

SEQ ID NO: 96536 - protein, 14 aa, Homo Sapiens
PRPEGLNFQDLKNQ

SEQ ID NO: 96537 - protein, 14 aa, Homo Sapiens
RPEGLNFQDLKNQL

SEQ ID NO: 96538 - protein, 14 aa, Homo Sapiens
PEGLNFQDLKNQLK

SEQ ID NO: 96539 - protein, 14 aa, Homo Sapiens
EGLNFQDLKNQLKH

SEQ ID NO: 96540 - protein, 14 aa, Homo Sapiens
GLNFQDLKNQLKHM

SEQ ID NO: 96541 - protein, 14 aa, Homo Sapiens
LNFQDLKNQLKHMS

SEQ ID NO: 96542 - protein, 14 aa, Homo Sapiens
NFQDLKNQLKHMSV

SEQ ID NO: 96543 - protein, 14 aa, Homo Sapiens
FQDLKNQLKHMSVS

SEQ ID NO: 96544 - protein, 14 aa, Homo Sapiens
QDLKNQLKHMSVSS

SEQ ID NO: 96545 - protein, 14 aa, Homo Sapiens
DLKNQLKHMSVSSI

SEQ ID NO: 96546 - protein, 14 aa, Homo Sapiens
LKNQLKHMSVSSIK

SEQ ID NO: 96547 - protein, 14 aa, Homo Sapiens
KNQLKHMSVSSIKQ

SEQ ID NO: 96548 - protein, 14 aa, Homo Sapiens
NQLKHMSVSSIKQA

SEQ ID NO: 96549 - protein, 14 aa, Homo Sapiens
QLKHMSVSSIKQAV

SEQ ID NO: 96550 - protein, 14 aa, Homo Sapiens
LKHMSVSSIKQAVD

SEQ ID NO: 96551 - protein, 14 aa, Homo Sapiens
KHMSVSSIKQAVDF

SEQ ID NO: 96552 - protein, 14 aa, Homo Sapiens
HMSVSSIKQAVDFL

SEQ ID NO: 96553 - protein, 14 aa, Homo Sapiens
MSVSSIKQAVDFLS

SEQ ID NO: 96554 - protein, 14 aa, Homo Sapiens
SVSSIKQAVDFLSN

SEQ ID NO: 96555 - protein, 14 aa, Homo Sapiens
VSSIKQAVDFLSNE

SEQ ID NO: 96556 - protein, 14 aa, Homo Sapiens
SSIKQAVDFLSNEG

SEQ ID NO: 96557 - protein, 14 aa, Homo Sapiens
SIKQAVDFLSNEGH

SEQ ID NO: 96558 - protein, 14 aa, Homo Sapiens
IKQAVDFLSNEGHI

SEQ ID NO: 96559 - protein, 14 aa, Homo Sapiens
KQAVDFLSNEGHIY

SEQ ID NO: 96560 - protein, 14 aa, Homo Sapiens
QAVDFLSNEGHIYS

SEQ ID NO: 96561 - protein, 14 aa, Homo Sapiens
AVDFLSNEGHIYST

SEQ ID NO: 96562 - protein, 14 aa, Homo Sapiens
VDFLSNEGHIYSTV

SEQ ID NO: 96563 - protein, 14 aa, Homo Sapiens
DFLSNEGHIYSTVD

SEQ ID NO: 96564 - protein, 14 aa, Homo Sapiens
FLSNEGHIYSTVDD

SEQ ID NO: 96565 - protein, 14 aa, Homo Sapiens
LSNEGHIYSTVDDD

SEQ ID NO: 96566 - protein, 14 aa, Homo Sapiens
SNEGHIYSTVDDDH

SEQ ID NO: 96567 - protein, 14 aa, Homo Sapiens
NEGHIYSTVDDDHF

SEQ ID NO: 96568 - protein, 14 aa, Homo Sapiens
EGHIYSTVDDDHFK

SEQ ID NO: 96569 - protein, 14 aa, Homo Sapiens
GHIYSTVDDDHFKS

SEQ ID NO: 96570 - protein, 14 aa, Homo Sapiens
HIYSTVDDDHFKST

SEQ ID NO: 96571 - protein, 14 aa, Homo Sapiens
IYSTVDDDHFKSTD

SEQ ID NO: 96572 - protein, 14 aa, Homo Sapiens
YSTVDDDHFKSTDA

SEQ ID NO: 96573 - protein, 14 aa, Homo Sapiens
STVDDDHFKSTDAE

SEQ ID NO: 96574 - protein, 15 aa, Homo Sapiens
MWNSGFESYGSSSYG

SEQ ID NO: 96575 - protein, 15 aa, Homo Sapiens
WNSGFESYGSSSYGG

SEQ ID NO: 96576 - protein, 15 aa, Homo Sapiens
NSGFESYGSSSYGGA

SEQ ID NO: 96577 - protein, 15 aa, Homo Sapiens
SGFESYGSSSYGGAG

SEQ ID NO: 96578 - protein, 15 aa, Homo Sapiens
GFESYGSSSYGGAGG

SEQ ID NO: 96579 - protein, 15 aa, Homo Sapiens
FESYGSSSYGGAGGY

SEQ ID NO: 96580 - protein, 15 aa, Homo Sapiens
ESYGSSSYGGAGGYT

SEQ ID NO: 96581 - protein, 15 aa, Homo Sapiens
SYGSSSYGGAGGYTQ

SEQ ID NO: 96582 - protein, 15 aa, Homo Sapiens
YGSSSYGGAGGYTQS

SEQ ID NO: 96583 - protein, 15 aa, Homo Sapiens
GSSSYGGAGGYTQSP

SEQ ID NO: 96584 - protein, 15 aa, Homo Sapiens
SSSYGGAGGYTQSPG

SEQ ID NO: 96585 - protein, 15 aa, Homo Sapiens
SSYGGAGGYTQSPGG

SEQ ID NO: 96586 - protein, 15 aa, Homo Sapiens
SYGGAGGYTQSPGGF

SEQ ID NO: 96587 - protein, 15 aa, Homo Sapiens
YGGAGGYTQSPGGFG

SEQ ID NO: 96588 - protein, 15 aa, Homo Sapiens
GGAGGYTQSPGGFGS

SEQ ID NO: 96589 - protein, 15 aa, Homo Sapiens
GAGGYTQSPGGFGSP

SEQ ID NO: 96590 - protein, 15 aa, Homo Sapiens
AGGYTQSPGGFGSPA

SEQ ID NO: 96591 - protein, 15 aa, Homo Sapiens
GGYTQSPGGFGSPAP

SEQ ID NO: 96592 - protein, 15 aa, Homo Sapiens
GYTQSPGGFGSPAPS

SEQ ID NO: 96593 - protein, 15 aa, Homo Sapiens
YTQSPGGFGSPAPSQ

SEQ ID NO: 96594 - protein, 15 aa, Homo Sapiens
TQSPGGFGSPAPSQA

SEQ ID NO: 96595 - protein, 15 aa, Homo Sapiens
QSPGGFGSPAPSQAE

SEQ ID NO: 96596 - protein, 15 aa, Homo Sapiens
SPGGFGSPAPSQAEK

SEQ ID NO: 96597 - protein, 15 aa, Homo Sapiens
PGGFGSPAPSQAEKK

SEQ ID NO: 96598 - protein, 15 aa, Homo Sapiens
GGFGSPAPSQAEKKS

SEQ ID NO: 96599 - protein, 15 aa, Homo Sapiens
GFGSPAPSQAEKKSR

SEQ ID NO: 96600 - protein, 15 aa, Homo Sapiens
FGSPAPSQAEKKSRA

SEQ ID NO: 96601 - protein, 15 aa, Homo Sapiens
GSPAPSQAEKKSRAR

SEQ ID NO: 96602 - protein, 15 aa, Homo Sapiens
SPAPSQAEKKSRARA

SEQ ID NO: 96603 - protein, 15 aa, Homo Sapiens
PAPSQAEKKSRARAQ

SEQ ID NO: 96604 - protein, 15 aa, Homo Sapiens
APSQAEKKSRARAQH

SEQ ID NO: 96605 - protein, 15 aa, Homo Sapiens
PSQAEKKSRARAQHI

SEQ ID NO: 96606 - protein, 15 aa, Homo Sapiens
SQAEKKSRARAQHIV

SEQ ID NO: 96607 - protein, 15 aa, Homo Sapiens
QAEKKSRARAQHIVP

SEQ ID NO: 96608 - protein, 15 aa, Homo Sapiens
AEKKSRARAQHIVPC

SEQ ID NO: 96609 - protein, 15 aa, Homo Sapiens
EKKSRARAQHIVPCT

SEQ ID NO: 96610 - protein, 15 aa, Homo Sapiens
KKSRARAQHIVPCTI

SEQ ID NO: 96611 - protein, 15 aa, Homo Sapiens
KSRARAQHIVPCTIS

SEQ ID NO: 96612 - protein, 15 aa, Homo Sapiens
SRARAQHIVPCTISQ

SEQ ID NO: 96613 - protein, 15 aa, Homo Sapiens
RARAQHIVPCTISQL

SEQ ID NO: 96614 - protein, 15 aa, Homo Sapiens
ARAQHIVPCTISQLL

SEQ ID NO: 96615 - protein, 15 aa, Homo Sapiens
RAQHIVPCTISQLLS

SEQ ID NO: 96616 - protein, 15 aa, Homo Sapiens
AQHIVPCTISQLLSA

SEQ ID NO: 96617 - protein, 15 aa, Homo Sapiens
QHIVPCTISQLLSAT

SEQ ID NO: 96618 - protein, 15 aa, Homo Sapiens
HIVPCTISQLLSATL

SEQ ID NO: 96619 - protein, 15 aa, Homo Sapiens
IVPCTISQLLSATLV

SEQ ID NO: 96620 - protein, 15 aa, Homo Sapiens
VPCTISQLLSATLVD

SEQ ID NO: 96621 - protein, 15 aa, Homo Sapiens
PCTISQLLSATLVDE

SEQ ID NO: 96622 - protein, 15 aa, Homo Sapiens
CTISQLLSATLVDEV

SEQ ID NO: 96623 - protein, 15 aa, Homo Sapiens
TISQLLSATLVDEVF

SEQ ID NO: 96624 - protein, 15 aa, Homo Sapiens
ISQLLSATLVDEVFR

SEQ ID NO: 96625 - protein, 15 aa, Homo Sapiens
SQLLSATLVDEVFRI

SEQ ID NO: 96626 - protein, 15 aa, Homo Sapiens
QLLSATLVDEVFRIG

SEQ ID NO: 96627 - protein, 15 aa, Homo Sapiens
LLSATLVDEVFRIGN

SEQ ID NO: 96628 - protein, 15 aa, Homo Sapiens
LSATLVDEVFRIGNV

SEQ ID NO: 96629 - protein, 15 aa, Homo Sapiens
SATLVDEVFRIGNVE

SEQ ID NO: 96630 - protein, 15 aa, Homo Sapiens
ATLVDEVFRIGNVEI

SEQ ID NO: 96631 - protein, 15 aa, Homo Sapiens
TLVDEVFRIGNVEIS

SEQ ID NO: 96632 - protein, 15 aa, Homo Sapiens
LVDEVFRIGNVEISQ

SEQ ID NO: 96633 - protein, 15 aa, Homo Sapiens
VDEVFRIGNVEISQV

SEQ ID NO: 96634 - protein, 15 aa, Homo Sapiens
DEVFRIGNVEISQVT

SEQ ID NO: 96635 - protein, 15 aa, Homo Sapiens
EVFRIGNVEISQVTI

SEQ ID NO: 96636 - protein, 15 aa, Homo Sapiens
VFRIGNVEISQVTIV

SEQ ID NO: 96637 - protein, 15 aa, Homo Sapiens
FRIGNVEISQVTIVG

SEQ ID NO: 96638 - protein, 15 aa, Homo Sapiens
RIGNVEISQVTIVGI

SEQ ID NO: 96639 - protein, 15 aa, Homo Sapiens
IGNVEISQVTIVGII

SEQ ID NO: 96640 - protein, 15 aa, Homo Sapiens
GNVEISQVTIVGIIR

SEQ ID NO: 96641 - protein, 15 aa, Homo Sapiens
NVEISQVTIVGIIRH

SEQ ID NO: 96642 - protein, 15 aa, Homo Sapiens
VEISQVTIVGIIRHA

SEQ ID NO: 96643 - protein, 15 aa, Homo Sapiens
EISQVTIVGIIRHAE

SEQ ID NO: 96644 - protein, 15 aa, Homo Sapiens
ISQVTIVGIIRHAEK

SEQ ID NO: 96645 - protein, 15 aa, Homo Sapiens
SQVTIVGIIRHAEKA

SEQ ID NO: 96646 - protein, 15 aa, Homo Sapiens
QVTIVGIIRHAEKAP

SEQ ID NO: 96647 - protein, 15 aa, Homo Sapiens
VTIVGIIRHAEKAPT

SEQ ID NO: 96648 - protein, 15 aa, Homo Sapiens
TIVGIIRHAEKAPTN

SEQ ID NO: 96649 - protein, 15 aa, Homo Sapiens
IVGIIRHAEKAPTNI

SEQ ID NO: 96650 - protein, 15 aa, Homo Sapiens
VGIIRHAEKAPTNIV

SEQ ID NO: 96651 - protein, 15 aa, Homo Sapiens
GIIRHAEKAPTNIVY

SEQ ID NO: 96652 - protein, 15 aa, Homo Sapiens
IIRHAEKAPTNIVYK

SEQ ID NO: 96653 - protein, 15 aa, Homo Sapiens
IRHAEKAPTNIVYKI

SEQ ID NO: 96654 - protein, 15 aa, Homo Sapiens
RHAEKAPTNIVYKID

SEQ ID NO: 96655 - protein, 15 aa, Homo Sapiens
HAEKAPTNIVYKIDD

SEQ ID NO: 96656 - protein, 15 aa, Homo Sapiens
AEKAPTNIVYKIDDM

SEQ ID NO: 96657 - protein, 15 aa, Homo Sapiens
EKAPTNIVYKIDDMT

SEQ ID NO: 96658 - protein, 15 aa, Homo Sapiens
KAPTNIVYKIDDMTA

SEQ ID NO: 96659 - protein, 15 aa, Homo Sapiens
APTNIVYKIDDMTAA

SEQ ID NO: 96660 - protein, 15 aa, Homo Sapiens
PTNIVYKIDDMTAAP

SEQ ID NO: 96661 - protein, 15 aa, Homo Sapiens
TNIVYKIDDMTAAPM

SEQ ID NO: 96662 - protein, 15 aa, Homo Sapiens
NIVYKIDDMTAAPMD

SEQ ID NO: 96663 - protein, 15 aa, Homo Sapiens
IVYKIDDMTAAPMDV

SEQ ID NO: 96664 - protein, 15 aa, Homo Sapiens
VYKIDDMTAAPMDVR

SEQ ID NO: 96665 - protein, 15 aa, Homo Sapiens
YKIDDMTAAPMDVRQ

SEQ ID NO: 96666 - protein, 15 aa, Homo Sapiens
KIDDMTAAPMDVRQW

SEQ ID NO: 96667 - protein, 15 aa, Homo Sapiens
IDDMTAAPMDVRQWV

SEQ ID NO: 96668 - protein, 15 aa, Homo Sapiens
DDMTAAPMDVRQWVD

SEQ ID NO: 96669 - protein, 15 aa, Homo Sapiens
DMTAAPMDVRQWVDT

SEQ ID NO: 96670 - protein, 15 aa, Homo Sapiens
MTAAPMDVRQWVDTD

SEQ ID NO: 96671 - protein, 15 aa, Homo Sapiens
TAAPMDVRQWVDTDD

SEQ ID NO: 96672 - protein, 15 aa, Homo Sapiens
AAPMDVRQWVDTDDT

SEQ ID NO: 96673 - protein, 15 aa, Homo Sapiens
APMDVRQWVDTDDTS

SEQ ID NO: 96674 - protein, 15 aa, Homo Sapiens
PMDVRQWVDTDDTSS

SEQ ID NO: 96675 - protein, 15 aa, Homo Sapiens
MDVRQWVDTDDTSSE

SEQ ID NO: 96676 - protein, 15 aa, Homo Sapiens
DVRQWVDTDDTSSEN

SEQ ID NO: 96677 - protein, 15 aa, Homo Sapiens
VRQWVDTDDTSSENT

SEQ ID NO: 96678 - protein, 15 aa, Homo Sapiens
RQWVDTDDTSSENTV

SEQ ID NO: 96679 - protein, 15 aa, Homo Sapiens
QWVDTDDTSSENTVV

SEQ ID NO: 96680 - protein, 15 aa, Homo Sapiens
WVDTDDTSSENTVVP

SEQ ID NO: 96681 - protein, 15 aa, Homo Sapiens
VDTDDTSSENTVVPP

SEQ ID NO: 96682 - protein, 15 aa, Homo Sapiens
DTDDTSSENTVVPPE

SEQ ID NO: 96683 - protein, 15 aa, Homo Sapiens
TDDTSSENTVVPPET

SEQ ID NO: 96684 - protein, 15 aa, Homo Sapiens
DDTSSENTVVPPETY

SEQ ID NO: 96685 - protein, 15 aa, Homo Sapiens
DTSSENTVVPPETYV

SEQ ID NO: 96686 - protein, 15 aa, Homo Sapiens
TSSENTVVPPETYVK

SEQ ID NO: 96687 - protein, 15 aa, Homo Sapiens
SSENTVVPPETYVKV

SEQ ID NO: 96688 - protein, 15 aa, Homo Sapiens
SENTVVPPETYVKVA

SEQ ID NO: 96689 - protein, 15 aa, Homo Sapiens
ENTVVPPETYVKVAG

SEQ ID NO: 96690 - protein, 15 aa, Homo Sapiens
NTVVPPETYVKVAGH

SEQ ID NO: 96691 - protein, 15 aa, Homo Sapiens
TVVPPETYVKVAGHL

SEQ ID NO: 96692 - protein, 15 aa, Homo Sapiens
VVPPETYVKVAGHLR

SEQ ID NO: 96693 - protein, 15 aa, Homo Sapiens
VPPETYVKVAGHLRS

SEQ ID NO: 96694 - protein, 15 aa, Homo Sapiens
PPETYVKVAGHLRSF

SEQ ID NO: 96695 - protein, 15 aa, Homo Sapiens
PETYVKVAGHLRSFQ

SEQ ID NO: 96696 - protein, 15 aa, Homo Sapiens
ETYVKVAGHLRSFQN

SEQ ID NO: 96697 - protein, 15 aa, Homo Sapiens
TYVKVAGHLRSFQNK

SEQ ID NO: 96698 - protein, 15 aa, Homo Sapiens
YVKVAGHLRSFQNKK

SEQ ID NO: 96699 - protein, 15 aa, Homo Sapiens
VKVAGHLRSFQNKKS

SEQ ID NO: 96700 - protein, 15 aa, Homo Sapiens
KVAGHLRSFQNKKSL

SEQ ID NO: 96701 - protein, 15 aa, Homo Sapiens
VAGHLRSFQNKKSLV

SEQ ID NO: 96702 - protein, 15 aa, Homo Sapiens
AGHLRSFQNKKSLVA

SEQ ID NO: 96703 - protein, 15 aa, Homo Sapiens
GHLRSFQNKKSLVAF

SEQ ID NO: 96704 - protein, 15 aa, Homo Sapiens
HLRSFQNKKSLVAFK

SEQ ID NO: 96705 - protein, 15 aa, Homo Sapiens
LRSFQNKKSLVAFKI

SEQ ID NO: 96706 - protein, 15 aa, Homo Sapiens
RSFQNKKSLVAFKIM

SEQ ID NO: 96707 - protein, 15 aa, Homo Sapiens
SFQNKKSLVAFKIMP

SEQ ID NO: 96708 - protein, 15 aa, Homo Sapiens
FQNKKSLVAFKIMPL

SEQ ID NO: 96709 - protein, 15 aa, Homo Sapiens
QNKKSLVAFKIMPLE

SEQ ID NO: 96710 - protein, 15 aa, Homo Sapiens
NKKSLVAFKIMPLED

SEQ ID NO: 96711 - protein, 15 aa, Homo Sapiens
KKSLVAFKIMPLEDM

SEQ ID NO: 96712 - protein, 15 aa, Homo Sapiens
KSLVAFKIMPLEDMN

SEQ ID NO: 96713 - protein, 15 aa, Homo Sapiens
SLVAFKIMPLEDMNE

SEQ ID NO: 96714 - protein, 15 aa, Homo Sapiens
LVAFKIMPLEDMNEF

SEQ ID NO: 96715 - protein, 15 aa, Homo Sapiens
VAFKIMPLEDMNEFT

SEQ ID NO: 96716 - protein, 15 aa, Homo Sapiens
AFKIMPLEDMNEFTT

SEQ ID NO: 96717 - protein, 15 aa, Homo Sapiens
FKIMPLEDMNEFTTH

SEQ ID NO: 96718 - protein, 15 aa, Homo Sapiens
KIMPLEDMNEFTTHI

SEQ ID NO: 96719 - protein, 15 aa, Homo Sapiens
IMPLEDMNEFTTHIL

SEQ ID NO: 96720 - protein, 15 aa, Homo Sapiens
MPLEDMNEFTTHILE

SEQ ID NO: 96721 - protein, 15 aa, Homo Sapiens
PLEDMNEFTTHILEV

SEQ ID NO: 96722 - protein, 15 aa, Homo Sapiens
LEDMNEFTTHILEVI

SEQ ID NO: 96723 - protein, 15 aa, Homo Sapiens
EDMNEFTTHILEVIN

SEQ ID NO: 96724 - protein, 15 aa, Homo Sapiens
DMNEFTTHILEVINA

SEQ ID NO: 96725 - protein, 15 aa, Homo Sapiens
MNEFTTHILEVINAH

SEQ ID NO: 96726 - protein, 15 aa, Homo Sapiens
NEFTTHILEVINAHM

SEQ ID NO: 96727 - protein, 15 aa, Homo Sapiens
EFTTHILEVINAHMV

SEQ ID NO: 96728 - protein, 15 aa, Homo Sapiens
FTTHILEVINAHMVL

SEQ ID NO: 96729 - protein, 15 aa, Homo Sapiens
TTHILEVINAHMVLS

SEQ ID NO: 96730 - protein, 15 aa, Homo Sapiens
THILEVINAHMVLSK

SEQ ID NO: 96731 - protein, 15 aa, Homo Sapiens
HILEVINAHMVLSKA

SEQ ID NO: 96732 - protein, 15 aa, Homo Sapiens
ILEVINAHMVLSKAN

SEQ ID NO: 96733 - protein, 15 aa, Homo Sapiens
LEVINAHMVLSKANS

SEQ ID NO: 96734 - protein, 15 aa, Homo Sapiens
EVINAHMVLSKANSQ

SEQ ID NO: 96735 - protein, 15 aa, Homo Sapiens
VINAHMVLSKANSQP

SEQ ID NO: 96736 - protein, 15 aa, Homo Sapiens
INAHMVLSKANSQPS

SEQ ID NO: 96737 - protein, 15 aa, Homo Sapiens
NAHMVLSKANSQPSA

SEQ ID NO: 96738 - protein, 15 aa, Homo Sapiens
AHMVLSKANSQPSAG

SEQ ID NO: 96739 - protein, 15 aa, Homo Sapiens
HMVLSKANSQPSAGR

SEQ ID NO: 96740 - protein, 15 aa, Homo Sapiens
MVLSKANSQPSAGRA

SEQ ID NO: 96741 - protein, 15 aa, Homo Sapiens
VLSKANSQPSAGRAP

SEQ ID NO: 96742 - protein, 15 aa, Homo Sapiens
LSKANSQPSAGRAPI

SEQ ID NO: 96743 - protein, 15 aa, Homo Sapiens
SKANSQPSAGRAPIS

SEQ ID NO: 96744 - protein, 15 aa, Homo Sapiens
KANSQPSAGRAPISN

SEQ ID NO: 96745 - protein, 15 aa, Homo Sapiens
ANSQPSAGRAPISNP

SEQ ID NO: 96746 - protein, 15 aa, Homo Sapiens
NSQPSAGRAPISNPG

SEQ ID NO: 96747 - protein, 15 aa, Homo Sapiens
SQPSAGRAPISNPGM

SEQ ID NO: 96748 - protein, 15 aa, Homo Sapiens
QPSAGRAPISNPGMS

SEQ ID NO: 96749 - protein, 15 aa, Homo Sapiens
PSAGRAPISNPGMSE

SEQ ID NO: 96750 - protein, 15 aa, Homo Sapiens
SAGRAPISNPGMSEA

SEQ ID NO: 96751 - protein, 15 aa, Homo Sapiens
AGRAPISNPGMSEAG

SEQ ID NO: 96752 - protein, 15 aa, Homo Sapiens
GRAPISNPGMSEAGN

SEQ ID NO: 96753 - protein, 15 aa, Homo Sapiens
RAPISNPGMSEAGNF

SEQ ID NO: 96754 - protein, 15 aa, Homo Sapiens
APISNPGMSEAGNFG

SEQ ID NO: 96755 - protein, 15 aa, Homo Sapiens
PISNPGMSEAGNFGG

SEQ ID NO: 96756 - protein, 15 aa, Homo Sapiens
ISNPGMSEAGNFGGN

SEQ ID NO: 96757 - protein, 15 aa, Homo Sapiens
SNPGMSEAGNFGGNS

SEQ ID NO: 96758 - protein, 15 aa, Homo Sapiens
NPGMSEAGNFGGNSF

SEQ ID NO: 96759 - protein, 15 aa, Homo Sapiens
PGMSEAGNFGGNSFM

SEQ ID NO: 96760 - protein, 15 aa, Homo Sapiens
GMSEAGNFGGNSFMP

SEQ ID NO: 96761 - protein, 15 aa, Homo Sapiens
MSEAGNFGGNSFMPA

SEQ ID NO: 96762 - protein, 15 aa, Homo Sapiens
SEAGNFGGNSFMPAN

SEQ ID NO: 96763 - protein, 15 aa, Homo Sapiens
EAGNFGGNSFMPANG

SEQ ID NO: 96764 - protein, 15 aa, Homo Sapiens
AGNFGGNSFMPANGL

SEQ ID NO: 96765 - protein, 15 aa, Homo Sapiens
GNFGGNSFMPANGLT

SEQ ID NO: 96766 - protein, 15 aa, Homo Sapiens
NFGGNSFMPANGLTV

SEQ ID NO: 96767 - protein, 15 aa, Homo Sapiens
FGGNSFMPANGLTVA

SEQ ID NO: 96768 - protein, 15 aa, Homo Sapiens
GGNSFMPANGLTVAQ

SEQ ID NO: 96769 - protein, 15 aa, Homo Sapiens
GNSFMPANGLTVAQN

SEQ ID NO: 96770 - protein, 15 aa, Homo Sapiens
NSFMPANGLTVAQNQ

SEQ ID NO: 96771 - protein, 15 aa, Homo Sapiens
SFMPANGLTVAQNQV

SEQ ID NO: 96772 - protein, 15 aa, Homo Sapiens
FMPANGLTVAQNQVL

SEQ ID NO: 96773 - protein, 15 aa, Homo Sapiens
MPANGLTVAQNQVLN

SEQ ID NO: 96774 - protein, 15 aa, Homo Sapiens
PANGLTVAQNQVLNL

SEQ ID NO: 96775 - protein, 15 aa, Homo Sapiens
ANGLTVAQNQVLNLI

SEQ ID NO: 96776 - protein, 15 aa, Homo Sapiens
NGLTVAQNQVLNLIK

SEQ ID NO: 96777 - protein, 15 aa, Homo Sapiens
GLTVAQNQVLNLIKA

SEQ ID NO: 96778 - protein, 15 aa, Homo Sapiens
LTVAQNQVLNLIKAC

SEQ ID NO: 96779 - protein, 15 aa, Homo Sapiens
TVAQNQVLNLIKACP

SEQ ID NO: 96780 - protein, 15 aa, Homo Sapiens
VAQNQVLNLIKACPR

SEQ ID NO: 96781 - protein, 15 aa, Homo Sapiens
AQNQVLNLIKACPRP

SEQ ID NO: 96782 - protein, 15 aa, Homo Sapiens
QNQVLNLIKACPRPE

SEQ ID NO: 96783 - protein, 15 aa, Homo Sapiens
NQVLNLIKACPRPEG

SEQ ID NO: 96784 - protein, 15 aa, Homo Sapiens
QVLNLIKACPRPEGL

SEQ ID NO: 96785 - protein, 15 aa, Homo Sapiens
VLNLIKACPRPEGLN

SEQ ID NO: 96786 - protein, 15 aa, Homo Sapiens
LNLIKACPRPEGLNF

SEQ ID NO: 96787 - protein, 15 aa, Homo Sapiens
NLIKACPRPEGLNFQ

SEQ ID NO: 96788 - protein, 15 aa, Homo Sapiens
LIKACPRPEGLNFQD

SEQ ID NO: 96789 - protein, 15 aa, Homo Sapiens
IKACPRPEGLNFQDL

SEQ ID NO: 96790 - protein, 15 aa, Homo Sapiens
KACPRPEGLNFQDLK

SEQ ID NO: 96791 - protein, 15 aa, Homo Sapiens
ACPRPEGLNFQDLKN

SEQ ID NO: 96792 - protein, 15 aa, Homo Sapiens
CPRPEGLNFQDLKNQ

SEQ ID NO: 96793 - protein, 15 aa, Homo Sapiens
PRPEGLNFQDLKNQL

SEQ ID NO: 96794 - protein, 15 aa, Homo Sapiens
RPEGLNFQDLKNQLK

SEQ ID NO: 96795 - protein, 15 aa, Homo Sapiens
PEGLNFQDLKNQLKH

SEQ ID NO: 96796 - protein, 15 aa, Homo Sapiens
EGLNFQDLKNQLKHM

SEQ ID NO: 96797 - protein, 15 aa, Homo Sapiens
GLNFQDLKNQLKHMS

SEQ ID NO: 96798 - protein, 15 aa, Homo Sapiens
LNFQDLKNQLKHMSV

SEQ ID NO: 96799 - protein, 15 aa, Homo Sapiens
NFQDLKNQLKHMSVS

SEQ ID NO: 96800 - protein, 15 aa, Homo Sapiens
FQDLKNQLKHMSVSS

SEQ ID NO: 96801 - protein, 15 aa, Homo Sapiens
QDLKNQLKHMSVSSI

SEQ ID NO: 96802 - protein, 15 aa, Homo Sapiens
DLKNQLKHMSVSSIK

SEQ ID NO: 96803 - protein, 15 aa, Homo Sapiens
LKNQLKHMSVSSIKQ

SEQ ID NO: 96804 - protein, 15 aa, Homo Sapiens
KNQLKHMSVSSIKQA

SEQ ID NO: 96805 - protein, 15 aa, Homo Sapiens
NQLKHMSVSSIKQAV

SEQ ID NO: 96806 - protein, 15 aa, Homo Sapiens
QLKHMSVSSIKQAVD

SEQ ID NO: 96807 - protein, 15 aa, Homo Sapiens
LKHMSVSSIKQAVDF

SEQ ID NO: 96808 - protein, 15 aa, Homo Sapiens
KHMSVSSIKQAVDFL

SEQ ID NO: 96809 - protein, 15 aa, Homo Sapiens
HMSVSSIKQAVDFLS

SEQ ID NO: 96810 - protein, 15 aa, Homo Sapiens
MSVSSIKQAVDFLSN

SEQ ID NO: 96811 - protein, 15 aa, Homo Sapiens
SVSSIKQAVDFLSNE

SEQ ID NO: 96812 - protein, 15 aa, Homo Sapiens
VSSIKQAVDFLSNEG

SEQ ID NO: 96813 - protein, 15 aa, Homo Sapiens
SSIKQAVDFLSNEGH

SEQ ID NO: 96814 - protein, 15 aa, Homo Sapiens
SIKQAVDFLSNEGHI

SEQ ID NO: 96815 - protein, 15 aa, Homo Sapiens
IKQAVDFLSNEGHIY

SEQ ID NO: 96816 - protein, 15 aa, Homo Sapiens
KQAVDFLSNEGHIYS

SEQ ID NO: 96817 - protein, 15 aa, Homo Sapiens
QAVDFLSNEGHIYST

SEQ ID NO: 96818 - protein, 15 aa, Homo Sapiens
AVDFLSNEGHIYSTV

SEQ ID NO: 96819 - protein, 15 aa, Homo Sapiens
VDFLSNEGHIYSTVD

SEQ ID NO: 96820 - protein, 15 aa, Homo Sapiens
DFLSNEGHIYSTVDD

SEQ ID NO: 96821 - protein, 15 aa, Homo Sapiens
FLSNEGHIYSTVDDD

SEQ ID NO: 96822 - protein, 15 aa, Homo Sapiens
LSNEGHIYSTVDDDH

SEQ ID NO: 96823 - protein, 15 aa, Homo Sapiens
SNEGHIYSTVDDDHF

SEQ ID NO: 96824 - protein, 15 aa, Homo Sapiens
NEGHIYSTVDDDHFK

SEQ ID NO: 96825 - protein, 15 aa, Homo Sapiens
EGHIYSTVDDDHFKS

SEQ ID NO: 96826 - protein, 15 aa, Homo Sapiens
GHIYSTVDDDHFKST

SEQ ID NO: 96827 - protein, 15 aa, Homo Sapiens
HIYSTVDDDHFKSTD

SEQ ID NO: 96828 - protein, 15 aa, Homo Sapiens
IYSTVDDDHFKSTDA

SEQ ID NO: 96829 - protein, 15 aa, Homo Sapiens
YSTVDDDHFKSTDAE

SEQ ID NO: 96830 - protein, 16 aa, Homo Sapiens
MWNSGFESYGSSSYGG

SEQ ID NO: 96831 - protein, 16 aa, Homo Sapiens
WNSGFESYGSSSYGGA

SEQ ID NO: 96832 - protein, 16 aa, Homo Sapiens
NSGFESYGSSSYGGAG

SEQ ID NO: 96833 - protein, 16 aa, Homo Sapiens
SGFESYGSSSYGGAGG

SEQ ID NO: 96834 - protein, 16 aa, Homo Sapiens
GFESYGSSSYGGAGGY

SEQ ID NO: 96835 - protein, 16 aa, Homo Sapiens
FESYGSSSYGGAGGYT

SEQ ID NO: 96836 - protein, 16 aa, Homo Sapiens
ESYGSSSYGGAGGYTQ

SEQ ID NO: 96837 - protein, 16 aa, Homo Sapiens
SYGSSSYGGAGGYTQS

SEQ ID NO: 96838 - protein, 16 aa, Homo Sapiens
YGSSSYGGAGGYTQSP

SEQ ID NO: 96839 - protein, 16 aa, Homo Sapiens
GSSSYGGAGGYTQSPG

SEQ ID NO: 96840 - protein, 16 aa, Homo Sapiens
SSSYGGAGGYTQSPGG

SEQ ID NO: 96841 - protein, 16 aa, Homo Sapiens
SSYGGAGGYTQSPGGF

SEQ ID NO: 96842 - protein, 16 aa, Homo Sapiens
SYGGAGGYTQSPGGFG

SEQ ID NO: 96843 - protein, 16 aa, Homo Sapiens
YGGAGGYTQSPGGFGS

SEQ ID NO: 96844 - protein, 16 aa, Homo Sapiens
GGAGGYTQSPGGFGSP

SEQ ID NO: 96845 - protein, 16 aa, Homo Sapiens
GAGGYTQSPGGFGSPA

SEQ ID NO: 96846 - protein, 16 aa, Homo Sapiens
AGGYTQSPGGFGSPAP

SEQ ID NO: 96847 - protein, 16 aa, Homo Sapiens
GGYTQSPGGFGSPAPS

SEQ ID NO: 96848 - protein, 16 aa, Homo Sapiens
GYTQSPGGFGSPAPSQ

SEQ ID NO: 96849 - protein, 16 aa, Homo Sapiens
YTQSPGGFGSPAPSQA

SEQ ID NO: 96850 - protein, 16 aa, Homo Sapiens
TQSPGGFGSPAPSQAE

SEQ ID NO: 96851 - protein, 16 aa, Homo Sapiens
QSPGGFGSPAPSQAEK

SEQ ID NO: 96852 - protein, 16 aa, Homo Sapiens
SPGGFGSPAPSQAEKK

SEQ ID NO: 96853 - protein, 16 aa, Homo Sapiens
PGGFGSPAPSQAEKKS

SEQ ID NO: 96854 - protein, 16 aa, Homo Sapiens
GGFGSPAPSQAEKKSR

SEQ ID NO: 96855 - protein, 16 aa, Homo Sapiens
GFGSPAPSQAEKKSRA

SEQ ID NO: 96856 - protein, 16 aa, Homo Sapiens
FGSPAPSQAEKKSRAR

SEQ ID NO: 96857 - protein, 16 aa, Homo Sapiens
GSPAPSQAEKKSRARA

SEQ ID NO: 96858 - protein, 16 aa, Homo Sapiens
SPAPSQAEKKSRARAQ

SEQ ID NO: 96859 - protein, 16 aa, Homo Sapiens
PAPSQAEKKSRARAQH

SEQ ID NO: 96860 - protein, 16 aa, Homo Sapiens
APSQAEKKSRARAQHI

SEQ ID NO: 96861 - protein, 16 aa, Homo Sapiens
PSQAEKKSRARAQHIV

SEQ ID NO: 96862 - protein, 16 aa, Homo Sapiens
SQAEKKSRARAQHIVP

SEQ ID NO: 96863 - protein, 16 aa, Homo Sapiens
QAEKKSRARAQHIVPC

SEQ ID NO: 96864 - protein, 16 aa, Homo Sapiens
AEKKSRARAQHIVPCT

SEQ ID NO: 96865 - protein, 16 aa, Homo Sapiens
EKKSRARAQHIVPCTI

SEQ ID NO: 96866 - protein, 16 aa, Homo Sapiens
KKSRARAQHIVPCTIS

SEQ ID NO: 96867 - protein, 16 aa, Homo Sapiens
KSRARAQHIVPCTISQ

SEQ ID NO: 96868 - protein, 16 aa, Homo Sapiens
SRARAQHIVPCTISQL

SEQ ID NO: 96869 - protein, 16 aa, Homo Sapiens
RARAQHIVPCTISQLL

SEQ ID NO: 96870 - protein, 16 aa, Homo Sapiens
ARAQHIVPCTISQLLS

SEQ ID NO: 96871 - protein, 16 aa, Homo Sapiens
RAQHIVPCTISQLLSA

SEQ ID NO: 96872 - protein, 16 aa, Homo Sapiens
AQHIVPCTISQLLSAT

SEQ ID NO: 96873 - protein, 16 aa, Homo Sapiens
QHIVPCTISQLLSATL

SEQ ID NO: 96874 - protein, 16 aa, Homo Sapiens
HIVPCTISQLLSATLV

SEQ ID NO: 96875 - protein, 16 aa, Homo Sapiens
IVPCTISQLLSATLVD

SEQ ID NO: 96876 - protein, 16 aa, Homo Sapiens
VPCTISQLLSATLVDE

SEQ ID NO: 96877 - protein, 16 aa, Homo Sapiens
PCTISQLLSATLVDEV

SEQ ID NO: 96878 - protein, 16 aa, Homo Sapiens
CTISQLLSATLVDEVF

SEQ ID NO: 96879 - protein, 16 aa, Homo Sapiens
TISQLLSATLVDEVFR

SEQ ID NO: 96880 - protein, 16 aa, Homo Sapiens
ISQLLSATLVDEVFRI

SEQ ID NO: 96881 - protein, 16 aa, Homo Sapiens
SQLLSATLVDEVFRIG

SEQ ID NO: 96882 - protein, 16 aa, Homo Sapiens
QLLSATLVDEVFRIGN

SEQ ID NO: 96883 - protein, 16 aa, Homo Sapiens
LLSATLVDEVFRIGNV

SEQ ID NO: 96884 - protein, 16 aa, Homo Sapiens
LSATLVDEVFRIGNVE

SEQ ID NO: 96885 - protein, 16 aa, Homo Sapiens
SATLVDEVFRIGNVEI

SEQ ID NO: 96886 - protein, 16 aa, Homo Sapiens
ATLVDEVFRIGNVEIS

SEQ ID NO: 96887 - protein, 16 aa, Homo Sapiens
TLVDEVFRIGNVEISQ

SEQ ID NO: 96888 - protein, 16 aa, Homo Sapiens
LVDEVFRIGNVEISQV

SEQ ID NO: 96889 - protein, 16 aa, Homo Sapiens
VDEVFRIGNVEISQVT

SEQ ID NO: 96890 - protein, 16 aa, Homo Sapiens
DEVFRIGNVEISQVTI

SEQ ID NO: 96891 - protein, 16 aa, Homo Sapiens
EVFRIGNVEISQVTIV

SEQ ID NO: 96892 - protein, 16 aa, Homo Sapiens
VFRIGNVEISQVTIVG

SEQ ID NO: 96893 - protein, 16 aa, Homo Sapiens
FRIGNVEISQVTIVGI

SEQ ID NO: 96894 - protein, 16 aa, Homo Sapiens
RIGNVEISQVTIVGII

SEQ ID NO: 96895 - protein, 16 aa, Homo Sapiens
IGNVEISQVTIVGIIR

SEQ ID NO: 96896 - protein, 16 aa, Homo Sapiens
GNVEISQVTIVGIIRH

SEQ ID NO: 96897 - protein, 16 aa, Homo Sapiens
NVEISQVTIVGIIRHA

SEQ ID NO: 96898 - protein, 16 aa, Homo Sapiens
VEISQVTIVGIIRHAE

SEQ ID NO: 96899 - protein, 16 aa, Homo Sapiens
EISQVTIVGIIRHAEK

SEQ ID NO: 96900 - protein, 16 aa, Homo Sapiens
ISQVTIVGIIRHAEKA

SEQ ID NO: 96901 - protein, 16 aa, Homo Sapiens
SQVTIVGIIRHAEKAP

SEQ ID NO: 96902 - protein, 16 aa, Homo Sapiens
QVTIVGIIRHAEKAPT

SEQ ID NO: 96903 - protein, 16 aa, Homo Sapiens
VTIVGIIRHAEKAPTN

SEQ ID NO: 96904 - protein, 16 aa, Homo Sapiens
TIVGIIRHAEKAPTNI

SEQ ID NO: 96905 - protein, 16 aa, Homo Sapiens
IVGIIRHAEKAPTNIV

SEQ ID NO: 96906 - protein, 16 aa, Homo Sapiens
VGIIRHAEKAPTNIVY

SEQ ID NO: 96907 - protein, 16 aa, Homo Sapiens
GIIRHAEKAPTNIVYK

SEQ ID NO: 96908 - protein, 16 aa, Homo Sapiens
IIRHAEKAPTNIVYKI

SEQ ID NO: 96909 - protein, 16 aa, Homo Sapiens
IRHAEKAPTNIVYKID

SEQ ID NO: 96910 - protein, 16 aa, Homo Sapiens
RHAEKAPTNIVYKIDD

SEQ ID NO: 96911 - protein, 16 aa, Homo Sapiens
HAEKAPTNIVYKIDDM

SEQ ID NO: 96912 - protein, 16 aa, Homo Sapiens
AEKAPTNIVYKIDDMT

SEQ ID NO: 96913 - protein, 16 aa, Homo Sapiens
EKAPTNIVYKIDDMTA

SEQ ID NO: 96914 - protein, 16 aa, Homo Sapiens
KAPTNIVYKIDDMTAA

SEQ ID NO: 96915 - protein, 16 aa, Homo Sapiens
APTNIVYKIDDMTAAP

SEQ ID NO: 96916 - protein, 16 aa, Homo Sapiens
PTNIVYKIDDMTAAPM

SEQ ID NO: 96917 - protein, 16 aa, Homo Sapiens
TNIVYKIDDMTAAPMD

SEQ ID NO: 96918 - protein, 16 aa, Homo Sapiens
NIVYKIDDMTAAPMDV

SEQ ID NO: 96919 - protein, 16 aa, Homo Sapiens
IVYKIDDMTAAPMDVR

SEQ ID NO: 96920 - protein, 16 aa, Homo Sapiens
VYKIDDMTAAPMDVRQ

SEQ ID NO: 96921 - protein, 16 aa, Homo Sapiens
YKIDDMTAAPMDVRQW

SEQ ID NO: 96922 - protein, 16 aa, Homo Sapiens
KIDDMTAAPMDVRQWV

SEQ ID NO: 96923 - protein, 16 aa, Homo Sapiens
IDDMTAAPMDVRQWVD

SEQ ID NO: 96924 - protein, 16 aa, Homo Sapiens
DDMTAAPMDVRQWVDT

SEQ ID NO: 96925 - protein, 16 aa, Homo Sapiens
DMTAAPMDVRQWVDTD

SEQ ID NO: 96926 - protein, 16 aa, Homo Sapiens
MTAAPMDVRQWVDTDD

SEQ ID NO: 96927 - protein, 16 aa, Homo Sapiens
TAAPMDVRQWVDTDDT

SEQ ID NO: 96928 - protein, 16 aa, Homo Sapiens
AAPMDVRQWVDTDDTS

SEQ ID NO: 96929 - protein, 16 aa, Homo Sapiens
APMDVRQWVDTDDTSS

SEQ ID NO: 96930 - protein, 16 aa, Homo Sapiens
PMDVRQWVDTDDTSSE

SEQ ID NO: 96931 - protein, 16 aa, Homo Sapiens
MDVRQWVDTDDTSSEN

SEQ ID NO: 96932 - protein, 16 aa, Homo Sapiens
DVRQWVDTDDTSSENT

SEQ ID NO: 96933 - protein, 16 aa, Homo Sapiens
VRQWVDTDDTSSENTV

SEQ ID NO: 96934 - protein, 16 aa, Homo Sapiens
RQWVDTDDTSSENTVV

SEQ ID NO: 96935 - protein, 16 aa, Homo Sapiens
QWVDTDDTSSENTVVP

SEQ ID NO: 96936 - protein, 16 aa, Homo Sapiens
WVDTDDTSSENTVVPP

SEQ ID NO: 96937 - protein, 16 aa, Homo Sapiens
VDTDDTSSENTVVPPE

SEQ ID NO: 96938 - protein, 16 aa, Homo Sapiens
DTDDTSSENTVVPPET

SEQ ID NO: 96939 - protein, 16 aa, Homo Sapiens
TDDTSSENTVVPPETY

SEQ ID NO: 96940 - protein, 16 aa, Homo Sapiens
DDTSSENTVVPPETYV

SEQ ID NO: 96941 - protein, 16 aa, Homo Sapiens
DTSSENTVVPPETYVK

SEQ ID NO: 96942 - protein, 16 aa, Homo Sapiens
TSSENTVVPPETYVKV

SEQ ID NO: 96943 - protein, 16 aa, Homo Sapiens
SSENTVVPPETYVKVA

SEQ ID NO: 96944 - protein, 16 aa, Homo Sapiens
SENTVVPPETYVKVAG

SEQ ID NO: 96945 - protein, 16 aa, Homo Sapiens
ENTVVPPETYVKVAGH

SEQ ID NO: 96946 - protein, 16 aa, Homo Sapiens
NTVVPPETYVKVAGHL

SEQ ID NO: 96947 - protein, 16 aa, Homo Sapiens
TVVPPETYVKVAGHLR

SEQ ID NO: 96948 - protein, 16 aa, Homo Sapiens
VVPPETYVKVAGHLRS

SEQ ID NO: 96949 - protein, 16 aa, Homo Sapiens
VPPETYVKVAGHLRSF

SEQ ID NO: 96950 - protein, 16 aa, Homo Sapiens
PPETYVKVAGHLRSFQ

SEQ ID NO: 96951 - protein, 16 aa, Homo Sapiens
PETYVKVAGHLRSFQN

SEQ ID NO: 96952 - protein, 16 aa, Homo Sapiens
ETYVKVAGHLRSFQNK

SEQ ID NO: 96953 - protein, 16 aa, Homo Sapiens
TYVKVAGHLRSFQNKK

SEQ ID NO: 96954 - protein, 16 aa, Homo Sapiens
YVKVAGHLRSFQNKKS

SEQ ID NO: 96955 - protein, 16 aa, Homo Sapiens
VKVAGHLRSFQNKKSL

SEQ ID NO: 96956 - protein, 16 aa, Homo Sapiens
KVAGHLRSFQNKKSLV

SEQ ID NO: 96957 - protein, 16 aa, Homo Sapiens
VAGHLRSFQNKKSLVA

SEQ ID NO: 96958 - protein, 16 aa, Homo Sapiens
AGHLRSFQNKKSLVAF

SEQ ID NO: 96959 - protein, 16 aa, Homo Sapiens
GHLRSFQNKKSLVAFK

SEQ ID NO: 96960 - protein, 16 aa, Homo Sapiens
HLRSFQNKKSLVAFKI

SEQ ID NO: 96961 - protein, 16 aa, Homo Sapiens
LRSFQNKKSLVAFKIM

SEQ ID NO: 96962 - protein, 16 aa, Homo Sapiens
RSFQNKKSLVAFKIMP

SEQ ID NO: 96963 - protein, 16 aa, Homo Sapiens
SFQNKKSLVAFKIMPL

SEQ ID NO: 96964 - protein, 16 aa, Homo Sapiens
FQNKKSLVAFKIMPLE

SEQ ID NO: 96965 - protein, 16 aa, Homo Sapiens
QNKKSLVAFKIMPLED

SEQ ID NO: 96966 - protein, 16 aa, Homo Sapiens
NKKSLVAFKIMPLEDM

SEQ ID NO: 96967 - protein, 16 aa, Homo Sapiens
KKSLVAFKIMPLEDMN

SEQ ID NO: 96968 - protein, 16 aa, Homo Sapiens
KSLVAFKIMPLEDMNE

SEQ ID NO: 96969 - protein, 16 aa, Homo Sapiens
SLVAFKIMPLEDMNEF

SEQ ID NO: 96970 - protein, 16 aa, Homo Sapiens
LVAFKIMPLEDMNEFT

SEQ ID NO: 96971 - protein, 16 aa, Homo Sapiens
VAFKIMPLEDMNEFTT

SEQ ID NO: 96972 - protein, 16 aa, Homo Sapiens
AFKIMPLEDMNEFTTH

SEQ ID NO: 96973 - protein, 16 aa, Homo Sapiens
FKIMPLEDMNEFTTHI

SEQ ID NO: 96974 - protein, 16 aa, Homo Sapiens
KIMPLEDMNEFTTHIL

SEQ ID NO: 96975 - protein, 16 aa, Homo Sapiens
IMPLEDMNEFTTHILE

SEQ ID NO: 96976 - protein, 16 aa, Homo Sapiens
MPLEDMNEFTTHILEV

SEQ ID NO: 96977 - protein, 16 aa, Homo Sapiens
PLEDMNEFTTHILEVI

SEQ ID NO: 96978 - protein, 16 aa, Homo Sapiens
LEDMNEFTTHILEVIN

SEQ ID NO: 96979 - protein, 16 aa, Homo Sapiens
EDMNEFTTHILEVINA

SEQ ID NO: 96980 - protein, 16 aa, Homo Sapiens
DMNEFTTHILEVINAH

SEQ ID NO: 96981 - protein, 16 aa, Homo Sapiens
MNEFTTHILEVINAHM

SEQ ID NO: 96982 - protein, 16 aa, Homo Sapiens
NEFTTHILEVINAHMV

SEQ ID NO: 96983 - protein, 16 aa, Homo Sapiens
EFTTHILEVINAHMVL

SEQ ID NO: 96984 - protein, 16 aa, Homo Sapiens
FTTHILEVINAHMVLS

SEQ ID NO: 96985 - protein, 16 aa, Homo Sapiens
TTHILEVINAHMVLSK

SEQ ID NO: 96986 - protein, 16 aa, Homo Sapiens
THILEVINAHMVLSKA

SEQ ID NO: 96987 - protein, 16 aa, Homo Sapiens
HILEVINAHMVLSKAN

SEQ ID NO: 96988 - protein, 16 aa, Homo Sapiens
ILEVINAHMVLSKANS

SEQ ID NO: 96989 - protein, 16 aa, Homo Sapiens
LEVINAHMVLSKANSQ

SEQ ID NO: 96990 - protein, 16 aa, Homo Sapiens
EVINAHMVLSKANSQP

SEQ ID NO: 96991 - protein, 16 aa, Homo Sapiens
VINAHMVLSKANSQPS

SEQ ID NO: 96992 - protein, 16 aa, Homo Sapiens
INAHMVLSKANSQPSA

SEQ ID NO: 96993 - protein, 16 aa, Homo Sapiens
NAHMVLSKANSQPSAG

SEQ ID NO: 96994 - protein, 16 aa, Homo Sapiens
AHMVLSKANSQPSAGR

SEQ ID NO: 96995 - protein, 16 aa, Homo Sapiens
HMVLSKANSQPSAGRA

SEQ ID NO: 96996 - protein, 16 aa, Homo Sapiens
MVLSKANSQPSAGRAP

SEQ ID NO: 96997 - protein, 16 aa, Homo Sapiens
VLSKANSQPSAGRAPI

SEQ ID NO: 96998 - protein, 16 aa, Homo Sapiens
LSKANSQPSAGRAPIS

SEQ ID NO: 96999 - protein, 16 aa, Homo Sapiens
SKANSQPSAGRAPISN

SEQ ID NO: 97000 - protein, 16 aa, Homo Sapiens
KANSQPSAGRAPISNP

SEQ ID NO: 97001 - protein, 16 aa, Homo Sapiens
ANSQPSAGRAPISNPG

SEQ ID NO: 97002 - protein, 16 aa, Homo Sapiens
NSQPSAGRAPISNPGM

SEQ ID NO: 97003 - protein, 16 aa, Homo Sapiens
SQPSAGRAPISNPGMS

SEQ ID NO: 97004 - protein, 16 aa, Homo Sapiens
QPSAGRAPISNPGMSE

SEQ ID NO: 97005 - protein, 16 aa, Homo Sapiens
PSAGRAPISNPGMSEA

SEQ ID NO: 97006 - protein, 16 aa, Homo Sapiens
SAGRAPISNPGMSEAG

SEQ ID NO: 97007 - protein, 16 aa, Homo Sapiens
AGRAPISNPGMSEAGN

SEQ ID NO: 97008 - protein, 16 aa, Homo Sapiens
GRAPISNPGMSEAGNF

SEQ ID NO: 97009 - protein, 16 aa, Homo Sapiens
RAPISNPGMSEAGNFG

SEQ ID NO: 97010 - protein, 16 aa, Homo Sapiens
APISNPGMSEAGNFGG

SEQ ID NO: 97011 - protein, 16 aa, Homo Sapiens
PISNPGMSEAGNFGGN

SEQ ID NO: 97012 - protein, 16 aa, Homo Sapiens
ISNPGMSEAGNFGGNS

SEQ ID NO: 97013 - protein, 16 aa, Homo Sapiens
SNPGMSEAGNFGGNSF

SEQ ID NO: 97014 - protein, 16 aa, Homo Sapiens
NPGMSEAGNFGGNSFM

SEQ ID NO: 97015 - protein, 16 aa, Homo Sapiens
PGMSEAGNFGGNSFMP

SEQ ID NO: 97016 - protein, 16 aa, Homo Sapiens
GMSEAGNFGGNSFMPA

SEQ ID NO: 97017 - protein, 16 aa, Homo Sapiens
MSEAGNFGGNSFMPAN

SEQ ID NO: 97018 - protein, 16 aa, Homo Sapiens
SEAGNFGGNSFMPANG

SEQ ID NO: 97019 - protein, 16 aa, Homo Sapiens
EAGNFGGNSFMPANGL

SEQ ID NO: 97020 - protein, 16 aa, Homo Sapiens
AGNFGGNSFMPANGLT

SEQ ID NO: 97021 - protein, 16 aa, Homo Sapiens
GNFGGNSFMPANGLTV

SEQ ID NO: 97022 - protein, 16 aa, Homo Sapiens
NFGGNSFMPANGLTVA

SEQ ID NO: 97023 - protein, 16 aa, Homo Sapiens
FGGNSFMPANGLTVAQ

SEQ ID NO: 97024 - protein, 16 aa, Homo Sapiens
GGNSFMPANGLTVAQN

SEQ ID NO: 97025 - protein, 16 aa, Homo Sapiens
GNSFMPANGLTVAQNQ

SEQ ID NO: 97026 - protein, 16 aa, Homo Sapiens
NSFMPANGLTVAQNQV

SEQ ID NO: 97027 - protein, 16 aa, Homo Sapiens
SFMPANGLTVAQNQVL

SEQ ID NO: 97028 - protein, 16 aa, Homo Sapiens
FMPANGLTVAQNQVLN

SEQ ID NO: 97029 - protein, 16 aa, Homo Sapiens
MPANGLTVAQNQVLNL

SEQ ID NO: 97030 - protein, 16 aa, Homo Sapiens
PANGLTVAQNQVLNLI

SEQ ID NO: 97031 - protein, 16 aa, Homo Sapiens
ANGLTVAQNQVLNLIK

SEQ ID NO: 97032 - protein, 16 aa, Homo Sapiens
NGLTVAQNQVLNLIKA

SEQ ID NO: 97033 - protein, 16 aa, Homo Sapiens
GLTVAQNQVLNLIKAC

SEQ ID NO: 97034 - protein, 16 aa, Homo Sapiens
LTVAQNQVLNLIKACP

SEQ ID NO: 97035 - protein, 16 aa, Homo Sapiens
TVAQNQVLNLIKACPR

SEQ ID NO: 97036 - protein, 16 aa, Homo Sapiens
VAQNQVLNLIKACPRP

SEQ ID NO: 97037 - protein, 16 aa, Homo Sapiens
AQNQVLNLIKACPRPE

SEQ ID NO: 97038 - protein, 16 aa, Homo Sapiens
QNQVLNLIKACPRPEG

SEQ ID NO: 97039 - protein, 16 aa, Homo Sapiens
NQVLNLIKACPRPEGL

SEQ ID NO: 97040 - protein, 16 aa, Homo Sapiens
QVLNLIKACPRPEGLN

SEQ ID NO: 97041 - protein, 16 aa, Homo Sapiens
VLNLIKACPRPEGLNF

SEQ ID NO: 97042 - protein, 16 aa, Homo Sapiens
LNLIKACPRPEGLNFQ

SEQ ID NO: 97043 - protein, 16 aa, Homo Sapiens
NLIKACPRPEGLNFQD

SEQ ID NO: 97044 - protein, 16 aa, Homo Sapiens
LIKACPRPEGLNFQDL

SEQ ID NO: 97045 - protein, 16 aa, Homo Sapiens
IKACPRPEGLNFQDLK

SEQ ID NO: 97046 - protein, 16 aa, Homo Sapiens
KACPRPEGLNFQDLKN

SEQ ID NO: 97047 - protein, 16 aa, Homo Sapiens
ACPRPEGLNFQDLKNQ

SEQ ID NO: 97048 - protein, 16 aa, Homo Sapiens
CPRPEGLNFQDLKNQL

SEQ ID NO: 97049 - protein, 16 aa, Homo Sapiens
PRPEGLNFQDLKNQLK

SEQ ID NO: 97050 - protein, 16 aa, Homo Sapiens
RPEGLNFQDLKNQLKH

SEQ ID NO: 97051 - protein, 16 aa, Homo Sapiens
PEGLNFQDLKNQLKHM

SEQ ID NO: 97052 - protein, 16 aa, Homo Sapiens
EGLNFQDLKNQLKHMS

SEQ ID NO: 97053 - protein, 16 aa, Homo Sapiens
GLNFQDLKNQLKHMSV

SEQ ID NO: 97054 - protein, 16 aa, Homo Sapiens
LNFQDLKNQLKHMSVS

SEQ ID NO: 97055 - protein, 16 aa, Homo Sapiens
NFQDLKNQLKHMSVSS

SEQ ID NO: 97056 - protein, 16 aa, Homo Sapiens
FQDLKNQLKHMSVSSI

SEQ ID NO: 97057 - protein, 16 aa, Homo Sapiens
QDLKNQLKHMSVSSIK

SEQ ID NO: 97058 - protein, 16 aa, Homo Sapiens
DLKNQLKHMSVSSIKQ

SEQ ID NO: 97059 - protein, 16 aa, Homo Sapiens
LKNQLKHMSVSSIKQA

SEQ ID NO: 97060 - protein, 16 aa, Homo Sapiens
KNQLKHMSVSSIKQAV

SEQ ID NO: 97061 - protein, 16 aa, Homo Sapiens
NQLKHMSVSSIKQAVD

SEQ ID NO: 97062 - protein, 16 aa, Homo Sapiens
QLKHMSVSSIKQAVDF

SEQ ID NO: 97063 - protein, 16 aa, Homo Sapiens
LKHMSVSSIKQAVDFL

SEQ ID NO: 97064 - protein, 16 aa, Homo Sapiens
KHMSVSSIKQAVDFLS

SEQ ID NO: 97065 - protein, 16 aa, Homo Sapiens
HMSVSSIKQAVDFLSN

SEQ ID NO: 97066 - protein, 16 aa, Homo Sapiens
MSVSSIKQAVDFLSNE

SEQ ID NO: 97067 - protein, 16 aa, Homo Sapiens
SVSSIKQAVDFLSNEG

SEQ ID NO: 97068 - protein, 16 aa, Homo Sapiens
VSSIKQAVDFLSNEGH

SEQ ID NO: 97069 - protein, 16 aa, Homo Sapiens
SSIKQAVDFLSNEGHI

SEQ ID NO: 97070 - protein, 16 aa, Homo Sapiens
SIKQAVDFLSNEGHIY

SEQ ID NO: 97071 - protein, 16 aa, Homo Sapiens
IKQAVDFLSNEGHIYS

SEQ ID NO: 97072 - protein, 16 aa, Homo Sapiens
KQAVDFLSNEGHIYST

SEQ ID NO: 97073 - protein, 16 aa, Homo Sapiens
QAVDFLSNEGHIYSTV

SEQ ID NO: 97074 - protein, 16 aa, Homo Sapiens
AVDFLSNEGHIYSTVD

SEQ ID NO: 97075 - protein, 16 aa, Homo Sapiens
VDFLSNEGHIYSTVDD

SEQ ID NO: 97076 - protein, 16 aa, Homo Sapiens
DFLSNEGHIYSTVDDD

SEQ ID NO: 97077 - protein, 16 aa, Homo Sapiens
FLSNEGHIYSTVDDDH

SEQ ID NO: 97078 - protein, 16 aa, Homo Sapiens
LSNEGHIYSTVDDDHF

SEQ ID NO: 97079 - protein, 16 aa, Homo Sapiens
SNEGHIYSTVDDDHFK

SEQ ID NO: 97080 - protein, 16 aa, Homo Sapiens
NEGHIYSTVDDDHFKS

SEQ ID NO: 97081 - protein, 16 aa, Homo Sapiens
EGHIYSTVDDDHFKST

SEQ ID NO: 97082 - protein, 16 aa, Homo Sapiens
GHIYSTVDDDHFKSTD

SEQ ID NO: 97083 - protein, 16 aa, Homo Sapiens
HIYSTVDDDHFKSTDA

SEQ ID NO: 97084 - protein, 16 aa, Homo Sapiens
IYSTVDDDHFKSTDAE

SEQ ID NO: 97085 - protein, 165 aa, Homo Sapiens
MEMFQGLLLLLLLSMGGTWASKEPLRPRCRPINATLAVEKEGCPVCITVNTTICAGYCPTMTRVLQGVLPALPQVVCNYRDVRFESIRLPGCPRGVNPVVSYAVALSCQCALCRRSTTDCGGPKDHPLTCDDPRFQDSSSSKAPPPSLPSPSRLPGPSDTPILPQ

SEQ ID NO: 97086 - protein, 8 aa, Homo Sapiens
MEMFQGLL

SEQ ID NO: 97087 - protein, 8 aa, Homo Sapiens
EMFQGLLL

SEQ ID NO: 97088 - protein, 8 aa, Homo Sapiens
FQGLLLLL

SEQ ID NO: 97089 - protein, 8 aa, Homo Sapiens
GLLLLLLL

SEQ ID NO: 97090 - protein, 8 aa, Homo Sapiens
LLLLLLLS

SEQ ID NO: 97091 - protein, 8 aa, Homo Sapiens
LLLLLLSM

SEQ ID NO: 97092 - protein, 8 aa, Homo Sapiens
LLLSMGGT

SEQ ID NO: 97093 - protein, 8 aa, Homo Sapiens
LLSMGGTW

SEQ ID NO: 97094 - protein, 8 aa, Homo Sapiens
SMGGTWAS

SEQ ID NO: 97095 - protein, 8 aa, Homo Sapiens
WASKEPLR

SEQ ID NO: 97096 - protein, 8 aa, Homo Sapiens
RPRCRPIN

SEQ ID NO: 97097 - protein, 8 aa, Homo Sapiens
RPINATLA

SEQ ID NO: 97098 - protein, 8 aa, Homo Sapiens
PINATLAV

SEQ ID NO: 97099 - protein, 8 aa, Homo Sapiens
NATLAVEK

SEQ ID NO: 97100 - protein, 8 aa, Homo Sapiens
VEKEGCPV

SEQ ID NO: 97101 - protein, 8 aa, Homo Sapiens
TVNTTICA

SEQ ID NO: 97102 - protein, 8 aa, Homo Sapiens
NTTICAGY

SEQ ID NO: 97103 - protein, 8 aa, Homo Sapiens
GYCPTMTR

SEQ ID NO: 97104 - protein, 8 aa, Homo Sapiens
YCPTMTRV

SEQ ID NO: 97105 - protein, 8 aa, Homo Sapiens
CPTMTRVL

SEQ ID NO: 97106 - protein, 8 aa, Homo Sapiens
MTRVLQGV

SEQ ID NO: 97107 - protein, 8 aa, Homo Sapiens
VLQGVLPA

SEQ ID NO: 97108 - protein, 8 aa, Homo Sapiens
LQGVLPAL

SEQ ID NO: 97109 - protein, 8 aa, Homo Sapiens
VLPALPQV

SEQ ID NO: 97110 - protein, 8 aa, Homo Sapiens
LPALPQVV

SEQ ID NO: 97111 - protein, 8 aa, Homo Sapiens
LPQVVCNY

SEQ ID NO: 97112 - protein, 8 aa, Homo Sapiens
PQVVCNYR

SEQ ID NO: 97113 - protein, 8 aa, Homo Sapiens
DVRFESIR

SEQ ID NO: 97114 - protein, 8 aa, Homo Sapiens
LPGCPRGV

SEQ ID NO: 97115 - protein, 8 aa, Homo Sapiens
CPRGVNPV

SEQ ID NO: 97116 - protein, 8 aa, Homo Sapiens
GVNPVVSY

SEQ ID NO: 97117 - protein, 8 aa, Homo Sapiens
NPVVSYAV

SEQ ID NO: 97118 - protein, 8 aa, Homo Sapiens
VVSYAVAL

SEQ ID NO: 97119 - protein, 8 aa, Homo Sapiens
ALSCQCAL

SEQ ID NO: 97120 - protein, 8 aa, Homo Sapiens
CQCALCRR

SEQ ID NO: 97121 - protein, 8 aa, Homo Sapiens
ALCRRSTT

SEQ ID NO: 97122 - protein, 8 aa, Homo Sapiens
TTDCGGPK

SEQ ID NO: 97123 - protein, 8 aa, Homo Sapiens
SLPSPSRL

SEQ ID NO: 97124 - protein, 8 aa, Homo Sapiens
GPSDTPIL

SEQ ID NO: 97125 - protein, 9 aa, Homo Sapiens
MEMFQGLLL

SEQ ID NO: 97126 - protein, 9 aa, Homo Sapiens
EMFQGLLLL

SEQ ID NO: 97127 - protein, 9 aa, Homo Sapiens
MFQGLLLLL

SEQ ID NO: 97128 - protein, 9 aa, Homo Sapiens
FQGLLLLLL

SEQ ID NO: 97129 - protein, 9 aa, Homo Sapiens
GLLLLLLLS

SEQ ID NO: 97130 - protein, 9 aa, Homo Sapiens
LLLLLLLSM

SEQ ID NO: 97131 - protein, 9 aa, Homo Sapiens
LLLLSMGGT

SEQ ID NO: 97132 - protein, 9 aa, Homo Sapiens
LLLSMGGTW

SEQ ID NO: 97133 - protein, 9 aa, Homo Sapiens
LLSMGGTWA

SEQ ID NO: 97134 - protein, 9 aa, Homo Sapiens
SMGGTWASK

SEQ ID NO: 97135 - protein, 9 aa, Homo Sapiens
TWASKEPLR

SEQ ID NO: 97136 - protein, 9 aa, Homo Sapiens
ASKEPLRPR

SEQ ID NO: 97137 - protein, 9 aa, Homo Sapiens
RPRCRPINA

SEQ ID NO: 97138 - protein, 9 aa, Homo Sapiens
RPINATLAV

SEQ ID NO: 97139 - protein, 9 aa, Homo Sapiens
AVEKEGCPV

SEQ ID NO: 97140 - protein, 9 aa, Homo Sapiens
EGCPVCITV

SEQ ID NO: 97141 - protein, 9 aa, Homo Sapiens
CPVCITVNT

SEQ ID NO: 97142 - protein, 9 aa, Homo Sapiens
AGYCPTMTR

SEQ ID NO: 97143 - protein, 9 aa, Homo Sapiens
GYCPTMTRV

SEQ ID NO: 97144 - protein, 9 aa, Homo Sapiens
TMTRVLQGV

SEQ ID NO: 97145 - protein, 9 aa, Homo Sapiens
RVLQGVLPA

SEQ ID NO: 97146 - protein, 9 aa, Homo Sapiens
VLQGVLPAL

SEQ ID NO: 97147 - protein, 9 aa, Homo Sapiens
GVLPALPQV

SEQ ID NO: 97148 - protein, 9 aa, Homo Sapiens
VLPALPQVV

SEQ ID NO: 97149 - protein, 9 aa, Homo Sapiens
LPALPQVVC

SEQ ID NO: 97150 - protein, 9 aa, Homo Sapiens
ALPQVVCNY

SEQ ID NO: 97151 - protein, 9 aa, Homo Sapiens
LPQVVCNYR

SEQ ID NO: 97152 - protein, 9 aa, Homo Sapiens
QVVCNYRDV

SEQ ID NO: 97153 - protein, 9 aa, Homo Sapiens
VVCNYRDVR

SEQ ID NO: 97154 - protein, 9 aa, Homo Sapiens
NYRDVRFES

SEQ ID NO: 97155 - protein, 9 aa, Homo Sapiens
SIRLPGCPR

SEQ ID NO: 97156 - protein, 9 aa, Homo Sapiens
RLPGCPRGV

SEQ ID NO: 97157 - protein, 9 aa, Homo Sapiens
GCPRGVNPV

SEQ ID NO: 97158 - protein, 9 aa, Homo Sapiens
CPRGVNPVV

SEQ ID NO: 97159 - protein, 9 aa, Homo Sapiens
RGVNPVVSY

SEQ ID NO: 97160 - protein, 9 aa, Homo Sapiens
GVNPVVSYA

SEQ ID NO: 97161 - protein, 9 aa, Homo Sapiens
NPVVSYAVA

SEQ ID NO: 97162 - protein, 9 aa, Homo Sapiens
PVVSYAVAL

SEQ ID NO: 97163 - protein, 9 aa, Homo Sapiens
LSCQCALCR

SEQ ID NO: 97164 - protein, 9 aa, Homo Sapiens
STTDCGGPK

SEQ ID NO: 97165 - protein, 9 aa, Homo Sapiens
RFQDSSSSK

SEQ ID NO: 97166 - protein, 9 aa, Homo Sapiens
FQDSSSSKA

SEQ ID NO: 97167 - protein, 9 aa, Homo Sapiens
LPSPSRLPG

SEQ ID NO: 97168 - protein, 9 aa, Homo Sapiens
SPSRLPGPS

SEQ ID NO: 97169 - protein, 9 aa, Homo Sapiens
LPGPSDTPI

SEQ ID NO: 97170 - protein, 10 aa, Homo Sapiens
MEMFQGLLLL

SEQ ID NO: 97171 - protein, 10 aa, Homo Sapiens
EMFQGLLLLL

SEQ ID NO: 97172 - protein, 10 aa, Homo Sapiens
MFQGLLLLLL

SEQ ID NO: 97173 - protein, 10 aa, Homo Sapiens
FQGLLLLLLL

SEQ ID NO: 97174 - protein, 10 aa, Homo Sapiens
GLLLLLLLSM

SEQ ID NO: 97175 - protein, 10 aa, Homo Sapiens
LLLLLLLSMG

SEQ ID NO: 97176 - protein, 10 aa, Homo Sapiens
LLLLLLSMGG

SEQ ID NO: 97177 - protein, 10 aa, Homo Sapiens
LLLLLSMGGT

SEQ ID NO: 97178 - protein, 10 aa, Homo Sapiens
LLLSMGGTWA

SEQ ID NO: 97179 - protein, 10 aa, Homo Sapiens
LLSMGGTWAS

SEQ ID NO: 97180 - protein, 10 aa, Homo Sapiens
LSMGGTWASK

SEQ ID NO: 97181 - protein, 10 aa, Homo Sapiens
GTWASKEPLR

SEQ ID NO: 97182 - protein, 10 aa, Homo Sapiens
EPLRPRCRPI

SEQ ID NO: 97183 - protein, 10 aa, Homo Sapiens
RPRCRPINAT

SEQ ID NO: 97184 - protein, 10 aa, Homo Sapiens
RCRPINATLA

SEQ ID NO: 97185 - protein, 10 aa, Homo Sapiens
RPINATLAVE

SEQ ID NO: 97186 - protein, 10 aa, Homo Sapiens
PINATLAVEK

SEQ ID NO: 97187 - protein, 10 aa, Homo Sapiens
LAVEKEGCPV

SEQ ID NO: 97188 - protein, 10 aa, Homo Sapiens
CPVCITVNTT

SEQ ID NO: 97189 - protein, 10 aa, Homo Sapiens
TVNTTICAGY

SEQ ID NO: 97190 - protein, 10 aa, Homo Sapiens
TTICAGYCPT

SEQ ID NO: 97191 - protein, 10 aa, Homo Sapiens
TICAGYCPTM

SEQ ID NO: 97192 - protein, 10 aa, Homo Sapiens
CAGYCPTMTR

SEQ ID NO: 97193 - protein, 10 aa, Homo Sapiens
AGYCPTMTRV

SEQ ID NO: 97194 - protein, 10 aa, Homo Sapiens
GYCPTMTRVL

SEQ ID NO: 97195 - protein, 10 aa, Homo Sapiens
PTMTRVLQGV

SEQ ID NO: 97196 - protein, 10 aa, Homo Sapiens
TMTRVLQGVL

SEQ ID NO: 97197 - protein, 10 aa, Homo Sapiens
RVLQGVLPAL

SEQ ID NO: 97198 - protein, 10 aa, Homo Sapiens
GVLPALPQVV

SEQ ID NO: 97199 - protein, 10 aa, Homo Sapiens
VLPALPQVVC

SEQ ID NO: 97200 - protein, 10 aa, Homo Sapiens
LPALPQVVCN

SEQ ID NO: 97201 - protein, 10 aa, Homo Sapiens
ALPQVVCNYR

SEQ ID NO: 97202 - protein, 10 aa, Homo Sapiens
QVVCNYRDVR

SEQ ID NO: 97203 - protein, 10 aa, Homo Sapiens
NYRDVRFESI

SEQ ID NO: 97204 - protein, 10 aa, Homo Sapiens
ESIRLPGCPR

SEQ ID NO: 97205 - protein, 10 aa, Homo Sapiens
GCPRGVNPVV

SEQ ID NO: 97206 - protein, 10 aa, Homo Sapiens
GVNPVVSYAV

SEQ ID NO: 97207 - protein, 10 aa, Homo Sapiens
NPVVSYAVAL

SEQ ID NO: 97208 - protein, 10 aa, Homo Sapiens
YAVALSCQCA

SEQ ID NO: 97209 - protein, 10 aa, Homo Sapiens
AVALSCQCAL

SEQ ID NO: 97210 - protein, 10 aa, Homo Sapiens
ALSCQCALCR

SEQ ID NO: 97211 - protein, 10 aa, Homo Sapiens
LSCQCALCRR

SEQ ID NO: 97212 - protein, 10 aa, Homo Sapiens
RSTTDCGGPK

SEQ ID NO: 97213 - protein, 10 aa, Homo Sapiens
HPLTCDDPRF

SEQ ID NO: 97214 - protein, 10 aa, Homo Sapiens
PPSLPSPSRL

SEQ ID NO: 97215 - protein, 10 aa, Homo Sapiens
RLPGPSDTPI

SEQ ID NO: 97216 - protein, 10 aa, Homo Sapiens
LPGPSDTPIL

SEQ ID NO: 97217 - protein, 11 aa, Homo Sapiens
MEMFQGLLLLL

SEQ ID NO: 97218 - protein, 11 aa, Homo Sapiens
EMFQGLLLLLL

SEQ ID NO: 97219 - protein, 11 aa, Homo Sapiens
MFQGLLLLLLL

SEQ ID NO: 97220 - protein, 11 aa, Homo Sapiens
FQGLLLLLLLS

SEQ ID NO: 97221 - protein, 11 aa, Homo Sapiens
LLLLLLSMGGT

SEQ ID NO: 97222 - protein, 11 aa, Homo Sapiens
LLLLSMGGTWA

SEQ ID NO: 97223 - protein, 11 aa, Homo Sapiens
LLLSMGGTWAS

SEQ ID NO: 97224 - protein, 11 aa, Homo Sapiens
LLSMGGTWASK

SEQ ID NO: 97225 - protein, 11 aa, Homo Sapiens
ASKEPLRPRCR

SEQ ID NO: 97226 - protein, 11 aa, Homo Sapiens
RPRCRPINATL

SEQ ID NO: 97227 - protein, 11 aa, Homo Sapiens
RCRPINATLAV

SEQ ID NO: 97228 - protein, 11 aa, Homo Sapiens
TLAVEKEGCPV

SEQ ID NO: 97229 - protein, 11 aa, Homo Sapiens
CPVCITVNTTI

SEQ ID NO: 97230 - protein, 11 aa, Homo Sapiens
ITVNTTICAGY

SEQ ID NO: 97231 - protein, 11 aa, Homo Sapiens
NTTICAGYCPT

SEQ ID NO: 97232 - protein, 11 aa, Homo Sapiens
TTICAGYCPTM

SEQ ID NO: 97233 - protein, 11 aa, Homo Sapiens
CAGYCPTMTRV

SEQ ID NO: 97234 - protein, 11 aa, Homo Sapiens
CPTMTRVLQGV

SEQ ID NO: 97235 - protein, 11 aa, Homo Sapiens
MTRVLQGVLPA

SEQ ID NO: 97236 - protein, 11 aa, Homo Sapiens
VLQGVLPALPQ

SEQ ID NO: 97237 - protein, 11 aa, Homo Sapiens
LQGVLPALPQV

SEQ ID NO: 97238 - protein, 11 aa, Homo Sapiens
QGVLPALPQVV

SEQ ID NO: 97239 - protein, 11 aa, Homo Sapiens
LPALPQVVCNY

SEQ ID NO: 97240 - protein, 11 aa, Homo Sapiens
LPQVVCNYRDV

SEQ ID NO: 97241 - protein, 11 aa, Homo Sapiens
QVVCNYRDVRF

SEQ ID NO: 97242 - protein, 11 aa, Homo Sapiens
NYRDVRFESIR

SEQ ID NO: 97243 - protein, 11 aa, Homo Sapiens
YRDVRFESIRL

SEQ ID NO: 97244 - protein, 11 aa, Homo Sapiens
SIRLPGCPRGV

SEQ ID NO: 97245 - protein, 11 aa, Homo Sapiens
LPGCPRGVNPV

SEQ ID NO: 97246 - protein, 11 aa, Homo Sapiens
CPRGVNPVVSY

SEQ ID NO: 97247 - protein, 11 aa, Homo Sapiens
RGVNPVVSYAV

SEQ ID NO: 97248 - protein, 11 aa, Homo Sapiens
GVNPVVSYAVA

SEQ ID NO: 97249 - protein, 11 aa, Homo Sapiens
NPVVSYAVALS

SEQ ID NO: 97250 - protein, 11 aa, Homo Sapiens
YAVALSCQCAL

SEQ ID NO: 97251 - protein, 11 aa, Homo Sapiens
VALSCQCALCR

SEQ ID NO: 97252 - protein, 11 aa, Homo Sapiens
ALSCQCALCRR

SEQ ID NO: 97253 - protein, 11 aa, Homo Sapiens
RRSTTDCGGPK

SEQ ID NO: 97254 - protein, 11 aa, Homo Sapiens
FQDSSSSKAPP

SEQ ID NO: 97255 - protein, 11 aa, Homo Sapiens
LPSPSRLPGPS

SEQ ID NO: 97256 - protein, 11 aa, Homo Sapiens
RLPGPSDTPIL

SEQ ID NO: 97257 - protein, 13 aa, Homo Sapiens
MEMFQGLLLLLLL

SEQ ID NO: 97258 - protein, 13 aa, Homo Sapiens
EMFQGLLLLLLLS

SEQ ID NO: 97259 - protein, 13 aa, Homo Sapiens
MFQGLLLLLLLSM

SEQ ID NO: 97260 - protein, 13 aa, Homo Sapiens
FQGLLLLLLLSMG

SEQ ID NO: 97261 - protein, 13 aa, Homo Sapiens
QGLLLLLLLSMGG

SEQ ID NO: 97262 - protein, 13 aa, Homo Sapiens
GLLLLLLLSMGGT

SEQ ID NO: 97263 - protein, 13 aa, Homo Sapiens
LLLLLLLSMGGTW

SEQ ID NO: 97264 - protein, 13 aa, Homo Sapiens
LLLLLLSMGGTWA

SEQ ID NO: 97265 - protein, 13 aa, Homo Sapiens
LLLLLSMGGTWAS

SEQ ID NO: 97266 - protein, 13 aa, Homo Sapiens
LLLLSMGGTWASK

SEQ ID NO: 97267 - protein, 13 aa, Homo Sapiens
LLLSMGGTWASKE

SEQ ID NO: 97268 - protein, 13 aa, Homo Sapiens
LLSMGGTWASKEP

SEQ ID NO: 97269 - protein, 13 aa, Homo Sapiens
LSMGGTWASKEPL

SEQ ID NO: 97270 - protein, 13 aa, Homo Sapiens
SMGGTWASKEPLR

SEQ ID NO: 97271 - protein, 13 aa, Homo Sapiens
MGGTWASKEPLRP

SEQ ID NO: 97272 - protein, 13 aa, Homo Sapiens
GGTWASKEPLRPR

SEQ ID NO: 97273 - protein, 13 aa, Homo Sapiens
GTWASKEPLRPRC

SEQ ID NO: 97274 - protein, 13 aa, Homo Sapiens
TWASKEPLRPRCR

SEQ ID NO: 97275 - protein, 13 aa, Homo Sapiens
WASKEPLRPRCRP

SEQ ID NO: 97276 - protein, 13 aa, Homo Sapiens
ASKEPLRPRCRPI

SEQ ID NO: 97277 - protein, 13 aa, Homo Sapiens
SKEPLRPRCRPIN

SEQ ID NO: 97278 - protein, 13 aa, Homo Sapiens
KEPLRPRCRPINA

SEQ ID NO: 97279 - protein, 13 aa, Homo Sapiens
EPLRPRCRPINAT

SEQ ID NO: 97280 - protein, 13 aa, Homo Sapiens
PLRPRCRPINATL

SEQ ID NO: 97281 - protein, 13 aa, Homo Sapiens
LRPRCRPINATLA

SEQ ID NO: 97282 - protein, 13 aa, Homo Sapiens
RPRCRPINATLAV

SEQ ID NO: 97283 - protein, 13 aa, Homo Sapiens
PRCRPINATLAVE

SEQ ID NO: 97284 - protein, 13 aa, Homo Sapiens
RCRPINATLAVEK

SEQ ID NO: 97285 - protein, 13 aa, Homo Sapiens
CRPINATLAVEKE

SEQ ID NO: 97286 - protein, 13 aa, Homo Sapiens
RPINATLAVEKEG

SEQ ID NO: 97287 - protein, 13 aa, Homo Sapiens
PINATLAVEKEGC

SEQ ID NO: 97288 - protein, 13 aa, Homo Sapiens
INATLAVEKEGCP

SEQ ID NO: 97289 - protein, 13 aa, Homo Sapiens
NATLAVEKEGCPV

SEQ ID NO: 97290 - protein, 13 aa, Homo Sapiens
ATLAVEKEGCPVC

SEQ ID NO: 97291 - protein, 13 aa, Homo Sapiens
TLAVEKEGCPVCI

SEQ ID NO: 97292 - protein, 13 aa, Homo Sapiens
LAVEKEGCPVCIT

SEQ ID NO: 97293 - protein, 13 aa, Homo Sapiens
AVEKEGCPVCITV

SEQ ID NO: 97294 - protein, 13 aa, Homo Sapiens
VEKEGCPVCITVN

SEQ ID NO: 97295 - protein, 13 aa, Homo Sapiens
EKEGCPVCITVNT

SEQ ID NO: 97296 - protein, 13 aa, Homo Sapiens
KEGCPVCITVNTT

SEQ ID NO: 97297 - protein, 13 aa, Homo Sapiens
EGCPVCITVNTTI

SEQ ID NO: 97298 - protein, 13 aa, Homo Sapiens
GCPVCITVNTTIC

SEQ ID NO: 97299 - protein, 13 aa, Homo Sapiens
CPVCITVNTTICA

SEQ ID NO: 97300 - protein, 13 aa, Homo Sapiens
PVCITVNTTICAG

SEQ ID NO: 97301 - protein, 13 aa, Homo Sapiens
VCITVNTTICAGY

SEQ ID NO: 97302 - protein, 13 aa, Homo Sapiens
CITVNTTICAGYC

SEQ ID NO: 97303 - protein, 13 aa, Homo Sapiens
ITVNTTICAGYCP

SEQ ID NO: 97304 - protein, 13 aa, Homo Sapiens
TVNTTICAGYCPT

SEQ ID NO: 97305 - protein, 13 aa, Homo Sapiens
VNTTICAGYCPTM

SEQ ID NO: 97306 - protein, 13 aa, Homo Sapiens
NTTICAGYCPTMT

SEQ ID NO: 97307 - protein, 13 aa, Homo Sapiens
TTICAGYCPTMTR

SEQ ID NO: 97308 - protein, 13 aa, Homo Sapiens
TICAGYCPTMTRV

SEQ ID NO: 97309 - protein, 13 aa, Homo Sapiens
ICAGYCPTMTRVL

SEQ ID NO: 97310 - protein, 13 aa, Homo Sapiens
CAGYCPTMTRVLQ

SEQ ID NO: 97311 - protein, 13 aa, Homo Sapiens
AGYCPTMTRVLQG

SEQ ID NO: 97312 - protein, 13 aa, Homo Sapiens
GYCPTMTRVLQGV

SEQ ID NO: 97313 - protein, 13 aa, Homo Sapiens
YCPTMTRVLQGVL

SEQ ID NO: 97314 - protein, 13 aa, Homo Sapiens
CPTMTRVLQGVLP

SEQ ID NO: 97315 - protein, 13 aa, Homo Sapiens
PTMTRVLQGVLPA

SEQ ID NO: 97316 - protein, 13 aa, Homo Sapiens
TMTRVLQGVLPAL

SEQ ID NO: 97317 - protein, 13 aa, Homo Sapiens
MTRVLQGVLPALP

SEQ ID NO: 97318 - protein, 13 aa, Homo Sapiens
TRVLQGVLPALPQ

SEQ ID NO: 97319 - protein, 13 aa, Homo Sapiens
RVLQGVLPALPQV

SEQ ID NO: 97320 - protein, 13 aa, Homo Sapiens
VLQGVLPALPQVV

SEQ ID NO: 97321 - protein, 13 aa, Homo Sapiens
LQGVLPALPQVVC

SEQ ID NO: 97322 - protein, 13 aa, Homo Sapiens
QGVLPALPQVVCN

SEQ ID NO: 97323 - protein, 13 aa, Homo Sapiens
GVLPALPQVVCNY

SEQ ID NO: 97324 - protein, 13 aa, Homo Sapiens
VLPALPQVVCNYR

SEQ ID NO: 97325 - protein, 13 aa, Homo Sapiens
LPALPQVVCNYRD

SEQ ID NO: 97326 - protein, 13 aa, Homo Sapiens
PALPQVVCNYRDV

SEQ ID NO: 97327 - protein, 13 aa, Homo Sapiens
ALPQVVCNYRDVR

SEQ ID NO: 97328 - protein, 13 aa, Homo Sapiens
LPQVVCNYRDVRF

SEQ ID NO: 97329 - protein, 13 aa, Homo Sapiens
PQVVCNYRDVRFE

SEQ ID NO: 97330 - protein, 13 aa, Homo Sapiens
QVVCNYRDVRFES

SEQ ID NO: 97331 - protein, 13 aa, Homo Sapiens
VVCNYRDVRFESI

SEQ ID NO: 97332 - protein, 13 aa, Homo Sapiens
VCNYRDVRFESIR

SEQ ID NO: 97333 - protein, 13 aa, Homo Sapiens
CNYRDVRFESIRL

SEQ ID NO: 97334 - protein, 13 aa, Homo Sapiens
NYRDVRFESIRLP

SEQ ID NO: 97335 - protein, 13 aa, Homo Sapiens
YRDVRFESIRLPG

SEQ ID NO: 97336 - protein, 13 aa, Homo Sapiens
RDVRFESIRLPGC

SEQ ID NO: 97337 - protein, 13 aa, Homo Sapiens
DVRFESIRLPGCP

SEQ ID NO: 97338 - protein, 13 aa, Homo Sapiens
VRFESIRLPGCPR

SEQ ID NO: 97339 - protein, 13 aa, Homo Sapiens
RFESIRLPGCPRG

SEQ ID NO: 97340 - protein, 13 aa, Homo Sapiens
FESIRLPGCPRGV

SEQ ID NO: 97341 - protein, 13 aa, Homo Sapiens
ESIRLPGCPRGVN

SEQ ID NO: 97342 - protein, 13 aa, Homo Sapiens
SIRLPGCPRGVNP

SEQ ID NO: 97343 - protein, 13 aa, Homo Sapiens
IRLPGCPRGVNPV

SEQ ID NO: 97344 - protein, 13 aa, Homo Sapiens
RLPGCPRGVNPVV

SEQ ID NO: 97345 - protein, 13 aa, Homo Sapiens
LPGCPRGVNPVVS

SEQ ID NO: 97346 - protein, 13 aa, Homo Sapiens
PGCPRGVNPVVSY

SEQ ID NO: 97347 - protein, 13 aa, Homo Sapiens
GCPRGVNPVVSYA

SEQ ID NO: 97348 - protein, 13 aa, Homo Sapiens
CPRGVNPVVSYAV

SEQ ID NO: 97349 - protein, 13 aa, Homo Sapiens
PRGVNPVVSYAVA

SEQ ID NO: 97350 - protein, 13 aa, Homo Sapiens
RGVNPVVSYAVAL

SEQ ID NO: 97351 - protein, 13 aa, Homo Sapiens
GVNPVVSYAVALS

SEQ ID NO: 97352 - protein, 13 aa, Homo Sapiens
VNPVVSYAVALSC

SEQ ID NO: 97353 - protein, 13 aa, Homo Sapiens
NPVVSYAVALSCQ

SEQ ID NO: 97354 - protein, 13 aa, Homo Sapiens
PVVSYAVALSCQC

SEQ ID NO: 97355 - protein, 13 aa, Homo Sapiens
VVSYAVALSCQCA

SEQ ID NO: 97356 - protein, 13 aa, Homo Sapiens
VSYAVALSCQCAL

SEQ ID NO: 97357 - protein, 13 aa, Homo Sapiens
SYAVALSCQCALC

SEQ ID NO: 97358 - protein, 13 aa, Homo Sapiens
YAVALSCQCALCR

SEQ ID NO: 97359 - protein, 13 aa, Homo Sapiens
AVALSCQCALCRR

SEQ ID NO: 97360 - protein, 13 aa, Homo Sapiens
VALSCQCALCRRS

SEQ ID NO: 97361 - protein, 13 aa, Homo Sapiens
ALSCQCALCRRST

SEQ ID NO: 97362 - protein, 13 aa, Homo Sapiens
LSCQCALCRRSTT

SEQ ID NO: 97363 - protein, 13 aa, Homo Sapiens
SCQCALCRRSTTD

SEQ ID NO: 97364 - protein, 13 aa, Homo Sapiens
CQCALCRRSTTDC

SEQ ID NO: 97365 - protein, 13 aa, Homo Sapiens
QCALCRRSTTDCG

SEQ ID NO: 97366 - protein, 13 aa, Homo Sapiens
CALCRRSTTDCGG

SEQ ID NO: 97367 - protein, 13 aa, Homo Sapiens
ALCRRSTTDCGGP

SEQ ID NO: 97368 - protein, 13 aa, Homo Sapiens
LCRRSTTDCGGPK

SEQ ID NO: 97369 - protein, 13 aa, Homo Sapiens
CRRSTTDCGGPKD

SEQ ID NO: 97370 - protein, 13 aa, Homo Sapiens
RRSTTDCGGPKDH

SEQ ID NO: 97371 - protein, 13 aa, Homo Sapiens
RSTTDCGGPKDHP

SEQ ID NO: 97372 - protein, 13 aa, Homo Sapiens
STTDCGGPKDHPL

SEQ ID NO: 97373 - protein, 13 aa, Homo Sapiens
TTDCGGPKDHPLT

SEQ ID NO: 97374 - protein, 13 aa, Homo Sapiens
TDCGGPKDHPLTC

SEQ ID NO: 97375 - protein, 13 aa, Homo Sapiens
DCGGPKDHPLTCD

SEQ ID NO: 97376 - protein, 13 aa, Homo Sapiens
CGGPKDHPLTCDD

SEQ ID NO: 97377 - protein, 13 aa, Homo Sapiens
GGPKDHPLTCDDP

SEQ ID NO: 97378 - protein, 13 aa, Homo Sapiens
GPKDHPLTCDDPR

SEQ ID NO: 97379 - protein, 13 aa, Homo Sapiens
PKDHPLTCDDPRF

SEQ ID NO: 97380 - protein, 13 aa, Homo Sapiens
KDHPLTCDDPRFQ

SEQ ID NO: 97381 - protein, 13 aa, Homo Sapiens
DHPLTCDDPRFQD

SEQ ID NO: 97382 - protein, 13 aa, Homo Sapiens
HPLTCDDPRFQDS

SEQ ID NO: 97383 - protein, 13 aa, Homo Sapiens
PLTCDDPRFQDSS

SEQ ID NO: 97384 - protein, 13 aa, Homo Sapiens
LTCDDPRFQDSSS

SEQ ID NO: 97385 - protein, 13 aa, Homo Sapiens
TCDDPRFQDSSSS

SEQ ID NO: 97386 - protein, 13 aa, Homo Sapiens
CDDPRFQDSSSSK

SEQ ID NO: 97387 - protein, 13 aa, Homo Sapiens
DDPRFQDSSSSKA

SEQ ID NO: 97388 - protein, 13 aa, Homo Sapiens
DPRFQDSSSSKAP

SEQ ID NO: 97389 - protein, 13 aa, Homo Sapiens
PRFQDSSSSKAPP

SEQ ID NO: 97390 - protein, 13 aa, Homo Sapiens
RFQDSSSSKAPPP

SEQ ID NO: 97391 - protein, 13 aa, Homo Sapiens
FQDSSSSKAPPPS

SEQ ID NO: 97392 - protein, 13 aa, Homo Sapiens
QDSSSSKAPPPSL

SEQ ID NO: 97393 - protein, 13 aa, Homo Sapiens
DSSSSKAPPPSLP

SEQ ID NO: 97394 - protein, 13 aa, Homo Sapiens
SSSSKAPPPSLPS

SEQ ID NO: 97395 - protein, 13 aa, Homo Sapiens
SSSKAPPPSLPSP

SEQ ID NO: 97396 - protein, 13 aa, Homo Sapiens
SSKAPPPSLPSPS

SEQ ID NO: 97397 - protein, 13 aa, Homo Sapiens
SKAPPPSLPSPSR

SEQ ID NO: 97398 - protein, 13 aa, Homo Sapiens
KAPPPSLPSPSRL

SEQ ID NO: 97399 - protein, 13 aa, Homo Sapiens
APPPSLPSPSRLP

SEQ ID NO: 97400 - protein, 13 aa, Homo Sapiens
PPPSLPSPSRLPG

SEQ ID NO: 97401 - protein, 13 aa, Homo Sapiens
PPSLPSPSRLPGP

SEQ ID NO: 97402 - protein, 13 aa, Homo Sapiens
PSLPSPSRLPGPS

SEQ ID NO: 97403 - protein, 13 aa, Homo Sapiens
SLPSPSRLPGPSD

SEQ ID NO: 97404 - protein, 13 aa, Homo Sapiens
LPSPSRLPGPSDT

SEQ ID NO: 97405 - protein, 13 aa, Homo Sapiens
PSPSRLPGPSDTP

SEQ ID NO: 97406 - protein, 13 aa, Homo Sapiens
SPSRLPGPSDTPI

SEQ ID NO: 97407 - protein, 13 aa, Homo Sapiens
PSRLPGPSDTPIL

SEQ ID NO: 97408 - protein, 13 aa, Homo Sapiens
SRLPGPSDTPILP

SEQ ID NO: 97409 - protein, 13 aa, Homo Sapiens
RLPGPSDTPILPQ

SEQ ID NO: 97410 - protein, 14 aa, Homo Sapiens
MEMFQGLLLLLLLS

SEQ ID NO: 97411 - protein, 14 aa, Homo Sapiens
EMFQGLLLLLLLSM

SEQ ID NO: 97412 - protein, 14 aa, Homo Sapiens
MFQGLLLLLLLSMG

SEQ ID NO: 97413 - protein, 14 aa, Homo Sapiens
FQGLLLLLLLSMGG

SEQ ID NO: 97414 - protein, 14 aa, Homo Sapiens
QGLLLLLLLSMGGT

SEQ ID NO: 97415 - protein, 14 aa, Homo Sapiens
GLLLLLLLSMGGTW

SEQ ID NO: 97416 - protein, 14 aa, Homo Sapiens
LLLLLLLSMGGTWA

SEQ ID NO: 97417 - protein, 14 aa, Homo Sapiens
LLLLLLSMGGTWAS

SEQ ID NO: 97418 - protein, 14 aa, Homo Sapiens
LLLLLSMGGTWASK

SEQ ID NO: 97419 - protein, 14 aa, Homo Sapiens
LLLLSMGGTWASKE

SEQ ID NO: 97420 - protein, 14 aa, Homo Sapiens
LLLSMGGTWASKEP

SEQ ID NO: 97421 - protein, 14 aa, Homo Sapiens
LLSMGGTWASKEPL

SEQ ID NO: 97422 - protein, 14 aa, Homo Sapiens
LSMGGTWASKEPLR

SEQ ID NO: 97423 - protein, 14 aa, Homo Sapiens
SMGGTWASKEPLRP

SEQ ID NO: 97424 - protein, 14 aa, Homo Sapiens
MGGTWASKEPLRPR

SEQ ID NO: 97425 - protein, 14 aa, Homo Sapiens
GGTWASKEPLRPRC

SEQ ID NO: 97426 - protein, 14 aa, Homo Sapiens
GTWASKEPLRPRCR

SEQ ID NO: 97427 - protein, 14 aa, Homo Sapiens
TWASKEPLRPRCRP

SEQ ID NO: 97428 - protein, 14 aa, Homo Sapiens
WASKEPLRPRCRPI

SEQ ID NO: 97429 - protein, 14 aa, Homo Sapiens
ASKEPLRPRCRPIN

SEQ ID NO: 97430 - protein, 14 aa, Homo Sapiens
SKEPLRPRCRPINA

SEQ ID NO: 97431 - protein, 14 aa, Homo Sapiens
KEPLRPRCRPINAT

SEQ ID NO: 97432 - protein, 14 aa, Homo Sapiens
EPLRPRCRPINATL

SEQ ID NO: 97433 - protein, 14 aa, Homo Sapiens
PLRPRCRPINATLA

SEQ ID NO: 97434 - protein, 14 aa, Homo Sapiens
LRPRCRPINATLAV

SEQ ID NO: 97435 - protein, 14 aa, Homo Sapiens
RPRCRPINATLAVE

SEQ ID NO: 97436 - protein, 14 aa, Homo Sapiens
PRCRPINATLAVEK

SEQ ID NO: 97437 - protein, 14 aa, Homo Sapiens
RCRPINATLAVEKE

SEQ ID NO: 97438 - protein, 14 aa, Homo Sapiens
CRPINATLAVEKEG

SEQ ID NO: 97439 - protein, 14 aa, Homo Sapiens
RPINATLAVEKEGC

SEQ ID NO: 97440 - protein, 14 aa, Homo Sapiens
PINATLAVEKEGCP

SEQ ID NO: 97441 - protein, 14 aa, Homo Sapiens
INATLAVEKEGCPV

SEQ ID NO: 97442 - protein, 14 aa, Homo Sapiens
NATLAVEKEGCPVC

SEQ ID NO: 97443 - protein, 14 aa, Homo Sapiens
ATLAVEKEGCPVCI

SEQ ID NO: 97444 - protein, 14 aa, Homo Sapiens
TLAVEKEGCPVCIT

SEQ ID NO: 97445 - protein, 14 aa, Homo Sapiens
LAVEKEGCPVCITV

SEQ ID NO: 97446 - protein, 14 aa, Homo Sapiens
AVEKEGCPVCITVN

SEQ ID NO: 97447 - protein, 14 aa, Homo Sapiens
VEKEGCPVCITVNT

SEQ ID NO: 97448 - protein, 14 aa, Homo Sapiens
EKEGCPVCITVNTT

SEQ ID NO: 97449 - protein, 14 aa, Homo Sapiens
KEGCPVCITVNTTI

SEQ ID NO: 97450 - protein, 14 aa, Homo Sapiens
EGCPVCITVNTTIC

SEQ ID NO: 97451 - protein, 14 aa, Homo Sapiens
GCPVCITVNTTICA

SEQ ID NO: 97452 - protein, 14 aa, Homo Sapiens
CPVCITVNTTICAG

SEQ ID NO: 97453 - protein, 14 aa, Homo Sapiens
PVCITVNTTICAGY

SEQ ID NO: 97454 - protein, 14 aa, Homo Sapiens
VCITVNTTICAGYC

SEQ ID NO: 97455 - protein, 14 aa, Homo Sapiens
CITVNTTICAGYCP

SEQ ID NO: 97456 - protein, 14 aa, Homo Sapiens
ITVNTTICAGYCPT

SEQ ID NO: 97457 - protein, 14 aa, Homo Sapiens
TVNTTICAGYCPTM

SEQ ID NO: 97458 - protein, 14 aa, Homo Sapiens
VNTTICAGYCPTMT

SEQ ID NO: 97459 - protein, 14 aa, Homo Sapiens
NTTICAGYCPTMTR

SEQ ID NO: 97460 - protein, 14 aa, Homo Sapiens
TTICAGYCPTMTRV

SEQ ID NO: 97461 - protein, 14 aa, Homo Sapiens
TICAGYCPTMTRVL

SEQ ID NO: 97462 - protein, 14 aa, Homo Sapiens
ICAGYCPTMTRVLQ

SEQ ID NO: 97463 - protein, 14 aa, Homo Sapiens
CAGYCPTMTRVLQG

SEQ ID NO: 97464 - protein, 14 aa, Homo Sapiens
AGYCPTMTRVLQGV

SEQ ID NO: 97465 - protein, 14 aa, Homo Sapiens
GYCPTMTRVLQGVL

SEQ ID NO: 97466 - protein, 14 aa, Homo Sapiens
YCPTMTRVLQGVLP

SEQ ID NO: 97467 - protein, 14 aa, Homo Sapiens
CPTMTRVLQGVLPA

SEQ ID NO: 97468 - protein, 14 aa, Homo Sapiens
PTMTRVLQGVLPAL

SEQ ID NO: 97469 - protein, 14 aa, Homo Sapiens
TMTRVLQGVLPALP

SEQ ID NO: 97470 - protein, 14 aa, Homo Sapiens
MTRVLQGVLPALPQ

SEQ ID NO: 97471 - protein, 14 aa, Homo Sapiens
TRVLQGVLPALPQV

SEQ ID NO: 97472 - protein, 14 aa, Homo Sapiens
RVLQGVLPALPQVV

SEQ ID NO: 97473 - protein, 14 aa, Homo Sapiens
VLQGVLPALPQVVC

SEQ ID NO: 97474 - protein, 14 aa, Homo Sapiens
LQGVLPALPQVVCN

SEQ ID NO: 97475 - protein, 14 aa, Homo Sapiens
QGVLPALPQVVCNY

SEQ ID NO: 97476 - protein, 14 aa, Homo Sapiens
GVLPALPQVVCNYR

SEQ ID NO: 97477 - protein, 14 aa, Homo Sapiens
VLPALPQVVCNYRD

SEQ ID NO: 97478 - protein, 14 aa, Homo Sapiens
LPALPQVVCNYRDV

SEQ ID NO: 97479 - protein, 14 aa, Homo Sapiens
PALPQVVCNYRDVR

SEQ ID NO: 97480 - protein, 14 aa, Homo Sapiens
ALPQVVCNYRDVRF

SEQ ID NO: 97481 - protein, 14 aa, Homo Sapiens
LPQVVCNYRDVRFE

SEQ ID NO: 97482 - protein, 14 aa, Homo Sapiens
PQVVCNYRDVRFES

SEQ ID NO: 97483 - protein, 14 aa, Homo Sapiens
QVVCNYRDVRFESI

SEQ ID NO: 97484 - protein, 14 aa, Homo Sapiens
VVCNYRDVRFESIR

SEQ ID NO: 97485 - protein, 14 aa, Homo Sapiens
VCNYRDVRFESIRL

SEQ ID NO: 97486 - protein, 14 aa, Homo Sapiens
CNYRDVRFESIRLP

SEQ ID NO: 97487 - protein, 14 aa, Homo Sapiens
NYRDVRFESIRLPG

SEQ ID NO: 97488 - protein, 14 aa, Homo Sapiens
YRDVRFESIRLPGC

SEQ ID NO: 97489 - protein, 14 aa, Homo Sapiens
RDVRFESIRLPGCP

SEQ ID NO: 97490 - protein, 14 aa, Homo Sapiens
DVRFESIRLPGCPR

SEQ ID NO: 97491 - protein, 14 aa, Homo Sapiens
VRFESIRLPGCPRG

SEQ ID NO: 97492 - protein, 14 aa, Homo Sapiens
RFESIRLPGCPRGV

SEQ ID NO: 97493 - protein, 14 aa, Homo Sapiens
FESIRLPGCPRGVN

SEQ ID NO: 97494 - protein, 14 aa, Homo Sapiens
ESIRLPGCPRGVNP

SEQ ID NO: 97495 - protein, 14 aa, Homo Sapiens
SIRLPGCPRGVNPV

SEQ ID NO: 97496 - protein, 14 aa, Homo Sapiens
IRLPGCPRGVNPVV

SEQ ID NO: 97497 - protein, 14 aa, Homo Sapiens
RLPGCPRGVNPVVS

SEQ ID NO: 97498 - protein, 14 aa, Homo Sapiens
LPGCPRGVNPVVSY

SEQ ID NO: 97499 - protein, 14 aa, Homo Sapiens
PGCPRGVNPVVSYA

SEQ ID NO: 97500 - protein, 14 aa, Homo Sapiens
GCPRGVNPVVSYAV

SEQ ID NO: 97501 - protein, 14 aa, Homo Sapiens
CPRGVNPVVSYAVA

SEQ ID NO: 97502 - protein, 14 aa, Homo Sapiens
PRGVNPVVSYAVAL

SEQ ID NO: 97503 - protein, 14 aa, Homo Sapiens
RGVNPVVSYAVALS

SEQ ID NO: 97504 - protein, 14 aa, Homo Sapiens
GVNPVVSYAVALSC

SEQ ID NO: 97505 - protein, 14 aa, Homo Sapiens
VNPVVSYAVALSCQ

SEQ ID NO: 97506 - protein, 14 aa, Homo Sapiens
NPVVSYAVALSCQC

SEQ ID NO: 97507 - protein, 14 aa, Homo Sapiens
PVVSYAVALSCQCA

SEQ ID NO: 97508 - protein, 14 aa, Homo Sapiens
VVSYAVALSCQCAL

SEQ ID NO: 97509 - protein, 14 aa, Homo Sapiens
VSYAVALSCQCALC

SEQ ID NO: 97510 - protein, 14 aa, Homo Sapiens
SYAVALSCQCALCR

SEQ ID NO: 97511 - protein, 14 aa, Homo Sapiens
YAVALSCQCALCRR

SEQ ID NO: 97512 - protein, 14 aa, Homo Sapiens
AVALSCQCALCRRS

SEQ ID NO: 97513 - protein, 14 aa, Homo Sapiens
VALSCQCALCRRST

SEQ ID NO: 97514 - protein, 14 aa, Homo Sapiens
ALSCQCALCRRSTT

SEQ ID NO: 97515 - protein, 14 aa, Homo Sapiens
LSCQCALCRRSTTD

SEQ ID NO: 97516 - protein, 14 aa, Homo Sapiens
SCQCALCRRSTTDC

SEQ ID NO: 97517 - protein, 14 aa, Homo Sapiens
CQCALCRRSTTDCG

SEQ ID NO: 97518 - protein, 14 aa, Homo Sapiens
QCALCRRSTTDCGG

SEQ ID NO: 97519 - protein, 14 aa, Homo Sapiens
CALCRRSTTDCGGP

SEQ ID NO: 97520 - protein, 14 aa, Homo Sapiens
ALCRRSTTDCGGPK

SEQ ID NO: 97521 - protein, 14 aa, Homo Sapiens
LCRRSTTDCGGPKD

SEQ ID NO: 97522 - protein, 14 aa, Homo Sapiens
CRRSTTDCGGPKDH

SEQ ID NO: 97523 - protein, 14 aa, Homo Sapiens
RRSTTDCGGPKDHP

SEQ ID NO: 97524 - protein, 14 aa, Homo Sapiens
RSTTDCGGPKDHPL

SEQ ID NO: 97525 - protein, 14 aa, Homo Sapiens
STTDCGGPKDHPLT

SEQ ID NO: 97526 - protein, 14 aa, Homo Sapiens
TTDCGGPKDHPLTC

SEQ ID NO: 97527 - protein, 14 aa, Homo Sapiens
TDCGGPKDHPLTCD

SEQ ID NO: 97528 - protein, 14 aa, Homo Sapiens
DCGGPKDHPLTCDD

SEQ ID NO: 97529 - protein, 14 aa, Homo Sapiens
CGGPKDHPLTCDDP

SEQ ID NO: 97530 - protein, 14 aa, Homo Sapiens
GGPKDHPLTCDDPR

SEQ ID NO: 97531 - protein, 14 aa, Homo Sapiens
GPKDHPLTCDDPRF

SEQ ID NO: 97532 - protein, 14 aa, Homo Sapiens
PKDHPLTCDDPRFQ

SEQ ID NO: 97533 - protein, 14 aa, Homo Sapiens
KDHPLTCDDPRFQD

SEQ ID NO: 97534 - protein, 14 aa, Homo Sapiens
DHPLTCDDPRFQDS

SEQ ID NO: 97535 - protein, 14 aa, Homo Sapiens
HPLTCDDPRFQDSS

SEQ ID NO: 97536 - protein, 14 aa, Homo Sapiens
PLTCDDPRFQDSSS

SEQ ID NO: 97537 - protein, 14 aa, Homo Sapiens
LTCDDPRFQDSSSS

SEQ ID NO: 97538 - protein, 14 aa, Homo Sapiens
TCDDPRFQDSSSSK

SEQ ID NO: 97539 - protein, 14 aa, Homo Sapiens
CDDPRFQDSSSSKA

SEQ ID NO: 97540 - protein, 14 aa, Homo Sapiens
DDPRFQDSSSSKAP

SEQ ID NO: 97541 - protein, 14 aa, Homo Sapiens
DPRFQDSSSSKAPP

SEQ ID NO: 97542 - protein, 14 aa, Homo Sapiens
PRFQDSSSSKAPPP

SEQ ID NO: 97543 - protein, 14 aa, Homo Sapiens
RFQDSSSSKAPPPS

SEQ ID NO: 97544 - protein, 14 aa, Homo Sapiens
FQDSSSSKAPPPSL

SEQ ID NO: 97545 - protein, 14 aa, Homo Sapiens
QDSSSSKAPPPSLP

SEQ ID NO: 97546 - protein, 14 aa, Homo Sapiens
DSSSSKAPPPSLPS

SEQ ID NO: 97547 - protein, 14 aa, Homo Sapiens
SSSSKAPPPSLPSP

SEQ ID NO: 97548 - protein, 14 aa, Homo Sapiens
SSSKAPPPSLPSPS

SEQ ID NO: 97549 - protein, 14 aa, Homo Sapiens
SSKAPPPSLPSPSR

SEQ ID NO: 97550 - protein, 14 aa, Homo Sapiens
SKAPPPSLPSPSRL

SEQ ID NO: 97551 - protein, 14 aa, Homo Sapiens
KAPPPSLPSPSRLP

SEQ ID NO: 97552 - protein, 14 aa, Homo Sapiens
APPPSLPSPSRLPG

SEQ ID NO: 97553 - protein, 14 aa, Homo Sapiens
PPPSLPSPSRLPGP

SEQ ID NO: 97554 - protein, 14 aa, Homo Sapiens
PPSLPSPSRLPGPS

SEQ ID NO: 97555 - protein, 14 aa, Homo Sapiens
PSLPSPSRLPGPSD

SEQ ID NO: 97556 - protein, 14 aa, Homo Sapiens
SLPSPSRLPGPSDT

SEQ ID NO: 97557 - protein, 14 aa, Homo Sapiens
LPSPSRLPGPSDTP

SEQ ID NO: 97558 - protein, 14 aa, Homo Sapiens
PSPSRLPGPSDTPI

SEQ ID NO: 97559 - protein, 14 aa, Homo Sapiens
SPSRLPGPSDTPIL

SEQ ID NO: 97560 - protein, 14 aa, Homo Sapiens
PSRLPGPSDTPILP

SEQ ID NO: 97561 - protein, 14 aa, Homo Sapiens
SRLPGPSDTPILPQ

SEQ ID NO: 97562 - protein, 15 aa, Homo Sapiens
MEMFQGLLLLLLLSM

SEQ ID NO: 97563 - protein, 15 aa, Homo Sapiens
EMFQGLLLLLLLSMG

SEQ ID NO: 97564 - protein, 15 aa, Homo Sapiens
MFQGLLLLLLLSMGG

SEQ ID NO: 97565 - protein, 15 aa, Homo Sapiens
FQGLLLLLLLSMGGT

SEQ ID NO: 97566 - protein, 15 aa, Homo Sapiens
QGLLLLLLLSMGGTW

SEQ ID NO: 97567 - protein, 15 aa, Homo Sapiens
GLLLLLLLSMGGTWA

SEQ ID NO: 97568 - protein, 15 aa, Homo Sapiens
LLLLLLLSMGGTWAS

SEQ ID NO: 97569 - protein, 15 aa, Homo Sapiens
LLLLLLSMGGTWASK

SEQ ID NO: 97570 - protein, 15 aa, Homo Sapiens
LLLLLSMGGTWASKE

SEQ ID NO: 97571 - protein, 15 aa, Homo Sapiens
LLLLSMGGTWASKEP

SEQ ID NO: 97572 - protein, 15 aa, Homo Sapiens
LLLSMGGTWASKEPL

SEQ ID NO: 97573 - protein, 15 aa, Homo Sapiens
LLSMGGTWASKEPLR

SEQ ID NO: 97574 - protein, 15 aa, Homo Sapiens
LSMGGTWASKEPLRP

SEQ ID NO: 97575 - protein, 15 aa, Homo Sapiens
SMGGTWASKEPLRPR

SEQ ID NO: 97576 - protein, 15 aa, Homo Sapiens
MGGTWASKEPLRPRC

SEQ ID NO: 97577 - protein, 15 aa, Homo Sapiens
GGTWASKEPLRPRCR

SEQ ID NO: 97578 - protein, 15 aa, Homo Sapiens
GTWASKEPLRPRCRP

SEQ ID NO: 97579 - protein, 15 aa, Homo Sapiens
TWASKEPLRPRCRPI

SEQ ID NO: 97580 - protein, 15 aa, Homo Sapiens
WASKEPLRPRCRPIN

SEQ ID NO: 97581 - protein, 15 aa, Homo Sapiens
ASKEPLRPRCRPINA

SEQ ID NO: 97582 - protein, 15 aa, Homo Sapiens
SKEPLRPRCRPINAT

SEQ ID NO: 97583 - protein, 15 aa, Homo Sapiens
KEPLRPRCRPINATL

SEQ ID NO: 97584 - protein, 15 aa, Homo Sapiens
EPLRPRCRPINATLA

SEQ ID NO: 97585 - protein, 15 aa, Homo Sapiens
PLRPRCRPINATLAV

SEQ ID NO: 97586 - protein, 15 aa, Homo Sapiens
LRPRCRPINATLAVE

SEQ ID NO: 97587 - protein, 15 aa, Homo Sapiens
RPRCRPINATLAVEK

SEQ ID NO: 97588 - protein, 15 aa, Homo Sapiens
PRCRPINATLAVEKE

SEQ ID NO: 97589 - protein, 15 aa, Homo Sapiens
RCRPINATLAVEKEG

SEQ ID NO: 97590 - protein, 15 aa, Homo Sapiens
CRPINATLAVEKEGC

SEQ ID NO: 97591 - protein, 15 aa, Homo Sapiens
RPINATLAVEKEGCP

SEQ ID NO: 97592 - protein, 15 aa, Homo Sapiens
PINATLAVEKEGCPV

SEQ ID NO: 97593 - protein, 15 aa, Homo Sapiens
INATLAVEKEGCPVC

SEQ ID NO: 97594 - protein, 15 aa, Homo Sapiens
NATLAVEKEGCPVCI

SEQ ID NO: 97595 - protein, 15 aa, Homo Sapiens
ATLAVEKEGCPVCIT

SEQ ID NO: 97596 - protein, 15 aa, Homo Sapiens
TLAVEKEGCPVCITV

SEQ ID NO: 97597 - protein, 15 aa, Homo Sapiens
LAVEKEGCPVCITVN

SEQ ID NO: 97598 - protein, 15 aa, Homo Sapiens
AVEKEGCPVCITVNT

SEQ ID NO: 97599 - protein, 15 aa, Homo Sapiens
VEKEGCPVCITVNTT

SEQ ID NO: 97600 - protein, 15 aa, Homo Sapiens
EKEGCPVCITVNTTI

SEQ ID NO: 97601 - protein, 15 aa, Homo Sapiens
KEGCPVCITVNTTIC

SEQ ID NO: 97602 - protein, 15 aa, Homo Sapiens
EGCPVCITVNTTICA

SEQ ID NO: 97603 - protein, 15 aa, Homo Sapiens
GCPVCITVNTTICAG

SEQ ID NO: 97604 - protein, 15 aa, Homo Sapiens
CPVCITVNTTICAGY

SEQ ID NO: 97605 - protein, 15 aa, Homo Sapiens
PVCITVNTTICAGYC

SEQ ID NO: 97606 - protein, 15 aa, Homo Sapiens
VCITVNTTICAGYCP

SEQ ID NO: 97607 - protein, 15 aa, Homo Sapiens
CITVNTTICAGYCPT

SEQ ID NO: 97608 - protein, 15 aa, Homo Sapiens
ITVNTTICAGYCPTM

SEQ ID NO: 97609 - protein, 15 aa, Homo Sapiens
TVNTTICAGYCPTMT

SEQ ID NO: 97610 - protein, 15 aa, Homo Sapiens
VNTTICAGYCPTMTR

SEQ ID NO: 97611 - protein, 15 aa, Homo Sapiens
NTTICAGYCPTMTRV

SEQ ID NO: 97612 - protein, 15 aa, Homo Sapiens
TTICAGYCPTMTRVL

SEQ ID NO: 97613 - protein, 15 aa, Homo Sapiens
TICAGYCPTMTRVLQ

SEQ ID NO: 97614 - protein, 15 aa, Homo Sapiens
ICAGYCPTMTRVLQG

SEQ ID NO: 97615 - protein, 15 aa, Homo Sapiens
CAGYCPTMTRVLQGV

SEQ ID NO: 97616 - protein, 15 aa, Homo Sapiens
AGYCPTMTRVLQGVL

SEQ ID NO: 97617 - protein, 15 aa, Homo Sapiens
GYCPTMTRVLQGVLP

SEQ ID NO: 97618 - protein, 15 aa, Homo Sapiens
YCPTMTRVLQGVLPA

SEQ ID NO: 97619 - protein, 15 aa, Homo Sapiens
CPTMTRVLQGVLPAL

SEQ ID NO: 97620 - protein, 15 aa, Homo Sapiens
PTMTRVLQGVLPALP

SEQ ID NO: 97621 - protein, 15 aa, Homo Sapiens
TMTRVLQGVLPALPQ

SEQ ID NO: 97622 - protein, 15 aa, Homo Sapiens
MTRVLQGVLPALPQV

SEQ ID NO: 97623 - protein, 15 aa, Homo Sapiens
TRVLQGVLPALPQVV

SEQ ID NO: 97624 - protein, 15 aa, Homo Sapiens
RVLQGVLPALPQVVC

SEQ ID NO: 97625 - protein, 15 aa, Homo Sapiens
VLQGVLPALPQVVCN

SEQ ID NO: 97626 - protein, 15 aa, Homo Sapiens
LQGVLPALPQVVCNY

SEQ ID NO: 97627 - protein, 15 aa, Homo Sapiens
QGVLPALPQVVCNYR

SEQ ID NO: 97628 - protein, 15 aa, Homo Sapiens
GVLPALPQVVCNYRD

SEQ ID NO: 97629 - protein, 15 aa, Homo Sapiens
VLPALPQVVCNYRDV

SEQ ID NO: 97630 - protein, 15 aa, Homo Sapiens
LPALPQVVCNYRDVR

SEQ ID NO: 97631 - protein, 15 aa, Homo Sapiens
PALPQVVCNYRDVRF

SEQ ID NO: 97632 - protein, 15 aa, Homo Sapiens
ALPQVVCNYRDVRFE

SEQ ID NO: 97633 - protein, 15 aa, Homo Sapiens
LPQVVCNYRDVRFES

SEQ ID NO: 97634 - protein, 15 aa, Homo Sapiens
PQVVCNYRDVRFESI

SEQ ID NO: 97635 - protein, 15 aa, Homo Sapiens
QVVCNYRDVRFESIR

SEQ ID NO: 97636 - protein, 15 aa, Homo Sapiens
VVCNYRDVRFESIRL

SEQ ID NO: 97637 - protein, 15 aa, Homo Sapiens
VCNYRDVRFESIRLP

SEQ ID NO: 97638 - protein, 15 aa, Homo Sapiens
CNYRDVRFESIRLPG

SEQ ID NO: 97639 - protein, 15 aa, Homo Sapiens
NYRDVRFESIRLPGC

SEQ ID NO: 97640 - protein, 15 aa, Homo Sapiens
YRDVRFESIRLPGCP

SEQ ID NO: 97641 - protein, 15 aa, Homo Sapiens
RDVRFESIRLPGCPR

SEQ ID NO: 97642 - protein, 15 aa, Homo Sapiens
DVRFESIRLPGCPRG

SEQ ID NO: 97643 - protein, 15 aa, Homo Sapiens
VRFESIRLPGCPRGV

SEQ ID NO: 97644 - protein, 15 aa, Homo Sapiens
RFESIRLPGCPRGVN

SEQ ID NO: 97645 - protein, 15 aa, Homo Sapiens
FESIRLPGCPRGVNP

SEQ ID NO: 97646 - protein, 15 aa, Homo Sapiens
ESIRLPGCPRGVNPV

SEQ ID NO: 97647 - protein, 15 aa, Homo Sapiens
SIRLPGCPRGVNPVV

SEQ ID NO: 97648 - protein, 15 aa, Homo Sapiens
IRLPGCPRGVNPVVS

SEQ ID NO: 97649 - protein, 15 aa, Homo Sapiens
RLPGCPRGVNPVVSY

SEQ ID NO: 97650 - protein, 15 aa, Homo Sapiens
LPGCPRGVNPVVSYA

SEQ ID NO: 97651 - protein, 15 aa, Homo Sapiens
PGCPRGVNPVVSYAV

SEQ ID NO: 97652 - protein, 15 aa, Homo Sapiens
GCPRGVNPVVSYAVA

SEQ ID NO: 97653 - protein, 15 aa, Homo Sapiens
CPRGVNPVVSYAVAL

SEQ ID NO: 97654 - protein, 15 aa, Homo Sapiens
PRGVNPVVSYAVALS

SEQ ID NO: 97655 - protein, 15 aa, Homo Sapiens
RGVNPVVSYAVALSC

SEQ ID NO: 97656 - protein, 15 aa, Homo Sapiens
GVNPVVSYAVALSCQ

SEQ ID NO: 97657 - protein, 15 aa, Homo Sapiens
VNPVVSYAVALSCQC

SEQ ID NO: 97658 - protein, 15 aa, Homo Sapiens
NPVVSYAVALSCQCA

SEQ ID NO: 97659 - protein, 15 aa, Homo Sapiens
PVVSYAVALSCQCAL

SEQ ID NO: 97660 - protein, 15 aa, Homo Sapiens
VVSYAVALSCQCALC

SEQ ID NO: 97661 - protein, 15 aa, Homo Sapiens
VSYAVALSCQCALCR

SEQ ID NO: 97662 - protein, 15 aa, Homo Sapiens
SYAVALSCQCALCRR

SEQ ID NO: 97663 - protein, 15 aa, Homo Sapiens
YAVALSCQCALCRRS

SEQ ID NO: 97664 - protein, 15 aa, Homo Sapiens
AVALSCQCALCRRST

SEQ ID NO: 97665 - protein, 15 aa, Homo Sapiens
VALSCQCALCRRSTT

SEQ ID NO: 97666 - protein, 15 aa, Homo Sapiens
ALSCQCALCRRSTTD

SEQ ID NO: 97667 - protein, 15 aa, Homo Sapiens
LSCQCALCRRSTTDC

SEQ ID NO: 97668 - protein, 15 aa, Homo Sapiens
SCQCALCRRSTTDCG

SEQ ID NO: 97669 - protein, 15 aa, Homo Sapiens
CQCALCRRSTTDCGG

SEQ ID NO: 97670 - protein, 15 aa, Homo Sapiens
QCALCRRSTTDCGGP

SEQ ID NO: 97671 - protein, 15 aa, Homo Sapiens
CALCRRSTTDCGGPK

SEQ ID NO: 97672 - protein, 15 aa, Homo Sapiens
ALCRRSTTDCGGPKD

SEQ ID NO: 97673 - protein, 15 aa, Homo Sapiens
LCRRSTTDCGGPKDH

SEQ ID NO: 97674 - protein, 15 aa, Homo Sapiens
CRRSTTDCGGPKDHP

SEQ ID NO: 97675 - protein, 15 aa, Homo Sapiens
RRSTTDCGGPKDHPL

SEQ ID NO: 97676 - protein, 15 aa, Homo Sapiens
RSTTDCGGPKDHPLT

SEQ ID NO: 97677 - protein, 15 aa, Homo Sapiens
STTDCGGPKDHPLTC

SEQ ID NO: 97678 - protein, 15 aa, Homo Sapiens
TTDCGGPKDHPLTCD

SEQ ID NO: 97679 - protein, 15 aa, Homo Sapiens
TDCGGPKDHPLTCDD

SEQ ID NO: 97680 - protein, 15 aa, Homo Sapiens
DCGGPKDHPLTCDDP

SEQ ID NO: 97681 - protein, 15 aa, Homo Sapiens
CGGPKDHPLTCDDPR

SEQ ID NO: 97682 - protein, 15 aa, Homo Sapiens
GGPKDHPLTCDDPRF

SEQ ID NO: 97683 - protein, 15 aa, Homo Sapiens
GPKDHPLTCDDPRFQ

SEQ ID NO: 97684 - protein, 15 aa, Homo Sapiens
PKDHPLTCDDPRFQD

SEQ ID NO: 97685 - protein, 15 aa, Homo Sapiens
KDHPLTCDDPRFQDS

SEQ ID NO: 97686 - protein, 15 aa, Homo Sapiens
DHPLTCDDPRFQDSS

SEQ ID NO: 97687 - protein, 15 aa, Homo Sapiens
HPLTCDDPRFQDSSS

SEQ ID NO: 97688 - protein, 15 aa, Homo Sapiens
PLTCDDPRFQDSSSS

SEQ ID NO: 97689 - protein, 15 aa, Homo Sapiens
LTCDDPRFQDSSSSK

SEQ ID NO: 97690 - protein, 15 aa, Homo Sapiens
TCDDPRFQDSSSSKA

SEQ ID NO: 97691 - protein, 15 aa, Homo Sapiens
CDDPRFQDSSSSKAP

SEQ ID NO: 97692 - protein, 15 aa, Homo Sapiens
DDPRFQDSSSSKAPP

SEQ ID NO: 97693 - protein, 15 aa, Homo Sapiens
DPRFQDSSSSKAPPP

SEQ ID NO: 97694 - protein, 15 aa, Homo Sapiens
PRFQDSSSSKAPPPS

SEQ ID NO: 97695 - protein, 15 aa, Homo Sapiens
RFQDSSSSKAPPPSL

SEQ ID NO: 97696 - protein, 15 aa, Homo Sapiens
FQDSSSSKAPPPSLP

SEQ ID NO: 97697 - protein, 15 aa, Homo Sapiens
QDSSSSKAPPPSLPS

SEQ ID NO: 97698 - protein, 15 aa, Homo Sapiens
DSSSSKAPPPSLPSP

SEQ ID NO: 97699 - protein, 15 aa, Homo Sapiens
SSSSKAPPPSLPSPS

SEQ ID NO: 97700 - protein, 15 aa, Homo Sapiens
SSSKAPPPSLPSPSR

SEQ ID NO: 97701 - protein, 15 aa, Homo Sapiens
SSKAPPPSLPSPSRL

SEQ ID NO: 97702 - protein, 15 aa, Homo Sapiens
SKAPPPSLPSPSRLP

SEQ ID NO: 97703 - protein, 15 aa, Homo Sapiens
KAPPPSLPSPSRLPG

SEQ ID NO: 97704 - protein, 15 aa, Homo Sapiens
APPPSLPSPSRLPGP

SEQ ID NO: 97705 - protein, 15 aa, Homo Sapiens
PPPSLPSPSRLPGPS

SEQ ID NO: 97706 - protein, 15 aa, Homo Sapiens
PPSLPSPSRLPGPSD

SEQ ID NO: 97707 - protein, 15 aa, Homo Sapiens
PSLPSPSRLPGPSDT

SEQ ID NO: 97708 - protein, 15 aa, Homo Sapiens
SLPSPSRLPGPSDTP

SEQ ID NO: 97709 - protein, 15 aa, Homo Sapiens
LPSPSRLPGPSDTPI

SEQ ID NO: 97710 - protein, 15 aa, Homo Sapiens
PSPSRLPGPSDTPIL

SEQ ID NO: 97711 - protein, 15 aa, Homo Sapiens
SPSRLPGPSDTPILP

SEQ ID NO: 97712 - protein, 15 aa, Homo Sapiens
PSRLPGPSDTPILPQ

SEQ ID NO: 97713 - protein, 16 aa, Homo Sapiens
MEMFQGLLLLLLLSMG

SEQ ID NO: 97714 - protein, 16 aa, Homo Sapiens
EMFQGLLLLLLLSMGG

SEQ ID NO: 97715 - protein, 16 aa, Homo Sapiens
MFQGLLLLLLLSMGGT

SEQ ID NO: 97716 - protein, 16 aa, Homo Sapiens
FQGLLLLLLLSMGGTW

SEQ ID NO: 97717 - protein, 16 aa, Homo Sapiens
QGLLLLLLLSMGGTWA

SEQ ID NO: 97718 - protein, 16 aa, Homo Sapiens
GLLLLLLLSMGGTWAS

SEQ ID NO: 97719 - protein, 16 aa, Homo Sapiens
LLLLLLLSMGGTWASK

SEQ ID NO: 97720 - protein, 16 aa, Homo Sapiens
LLLLLLSMGGTWASKE

SEQ ID NO: 97721 - protein, 16 aa, Homo Sapiens
LLLLLSMGGTWASKEP

SEQ ID NO: 97722 - protein, 16 aa, Homo Sapiens
LLLLSMGGTWASKEPL

SEQ ID NO: 97723 - protein, 16 aa, Homo Sapiens
LLLSMGGTWASKEPLR

SEQ ID NO: 97724 - protein, 16 aa, Homo Sapiens
LLSMGGTWASKEPLRP

SEQ ID NO: 97725 - protein, 16 aa, Homo Sapiens
LSMGGTWASKEPLRPR

SEQ ID NO: 97726 - protein, 16 aa, Homo Sapiens
SMGGTWASKEPLRPRC

SEQ ID NO: 97727 - protein, 16 aa, Homo Sapiens
MGGTWASKEPLRPRCR

SEQ ID NO: 97728 - protein, 16 aa, Homo Sapiens
GGTWASKEPLRPRCRP

SEQ ID NO: 97729 - protein, 16 aa, Homo Sapiens
GTWASKEPLRPRCRPI

SEQ ID NO: 97730 - protein, 16 aa, Homo Sapiens
TWASKEPLRPRCRPIN

SEQ ID NO: 97731 - protein, 16 aa, Homo Sapiens
WASKEPLRPRCRPINA

SEQ ID NO: 97732 - protein, 16 aa, Homo Sapiens
ASKEPLRPRCRPINAT

SEQ ID NO: 97733 - protein, 16 aa, Homo Sapiens
SKEPLRPRCRPINATL

SEQ ID NO: 97734 - protein, 16 aa, Homo Sapiens
KEPLRPRCRPINATLA

SEQ ID NO: 97735 - protein, 16 aa, Homo Sapiens
EPLRPRCRPINATLAV

SEQ ID NO: 97736 - protein, 16 aa, Homo Sapiens
PLRPRCRPINATLAVE

SEQ ID NO: 97737 - protein, 16 aa, Homo Sapiens
LRPRCRPINATLAVEK

SEQ ID NO: 97738 - protein, 16 aa, Homo Sapiens
RPRCRPINATLAVEKE

SEQ ID NO: 97739 - protein, 16 aa, Homo Sapiens
PRCRPINATLAVEKEG

SEQ ID NO: 97740 - protein, 16 aa, Homo Sapiens
RCRPINATLAVEKEGC

SEQ ID NO: 97741 - protein, 16 aa, Homo Sapiens
CRPINATLAVEKEGCP

SEQ ID NO: 97742 - protein, 16 aa, Homo Sapiens
RPINATLAVEKEGCPV

SEQ ID NO: 97743 - protein, 16 aa, Homo Sapiens
PINATLAVEKEGCPVC

SEQ ID NO: 97744 - protein, 16 aa, Homo Sapiens
INATLAVEKEGCPVCI

SEQ ID NO: 97745 - protein, 16 aa, Homo Sapiens
NATLAVEKEGCPVCIT

SEQ ID NO: 97746 - protein, 16 aa, Homo Sapiens
ATLAVEKEGCPVCITV

SEQ ID NO: 97747 - protein, 16 aa, Homo Sapiens
TLAVEKEGCPVCITVN

SEQ ID NO: 97748 - protein, 16 aa, Homo Sapiens
LAVEKEGCPVCITVNT

SEQ ID NO: 97749 - protein, 16 aa, Homo Sapiens
AVEKEGCPVCITVNTT

SEQ ID NO: 97750 - protein, 16 aa, Homo Sapiens
VEKEGCPVCITVNTTI

SEQ ID NO: 97751 - protein, 16 aa, Homo Sapiens
EKEGCPVCITVNTTIC

SEQ ID NO: 97752 - protein, 16 aa, Homo Sapiens
KEGCPVCITVNTTICA

SEQ ID NO: 97753 - protein, 16 aa, Homo Sapiens
EGCPVCITVNTTICAG

SEQ ID NO: 97754 - protein, 16 aa, Homo Sapiens
GCPVCITVNTTICAGY

SEQ ID NO: 97755 - protein, 16 aa, Homo Sapiens
CPVCITVNTTICAGYC

SEQ ID NO: 97756 - protein, 16 aa, Homo Sapiens
PVCITVNTTICAGYCP

SEQ ID NO: 97757 - protein, 16 aa, Homo Sapiens
VCITVNTTICAGYCPT

SEQ ID NO: 97758 - protein, 16 aa, Homo Sapiens
CITVNTTICAGYCPTM

SEQ ID NO: 97759 - protein, 16 aa, Homo Sapiens
ITVNTTICAGYCPTMT

SEQ ID NO: 97760 - protein, 16 aa, Homo Sapiens
TVNTTICAGYCPTMTR

SEQ ID NO: 97761 - protein, 16 aa, Homo Sapiens
VNTTICAGYCPTMTRV

SEQ ID NO: 97762 - protein, 16 aa, Homo Sapiens
NTTICAGYCPTMTRVL

SEQ ID NO: 97763 - protein, 16 aa, Homo Sapiens
TTICAGYCPTMTRVLQ

SEQ ID NO: 97764 - protein, 16 aa, Homo Sapiens
TICAGYCPTMTRVLQG

SEQ ID NO: 97765 - protein, 16 aa, Homo Sapiens
ICAGYCPTMTRVLQGV

SEQ ID NO: 97766 - protein, 16 aa, Homo Sapiens
CAGYCPTMTRVLQGVL

SEQ ID NO: 97767 - protein, 16 aa, Homo Sapiens
AGYCPTMTRVLQGVLP

SEQ ID NO: 97768 - protein, 16 aa, Homo Sapiens
GYCPTMTRVLQGVLPA

SEQ ID NO: 97769 - protein, 16 aa, Homo Sapiens
YCPTMTRVLQGVLPAL

SEQ ID NO: 97770 - protein, 16 aa, Homo Sapiens
CPTMTRVLQGVLPALP

SEQ ID NO: 97771 - protein, 16 aa, Homo Sapiens
PTMTRVLQGVLPALPQ

SEQ ID NO: 97772 - protein, 16 aa, Homo Sapiens
TMTRVLQGVLPALPQV

SEQ ID NO: 97773 - protein, 16 aa, Homo Sapiens
MTRVLQGVLPALPQVV

SEQ ID NO: 97774 - protein, 16 aa, Homo Sapiens
TRVLQGVLPALPQVVC

SEQ ID NO: 97775 - protein, 16 aa, Homo Sapiens
RVLQGVLPALPQVVCN

SEQ ID NO: 97776 - protein, 16 aa, Homo Sapiens
VLQGVLPALPQVVCNY

SEQ ID NO: 97777 - protein, 16 aa, Homo Sapiens
LQGVLPALPQVVCNYR

SEQ ID NO: 97778 - protein, 16 aa, Homo Sapiens
QGVLPALPQVVCNYRD

SEQ ID NO: 97779 - protein, 16 aa, Homo Sapiens
GVLPALPQVVCNYRDV

SEQ ID NO: 97780 - protein, 16 aa, Homo Sapiens
VLPALPQVVCNYRDVR

SEQ ID NO: 97781 - protein, 16 aa, Homo Sapiens
LPALPQVVCNYRDVRF

SEQ ID NO: 97782 - protein, 16 aa, Homo Sapiens
PALPQVVCNYRDVRFE

SEQ ID NO: 97783 - protein, 16 aa, Homo Sapiens
ALPQVVCNYRDVRFES

SEQ ID NO: 97784 - protein, 16 aa, Homo Sapiens
LPQVVCNYRDVRFESI

SEQ ID NO: 97785 - protein, 16 aa, Homo Sapiens
PQVVCNYRDVRFESIR

SEQ ID NO: 97786 - protein, 16 aa, Homo Sapiens
QVVCNYRDVRFESIRL

SEQ ID NO: 97787 - protein, 16 aa, Homo Sapiens
VVCNYRDVRFESIRLP

SEQ ID NO: 97788 - protein, 16 aa, Homo Sapiens
VCNYRDVRFESIRLPG

SEQ ID NO: 97789 - protein, 16 aa, Homo Sapiens
CNYRDVRFESIRLPGC

SEQ ID NO: 97790 - protein, 16 aa, Homo Sapiens
NYRDVRFESIRLPGCP

SEQ ID NO: 97791 - protein, 16 aa, Homo Sapiens
YRDVRFESIRLPGCPR

SEQ ID NO: 97792 - protein, 16 aa, Homo Sapiens
RDVRFESIRLPGCPRG

SEQ ID NO: 97793 - protein, 16 aa, Homo Sapiens
DVRFESIRLPGCPRGV

SEQ ID NO: 97794 - protein, 16 aa, Homo Sapiens
VRFESIRLPGCPRGVN

SEQ ID NO: 97795 - protein, 16 aa, Homo Sapiens
RFESIRLPGCPRGVNP

SEQ ID NO: 97796 - protein, 16 aa, Homo Sapiens
FESIRLPGCPRGVNPV

SEQ ID NO: 97797 - protein, 16 aa, Homo Sapiens
ESIRLPGCPRGVNPVV

SEQ ID NO: 97798 - protein, 16 aa, Homo Sapiens
SIRLPGCPRGVNPVVS

SEQ ID NO: 97799 - protein, 16 aa, Homo Sapiens
IRLPGCPRGVNPVVSY

SEQ ID NO: 97800 - protein, 16 aa, Homo Sapiens
RLPGCPRGVNPVVSYA

SEQ ID NO: 97801 - protein, 16 aa, Homo Sapiens
LPGCPRGVNPVVSYAV

SEQ ID NO: 97802 - protein, 16 aa, Homo Sapiens
PGCPRGVNPVVSYAVA

SEQ ID NO: 97803 - protein, 16 aa, Homo Sapiens
GCPRGVNPVVSYAVAL

SEQ ID NO: 97804 - protein, 16 aa, Homo Sapiens
CPRGVNPVVSYAVALS

SEQ ID NO: 97805 - protein, 16 aa, Homo Sapiens
PRGVNPVVSYAVALSC

SEQ ID NO: 97806 - protein, 16 aa, Homo Sapiens
RGVNPVVSYAVALSCQ

SEQ ID NO: 97807 - protein, 16 aa, Homo Sapiens
GVNPVVSYAVALSCQC

SEQ ID NO: 97808 - protein, 16 aa, Homo Sapiens
VNPVVSYAVALSCQCA

SEQ ID NO: 97809 - protein, 16 aa, Homo Sapiens
NPVVSYAVALSCQCAL

SEQ ID NO: 97810 - protein, 16 aa, Homo Sapiens
PVVSYAVALSCQCALC

SEQ ID NO: 97811 - protein, 16 aa, Homo Sapiens
VVSYAVALSCQCALCR

SEQ ID NO: 97812 - protein, 16 aa, Homo Sapiens
VSYAVALSCQCALCRR

SEQ ID NO: 97813 - protein, 16 aa, Homo Sapiens
SYAVALSCQCALCRRS

SEQ ID NO: 97814 - protein, 16 aa, Homo Sapiens
YAVALSCQCALCRRST

SEQ ID NO: 97815 - protein, 16 aa, Homo Sapiens
AVALSCQCALCRRSTT

SEQ ID NO: 97816 - protein, 16 aa, Homo Sapiens
VALSCQCALCRRSTTD

SEQ ID NO: 97817 - protein, 16 aa, Homo Sapiens
ALSCQCALCRRSTTDC

SEQ ID NO: 97818 - protein, 16 aa, Homo Sapiens
LSCQCALCRRSTTDCG

SEQ ID NO: 97819 - protein, 16 aa, Homo Sapiens
SCQCALCRRSTTDCGG

SEQ ID NO: 97820 - protein, 16 aa, Homo Sapiens
CQCALCRRSTTDCGGP

SEQ ID NO: 97821 - protein, 16 aa, Homo Sapiens
QCALCRRSTTDCGGPK

SEQ ID NO: 97822 - protein, 16 aa, Homo Sapiens
CALCRRSTTDCGGPKD

SEQ ID NO: 97823 - protein, 16 aa, Homo Sapiens
ALCRRSTTDCGGPKDH

SEQ ID NO: 97824 - protein, 16 aa, Homo Sapiens
LCRRSTTDCGGPKDHP

SEQ ID NO: 97825 - protein, 16 aa, Homo Sapiens
CRRSTTDCGGPKDHPL

SEQ ID NO: 97826 - protein, 16 aa, Homo Sapiens
RRSTTDCGGPKDHPLT

SEQ ID NO: 97827 - protein, 16 aa, Homo Sapiens
RSTTDCGGPKDHPLTC

SEQ ID NO: 97828 - protein, 16 aa, Homo Sapiens
STTDCGGPKDHPLTCD

SEQ ID NO: 97829 - protein, 16 aa, Homo Sapiens
TTDCGGPKDHPLTCDD

SEQ ID NO: 97830 - protein, 16 aa, Homo Sapiens
TDCGGPKDHPLTCDDP

SEQ ID NO: 97831 - protein, 16 aa, Homo Sapiens
DCGGPKDHPLTCDDPR

SEQ ID NO: 97832 - protein, 16 aa, Homo Sapiens
CGGPKDHPLTCDDPRF

SEQ ID NO: 97833 - protein, 16 aa, Homo Sapiens
GGPKDHPLTCDDPRFQ

SEQ ID NO: 97834 - protein, 16 aa, Homo Sapiens
GPKDHPLTCDDPRFQD

SEQ ID NO: 97835 - protein, 16 aa, Homo Sapiens
PKDHPLTCDDPRFQDS

SEQ ID NO: 97836 - protein, 16 aa, Homo Sapiens
KDHPLTCDDPRFQDSS

SEQ ID NO: 97837 - protein, 16 aa, Homo Sapiens
DHPLTCDDPRFQDSSS

SEQ ID NO: 97838 - protein, 16 aa, Homo Sapiens
HPLTCDDPRFQDSSSS

SEQ ID NO: 97839 - protein, 16 aa, Homo Sapiens
PLTCDDPRFQDSSSSK

SEQ ID NO: 97840 - protein, 16 aa, Homo Sapiens
LTCDDPRFQDSSSSKA

SEQ ID NO: 97841 - protein, 16 aa, Homo Sapiens
TCDDPRFQDSSSSKAP

SEQ ID NO: 97842 - protein, 16 aa, Homo Sapiens
CDDPRFQDSSSSKAPP

SEQ ID NO: 97843 - protein, 16 aa, Homo Sapiens
DDPRFQDSSSSKAPPP

SEQ ID NO: 97844 - protein, 16 aa, Homo Sapiens
DPRFQDSSSSKAPPPS

SEQ ID NO: 97845 - protein, 16 aa, Homo Sapiens
PRFQDSSSSKAPPPSL

SEQ ID NO: 97846 - protein, 16 aa, Homo Sapiens
RFQDSSSSKAPPPSLP

SEQ ID NO: 97847 - protein, 16 aa, Homo Sapiens
FQDSSSSKAPPPSLPS

SEQ ID NO: 97848 - protein, 16 aa, Homo Sapiens
QDSSSSKAPPPSLPSP

SEQ ID NO: 97849 - protein, 16 aa, Homo Sapiens
DSSSSKAPPPSLPSPS

SEQ ID NO: 97850 - protein, 16 aa, Homo Sapiens
SSSSKAPPPSLPSPSR

SEQ ID NO: 97851 - protein, 16 aa, Homo Sapiens
SSSKAPPPSLPSPSRL

SEQ ID NO: 97852 - protein, 16 aa, Homo Sapiens
SSKAPPPSLPSPSRLP

SEQ ID NO: 97853 - protein, 16 aa, Homo Sapiens
SKAPPPSLPSPSRLPG

SEQ ID NO: 97854 - protein, 16 aa, Homo Sapiens
KAPPPSLPSPSRLPGP

SEQ ID NO: 97855 - protein, 16 aa, Homo Sapiens
APPPSLPSPSRLPGPS

SEQ ID NO: 97856 - protein, 16 aa, Homo Sapiens
PPPSLPSPSRLPGPSD

SEQ ID NO: 97857 - protein, 16 aa, Homo Sapiens
PPSLPSPSRLPGPSDT

SEQ ID NO: 97858 - protein, 16 aa, Homo Sapiens
PSLPSPSRLPGPSDTP

SEQ ID NO: 97859 - protein, 16 aa, Homo Sapiens
SLPSPSRLPGPSDTPI

SEQ ID NO: 97860 - protein, 16 aa, Homo Sapiens
LPSPSRLPGPSDTPIL

SEQ ID NO: 97861 - protein, 16 aa, Homo Sapiens
PSPSRLPGPSDTPILP

SEQ ID NO: 97862 - protein, 16 aa, Homo Sapiens
SPSRLPGPSDTPILPQ

SEQ ID NO: 97863 - protein, 1456 aa, Homo Sapiens [sequence omitted]

SEQ ID NO: 97864 - protein, 8 aa, Homo Sapiens
MRLPLLLV

SEQ ID NO: 97865 - protein, 8 aa, Homo Sapiens
RLPLLLVF

SEQ ID NO: 97866 - protein, 8 aa, Homo Sapiens
LPLLLVFA

SEQ ID NO: 97867 - protein, 8 aa, Homo Sapiens
LLLVFASV

SEQ ID NO: 97868 - protein, 8 aa, Homo Sapiens
LLVFASVI

SEQ ID NO: 97869 - protein, 8 aa, Homo Sapiens
FASVIPGA

SEQ ID NO: 97870 - protein, 8 aa, Homo Sapiens
SVIPGAVL

SEQ ID NO: 97871 - protein, 8 aa, Homo Sapiens
VIPGAVLL

SEQ ID NO: 97872 - protein, 8 aa, Homo Sapiens
IPGAVLLL

SEQ ID NO: 97873 - protein, 8 aa, Homo Sapiens
AVLLLDTR

SEQ ID NO: 97874 - protein, 8 aa, Homo Sapiens
LLLDTRQF

SEQ ID NO: 97875 - protein, 8 aa, Homo Sapiens
LLDTRQFL

SEQ ID NO: 97876 - protein, 8 aa, Homo Sapiens
DTRQFLIY

SEQ ID NO: 97877 - protein, 8 aa, Homo Sapiens
LIYNEDHK

SEQ ID NO: 97878 - protein, 8 aa, Homo Sapiens
IYNEDHKR

SEQ ID NO: 97879 - protein, 8 aa, Homo Sapiens
DAVSPSAV

SEQ ID NO: 97880 - protein, 8 aa, Homo Sapiens
TAACNQDA

SEQ ID NO: 97881 - protein, 8 aa, Homo Sapiens
DAESQKFR

SEQ ID NO: 97882 - protein, 8 aa, Homo Sapiens
AESQKFRW

SEQ ID NO: 97883 - protein, 8 aa, Homo Sapiens
ESQKFRWV

SEQ ID NO: 97884 - protein, 8 aa, Homo Sapiens
FRWVSESQ

SEQ ID NO: 97885 - protein, 8 aa, Homo Sapiens
RWVSESQI

SEQ ID NO: 97886 - protein, 8 aa, Homo Sapiens
WVSESQIM

SEQ ID NO: 97887 - protein, 8 aa, Homo Sapiens
SESQIMSV

SEQ ID NO: 97888 - protein, 8 aa, Homo Sapiens
SQIMSVAF

SEQ ID NO: 97889 - protein, 8 aa, Homo Sapiens
QIMSVAFK

SEQ ID NO: 97890 - protein, 8 aa, Homo Sapiens
IMSVAFKL

SEQ ID NO: 97891 - protein, 8 aa, Homo Sapiens
SVAFKLCL

SEQ ID NO: 97892 - protein, 8 aa, Homo Sapiens
DWVAITLY

SEQ ID NO: 97893 - protein, 8 aa, Homo Sapiens
WVAITLYA

SEQ ID NO: 97894 - protein, 8 aa, Homo Sapiens
TLYACDSK

SEQ ID NO: 97895 - protein, 8 aa, Homo Sapiens
DSKSEFQK

SEQ ID NO: 97896 - protein, 8 aa, Homo Sapiens
EFQKWECK

SEQ ID NO: 97897 - protein, 8 aa, Homo Sapiens
WECKNDTL

SEQ ID NO: 97898 - protein, 8 aa, Homo Sapiens
LFFNYGNR

SEQ ID NO: 97899 - protein, 8 aa, Homo Sapiens
NYGNRQEK

SEQ ID NO: 97900 - protein, 8 aa, Homo Sapiens
RQEKNIML

SEQ ID NO: 97901 - protein, 8 aa, Homo Sapiens
QEKNIMLY

SEQ ID NO: 97902 - protein, 8 aa, Homo Sapiens
EKNIMLYK

SEQ ID NO: 97903 - protein, 8 aa, Homo Sapiens
MLYKGSGL

SEQ ID NO: 97904 - protein, 8 aa, Homo Sapiens
LYKGSGLW

SEQ ID NO: 97905 - protein, 8 aa, Homo Sapiens
KGSGLWSR

SEQ ID NO: 97906 - protein, 8 aa, Homo Sapiens
GSGLWSRW

SEQ ID NO: 97907 - protein, 8 aa, Homo Sapiens
SGLWSRWK

SEQ ID NO: 97908 - protein, 8 aa, Homo Sapiens
GLWSRWKI

SEQ ID NO: 97909 - protein, 8 aa, Homo Sapiens
SRWKIYGT

SEQ ID NO: 97910 - protein, 8 aa, Homo Sapiens
IYGTTDNL

SEQ ID NO: 97911 - protein, 8 aa, Homo Sapiens
TTDNLCSR

SEQ ID NO: 97912 - protein, 8 aa, Homo Sapiens
GYEAMYTL

SEQ ID NO: 97913 - protein, 8 aa, Homo Sapiens
YEAMYTLL

SEQ ID NO: 97914 - protein, 8 aa, Homo Sapiens
LLGNANGA

SEQ ID NO: 97915 - protein, 8 aa, Homo Sapiens
ATCAFPFK

SEQ ID NO: 97916 - protein, 8 aa, Homo Sapiens
FPFKFENK

SEQ ID NO: 97917 - protein, 8 aa, Homo Sapiens
SAGRSDGW

SEQ ID NO: 97918 - protein, 8 aa, Homo Sapiens
WLWCGTTT

SEQ ID NO: 97919 - protein, 8 aa, Homo Sapiens
TTDYDTDK

SEQ ID NO: 97920 - protein, 8 aa, Homo Sapiens
DYDTDKLF

SEQ ID NO: 97921 - protein, 8 aa, Homo Sapiens
DTDKLFGY

SEQ ID NO: 97922 - protein, 8 aa, Homo Sapiens
KLFGYCPL

SEQ ID NO: 97923 - protein, 8 aa, Homo Sapiens
GSESLWNK

SEQ ID NO: 97924 - protein, 8 aa, Homo Sapiens
SLWNKDPL

SEQ ID NO: 97925 - protein, 8 aa, Homo Sapiens
NKDPLTSV

SEQ ID NO: 97926 - protein, 8 aa, Homo Sapiens
DPLTSVSY

SEQ ID NO: 97927 - protein, 8 aa, Homo Sapiens
PLTSVSYQ

SEQ ID NO: 97928 - protein, 8 aa, Homo Sapiens
LTSVSYQI

SEQ ID NO: 97929 - protein, 8 aa, Homo Sapiens
VSYQINSK

SEQ ID NO: 97930 - protein, 8 aa, Homo Sapiens
YQINSKSA

SEQ ID NO: 97931 - protein, 8 aa, Homo Sapiens
QINSKSAL

SEQ ID NO: 97932 - protein, 8 aa, Homo Sapiens
NSKSALSW

SEQ ID NO: 97933 - protein, 8 aa, Homo Sapiens
SALSWHQA

SEQ ID NO: 97934 - protein, 8 aa, Homo Sapiens
ALSWHQAR

SEQ ID NO: 97935 - protein, 8 aa, Homo Sapiens
LSWHQARK

SEQ ID NO: 97936 - protein, 8 aa, Homo Sapiens
ELLSITEI

SEQ ID NO: 97937 - protein, 8 aa, Homo Sapiens
SITEIHEQ

SEQ ID NO: 97938 - protein, 8 aa, Homo Sapiens
TEIHEQTY

SEQ ID NO: 97939 - protein, 8 aa, Homo Sapiens
EIHEQTYL

SEQ ID NO: 97940 - protein, 8 aa, Homo Sapiens
YLTGLTSS

SEQ ID NO: 97941 - protein, 8 aa, Homo Sapiens
LTGLTSSL

SEQ ID NO: 97942 - protein, 8 aa, Homo Sapiens
TSSLTSGL

SEQ ID NO: 97943 - protein, 8 aa, Homo Sapiens
SSLTSGLW

SEQ ID NO: 97944 - protein, 8 aa, Homo Sapiens
SLTSGLWI

SEQ ID NO: 97945 - protein, 8 aa, Homo Sapiens
GLWIGLNS

SEQ ID NO: 97946 - protein, 8 aa, Homo Sapiens
SLSFNSGW

SEQ ID NO: 97947 - protein, 8 aa, Homo Sapiens
SFNSGWQW

SEQ ID NO: 97948 - protein, 8 aa, Homo Sapiens
QWSDRSPF

SEQ ID NO: 97949 - protein, 8 aa, Homo Sapiens
WSDRSPFR

SEQ ID NO: 97950 - protein, 8 aa, Homo Sapiens
SPFRYLNW

SEQ ID NO: 97951 - protein, 8 aa, Homo Sapiens
YLNWLPGS

SEQ ID NO: 97952 - protein, 8 aa, Homo Sapiens
WLPGSPSA

SEQ ID NO: 97953 - protein, 8 aa, Homo Sapiens
CVSLNPGK

SEQ ID NO: 97954 - protein, 8 aa, Homo Sapiens
SLNPGKNA

SEQ ID NO: 97955 - protein, 8 aa, Homo Sapiens
NPGKNAKW

SEQ ID NO: 97956 - protein, 8 aa, Homo Sapiens
NLECVQKL

SEQ ID NO: 97957 - protein, 8 aa, Homo Sapiens
ECVQKLGY

SEQ ID NO: 97958 - protein, 8 aa, Homo Sapiens
KLGYICKK

SEQ ID NO: 97959 - protein, 8 aa, Homo Sapiens
NTTLNSFV

SEQ ID NO: 97960 - protein, 8 aa, Homo Sapiens
TTLNSFVI

SEQ ID NO: 97961 - protein, 8 aa, Homo Sapiens
VIPSESDV

SEQ ID NO: 97962 - protein, 8 aa, Homo Sapiens
CPSQWWPY

SEQ ID NO: 97963 - protein, 8 aa, Homo Sapiens
WPYAGHCY

SEQ ID NO: 97964 - protein, 8 aa, Homo Sapiens
PYAGHCYK

SEQ ID NO: 97965 - protein, 8 aa, Homo Sapiens
KIHRDEKK

SEQ ID NO: 97966 - protein, 8 aa, Homo Sapiens
IQRDALTT

SEQ ID NO: 97967 - protein, 8 aa, Homo Sapiens
DALTTCRK

SEQ ID NO: 97968 - protein, 8 aa, Homo Sapiens
DLASIHTI

SEQ ID NO: 97969 - protein, 8 aa, Homo Sapiens
HTIEEFDF

SEQ ID NO: 97970 - protein, 8 aa, Homo Sapiens
TIEEFDFI

SEQ ID NO: 97971 - protein, 8 aa, Homo Sapiens
IEEFDFII

SEQ ID NO: 97972 - protein, 8 aa, Homo Sapiens
EEFDFIIS

SEQ ID NO: 97973 - protein, 8 aa, Homo Sapiens
FDFIISQL

SEQ ID NO: 97974 - protein, 8 aa, Homo Sapiens
FIISQLGY

SEQ ID NO: 97975 - protein, 8 aa, Homo Sapiens
GYEPNDEL

SEQ ID NO: 97976 - protein, 8 aa, Homo Sapiens
EPNDELWI

SEQ ID NO: 97977 - protein, 8 aa, Homo Sapiens
GLNDIKIQ

SEQ ID NO: 97978 - protein, 8 aa, Homo Sapiens
DIKIQMYF

SEQ ID NO: 97979 - protein, 8 aa, Homo Sapiens
KIQMYFEW

SEQ ID NO: 97980 - protein, 8 aa, Homo Sapiens
IQMYFEWS

SEQ ID NO: 97981 - protein, 8 aa, Homo Sapiens
EWSDGTPV

SEQ ID NO: 97982 - protein, 8 aa, Homo Sapiens
GTPVTFTK

SEQ ID NO: 97983 - protein, 8 aa, Homo Sapiens
TPVTFTKW

SEQ ID NO: 97984 - protein, 8 aa, Homo Sapiens
VTFTKWLR

SEQ ID NO: 97985 - protein, 8 aa, Homo Sapiens
EPSHENNR

SEQ ID NO: 97986 - protein, 8 aa, Homo Sapiens
RQEDCVVM

SEQ ID NO: 97987 - protein, 8 aa, Homo Sapiens
VMKGKDGY

SEQ ID NO: 97988 - protein, 8 aa, Homo Sapiens
WADRGCEW

SEQ ID NO: 97989 - protein, 8 aa, Homo Sapiens
CEWPLGYI

SEQ ID NO: 97990 - protein, 8 aa, Homo Sapiens
PLGYICKM

SEQ ID NO: 97991 - protein, 8 aa, Homo Sapiens
YICKMKSR

SEQ ID NO: 97992 - protein, 8 aa, Homo Sapiens
KSRSQGPE

SEQ ID NO: 97993 - protein, 8 aa, Homo Sapiens
QGPEIVEV

SEQ ID NO: 97994 - protein, 8 aa, Homo Sapiens
EVEKGCRK

SEQ ID NO: 97995 - protein, 8 aa, Homo Sapiens
KGCRKGWK

SEQ ID NO: 97996 - protein, 8 aa, Homo Sapiens
GCRKGWKK

SEQ ID NO: 97997 - protein, 8 aa, Homo Sapiens
KGWKKHHF

SEQ ID NO: 97998 - protein, 8 aa, Homo Sapiens
CYMIGHTL

SEQ ID NO: 97999 - protein, 8 aa, Homo Sapiens
YMIGHTLS

SEQ ID NO: 98000 - protein, 8 aa, Homo Sapiens
MIGHTLST

SEQ ID NO: 98001 - protein, 8 aa, Homo Sapiens
TLSTFAEA

SEQ ID NO: 98002 - protein, 8 aa, Homo Sapiens
STFAEANQ

SEQ ID NO: 98003 - protein, 8 aa, Homo Sapiens
TCNNENAY

SEQ ID NO: 98004 - protein, 8 aa, Homo Sapiens
ENAYLTTI

SEQ ID NO: 98005 - protein, 8 aa, Homo Sapiens
YLTTIEDR

SEQ ID NO: 98006 - protein, 8 aa, Homo Sapiens
LTTIEDRY

SEQ ID NO: 98007 - protein, 8 aa, Homo Sapiens
EQAFLTSF

SEQ ID NO: 98008 - protein, 8 aa, Homo Sapiens
QAFLTSFV

SEQ ID NO: 98009 - protein, 8 aa, Homo Sapiens
FLTSFVGL

SEQ ID NO: 98010 - protein, 8 aa, Homo Sapiens
LTSFVGLR

SEQ ID NO: 98011 - protein, 8 aa, Homo Sapiens
FVGLRPEK

SEQ ID NO: 98012 - protein, 8 aa, Homo Sapiens
EKYFWTGL

SEQ ID NO: 98013 - protein, 8 aa, Homo Sapiens
GLSDIQTK

SEQ ID NO: 98014 - protein, 8 aa, Homo Sapiens
DIQTKGTF

SEQ ID NO: 98015 - protein, 8 aa, Homo Sapiens
QTKGTFQW

SEQ ID NO: 98016 - protein, 8 aa, Homo Sapiens
FQWTIEEE

SEQ ID NO: 98017 - protein, 8 aa, Homo Sapiens
WTIEEEVR

SEQ ID NO: 98018 - protein, 8 aa, Homo Sapiens
EEVRFTHW

SEQ ID NO: 98019 - protein, 8 aa, Homo Sapiens
FTHWNSDM

SEQ ID NO: 98020 - protein, 8 aa, Homo Sapiens
NSDMPGRK

SEQ ID NO: 98021 - protein, 8 aa, Homo Sapiens
MPGRKPGC

SEQ ID NO: 98022 - protein, 8 aa, Homo Sapiens
CVAMRTGI

SEQ ID NO: 98023 - protein, 8 aa, Homo Sapiens
TGIAGGLW

SEQ ID NO: 98024 - protein, 8 aa, Homo Sapiens
IAGGLWDV

SEQ ID NO: 98025 - protein, 8 aa, Homo Sapiens
GLWDVLKC

SEQ ID NO: 98026 - protein, 8 aa, Homo Sapiens
DVLKCDEK

SEQ ID NO: 98027 - protein, 8 aa, Homo Sapiens
EKAKFVCK

SEQ ID NO: 98028 - protein, 8 aa, Homo Sapiens
PTTTPEPK

SEQ ID NO: 98029 - protein, 8 aa, Homo Sapiens
GASSRTSL

SEQ ID NO: 98030 - protein, 8 aa, Homo Sapiens
SSRTSLCF

SEQ ID NO: 98031 - protein, 8 aa, Homo Sapiens
RTSLCFKL

SEQ ID NO: 98032 - protein, 8 aa, Homo Sapiens
TSLCFKLY

SEQ ID NO: 98033 - protein, 8 aa, Homo Sapiens
SLCFKLYA

SEQ ID NO: 98034 - protein, 8 aa, Homo Sapiens
LCFKLYAK

SEQ ID NO: 98035 - protein, 8 aa, Homo Sapiens
KLYAKGKI

SEQ ID NO: 98036 - protein, 8 aa, Homo Sapiens
YAKGKIEK

SEQ ID NO: 98037 - protein, 8 aa, Homo Sapiens
KIEKKTWF

SEQ ID NO: 98038 - protein, 8 aa, Homo Sapiens
TWFESRDF

SEQ ID NO: 98039 - protein, 8 aa, Homo Sapiens
SRDFCRAL

SEQ ID NO: 98040 - protein, 8 aa, Homo Sapiens
RALGGDLA

SEQ ID NO: 98041 - protein, 8 aa, Homo Sapiens
ALGGDLAS

SEQ ID NO: 98042 - protein, 8 aa, Homo Sapiens
DLASINNK

SEQ ID NO: 98043 - protein, 8 aa, Homo Sapiens
KEEQQTIW

SEQ ID NO: 98044 - protein, 8 aa, Homo Sapiens
TIWRLITA

SEQ ID NO: 98045 - protein, 8 aa, Homo Sapiens
RLITASGS

SEQ ID NO: 98046 - protein, 8 aa, Homo Sapiens
LITASGSY

SEQ ID NO: 98047 - protein, 8 aa, Homo Sapiens
TASGSYHK

SEQ ID NO: 98048 - protein, 8 aa, Homo Sapiens
GSYHKLFW

SEQ ID NO: 98049 - protein, 8 aa, Homo Sapiens
SYHKLFWL

SEQ ID NO: 98050 - protein, 8 aa, Homo Sapiens
KLFWLGLT

SEQ ID NO: 98051 - protein, 8 aa, Homo Sapiens
LFWLGLTY

SEQ ID NO: 98052 - protein, 8 aa, Homo Sapiens
SPSEGFTW

SEQ ID NO: 98053 - protein, 8 aa, Homo Sapiens
TWSDGSPV

SEQ ID NO: 98054 - protein, 8 aa, Homo Sapiens
SPVSYENW

SEQ ID NO: 98055 - protein, 8 aa, Homo Sapiens
VSYENWAY

SEQ ID NO: 98056 - protein, 8 aa, Homo Sapiens
EPNNYQNV

SEQ ID NO: 98057 - protein, 8 aa, Homo Sapiens
ELKGDPTM

SEQ ID NO: 98058 - protein, 8 aa, Homo Sapiens
KGDPTMSW

SEQ ID NO: 98059 - protein, 8 aa, Homo Sapiens
CEHLNNWI

SEQ ID NO: 98060 - protein, 8 aa, Homo Sapiens
HLNNWICQ

SEQ ID NO: 98061 - protein, 8 aa, Homo Sapiens
NWICQIQK

SEQ ID NO: 98062 - protein, 8 aa, Homo Sapiens
IQKGQTPK

SEQ ID NO: 98063 - protein, 8 aa, Homo Sapiens
APQDNPPV

SEQ ID NO: 98064 - protein, 8 aa, Homo Sapiens
PPVTEDGW

SEQ ID NO: 98065 - protein, 8 aa, Homo Sapiens
PVTEDGWV

SEQ ID NO: 98066 - protein, 8 aa, Homo Sapiens
VTEDGWVI

SEQ ID NO: 98067 - protein, 8 aa, Homo Sapiens
TEDGWVIY

SEQ ID NO: 98068 - protein, 8 aa, Homo Sapiens
VIYKDYQY

SEQ ID NO: 98069 - protein, 8 aa, Homo Sapiens
IYKDYQYY

SEQ ID NO: 98070 - protein, 8 aa, Homo Sapiens
DYQYYFSK

SEQ ID NO: 98071 - protein, 8 aa, Homo Sapiens
YQYYFSKE

SEQ ID NO: 98072 - protein, 8 aa, Homo Sapiens
QYYFSKEK

SEQ ID NO: 98073 - protein, 8 aa, Homo Sapiens
ETMDNARA

SEQ ID NO: 98074 - protein, 8 aa, Homo Sapiens
TMDNARAF

SEQ ID NO: 98075 - protein, 8 aa, Homo Sapiens
DNARAFCK

SEQ ID NO: 98076 - protein, 8 aa, Homo Sapiens
NARAFCKR

SEQ ID NO: 98077 - protein, 8 aa, Homo Sapiens
SIQSESEK

SEQ ID NO: 98078 - protein, 8 aa, Homo Sapiens
SESEKKFL

SEQ ID NO: 98079 - protein, 8 aa, Homo Sapiens
FLWKYVNR

SEQ ID NO: 98080 - protein, 8 aa, Homo Sapiens
DAQSAYFI

SEQ ID NO: 98081 - protein, 8 aa, Homo Sapiens
QSAYFIGL

SEQ ID NO: 98082 - protein, 8 aa, Homo Sapiens
SAYFIGLL

SEQ ID NO: 98083 - protein, 8 aa, Homo Sapiens
AYFIGLLI

SEQ ID NO: 98084 - protein, 8 aa, Homo Sapiens
FIGLLISL

SEQ ID NO: 98085 - protein, 8 aa, Homo Sapiens
GLLISLDK

SEQ ID NO: 98086 - protein, 8 aa, Homo Sapiens
LLISLDKK

SEQ ID NO: 98087 - protein, 8 aa, Homo Sapiens
SLDKKFAW

SEQ ID NO: 98088 - protein, 8 aa, Homo Sapiens
FAWMDGSK

SEQ ID NO: 98089 - protein, 8 aa, Homo Sapiens
DGSKVDYV

SEQ ID NO: 98090 - protein, 8 aa, Homo Sapiens
KVDYVSWA

SEQ ID NO: 98091 - protein, 8 aa, Homo Sapiens
WATGEPNF

SEQ ID NO: 98092 - protein, 8 aa, Homo Sapiens
ATGEPNFA

SEQ ID NO: 98093 - protein, 8 aa, Homo Sapiens
DENCVTMY

SEQ ID NO: 98094 - protein, 8 aa, Homo Sapiens
TMYSNSGF

SEQ ID NO: 98095 - protein, 8 aa, Homo Sapiens
MYSNSGFW

SEQ ID NO: 98096 - protein, 8 aa, Homo Sapiens
CGYPNAFI

SEQ ID NO: 98097 - protein, 8 aa, Homo Sapiens
SSINATTV

SEQ ID NO: 98098 - protein, 8 aa, Homo Sapiens
SINATTVM

SEQ ID NO: 98099 - protein, 8 aa, Homo Sapiens
ATTVMPTM

SEQ ID NO: 98100 - protein, 8 aa, Homo Sapiens
TVMPTMPS

SEQ ID NO: 98101 - protein, 8 aa, Homo Sapiens
VMPTMPSV

SEQ ID NO: 98102 - protein, 8 aa, Homo Sapiens
MPTMPSVP

SEQ ID NO: 98103 - protein, 8 aa, Homo Sapiens
MPSVPSGC

SEQ ID NO: 98104 - protein, 8 aa, Homo Sapiens
NFYSNKCF

SEQ ID NO: 98105 - protein, 8 aa, Homo Sapiens
FYSNKCFK

SEQ ID NO: 98106 - protein, 8 aa, Homo Sapiens
KCFKIFGF

SEQ ID NO: 98107 - protein, 8 aa, Homo Sapiens
FGFMEEER

SEQ ID NO: 98108 - protein, 8 aa, Homo Sapiens
IGFGGNLV

SEQ ID NO: 98109 - protein, 8 aa, Homo Sapiens
LVSIQNEK

SEQ ID NO: 98110 - protein, 8 aa, Homo Sapiens
NEKEQAFL

SEQ ID NO: 98111 - protein, 8 aa, Homo Sapiens
KEQAFLTY

SEQ ID NO: 98112 - protein, 8 aa, Homo Sapiens
QAFLTYHM

SEQ ID NO: 98113 - protein, 8 aa, Homo Sapiens
AFLTYHMK

SEQ ID NO: 98114 - protein, 8 aa, Homo Sapiens
YHMKDSTF

SEQ ID NO: 98115 - protein, 8 aa, Homo Sapiens
MKDSTFSA

SEQ ID NO: 98116 - protein, 8 aa, Homo Sapiens
DVNSEHTF

SEQ ID NO: 98117 - protein, 8 aa, Homo Sapiens
NSEHTFLW

SEQ ID NO: 98118 - protein, 8 aa, Homo Sapiens
TFLWTDGR

SEQ ID NO: 98119 - protein, 8 aa, Homo Sapiens
RGVHYTNW

SEQ ID NO: 98120 - protein, 8 aa, Homo Sapiens
YTNWGKGY

SEQ ID NO: 98121 - protein, 8 aa, Homo Sapiens
KGYPGGRR

SEQ ID NO: 98122 - protein, 8 aa, Homo Sapiens
YPGGRRSS

SEQ ID NO: 98123 - protein, 8 aa, Homo Sapiens
GRRSSLSY

SEQ ID NO: 98124 - protein, 8 aa, Homo Sapiens
SYEDADCV

SEQ ID NO: 98125 - protein, 8 aa, Homo Sapiens
YEDADCVV

SEQ ID NO: 98126 - protein, 8 aa, Homo Sapiens
EDADCVVI

SEQ ID NO: 98127 - protein, 8 aa, Homo Sapiens
CVVIIGGA

SEQ ID NO: 98128 - protein, 8 aa, Homo Sapiens
GASNEAGK

SEQ ID NO: 98129 - protein, 8 aa, Homo Sapiens
ASNEAGKW

SEQ ID NO: 98130 - protein, 8 aa, Homo Sapiens
WMDDTCDS

SEQ ID NO: 98131 - protein, 8 aa, Homo Sapiens
RGYICQTR

SEQ ID NO: 98132 - protein, 8 aa, Homo Sapiens
SLTNPPAT

SEQ ID NO: 98133 - protein, 8 aa, Homo Sapiens
LTNPPATI

SEQ ID NO: 98134 - protein, 8 aa, Homo Sapiens
ATIQTDGF

SEQ ID NO: 98135 - protein, 8 aa, Homo Sapiens
TIQTDGFV

SEQ ID NO: 98136 - protein, 8 aa, Homo Sapiens
IQTDGFVK

SEQ ID NO: 98137 - protein, 8 aa, Homo Sapiens
QTDGFVKY

SEQ ID NO: 98138 - protein, 8 aa, Homo Sapiens
KSSYSLMR

SEQ ID NO: 98139 - protein, 8 aa, Homo Sapiens
SSYSLMRQ

SEQ ID NO: 98140 - protein, 8 aa, Homo Sapiens
SYSLMRQK

SEQ ID NO: 98141 - protein, 8 aa, Homo Sapiens
YSLMRQKF

SEQ ID NO: 98142 - protein, 8 aa, Homo Sapiens
SLMRQKFQ

SEQ ID NO: 98143 - protein, 8 aa, Homo Sapiens
LMRQKFQW

SEQ ID NO: 98144 - protein, 8 aa, Homo Sapiens
FQWHEAET

SEQ ID NO: 98145 - protein, 8 aa, Homo Sapiens
QWHEAETY

SEQ ID NO: 98146 - protein, 8 aa, Homo Sapiens
YCKLHNSL

SEQ ID NO: 98147 - protein, 8 aa, Homo Sapiens
KLHNSLIA

SEQ ID NO: 98148 - protein, 8 aa, Homo Sapiens
IASILDPY

SEQ ID NO: 98149 - protein, 8 aa, Homo Sapiens
ILDPYSNA

SEQ ID NO: 98150 - protein, 8 aa, Homo Sapiens
DPYSNAFA

SEQ ID NO: 98151 - protein, 8 aa, Homo Sapiens
PYSNAFAW

SEQ ID NO: 98152 - protein, 8 aa, Homo Sapiens
YSNAFAWL

SEQ ID NO: 98153 - protein, 8 aa, Homo Sapiens
NAFAWLQM

SEQ ID NO: 98154 - protein, 8 aa, Homo Sapiens
FAWLQMET

SEQ ID NO: 98155 - protein, 8 aa, Homo Sapiens
LQMETSNE

SEQ ID NO: 98156 - protein, 8 aa, Homo Sapiens
QMETSNER

SEQ ID NO: 98157 - protein, 8 aa, Homo Sapiens
ETSNERVW

SEQ ID NO: 98158 - protein, 8 aa, Homo Sapiens
NERVWIAL

SEQ ID NO: 98159 - protein, 8 aa, Homo Sapiens
WIALNSNL

SEQ ID NO: 98160 - protein, 8 aa, Homo Sapiens
NLTDNQYT

SEQ ID NO: 98161 - protein, 8 aa, Homo Sapiens
LTDNQYTW

SEQ ID NO: 98162 - protein, 8 aa, Homo Sapiens
NQYTWTDK

SEQ ID NO: 98163 - protein, 8 aa, Homo Sapiens
QYTWTDKW

SEQ ID NO: 98164 - protein, 8 aa, Homo Sapiens
YTWTDKWR

SEQ ID NO: 98165 - protein, 8 aa, Homo Sapiens
TWTDKWRV

SEQ ID NO: 98166 - protein, 8 aa, Homo Sapiens
RVRYTNWA

SEQ ID NO: 98167 - protein, 8 aa, Homo Sapiens
WAADEPKL

SEQ ID NO: 98168 - protein, 8 aa, Homo Sapiens
AADEPKLK

SEQ ID NO: 98169 - protein, 8 aa, Homo Sapiens
KLKSACVY

SEQ ID NO: 98170 - protein, 8 aa, Homo Sapiens
LKSACVYL

SEQ ID NO: 98171 - protein, 8 aa, Homo Sapiens
VYLDLDGY

SEQ ID NO: 98172 - protein, 8 aa, Homo Sapiens
YLDLDGYW

SEQ ID NO: 98173 - protein, 8 aa, Homo Sapiens
DLDGYWKT

SEQ ID NO: 98174 - protein, 8 aa, Homo Sapiens
TAHCNESF

SEQ ID NO: 98175 - protein, 8 aa, Homo Sapiens
ESFYFLCK

SEQ ID NO: 98176 - protein, 8 aa, Homo Sapiens
SFYFLCKR

SEQ ID NO: 98177 - protein, 8 aa, Homo Sapiens
PESDHTAW

SEQ ID NO: 98178 - protein, 8 aa, Homo Sapiens
HTAWIPFH

SEQ ID NO: 98179 - protein, 8 aa, Homo Sapiens
IPFHGHCY

SEQ ID NO: 98180 - protein, 8 aa, Homo Sapiens
PFHGHCYY

SEQ ID NO: 98181 - protein, 8 aa, Homo Sapiens
CYYIESSY

SEQ ID NO: 98182 - protein, 8 aa, Homo Sapiens
YYIESSYT

SEQ ID NO: 98183 - protein, 8 aa, Homo Sapiens
YIESSYTR

SEQ ID NO: 98184 - protein, 8 aa, Homo Sapiens
ESSYTRNW

SEQ ID NO: 98185 - protein, 8 aa, Homo Sapiens
YTRNWGQA

SEQ ID NO: 98186 - protein, 8 aa, Homo Sapiens
GQASLECL

SEQ ID NO: 98187 - protein, 8 aa, Homo Sapiens
QASLECLR

SEQ ID NO: 98188 - protein, 8 aa, Homo Sapiens
CLRMGSSL

SEQ ID NO: 98189 - protein, 8 aa, Homo Sapiens
MGSSLVSI

SEQ ID NO: 98190 - protein, 8 aa, Homo Sapiens
SLVSIESA

SEQ ID NO: 98191 - protein, 8 aa, Homo Sapiens
ESAAESSF

SEQ ID NO: 98192 - protein, 8 aa, Homo Sapiens
SAAESSFL

SEQ ID NO: 98193 - protein, 8 aa, Homo Sapiens
AESSFLSY

SEQ ID NO: 98194 - protein, 8 aa, Homo Sapiens
ESSFLSYR

SEQ ID NO: 98195 - protein, 8 aa, Homo Sapiens
SSFLSYRV

SEQ ID NO: 98196 - protein, 8 aa, Homo Sapiens
SYRVEPLK

SEQ ID NO: 98197 - protein, 8 aa, Homo Sapiens
RVEPLKSK

SEQ ID NO: 98198 - protein, 8 aa, Homo Sapiens
KTNFWIGL

SEQ ID NO: 98199 - protein, 8 aa, Homo Sapiens
NFWIGLFR

SEQ ID NO: 98200 - protein, 8 aa, Homo Sapiens
WIGLFRNV

SEQ ID NO: 98201 - protein, 8 aa, Homo Sapiens
NNSPVSFV

SEQ ID NO: 98202 - protein, 8 aa, Homo Sapiens
SPVSFVNW

SEQ ID NO: 98203 - protein, 8 aa, Homo Sapiens
ALHASSGF

SEQ ID NO: 98204 - protein, 8 aa, Homo Sapiens
NIHCSSYK

SEQ ID NO: 98205 - protein, 8 aa, Homo Sapiens
SYKGYICK

SEQ ID NO: 98206 - protein, 8 aa, Homo Sapiens
GYICKRPK

SEQ ID NO: 98207 - protein, 8 aa, Homo Sapiens
LTTKADTR

SEQ ID NO: 98208 - protein, 8 aa, Homo Sapiens
TTKADTRK

SEQ ID NO: 98209 - protein, 8 aa, Homo Sapiens
KMDPSKPS

SEQ ID NO: 98210 - protein, 8 aa, Homo Sapiens
KPSSNVAG

SEQ ID NO: 98211 - protein, 8 aa, Homo Sapiens
NVAGVVII

SEQ ID NO: 98212 - protein, 8 aa, Homo Sapiens
VAGVVIIV

SEQ ID NO: 98213 - protein, 8 aa, Homo Sapiens
GVVIIVIL

SEQ ID NO: 98214 - protein, 8 aa, Homo Sapiens
VVIIVILL

SEQ ID NO: 98215 - protein, 8 aa, Homo Sapiens
VIIVILLI

SEQ ID NO: 98216 - protein, 8 aa, Homo Sapiens
IIVILLIL

SEQ ID NO: 98217 - protein, 8 aa, Homo Sapiens
ILLILTGA

SEQ ID NO: 98218 - protein, 8 aa, Homo Sapiens
LILTGAGL

SEQ ID NO: 98219 - protein, 8 aa, Homo Sapiens
ILTGAGLA

SEQ ID NO: 98220 - protein, 8 aa, Homo Sapiens
TGAGLAAY

SEQ ID NO: 98221 - protein, 8 aa, Homo Sapiens
GLAAYFFY

SEQ ID NO: 98222 - protein, 8 aa, Homo Sapiens
LAAYFFYK

SEQ ID NO: 98223 - protein, 8 aa, Homo Sapiens
AAYFFYKK

SEQ ID NO: 98224 - protein, 8 aa, Homo Sapiens
AYFFYKKR

SEQ ID NO: 98225 - protein, 8 aa, Homo Sapiens
YFFYKKRR

SEQ ID NO: 98226 - protein, 8 aa, Homo Sapiens
FFYKKRRV

SEQ ID NO: 98227 - protein, 8 aa, Homo Sapiens
YKKRRVHL

SEQ ID NO: 98228 - protein, 8 aa, Homo Sapiens
KRRVHLPQ

SEQ ID NO: 98229 - protein, 8 aa, Homo Sapiens
HLPQEGAF

SEQ ID NO: 98230 - protein, 8 aa, Homo Sapiens
EGAFENTL

SEQ ID NO: 98231 - protein, 8 aa, Homo Sapiens
GAFENTLY

SEQ ID NO: 98232 - protein, 8 aa, Homo Sapiens
AFENTLYF

SEQ ID NO: 98233 - protein, 8 aa, Homo Sapiens
TLYFNSQS

SEQ ID NO: 98234 - protein, 8 aa, Homo Sapiens
DLVGNIEQ

SEQ ID NO: 98235 - protein, 9 aa, Homo Sapiens
MRLPLLLVF

SEQ ID NO: 98236 - protein, 9 aa, Homo Sapiens
RLPLLLVFA

SEQ ID NO: 98237 - protein, 9 aa, Homo Sapiens
LPLLLVFAS

SEQ ID NO: 98238 - protein, 9 aa, Homo Sapiens
PLLLVFASV

SEQ ID NO: 98239 - protein, 9 aa, Homo Sapiens
LLLVFASVI

SEQ ID NO: 98240 - protein, 9 aa, Homo Sapiens
FASVIPGAV

SEQ ID NO: 98241 - protein, 9 aa, Homo Sapiens
SVIPGAVLL

SEQ ID NO: 98242 - protein, 9 aa, Homo Sapiens
VIPGAVLLL

SEQ ID NO: 98243 - protein, 9 aa, Homo Sapiens
VLLLDTRQF

SEQ ID NO: 98244 - protein, 9 aa, Homo Sapiens
LLLDTRQFL

SEQ ID NO: 98245 - protein, 9 aa, Homo Sapiens
LLDTRQFLI

SEQ ID NO: 98246 - protein, 9 aa, Homo Sapiens
FLIYNEDHK

SEQ ID NO: 98247 - protein, 9 aa, Homo Sapiens
LIYNEDHKR

SEQ ID NO: 98248 - protein, 9 aa, Homo Sapiens
CVDAVSPSA

SEQ ID NO: 98249 - protein, 9 aa, Homo Sapiens
SPSAVQTAA

SEQ ID NO: 98250 - protein, 9 aa, Homo Sapiens
QTAACNQDA

SEQ ID NO: 98251 - protein, 9 aa, Homo Sapiens
AESQKFRWV

SEQ ID NO: 98252 - protein, 9 aa, Homo Sapiens
FRWVSESQI

SEQ ID NO: 98253 - protein, 9 aa, Homo Sapiens
ESQIMSVAF

SEQ ID NO: 98254 - protein, 9 aa, Homo Sapiens
SQIMSVAFK

SEQ ID NO: 98255 - protein, 9 aa, Homo Sapiens
QIMSVAFKL

SEQ ID NO: 98256 - protein, 9 aa, Homo Sapiens
MSVAFKLCL

SEQ ID NO: 98257 - protein, 9 aa, Homo Sapiens
VAFKLCLGV

SEQ ID NO: 98258 - protein, 9 aa, Homo Sapiens
KLCLGVPSK

SEQ ID NO: 98259 - protein, 9 aa, Homo Sapiens
LGVPSKTDW

SEQ ID NO: 98260 - protein, 9 aa, Homo Sapiens
GVPSKTDWV

SEQ ID NO: 98261 - protein, 9 aa, Homo Sapiens
VPSKTDWVA

SEQ ID NO: 98262 - protein, 9 aa, Homo Sapiens
KTDWVAITL

SEQ ID NO: 98263 - protein, 9 aa, Homo Sapiens
TDWVAITLY

SEQ ID NO: 98264 - protein, 9 aa, Homo Sapiens
WVAITLYAC

SEQ ID NO: 98265 - protein, 9 aa, Homo Sapiens
ITLYACDSK

SEQ ID NO: 98266 - protein, 9 aa, Homo Sapiens
YACDSKSEF

SEQ ID NO: 98267 - protein, 9 aa, Homo Sapiens
DSKSEFQKW

SEQ ID NO: 98268 - protein, 9 aa, Homo Sapiens
WECKNDTLL

SEQ ID NO: 98269 - protein, 9 aa, Homo Sapiens
KGEDLFFNY

SEQ ID NO: 98270 - protein, 9 aa, Homo Sapiens
DLFFNYGNR

SEQ ID NO: 98271 - protein, 9 aa, Homo Sapiens
FNYGNRQEK

SEQ ID NO: 98272 - protein, 9 aa, Homo Sapiens
RQEKNIMLY

SEQ ID NO: 98273 - protein, 9 aa, Homo Sapiens
IMLYKGSGL

SEQ ID NO: 98274 - protein, 9 aa, Homo Sapiens
MLYKGSGLW

SEQ ID NO: 98275 - protein, 9 aa, Homo Sapiens
YKGSGLWSR

SEQ ID NO: 98276 - protein, 9 aa, Homo Sapiens
KGSGLWSRW

SEQ ID NO: 98277 - protein, 9 aa, Homo Sapiens
GSGLWSRWK

SEQ ID NO: 98278 - protein, 9 aa, Homo Sapiens
SRWKIYGTT

SEQ ID NO: 98279 - protein, 9 aa, Homo Sapiens
KIYGTTDNL

SEQ ID NO: 98280 - protein, 9 aa, Homo Sapiens
GTTDNLCSR

SEQ ID NO: 98281 - protein, 9 aa, Homo Sapiens
NLCSRGYEA

SEQ ID NO: 98282 - protein, 9 aa, Homo Sapiens
RGYEAMYTL

SEQ ID NO: 98283 - protein, 9 aa, Homo Sapiens
GYEAMYTLL

SEQ ID NO: 98284 - protein, 9 aa, Homo Sapiens
AMYTLLGNA

SEQ ID NO: 98285 - protein, 9 aa, Homo Sapiens
TLLGNANGA

SEQ ID NO: 98286 - protein, 9 aa, Homo Sapiens
NANGATCAF

SEQ ID NO: 98287 - protein, 9 aa, Homo Sapiens
GATCAFPFK

SEQ ID NO: 98288 - protein, 9 aa, Homo Sapiens
ATCAFPFKF

SEQ ID NO: 98289 - protein, 9 aa, Homo Sapiens
FPFKFENKW

SEQ ID NO: 98290 - protein, 9 aa, Homo Sapiens
FKFENKWYA

SEQ ID NO: 98291 - protein, 9 aa, Homo Sapiens
YADCTSAGR

SEQ ID NO: 98292 - protein, 9 aa, Homo Sapiens
TSAGRSDGW

SEQ ID NO: 98293 - protein, 9 aa, Homo Sapiens
WLWCGTTTD

SEQ ID NO: 98294 - protein, 9 aa, Homo Sapiens
TTTDYDTDK

SEQ ID NO: 98295 - protein, 9 aa, Homo Sapiens
KLFGYCPLK

SEQ ID NO: 98296 - protein, 9 aa, Homo Sapiens
LFGYCPLKF

SEQ ID NO: 98297 - protein, 9 aa, Homo Sapiens
LKFEGSESL

SEQ ID NO: 98298 - protein, 9 aa, Homo Sapiens
EGSESLWNK

SEQ ID NO: 98299 - protein, 9 aa, Homo Sapiens
SLWNKDPLT

SEQ ID NO: 98300 - protein, 9 aa, Homo Sapiens
PLTSVSYQI

SEQ ID NO: 98301 - protein, 9 aa, Homo Sapiens
SVSYQINSK

SEQ ID NO: 98302 - protein, 9 aa, Homo Sapiens
YQINSKSAL

SEQ ID NO: 98303 - protein, 9 aa, Homo Sapiens
INSKSALSW

SEQ ID NO: 98304 - protein, 9 aa, Homo Sapiens
SALSWHQAR

SEQ ID NO: 98305 - protein, 9 aa, Homo Sapiens
ALSWHQARK

SEQ ID NO: 98306 - protein, 9 aa, Homo Sapiens
QQNAELLSI

SEQ ID NO: 98307 - protein, 9 aa, Homo Sapiens
AELLSITEI

SEQ ID NO: 98308 - protein, 9 aa, Homo Sapiens
SITEIHEQT

SEQ ID NO: 98309 - protein, 9 aa, Homo Sapiens
ITEIHEQTY

SEQ ID NO: 98310 - protein, 9 aa, Homo Sapiens
TEIHEQTYL

SEQ ID NO: 98311 - protein, 9 aa, Homo Sapiens
EIHEQTYLT

SEQ ID NO: 98312 - protein, 9 aa, Homo Sapiens
HEQTYLTGL

SEQ ID NO: 98313 - protein, 9 aa, Homo Sapiens
YLTGLTSSL

SEQ ID NO: 98314 - protein, 9 aa, Homo Sapiens
LTSSLTSGL

SEQ ID NO: 98315 - protein, 9 aa, Homo Sapiens
TSSLTSGLW

SEQ ID NO: 98316 - protein, 9 aa, Homo Sapiens
SLTSGLWIG

SEQ ID NO: 98317 - protein, 9 aa, Homo Sapiens
LTSGLWIGL

SEQ ID NO: 98318 - protein, 9 aa, Homo Sapiens
GLWIGLNSL

SEQ ID NO: 98319 - protein, 9 aa, Homo Sapiens
WIGLNSLSF

SEQ ID NO: 98320 - protein, 9 aa, Homo Sapiens
GLNSLSFNS

SEQ ID NO: 98321 - protein, 9 aa, Homo Sapiens
NSLSFNSGW

SEQ ID NO: 98322 - protein, 9 aa, Homo Sapiens
SLSFNSGWQ

SEQ ID NO: 98323 - protein, 9 aa, Homo Sapiens
LSFNSGWQW

SEQ ID NO: 98324 - protein, 9 aa, Homo Sapiens
NSGWQWSDR

SEQ ID NO: 98325 - protein, 9 aa, Homo Sapiens
WQWSDRSPF

SEQ ID NO: 98326 - protein, 9 aa, Homo Sapiens
QWSDRSPFR

SEQ ID NO: 98327 - protein, 9 aa, Homo Sapiens
WSDRSPFRY

SEQ ID NO: 98328 - protein, 9 aa, Homo Sapiens
RSPFRYLNW

SEQ ID NO: 98329 - protein, 9 aa, Homo Sapiens
SPFRYLNWL

SEQ ID NO: 98330 - protein, 9 aa, Homo Sapiens
YLNWLPGSP

SEQ ID NO: 98331 - protein, 9 aa, Homo Sapiens
GSPSAEPGK

SEQ ID NO: 98332 - protein, 9 aa, Homo Sapiens
SAEPGKSCV

SEQ ID NO: 98333 - protein, 9 aa, Homo Sapiens
AEPGKSCVS

SEQ ID NO: 98334 - protein, 9 aa, Homo Sapiens
EPGKSCVSL

SEQ ID NO: 98335 - protein, 9 aa, Homo Sapiens
SLNPGKNAK

SEQ ID NO: 98336 - protein, 9 aa, Homo Sapiens
AKWENLECV

SEQ ID NO: 98337 - protein, 9 aa, Homo Sapiens
LECVQKLGY

SEQ ID NO: 98338 - protein, 9 aa, Homo Sapiens
VQKLGYICK

SEQ ID NO: 98339 - protein, 9 aa, Homo Sapiens
NTTLNSFVI

SEQ ID NO: 98340 - protein, 9 aa, Homo Sapiens
TLNSFVIPS

SEQ ID NO: 98341 - protein, 9 aa, Homo Sapiens
NSFVIPSES

SEQ ID NO: 98342 - protein, 9 aa, Homo Sapiens
FVIPSESDV

SEQ ID NO: 98343 - protein, 9 aa, Homo Sapiens
IPSESDVPT

SEQ ID NO: 98344 - protein, 9 aa, Homo Sapiens
VPTHCPSQW

SEQ ID NO: 98345 - protein, 9 aa, Homo Sapiens
HCPSQWWPY

SEQ ID NO: 98346 - protein, 9 aa, Homo Sapiens
CPSQWWPYA

SEQ ID NO: 98347 - protein, 9 aa, Homo Sapiens
WWPYAGHCY

SEQ ID NO: 98348 - protein, 9 aa, Homo Sapiens
WPYAGHCYK

SEQ ID NO: 98349 - protein, 9 aa, Homo Sapiens
PYAGHCYKI

SEQ ID NO: 98350 - protein, 9 aa, Homo Sapiens
AGHCYKIHR

SEQ ID NO: 98351 - protein, 9 aa, Homo Sapiens
CYKIHRDEK

SEQ ID NO: 98352 - protein, 9 aa, Homo Sapiens
IQRDALTTC

SEQ ID NO: 98353 - protein, 9 aa, Homo Sapiens
ASIHTIEEF

SEQ ID NO: 98354 - protein, 9 aa, Homo Sapiens
HTIEEFDFI

SEQ ID NO: 98355 - protein, 9 aa, Homo Sapiens
TIEEFDFII

SEQ ID NO: 98356 - protein, 9 aa, Homo Sapiens
EEFDFIISQ

SEQ ID NO: 98357 - protein, 9 aa, Homo Sapiens
DFIISQLGY

SEQ ID NO: 98358 - protein, 9 aa, Homo Sapiens
FIISQLGYE

SEQ ID NO: 98359 - protein, 9 aa, Homo Sapiens
GYEPNDELW

SEQ ID NO: 98360 - protein, 9 aa, Homo Sapiens
YEPNDELWI

SEQ ID NO: 98361 - protein, 9 aa, Homo Sapiens
DELWIGLND

SEQ ID NO: 98362 - protein, 9 aa, Homo Sapiens
ELWIGLNDI

SEQ ID NO: 98363 - protein, 9 aa, Homo Sapiens
GLNDIKIQM

SEQ ID NO: 98364 - protein, 9 aa, Homo Sapiens
DIKIQMYFE

SEQ ID NO: 98365 - protein, 9 aa, Homo Sapiens
IKIQMYFEW

SEQ ID NO: 98366 - protein, 9 aa, Homo Sapiens
IQMYFEWSD

SEQ ID NO: 98367 - protein, 9 aa, Homo Sapiens
FEWSDGTPV

SEQ ID NO: 98368 - protein, 9 aa, Homo Sapiens
WSDGTPVTF

SEQ ID NO: 98369 - protein, 9 aa, Homo Sapiens
DGTPVTFTK

SEQ ID NO: 98370 - protein, 9 aa, Homo Sapiens
GTPVTFTKW

SEQ ID NO: 98371 - protein, 9 aa, Homo Sapiens
TPVTFTKWL

SEQ ID NO: 98372 - protein, 9 aa, Homo Sapiens
PVTFTKWLR

SEQ ID NO: 98373 - protein, 9 aa, Homo Sapiens
RQEDCVVMK

SEQ ID NO: 98374 - protein, 9 aa, Homo Sapiens
WPLGYICKM

SEQ ID NO: 98375 - protein, 9 aa, Homo Sapiens
GYICKMKSR

SEQ ID NO: 98376 - protein, 9 aa, Homo Sapiens
KSRSQGPEI

SEQ ID NO: 98377 - protein, 9 aa, Homo Sapiens
SQGPEIVEV

SEQ ID NO: 98378 - protein, 9 aa, Homo Sapiens
IVEVEKGCR

SEQ ID NO: 98379 - protein, 9 aa, Homo Sapiens
KGCRKGWKK

SEQ ID NO: 98380 - protein, 9 aa, Homo Sapiens
KGWKKHHFY

SEQ ID NO: 98381 - protein, 9 aa, Homo Sapiens
YCYMIGHTL

SEQ ID NO: 98382 - protein, 9 aa, Homo Sapiens
YMIGHTLST

SEQ ID NO: 98383 - protein, 9 aa, Homo Sapiens
MIGHTLSTF

SEQ ID NO: 98384 - protein, 9 aa, Homo Sapiens
HTLSTFAEA

SEQ ID NO: 98385 - protein, 9 aa, Homo Sapiens
AEANQTCNN

SEQ ID NO: 98386 - protein, 9 aa, Homo Sapiens
QTCNNENAY

SEQ ID NO: 98387 - protein, 9 aa, Homo Sapiens
NENAYLTTI

SEQ ID NO: 98388 - protein, 9 aa, Homo Sapiens
AYLTTIEDR

SEQ ID NO: 98389 - protein, 9 aa, Homo Sapiens
YLTTIEDRY

SEQ ID NO: 98390 - protein, 9 aa, Homo Sapiens
TTIEDRYEQ

SEQ ID NO: 98391 - protein, 9 aa, Homo Sapiens
IEDRYEQAF

SEQ ID NO: 98392 - protein, 9 aa, Homo Sapiens
YEQAFLTSF

SEQ ID NO: 98393 - protein, 9 aa, Homo Sapiens
EQAFLTSFV

SEQ ID NO: 98394 - protein, 9 aa, Homo Sapiens
AFLTSFVGL

SEQ ID NO: 98395 - protein, 9 aa, Homo Sapiens
FLTSFVGLR

SEQ ID NO: 98396 - protein, 9 aa, Homo Sapiens
SFVGLRPEK

SEQ ID NO: 98397 - protein, 9 aa, Homo Sapiens
PEKYFWTGL

SEQ ID NO: 98398 - protein, 9 aa, Homo Sapiens
YFWTGLSDI

SEQ ID NO: 98399 - protein, 9 aa, Homo Sapiens
GLSDIQTKG

SEQ ID NO: 98400 - protein, 9 aa, Homo Sapiens
IQTKGTFQW

SEQ ID NO: 98401 - protein, 9 aa, Homo Sapiens
FQWTIEEEV

SEQ ID NO: 98402 - protein, 9 aa, Homo Sapiens
WTIEEEVRF

SEQ ID NO: 98403 - protein, 9 aa, Homo Sapiens
HWNSDMPGR

SEQ ID NO: 98404 - protein, 9 aa, Homo Sapiens
MPGRKPGCV

SEQ ID NO: 98405 - protein, 9 aa, Homo Sapiens
CVAMRTGIA

SEQ ID NO: 98406 - protein, 9 aa, Homo Sapiens
MRTGIAGGL

SEQ ID NO: 98407 - protein, 9 aa, Homo Sapiens
RTGIAGGLW

SEQ ID NO: 98408 - protein, 9 aa, Homo Sapiens
GIAGGLWDV

SEQ ID NO: 98409 - protein, 9 aa, Homo Sapiens
GLWDVLKCD

SEQ ID NO: 98410 - protein, 9 aa, Homo Sapiens
KCDEKAKFV

SEQ ID NO: 98411 - protein, 9 aa, Homo Sapiens
KAKFVCKHW

SEQ ID NO: 98412 - protein, 9 aa, Homo Sapiens
AEGVTHPPK

SEQ ID NO: 98413 - protein, 9 aa, Homo Sapiens
WGASSRTSL

SEQ ID NO: 98414 - protein, 9 aa, Homo Sapiens
ASSRTSLCF

SEQ ID NO: 98415 - protein, 9 aa, Homo Sapiens
SSRTSLCFK

SEQ ID NO: 98416 - protein, 9 aa, Homo Sapiens
RTSLCFKLY

SEQ ID NO: 98417 - protein, 9 aa, Homo Sapiens
SLCFKLYAK

SEQ ID NO: 98418 - protein, 9 aa, Homo Sapiens
LYAKGKIEK

SEQ ID NO: 98419 - protein, 9 aa, Homo Sapiens
YAKGKIEKK

SEQ ID NO: 98420 - protein, 9 aa, Homo Sapiens
EKKTWFESR

SEQ ID NO: 98421 - protein, 9 aa, Homo Sapiens
WFESRDFCR

SEQ ID NO: 98422 - protein, 9 aa, Homo Sapiens
FESRDFCRA

SEQ ID NO: 98423 - protein, 9 aa, Homo Sapiens
ALGGDLASI

SEQ ID NO: 98424 - protein, 9 aa, Homo Sapiens
EEQQTIWRL

SEQ ID NO: 98425 - protein, 9 aa, Homo Sapiens
QTIWRLITA

SEQ ID NO: 98426 - protein, 9 aa, Homo Sapiens
RLITASGSY

SEQ ID NO: 98427 - protein, 9 aa, Homo Sapiens
ITASGSYHK

SEQ ID NO: 98428 - protein, 9 aa, Homo Sapiens
TASGSYHKL

SEQ ID NO: 98429 - protein, 9 aa, Homo Sapiens
SGSYHKLFW

SEQ ID NO: 98430 - protein, 9 aa, Homo Sapiens
SYHKLFWLG

SEQ ID NO: 98431 - protein, 9 aa, Homo Sapiens
YHKLFWLGL

SEQ ID NO: 98432 - protein, 9 aa, Homo Sapiens
KLFWLGLTY

SEQ ID NO: 98433 - protein, 9 aa, Homo Sapiens
TYGSPSEGF

SEQ ID NO: 98434 - protein, 9 aa, Homo Sapiens
GSPSEGFTW

SEQ ID NO: 98435 - protein, 9 aa, Homo Sapiens
FTWSDGSPV

SEQ ID NO: 98436 - protein, 9 aa, Homo Sapiens
WSDGSPVSY

SEQ ID NO: 98437 - protein, 9 aa, Homo Sapiens
GSPVSYENW

SEQ ID NO: 98438 - protein, 9 aa, Homo Sapiens
SPVSYENWA

SEQ ID NO: 98439 - protein, 9 aa, Homo Sapiens
PVSYENWAY

SEQ ID NO: 98440 - protein, 9 aa, Homo Sapiens
WAYGEPNNY

SEQ ID NO: 98441 - protein, 9 aa, Homo Sapiens
GEPNNYQNV

SEQ ID NO: 98442 - protein, 9 aa, Homo Sapiens
EPNNYQNVE

SEQ ID NO: 98443 - protein, 9 aa, Homo Sapiens
NVEYCGELK

SEQ ID NO: 98444 - protein, 9 aa, Homo Sapiens
GELKGDPTM

SEQ ID NO: 98445 - protein, 9 aa, Homo Sapiens
HLNNWICQI

SEQ ID NO: 98446 - protein, 9 aa, Homo Sapiens
QIQKGQTPK

SEQ ID NO: 98447 - protein, 9 aa, Homo Sapiens
TPKPEPTPA

SEQ ID NO: 98448 - protein, 9 aa, Homo Sapiens
TPAPQDNPP

SEQ ID NO: 98449 - protein, 9 aa, Homo Sapiens
NPPVTEDGW

SEQ ID NO: 98450 - protein, 9 aa, Homo Sapiens
PVTEDGWVI

SEQ ID NO: 98451 - protein, 9 aa, Homo Sapiens
VTEDGWVIY

SEQ ID NO: 98452 - protein, 9 aa, Homo Sapiens
WVIYKDYQY

SEQ ID NO: 98453 - protein, 9 aa, Homo Sapiens
VIYKDYQYY

SEQ ID NO: 98454 - protein, 9 aa, Homo Sapiens
IYKDYQYYF

SEQ ID NO: 98455 - protein, 9 aa, Homo Sapiens
KDYQYYFSK

SEQ ID NO: 98456 - protein, 9 aa, Homo Sapiens
DYQYYFSKE

SEQ ID NO: 98457 - protein, 9 aa, Homo Sapiens
YQYYFSKEK

SEQ ID NO: 98458 - protein, 9 aa, Homo Sapiens
ETMDNARAF

SEQ ID NO: 98459 - protein, 9 aa, Homo Sapiens
TMDNARAFC

SEQ ID NO: 98460 - protein, 9 aa, Homo Sapiens
MDNARAFCK

SEQ ID NO: 98461 - protein, 9 aa, Homo Sapiens
DNARAFCKR

SEQ ID NO: 98462 - protein, 9 aa, Homo Sapiens
VSIQSESEK

SEQ ID NO: 98463 - protein, 9 aa, Homo Sapiens
SIQSESEKK

SEQ ID NO: 98464 - protein, 9 aa, Homo Sapiens
IQSESEKKF

SEQ ID NO: 98465 - protein, 9 aa, Homo Sapiens
SESEKKFLW

SEQ ID NO: 98466 - protein, 9 aa, Homo Sapiens
ESEKKFLWK

SEQ ID NO: 98467 - protein, 9 aa, Homo Sapiens
SEKKFLWKY

SEQ ID NO: 98468 - protein, 9 aa, Homo Sapiens
KFLWKYVNR

SEQ ID NO: 98469 - protein, 9 aa, Homo Sapiens
FLWKYVNRN

SEQ ID NO: 98470 - protein, 9 aa, Homo Sapiens
NRNDAQSAY

SEQ ID NO: 98471 - protein, 9 aa, Homo Sapiens
NDAQSAYFI

SEQ ID NO: 98472 - protein, 9 aa, Homo Sapiens
AQSAYFIGL

SEQ ID NO: 98473 - protein, 9 aa, Homo Sapiens
QSAYFIGLL

SEQ ID NO: 98474 - protein, 9 aa, Homo Sapiens
SAYFIGLLI

SEQ ID NO: 98475 - protein, 9 aa, Homo Sapiens
YFIGLLISL

SEQ ID NO: 98476 - protein, 9 aa, Homo Sapiens
GLLISLDKK

SEQ ID NO: 98477 - protein, 9 aa, Homo Sapiens
ISLDKKFAW

SEQ ID NO: 98478 - protein, 9 aa, Homo Sapiens
SLDKKFAWM

SEQ ID NO: 98479 - protein, 9 aa, Homo Sapiens
KFAWMDGSK

SEQ ID NO: 98480 - protein, 9 aa, Homo Sapiens
FAWMDGSKV

SEQ ID NO: 98481 - protein, 9 aa, Homo Sapiens
WMDGSKVDY

SEQ ID NO: 98482 - protein, 9 aa, Homo Sapiens
MDGSKVDYV

SEQ ID NO: 98483 - protein, 9 aa, Homo Sapiens
GSKVDYVSW

SEQ ID NO: 98484 - protein, 9 aa, Homo Sapiens
KVDYVSWAT

SEQ ID NO: 98485 - protein, 9 aa, Homo Sapiens
SWATGEPNF

SEQ ID NO: 98486 - protein, 9 aa, Homo Sapiens
FANEDENCV

SEQ ID NO: 98487 - protein, 9 aa, Homo Sapiens
VTMYSNSGF

SEQ ID NO: 98488 - protein, 9 aa, Homo Sapiens
TMYSNSGFW

SEQ ID NO: 98489 - protein, 9 aa, Homo Sapiens
FWNDINCGY

SEQ ID NO: 98490 - protein, 9 aa, Homo Sapiens
DINCGYPNA

SEQ ID NO: 98491 - protein, 9 aa, Homo Sapiens
NCGYPNAFI

SEQ ID NO: 98492 - protein, 9 aa, Homo Sapiens
YPNAFICQR

SEQ ID NO: 98493 - protein, 9 aa, Homo Sapiens
SSINATTVM

SEQ ID NO: 98494 - protein, 9 aa, Homo Sapiens
NATTVMPTM

SEQ ID NO: 98495 - protein, 9 aa, Homo Sapiens
TTVMPTMPS

SEQ ID NO: 98496 - protein, 9 aa, Homo Sapiens
TVMPTMPSV

SEQ ID NO: 98497 - protein, 9 aa, Homo Sapiens
MPTMPSVPS

SEQ ID NO: 98498 - protein, 9 aa, Homo Sapiens
MPSVPSGCK

SEQ ID NO: 98499 - protein, 9 aa, Homo Sapiens
VPSGCKEGW

SEQ ID NO: 98500 - protein, 9 aa, Homo Sapiens
WNFYSNKCF

SEQ ID NO: 98501 - protein, 9 aa, Homo Sapiens
NFYSNKCFK

SEQ ID NO: 98502 - protein, 9 aa, Homo Sapiens
FYSNKCFKI

SEQ ID NO: 98503 - protein, 9 aa, Homo Sapiens
IFGFMEEER

SEQ ID NO: 98504 - protein, 9 aa, Homo Sapiens
ERKNWQEAR

SEQ ID NO: 98505 - protein, 9 aa, Homo Sapiens
CIGFGGNLV

SEQ ID NO: 98506 - protein, 9 aa, Homo Sapiens
NLVSIQNEK

SEQ ID NO: 98507 - protein, 9 aa, Homo Sapiens
IQNEKEQAF

SEQ ID NO: 98508 - protein, 9 aa, Homo Sapiens
EKEQAFLTY

SEQ ID NO: 98509 - protein, 9 aa, Homo Sapiens
QAFLTYHMK

SEQ ID NO: 98510 - protein, 9 aa, Homo Sapiens
TYHMKDSTF

SEQ ID NO: 98511 - protein, 9 aa, Homo Sapiens
HMKDSTFSA

SEQ ID NO: 98512 - protein, 9 aa, Homo Sapiens
STFSAWTGL

SEQ ID NO: 98513 - protein, 9 aa, Homo Sapiens
SAWTGLNDV

SEQ ID NO: 98514 - protein, 9 aa, Homo Sapiens
NDVNSEHTF

SEQ ID NO: 98515 - protein, 9 aa, Homo Sapiens
DVNSEHTFL

SEQ ID NO: 98516 - protein, 9 aa, Homo Sapiens
VNSEHTFLW

SEQ ID NO: 98517 - protein, 9 aa, Homo Sapiens
HTFLWTDGR

SEQ ID NO: 98518 - protein, 9 aa, Homo Sapiens
FLWTDGRGV

SEQ ID NO: 98519 - protein, 9 aa, Homo Sapiens
WTDGRGVHY

SEQ ID NO: 98520 - protein, 9 aa, Homo Sapiens
GVHYTNWGK

SEQ ID NO: 98521 - protein, 9 aa, Homo Sapiens
HYTNWGKGY

SEQ ID NO: 98522 - protein, 9 aa, Homo Sapiens
YPGGRRSSL

SEQ ID NO: 98523 - protein, 9 aa, Homo Sapiens
GGRRSSLSY

SEQ ID NO: 98524 - protein, 9 aa, Homo Sapiens
SYEDADCVV

SEQ ID NO: 98525 - protein, 9 aa, Homo Sapiens
YEDADCVVI

SEQ ID NO: 98526 - protein, 9 aa, Homo Sapiens
EDADCVVII

SEQ ID NO: 98527 - protein, 9 aa, Homo Sapiens
DCVVIIGGA

SEQ ID NO: 98528 - protein, 9 aa, Homo Sapiens
IIGGASNEA

SEQ ID NO: 98529 - protein, 9 aa, Homo Sapiens
GASNEAGKW

SEQ ID NO: 98530 - protein, 9 aa, Homo Sapiens
WMDDTCDSK

SEQ ID NO: 98531 - protein, 9 aa, Homo Sapiens
DTCDSKRGY

SEQ ID NO: 98532 - protein, 9 aa, Homo Sapiens
DPSLTNPPA

SEQ ID NO: 98533 - protein, 9 aa, Homo Sapiens
SLTNPPATI

SEQ ID NO: 98534 - protein, 9 aa, Homo Sapiens
ATIQTDGFV

SEQ ID NO: 98535 - protein, 9 aa, Homo Sapiens
TIQTDGFVK

SEQ ID NO: 98536 - protein, 9 aa, Homo Sapiens
IQTDGFVKY

SEQ ID NO: 98537 - protein, 9 aa, Homo Sapiens
FVKYGKSSY

SEQ ID NO: 98538 - protein, 9 aa, Homo Sapiens
KYGKSSYSL

SEQ ID NO: 98539 - protein, 9 aa, Homo Sapiens
YGKSSYSLM

SEQ ID NO: 98540 - protein, 9 aa, Homo Sapiens
SSYSLMRQK

SEQ ID NO: 98541 - protein, 9 aa, Homo Sapiens
SYSLMRQKF

SEQ ID NO: 98542 - protein, 9 aa, Homo Sapiens
SLMRQKFQW

SEQ ID NO: 98543 - protein, 9 aa, Homo Sapiens
FQWHEAETY

SEQ ID NO: 98544 - protein, 9 aa, Homo Sapiens
HEAETYCKL

SEQ ID NO: 98545 - protein, 9 aa, Homo Sapiens
ETYCKLHNS

SEQ ID NO: 98546 - protein, 9 aa, Homo Sapiens
TYCKLHNSL

SEQ ID NO: 98547 - protein, 9 aa, Homo Sapiens
KLHNSLIAS

SEQ ID NO: 98548 - protein, 9 aa, Homo Sapiens
LIASILDPY

SEQ ID NO: 98549 - protein, 9 aa, Homo Sapiens
SILDPYSNA

SEQ ID NO: 98550 - protein, 9 aa, Homo Sapiens
ILDPYSNAF

SEQ ID NO: 98551 - protein, 9 aa, Homo Sapiens
DPYSNAFAW

SEQ ID NO: 98552 - protein, 9 aa, Homo Sapiens
PYSNAFAWL

SEQ ID NO: 98553 - protein, 9 aa, Homo Sapiens
YSNAFAWLQ

SEQ ID NO: 98554 - protein, 9 aa, Homo Sapiens
FAWLQMETS

SEQ ID NO: 98555 - protein, 9 aa, Homo Sapiens
LQMETSNER

SEQ ID NO: 98556 - protein, 9 aa, Homo Sapiens
QMETSNERV

SEQ ID NO: 98557 - protein, 9 aa, Homo Sapiens
ETSNERVWI

SEQ ID NO: 98558 - protein, 9 aa, Homo Sapiens
VWIALNSNL

SEQ ID NO: 98559 - protein, 9 aa, Homo Sapiens
NSNLTDNQY

SEQ ID NO: 98560 - protein, 9 aa, Homo Sapiens
NLTDNQYTW

SEQ ID NO: 98561 - protein, 9 aa, Homo Sapiens
QYTWTDKWR

SEQ ID NO: 98562 - protein, 9 aa, Homo Sapiens
YTWTDKWRV

SEQ ID NO: 98563 - protein, 9 aa, Homo Sapiens
WTDKWRVRY

SEQ ID NO: 98564 - protein, 9 aa, Homo Sapiens
RVRYTNWAA

SEQ ID NO: 98565 - protein, 9 aa, Homo Sapiens
KLKSACVYL

SEQ ID NO: 98566 - protein, 9 aa, Homo Sapiens
KSACVYLDL

SEQ ID NO: 98567 - protein, 9 aa, Homo Sapiens
CVYLDLDGY

SEQ ID NO: 98568 - protein, 9 aa, Homo Sapiens
VYLDLDGYW

SEQ ID NO: 98569 - protein, 9 aa, Homo Sapiens
YLDLDGYWK

SEQ ID NO: 98570 - protein, 9 aa, Homo Sapiens
DLDGYWKTA

SEQ ID NO: 98571 - protein, 9 aa, Homo Sapiens
KTAHCNESF

SEQ ID NO: 98572 - protein, 9 aa, Homo Sapiens
TAHCNESFY

SEQ ID NO: 98573 - protein, 9 aa, Homo Sapiens
AHCNESFYF

SEQ ID NO: 98574 - protein, 9 aa, Homo Sapiens
HCNESFYFL

SEQ ID NO: 98575 - protein, 9 aa, Homo Sapiens
ESFYFLCKR

SEQ ID NO: 98576 - protein, 9 aa, Homo Sapiens
FLCKRSDEI

SEQ ID NO: 98577 - protein, 9 aa, Homo Sapiens
IPATEPPQL

SEQ ID NO: 98578 - protein, 9 aa, Homo Sapiens
EPPQLPGRC

SEQ ID NO: 98579 - protein, 9 aa, Homo Sapiens
CPESDHTAW

SEQ ID NO: 98580 - protein, 9 aa, Homo Sapiens
HTAWIPFHG

SEQ ID NO: 98581 - protein, 9 aa, Homo Sapiens
WIPFHGHCY

SEQ ID NO: 98582 - protein, 9 aa, Homo Sapiens
IPFHGHCYY

SEQ ID NO: 98583 - protein, 9 aa, Homo Sapiens
HCYYIESSY

SEQ ID NO: 98584 - protein, 9 aa, Homo Sapiens
YYIESSYTR

SEQ ID NO: 98585 - protein, 9 aa, Homo Sapiens
IESSYTRNW

SEQ ID NO: 98586 - protein, 9 aa, Homo Sapiens
GQASLECLR

SEQ ID NO: 98587 - protein, 9 aa, Homo Sapiens
CLRMGSSLV

SEQ ID NO: 98588 - protein, 9 aa, Homo Sapiens
RMGSSLVSI

SEQ ID NO: 98589 - protein, 9 aa, Homo Sapiens
SLVSIESAA

SEQ ID NO: 98590 - protein, 9 aa, Homo Sapiens
IESAAESSF

SEQ ID NO: 98591 - protein, 9 aa, Homo Sapiens
ESAAESSFL

SEQ ID NO: 98592 - protein, 9 aa, Homo Sapiens
AAESSFLSY

SEQ ID NO: 98593 - protein, 9 aa, Homo Sapiens
AESSFLSYR

SEQ ID NO: 98594 - protein, 9 aa, Homo Sapiens
ESSFLSYRV

SEQ ID NO: 98595 - protein, 9 aa, Homo Sapiens
FLSYRVEPL

SEQ ID NO: 98596 - protein, 9 aa, Homo Sapiens
LSYRVEPLK

SEQ ID NO: 98597 - protein, 9 aa, Homo Sapiens
YRVEPLKSK

SEQ ID NO: 98598 - protein, 9 aa, Homo Sapiens
EPLKSKTNF

SEQ ID NO: 98599 - protein, 9 aa, Homo Sapiens
KTNFWIGLF

SEQ ID NO: 98600 - protein, 9 aa, Homo Sapiens
TNFWIGLFR

SEQ ID NO: 98601 - protein, 9 aa, Homo Sapiens
GLFRNVEGT

SEQ ID NO: 98602 - protein, 9 aa, Homo Sapiens
RNVEGTWLW

SEQ ID NO: 98603 - protein, 9 aa, Homo Sapiens
WLWINNSPV

SEQ ID NO: 98604 - protein, 9 aa, Homo Sapiens
WINNSPVSF

SEQ ID NO: 98605 - protein, 9 aa, Homo Sapiens
NSPVSFVNW

SEQ ID NO: 98606 - protein, 9 aa, Homo Sapiens
NTGDPSGER

SEQ ID NO: 98607 - protein, 9 aa, Homo Sapiens
GERNDCVAL

SEQ ID NO: 98608 - protein, 9 aa, Homo Sapiens
VALHASSGF

SEQ ID NO: 98609 - protein, 9 aa, Homo Sapiens
WSNIHCSSY

SEQ ID NO: 98610 - protein, 9 aa, Homo Sapiens
SNIHCSSYK

SEQ ID NO: 98611 - protein, 9 aa, Homo Sapiens
SSYKGYICK

SEQ ID NO: 98612 - protein, 9 aa, Homo Sapiens
SYKGYICKR

SEQ ID NO: 98613 - protein, 9 aa, Homo Sapiens
KGYICKRPK

SEQ ID NO: 98614 - protein, 9 aa, Homo Sapiens
GYICKRPKI

SEQ ID NO: 98615 - protein, 9 aa, Homo Sapiens
KPTHELLTT

SEQ ID NO: 98616 - protein, 9 aa, Homo Sapiens
PTHELLTTK

SEQ ID NO: 98617 - protein, 9 aa, Homo Sapiens
LLTTKADTR

SEQ ID NO: 98618 - protein, 9 aa, Homo Sapiens
LTTKADTRK

SEQ ID NO: 98619 - protein, 9 aa, Homo Sapiens
TTKADTRKM

SEQ ID NO: 98620 - protein, 9 aa, Homo Sapiens
DTRKMDPSK

SEQ ID NO: 98621 - protein, 9 aa, Homo Sapiens
KMDPSKPSS

SEQ ID NO: 98622 - protein, 9 aa, Homo Sapiens
KPSSNVAGV

SEQ ID NO: 98623 - protein, 9 aa, Homo Sapiens
NVAGVVIIV

SEQ ID NO: 98624 - protein, 9 aa, Homo Sapiens
GVVIIVILL

SEQ ID NO: 98625 - protein, 9 aa, Homo Sapiens
VVIIVILLI

SEQ ID NO: 98626 - protein, 9 aa, Homo Sapiens
VIIVILLIL

SEQ ID NO: 98627 - protein, 9 aa, Homo Sapiens
VILLILTGA

SEQ ID NO: 98628 - protein, 9 aa, Homo Sapiens
LLILTGAGL

SEQ ID NO: 98629 - protein, 9 aa, Homo Sapiens
ILTGAGLAA

SEQ ID NO: 98630 - protein, 9 aa, Homo Sapiens
LTGAGLAAY

SEQ ID NO: 98631 - protein, 9 aa, Homo Sapiens
GAGLAAYFF

SEQ ID NO: 98632 - protein, 9 aa, Homo Sapiens
AGLAAYFFY

SEQ ID NO: 98633 - protein, 9 aa, Homo Sapiens
GLAAYFFYK

SEQ ID NO: 98634 - protein, 9 aa, Homo Sapiens
LAAYFFYKK

SEQ ID NO: 98635 - protein, 9 aa, Homo Sapiens
AAYFFYKKR

SEQ ID NO: 98636 - protein, 9 aa, Homo Sapiens
AYFFYKKRR

SEQ ID NO: 98637 - protein, 9 aa, Homo Sapiens
FYKKRRVHL

SEQ ID NO: 98638 - protein, 9 aa, Homo Sapiens
KKRRVHLPQ

SEQ ID NO: 98639 - protein, 9 aa, Homo Sapiens
VHLPQEGAF

SEQ ID NO: 98640 - protein, 9 aa, Homo Sapiens
QEGAFENTL

SEQ ID NO: 98641 - protein, 9 aa, Homo Sapiens
EGAFENTLY

SEQ ID NO: 98642 - protein, 9 aa, Homo Sapiens
GAFENTLYF

SEQ ID NO: 98643 - protein, 9 aa, Homo Sapiens
TLYFNSQSS

SEQ ID NO: 98644 - protein, 9 aa, Homo Sapiens
SSPGTSDMK

SEQ ID NO: 98645 - protein, 9 aa, Homo Sapiens
GTSDMKDLV

SEQ ID NO: 98646 - protein, 9 aa, Homo Sapiens
DMKDLVGNI

SEQ ID NO: 98647 - protein, 9 aa, Homo Sapiens
NIEQNEHSV

SEQ ID NO: 98648 - protein, 10 aa, Homo Sapiens
RLPLLLVFAS

SEQ ID NO: 98649 - protein, 10 aa, Homo Sapiens
LPLLLVFASV

SEQ ID NO: 98650 - protein, 10 aa, Homo Sapiens
PLLLVFASVI

SEQ ID NO: 98651 - protein, 10 aa, Homo Sapiens
LVFASVIPGA

SEQ ID NO: 98652 - protein, 10 aa, Homo Sapiens
FASVIPGAVL

SEQ ID NO: 98653 - protein, 10 aa, Homo Sapiens
SVIPGAVLLL

SEQ ID NO: 98654 - protein, 10 aa, Homo Sapiens
AVLLLDTRQF

SEQ ID NO: 98655 - protein, 10 aa, Homo Sapiens
VLLLDTRQFL

SEQ ID NO: 98656 - protein, 10 aa, Homo Sapiens
LLLDTRQFLI

SEQ ID NO: 98657 - protein, 10 aa, Homo Sapiens
LLDTRQFLIY

SEQ ID NO: 98658 - protein, 10 aa, Homo Sapiens
RQFLIYNEDH

SEQ ID NO: 98659 - protein, 10 aa, Homo Sapiens
FLIYNEDHKR

SEQ ID NO: 98660 - protein, 10 aa, Homo Sapiens
CVDAVSPSAV

SEQ ID NO: 98661 - protein, 10 aa, Homo Sapiens
AVSPSAVQTA

SEQ ID NO: 98662 - protein, 10 aa, Homo Sapiens
SPSAVQTAAC

SEQ ID NO: 98663 - protein, 10 aa, Homo Sapiens
TAACNQDAES

SEQ ID NO: 98664 - protein, 10 aa, Homo Sapiens
KFRWVSESQI

SEQ ID NO: 98665 - protein, 10 aa, Homo Sapiens
FRWVSESQIM

SEQ ID NO: 98666 - protein, 10 aa, Homo Sapiens
WVSESQIMSV

SEQ ID NO: 98667 - protein, 10 aa, Homo Sapiens
SESQIMSVAF

SEQ ID NO: 98668 - protein, 10 aa, Homo Sapiens
ESQIMSVAFK

SEQ ID NO: 98669 - protein, 10 aa, Homo Sapiens
SQIMSVAFKL

SEQ ID NO: 98670 - protein, 10 aa, Homo Sapiens
IMSVAFKLCL

SEQ ID NO: 98671 - protein, 10 aa, Homo Sapiens
SVAFKLCLGV

SEQ ID NO: 98672 - protein, 10 aa, Homo Sapiens
VPSKTDWVAI

SEQ ID NO: 98673 - protein, 10 aa, Homo Sapiens
SKTDWVAITL

SEQ ID NO: 98674 - protein, 10 aa, Homo Sapiens
KTDWVAITLY

SEQ ID NO: 98675 - protein, 10 aa, Homo Sapiens
AITLYACDSK

SEQ ID NO: 98676 - protein, 10 aa, Homo Sapiens
LYACDSKSEF

SEQ ID NO: 98677 - protein, 10 aa, Homo Sapiens
KSEFQKWECK

SEQ ID NO: 98678 - protein, 10 aa, Homo Sapiens
TLLGIKGEDL

SEQ ID NO: 98679 - protein, 10 aa, Homo Sapiens
EDLFFNYGNR

SEQ ID NO: 98680 - protein, 10 aa, Homo Sapiens
FFNYGNRQEK

SEQ ID NO: 98681 - protein, 10 aa, Homo Sapiens
NYGNRQEKNI

SEQ ID NO: 98682 - protein, 10 aa, Homo Sapiens
RQEKNIMLYK

SEQ ID NO: 98683 - protein, 10 aa, Homo Sapiens
NIMLYKGSGL

SEQ ID NO: 98684 - protein, 10 aa, Homo Sapiens
IMLYKGSGLW

SEQ ID NO: 98685 - protein, 10 aa, Homo Sapiens
MLYKGSGLWS

SEQ ID NO: 98686 - protein, 10 aa, Homo Sapiens
LYKGSGLWSR

SEQ ID NO: 98687 - protein, 10 aa, Homo Sapiens
KGSGLWSRWK

SEQ ID NO: 98688 - protein, 10 aa, Homo Sapiens
TTDNLCSRGY

SEQ ID NO: 98689 - protein, 10 aa, Homo Sapiens
NLCSRGYEAM

SEQ ID NO: 98690 - protein, 10 aa, Homo Sapiens
RGYEAMYTLL

SEQ ID NO: 98691 - protein, 10 aa, Homo Sapiens
EAMYTLLGNA

SEQ ID NO: 98692 - protein, 10 aa, Homo Sapiens
YTLLGNANGA

SEQ ID NO: 98693 - protein, 10 aa, Homo Sapiens
TLLGNANGAT

SEQ ID NO: 98694 - protein, 10 aa, Homo Sapiens
LLGNANGATC

SEQ ID NO: 98695 - protein, 10 aa, Homo Sapiens
NGATCAFPFK

SEQ ID NO: 98696 - protein, 10 aa, Homo Sapiens
CAFPFKFENK

SEQ ID NO: 98697 - protein, 10 aa, Homo Sapiens
AFPFKFENKW

SEQ ID NO: 98698 - protein, 10 aa, Homo Sapiens
FPFKFENKWY

SEQ ID NO: 98699 - protein, 10 aa, Homo Sapiens
FENKWYADCT

SEQ ID NO: 98700 - protein, 10 aa, Homo Sapiens
WYADCTSAGR

SEQ ID NO: 98701 - protein, 10 aa, Homo Sapiens
CTSAGRSDGW

SEQ ID NO: 98702 - protein, 10 aa, Homo Sapiens
TSAGRSDGWL

SEQ ID NO: 98703 - protein, 10 aa, Homo Sapiens
SAGRSDGWLW

SEQ ID NO: 98704 - protein, 10 aa, Homo Sapiens
WLWCGTTTDY

SEQ ID NO: 98705 - protein, 10 aa, Homo Sapiens
GTTTDYDTDK

SEQ ID NO: 98706 - protein, 10 aa, Homo Sapiens
TTTDYDTDKL

SEQ ID NO: 98707 - protein, 10 aa, Homo Sapiens
TTDYDTDKLF

SEQ ID NO: 98708 - protein, 10 aa, Homo Sapiens
DYDTDKLFGY

SEQ ID NO: 98709 - protein, 10 aa, Homo Sapiens
KLFGYCPLKF

SEQ ID NO: 98710 - protein, 10 aa, Homo Sapiens
PLKFEGSESL

SEQ ID NO: 98711 - protein, 10 aa, Homo Sapiens
SLWNKDPLTS

SEQ ID NO: 98712 - protein, 10 aa, Homo Sapiens
DPLTSVSYQI

SEQ ID NO: 98713 - protein, 10 aa, Homo Sapiens
TSVSYQINSK

SEQ ID NO: 98714 - protein, 10 aa, Homo Sapiens
SYQINSKSAL

SEQ ID NO: 98715 - protein, 10 aa, Homo Sapiens
YQINSKSALS

SEQ ID NO: 98716 - protein, 10 aa, Homo Sapiens
QINSKSALSW

SEQ ID NO: 98717 - protein, 10 aa, Homo Sapiens
KSALSWHQAR

SEQ ID NO: 98718 - protein, 10 aa, Homo Sapiens
SALSWHQARK

SEQ ID NO: 98719 - protein, 10 aa, Homo Sapiens
QQQNAELLSI

SEQ ID NO: 98720 - protein, 10 aa, Homo Sapiens
LLSITEIHEQ

SEQ ID NO: 98721 - protein, 10 aa, Homo Sapiens
SITEIHEQTY

SEQ ID NO: 98722 - protein, 10 aa, Homo Sapiens
IHEQTYLTGL

SEQ ID NO: 98723 - protein, 10 aa, Homo Sapiens
TYLTGLTSSL

SEQ ID NO: 98724 - protein, 10 aa, Homo Sapiens
YLTGLTSSLT

SEQ ID NO: 98725 - protein, 10 aa, Homo Sapiens
GLTSSLTSGL

SEQ ID NO: 98726 - protein, 10 aa, Homo Sapiens
LTSSLTSGLW

SEQ ID NO: 98727 - protein, 10 aa, Homo Sapiens
SLTSGLWIGL

SEQ ID NO: 98728 - protein, 10 aa, Homo Sapiens
GLWIGLNSLS

SEQ ID NO: 98729 - protein, 10 aa, Homo Sapiens
LWIGLNSLSF

SEQ ID NO: 98730 - protein, 10 aa, Homo Sapiens
SLSFNSGWQW

SEQ ID NO: 98731 - protein, 10 aa, Homo Sapiens
FNSGWQWSDR

SEQ ID NO: 98732 - protein, 10 aa, Homo Sapiens
GWQWSDRSPF

SEQ ID NO: 98733 - protein, 10 aa, Homo Sapiens
QWSDRSPFRY

SEQ ID NO: 98734 - protein, 10 aa, Homo Sapiens
YLNWLPGSPS

SEQ ID NO: 98735 - protein, 10 aa, Homo Sapiens
SPSAEPGKSC

SEQ ID NO: 98736 - protein, 10 aa, Homo Sapiens
AEPGKSCVSL

SEQ ID NO: 98737 - protein, 10 aa, Homo Sapiens
KSCVSLNPGK

SEQ ID NO: 98738 - protein, 10 aa, Homo Sapiens
VSLNPGKNAK

SEQ ID NO: 98739 - protein, 10 aa, Homo Sapiens
SLNPGKNAKW

SEQ ID NO: 98740 - protein, 10 aa, Homo Sapiens
WENLECVQKL

SEQ ID NO: 98741 - protein, 10 aa, Homo Sapiens
CVQKLGYICK

SEQ ID NO: 98742 - protein, 10 aa, Homo Sapiens
VQKLGYICKK

SEQ ID NO: 98743 - protein, 10 aa, Homo Sapiens
YICKKGNTTL

SEQ ID NO: 98744 - protein, 10 aa, Homo Sapiens
IPSESDVPTH

SEQ ID NO: 98745 - protein, 10 aa, Homo Sapiens
DVPTHCPSQW

SEQ ID NO: 98746 - protein, 10 aa, Homo Sapiens
VPTHCPSQWW

SEQ ID NO: 98747 - protein, 10 aa, Homo Sapiens
SQWWPYAGHC

SEQ ID NO: 98748 - protein, 10 aa, Homo Sapiens
QWWPYAGHCY

SEQ ID NO: 98749 - protein, 10 aa, Homo Sapiens
WPYAGHCYKI

SEQ ID NO: 98750 - protein, 10 aa, Homo Sapiens
YAGHCYKIHR

SEQ ID NO: 98751 - protein, 10 aa, Homo Sapiens
CYKIHRDEKK

SEQ ID NO: 98752 - protein, 10 aa, Homo Sapiens
LASIHTIEEF

SEQ ID NO: 98753 - protein, 10 aa, Homo Sapiens
HTIEEFDFII

SEQ ID NO: 98754 - protein, 10 aa, Homo Sapiens
EEFDFIISQL

SEQ ID NO: 98755 - protein, 10 aa, Homo Sapiens
QLGYEPNDEL

SEQ ID NO: 98756 - protein, 10 aa, Homo Sapiens
LGYEPNDELW

SEQ ID NO: 98757 - protein, 10 aa, Homo Sapiens
GYEPNDELWI

SEQ ID NO: 98758 - protein, 10 aa, Homo Sapiens
EPNDELWIGL

SEQ ID NO: 98759 - protein, 10 aa, Homo Sapiens
DELWIGLNDI

SEQ ID NO: 98760 - protein, 10 aa, Homo Sapiens
LWIGLNDIKI

SEQ ID NO: 98761 - protein, 10 aa, Homo Sapiens
GLNDIKIQMY

SEQ ID NO: 98762 - protein, 10 aa, Homo Sapiens
DIKIQMYFEW

SEQ ID NO: 98763 - protein, 10 aa, Homo Sapiens
QMYFEWSDGT

SEQ ID NO: 98764 - protein, 10 aa, Homo Sapiens
EWSDGTPVTF

SEQ ID NO: 98765 - protein, 10 aa, Homo Sapiens
DGTPVTFTKW

SEQ ID NO: 98766 - protein, 10 aa, Homo Sapiens
TPVTFTKWLR

SEQ ID NO: 98767 - protein, 10 aa, Homo Sapiens
VVMKGKDGYW

SEQ ID NO: 98768 - protein, 10 aa, Homo Sapiens
VMKGKDGYWA

SEQ ID NO: 98769 - protein, 10 aa, Homo Sapiens
KGKDGYWADR

SEQ ID NO: 98770 - protein, 10 aa, Homo Sapiens
GYWADRGCEW

SEQ ID NO: 98771 - protein, 10 aa, Homo Sapiens
WADRGCEWPL

SEQ ID NO: 98772 - protein, 10 aa, Homo Sapiens
LGYICKMKSR

SEQ ID NO: 98773 - protein, 10 aa, Homo Sapiens
EIVEVEKGCR

SEQ ID NO: 98774 - protein, 10 aa, Homo Sapiens
FYCYMIGHTL

SEQ ID NO: 98775 - protein, 10 aa, Homo Sapiens
YMIGHTLSTF

SEQ ID NO: 98776 - protein, 10 aa, Homo Sapiens
MIGHTLSTFA

SEQ ID NO: 98777 - protein, 10 aa, Homo Sapiens
NQTCNNENAY

SEQ ID NO: 98778 - protein, 10 aa, Homo Sapiens
QTCNNENAYL

SEQ ID NO: 98779 - protein, 10 aa, Homo Sapiens
NAYLTTIEDR

SEQ ID NO: 98780 - protein, 10 aa, Homo Sapiens
AYLTTIEDRY

SEQ ID NO: 98781 - protein, 10 aa, Homo Sapiens
TTIEDRYEQA

SEQ ID NO: 98782 - protein, 10 aa, Homo Sapiens
TIEDRYEQAF

SEQ ID NO: 98783 - protein, 10 aa, Homo Sapiens
IEDRYEQAFL

SEQ ID NO: 98784 - protein, 10 aa, Homo Sapiens
RYEQAFLTSF

SEQ ID NO: 98785 - protein, 10 aa, Homo Sapiens
YEQAFLTSFV

SEQ ID NO: 98786 - protein, 10 aa, Homo Sapiens
QAFLTSFVGL

SEQ ID NO: 98787 - protein, 10 aa, Homo Sapiens
AFLTSFVGLR

SEQ ID NO: 98788 - protein, 10 aa, Homo Sapiens
TSFVGLRPEK

SEQ ID NO: 98789 - protein, 10 aa, Homo Sapiens
GLRPEKYFWT

SEQ ID NO: 98790 - protein, 10 aa, Homo Sapiens
RPEKYFWTGL

SEQ ID NO: 98791 - protein, 10 aa, Homo Sapiens
KYFWTGLSDI

SEQ ID NO: 98792 - protein, 10 aa, Homo Sapiens
GLSDIQTKGT

SEQ ID NO: 98793 - protein, 10 aa, Homo Sapiens
IQTKGTFQWT

SEQ ID NO: 98794 - protein, 10 aa, Homo Sapiens
QTKGTFQWTI

SEQ ID NO: 98795 - protein, 10 aa, Homo Sapiens
IEEEVRFTHW

SEQ ID NO: 98796 - protein, 10 aa, Homo Sapiens
EEVRFTHWNS

SEQ ID NO: 98797 - protein, 10 aa, Homo Sapiens
DMPGRKPGCV

SEQ ID NO: 98798 - protein, 10 aa, Homo Sapiens
MPGRKPGCVA

SEQ ID NO: 98799 - protein, 10 aa, Homo Sapiens
AMRTGIAGGL

SEQ ID NO: 98800 - protein, 10 aa, Homo Sapiens
GIAGGLWDVL

SEQ ID NO: 98801 - protein, 10 aa, Homo Sapiens
IAGGLWDVLK

SEQ ID NO: 98802 - protein, 10 aa, Homo Sapiens
GLWDVLKCDE

SEQ ID NO: 98803 - protein, 10 aa, Homo Sapiens
FVCKHWAEGV

SEQ ID NO: 98804 - protein, 10 aa, Homo Sapiens
WAEGVTHPPK

SEQ ID NO: 98805 - protein, 10 aa, Homo Sapiens
ASSRTSLCFK

SEQ ID NO: 98806 - protein, 10 aa, Homo Sapiens
TSLCFKLYAK

SEQ ID NO: 98807 - protein, 10 aa, Homo Sapiens
LCFKLYAKGK

SEQ ID NO: 98808 - protein, 10 aa, Homo Sapiens
KLYAKGKIEK

SEQ ID NO: 98809 - protein, 10 aa, Homo Sapiens
LYAKGKIEKK

SEQ ID NO: 98810 - protein, 10 aa, Homo Sapiens
TWFESRDFCR

SEQ ID NO: 98811 - protein, 10 aa, Homo Sapiens
FESRDFCRAL

SEQ ID NO: 98812 - protein, 10 aa, Homo Sapiens
RALGGDLASI

SEQ ID NO: 98813 - protein, 10 aa, Homo Sapiens
KEEQQTIWRL

SEQ ID NO: 98814 - protein, 10 aa, Homo Sapiens
QQTIWRLITA

SEQ ID NO: 98815 - protein, 10 aa, Homo Sapiens
WRLITASGSY

SEQ ID NO: 98816 - protein, 10 aa, Homo Sapiens
LITASGSYHK

SEQ ID NO: 98817 - protein, 10 aa, Homo Sapiens
ITASGSYHKL

SEQ ID NO: 98818 - protein, 10 aa, Homo Sapiens
TASGSYHKLF

SEQ ID NO: 98819 - protein, 10 aa, Homo Sapiens
ASGSYHKLFW

SEQ ID NO: 98820 - protein, 10 aa, Homo Sapiens
SYHKLFWLGL

SEQ ID NO: 98821 - protein, 10 aa, Homo Sapiens
HKLFWLGLTY

SEQ ID NO: 98822 - protein, 10 aa, Homo Sapiens
KLFWLGLTYG

SEQ ID NO: 98823 - protein, 10 aa, Homo Sapiens
LTYGSPSEGF

SEQ ID NO: 98824 - protein, 10 aa, Homo Sapiens
YGSPSEGFTW

SEQ ID NO: 98825 - protein, 10 aa, Homo Sapiens
FTWSDGSPVS

SEQ ID NO: 98826 - protein, 10 aa, Homo Sapiens
TWSDGSPVSY

SEQ ID NO: 98827 - protein, 10 aa, Homo Sapiens
DGSPVSYENW

SEQ ID NO: 98828 - protein, 10 aa, Homo Sapiens
SPVSYENWAY

SEQ ID NO: 98829 - protein, 10 aa, Homo Sapiens
YGEPNNYQNV

SEQ ID NO: 98830 - protein, 10 aa, Homo Sapiens
EPNNYQNVEY

SEQ ID NO: 98831 - protein, 10 aa, Homo Sapiens
YQNVEYCGEL

SEQ ID NO: 98832 - protein, 10 aa, Homo Sapiens
HLNNWICQIQ

SEQ ID NO: 98833 - protein, 10 aa, Homo Sapiens
CQIQKGQTPK

SEQ ID NO: 98834 - protein, 10 aa, Homo Sapiens
TPAPQDNPPV

SEQ ID NO: 98835 - protein, 10 aa, Homo Sapiens
PPVTEDGWVI

SEQ ID NO: 98836 - protein, 10 aa, Homo Sapiens
PVTEDGWVIY

SEQ ID NO: 98837 - protein, 10 aa, Homo Sapiens
VTEDGWVIYK

SEQ ID NO: 98838 - protein, 10 aa, Homo Sapiens
WVIYKDYQYY

SEQ ID NO: 98839 - protein, 10 aa, Homo Sapiens
VIYKDYQYYF

SEQ ID NO: 98840 - protein, 10 aa, Homo Sapiens
DYQYYFSKEK

SEQ ID NO: 98841 - protein, 10 aa, Homo Sapiens
YYFSKEKETM

SEQ ID NO: 98842 - protein, 10 aa, Homo Sapiens
ETMDNARAFC

SEQ ID NO: 98843 - protein, 10 aa, Homo Sapiens
TMDNARAFCK

SEQ ID NO: 98844 - protein, 10 aa, Homo Sapiens
MDNARAFCKR

SEQ ID NO: 98845 - protein, 10 aa, Homo Sapiens
LVSIQSESEK

SEQ ID NO: 98846 - protein, 10 aa, Homo Sapiens
VSIQSESEKK

SEQ ID NO: 98847 - protein, 10 aa, Homo Sapiens
QSESEKKFLW

SEQ ID NO: 98848 - protein, 10 aa, Homo Sapiens
SESEKKFLWK

SEQ ID NO: 98849 - protein, 10 aa, Homo Sapiens
ESEKKFLWKY

SEQ ID NO: 98850 - protein, 10 aa, Homo Sapiens
KKFLWKYVNR

SEQ ID NO: 98851 - protein, 10 aa, Homo Sapiens
YVNRNDAQSA

SEQ ID NO: 98852 - protein, 10 aa, Homo Sapiens
VNRNDAQSAY

SEQ ID NO: 98853 - protein, 10 aa, Homo Sapiens
NRNDAQSAYF

SEQ ID NO: 98854 - protein, 10 aa, Homo Sapiens
DAQSAYFIGL

SEQ ID NO: 98855 - protein, 10 aa, Homo Sapiens
AQSAYFIGLL

SEQ ID NO: 98856 - protein, 10 aa, Homo Sapiens
QSAYFIGLLI

SEQ ID NO: 98857 - protein, 10 aa, Homo Sapiens
AYFIGLLISL

SEQ ID NO: 98858 - protein, 10 aa, Homo Sapiens
FIGLLISLDK

SEQ ID NO: 98859 - protein, 10 aa, Homo Sapiens
GLLISLDKKF

SEQ ID NO: 98860 - protein, 10 aa, Homo Sapiens
LLISLDKKFA

SEQ ID NO: 98861 - protein, 10 aa, Homo Sapiens
LISLDKKFAW

SEQ ID NO: 98862 - protein, 10 aa, Homo Sapiens
SLDKKFAWMD

SEQ ID NO: 98863 - protein, 10 aa, Homo Sapiens
WMDGSKVDYV

SEQ ID NO: 98864 - protein, 10 aa, Homo Sapiens
VSWATGEPNF

SEQ ID NO: 98865 - protein, 10 aa, Homo Sapiens
FANEDENCVT

SEQ ID NO: 98866 - protein, 10 aa, Homo Sapiens
NEDENCVTMY

SEQ ID NO: 98867 - protein, 10 aa, Homo Sapiens
VTMYSNSGFW

SEQ ID NO: 98868 - protein, 10 aa, Homo Sapiens
GFWNDINCGY

SEQ ID NO: 98869 - protein, 10 aa, Homo Sapiens
DINCGYPNAF

SEQ ID NO: 98870 - protein, 10 aa, Homo Sapiens
GYPNAFICQR

SEQ ID NO: 98871 - protein, 10 aa, Homo Sapiens
YPNAFICQRH

SEQ ID NO: 98872 - protein, 10 aa, Homo Sapiens
FICQRHNSSI

SEQ ID NO: 98873 - protein, 10 aa, Homo Sapiens
NSSINATTVM

SEQ ID NO: 98874 - protein, 10 aa, Homo Sapiens
SINATTVMPT

SEQ ID NO: 98875 - protein, 10 aa, Homo Sapiens
TTVMPTMPSV

SEQ ID NO: 98876 - protein, 10 aa, Homo Sapiens
MPTMPSVPSG

SEQ ID NO: 98877 - protein, 10 aa, Homo Sapiens
TMPSVPSGCK

SEQ ID NO: 98878 - protein, 10 aa, Homo Sapiens
GWNFYSNKCF

SEQ ID NO: 98879 - protein, 10 aa, Homo Sapiens
WNFYSNKCFK

SEQ ID NO: 98880 - protein, 10 aa, Homo Sapiens
NFYSNKCFKI

SEQ ID NO: 98881 - protein, 10 aa, Homo Sapiens
FYSNKCFKIF

SEQ ID NO: 98882 - protein, 10 aa, Homo Sapiens
KIFGFMEEER

SEQ ID NO: 98883 - protein, 10 aa, Homo Sapiens
FMEEERKNWQ

SEQ ID NO: 98884 - protein, 10 aa, Homo Sapiens
QEARKACIGF

SEQ ID NO: 98885 - protein, 10 aa, Homo Sapiens
IQNEKEQAFL

SEQ ID NO: 98886 - protein, 10 aa, Homo Sapiens
NEKEQAFLTY

SEQ ID NO: 98887 - protein, 10 aa, Homo Sapiens
EQAFLTYHMK

SEQ ID NO: 98888 - protein, 10 aa, Homo Sapiens
FLTYHMKDST

SEQ ID NO: 98889 - protein, 10 aa, Homo Sapiens
LTYHMKDSTF

SEQ ID NO: 98890 - protein, 10 aa, Homo Sapiens
HMKDSTFSAW

SEQ ID NO: 98891 - protein, 10 aa, Homo Sapiens
FSAWTGLNDV

SEQ ID NO: 98892 - protein, 10 aa, Homo Sapiens
GLNDVNSEHT

SEQ ID NO: 98893 - protein, 10 aa, Homo Sapiens
DVNSEHTFLW

SEQ ID NO: 98894 - protein, 10 aa, Homo Sapiens
EHTFLWTDGR

SEQ ID NO: 98895 - protein, 10 aa, Homo Sapiens
LWTDGRGVHY

SEQ ID NO: 98896 - protein, 10 aa, Homo Sapiens
RGVHYTNWGK

SEQ ID NO: 98897 - protein, 10 aa, Homo Sapiens
GYPGGRRSSL

SEQ ID NO: 98898 - protein, 10 aa, Homo Sapiens
YPGGRRSSLS

SEQ ID NO: 98899 - protein, 10 aa, Homo Sapiens
SLSYEDADCV

SEQ ID NO: 98900 - protein, 10 aa, Homo Sapiens
LSYEDADCVV

SEQ ID NO: 98901 - protein, 10 aa, Homo Sapiens
SYEDADCVVI

SEQ ID NO: 98902 - protein, 10 aa, Homo Sapiens
YEDADCVVII

SEQ ID NO: 98903 - protein, 10 aa, Homo Sapiens
VIIGGASNEA

SEQ ID NO: 98904 - protein, 10 aa, Homo Sapiens
GGASNEAGKW

SEQ ID NO: 98905 - protein, 10 aa, Homo Sapiens
KWMDDTCDSK

SEQ ID NO: 98906 - protein, 10 aa, Homo Sapiens
SKRGYICQTR

SEQ ID NO: 98907 - protein, 10 aa, Homo Sapiens
DPSLTNPPAT

SEQ ID NO: 98908 - protein, 10 aa, Homo Sapiens
SLTNPPATIQ

SEQ ID NO: 98909 - protein, 10 aa, Homo Sapiens
PPATIQTDGF

SEQ ID NO: 98910 - protein, 10 aa, Homo Sapiens
ATIQTDGFVK

SEQ ID NO: 98911 - protein, 10 aa, Homo Sapiens
TIQTDGFVKY

SEQ ID NO: 98912 - protein, 10 aa, Homo Sapiens
QTDGFVKYGK

SEQ ID NO: 98913 - protein, 10 aa, Homo Sapiens
KYGKSSYSLM

SEQ ID NO: 98914 - protein, 10 aa, Homo Sapiens
KSSYSLMRQK

SEQ ID NO: 98915 - protein, 10 aa, Homo Sapiens
SSYSLMRQKF

SEQ ID NO: 98916 - protein, 10 aa, Homo Sapiens
YSLMRQKFQW

SEQ ID NO: 98917 - protein, 10 aa, Homo Sapiens
FQWHEAETYC

SEQ ID NO: 98918 - protein, 10 aa, Homo Sapiens
QWHEAETYCK

SEQ ID NO: 98919 - protein, 10 aa, Homo Sapiens
WHEAETYCKL

SEQ ID NO: 98920 - protein, 10 aa, Homo Sapiens
ETYCKLHNSL

SEQ ID NO: 98921 - protein, 10 aa, Homo Sapiens
TYCKLHNSLI

SEQ ID NO: 98922 - protein, 10 aa, Homo Sapiens
KLHNSLIASI

SEQ ID NO: 98923 - protein, 10 aa, Homo Sapiens
SLIASILDPY

SEQ ID NO: 98924 - protein, 10 aa, Homo Sapiens
SILDPYSNAF

SEQ ID NO: 98925 - protein, 10 aa, Homo Sapiens
ILDPYSNAFA

SEQ ID NO: 98926 - protein, 10 aa, Homo Sapiens
DPYSNAFAWL

SEQ ID NO: 98927 - protein, 10 aa, Homo Sapiens
YSNAFAWLQM

SEQ ID NO: 98928 - protein, 10 aa, Homo Sapiens
NAFAWLQMET

SEQ ID NO: 98929 - protein, 10 aa, Homo Sapiens
WLQMETSNER

SEQ ID NO: 98930 - protein, 10 aa, Homo Sapiens
LQMETSNERV

SEQ ID NO: 98931 - protein, 10 aa, Homo Sapiens
METSNERVWI

SEQ ID NO: 98932 - protein, 10 aa, Homo Sapiens
ETSNERVWIA

SEQ ID NO: 98933 - protein, 10 aa, Homo Sapiens
TSNERVWIAL

SEQ ID NO: 98934 - protein, 10 aa, Homo Sapiens
RVWIALNSNL

SEQ ID NO: 98935 - protein, 10 aa, Homo Sapiens
NLTDNQYTWT

SEQ ID NO: 98936 - protein, 10 aa, Homo Sapiens
NQYTWTDKWR

SEQ ID NO: 98937 - protein, 10 aa, Homo Sapiens
QYTWTDKWRV

SEQ ID NO: 98938 - protein, 10 aa, Homo Sapiens
YTWTDKWRVR

SEQ ID NO: 98939 - protein, 10 aa, Homo Sapiens
YTNWAADEPK

SEQ ID NO: 98940 - protein, 10 aa, Homo Sapiens
EPKLKSACVY

SEQ ID NO: 98941 - protein, 10 aa, Homo Sapiens
VYLDLDGYWK

SEQ ID NO: 98942 - protein, 10 aa, Homo Sapiens
YLDLDGYWKT

SEQ ID NO: 98943 - protein, 10 aa, Homo Sapiens
KTAHCNESFY

SEQ ID NO: 98944 - protein, 10 aa, Homo Sapiens
TAHCNESFYF

SEQ ID NO: 98945 - protein, 10 aa, Homo Sapiens
NESFYFLCKR

SEQ ID NO: 98946 - protein, 10 aa, Homo Sapiens
YFLCKRSDEI

SEQ ID NO: 98947 - protein, 10 aa, Homo Sapiens
EIPATEPPQL

SEQ ID NO: 98948 - protein, 10 aa, Homo Sapiens
ATEPPQLPGR

SEQ ID NO: 98949 - protein, 10 aa, Homo Sapiens
HTAWIPFHGH

SEQ ID NO: 98950 - protein, 10 aa, Homo Sapiens
AWIPFHGHCY

SEQ ID NO: 98951 - protein, 10 aa, Homo Sapiens
WIPFHGHCYY

SEQ ID NO: 98952 - protein, 10 aa, Homo Sapiens
IPFHGHCYYI

SEQ ID NO: 98953 - protein, 10 aa, Homo Sapiens
CYYIESSYTR

SEQ ID NO: 98954 - protein, 10 aa, Homo Sapiens
YTRNWGQASL

SEQ ID NO: 98955 - protein, 10 aa, Homo Sapiens
LECLRMGSSL

SEQ ID NO: 98956 - protein, 10 aa, Homo Sapiens
ECLRMGSSLV

SEQ ID NO: 98957 - protein, 10 aa, Homo Sapiens
LRMGSSLVSI

SEQ ID NO: 98958 - protein, 10 aa, Homo Sapiens
IESAAESSFL

SEQ ID NO: 98959 - protein, 10 aa, Homo Sapiens
ESAAESSFLS

SEQ ID NO: 98960 - protein, 10 aa, Homo Sapiens
SAAESSFLSY

SEQ ID NO: 98961 - protein, 10 aa, Homo Sapiens
AAESSFLSYR

SEQ ID NO: 98962 - protein, 10 aa, Homo Sapiens
AESSFLSYRV

SEQ ID NO: 98963 - protein, 10 aa, Homo Sapiens
FLSYRVEPLK

SEQ ID NO: 98964 - protein, 10 aa, Homo Sapiens
SYRVEPLKSK

SEQ ID NO: 98965 - protein, 10 aa, Homo Sapiens
EPLKSKTNFW

SEQ ID NO: 98966 - protein, 10 aa, Homo Sapiens
PLKSKTNFWI

SEQ ID NO: 98967 - protein, 10 aa, Homo Sapiens
KTNFWIGLFR

SEQ ID NO: 98968 - protein, 10 aa, Homo Sapiens
NFWIGLFRNV

SEQ ID NO: 98969 - protein, 10 aa, Homo Sapiens
GLFRNVEGTW

SEQ ID NO: 98970 - protein, 10 aa, Homo Sapiens
FRNVEGTWLW

SEQ ID NO: 98971 - protein, 10 aa, Homo Sapiens
TWLWINNSPV

SEQ ID NO: 98972 - protein, 10 aa, Homo Sapiens
WLWINNSPVS

SEQ ID NO: 98973 - protein, 10 aa, Homo Sapiens
LWINNSPVSF

SEQ ID NO: 98974 - protein, 10 aa, Homo Sapiens
WINNSPVSFV

SEQ ID NO: 98975 - protein, 10 aa, Homo Sapiens
NNSPVSFVNW

SEQ ID NO: 98976 - protein, 10 aa, Homo Sapiens
CVALHASSGF

SEQ ID NO: 98977 - protein, 10 aa, Homo Sapiens
VALHASSGFW

SEQ ID NO: 98978 - protein, 10 aa, Homo Sapiens
HASSGFWSNI

SEQ ID NO: 98979 - protein, 10 aa, Homo Sapiens
FWSNIHCSSY

SEQ ID NO: 98980 - protein, 10 aa, Homo Sapiens
WSNIHCSSYK

SEQ ID NO: 98981 - protein, 10 aa, Homo Sapiens
NIHCSSYKGY

SEQ ID NO: 98982 - protein, 10 aa, Homo Sapiens
CSSYKGYICK

SEQ ID NO: 98983 - protein, 10 aa, Homo Sapiens
SSYKGYICKR

SEQ ID NO: 98984 - protein, 10 aa, Homo Sapiens
GYICKRPKII

SEQ ID NO: 98985 - protein, 10 aa, Homo Sapiens
RPKIIDAKPT

SEQ ID NO: 98986 - protein, 10 aa, Homo Sapiens
IIDAKPTHEL

SEQ ID NO: 98987 - protein, 10 aa, Homo Sapiens
ELLTTKADTR

SEQ ID NO: 98988 - protein, 10 aa, Homo Sapiens
LLTTKADTRK

SEQ ID NO: 98989 - protein, 10 aa, Homo Sapiens
KPSSNVAGVV

SEQ ID NO: 98990 - protein, 10 aa, Homo Sapiens
NVAGVVIIVI

SEQ ID NO: 98991 - protein, 10 aa, Homo Sapiens
VVIIVILLIL

SEQ ID NO: 98992 - protein, 10 aa, Homo Sapiens
IVILLILTGA

SEQ ID NO: 98993 - protein, 10 aa, Homo Sapiens
ILLILTGAGL

SEQ ID NO: 98994 - protein, 10 aa, Homo Sapiens
LLILTGAGLA

SEQ ID NO: 98995 - protein, 10 aa, Homo Sapiens
LILTGAGLAA

SEQ ID NO: 98996 - protein, 10 aa, Homo Sapiens
ILTGAGLAAY

SEQ ID NO: 98997 - protein, 10 aa, Homo Sapiens
LTGAGLAAYF

SEQ ID NO: 98998 - protein, 10 aa, Homo Sapiens
GAGLAAYFFY

SEQ ID NO: 98999 - protein, 10 aa, Homo Sapiens
AGLAAYFFYK

SEQ ID NO: 99000 - protein, 10 aa, Homo Sapiens
GLAAYFFYKK

SEQ ID NO: 99001 - protein, 10 aa, Homo Sapiens
LAAYFFYKKR

SEQ ID NO: 99002 - protein, 10 aa, Homo Sapiens
AAYFFYKKRR

SEQ ID NO: 99003 - protein, 10 aa, Homo Sapiens
FFYKKRRVHL

SEQ ID NO: 99004 - protein, 10 aa, Homo Sapiens
RVHLPQEGAF

SEQ ID NO: 99005 - protein, 10 aa, Homo Sapiens
LPQEGAFENT

SEQ ID NO: 99006 - protein, 10 aa, Homo Sapiens
EGAFENTLYF

SEQ ID NO: 99007 - protein, 10 aa, Homo Sapiens
SQSSPGTSDM

SEQ ID NO: 99008 - protein, 10 aa, Homo Sapiens
QSSPGTSDMK

SEQ ID NO: 99009 - protein, 10 aa, Homo Sapiens
SPGTSDMKDL

SEQ ID NO: 99010 - protein, 11 aa, Homo Sapiens
RLPLLLVFASV

SEQ ID NO: 99011 - protein, 11 aa, Homo Sapiens
LPLLLVFASVI

SEQ ID NO: 99012 - protein, 11 aa, Homo Sapiens
LLVFASVIPGA

SEQ ID NO: 99013 - protein, 11 aa, Homo Sapiens
LVFASVIPGAV

SEQ ID NO: 99014 - protein, 11 aa, Homo Sapiens
FASVIPGAVLL

SEQ ID NO: 99015 - protein, 11 aa, Homo Sapiens
AVLLLDTRQFL

SEQ ID NO: 99016 - protein, 11 aa, Homo Sapiens
VLLLDTRQFLI

SEQ ID NO: 99017 - protein, 11 aa, Homo Sapiens
LLLDTRQFLIY

SEQ ID NO: 99018 - protein, 11 aa, Homo Sapiens
LLDTRQFLIYN

SEQ ID NO: 99019 - protein, 11 aa, Homo Sapiens
RQFLIYNEDHK

SEQ ID NO: 99020 - protein, 11 aa, Homo Sapiens
QFLIYNEDHKR

SEQ ID NO: 99021 - protein, 11 aa, Homo Sapiens
FLIYNEDHKRC

SEQ ID NO: 99022 - protein, 11 aa, Homo Sapiens
LIYNEDHKRCV

SEQ ID NO: 99023 - protein, 11 aa, Homo Sapiens
RCVDAVSPSAV

SEQ ID NO: 99024 - protein, 11 aa, Homo Sapiens
AVSPSAVQTAA

SEQ ID NO: 99025 - protein, 11 aa, Homo Sapiens
QTAACNQDAES

SEQ ID NO: 99026 - protein, 11 aa, Homo Sapiens
AACNQDAESQK

SEQ ID NO: 99027 - protein, 11 aa, Homo Sapiens
WVSESQIMSVA

SEQ ID NO: 99028 - protein, 11 aa, Homo Sapiens
VSESQIMSVAF

SEQ ID NO: 99029 - protein, 11 aa, Homo Sapiens
SESQIMSVAFK

SEQ ID NO: 99030 - protein, 11 aa, Homo Sapiens
SQIMSVAFKLC

SEQ ID NO: 99031 - protein, 11 aa, Homo Sapiens
QIMSVAFKLCL

SEQ ID NO: 99032 - protein, 11 aa, Homo Sapiens
MSVAFKLCLGV

SEQ ID NO: 99033 - protein, 11 aa, Homo Sapiens
AFKLCLGVPSK

SEQ ID NO: 99034 - protein, 11 aa, Homo Sapiens
CLGVPSKTDWV

SEQ ID NO: 99035 - protein, 11 aa, Homo Sapiens
KTDWVAITLYA

SEQ ID NO: 99036 - protein, 11 aa, Homo Sapiens
VAITLYACDSK

SEQ ID NO: 99037 - protein, 11 aa, Homo Sapiens
TLYACDSKSEF

SEQ ID NO: 99038 - protein, 11 aa, Homo Sapiens
YACDSKSEFQK

SEQ ID NO: 99039 - protein, 11 aa, Homo Sapiens
FQKWECKNDTL

SEQ ID NO: 99040 - protein, 11 aa, Homo Sapiens
WECKNDTLLGI

SEQ ID NO: 99041 - protein, 11 aa, Homo Sapiens
TLLGIKGEDLF

SEQ ID NO: 99042 - protein, 11 aa, Homo Sapiens
GIKGEDLFFNY

SEQ ID NO: 99043 - protein, 11 aa, Homo Sapiens
LFFNYGNRQEK

SEQ ID NO: 99044 - protein, 11 aa, Homo Sapiens
NRQEKNIMLYK

SEQ ID NO: 99045 - protein, 11 aa, Homo Sapiens
MLYKGSGLWSR

SEQ ID NO: 99046 - protein, 11 aa, Homo Sapiens
LYKGSGLWSRW

SEQ ID NO: 99047 - protein, 11 aa, Homo Sapiens
GLWSRWKIYGT

SEQ ID NO: 99048 - protein, 11 aa, Homo Sapiens
IYGTTDNLCSR

SEQ ID NO: 99049 - protein, 11 aa, Homo Sapiens
GTTDNLCSRGY

SEQ ID NO: 99050 - protein, 11 aa, Homo Sapiens
TLLGNANGATC

SEQ ID NO: 99051 - protein, 11 aa, Homo Sapiens
LLGNANGATCA

SEQ ID NO: 99052 - protein, 11 aa, Homo Sapiens
LGNANGATCAF

SEQ ID NO: 99053 - protein, 11 aa, Homo Sapiens
NANGATCAFPF

SEQ ID NO: 99054 - protein, 11 aa, Homo Sapiens
ANGATCAFPFK

SEQ ID NO: 99055 - protein, 11 aa, Homo Sapiens
CAFPFKFENKW

SEQ ID NO: 99056 - protein, 11 aa, Homo Sapiens
FPFKFENKWYA

SEQ ID NO: 99057 - protein, 11 aa, Homo Sapiens
KWYADCTSAGR

SEQ ID NO: 99058 - protein, 11 aa, Homo Sapiens
CTSAGRSDGWL

SEQ ID NO: 99059 - protein, 11 aa, Homo Sapiens
TSAGRSDGWLW

SEQ ID NO: 99060 - protein, 11 aa, Homo Sapiens
DTDKLFGYCPL

SEQ ID NO: 99061 - protein, 11 aa, Homo Sapiens
TDKLFGYCPLK

SEQ ID NO: 99062 - protein, 11 aa, Homo Sapiens
KLFGYCPLKFE

SEQ ID NO: 99063 - protein, 11 aa, Homo Sapiens
CPLKFEGSESL

SEQ ID NO: 99064 - protein, 11 aa, Homo Sapiens
KFEGSESLWNK

SEQ ID NO: 99065 - protein, 11 aa, Homo Sapiens
SLWNKDPLTSV

SEQ ID NO: 99066 - protein, 11 aa, Homo Sapiens
WNKDPLTSVSY

SEQ ID NO: 99067 - protein, 11 aa, Homo Sapiens
LTSVSYQINSK

SEQ ID NO: 99068 - protein, 11 aa, Homo Sapiens
SVSYQINSKSA

SEQ ID NO: 99069 - protein, 11 aa, Homo Sapiens
YQINSKSALSW

SEQ ID NO: 99070 - protein, 11 aa, Homo Sapiens
KSALSWHQARK

SEQ ID NO: 99071 - protein, 11 aa, Homo Sapiens
ALSWHQARKSC

SEQ ID NO: 99072 - protein, 11 aa, Homo Sapiens
CQQQNAELLSI

SEQ ID NO: 99073 - protein, 11 aa, Homo Sapiens
ELLSITEIHEQ

SEQ ID NO: 99074 - protein, 11 aa, Homo Sapiens
LLSITEIHEQT

SEQ ID NO: 99075 - protein, 11 aa, Homo Sapiens
LSITEIHEQTY

SEQ ID NO: 99076 - protein, 11 aa, Homo Sapiens
SITEIHEQTYL

SEQ ID NO: 99077 - protein, 11 aa, Homo Sapiens
EIHEQTYLTGL

SEQ ID NO: 99078 - protein, 11 aa, Homo Sapiens
QTYLTGLTSSL

SEQ ID NO: 99079 - protein, 11 aa, Homo Sapiens
YLTGLTSSLTS

SEQ ID NO: 99080 - protein, 11 aa, Homo Sapiens
LTSSLTSGLWI

SEQ ID NO: 99081 - protein, 11 aa, Homo Sapiens
SLTSGLWIGLN

SEQ ID NO: 99082 - protein, 11 aa, Homo Sapiens
GLWIGLNSLSF

SEQ ID NO: 99083 - protein, 11 aa, Homo Sapiens
GLNSLSFNSGW

SEQ ID NO: 99084 - protein, 11 aa, Homo Sapiens
NSLSFNSGWQW

SEQ ID NO: 99085 - protein, 11 aa, Homo Sapiens
SLSFNSGWQWS

SEQ ID NO: 99086 - protein, 11 aa, Homo Sapiens
SFNSGWQWSDR

SEQ ID NO: 99087 - protein, 11 aa, Homo Sapiens
SGWQWSDRSPF

SEQ ID NO: 99088 - protein, 11 aa, Homo Sapiens
GWQWSDRSPFR

SEQ ID NO: 99089 - protein, 11 aa, Homo Sapiens
WQWSDRSPFRY

SEQ ID NO: 99090 - protein, 11 aa, Homo Sapiens
YLNWLPGSPSA

SEQ ID NO: 99091 - protein, 11 aa, Homo Sapiens
SPSAEPGKSCV

SEQ ID NO: 99092 - protein, 11 aa, Homo Sapiens
SAEPGKSCVSL

SEQ ID NO: 99093 - protein, 11 aa, Homo Sapiens
CVSLNPGKNAK

SEQ ID NO: 99094 - protein, 11 aa, Homo Sapiens
VSLNPGKNAKW

SEQ ID NO: 99095 - protein, 11 aa, Homo Sapiens
SLNPGKNAKWE

SEQ ID NO: 99096 - protein, 11 aa, Homo Sapiens
NLECVQKLGYI

SEQ ID NO: 99097 - protein, 11 aa, Homo Sapiens
CVQKLGYICKK

SEQ ID NO: 99098 - protein, 11 aa, Homo Sapiens
GYICKKGNTTL

SEQ ID NO: 99099 - protein, 11 aa, Homo Sapiens
NTTLNSFVIPS

SEQ ID NO: 99100 - protein, 11 aa, Homo Sapiens
TLNSFVIPSES

SEQ ID NO: 99101 - protein, 11 aa, Homo Sapiens
NSFVIPSESDV

SEQ ID NO: 99102 - protein, 11 aa, Homo Sapiens
FVIPSESDVPT

SEQ ID NO: 99103 - protein, 11 aa, Homo Sapiens
DVPTHCPSQWW

SEQ ID NO: 99104 - protein, 11 aa, Homo Sapiens
PTHCPSQWWPY

SEQ ID NO: 99105 - protein, 11 aa, Homo Sapiens
SQWWPYAGHCY

SEQ ID NO: 99106 - protein, 11 aa, Homo Sapiens
QWWPYAGHCYK

SEQ ID NO: 99107 - protein, 11 aa, Homo Sapiens
WWPYAGHCYKI

SEQ ID NO: 99108 - protein, 11 aa, Homo Sapiens
WPYAGHCYKIH

SEQ ID NO: 99109 - protein, 11 aa, Homo Sapiens
PYAGHCYKIHR

SEQ ID NO: 99110 - protein, 11 aa, Homo Sapiens
CYKIHRDEKKI

SEQ ID NO: 99111 - protein, 11 aa, Homo Sapiens
KIHRDEKKIQR

SEQ ID NO: 99112 - protein, 11 aa, Homo Sapiens
KIQRDALTTCR

SEQ ID NO: 99113 - protein, 11 aa, Homo Sapiens
IQRDALTTCRK

SEQ ID NO: 99114 - protein, 11 aa, Homo Sapiens
DLASIHTIEEF

SEQ ID NO: 99115 - protein, 11 aa, Homo Sapiens
ASIHTIEEFDF

SEQ ID NO: 99116 - protein, 11 aa, Homo Sapiens
SIHTIEEFDFI

SEQ ID NO: 99117 - protein, 11 aa, Homo Sapiens
TIEEFDFIISQ

SEQ ID NO: 99118 - protein, 11 aa, Homo Sapiens
IEEFDFIISQL

SEQ ID NO: 99119 - protein, 11 aa, Homo Sapiens
EEFDFIISQLG

SEQ ID NO: 99120 - protein, 11 aa, Homo Sapiens
EFDFIISQLGY

SEQ ID NO: 99121 - protein, 11 aa, Homo Sapiens
SQLGYEPNDEL

SEQ ID NO: 99122 - protein, 11 aa, Homo Sapiens
YEPNDELWIGL

SEQ ID NO: 99123 - protein, 11 aa, Homo Sapiens
ELWIGLNDIKI

SEQ ID NO: 99124 - protein, 11 aa, Homo Sapiens
GLNDIKIQMYF

SEQ ID NO: 99125 - protein, 11 aa, Homo Sapiens
IQMYFEWSDGT

SEQ ID NO: 99126 - protein, 11 aa, Homo Sapiens
MYFEWSDGTPV

SEQ ID NO: 99127 - protein, 11 aa, Homo Sapiens
YFEWSDGTPVT

SEQ ID NO: 99128 - protein, 11 aa, Homo Sapiens
FEWSDGTPVTF

SEQ ID NO: 99129 - protein, 11 aa, Homo Sapiens
WSDGTPVTFTK

SEQ ID NO: 99130 - protein, 11 aa, Homo Sapiens
GTPVTFTKWLR

SEQ ID NO: 99131 - protein, 11 aa, Homo Sapiens
HENNRQEDCVV

SEQ ID NO: 99132 - protein, 11 aa, Homo Sapiens
VVMKGKDGYWA

SEQ ID NO: 99133 - protein, 11 aa, Homo Sapiens
DGYWADRGCEW

SEQ ID NO: 99134 - protein, 11 aa, Homo Sapiens
YWADRGCEWPL

SEQ ID NO: 99135 - protein, 11 aa, Homo Sapiens
CEWPLGYICKM

SEQ ID NO: 99136 - protein, 11 aa, Homo Sapiens
KMKSRSQGPEI

SEQ ID NO: 99137 - protein, 11 aa, Homo Sapiens
SRSQGPEIVEV

SEQ ID NO: 99138 - protein, 11 aa, Homo Sapiens
SQGPEIVEVEK

SEQ ID NO: 99139 - protein, 11 aa, Homo Sapiens
EIVEVEKGCRK

SEQ ID NO: 99140 - protein, 11 aa, Homo Sapiens
VEVEKGCRKGW

SEQ ID NO: 99141 - protein, 11 aa, Homo Sapiens
EVEKGCRKGWK

SEQ ID NO: 99142 - protein, 11 aa, Homo Sapiens
HFYCYMIGHTL

SEQ ID NO: 99143 - protein, 11 aa, Homo Sapiens
CYMIGHTLSTF

SEQ ID NO: 99144 - protein, 11 aa, Homo Sapiens
YMIGHTLSTFA

SEQ ID NO: 99145 - protein, 11 aa, Homo Sapiens
TLSTFAEANQT

SEQ ID NO: 99146 - protein, 11 aa, Homo Sapiens
AEANQTCNNEN

SEQ ID NO: 99147 - protein, 11 aa, Homo Sapiens
NQTCNNENAYL

SEQ ID NO: 99148 - protein, 11 aa, Homo Sapiens
ENAYLTTIEDR

SEQ ID NO: 99149 - protein, 11 aa, Homo Sapiens
NAYLTTIEDRY

SEQ ID NO: 99150 - protein, 11 aa, Homo Sapiens
YLTTIEDRYEQ

SEQ ID NO: 99151 - protein, 11 aa, Homo Sapiens
TTIEDRYEQAF

SEQ ID NO: 99152 - protein, 11 aa, Homo Sapiens
TIEDRYEQAFL

SEQ ID NO: 99153 - protein, 11 aa, Homo Sapiens
DRYEQAFLTSF

SEQ ID NO: 99154 - protein, 11 aa, Homo Sapiens
RYEQAFLTSFV

SEQ ID NO: 99155 - protein, 11 aa, Homo Sapiens
EQAFLTSFVGL

SEQ ID NO: 99156 - protein, 11 aa, Homo Sapiens
QAFLTSFVGLR

SEQ ID NO: 99157 - protein, 11 aa, Homo Sapiens
LTSFVGLRPEK

SEQ ID NO: 99158 - protein, 11 aa, Homo Sapiens
SFVGLRPEKYF

SEQ ID NO: 99159 - protein, 11 aa, Homo Sapiens
GLSDIQTKGTF

SEQ ID NO: 99160 - protein, 11 aa, Homo Sapiens
IQTKGTFQWTI

SEQ ID NO: 99161 - protein, 11 aa, Homo Sapiens
GTFQWTIEEEV

SEQ ID NO: 99162 - protein, 11 aa, Homo Sapiens
TFQWTIEEEVR

SEQ ID NO: 99163 - protein, 11 aa, Homo Sapiens
FQWTIEEEVRF

SEQ ID NO: 99164 - protein, 11 aa, Homo Sapiens
EVRFTHWNSDM

SEQ ID NO: 99165 - protein, 11 aa, Homo Sapiens
FTHWNSDMPGR

SEQ ID NO: 99166 - protein, 11 aa, Homo Sapiens
DMPGRKPGCVA

SEQ ID NO: 99167 - protein, 11 aa, Homo Sapiens
MPGRKPGCVAM

SEQ ID NO: 99168 - protein, 11 aa, Homo Sapiens
KPGCVAMRTGI

SEQ ID NO: 99169 - protein, 11 aa, Homo Sapiens
GIAGGLWDVLK

SEQ ID NO: 99170 - protein, 11 aa, Homo Sapiens
GLWDVLKCDEK

SEQ ID NO: 99171 - protein, 11 aa, Homo Sapiens
DVLKCDEKAKF

SEQ ID NO: 99172 - protein, 11 aa, Homo Sapiens
VLKCDEKAKFV

SEQ ID NO: 99173 - protein, 11 aa, Homo Sapiens
EKAKFVCKHWA

SEQ ID NO: 99174 - protein, 11 aa, Homo Sapiens
KFVCKHWAEGV

SEQ ID NO: 99175 - protein, 11 aa, Homo Sapiens
AEGVTHPPKPT

SEQ ID NO: 99176 - protein, 11 aa, Homo Sapiens
PPKPTTTPEPK

SEQ ID NO: 99177 - protein, 11 aa, Homo Sapiens
GASSRTSLCFK

SEQ ID NO: 99178 - protein, 11 aa, Homo Sapiens
RTSLCFKLYAK

SEQ ID NO: 99179 - protein, 11 aa, Homo Sapiens
SLCFKLYAKGK

SEQ ID NO: 99180 - protein, 11 aa, Homo Sapiens
KLYAKGKIEKK

SEQ ID NO: 99181 - protein, 11 aa, Homo Sapiens
KIEKKTWFESR

SEQ ID NO: 99182 - protein, 11 aa, Homo Sapiens
KTWFESRDFCR

SEQ ID NO: 99183 - protein, 11 aa, Homo Sapiens
SINNKEEQQTI

SEQ ID NO: 99184 - protein, 11 aa, Homo Sapiens
INNKEEQQTIW

SEQ ID NO: 99185 - protein, 11 aa, Homo Sapiens
KEEQQTIWRLI

SEQ ID NO: 99186 - protein, 11 aa, Homo Sapiens
IWRLITASGSY

SEQ ID NO: 99187 - protein, 11 aa, Homo Sapiens
RLITASGSYHK

SEQ ID NO: 99188 - protein, 11 aa, Homo Sapiens
LITASGSYHKL

SEQ ID NO: 99189 - protein, 11 aa, Homo Sapiens
ITASGSYHKLF

SEQ ID NO: 99190 - protein, 11 aa, Homo Sapiens
TASGSYHKLFW

SEQ ID NO: 99191 - protein, 11 aa, Homo Sapiens
YHKLFWLGLTY

SEQ ID NO: 99192 - protein, 11 aa, Homo Sapiens
KLFWLGLTYGS

SEQ ID NO: 99193 - protein, 11 aa, Homo Sapiens
TYGSPSEGFTW

SEQ ID NO: 99194 - protein, 11 aa, Homo Sapiens
EGFTWSDGSPV

SEQ ID NO: 99195 - protein, 11 aa, Homo Sapiens
FTWSDGSPVSY

SEQ ID NO: 99196 - protein, 11 aa, Homo Sapiens
GSPVSYENWAY

SEQ ID NO: 99197 - protein, 11 aa, Homo Sapiens
AYGEPNNYQNV

SEQ ID NO: 99198 - protein, 11 aa, Homo Sapiens
NYQNVEYCGEL

SEQ ID NO: 99199 - protein, 11 aa, Homo Sapiens
GELKGDPTMSW

SEQ ID NO: 99200 - protein, 11 aa, Homo Sapiens
MSWNDINCEHL

SEQ ID NO: 99201 - protein, 11 aa, Homo Sapiens
HLNNWICQIQK

SEQ ID NO: 99202 - protein, 11 aa, Homo Sapiens
GQTPKPEPTPA

SEQ ID NO: 99203 - protein, 11 aa, Homo Sapiens
PTPAPQDNPPV

SEQ ID NO: 99204 - protein, 11 aa, Homo Sapiens
TPAPQDNPPVT

SEQ ID NO: 99205 - protein, 11 aa, Homo Sapiens
NPPVTEDGWVI

SEQ ID NO: 99206 - protein, 11 aa, Homo Sapiens
PPVTEDGWVIY

SEQ ID NO: 99207 - protein, 11 aa, Homo Sapiens
PVTEDGWVIYK

SEQ ID NO: 99208 - protein, 11 aa, Homo Sapiens
WVIYKDYQYYF

SEQ ID NO: 99209 - protein, 11 aa, Homo Sapiens
IYKDYQYYFSK

SEQ ID NO: 99210 - protein, 11 aa, Homo Sapiens
KDYQYYFSKEK

SEQ ID NO: 99211 - protein, 11 aa, Homo Sapiens
YQYYFSKEKET

SEQ ID NO: 99212 - protein, 11 aa, Homo Sapiens
EKETMDNARAF

SEQ ID NO: 99213 - protein, 11 aa, Homo Sapiens
ETMDNARAFCK

SEQ ID NO: 99214 - protein, 11 aa, Homo Sapiens
TMDNARAFCKR

SEQ ID NO: 99215 - protein, 11 aa, Homo Sapiens
DLVSIQSESEK

SEQ ID NO: 99216 - protein, 11 aa, Homo Sapiens
LVSIQSESEKK

SEQ ID NO: 99217 - protein, 11 aa, Homo Sapiens
VSIQSESEKKF

SEQ ID NO: 99218 - protein, 11 aa, Homo Sapiens
SIQSESEKKFL

SEQ ID NO: 99219 - protein, 11 aa, Homo Sapiens
IQSESEKKFLW

SEQ ID NO: 99220 - protein, 11 aa, Homo Sapiens
QSESEKKFLWK

SEQ ID NO: 99221 - protein, 11 aa, Homo Sapiens
SESEKKFLWKY

SEQ ID NO: 99222 - protein, 11 aa, Homo Sapiens
EKKFLWKYVNR

SEQ ID NO: 99223 - protein, 11 aa, Homo Sapiens
FLWKYVNRNDA

SEQ ID NO: 99224 - protein, 11 aa, Homo Sapiens
YVNRNDAQSAY

SEQ ID NO: 99225 - protein, 11 aa, Homo Sapiens
NDAQSAYFIGL

SEQ ID NO: 99226 - protein, 11 aa, Homo Sapiens
AQSAYFIGLLI

SEQ ID NO: 99227 - protein, 11 aa, Homo Sapiens
SAYFIGLLISL

SEQ ID NO: 99228 - protein, 11 aa, Homo Sapiens
YFIGLLISLDK

SEQ ID NO: 99229 - protein, 11 aa, Homo Sapiens
GLLISLDKKFA

SEQ ID NO: 99230 - protein, 11 aa, Homo Sapiens
LLISLDKKFAW

SEQ ID NO: 99231 - protein, 11 aa, Homo Sapiens
LISLDKKFAWM

SEQ ID NO: 99232 - protein, 11 aa, Homo Sapiens
FAWMDGSKVDY

SEQ ID NO: 99233 - protein, 11 aa, Homo Sapiens
AWMDGSKVDYV

SEQ ID NO: 99234 - protein, 11 aa, Homo Sapiens
WMDGSKVDYVS

SEQ ID NO: 99235 - protein, 11 aa, Homo Sapiens
YVSWATGEPNF

SEQ ID NO: 99236 - protein, 11 aa, Homo Sapiens
FANEDENCVTM

SEQ ID NO: 99237 - protein, 11 aa, Homo Sapiens
MYSNSGFWNDI

SEQ ID NO: 99238 - protein, 11 aa, Homo Sapiens
NDINCGYPNAF

SEQ ID NO: 99239 - protein, 11 aa, Homo Sapiens
DINCGYPNAFI

SEQ ID NO: 99240 - protein, 11 aa, Homo Sapiens
CGYPNAFICQR

SEQ ID NO: 99241 - protein, 11 aa, Homo Sapiens
SINATTVMPTM

SEQ ID NO: 99242 - protein, 11 aa, Homo Sapiens
ATTVMPTMPSV

SEQ ID NO: 99243 - protein, 11 aa, Homo Sapiens
TVMPTMPSVPS

SEQ ID NO: 99244 - protein, 11 aa, Homo Sapiens
MPTMPSVPSGC

SEQ ID NO: 99245 - protein, 11 aa, Homo Sapiens
PTMPSVPSGCK

SEQ ID NO: 99246 - protein, 11 aa, Homo Sapiens
PSVPSGCKEGW

SEQ ID NO: 99247 - protein, 11 aa, Homo Sapiens
VPSGCKEGWNF

SEQ ID NO: 99248 - protein, 11 aa, Homo Sapiens
GWNFYSNKCFK

SEQ ID NO: 99249 - protein, 11 aa, Homo Sapiens
NFYSNKCFKIF

SEQ ID NO: 99250 - protein, 11 aa, Homo Sapiens
YSNKCFKIFGF

SEQ ID NO: 99251 - protein, 11 aa, Homo Sapiens
FKIFGFMEEER

SEQ ID NO: 99252 - protein, 11 aa, Homo Sapiens
KIFGFMEEERK

SEQ ID NO: 99253 - protein, 11 aa, Homo Sapiens
FGFMEEERKNW

SEQ ID NO: 99254 - protein, 11 aa, Homo Sapiens
WQEARKACIGF

SEQ ID NO: 99255 - protein, 11 aa, Homo Sapiens
KACIGFGGNLV

SEQ ID NO: 99256 - protein, 11 aa, Homo Sapiens
GGNLVSIQNEK

SEQ ID NO: 99257 - protein, 11 aa, Homo Sapiens
VSIQNEKEQAF

SEQ ID NO: 99258 - protein, 11 aa, Homo Sapiens
SIQNEKEQAFL

SEQ ID NO: 99259 - protein, 11 aa, Homo Sapiens
IQNEKEQAFLT

SEQ ID NO: 99260 - protein, 11 aa, Homo Sapiens
KEQAFLTYHMK

SEQ ID NO: 99261 - protein, 11 aa, Homo Sapiens
FLTYHMKDSTF

SEQ ID NO: 99262 - protein, 11 aa, Homo Sapiens
YHMKDSTFSAW

SEQ ID NO: 99263 - protein, 11 aa, Homo Sapiens
HMKDSTFSAWT

SEQ ID NO: 99264 - protein, 11 aa, Homo Sapiens
GLNDVNSEHTF

SEQ ID NO: 99265 - protein, 11 aa, Homo Sapiens
HTFLWTDGRGV

SEQ ID NO: 99266 - protein, 11 aa, Homo Sapiens
FLWTDGRGVHY

SEQ ID NO: 99267 - protein, 11 aa, Homo Sapiens
GVHYTNWGKGY

SEQ ID NO: 99268 - protein, 11 aa, Homo Sapiens
TNWGKGYPGGR

SEQ ID NO: 99269 - protein, 11 aa, Homo Sapiens
YPGGRRSSLSY

SEQ ID NO: 99270 - protein, 11 aa, Homo Sapiens
SLSYEDADCVV

SEQ ID NO: 99271 - protein, 11 aa, Homo Sapiens
SYEDADCVVII

SEQ ID NO: 99272 - protein, 11 aa, Homo Sapiens
VVIIGGASNEA

SEQ ID NO: 99273 - protein, 11 aa, Homo Sapiens
IIGGASNEAGK

SEQ ID NO: 99274 - protein, 11 aa, Homo Sapiens
IGGASNEAGKW

SEQ ID NO: 99275 - protein, 11 aa, Homo Sapiens
KWMDDTCDSKR

SEQ ID NO: 99276 - protein, 11 aa, Homo Sapiens
DSKRGYICQTR

SEQ ID NO: 99277 - protein, 11 aa, Homo Sapiens
YICQTRSDPSL

SEQ ID NO: 99278 - protein, 11 aa, Homo Sapiens
DPSLTNPPATI

SEQ ID NO: 99279 - protein, 11 aa, Homo Sapiens
SLTNPPATIQT

SEQ ID NO: 99280 - protein, 11 aa, Homo Sapiens
NPPATIQTDGF

SEQ ID NO: 99281 - protein, 11 aa, Homo Sapiens
ATIQTDGFVKY

SEQ ID NO: 99282 - protein, 11 aa, Homo Sapiens
IQTDGFVKYGK

SEQ ID NO: 99283 - protein, 11 aa, Homo Sapiens
FVKYGKSSYSL

SEQ ID NO: 99284 - protein, 11 aa, Homo Sapiens
KYGKSSYSLMR

SEQ ID NO: 99285 - protein, 11 aa, Homo Sapiens
KSSYSLMRQKF

SEQ ID NO: 99286 - protein, 11 aa, Homo Sapiens
SYSLMRQKFQW

SEQ ID NO: 99287 - protein, 11 aa, Homo Sapiens
SLMRQKFQWHE

SEQ ID NO: 99288 - protein, 11 aa, Homo Sapiens
LMRQKFQWHEA

SEQ ID NO: 99289 - protein, 11 aa, Homo Sapiens
AETYCKLHNSL

SEQ ID NO: 99290 - protein, 11 aa, Homo Sapiens
ETYCKLHNSLI

SEQ ID NO: 99291 - protein, 11 aa, Homo Sapiens
KLHNSLIASIL

SEQ ID NO: 99292 - protein, 11 aa, Homo Sapiens
NSLIASILDPY

SEQ ID NO: 99293 - protein, 11 aa, Homo Sapiens
ASILDPYSNAF

SEQ ID NO: 99294 - protein, 11 aa, Homo Sapiens
SILDPYSNAFA

SEQ ID NO: 99295 - protein, 11 aa, Homo Sapiens
ILDPYSNAFAW

SEQ ID NO: 99296 - protein, 11 aa, Homo Sapiens
PYSNAFAWLQM

SEQ ID NO: 99297 - protein, 11 aa, Homo Sapiens
WLQMETSNERV

SEQ ID NO: 99298 - protein, 11 aa, Homo Sapiens
LQMETSNERVW

SEQ ID NO: 99299 - protein, 11 aa, Homo Sapiens
QMETSNERVWI

SEQ ID NO: 99300 - protein, 11 aa, Homo Sapiens
ETSNERVWIAL

SEQ ID NO: 99301 - protein, 11 aa, Homo Sapiens
ERVWIALNSNL

SEQ ID NO: 99302 - protein, 11 aa, Homo Sapiens
NSNLTDNQYTW

SEQ ID NO: 99303 - protein, 11 aa, Homo Sapiens
NLTDNQYTWTD

SEQ ID NO: 99304 - protein, 11 aa, Homo Sapiens
LTDNQYTWTDK

SEQ ID NO: 99305 - protein, 11 aa, Homo Sapiens
NQYTWTDKWRV

SEQ ID NO: 99306 - protein, 11 aa, Homo Sapiens
QYTWTDKWRVR

SEQ ID NO: 99307 - protein, 11 aa, Homo Sapiens
YTWTDKWRVRY

SEQ ID NO: 99308 - protein, 11 aa, Homo Sapiens
RYTNWAADEPK

SEQ ID NO: 99309 - protein, 11 aa, Homo Sapiens
YTNWAADEPKL

SEQ ID NO: 99310 - protein, 11 aa, Homo Sapiens
DEPKLKSACVY

SEQ ID NO: 99311 - protein, 11 aa, Homo Sapiens
KLKSACVYLDL

SEQ ID NO: 99312 - protein, 11 aa, Homo Sapiens
SACVYLDLDGY

SEQ ID NO: 99313 - protein, 11 aa, Homo Sapiens
CVYLDLDGYWK

SEQ ID NO: 99314 - protein, 11 aa, Homo Sapiens
YLDLDGYWKTA

SEQ ID NO: 99315 - protein, 11 aa, Homo Sapiens
DLDGYWKTAHC

SEQ ID NO: 99316 - protein, 11 aa, Homo Sapiens
YWKTAHCNESF

SEQ ID NO: 99317 - protein, 11 aa, Homo Sapiens
KTAHCNESFYF

SEQ ID NO: 99318 - protein, 11 aa, Homo Sapiens
TAHCNESFYFL

SEQ ID NO: 99319 - protein, 11 aa, Homo Sapiens
CNESFYFLCKR

SEQ ID NO: 99320 - protein, 11 aa, Homo Sapiens
FYFLCKRSDEI

SEQ ID NO: 99321 - protein, 11 aa, Homo Sapiens
FLCKRSDEIPA

SEQ ID NO: 99322 - protein, 11 aa, Homo Sapiens
DEIPATEPPQL

SEQ ID NO: 99323 - protein, 11 aa, Homo Sapiens
LPGRCPESDHT

SEQ ID NO: 99324 - protein, 11 aa, Homo Sapiens
PESDHTAWIPF

SEQ ID NO: 99325 - protein, 11 aa, Homo Sapiens
TAWIPFHGHCY

SEQ ID NO: 99326 - protein, 11 aa, Homo Sapiens
AWIPFHGHCYY

SEQ ID NO: 99327 - protein, 11 aa, Homo Sapiens
WIPFHGHCYYI

SEQ ID NO: 99328 - protein, 11 aa, Homo Sapiens
IPFHGHCYYIE

SEQ ID NO: 99329 - protein, 11 aa, Homo Sapiens
HCYYIESSYTR

SEQ ID NO: 99330 - protein, 11 aa, Homo Sapiens
YYIESSYTRNW

SEQ ID NO: 99331 - protein, 11 aa, Homo Sapiens
ESSYTRNWGQA

SEQ ID NO: 99332 - protein, 11 aa, Homo Sapiens
SYTRNWGQASL

SEQ ID NO: 99333 - protein, 11 aa, Homo Sapiens
SLECLRMGSSL

SEQ ID NO: 99334 - protein, 11 aa, Homo Sapiens
CLRMGSSLVSI

SEQ ID NO: 99335 - protein, 11 aa, Homo Sapiens
MGSSLVSIESA

SEQ ID NO: 99336 - protein, 11 aa, Homo Sapiens
VSIESAAESSF

SEQ ID NO: 99337 - protein, 11 aa, Homo Sapiens
SIESAAESSFL

SEQ ID NO: 99338 - protein, 11 aa, Homo Sapiens
ESAAESSFLSY

SEQ ID NO: 99339 - protein, 11 aa, Homo Sapiens
SAAESSFLSYR

SEQ ID NO: 99340 - protein, 11 aa, Homo Sapiens
AAESSFLSYRV

SEQ ID NO: 99341 - protein, 11 aa, Homo Sapiens
SSFLSYRVEPL

SEQ ID NO: 99342 - protein, 11 aa, Homo Sapiens
SFLSYRVEPLK

SEQ ID NO: 99343 - protein, 11 aa, Homo Sapiens
FLSYRVEPLKS

SEQ ID NO: 99344 - protein, 11 aa, Homo Sapiens
LSYRVEPLKSK

SEQ ID NO: 99345 - protein, 11 aa, Homo Sapiens
RVEPLKSKTNF

SEQ ID NO: 99346 - protein, 11 aa, Homo Sapiens
EPLKSKTNFWI

SEQ ID NO: 99347 - protein, 11 aa, Homo Sapiens
SKTNFWIGLFR

SEQ ID NO: 99348 - protein, 11 aa, Homo Sapiens
TNFWIGLFRNV

SEQ ID NO: 99349 - protein, 11 aa, Homo Sapiens
IGLFRNVEGTW

SEQ ID NO: 99350 - protein, 11 aa, Homo Sapiens
GLFRNVEGTWL

SEQ ID NO: 99351 - protein, 11 aa, Homo Sapiens
GTWLWINNSPV

SEQ ID NO: 99352 - protein, 11 aa, Homo Sapiens
WLWINNSPVSF

SEQ ID NO: 99353 - protein, 11 aa, Homo Sapiens
LWINNSPVSFV

SEQ ID NO: 99354 - protein, 11 aa, Homo Sapiens
INNSPVSFVNW

SEQ ID NO: 99355 - protein, 11 aa, Homo Sapiens
HASSGFWSNIH

SEQ ID NO: 99356 - protein, 11 aa, Homo Sapiens
FWSNIHCSSYK

SEQ ID NO: 99357 - protein, 11 aa, Homo Sapiens
NIHCSSYKGYI

SEQ ID NO: 99358 - protein, 11 aa, Homo Sapiens
CSSYKGYICKR

SEQ ID NO: 99359 - protein, 11 aa, Homo Sapiens
SYKGYICKRPK

SEQ ID NO: 99360 - protein, 11 aa, Homo Sapiens
KIIDAKPTHEL

SEQ ID NO: 99361 - protein, 11 aa, Homo Sapiens
IIDAKPTHELL

SEQ ID NO: 99362 - protein, 11 aa, Homo Sapiens
KPTHELLTTKA

SEQ ID NO: 99363 - protein, 11 aa, Homo Sapiens
KADTRKMDPSK

SEQ ID NO: 99364 - protein, 11 aa, Homo Sapiens
KMDPSKPSSNV

SEQ ID NO: 99365 - protein, 11 aa, Homo Sapiens
KPSSNVAGVVI

SEQ ID NO: 99366 - protein, 11 aa, Homo Sapiens
NVAGVVIIVIL

SEQ ID NO: 99367 - protein, 11 aa, Homo Sapiens
IIVILLILTGA

SEQ ID NO: 99368 - protein, 11 aa, Homo Sapiens
VILLILTGAGL

SEQ ID NO: 99369 - protein, 11 aa, Homo Sapiens
ILLILTGAGLA

SEQ ID NO: 99370 - protein, 11 aa, Homo Sapiens
LLILTGAGLAA

SEQ ID NO: 99371 - protein, 11 aa, Homo Sapiens
LILTGAGLAAY

SEQ ID NO: 99372 - protein, 11 aa, Homo Sapiens
ILTGAGLAAYF

SEQ ID NO: 99373 - protein, 11 aa, Homo Sapiens
LTGAGLAAYFF

SEQ ID NO: 99374 - protein, 11 aa, Homo Sapiens
TGAGLAAYFFY

SEQ ID NO: 99375 - protein, 11 aa, Homo Sapiens
GAGLAAYFFYK

SEQ ID NO: 99376 - protein, 11 aa, Homo Sapiens
AGLAAYFFYKK

SEQ ID NO: 99377 - protein, 11 aa, Homo Sapiens
GLAAYFFYKKR

SEQ ID NO: 99378 - protein, 11 aa, Homo Sapiens
LAAYFFYKKRR

SEQ ID NO: 99379 - protein, 11 aa, Homo Sapiens
YFFYKKRRVHL

SEQ ID NO: 99380 - protein, 11 aa, Homo Sapiens
RRVHLPQEGAF

SEQ ID NO: 99381 - protein, 11 aa, Homo Sapiens
LPQEGAFENTL

SEQ ID NO: 99382 - protein, 11 aa, Homo Sapiens
QEGAFENTLYF

SEQ ID NO: 99383 - protein, 11 aa, Homo Sapiens
SQSSPGTSDMK

SEQ ID NO: 99384 - protein, 13 aa, Homo Sapiens
MRLPLLLVFASVI

SEQ ID NO: 99385 - protein, 13 aa, Homo Sapiens
RLPLLLVFASVIP

SEQ ID NO: 99386 - protein, 13 aa, Homo Sapiens
LPLLLVFASVIPG

SEQ ID NO: 99387 - protein, 13 aa, Homo Sapiens
PLLLVFASVIPGA

SEQ ID NO: 99388 - protein, 13 aa, Homo Sapiens
LLLVFASVIPGAV

SEQ ID NO: 99389 - protein, 13 aa, Homo Sapiens
LLVFASVIPGAVL

SEQ ID NO: 99390 - protein, 13 aa, Homo Sapiens
LVFASVIPGAVLL

SEQ ID NO: 99391 - protein, 13 aa, Homo Sapiens
VFASVIPGAVLLL

SEQ ID NO: 99392 - protein, 13 aa, Homo Sapiens
FASVIPGAVLLLD

SEQ ID NO: 99393 - protein, 13 aa, Homo Sapiens
ASVIPGAVLLLDT

SEQ ID NO: 99394 - protein, 13 aa, Homo Sapiens
SVIPGAVLLLDTR

SEQ ID NO: 99395 - protein, 13 aa, Homo Sapiens
VIPGAVLLLDTRQ

SEQ ID NO: 99396 - protein, 13 aa, Homo Sapiens
IPGAVLLLDTRQF

SEQ ID NO: 99397 - protein, 13 aa, Homo Sapiens
PGAVLLLDTRQFL

SEQ ID NO: 99398 - protein, 13 aa, Homo Sapiens
GAVLLLDTRQFLI

SEQ ID NO: 99399 - protein, 13 aa, Homo Sapiens
AVLLLDTRQFLIY

SEQ ID NO: 99400 - protein, 13 aa, Homo Sapiens
VLLLDTRQFLIYN

SEQ ID NO: 99401 - protein, 13 aa, Homo Sapiens
LLLDTRQFLIYNE

SEQ ID NO: 99402 - protein, 13 aa, Homo Sapiens
LLDTRQFLIYNED

SEQ ID NO: 99403 - protein, 13 aa, Homo Sapiens
LDTRQFLIYNEDH

SEQ ID NO: 99404 - protein, 13 aa, Homo Sapiens
DTRQFLIYNEDHK

SEQ ID NO: 99405 - protein, 13 aa, Homo Sapiens
TRQFLIYNEDHKR

SEQ ID NO: 99406 - protein, 13 aa, Homo Sapiens
RQFLIYNEDHKRC

SEQ ID NO: 99407 - protein, 13 aa, Homo Sapiens
QFLIYNEDHKRCV

SEQ ID NO: 99408 - protein, 13 aa, Homo Sapiens
FLIYNEDHKRCVD

SEQ ID NO: 99409 - protein, 13 aa, Homo Sapiens
LIYNEDHKRCVDA

SEQ ID NO: 99410 - protein, 13 aa, Homo Sapiens
IYNEDHKRCVDAV

SEQ ID NO: 99411 - protein, 13 aa, Homo Sapiens
YNEDHKRCVDAVS

SEQ ID NO: 99412 - protein, 13 aa, Homo Sapiens
NEDHKRCVDAVSP

SEQ ID NO: 99413 - protein, 13 aa, Homo Sapiens
EDHKRCVDAVSPS

SEQ ID NO: 99414 - protein, 13 aa, Homo Sapiens
DHKRCVDAVSPSA

SEQ ID NO: 99415 - protein, 13 aa, Homo Sapiens
HKRCVDAVSPSAV

SEQ ID NO: 99416 - protein, 13 aa, Homo Sapiens
KRCVDAVSPSAVQ

SEQ ID NO: 99417 - protein, 13 aa, Homo Sapiens
RCVDAVSPSAVQT

SEQ ID NO: 99418 - protein, 13 aa, Homo Sapiens
CVDAVSPSAVQTA

SEQ ID NO: 99419 - protein, 13 aa, Homo Sapiens
VDAVSPSAVQTAA

SEQ ID NO: 99420 - protein, 13 aa, Homo Sapiens
DAVSPSAVQTAAC

SEQ ID NO: 99421 - protein, 13 aa, Homo Sapiens
AVSPSAVQTAACN

SEQ ID NO: 99422 - protein, 13 aa, Homo Sapiens
VSPSAVQTAACNQ

SEQ ID NO: 99423 - protein, 13 aa, Homo Sapiens
SPSAVQTAACNQD

SEQ ID NO: 99424 - protein, 13 aa, Homo Sapiens
PSAVQTAACNQDA

SEQ ID NO: 99425 - protein, 13 aa, Homo Sapiens
SAVQTAACNQDAE

SEQ ID NO: 99426 - protein, 13 aa, Homo Sapiens
AVQTAACNQDAES

SEQ ID NO: 99427 - protein, 13 aa, Homo Sapiens
VQTAACNQDAESQ

SEQ ID NO: 99428 - protein, 13 aa, Homo Sapiens
QTAACNQDAESQK

SEQ ID NO: 99429 - protein, 13 aa, Homo Sapiens
TAACNQDAESQKF

SEQ ID NO: 99430 - protein, 13 aa, Homo Sapiens
AACNQDAESQKFR

SEQ ID NO: 99431 - protein, 13 aa, Homo Sapiens
ACNQDAESQKFRW

SEQ ID NO: 99432 - protein, 13 aa, Homo Sapiens
CNQDAESQKFRWV

SEQ ID NO: 99433 - protein, 13 aa, Homo Sapiens
NQDAESQKFRWVS

SEQ ID NO: 99434 - protein, 13 aa, Homo Sapiens
QDAESQKFRWVSE

SEQ ID NO: 99435 - protein, 13 aa, Homo Sapiens
DAESQKFRWVSES

SEQ ID NO: 99436 - protein, 13 aa, Homo Sapiens
AESQKFRWVSESQ

SEQ ID NO: 99437 - protein, 13 aa, Homo Sapiens
ESQKFRWVSESQI

SEQ ID NO: 99438 - protein, 13 aa, Homo Sapiens
SQKFRWVSESQIM

SEQ ID NO: 99439 - protein, 13 aa, Homo Sapiens
QKFRWVSESQIMS

SEQ ID NO: 99440 - protein, 13 aa, Homo Sapiens
KFRWVSESQIMSV

SEQ ID NO: 99441 - protein, 13 aa, Homo Sapiens
FRWVSESQIMSVA

SEQ ID NO: 99442 - protein, 13 aa, Homo Sapiens
RWVSESQIMSVAF

SEQ ID NO: 99443 - protein, 13 aa, Homo Sapiens
WVSESQIMSVAFK

SEQ ID NO: 99444 - protein, 13 aa, Homo Sapiens
VSESQIMSVAFKL

SEQ ID NO: 99445 - protein, 13 aa, Homo Sapiens
SESQIMSVAFKLC

SEQ ID NO: 99446 - protein, 13 aa, Homo Sapiens
ESQIMSVAFKLCL

SEQ ID NO: 99447 - protein, 13 aa, Homo Sapiens
SQIMSVAFKLCLG

SEQ ID NO: 99448 - protein, 13 aa, Homo Sapiens
QIMSVAFKLCLGV

SEQ ID NO: 99449 - protein, 13 aa, Homo Sapiens
IMSVAFKLCLGVP

SEQ ID NO: 99450 - protein, 13 aa, Homo Sapiens
MSVAFKLCLGVPS

SEQ ID NO: 99451 - protein, 13 aa, Homo Sapiens
SVAFKLCLGVPSK

SEQ ID NO: 99452 - protein, 13 aa, Homo Sapiens
VAFKLCLGVPSKT

SEQ ID NO: 99453 - protein, 13 aa, Homo Sapiens
AFKLCLGVPSKTD

SEQ ID NO: 99454 - protein, 13 aa, Homo Sapiens
FKLCLGVPSKTDW

SEQ ID NO: 99455 - protein, 13 aa, Homo Sapiens
KLCLGVPSKTDWV

SEQ ID NO: 99456 - protein, 13 aa, Homo Sapiens
LCLGVPSKTDWVA

SEQ ID NO: 99457 - protein, 13 aa, Homo Sapiens
CLGVPSKTDWVAI

SEQ ID NO: 99458 - protein, 13 aa, Homo Sapiens
LGVPSKTDWVAIT

SEQ ID NO: 99459 - protein, 13 aa, Homo Sapiens
GVPSKTDWVAITL

SEQ ID NO: 99460 - protein, 13 aa, Homo Sapiens
VPSKTDWVAITLY

SEQ ID NO: 99461 - protein, 13 aa, Homo Sapiens
PSKTDWVAITLYA

SEQ ID NO: 99462 - protein, 13 aa, Homo Sapiens
SKTDWVAITLYAC

SEQ ID NO: 99463 - protein, 13 aa, Homo Sapiens
KTDWVAITLYACD

SEQ ID NO: 99464 - protein, 13 aa, Homo Sapiens
TDWVAITLYACDS

SEQ ID NO: 99465 - protein, 13 aa, Homo Sapiens
DWVAITLYACDSK

SEQ ID NO: 99466 - protein, 13 aa, Homo Sapiens
WVAITLYACDSKS

SEQ ID NO: 99467 - protein, 13 aa, Homo Sapiens
VAITLYACDSKSE

SEQ ID NO: 99468 - protein, 13 aa, Homo Sapiens
AITLYACDSKSEF

SEQ ID NO: 99469 - protein, 13 aa, Homo Sapiens
ITLYACDSKSEFQ

SEQ ID NO: 99470 - protein, 13 aa, Homo Sapiens
TLYACDSKSEFQK

SEQ ID NO: 99471 - protein, 13 aa, Homo Sapiens
LYACDSKSEFQKW

SEQ ID NO: 99472 - protein, 13 aa, Homo Sapiens
YACDSKSEFQKWE

SEQ ID NO: 99473 - protein, 13 aa, Homo Sapiens
ACDSKSEFQKWEC

SEQ ID NO: 99474 - protein, 13 aa, Homo Sapiens
CDSKSEFQKWECK

SEQ ID NO: 99475 - protein, 13 aa, Homo Sapiens
DSKSEFQKWECKN

SEQ ID NO: 99476 - protein, 13 aa, Homo Sapiens
SKSEFQKWECKND

SEQ ID NO: 99477 - protein, 13 aa, Homo Sapiens
KSEFQKWECKNDT

SEQ ID NO: 99478 - protein, 13 aa, Homo Sapiens
SEFQKWECKNDTL

SEQ ID NO: 99479 - protein, 13 aa, Homo Sapiens
EFQKWECKNDTLL

SEQ ID NO: 99480 - protein, 13 aa, Homo Sapiens
FQKWECKNDTLLG

SEQ ID NO: 99481 - protein, 13 aa, Homo Sapiens
QKWECKNDTLLGI

SEQ ID NO: 99482 - protein, 13 aa, Homo Sapiens
KWECKNDTLLGIK

SEQ ID NO: 99483 - protein, 13 aa, Homo Sapiens
WECKNDTLLGIKG

SEQ ID NO: 99484 - protein, 13 aa, Homo Sapiens
ECKNDTLLGIKGE

SEQ ID NO: 99485 - protein, 13 aa, Homo Sapiens
CKNDTLLGIKGED

SEQ ID NO: 99486 - protein, 13 aa, Homo Sapiens
KNDTLLGIKGEDL

SEQ ID NO: 99487 - protein, 13 aa, Homo Sapiens
NDTLLGIKGEDLF

SEQ ID NO: 99488 - protein, 13 aa, Homo Sapiens
DTLLGIKGEDLFF

SEQ ID NO: 99489 - protein, 13 aa, Homo Sapiens
TLLGIKGEDLFFN

SEQ ID NO: 99490 - protein, 13 aa, Homo Sapiens
LLGIKGEDLFFNY

SEQ ID NO: 99491 - protein, 13 aa, Homo Sapiens
LGIKGEDLFFNYG

SEQ ID NO: 99492 - protein, 13 aa, Homo Sapiens
GIKGEDLFFNYGN

SEQ ID NO: 99493 - protein, 13 aa, Homo Sapiens
IKGEDLFFNYGNR

SEQ ID NO: 99494 - protein, 13 aa, Homo Sapiens
KGEDLFFNYGNRQ

SEQ ID NO: 99495 - protein, 13 aa, Homo Sapiens
GEDLFFNYGNRQE

SEQ ID NO: 99496 - protein, 13 aa, Homo Sapiens
EDLFFNYGNRQEK

SEQ ID NO: 99497 - protein, 13 aa, Homo Sapiens
DLFFNYGNRQEKN

SEQ ID NO: 99498 - protein, 13 aa, Homo Sapiens
LFFNYGNRQEKNI

SEQ ID NO: 99499 - protein, 13 aa, Homo Sapiens
FFNYGNRQEKNIM

SEQ ID NO: 99500 - protein, 13 aa, Homo Sapiens
FNYGNRQEKNIML

SEQ ID NO: 99501 - protein, 13 aa, Homo Sapiens
NYGNRQEKNIMLY

SEQ ID NO: 99502 - protein, 13 aa, Homo Sapiens
YGNRQEKNIMLYK

SEQ ID NO: 99503 - protein, 13 aa, Homo Sapiens
GNRQEKNIMLYKG

SEQ ID NO: 99504 - protein, 13 aa, Homo Sapiens
NRQEKNIMLYKGS

SEQ ID NO: 99505 - protein, 13 aa, Homo Sapiens
RQEKNIMLYKGSG

SEQ ID NO: 99506 - protein, 13 aa, Homo Sapiens
QEKNIMLYKGSGL

SEQ ID NO: 99507 - protein, 13 aa, Homo Sapiens
EKNIMLYKGSGLW

SEQ ID NO: 99508 - protein, 13 aa, Homo Sapiens
KNIMLYKGSGLWS

SEQ ID NO: 99509 - protein, 13 aa, Homo Sapiens
NIMLYKGSGLWSR

SEQ ID NO: 99510 - protein, 13 aa, Homo Sapiens
IMLYKGSGLWSRW

SEQ ID NO: 99511 - protein, 13 aa, Homo Sapiens
MLYKGSGLWSRWK

SEQ ID NO: 99512 - protein, 13 aa, Homo Sapiens
LYKGSGLWSRWKI

SEQ ID NO: 99513 - protein, 13 aa, Homo Sapiens
YKGSGLWSRWKIY

SEQ ID NO: 99514 - protein, 13 aa, Homo Sapiens
KGSGLWSRWKIYG

SEQ ID NO: 99515 - protein, 13 aa, Homo Sapiens
GSGLWSRWKIYGT

SEQ ID NO: 99516 - protein, 13 aa, Homo Sapiens
SGLWSRWKIYGTT

SEQ ID NO: 99517 - protein, 13 aa, Homo Sapiens
GLWSRWKIYGTTD

SEQ ID NO: 99518 - protein, 13 aa, Homo Sapiens
LWSRWKIYGTTDN

SEQ ID NO: 99519 - protein, 13 aa, Homo Sapiens
WSRWKIYGTTDNL

SEQ ID NO: 99520 - protein, 13 aa, Homo Sapiens
SRWKIYGTTDNLC

SEQ ID NO: 99521 - protein, 13 aa, Homo Sapiens
RWKIYGTTDNLCS

SEQ ID NO: 99522 - protein, 13 aa, Homo Sapiens
WKIYGTTDNLCSR

SEQ ID NO: 99523 - protein, 13 aa, Homo Sapiens
KIYGTTDNLCSRG

SEQ ID NO: 99524 - protein, 13 aa, Homo Sapiens
IYGTTDNLCSRGY

SEQ ID NO: 99525 - protein, 13 aa, Homo Sapiens
YGTTDNLCSRGYE

SEQ ID NO: 99526 - protein, 13 aa, Homo Sapiens
GTTDNLCSRGYEA

SEQ ID NO: 99527 - protein, 13 aa, Homo Sapiens
TTDNLCSRGYEAM

SEQ ID NO: 99528 - protein, 13 aa, Homo Sapiens
TDNLCSRGYEAMY

SEQ ID NO: 99529 - protein, 13 aa, Homo Sapiens
DNLCSRGYEAMYT

SEQ ID NO: 99530 - protein, 13 aa, Homo Sapiens
NLCSRGYEAMYTL

SEQ ID NO: 99531 - protein, 13 aa, Homo Sapiens
LCSRGYEAMYTLL

SEQ ID NO: 99532 - protein, 13 aa, Homo Sapiens
CSRGYEAMYTLLG

SEQ ID NO: 99533 - protein, 13 aa, Homo Sapiens
SRGYEAMYTLLGN

SEQ ID NO: 99534 - protein, 13 aa, Homo Sapiens
RGYEAMYTLLGNA

SEQ ID NO: 99535 - protein, 13 aa, Homo Sapiens
GYEAMYTLLGNAN

SEQ ID NO: 99536 - protein, 13 aa, Homo Sapiens
YEAMYTLLGNANG

SEQ ID NO: 99537 - protein, 13 aa, Homo Sapiens
EAMYTLLGNANGA

SEQ ID NO: 99538 - protein, 13 aa, Homo Sapiens
AMYTLLGNANGAT

SEQ ID NO: 99539 - protein, 13 aa, Homo Sapiens
MYTLLGNANGATC

SEQ ID NO: 99540 - protein, 13 aa, Homo Sapiens
YTLLGNANGATCA

SEQ ID NO: 99541 - protein, 13 aa, Homo Sapiens
TLLGNANGATCAF

SEQ ID NO: 99542 - protein, 13 aa, Homo Sapiens
LLGNANGATCAFP

SEQ ID NO: 99543 - protein, 13 aa, Homo Sapiens
LGNANGATCAFPF

SEQ ID NO: 99544 - protein, 13 aa, Homo Sapiens
GNANGATCAFPFK

SEQ ID NO: 99545 - protein, 13 aa, Homo Sapiens
NANGATCAFPFKF

SEQ ID NO: 99546 - protein, 13 aa, Homo Sapiens
ANGATCAFPFKFE

SEQ ID NO: 99547 - protein, 13 aa, Homo Sapiens
NGATCAFPFKFEN

SEQ ID NO: 99548 - protein, 13 aa, Homo Sapiens
GATCAFPFKFENK

SEQ ID NO: 99549 - protein, 13 aa, Homo Sapiens
ATCAFPFKFENKW

SEQ ID NO: 99550 - protein, 13 aa, Homo Sapiens
TCAFPFKFENKWY

SEQ ID NO: 99551 - protein, 13 aa, Homo Sapiens
CAFPFKFENKWYA

SEQ ID NO: 99552 - protein, 13 aa, Homo Sapiens
AFPFKFENKWYAD

SEQ ID NO: 99553 - protein, 13 aa, Homo Sapiens
FPFKFENKWYADC

SEQ ID NO: 99554 - protein, 13 aa, Homo Sapiens
PFKFENKWYADCT

SEQ ID NO: 99555 - protein, 13 aa, Homo Sapiens
FKFENKWYADCTS

SEQ ID NO: 99556 - protein, 13 aa, Homo Sapiens
KFENKWYADCTSA

SEQ ID NO: 99557 - protein, 13 aa, Homo Sapiens
FENKWYADCTSAG

SEQ ID NO: 99558 - protein, 13 aa, Homo Sapiens
ENKWYADCTSAGR

SEQ ID NO: 99559 - protein, 13 aa, Homo Sapiens
NKWYADCTSAGRS

SEQ ID NO: 99560 - protein, 13 aa, Homo Sapiens
KWYADCTSAGRSD

SEQ ID NO: 99561 - protein, 13 aa, Homo Sapiens
WYADCTSAGRSDG

SEQ ID NO: 99562 - protein, 13 aa, Homo Sapiens
YADCTSAGRSDGW

SEQ ID NO: 99563 - protein, 13 aa, Homo Sapiens
ADCTSAGRSDGWL

SEQ ID NO: 99564 - protein, 13 aa, Homo Sapiens
DCTSAGRSDGWLW

SEQ ID NO: 99565 - protein, 13 aa, Homo Sapiens
CTSAGRSDGWLWC

SEQ ID NO: 99566 - protein, 13 aa, Homo Sapiens
TSAGRSDGWLWCG

SEQ ID NO: 99567 - protein, 13 aa, Homo Sapiens
SAGRSDGWLWCGT

SEQ ID NO: 99568 - protein, 13 aa, Homo Sapiens
AGRSDGWLWCGTT

SEQ ID NO: 99569 - protein, 13 aa, Homo Sapiens
GRSDGWLWCGTTT

SEQ ID NO: 99570 - protein, 13 aa, Homo Sapiens
RSDGWLWCGTTTD

SEQ ID NO: 99571 - protein, 13 aa, Homo Sapiens
SDGWLWCGTTTDY

SEQ ID NO: 99572 - protein, 13 aa, Homo Sapiens
DGWLWCGTTTDYD

SEQ ID NO: 99573 - protein, 13 aa, Homo Sapiens
GWLWCGTTTDYDT

SEQ ID NO: 99574 - protein, 13 aa, Homo Sapiens
WLWCGTTTDYDTD

SEQ ID NO: 99575 - protein, 13 aa, Homo Sapiens
LWCGTTTDYDTDK

SEQ ID NO: 99576 - protein, 13 aa, Homo Sapiens
WCGTTTDYDTDKL

SEQ ID NO: 99577 - protein, 13 aa, Homo Sapiens
CGTTTDYDTDKLF

SEQ ID NO: 99578 - protein, 13 aa, Homo Sapiens
GTTTDYDTDKLFG

SEQ ID NO: 99579 - protein, 13 aa, Homo Sapiens
TTTDYDTDKLFGY

SEQ ID NO: 99580 - protein, 13 aa, Homo Sapiens
TTDYDTDKLFGYC

SEQ ID NO: 99581 - protein, 13 aa, Homo Sapiens
TDYDTDKLFGYCP

SEQ ID NO: 99582 - protein, 13 aa, Homo Sapiens
DYDTDKLFGYCPL

SEQ ID NO: 99583 - protein, 13 aa, Homo Sapiens
YDTDKLFGYCPLK

SEQ ID NO: 99584 - protein, 13 aa, Homo Sapiens
DTDKLFGYCPLKF

SEQ ID NO: 99585 - protein, 13 aa, Homo Sapiens
TDKLFGYCPLKFE

SEQ ID NO: 99586 - protein, 13 aa, Homo Sapiens
DKLFGYCPLKFEG

SEQ ID NO: 99587 - protein, 13 aa, Homo Sapiens
KLFGYCPLKFEGS

SEQ ID NO: 99588 - protein, 13 aa, Homo Sapiens
LFGYCPLKFEGSE

SEQ ID NO: 99589 - protein, 13 aa, Homo Sapiens
FGYCPLKFEGSES

SEQ ID NO: 99590 - protein, 13 aa, Homo Sapiens
GYCPLKFEGSESL

SEQ ID NO: 99591 - protein, 13 aa, Homo Sapiens
YCPLKFEGSESLW

SEQ ID NO: 99592 - protein, 13 aa, Homo Sapiens
CPLKFEGSESLWN

SEQ ID NO: 99593 - protein, 13 aa, Homo Sapiens
PLKFEGSESLWNK

SEQ ID NO: 99594 - protein, 13 aa, Homo Sapiens
LKFEGSESLWNKD

SEQ ID NO: 99595 - protein, 13 aa, Homo Sapiens
KFEGSESLWNKDP

SEQ ID NO: 99596 - protein, 13 aa, Homo Sapiens
FEGSESLWNKDPL

SEQ ID NO: 99597 - protein, 13 aa, Homo Sapiens
EGSESLWNKDPLT

SEQ ID NO: 99598 - protein, 13 aa, Homo Sapiens
GSESLWNKDPLTS

SEQ ID NO: 99599 - protein, 13 aa, Homo Sapiens
SESLWNKDPLTSV

SEQ ID NO: 99600 - protein, 13 aa, Homo Sapiens
ESLWNKDPLTSVS

SEQ ID NO: 99601 - protein, 13 aa, Homo Sapiens
SLWNKDPLTSVSY

SEQ ID NO: 99602 - protein, 13 aa, Homo Sapiens
LWNKDPLTSVSYQ

SEQ ID NO: 99603 - protein, 13 aa, Homo Sapiens
WNKDPLTSVSYQI

SEQ ID NO: 99604 - protein, 13 aa, Homo Sapiens
NKDPLTSVSYQIN

SEQ ID NO: 99605 - protein, 13 aa, Homo Sapiens
KDPLTSVSYQINS

SEQ ID NO: 99606 - protein, 13 aa, Homo Sapiens
DPLTSVSYQINSK

SEQ ID NO: 99607 - protein, 13 aa, Homo Sapiens
PLTSVSYQINSKS

SEQ ID NO: 99608 - protein, 13 aa, Homo Sapiens
LTSVSYQINSKSA

SEQ ID NO: 99609 - protein, 13 aa, Homo Sapiens
TSVSYQINSKSAL

SEQ ID NO: 99610 - protein, 13 aa, Homo Sapiens
SVSYQINSKSALS

SEQ ID NO: 99611 - protein, 13 aa, Homo Sapiens
VSYQINSKSALSW

SEQ ID NO: 99612 - protein, 13 aa, Homo Sapiens
SYQINSKSALSWH

SEQ ID NO: 99613 - protein, 13 aa, Homo Sapiens
YQINSKSALSWHQ

SEQ ID NO: 99614 - protein, 13 aa, Homo Sapiens
QINSKSALSWHQA

SEQ ID NO: 99615 - protein, 13 aa, Homo Sapiens
INSKSALSWHQAR

SEQ ID NO: 99616 - protein, 13 aa, Homo Sapiens
NSKSALSWHQARK

SEQ ID NO: 99617 - protein, 13 aa, Homo Sapiens
SKSALSWHQARKS

SEQ ID NO: 99618 - protein, 13 aa, Homo Sapiens
KSALSWHQARKSC

SEQ ID NO: 99619 - protein, 13 aa, Homo Sapiens
SALSWHQARKSCQ

SEQ ID NO: 99620 - protein, 13 aa, Homo Sapiens
ALSWHQARKSCQQ

SEQ ID NO: 99621 - protein, 13 aa, Homo Sapiens
LSWHQARKSCQQQ

SEQ ID NO: 99622 - protein, 13 aa, Homo Sapiens
SWHQARKSCQQQN

SEQ ID NO: 99623 - protein, 13 aa, Homo Sapiens
WHQARKSCQQQNA

SEQ ID NO: 99624 - protein, 13 aa, Homo Sapiens
HQARKSCQQQNAE

SEQ ID NO: 99625 - protein, 13 aa, Homo Sapiens
QARKSCQQQNAEL

SEQ ID NO: 99626 - protein, 13 aa, Homo Sapiens
ARKSCQQQNAELL

SEQ ID NO: 99627 - protein, 13 aa, Homo Sapiens
RKSCQQQNAELLS

SEQ ID NO: 99628 - protein, 13 aa, Homo Sapiens
KSCQQQNAELLSI

SEQ ID NO: 99629 - protein, 13 aa, Homo Sapiens
SCQQQNAELLSIT

SEQ ID NO: 99630 - protein, 13 aa, Homo Sapiens
CQQQNAELLSITE

SEQ ID NO: 99631 - protein, 13 aa, Homo Sapiens
QQQNAELLSITEI

SEQ ID NO: 99632 - protein, 13 aa, Homo Sapiens
QQNAELLSITEIH

SEQ ID NO: 99633 - protein, 13 aa, Homo Sapiens
QNAELLSITEIHE

SEQ ID NO: 99634 - protein, 13 aa, Homo Sapiens
NAELLSITEIHEQ

SEQ ID NO: 99635 - protein, 13 aa, Homo Sapiens
AELLSITEIHEQT

SEQ ID NO: 99636 - protein, 13 aa, Homo Sapiens
ELLSITEIHEQTY

SEQ ID NO: 99637 - protein, 13 aa, Homo Sapiens
LLSITEIHEQTYL

SEQ ID NO: 99638 - protein, 13 aa, Homo Sapiens
LSITEIHEQTYLT

SEQ ID NO: 99639 - protein, 13 aa, Homo Sapiens
SITEIHEQTYLTG

SEQ ID NO: 99640 - protein, 13 aa, Homo Sapiens
ITEIHEQTYLTGL

SEQ ID NO: 99641 - protein, 13 aa, Homo Sapiens
TEIHEQTYLTGLT

SEQ ID NO: 99642 - protein, 13 aa, Homo Sapiens
EIHEQTYLTGLTS

SEQ ID NO: 99643 - protein, 13 aa, Homo Sapiens
IHEQTYLTGLTSS

SEQ ID NO: 99644 - protein, 13 aa, Homo Sapiens
HEQTYLTGLTSSL

SEQ ID NO: 99645 - protein, 13 aa, Homo Sapiens
EQTYLTGLTSSLT

SEQ ID NO: 99646 - protein, 13 aa, Homo Sapiens
QTYLTGLTSSLTS

SEQ ID NO: 99647 - protein, 13 aa, Homo Sapiens
TYLTGLTSSLTSG

SEQ ID NO: 99648 - protein, 13 aa, Homo Sapiens
YLTGLTSSLTSGL

SEQ ID NO: 99649 - protein, 13 aa, Homo Sapiens
LTGLTSSLTSGLW

SEQ ID NO: 99650 - protein, 13 aa, Homo Sapiens
TGLTSSLTSGLWI

SEQ ID NO: 99651 - protein, 13 aa, Homo Sapiens
GLTSSLTSGLWIG

SEQ ID NO: 99652 - protein, 13 aa, Homo Sapiens
LTSSLTSGLWIGL

SEQ ID NO: 99653 - protein, 13 aa, Homo Sapiens
TSSLTSGLWIGLN

SEQ ID NO: 99654 - protein, 13 aa, Homo Sapiens
SSLTSGLWIGLNS

SEQ ID NO: 99655 - protein, 13 aa, Homo Sapiens
SLTSGLWIGLNSL

SEQ ID NO: 99656 - protein, 13 aa, Homo Sapiens
LTSGLWIGLNSLS

SEQ ID NO: 99657 - protein, 13 aa, Homo Sapiens
TSGLWIGLNSLSF

SEQ ID NO: 99658 - protein, 13 aa, Homo Sapiens
SGLWIGLNSLSFN

SEQ ID NO: 99659 - protein, 13 aa, Homo Sapiens
GLWIGLNSLSFNS

SEQ ID NO: 99660 - protein, 13 aa, Homo Sapiens
LWIGLNSLSFNSG

SEQ ID NO: 99661 - protein, 13 aa, Homo Sapiens
WIGLNSLSFNSGW

SEQ ID NO: 99662 - protein, 13 aa, Homo Sapiens
IGLNSLSFNSGWQ

SEQ ID NO: 99663 - protein, 13 aa, Homo Sapiens
GLNSLSFNSGWQW

SEQ ID NO: 99664 - protein, 13 aa, Homo Sapiens
LNSLSFNSGWQWS

SEQ ID NO: 99665 - protein, 13 aa, Homo Sapiens
NSLSFNSGWQWSD

SEQ ID NO: 99666 - protein, 13 aa, Homo Sapiens
SLSFNSGWQWSDR

SEQ ID NO: 99667 - protein, 13 aa, Homo Sapiens
LSFNSGWQWSDRS

SEQ ID NO: 99668 - protein, 13 aa, Homo Sapiens
SFNSGWQWSDRSP

SEQ ID NO: 99669 - protein, 13 aa, Homo Sapiens
FNSGWQWSDRSPF

SEQ ID NO: 99670 - protein, 13 aa, Homo Sapiens
NSGWQWSDRSPFR

SEQ ID NO: 99671 - protein, 13 aa, Homo Sapiens
SGWQWSDRSPFRY

SEQ ID NO: 99672 - protein, 13 aa, Homo Sapiens
GWQWSDRSPFRYL

SEQ ID NO: 99673 - protein, 13 aa, Homo Sapiens
WQWSDRSPFRYLN

SEQ ID NO: 99674 - protein, 13 aa, Homo Sapiens
QWSDRSPFRYLNW

SEQ ID NO: 99675 - protein, 13 aa, Homo Sapiens
WSDRSPFRYLNWL

SEQ ID NO: 99676 - protein, 13 aa, Homo Sapiens
SDRSPFRYLNWLP

SEQ ID NO: 99677 - protein, 13 aa, Homo Sapiens
DRSPFRYLNWLPG

SEQ ID NO: 99678 - protein, 13 aa, Homo Sapiens
RSPFRYLNWLPGS

SEQ ID NO: 99679 - protein, 13 aa, Homo Sapiens
SPFRYLNWLPGSP

SEQ ID NO: 99680 - protein, 13 aa, Homo Sapiens
PFRYLNWLPGSPS

SEQ ID NO: 99681 - protein, 13 aa, Homo Sapiens
FRYLNWLPGSPSA

SEQ ID NO: 99682 - protein, 13 aa, Homo Sapiens
RYLNWLPGSPSAE

SEQ ID NO: 99683 - protein, 13 aa, Homo Sapiens
YLNWLPGSPSAEP

SEQ ID NO: 99684 - protein, 13 aa, Homo Sapiens
LNWLPGSPSAEPG

SEQ ID NO: 99685 - protein, 13 aa, Homo Sapiens
NWLPGSPSAEPGK

SEQ ID NO: 99686 - protein, 13 aa, Homo Sapiens
WLPGSPSAEPGKS

SEQ ID NO: 99687 - protein, 13 aa, Homo Sapiens
LPGSPSAEPGKSC

SEQ ID NO: 99688 - protein, 13 aa, Homo Sapiens
PGSPSAEPGKSCV

SEQ ID NO: 99689 - protein, 13 aa, Homo Sapiens
GSPSAEPGKSCVS

SEQ ID NO: 99690 - protein, 13 aa, Homo Sapiens
SPSAEPGKSCVSL

SEQ ID NO: 99691 - protein, 13 aa, Homo Sapiens
PSAEPGKSCVSLN

SEQ ID NO: 99692 - protein, 13 aa, Homo Sapiens
SAEPGKSCVSLNP

SEQ ID NO: 99693 - protein, 13 aa, Homo Sapiens
AEPGKSCVSLNPG

SEQ ID NO: 99694 - protein, 13 aa, Homo Sapiens
EPGKSCVSLNPGK

SEQ ID NO: 99695 - protein, 13 aa, Homo Sapiens
PGKSCVSLNPGKN

SEQ ID NO: 99696 - protein, 13 aa, Homo Sapiens
GKSCVSLNPGKNA

SEQ ID NO: 99697 - protein, 13 aa, Homo Sapiens
KSCVSLNPGKNAK

SEQ ID NO: 99698 - protein, 13 aa, Homo Sapiens
SCVSLNPGKNAKW

SEQ ID NO: 99699 - protein, 13 aa, Homo Sapiens
CVSLNPGKNAKWE

SEQ ID NO: 99700 - protein, 13 aa, Homo Sapiens
VSLNPGKNAKWEN

SEQ ID NO: 99701 - protein, 13 aa, Homo Sapiens
SLNPGKNAKWENL

SEQ ID NO: 99702 - protein, 13 aa, Homo Sapiens
LNPGKNAKWENLE

SEQ ID NO: 99703 - protein, 13 aa, Homo Sapiens
NPGKNAKWENLEC

SEQ ID NO: 99704 - protein, 13 aa, Homo Sapiens
PGKNAKWENLECV

SEQ ID NO: 99705 - protein, 13 aa, Homo Sapiens
GKNAKWENLECVQ

SEQ ID NO: 99706 - protein, 13 aa, Homo Sapiens
KNAKWENLECVQK

SEQ ID NO: 99707 - protein, 13 aa, Homo Sapiens
NAKWENLECVQKL

SEQ ID NO: 99708 - protein, 13 aa, Homo Sapiens
AKWENLECVQKLG

SEQ ID NO: 99709 - protein, 13 aa, Homo Sapiens
KWENLECVQKLGY

SEQ ID NO: 99710 - protein, 13 aa, Homo Sapiens
WENLECVQKLGYI

SEQ ID NO: 99711 - protein, 13 aa, Homo Sapiens
ENLECVQKLGYIC

SEQ ID NO: 99712 - protein, 13 aa, Homo Sapiens
NLECVQKLGYICK

SEQ ID NO: 99713 - protein, 13 aa, Homo Sapiens
LECVQKLGYICKK

SEQ ID NO: 99714 - protein, 13 aa, Homo Sapiens
ECVQKLGYICKKG

SEQ ID NO: 99715 - protein, 13 aa, Homo Sapiens
CVQKLGYICKKGN

SEQ ID NO: 99716 - protein, 13 aa, Homo Sapiens
VQKLGYICKKGNT

SEQ ID NO: 99717 - protein, 13 aa, Homo Sapiens
QKLGYICKKGNTT

SEQ ID NO: 99718 - protein, 13 aa, Homo Sapiens
KLGYICKKGNTTL

SEQ ID NO: 99719 - protein, 13 aa, Homo Sapiens
LGYICKKGNTTLN

SEQ ID NO: 99720 - protein, 13 aa, Homo Sapiens
GYICKKGNTTLNS

SEQ ID NO: 99721 - protein, 13 aa, Homo Sapiens
YICKKGNTTLNSF

SEQ ID NO: 99722 - protein, 13 aa, Homo Sapiens
ICKKGNTTLNSFV

SEQ ID NO: 99723 - protein, 13 aa, Homo Sapiens
CKKGNTTLNSFVI

SEQ ID NO: 99724 - protein, 13 aa, Homo Sapiens
KKGNTTLNSFVIP

SEQ ID NO: 99725 - protein, 13 aa, Homo Sapiens
KGNTTLNSFVIPS

SEQ ID NO: 99726 - protein, 13 aa, Homo Sapiens
GNTTLNSFVIPSE

SEQ ID NO: 99727 - protein, 13 aa, Homo Sapiens
NTTLNSFVIPSES

SEQ ID NO: 99728 - protein, 13 aa, Homo Sapiens
TTLNSFVIPSESD

SEQ ID NO: 99729 - protein, 13 aa, Homo Sapiens
TLNSFVIPSESDV

SEQ ID NO: 99730 - protein, 13 aa, Homo Sapiens
LNSFVIPSESDVP

SEQ ID NO: 99731 - protein, 13 aa, Homo Sapiens
NSFVIPSESDVPT

SEQ ID NO: 99732 - protein, 13 aa, Homo Sapiens
SFVIPSESDVPTH

SEQ ID NO: 99733 - protein, 13 aa, Homo Sapiens
FVIPSESDVPTHC

SEQ ID NO: 99734 - protein, 13 aa, Homo Sapiens
VIPSESDVPTHCP

SEQ ID NO: 99735 - protein, 13 aa, Homo Sapiens
IPSESDVPTHCPS

SEQ ID NO: 99736 - protein, 13 aa, Homo Sapiens
PSESDVPTHCPSQ

SEQ ID NO: 99737 - protein, 13 aa, Homo Sapiens
SESDVPTHCPSQW

SEQ ID NO: 99738 - protein, 13 aa, Homo Sapiens
ESDVPTHCPSQWW

SEQ ID NO: 99739 - protein, 13 aa, Homo Sapiens
SDVPTHCPSQWWP

SEQ ID NO: 99740 - protein, 13 aa, Homo Sapiens
DVPTHCPSQWWPY

SEQ ID NO: 99741 - protein, 13 aa, Homo Sapiens
VPTHCPSQWWPYA

SEQ ID NO: 99742 - protein, 13 aa, Homo Sapiens
PTHCPSQWWPYAG

SEQ ID NO: 99743 - protein, 13 aa, Homo Sapiens
THCPSQWWPYAGH

SEQ ID NO: 99744 - protein, 13 aa, Homo Sapiens
HCPSQWWPYAGHC

SEQ ID NO: 99745 - protein, 13 aa, Homo Sapiens
CPSQWWPYAGHCY

SEQ ID NO: 99746 - protein, 13 aa, Homo Sapiens
PSQWWPYAGHCYK

SEQ ID NO: 99747 - protein, 13 aa, Homo Sapiens
SQWWPYAGHCYKI

SEQ ID NO: 99748 - protein, 13 aa, Homo Sapiens
QWWPYAGHCYKIH

SEQ ID NO: 99749 - protein, 13 aa, Homo Sapiens
WWPYAGHCYKIHR

SEQ ID NO: 99750 - protein, 13 aa, Homo Sapiens
WPYAGHCYKIHRD

SEQ ID NO: 99751 - protein, 13 aa, Homo Sapiens
PYAGHCYKIHRDE

SEQ ID NO: 99752 - protein, 13 aa, Homo Sapiens
YAGHCYKIHRDEK

SEQ ID NO: 99753 - protein, 13 aa, Homo Sapiens
AGHCYKIHRDEKK

SEQ ID NO: 99754 - protein, 13 aa, Homo Sapiens
GHCYKIHRDEKKI

SEQ ID NO: 99755 - protein, 13 aa, Homo Sapiens
HCYKIHRDEKKIQ

SEQ ID NO: 99756 - protein, 13 aa, Homo Sapiens
CYKIHRDEKKIQR

SEQ ID NO: 99757 - protein, 13 aa, Homo Sapiens
YKIHRDEKKIQRD

SEQ ID NO: 99758 - protein, 13 aa, Homo Sapiens
KIHRDEKKIQRDA

SEQ ID NO: 99759 - protein, 13 aa, Homo Sapiens
IHRDEKKIQRDAL

SEQ ID NO: 99760 - protein, 13 aa, Homo Sapiens
HRDEKKIQRDALT

SEQ ID NO: 99761 - protein, 13 aa, Homo Sapiens
RDEKKIQRDALTT

SEQ ID NO: 99762 - protein, 13 aa, Homo Sapiens
DEKKIQRDALTTC

SEQ ID NO: 99763 - protein, 13 aa, Homo Sapiens
EKKIQRDALTTCR

SEQ ID NO: 99764 - protein, 13 aa, Homo Sapiens
KKIQRDALTTCRK

SEQ ID NO: 99765 - protein, 13 aa, Homo Sapiens
KIQRDALTTCRKE

SEQ ID NO: 99766 - protein, 13 aa, Homo Sapiens
IQRDALTTCRKEG

SEQ ID NO: 99767 - protein, 13 aa, Homo Sapiens
QRDALTTCRKEGG

SEQ ID NO: 99768 - protein, 13 aa, Homo Sapiens
RDALTTCRKEGGD

SEQ ID NO: 99769 - protein, 13 aa, Homo Sapiens
DALTTCRKEGGDL

SEQ ID NO: 99770 - protein, 13 aa, Homo Sapiens
ALTTCRKEGGDLA

SEQ ID NO: 99771 - protein, 13 aa, Homo Sapiens
LTTCRKEGGDLAS

SEQ ID NO: 99772 - protein, 13 aa, Homo Sapiens
TTCRKEGGDLASI

SEQ ID NO: 99773 - protein, 13 aa, Homo Sapiens
TCRKEGGDLASIH

SEQ ID NO: 99774 - protein, 13 aa, Homo Sapiens
CRKEGGDLASIHT

SEQ ID NO: 99775 - protein, 13 aa, Homo Sapiens
RKEGGDLASIHTI

SEQ ID NO: 99776 - protein, 13 aa, Homo Sapiens
KEGGDLASIHTIE

SEQ ID NO: 99777 - protein, 13 aa, Homo Sapiens
EGGDLASIHTIEE

SEQ ID NO: 99778 - protein, 13 aa, Homo Sapiens
GGDLASIHTIEEF

SEQ ID NO: 99779 - protein, 13 aa, Homo Sapiens
GDLASIHTIEEFD

SEQ ID NO: 99780 - protein, 13 aa, Homo Sapiens
DLASIHTIEEFDF

SEQ ID NO: 99781 - protein, 13 aa, Homo Sapiens
LASIHTIEEFDFI

SEQ ID NO: 99782 - protein, 13 aa, Homo Sapiens
ASIHTIEEFDFII

SEQ ID NO: 99783 - protein, 13 aa, Homo Sapiens
SIHTIEEFDFIIS

SEQ ID NO: 99784 - protein, 13 aa, Homo Sapiens
IHTIEEFDFIISQ

SEQ ID NO: 99785 - protein, 13 aa, Homo Sapiens
HTIEEFDFIISQL

SEQ ID NO: 99786 - protein, 13 aa, Homo Sapiens
TIEEFDFIISQLG

SEQ ID NO: 99787 - protein, 13 aa, Homo Sapiens
IEEFDFIISQLGY

SEQ ID NO: 99788 - protein, 13 aa, Homo Sapiens
EEFDFIISQLGYE

SEQ ID NO: 99789 - protein, 13 aa, Homo Sapiens
EFDFIISQLGYEP

SEQ ID NO: 99790 - protein, 13 aa, Homo Sapiens
FDFIISQLGYEPN

SEQ ID NO: 99791 - protein, 13 aa, Homo Sapiens
DFIISQLGYEPND

SEQ ID NO: 99792 - protein, 13 aa, Homo Sapiens
FIISQLGYEPNDE

SEQ ID NO: 99793 - protein, 13 aa, Homo Sapiens
IISQLGYEPNDEL

SEQ ID NO: 99794 - protein, 13 aa, Homo Sapiens
ISQLGYEPNDELW

SEQ ID NO: 99795 - protein, 13 aa, Homo Sapiens
SQLGYEPNDELWI

SEQ ID NO: 99796 - protein, 13 aa, Homo Sapiens
QLGYEPNDELWIG

SEQ ID NO: 99797 - protein, 13 aa, Homo Sapiens
LGYEPNDELWIGL

SEQ ID NO: 99798 - protein, 13 aa, Homo Sapiens
GYEPNDELWIGLN

SEQ ID NO: 99799 - protein, 13 aa, Homo Sapiens
YEPNDELWIGLND

SEQ ID NO: 99800 - protein, 13 aa, Homo Sapiens
EPNDELWIGLNDI

SEQ ID NO: 99801 - protein, 13 aa, Homo Sapiens
PNDELWIGLNDIK

SEQ ID NO: 99802 - protein, 13 aa, Homo Sapiens
NDELWIGLNDIKI

SEQ ID NO: 99803 - protein, 13 aa, Homo Sapiens
DELWIGLNDIKIQ

SEQ ID NO: 99804 - protein, 13 aa, Homo Sapiens
ELWIGLNDIKIQM

SEQ ID NO: 99805 - protein, 13 aa, Homo Sapiens
LWIGLNDIKIQMY

SEQ ID NO: 99806 - protein, 13 aa, Homo Sapiens
WIGLNDIKIQMYF

SEQ ID NO: 99807 - protein, 13 aa, Homo Sapiens
IGLNDIKIQMYFE

SEQ ID NO: 99808 - protein, 13 aa, Homo Sapiens
GLNDIKIQMYFEW

SEQ ID NO: 99809 - protein, 13 aa, Homo Sapiens
LNDIKIQMYFEWS

SEQ ID NO: 99810 - protein, 13 aa, Homo Sapiens
NDIKIQMYFEWSD

SEQ ID NO: 99811 - protein, 13 aa, Homo Sapiens
DIKIQMYFEWSDG

SEQ ID NO: 99812 - protein, 13 aa, Homo Sapiens
IKIQMYFEWSDGT

SEQ ID NO: 99813 - protein, 13 aa, Homo Sapiens
KIQMYFEWSDGTP

SEQ ID NO: 99814 - protein, 13 aa, Homo Sapiens
IQMYFEWSDGTPV

SEQ ID NO: 99815 - protein, 13 aa, Homo Sapiens
QMYFEWSDGTPVT

SEQ ID NO: 99816 - protein, 13 aa, Homo Sapiens
MYFEWSDGTPVTF

SEQ ID NO: 99817 - protein, 13 aa, Homo Sapiens
YFEWSDGTPVTFT

SEQ ID NO: 99818 - protein, 13 aa, Homo Sapiens
FEWSDGTPVTFTK

SEQ ID NO: 99819 - protein, 13 aa, Homo Sapiens
EWSDGTPVTFTKW

SEQ ID NO: 99820 - protein, 13 aa, Homo Sapiens
WSDGTPVTFTKWL

SEQ ID NO: 99821 - protein, 13 aa, Homo Sapiens
SDGTPVTFTKWLR

SEQ ID NO: 99822 - protein, 13 aa, Homo Sapiens
DGTPVTFTKWLRG

SEQ ID NO: 99823 - protein, 13 aa, Homo Sapiens
GTPVTFTKWLRGE

SEQ ID NO: 99824 - protein, 13 aa, Homo Sapiens
TPVTFTKWLRGEP

SEQ ID NO: 99825 - protein, 13 aa, Homo Sapiens
PVTFTKWLRGEPS

SEQ ID NO: 99826 - protein, 13 aa, Homo Sapiens
VTFTKWLRGEPSH

SEQ ID NO: 99827 - protein, 13 aa, Homo Sapiens
TFTKWLRGEPSHE

SEQ ID NO: 99828 - protein, 13 aa, Homo Sapiens
FTKWLRGEPSHEN

SEQ ID NO: 99829 - protein, 13 aa, Homo Sapiens
TKWLRGEPSHENN

SEQ ID NO: 99830 - protein, 13 aa, Homo Sapiens
KWLRGEPSHENNR

SEQ ID NO: 99831 - protein, 13 aa, Homo Sapiens
WLRGEPSHENNRQ

SEQ ID NO: 99832 - protein, 13 aa, Homo Sapiens
LRGEPSHENNRQE

SEQ ID NO: 99833 - protein, 13 aa, Homo Sapiens
RGEPSHENNRQED

SEQ ID NO: 99834 - protein, 13 aa, Homo Sapiens
GEPSHENNRQEDC

SEQ ID NO: 99835 - protein, 13 aa, Homo Sapiens
EPSHENNRQEDCV

SEQ ID NO: 99836 - protein, 13 aa, Homo Sapiens
PSHENNRQEDCVV

SEQ ID NO: 99837 - protein, 13 aa, Homo Sapiens
SHENNRQEDCVVM

SEQ ID NO: 99838 - protein, 13 aa, Homo Sapiens
HENNRQEDCVVMK

SEQ ID NO: 99839 - protein, 13 aa, Homo Sapiens
ENNRQEDCVVMKG

SEQ ID NO: 99840 - protein, 13 aa, Homo Sapiens
NNRQEDCVVMKGK

SEQ ID NO: 99841 - protein, 13 aa, Homo Sapiens
NRQEDCVVMKGKD

SEQ ID NO: 99842 - protein, 13 aa, Homo Sapiens
RQEDCVVMKGKDG

SEQ ID NO: 99843 - protein, 13 aa, Homo Sapiens
QEDCVVMKGKDGY

SEQ ID NO: 99844 - protein, 13 aa, Homo Sapiens
EDCVVMKGKDGYW

SEQ ID NO: 99845 - protein, 13 aa, Homo Sapiens
DCVVMKGKDGYWA

SEQ ID NO: 99846 - protein, 13 aa, Homo Sapiens
CVVMKGKDGYWAD

SEQ ID NO: 99847 - protein, 13 aa, Homo Sapiens
VVMKGKDGYWADR

SEQ ID NO: 99848 - protein, 13 aa, Homo Sapiens
VMKGKDGYWADRG

SEQ ID NO: 99849 - protein, 13 aa, Homo Sapiens
MKGKDGYWADRGC

SEQ ID NO: 99850 - protein, 13 aa, Homo Sapiens
KGKDGYWADRGCE

SEQ ID NO: 99851 - protein, 13 aa, Homo Sapiens
GKDGYWADRGCEW

SEQ ID NO: 99852 - protein, 13 aa, Homo Sapiens
KDGYWADRGCEWP

SEQ ID NO: 99853 - protein, 13 aa, Homo Sapiens
DGYWADRGCEWPL

SEQ ID NO: 99854 - protein, 13 aa, Homo Sapiens
GYWADRGCEWPLG

SEQ ID NO: 99855 - protein, 13 aa, Homo Sapiens
YWADRGCEWPLGY

SEQ ID NO: 99856 - protein, 13 aa, Homo Sapiens
WADRGCEWPLGYI

SEQ ID NO: 99857 - protein, 13 aa, Homo Sapiens
ADRGCEWPLGYIC

SEQ ID NO: 99858 - protein, 13 aa, Homo Sapiens
DRGCEWPLGYICK

SEQ ID NO: 99859 - protein, 13 aa, Homo Sapiens
RGCEWPLGYICKM

SEQ ID NO: 99860 - protein, 13 aa, Homo Sapiens
GCEWPLGYICKMK

SEQ ID NO: 99861 - protein, 13 aa, Homo Sapiens
CEWPLGYICKMKS

SEQ ID NO: 99862 - protein, 13 aa, Homo Sapiens
EWPLGYICKMKSR

SEQ ID NO: 99863 - protein, 13 aa, Homo Sapiens
WPLGYICKMKSRS

SEQ ID NO: 99864 - protein, 13 aa, Homo Sapiens
PLGYICKMKSRSQ

SEQ ID NO: 99865 - protein, 13 aa, Homo Sapiens
LGYICKMKSRSQG

SEQ ID NO: 99866 - protein, 13 aa, Homo Sapiens
GYICKMKSRSQGP

SEQ ID NO: 99867 - protein, 13 aa, Homo Sapiens
YICKMKSRSQGPE

SEQ ID NO: 99868 - protein, 13 aa, Homo Sapiens
ICKMKSRSQGPEI

SEQ ID NO: 99869 - protein, 13 aa, Homo Sapiens
CKMKSRSQGPEIV

SEQ ID NO: 99870 - protein, 13 aa, Homo Sapiens
KMKSRSQGPEIVE

SEQ ID NO: 99871 - protein, 13 aa, Homo Sapiens
MKSRSQGPEIVEV

SEQ ID NO: 99872 - protein, 13 aa, Homo Sapiens
KSRSQGPEIVEVE

SEQ ID NO: 99873 - protein, 13 aa, Homo Sapiens
SRSQGPEIVEVEK

SEQ ID NO: 99874 - protein, 13 aa, Homo Sapiens
RSQGPEIVEVEKG

SEQ ID NO: 99875 - protein, 13 aa, Homo Sapiens
SQGPEIVEVEKGC

SEQ ID NO: 99876 - protein, 13 aa, Homo Sapiens
QGPEIVEVEKGCR

SEQ ID NO: 99877 - protein, 13 aa, Homo Sapiens
GPEIVEVEKGCRK

SEQ ID NO: 99878 - protein, 13 aa, Homo Sapiens
PEIVEVEKGCRKG

SEQ ID NO: 99879 - protein, 13 aa, Homo Sapiens
EIVEVEKGCRKGW

SEQ ID NO: 99880 - protein, 13 aa, Homo Sapiens
IVEVEKGCRKGWK

SEQ ID NO: 99881 - protein, 13 aa, Homo Sapiens
VEVEKGCRKGWKK

SEQ ID NO: 99882 - protein, 13 aa, Homo Sapiens
EVEKGCRKGWKKH

SEQ ID NO: 99883 - protein, 13 aa, Homo Sapiens
VEKGCRKGWKKHH

SEQ ID NO: 99884 - protein, 13 aa, Homo Sapiens
EKGCRKGWKKHHF

SEQ ID NO: 99885 - protein, 13 aa, Homo Sapiens
KGCRKGWKKHHFY

SEQ ID NO: 99886 - protein, 13 aa, Homo Sapiens
GCRKGWKKHHFYC

SEQ ID NO: 99887 - protein, 13 aa, Homo Sapiens
CRKGWKKHHFYCY

SEQ ID NO: 99888 - protein, 13 aa, Homo Sapiens
RKGWKKHHFYCYM

SEQ ID NO: 99889 - protein, 13 aa, Homo Sapiens
KGWKKHHFYCYMI

SEQ ID NO: 99890 - protein, 13 aa, Homo Sapiens
GWKKHHFYCYMIG

SEQ ID NO: 99891 - protein, 13 aa, Homo Sapiens
WKKHHFYCYMIGH

SEQ ID NO: 99892 - protein, 13 aa, Homo Sapiens
KKHHFYCYMIGHT

SEQ ID NO: 99893 - protein, 13 aa, Homo Sapiens
KHHFYCYMIGHTL

SEQ ID NO: 99894 - protein, 13 aa, Homo Sapiens
HHFYCYMIGHTLS

SEQ ID NO: 99895 - protein, 13 aa, Homo Sapiens
HFYCYMIGHTLST

SEQ ID NO: 99896 - protein, 13 aa, Homo Sapiens
FYCYMIGHTLSTF

SEQ ID NO: 99897 - protein, 13 aa, Homo Sapiens
YCYMIGHTLSTFA

SEQ ID NO: 99898 - protein, 13 aa, Homo Sapiens
CYMIGHTLSTFAE

SEQ ID NO: 99899 - protein, 13 aa, Homo Sapiens
YMIGHTLSTFAEA

SEQ ID NO: 99900 - protein, 13 aa, Homo Sapiens
MIGHTLSTFAEAN

SEQ ID NO: 99901 - protein, 13 aa, Homo Sapiens
IGHTLSTFAEANQ

SEQ ID NO: 99902 - protein, 13 aa, Homo Sapiens
GHTLSTFAEANQT

SEQ ID NO: 99903 - protein, 13 aa, Homo Sapiens
HTLSTFAEANQTC

SEQ ID NO: 99904 - protein, 13 aa, Homo Sapiens
TLSTFAEANQTCN

SEQ ID NO: 99905 - protein, 13 aa, Homo Sapiens
LSTFAEANQTCNN

SEQ ID NO: 99906 - protein, 13 aa, Homo Sapiens
STFAEANQTCNNE

SEQ ID NO: 99907 - protein, 13 aa, Homo Sapiens
TFAEANQTCNNEN

SEQ ID NO: 99908 - protein, 13 aa, Homo Sapiens
FAEANQTCNNENA

SEQ ID NO: 99909 - protein, 13 aa, Homo Sapiens
AEANQTCNNENAY

SEQ ID NO: 99910 - protein, 13 aa, Homo Sapiens
EANQTCNNENAYL

SEQ ID NO: 99911 - protein, 13 aa, Homo Sapiens
ANQTCNNENAYLT

SEQ ID NO: 99912 - protein, 13 aa, Homo Sapiens
NQTCNNENAYLTT

SEQ ID NO: 99913 - protein, 13 aa, Homo Sapiens
QTCNNENAYLTTI

SEQ ID NO: 99914 - protein, 13 aa, Homo Sapiens
TCNNENAYLTTIE

SEQ ID NO: 99915 - protein, 13 aa, Homo Sapiens
CNNENAYLTTIED

SEQ ID NO: 99916 - protein, 13 aa, Homo Sapiens
NNENAYLTTIEDR

SEQ ID NO: 99917 - protein, 13 aa, Homo Sapiens
NENAYLTTIEDRY

SEQ ID NO: 99918 - protein, 13 aa, Homo Sapiens
ENAYLTTIEDRYE

SEQ ID NO: 99919 - protein, 13 aa, Homo Sapiens
NAYLTTIEDRYEQ

SEQ ID NO: 99920 - protein, 13 aa, Homo Sapiens
AYLTTIEDRYEQA

SEQ ID NO: 99921 - protein, 13 aa, Homo Sapiens
YLTTIEDRYEQAF

SEQ ID NO: 99922 - protein, 13 aa, Homo Sapiens
LTTIEDRYEQAFL

SEQ ID NO: 99923 - protein, 13 aa, Homo Sapiens
TTIEDRYEQAFLT

SEQ ID NO: 99924 - protein, 13 aa, Homo Sapiens
TIEDRYEQAFLTS

SEQ ID NO: 99925 - protein, 13 aa, Homo Sapiens
IEDRYEQAFLTSF

SEQ ID NO: 99926 - protein, 13 aa, Homo Sapiens
EDRYEQAFLTSFV

SEQ ID NO: 99927 - protein, 13 aa, Homo Sapiens
DRYEQAFLTSFVG

SEQ ID NO: 99928 - protein, 13 aa, Homo Sapiens
RYEQAFLTSFVGL

SEQ ID NO: 99929 - protein, 13 aa, Homo Sapiens
YEQAFLTSFVGLR

SEQ ID NO: 99930 - protein, 13 aa, Homo Sapiens
EQAFLTSFVGLRP

SEQ ID NO: 99931 - protein, 13 aa, Homo Sapiens
QAFLTSFVGLRPE

SEQ ID NO: 99932 - protein, 13 aa, Homo Sapiens
AFLTSFVGLRPEK

SEQ ID NO: 99933 - protein, 13 aa, Homo Sapiens
FLTSFVGLRPEKY

SEQ ID NO: 99934 - protein, 13 aa, Homo Sapiens
LTSFVGLRPEKYF

SEQ ID NO: 99935 - protein, 13 aa, Homo Sapiens
TSFVGLRPEKYFW

SEQ ID NO: 99936 - protein, 13 aa, Homo Sapiens
SFVGLRPEKYFWT

SEQ ID NO: 99937 - protein, 13 aa, Homo Sapiens
FVGLRPEKYFWTG

SEQ ID NO: 99938 - protein, 13 aa, Homo Sapiens
VGLRPEKYFWTGL

SEQ ID NO: 99939 - protein, 13 aa, Homo Sapiens
GLRPEKYFWTGLS

SEQ ID NO: 99940 - protein, 13 aa, Homo Sapiens
LRPEKYFWTGLSD

SEQ ID NO: 99941 - protein, 13 aa, Homo Sapiens
RPEKYFWTGLSDI

SEQ ID NO: 99942 - protein, 13 aa, Homo Sapiens
PEKYFWTGLSDIQ

SEQ ID NO: 99943 - protein, 13 aa, Homo Sapiens
EKYFWTGLSDIQT

SEQ ID NO: 99944 - protein, 13 aa, Homo Sapiens
KYFWTGLSDIQTK

SEQ ID NO: 99945 - protein, 13 aa, Homo Sapiens
YFWTGLSDIQTKG

SEQ ID NO: 99946 - protein, 13 aa, Homo Sapiens
FWTGLSDIQTKGT

SEQ ID NO: 99947 - protein, 13 aa, Homo Sapiens
WTGLSDIQTKGTF

SEQ ID NO: 99948 - protein, 13 aa, Homo Sapiens
TGLSDIQTKGTFQ

SEQ ID NO: 99949 - protein, 13 aa, Homo Sapiens
GLSDIQTKGTFQW

SEQ ID NO: 99950 - protein, 13 aa, Homo Sapiens
LSDIQTKGTFQWT

SEQ ID NO: 99951 - protein, 13 aa, Homo Sapiens
SDIQTKGTFQWTI

SEQ ID NO: 99952 - protein, 13 aa, Homo Sapiens
DIQTKGTFQWTIE

SEQ ID NO: 99953 - protein, 13 aa, Homo Sapiens
IQTKGTFQWTIEE

SEQ ID NO: 99954 - protein, 13 aa, Homo Sapiens
QTKGTFQWTIEEE

SEQ ID NO: 99955 - protein, 13 aa, Homo Sapiens
TKGTFQWTIEEEV

SEQ ID NO: 99956 - protein, 13 aa, Homo Sapiens
KGTFQWTIEEEVR

SEQ ID NO: 99957 - protein, 13 aa, Homo Sapiens
GTFQWTIEEEVRF

SEQ ID NO: 99958 - protein, 13 aa, Homo Sapiens
TFQWTIEEEVRFT

SEQ ID NO: 99959 - protein, 13 aa, Homo Sapiens
FQWTIEEEVRFTH

SEQ ID NO: 99960 - protein, 13 aa, Homo Sapiens
QWTIEEEVRFTHW

SEQ ID NO: 99961 - protein, 13 aa, Homo Sapiens
WTIEEEVRFTHWN

SEQ ID NO: 99962 - protein, 13 aa, Homo Sapiens
TIEEEVRFTHWNS

SEQ ID NO: 99963 - protein, 13 aa, Homo Sapiens
IEEEVRFTHWNSD

SEQ ID NO: 99964 - protein, 13 aa, Homo Sapiens
EEEVRFTHWNSDM

SEQ ID NO: 99965 - protein, 13 aa, Homo Sapiens
EEVRFTHWNSDMP

SEQ ID NO: 99966 - protein, 13 aa, Homo Sapiens
EVRFTHWNSDMPG

SEQ ID NO: 99967 - protein, 13 aa, Homo Sapiens
VRFTHWNSDMPGR

SEQ ID NO: 99968 - protein, 13 aa, Homo Sapiens
RFTHWNSDMPGRK

SEQ ID NO: 99969 - protein, 13 aa, Homo Sapiens
FTHWNSDMPGRKP

SEQ ID NO: 99970 - protein, 13 aa, Homo Sapiens
THWNSDMPGRKPG

SEQ ID NO: 99971 - protein, 13 aa, Homo Sapiens
HWNSDMPGRKPGC

SEQ ID NO: 99972 - protein, 13 aa, Homo Sapiens
WNSDMPGRKPGCV

SEQ ID NO: 99973 - protein, 13 aa, Homo Sapiens
NSDMPGRKPGCVA

SEQ ID NO: 99974 - protein, 13 aa, Homo Sapiens
SDMPGRKPGCVAM

SEQ ID NO: 99975 - protein, 13 aa, Homo Sapiens
DMPGRKPGCVAMR

SEQ ID NO: 99976 - protein, 13 aa, Homo Sapiens
MPGRKPGCVAMRT

SEQ ID NO: 99977 - protein, 13 aa, Homo Sapiens
PGRKPGCVAMRTG

SEQ ID NO: 99978 - protein, 13 aa, Homo Sapiens
GRKPGCVAMRTGI

SEQ ID NO: 99979 - protein, 13 aa, Homo Sapiens
RKPGCVAMRTGIA

SEQ ID NO: 99980 - protein, 13 aa, Homo Sapiens
KPGCVAMRTGIAG

SEQ ID NO: 99981 - protein, 13 aa, Homo Sapiens
PGCVAMRTGIAGG

SEQ ID NO: 99982 - protein, 13 aa, Homo Sapiens
GCVAMRTGIAGGL

SEQ ID NO: 99983 - protein, 13 aa, Homo Sapiens
CVAMRTGIAGGLW

SEQ ID NO: 99984 - protein, 13 aa, Homo Sapiens
VAMRTGIAGGLWD

SEQ ID NO: 99985 - protein, 13 aa, Homo Sapiens
AMRTGIAGGLWDV

SEQ ID NO: 99986 - protein, 13 aa, Homo Sapiens
MRTGIAGGLWDVL

SEQ ID NO: 99987 - protein, 13 aa, Homo Sapiens
RTGIAGGLWDVLK

SEQ ID NO: 99988 - protein, 13 aa, Homo Sapiens
TGIAGGLWDVLKC

SEQ ID NO: 99989 - protein, 13 aa, Homo Sapiens
GIAGGLWDVLKCD

SEQ ID NO: 99990 - protein, 13 aa, Homo Sapiens
IAGGLWDVLKCDE

SEQ ID NO: 99991 - protein, 13 aa, Homo Sapiens
AGGLWDVLKCDEK

SEQ ID NO: 99992 - protein, 13 aa, Homo Sapiens
GGLWDVLKCDEKA

SEQ ID NO: 99993 - protein, 13 aa, Homo Sapiens
GLWDVLKCDEKAK

SEQ ID NO: 99994 - protein, 13 aa, Homo Sapiens
LWDVLKCDEKAKF

SEQ ID NO: 99995 - protein, 13 aa, Homo Sapiens
WDVLKCDEKAKFV

SEQ ID NO: 99996 - protein, 13 aa, Homo Sapiens
DVLKCDEKAKFVC

SEQ ID NO: 99997 - protein, 13 aa, Homo Sapiens
VLKCDEKAKFVCK

SEQ ID NO: 99998 - protein, 13 aa, Homo Sapiens
LKCDEKAKFVCKH

SEQ ID NO: 99999 - protein, 13 aa, Homo Sapiens
KCDEKAKFVCKHW

SEQ ID NO: 100000 - protein, 13 aa, Homo Sapiens
CDEKAKFVCKHWA

SEQ ID NO: 100001 - protein, 13 aa, Homo Sapiens
DEKAKFVCKHWAE

SEQ ID NO: 100002 - protein, 13 aa, Homo Sapiens
EKAKFVCKHWAEG

SEQ ID NO: 100003 - protein, 13 aa, Homo Sapiens
KAKFVCKHWAEGV

SEQ ID NO: 100004 - protein, 13 aa, Homo Sapiens
AKFVCKHWAEGVT

SEQ ID NO: 100005 - protein, 13 aa, Homo Sapiens
KFVCKHWAEGVTH

SEQ ID NO: 100006 - protein, 13 aa, Homo Sapiens
FVCKHWAEGVTHP

SEQ ID NO: 100007 - protein, 13 aa, Homo Sapiens
VCKHWAEGVTHPP

SEQ ID NO: 100008 - protein, 13 aa, Homo Sapiens
CKHWAEGVTHPPK

SEQ ID NO: 100009 - protein, 13 aa, Homo Sapiens
KHWAEGVTHPPKP

SEQ ID NO: 100010 - protein, 13 aa, Homo Sapiens
HWAEGVTHPPKPT

SEQ ID NO: 100011 - protein, 13 aa, Homo Sapiens
WAEGVTHPPKPTT

SEQ ID NO: 100012 - protein, 13 aa, Homo Sapiens
AEGVTHPPKPTTT

SEQ ID NO: 100013 - protein, 13 aa, Homo Sapiens
EGVTHPPKPTTTP

SEQ ID NO: 100014 - protein, 13 aa, Homo Sapiens
GVTHPPKPTTTPE

SEQ ID NO: 100015 - protein, 13 aa, Homo Sapiens
VTHPPKPTTTPEP

SEQ ID NO: 100016 - protein, 13 aa, Homo Sapiens
THPPKPTTTPEPK

SEQ ID NO: 100017 - protein, 13 aa, Homo Sapiens
HPPKPTTTPEPKC

SEQ ID NO: 100018 - protein, 13 aa, Homo Sapiens
PPKPTTTPEPKCP

SEQ ID NO: 100019 - protein, 13 aa, Homo Sapiens
PKPTTTPEPKCPE

SEQ ID NO: 100020 - protein, 13 aa, Homo Sapiens
KPTTTPEPKCPED

SEQ ID NO: 100021 - protein, 13 aa, Homo Sapiens
PTTTPEPKCPEDW

SEQ ID NO: 100022 - protein, 13 aa, Homo Sapiens
TTTPEPKCPEDWG

SEQ ID NO: 100023 - protein, 13 aa, Homo Sapiens
TTPEPKCPEDWGA

SEQ ID NO: 100024 - protein, 13 aa, Homo Sapiens
TPEPKCPEDWGAS

SEQ ID NO: 100025 - protein, 13 aa, Homo Sapiens
PEPKCPEDWGASS

SEQ ID NO: 100026 - protein, 13 aa, Homo Sapiens
EPKCPEDWGASSR

SEQ ID NO: 100027 - protein, 13 aa, Homo Sapiens
PKCPEDWGASSRT

SEQ ID NO: 100028 - protein, 13 aa, Homo Sapiens
KCPEDWGASSRTS

SEQ ID NO: 100029 - protein, 13 aa, Homo Sapiens
CPEDWGASSRTSL

SEQ ID NO: 100030 - protein, 13 aa, Homo Sapiens
PEDWGASSRTSLC

SEQ ID NO: 100031 - protein, 13 aa, Homo Sapiens
EDWGASSRTSLCF

SEQ ID NO: 100032 - protein, 13 aa, Homo Sapiens
DWGASSRTSLCFK

SEQ ID NO: 100033 - protein, 13 aa, Homo Sapiens
WGASSRTSLCFKL

SEQ ID NO: 100034 - protein, 13 aa, Homo Sapiens
GASSRTSLCFKLY

SEQ ID NO: 100035 - protein, 13 aa, Homo Sapiens
ASSRTSLCFKLYA

SEQ ID NO: 100036 - protein, 13 aa, Homo Sapiens
SSRTSLCFKLYAK

SEQ ID NO: 100037 - protein, 13 aa, Homo Sapiens
SRTSLCFKLYAKG

SEQ ID NO: 100038 - protein, 13 aa, Homo Sapiens
RTSLCFKLYAKGK

SEQ ID NO: 100039 - protein, 13 aa, Homo Sapiens
TSLCFKLYAKGKI

SEQ ID NO: 100040 - protein, 13 aa, Homo Sapiens
SLCFKLYAKGKIE

SEQ ID NO: 100041 - protein, 13 aa, Homo Sapiens
LCFKLYAKGKIEK

SEQ ID NO: 100042 - protein, 13 aa, Homo Sapiens
CFKLYAKGKIEKK

SEQ ID NO: 100043 - protein, 13 aa, Homo Sapiens
FKLYAKGKIEKKT

SEQ ID NO: 100044 - protein, 13 aa, Homo Sapiens
KLYAKGKIEKKTW

SEQ ID NO: 100045 - protein, 13 aa, Homo Sapiens
LYAKGKIEKKTWF

SEQ ID NO: 100046 - protein, 13 aa, Homo Sapiens
YAKGKIEKKTWFE

SEQ ID NO: 100047 - protein, 13 aa, Homo Sapiens
AKGKIEKKTWFES

SEQ ID NO: 100048 - protein, 13 aa, Homo Sapiens
KGKIEKKTWFESR

SEQ ID NO: 100049 - protein, 13 aa, Homo Sapiens
GKIEKKTWFESRD

SEQ ID NO: 100050 - protein, 13 aa, Homo Sapiens
KIEKKTWFESRDF

SEQ ID NO: 100051 - protein, 13 aa, Homo Sapiens
IEKKTWFESRDFC

SEQ ID NO: 100052 - protein, 13 aa, Homo Sapiens
EKKTWFESRDFCR

SEQ ID NO: 100053 - protein, 13 aa, Homo Sapiens
KKTWFESRDFCRA

SEQ ID NO: 100054 - protein, 13 aa, Homo Sapiens
KTWFESRDFCRAL

SEQ ID NO: 100055 - protein, 13 aa, Homo Sapiens
TWFESRDFCRALG

SEQ ID NO: 100056 - protein, 13 aa, Homo Sapiens
WFESRDFCRALGG

SEQ ID NO: 100057 - protein, 13 aa, Homo Sapiens
FESRDFCRALGGD

SEQ ID NO: 100058 - protein, 13 aa, Homo Sapiens
ESRDFCRALGGDL

SEQ ID NO: 100059 - protein, 13 aa, Homo Sapiens
SRDFCRALGGDLA

SEQ ID NO: 100060 - protein, 13 aa, Homo Sapiens
RDFCRALGGDLAS

SEQ ID NO: 100061 - protein, 13 aa, Homo Sapiens
DFCRALGGDLASI

SEQ ID NO: 100062 - protein, 13 aa, Homo Sapiens
FCRALGGDLASIN

SEQ ID NO: 100063 - protein, 13 aa, Homo Sapiens
CRALGGDLASINN

SEQ ID NO: 100064 - protein, 13 aa, Homo Sapiens
RALGGDLASINNK

SEQ ID NO: 100065 - protein, 13 aa, Homo Sapiens
ALGGDLASINNKE

SEQ ID NO: 100066 - protein, 13 aa, Homo Sapiens
LGGDLASINNKEE

SEQ ID NO: 100067 - protein, 13 aa, Homo Sapiens
GGDLASINNKEEQ

SEQ ID NO: 100068 - protein, 13 aa, Homo Sapiens
GDLASINNKEEQQ

SEQ ID NO: 100069 - protein, 13 aa, Homo Sapiens
DLASINNKEEQQT

SEQ ID NO: 100070 - protein, 13 aa, Homo Sapiens
LASINNKEEQQTI

SEQ ID NO: 100071 - protein, 13 aa, Homo Sapiens
ASINNKEEQQTIW

SEQ ID NO: 100072 - protein, 13 aa, Homo Sapiens
SINNKEEQQTIWR

SEQ ID NO: 100073 - protein, 13 aa, Homo Sapiens
INNKEEQQTIWRL

SEQ ID NO: 100074 - protein, 13 aa, Homo Sapiens
NNKEEQQTIWRLI

SEQ ID NO: 100075 - protein, 13 aa, Homo Sapiens
NKEEQQTIWRLIT

SEQ ID NO: 100076 - protein, 13 aa, Homo Sapiens
KEEQQTIWRLITA

SEQ ID NO: 100077 - protein, 13 aa, Homo Sapiens
EEQQTIWRLITAS

SEQ ID NO: 100078 - protein, 13 aa, Homo Sapiens
EQQTIWRLITASG

SEQ ID NO: 100079 - protein, 13 aa, Homo Sapiens
QQTIWRLITASGS

SEQ ID NO: 100080 - protein, 13 aa, Homo Sapiens
QTIWRLITASGSY

SEQ ID NO: 100081 - protein, 13 aa, Homo Sapiens
TIWRLITASGSYH

SEQ ID NO: 100082 - protein, 13 aa, Homo Sapiens
IWRLITASGSYHK

SEQ ID NO: 100083 - protein, 13 aa, Homo Sapiens
WRLITASGSYHKL

SEQ ID NO: 100084 - protein, 13 aa, Homo Sapiens
RLITASGSYHKLF

SEQ ID NO: 100085 - protein, 13 aa, Homo Sapiens
LITASGSYHKLFW

SEQ ID NO: 100086 - protein, 13 aa, Homo Sapiens
ITASGSYHKLFWL

SEQ ID NO: 100087 - protein, 13 aa, Homo Sapiens
TASGSYHKLFWLG

SEQ ID NO: 100088 - protein, 13 aa, Homo Sapiens
ASGSYHKLFWLGL

SEQ ID NO: 100089 - protein, 13 aa, Homo Sapiens
SGSYHKLFWLGLT

SEQ ID NO: 100090 - protein, 13 aa, Homo Sapiens
GSYHKLFWLGLTY

SEQ ID NO: 100091 - protein, 13 aa, Homo Sapiens
SYHKLFWLGLTYG

SEQ ID NO: 100092 - protein, 13 aa, Homo Sapiens
YHKLFWLGLTYGS

SEQ ID NO: 100093 - protein, 13 aa, Homo Sapiens
HKLFWLGLTYGSP

SEQ ID NO: 100094 - protein, 13 aa, Homo Sapiens
KLFWLGLTYGSPS

SEQ ID NO: 100095 - protein, 13 aa, Homo Sapiens
LFWLGLTYGSPSE

SEQ ID NO: 100096 - protein, 13 aa, Homo Sapiens
FWLGLTYGSPSEG

SEQ ID NO: 100097 - protein, 13 aa, Homo Sapiens
WLGLTYGSPSEGF

SEQ ID NO: 100098 - protein, 13 aa, Homo Sapiens
LGLTYGSPSEGFT

SEQ ID NO: 100099 - protein, 13 aa, Homo Sapiens
GLTYGSPSEGFTW

SEQ ID NO: 100100 - protein, 13 aa, Homo Sapiens
LTYGSPSEGFTWS

SEQ ID NO: 100101 - protein, 13 aa, Homo Sapiens
TYGSPSEGFTWSD

SEQ ID NO: 100102 - protein, 13 aa, Homo Sapiens
YGSPSEGFTWSDG

SEQ ID NO: 100103 - protein, 13 aa, Homo Sapiens
GSPSEGFTWSDGS

SEQ ID NO: 100104 - protein, 13 aa, Homo Sapiens
SPSEGFTWSDGSP

SEQ ID NO: 100105 - protein, 13 aa, Homo Sapiens
PSEGFTWSDGSPV

SEQ ID NO: 100106 - protein, 13 aa, Homo Sapiens
SEGFTWSDGSPVS

SEQ ID NO: 100107 - protein, 13 aa, Homo Sapiens
EGFTWSDGSPVSY

SEQ ID NO: 100108 - protein, 13 aa, Homo Sapiens
GFTWSDGSPVSYE

SEQ ID NO: 100109 - protein, 13 aa, Homo Sapiens
FTWSDGSPVSYEN

SEQ ID NO: 100110 - protein, 13 aa, Homo Sapiens
TWSDGSPVSYENW

SEQ ID NO: 100111 - protein, 13 aa, Homo Sapiens
WSDGSPVSYENWA

SEQ ID NO: 100112 - protein, 13 aa, Homo Sapiens
SDGSPVSYENWAY

SEQ ID NO: 100113 - protein, 13 aa, Homo Sapiens
DGSPVSYENWAYG

SEQ ID NO: 100114 - protein, 13 aa, Homo Sapiens
GSPVSYENWAYGE

SEQ ID NO: 100115 - protein, 13 aa, Homo Sapiens
SPVSYENWAYGEP

SEQ ID NO: 100116 - protein, 13 aa, Homo Sapiens
PVSYENWAYGEPN

SEQ ID NO: 100117 - protein, 13 aa, Homo Sapiens
VSYENWAYGEPNN

SEQ ID NO: 100118 - protein, 13 aa, Homo Sapiens
SYENWAYGEPNNY

SEQ ID NO: 100119 - protein, 13 aa, Homo Sapiens
YENWAYGEPNNYQ

SEQ ID NO: 100120 - protein, 13 aa, Homo Sapiens
ENWAYGEPNNYQN

SEQ ID NO: 100121 - protein, 13 aa, Homo Sapiens
NWAYGEPNNYQNV

SEQ ID NO: 100122 - protein, 13 aa, Homo Sapiens
WAYGEPNNYQNVE

SEQ ID NO: 100123 - protein, 13 aa, Homo Sapiens
AYGEPNNYQNVEY

SEQ ID NO: 100124 - protein, 13 aa, Homo Sapiens
YGEPNNYQNVEYC

SEQ ID NO: 100125 - protein, 13 aa, Homo Sapiens
GEPNNYQNVEYCG

SEQ ID NO: 100126 - protein, 13 aa, Homo Sapiens
EPNNYQNVEYCGE

SEQ ID NO: 100127 - protein, 13 aa, Homo Sapiens
PNNYQNVEYCGEL

SEQ ID NO: 100128 - protein, 13 aa, Homo Sapiens
NNYQNVEYCGELK

SEQ ID NO: 100129 - protein, 13 aa, Homo Sapiens
NYQNVEYCGELKG

SEQ ID NO: 100130 - protein, 13 aa, Homo Sapiens
YQNVEYCGELKGD

SEQ ID NO: 100131 - protein, 13 aa, Homo Sapiens
QNVEYCGELKGDP

SEQ ID NO: 100132 - protein, 13 aa, Homo Sapiens
NVEYCGELKGDPT

SEQ ID NO: 100133 - protein, 13 aa, Homo Sapiens
VEYCGELKGDPTM

SEQ ID NO: 100134 - protein, 13 aa, Homo Sapiens
EYCGELKGDPTMS

SEQ ID NO: 100135 - protein, 13 aa, Homo Sapiens
YCGELKGDPTMSW

SEQ ID NO: 100136 - protein, 13 aa, Homo Sapiens
CGELKGDPTMSWN

SEQ ID NO: 100137 - protein, 13 aa, Homo Sapiens
GELKGDPTMSWND

SEQ ID NO: 100138 - protein, 13 aa, Homo Sapiens
ELKGDPTMSWNDI

SEQ ID NO: 100139 - protein, 13 aa, Homo Sapiens
LKGDPTMSWNDIN

SEQ ID NO: 100140 - protein, 13 aa, Homo Sapiens
KGDPTMSWNDINC

SEQ ID NO: 100141 - protein, 13 aa, Homo Sapiens
GDPTMSWNDINCE

SEQ ID NO: 100142 - protein, 13 aa, Homo Sapiens
DPTMSWNDINCEH

SEQ ID NO: 100143 - protein, 13 aa, Homo Sapiens
PTMSWNDINCEHL

SEQ ID NO: 100144 - protein, 13 aa, Homo Sapiens
TMSWNDINCEHLN

SEQ ID NO: 100145 - protein, 13 aa, Homo Sapiens
MSWNDINCEHLNN

SEQ ID NO: 100146 - protein, 13 aa, Homo Sapiens
SWNDINCEHLNNW

SEQ ID NO: 100147 - protein, 13 aa, Homo Sapiens
WNDINCEHLNNWI

SEQ ID NO: 100148 - protein, 13 aa, Homo Sapiens
NDINCEHLNNWIC

SEQ ID NO: 100149 - protein, 13 aa, Homo Sapiens
DINCEHLNNWICQ

SEQ ID NO: 100150 - protein, 13 aa, Homo Sapiens
INCEHLNNWICQI

SEQ ID NO: 100151 - protein, 13 aa, Homo Sapiens
NCEHLNNWICQIQ

SEQ ID NO: 100152 - protein, 13 aa, Homo Sapiens
CEHLNNWICQIQK

SEQ ID NO: 100153 - protein, 13 aa, Homo Sapiens
EHLNNWICQIQKG

SEQ ID NO: 100154 - protein, 13 aa, Homo Sapiens
HLNNWICQIQKGQ

SEQ ID NO: 100155 - protein, 13 aa, Homo Sapiens
LNNWICQIQKGQT

SEQ ID NO: 100156 - protein, 13 aa, Homo Sapiens
NNWICQIQKGQTP

SEQ ID NO: 100157 - protein, 13 aa, Homo Sapiens
NWICQIQKGQTPK

SEQ ID NO: 100158 - protein, 13 aa, Homo Sapiens
WICQIQKGQTPKP

SEQ ID NO: 100159 - protein, 13 aa, Homo Sapiens
ICQIQKGQTPKPE

SEQ ID NO: 100160 - protein, 13 aa, Homo Sapiens
CQIQKGQTPKPEP

SEQ ID NO: 100161 - protein, 13 aa, Homo Sapiens
QIQKGQTPKPEPT

SEQ ID NO: 100162 - protein, 13 aa, Homo Sapiens
IQKGQTPKPEPTP

SEQ ID NO: 100163 - protein, 13 aa, Homo Sapiens
QKGQTPKPEPTPA

SEQ ID NO: 100164 - protein, 13 aa, Homo Sapiens
KGQTPKPEPTPAP

SEQ ID NO: 100165 - protein, 13 aa, Homo Sapiens
GQTPKPEPTPAPQ

SEQ ID NO: 100166 - protein, 13 aa, Homo Sapiens
QTPKPEPTPAPQD

SEQ ID NO: 100167 - protein, 13 aa, Homo Sapiens
TPKPEPTPAPQDN

SEQ ID NO: 100168 - protein, 13 aa, Homo Sapiens
PKPEPTPAPQDNP

SEQ ID NO: 100169 - protein, 13 aa, Homo Sapiens
KPEPTPAPQDNPP

SEQ ID NO: 100170 - protein, 13 aa, Homo Sapiens
PEPTPAPQDNPPV

SEQ ID NO: 100171 - protein, 13 aa, Homo Sapiens
EPTPAPQDNPPVT

SEQ ID NO: 100172 - protein, 13 aa, Homo Sapiens
PTPAPQDNPPVTE

SEQ ID NO: 100173 - protein, 13 aa, Homo Sapiens
TPAPQDNPPVTED

SEQ ID NO: 100174 - protein, 13 aa, Homo Sapiens
PAPQDNPPVTEDG

SEQ ID NO: 100175 - protein, 13 aa, Homo Sapiens
APQDNPPVTEDGW

SEQ ID NO: 100176 - protein, 13 aa, Homo Sapiens
PQDNPPVTEDGWV

SEQ ID NO: 100177 - protein, 13 aa, Homo Sapiens
QDNPPVTEDGWVI

SEQ ID NO: 100178 - protein, 13 aa, Homo Sapiens
DNPPVTEDGWVIY

SEQ ID NO: 100179 - protein, 13 aa, Homo Sapiens
NPPVTEDGWVIYK

SEQ ID NO: 100180 - protein, 13 aa, Homo Sapiens
PPVTEDGWVIYKD

SEQ ID NO: 100181 - protein, 13 aa, Homo Sapiens
PVTEDGWVIYKDY

SEQ ID NO: 100182 - protein, 13 aa, Homo Sapiens
VTEDGWVIYKDYQ

SEQ ID NO: 100183 - protein, 13 aa, Homo Sapiens
TEDGWVIYKDYQY

SEQ ID NO: 100184 - protein, 13 aa, Homo Sapiens
EDGWVIYKDYQYY

SEQ ID NO: 100185 - protein, 13 aa, Homo Sapiens
DGWVIYKDYQYYF

SEQ ID NO: 100186 - protein, 13 aa, Homo Sapiens
GWVIYKDYQYYFS

SEQ ID NO: 100187 - protein, 13 aa, Homo Sapiens
WVIYKDYQYYFSK

SEQ ID NO: 100188 - protein, 13 aa, Homo Sapiens
VIYKDYQYYFSKE

SEQ ID NO: 100189 - protein, 13 aa, Homo Sapiens
IYKDYQYYFSKEK

SEQ ID NO: 100190 - protein, 13 aa, Homo Sapiens
YKDYQYYFSKEKE

SEQ ID NO: 100191 - protein, 13 aa, Homo Sapiens
KDYQYYFSKEKET

SEQ ID NO: 100192 - protein, 13 aa, Homo Sapiens
DYQYYFSKEKETM

SEQ ID NO: 100193 - protein, 13 aa, Homo Sapiens
YQYYFSKEKETMD

SEQ ID NO: 100194 - protein, 13 aa, Homo Sapiens
QYYFSKEKETMDN

SEQ ID NO: 100195 - protein, 13 aa, Homo Sapiens
YYFSKEKETMDNA

SEQ ID NO: 100196 - protein, 13 aa, Homo Sapiens
YFSKEKETMDNAR

SEQ ID NO: 100197 - protein, 13 aa, Homo Sapiens
FSKEKETMDNARA

SEQ ID NO: 100198 - protein, 13 aa, Homo Sapiens
SKEKETMDNARAF

SEQ ID NO: 100199 - protein, 13 aa, Homo Sapiens
KEKETMDNARAFC

SEQ ID NO: 100200 - protein, 13 aa, Homo Sapiens
EKETMDNARAFCK

SEQ ID NO: 100201 - protein, 13 aa, Homo Sapiens
KETMDNARAFCKR

SEQ ID NO: 100202 - protein, 13 aa, Homo Sapiens
ETMDNARAFCKRN

SEQ ID NO: 100203 - protein, 13 aa, Homo Sapiens
TMDNARAFCKRNF

SEQ ID NO: 100204 - protein, 13 aa, Homo Sapiens
MDNARAFCKRNFG

SEQ ID NO: 100205 - protein, 13 aa, Homo Sapiens
DNARAFCKRNFGD

SEQ ID NO: 100206 - protein, 13 aa, Homo Sapiens
NARAFCKRNFGDL

SEQ ID NO: 100207 - protein, 13 aa, Homo Sapiens
ARAFCKRNFGDLV

SEQ ID NO: 100208 - protein, 13 aa, Homo Sapiens
RAFCKRNFGDLVS

SEQ ID NO: 100209 - protein, 13 aa, Homo Sapiens
AFCKRNFGDLVSI

SEQ ID NO: 100210 - protein, 13 aa, Homo Sapiens
FCKRNFGDLVSIQ

SEQ ID NO: 100211 - protein, 13 aa, Homo Sapiens
CKRNFGDLVSIQS

SEQ ID NO: 100212 - protein, 13 aa, Homo Sapiens
KRNFGDLVSIQSE

SEQ ID NO: 100213 - protein, 13 aa, Homo Sapiens
RNFGDLVSIQSES

SEQ ID NO: 100214 - protein, 13 aa, Homo Sapiens
NFGDLVSIQSESE

SEQ ID NO: 100215 - protein, 13 aa, Homo Sapiens
FGDLVSIQSESEK

SEQ ID NO: 100216 - protein, 13 aa, Homo Sapiens
GDLVSIQSESEKK

SEQ ID NO: 100217 - protein, 13 aa, Homo Sapiens
DLVSIQSESEKKF

SEQ ID NO: 100218 - protein, 13 aa, Homo Sapiens
LVSIQSESEKKFL

SEQ ID NO: 100219 - protein, 13 aa, Homo Sapiens
VSIQSESEKKFLW

SEQ ID NO: 100220 - protein, 13 aa, Homo Sapiens
SIQSESEKKFLWK

SEQ ID NO: 100221 - protein, 13 aa, Homo Sapiens
IQSESEKKFLWKY

SEQ ID NO: 100222 - protein, 13 aa, Homo Sapiens
QSESEKKFLWKYV

SEQ ID NO: 100223 - protein, 13 aa, Homo Sapiens
SESEKKFLWKYVN

SEQ ID NO: 100224 - protein, 13 aa, Homo Sapiens
ESEKKFLWKYVNR

SEQ ID NO: 100225 - protein, 13 aa, Homo Sapiens
SEKKFLWKYVNRN

SEQ ID NO: 100226 - protein, 13 aa, Homo Sapiens
EKKFLWKYVNRND

SEQ ID NO: 100227 - protein, 13 aa, Homo Sapiens
KKFLWKYVNRNDA

SEQ ID NO: 100228 - protein, 13 aa, Homo Sapiens
KFLWKYVNRNDAQ

SEQ ID NO: 100229 - protein, 13 aa, Homo Sapiens
FLWKYVNRNDAQS

SEQ ID NO: 100230 - protein, 13 aa, Homo Sapiens
LWKYVNRNDAQSA

SEQ ID NO: 100231 - protein, 13 aa, Homo Sapiens
WKYVNRNDAQSAY

SEQ ID NO: 100232 - protein, 13 aa, Homo Sapiens
KYVNRNDAQSAYF

SEQ ID NO: 100233 - protein, 13 aa, Homo Sapiens
YVNRNDAQSAYFI

SEQ ID NO: 100234 - protein, 13 aa, Homo Sapiens
VNRNDAQSAYFIG

SEQ ID NO: 100235 - protein, 13 aa, Homo Sapiens
NRNDAQSAYFIGL

SEQ ID NO: 100236 - protein, 13 aa, Homo Sapiens
RNDAQSAYFIGLL

SEQ ID NO: 100237 - protein, 13 aa, Homo Sapiens
NDAQSAYFIGLLI

SEQ ID NO: 100238 - protein, 13 aa, Homo Sapiens
DAQSAYFIGLLIS

SEQ ID NO: 100239 - protein, 13 aa, Homo Sapiens
AQSAYFIGLLISL

SEQ ID NO: 100240 - protein, 13 aa, Homo Sapiens
QSAYFIGLLISLD

SEQ ID NO: 100241 - protein, 13 aa, Homo Sapiens
SAYFIGLLISLDK

SEQ ID NO: 100242 - protein, 13 aa, Homo Sapiens
AYFIGLLISLDKK

SEQ ID NO: 100243 - protein, 13 aa, Homo Sapiens
YFIGLLISLDKKF

SEQ ID NO: 100244 - protein, 13 aa, Homo Sapiens
FIGLLISLDKKFA

SEQ ID NO: 100245 - protein, 13 aa, Homo Sapiens
IGLLISLDKKFAW

SEQ ID NO: 100246 - protein, 13 aa, Homo Sapiens
GLLISLDKKFAWM

SEQ ID NO: 100247 - protein, 13 aa, Homo Sapiens
LLISLDKKFAWMD

SEQ ID NO: 100248 - protein, 13 aa, Homo Sapiens
LISLDKKFAWMDG

SEQ ID NO: 100249 - protein, 13 aa, Homo Sapiens
ISLDKKFAWMDGS

SEQ ID NO: 100250 - protein, 13 aa, Homo Sapiens
SLDKKFAWMDGSK

SEQ ID NO: 100251 - protein, 13 aa, Homo Sapiens
LDKKFAWMDGSKV

SEQ ID NO: 100252 - protein, 13 aa, Homo Sapiens
DKKFAWMDGSKVD

SEQ ID NO: 100253 - protein, 13 aa, Homo Sapiens
KKFAWMDGSKVDY

SEQ ID NO: 100254 - protein, 13 aa, Homo Sapiens
KFAWMDGSKVDYV

SEQ ID NO: 100255 - protein, 13 aa, Homo Sapiens
FAWMDGSKVDYVS

SEQ ID NO: 100256 - protein, 13 aa, Homo Sapiens
AWMDGSKVDYVSW

SEQ ID NO: 100257 - protein, 13 aa, Homo Sapiens
WMDGSKVDYVSWA

SEQ ID NO: 100258 - protein, 13 aa, Homo Sapiens
MDGSKVDYVSWAT

SEQ ID NO: 100259 - protein, 13 aa, Homo Sapiens
DGSKVDYVSWATG

SEQ ID NO: 100260 - protein, 13 aa, Homo Sapiens
GSKVDYVSWATGE

SEQ ID NO: 100261 - protein, 13 aa, Homo Sapiens
SKVDYVSWATGEP

SEQ ID NO: 100262 - protein, 13 aa, Homo Sapiens
KVDYVSWATGEPN

SEQ ID NO: 100263 - protein, 13 aa, Homo Sapiens
VDYVSWATGEPNF

SEQ ID NO: 100264 - protein, 13 aa, Homo Sapiens
DYVSWATGEPNFA

SEQ ID NO: 100265 - protein, 13 aa, Homo Sapiens
YVSWATGEPNFAN

SEQ ID NO: 100266 - protein, 13 aa, Homo Sapiens
VSWATGEPNFANE

SEQ ID NO: 100267 - protein, 13 aa, Homo Sapiens
SWATGEPNFANED

SEQ ID NO: 100268 - protein, 13 aa, Homo Sapiens
WATGEPNFANEDE

SEQ ID NO: 100269 - protein, 13 aa, Homo Sapiens
ATGEPNFANEDEN

SEQ ID NO: 100270 - protein, 13 aa, Homo Sapiens
TGEPNFANEDENC

SEQ ID NO: 100271 - protein, 13 aa, Homo Sapiens
GEPNFANEDENCV

SEQ ID NO: 100272 - protein, 13 aa, Homo Sapiens
EPNFANEDENCVT

SEQ ID NO: 100273 - protein, 13 aa, Homo Sapiens
PNFANEDENCVTM

SEQ ID NO: 100274 - protein, 13 aa, Homo Sapiens
NFANEDENCVTMY

SEQ ID NO: 100275 - protein, 13 aa, Homo Sapiens
FANEDENCVTMYS

SEQ ID NO: 100276 - protein, 13 aa, Homo Sapiens
ANEDENCVTMYSN

SEQ ID NO: 100277 - protein, 13 aa, Homo Sapiens
NEDENCVTMYSNS

SEQ ID NO: 100278 - protein, 13 aa, Homo Sapiens
EDENCVTMYSNSG

SEQ ID NO: 100279 - protein, 13 aa, Homo Sapiens
DENCVTMYSNSGF

SEQ ID NO: 100280 - protein, 13 aa, Homo Sapiens
ENCVTMYSNSGFW

SEQ ID NO: 100281 - protein, 13 aa, Homo Sapiens
NCVTMYSNSGFWN

SEQ ID NO: 100282 - protein, 13 aa, Homo Sapiens
CVTMYSNSGFWND

SEQ ID NO: 100283 - protein, 13 aa, Homo Sapiens
VTMYSNSGFWNDI

SEQ ID NO: 100284 - protein, 13 aa, Homo Sapiens
TMYSNSGFWNDIN

SEQ ID NO: 100285 - protein, 13 aa, Homo Sapiens
MYSNSGFWNDINC

SEQ ID NO: 100286 - protein, 13 aa, Homo Sapiens
YSNSGFWNDINCG

SEQ ID NO: 100287 - protein, 13 aa, Homo Sapiens
SNSGFWNDINCGY

SEQ ID NO: 100288 - protein, 13 aa, Homo Sapiens
NSGFWNDINCGYP

SEQ ID NO: 100289 - protein, 13 aa, Homo Sapiens
SGFWNDINCGYPN

SEQ ID NO: 100290 - protein, 13 aa, Homo Sapiens
GFWNDINCGYPNA

SEQ ID NO: 100291 - protein, 13 aa, Homo Sapiens
FWNDINCGYPNAF

SEQ ID NO: 100292 - protein, 13 aa, Homo Sapiens
WNDINCGYPNAFI

SEQ ID NO: 100293 - protein, 13 aa, Homo Sapiens
NDINCGYPNAFIC

SEQ ID NO: 100294 - protein, 13 aa, Homo Sapiens
DINCGYPNAFICQ

SEQ ID NO: 100295 - protein, 13 aa, Homo Sapiens
INCGYPNAFICQR

SEQ ID NO: 100296 - protein, 13 aa, Homo Sapiens
NCGYPNAFICQRH

SEQ ID NO: 100297 - protein, 13 aa, Homo Sapiens
CGYPNAFICQRHN

SEQ ID NO: 100298 - protein, 13 aa, Homo Sapiens
GYPNAFICQRHNS

SEQ ID NO: 100299 - protein, 13 aa, Homo Sapiens
YPNAFICQRHNSS

SEQ ID NO: 100300 - protein, 13 aa, Homo Sapiens
PNAFICQRHNSSI

SEQ ID NO: 100301 - protein, 13 aa, Homo Sapiens
NAFICQRHNSSIN

SEQ ID NO: 100302 - protein, 13 aa, Homo Sapiens
AFICQRHNSSINA

SEQ ID NO: 100303 - protein, 13 aa, Homo Sapiens
FICQRHNSSINAT

SEQ ID NO: 100304 - protein, 13 aa, Homo Sapiens
ICQRHNSSINATT

SEQ ID NO: 100305 - protein, 13 aa, Homo Sapiens
CQRHNSSINATTV

SEQ ID NO: 100306 - protein, 13 aa, Homo Sapiens
QRHNSSINATTVM

SEQ ID NO: 100307 - protein, 13 aa, Homo Sapiens
RHNSSINATTVMP

SEQ ID NO: 100308 - protein, 13 aa, Homo Sapiens
HNSSINATTVMPT

SEQ ID NO: 100309 - protein, 13 aa, Homo Sapiens
NSSINATTVMPTM

SEQ ID NO: 100310 - protein, 13 aa, Homo Sapiens
SSINATTVMPTMP

SEQ ID NO: 100311 - protein, 13 aa, Homo Sapiens
SINATTVMPTMPS

SEQ ID NO: 100312 - protein, 13 aa, Homo Sapiens
INATTVMPTMPSV

SEQ ID NO: 100313 - protein, 13 aa, Homo Sapiens
NATTVMPTMPSVP

SEQ ID NO: 100314 - protein, 13 aa, Homo Sapiens
ATTVMPTMPSVPS

SEQ ID NO: 100315 - protein, 13 aa, Homo Sapiens
TTVMPTMPSVPSG

SEQ ID NO: 100316 - protein, 13 aa, Homo Sapiens
TVMPTMPSVPSGC

SEQ ID NO: 100317 - protein, 13 aa, Homo Sapiens
VMPTMPSVPSGCK

SEQ ID NO: 100318 - protein, 13 aa, Homo Sapiens
MPTMPSVPSGCKE

SEQ ID NO: 100319 - protein, 13 aa, Homo Sapiens
PTMPSVPSGCKEG

SEQ ID NO: 100320 - protein, 13 aa, Homo Sapiens
TMPSVPSGCKEGW

SEQ ID NO: 100321 - protein, 13 aa, Homo Sapiens
MPSVPSGCKEGWN

SEQ ID NO: 100322 - protein, 13 aa, Homo Sapiens
PSVPSGCKEGWNF

SEQ ID NO: 100323 - protein, 13 aa, Homo Sapiens
SVPSGCKEGWNFY

SEQ ID NO: 100324 - protein, 13 aa, Homo Sapiens
VPSGCKEGWNFYS

SEQ ID NO: 100325 - protein, 13 aa, Homo Sapiens
PSGCKEGWNFYSN

SEQ ID NO: 100326 - protein, 13 aa, Homo Sapiens
SGCKEGWNFYSNK

SEQ ID NO: 100327 - protein, 13 aa, Homo Sapiens
GCKEGWNFYSNKC

SEQ ID NO: 100328 - protein, 13 aa, Homo Sapiens
CKEGWNFYSNKCF

SEQ ID NO: 100329 - protein, 13 aa, Homo Sapiens
KEGWNFYSNKCFK

SEQ ID NO: 100330 - protein, 13 aa, Homo Sapiens
EGWNFYSNKCFKI

SEQ ID NO: 100331 - protein, 13 aa, Homo Sapiens
GWNFYSNKCFKIF

SEQ ID NO: 100332 - protein, 13 aa, Homo Sapiens
WNFYSNKCFKIFG

SEQ ID NO: 100333 - protein, 13 aa, Homo Sapiens
NFYSNKCFKIFGF

SEQ ID NO: 100334 - protein, 13 aa, Homo Sapiens
FYSNKCFKIFGFM

SEQ ID NO: 100335 - protein, 13 aa, Homo Sapiens
YSNKCFKIFGFME

SEQ ID NO: 100336 - protein, 13 aa, Homo Sapiens
SNKCFKIFGFMEE

SEQ ID NO: 100337 - protein, 13 aa, Homo Sapiens
NKCFKIFGFMEEE

SEQ ID NO: 100338 - protein, 13 aa, Homo Sapiens
KCFKIFGFMEEER

SEQ ID NO: 100339 - protein, 13 aa, Homo Sapiens
CFKIFGFMEEERK

SEQ ID NO: 100340 - protein, 13 aa, Homo Sapiens
FKIFGFMEEERKN

SEQ ID NO: 100341 - protein, 13 aa, Homo Sapiens
KIFGFMEEERKNW

SEQ ID NO: 100342 - protein, 13 aa, Homo Sapiens
IFGFMEEERKNWQ

SEQ ID NO: 100343 - protein, 13 aa, Homo Sapiens
FGFMEEERKNWQE

SEQ ID NO: 100344 - protein, 13 aa, Homo Sapiens
GFMEEERKNWQEA

SEQ ID NO: 100345 - protein, 13 aa, Homo Sapiens
FMEEERKNWQEAR

SEQ ID NO: 100346 - protein, 13 aa, Homo Sapiens
MEEERKNWQEARK

SEQ ID NO: 100347 - protein, 13 aa, Homo Sapiens
EEERKNWQEARKA

SEQ ID NO: 100348 - protein, 13 aa, Homo Sapiens
EERKNWQEARKAC

SEQ ID NO: 100349 - protein, 13 aa, Homo Sapiens
ERKNWQEARKACI

SEQ ID NO: 100350 - protein, 13 aa, Homo Sapiens
RKNWQEARKACIG

SEQ ID NO: 100351 - protein, 13 aa, Homo Sapiens
KNWQEARKACIGF

SEQ ID NO: 100352 - protein, 13 aa, Homo Sapiens
NWQEARKACIGFG

SEQ ID NO: 100353 - protein, 13 aa, Homo Sapiens
WQEARKACIGFGG

SEQ ID NO: 100354 - protein, 13 aa, Homo Sapiens
QEARKACIGFGGN

SEQ ID NO: 100355 - protein, 13 aa, Homo Sapiens
EARKACIGFGGNL

SEQ ID NO: 100356 - protein, 13 aa, Homo Sapiens
ARKACIGFGGNLV

SEQ ID NO: 100357 - protein, 13 aa, Homo Sapiens
RKACIGFGGNLVS

SEQ ID NO: 100358 - protein, 13 aa, Homo Sapiens
KACIGFGGNLVSI

SEQ ID NO: 100359 - protein, 13 aa, Homo Sapiens
ACIGFGGNLVSIQ

SEQ ID NO: 100360 - protein, 13 aa, Homo Sapiens
CIGFGGNLVSIQN

SEQ ID NO: 100361 - protein, 13 aa, Homo Sapiens
IGFGGNLVSIQNE

SEQ ID NO: 100362 - protein, 13 aa, Homo Sapiens
GFGGNLVSIQNEK

SEQ ID NO: 100363 - protein, 13 aa, Homo Sapiens
FGGNLVSIQNEKE

SEQ ID NO: 100364 - protein, 13 aa, Homo Sapiens
GGNLVSIQNEKEQ

SEQ ID NO: 100365 - protein, 13 aa, Homo Sapiens
GNLVSIQNEKEQA

SEQ ID NO: 100366 - protein, 13 aa, Homo Sapiens
NLVSIQNEKEQAF

SEQ ID NO: 100367 - protein, 13 aa, Homo Sapiens
LVSIQNEKEQAFL

SEQ ID NO: 100368 - protein, 13 aa, Homo Sapiens
VSIQNEKEQAFLT

SEQ ID NO: 100369 - protein, 13 aa, Homo Sapiens
SIQNEKEQAFLTY

SEQ ID NO: 100370 - protein, 13 aa, Homo Sapiens
IQNEKEQAFLTYH

SEQ ID NO: 100371 - protein, 13 aa, Homo Sapiens
QNEKEQAFLTYHM

SEQ ID NO: 100372 - protein, 13 aa, Homo Sapiens
NEKEQAFLTYHMK

SEQ ID NO: 100373 - protein, 13 aa, Homo Sapiens
EKEQAFLTYHMKD

SEQ ID NO: 100374 - protein, 13 aa, Homo Sapiens
KEQAFLTYHMKDS

SEQ ID NO: 100375 - protein, 13 aa, Homo Sapiens
EQAFLTYHMKDST

SEQ ID NO: 100376 - protein, 13 aa, Homo Sapiens
QAFLTYHMKDSTF

SEQ ID NO: 100377 - protein, 13 aa, Homo Sapiens
AFLTYHMKDSTFS

SEQ ID NO: 100378 - protein, 13 aa, Homo Sapiens
FLTYHMKDSTFSA

SEQ ID NO: 100379 - protein, 13 aa, Homo Sapiens
LTYHMKDSTFSAW

SEQ ID NO: 100380 - protein, 13 aa, Homo Sapiens
TYHMKDSTFSAWT

SEQ ID NO: 100381 - protein, 13 aa, Homo Sapiens
YHMKDSTFSAWTG

SEQ ID NO: 100382 - protein, 13 aa, Homo Sapiens
HMKDSTFSAWTGL

SEQ ID NO: 100383 - protein, 13 aa, Homo Sapiens
MKDSTFSAWTGLN

SEQ ID NO: 100384 - protein, 13 aa, Homo Sapiens
KDSTFSAWTGLND

SEQ ID NO: 100385 - protein, 13 aa, Homo Sapiens
DSTFSAWTGLNDV

SEQ ID NO: 100386 - protein, 13 aa, Homo Sapiens
STFSAWTGLNDVN

SEQ ID NO: 100387 - protein, 13 aa, Homo Sapiens
TFSAWTGLNDVNS

SEQ ID NO: 100388 - protein, 13 aa, Homo Sapiens
FSAWTGLNDVNSE

SEQ ID NO: 100389 - protein, 13 aa, Homo Sapiens
SAWTGLNDVNSEH

SEQ ID NO: 100390 - protein, 13 aa, Homo Sapiens
AWTGLNDVNSEHT

SEQ ID NO: 100391 - protein, 13 aa, Homo Sapiens
WTGLNDVNSEHTF

SEQ ID NO: 100392 - protein, 13 aa, Homo Sapiens
TGLNDVNSEHTFL

SEQ ID NO: 100393 - protein, 13 aa, Homo Sapiens
GLNDVNSEHTFLW

SEQ ID NO: 100394 - protein, 13 aa, Homo Sapiens
LNDVNSEHTFLWT

SEQ ID NO: 100395 - protein, 13 aa, Homo Sapiens
NDVNSEHTFLWTD

SEQ ID NO: 100396 - protein, 13 aa, Homo Sapiens
DVNSEHTFLWTDG

SEQ ID NO: 100397 - protein, 13 aa, Homo Sapiens
VNSEHTFLWTDGR

SEQ ID NO: 100398 - protein, 13 aa, Homo Sapiens
NSEHTFLWTDGRG

SEQ ID NO: 100399 - protein, 13 aa, Homo Sapiens
SEHTFLWTDGRGV

SEQ ID NO: 100400 - protein, 13 aa, Homo Sapiens
EHTFLWTDGRGVH

SEQ ID NO: 100401 - protein, 13 aa, Homo Sapiens
HTFLWTDGRGVHY

SEQ ID NO: 100402 - protein, 13 aa, Homo Sapiens
TFLWTDGRGVHYT

SEQ ID NO: 100403 - protein, 13 aa, Homo Sapiens
FLWTDGRGVHYTN

SEQ ID NO: 100404 - protein, 13 aa, Homo Sapiens
LWTDGRGVHYTNW

SEQ ID NO: 100405 - protein, 13 aa, Homo Sapiens
WTDGRGVHYTNWG

SEQ ID NO: 100406 - protein, 13 aa, Homo Sapiens
TDGRGVHYTNWGK

SEQ ID NO: 100407 - protein, 13 aa, Homo Sapiens
DGRGVHYTNWGKG

SEQ ID NO: 100408 - protein, 13 aa, Homo Sapiens
GRGVHYTNWGKGY

SEQ ID NO: 100409 - protein, 13 aa, Homo Sapiens
RGVHYTNWGKGYP

SEQ ID NO: 100410 - protein, 13 aa, Homo Sapiens
GVHYTNWGKGYPG

SEQ ID NO: 100411 - protein, 13 aa, Homo Sapiens
VHYTNWGKGYPGG

SEQ ID NO: 100412 - protein, 13 aa, Homo Sapiens
HYTNWGKGYPGGR

SEQ ID NO: 100413 - protein, 13 aa, Homo Sapiens
YTNWGKGYPGGRR

SEQ ID NO: 100414 - protein, 13 aa, Homo Sapiens
TNWGKGYPGGRRS

SEQ ID NO: 100415 - protein, 13 aa, Homo Sapiens
NWGKGYPGGRRSS

SEQ ID NO: 100416 - protein, 13 aa, Homo Sapiens
WGKGYPGGRRSSL

SEQ ID NO: 100417 - protein, 13 aa, Homo Sapiens
GKGYPGGRRSSLS

SEQ ID NO: 100418 - protein, 13 aa, Homo Sapiens
KGYPGGRRSSLSY

SEQ ID NO: 100419 - protein, 13 aa, Homo Sapiens
GYPGGRRSSLSYE

SEQ ID NO: 100420 - protein, 13 aa, Homo Sapiens
YPGGRRSSLSYED

SEQ ID NO: 100421 - protein, 13 aa, Homo Sapiens
PGGRRSSLSYEDA

SEQ ID NO: 100422 - protein, 13 aa, Homo Sapiens
GGRRSSLSYEDAD

SEQ ID NO: 100423 - protein, 13 aa, Homo Sapiens
GRRSSLSYEDADC

SEQ ID NO: 100424 - protein, 13 aa, Homo Sapiens
RRSSLSYEDADCV

SEQ ID NO: 100425 - protein, 13 aa, Homo Sapiens
RSSLSYEDADCVV

SEQ ID NO: 100426 - protein, 13 aa, Homo Sapiens
SSLSYEDADCVVI

SEQ ID NO: 100427 - protein, 13 aa, Homo Sapiens
SLSYEDADCVVII

SEQ ID NO: 100428 - protein, 13 aa, Homo Sapiens
LSYEDADCVVIIG

SEQ ID NO: 100429 - protein, 13 aa, Homo Sapiens
SYEDADCVVIIGG

SEQ ID NO: 100430 - protein, 13 aa, Homo Sapiens
YEDADCVVIIGGA

SEQ ID NO: 100431 - protein, 13 aa, Homo Sapiens
EDADCVVIIGGAS

SEQ ID NO: 100432 - protein, 13 aa, Homo Sapiens
DADCVVIIGGASN

SEQ ID NO: 100433 - protein, 13 aa, Homo Sapiens
ADCVVIIGGASNE

SEQ ID NO: 100434 - protein, 13 aa, Homo Sapiens
DCVVIIGGASNEA

SEQ ID NO: 100435 - protein, 13 aa, Homo Sapiens
CVVIIGGASNEAG

SEQ ID NO: 100436 - protein, 13 aa, Homo Sapiens
VVIIGGASNEAGK

SEQ ID NO: 100437 - protein, 13 aa, Homo Sapiens
VIIGGASNEAGKW

SEQ ID NO: 100438 - protein, 13 aa, Homo Sapiens
IIGGASNEAGKWM

SEQ ID NO: 100439 - protein, 13 aa, Homo Sapiens
IGGASNEAGKWMD

SEQ ID NO: 100440 - protein, 13 aa, Homo Sapiens
GGASNEAGKWMDD

SEQ ID NO: 100441 - protein, 13 aa, Homo Sapiens
GASNEAGKWMDDT

SEQ ID NO: 100442 - protein, 13 aa, Homo Sapiens
ASNEAGKWMDDTC

SEQ ID NO: 100443 - protein, 13 aa, Homo Sapiens
SNEAGKWMDDTCD

SEQ ID NO: 100444 - protein, 13 aa, Homo Sapiens
NEAGKWMDDTCDS

SEQ ID NO: 100445 - protein, 13 aa, Homo Sapiens
EAGKWMDDTCDSK

SEQ ID NO: 100446 - protein, 13 aa, Homo Sapiens
AGKWMDDTCDSKR

SEQ ID NO: 100447 - protein, 13 aa, Homo Sapiens
GKWMDDTCDSKRG

SEQ ID NO: 100448 - protein, 13 aa, Homo Sapiens
KWMDDTCDSKRGY

SEQ ID NO: 100449 - protein, 13 aa, Homo Sapiens
WMDDTCDSKRGYI

SEQ ID NO: 100450 - protein, 13 aa, Homo Sapiens
MDDTCDSKRGYIC

SEQ ID NO: 100451 - protein, 13 aa, Homo Sapiens
DDTCDSKRGYICQ

SEQ ID NO: 100452 - protein, 13 aa, Homo Sapiens
DTCDSKRGYICQT

SEQ ID NO: 100453 - protein, 13 aa, Homo Sapiens
TCDSKRGYICQTR

SEQ ID NO: 100454 - protein, 13 aa, Homo Sapiens
CDSKRGYICQTRS

SEQ ID NO: 100455 - protein, 13 aa, Homo Sapiens
DSKRGYICQTRSD

SEQ ID NO: 100456 - protein, 13 aa, Homo Sapiens
SKRGYICQTRSDP

SEQ ID NO: 100457 - protein, 13 aa, Homo Sapiens
KRGYICQTRSDPS

SEQ ID NO: 100458 - protein, 13 aa, Homo Sapiens
RGYICQTRSDPSL

SEQ ID NO: 100459 - protein, 13 aa, Homo Sapiens
GYICQTRSDPSLT

SEQ ID NO: 100460 - protein, 13 aa, Homo Sapiens
YICQTRSDPSLTN

SEQ ID NO: 100461 - protein, 13 aa, Homo Sapiens
ICQTRSDPSLTNP

SEQ ID NO: 100462 - protein, 13 aa, Homo Sapiens
CQTRSDPSLTNPP

SEQ ID NO: 100463 - protein, 13 aa, Homo Sapiens
QTRSDPSLTNPPA

SEQ ID NO: 100464 - protein, 13 aa, Homo Sapiens
TRSDPSLTNPPAT

SEQ ID NO: 100465 - protein, 13 aa, Homo Sapiens
RSDPSLTNPPATI

SEQ ID NO: 100466 - protein, 13 aa, Homo Sapiens
SDPSLTNPPATIQ

SEQ ID NO: 100467 - protein, 13 aa, Homo Sapiens
DPSLTNPPATIQT

SEQ ID NO: 100468 - protein, 13 aa, Homo Sapiens
PSLTNPPATIQTD

SEQ ID NO: 100469 - protein, 13 aa, Homo Sapiens
SLTNPPATIQTDG

SEQ ID NO: 100470 - protein, 13 aa, Homo Sapiens
LTNPPATIQTDGF

SEQ ID NO: 100471 - protein, 13 aa, Homo Sapiens
TNPPATIQTDGFV

SEQ ID NO: 100472 - protein, 13 aa, Homo Sapiens
NPPATIQTDGFVK

SEQ ID NO: 100473 - protein, 13 aa, Homo Sapiens
PPATIQTDGFVKY

SEQ ID NO: 100474 - protein, 13 aa, Homo Sapiens
PATIQTDGFVKYG

SEQ ID NO: 100475 - protein, 13 aa, Homo Sapiens
ATIQTDGFVKYGK

SEQ ID NO: 100476 - protein, 13 aa, Homo Sapiens
TIQTDGFVKYGKS

SEQ ID NO: 100477 - protein, 13 aa, Homo Sapiens
IQTDGFVKYGKSS

SEQ ID NO: 100478 - protein, 13 aa, Homo Sapiens
QTDGFVKYGKSSY

SEQ ID NO: 100479 - protein, 13 aa, Homo Sapiens
TDGFVKYGKSSYS

SEQ ID NO: 100480 - protein, 13 aa, Homo Sapiens
DGFVKYGKSSYSL

SEQ ID NO: 100481 - protein, 13 aa, Homo Sapiens
GFVKYGKSSYSLM

SEQ ID NO: 100482 - protein, 13 aa, Homo Sapiens
FVKYGKSSYSLMR

SEQ ID NO: 100483 - protein, 13 aa, Homo Sapiens
VKYGKSSYSLMRQ

SEQ ID NO: 100484 - protein, 13 aa, Homo Sapiens
KYGKSSYSLMRQK

SEQ ID NO: 100485 - protein, 13 aa, Homo Sapiens
YGKSSYSLMRQKF

SEQ ID NO: 100486 - protein, 13 aa, Homo Sapiens
GKSSYSLMRQKFQ

SEQ ID NO: 100487 - protein, 13 aa, Homo Sapiens
KSSYSLMRQKFQW

SEQ ID NO: 100488 - protein, 13 aa, Homo Sapiens
SSYSLMRQKFQWH

SEQ ID NO: 100489 - protein, 13 aa, Homo Sapiens
SYSLMRQKFQWHE

SEQ ID NO: 100490 - protein, 13 aa, Homo Sapiens
YSLMRQKFQWHEA

SEQ ID NO: 100491 - protein, 13 aa, Homo Sapiens
SLMRQKFQWHEAE

SEQ ID NO: 100492 - protein, 13 aa, Homo Sapiens
LMRQKFQWHEAET

SEQ ID NO: 100493 - protein, 13 aa, Homo Sapiens
MRQKFQWHEAETY

SEQ ID NO: 100494 - protein, 13 aa, Homo Sapiens
RQKFQWHEAETYC

SEQ ID NO: 100495 - protein, 13 aa, Homo Sapiens
QKFQWHEAETYCK

SEQ ID NO: 100496 - protein, 13 aa, Homo Sapiens
KFQWHEAETYCKL

SEQ ID NO: 100497 - protein, 13 aa, Homo Sapiens
FQWHEAETYCKLH

SEQ ID NO: 100498 - protein, 13 aa, Homo Sapiens
QWHEAETYCKLHN

SEQ ID NO: 100499 - protein, 13 aa, Homo Sapiens
WHEAETYCKLHNS

SEQ ID NO: 100500 - protein, 13 aa, Homo Sapiens
HEAETYCKLHNSL

SEQ ID NO: 100501 - protein, 13 aa, Homo Sapiens
EAETYCKLHNSLI

SEQ ID NO: 100502 - protein, 13 aa, Homo Sapiens
AETYCKLHNSLIA

SEQ ID NO: 100503 - protein, 13 aa, Homo Sapiens
ETYCKLHNSLIAS

SEQ ID NO: 100504 - protein, 13 aa, Homo Sapiens
TYCKLHNSLIASI

SEQ ID NO: 100505 - protein, 13 aa, Homo Sapiens
YCKLHNSLIASIL

SEQ ID NO: 100506 - protein, 13 aa, Homo Sapiens
CKLHNSLIASILD

SEQ ID NO: 100507 - protein, 13 aa, Homo Sapiens
KLHNSLIASILDP

SEQ ID NO: 100508 - protein, 13 aa, Homo Sapiens
LHNSLIASILDPY

SEQ ID NO: 100509 - protein, 13 aa, Homo Sapiens
HNSLIASILDPYS

SEQ ID NO: 100510 - protein, 13 aa, Homo Sapiens
NSLIASILDPYSN

SEQ ID NO: 100511 - protein, 13 aa, Homo Sapiens
SLIASILDPYSNA

SEQ ID NO: 100512 - protein, 13 aa, Homo Sapiens
LIASILDPYSNAF

SEQ ID NO: 100513 - protein, 13 aa, Homo Sapiens
IASILDPYSNAFA

SEQ ID NO: 100514 - protein, 13 aa, Homo Sapiens
ASILDPYSNAFAW

SEQ ID NO: 100515 - protein, 13 aa, Homo Sapiens
SILDPYSNAFAWL

SEQ ID NO: 100516 - protein, 13 aa, Homo Sapiens
ILDPYSNAFAWLQ

SEQ ID NO: 100517 - protein, 13 aa, Homo Sapiens
LDPYSNAFAWLQM

SEQ ID NO: 100518 - protein, 13 aa, Homo Sapiens
DPYSNAFAWLQME

SEQ ID NO: 100519 - protein, 13 aa, Homo Sapiens
PYSNAFAWLQMET

SEQ ID NO: 100520 - protein, 13 aa, Homo Sapiens
YSNAFAWLQMETS

SEQ ID NO: 100521 - protein, 13 aa, Homo Sapiens
SNAFAWLQMETSN

SEQ ID NO: 100522 - protein, 13 aa, Homo Sapiens
NAFAWLQMETSNE

SEQ ID NO: 100523 - protein, 13 aa, Homo Sapiens
AFAWLQMETSNER

SEQ ID NO: 100524 - protein, 13 aa, Homo Sapiens
FAWLQMETSNERV

SEQ ID NO: 100525 - protein, 13 aa, Homo Sapiens
AWLQMETSNERVW

SEQ ID NO: 100526 - protein, 13 aa, Homo Sapiens
WLQMETSNERVWI

SEQ ID NO: 100527 - protein, 13 aa, Homo Sapiens
LQMETSNERVWIA

SEQ ID NO: 100528 - protein, 13 aa, Homo Sapiens
QMETSNERVWIAL

SEQ ID NO: 100529 - protein, 13 aa, Homo Sapiens
METSNERVWIALN

SEQ ID NO: 100530 - protein, 13 aa, Homo Sapiens
ETSNERVWIALNS

SEQ ID NO: 100531 - protein, 13 aa, Homo Sapiens
TSNERVWIALNSN

SEQ ID NO: 100532 - protein, 13 aa, Homo Sapiens
SNERVWIALNSNL

SEQ ID NO: 100533 - protein, 13 aa, Homo Sapiens
NERVWIALNSNLT

SEQ ID NO: 100534 - protein, 13 aa, Homo Sapiens
ERVWIALNSNLTD

SEQ ID NO: 100535 - protein, 13 aa, Homo Sapiens
RVWIALNSNLTDN

SEQ ID NO: 100536 - protein, 13 aa, Homo Sapiens
VWIALNSNLTDNQ

SEQ ID NO: 100537 - protein, 13 aa, Homo Sapiens
WIALNSNLTDNQY

SEQ ID NO: 100538 - protein, 13 aa, Homo Sapiens
IALNSNLTDNQYT

SEQ ID NO: 100539 - protein, 13 aa, Homo Sapiens
ALNSNLTDNQYTW

SEQ ID NO: 100540 - protein, 13 aa, Homo Sapiens
LNSNLTDNQYTWT

SEQ ID NO: 100541 - protein, 13 aa, Homo Sapiens
NSNLTDNQYTWTD

SEQ ID NO: 100542 - protein, 13 aa, Homo Sapiens
SNLTDNQYTWTDK

SEQ ID NO: 100543 - protein, 13 aa, Homo Sapiens
NLTDNQYTWTDKW

SEQ ID NO: 100544 - protein, 13 aa, Homo Sapiens
LTDNQYTWTDKWR

SEQ ID NO: 100545 - protein, 13 aa, Homo Sapiens
TDNQYTWTDKWRV

SEQ ID NO: 100546 - protein, 13 aa, Homo Sapiens
DNQYTWTDKWRVR

SEQ ID NO: 100547 - protein, 13 aa, Homo Sapiens
NQYTWTDKWRVRY

SEQ ID NO: 100548 - protein, 13 aa, Homo Sapiens
QYTWTDKWRVRYT

SEQ ID NO: 100549 - protein, 13 aa, Homo Sapiens
YTWTDKWRVRYTN

SEQ ID NO: 100550 - protein, 13 aa, Homo Sapiens
TWTDKWRVRYTNW

SEQ ID NO: 100551 - protein, 13 aa, Homo Sapiens
WTDKWRVRYTNWA

SEQ ID NO: 100552 - protein, 13 aa, Homo Sapiens
TDKWRVRYTNWAA

SEQ ID NO: 100553 - protein, 13 aa, Homo Sapiens
DKWRVRYTNWAAD

SEQ ID NO: 100554 - protein, 13 aa, Homo Sapiens
KWRVRYTNWAADE

SEQ ID NO: 100555 - protein, 13 aa, Homo Sapiens
WRVRYTNWAADEP

SEQ ID NO: 100556 - protein, 13 aa, Homo Sapiens
RVRYTNWAADEPK

SEQ ID NO: 100557 - protein, 13 aa, Homo Sapiens
VRYTNWAADEPKL

SEQ ID NO: 100558 - protein, 13 aa, Homo Sapiens
RYTNWAADEPKLK

SEQ ID NO: 100559 - protein, 13 aa, Homo Sapiens
YTNWAADEPKLKS

SEQ ID NO: 100560 - protein, 13 aa, Homo Sapiens
TNWAADEPKLKSA

SEQ ID NO: 100561 - protein, 13 aa, Homo Sapiens
NWAADEPKLKSAC

SEQ ID NO: 100562 - protein, 13 aa, Homo Sapiens
WAADEPKLKSACV

SEQ ID NO: 100563 - protein, 13 aa, Homo Sapiens
AADEPKLKSACVY

SEQ ID NO: 100564 - protein, 13 aa, Homo Sapiens
ADEPKLKSACVYL

SEQ ID NO: 100565 - protein, 13 aa, Homo Sapiens
DEPKLKSACVYLD

SEQ ID NO: 100566 - protein, 13 aa, Homo Sapiens
EPKLKSACVYLDL

SEQ ID NO: 100567 - protein, 13 aa, Homo Sapiens
PKLKSACVYLDLD

SEQ ID NO: 100568 - protein, 13 aa, Homo Sapiens
KLKSACVYLDLDG

SEQ ID NO: 100569 - protein, 13 aa, Homo Sapiens
LKSACVYLDLDGY

SEQ ID NO: 100570 - protein, 13 aa, Homo Sapiens
KSACVYLDLDGYW

SEQ ID NO: 100571 - protein, 13 aa, Homo Sapiens
SACVYLDLDGYWK

SEQ ID NO: 100572 - protein, 13 aa, Homo Sapiens
ACVYLDLDGYWKT

SEQ ID NO: 100573 - protein, 13 aa, Homo Sapiens
CVYLDLDGYWKTA

SEQ ID NO: 100574 - protein, 13 aa, Homo Sapiens
VYLDLDGYWKTAH

SEQ ID NO: 100575 - protein, 13 aa, Homo Sapiens
YLDLDGYWKTAHC

SEQ ID NO: 100576 - protein, 13 aa, Homo Sapiens
LDLDGYWKTAHCN

SEQ ID NO: 100577 - protein, 13 aa, Homo Sapiens
DLDGYWKTAHCNE

SEQ ID NO: 100578 - protein, 13 aa, Homo Sapiens
LDGYWKTAHCNES

SEQ ID NO: 100579 - protein, 13 aa, Homo Sapiens
DGYWKTAHCNESF

SEQ ID NO: 100580 - protein, 13 aa, Homo Sapiens
GYWKTAHCNESFY

SEQ ID NO: 100581 - protein, 13 aa, Homo Sapiens
YWKTAHCNESFYF

SEQ ID NO: 100582 - protein, 13 aa, Homo Sapiens
WKTAHCNESFYFL

SEQ ID NO: 100583 - protein, 13 aa, Homo Sapiens
KTAHCNESFYFLC

SEQ ID NO: 100584 - protein, 13 aa, Homo Sapiens
TAHCNESFYFLCK

SEQ ID NO: 100585 - protein, 13 aa, Homo Sapiens
AHCNESFYFLCKR

SEQ ID NO: 100586 - protein, 13 aa, Homo Sapiens
HCNESFYFLCKRS

SEQ ID NO: 100587 - protein, 13 aa, Homo Sapiens
CNESFYFLCKRSD

SEQ ID NO: 100588 - protein, 13 aa, Homo Sapiens
NESFYFLCKRSDE

SEQ ID NO: 100589 - protein, 13 aa, Homo Sapiens
ESFYFLCKRSDEI

SEQ ID NO: 100590 - protein, 13 aa, Homo Sapiens
SFYFLCKRSDEIP

SEQ ID NO: 100591 - protein, 13 aa, Homo Sapiens
FYFLCKRSDEIPA

SEQ ID NO: 100592 - protein, 13 aa, Homo Sapiens
YFLCKRSDEIPAT

SEQ ID NO: 100593 - protein, 13 aa, Homo Sapiens
FLCKRSDEIPATE

SEQ ID NO: 100594 - protein, 13 aa, Homo Sapiens
LCKRSDEIPATEP

SEQ ID NO: 100595 - protein, 13 aa, Homo Sapiens
CKRSDEIPATEPP

SEQ ID NO: 100596 - protein, 13 aa, Homo Sapiens
KRSDEIPATEPPQ

SEQ ID NO: 100597 - protein, 13 aa, Homo Sapiens
RSDEIPATEPPQL

SEQ ID NO: 100598 - protein, 13 aa, Homo Sapiens
SDEIPATEPPQLP

SEQ ID NO: 100599 - protein, 13 aa, Homo Sapiens
DEIPATEPPQLPG

SEQ ID NO: 100600 - protein, 13 aa, Homo Sapiens
EIPATEPPQLPGR

SEQ ID NO: 100601 - protein, 13 aa, Homo Sapiens
IPATEPPQLPGRC

SEQ ID NO: 100602 - protein, 13 aa, Homo Sapiens
PATEPPQLPGRCP

SEQ ID NO: 100603 - protein, 13 aa, Homo Sapiens
ATEPPQLPGRCPE

SEQ ID NO: 100604 - protein, 13 aa, Homo Sapiens
TEPPQLPGRCPES

SEQ ID NO: 100605 - protein, 13 aa, Homo Sapiens
EPPQLPGRCPESD

SEQ ID NO: 100606 - protein, 13 aa, Homo Sapiens
PPQLPGRCPESDH

SEQ ID NO: 100607 - protein, 13 aa, Homo Sapiens
PQLPGRCPESDHT

SEQ ID NO: 100608 - protein, 13 aa, Homo Sapiens
QLPGRCPESDHTA

SEQ ID NO: 100609 - protein, 13 aa, Homo Sapiens
LPGRCPESDHTAW

SEQ ID NO: 100610 - protein, 13 aa, Homo Sapiens
PGRCPESDHTAWI

SEQ ID NO: 100611 - protein, 13 aa, Homo Sapiens
GRCPESDHTAWIP

SEQ ID NO: 100612 - protein, 13 aa, Homo Sapiens
RCPESDHTAWIPF

SEQ ID NO: 100613 - protein, 13 aa, Homo Sapiens
CPESDHTAWIPFH

SEQ ID NO: 100614 - protein, 13 aa, Homo Sapiens
PESDHTAWIPFHG

SEQ ID NO: 100615 - protein, 13 aa, Homo Sapiens
ESDHTAWIPFHGH

SEQ ID NO: 100616 - protein, 13 aa, Homo Sapiens
SDHTAWIPFHGHC

SEQ ID NO: 100617 - protein, 13 aa, Homo Sapiens
DHTAWIPFHGHCY

SEQ ID NO: 100618 - protein, 13 aa, Homo Sapiens
HTAWIPFHGHCYY

SEQ ID NO: 100619 - protein, 13 aa, Homo Sapiens
TAWIPFHGHCYYI

SEQ ID NO: 100620 - protein, 13 aa, Homo Sapiens
AWIPFHGHCYYIE

SEQ ID NO: 100621 - protein, 13 aa, Homo Sapiens
WIPFHGHCYYIES

SEQ ID NO: 100622 - protein, 13 aa, Homo Sapiens
IPFHGHCYYIESS

SEQ ID NO: 100623 - protein, 13 aa, Homo Sapiens
PFHGHCYYIESSY

SEQ ID NO: 100624 - protein, 13 aa, Homo Sapiens
FHGHCYYIESSYT

SEQ ID NO: 100625 - protein, 13 aa, Homo Sapiens
HGHCYYIESSYTR

SEQ ID NO: 100626 - protein, 13 aa, Homo Sapiens
GHCYYIESSYTRN

SEQ ID NO: 100627 - protein, 13 aa, Homo Sapiens
HCYYIESSYTRNW

SEQ ID NO: 100628 - protein, 13 aa, Homo Sapiens
CYYIESSYTRNWG

SEQ ID NO: 100629 - protein, 13 aa, Homo Sapiens
YYIESSYTRNWGQ

SEQ ID NO: 100630 - protein, 13 aa, Homo Sapiens
YIESSYTRNWGQA

SEQ ID NO: 100631 - protein, 13 aa, Homo Sapiens
IESSYTRNWGQAS

SEQ ID NO: 100632 - protein, 13 aa, Homo Sapiens
ESSYTRNWGQASL

SEQ ID NO: 100633 - protein, 13 aa, Homo Sapiens
SSYTRNWGQASLE

SEQ ID NO: 100634 - protein, 13 aa, Homo Sapiens
SYTRNWGQASLEC

SEQ ID NO: 100635 - protein, 13 aa, Homo Sapiens
YTRNWGQASLECL

SEQ ID NO: 100636 - protein, 13 aa, Homo Sapiens
TRNWGQASLECLR

SEQ ID NO: 100637 - protein, 13 aa, Homo Sapiens
RNWGQASLECLRM

SEQ ID NO: 100638 - protein, 13 aa, Homo Sapiens
NWGQASLECLRMG

SEQ ID NO: 100639 - protein, 13 aa, Homo Sapiens
WGQASLECLRMGS

SEQ ID NO: 100640 - protein, 13 aa, Homo Sapiens
GQASLECLRMGSS

SEQ ID NO: 100641 - protein, 13 aa, Homo Sapiens
QASLECLRMGSSL

SEQ ID NO: 100642 - protein, 13 aa, Homo Sapiens
ASLECLRMGSSLV

SEQ ID NO: 100643 - protein, 13 aa, Homo Sapiens
SLECLRMGSSLVS

SEQ ID NO: 100644 - protein, 13 aa, Homo Sapiens
LECLRMGSSLVSI

SEQ ID NO: 100645 - protein, 13 aa, Homo Sapiens
ECLRMGSSLVSIE

SEQ ID NO: 100646 - protein, 13 aa, Homo Sapiens
CLRMGSSLVSIES

SEQ ID NO: 100647 - protein, 13 aa, Homo Sapiens
LRMGSSLVSIESA

SEQ ID NO: 100648 - protein, 13 aa, Homo Sapiens
RMGSSLVSIESAA

SEQ ID NO: 100649 - protein, 13 aa, Homo Sapiens
MGSSLVSIESAAE

SEQ ID NO: 100650 - protein, 13 aa, Homo Sapiens
GSSLVSIESAAES

SEQ ID NO: 100651 - protein, 13 aa, Homo Sapiens
SSLVSIESAAESS

SEQ ID NO: 100652 - protein, 13 aa, Homo Sapiens
SLVSIESAAESSF

SEQ ID NO: 100653 - protein, 13 aa, Homo Sapiens
LVSIESAAESSFL

SEQ ID NO: 100654 - protein, 13 aa, Homo Sapiens
VSIESAAESSFLS

SEQ ID NO: 100655 - protein, 13 aa, Homo Sapiens
SIESAAESSFLSY

SEQ ID NO: 100656 - protein, 13 aa, Homo Sapiens
IESAAESSFLSYR

SEQ ID NO: 100657 - protein, 13 aa, Homo Sapiens
ESAAESSFLSYRV

SEQ ID NO: 100658 - protein, 13 aa, Homo Sapiens
SAAESSFLSYRVE

SEQ ID NO: 100659 - protein, 13 aa, Homo Sapiens
AAESSFLSYRVEP

SEQ ID NO: 100660 - protein, 13 aa, Homo Sapiens
AESSFLSYRVEPL

SEQ ID NO: 100661 - protein, 13 aa, Homo Sapiens
ESSFLSYRVEPLK

SEQ ID NO: 100662 - protein, 13 aa, Homo Sapiens
SSFLSYRVEPLKS

SEQ ID NO: 100663 - protein, 13 aa, Homo Sapiens
SFLSYRVEPLKSK

SEQ ID NO: 100664 - protein, 13 aa, Homo Sapiens
FLSYRVEPLKSKT

SEQ ID NO: 100665 - protein, 13 aa, Homo Sapiens
LSYRVEPLKSKTN

SEQ ID NO: 100666 - protein, 13 aa, Homo Sapiens
SYRVEPLKSKTNF

SEQ ID NO: 100667 - protein, 13 aa, Homo Sapiens
YRVEPLKSKTNFW

SEQ ID NO: 100668 - protein, 13 aa, Homo Sapiens
RVEPLKSKTNFWI

SEQ ID NO: 100669 - protein, 13 aa, Homo Sapiens
VEPLKSKTNFWIG

SEQ ID NO: 100670 - protein, 13 aa, Homo Sapiens
EPLKSKTNFWIGL

SEQ ID NO: 100671 - protein, 13 aa, Homo Sapiens
PLKSKTNFWIGLF

SEQ ID NO: 100672 - protein, 13 aa, Homo Sapiens
LKSKTNFWIGLFR

SEQ ID NO: 100673 - protein, 13 aa, Homo Sapiens
KSKTNFWIGLFRN

SEQ ID NO: 100674 - protein, 13 aa, Homo Sapiens
SKTNFWIGLFRNV

SEQ ID NO: 100675 - protein, 13 aa, Homo Sapiens
KTNFWIGLFRNVE

SEQ ID NO: 100676 - protein, 13 aa, Homo Sapiens
TNFWIGLFRNVEG

SEQ ID NO: 100677 - protein, 13 aa, Homo Sapiens
NFWIGLFRNVEGT

SEQ ID NO: 100678 - protein, 13 aa, Homo Sapiens
FWIGLFRNVEGTW

SEQ ID NO: 100679 - protein, 13 aa, Homo Sapiens
WIGLFRNVEGTWL

SEQ ID NO: 100680 - protein, 13 aa, Homo Sapiens
IGLFRNVEGTWLW

SEQ ID NO: 100681 - protein, 13 aa, Homo Sapiens
GLFRNVEGTWLWI

SEQ ID NO: 100682 - protein, 13 aa, Homo Sapiens
LFRNVEGTWLWIN

SEQ ID NO: 100683 - protein, 13 aa, Homo Sapiens
FRNVEGTWLWINN

SEQ ID NO: 100684 - protein, 13 aa, Homo Sapiens
RNVEGTWLWINNS

SEQ ID NO: 100685 - protein, 13 aa, Homo Sapiens
NVEGTWLWINNSP

SEQ ID NO: 100686 - protein, 13 aa, Homo Sapiens
VEGTWLWINNSPV

SEQ ID NO: 100687 - protein, 13 aa, Homo Sapiens
EGTWLWINNSPVS

SEQ ID NO: 100688 - protein, 13 aa, Homo Sapiens
GTWLWINNSPVSF

SEQ ID NO: 100689 - protein, 13 aa, Homo Sapiens
TWLWINNSPVSFV

SEQ ID NO: 100690 - protein, 13 aa, Homo Sapiens
WLWINNSPVSFVN

SEQ ID NO: 100691 - protein, 13 aa, Homo Sapiens
LWINNSPVSFVNW

SEQ ID NO: 100692 - protein, 13 aa, Homo Sapiens
WINNSPVSFVNWN

SEQ ID NO: 100693 - protein, 13 aa, Homo Sapiens
INNSPVSFVNWNT

SEQ ID NO: 100694 - protein, 13 aa, Homo Sapiens
NNSPVSFVNWNTG

SEQ ID NO: 100695 - protein, 13 aa, Homo Sapiens
NSPVSFVNWNTGD

SEQ ID NO: 100696 - protein, 13 aa, Homo Sapiens
SPVSFVNWNTGDP

SEQ ID NO: 100697 - protein, 13 aa, Homo Sapiens
PVSFVNWNTGDPS

SEQ ID NO: 100698 - protein, 13 aa, Homo Sapiens
VSFVNWNTGDPSG

SEQ ID NO: 100699 - protein, 13 aa, Homo Sapiens
SFVNWNTGDPSGE

SEQ ID NO: 100700 - protein, 13 aa, Homo Sapiens
FVNWNTGDPSGER

SEQ ID NO: 100701 - protein, 13 aa, Homo Sapiens
VNWNTGDPSGERN

SEQ ID NO: 100702 - protein, 13 aa, Homo Sapiens
NWNTGDPSGERND

SEQ ID NO: 100703 - protein, 13 aa, Homo Sapiens
WNTGDPSGERNDC

SEQ ID NO: 100704 - protein, 13 aa, Homo Sapiens
NTGDPSGERNDCV

SEQ ID NO: 100705 - protein, 13 aa, Homo Sapiens
TGDPSGERNDCVA

SEQ ID NO: 100706 - protein, 13 aa, Homo Sapiens
GDPSGERNDCVAL

SEQ ID NO: 100707 - protein, 13 aa, Homo Sapiens
DPSGERNDCVALH

SEQ ID NO: 100708 - protein, 13 aa, Homo Sapiens
PSGERNDCVALHA

SEQ ID NO: 100709 - protein, 13 aa, Homo Sapiens
SGERNDCVALHAS

SEQ ID NO: 100710 - protein, 13 aa, Homo Sapiens
GERNDCVALHASS

SEQ ID NO: 100711 - protein, 13 aa, Homo Sapiens
ERNDCVALHASSG

SEQ ID NO: 100712 - protein, 13 aa, Homo Sapiens
RNDCVALHASSGF

SEQ ID NO: 100713 - protein, 13 aa, Homo Sapiens
NDCVALHASSGFW

SEQ ID NO: 100714 - protein, 13 aa, Homo Sapiens
DCVALHASSGFWS

SEQ ID NO: 100715 - protein, 13 aa, Homo Sapiens
CVALHASSGFWSN

SEQ ID NO: 100716 - protein, 13 aa, Homo Sapiens
VALHASSGFWSNI

SEQ ID NO: 100717 - protein, 13 aa, Homo Sapiens
ALHASSGFWSNIH

SEQ ID NO: 100718 - protein, 13 aa, Homo Sapiens
LHASSGFWSNIHC

SEQ ID NO: 100719 - protein, 13 aa, Homo Sapiens
HASSGFWSNIHCS

SEQ ID NO: 100720 - protein, 13 aa, Homo Sapiens
ASSGFWSNIHCSS

SEQ ID NO: 100721 - protein, 13 aa, Homo Sapiens
SSGFWSNIHCSSY

SEQ ID NO: 100722 - protein, 13 aa, Homo Sapiens
SGFWSNIHCSSYK

SEQ ID NO: 100723 - protein, 13 aa, Homo Sapiens
GFWSNIHCSSYKG

SEQ ID NO: 100724 - protein, 13 aa, Homo Sapiens
FWSNIHCSSYKGY

SEQ ID NO: 100725 - protein, 13 aa, Homo Sapiens
WSNIHCSSYKGYI

SEQ ID NO: 100726 - protein, 13 aa, Homo Sapiens
SNIHCSSYKGYIC

SEQ ID NO: 100727 - protein, 13 aa, Homo Sapiens
NIHCSSYKGYICK

SEQ ID NO: 100728 - protein, 13 aa, Homo Sapiens
IHCSSYKGYICKR

SEQ ID NO: 100729 - protein, 13 aa, Homo Sapiens
HCSSYKGYICKRP

SEQ ID NO: 100730 - protein, 13 aa, Homo Sapiens
CSSYKGYICKRPK

SEQ ID NO: 100731 - protein, 13 aa, Homo Sapiens
SSYKGYICKRPKI

SEQ ID NO: 100732 - protein, 13 aa, Homo Sapiens
SYKGYICKRPKII

SEQ ID NO: 100733 - protein, 13 aa, Homo Sapiens
YKGYICKRPKIID

SEQ ID NO: 100734 - protein, 13 aa, Homo Sapiens
KGYICKRPKIIDA

SEQ ID NO: 100735 - protein, 13 aa, Homo Sapiens
GYICKRPKIIDAK

SEQ ID NO: 100736 - protein, 13 aa, Homo Sapiens
YICKRPKIIDAKP

SEQ ID NO: 100737 - protein, 13 aa, Homo Sapiens
ICKRPKIIDAKPT

SEQ ID NO: 100738 - protein, 13 aa, Homo Sapiens
CKRPKIIDAKPTH

SEQ ID NO: 100739 - protein, 13 aa, Homo Sapiens
KRPKIIDAKPTHE

SEQ ID NO: 100740 - protein, 13 aa, Homo Sapiens
RPKIIDAKPTHEL

SEQ ID NO: 100741 - protein, 13 aa, Homo Sapiens
PKIIDAKPTHELL

SEQ ID NO: 100742 - protein, 13 aa, Homo Sapiens
KIIDAKPTHELLT

SEQ ID NO: 100743 - protein, 13 aa, Homo Sapiens
IIDAKPTHELLTT

SEQ ID NO: 100744 - protein, 13 aa, Homo Sapiens
IDAKPTHELLTTK

SEQ ID NO: 100745 - protein, 13 aa, Homo Sapiens
DAKPTHELLTTKA

SEQ ID NO: 100746 - protein, 13 aa, Homo Sapiens
AKPTHELLTTKAD

SEQ ID NO: 100747 - protein, 13 aa, Homo Sapiens
KPTHELLTTKADT

SEQ ID NO: 100748 - protein, 13 aa, Homo Sapiens
PTHELLTTKADTR

SEQ ID NO: 100749 - protein, 13 aa, Homo Sapiens
THELLTTKADTRK

SEQ ID NO: 100750 - protein, 13 aa, Homo Sapiens
HELLTTKADTRKM

SEQ ID NO: 100751 - protein, 13 aa, Homo Sapiens
ELLTTKADTRKMD

SEQ ID NO: 100752 - protein, 13 aa, Homo Sapiens
LLTTKADTRKMDP

SEQ ID NO: 100753 - protein, 13 aa, Homo Sapiens
LTTKADTRKMDPS

SEQ ID NO: 100754 - protein, 13 aa, Homo Sapiens
TTKADTRKMDPSK

SEQ ID NO: 100755 - protein, 13 aa, Homo Sapiens
TKADTRKMDPSKP

SEQ ID NO: 100756 - protein, 13 aa, Homo Sapiens
KADTRKMDPSKPS

SEQ ID NO: 100757 - protein, 13 aa, Homo Sapiens
ADTRKMDPSKPSS

SEQ ID NO: 100758 - protein, 13 aa, Homo Sapiens
DTRKMDPSKPSSN

SEQ ID NO: 100759 - protein, 13 aa, Homo Sapiens
TRKMDPSKPSSNV

SEQ ID NO: 100760 - protein, 13 aa, Homo Sapiens
RKMDPSKPSSNVA

SEQ ID NO: 100761 - protein, 13 aa, Homo Sapiens
KMDPSKPSSNVAG

SEQ ID NO: 100762 - protein, 13 aa, Homo Sapiens
MDPSKPSSNVAGV

SEQ ID NO: 100763 - protein, 13 aa, Homo Sapiens
DPSKPSSNVAGVV

SEQ ID NO: 100764 - protein, 13 aa, Homo Sapiens
PSKPSSNVAGVVI

SEQ ID NO: 100765 - protein, 13 aa, Homo Sapiens
SKPSSNVAGVVII

SEQ ID NO: 100766 - protein, 13 aa, Homo Sapiens
KPSSNVAGVVIIV

SEQ ID NO: 100767 - protein, 13 aa, Homo Sapiens
PSSNVAGVVIIVI

SEQ ID NO: 100768 - protein, 13 aa, Homo Sapiens
SSNVAGVVIIVIL

SEQ ID NO: 100769 - protein, 13 aa, Homo Sapiens
SNVAGVVIIVILL

SEQ ID NO: 100770 - protein, 13 aa, Homo Sapiens
NVAGVVIIVILLI

SEQ ID NO: 100771 - protein, 13 aa, Homo Sapiens
VAGVVIIVILLIL

SEQ ID NO: 100772 - protein, 13 aa, Homo Sapiens
AGVVIIVILLILT

SEQ ID NO: 100773 - protein, 13 aa, Homo Sapiens
GVVIIVILLILTG

SEQ ID NO: 100774 - protein, 13 aa, Homo Sapiens
VVIIVILLILTGA

SEQ ID NO: 100775 - protein, 13 aa, Homo Sapiens
VIIVILLILTGAG

SEQ ID NO: 100776 - protein, 13 aa, Homo Sapiens
IIVILLILTGAGL

SEQ ID NO: 100777 - protein, 13 aa, Homo Sapiens
IVILLILTGAGLA

SEQ ID NO: 100778 - protein, 13 aa, Homo Sapiens
VILLILTGAGLAA

SEQ ID NO: 100779 - protein, 13 aa, Homo Sapiens
ILLILTGAGLAAY

SEQ ID NO: 100780 - protein, 13 aa, Homo Sapiens
LLILTGAGLAAYF

SEQ ID NO: 100781 - protein, 13 aa, Homo Sapiens
LILTGAGLAAYFF

SEQ ID NO: 100782 - protein, 13 aa, Homo Sapiens
ILTGAGLAAYFFY

SEQ ID NO: 100783 - protein, 13 aa, Homo Sapiens
LTGAGLAAYFFYK

SEQ ID NO: 100784 - protein, 13 aa, Homo Sapiens
TGAGLAAYFFYKK

SEQ ID NO: 100785 - protein, 13 aa, Homo Sapiens
GAGLAAYFFYKKR

SEQ ID NO: 100786 - protein, 13 aa, Homo Sapiens
AGLAAYFFYKKRR

SEQ ID NO: 100787 - protein, 13 aa, Homo Sapiens
GLAAYFFYKKRRV

SEQ ID NO: 100788 - protein, 13 aa, Homo Sapiens
LAAYFFYKKRRVH

SEQ ID NO: 100789 - protein, 13 aa, Homo Sapiens
AAYFFYKKRRVHL

SEQ ID NO: 100790 - protein, 13 aa, Homo Sapiens
AYFFYKKRRVHLP

SEQ ID NO: 100791 - protein, 13 aa, Homo Sapiens
YFFYKKRRVHLPQ

SEQ ID NO: 100792 - protein, 13 aa, Homo Sapiens
FFYKKRRVHLPQE

SEQ ID NO: 100793 - protein, 13 aa, Homo Sapiens
FYKKRRVHLPQEG

SEQ ID NO: 100794 - protein, 13 aa, Homo Sapiens
YKKRRVHLPQEGA

SEQ ID NO: 100795 - protein, 13 aa, Homo Sapiens
KKRRVHLPQEGAF

SEQ ID NO: 100796 - protein, 13 aa, Homo Sapiens
KRRVHLPQEGAFE

SEQ ID NO: 100797 - protein, 13 aa, Homo Sapiens
RRVHLPQEGAFEN

SEQ ID NO: 100798 - protein, 13 aa, Homo Sapiens
RVHLPQEGAFENT

SEQ ID NO: 100799 - protein, 13 aa, Homo Sapiens
VHLPQEGAFENTL

SEQ ID NO: 100800 - protein, 13 aa, Homo Sapiens
HLPQEGAFENTLY

SEQ ID NO: 100801 - protein, 13 aa, Homo Sapiens
LPQEGAFENTLYF

SEQ ID NO: 100802 - protein, 13 aa, Homo Sapiens
PQEGAFENTLYFN

SEQ ID NO: 100803 - protein, 13 aa, Homo Sapiens
QEGAFENTLYFNS

SEQ ID NO: 100804 - protein, 13 aa, Homo Sapiens
EGAFENTLYFNSQ

SEQ ID NO: 100805 - protein, 13 aa, Homo Sapiens
GAFENTLYFNSQS

SEQ ID NO: 100806 - protein, 13 aa, Homo Sapiens
AFENTLYFNSQSS

SEQ ID NO: 100807 - protein, 13 aa, Homo Sapiens
FENTLYFNSQSSP

SEQ ID NO: 100808 - protein, 13 aa, Homo Sapiens
ENTLYFNSQSSPG

SEQ ID NO: 100809 - protein, 13 aa, Homo Sapiens
NTLYFNSQSSPGT

SEQ ID NO: 100810 - protein, 13 aa, Homo Sapiens
TLYFNSQSSPGTS

SEQ ID NO: 100811 - protein, 13 aa, Homo Sapiens
LYFNSQSSPGTSD

SEQ ID NO: 100812 - protein, 13 aa, Homo Sapiens
YFNSQSSPGTSDM

SEQ ID NO: 100813 - protein, 13 aa, Homo Sapiens
FNSQSSPGTSDMK

SEQ ID NO: 100814 - protein, 13 aa, Homo Sapiens
NSQSSPGTSDMKD

SEQ ID NO: 100815 - protein, 13 aa, Homo Sapiens
SQSSPGTSDMKDL

SEQ ID NO: 100816 - protein, 13 aa, Homo Sapiens
QSSPGTSDMKDLV

SEQ ID NO: 100817 - protein, 13 aa, Homo Sapiens
SSPGTSDMKDLVG

SEQ ID NO: 100818 - protein, 13 aa, Homo Sapiens
SPGTSDMKDLVGN

SEQ ID NO: 100819 - protein, 13 aa, Homo Sapiens
PGTSDMKDLVGNI

SEQ ID NO: 100820 - protein, 13 aa, Homo Sapiens
GTSDMKDLVGNIE

SEQ ID NO: 100821 - protein, 13 aa, Homo Sapiens
TSDMKDLVGNIEQ

SEQ ID NO: 100822 - protein, 13 aa, Homo Sapiens
SDMKDLVGNIEQN

SEQ ID NO: 100823 - protein, 13 aa, Homo Sapiens
DMKDLVGNIEQNE

SEQ ID NO: 100824 - protein, 13 aa, Homo Sapiens
MKDLVGNIEQNEH

SEQ ID NO: 100825 - protein, 13 aa, Homo Sapiens
KDLVGNIEQNEHS

SEQ ID NO: 100826 - protein, 13 aa, Homo Sapiens
DLVGNIEQNEHSV

SEQ ID NO: 100827 - protein, 13 aa, Homo Sapiens
LVGNIEQNEHSVI

SEQ ID NO: 100828 - protein, 14 aa, Homo Sapiens
MRLPLLLVFASVIP

SEQ ID NO: 100829 - protein, 14 aa, Homo Sapiens
RLPLLLVFASVIPG

SEQ ID NO: 100830 - protein, 14 aa, Homo Sapiens
LPLLLVFASVIPGA

SEQ ID NO: 100831 - protein, 14 aa, Homo Sapiens
PLLLVFASVIPGAV

SEQ ID NO: 100832 - protein, 14 aa, Homo Sapiens
LLLVFASVIPGAVL

SEQ ID NO: 100833 - protein, 14 aa, Homo Sapiens
LLVFASVIPGAVLL

SEQ ID NO: 100834 - protein, 14 aa, Homo Sapiens
LVFASVIPGAVLLL

SEQ ID NO: 100835 - protein, 14 aa, Homo Sapiens
VFASVIPGAVLLLD

SEQ ID NO: 100836 - protein, 14 aa, Homo Sapiens
FASVIPGAVLLLDT

SEQ ID NO: 100837 - protein, 14 aa, Homo Sapiens
ASVIPGAVLLLDTR

SEQ ID NO: 100838 - protein, 14 aa, Homo Sapiens
SVIPGAVLLLDTRQ

SEQ ID NO: 100839 - protein, 14 aa, Homo Sapiens
VIPGAVLLLDTRQF

SEQ ID NO: 100840 - protein, 14 aa, Homo Sapiens
IPGAVLLLDTRQFL

SEQ ID NO: 100841 - protein, 14 aa, Homo Sapiens
PGAVLLLDTRQFLI

SEQ ID NO: 100842 - protein, 14 aa, Homo Sapiens
GAVLLLDTRQFLIY

SEQ ID NO: 100843 - protein, 14 aa, Homo Sapiens
AVLLLDTRQFLIYN

SEQ ID NO: 100844 - protein, 14 aa, Homo Sapiens
VLLLDTRQFLIYNE

SEQ ID NO: 100845 - protein, 14 aa, Homo Sapiens
LLLDTRQFLIYNED

SEQ ID NO: 100846 - protein, 14 aa, Homo Sapiens
LLDTRQFLIYNEDH

SEQ ID NO: 100847 - protein, 14 aa, Homo Sapiens
LDTRQFLIYNEDHK

SEQ ID NO: 100848 - protein, 14 aa, Homo Sapiens
DTRQFLIYNEDHKR

SEQ ID NO: 100849 - protein, 14 aa, Homo Sapiens
TRQFLIYNEDHKRC

SEQ ID NO: 100850 - protein, 14 aa, Homo Sapiens
RQFLIYNEDHKRCV

SEQ ID NO: 100851 - protein, 14 aa, Homo Sapiens
QFLIYNEDHKRCVD

SEQ ID NO: 100852 - protein, 14 aa, Homo Sapiens
FLIYNEDHKRCVDA

SEQ ID NO: 100853 - protein, 14 aa, Homo Sapiens
LIYNEDHKRCVDAV

SEQ ID NO: 100854 - protein, 14 aa, Homo Sapiens
IYNEDHKRCVDAVS

SEQ ID NO: 100855 - protein, 14 aa, Homo Sapiens
YNEDHKRCVDAVSP

SEQ ID NO: 100856 - protein, 14 aa, Homo Sapiens
NEDHKRCVDAVSPS

SEQ ID NO: 100857 - protein, 14 aa, Homo Sapiens
EDHKRCVDAVSPSA

SEQ ID NO: 100858 - protein, 14 aa, Homo Sapiens
DHKRCVDAVSPSAV

SEQ ID NO: 100859 - protein, 14 aa, Homo Sapiens
HKRCVDAVSPSAVQ

SEQ ID NO: 100860 - protein, 14 aa, Homo Sapiens
KRCVDAVSPSAVQT

SEQ ID NO: 100861 - protein, 14 aa, Homo Sapiens
RCVDAVSPSAVQTA

SEQ ID NO: 100862 - protein, 14 aa, Homo Sapiens
CVDAVSPSAVQTAA

SEQ ID NO: 100863 - protein, 14 aa, Homo Sapiens
VDAVSPSAVQTAAC

SEQ ID NO: 100864 - protein, 14 aa, Homo Sapiens
DAVSPSAVQTAACN

SEQ ID NO: 100865 - protein, 14 aa, Homo Sapiens
AVSPSAVQTAACNQ

SEQ ID NO: 100866 - protein, 14 aa, Homo Sapiens
VSPSAVQTAACNQD

SEQ ID NO: 100867 - protein, 14 aa, Homo Sapiens
SPSAVQTAACNQDA

SEQ ID NO: 100868 - protein, 14 aa, Homo Sapiens
PSAVQTAACNQDAE

SEQ ID NO: 100869 - protein, 14 aa, Homo Sapiens
SAVQTAACNQDAES

SEQ ID NO: 100870 - protein, 14 aa, Homo Sapiens
AVQTAACNQDAESQ

SEQ ID NO: 100871 - protein, 14 aa, Homo Sapiens
VQTAACNQDAESQK

SEQ ID NO: 100872 - protein, 14 aa, Homo Sapiens
QTAACNQDAESQKF

SEQ ID NO: 100873 - protein, 14 aa, Homo Sapiens
TAACNQDAESQKFR

SEQ ID NO: 100874 - protein, 14 aa, Homo Sapiens
AACNQDAESQKFRW

SEQ ID NO: 100875 - protein, 14 aa, Homo Sapiens
ACNQDAESQKFRWV

SEQ ID NO: 100876 - protein, 14 aa, Homo Sapiens
CNQDAESQKFRWVS

SEQ ID NO: 100877 - protein, 14 aa, Homo Sapiens
NQDAESQKFRWVSE

SEQ ID NO: 100878 - protein, 14 aa, Homo Sapiens
QDAESQKFRWVSES

SEQ ID NO: 100879 - protein, 14 aa, Homo Sapiens
DAESQKFRWVSESQ

SEQ ID NO: 100880 - protein, 14 aa, Homo Sapiens
AESQKFRWVSESQI

SEQ ID NO: 100881 - protein, 14 aa, Homo Sapiens
ESQKFRWVSESQIM

SEQ ID NO: 100882 - protein, 14 aa, Homo Sapiens
SQKFRWVSESQIMS

SEQ ID NO: 100883 - protein, 14 aa, Homo Sapiens
QKFRWVSESQIMSV

SEQ ID NO: 100884 - protein, 14 aa, Homo Sapiens
KFRWVSESQIMSVA

SEQ ID NO: 100885 - protein, 14 aa, Homo Sapiens
FRWVSESQIMSVAF

SEQ ID NO: 100886 - protein, 14 aa, Homo Sapiens
RWVSESQIMSVAFK

SEQ ID NO: 100887 - protein, 14 aa, Homo Sapiens
WVSESQIMSVAFKL

SEQ ID NO: 100888 - protein, 14 aa, Homo Sapiens
VSESQIMSVAFKLC

SEQ ID NO: 100889 - protein, 14 aa, Homo Sapiens
SESQIMSVAFKLCL

SEQ ID NO: 100890 - protein, 14 aa, Homo Sapiens
ESQIMSVAFKLCLG

SEQ ID NO: 100891 - protein, 14 aa, Homo Sapiens
SQIMSVAFKLCLGV

SEQ ID NO: 100892 - protein, 14 aa, Homo Sapiens
QIMSVAFKLCLGVP

SEQ ID NO: 100893 - protein, 14 aa, Homo Sapiens
IMSVAFKLCLGVPS

SEQ ID NO: 100894 - protein, 14 aa, Homo Sapiens
MSVAFKLCLGVPSK

SEQ ID NO: 100895 - protein, 14 aa, Homo Sapiens
SVAFKLCLGVPSKT

SEQ ID NO: 100896 - protein, 14 aa, Homo Sapiens
VAFKLCLGVPSKTD

SEQ ID NO: 100897 - protein, 14 aa, Homo Sapiens
AFKLCLGVPSKTDW

SEQ ID NO: 100898 - protein, 14 aa, Homo Sapiens
FKLCLGVPSKTDWV

SEQ ID NO: 100899 - protein, 14 aa, Homo Sapiens
KLCLGVPSKTDWVA

SEQ ID NO: 100900 - protein, 14 aa, Homo Sapiens
LCLGVPSKTDWVAI

SEQ ID NO: 100901 - protein, 14 aa, Homo Sapiens
CLGVPSKTDWVAIT

SEQ ID NO: 100902 - protein, 14 aa, Homo Sapiens
LGVPSKTDWVAITL

SEQ ID NO: 100903 - protein, 14 aa, Homo Sapiens
GVPSKTDWVAITLY

SEQ ID NO: 100904 - protein, 14 aa, Homo Sapiens
VPSKTDWVAITLYA

SEQ ID NO: 100905 - protein, 14 aa, Homo Sapiens
PSKTDWVAITLYAC

SEQ ID NO: 100906 - protein, 14 aa, Homo Sapiens
SKTDWVAITLYACD

SEQ ID NO: 100907 - protein, 14 aa, Homo Sapiens
KTDWVAITLYACDS

SEQ ID NO: 100908 - protein, 14 aa, Homo Sapiens
TDWVAITLYACDSK

SEQ ID NO: 100909 - protein, 14 aa, Homo Sapiens
DWVAITLYACDSKS

SEQ ID NO: 100910 - protein, 14 aa, Homo Sapiens
WVAITLYACDSKSE

SEQ ID NO: 100911 - protein, 14 aa, Homo Sapiens
VAITLYACDSKSEF

SEQ ID NO: 100912 - protein, 14 aa, Homo Sapiens
AITLYACDSKSEFQ

SEQ ID NO: 100913 - protein, 14 aa, Homo Sapiens
ITLYACDSKSEFQK

SEQ ID NO: 100914 - protein, 14 aa, Homo Sapiens
TLYACDSKSEFQKW

SEQ ID NO: 100915 - protein, 14 aa, Homo Sapiens
LYACDSKSEFQKWE

SEQ ID NO: 100916 - protein, 14 aa, Homo Sapiens
YACDSKSEFQKWEC

SEQ ID NO: 100917 - protein, 14 aa, Homo Sapiens
ACDSKSEFQKWECK

SEQ ID NO: 100918 - protein, 14 aa, Homo Sapiens
CDSKSEFQKWECKN

SEQ ID NO: 100919 - protein, 14 aa, Homo Sapiens
DSKSEFQKWECKND

SEQ ID NO: 100920 - protein, 14 aa, Homo Sapiens
SKSEFQKWECKNDT

SEQ ID NO: 100921 - protein, 14 aa, Homo Sapiens
KSEFQKWECKNDTL

SEQ ID NO: 100922 - protein, 14 aa, Homo Sapiens
SEFQKWECKNDTLL

SEQ ID NO: 100923 - protein, 14 aa, Homo Sapiens
EFQKWECKNDTLLG

SEQ ID NO: 100924 - protein, 14 aa, Homo Sapiens
FQKWECKNDTLLGI

SEQ ID NO: 100925 - protein, 14 aa, Homo Sapiens
QKWECKNDTLLGIK

SEQ ID NO: 100926 - protein, 14 aa, Homo Sapiens
KWECKNDTLLGIKG

SEQ ID NO: 100927 - protein, 14 aa, Homo Sapiens
WECKNDTLLGIKGE

SEQ ID NO: 100928 - protein, 14 aa, Homo Sapiens
ECKNDTLLGIKGED

SEQ ID NO: 100929 - protein, 14 aa, Homo Sapiens
CKNDTLLGIKGEDL

SEQ ID NO: 100930 - protein, 14 aa, Homo Sapiens
KNDTLLGIKGEDLF

SEQ ID NO: 100931 - protein, 14 aa, Homo Sapiens
NDTLLGIKGEDLFF

SEQ ID NO: 100932 - protein, 14 aa, Homo Sapiens
DTLLGIKGEDLFFN

SEQ ID NO: 100933 - protein, 14 aa, Homo Sapiens
TLLGIKGEDLFFNY

SEQ ID NO: 100934 - protein, 14 aa, Homo Sapiens
LLGIKGEDLFFNYG

SEQ ID NO: 100935 - protein, 14 aa, Homo Sapiens
LGIKGEDLFFNYGN

SEQ ID NO: 100936 - protein, 14 aa, Homo Sapiens
GIKGEDLFFNYGNR

SEQ ID NO: 100937 - protein, 14 aa, Homo Sapiens
IKGEDLFFNYGNRQ

SEQ ID NO: 100938 - protein, 14 aa, Homo Sapiens
KGEDLFFNYGNRQE

SEQ ID NO: 100939 - protein, 14 aa, Homo Sapiens
GEDLFFNYGNRQEK

SEQ ID NO: 100940 - protein, 14 aa, Homo Sapiens
EDLFFNYGNRQEKN

SEQ ID NO: 100941 - protein, 14 aa, Homo Sapiens
DLFFNYGNRQEKNI

SEQ ID NO: 100942 - protein, 14 aa, Homo Sapiens
LFFNYGNRQEKNIM

SEQ ID NO: 100943 - protein, 14 aa, Homo Sapiens
FFNYGNRQEKNIML

SEQ ID NO: 100944 - protein, 14 aa, Homo Sapiens
FNYGNRQEKNIMLY

SEQ ID NO: 100945 - protein, 14 aa, Homo Sapiens
NYGNRQEKNIMLYK

SEQ ID NO: 100946 - protein, 14 aa, Homo Sapiens
YGNRQEKNIMLYKG

SEQ ID NO: 100947 - protein, 14 aa, Homo Sapiens
GNRQEKNIMLYKGS

SEQ ID NO: 100948 - protein, 14 aa, Homo Sapiens
NRQEKNIMLYKGSG

SEQ ID NO: 100949 - protein, 14 aa, Homo Sapiens
RQEKNIMLYKGSGL

SEQ ID NO: 100950 - protein, 14 aa, Homo Sapiens
QEKNIMLYKGSGLW

SEQ ID NO: 100951 - protein, 14 aa, Homo Sapiens
EKNIMLYKGSGLWS

SEQ ID NO: 100952 - protein, 14 aa, Homo Sapiens
KNIMLYKGSGLWSR

SEQ ID NO: 100953 - protein, 14 aa, Homo Sapiens
NIMLYKGSGLWSRW

SEQ ID NO: 100954 - protein, 14 aa, Homo Sapiens
IMLYKGSGLWSRWK

SEQ ID NO: 100955 - protein, 14 aa, Homo Sapiens
MLYKGSGLWSRWKI

SEQ ID NO: 100956 - protein, 14 aa, Homo Sapiens
LYKGSGLWSRWKIY

SEQ ID NO: 100957 - protein, 14 aa, Homo Sapiens
YKGSGLWSRWKIYG

SEQ ID NO: 100958 - protein, 14 aa, Homo Sapiens
KGSGLWSRWKIYGT

SEQ ID NO: 100959 - protein, 14 aa, Homo Sapiens
GSGLWSRWKIYGTT

SEQ ID NO: 100960 - protein, 14 aa, Homo Sapiens
SGLWSRWKIYGTTD

SEQ ID NO: 100961 - protein, 14 aa, Homo Sapiens
GLWSRWKIYGTTDN

SEQ ID NO: 100962 - protein, 14 aa, Homo Sapiens
LWSRWKIYGTTDNL

SEQ ID NO: 100963 - protein, 14 aa, Homo Sapiens
WSRWKIYGTTDNLC

SEQ ID NO: 100964 - protein, 14 aa, Homo Sapiens
SRWKIYGTTDNLCS

SEQ ID NO: 100965 - protein, 14 aa, Homo Sapiens
RWKIYGTTDNLCSR

SEQ ID NO: 100966 - protein, 14 aa, Homo Sapiens
WKIYGTTDNLCSRG

SEQ ID NO: 100967 - protein, 14 aa, Homo Sapiens
KIYGTTDNLCSRGY

SEQ ID NO: 100968 - protein, 14 aa, Homo Sapiens
IYGTTDNLCSRGYE

SEQ ID NO: 100969 - protein, 14 aa, Homo Sapiens
YGTTDNLCSRGYEA

SEQ ID NO: 100970 - protein, 14 aa, Homo Sapiens
GTTDNLCSRGYEAM

SEQ ID NO: 100971 - protein, 14 aa, Homo Sapiens
TTDNLCSRGYEAMY

SEQ ID NO: 100972 - protein, 14 aa, Homo Sapiens
TDNLCSRGYEAMYT

SEQ ID NO: 100973 - protein, 14 aa, Homo Sapiens
DNLCSRGYEAMYTL

SEQ ID NO: 100974 - protein, 14 aa, Homo Sapiens
NLCSRGYEAMYTLL

SEQ ID NO: 100975 - protein, 14 aa, Homo Sapiens
LCSRGYEAMYTLLG

SEQ ID NO: 100976 - protein, 14 aa, Homo Sapiens
CSRGYEAMYTLLGN

SEQ ID NO: 100977 - protein, 14 aa, Homo Sapiens
SRGYEAMYTLLGNA

SEQ ID NO: 100978 - protein, 14 aa, Homo Sapiens
RGYEAMYTLLGNAN

SEQ ID NO: 100979 - protein, 14 aa, Homo Sapiens
GYEAMYTLLGNANG

SEQ ID NO: 100980 - protein, 14 aa, Homo Sapiens
YEAMYTLLGNANGA

SEQ ID NO: 100981 - protein, 14 aa, Homo Sapiens
EAMYTLLGNANGAT

SEQ ID NO: 100982 - protein, 14 aa, Homo Sapiens
AMYTLLGNANGATC

SEQ ID NO: 100983 - protein, 14 aa, Homo Sapiens
MYTLLGNANGATCA

SEQ ID NO: 100984 - protein, 14 aa, Homo Sapiens
YTLLGNANGATCAF

SEQ ID NO: 100985 - protein, 14 aa, Homo Sapiens
TLLGNANGATCAFP

SEQ ID NO: 100986 - protein, 14 aa, Homo Sapiens
LLGNANGATCAFPF

SEQ ID NO: 100987 - protein, 14 aa, Homo Sapiens
LGNANGATCAFPFK

SEQ ID NO: 100988 - protein, 14 aa, Homo Sapiens
GNANGATCAFPFKF

SEQ ID NO: 100989 - protein, 14 aa, Homo Sapiens
NANGATCAFPFKFE

SEQ ID NO: 100990 - protein, 14 aa, Homo Sapiens
ANGATCAFPFKFEN

SEQ ID NO: 100991 - protein, 14 aa, Homo Sapiens
NGATCAFPFKFENK

SEQ ID NO: 100992 - protein, 14 aa, Homo Sapiens
GATCAFPFKFENKW

SEQ ID NO: 100993 - protein, 14 aa, Homo Sapiens
ATCAFPFKFENKWY

SEQ ID NO: 100994 - protein, 14 aa, Homo Sapiens
TCAFPFKFENKWYA

SEQ ID NO: 100995 - protein, 14 aa, Homo Sapiens
CAFPFKFENKWYAD

SEQ ID NO: 100996 - protein, 14 aa, Homo Sapiens
AFPFKFENKWYADC

SEQ ID NO: 100997 - protein, 14 aa, Homo Sapiens
FPFKFENKWYADCT

SEQ ID NO: 100998 - protein, 14 aa, Homo Sapiens
PFKFENKWYADCTS

SEQ ID NO: 100999 - protein, 14 aa, Homo Sapiens
FKFENKWYADCTSA

SEQ ID NO: 101000 - protein, 14 aa, Homo Sapiens
KFENKWYADCTSAG

SEQ ID NO: 101001 - protein, 14 aa, Homo Sapiens
FENKWYADCTSAGR

SEQ ID NO: 101002 - protein, 14 aa, Homo Sapiens
ENKWYADCTSAGRS

SEQ ID NO: 101003 - protein, 14 aa, Homo Sapiens
NKWYADCTSAGRSD

SEQ ID NO: 101004 - protein, 14 aa, Homo Sapiens
KWYADCTSAGRSDG

SEQ ID NO: 101005 - protein, 14 aa, Homo Sapiens
WYADCTSAGRSDGW

SEQ ID NO: 101006 - protein, 14 aa, Homo Sapiens
YADCTSAGRSDGWL

SEQ ID NO: 101007 - protein, 14 aa, Homo Sapiens
ADCTSAGRSDGWLW

SEQ ID NO: 101008 - protein, 14 aa, Homo Sapiens
DCTSAGRSDGWLWC

SEQ ID NO: 101009 - protein, 14 aa, Homo Sapiens
CTSAGRSDGWLWCG

SEQ ID NO: 101010 - protein, 14 aa, Homo Sapiens
TSAGRSDGWLWCGT

SEQ ID NO: 101011 - protein, 14 aa, Homo Sapiens
SAGRSDGWLWCGTT

SEQ ID NO: 101012 - protein, 14 aa, Homo Sapiens
AGRSDGWLWCGTTT

SEQ ID NO: 101013 - protein, 14 aa, Homo Sapiens
GRSDGWLWCGTTTD

SEQ ID NO: 101014 - protein, 14 aa, Homo Sapiens
RSDGWLWCGTTTDY

SEQ ID NO: 101015 - protein, 14 aa, Homo Sapiens
SDGWLWCGTTTDYD

SEQ ID NO: 101016 - protein, 14 aa, Homo Sapiens
DGWLWCGTTTDYDT

SEQ ID NO: 101017 - protein, 14 aa, Homo Sapiens
GWLWCGTTTDYDTD

SEQ ID NO: 101018 - protein, 14 aa, Homo Sapiens
WLWCGTTTDYDTDK

SEQ ID NO: 101019 - protein, 14 aa, Homo Sapiens
LWCGTTTDYDTDKL

SEQ ID NO: 101020 - protein, 14 aa, Homo Sapiens
WCGTTTDYDTDKLF

SEQ ID NO: 101021 - protein, 14 aa, Homo Sapiens
CGTTTDYDTDKLFG

SEQ ID NO: 101022 - protein, 14 aa, Homo Sapiens
GTTTDYDTDKLFGY

SEQ ID NO: 101023 - protein, 14 aa, Homo Sapiens
TTTDYDTDKLFGYC

SEQ ID NO: 101024 - protein, 14 aa, Homo Sapiens
TTDYDTDKLFGYCP

SEQ ID NO: 101025 - protein, 14 aa, Homo Sapiens
TDYDTDKLFGYCPL

SEQ ID NO: 101026 - protein, 14 aa, Homo Sapiens
DYDTDKLFGYCPLK

SEQ ID NO: 101027 - protein, 14 aa, Homo Sapiens
YDTDKLFGYCPLKF

SEQ ID NO: 101028 - protein, 14 aa, Homo Sapiens
DTDKLFGYCPLKFE

SEQ ID NO: 101029 - protein, 14 aa, Homo Sapiens
TDKLFGYCPLKFEG

SEQ ID NO: 101030 - protein, 14 aa, Homo Sapiens
DKLFGYCPLKFEGS

SEQ ID NO: 101031 - protein, 14 aa, Homo Sapiens
KLFGYCPLKFEGSE

SEQ ID NO: 101032 - protein, 14 aa, Homo Sapiens
LFGYCPLKFEGSES

SEQ ID NO: 101033 - protein, 14 aa, Homo Sapiens
FGYCPLKFEGSESL

SEQ ID NO: 101034 - protein, 14 aa, Homo Sapiens
GYCPLKFEGSESLW

SEQ ID NO: 101035 - protein, 14 aa, Homo Sapiens
YCPLKFEGSESLWN

SEQ ID NO: 101036 - protein, 14 aa, Homo Sapiens
CPLKFEGSESLWNK

SEQ ID NO: 101037 - protein, 14 aa, Homo Sapiens
PLKFEGSESLWNKD

SEQ ID NO: 101038 - protein, 14 aa, Homo Sapiens
LKFEGSESLWNKDP

SEQ ID NO: 101039 - protein, 14 aa, Homo Sapiens
KFEGSESLWNKDPL

SEQ ID NO: 101040 - protein, 14 aa, Homo Sapiens
FEGSESLWNKDPLT

SEQ ID NO: 101041 - protein, 14 aa, Homo Sapiens
EGSESLWNKDPLTS

SEQ ID NO: 101042 - protein, 14 aa, Homo Sapiens
GSESLWNKDPLTSV

SEQ ID NO: 101043 - protein, 14 aa, Homo Sapiens
SESLWNKDPLTSVS

SEQ ID NO: 101044 - protein, 14 aa, Homo Sapiens
ESLWNKDPLTSVSY

SEQ ID NO: 101045 - protein, 14 aa, Homo Sapiens
SLWNKDPLTSVSYQ

SEQ ID NO: 101046 - protein, 14 aa, Homo Sapiens
LWNKDPLTSVSYQI

SEQ ID NO: 101047 - protein, 14 aa, Homo Sapiens
WNKDPLTSVSYQIN

SEQ ID NO: 101048 - protein, 14 aa, Homo Sapiens
NKDPLTSVSYQINS

SEQ ID NO: 101049 - protein, 14 aa, Homo Sapiens
KDPLTSVSYQINSK

SEQ ID NO: 101050 - protein, 14 aa, Homo Sapiens
DPLTSVSYQINSKS

SEQ ID NO: 101051 - protein, 14 aa, Homo Sapiens
PLTSVSYQINSKSA

SEQ ID NO: 101052 - protein, 14 aa, Homo Sapiens
LTSVSYQINSKSAL

SEQ ID NO: 101053 - protein, 14 aa, Homo Sapiens
TSVSYQINSKSALS

SEQ ID NO: 101054 - protein, 14 aa, Homo Sapiens
SVSYQINSKSALSW

SEQ ID NO: 101055 - protein, 14 aa, Homo Sapiens
VSYQINSKSALSWH

SEQ ID NO: 101056 - protein, 14 aa, Homo Sapiens
SYQINSKSALSWHQ

SEQ ID NO: 101057 - protein, 14 aa, Homo Sapiens
YQINSKSALSWHQA

SEQ ID NO: 101058 - protein, 14 aa, Homo Sapiens
QINSKSALSWHQAR

SEQ ID NO: 101059 - protein, 14 aa, Homo Sapiens
INSKSALSWHQARK

SEQ ID NO: 101060 - protein, 14 aa, Homo Sapiens
NSKSALSWHQARKS

SEQ ID NO: 101061 - protein, 14 aa, Homo Sapiens
SKSALSWHQARKSC

SEQ ID NO: 101062 - protein, 14 aa, Homo Sapiens
KSALSWHQARKSCQ

SEQ ID NO: 101063 - protein, 14 aa, Homo Sapiens
SALSWHQARKSCQQ

SEQ ID NO: 101064 - protein, 14 aa, Homo Sapiens
ALSWHQARKSCQQQ

SEQ ID NO: 101065 - protein, 14 aa, Homo Sapiens
LSWHQARKSCQQQN

SEQ ID NO: 101066 - protein, 14 aa, Homo Sapiens
SWHQARKSCQQQNA

SEQ ID NO: 101067 - protein, 14 aa, Homo Sapiens
WHQARKSCQQQNAE

SEQ ID NO: 101068 - protein, 14 aa, Homo Sapiens
HQARKSCQQQNAEL

SEQ ID NO: 101069 - protein, 14 aa, Homo Sapiens
QARKSCQQQNAELL

SEQ ID NO: 101070 - protein, 14 aa, Homo Sapiens
ARKSCQQQNAELLS

SEQ ID NO: 101071 - protein, 14 aa, Homo Sapiens
RKSCQQQNAELLSI

SEQ ID NO: 101072 - protein, 14 aa, Homo Sapiens
KSCQQQNAELLSIT

SEQ ID NO: 101073 - protein, 14 aa, Homo Sapiens
SCQQQNAELLSITE

SEQ ID NO: 101074 - protein, 14 aa, Homo Sapiens
CQQQNAELLSITEI

SEQ ID NO: 101075 - protein, 14 aa, Homo Sapiens
QQQNAELLSITEIH

SEQ ID NO: 101076 - protein, 14 aa, Homo Sapiens
QQNAELLSITEIHE

SEQ ID NO: 101077 - protein, 14 aa, Homo Sapiens
QNAELLSITEIHEQ

SEQ ID NO: 101078 - protein, 14 aa, Homo Sapiens
NAELLSITEIHEQT

SEQ ID NO: 101079 - protein, 14 aa, Homo Sapiens
AELLSITEIHEQTY

SEQ ID NO: 101080 - protein, 14 aa, Homo Sapiens
ELLSITEIHEQTYL

SEQ ID NO: 101081 - protein, 14 aa, Homo Sapiens
LLSITEIHEQTYLT

SEQ ID NO: 101082 - protein, 14 aa, Homo Sapiens
LSITEIHEQTYLTG

SEQ ID NO: 101083 - protein, 14 aa, Homo Sapiens
SITEIHEQTYLTGL

SEQ ID NO: 101084 - protein, 14 aa, Homo Sapiens
ITEIHEQTYLTGLT

SEQ ID NO: 101085 - protein, 14 aa, Homo Sapiens
TEIHEQTYLTGLTS

SEQ ID NO: 101086 - protein, 14 aa, Homo Sapiens
EIHEQTYLTGLTSS

SEQ ID NO: 101087 - protein, 14 aa, Homo Sapiens
IHEQTYLTGLTSSL

SEQ ID NO: 101088 - protein, 14 aa, Homo Sapiens
HEQTYLTGLTSSLT

SEQ ID NO: 101089 - protein, 14 aa, Homo Sapiens
EQTYLTGLTSSLTS

SEQ ID NO: 101090 - protein, 14 aa, Homo Sapiens
QTYLTGLTSSLTSG

SEQ ID NO: 101091 - protein, 14 aa, Homo Sapiens
TYLTGLTSSLTSGL

SEQ ID NO: 101092 - protein, 14 aa, Homo Sapiens
YLTGLTSSLTSGLW

SEQ ID NO: 101093 - protein, 14 aa, Homo Sapiens
LTGLTSSLTSGLWI

SEQ ID NO: 101094 - protein, 14 aa, Homo Sapiens
TGLTSSLTSGLWIG

SEQ ID NO: 101095 - protein, 14 aa, Homo Sapiens
GLTSSLTSGLWIGL

SEQ ID NO: 101096 - protein, 14 aa, Homo Sapiens
LTSSLTSGLWIGLN

SEQ ID NO: 101097 - protein, 14 aa, Homo Sapiens
TSSLTSGLWIGLNS

SEQ ID NO: 101098 - protein, 14 aa, Homo Sapiens
SSLTSGLWIGLNSL

SEQ ID NO: 101099 - protein, 14 aa, Homo Sapiens
SLTSGLWIGLNSLS

SEQ ID NO: 101100 - protein, 14 aa, Homo Sapiens
LTSGLWIGLNSLSF

SEQ ID NO: 101101 - protein, 14 aa, Homo Sapiens
TSGLWIGLNSLSFN

SEQ ID NO: 101102 - protein, 14 aa, Homo Sapiens
SGLWIGLNSLSFNS

SEQ ID NO: 101103 - protein, 14 aa, Homo Sapiens
GLWIGLNSLSFNSG

SEQ ID NO: 101104 - protein, 14 aa, Homo Sapiens
LWIGLNSLSFNSGW

SEQ ID NO: 101105 - protein, 14 aa, Homo Sapiens
WIGLNSLSFNSGWQ

SEQ ID NO: 101106 - protein, 14 aa, Homo Sapiens
IGLNSLSFNSGWQW

SEQ ID NO: 101107 - protein, 14 aa, Homo Sapiens
GLNSLSFNSGWQWS

SEQ ID NO: 101108 - protein, 14 aa, Homo Sapiens
LNSLSFNSGWQWSD

SEQ ID NO: 101109 - protein, 14 aa, Homo Sapiens
NSLSFNSGWQWSDR

SEQ ID NO: 101110 - protein, 14 aa, Homo Sapiens
SLSFNSGWQWSDRS

SEQ ID NO: 101111 - protein, 14 aa, Homo Sapiens
LSFNSGWQWSDRSP

SEQ ID NO: 101112 - protein, 14 aa, Homo Sapiens
SFNSGWQWSDRSPF

SEQ ID NO: 101113 - protein, 14 aa, Homo Sapiens
FNSGWQWSDRSPFR

SEQ ID NO: 101114 - protein, 14 aa, Homo Sapiens
NSGWQWSDRSPFRY

SEQ ID NO: 101115 - protein, 14 aa, Homo Sapiens
SGWQWSDRSPFRYL

SEQ ID NO: 101116 - protein, 14 aa, Homo Sapiens
GWQWSDRSPFRYLN

SEQ ID NO: 101117 - protein, 14 aa, Homo Sapiens
WQWSDRSPFRYLNW

SEQ ID NO: 101118 - protein, 14 aa, Homo Sapiens
QWSDRSPFRYLNWL

SEQ ID NO: 101119 - protein, 14 aa, Homo Sapiens
WSDRSPFRYLNWLP

SEQ ID NO: 101120 - protein, 14 aa, Homo Sapiens
SDRSPFRYLNWLPG

SEQ ID NO: 101121 - protein, 14 aa, Homo Sapiens
DRSPFRYLNWLPGS

SEQ ID NO: 101122 - protein, 14 aa, Homo Sapiens
RSPFRYLNWLPGSP

SEQ ID NO: 101123 - protein, 14 aa, Homo Sapiens
SPFRYLNWLPGSPS

SEQ ID NO: 101124 - protein, 14 aa, Homo Sapiens
PFRYLNWLPGSPSA

SEQ ID NO: 101125 - protein, 14 aa, Homo Sapiens
FRYLNWLPGSPSAE

SEQ ID NO: 101126 - protein, 14 aa, Homo Sapiens
RYLNWLPGSPSAEP

SEQ ID NO: 101127 - protein, 14 aa, Homo Sapiens
YLNWLPGSPSAEPG

SEQ ID NO: 101128 - protein, 14 aa, Homo Sapiens
LNWLPGSPSAEPGK

SEQ ID NO: 101129 - protein, 14 aa, Homo Sapiens
NWLPGSPSAEPGKS

SEQ ID NO: 101130 - protein, 14 aa, Homo Sapiens
WLPGSPSAEPGKSC

SEQ ID NO: 101131 - protein, 14 aa, Homo Sapiens
LPGSPSAEPGKSCV

SEQ ID NO: 101132 - protein, 14 aa, Homo Sapiens
PGSPSAEPGKSCVS

SEQ ID NO: 101133 - protein, 14 aa, Homo Sapiens
GSPSAEPGKSCVSL

SEQ ID NO: 101134 - protein, 14 aa, Homo Sapiens
SPSAEPGKSCVSLN

SEQ ID NO: 101135 - protein, 14 aa, Homo Sapiens
PSAEPGKSCVSLNP

SEQ ID NO: 101136 - protein, 14 aa, Homo Sapiens
SAEPGKSCVSLNPG

SEQ ID NO: 101137 - protein, 14 aa, Homo Sapiens
AEPGKSCVSLNPGK

SEQ ID NO: 101138 - protein, 14 aa, Homo Sapiens
EPGKSCVSLNPGKN

SEQ ID NO: 101139 - protein, 14 aa, Homo Sapiens
PGKSCVSLNPGKNA

SEQ ID NO: 101140 - protein, 14 aa, Homo Sapiens
GKSCVSLNPGKNAK

SEQ ID NO: 101141 - protein, 14 aa, Homo Sapiens
KSCVSLNPGKNAKW

SEQ ID NO: 101142 - protein, 14 aa, Homo Sapiens
SCVSLNPGKNAKWE

SEQ ID NO: 101143 - protein, 14 aa, Homo Sapiens
CVSLNPGKNAKWEN

SEQ ID NO: 101144 - protein, 14 aa, Homo Sapiens
VSLNPGKNAKWENL

SEQ ID NO: 101145 - protein, 14 aa, Homo Sapiens
SLNPGKNAKWENLE

SEQ ID NO: 101146 - protein, 14 aa, Homo Sapiens
LNPGKNAKWENLEC

SEQ ID NO: 101147 - protein, 14 aa, Homo Sapiens
NPGKNAKWENLECV

SEQ ID NO: 101148 - protein, 14 aa, Homo Sapiens
PGKNAKWENLECVQ

SEQ ID NO: 101149 - protein, 14 aa, Homo Sapiens
GKNAKWENLECVQK

SEQ ID NO: 101150 - protein, 14 aa, Homo Sapiens
KNAKWENLECVQKL

SEQ ID NO: 101151 - protein, 14 aa, Homo Sapiens
NAKWENLECVQKLG

SEQ ID NO: 101152 - protein, 14 aa, Homo Sapiens
AKWENLECVQKLGY

SEQ ID NO: 101153 - protein, 14 aa, Homo Sapiens
KWENLECVQKLGYI

SEQ ID NO: 101154 - protein, 14 aa, Homo Sapiens
WENLECVQKLGYIC

SEQ ID NO: 101155 - protein, 14 aa, Homo Sapiens
ENLECVQKLGYICK

SEQ ID NO: 101156 - protein, 14 aa, Homo Sapiens
NLECVQKLGYICKK

SEQ ID NO: 101157 - protein, 14 aa, Homo Sapiens
LECVQKLGYICKKG

SEQ ID NO: 101158 - protein, 14 aa, Homo Sapiens
ECVQKLGYICKKGN

SEQ ID NO: 101159 - protein, 14 aa, Homo Sapiens
CVQKLGYICKKGNT

SEQ ID NO: 101160 - protein, 14 aa, Homo Sapiens
VQKLGYICKKGNTT

SEQ ID NO: 101161 - protein, 14 aa, Homo Sapiens
QKLGYICKKGNTTL

SEQ ID NO: 101162 - protein, 14 aa, Homo Sapiens
KLGYICKKGNTTLN

SEQ ID NO: 101163 - protein, 14 aa, Homo Sapiens
LGYICKKGNTTLNS

SEQ ID NO: 101164 - protein, 14 aa, Homo Sapiens
GYICKKGNTTLNSF

SEQ ID NO: 101165 - protein, 14 aa, Homo Sapiens
YICKKGNTTLNSFV

SEQ ID NO: 101166 - protein, 14 aa, Homo Sapiens
ICKKGNTTLNSFVI

SEQ ID NO: 101167 - protein, 14 aa, Homo Sapiens
CKKGNTTLNSFVIP

SEQ ID NO: 101168 - protein, 14 aa, Homo Sapiens
KKGNTTLNSFVIPS

SEQ ID NO: 101169 - protein, 14 aa, Homo Sapiens
KGNTTLNSFVIPSE

SEQ ID NO: 101170 - protein, 14 aa, Homo Sapiens
GNTTLNSFVIPSES

SEQ ID NO: 101171 - protein, 14 aa, Homo Sapiens
NTTLNSFVIPSESD

SEQ ID NO: 101172 - protein, 14 aa, Homo Sapiens
TTLNSFVIPSESDV

SEQ ID NO: 101173 - protein, 14 aa, Homo Sapiens
TLNSFVIPSESDVP

SEQ ID NO: 101174 - protein, 14 aa, Homo Sapiens
LNSFVIPSESDVPT

SEQ ID NO: 101175 - protein, 14 aa, Homo Sapiens
NSFVIPSESDVPTH

SEQ ID NO: 101176 - protein, 14 aa, Homo Sapiens
SFVIPSESDVPTHC

SEQ ID NO: 101177 - protein, 14 aa, Homo Sapiens
FVIPSESDVPTHCP

SEQ ID NO: 101178 - protein, 14 aa, Homo Sapiens
VIPSESDVPTHCPS

SEQ ID NO: 101179 - protein, 14 aa, Homo Sapiens
IPSESDVPTHCPSQ

SEQ ID NO: 101180 - protein, 14 aa, Homo Sapiens
PSESDVPTHCPSQW

SEQ ID NO: 101181 - protein, 14 aa, Homo Sapiens
SESDVPTHCPSQWW

SEQ ID NO: 101182 - protein, 14 aa, Homo Sapiens
ESDVPTHCPSQWWP

SEQ ID NO: 101183 - protein, 14 aa, Homo Sapiens
SDVPTHCPSQWWPY

SEQ ID NO: 101184 - protein, 14 aa, Homo Sapiens
DVPTHCPSQWWPYA

SEQ ID NO: 101185 - protein, 14 aa, Homo Sapiens
VPTHCPSQWWPYAG

SEQ ID NO: 101186 - protein, 14 aa, Homo Sapiens
PTHCPSQWWPYAGH

SEQ ID NO: 101187 - protein, 14 aa, Homo Sapiens
THCPSQWWPYAGHC

SEQ ID NO: 101188 - protein, 14 aa, Homo Sapiens
HCPSQWWPYAGHCY

SEQ ID NO: 101189 - protein, 14 aa, Homo Sapiens
CPSQWWPYAGHCYK

SEQ ID NO: 101190 - protein, 14 aa, Homo Sapiens
PSQWWPYAGHCYKI

SEQ ID NO: 101191 - protein, 14 aa, Homo Sapiens
SQWWPYAGHCYKIH

SEQ ID NO: 101192 - protein, 14 aa, Homo Sapiens
QWWPYAGHCYKIHR

SEQ ID NO: 101193 - protein, 14 aa, Homo Sapiens
WWPYAGHCYKIHRD

SEQ ID NO: 101194 - protein, 14 aa, Homo Sapiens
WPYAGHCYKIHRDE

SEQ ID NO: 101195 - protein, 14 aa, Homo Sapiens
PYAGHCYKIHRDEK

SEQ ID NO: 101196 - protein, 14 aa, Homo Sapiens
YAGHCYKIHRDEKK

SEQ ID NO: 101197 - protein, 14 aa, Homo Sapiens
AGHCYKIHRDEKKI

SEQ ID NO: 101198 - protein, 14 aa, Homo Sapiens
GHCYKIHRDEKKIQ

SEQ ID NO: 101199 - protein, 14 aa, Homo Sapiens
HCYKIHRDEKKIQR

SEQ ID NO: 101200 - protein, 14 aa, Homo Sapiens
CYKIHRDEKKIQRD

SEQ ID NO: 101201 - protein, 14 aa, Homo Sapiens
YKIHRDEKKIQRDA

SEQ ID NO: 101202 - protein, 14 aa, Homo Sapiens
KIHRDEKKIQRDAL

SEQ ID NO: 101203 - protein, 14 aa, Homo Sapiens
IHRDEKKIQRDALT

SEQ ID NO: 101204 - protein, 14 aa, Homo Sapiens
HRDEKKIQRDALTT

SEQ ID NO: 101205 - protein, 14 aa, Homo Sapiens
RDEKKIQRDALTTC

SEQ ID NO: 101206 - protein, 14 aa, Homo Sapiens
DEKKIQRDALTTCR

SEQ ID NO: 101207 - protein, 14 aa, Homo Sapiens
EKKIQRDALTTCRK

SEQ ID NO: 101208 - protein, 14 aa, Homo Sapiens
KKIQRDALTTCRKE

SEQ ID NO: 101209 - protein, 14 aa, Homo Sapiens
KIQRDALTTCRKEG

SEQ ID NO: 101210 - protein, 14 aa, Homo Sapiens
IQRDALTTCRKEGG

SEQ ID NO: 101211 - protein, 14 aa, Homo Sapiens
QRDALTTCRKEGGD

SEQ ID NO: 101212 - protein, 14 aa, Homo Sapiens
RDALTTCRKEGGDL

SEQ ID NO: 101213 - protein, 14 aa, Homo Sapiens
DALTTCRKEGGDLA

SEQ ID NO: 101214 - protein, 14 aa, Homo Sapiens
ALTTCRKEGGDLAS

SEQ ID NO: 101215 - protein, 14 aa, Homo Sapiens
LTTCRKEGGDLASI

SEQ ID NO: 101216 - protein, 14 aa, Homo Sapiens
TTCRKEGGDLASIH

SEQ ID NO: 101217 - protein, 14 aa, Homo Sapiens
TCRKEGGDLASIHT

SEQ ID NO: 101218 - protein, 14 aa, Homo Sapiens
CRKEGGDLASIHTI

SEQ ID NO: 101219 - protein, 14 aa, Homo Sapiens
RKEGGDLASIHTIE

SEQ ID NO: 101220 - protein, 14 aa, Homo Sapiens
KEGGDLASIHTIEE

SEQ ID NO: 101221 - protein, 14 aa, Homo Sapiens
EGGDLASIHTIEEF

SEQ ID NO: 101222 - protein, 14 aa, Homo Sapiens
GGDLASIHTIEEFD

SEQ ID NO: 101223 - protein, 14 aa, Homo Sapiens
GDLASIHTIEEFDF

SEQ ID NO: 101224 - protein, 14 aa, Homo Sapiens
DLASIHTIEEFDFI

SEQ ID NO: 101225 - protein, 14 aa, Homo Sapiens
LASIHTIEEFDFII

SEQ ID NO: 101226 - protein, 14 aa, Homo Sapiens
ASIHTIEEFDFIIS

SEQ ID NO: 101227 - protein, 14 aa, Homo Sapiens
SIHTIEEFDFIISQ

SEQ ID NO: 101228 - protein, 14 aa, Homo Sapiens
IHTIEEFDFIISQL

SEQ ID NO: 101229 - protein, 14 aa, Homo Sapiens
HTIEEFDFIISQLG

SEQ ID NO: 101230 - protein, 14 aa, Homo Sapiens
TIEEFDFIISQLGY

SEQ ID NO: 101231 - protein, 14 aa, Homo Sapiens
IEEFDFIISQLGYE

SEQ ID NO: 101232 - protein, 14 aa, Homo Sapiens
EEFDFIISQLGYEP

SEQ ID NO: 101233 - protein, 14 aa, Homo Sapiens
EFDFIISQLGYEPN

SEQ ID NO: 101234 - protein, 14 aa, Homo Sapiens
FDFIISQLGYEPND

SEQ ID NO: 101235 - protein, 14 aa, Homo Sapiens
DFIISQLGYEPNDE

SEQ ID NO: 101236 - protein, 14 aa, Homo Sapiens
FIISQLGYEPNDEL

SEQ ID NO: 101237 - protein, 14 aa, Homo Sapiens
IISQLGYEPNDELW

SEQ ID NO: 101238 - protein, 14 aa, Homo Sapiens
ISQLGYEPNDELWI

SEQ ID NO: 101239 - protein, 14 aa, Homo Sapiens
SQLGYEPNDELWIG

SEQ ID NO: 101240 - protein, 14 aa, Homo Sapiens
QLGYEPNDELWIGL

SEQ ID NO: 101241 - protein, 14 aa, Homo Sapiens
LGYEPNDELWIGLN

SEQ ID NO: 101242 - protein, 14 aa, Homo Sapiens
GYEPNDELWIGLND

SEQ ID NO: 101243 - protein, 14 aa, Homo Sapiens
YEPNDELWIGLNDI

SEQ ID NO: 101244 - protein, 14 aa, Homo Sapiens
EPNDELWIGLNDIK

SEQ ID NO: 101245 - protein, 14 aa, Homo Sapiens
PNDELWIGLNDIKI

SEQ ID NO: 101246 - protein, 14 aa, Homo Sapiens
NDELWIGLNDIKIQ

SEQ ID NO: 101247 - protein, 14 aa, Homo Sapiens
DELWIGLNDIKIQM

SEQ ID NO: 101248 - protein, 14 aa, Homo Sapiens
ELWIGLNDIKIQMY

SEQ ID NO: 101249 - protein, 14 aa, Homo Sapiens
LWIGLNDIKIQMYF

SEQ ID NO: 101250 - protein, 14 aa, Homo Sapiens
WIGLNDIKIQMYFE

SEQ ID NO: 101251 - protein, 14 aa, Homo Sapiens
IGLNDIKIQMYFEW

SEQ ID NO: 101252 - protein, 14 aa, Homo Sapiens
GLNDIKIQMYFEWS

SEQ ID NO: 101253 - protein, 14 aa, Homo Sapiens
LNDIKIQMYFEWSD

SEQ ID NO: 101254 - protein, 14 aa, Homo Sapiens
NDIKIQMYFEWSDG

SEQ ID NO: 101255 - protein, 14 aa, Homo Sapiens
DIKIQMYFEWSDGT

SEQ ID NO: 101256 - protein, 14 aa, Homo Sapiens
IKIQMYFEWSDGTP

SEQ ID NO: 101257 - protein, 14 aa, Homo Sapiens
KIQMYFEWSDGTPV

SEQ ID NO: 101258 - protein, 14 aa, Homo Sapiens
IQMYFEWSDGTPVT

SEQ ID NO: 101259 - protein, 14 aa, Homo Sapiens
QMYFEWSDGTPVTF

SEQ ID NO: 101260 - protein, 14 aa, Homo Sapiens
MYFEWSDGTPVTFT

SEQ ID NO: 101261 - protein, 14 aa, Homo Sapiens
YFEWSDGTPVTFTK

SEQ ID NO: 101262 - protein, 14 aa, Homo Sapiens
FEWSDGTPVTFTKW

SEQ ID NO: 101263 - protein, 14 aa, Homo Sapiens
EWSDGTPVTFTKWL

SEQ ID NO: 101264 - protein, 14 aa, Homo Sapiens
WSDGTPVTFTKWLR

SEQ ID NO: 101265 - protein, 14 aa, Homo Sapiens
SDGTPVTFTKWLRG

SEQ ID NO: 101266 - protein, 14 aa, Homo Sapiens
DGTPVTFTKWLRGE

SEQ ID NO: 101267 - protein, 14 aa, Homo Sapiens
GTPVTFTKWLRGEP

SEQ ID NO: 101268 - protein, 14 aa, Homo Sapiens
TPVTFTKWLRGEPS

SEQ ID NO: 101269 - protein, 14 aa, Homo Sapiens
PVTFTKWLRGEPSH

SEQ ID NO: 101270 - protein, 14 aa, Homo Sapiens
VTFTKWLRGEPSHE

SEQ ID NO: 101271 - protein, 14 aa, Homo Sapiens
TFTKWLRGEPSHEN

SEQ ID NO: 101272 - protein, 14 aa, Homo Sapiens
FTKWLRGEPSHENN

SEQ ID NO: 101273 - protein, 14 aa, Homo Sapiens
TKWLRGEPSHENNR

SEQ ID NO: 101274 - protein, 14 aa, Homo Sapiens
KWLRGEPSHENNRQ

SEQ ID NO: 101275 - protein, 14 aa, Homo Sapiens
WLRGEPSHENNRQE

SEQ ID NO: 101276 - protein, 14 aa, Homo Sapiens
LRGEPSHENNRQED

SEQ ID NO: 101277 - protein, 14 aa, Homo Sapiens
RGEPSHENNRQEDC

SEQ ID NO: 101278 - protein, 14 aa, Homo Sapiens
GEPSHENNRQEDCV

SEQ ID NO: 101279 - protein, 14 aa, Homo Sapiens
EPSHENNRQEDCVV

SEQ ID NO: 101280 - protein, 14 aa, Homo Sapiens
PSHENNRQEDCVVM

SEQ ID NO: 101281 - protein, 14 aa, Homo Sapiens
SHENNRQEDCVVMK

SEQ ID NO: 101282 - protein, 14 aa, Homo Sapiens
HENNRQEDCVVMKG

SEQ ID NO: 101283 - protein, 14 aa, Homo Sapiens
ENNRQEDCVVMKGK

SEQ ID NO: 101284 - protein, 14 aa, Homo Sapiens
NNRQEDCVVMKGKD

SEQ ID NO: 101285 - protein, 14 aa, Homo Sapiens
NRQEDCVVMKGKDG

SEQ ID NO: 101286 - protein, 14 aa, Homo Sapiens
RQEDCVVMKGKDGY

SEQ ID NO: 101287 - protein, 14 aa, Homo Sapiens
QEDCVVMKGKDGYW

SEQ ID NO: 101288 - protein, 14 aa, Homo Sapiens
EDCVVMKGKDGYWA

SEQ ID NO: 101289 - protein, 14 aa, Homo Sapiens
DCVVMKGKDGYWAD

SEQ ID NO: 101290 - protein, 14 aa, Homo Sapiens
CVVMKGKDGYWADR

SEQ ID NO: 101291 - protein, 14 aa, Homo Sapiens
VVMKGKDGYWADRG

SEQ ID NO: 101292 - protein, 14 aa, Homo Sapiens
VMKGKDGYWADRGC

SEQ ID NO: 101293 - protein, 14 aa, Homo Sapiens
MKGKDGYWADRGCE

SEQ ID NO: 101294 - protein, 14 aa, Homo Sapiens
KGKDGYWADRGCEW

SEQ ID NO: 101295 - protein, 14 aa, Homo Sapiens
GKDGYWADRGCEWP

SEQ ID NO: 101296 - protein, 14 aa, Homo Sapiens
KDGYWADRGCEWPL

SEQ ID NO: 101297 - protein, 14 aa, Homo Sapiens
DGYWADRGCEWPLG

SEQ ID NO: 101298 - protein, 14 aa, Homo Sapiens
GYWADRGCEWPLGY

SEQ ID NO: 101299 - protein, 14 aa, Homo Sapiens
YWADRGCEWPLGYI

SEQ ID NO: 101300 - protein, 14 aa, Homo Sapiens
WADRGCEWPLGYIC

SEQ ID NO: 101301 - protein, 14 aa, Homo Sapiens
ADRGCEWPLGYICK

SEQ ID NO: 101302 - protein, 14 aa, Homo Sapiens
DRGCEWPLGYICKM

SEQ ID NO: 101303 - protein, 14 aa, Homo Sapiens
RGCEWPLGYICKMK

SEQ ID NO: 101304 - protein, 14 aa, Homo Sapiens
GCEWPLGYICKMKS

SEQ ID NO: 101305 - protein, 14 aa, Homo Sapiens
CEWPLGYICKMKSR

SEQ ID NO: 101306 - protein, 14 aa, Homo Sapiens
EWPLGYICKMKSRS

SEQ ID NO: 101307 - protein, 14 aa, Homo Sapiens
WPLGYICKMKSRSQ

SEQ ID NO: 101308 - protein, 14 aa, Homo Sapiens
PLGYICKMKSRSQG

SEQ ID NO: 101309 - protein, 14 aa, Homo Sapiens
LGYICKMKSRSQGP

SEQ ID NO: 101310 - protein, 14 aa, Homo Sapiens
GYICKMKSRSQGPE

SEQ ID NO: 101311 - protein, 14 aa, Homo Sapiens
YICKMKSRSQGPEI

SEQ ID NO: 101312 - protein, 14 aa, Homo Sapiens
ICKMKSRSQGPEIV

SEQ ID NO: 101313 - protein, 14 aa, Homo Sapiens
CKMKSRSQGPEIVE

SEQ ID NO: 101314 - protein, 14 aa, Homo Sapiens
KMKSRSQGPEIVEV

SEQ ID NO: 101315 - protein, 14 aa, Homo Sapiens
MKSRSQGPEIVEVE

SEQ ID NO: 101316 - protein, 14 aa, Homo Sapiens
KSRSQGPEIVEVEK

SEQ ID NO: 101317 - protein, 14 aa, Homo Sapiens
SRSQGPEIVEVEKG

SEQ ID NO: 101318 - protein, 14 aa, Homo Sapiens
RSQGPEIVEVEKGC

SEQ ID NO: 101319 - protein, 14 aa, Homo Sapiens
SQGPEIVEVEKGCR

SEQ ID NO: 101320 - protein, 14 aa, Homo Sapiens
QGPEIVEVEKGCRK

SEQ ID NO: 101321 - protein, 14 aa, Homo Sapiens
GPEIVEVEKGCRKG

SEQ ID NO: 101322 - protein, 14 aa, Homo Sapiens
PEIVEVEKGCRKGW

SEQ ID NO: 101323 - protein, 14 aa, Homo Sapiens
EIVEVEKGCRKGWK

SEQ ID NO: 101324 - protein, 14 aa, Homo Sapiens
IVEVEKGCRKGWKK

SEQ ID NO: 101325 - protein, 14 aa, Homo Sapiens
VEVEKGCRKGWKKH

SEQ ID NO: 101326 - protein, 14 aa, Homo Sapiens
EVEKGCRKGWKKHH

SEQ ID NO: 101327 - protein, 14 aa, Homo Sapiens
VEKGCRKGWKKHHF

SEQ ID NO: 101328 - protein, 14 aa, Homo Sapiens
EKGCRKGWKKHHFY

SEQ ID NO: 101329 - protein, 14 aa, Homo Sapiens
KGCRKGWKKHHFYC

SEQ ID NO: 101330 - protein, 14 aa, Homo Sapiens
GCRKGWKKHHFYCY

SEQ ID NO: 101331 - protein, 14 aa, Homo Sapiens
CRKGWKKHHFYCYM

SEQ ID NO: 101332 - protein, 14 aa, Homo Sapiens
RKGWKKHHFYCYMI

SEQ ID NO: 101333 - protein, 14 aa, Homo Sapiens
KGWKKHHFYCYMIG

SEQ ID NO: 101334 - protein, 14 aa, Homo Sapiens
GWKKHHFYCYMIGH

SEQ ID NO: 101335 - protein, 14 aa, Homo Sapiens
WKKHHFYCYMIGHT

SEQ ID NO: 101336 - protein, 14 aa, Homo Sapiens
KKHHFYCYMIGHTL

SEQ ID NO: 101337 - protein, 14 aa, Homo Sapiens
KHHFYCYMIGHTLS

SEQ ID NO: 101338 - protein, 14 aa, Homo Sapiens
HHFYCYMIGHTLST

SEQ ID NO: 101339 - protein, 14 aa, Homo Sapiens
HFYCYMIGHTLSTF

SEQ ID NO: 101340 - protein, 14 aa, Homo Sapiens
FYCYMIGHTLSTFA

SEQ ID NO: 101341 - protein, 14 aa, Homo Sapiens
YCYMIGHTLSTFAE

SEQ ID NO: 101342 - protein, 14 aa, Homo Sapiens
CYMIGHTLSTFAEA

SEQ ID NO: 101343 - protein, 14 aa, Homo Sapiens
YMIGHTLSTFAEAN

SEQ ID NO: 101344 - protein, 14 aa, Homo Sapiens
MIGHTLSTFAEANQ

SEQ ID NO: 101345 - protein, 14 aa, Homo Sapiens
IGHTLSTFAEANQT

SEQ ID NO: 101346 - protein, 14 aa, Homo Sapiens
GHTLSTFAEANQTC

SEQ ID NO: 101347 - protein, 14 aa, Homo Sapiens
HTLSTFAEANQTCN

SEQ ID NO: 101348 - protein, 14 aa, Homo Sapiens
TLSTFAEANQTCNN

SEQ ID NO: 101349 - protein, 14 aa, Homo Sapiens
LSTFAEANQTCNNE

SEQ ID NO: 101350 - protein, 14 aa, Homo Sapiens
STFAEANQTCNNEN

SEQ ID NO: 101351 - protein, 14 aa, Homo Sapiens
TFAEANQTCNNENA

SEQ ID NO: 101352 - protein, 14 aa, Homo Sapiens
FAEANQTCNNENAY

SEQ ID NO: 101353 - protein, 14 aa, Homo Sapiens
AEANQTCNNENAYL

SEQ ID NO: 101354 - protein, 14 aa, Homo Sapiens
EANQTCNNENAYLT

SEQ ID NO: 101355 - protein, 14 aa, Homo Sapiens
ANQTCNNENAYLTT

SEQ ID NO: 101356 - protein, 14 aa, Homo Sapiens
NQTCNNENAYLTTI

SEQ ID NO: 101357 - protein, 14 aa, Homo Sapiens
QTCNNENAYLTTIE

SEQ ID NO: 101358 - protein, 14 aa, Homo Sapiens
TCNNENAYLTTIED

SEQ ID NO: 101359 - protein, 14 aa, Homo Sapiens
CNNENAYLTTIEDR

SEQ ID NO: 101360 - protein, 14 aa, Homo Sapiens
NNENAYLTTIEDRY

SEQ ID NO: 101361 - protein, 14 aa, Homo Sapiens
NENAYLTTIEDRYE

SEQ ID NO: 101362 - protein, 14 aa, Homo Sapiens
ENAYLTTIEDRYEQ

SEQ ID NO: 101363 - protein, 14 aa, Homo Sapiens
NAYLTTIEDRYEQA

SEQ ID NO: 101364 - protein, 14 aa, Homo Sapiens
AYLTTIEDRYEQAF

SEQ ID NO: 101365 - protein, 14 aa, Homo Sapiens
YLTTIEDRYEQAFL

SEQ ID NO: 101366 - protein, 14 aa, Homo Sapiens
LTTIEDRYEQAFLT

SEQ ID NO: 101367 - protein, 14 aa, Homo Sapiens
TTIEDRYEQAFLTS

SEQ ID NO: 101368 - protein, 14 aa, Homo Sapiens
TIEDRYEQAFLTSF

SEQ ID NO: 101369 - protein, 14 aa, Homo Sapiens
IEDRYEQAFLTSFV

SEQ ID NO: 101370 - protein, 14 aa, Homo Sapiens
EDRYEQAFLTSFVG

SEQ ID NO: 101371 - protein, 14 aa, Homo Sapiens
DRYEQAFLTSFVGL

SEQ ID NO: 101372 - protein, 14 aa, Homo Sapiens
RYEQAFLTSFVGLR

SEQ ID NO: 101373 - protein, 14 aa, Homo Sapiens
YEQAFLTSFVGLRP

SEQ ID NO: 101374 - protein, 14 aa, Homo Sapiens
EQAFLTSFVGLRPE

SEQ ID NO: 101375 - protein, 14 aa, Homo Sapiens
QAFLTSFVGLRPEK

SEQ ID NO: 101376 - protein, 14 aa, Homo Sapiens
AFLTSFVGLRPEKY

SEQ ID NO: 101377 - protein, 14 aa, Homo Sapiens
FLTSFVGLRPEKYF

SEQ ID NO: 101378 - protein, 14 aa, Homo Sapiens
LTSFVGLRPEKYFW

SEQ ID NO: 101379 - protein, 14 aa, Homo Sapiens
TSFVGLRPEKYFWT

SEQ ID NO: 101380 - protein, 14 aa, Homo Sapiens
SFVGLRPEKYFWTG

SEQ ID NO: 101381 - protein, 14 aa, Homo Sapiens
FVGLRPEKYFWTGL

SEQ ID NO: 101382 - protein, 14 aa, Homo Sapiens
VGLRPEKYFWTGLS

SEQ ID NO: 101383 - protein, 14 aa, Homo Sapiens
GLRPEKYFWTGLSD

SEQ ID NO: 101384 - protein, 14 aa, Homo Sapiens
LRPEKYFWTGLSDI

SEQ ID NO: 101385 - protein, 14 aa, Homo Sapiens
RPEKYFWTGLSDIQ

SEQ ID NO: 101386 - protein, 14 aa, Homo Sapiens
PEKYFWTGLSDIQT

SEQ ID NO: 101387 - protein, 14 aa, Homo Sapiens
EKYFWTGLSDIQTK

SEQ ID NO: 101388 - protein, 14 aa, Homo Sapiens
KYFWTGLSDIQTKG

SEQ ID NO: 101389 - protein, 14 aa, Homo Sapiens
YFWTGLSDIQTKGT

SEQ ID NO: 101390 - protein, 14 aa, Homo Sapiens
FWTGLSDIQTKGTF

SEQ ID NO: 101391 - protein, 14 aa, Homo Sapiens
WTGLSDIQTKGTFQ

SEQ ID NO: 101392 - protein, 14 aa, Homo Sapiens
TGLSDIQTKGTFQW

SEQ ID NO: 101393 - protein, 14 aa, Homo Sapiens
GLSDIQTKGTFQWT

SEQ ID NO: 101394 - protein, 14 aa, Homo Sapiens
LSDIQTKGTFQWTI

SEQ ID NO: 101395 - protein, 14 aa, Homo Sapiens
SDIQTKGTFQWTIE

SEQ ID NO: 101396 - protein, 14 aa, Homo Sapiens
DIQTKGTFQWTIEE

SEQ ID NO: 101397 - protein, 14 aa, Homo Sapiens
IQTKGTFQWTIEEE

SEQ ID NO: 101398 - protein, 14 aa, Homo Sapiens
QTKGTFQWTIEEEV

SEQ ID NO: 101399 - protein, 14 aa, Homo Sapiens
TKGTFQWTIEEEVR

SEQ ID NO: 101400 - protein, 14 aa, Homo Sapiens
KGTFQWTIEEEVRF

SEQ ID NO: 101401 - protein, 14 aa, Homo Sapiens
GTFQWTIEEEVRFT

SEQ ID NO: 101402 - protein, 14 aa, Homo Sapiens
TFQWTIEEEVRFTH

SEQ ID NO: 101403 - protein, 14 aa, Homo Sapiens
FQWTIEEEVRFTHW

SEQ ID NO: 101404 - protein, 14 aa, Homo Sapiens
QWTIEEEVRFTHWN

SEQ ID NO: 101405 - protein, 14 aa, Homo Sapiens
WTIEEEVRFTHWNS

SEQ ID NO: 101406 - protein, 14 aa, Homo Sapiens
TIEEEVRFTHWNSD

SEQ ID NO: 101407 - protein, 14 aa, Homo Sapiens
IEEEVRFTHWNSDM

SEQ ID NO: 101408 - protein, 14 aa, Homo Sapiens
EEEVRFTHWNSDMP

SEQ ID NO: 101409 - protein, 14 aa, Homo Sapiens
EEVRFTHWNSDMPG

SEQ ID NO: 101410 - protein, 14 aa, Homo Sapiens
EVRFTHWNSDMPGR

SEQ ID NO: 101411 - protein, 14 aa, Homo Sapiens
VRFTHWNSDMPGRK

SEQ ID NO: 101412 - protein, 14 aa, Homo Sapiens
RFTHWNSDMPGRKP

SEQ ID NO: 101413 - protein, 14 aa, Homo Sapiens
FTHWNSDMPGRKPG

SEQ ID NO: 101414 - protein, 14 aa, Homo Sapiens
THWNSDMPGRKPGC

SEQ ID NO: 101415 - protein, 14 aa, Homo Sapiens
HWNSDMPGRKPGCV

SEQ ID NO: 101416 - protein, 14 aa, Homo Sapiens
WNSDMPGRKPGCVA

SEQ ID NO: 101417 - protein, 14 aa, Homo Sapiens
NSDMPGRKPGCVAM

SEQ ID NO: 101418 - protein, 14 aa, Homo Sapiens
SDMPGRKPGCVAMR

SEQ ID NO: 101419 - protein, 14 aa, Homo Sapiens
DMPGRKPGCVAMRT

SEQ ID NO: 101420 - protein, 14 aa, Homo Sapiens
MPGRKPGCVAMRTG

SEQ ID NO: 101421 - protein, 14 aa, Homo Sapiens
PGRKPGCVAMRTGI

SEQ ID NO: 101422 - protein, 14 aa, Homo Sapiens
GRKPGCVAMRTGIA

SEQ ID NO: 101423 - protein, 14 aa, Homo Sapiens
RKPGCVAMRTGIAG

SEQ ID NO: 101424 - protein, 14 aa, Homo Sapiens
KPGCVAMRTGIAGG

SEQ ID NO: 101425 - protein, 14 aa, Homo Sapiens
PGCVAMRTGIAGGL

SEQ ID NO: 101426 - protein, 14 aa, Homo Sapiens
GCVAMRTGIAGGLW

SEQ ID NO: 101427 - protein, 14 aa, Homo Sapiens
CVAMRTGIAGGLWD

SEQ ID NO: 101428 - protein, 14 aa, Homo Sapiens
VAMRTGIAGGLWDV

SEQ ID NO: 101429 - protein, 14 aa, Homo Sapiens
AMRTGIAGGLWDVL

SEQ ID NO: 101430 - protein, 14 aa, Homo Sapiens
MRTGIAGGLWDVLK

SEQ ID NO: 101431 - protein, 14 aa, Homo Sapiens
RTGIAGGLWDVLKC

SEQ ID NO: 101432 - protein, 14 aa, Homo Sapiens
TGIAGGLWDVLKCD

SEQ ID NO: 101433 - protein, 14 aa, Homo Sapiens
GIAGGLWDVLKCDE

SEQ ID NO: 101434 - protein, 14 aa, Homo Sapiens
IAGGLWDVLKCDEK

SEQ ID NO: 101435 - protein, 14 aa, Homo Sapiens
AGGLWDVLKCDEKA

SEQ ID NO: 101436 - protein, 14 aa, Homo Sapiens
GGLWDVLKCDEKAK

SEQ ID NO: 101437 - protein, 14 aa, Homo Sapiens
GLWDVLKCDEKAKF

SEQ ID NO: 101438 - protein, 14 aa, Homo Sapiens
LWDVLKCDEKAKFV

SEQ ID NO: 101439 - protein, 14 aa, Homo Sapiens
WDVLKCDEKAKFVC

SEQ ID NO: 101440 - protein, 14 aa, Homo Sapiens
DVLKCDEKAKFVCK

SEQ ID NO: 101441 - protein, 14 aa, Homo Sapiens
VLKCDEKAKFVCKH

SEQ ID NO: 101442 - protein, 14 aa, Homo Sapiens
LKCDEKAKFVCKHW

SEQ ID NO: 101443 - protein, 14 aa, Homo Sapiens
KCDEKAKFVCKHWA

SEQ ID NO: 101444 - protein, 14 aa, Homo Sapiens
CDEKAKFVCKHWAE

SEQ ID NO: 101445 - protein, 14 aa, Homo Sapiens
DEKAKFVCKHWAEG

SEQ ID NO: 101446 - protein, 14 aa, Homo Sapiens
EKAKFVCKHWAEGV

SEQ ID NO: 101447 - protein, 14 aa, Homo Sapiens
KAKFVCKHWAEGVT

SEQ ID NO: 101448 - protein, 14 aa, Homo Sapiens
AKFVCKHWAEGVTH

SEQ ID NO: 101449 - protein, 14 aa, Homo Sapiens
KFVCKHWAEGVTHP

SEQ ID NO: 101450 - protein, 14 aa, Homo Sapiens
FVCKHWAEGVTHPP

SEQ ID NO: 101451 - protein, 14 aa, Homo Sapiens
VCKHWAEGVTHPPK

SEQ ID NO: 101452 - protein, 14 aa, Homo Sapiens
CKHWAEGVTHPPKP

SEQ ID NO: 101453 - protein, 14 aa, Homo Sapiens
KHWAEGVTHPPKPT

SEQ ID NO: 101454 - protein, 14 aa, Homo Sapiens
HWAEGVTHPPKPTT

SEQ ID NO: 101455 - protein, 14 aa, Homo Sapiens
WAEGVTHPPKPTTT

SEQ ID NO: 101456 - protein, 14 aa, Homo Sapiens
AEGVTHPPKPTTTP

SEQ ID NO: 101457 - protein, 14 aa, Homo Sapiens
EGVTHPPKPTTTPE

SEQ ID NO: 101458 - protein, 14 aa, Homo Sapiens
GVTHPPKPTTTPEP

SEQ ID NO: 101459 - protein, 14 aa, Homo Sapiens
VTHPPKPTTTPEPK

SEQ ID NO: 101460 - protein, 14 aa, Homo Sapiens
THPPKPTTTPEPKC

SEQ ID NO: 101461 - protein, 14 aa, Homo Sapiens
HPPKPTTTPEPKCP

SEQ ID NO: 101462 - protein, 14 aa, Homo Sapiens
PPKPTTTPEPKCPE

SEQ ID NO: 101463 - protein, 14 aa, Homo Sapiens
PKPTTTPEPKCPED

SEQ ID NO: 101464 - protein, 14 aa, Homo Sapiens
KPTTTPEPKCPEDW

SEQ ID NO: 101465 - protein, 14 aa, Homo Sapiens
PTTTPEPKCPEDWG

SEQ ID NO: 101466 - protein, 14 aa, Homo Sapiens
TTTPEPKCPEDWGA

SEQ ID NO: 101467 - protein, 14 aa, Homo Sapiens
TTPEPKCPEDWGAS

SEQ ID NO: 101468 - protein, 14 aa, Homo Sapiens
TPEPKCPEDWGASS

SEQ ID NO: 101469 - protein, 14 aa, Homo Sapiens
PEPKCPEDWGASSR

SEQ ID NO: 101470 - protein, 14 aa, Homo Sapiens
EPKCPEDWGASSRT

SEQ ID NO: 101471 - protein, 14 aa, Homo Sapiens
PKCPEDWGASSRTS

SEQ ID NO: 101472 - protein, 14 aa, Homo Sapiens
KCPEDWGASSRTSL

SEQ ID NO: 101473 - protein, 14 aa, Homo Sapiens
CPEDWGASSRTSLC

SEQ ID NO: 101474 - protein, 14 aa, Homo Sapiens
PEDWGASSRTSLCF

SEQ ID NO: 101475 - protein, 14 aa, Homo Sapiens
EDWGASSRTSLCFK

SEQ ID NO: 101476 - protein, 14 aa, Homo Sapiens
DWGASSRTSLCFKL

SEQ ID NO: 101477 - protein, 14 aa, Homo Sapiens
WGASSRTSLCFKLY

SEQ ID NO: 101478 - protein, 14 aa, Homo Sapiens
GASSRTSLCFKLYA

SEQ ID NO: 101479 - protein, 14 aa, Homo Sapiens
ASSRTSLCFKLYAK

SEQ ID NO: 101480 - protein, 14 aa, Homo Sapiens
SSRTSLCFKLYAKG

SEQ ID NO: 101481 - protein, 14 aa, Homo Sapiens
SRTSLCFKLYAKGK

SEQ ID NO: 101482 - protein, 14 aa, Homo Sapiens
RTSLCFKLYAKGKI

SEQ ID NO: 101483 - protein, 14 aa, Homo Sapiens
TSLCFKLYAKGKIE

SEQ ID NO: 101484 - protein, 14 aa, Homo Sapiens
SLCFKLYAKGKIEK

SEQ ID NO: 101485 - protein, 14 aa, Homo Sapiens
LCFKLYAKGKIEKK

SEQ ID NO: 101486 - protein, 14 aa, Homo Sapiens
CFKLYAKGKIEKKT

SEQ ID NO: 101487 - protein, 14 aa, Homo Sapiens
FKLYAKGKIEKKTW

SEQ ID NO: 101488 - protein, 14 aa, Homo Sapiens
KLYAKGKIEKKTWF

SEQ ID NO: 101489 - protein, 14 aa, Homo Sapiens
LYAKGKIEKKTWFE

SEQ ID NO: 101490 - protein, 14 aa, Homo Sapiens
YAKGKIEKKTWFES

SEQ ID NO: 101491 - protein, 14 aa, Homo Sapiens
AKGKIEKKTWFESR

SEQ ID NO: 101492 - protein, 14 aa, Homo Sapiens
KGKIEKKTWFESRD

SEQ ID NO: 101493 - protein, 14 aa, Homo Sapiens
GKIEKKTWFESRDF

SEQ ID NO: 101494 - protein, 14 aa, Homo Sapiens
KIEKKTWFESRDFC

SEQ ID NO: 101495 - protein, 14 aa, Homo Sapiens
IEKKTWFESRDFCR

SEQ ID NO: 101496 - protein, 14 aa, Homo Sapiens
EKKTWFESRDFCRA

SEQ ID NO: 101497 - protein, 14 aa, Homo Sapiens
KKTWFESRDFCRAL

SEQ ID NO: 101498 - protein, 14 aa, Homo Sapiens
KTWFESRDFCRALG

SEQ ID NO: 101499 - protein, 14 aa, Homo Sapiens
TWFESRDFCRALGG

SEQ ID NO: 101500 - protein, 14 aa, Homo Sapiens
WFESRDFCRALGGD

SEQ ID NO: 101501 - protein, 14 aa, Homo Sapiens
FESRDFCRALGGDL

SEQ ID NO: 101502 - protein, 14 aa, Homo Sapiens
ESRDFCRALGGDLA

SEQ ID NO: 101503 - protein, 14 aa, Homo Sapiens
SRDFCRALGGDLAS

SEQ ID NO: 101504 - protein, 14 aa, Homo Sapiens
RDFCRALGGDLASI

SEQ ID NO: 101505 - protein, 14 aa, Homo Sapiens
DFCRALGGDLASIN

SEQ ID NO: 101506 - protein, 14 aa, Homo Sapiens
FCRALGGDLASINN

SEQ ID NO: 101507 - protein, 14 aa, Homo Sapiens
CRALGGDLASINNK

SEQ ID NO: 101508 - protein, 14 aa, Homo Sapiens
RALGGDLASINNKE

SEQ ID NO: 101509 - protein, 14 aa, Homo Sapiens
ALGGDLASINNKEE

SEQ ID NO: 101510 - protein, 14 aa, Homo Sapiens
LGGDLASINNKEEQ

SEQ ID NO: 101511 - protein, 14 aa, Homo Sapiens
GGDLASINNKEEQQ

SEQ ID NO: 101512 - protein, 14 aa, Homo Sapiens
GDLASINNKEEQQT

SEQ ID NO: 101513 - protein, 14 aa, Homo Sapiens
DLASINNKEEQQTI

SEQ ID NO: 101514 - protein, 14 aa, Homo Sapiens
LASINNKEEQQTIW

SEQ ID NO: 101515 - protein, 14 aa, Homo Sapiens
ASINNKEEQQTIWR

SEQ ID NO: 101516 - protein, 14 aa, Homo Sapiens
SINNKEEQQTIWRL

SEQ ID NO: 101517 - protein, 14 aa, Homo Sapiens
INNKEEQQTIWRLI

SEQ ID NO: 101518 - protein, 14 aa, Homo Sapiens
NNKEEQQTIWRLIT

SEQ ID NO: 101519 - protein, 14 aa, Homo Sapiens
NKEEQQTIWRLITA

SEQ ID NO: 101520 - protein, 14 aa, Homo Sapiens
KEEQQTIWRLITAS

SEQ ID NO: 101521 - protein, 14 aa, Homo Sapiens
EEQQTIWRLITASG

SEQ ID NO: 101522 - protein, 14 aa, Homo Sapiens
EQQTIWRLITASGS

SEQ ID NO: 101523 - protein, 14 aa, Homo Sapiens
QQTIWRLITASGSY

SEQ ID NO: 101524 - protein, 14 aa, Homo Sapiens
QTIWRLITASGSYH

SEQ ID NO: 101525 - protein, 14 aa, Homo Sapiens
TIWRLITASGSYHK

SEQ ID NO: 101526 - protein, 14 aa, Homo Sapiens
IWRLITASGSYHKL

SEQ ID NO: 101527 - protein, 14 aa, Homo Sapiens
WRLITASGSYHKLF

SEQ ID NO: 101528 - protein, 14 aa, Homo Sapiens
RLITASGSYHKLFW

SEQ ID NO: 101529 - protein, 14 aa, Homo Sapiens
LITASGSYHKLFWL

SEQ ID NO: 101530 - protein, 14 aa, Homo Sapiens
ITASGSYHKLFWLG

SEQ ID NO: 101531 - protein, 14 aa, Homo Sapiens
TASGSYHKLFWLGL

SEQ ID NO: 101532 - protein, 14 aa, Homo Sapiens
ASGSYHKLFWLGLT

SEQ ID NO: 101533 - protein, 14 aa, Homo Sapiens
SGSYHKLFWLGLTY

SEQ ID NO: 101534 - protein, 14 aa, Homo Sapiens
GSYHKLFWLGLTYG

SEQ ID NO: 101535 - protein, 14 aa, Homo Sapiens
SYHKLFWLGLTYGS

SEQ ID NO: 101536 - protein, 14 aa, Homo Sapiens
YHKLFWLGLTYGSP

SEQ ID NO: 101537 - protein, 14 aa, Homo Sapiens
HKLFWLGLTYGSPS

SEQ ID NO: 101538 - protein, 14 aa, Homo Sapiens
KLFWLGLTYGSPSE

SEQ ID NO: 101539 - protein, 14 aa, Homo Sapiens
LFWLGLTYGSPSEG

SEQ ID NO: 101540 - protein, 14 aa, Homo Sapiens
FWLGLTYGSPSEGF

SEQ ID NO: 101541 - protein, 14 aa, Homo Sapiens
WLGLTYGSPSEGFT

SEQ ID NO: 101542 - protein, 14 aa, Homo Sapiens
LGLTYGSPSEGFTW

SEQ ID NO: 101543 - protein, 14 aa, Homo Sapiens
GLTYGSPSEGFTWS

SEQ ID NO: 101544 - protein, 14 aa, Homo Sapiens
LTYGSPSEGFTWSD

SEQ ID NO: 101545 - protein, 14 aa, Homo Sapiens
TYGSPSEGFTWSDG

SEQ ID NO: 101546 - protein, 14 aa, Homo Sapiens
YGSPSEGFTWSDGS

SEQ ID NO: 101547 - protein, 14 aa, Homo Sapiens
GSPSEGFTWSDGSP

SEQ ID NO: 101548 - protein, 14 aa, Homo Sapiens
SPSEGFTWSDGSPV

SEQ ID NO: 101549 - protein, 14 aa, Homo Sapiens
PSEGFTWSDGSPVS

SEQ ID NO: 101550 - protein, 14 aa, Homo Sapiens
SEGFTWSDGSPVSY

SEQ ID NO: 101551 - protein, 14 aa, Homo Sapiens
EGFTWSDGSPVSYE

SEQ ID NO: 101552 - protein, 14 aa, Homo Sapiens
GFTWSDGSPVSYEN

SEQ ID NO: 101553 - protein, 14 aa, Homo Sapiens
FTWSDGSPVSYENW

SEQ ID NO: 101554 - protein, 14 aa, Homo Sapiens
TWSDGSPVSYENWA

SEQ ID NO: 101555 - protein, 14 aa, Homo Sapiens
WSDGSPVSYENWAY

SEQ ID NO: 101556 - protein, 14 aa, Homo Sapiens
SDGSPVSYENWAYG

SEQ ID NO: 101557 - protein, 14 aa, Homo Sapiens
DGSPVSYENWAYGE

SEQ ID NO: 101558 - protein, 14 aa, Homo Sapiens
GSPVSYENWAYGEP

SEQ ID NO: 101559 - protein, 14 aa, Homo Sapiens
SPVSYENWAYGEPN

SEQ ID NO: 101560 - protein, 14 aa, Homo Sapiens
PVSYENWAYGEPNN

SEQ ID NO: 101561 - protein, 14 aa, Homo Sapiens
VSYENWAYGEPNNY

SEQ ID NO: 101562 - protein, 14 aa, Homo Sapiens
SYENWAYGEPNNYQ

SEQ ID NO: 101563 - protein, 14 aa, Homo Sapiens
YENWAYGEPNNYQN

SEQ ID NO: 101564 - protein, 14 aa, Homo Sapiens
ENWAYGEPNNYQNV

SEQ ID NO: 101565 - protein, 14 aa, Homo Sapiens
NWAYGEPNNYQNVE

SEQ ID NO: 101566 - protein, 14 aa, Homo Sapiens
WAYGEPNNYQNVEY

SEQ ID NO: 101567 - protein, 14 aa, Homo Sapiens
AYGEPNNYQNVEYC

SEQ ID NO: 101568 - protein, 14 aa, Homo Sapiens
YGEPNNYQNVEYCG

SEQ ID NO: 101569 - protein, 14 aa, Homo Sapiens
GEPNNYQNVEYCGE

SEQ ID NO: 101570 - protein, 14 aa, Homo Sapiens
EPNNYQNVEYCGEL

SEQ ID NO: 101571 - protein, 14 aa, Homo Sapiens
PNNYQNVEYCGELK

SEQ ID NO: 101572 - protein, 14 aa, Homo Sapiens
NNYQNVEYCGELKG

SEQ ID NO: 101573 - protein, 14 aa, Homo Sapiens
NYQNVEYCGELKGD

SEQ ID NO: 101574 - protein, 14 aa, Homo Sapiens
YQNVEYCGELKGDP

SEQ ID NO: 101575 - protein, 14 aa, Homo Sapiens
QNVEYCGELKGDPT

SEQ ID NO: 101576 - protein, 14 aa, Homo Sapiens
NVEYCGELKGDPTM

SEQ ID NO: 101577 - protein, 14 aa, Homo Sapiens
VEYCGELKGDPTMS

SEQ ID NO: 101578 - protein, 14 aa, Homo Sapiens
EYCGELKGDPTMSW

SEQ ID NO: 101579 - protein, 14 aa, Homo Sapiens
YCGELKGDPTMSWN

SEQ ID NO: 101580 - protein, 14 aa, Homo Sapiens
CGELKGDPTMSWND

SEQ ID NO: 101581 - protein, 14 aa, Homo Sapiens
GELKGDPTMSWNDI

SEQ ID NO: 101582 - protein, 14 aa, Homo Sapiens
ELKGDPTMSWNDIN

SEQ ID NO: 101583 - protein, 14 aa, Homo Sapiens
LKGDPTMSWNDINC

SEQ ID NO: 101584 - protein, 14 aa, Homo Sapiens
KGDPTMSWNDINCE

SEQ ID NO: 101585 - protein, 14 aa, Homo Sapiens
GDPTMSWNDINCEH

SEQ ID NO: 101586 - protein, 14 aa, Homo Sapiens
DPTMSWNDINCEHL

SEQ ID NO: 101587 - protein, 14 aa, Homo Sapiens
PTMSWNDINCEHLN

SEQ ID NO: 101588 - protein, 14 aa, Homo Sapiens
TMSWNDINCEHLNN

SEQ ID NO: 101589 - protein, 14 aa, Homo Sapiens
MSWNDINCEHLNNW

SEQ ID NO: 101590 - protein, 14 aa, Homo Sapiens
SWNDINCEHLNNWI

SEQ ID NO: 101591 - protein, 14 aa, Homo Sapiens
WNDINCEHLNNWIC

SEQ ID NO: 101592 - protein, 14 aa, Homo Sapiens
NDINCEHLNNWICQ

SEQ ID NO: 101593 - protein, 14 aa, Homo Sapiens
DINCEHLNNWICQI

SEQ ID NO: 101594 - protein, 14 aa, Homo Sapiens
INCEHLNNWICQIQ

SEQ ID NO: 101595 - protein, 14 aa, Homo Sapiens
NCEHLNNWICQIQK

SEQ ID NO: 101596 - protein, 14 aa, Homo Sapiens
CEHLNNWICQIQKG

SEQ ID NO: 101597 - protein, 14 aa, Homo Sapiens
EHLNNWICQIQKGQ

SEQ ID NO: 101598 - protein, 14 aa, Homo Sapiens
HLNNWICQIQKGQT

SEQ ID NO: 101599 - protein, 14 aa, Homo Sapiens
LNNWICQIQKGQTP

SEQ ID NO: 101600 - protein, 14 aa, Homo Sapiens
NNWICQIQKGQTPK

SEQ ID NO: 101601 - protein, 14 aa, Homo Sapiens
NWICQIQKGQTPKP

SEQ ID NO: 101602 - protein, 14 aa, Homo Sapiens
WICQIQKGQTPKPE

SEQ ID NO: 101603 - protein, 14 aa, Homo Sapiens
ICQIQKGQTPKPEP

SEQ ID NO: 101604 - protein, 14 aa, Homo Sapiens
CQIQKGQTPKPEPT

SEQ ID NO: 101605 - protein, 14 aa, Homo Sapiens
QIQKGQTPKPEPTP

SEQ ID NO: 101606 - protein, 14 aa, Homo Sapiens
IQKGQTPKPEPTPA

SEQ ID NO: 101607 - protein, 14 aa, Homo Sapiens
QKGQTPKPEPTPAP

SEQ ID NO: 101608 - protein, 14 aa, Homo Sapiens
KGQTPKPEPTPAPQ

SEQ ID NO: 101609 - protein, 14 aa, Homo Sapiens
GQTPKPEPTPAPQD

SEQ ID NO: 101610 - protein, 14 aa, Homo Sapiens
QTPKPEPTPAPQDN

SEQ ID NO: 101611 - protein, 14 aa, Homo Sapiens
TPKPEPTPAPQDNP

SEQ ID NO: 101612 - protein, 14 aa, Homo Sapiens
PKPEPTPAPQDNPP

SEQ ID NO: 101613 - protein, 14 aa, Homo Sapiens
KPEPTPAPQDNPPV

SEQ ID NO: 101614 - protein, 14 aa, Homo Sapiens
PEPTPAPQDNPPVT

SEQ ID NO: 101615 - protein, 14 aa, Homo Sapiens
EPTPAPQDNPPVTE

SEQ ID NO: 101616 - protein, 14 aa, Homo Sapiens
PTPAPQDNPPVTED

SEQ ID NO: 101617 - protein, 14 aa, Homo Sapiens
TPAPQDNPPVTEDG

SEQ ID NO: 101618 - protein, 14 aa, Homo Sapiens
PAPQDNPPVTEDGW

SEQ ID NO: 101619 - protein, 14 aa, Homo Sapiens
APQDNPPVTEDGWV

SEQ ID NO: 101620 - protein, 14 aa, Homo Sapiens
PQDNPPVTEDGWVI

SEQ ID NO: 101621 - protein, 14 aa, Homo Sapiens
QDNPPVTEDGWVIY

SEQ ID NO: 101622 - protein, 14 aa, Homo Sapiens
DNPPVTEDGWVIYK

SEQ ID NO: 101623 - protein, 14 aa, Homo Sapiens
NPPVTEDGWVIYKD

SEQ ID NO: 101624 - protein, 14 aa, Homo Sapiens
PPVTEDGWVIYKDY

SEQ ID NO: 101625 - protein, 14 aa, Homo Sapiens
PVTEDGWVIYKDYQ

SEQ ID NO: 101626 - protein, 14 aa, Homo Sapiens
VTEDGWVIYKDYQY

SEQ ID NO: 101627 - protein, 14 aa, Homo Sapiens
TEDGWVIYKDYQYY

SEQ ID NO: 101628 - protein, 14 aa, Homo Sapiens
EDGWVIYKDYQYYF

SEQ ID NO: 101629 - protein, 14 aa, Homo Sapiens
DGWVIYKDYQYYFS

SEQ ID NO: 101630 - protein, 14 aa, Homo Sapiens
GWVIYKDYQYYFSK

SEQ ID NO: 101631 - protein, 14 aa, Homo Sapiens
WVIYKDYQYYFSKE

SEQ ID NO: 101632 - protein, 14 aa, Homo Sapiens
VIYKDYQYYFSKEK

SEQ ID NO: 101633 - protein, 14 aa, Homo Sapiens
IYKDYQYYFSKEKE

SEQ ID NO: 101634 - protein, 14 aa, Homo Sapiens
YKDYQYYFSKEKET

SEQ ID NO: 101635 - protein, 14 aa, Homo Sapiens
KDYQYYFSKEKETM

SEQ ID NO: 101636 - protein, 14 aa, Homo Sapiens
DYQYYFSKEKETMD

SEQ ID NO: 101637 - protein, 14 aa, Homo Sapiens
YQYYFSKEKETMDN

SEQ ID NO: 101638 - protein, 14 aa, Homo Sapiens
QYYFSKEKETMDNA

SEQ ID NO: 101639 - protein, 14 aa, Homo Sapiens
YYFSKEKETMDNAR

SEQ ID NO: 101640 - protein, 14 aa, Homo Sapiens
YFSKEKETMDNARA

SEQ ID NO: 101641 - protein, 14 aa, Homo Sapiens
FSKEKETMDNARAF

SEQ ID NO: 101642 - protein, 14 aa, Homo Sapiens
SKEKETMDNARAFC

SEQ ID NO: 101643 - protein, 14 aa, Homo Sapiens
KEKETMDNARAFCK

SEQ ID NO: 101644 - protein, 14 aa, Homo Sapiens
EKETMDNARAFCKR

SEQ ID NO: 101645 - protein, 14 aa, Homo Sapiens
KETMDNARAFCKRN

SEQ ID NO: 101646 - protein, 14 aa, Homo Sapiens
ETMDNARAFCKRNF

SEQ ID NO: 101647 - protein, 14 aa, Homo Sapiens
TMDNARAFCKRNFG

SEQ ID NO: 101648 - protein, 14 aa, Homo Sapiens
MDNARAFCKRNFGD

SEQ ID NO: 101649 - protein, 14 aa, Homo Sapiens
DNARAFCKRNFGDL

SEQ ID NO: 101650 - protein, 14 aa, Homo Sapiens
NARAFCKRNFGDLV

SEQ ID NO: 101651 - protein, 14 aa, Homo Sapiens
ARAFCKRNFGDLVS

SEQ ID NO: 101652 - protein, 14 aa, Homo Sapiens
RAFCKRNFGDLVSI

SEQ ID NO: 101653 - protein, 14 aa, Homo Sapiens
AFCKRNFGDLVSIQ

SEQ ID NO: 101654 - protein, 14 aa, Homo Sapiens
FCKRNFGDLVSIQS

SEQ ID NO: 101655 - protein, 14 aa, Homo Sapiens
CKRNFGDLVSIQSE

SEQ ID NO: 101656 - protein, 14 aa, Homo Sapiens
KRNFGDLVSIQSES

SEQ ID NO: 101657 - protein, 14 aa, Homo Sapiens
RNFGDLVSIQSESE

SEQ ID NO: 101658 - protein, 14 aa, Homo Sapiens
NFGDLVSIQSESEK

SEQ ID NO: 101659 - protein, 14 aa, Homo Sapiens
FGDLVSIQSESEKK

SEQ ID NO: 101660 - protein, 14 aa, Homo Sapiens
GDLVSIQSESEKKF

SEQ ID NO: 101661 - protein, 14 aa, Homo Sapiens
DLVSIQSESEKKFL

SEQ ID NO: 101662 - protein, 14 aa, Homo Sapiens
LVSIQSESEKKFLW

SEQ ID NO: 101663 - protein, 14 aa, Homo Sapiens
VSIQSESEKKFLWK

SEQ ID NO: 101664 - protein, 14 aa, Homo Sapiens
SIQSESEKKFLWKY

SEQ ID NO: 101665 - protein, 14 aa, Homo Sapiens
IQSESEKKFLWKYV

SEQ ID NO: 101666 - protein, 14 aa, Homo Sapiens
QSESEKKFLWKYVN

SEQ ID NO: 101667 - protein, 14 aa, Homo Sapiens
SESEKKFLWKYVNR

SEQ ID NO: 101668 - protein, 14 aa, Homo Sapiens
ESEKKFLWKYVNRN

SEQ ID NO: 101669 - protein, 14 aa, Homo Sapiens
SEKKFLWKYVNRND

SEQ ID NO: 101670 - protein, 14 aa, Homo Sapiens
EKKFLWKYVNRNDA

SEQ ID NO: 101671 - protein, 14 aa, Homo Sapiens
KKFLWKYVNRNDAQ

SEQ ID NO: 101672 - protein, 14 aa, Homo Sapiens
KFLWKYVNRNDAQS

SEQ ID NO: 101673 - protein, 14 aa, Homo Sapiens
FLWKYVNRNDAQSA

SEQ ID NO: 101674 - protein, 14 aa, Homo Sapiens
LWKYVNRNDAQSAY

SEQ ID NO: 101675 - protein, 14 aa, Homo Sapiens
WKYVNRNDAQSAYF

SEQ ID NO: 101676 - protein, 14 aa, Homo Sapiens
KYVNRNDAQSAYFI

SEQ ID NO: 101677 - protein, 14 aa, Homo Sapiens
YVNRNDAQSAYFIG

SEQ ID NO: 101678 - protein, 14 aa, Homo Sapiens
VNRNDAQSAYFIGL

SEQ ID NO: 101679 - protein, 14 aa, Homo Sapiens
NRNDAQSAYFIGLL

SEQ ID NO: 101680 - protein, 14 aa, Homo Sapiens
RNDAQSAYFIGLLI

SEQ ID NO: 101681 - protein, 14 aa, Homo Sapiens
NDAQSAYFIGLLIS

SEQ ID NO: 101682 - protein, 14 aa, Homo Sapiens
DAQSAYFIGLLISL

SEQ ID NO: 101683 - protein, 14 aa, Homo Sapiens
AQSAYFIGLLISLD

SEQ ID NO: 101684 - protein, 14 aa, Homo Sapiens
QSAYFIGLLISLDK

SEQ ID NO: 101685 - protein, 14 aa, Homo Sapiens
SAYFIGLLISLDKK

SEQ ID NO: 101686 - protein, 14 aa, Homo Sapiens
AYFIGLLISLDKKF

SEQ ID NO: 101687 - protein, 14 aa, Homo Sapiens
YFIGLLISLDKKFA

SEQ ID NO: 101688 - protein, 14 aa, Homo Sapiens
FIGLLISLDKKFAW

SEQ ID NO: 101689 - protein, 14 aa, Homo Sapiens
IGLLISLDKKFAWM

SEQ ID NO: 101690 - protein, 14 aa, Homo Sapiens
GLLISLDKKFAWMD

SEQ ID NO: 101691 - protein, 14 aa, Homo Sapiens
LLISLDKKFAWMDG

SEQ ID NO: 101692 - protein, 14 aa, Homo Sapiens
LISLDKKFAWMDGS

SEQ ID NO: 101693 - protein, 14 aa, Homo Sapiens
ISLDKKFAWMDGSK

SEQ ID NO: 101694 - protein, 14 aa, Homo Sapiens
SLDKKFAWMDGSKV

SEQ ID NO: 101695 - protein, 14 aa, Homo Sapiens
LDKKFAWMDGSKVD

SEQ ID NO: 101696 - protein, 14 aa, Homo Sapiens
DKKFAWMDGSKVDY

SEQ ID NO: 101697 - protein, 14 aa, Homo Sapiens
KKFAWMDGSKVDYV

SEQ ID NO: 101698 - protein, 14 aa, Homo Sapiens
KFAWMDGSKVDYVS

SEQ ID NO: 101699 - protein, 14 aa, Homo Sapiens
FAWMDGSKVDYVSW

SEQ ID NO: 101700 - protein, 14 aa, Homo Sapiens
AWMDGSKVDYVSWA

SEQ ID NO: 101701 - protein, 14 aa, Homo Sapiens
WMDGSKVDYVSWAT

SEQ ID NO: 101702 - protein, 14 aa, Homo Sapiens
MDGSKVDYVSWATG

SEQ ID NO: 101703 - protein, 14 aa, Homo Sapiens
DGSKVDYVSWATGE

SEQ ID NO: 101704 - protein, 14 aa, Homo Sapiens
GSKVDYVSWATGEP

SEQ ID NO: 101705 - protein, 14 aa, Homo Sapiens
SKVDYVSWATGEPN

SEQ ID NO: 101706 - protein, 14 aa, Homo Sapiens
KVDYVSWATGEPNF

SEQ ID NO: 101707 - protein, 14 aa, Homo Sapiens
VDYVSWATGEPNFA

SEQ ID NO: 101708 - protein, 14 aa, Homo Sapiens
DYVSWATGEPNFAN

SEQ ID NO: 101709 - protein, 14 aa, Homo Sapiens
YVSWATGEPNFANE

SEQ ID NO: 101710 - protein, 14 aa, Homo Sapiens
VSWATGEPNFANED

SEQ ID NO: 101711 - protein, 14 aa, Homo Sapiens
SWATGEPNFANEDE

SEQ ID NO: 101712 - protein, 14 aa, Homo Sapiens
WATGEPNFANEDEN

SEQ ID NO: 101713 - protein, 14 aa, Homo Sapiens
ATGEPNFANEDENC

SEQ ID NO: 101714 - protein, 14 aa, Homo Sapiens
TGEPNFANEDENCV

SEQ ID NO: 101715 - protein, 14 aa, Homo Sapiens
GEPNFANEDENCVT

SEQ ID NO: 101716 - protein, 14 aa, Homo Sapiens
EPNFANEDENCVTM

SEQ ID NO: 101717 - protein, 14 aa, Homo Sapiens
PNFANEDENCVTMY

SEQ ID NO: 101718 - protein, 14 aa, Homo Sapiens
NFANEDENCVTMYS

SEQ ID NO: 101719 - protein, 14 aa, Homo Sapiens
FANEDENCVTMYSN

SEQ ID NO: 101720 - protein, 14 aa, Homo Sapiens
ANEDENCVTMYSNS

SEQ ID NO: 101721 - protein, 14 aa, Homo Sapiens
NEDENCVTMYSNSG

SEQ ID NO: 101722 - protein, 14 aa, Homo Sapiens
EDENCVTMYSNSGF

SEQ ID NO: 101723 - protein, 14 aa, Homo Sapiens
DENCVTMYSNSGFW

SEQ ID NO: 101724 - protein, 14 aa, Homo Sapiens
ENCVTMYSNSGFWN

SEQ ID NO: 101725 - protein, 14 aa, Homo Sapiens
NCVTMYSNSGFWND

SEQ ID NO: 101726 - protein, 14 aa, Homo Sapiens
CVTMYSNSGFWNDI

SEQ ID NO: 101727 - protein, 14 aa, Homo Sapiens
VTMYSNSGFWNDIN

SEQ ID NO: 101728 - protein, 14 aa, Homo Sapiens
TMYSNSGFWNDINC

SEQ ID NO: 101729 - protein, 14 aa, Homo Sapiens
MYSNSGFWNDINCG

SEQ ID NO: 101730 - protein, 14 aa, Homo Sapiens
YSNSGFWNDINCGY

SEQ ID NO: 101731 - protein, 14 aa, Homo Sapiens
SNSGFWNDINCGYP

SEQ ID NO: 101732 - protein, 14 aa, Homo Sapiens
NSGFWNDINCGYPN

SEQ ID NO: 101733 - protein, 14 aa, Homo Sapiens
SGFWNDINCGYPNA

SEQ ID NO: 101734 - protein, 14 aa, Homo Sapiens
GFWNDINCGYPNAF

SEQ ID NO: 101735 - protein, 14 aa, Homo Sapiens
FWNDINCGYPNAFI

SEQ ID NO: 101736 - protein, 14 aa, Homo Sapiens
WNDINCGYPNAFIC

SEQ ID NO: 101737 - protein, 14 aa, Homo Sapiens
NDINCGYPNAFICQ

SEQ ID NO: 101738 - protein, 14 aa, Homo Sapiens
DINCGYPNAFICQR

SEQ ID NO: 101739 - protein, 14 aa, Homo Sapiens
INCGYPNAFICQRH

SEQ ID NO: 101740 - protein, 14 aa, Homo Sapiens
NCGYPNAFICQRHN

SEQ ID NO: 101741 - protein, 14 aa, Homo Sapiens
CGYPNAFICQRHNS

SEQ ID NO: 101742 - protein, 14 aa, Homo Sapiens
GYPNAFICQRHNSS

SEQ ID NO: 101743 - protein, 14 aa, Homo Sapiens
YPNAFICQRHNSSI

SEQ ID NO: 101744 - protein, 14 aa, Homo Sapiens
PNAFICQRHNSSIN

SEQ ID NO: 101745 - protein, 14 aa, Homo Sapiens
NAFICQRHNSSINA

SEQ ID NO: 101746 - protein, 14 aa, Homo Sapiens
AFICQRHNSSINAT

SEQ ID NO: 101747 - protein, 14 aa, Homo Sapiens
FICQRHNSSINATT

SEQ ID NO: 101748 - protein, 14 aa, Homo Sapiens
ICQRHNSSINATTV

SEQ ID NO: 101749 - protein, 14 aa, Homo Sapiens
CQRHNSSINATTVM

SEQ ID NO: 101750 - protein, 14 aa, Homo Sapiens
QRHNSSINATTVMP

SEQ ID NO: 101751 - protein, 14 aa, Homo Sapiens
RHNSSINATTVMPT

SEQ ID NO: 101752 - protein, 14 aa, Homo Sapiens
HNSSINATTVMPTM

SEQ ID NO: 101753 - protein, 14 aa, Homo Sapiens
NSSINATTVMPTMP

SEQ ID NO: 101754 - protein, 14 aa, Homo Sapiens
SSINATTVMPTMPS

SEQ ID NO: 101755 - protein, 14 aa, Homo Sapiens
SINATTVMPTMPSV

SEQ ID NO: 101756 - protein, 14 aa, Homo Sapiens
INATTVMPTMPSVP

SEQ ID NO: 101757 - protein, 14 aa, Homo Sapiens
NATTVMPTMPSVPS

SEQ ID NO: 101758 - protein, 14 aa, Homo Sapiens
ATTVMPTMPSVPSG

SEQ ID NO: 101759 - protein, 14 aa, Homo Sapiens
TTVMPTMPSVPSGC

SEQ ID NO: 101760 - protein, 14 aa, Homo Sapiens
TVMPTMPSVPSGCK

SEQ ID NO: 101761 - protein, 14 aa, Homo Sapiens
VMPTMPSVPSGCKE

SEQ ID NO: 101762 - protein, 14 aa, Homo Sapiens
MPTMPSVPSGCKEG

SEQ ID NO: 101763 - protein, 14 aa, Homo Sapiens
PTMPSVPSGCKEGW

SEQ ID NO: 101764 - protein, 14 aa, Homo Sapiens
TMPSVPSGCKEGWN

SEQ ID NO: 101765 - protein, 14 aa, Homo Sapiens
MPSVPSGCKEGWNF

SEQ ID NO: 101766 - protein, 14 aa, Homo Sapiens
PSVPSGCKEGWNFY

SEQ ID NO: 101767 - protein, 14 aa, Homo Sapiens
SVPSGCKEGWNFYS

SEQ ID NO: 101768 - protein, 14 aa, Homo Sapiens
VPSGCKEGWNFYSN

SEQ ID NO: 101769 - protein, 14 aa, Homo Sapiens
PSGCKEGWNFYSNK

SEQ ID NO: 101770 - protein, 14 aa, Homo Sapiens
SGCKEGWNFYSNKC

SEQ ID NO: 101771 - protein, 14 aa, Homo Sapiens
GCKEGWNFYSNKCF

SEQ ID NO: 101772 - protein, 14 aa, Homo Sapiens
CKEGWNFYSNKCFK

SEQ ID NO: 101773 - protein, 14 aa, Homo Sapiens
KEGWNFYSNKCFKI

SEQ ID NO: 101774 - protein, 14 aa, Homo Sapiens
EGWNFYSNKCFKIF

SEQ ID NO: 101775 - protein, 14 aa, Homo Sapiens
GWNFYSNKCFKIFG

SEQ ID NO: 101776 - protein, 14 aa, Homo Sapiens
WNFYSNKCFKIFGF

SEQ ID NO: 101777 - protein, 14 aa, Homo Sapiens
NFYSNKCFKIFGFM

SEQ ID NO: 101778 - protein, 14 aa, Homo Sapiens
FYSNKCFKIFGFME

SEQ ID NO: 101779 - protein, 14 aa, Homo Sapiens
YSNKCFKIFGFMEE

SEQ ID NO: 101780 - protein, 14 aa, Homo Sapiens
SNKCFKIFGFMEEE

SEQ ID NO: 101781 - protein, 14 aa, Homo Sapiens
NKCFKIFGFMEEER

SEQ ID NO: 101782 - protein, 14 aa, Homo Sapiens
KCFKIFGFMEEERK

SEQ ID NO: 101783 - protein, 14 aa, Homo Sapiens
CFKIFGFMEEERKN

SEQ ID NO: 101784 - protein, 14 aa, Homo Sapiens
FKIFGFMEEERKNW

SEQ ID NO: 101785 - protein, 14 aa, Homo Sapiens
KIFGFMEEERKNWQ

SEQ ID NO: 101786 - protein, 14 aa, Homo Sapiens
IFGFMEEERKNWQE

SEQ ID NO: 101787 - protein, 14 aa, Homo Sapiens
FGFMEEERKNWQEA

SEQ ID NO: 101788 - protein, 14 aa, Homo Sapiens
GFMEEERKNWQEAR

SEQ ID NO: 101789 - protein, 14 aa, Homo Sapiens
FMEEERKNWQEARK

SEQ ID NO: 101790 - protein, 14 aa, Homo Sapiens
MEEERKNWQEARKA

SEQ ID NO: 101791 - protein, 14 aa, Homo Sapiens
EEERKNWQEARKAC

SEQ ID NO: 101792 - protein, 14 aa, Homo Sapiens
EERKNWQEARKACI

SEQ ID NO: 101793 - protein, 14 aa, Homo Sapiens
ERKNWQEARKACIG

SEQ ID NO: 101794 - protein, 14 aa, Homo Sapiens
RKNWQEARKACIGF

SEQ ID NO: 101795 - protein, 14 aa, Homo Sapiens
KNWQEARKACIGFG

SEQ ID NO: 101796 - protein, 14 aa, Homo Sapiens
NWQEARKACIGFGG

SEQ ID NO: 101797 - protein, 14 aa, Homo Sapiens
WQEARKACIGFGGN

SEQ ID NO: 101798 - protein, 14 aa, Homo Sapiens
QEARKACIGFGGNL

SEQ ID NO: 101799 - protein, 14 aa, Homo Sapiens
EARKACIGFGGNLV

SEQ ID NO: 101800 - protein, 14 aa, Homo Sapiens
ARKACIGFGGNLVS

SEQ ID NO: 101801 - protein, 14 aa, Homo Sapiens
RKACIGFGGNLVSI

SEQ ID NO: 101802 - protein, 14 aa, Homo Sapiens
KACIGFGGNLVSIQ

SEQ ID NO: 101803 - protein, 14 aa, Homo Sapiens
ACIGFGGNLVSIQN

SEQ ID NO: 101804 - protein, 14 aa, Homo Sapiens
CIGFGGNLVSIQNE

SEQ ID NO: 101805 - protein, 14 aa, Homo Sapiens
IGFGGNLVSIQNEK

SEQ ID NO: 101806 - protein, 14 aa, Homo Sapiens
GFGGNLVSIQNEKE

SEQ ID NO: 101807 - protein, 14 aa, Homo Sapiens
FGGNLVSIQNEKEQ

SEQ ID NO: 101808 - protein, 14 aa, Homo Sapiens
GGNLVSIQNEKEQA

SEQ ID NO: 101809 - protein, 14 aa, Homo Sapiens
GNLVSIQNEKEQAF

SEQ ID NO: 101810 - protein, 14 aa, Homo Sapiens
NLVSIQNEKEQAFL

SEQ ID NO: 101811 - protein, 14 aa, Homo Sapiens
LVSIQNEKEQAFLT

SEQ ID NO: 101812 - protein, 14 aa, Homo Sapiens
VSIQNEKEQAFLTY

SEQ ID NO: 101813 - protein, 14 aa, Homo Sapiens
SIQNEKEQAFLTYH

SEQ ID NO: 101814 - protein, 14 aa, Homo Sapiens
IQNEKEQAFLTYHM

SEQ ID NO: 101815 - protein, 14 aa, Homo Sapiens
QNEKEQAFLTYHMK

SEQ ID NO: 101816 - protein, 14 aa, Homo Sapiens
NEKEQAFLTYHMKD

SEQ ID NO: 101817 - protein, 14 aa, Homo Sapiens
EKEQAFLTYHMKDS

SEQ ID NO: 101818 - protein, 14 aa, Homo Sapiens
KEQAFLTYHMKDST

SEQ ID NO: 101819 - protein, 14 aa, Homo Sapiens
EQAFLTYHMKDSTF

SEQ ID NO: 101820 - protein, 14 aa, Homo Sapiens
QAFLTYHMKDSTFS

SEQ ID NO: 101821 - protein, 14 aa, Homo Sapiens
AFLTYHMKDSTFSA

SEQ ID NO: 101822 - protein, 14 aa, Homo Sapiens
FLTYHMKDSTFSAW

SEQ ID NO: 101823 - protein, 14 aa, Homo Sapiens
LTYHMKDSTFSAWT

SEQ ID NO: 101824 - protein, 14 aa, Homo Sapiens
TYHMKDSTFSAWTG

SEQ ID NO: 101825 - protein, 14 aa, Homo Sapiens
YHMKDSTFSAWTGL

SEQ ID NO: 101826 - protein, 14 aa, Homo Sapiens
HMKDSTFSAWTGLN

SEQ ID NO: 101827 - protein, 14 aa, Homo Sapiens
MKDSTFSAWTGLND

SEQ ID NO: 101828 - protein, 14 aa, Homo Sapiens
KDSTFSAWTGLNDV

SEQ ID NO: 101829 - protein, 14 aa, Homo Sapiens
DSTFSAWTGLNDVN

SEQ ID NO: 101830 - protein, 14 aa, Homo Sapiens
STFSAWTGLNDVNS

SEQ ID NO: 101831 - protein, 14 aa, Homo Sapiens
TFSAWTGLNDVNSE

SEQ ID NO: 101832 - protein, 14 aa, Homo Sapiens
FSAWTGLNDVNSEH

SEQ ID NO: 101833 - protein, 14 aa, Homo Sapiens
SAWTGLNDVNSEHT

SEQ ID NO: 101834 - protein, 14 aa, Homo Sapiens
AWTGLNDVNSEHTF

SEQ ID NO: 101835 - protein, 14 aa, Homo Sapiens
WTGLNDVNSEHTFL

SEQ ID NO: 101836 - protein, 14 aa, Homo Sapiens
TGLNDVNSEHTFLW

SEQ ID NO: 101837 - protein, 14 aa, Homo Sapiens
GLNDVNSEHTFLWT

SEQ ID NO: 101838 - protein, 14 aa, Homo Sapiens
LNDVNSEHTFLWTD

SEQ ID NO: 101839 - protein, 14 aa, Homo Sapiens
NDVNSEHTFLWTDG

SEQ ID NO: 101840 - protein, 14 aa, Homo Sapiens
DVNSEHTFLWTDGR

SEQ ID NO: 101841 - protein, 14 aa, Homo Sapiens
VNSEHTFLWTDGRG

SEQ ID NO: 101842 - protein, 14 aa, Homo Sapiens
NSEHTFLWTDGRGV

SEQ ID NO: 101843 - protein, 14 aa, Homo Sapiens
SEHTFLWTDGRGVH

SEQ ID NO: 101844 - protein, 14 aa, Homo Sapiens
EHTFLWTDGRGVHY

SEQ ID NO: 101845 - protein, 14 aa, Homo Sapiens
HTFLWTDGRGVHYT

SEQ ID NO: 101846 - protein, 14 aa, Homo Sapiens
TFLWTDGRGVHYTN

SEQ ID NO: 101847 - protein, 14 aa, Homo Sapiens
FLWTDGRGVHYTNW

SEQ ID NO: 101848 - protein, 14 aa, Homo Sapiens
LWTDGRGVHYTNWG

SEQ ID NO: 101849 - protein, 14 aa, Homo Sapiens
WTDGRGVHYTNWGK

SEQ ID NO: 101850 - protein, 14 aa, Homo Sapiens
TDGRGVHYTNWGKG

SEQ ID NO: 101851 - protein, 14 aa, Homo Sapiens
DGRGVHYTNWGKGY

SEQ ID NO: 101852 - protein, 14 aa, Homo Sapiens
GRGVHYTNWGKGYP

SEQ ID NO: 101853 - protein, 14 aa, Homo Sapiens
RGVHYTNWGKGYPG

SEQ ID NO: 101854 - protein, 14 aa, Homo Sapiens
GVHYTNWGKGYPGG

SEQ ID NO: 101855 - protein, 14 aa, Homo Sapiens
VHYTNWGKGYPGGR

SEQ ID NO: 101856 - protein, 14 aa, Homo Sapiens
HYTNWGKGYPGGRR

SEQ ID NO: 101857 - protein, 14 aa, Homo Sapiens
YTNWGKGYPGGRRS

SEQ ID NO: 101858 - protein, 14 aa, Homo Sapiens
TNWGKGYPGGRRSS

SEQ ID NO: 101859 - protein, 14 aa, Homo Sapiens
NWGKGYPGGRRSSL

SEQ ID NO: 101860 - protein, 14 aa, Homo Sapiens
WGKGYPGGRRSSLS

SEQ ID NO: 101861 - protein, 14 aa, Homo Sapiens
GKGYPGGRRSSLSY

SEQ ID NO: 101862 - protein, 14 aa, Homo Sapiens
KGYPGGRRSSLSYE

SEQ ID NO: 101863 - protein, 14 aa, Homo Sapiens
GYPGGRRSSLSYED

SEQ ID NO: 101864 - protein, 14 aa, Homo Sapiens
YPGGRRSSLSYEDA

SEQ ID NO: 101865 - protein, 14 aa, Homo Sapiens
PGGRRSSLSYEDAD

SEQ ID NO: 101866 - protein, 14 aa, Homo Sapiens
GGRRSSLSYEDADC

SEQ ID NO: 101867 - protein, 14 aa, Homo Sapiens
GRRSSLSYEDADCV

SEQ ID NO: 101868 - protein, 14 aa, Homo Sapiens
RRSSLSYEDADCVV

SEQ ID NO: 101869 - protein, 14 aa, Homo Sapiens
RSSLSYEDADCVVI

SEQ ID NO: 101870 - protein, 14 aa, Homo Sapiens
SSLSYEDADCVVII

SEQ ID NO: 101871 - protein, 14 aa, Homo Sapiens
SLSYEDADCVVIIG

SEQ ID NO: 101872 - protein, 14 aa, Homo Sapiens
LSYEDADCVVIIGG

SEQ ID NO: 101873 - protein, 14 aa, Homo Sapiens
SYEDADCVVIIGGA

SEQ ID NO: 101874 - protein, 14 aa, Homo Sapiens
YEDADCVVIIGGAS

SEQ ID NO: 101875 - protein, 14 aa, Homo Sapiens
EDADCVVIIGGASN

SEQ ID NO: 101876 - protein, 14 aa, Homo Sapiens
DADCVVIIGGASNE

SEQ ID NO: 101877 - protein, 14 aa, Homo Sapiens
ADCVVIIGGASNEA

SEQ ID NO: 101878 - protein, 14 aa, Homo Sapiens
DCVVIIGGASNEAG

SEQ ID NO: 101879 - protein, 14 aa, Homo Sapiens
CVVIIGGASNEAGK

SEQ ID NO: 101880 - protein, 14 aa, Homo Sapiens
VVIIGGASNEAGKW

SEQ ID NO: 101881 - protein, 14 aa, Homo Sapiens
VIIGGASNEAGKWM

SEQ ID NO: 101882 - protein, 14 aa, Homo Sapiens
IIGGASNEAGKWMD

SEQ ID NO: 101883 - protein, 14 aa, Homo Sapiens
IGGASNEAGKWMDD

SEQ ID NO: 101884 - protein, 14 aa, Homo Sapiens
GGASNEAGKWMDDT

SEQ ID NO: 101885 - protein, 14 aa, Homo Sapiens
GASNEAGKWMDDTC

SEQ ID NO: 101886 - protein, 14 aa, Homo Sapiens
ASNEAGKWMDDTCD

SEQ ID NO: 101887 - protein, 14 aa, Homo Sapiens
SNEAGKWMDDTCDS

SEQ ID NO: 101888 - protein, 14 aa, Homo Sapiens
NEAGKWMDDTCDSK

SEQ ID NO: 101889 - protein, 14 aa, Homo Sapiens
EAGKWMDDTCDSKR

SEQ ID NO: 101890 - protein, 14 aa, Homo Sapiens
AGKWMDDTCDSKRG

SEQ ID NO: 101891 - protein, 14 aa, Homo Sapiens
GKWMDDTCDSKRGY

SEQ ID NO: 101892 - protein, 14 aa, Homo Sapiens
KWMDDTCDSKRGYI

SEQ ID NO: 101893 - protein, 14 aa, Homo Sapiens
WMDDTCDSKRGYIC

SEQ ID NO: 101894 - protein, 14 aa, Homo Sapiens
MDDTCDSKRGYICQ

SEQ ID NO: 101895 - protein, 14 aa, Homo Sapiens
DDTCDSKRGYICQT

SEQ ID NO: 101896 - protein, 14 aa, Homo Sapiens
DTCDSKRGYICQTR

SEQ ID NO: 101897 - protein, 14 aa, Homo Sapiens
TCDSKRGYICQTRS

SEQ ID NO: 101898 - protein, 14 aa, Homo Sapiens
CDSKRGYICQTRSD

SEQ ID NO: 101899 - protein, 14 aa, Homo Sapiens
DSKRGYICQTRSDP

SEQ ID NO: 101900 - protein, 14 aa, Homo Sapiens
SKRGYICQTRSDPS

SEQ ID NO: 101901 - protein, 14 aa, Homo Sapiens
KRGYICQTRSDPSL

SEQ ID NO: 101902 - protein, 14 aa, Homo Sapiens
RGYICQTRSDPSLT

SEQ ID NO: 101903 - protein, 14 aa, Homo Sapiens
GYICQTRSDPSLTN

SEQ ID NO: 101904 - protein, 14 aa, Homo Sapiens
YICQTRSDPSLTNP

SEQ ID NO: 101905 - protein, 14 aa, Homo Sapiens
ICQTRSDPSLTNPP

SEQ ID NO: 101906 - protein, 14 aa, Homo Sapiens
CQTRSDPSLTNPPA

SEQ ID NO: 101907 - protein, 14 aa, Homo Sapiens
QTRSDPSLTNPPAT

SEQ ID NO: 101908 - protein, 14 aa, Homo Sapiens
TRSDPSLTNPPATI

SEQ ID NO: 101909 - protein, 14 aa, Homo Sapiens
RSDPSLTNPPATIQ

SEQ ID NO: 101910 - protein, 14 aa, Homo Sapiens
SDPSLTNPPATIQT

SEQ ID NO: 101911 - protein, 14 aa, Homo Sapiens
DPSLTNPPATIQTD

SEQ ID NO: 101912 - protein, 14 aa, Homo Sapiens
PSLTNPPATIQTDG

SEQ ID NO: 101913 - protein, 14 aa, Homo Sapiens
SLTNPPATIQTDGF

SEQ ID NO: 101914 - protein, 14 aa, Homo Sapiens
LTNPPATIQTDGFV

SEQ ID NO: 101915 - protein, 14 aa, Homo Sapiens
TNPPATIQTDGFVK

SEQ ID NO: 101916 - protein, 14 aa, Homo Sapiens
NPPATIQTDGFVKY

SEQ ID NO: 101917 - protein, 14 aa, Homo Sapiens
PPATIQTDGFVKYG

SEQ ID NO: 101918 - protein, 14 aa, Homo Sapiens
PATIQTDGFVKYGK

SEQ ID NO: 101919 - protein, 14 aa, Homo Sapiens
ATIQTDGFVKYGKS

SEQ ID NO: 101920 - protein, 14 aa, Homo Sapiens
TIQTDGFVKYGKSS

SEQ ID NO: 101921 - protein, 14 aa, Homo Sapiens
IQTDGFVKYGKSSY

SEQ ID NO: 101922 - protein, 14 aa, Homo Sapiens
QTDGFVKYGKSSYS

SEQ ID NO: 101923 - protein, 14 aa, Homo Sapiens
TDGFVKYGKSSYSL

SEQ ID NO: 101924 - protein, 14 aa, Homo Sapiens
DGFVKYGKSSYSLM

SEQ ID NO: 101925 - protein, 14 aa, Homo Sapiens
GFVKYGKSSYSLMR

SEQ ID NO: 101926 - protein, 14 aa, Homo Sapiens
FVKYGKSSYSLMRQ

SEQ ID NO: 101927 - protein, 14 aa, Homo Sapiens
VKYGKSSYSLMRQK

SEQ ID NO: 101928 - protein, 14 aa, Homo Sapiens
KYGKSSYSLMRQKF

SEQ ID NO: 101929 - protein, 14 aa, Homo Sapiens
YGKSSYSLMRQKFQ

SEQ ID NO: 101930 - protein, 14 aa, Homo Sapiens
GKSSYSLMRQKFQW

SEQ ID NO: 101931 - protein, 14 aa, Homo Sapiens
KSSYSLMRQKFQWH

SEQ ID NO: 101932 - protein, 14 aa, Homo Sapiens
SSYSLMRQKFQWHE

SEQ ID NO: 101933 - protein, 14 aa, Homo Sapiens
SYSLMRQKFQWHEA

SEQ ID NO: 101934 - protein, 14 aa, Homo Sapiens
YSLMRQKFQWHEAE

SEQ ID NO: 101935 - protein, 14 aa, Homo Sapiens
SLMRQKFQWHEAET

SEQ ID NO: 101936 - protein, 14 aa, Homo Sapiens
LMRQKFQWHEAETY

SEQ ID NO: 101937 - protein, 14 aa, Homo Sapiens
MRQKFQWHEAETYC

SEQ ID NO: 101938 - protein, 14 aa, Homo Sapiens
RQKFQWHEAETYCK

SEQ ID NO: 101939 - protein, 14 aa, Homo Sapiens
QKFQWHEAETYCKL

SEQ ID NO: 101940 - protein, 14 aa, Homo Sapiens
KFQWHEAETYCKLH

SEQ ID NO: 101941 - protein, 14 aa, Homo Sapiens
FQWHEAETYCKLHN

SEQ ID NO: 101942 - protein, 14 aa, Homo Sapiens
QWHEAETYCKLHNS

SEQ ID NO: 101943 - protein, 14 aa, Homo Sapiens
WHEAETYCKLHNSL

SEQ ID NO: 101944 - protein, 14 aa, Homo Sapiens
HEAETYCKLHNSLI

SEQ ID NO: 101945 - protein, 14 aa, Homo Sapiens
EAETYCKLHNSLIA

SEQ ID NO: 101946 - protein, 14 aa, Homo Sapiens
AETYCKLHNSLIAS

SEQ ID NO: 101947 - protein, 14 aa, Homo Sapiens
ETYCKLHNSLIASI

SEQ ID NO: 101948 - protein, 14 aa, Homo Sapiens
TYCKLHNSLIASIL

SEQ ID NO: 101949 - protein, 14 aa, Homo Sapiens
YCKLHNSLIASILD

SEQ ID NO: 101950 - protein, 14 aa, Homo Sapiens
CKLHNSLIASILDP

SEQ ID NO: 101951 - protein, 14 aa, Homo Sapiens
KLHNSLIASILDPY

SEQ ID NO: 101952 - protein, 14 aa, Homo Sapiens
LHNSLIASILDPYS

SEQ ID NO: 101953 - protein, 14 aa, Homo Sapiens
HNSLIASILDPYSN

SEQ ID NO: 101954 - protein, 14 aa, Homo Sapiens
NSLIASILDPYSNA

SEQ ID NO: 101955 - protein, 14 aa, Homo Sapiens
SLIASILDPYSNAF

SEQ ID NO: 101956 - protein, 14 aa, Homo Sapiens
LIASILDPYSNAFA

SEQ ID NO: 101957 - protein, 14 aa, Homo Sapiens
IASILDPYSNAFAW

SEQ ID NO: 101958 - protein, 14 aa, Homo Sapiens
ASILDPYSNAFAWL

SEQ ID NO: 101959 - protein, 14 aa, Homo Sapiens
SILDPYSNAFAWLQ

SEQ ID NO: 101960 - protein, 14 aa, Homo Sapiens
ILDPYSNAFAWLQM

SEQ ID NO: 101961 - protein, 14 aa, Homo Sapiens
LDPYSNAFAWLQME

SEQ ID NO: 101962 - protein, 14 aa, Homo Sapiens
DPYSNAFAWLQMET

SEQ ID NO: 101963 - protein, 14 aa, Homo Sapiens
PYSNAFAWLQMETS

SEQ ID NO: 101964 - protein, 14 aa, Homo Sapiens
YSNAFAWLQMETSN

SEQ ID NO: 101965 - protein, 14 aa, Homo Sapiens
SNAFAWLQMETSNE

SEQ ID NO: 101966 - protein, 14 aa, Homo Sapiens
NAFAWLQMETSNER

SEQ ID NO: 101967 - protein, 14 aa, Homo Sapiens
AFAWLQMETSNERV

SEQ ID NO: 101968 - protein, 14 aa, Homo Sapiens
FAWLQMETSNERVW

SEQ ID NO: 101969 - protein, 14 aa, Homo Sapiens
AWLQMETSNERVWI

SEQ ID NO: 101970 - protein, 14 aa, Homo Sapiens
WLQMETSNERVWIA

SEQ ID NO: 101971 - protein, 14 aa, Homo Sapiens
LQMETSNERVWIAL

SEQ ID NO: 101972 - protein, 14 aa, Homo Sapiens
QMETSNERVWIALN

SEQ ID NO: 101973 - protein, 14 aa, Homo Sapiens
METSNERVWIALNS

SEQ ID NO: 101974 - protein, 14 aa, Homo Sapiens
ETSNERVWIALNSN

SEQ ID NO: 101975 - protein, 14 aa, Homo Sapiens
TSNERVWIALNSNL

SEQ ID NO: 101976 - protein, 14 aa, Homo Sapiens
SNERVWIALNSNLT

SEQ ID NO: 101977 - protein, 14 aa, Homo Sapiens
NERVWIALNSNLTD

SEQ ID NO: 101978 - protein, 14 aa, Homo Sapiens
ERVWIALNSNLTDN

SEQ ID NO: 101979 - protein, 14 aa, Homo Sapiens
RVWIALNSNLTDNQ

SEQ ID NO: 101980 - protein, 14 aa, Homo Sapiens
VWIALNSNLTDNQY

SEQ ID NO: 101981 - protein, 14 aa, Homo Sapiens
WIALNSNLTDNQYT

SEQ ID NO: 101982 - protein, 14 aa, Homo Sapiens
IALNSNLTDNQYTW

SEQ ID NO: 101983 - protein, 14 aa, Homo Sapiens
ALNSNLTDNQYTWT

SEQ ID NO: 101984 - protein, 14 aa, Homo Sapiens
LNSNLTDNQYTWTD

SEQ ID NO: 101985 - protein, 14 aa, Homo Sapiens
NSNLTDNQYTWTDK

SEQ ID NO: 101986 - protein, 14 aa, Homo Sapiens
SNLTDNQYTWTDKW

SEQ ID NO: 101987 - protein, 14 aa, Homo Sapiens
NLTDNQYTWTDKWR

SEQ ID NO: 101988 - protein, 14 aa, Homo Sapiens
LTDNQYTWTDKWRV

SEQ ID NO: 101989 - protein, 14 aa, Homo Sapiens
TDNQYTWTDKWRVR

SEQ ID NO: 101990 - protein, 14 aa, Homo Sapiens
DNQYTWTDKWRVRY

SEQ ID NO: 101991 - protein, 14 aa, Homo Sapiens
NQYTWTDKWRVRYT

SEQ ID NO: 101992 - protein, 14 aa, Homo Sapiens
QYTWTDKWRVRYTN

SEQ ID NO: 101993 - protein, 14 aa, Homo Sapiens
YTWTDKWRVRYTNW

SEQ ID NO: 101994 - protein, 14 aa, Homo Sapiens
TWTDKWRVRYTNWA

SEQ ID NO: 101995 - protein, 14 aa, Homo Sapiens
WTDKWRVRYTNWAA

SEQ ID NO: 101996 - protein, 14 aa, Homo Sapiens
TDKWRVRYTNWAAD

SEQ ID NO: 101997 - protein, 14 aa, Homo Sapiens
DKWRVRYTNWAADE

SEQ ID NO: 101998 - protein, 14 aa, Homo Sapiens
KWRVRYTNWAADEP

SEQ ID NO: 101999 - protein, 14 aa, Homo Sapiens
WRVRYTNWAADEPK

SEQ ID NO: 102000 - protein, 14 aa, Homo Sapiens
RVRYTNWAADEPKL

SEQ ID NO: 102001 - protein, 14 aa, Homo Sapiens
VRYTNWAADEPKLK

SEQ ID NO: 102002 - protein, 14 aa, Homo Sapiens
RYTNWAADEPKLKS

SEQ ID NO: 102003 - protein, 14 aa, Homo Sapiens
YTNWAADEPKLKSA

SEQ ID NO: 102004 - protein, 14 aa, Homo Sapiens
TNWAADEPKLKSAC

SEQ ID NO: 102005 - protein, 14 aa, Homo Sapiens
NWAADEPKLKSACV

SEQ ID NO: 102006 - protein, 14 aa, Homo Sapiens
WAADEPKLKSACVY

SEQ ID NO: 102007 - protein, 14 aa, Homo Sapiens
AADEPKLKSACVYL

SEQ ID NO: 102008 - protein, 14 aa, Homo Sapiens
ADEPKLKSACVYLD

SEQ ID NO: 102009 - protein, 14 aa, Homo Sapiens
DEPKLKSACVYLDL

SEQ ID NO: 102010 - protein, 14 aa, Homo Sapiens
EPKLKSACVYLDLD

SEQ ID NO: 102011 - protein, 14 aa, Homo Sapiens
PKLKSACVYLDLDG

SEQ ID NO: 102012 - protein, 14 aa, Homo Sapiens
KLKSACVYLDLDGY

SEQ ID NO: 102013 - protein, 14 aa, Homo Sapiens
LKSACVYLDLDGYW

SEQ ID NO: 102014 - protein, 14 aa, Homo Sapiens
KSACVYLDLDGYWK

SEQ ID NO: 102015 - protein, 14 aa, Homo Sapiens
SACVYLDLDGYWKT

SEQ ID NO: 102016 - protein, 14 aa, Homo Sapiens
ACVYLDLDGYWKTA

SEQ ID NO: 102017 - protein, 14 aa, Homo Sapiens
CVYLDLDGYWKTAH

SEQ ID NO: 102018 - protein, 14 aa, Homo Sapiens
VYLDLDGYWKTAHC

SEQ ID NO: 102019 - protein, 14 aa, Homo Sapiens
YLDLDGYWKTAHCN

SEQ ID NO: 102020 - protein, 14 aa, Homo Sapiens
LDLDGYWKTAHCNE

SEQ ID NO: 102021 - protein, 14 aa, Homo Sapiens
DLDGYWKTAHCNES

SEQ ID NO: 102022 - protein, 14 aa, Homo Sapiens
LDGYWKTAHCNESF

SEQ ID NO: 102023 - protein, 14 aa, Homo Sapiens
DGYWKTAHCNESFY

SEQ ID NO: 102024 - protein, 14 aa, Homo Sapiens
GYWKTAHCNESFYF

SEQ ID NO: 102025 - protein, 14 aa, Homo Sapiens
YWKTAHCNESFYFL

SEQ ID NO: 102026 - protein, 14 aa, Homo Sapiens
WKTAHCNESFYFLC

SEQ ID NO: 102027 - protein, 14 aa, Homo Sapiens
KTAHCNESFYFLCK

SEQ ID NO: 102028 - protein, 14 aa, Homo Sapiens
TAHCNESFYFLCKR

SEQ ID NO: 102029 - protein, 14 aa, Homo Sapiens
AHCNESFYFLCKRS

SEQ ID NO: 102030 - protein, 14 aa, Homo Sapiens
HCNESFYFLCKRSD

SEQ ID NO: 102031 - protein, 14 aa, Homo Sapiens
CNESFYFLCKRSDE

SEQ ID NO: 102032 - protein, 14 aa, Homo Sapiens
NESFYFLCKRSDEI

SEQ ID NO: 102033 - protein, 14 aa, Homo Sapiens
ESFYFLCKRSDEIP

SEQ ID NO: 102034 - protein, 14 aa, Homo Sapiens
SFYFLCKRSDEIPA

SEQ ID NO: 102035 - protein, 14 aa, Homo Sapiens
FYFLCKRSDEIPAT

SEQ ID NO: 102036 - protein, 14 aa, Homo Sapiens
YFLCKRSDEIPATE

SEQ ID NO: 102037 - protein, 14 aa, Homo Sapiens
FLCKRSDEIPATEP

SEQ ID NO: 102038 - protein, 14 aa, Homo Sapiens
LCKRSDEIPATEPP

SEQ ID NO: 102039 - protein, 14 aa, Homo Sapiens
CKRSDEIPATEPPQ

SEQ ID NO: 102040 - protein, 14 aa, Homo Sapiens
KRSDEIPATEPPQL

SEQ ID NO: 102041 - protein, 14 aa, Homo Sapiens
RSDEIPATEPPQLP

SEQ ID NO: 102042 - protein, 14 aa, Homo Sapiens
SDEIPATEPPQLPG

SEQ ID NO: 102043 - protein, 14 aa, Homo Sapiens
DEIPATEPPQLPGR

SEQ ID NO: 102044 - protein, 14 aa, Homo Sapiens
EIPATEPPQLPGRC

SEQ ID NO: 102045 - protein, 14 aa, Homo Sapiens
IPATEPPQLPGRCP

SEQ ID NO: 102046 - protein, 14 aa, Homo Sapiens
PATEPPQLPGRCPE

SEQ ID NO: 102047 - protein, 14 aa, Homo Sapiens
ATEPPQLPGRCPES

SEQ ID NO: 102048 - protein, 14 aa, Homo Sapiens
TEPPQLPGRCPESD

SEQ ID NO: 102049 - protein, 14 aa, Homo Sapiens
EPPQLPGRCPESDH

SEQ ID NO: 102050 - protein, 14 aa, Homo Sapiens
PPQLPGRCPESDHT

SEQ ID NO: 102051 - protein, 14 aa, Homo Sapiens
PQLPGRCPESDHTA

SEQ ID NO: 102052 - protein, 14 aa, Homo Sapiens
QLPGRCPESDHTAW

SEQ ID NO: 102053 - protein, 14 aa, Homo Sapiens
LPGRCPESDHTAWI

SEQ ID NO: 102054 - protein, 14 aa, Homo Sapiens
PGRCPESDHTAWIP

SEQ ID NO: 102055 - protein, 14 aa, Homo Sapiens
GRCPESDHTAWIPF

SEQ ID NO: 102056 - protein, 14 aa, Homo Sapiens
RCPESDHTAWIPFH

SEQ ID NO: 102057 - protein, 14 aa, Homo Sapiens
CPESDHTAWIPFHG

SEQ ID NO: 102058 - protein, 14 aa, Homo Sapiens
PESDHTAWIPFHGH

SEQ ID NO: 102059 - protein, 14 aa, Homo Sapiens
ESDHTAWIPFHGHC

SEQ ID NO: 102060 - protein, 14 aa, Homo Sapiens
SDHTAWIPFHGHCY

SEQ ID NO: 102061 - protein, 14 aa, Homo Sapiens
DHTAWIPFHGHCYY

SEQ ID NO: 102062 - protein, 14 aa, Homo Sapiens
HTAWIPFHGHCYYI

SEQ ID NO: 102063 - protein, 14 aa, Homo Sapiens
TAWIPFHGHCYYIE

SEQ ID NO: 102064 - protein, 14 aa, Homo Sapiens
AWIPFHGHCYYIES

SEQ ID NO: 102065 - protein, 14 aa, Homo Sapiens
WIPFHGHCYYIESS

SEQ ID NO: 102066 - protein, 14 aa, Homo Sapiens
IPFHGHCYYIESSY

SEQ ID NO: 102067 - protein, 14 aa, Homo Sapiens
PFHGHCYYIESSYT

SEQ ID NO: 102068 - protein, 14 aa, Homo Sapiens
FHGHCYYIESSYTR

SEQ ID NO: 102069 - protein, 14 aa, Homo Sapiens
HGHCYYIESSYTRN

SEQ ID NO: 102070 - protein, 14 aa, Homo Sapiens
GHCYYIESSYTRNW

SEQ ID NO: 102071 - protein, 14 aa, Homo Sapiens
HCYYIESSYTRNWG

SEQ ID NO: 102072 - protein, 14 aa, Homo Sapiens
CYYIESSYTRNWGQ

SEQ ID NO: 102073 - protein, 14 aa, Homo Sapiens
YYIESSYTRNWGQA

SEQ ID NO: 102074 - protein, 14 aa, Homo Sapiens
YIESSYTRNWGQAS

SEQ ID NO: 102075 - protein, 14 aa, Homo Sapiens
IESSYTRNWGQASL

SEQ ID NO: 102076 - protein, 14 aa, Homo Sapiens
ESSYTRNWGQASLE

SEQ ID NO: 102077 - protein, 14 aa, Homo Sapiens
SSYTRNWGQASLEC

SEQ ID NO: 102078 - protein, 14 aa, Homo Sapiens
SYTRNWGQASLECL

SEQ ID NO: 102079 - protein, 14 aa, Homo Sapiens
YTRNWGQASLECLR

SEQ ID NO: 102080 - protein, 14 aa, Homo Sapiens
TRNWGQASLECLRM

SEQ ID NO: 102081 - protein, 14 aa, Homo Sapiens
RNWGQASLECLRMG

SEQ ID NO: 102082 - protein, 14 aa, Homo Sapiens
NWGQASLECLRMGS

SEQ ID NO: 102083 - protein, 14 aa, Homo Sapiens
WGQASLECLRMGSS

SEQ ID NO: 102084 - protein, 14 aa, Homo Sapiens
GQASLECLRMGSSL

SEQ ID NO: 102085 - protein, 14 aa, Homo Sapiens
QASLECLRMGSSLV

SEQ ID NO: 102086 - protein, 14 aa, Homo Sapiens
ASLECLRMGSSLVS

SEQ ID NO: 102087 - protein, 14 aa, Homo Sapiens
SLECLRMGSSLVSI

SEQ ID NO: 102088 - protein, 14 aa, Homo Sapiens
LECLRMGSSLVSIE

SEQ ID NO: 102089 - protein, 14 aa, Homo Sapiens
ECLRMGSSLVSIES

SEQ ID NO: 102090 - protein, 14 aa, Homo Sapiens
CLRMGSSLVSIESA

SEQ ID NO: 102091 - protein, 14 aa, Homo Sapiens
LRMGSSLVSIESAA

SEQ ID NO: 102092 - protein, 14 aa, Homo Sapiens
RMGSSLVSIESAAE

SEQ ID NO: 102093 - protein, 14 aa, Homo Sapiens
MGSSLVSIESAAES

SEQ ID NO: 102094 - protein, 14 aa, Homo Sapiens
GSSLVSIESAAESS

SEQ ID NO: 102095 - protein, 14 aa, Homo Sapiens
SSLVSIESAAESSF

SEQ ID NO: 102096 - protein, 14 aa, Homo Sapiens
SLVSIESAAESSFL

SEQ ID NO: 102097 - protein, 14 aa, Homo Sapiens
LVSIESAAESSFLS

SEQ ID NO: 102098 - protein, 14 aa, Homo Sapiens
VSIESAAESSFLSY

SEQ ID NO: 102099 - protein, 14 aa, Homo Sapiens
SIESAAESSFLSYR

SEQ ID NO: 102100 - protein, 14 aa, Homo Sapiens
IESAAESSFLSYRV

SEQ ID NO: 102101 - protein, 14 aa, Homo Sapiens
ESAAESSFLSYRVE

SEQ ID NO: 102102 - protein, 14 aa, Homo Sapiens
SAAESSFLSYRVEP

SEQ ID NO: 102103 - protein, 14 aa, Homo Sapiens
AAESSFLSYRVEPL

SEQ ID NO: 102104 - protein, 14 aa, Homo Sapiens
AESSFLSYRVEPLK

SEQ ID NO: 102105 - protein, 14 aa, Homo Sapiens
ESSFLSYRVEPLKS

SEQ ID NO: 102106 - protein, 14 aa, Homo Sapiens
SSFLSYRVEPLKSK

SEQ ID NO: 102107 - protein, 14 aa, Homo Sapiens
SFLSYRVEPLKSKT

SEQ ID NO: 102108 - protein, 14 aa, Homo Sapiens
FLSYRVEPLKSKTN

SEQ ID NO: 102109 - protein, 14 aa, Homo Sapiens
LSYRVEPLKSKTNF

SEQ ID NO: 102110 - protein, 14 aa, Homo Sapiens
SYRVEPLKSKTNFW

SEQ ID NO: 102111 - protein, 14 aa, Homo Sapiens
YRVEPLKSKTNFWI

SEQ ID NO: 102112 - protein, 14 aa, Homo Sapiens
RVEPLKSKTNFWIG

SEQ ID NO: 102113 - protein, 14 aa, Homo Sapiens
VEPLKSKTNFWIGL

SEQ ID NO: 102114 - protein, 14 aa, Homo Sapiens
EPLKSKTNFWIGLF

SEQ ID NO: 102115 - protein, 14 aa, Homo Sapiens
PLKSKTNFWIGLFR

SEQ ID NO: 102116 - protein, 14 aa, Homo Sapiens
LKSKTNFWIGLFRN

SEQ ID NO: 102117 - protein, 14 aa, Homo Sapiens
KSKTNFWIGLFRNV

SEQ ID NO: 102118 - protein, 14 aa, Homo Sapiens
SKTNFWIGLFRNVE

SEQ ID NO: 102119 - protein, 14 aa, Homo Sapiens
KTNFWIGLFRNVEG

SEQ ID NO: 102120 - protein, 14 aa, Homo Sapiens
TNFWIGLFRNVEGT

SEQ ID NO: 102121 - protein, 14 aa, Homo Sapiens
NFWIGLFRNVEGTW

SEQ ID NO: 102122 - protein, 14 aa, Homo Sapiens
FWIGLFRNVEGTWL

SEQ ID NO: 102123 - protein, 14 aa, Homo Sapiens
WIGLFRNVEGTWLW

SEQ ID NO: 102124 - protein, 14 aa, Homo Sapiens
IGLFRNVEGTWLWI

SEQ ID NO: 102125 - protein, 14 aa, Homo Sapiens
GLFRNVEGTWLWIN

SEQ ID NO: 102126 - protein, 14 aa, Homo Sapiens
LFRNVEGTWLWINN

SEQ ID NO: 102127 - protein, 14 aa, Homo Sapiens
FRNVEGTWLWINNS

SEQ ID NO: 102128 - protein, 14 aa, Homo Sapiens
RNVEGTWLWINNSP

SEQ ID NO: 102129 - protein, 14 aa, Homo Sapiens
NVEGTWLWINNSPV

SEQ ID NO: 102130 - protein, 14 aa, Homo Sapiens
VEGTWLWINNSPVS

SEQ ID NO: 102131 - protein, 14 aa, Homo Sapiens
EGTWLWINNSPVSF

SEQ ID NO: 102132 - protein, 14 aa, Homo Sapiens
GTWLWINNSPVSFV

SEQ ID NO: 102133 - protein, 14 aa, Homo Sapiens
TWLWINNSPVSFVN

SEQ ID NO: 102134 - protein, 14 aa, Homo Sapiens
WLWINNSPVSFVNW

SEQ ID NO: 102135 - protein, 14 aa, Homo Sapiens
LWINNSPVSFVNWN

SEQ ID NO: 102136 - protein, 14 aa, Homo Sapiens
WINNSPVSFVNWNT

SEQ ID NO: 102137 - protein, 14 aa, Homo Sapiens
INNSPVSFVNWNTG

SEQ ID NO: 102138 - protein, 14 aa, Homo Sapiens
NNSPVSFVNWNTGD

SEQ ID NO: 102139 - protein, 14 aa, Homo Sapiens
NSPVSFVNWNTGDP

SEQ ID NO: 102140 - protein, 14 aa, Homo Sapiens
SPVSFVNWNTGDPS

SEQ ID NO: 102141 - protein, 14 aa, Homo Sapiens
PVSFVNWNTGDPSG

SEQ ID NO: 102142 - protein, 14 aa, Homo Sapiens
VSFVNWNTGDPSGE

SEQ ID NO: 102143 - protein, 14 aa, Homo Sapiens
SFVNWNTGDPSGER

SEQ ID NO: 102144 - protein, 14 aa, Homo Sapiens
FVNWNTGDPSGERN

SEQ ID NO: 102145 - protein, 14 aa, Homo Sapiens
VNWNTGDPSGERND

SEQ ID NO: 102146 - protein, 14 aa, Homo Sapiens
NWNTGDPSGERNDC

SEQ ID NO: 102147 - protein, 14 aa, Homo Sapiens
WNTGDPSGERNDCV

SEQ ID NO: 102148 - protein, 14 aa, Homo Sapiens
NTGDPSGERNDCVA

SEQ ID NO: 102149 - protein, 14 aa, Homo Sapiens
TGDPSGERNDCVAL

SEQ ID NO: 102150 - protein, 14 aa, Homo Sapiens
GDPSGERNDCVALH

SEQ ID NO: 102151 - protein, 14 aa, Homo Sapiens
DPSGERNDCVALHA

SEQ ID NO: 102152 - protein, 14 aa, Homo Sapiens
PSGERNDCVALHAS

SEQ ID NO: 102153 - protein, 14 aa, Homo Sapiens
SGERNDCVALHASS

SEQ ID NO: 102154 - protein, 14 aa, Homo Sapiens
GERNDCVALHASSG

SEQ ID NO: 102155 - protein, 14 aa, Homo Sapiens
ERNDCVALHASSGF

SEQ ID NO: 102156 - protein, 14 aa, Homo Sapiens
RNDCVALHASSGFW

SEQ ID NO: 102157 - protein, 14 aa, Homo Sapiens
NDCVALHASSGFWS

SEQ ID NO: 102158 - protein, 14 aa, Homo Sapiens
DCVALHASSGFWSN

SEQ ID NO: 102159 - protein, 14 aa, Homo Sapiens
CVALHASSGFWSNI

SEQ ID NO: 102160 - protein, 14 aa, Homo Sapiens
VALHASSGFWSNIH

SEQ ID NO: 102161 - protein, 14 aa, Homo Sapiens
ALHASSGFWSNIHC

SEQ ID NO: 102162 - protein, 14 aa, Homo Sapiens
LHASSGFWSNIHCS

SEQ ID NO: 102163 - protein, 14 aa, Homo Sapiens
HASSGFWSNIHCSS

SEQ ID NO: 102164 - protein, 14 aa, Homo Sapiens
ASSGFWSNIHCSSY

SEQ ID NO: 102165 - protein, 14 aa, Homo Sapiens
SSGFWSNIHCSSYK

SEQ ID NO: 102166 - protein, 14 aa, Homo Sapiens
SGFWSNIHCSSYKG

SEQ ID NO: 102167 - protein, 14 aa, Homo Sapiens
GFWSNIHCSSYKGY

SEQ ID NO: 102168 - protein, 14 aa, Homo Sapiens
FWSNIHCSSYKGYI

SEQ ID NO: 102169 - protein, 14 aa, Homo Sapiens
WSNIHCSSYKGYIC

SEQ ID NO: 102170 - protein, 14 aa, Homo Sapiens
SNIHCSSYKGYICK

SEQ ID NO: 102171 - protein, 14 aa, Homo Sapiens
NIHCSSYKGYICKR

SEQ ID NO: 102172 - protein, 14 aa, Homo Sapiens
IHCSSYKGYICKRP

SEQ ID NO: 102173 - protein, 14 aa, Homo Sapiens
HCSSYKGYICKRPK

SEQ ID NO: 102174 - protein, 14 aa, Homo Sapiens
CSSYKGYICKRPKI

SEQ ID NO: 102175 - protein, 14 aa, Homo Sapiens
SSYKGYICKRPKII

SEQ ID NO: 102176 - protein, 14 aa, Homo Sapiens
SYKGYICKRPKIID

SEQ ID NO: 102177 - protein, 14 aa, Homo Sapiens
YKGYICKRPKIIDA

SEQ ID NO: 102178 - protein, 14 aa, Homo Sapiens
KGYICKRPKIIDAK

SEQ ID NO: 102179 - protein, 14 aa, Homo Sapiens
GYICKRPKIIDAKP

SEQ ID NO: 102180 - protein, 14 aa, Homo Sapiens
YICKRPKIIDAKPT

SEQ ID NO: 102181 - protein, 14 aa, Homo Sapiens
ICKRPKIIDAKPTH

SEQ ID NO: 102182 - protein, 14 aa, Homo Sapiens
CKRPKIIDAKPTHE

SEQ ID NO: 102183 - protein, 14 aa, Homo Sapiens
KRPKIIDAKPTHEL

SEQ ID NO: 102184 - protein, 14 aa, Homo Sapiens
RPKIIDAKPTHELL

SEQ ID NO: 102185 - protein, 14 aa, Homo Sapiens
PKIIDAKPTHELLT

SEQ ID NO: 102186 - protein, 14 aa, Homo Sapiens
KIIDAKPTHELLTT

SEQ ID NO: 102187 - protein, 14 aa, Homo Sapiens
IIDAKPTHELLTTK

SEQ ID NO: 102188 - protein, 14 aa, Homo Sapiens
IDAKPTHELLTTKA

SEQ ID NO: 102189 - protein, 14 aa, Homo Sapiens
DAKPTHELLTTKAD

SEQ ID NO: 102190 - protein, 14 aa, Homo Sapiens
AKPTHELLTTKADT

SEQ ID NO: 102191 - protein, 14 aa, Homo Sapiens
KPTHELLTTKADTR

SEQ ID NO: 102192 - protein, 14 aa, Homo Sapiens
PTHELLTTKADTRK

SEQ ID NO: 102193 - protein, 14 aa, Homo Sapiens
THELLTTKADTRKM

SEQ ID NO: 102194 - protein, 14 aa, Homo Sapiens
HELLTTKADTRKMD

SEQ ID NO: 102195 - protein, 14 aa, Homo Sapiens
ELLTTKADTRKMDP

SEQ ID NO: 102196 - protein, 14 aa, Homo Sapiens
LLTTKADTRKMDPS

SEQ ID NO: 102197 - protein, 14 aa, Homo Sapiens
LTTKADTRKMDPSK

SEQ ID NO: 102198 - protein, 14 aa, Homo Sapiens
TTKADTRKMDPSKP

SEQ ID NO: 102199 - protein, 14 aa, Homo Sapiens
TKADTRKMDPSKPS

SEQ ID NO: 102200 - protein, 14 aa, Homo Sapiens
KADTRKMDPSKPSS

SEQ ID NO: 102201 - protein, 14 aa, Homo Sapiens
ADTRKMDPSKPSSN

SEQ ID NO: 102202 - protein, 14 aa, Homo Sapiens
DTRKMDPSKPSSNV

SEQ ID NO: 102203 - protein, 14 aa, Homo Sapiens
TRKMDPSKPSSNVA

SEQ ID NO: 102204 - protein, 14 aa, Homo Sapiens
RKMDPSKPSSNVAG

SEQ ID NO: 102205 - protein, 14 aa, Homo Sapiens
KMDPSKPSSNVAGV

SEQ ID NO: 102206 - protein, 14 aa, Homo Sapiens
MDPSKPSSNVAGVV

SEQ ID NO: 102207 - protein, 14 aa, Homo Sapiens
DPSKPSSNVAGVVI

SEQ ID NO: 102208 - protein, 14 aa, Homo Sapiens
PSKPSSNVAGVVII

SEQ ID NO: 102209 - protein, 14 aa, Homo Sapiens
SKPSSNVAGVVIIV

SEQ ID NO: 102210 - protein, 14 aa, Homo Sapiens
KPSSNVAGVVIIVI

SEQ ID NO: 102211 - protein, 14 aa, Homo Sapiens
PSSNVAGVVIIVIL

SEQ ID NO: 102212 - protein, 14 aa, Homo Sapiens
SSNVAGVVIIVILL

SEQ ID NO: 102213 - protein, 14 aa, Homo Sapiens
SNVAGVVIIVILLI

SEQ ID NO: 102214 - protein, 14 aa, Homo Sapiens
NVAGVVIIVILLIL

SEQ ID NO: 102215 - protein, 14 aa, Homo Sapiens
VAGVVIIVILLILT

SEQ ID NO: 102216 - protein, 14 aa, Homo Sapiens
AGVVIIVILLILTG

SEQ ID NO: 102217 - protein, 14 aa, Homo Sapiens
GVVIIVILLILTGA

SEQ ID NO: 102218 - protein, 14 aa, Homo Sapiens
VVIIVILLILTGAG

SEQ ID NO: 102219 - protein, 14 aa, Homo Sapiens
VIIVILLILTGAGL

SEQ ID NO: 102220 - protein, 14 aa, Homo Sapiens
IIVILLILTGAGLA

SEQ ID NO: 102221 - protein, 14 aa, Homo Sapiens
IVILLILTGAGLAA

SEQ ID NO: 102222 - protein, 14 aa, Homo Sapiens
VILLILTGAGLAAY

SEQ ID NO: 102223 - protein, 14 aa, Homo Sapiens
ILLILTGAGLAAYF

SEQ ID NO: 102224 - protein, 14 aa, Homo Sapiens
LLILTGAGLAAYFF

SEQ ID NO: 102225 - protein, 14 aa, Homo Sapiens
LILTGAGLAAYFFY

SEQ ID NO: 102226 - protein, 14 aa, Homo Sapiens
ILTGAGLAAYFFYK

SEQ ID NO: 102227 - protein, 14 aa, Homo Sapiens
LTGAGLAAYFFYKK

SEQ ID NO: 102228 - protein, 14 aa, Homo Sapiens
TGAGLAAYFFYKKR

SEQ ID NO: 102229 - protein, 14 aa, Homo Sapiens
GAGLAAYFFYKKRR

SEQ ID NO: 102230 - protein, 14 aa, Homo Sapiens
AGLAAYFFYKKRRV

SEQ ID NO: 102231 - protein, 14 aa, Homo Sapiens
GLAAYFFYKKRRVH

SEQ ID NO: 102232 - protein, 14 aa, Homo Sapiens
LAAYFFYKKRRVHL

SEQ ID NO: 102233 - protein, 14 aa, Homo Sapiens
AAYFFYKKRRVHLP

SEQ ID NO: 102234 - protein, 14 aa, Homo Sapiens
AYFFYKKRRVHLPQ

SEQ ID NO: 102235 - protein, 14 aa, Homo Sapiens
YFFYKKRRVHLPQE

SEQ ID NO: 102236 - protein, 14 aa, Homo Sapiens
FFYKKRRVHLPQEG

SEQ ID NO: 102237 - protein, 14 aa, Homo Sapiens
FYKKRRVHLPQEGA

SEQ ID NO: 102238 - protein, 14 aa, Homo Sapiens
YKKRRVHLPQEGAF

SEQ ID NO: 102239 - protein, 14 aa, Homo Sapiens
KKRRVHLPQEGAFE

SEQ ID NO: 102240 - protein, 14 aa, Homo Sapiens
KRRVHLPQEGAFEN

SEQ ID NO: 102241 - protein, 14 aa, Homo Sapiens
RRVHLPQEGAFENT

SEQ ID NO: 102242 - protein, 14 aa, Homo Sapiens
RVHLPQEGAFENTL

SEQ ID NO: 102243 - protein, 14 aa, Homo Sapiens
VHLPQEGAFENTLY

SEQ ID NO: 102244 - protein, 14 aa, Homo Sapiens
HLPQEGAFENTLYF

SEQ ID NO: 102245 - protein, 14 aa, Homo Sapiens
LPQEGAFENTLYFN

SEQ ID NO: 102246 - protein, 14 aa, Homo Sapiens
PQEGAFENTLYFNS

SEQ ID NO: 102247 - protein, 14 aa, Homo Sapiens
QEGAFENTLYFNSQ

SEQ ID NO: 102248 - protein, 14 aa, Homo Sapiens
EGAFENTLYFNSQS

SEQ ID NO: 102249 - protein, 14 aa, Homo Sapiens
GAFENTLYFNSQSS

SEQ ID NO: 102250 - protein, 14 aa, Homo Sapiens
AFENTLYFNSQSSP

SEQ ID NO: 102251 - protein, 14 aa, Homo Sapiens
FENTLYFNSQSSPG

SEQ ID NO: 102252 - protein, 14 aa, Homo Sapiens
ENTLYFNSQSSPGT

SEQ ID NO: 102253 - protein, 14 aa, Homo Sapiens
NTLYFNSQSSPGTS

SEQ ID NO: 102254 - protein, 14 aa, Homo Sapiens
TLYFNSQSSPGTSD

SEQ ID NO: 102255 - protein, 14 aa, Homo Sapiens
LYFNSQSSPGTSDM

SEQ ID NO: 102256 - protein, 14 aa, Homo Sapiens
YFNSQSSPGTSDMK

SEQ ID NO: 102257 - protein, 14 aa, Homo Sapiens
FNSQSSPGTSDMKD

SEQ ID NO: 102258 - protein, 14 aa, Homo Sapiens
NSQSSPGTSDMKDL

SEQ ID NO: 102259 - protein, 14 aa, Homo Sapiens
SQSSPGTSDMKDLV

SEQ ID NO: 102260 - protein, 14 aa, Homo Sapiens
QSSPGTSDMKDLVG

SEQ ID NO: 102261 - protein, 14 aa, Homo Sapiens
SSPGTSDMKDLVGN

SEQ ID NO: 102262 - protein, 14 aa, Homo Sapiens
SPGTSDMKDLVGNI

SEQ ID NO: 102263 - protein, 14 aa, Homo Sapiens
PGTSDMKDLVGNIE

SEQ ID NO: 102264 - protein, 14 aa, Homo Sapiens
GTSDMKDLVGNIEQ

SEQ ID NO: 102265 - protein, 14 aa, Homo Sapiens
TSDMKDLVGNIEQN

SEQ ID NO: 102266 - protein, 14 aa, Homo Sapiens
SDMKDLVGNIEQNE

SEQ ID NO: 102267 - protein, 14 aa, Homo Sapiens
DMKDLVGNIEQNEH

SEQ ID NO: 102268 - protein, 14 aa, Homo Sapiens
MKDLVGNIEQNEHS

SEQ ID NO: 102269 - protein, 14 aa, Homo Sapiens
KDLVGNIEQNEHSV

SEQ ID NO: 102270 - protein, 14 aa, Homo Sapiens
DLVGNIEQNEHSVI

SEQ ID NO: 102271 - protein, 15 aa, Homo Sapiens
MRLPLLLVFASVIPG

SEQ ID NO: 102272 - protein, 15 aa, Homo Sapiens
RLPLLLVFASVIPGA

SEQ ID NO: 102273 - protein, 15 aa, Homo Sapiens
LPLLLVFASVIPGAV

SEQ ID NO: 102274 - protein, 15 aa, Homo Sapiens
PLLLVFASVIPGAVL

SEQ ID NO: 102275 - protein, 15 aa, Homo Sapiens
LLLVFASVIPGAVLL

SEQ ID NO: 102276 - protein, 15 aa, Homo Sapiens
LLVFASVIPGAVLLL

SEQ ID NO: 102277 - protein, 15 aa, Homo Sapiens
LVFASVIPGAVLLLD

SEQ ID NO: 102278 - protein, 15 aa, Homo Sapiens
VFASVIPGAVLLLDT

SEQ ID NO: 102279 - protein, 15 aa, Homo Sapiens
FASVIPGAVLLLDTR

SEQ ID NO: 102280 - protein, 15 aa, Homo Sapiens
ASVIPGAVLLLDTRQ

SEQ ID NO: 102281 - protein, 15 aa, Homo Sapiens
SVIPGAVLLLDTRQF

SEQ ID NO: 102282 - protein, 15 aa, Homo Sapiens
VIPGAVLLLDTRQFL

SEQ ID NO: 102283 - protein, 15 aa, Homo Sapiens
IPGAVLLLDTRQFLI

SEQ ID NO: 102284 - protein, 15 aa, Homo Sapiens
PGAVLLLDTRQFLIY

SEQ ID NO: 102285 - protein, 15 aa, Homo Sapiens
GAVLLLDTRQFLIYN

SEQ ID NO: 102286 - protein, 15 aa, Homo Sapiens
AVLLLDTRQFLIYNE

SEQ ID NO: 102287 - protein, 15 aa, Homo Sapiens
VLLLDTRQFLIYNED

SEQ ID NO: 102288 - protein, 15 aa, Homo Sapiens
LLLDTRQFLIYNEDH

SEQ ID NO: 102289 - protein, 15 aa, Homo Sapiens
LLDTRQFLIYNEDHK

SEQ ID NO: 102290 - protein, 15 aa, Homo Sapiens
LDTRQFLIYNEDHKR

SEQ ID NO: 102291 - protein, 15 aa, Homo Sapiens
DTRQFLIYNEDHKRC

SEQ ID NO: 102292 - protein, 15 aa, Homo Sapiens
TRQFLIYNEDHKRCV

SEQ ID NO: 102293 - protein, 15 aa, Homo Sapiens
RQFLIYNEDHKRCVD

SEQ ID NO: 102294 - protein, 15 aa, Homo Sapiens
QFLIYNEDHKRCVDA

SEQ ID NO: 102295 - protein, 15 aa, Homo Sapiens
FLIYNEDHKRCVDAV

SEQ ID NO: 102296 - protein, 15 aa, Homo Sapiens
LIYNEDHKRCVDAVS

SEQ ID NO: 102297 - protein, 15 aa, Homo Sapiens
IYNEDHKRCVDAVSP

SEQ ID NO: 102298 - protein, 15 aa, Homo Sapiens
YNEDHKRCVDAVSPS

SEQ ID NO: 102299 - protein, 15 aa, Homo Sapiens
NEDHKRCVDAVSPSA

SEQ ID NO: 102300 - protein, 15 aa, Homo Sapiens
EDHKRCVDAVSPSAV

SEQ ID NO: 102301 - protein, 15 aa, Homo Sapiens
DHKRCVDAVSPSAVQ

SEQ ID NO: 102302 - protein, 15 aa, Homo Sapiens
HKRCVDAVSPSAVQT

SEQ ID NO: 102303 - protein, 15 aa, Homo Sapiens
KRCVDAVSPSAVQTA

SEQ ID NO: 102304 - protein, 15 aa, Homo Sapiens
RCVDAVSPSAVQTAA

SEQ ID NO: 102305 - protein, 15 aa, Homo Sapiens
CVDAVSPSAVQTAAC

SEQ ID NO: 102306 - protein, 15 aa, Homo Sapiens
VDAVSPSAVQTAACN

SEQ ID NO: 102307 - protein, 15 aa, Homo Sapiens
DAVSPSAVQTAACNQ

SEQ ID NO: 102308 - protein, 15 aa, Homo Sapiens
AVSPSAVQTAACNQD

SEQ ID NO: 102309 - protein, 15 aa, Homo Sapiens
VSPSAVQTAACNQDA

SEQ ID NO: 102310 - protein, 15 aa, Homo Sapiens
SPSAVQTAACNQDAE

SEQ ID NO: 102311 - protein, 15 aa, Homo Sapiens
PSAVQTAACNQDAES

SEQ ID NO: 102312 - protein, 15 aa, Homo Sapiens
SAVQTAACNQDAESQ

SEQ ID NO: 102313 - protein, 15 aa, Homo Sapiens
AVQTAACNQDAESQK

SEQ ID NO: 102314 - protein, 15 aa, Homo Sapiens
VQTAACNQDAESQKF

SEQ ID NO: 102315 - protein, 15 aa, Homo Sapiens
QTAACNQDAESQKFR

SEQ ID NO: 102316 - protein, 15 aa, Homo Sapiens
TAACNQDAESQKFRW

SEQ ID NO: 102317 - protein, 15 aa, Homo Sapiens
AACNQDAESQKFRWV

SEQ ID NO: 102318 - protein, 15 aa, Homo Sapiens
ACNQDAESQKFRWVS

SEQ ID NO: 102319 - protein, 15 aa, Homo Sapiens
CNQDAESQKFRWVSE

SEQ ID NO: 102320 - protein, 15 aa, Homo Sapiens
NQDAESQKFRWVSES

SEQ ID NO: 102321 - protein, 15 aa, Homo Sapiens
QDAESQKFRWVSESQ

SEQ ID NO: 102322 - protein, 15 aa, Homo Sapiens
DAESQKFRWVSESQI

SEQ ID NO: 102323 - protein, 15 aa, Homo Sapiens
AESQKFRWVSESQIM

SEQ ID NO: 102324 - protein, 15 aa, Homo Sapiens
ESQKFRWVSESQIMS

SEQ ID NO: 102325 - protein, 15 aa, Homo Sapiens
SQKFRWVSESQIMSV

SEQ ID NO: 102326 - protein, 15 aa, Homo Sapiens
QKFRWVSESQIMSVA

SEQ ID NO: 102327 - protein, 15 aa, Homo Sapiens
KFRWVSESQIMSVAF

SEQ ID NO: 102328 - protein, 15 aa, Homo Sapiens
FRWVSESQIMSVAFK

SEQ ID NO: 102329 - protein, 15 aa, Homo Sapiens
RWVSESQIMSVAFKL

SEQ ID NO: 102330 - protein, 15 aa, Homo Sapiens
WVSESQIMSVAFKLC

SEQ ID NO: 102331 - protein, 15 aa, Homo Sapiens
VSESQIMSVAFKLCL

SEQ ID NO: 102332 - protein, 15 aa, Homo Sapiens
SESQIMSVAFKLCLG

SEQ ID NO: 102333 - protein, 15 aa, Homo Sapiens
ESQIMSVAFKLCLGV

SEQ ID NO: 102334 - protein, 15 aa, Homo Sapiens
SQIMSVAFKLCLGVP

SEQ ID NO: 102335 - protein, 15 aa, Homo Sapiens
QIMSVAFKLCLGVPS

SEQ ID NO: 102336 - protein, 15 aa, Homo Sapiens
IMSVAFKLCLGVPSK

SEQ ID NO: 102337 - protein, 15 aa, Homo Sapiens
MSVAFKLCLGVPSKT

SEQ ID NO: 102338 - protein, 15 aa, Homo Sapiens
SVAFKLCLGVPSKTD

SEQ ID NO: 102339 - protein, 15 aa, Homo Sapiens
VAFKLCLGVPSKTDW

SEQ ID NO: 102340 - protein, 15 aa, Homo Sapiens
AFKLCLGVPSKTDWV

SEQ ID NO: 102341 - protein, 15 aa, Homo Sapiens
FKLCLGVPSKTDWVA

SEQ ID NO: 102342 - protein, 15 aa, Homo Sapiens
KLCLGVPSKTDWVAI

SEQ ID NO: 102343 - protein, 15 aa, Homo Sapiens
LCLGVPSKTDWVAIT

SEQ ID NO: 102344 - protein, 15 aa, Homo Sapiens
CLGVPSKTDWVAITL

SEQ ID NO: 102345 - protein, 15 aa, Homo Sapiens
LGVPSKTDWVAITLY

SEQ ID NO: 102346 - protein, 15 aa, Homo Sapiens
GVPSKTDWVAITLYA

SEQ ID NO: 102347 - protein, 15 aa, Homo Sapiens
VPSKTDWVAITLYAC

SEQ ID NO: 102348 - protein, 15 aa, Homo Sapiens
PSKTDWVAITLYACD

SEQ ID NO: 102349 - protein, 15 aa, Homo Sapiens
SKTDWVAITLYACDS

SEQ ID NO: 102350 - protein, 15 aa, Homo Sapiens
KTDWVAITLYACDSK

SEQ ID NO: 102351 - protein, 15 aa, Homo Sapiens
TDWVAITLYACDSKS

SEQ ID NO: 102352 - protein, 15 aa, Homo Sapiens
DWVAITLYACDSKSE

SEQ ID NO: 102353 - protein, 15 aa, Homo Sapiens
WVAITLYACDSKSEF

SEQ ID NO: 102354 - protein, 15 aa, Homo Sapiens
VAITLYACDSKSEFQ

SEQ ID NO: 102355 - protein, 15 aa, Homo Sapiens
AITLYACDSKSEFQK

SEQ ID NO: 102356 - protein, 15 aa, Homo Sapiens
ITLYACDSKSEFQKW

SEQ ID NO: 102357 - protein, 15 aa, Homo Sapiens
TLYACDSKSEFQKWE

SEQ ID NO: 102358 - protein, 15 aa, Homo Sapiens
LYACDSKSEFQKWEC

SEQ ID NO: 102359 - protein, 15 aa, Homo Sapiens
YACDSKSEFQKWECK

SEQ ID NO: 102360 - protein, 15 aa, Homo Sapiens
ACDSKSEFQKWECKN

SEQ ID NO: 102361 - protein, 15 aa, Homo Sapiens
CDSKSEFQKWECKND

SEQ ID NO: 102362 - protein, 15 aa, Homo Sapiens
DSKSEFQKWECKNDT

SEQ ID NO: 102363 - protein, 15 aa, Homo Sapiens
SKSEFQKWECKNDTL

SEQ ID NO: 102364 - protein, 15 aa, Homo Sapiens
KSEFQKWECKNDTLL

SEQ ID NO: 102365 - protein, 15 aa, Homo Sapiens
SEFQKWECKNDTLLG

SEQ ID NO: 102366 - protein, 15 aa, Homo Sapiens
EFQKWECKNDTLLGI

SEQ ID NO: 102367 - protein, 15 aa, Homo Sapiens
FQKWECKNDTLLGIK

SEQ ID NO: 102368 - protein, 15 aa, Homo Sapiens
QKWECKNDTLLGIKG

SEQ ID NO: 102369 - protein, 15 aa, Homo Sapiens
KWECKNDTLLGIKGE

SEQ ID NO: 102370 - protein, 15 aa, Homo Sapiens
WECKNDTLLGIKGED

SEQ ID NO: 102371 - protein, 15 aa, Homo Sapiens
ECKNDTLLGIKGEDL

SEQ ID NO: 102372 - protein, 15 aa, Homo Sapiens
CKNDTLLGIKGEDLF

SEQ ID NO: 102373 - protein, 15 aa, Homo Sapiens
KNDTLLGIKGEDLFF

SEQ ID NO: 102374 - protein, 15 aa, Homo Sapiens
NDTLLGIKGEDLFFN

SEQ ID NO: 102375 - protein, 15 aa, Homo Sapiens
DTLLGIKGEDLFFNY

SEQ ID NO: 102376 - protein, 15 aa, Homo Sapiens
TLLGIKGEDLFFNYG

SEQ ID NO: 102377 - protein, 15 aa, Homo Sapiens
LLGIKGEDLFFNYGN

SEQ ID NO: 102378 - protein, 15 aa, Homo Sapiens
LGIKGEDLFFNYGNR

SEQ ID NO: 102379 - protein, 15 aa, Homo Sapiens
GIKGEDLFFNYGNRQ

SEQ ID NO: 102380 - protein, 15 aa, Homo Sapiens
IKGEDLFFNYGNRQE

SEQ ID NO: 102381 - protein, 15 aa, Homo Sapiens
KGEDLFFNYGNRQEK

SEQ ID NO: 102382 - protein, 15 aa, Homo Sapiens
GEDLFFNYGNRQEKN

SEQ ID NO: 102383 - protein, 15 aa, Homo Sapiens
EDLFFNYGNRQEKNI

SEQ ID NO: 102384 - protein, 15 aa, Homo Sapiens
DLFFNYGNRQEKNIM

SEQ ID NO: 102385 - protein, 15 aa, Homo Sapiens
LFFNYGNRQEKNIML

SEQ ID NO: 102386 - protein, 15 aa, Homo Sapiens
FFNYGNRQEKNIMLY

SEQ ID NO: 102387 - protein, 15 aa, Homo Sapiens
FNYGNRQEKNIMLYK

SEQ ID NO: 102388 - protein, 15 aa, Homo Sapiens
NYGNRQEKNIMLYKG

SEQ ID NO: 102389 - protein, 15 aa, Homo Sapiens
YGNRQEKNIMLYKGS

SEQ ID NO: 102390 - protein, 15 aa, Homo Sapiens
GNRQEKNIMLYKGSG

SEQ ID NO: 102391 - protein, 15 aa, Homo Sapiens
NRQEKNIMLYKGSGL

SEQ ID NO: 102392 - protein, 15 aa, Homo Sapiens
RQEKNIMLYKGSGLW

SEQ ID NO: 102393 - protein, 15 aa, Homo Sapiens
QEKNIMLYKGSGLWS

SEQ ID NO: 102394 - protein, 15 aa, Homo Sapiens
EKNIMLYKGSGLWSR

SEQ ID NO: 102395 - protein, 15 aa, Homo Sapiens
KNIMLYKGSGLWSRW

SEQ ID NO: 102396 - protein, 15 aa, Homo Sapiens
NIMLYKGSGLWSRWK

SEQ ID NO: 102397 - protein, 15 aa, Homo Sapiens
IMLYKGSGLWSRWKI

SEQ ID NO: 102398 - protein, 15 aa, Homo Sapiens
MLYKGSGLWSRWKIY

SEQ ID NO: 102399 - protein, 15 aa, Homo Sapiens
LYKGSGLWSRWKIYG

SEQ ID NO: 102400 - protein, 15 aa, Homo Sapiens
YKGSGLWSRWKIYGT

SEQ ID NO: 102401 - protein, 15 aa, Homo Sapiens
KGSGLWSRWKIYGTT

SEQ ID NO: 102402 - protein, 15 aa, Homo Sapiens
GSGLWSRWKIYGTTD

SEQ ID NO: 102403 - protein, 15 aa, Homo Sapiens
SGLWSRWKIYGTTDN

SEQ ID NO: 102404 - protein, 15 aa, Homo Sapiens
GLWSRWKIYGTTDNL

SEQ ID NO: 102405 - protein, 15 aa, Homo Sapiens
LWSRWKIYGTTDNLC

SEQ ID NO: 102406 - protein, 15 aa, Homo Sapiens
WSRWKIYGTTDNLCS

SEQ ID NO: 102407 - protein, 15 aa, Homo Sapiens
SRWKIYGTTDNLCSR

SEQ ID NO: 102408 - protein, 15 aa, Homo Sapiens
RWKIYGTTDNLCSRG

SEQ ID NO: 102409 - protein, 15 aa, Homo Sapiens
WKIYGTTDNLCSRGY

SEQ ID NO: 102410 - protein, 15 aa, Homo Sapiens
KIYGTTDNLCSRGYE

SEQ ID NO: 102411 - protein, 15 aa, Homo Sapiens
IYGTTDNLCSRGYEA

SEQ ID NO: 102412 - protein, 15 aa, Homo Sapiens
YGTTDNLCSRGYEAM

SEQ ID NO: 102413 - protein, 15 aa, Homo Sapiens
GTTDNLCSRGYEAMY

SEQ ID NO: 102414 - protein, 15 aa, Homo Sapiens
TTDNLCSRGYEAMYT

SEQ ID NO: 102415 - protein, 15 aa, Homo Sapiens
TDNLCSRGYEAMYTL

SEQ ID NO: 102416 - protein, 15 aa, Homo Sapiens
DNLCSRGYEAMYTLL

SEQ ID NO: 102417 - protein, 15 aa, Homo Sapiens
NLCSRGYEAMYTLLG

SEQ ID NO: 102418 - protein, 15 aa, Homo Sapiens
LCSRGYEAMYTLLGN

SEQ ID NO: 102419 - protein, 15 aa, Homo Sapiens
CSRGYEAMYTLLGNA

SEQ ID NO: 102420 - protein, 15 aa, Homo Sapiens
SRGYEAMYTLLGNAN

SEQ ID NO: 102421 - protein, 15 aa, Homo Sapiens
RGYEAMYTLLGNANG

SEQ ID NO: 102422 - protein, 15 aa, Homo Sapiens
GYEAMYTLLGNANGA

SEQ ID NO: 102423 - protein, 15 aa, Homo Sapiens
YEAMYTLLGNANGAT

SEQ ID NO: 102424 - protein, 15 aa, Homo Sapiens
EAMYTLLGNANGATC

SEQ ID NO: 102425 - protein, 15 aa, Homo Sapiens
AMYTLLGNANGATCA

SEQ ID NO: 102426 - protein, 15 aa, Homo Sapiens
MYTLLGNANGATCAF

SEQ ID NO: 102427 - protein, 15 aa, Homo Sapiens
YTLLGNANGATCAFP

SEQ ID NO: 102428 - protein, 15 aa, Homo Sapiens
TLLGNANGATCAFPF

SEQ ID NO: 102429 - protein, 15 aa, Homo Sapiens
LLGNANGATCAFPFK

SEQ ID NO: 102430 - protein, 15 aa, Homo Sapiens
LGNANGATCAFPFKF

SEQ ID NO: 102431 - protein, 15 aa, Homo Sapiens
GNANGATCAFPFKFE

SEQ ID NO: 102432 - protein, 15 aa, Homo Sapiens
NANGATCAFPFKFEN

SEQ ID NO: 102433 - protein, 15 aa, Homo Sapiens
ANGATCAFPFKFENK

SEQ ID NO: 102434 - protein, 15 aa, Homo Sapiens
NGATCAFPFKFENKW

SEQ ID NO: 102435 - protein, 15 aa, Homo Sapiens
GATCAFPFKFENKWY

SEQ ID NO: 102436 - protein, 15 aa, Homo Sapiens
ATCAFPFKFENKWYA

SEQ ID NO: 102437 - protein, 15 aa, Homo Sapiens
TCAFPFKFENKWYAD

SEQ ID NO: 102438 - protein, 15 aa, Homo Sapiens
CAFPFKFENKWYADC

SEQ ID NO: 102439 - protein, 15 aa, Homo Sapiens
AFPFKFENKWYADCT

SEQ ID NO: 102440 - protein, 15 aa, Homo Sapiens
FPFKFENKWYADCTS

SEQ ID NO: 102441 - protein, 15 aa, Homo Sapiens
PFKFENKWYADCTSA

SEQ ID NO: 102442 - protein, 15 aa, Homo Sapiens
FKFENKWYADCTSAG

SEQ ID NO: 102443 - protein, 15 aa, Homo Sapiens
KFENKWYADCTSAGR

SEQ ID NO: 102444 - protein, 15 aa, Homo Sapiens
FENKWYADCTSAGRS

SEQ ID NO: 102445 - protein, 15 aa, Homo Sapiens
ENKWYADCTSAGRSD

SEQ ID NO: 102446 - protein, 15 aa, Homo Sapiens
NKWYADCTSAGRSDG

SEQ ID NO: 102447 - protein, 15 aa, Homo Sapiens
KWYADCTSAGRSDGW

SEQ ID NO: 102448 - protein, 15 aa, Homo Sapiens
WYADCTSAGRSDGWL

SEQ ID NO: 102449 - protein, 15 aa, Homo Sapiens
YADCTSAGRSDGWLW

SEQ ID NO: 102450 - protein, 15 aa, Homo Sapiens
ADCTSAGRSDGWLWC

SEQ ID NO: 102451 - protein, 15 aa, Homo Sapiens
DCTSAGRSDGWLWCG

SEQ ID NO: 102452 - protein, 15 aa, Homo Sapiens
CTSAGRSDGWLWCGT

SEQ ID NO: 102453 - protein, 15 aa, Homo Sapiens
TSAGRSDGWLWCGTT

SEQ ID NO: 102454 - protein, 15 aa, Homo Sapiens
SAGRSDGWLWCGTTT

SEQ ID NO: 102455 - protein, 15 aa, Homo Sapiens
AGRSDGWLWCGTTTD

SEQ ID NO: 102456 - protein, 15 aa, Homo Sapiens
GRSDGWLWCGTTTDY

SEQ ID NO: 102457 - protein, 15 aa, Homo Sapiens
RSDGWLWCGTTTDYD

SEQ ID NO: 102458 - protein, 15 aa, Homo Sapiens
SDGWLWCGTTTDYDT

SEQ ID NO: 102459 - protein, 15 aa, Homo Sapiens
DGWLWCGTTTDYDTD

SEQ ID NO: 102460 - protein, 15 aa, Homo Sapiens
GWLWCGTTTDYDTDK

SEQ ID NO: 102461 - protein, 15 aa, Homo Sapiens
WLWCGTTTDYDTDKL

SEQ ID NO: 102462 - protein, 15 aa, Homo Sapiens
LWCGTTTDYDTDKLF

SEQ ID NO: 102463 - protein, 15 aa, Homo Sapiens
WCGTTTDYDTDKLFG

SEQ ID NO: 102464 - protein, 15 aa, Homo Sapiens
CGTTTDYDTDKLFGY

SEQ ID NO: 102465 - protein, 15 aa, Homo Sapiens
GTTTDYDTDKLFGYC

SEQ ID NO: 102466 - protein, 15 aa, Homo Sapiens
TTTDYDTDKLFGYCP

SEQ ID NO: 102467 - protein, 15 aa, Homo Sapiens
TTDYDTDKLFGYCPL

SEQ ID NO: 102468 - protein, 15 aa, Homo Sapiens
TDYDTDKLFGYCPLK

SEQ ID NO: 102469 - protein, 15 aa, Homo Sapiens
DYDTDKLFGYCPLKF

SEQ ID NO: 102470 - protein, 15 aa, Homo Sapiens
YDTDKLFGYCPLKFE

SEQ ID NO: 102471 - protein, 15 aa, Homo Sapiens
DTDKLFGYCPLKFEG

SEQ ID NO: 102472 - protein, 15 aa, Homo Sapiens
TDKLFGYCPLKFEGS

SEQ ID NO: 102473 - protein, 15 aa, Homo Sapiens
DKLFGYCPLKFEGSE

SEQ ID NO: 102474 - protein, 15 aa, Homo Sapiens
KLFGYCPLKFEGSES

SEQ ID NO: 102475 - protein, 15 aa, Homo Sapiens
LFGYCPLKFEGSESL

SEQ ID NO: 102476 - protein, 15 aa, Homo Sapiens
FGYCPLKFEGSESLW

SEQ ID NO: 102477 - protein, 15 aa, Homo Sapiens
GYCPLKFEGSESLWN

SEQ ID NO: 102478 - protein, 15 aa, Homo Sapiens
YCPLKFEGSESLWNK

SEQ ID NO: 102479 - protein, 15 aa, Homo Sapiens
CPLKFEGSESLWNKD

SEQ ID NO: 102480 - protein, 15 aa, Homo Sapiens
PLKFEGSESLWNKDP

SEQ ID NO: 102481 - protein, 15 aa, Homo Sapiens
LKFEGSESLWNKDPL

SEQ ID NO: 102482 - protein, 15 aa, Homo Sapiens
KFEGSESLWNKDPLT

SEQ ID NO: 102483 - protein, 15 aa, Homo Sapiens
FEGSESLWNKDPLTS

SEQ ID NO: 102484 - protein, 15 aa, Homo Sapiens
EGSESLWNKDPLTSV

SEQ ID NO: 102485 - protein, 15 aa, Homo Sapiens
GSESLWNKDPLTSVS

SEQ ID NO: 102486 - protein, 15 aa, Homo Sapiens
SESLWNKDPLTSVSY

SEQ ID NO: 102487 - protein, 15 aa, Homo Sapiens
ESLWNKDPLTSVSYQ

SEQ ID NO: 102488 - protein, 15 aa, Homo Sapiens
SLWNKDPLTSVSYQI

SEQ ID NO: 102489 - protein, 15 aa, Homo Sapiens
LWNKDPLTSVSYQIN

SEQ ID NO: 102490 - protein, 15 aa, Homo Sapiens
WNKDPLTSVSYQINS

SEQ ID NO: 102491 - protein, 15 aa, Homo Sapiens
NKDPLTSVSYQINSK

SEQ ID NO: 102492 - protein, 15 aa, Homo Sapiens
KDPLTSVSYQINSKS

SEQ ID NO: 102493 - protein, 15 aa, Homo Sapiens
DPLTSVSYQINSKSA

SEQ ID NO: 102494 - protein, 15 aa, Homo Sapiens
PLTSVSYQINSKSAL

SEQ ID NO: 102495 - protein, 15 aa, Homo Sapiens
LTSVSYQINSKSALS

SEQ ID NO: 102496 - protein, 15 aa, Homo Sapiens
TSVSYQINSKSALSW

SEQ ID NO: 102497 - protein, 15 aa, Homo Sapiens
SVSYQINSKSALSWH

SEQ ID NO: 102498 - protein, 15 aa, Homo Sapiens
VSYQINSKSALSWHQ

SEQ ID NO: 102499 - protein, 15 aa, Homo Sapiens
SYQINSKSALSWHQA

SEQ ID NO: 102500 - protein, 15 aa, Homo Sapiens
YQINSKSALSWHQAR

SEQ ID NO: 102501 - protein, 15 aa, Homo Sapiens
QINSKSALSWHQARK

SEQ ID NO: 102502 - protein, 15 aa, Homo Sapiens
INSKSALSWHQARKS

SEQ ID NO: 102503 - protein, 15 aa, Homo Sapiens
NSKSALSWHQARKSC

SEQ ID NO: 102504 - protein, 15 aa, Homo Sapiens
SKSALSWHQARKSCQ

SEQ ID NO: 102505 - protein, 15 aa, Homo Sapiens
KSALSWHQARKSCQQ

SEQ ID NO: 102506 - protein, 15 aa, Homo Sapiens
SALSWHQARKSCQQQ

SEQ ID NO: 102507 - protein, 15 aa, Homo Sapiens
ALSWHQARKSCQQQN

SEQ ID NO: 102508 - protein, 15 aa, Homo Sapiens
LSWHQARKSCQQQNA

SEQ ID NO: 102509 - protein, 15 aa, Homo Sapiens
SWHQARKSCQQQNAE

SEQ ID NO: 102510 - protein, 15 aa, Homo Sapiens
WHQARKSCQQQNAEL

SEQ ID NO: 102511 - protein, 15 aa, Homo Sapiens
HQARKSCQQQNAELL

SEQ ID NO: 102512 - protein, 15 aa, Homo Sapiens
QARKSCQQQNAELLS

SEQ ID NO: 102513 - protein, 15 aa, Homo Sapiens
ARKSCQQQNAELLSI

SEQ ID NO: 102514 - protein, 15 aa, Homo Sapiens
RKSCQQQNAELLSIT

SEQ ID NO: 102515 - protein, 15 aa, Homo Sapiens
KSCQQQNAELLSITE

SEQ ID NO: 102516 - protein, 15 aa, Homo Sapiens
SCQQQNAELLSITEI

SEQ ID NO: 102517 - protein, 15 aa, Homo Sapiens
CQQQNAELLSITEIH

SEQ ID NO: 102518 - protein, 15 aa, Homo Sapiens
QQQNAELLSITEIHE

SEQ ID NO: 102519 - protein, 15 aa, Homo Sapiens
QQNAELLSITEIHEQ

SEQ ID NO: 102520 - protein, 15 aa, Homo Sapiens
QNAELLSITEIHEQT

SEQ ID NO: 102521 - protein, 15 aa, Homo Sapiens
NAELLSITEIHEQTY

SEQ ID NO: 102522 - protein, 15 aa, Homo Sapiens
AELLSITEIHEQTYL

SEQ ID NO: 102523 - protein, 15 aa, Homo Sapiens
ELLSITEIHEQTYLT

SEQ ID NO: 102524 - protein, 15 aa, Homo Sapiens
LLSITEIHEQTYLTG

SEQ ID NO: 102525 - protein, 15 aa, Homo Sapiens
LSITEIHEQTYLTGL

SEQ ID NO: 102526 - protein, 15 aa, Homo Sapiens
SITEIHEQTYLTGLT

SEQ ID NO: 102527 - protein, 15 aa, Homo Sapiens
ITEIHEQTYLTGLTS

SEQ ID NO: 102528 - protein, 15 aa, Homo Sapiens
TEIHEQTYLTGLTSS

SEQ ID NO: 102529 - protein, 15 aa, Homo Sapiens
EIHEQTYLTGLTSSL

SEQ ID NO: 102530 - protein, 15 aa, Homo Sapiens
IHEQTYLTGLTSSLT

SEQ ID NO: 102531 - protein, 15 aa, Homo Sapiens
HEQTYLTGLTSSLTS

SEQ ID NO: 102532 - protein, 15 aa, Homo Sapiens
EQTYLTGLTSSLTSG

SEQ ID NO: 102533 - protein, 15 aa, Homo Sapiens
QTYLTGLTSSLTSGL

SEQ ID NO: 102534 - protein, 15 aa, Homo Sapiens
TYLTGLTSSLTSGLW

SEQ ID NO: 102535 - protein, 15 aa, Homo Sapiens
YLTGLTSSLTSGLWI

SEQ ID NO: 102536 - protein, 15 aa, Homo Sapiens
LTGLTSSLTSGLWIG

SEQ ID NO: 102537 - protein, 15 aa, Homo Sapiens
TGLTSSLTSGLWIGL

SEQ ID NO: 102538 - protein, 15 aa, Homo Sapiens
GLTSSLTSGLWIGLN

SEQ ID NO: 102539 - protein, 15 aa, Homo Sapiens
LTSSLTSGLWIGLNS

SEQ ID NO: 102540 - protein, 15 aa, Homo Sapiens
TSSLTSGLWIGLNSL

SEQ ID NO: 102541 - protein, 15 aa, Homo Sapiens
SSLTSGLWIGLNSLS

SEQ ID NO: 102542 - protein, 15 aa, Homo Sapiens
SLTSGLWIGLNSLSF

SEQ ID NO: 102543 - protein, 15 aa, Homo Sapiens
LTSGLWIGLNSLSFN

SEQ ID NO: 102544 - protein, 15 aa, Homo Sapiens
TSGLWIGLNSLSFNS

SEQ ID NO: 102545 - protein, 15 aa, Homo Sapiens
SGLWIGLNSLSFNSG

SEQ ID NO: 102546 - protein, 15 aa, Homo Sapiens
GLWIGLNSLSFNSGW

SEQ ID NO: 102547 - protein, 15 aa, Homo Sapiens
LWIGLNSLSFNSGWQ

SEQ ID NO: 102548 - protein, 15 aa, Homo Sapiens
WIGLNSLSFNSGWQW

SEQ ID NO: 102549 - protein, 15 aa, Homo Sapiens
IGLNSLSFNSGWQWS

SEQ ID NO: 102550 - protein, 15 aa, Homo Sapiens
GLNSLSFNSGWQWSD

SEQ ID NO: 102551 - protein, 15 aa, Homo Sapiens
LNSLSFNSGWQWSDR

SEQ ID NO: 102552 - protein, 15 aa, Homo Sapiens
NSLSFNSGWQWSDRS

SEQ ID NO: 102553 - protein, 15 aa, Homo Sapiens
SLSFNSGWQWSDRSP

SEQ ID NO: 102554 - protein, 15 aa, Homo Sapiens
LSFNSGWQWSDRSPF

SEQ ID NO: 102555 - protein, 15 aa, Homo Sapiens
SFNSGWQWSDRSPFR

SEQ ID NO: 102556 - protein, 15 aa, Homo Sapiens
FNSGWQWSDRSPFRY

SEQ ID NO: 102557 - protein, 15 aa, Homo Sapiens
NSGWQWSDRSPFRYL

SEQ ID NO: 102558 - protein, 15 aa, Homo Sapiens
SGWQWSDRSPFRYLN

SEQ ID NO: 102559 - protein, 15 aa, Homo Sapiens
GWQWSDRSPFRYLNW

SEQ ID NO: 102560 - protein, 15 aa, Homo Sapiens
WQWSDRSPFRYLNWL

SEQ ID NO: 102561 - protein, 15 aa, Homo Sapiens
QWSDRSPFRYLNWLP

SEQ ID NO: 102562 - protein, 15 aa, Homo Sapiens
WSDRSPFRYLNWLPG

SEQ ID NO: 102563 - protein, 15 aa, Homo Sapiens
SDRSPFRYLNWLPGS

SEQ ID NO: 102564 - protein, 15 aa, Homo Sapiens
DRSPFRYLNWLPGSP

SEQ ID NO: 102565 - protein, 15 aa, Homo Sapiens
RSPFRYLNWLPGSPS

SEQ ID NO: 102566 - protein, 15 aa, Homo Sapiens
SPFRYLNWLPGSPSA

SEQ ID NO: 102567 - protein, 15 aa, Homo Sapiens
PFRYLNWLPGSPSAE

SEQ ID NO: 102568 - protein, 15 aa, Homo Sapiens
FRYLNWLPGSPSAEP

SEQ ID NO: 102569 - protein, 15 aa, Homo Sapiens
RYLNWLPGSPSAEPG

SEQ ID NO: 102570 - protein, 15 aa, Homo Sapiens
YLNWLPGSPSAEPGK

SEQ ID NO: 102571 - protein, 15 aa, Homo Sapiens
LNWLPGSPSAEPGKS

SEQ ID NO: 102572 - protein, 15 aa, Homo Sapiens
NWLPGSPSAEPGKSC

SEQ ID NO: 102573 - protein, 15 aa, Homo Sapiens
WLPGSPSAEPGKSCV

SEQ ID NO: 102574 - protein, 15 aa, Homo Sapiens
LPGSPSAEPGKSCVS

SEQ ID NO: 102575 - protein, 15 aa, Homo Sapiens
PGSPSAEPGKSCVSL

SEQ ID NO: 102576 - protein, 15 aa, Homo Sapiens
GSPSAEPGKSCVSLN

SEQ ID NO: 102577 - protein, 15 aa, Homo Sapiens
SPSAEPGKSCVSLNP

SEQ ID NO: 102578 - protein, 15 aa, Homo Sapiens
PSAEPGKSCVSLNPG

SEQ ID NO: 102579 - protein, 15 aa, Homo Sapiens
SAEPGKSCVSLNPGK

SEQ ID NO: 102580 - protein, 15 aa, Homo Sapiens
AEPGKSCVSLNPGKN

SEQ ID NO: 102581 - protein, 15 aa, Homo Sapiens
EPGKSCVSLNPGKNA

SEQ ID NO: 102582 - protein, 15 aa, Homo Sapiens
PGKSCVSLNPGKNAK

SEQ ID NO: 102583 - protein, 15 aa, Homo Sapiens
GKSCVSLNPGKNAKW

SEQ ID NO: 102584 - protein, 15 aa, Homo Sapiens
KSCVSLNPGKNAKWE

SEQ ID NO: 102585 - protein, 15 aa, Homo Sapiens
SCVSLNPGKNAKWEN

SEQ ID NO: 102586 - protein, 15 aa, Homo Sapiens
CVSLNPGKNAKWENL

SEQ ID NO: 102587 - protein, 15 aa, Homo Sapiens
VSLNPGKNAKWENLE

SEQ ID NO: 102588 - protein, 15 aa, Homo Sapiens
SLNPGKNAKWENLEC

SEQ ID NO: 102589 - protein, 15 aa, Homo Sapiens
LNPGKNAKWENLECV

SEQ ID NO: 102590 - protein, 15 aa, Homo Sapiens
NPGKNAKWENLECVQ

SEQ ID NO: 102591 - protein, 15 aa, Homo Sapiens
PGKNAKWENLECVQK

SEQ ID NO: 102592 - protein, 15 aa, Homo Sapiens
GKNAKWENLECVQKL

SEQ ID NO: 102593 - protein, 15 aa, Homo Sapiens
KNAKWENLECVQKLG

SEQ ID NO: 102594 - protein, 15 aa, Homo Sapiens
NAKWENLECVQKLGY

SEQ ID NO: 102595 - protein, 15 aa, Homo Sapiens
AKWENLECVQKLGYI

SEQ ID NO: 102596 - protein, 15 aa, Homo Sapiens
KWENLECVQKLGYIC

SEQ ID NO: 102597 - protein, 15 aa, Homo Sapiens
WENLECVQKLGYICK

SEQ ID NO: 102598 - protein, 15 aa, Homo Sapiens
ENLECVQKLGYICKK

SEQ ID NO: 102599 - protein, 15 aa, Homo Sapiens
NLECVQKLGYICKKG

SEQ ID NO: 102600 - protein, 15 aa, Homo Sapiens
LECVQKLGYICKKGN

SEQ ID NO: 102601 - protein, 15 aa, Homo Sapiens
ECVQKLGYICKKGNT

SEQ ID NO: 102602 - protein, 15 aa, Homo Sapiens
CVQKLGYICKKGNTT

SEQ ID NO: 102603 - protein, 15 aa, Homo Sapiens
VQKLGYICKKGNTTL

SEQ ID NO: 102604 - protein, 15 aa, Homo Sapiens
QKLGYICKKGNTTLN

SEQ ID NO: 102605 - protein, 15 aa, Homo Sapiens
KLGYICKKGNTTLNS

SEQ ID NO: 102606 - protein, 15 aa, Homo Sapiens
LGYICKKGNTTLNSF

SEQ ID NO: 102607 - protein, 15 aa, Homo Sapiens
GYICKKGNTTLNSFV

SEQ ID NO: 102608 - protein, 15 aa, Homo Sapiens
YICKKGNTTLNSFVI

SEQ ID NO: 102609 - protein, 15 aa, Homo Sapiens
ICKKGNTTLNSFVIP

SEQ ID NO: 102610 - protein, 15 aa, Homo Sapiens
CKKGNTTLNSFVIPS

SEQ ID NO: 102611 - protein, 15 aa, Homo Sapiens
KKGNTTLNSFVIPSE

SEQ ID NO: 102612 - protein, 15 aa, Homo Sapiens
KGNTTLNSFVIPSES

SEQ ID NO: 102613 - protein, 15 aa, Homo Sapiens
GNTTLNSFVIPSESD

SEQ ID NO: 102614 - protein, 15 aa, Homo Sapiens
NTTLNSFVIPSESDV

SEQ ID NO: 102615 - protein, 15 aa, Homo Sapiens
TTLNSFVIPSESDVP

SEQ ID NO: 102616 - protein, 15 aa, Homo Sapiens
TLNSFVIPSESDVPT

SEQ ID NO: 102617 - protein, 15 aa, Homo Sapiens
LNSFVIPSESDVPTH

SEQ ID NO: 102618 - protein, 15 aa, Homo Sapiens
NSFVIPSESDVPTHC

SEQ ID NO: 102619 - protein, 15 aa, Homo Sapiens
SFVIPSESDVPTHCP

SEQ ID NO: 102620 - protein, 15 aa, Homo Sapiens
FVIPSESDVPTHCPS

SEQ ID NO: 102621 - protein, 15 aa, Homo Sapiens
VIPSESDVPTHCPSQ

SEQ ID NO: 102622 - protein, 15 aa, Homo Sapiens
IPSESDVPTHCPSQW

SEQ ID NO: 102623 - protein, 15 aa, Homo Sapiens
PSESDVPTHCPSQWW

SEQ ID NO: 102624 - protein, 15 aa, Homo Sapiens
SESDVPTHCPSQWWP

SEQ ID NO: 102625 - protein, 15 aa, Homo Sapiens
ESDVPTHCPSQWWPY

SEQ ID NO: 102626 - protein, 15 aa, Homo Sapiens
SDVPTHCPSQWWPYA

SEQ ID NO: 102627 - protein, 15 aa, Homo Sapiens
DVPTHCPSQWWPYAG

SEQ ID NO: 102628 - protein, 15 aa, Homo Sapiens
VPTHCPSQWWPYAGH

SEQ ID NO: 102629 - protein, 15 aa, Homo Sapiens
PTHCPSQWWPYAGHC

SEQ ID NO: 102630 - protein, 15 aa, Homo Sapiens
THCPSQWWPYAGHCY

SEQ ID NO: 102631 - protein, 15 aa, Homo Sapiens
HCPSQWWPYAGHCYK

SEQ ID NO: 102632 - protein, 15 aa, Homo Sapiens
CPSQWWPYAGHCYKI

SEQ ID NO: 102633 - protein, 15 aa, Homo Sapiens
PSQWWPYAGHCYKIH

SEQ ID NO: 102634 - protein, 15 aa, Homo Sapiens
SQWWPYAGHCYKIHR

SEQ ID NO: 102635 - protein, 15 aa, Homo Sapiens
QWWPYAGHCYKIHRD

SEQ ID NO: 102636 - protein, 15 aa, Homo Sapiens
WWPYAGHCYKIHRDE

SEQ ID NO: 102637 - protein, 15 aa, Homo Sapiens
WPYAGHCYKIHRDEK

SEQ ID NO: 102638 - protein, 15 aa, Homo Sapiens
PYAGHCYKIHRDEKK

SEQ ID NO: 102639 - protein, 15 aa, Homo Sapiens
YAGHCYKIHRDEKKI

SEQ ID NO: 102640 - protein, 15 aa, Homo Sapiens
AGHCYKIHRDEKKIQ

SEQ ID NO: 102641 - protein, 15 aa, Homo Sapiens
GHCYKIHRDEKKIQR

SEQ ID NO: 102642 - protein, 15 aa, Homo Sapiens
HCYKIHRDEKKIQRD

SEQ ID NO: 102643 - protein, 15 aa, Homo Sapiens
CYKIHRDEKKIQRDA

SEQ ID NO: 102644 - protein, 15 aa, Homo Sapiens
YKIHRDEKKIQRDAL

SEQ ID NO: 102645 - protein, 15 aa, Homo Sapiens
KIHRDEKKIQRDALT

SEQ ID NO: 102646 - protein, 15 aa, Homo Sapiens
IHRDEKKIQRDALTT

SEQ ID NO: 102647 - protein, 15 aa, Homo Sapiens
HRDEKKIQRDALTTC

SEQ ID NO: 102648 - protein, 15 aa, Homo Sapiens
RDEKKIQRDALTTCR

SEQ ID NO: 102649 - protein, 15 aa, Homo Sapiens
DEKKIQRDALTTCRK

SEQ ID NO: 102650 - protein, 15 aa, Homo Sapiens
EKKIQRDALTTCRKE

SEQ ID NO: 102651 - protein, 15 aa, Homo Sapiens
KKIQRDALTTCRKEG

SEQ ID NO: 102652 - protein, 15 aa, Homo Sapiens
KIQRDALTTCRKEGG

SEQ ID NO: 102653 - protein, 15 aa, Homo Sapiens
IQRDALTTCRKEGGD

SEQ ID NO: 102654 - protein, 15 aa, Homo Sapiens
QRDALTTCRKEGGDL

SEQ ID NO: 102655 - protein, 15 aa, Homo Sapiens
RDALTTCRKEGGDLA

SEQ ID NO: 102656 - protein, 15 aa, Homo Sapiens
DALTTCRKEGGDLAS

SEQ ID NO: 102657 - protein, 15 aa, Homo Sapiens
ALTTCRKEGGDLASI

SEQ ID NO: 102658 - protein, 15 aa, Homo Sapiens
LTTCRKEGGDLASIH

SEQ ID NO: 102659 - protein, 15 aa, Homo Sapiens
TTCRKEGGDLASIHT

SEQ ID NO: 102660 - protein, 15 aa, Homo Sapiens
TCRKEGGDLASIHTI

SEQ ID NO: 102661 - protein, 15 aa, Homo Sapiens
CRKEGGDLASIHTIE

SEQ ID NO: 102662 - protein, 15 aa, Homo Sapiens
RKEGGDLASIHTIEE

SEQ ID NO: 102663 - protein, 15 aa, Homo Sapiens
KEGGDLASIHTIEEF

SEQ ID NO: 102664 - protein, 15 aa, Homo Sapiens
EGGDLASIHTIEEFD

SEQ ID NO: 102665 - protein, 15 aa, Homo Sapiens
GGDLASIHTIEEFDF

SEQ ID NO: 102666 - protein, 15 aa, Homo Sapiens
GDLASIHTIEEFDFI

SEQ ID NO: 102667 - protein, 15 aa, Homo Sapiens
DLASIHTIEEFDFII

SEQ ID NO: 102668 - protein, 15 aa, Homo Sapiens
LASIHTIEEFDFIIS

SEQ ID NO: 102669 - protein, 15 aa, Homo Sapiens
ASIHTIEEFDFIISQ

SEQ ID NO: 102670 - protein, 15 aa, Homo Sapiens
SIHTIEEFDFIISQL

SEQ ID NO: 102671 - protein, 15 aa, Homo Sapiens
IHTIEEFDFIISQLG

SEQ ID NO: 102672 - protein, 15 aa, Homo Sapiens
HTIEEFDFIISQLGY

SEQ ID NO: 102673 - protein, 15 aa, Homo Sapiens
TIEEFDFIISQLGYE

SEQ ID NO: 102674 - protein, 15 aa, Homo Sapiens
IEEFDFIISQLGYEP

SEQ ID NO: 102675 - protein, 15 aa, Homo Sapiens
EEFDFIISQLGYEPN

SEQ ID NO: 102676 - protein, 15 aa, Homo Sapiens
EFDFIISQLGYEPND

SEQ ID NO: 102677 - protein, 15 aa, Homo Sapiens
FDFIISQLGYEPNDE

SEQ ID NO: 102678 - protein, 15 aa, Homo Sapiens
DFIISQLGYEPNDEL

SEQ ID NO: 102679 - protein, 15 aa, Homo Sapiens
FIISQLGYEPNDELW

SEQ ID NO: 102680 - protein, 15 aa, Homo Sapiens
IISQLGYEPNDELWI

SEQ ID NO: 102681 - protein, 15 aa, Homo Sapiens
ISQLGYEPNDELWIG

SEQ ID NO: 102682 - protein, 15 aa, Homo Sapiens
SQLGYEPNDELWIGL

SEQ ID NO: 102683 - protein, 15 aa, Homo Sapiens
QLGYEPNDELWIGLN

SEQ ID NO: 102684 - protein, 15 aa, Homo Sapiens
LGYEPNDELWIGLND

SEQ ID NO: 102685 - protein, 15 aa, Homo Sapiens
GYEPNDELWIGLNDI

SEQ ID NO: 102686 - protein, 15 aa, Homo Sapiens
YEPNDELWIGLNDIK

SEQ ID NO: 102687 - protein, 15 aa, Homo Sapiens
EPNDELWIGLNDIKI

SEQ ID NO: 102688 - protein, 15 aa, Homo Sapiens
PNDELWIGLNDIKIQ

SEQ ID NO: 102689 - protein, 15 aa, Homo Sapiens
NDELWIGLNDIKIQM

SEQ ID NO: 102690 - protein, 15 aa, Homo Sapiens
DELWIGLNDIKIQMY

SEQ ID NO: 102691 - protein, 15 aa, Homo Sapiens
ELWIGLNDIKIQMYF

SEQ ID NO: 102692 - protein, 15 aa, Homo Sapiens
LWIGLNDIKIQMYFE

SEQ ID NO: 102693 - protein, 15 aa, Homo Sapiens
WIGLNDIKIQMYFEW

SEQ ID NO: 102694 - protein, 15 aa, Homo Sapiens
IGLNDIKIQMYFEWS

SEQ ID NO: 102695 - protein, 15 aa, Homo Sapiens
GLNDIKIQMYFEWSD

SEQ ID NO: 102696 - protein, 15 aa, Homo Sapiens
LNDIKIQMYFEWSDG

SEQ ID NO: 102697 - protein, 15 aa, Homo Sapiens
NDIKIQMYFEWSDGT

SEQ ID NO: 102698 - protein, 15 aa, Homo Sapiens
DIKIQMYFEWSDGTP

SEQ ID NO: 102699 - protein, 15 aa, Homo Sapiens
IKIQMYFEWSDGTPV

SEQ ID NO: 102700 - protein, 15 aa, Homo Sapiens
KIQMYFEWSDGTPVT

SEQ ID NO: 102701 - protein, 15 aa, Homo Sapiens
IQMYFEWSDGTPVTF

SEQ ID NO: 102702 - protein, 15 aa, Homo Sapiens
QMYFEWSDGTPVTFT

SEQ ID NO: 102703 - protein, 15 aa, Homo Sapiens
MYFEWSDGTPVTFTK

SEQ ID NO: 102704 - protein, 15 aa, Homo Sapiens
YFEWSDGTPVTFTKW

SEQ ID NO: 102705 - protein, 15 aa, Homo Sapiens
FEWSDGTPVTFTKWL

SEQ ID NO: 102706 - protein, 15 aa, Homo Sapiens
EWSDGTPVTFTKWLR

SEQ ID NO: 102707 - protein, 15 aa, Homo Sapiens
WSDGTPVTFTKWLRG

SEQ ID NO: 102708 - protein, 15 aa, Homo Sapiens
SDGTPVTFTKWLRGE

SEQ ID NO: 102709 - protein, 15 aa, Homo Sapiens
DGTPVTFTKWLRGEP

SEQ ID NO: 102710 - protein, 15 aa, Homo Sapiens
GTPVTFTKWLRGEPS

SEQ ID NO: 102711 - protein, 15 aa, Homo Sapiens
TPVTFTKWLRGEPSH

SEQ ID NO: 102712 - protein, 15 aa, Homo Sapiens
PVTFTKWLRGEPSHE

SEQ ID NO: 102713 - protein, 15 aa, Homo Sapiens
VTFTKWLRGEPSHEN

SEQ ID NO: 102714 - protein, 15 aa, Homo Sapiens
TFTKWLRGEPSHENN

SEQ ID NO: 102715 - protein, 15 aa, Homo Sapiens
FTKWLRGEPSHENNR

SEQ ID NO: 102716 - protein, 15 aa, Homo Sapiens
TKWLRGEPSHENNRQ

SEQ ID NO: 102717 - protein, 15 aa, Homo Sapiens
KWLRGEPSHENNRQE

SEQ ID NO: 102718 - protein, 15 aa, Homo Sapiens
WLRGEPSHENNRQED

SEQ ID NO: 102719 - protein, 15 aa, Homo Sapiens
LRGEPSHENNRQEDC

SEQ ID NO: 102720 - protein, 15 aa, Homo Sapiens
RGEPSHENNRQEDCV

SEQ ID NO: 102721 - protein, 15 aa, Homo Sapiens
GEPSHENNRQEDCVV

SEQ ID NO: 102722 - protein, 15 aa, Homo Sapiens
EPSHENNRQEDCVVM

SEQ ID NO: 102723 - protein, 15 aa, Homo Sapiens
PSHENNRQEDCVVMK

SEQ ID NO: 102724 - protein, 15 aa, Homo Sapiens
SHENNRQEDCVVMKG

SEQ ID NO: 102725 - protein, 15 aa, Homo Sapiens
HENNRQEDCVVMKGK

SEQ ID NO: 102726 - protein, 15 aa, Homo Sapiens
ENNRQEDCVVMKGKD

SEQ ID NO: 102727 - protein, 15 aa, Homo Sapiens
NNRQEDCVVMKGKDG

SEQ ID NO: 102728 - protein, 15 aa, Homo Sapiens
NRQEDCVVMKGKDGY

SEQ ID NO: 102729 - protein, 15 aa, Homo Sapiens
RQEDCVVMKGKDGYW

SEQ ID NO: 102730 - protein, 15 aa, Homo Sapiens
QEDCVVMKGKDGYWA

SEQ ID NO: 102731 - protein, 15 aa, Homo Sapiens
EDCVVMKGKDGYWAD

SEQ ID NO: 102732 - protein, 15 aa, Homo Sapiens
DCVVMKGKDGYWADR

SEQ ID NO: 102733 - protein, 15 aa, Homo Sapiens
CVVMKGKDGYWADRG

SEQ ID NO: 102734 - protein, 15 aa, Homo Sapiens
VVMKGKDGYWADRGC

SEQ ID NO: 102735 - protein, 15 aa, Homo Sapiens
VMKGKDGYWADRGCE

SEQ ID NO: 102736 - protein, 15 aa, Homo Sapiens
MKGKDGYWADRGCEW

SEQ ID NO: 102737 - protein, 15 aa, Homo Sapiens
KGKDGYWADRGCEWP

SEQ ID NO: 102738 - protein, 15 aa, Homo Sapiens
GKDGYWADRGCEWPL

SEQ ID NO: 102739 - protein, 15 aa, Homo Sapiens
KDGYWADRGCEWPLG

SEQ ID NO: 102740 - protein, 15 aa, Homo Sapiens
DGYWADRGCEWPLGY

SEQ ID NO: 102741 - protein, 15 aa, Homo Sapiens
GYWADRGCEWPLGYI

SEQ ID NO: 102742 - protein, 15 aa, Homo Sapiens
YWADRGCEWPLGYIC

SEQ ID NO: 102743 - protein, 15 aa, Homo Sapiens
WADRGCEWPLGYICK

SEQ ID NO: 102744 - protein, 15 aa, Homo Sapiens
ADRGCEWPLGYICKM

SEQ ID NO: 102745 - protein, 15 aa, Homo Sapiens
DRGCEWPLGYICKMK

SEQ ID NO: 102746 - protein, 15 aa, Homo Sapiens
RGCEWPLGYICKMKS

SEQ ID NO: 102747 - protein, 15 aa, Homo Sapiens
GCEWPLGYICKMKSR

SEQ ID NO: 102748 - protein, 15 aa, Homo Sapiens
CEWPLGYICKMKSRS

SEQ ID NO: 102749 - protein, 15 aa, Homo Sapiens
EWPLGYICKMKSRSQ

SEQ ID NO: 102750 - protein, 15 aa, Homo Sapiens
WPLGYICKMKSRSQG

SEQ ID NO: 102751 - protein, 15 aa, Homo Sapiens
PLGYICKMKSRSQGP

SEQ ID NO: 102752 - protein, 15 aa, Homo Sapiens
LGYICKMKSRSQGPE

SEQ ID NO: 102753 - protein, 15 aa, Homo Sapiens
GYICKMKSRSQGPEI

SEQ ID NO: 102754 - protein, 15 aa, Homo Sapiens
YICKMKSRSQGPEIV

SEQ ID NO: 102755 - protein, 15 aa, Homo Sapiens
ICKMKSRSQGPEIVE

SEQ ID NO: 102756 - protein, 15 aa, Homo Sapiens
CKMKSRSQGPEIVEV

SEQ ID NO: 102757 - protein, 15 aa, Homo Sapiens
KMKSRSQGPEIVEVE

SEQ ID NO: 102758 - protein, 15 aa, Homo Sapiens
MKSRSQGPEIVEVEK

SEQ ID NO: 102759 - protein, 15 aa, Homo Sapiens
KSRSQGPEIVEVEKG

SEQ ID NO: 102760 - protein, 15 aa, Homo Sapiens
SRSQGPEIVEVEKGC

SEQ ID NO: 102761 - protein, 15 aa, Homo Sapiens
RSQGPEIVEVEKGCR

SEQ ID NO: 102762 - protein, 15 aa, Homo Sapiens
SQGPEIVEVEKGCRK

SEQ ID NO: 102763 - protein, 15 aa, Homo Sapiens
QGPEIVEVEKGCRKG

SEQ ID NO: 102764 - protein, 15 aa, Homo Sapiens
GPEIVEVEKGCRKGW

SEQ ID NO: 102765 - protein, 15 aa, Homo Sapiens
PEIVEVEKGCRKGWK

SEQ ID NO: 102766 - protein, 15 aa, Homo Sapiens
EIVEVEKGCRKGWKK

SEQ ID NO: 102767 - protein, 15 aa, Homo Sapiens
IVEVEKGCRKGWKKH

SEQ ID NO: 102768 - protein, 15 aa, Homo Sapiens
VEVEKGCRKGWKKHH

SEQ ID NO: 102769 - protein, 15 aa, Homo Sapiens
EVEKGCRKGWKKHHF

SEQ ID NO: 102770 - protein, 15 aa, Homo Sapiens
VEKGCRKGWKKHHFY

SEQ ID NO: 102771 - protein, 15 aa, Homo Sapiens
EKGCRKGWKKHHFYC

SEQ ID NO: 102772 - protein, 15 aa, Homo Sapiens
KGCRKGWKKHHFYCY

SEQ ID NO: 102773 - protein, 15 aa, Homo Sapiens
GCRKGWKKHHFYCYM

SEQ ID NO: 102774 - protein, 15 aa, Homo Sapiens
CRKGWKKHHFYCYMI

SEQ ID NO: 102775 - protein, 15 aa, Homo Sapiens
RKGWKKHHFYCYMIG

SEQ ID NO: 102776 - protein, 15 aa, Homo Sapiens
KGWKKHHFYCYMIGH

SEQ ID NO: 102777 - protein, 15 aa, Homo Sapiens
GWKKHHFYCYMIGHT

SEQ ID NO: 102778 - protein, 15 aa, Homo Sapiens
WKKHHFYCYMIGHTL

SEQ ID NO: 102779 - protein, 15 aa, Homo Sapiens
KKHHFYCYMIGHTLS

SEQ ID NO: 102780 - protein, 15 aa, Homo Sapiens
KHHFYCYMIGHTLST

SEQ ID NO: 102781 - protein, 15 aa, Homo Sapiens
HHFYCYMIGHTLSTF

SEQ ID NO: 102782 - protein, 15 aa, Homo Sapiens
HFYCYMIGHTLSTFA

SEQ ID NO: 102783 - protein, 15 aa, Homo Sapiens
FYCYMIGHTLSTFAE

SEQ ID NO: 102784 - protein, 15 aa, Homo Sapiens
YCYMIGHTLSTFAEA

SEQ ID NO: 102785 - protein, 15 aa, Homo Sapiens
CYMIGHTLSTFAEAN

SEQ ID NO: 102786 - protein, 15 aa, Homo Sapiens
YMIGHTLSTFAEANQ

SEQ ID NO: 102787 - protein, 15 aa, Homo Sapiens
MIGHTLSTFAEANQT

SEQ ID NO: 102788 - protein, 15 aa, Homo Sapiens
IGHTLSTFAEANQTC

SEQ ID NO: 102789 - protein, 15 aa, Homo Sapiens
GHTLSTFAEANQTCN

SEQ ID NO: 102790 - protein, 15 aa, Homo Sapiens
HTLSTFAEANQTCNN

SEQ ID NO: 102791 - protein, 15 aa, Homo Sapiens
TLSTFAEANQTCNNE

SEQ ID NO: 102792 - protein, 15 aa, Homo Sapiens
LSTFAEANQTCNNEN

SEQ ID NO: 102793 - protein, 15 aa, Homo Sapiens
STFAEANQTCNNENA

SEQ ID NO: 102794 - protein, 15 aa, Homo Sapiens
TFAEANQTCNNENAY

SEQ ID NO: 102795 - protein, 15 aa, Homo Sapiens
FAEANQTCNNENAYL

SEQ ID NO: 102796 - protein, 15 aa, Homo Sapiens
AEANQTCNNENAYLT

SEQ ID NO: 102797 - protein, 15 aa, Homo Sapiens
EANQTCNNENAYLTT

SEQ ID NO: 102798 - protein, 15 aa, Homo Sapiens
ANQTCNNENAYLTTI

SEQ ID NO: 102799 - protein, 15 aa, Homo Sapiens
NQTCNNENAYLTTIE

SEQ ID NO: 102800 - protein, 15 aa, Homo Sapiens
QTCNNENAYLTTIED

SEQ ID NO: 102801 - protein, 15 aa, Homo Sapiens
TCNNENAYLTTIEDR

SEQ ID NO: 102802 - protein, 15 aa, Homo Sapiens
CNNENAYLTTIEDRY

SEQ ID NO: 102803 - protein, 15 aa, Homo Sapiens
NNENAYLTTIEDRYE

SEQ ID NO: 102804 - protein, 15 aa, Homo Sapiens
NENAYLTTIEDRYEQ

SEQ ID NO: 102805 - protein, 15 aa, Homo Sapiens
ENAYLTTIEDRYEQA

SEQ ID NO: 102806 - protein, 15 aa, Homo Sapiens
NAYLTTIEDRYEQAF

SEQ ID NO: 102807 - protein, 15 aa, Homo Sapiens
AYLTTIEDRYEQAFL

SEQ ID NO: 102808 - protein, 15 aa, Homo Sapiens
YLTTIEDRYEQAFLT

SEQ ID NO: 102809 - protein, 15 aa, Homo Sapiens
LTTIEDRYEQAFLTS

SEQ ID NO: 102810 - protein, 15 aa, Homo Sapiens
TTIEDRYEQAFLTSF

SEQ ID NO: 102811 - protein, 15 aa, Homo Sapiens
TIEDRYEQAFLTSFV

SEQ ID NO: 102812 - protein, 15 aa, Homo Sapiens
IEDRYEQAFLTSFVG

SEQ ID NO: 102813 - protein, 15 aa, Homo Sapiens
EDRYEQAFLTSFVGL

SEQ ID NO: 102814 - protein, 15 aa, Homo Sapiens
DRYEQAFLTSFVGLR

SEQ ID NO: 102815 - protein, 15 aa, Homo Sapiens
RYEQAFLTSFVGLRP

SEQ ID NO: 102816 - protein, 15 aa, Homo Sapiens
YEQAFLTSFVGLRPE

SEQ ID NO: 102817 - protein, 15 aa, Homo Sapiens
EQAFLTSFVGLRPEK

SEQ ID NO: 102818 - protein, 15 aa, Homo Sapiens
QAFLTSFVGLRPEKY

SEQ ID NO: 102819 - protein, 15 aa, Homo Sapiens
AFLTSFVGLRPEKYF

SEQ ID NO: 102820 - protein, 15 aa, Homo Sapiens
FLTSFVGLRPEKYFW

SEQ ID NO: 102821 - protein, 15 aa, Homo Sapiens
LTSFVGLRPEKYFWT

SEQ ID NO: 102822 - protein, 15 aa, Homo Sapiens
TSFVGLRPEKYFWTG

SEQ ID NO: 102823 - protein, 15 aa, Homo Sapiens
SFVGLRPEKYFWTGL

SEQ ID NO: 102824 - protein, 15 aa, Homo Sapiens
FVGLRPEKYFWTGLS

SEQ ID NO: 102825 - protein, 15 aa, Homo Sapiens
VGLRPEKYFWTGLSD

SEQ ID NO: 102826 - protein, 15 aa, Homo Sapiens
GLRPEKYFWTGLSDI

SEQ ID NO: 102827 - protein, 15 aa, Homo Sapiens
LRPEKYFWTGLSDIQ

SEQ ID NO: 102828 - protein, 15 aa, Homo Sapiens
RPEKYFWTGLSDIQT

SEQ ID NO: 102829 - protein, 15 aa, Homo Sapiens
PEKYFWTGLSDIQTK

SEQ ID NO: 102830 - protein, 15 aa, Homo Sapiens
EKYFWTGLSDIQTKG

SEQ ID NO: 102831 - protein, 15 aa, Homo Sapiens
KYFWTGLSDIQTKGT

SEQ ID NO: 102832 - protein, 15 aa, Homo Sapiens
YFWTGLSDIQTKGTF

SEQ ID NO: 102833 - protein, 15 aa, Homo Sapiens
FWTGLSDIQTKGTFQ

SEQ ID NO: 102834 - protein, 15 aa, Homo Sapiens
WTGLSDIQTKGTFQW

SEQ ID NO: 102835 - protein, 15 aa, Homo Sapiens
TGLSDIQTKGTFQWT

SEQ ID NO: 102836 - protein, 15 aa, Homo Sapiens
GLSDIQTKGTFQWTI

SEQ ID NO: 102837 - protein, 15 aa, Homo Sapiens
LSDIQTKGTFQWTIE

SEQ ID NO: 102838 - protein, 15 aa, Homo Sapiens
SDIQTKGTFQWTIEE

SEQ ID NO: 102839 - protein, 15 aa, Homo Sapiens
DIQTKGTFQWTIEEE

SEQ ID NO: 102840 - protein, 15 aa, Homo Sapiens
IQTKGTFQWTIEEEV

SEQ ID NO: 102841 - protein, 15 aa, Homo Sapiens
QTKGTFQWTIEEEVR

SEQ ID NO: 102842 - protein, 15 aa, Homo Sapiens
TKGTFQWTIEEEVRF

SEQ ID NO: 102843 - protein, 15 aa, Homo Sapiens
KGTFQWTIEEEVRFT

SEQ ID NO: 102844 - protein, 15 aa, Homo Sapiens
GTFQWTIEEEVRFTH

SEQ ID NO: 102845 - protein, 15 aa, Homo Sapiens
TFQWTIEEEVRFTHW

SEQ ID NO: 102846 - protein, 15 aa, Homo Sapiens
FQWTIEEEVRFTHWN

SEQ ID NO: 102847 - protein, 15 aa, Homo Sapiens
QWTIEEEVRFTHWNS

SEQ ID NO: 102848 - protein, 15 aa, Homo Sapiens
WTIEEEVRFTHWNSD

SEQ ID NO: 102849 - protein, 15 aa, Homo Sapiens
TIEEEVRFTHWNSDM

SEQ ID NO: 102850 - protein, 15 aa, Homo Sapiens
IEEEVRFTHWNSDMP

SEQ ID NO: 102851 - protein, 15 aa, Homo Sapiens
EEEVRFTHWNSDMPG

SEQ ID NO: 102852 - protein, 15 aa, Homo Sapiens
EEVRFTHWNSDMPGR

SEQ ID NO: 102853 - protein, 15 aa, Homo Sapiens
EVRFTHWNSDMPGRK

SEQ ID NO: 102854 - protein, 15 aa, Homo Sapiens
VRFTHWNSDMPGRKP

SEQ ID NO: 102855 - protein, 15 aa, Homo Sapiens
RFTHWNSDMPGRKPG

SEQ ID NO: 102856 - protein, 15 aa, Homo Sapiens
FTHWNSDMPGRKPGC

SEQ ID NO: 102857 - protein, 15 aa, Homo Sapiens
THWNSDMPGRKPGCV

SEQ ID NO: 102858 - protein, 15 aa, Homo Sapiens
HWNSDMPGRKPGCVA

SEQ ID NO: 102859 - protein, 15 aa, Homo Sapiens
WNSDMPGRKPGCVAM

SEQ ID NO: 102860 - protein, 15 aa, Homo Sapiens
NSDMPGRKPGCVAMR

SEQ ID NO: 102861 - protein, 15 aa, Homo Sapiens
SDMPGRKPGCVAMRT

SEQ ID NO: 102862 - protein, 15 aa, Homo Sapiens
DMPGRKPGCVAMRTG

SEQ ID NO: 102863 - protein, 15 aa, Homo Sapiens
MPGRKPGCVAMRTGI

SEQ ID NO: 102864 - protein, 15 aa, Homo Sapiens
PGRKPGCVAMRTGIA

SEQ ID NO: 102865 - protein, 15 aa, Homo Sapiens
GRKPGCVAMRTGIAG

SEQ ID NO: 102866 - protein, 15 aa, Homo Sapiens
RKPGCVAMRTGIAGG

SEQ ID NO: 102867 - protein, 15 aa, Homo Sapiens
KPGCVAMRTGIAGGL

SEQ ID NO: 102868 - protein, 15 aa, Homo Sapiens
PGCVAMRTGIAGGLW

SEQ ID NO: 102869 - protein, 15 aa, Homo Sapiens
GCVAMRTGIAGGLWD

SEQ ID NO: 102870 - protein, 15 aa, Homo Sapiens
CVAMRTGIAGGLWDV

SEQ ID NO: 102871 - protein, 15 aa, Homo Sapiens
VAMRTGIAGGLWDVL

SEQ ID NO: 102872 - protein, 15 aa, Homo Sapiens
AMRTGIAGGLWDVLK

SEQ ID NO: 102873 - protein, 15 aa, Homo Sapiens
MRTGIAGGLWDVLKC

SEQ ID NO: 102874 - protein, 15 aa, Homo Sapiens
RTGIAGGLWDVLKCD

SEQ ID NO: 102875 - protein, 15 aa, Homo Sapiens
TGIAGGLWDVLKCDE

SEQ ID NO: 102876 - protein, 15 aa, Homo Sapiens
GIAGGLWDVLKCDEK

SEQ ID NO: 102877 - protein, 15 aa, Homo Sapiens
IAGGLWDVLKCDEKA

SEQ ID NO: 102878 - protein, 15 aa, Homo Sapiens
AGGLWDVLKCDEKAK

SEQ ID NO: 102879 - protein, 15 aa, Homo Sapiens
GGLWDVLKCDEKAKF

SEQ ID NO: 102880 - protein, 15 aa, Homo Sapiens
GLWDVLKCDEKAKFV

SEQ ID NO: 102881 - protein, 15 aa, Homo Sapiens
LWDVLKCDEKAKFVC

SEQ ID NO: 102882 - protein, 15 aa, Homo Sapiens
WDVLKCDEKAKFVCK

SEQ ID NO: 102883 - protein, 15 aa, Homo Sapiens
DVLKCDEKAKFVCKH

SEQ ID NO: 102884 - protein, 15 aa, Homo Sapiens
VLKCDEKAKFVCKHW

SEQ ID NO: 102885 - protein, 15 aa, Homo Sapiens
LKCDEKAKFVCKHWA

SEQ ID NO: 102886 - protein, 15 aa, Homo Sapiens
KCDEKAKFVCKHWAE

SEQ ID NO: 102887 - protein, 15 aa, Homo Sapiens
CDEKAKFVCKHWAEG

SEQ ID NO: 102888 - protein, 15 aa, Homo Sapiens
DEKAKFVCKHWAEGV

SEQ ID NO: 102889 - protein, 15 aa, Homo Sapiens
EKAKFVCKHWAEGVT

SEQ ID NO: 102890 - protein, 15 aa, Homo Sapiens
KAKFVCKHWAEGVTH

SEQ ID NO: 102891 - protein, 15 aa, Homo Sapiens
AKFVCKHWAEGVTHP

SEQ ID NO: 102892 - protein, 15 aa, Homo Sapiens
KFVCKHWAEGVTHPP

SEQ ID NO: 102893 - protein, 15 aa, Homo Sapiens
FVCKHWAEGVTHPPK

SEQ ID NO: 102894 - protein, 15 aa, Homo Sapiens
VCKHWAEGVTHPPKP

SEQ ID NO: 102895 - protein, 15 aa, Homo Sapiens
CKHWAEGVTHPPKPT

SEQ ID NO: 102896 - protein, 15 aa, Homo Sapiens
KHWAEGVTHPPKPTT

SEQ ID NO: 102897 - protein, 15 aa, Homo Sapiens
HWAEGVTHPPKPTTT

SEQ ID NO: 102898 - protein, 15 aa, Homo Sapiens
WAEGVTHPPKPTTTP

SEQ ID NO: 102899 - protein, 15 aa, Homo Sapiens
AEGVTHPPKPTTTPE

SEQ ID NO: 102900 - protein, 15 aa, Homo Sapiens
EGVTHPPKPTTTPEP

SEQ ID NO: 102901 - protein, 15 aa, Homo Sapiens
GVTHPPKPTTTPEPK

SEQ ID NO: 102902 - protein, 15 aa, Homo Sapiens
VTHPPKPTTTPEPKC

SEQ ID NO: 102903 - protein, 15 aa, Homo Sapiens
THPPKPTTTPEPKCP

SEQ ID NO: 102904 - protein, 15 aa, Homo Sapiens
HPPKPTTTPEPKCPE

SEQ ID NO: 102905 - protein, 15 aa, Homo Sapiens
PPKPTTTPEPKCPED

SEQ ID NO: 102906 - protein, 15 aa, Homo Sapiens
PKPTTTPEPKCPEDW

SEQ ID NO: 102907 - protein, 15 aa, Homo Sapiens
KPTTTPEPKCPEDWG

SEQ ID NO: 102908 - protein, 15 aa, Homo Sapiens
PTTTPEPKCPEDWGA

SEQ ID NO: 102909 - protein, 15 aa, Homo Sapiens
TTTPEPKCPEDWGAS

SEQ ID NO: 102910 - protein, 15 aa, Homo Sapiens
TTPEPKCPEDWGASS

SEQ ID NO: 102911 - protein, 15 aa, Homo Sapiens
TPEPKCPEDWGASSR

SEQ ID NO: 102912 - protein, 15 aa, Homo Sapiens
PEPKCPEDWGASSRT

SEQ ID NO: 102913 - protein, 15 aa, Homo Sapiens
EPKCPEDWGASSRTS

SEQ ID NO: 102914 - protein, 15 aa, Homo Sapiens
PKCPEDWGASSRTSL

SEQ ID NO: 102915 - protein, 15 aa, Homo Sapiens
KCPEDWGASSRTSLC

SEQ ID NO: 102916 - protein, 15 aa, Homo Sapiens
CPEDWGASSRTSLCF

SEQ ID NO: 102917 - protein, 15 aa, Homo Sapiens
PEDWGASSRTSLCFK

SEQ ID NO: 102918 - protein, 15 aa, Homo Sapiens
EDWGASSRTSLCFKL

SEQ ID NO: 102919 - protein, 15 aa, Homo Sapiens
DWGASSRTSLCFKLY

SEQ ID NO: 102920 - protein, 15 aa, Homo Sapiens
WGASSRTSLCFKLYA

SEQ ID NO: 102921 - protein, 15 aa, Homo Sapiens
GASSRTSLCFKLYAK

SEQ ID NO: 102922 - protein, 15 aa, Homo Sapiens
ASSRTSLCFKLYAKG

SEQ ID NO: 102923 - protein, 15 aa, Homo Sapiens
SSRTSLCFKLYAKGK

SEQ ID NO: 102924 - protein, 15 aa, Homo Sapiens
SRTSLCFKLYAKGKI

SEQ ID NO: 102925 - protein, 15 aa, Homo Sapiens
RTSLCFKLYAKGKIE

SEQ ID NO: 102926 - protein, 15 aa, Homo Sapiens
TSLCFKLYAKGKIEK

SEQ ID NO: 102927 - protein, 15 aa, Homo Sapiens
SLCFKLYAKGKIEKK

SEQ ID NO: 102928 - protein, 15 aa, Homo Sapiens
LCFKLYAKGKIEKKT

SEQ ID NO: 102929 - protein, 15 aa, Homo Sapiens
CFKLYAKGKIEKKTW

SEQ ID NO: 102930 - protein, 15 aa, Homo Sapiens
FKLYAKGKIEKKTWF

SEQ ID NO: 102931 - protein, 15 aa, Homo Sapiens
KLYAKGKIEKKTWFE

SEQ ID NO: 102932 - protein, 15 aa, Homo Sapiens
LYAKGKIEKKTWFES

SEQ ID NO: 102933 - protein, 15 aa, Homo Sapiens
YAKGKIEKKTWFESR

SEQ ID NO: 102934 - protein, 15 aa, Homo Sapiens
AKGKIEKKTWFESRD

SEQ ID NO: 102935 - protein, 15 aa, Homo Sapiens
KGKIEKKTWFESRDF

SEQ ID NO: 102936 - protein, 15 aa, Homo Sapiens
GKIEKKTWFESRDFC

SEQ ID NO: 102937 - protein, 15 aa, Homo Sapiens
KIEKKTWFESRDFCR

SEQ ID NO: 102938 - protein, 15 aa, Homo Sapiens
IEKKTWFESRDFCRA

SEQ ID NO: 102939 - protein, 15 aa, Homo Sapiens
EKKTWFESRDFCRAL

SEQ ID NO: 102940 - protein, 15 aa, Homo Sapiens
KKTWFESRDFCRALG

SEQ ID NO: 102941 - protein, 15 aa, Homo Sapiens
KTWFESRDFCRALGG

SEQ ID NO: 102942 - protein, 15 aa, Homo Sapiens
TWFESRDFCRALGGD

SEQ ID NO: 102943 - protein, 15 aa, Homo Sapiens
WFESRDFCRALGGDL

SEQ ID NO: 102944 - protein, 15 aa, Homo Sapiens
FESRDFCRALGGDLA

SEQ ID NO: 102945 - protein, 15 aa, Homo Sapiens
ESRDFCRALGGDLAS

SEQ ID NO: 102946 - protein, 15 aa, Homo Sapiens
SRDFCRALGGDLASI

SEQ ID NO: 102947 - protein, 15 aa, Homo Sapiens
RDFCRALGGDLASIN

SEQ ID NO: 102948 - protein, 15 aa, Homo Sapiens
DFCRALGGDLASINN

SEQ ID NO: 102949 - protein, 15 aa, Homo Sapiens
FCRALGGDLASINNK

SEQ ID NO: 102950 - protein, 15 aa, Homo Sapiens
CRALGGDLASINNKE

SEQ ID NO: 102951 - protein, 15 aa, Homo Sapiens
RALGGDLASINNKEE

SEQ ID NO: 102952 - protein, 15 aa, Homo Sapiens
ALGGDLASINNKEEQ

SEQ ID NO: 102953 - protein, 15 aa, Homo Sapiens
LGGDLASINNKEEQQ

SEQ ID NO: 102954 - protein, 15 aa, Homo Sapiens
GGDLASINNKEEQQT

SEQ ID NO: 102955 - protein, 15 aa, Homo Sapiens
GDLASINNKEEQQTI

SEQ ID NO: 102956 - protein, 15 aa, Homo Sapiens
DLASINNKEEQQTIW

SEQ ID NO: 102957 - protein, 15 aa, Homo Sapiens
LASINNKEEQQTIWR

SEQ ID NO: 102958 - protein, 15 aa, Homo Sapiens
ASINNKEEQQTIWRL

SEQ ID NO: 102959 - protein, 15 aa, Homo Sapiens
SINNKEEQQTIWRLI

SEQ ID NO: 102960 - protein, 15 aa, Homo Sapiens
INNKEEQQTIWRLIT

SEQ ID NO: 102961 - protein, 15 aa, Homo Sapiens
NNKEEQQTIWRLITA

SEQ ID NO: 102962 - protein, 15 aa, Homo Sapiens
NKEEQQTIWRLITAS

SEQ ID NO: 102963 - protein, 15 aa, Homo Sapiens
KEEQQTIWRLITASG

SEQ ID NO: 102964 - protein, 15 aa, Homo Sapiens
EEQQTIWRLITASGS

SEQ ID NO: 102965 - protein, 15 aa, Homo Sapiens
EQQTIWRLITASGSY

SEQ ID NO: 102966 - protein, 15 aa, Homo Sapiens
QQTIWRLITASGSYH

SEQ ID NO: 102967 - protein, 15 aa, Homo Sapiens
QTIWRLITASGSYHK

SEQ ID NO: 102968 - protein, 15 aa, Homo Sapiens
TIWRLITASGSYHKL

SEQ ID NO: 102969 - protein, 15 aa, Homo Sapiens
IWRLITASGSYHKLF

SEQ ID NO: 102970 - protein, 15 aa, Homo Sapiens
WRLITASGSYHKLFW

SEQ ID NO: 102971 - protein, 15 aa, Homo Sapiens
RLITASGSYHKLFWL

SEQ ID NO: 102972 - protein, 15 aa, Homo Sapiens
LITASGSYHKLFWLG

SEQ ID NO: 102973 - protein, 15 aa, Homo Sapiens
ITASGSYHKLFWLGL

SEQ ID NO: 102974 - protein, 15 aa, Homo Sapiens
TASGSYHKLFWLGLT

SEQ ID NO: 102975 - protein, 15 aa, Homo Sapiens
ASGSYHKLFWLGLTY

SEQ ID NO: 102976 - protein, 15 aa, Homo Sapiens
SGSYHKLFWLGLTYG

SEQ ID NO: 102977 - protein, 15 aa, Homo Sapiens
GSYHKLFWLGLTYGS

SEQ ID NO: 102978 - protein, 15 aa, Homo Sapiens
SYHKLFWLGLTYGSP

SEQ ID NO: 102979 - protein, 15 aa, Homo Sapiens
YHKLFWLGLTYGSPS

SEQ ID NO: 102980 - protein, 15 aa, Homo Sapiens
HKLFWLGLTYGSPSE

SEQ ID NO: 102981 - protein, 15 aa, Homo Sapiens
KLFWLGLTYGSPSEG

SEQ ID NO: 102982 - protein, 15 aa, Homo Sapiens
LFWLGLTYGSPSEGF

SEQ ID NO: 102983 - protein, 15 aa, Homo Sapiens
FWLGLTYGSPSEGFT

SEQ ID NO: 102984 - protein, 15 aa, Homo Sapiens
WLGLTYGSPSEGFTW

SEQ ID NO: 102985 - protein, 15 aa, Homo Sapiens
LGLTYGSPSEGFTWS

SEQ ID NO: 102986 - protein, 15 aa, Homo Sapiens
GLTYGSPSEGFTWSD

SEQ ID NO: 102987 - protein, 15 aa, Homo Sapiens
LTYGSPSEGFTWSDG

SEQ ID NO: 102988 - protein, 15 aa, Homo Sapiens
TYGSPSEGFTWSDGS

SEQ ID NO: 102989 - protein, 15 aa, Homo Sapiens
YGSPSEGFTWSDGSP

SEQ ID NO: 102990 - protein, 15 aa, Homo Sapiens
GSPSEGFTWSDGSPV

SEQ ID NO: 102991 - protein, 15 aa, Homo Sapiens
SPSEGFTWSDGSPVS

SEQ ID NO: 102992 - protein, 15 aa, Homo Sapiens
PSEGFTWSDGSPVSY

SEQ ID NO: 102993 - protein, 15 aa, Homo Sapiens
SEGFTWSDGSPVSYE

SEQ ID NO: 102994 - protein, 15 aa, Homo Sapiens
EGFTWSDGSPVSYEN

SEQ ID NO: 102995 - protein, 15 aa, Homo Sapiens
GFTWSDGSPVSYENW

SEQ ID NO: 102996 - protein, 15 aa, Homo Sapiens
FTWSDGSPVSYENWA

SEQ ID NO: 102997 - protein, 15 aa, Homo Sapiens
TWSDGSPVSYENWAY

SEQ ID NO: 102998 - protein, 15 aa, Homo Sapiens
WSDGSPVSYENWAYG

SEQ ID NO: 102999 - protein, 15 aa, Homo Sapiens
SDGSPVSYENWAYGE

SEQ ID NO: 103000 - protein, 15 aa, Homo Sapiens
DGSPVSYENWAYGEP

SEQ ID NO: 103001 - protein, 15 aa, Homo Sapiens
GSPVSYENWAYGEPN

SEQ ID NO: 103002 - protein, 15 aa, Homo Sapiens
SPVSYENWAYGEPNN

SEQ ID NO: 103003 - protein, 15 aa, Homo Sapiens
PVSYENWAYGEPNNY

SEQ ID NO: 103004 - protein, 15 aa, Homo Sapiens
VSYENWAYGEPNNYQ

SEQ ID NO: 103005 - protein, 15 aa, Homo Sapiens
SYENWAYGEPNNYQN

SEQ ID NO: 103006 - protein, 15 aa, Homo Sapiens
YENWAYGEPNNYQNV

SEQ ID NO: 103007 - protein, 15 aa, Homo Sapiens
ENWAYGEPNNYQNVE

SEQ ID NO: 103008 - protein, 15 aa, Homo Sapiens
NWAYGEPNNYQNVEY

SEQ ID NO: 103009 - protein, 15 aa, Homo Sapiens
WAYGEPNNYQNVEYC

SEQ ID NO: 103010 - protein, 15 aa, Homo Sapiens
AYGEPNNYQNVEYCG

SEQ ID NO: 103011 - protein, 15 aa, Homo Sapiens
YGEPNNYQNVEYCGE

SEQ ID NO: 103012 - protein, 15 aa, Homo Sapiens
GEPNNYQNVEYCGEL

SEQ ID NO: 103013 - protein, 15 aa, Homo Sapiens
EPNNYQNVEYCGELK

SEQ ID NO: 103014 - protein, 15 aa, Homo Sapiens
PNNYQNVEYCGELKG

SEQ ID NO: 103015 - protein, 15 aa, Homo Sapiens
NNYQNVEYCGELKGD

SEQ ID NO: 103016 - protein, 15 aa, Homo Sapiens
NYQNVEYCGELKGDP

SEQ ID NO: 103017 - protein, 15 aa, Homo Sapiens
YQNVEYCGELKGDPT

SEQ ID NO: 103018 - protein, 15 aa, Homo Sapiens
QNVEYCGELKGDPTM

SEQ ID NO: 103019 - protein, 15 aa, Homo Sapiens
NVEYCGELKGDPTMS

SEQ ID NO: 103020 - protein, 15 aa, Homo Sapiens
VEYCGELKGDPTMSW

SEQ ID NO: 103021 - protein, 15 aa, Homo Sapiens
EYCGELKGDPTMSWN

SEQ ID NO: 103022 - protein, 15 aa, Homo Sapiens
YCGELKGDPTMSWND

SEQ ID NO: 103023 - protein, 15 aa, Homo Sapiens
CGELKGDPTMSWNDI

SEQ ID NO: 103024 - protein, 15 aa, Homo Sapiens
GELKGDPTMSWNDIN

SEQ ID NO: 103025 - protein, 15 aa, Homo Sapiens
ELKGDPTMSWNDINC

SEQ ID NO: 103026 - protein, 15 aa, Homo Sapiens
LKGDPTMSWNDINCE

SEQ ID NO: 103027 - protein, 15 aa, Homo Sapiens
KGDPTMSWNDINCEH

SEQ ID NO: 103028 - protein, 15 aa, Homo Sapiens
GDPTMSWNDINCEHL

SEQ ID NO: 103029 - protein, 15 aa, Homo Sapiens
DPTMSWNDINCEHLN

SEQ ID NO: 103030 - protein, 15 aa, Homo Sapiens
PTMSWNDINCEHLNN

SEQ ID NO: 103031 - protein, 15 aa, Homo Sapiens
TMSWNDINCEHLNNW

SEQ ID NO: 103032 - protein, 15 aa, Homo Sapiens
MSWNDINCEHLNNWI

SEQ ID NO: 103033 - protein, 15 aa, Homo Sapiens
SWNDINCEHLNNWIC

SEQ ID NO: 103034 - protein, 15 aa, Homo Sapiens
WNDINCEHLNNWICQ

SEQ ID NO: 103035 - protein, 15 aa, Homo Sapiens
NDINCEHLNNWICQI

SEQ ID NO: 103036 - protein, 15 aa, Homo Sapiens
DINCEHLNNWICQIQ

SEQ ID NO: 103037 - protein, 15 aa, Homo Sapiens
INCEHLNNWICQIQK

SEQ ID NO: 103038 - protein, 15 aa, Homo Sapiens
NCEHLNNWICQIQKG

SEQ ID NO: 103039 - protein, 15 aa, Homo Sapiens
CEHLNNWICQIQKGQ

SEQ ID NO: 103040 - protein, 15 aa, Homo Sapiens
EHLNNWICQIQKGQT

SEQ ID NO: 103041 - protein, 15 aa, Homo Sapiens
HLNNWICQIQKGQTP

SEQ ID NO: 103042 - protein, 15 aa, Homo Sapiens
LNNWICQIQKGQTPK

SEQ ID NO: 103043 - protein, 15 aa, Homo Sapiens
NNWICQIQKGQTPKP

SEQ ID NO: 103044 - protein, 15 aa, Homo Sapiens
NWICQIQKGQTPKPE

SEQ ID NO: 103045 - protein, 15 aa, Homo Sapiens
WICQIQKGQTPKPEP

SEQ ID NO: 103046 - protein, 15 aa, Homo Sapiens
ICQIQKGQTPKPEPT

SEQ ID NO: 103047 - protein, 15 aa, Homo Sapiens
CQIQKGQTPKPEPTP

SEQ ID NO: 103048 - protein, 15 aa, Homo Sapiens
QIQKGQTPKPEPTPA

SEQ ID NO: 103049 - protein, 15 aa, Homo Sapiens
IQKGQTPKPEPTPAP

SEQ ID NO: 103050 - protein, 15 aa, Homo Sapiens
QKGQTPKPEPTPAPQ

SEQ ID NO: 103051 - protein, 15 aa, Homo Sapiens
KGQTPKPEPTPAPQD

SEQ ID NO: 103052 - protein, 15 aa, Homo Sapiens
GQTPKPEPTPAPQDN

SEQ ID NO: 103053 - protein, 15 aa, Homo Sapiens
QTPKPEPTPAPQDNP

SEQ ID NO: 103054 - protein, 15 aa, Homo Sapiens
TPKPEPTPAPQDNPP

SEQ ID NO: 103055 - protein, 15 aa, Homo Sapiens
PKPEPTPAPQDNPPV

SEQ ID NO: 103056 - protein, 15 aa, Homo Sapiens
KPEPTPAPQDNPPVT

SEQ ID NO: 103057 - protein, 15 aa, Homo Sapiens
PEPTPAPQDNPPVTE

SEQ ID NO: 103058 - protein, 15 aa, Homo Sapiens
EPTPAPQDNPPVTED

SEQ ID NO: 103059 - protein, 15 aa, Homo Sapiens
PTPAPQDNPPVTEDG

SEQ ID NO: 103060 - protein, 15 aa, Homo Sapiens
TPAPQDNPPVTEDGW

SEQ ID NO: 103061 - protein, 15 aa, Homo Sapiens
PAPQDNPPVTEDGWV

SEQ ID NO: 103062 - protein, 15 aa, Homo Sapiens
APQDNPPVTEDGWVI

SEQ ID NO: 103063 - protein, 15 aa, Homo Sapiens
PQDNPPVTEDGWVIY

SEQ ID NO: 103064 - protein, 15 aa, Homo Sapiens
QDNPPVTEDGWVIYK

SEQ ID NO: 103065 - protein, 15 aa, Homo Sapiens
DNPPVTEDGWVIYKD

SEQ ID NO: 103066 - protein, 15 aa, Homo Sapiens
NPPVTEDGWVIYKDY

SEQ ID NO: 103067 - protein, 15 aa, Homo Sapiens
PPVTEDGWVIYKDYQ

SEQ ID NO: 103068 - protein, 15 aa, Homo Sapiens
PVTEDGWVIYKDYQY

SEQ ID NO: 103069 - protein, 15 aa, Homo Sapiens
VTEDGWVIYKDYQYY

SEQ ID NO: 103070 - protein, 15 aa, Homo Sapiens
TEDGWVIYKDYQYYF

SEQ ID NO: 103071 - protein, 15 aa, Homo Sapiens
EDGWVIYKDYQYYFS

SEQ ID NO: 103072 - protein, 15 aa, Homo Sapiens
DGWVIYKDYQYYFSK

SEQ ID NO: 103073 - protein, 15 aa, Homo Sapiens
GWVIYKDYQYYFSKE

SEQ ID NO: 103074 - protein, 15 aa, Homo Sapiens
WVIYKDYQYYFSKEK

SEQ ID NO: 103075 - protein, 15 aa, Homo Sapiens
VIYKDYQYYFSKEKE

SEQ ID NO: 103076 - protein, 15 aa, Homo Sapiens
IYKDYQYYFSKEKET

SEQ ID NO: 103077 - protein, 15 aa, Homo Sapiens
YKDYQYYFSKEKETM

SEQ ID NO: 103078 - protein, 15 aa, Homo Sapiens
KDYQYYFSKEKETMD

SEQ ID NO: 103079 - protein, 15 aa, Homo Sapiens
DYQYYFSKEKETMDN

SEQ ID NO: 103080 - protein, 15 aa, Homo Sapiens
YQYYFSKEKETMDNA

SEQ ID NO: 103081 - protein, 15 aa, Homo Sapiens
QYYFSKEKETMDNAR

SEQ ID NO: 103082 - protein, 15 aa, Homo Sapiens
YYFSKEKETMDNARA

SEQ ID NO: 103083 - protein, 15 aa, Homo Sapiens
YFSKEKETMDNARAF

SEQ ID NO: 103084 - protein, 15 aa, Homo Sapiens
FSKEKETMDNARAFC

SEQ ID NO: 103085 - protein, 15 aa, Homo Sapiens
SKEKETMDNARAFCK

SEQ ID NO: 103086 - protein, 15 aa, Homo Sapiens
KEKETMDNARAFCKR

SEQ ID NO: 103087 - protein, 15 aa, Homo Sapiens
EKETMDNARAFCKRN

SEQ ID NO: 103088 - protein, 15 aa, Homo Sapiens
KETMDNARAFCKRNF

SEQ ID NO: 103089 - protein, 15 aa, Homo Sapiens
ETMDNARAFCKRNFG

SEQ ID NO: 103090 - protein, 15 aa, Homo Sapiens
TMDNARAFCKRNFGD

SEQ ID NO: 103091 - protein, 15 aa, Homo Sapiens
MDNARAFCKRNFGDL

SEQ ID NO: 103092 - protein, 15 aa, Homo Sapiens
DNARAFCKRNFGDLV

SEQ ID NO: 103093 - protein, 15 aa, Homo Sapiens
NARAFCKRNFGDLVS

SEQ ID NO: 103094 - protein, 15 aa, Homo Sapiens
ARAFCKRNFGDLVSI

SEQ ID NO: 103095 - protein, 15 aa, Homo Sapiens
RAFCKRNFGDLVSIQ

SEQ ID NO: 103096 - protein, 15 aa, Homo Sapiens
AFCKRNFGDLVSIQS

SEQ ID NO: 103097 - protein, 15 aa, Homo Sapiens
FCKRNFGDLVSIQSE

SEQ ID NO: 103098 - protein, 15 aa, Homo Sapiens
CKRNFGDLVSIQSES

SEQ ID NO: 103099 - protein, 15 aa, Homo Sapiens
KRNFGDLVSIQSESE

SEQ ID NO: 103100 - protein, 15 aa, Homo Sapiens
RNFGDLVSIQSESEK

SEQ ID NO: 103101 - protein, 15 aa, Homo Sapiens
NFGDLVSIQSESEKK

SEQ ID NO: 103102 - protein, 15 aa, Homo Sapiens
FGDLVSIQSESEKKF

SEQ ID NO: 103103 - protein, 15 aa, Homo Sapiens
GDLVSIQSESEKKFL

SEQ ID NO: 103104 - protein, 15 aa, Homo Sapiens
DLVSIQSESEKKFLW

SEQ ID NO: 103105 - protein, 15 aa, Homo Sapiens
LVSIQSESEKKFLWK

SEQ ID NO: 103106 - protein, 15 aa, Homo Sapiens
VSIQSESEKKFLWKY

SEQ ID NO: 103107 - protein, 15 aa, Homo Sapiens
SIQSESEKKFLWKYV

SEQ ID NO: 103108 - protein, 15 aa, Homo Sapiens
IQSESEKKFLWKYVN

SEQ ID NO: 103109 - protein, 15 aa, Homo Sapiens
QSESEKKFLWKYVNR

SEQ ID NO: 103110 - protein, 15 aa, Homo Sapiens
SESEKKFLWKYVNRN

SEQ ID NO: 103111 - protein, 15 aa, Homo Sapiens
ESEKKFLWKYVNRND

SEQ ID NO: 103112 - protein, 15 aa, Homo Sapiens
SEKKFLWKYVNRNDA

SEQ ID NO: 103113 - protein, 15 aa, Homo Sapiens
EKKFLWKYVNRNDAQ

SEQ ID NO: 103114 - protein, 15 aa, Homo Sapiens
KKFLWKYVNRNDAQS

SEQ ID NO: 103115 - protein, 15 aa, Homo Sapiens
KFLWKYVNRNDAQSA

SEQ ID NO: 103116 - protein, 15 aa, Homo Sapiens
FLWKYVNRNDAQSAY

SEQ ID NO: 103117 - protein, 15 aa, Homo Sapiens
LWKYVNRNDAQSAYF

SEQ ID NO: 103118 - protein, 15 aa, Homo Sapiens
WKYVNRNDAQSAYFI

SEQ ID NO: 103119 - protein, 15 aa, Homo Sapiens
KYVNRNDAQSAYFIG

SEQ ID NO: 103120 - protein, 15 aa, Homo Sapiens
YVNRNDAQSAYFIGL

SEQ ID NO: 103121 - protein, 15 aa, Homo Sapiens
VNRNDAQSAYFIGLL

SEQ ID NO: 103122 - protein, 15 aa, Homo Sapiens
NRNDAQSAYFIGLLI

SEQ ID NO: 103123 - protein, 15 aa, Homo Sapiens
RNDAQSAYFIGLLIS

SEQ ID NO: 103124 - protein, 15 aa, Homo Sapiens
NDAQSAYFIGLLISL

SEQ ID NO: 103125 - protein, 15 aa, Homo Sapiens
DAQSAYFIGLLISLD

SEQ ID NO: 103126 - protein, 15 aa, Homo Sapiens
AQSAYFIGLLISLDK

SEQ ID NO: 103127 - protein, 15 aa, Homo Sapiens
QSAYFIGLLISLDKK

SEQ ID NO: 103128 - protein, 15 aa, Homo Sapiens
SAYFIGLLISLDKKF

SEQ ID NO: 103129 - protein, 15 aa, Homo Sapiens
AYFIGLLISLDKKFA

SEQ ID NO: 103130 - protein, 15 aa, Homo Sapiens
YFIGLLISLDKKFAW

SEQ ID NO: 103131 - protein, 15 aa, Homo Sapiens
FIGLLISLDKKFAWM

SEQ ID NO: 103132 - protein, 15 aa, Homo Sapiens
IGLLISLDKKFAWMD

SEQ ID NO: 103133 - protein, 15 aa, Homo Sapiens
GLLISLDKKFAWMDG

SEQ ID NO: 103134 - protein, 15 aa, Homo Sapiens
LLISLDKKFAWMDGS

SEQ ID NO: 103135 - protein, 15 aa, Homo Sapiens
LISLDKKFAWMDGSK

SEQ ID NO: 103136 - protein, 15 aa, Homo Sapiens
ISLDKKFAWMDGSKV

SEQ ID NO: 103137 - protein, 15 aa, Homo Sapiens
SLDKKFAWMDGSKVD

SEQ ID NO: 103138 - protein, 15 aa, Homo Sapiens
LDKKFAWMDGSKVDY

SEQ ID NO: 103139 - protein, 15 aa, Homo Sapiens
DKKFAWMDGSKVDYV

SEQ ID NO: 103140 - protein, 15 aa, Homo Sapiens
KKFAWMDGSKVDYVS

SEQ ID NO: 103141 - protein, 15 aa, Homo Sapiens
KFAWMDGSKVDYVSW

SEQ ID NO: 103142 - protein, 15 aa, Homo Sapiens
FAWMDGSKVDYVSWA

SEQ ID NO: 103143 - protein, 15 aa, Homo Sapiens
AWMDGSKVDYVSWAT

SEQ ID NO: 103144 - protein, 15 aa, Homo Sapiens
WMDGSKVDYVSWATG

SEQ ID NO: 103145 - protein, 15 aa, Homo Sapiens
MDGSKVDYVSWATGE

SEQ ID NO: 103146 - protein, 15 aa, Homo Sapiens
DGSKVDYVSWATGEP

SEQ ID NO: 103147 - protein, 15 aa, Homo Sapiens
GSKVDYVSWATGEPN

SEQ ID NO: 103148 - protein, 15 aa, Homo Sapiens
SKVDYVSWATGEPNF

SEQ ID NO: 103149 - protein, 15 aa, Homo Sapiens
KVDYVSWATGEPNFA

SEQ ID NO: 103150 - protein, 15 aa, Homo Sapiens
VDYVSWATGEPNFAN

SEQ ID NO: 103151 - protein, 15 aa, Homo Sapiens
DYVSWATGEPNFANE

SEQ ID NO: 103152 - protein, 15 aa, Homo Sapiens
YVSWATGEPNFANED

SEQ ID NO: 103153 - protein, 15 aa, Homo Sapiens
VSWATGEPNFANEDE

SEQ ID NO: 103154 - protein, 15 aa, Homo Sapiens
SWATGEPNFANEDEN

SEQ ID NO: 103155 - protein, 15 aa, Homo Sapiens
WATGEPNFANEDENC

SEQ ID NO: 103156 - protein, 15 aa, Homo Sapiens
ATGEPNFANEDENCV

SEQ ID NO: 103157 - protein, 15 aa, Homo Sapiens
TGEPNFANEDENCVT

SEQ ID NO: 103158 - protein, 15 aa, Homo Sapiens
GEPNFANEDENCVTM

SEQ ID NO: 103159 - protein, 15 aa, Homo Sapiens
EPNFANEDENCVTMY

SEQ ID NO: 103160 - protein, 15 aa, Homo Sapiens
PNFANEDENCVTMYS

SEQ ID NO: 103161 - protein, 15 aa, Homo Sapiens
NFANEDENCVTMYSN

SEQ ID NO: 103162 - protein, 15 aa, Homo Sapiens
FANEDENCVTMYSNS

SEQ ID NO: 103163 - protein, 15 aa, Homo Sapiens
ANEDENCVTMYSNSG

SEQ ID NO: 103164 - protein, 15 aa, Homo Sapiens
NEDENCVTMYSNSGF

SEQ ID NO: 103165 - protein, 15 aa, Homo Sapiens
EDENCVTMYSNSGFW

SEQ ID NO: 103166 - protein, 15 aa, Homo Sapiens
DENCVTMYSNSGFWN

SEQ ID NO: 103167 - protein, 15 aa, Homo Sapiens
ENCVTMYSNSGFWND

SEQ ID NO: 103168 - protein, 15 aa, Homo Sapiens
NCVTMYSNSGFWNDI

SEQ ID NO: 103169 - protein, 15 aa, Homo Sapiens
CVTMYSNSGFWNDIN

SEQ ID NO: 103170 - protein, 15 aa, Homo Sapiens
VTMYSNSGFWNDINC

SEQ ID NO: 103171 - protein, 15 aa, Homo Sapiens
TMYSNSGFWNDINCG

SEQ ID NO: 103172 - protein, 15 aa, Homo Sapiens
MYSNSGFWNDINCGY

SEQ ID NO: 103173 - protein, 15 aa, Homo Sapiens
YSNSGFWNDINCGYP

SEQ ID NO: 103174 - protein, 15 aa, Homo Sapiens
SNSGFWNDINCGYPN

SEQ ID NO: 103175 - protein, 15 aa, Homo Sapiens
NSGFWNDINCGYPNA

SEQ ID NO: 103176 - protein, 15 aa, Homo Sapiens
SGFWNDINCGYPNAF

SEQ ID NO: 103177 - protein, 15 aa, Homo Sapiens
GFWNDINCGYPNAFI

SEQ ID NO: 103178 - protein, 15 aa, Homo Sapiens
FWNDINCGYPNAFIC

SEQ ID NO: 103179 - protein, 15 aa, Homo Sapiens
WNDINCGYPNAFICQ

SEQ ID NO: 103180 - protein, 15 aa, Homo Sapiens
NDINCGYPNAFICQR

SEQ ID NO: 103181 - protein, 15 aa, Homo Sapiens
DINCGYPNAFICQRH

SEQ ID NO: 103182 - protein, 15 aa, Homo Sapiens
INCGYPNAFICQRHN

SEQ ID NO: 103183 - protein, 15 aa, Homo Sapiens
NCGYPNAFICQRHNS

SEQ ID NO: 103184 - protein, 15 aa, Homo Sapiens
CGYPNAFICQRHNSS

SEQ ID NO: 103185 - protein, 15 aa, Homo Sapiens
GYPNAFICQRHNSSI

SEQ ID NO: 103186 - protein, 15 aa, Homo Sapiens
YPNAFICQRHNSSIN

SEQ ID NO: 103187 - protein, 15 aa, Homo Sapiens
PNAFICQRHNSSINA

SEQ ID NO: 103188 - protein, 15 aa, Homo Sapiens
NAFICQRHNSSINAT

SEQ ID NO: 103189 - protein, 15 aa, Homo Sapiens
AFICQRHNSSINATT

SEQ ID NO: 103190 - protein, 15 aa, Homo Sapiens
FICQRHNSSINATTV

SEQ ID NO: 103191 - protein, 15 aa, Homo Sapiens
ICQRHNSSINATTVM

SEQ ID NO: 103192 - protein, 15 aa, Homo Sapiens
CQRHNSSINATTVMP

SEQ ID NO: 103193 - protein, 15 aa, Homo Sapiens
QRHNSSINATTVMPT

SEQ ID NO: 103194 - protein, 15 aa, Homo Sapiens
RHNSSINATTVMPTM

SEQ ID NO: 103195 - protein, 15 aa, Homo Sapiens
HNSSINATTVMPTMP

SEQ ID NO: 103196 - protein, 15 aa, Homo Sapiens
NSSINATTVMPTMPS

SEQ ID NO: 103197 - protein, 15 aa, Homo Sapiens
SSINATTVMPTMPSV

SEQ ID NO: 103198 - protein, 15 aa, Homo Sapiens
SINATTVMPTMPSVP

SEQ ID NO: 103199 - protein, 15 aa, Homo Sapiens
INATTVMPTMPSVPS

SEQ ID NO: 103200 - protein, 15 aa, Homo Sapiens
NATTVMPTMPSVPSG

SEQ ID NO: 103201 - protein, 15 aa, Homo Sapiens
ATTVMPTMPSVPSGC

SEQ ID NO: 103202 - protein, 15 aa, Homo Sapiens
TTVMPTMPSVPSGCK

SEQ ID NO: 103203 - protein, 15 aa, Homo Sapiens
TVMPTMPSVPSGCKE

SEQ ID NO: 103204 - protein, 15 aa, Homo Sapiens
VMPTMPSVPSGCKEG

SEQ ID NO: 103205 - protein, 15 aa, Homo Sapiens
MPTMPSVPSGCKEGW

SEQ ID NO: 103206 - protein, 15 aa, Homo Sapiens
PTMPSVPSGCKEGWN

SEQ ID NO: 103207 - protein, 15 aa, Homo Sapiens
TMPSVPSGCKEGWNF

SEQ ID NO: 103208 - protein, 15 aa, Homo Sapiens
MPSVPSGCKEGWNFY

SEQ ID NO: 103209 - protein, 15 aa, Homo Sapiens
PSVPSGCKEGWNFYS

SEQ ID NO: 103210 - protein, 15 aa, Homo Sapiens
SVPSGCKEGWNFYSN

SEQ ID NO: 103211 - protein, 15 aa, Homo Sapiens
VPSGCKEGWNFYSNK

SEQ ID NO: 103212 - protein, 15 aa, Homo Sapiens
PSGCKEGWNFYSNKC

SEQ ID NO: 103213 - protein, 15 aa, Homo Sapiens
SGCKEGWNFYSNKCF

SEQ ID NO: 103214 - protein, 15 aa, Homo Sapiens
GCKEGWNFYSNKCFK

SEQ ID NO: 103215 - protein, 15 aa, Homo Sapiens
CKEGWNFYSNKCFKI

SEQ ID NO: 103216 - protein, 15 aa, Homo Sapiens
KEGWNFYSNKCFKIF

SEQ ID NO: 103217 - protein, 15 aa, Homo Sapiens
EGWNFYSNKCFKIFG

SEQ ID NO: 103218 - protein, 15 aa, Homo Sapiens
GWNFYSNKCFKIFGF

SEQ ID NO: 103219 - protein, 15 aa, Homo Sapiens
WNFYSNKCFKIFGFM

SEQ ID NO: 103220 - protein, 15 aa, Homo Sapiens
NFYSNKCFKIFGFME

SEQ ID NO: 103221 - protein, 15 aa, Homo Sapiens
FYSNKCFKIFGFMEE

SEQ ID NO: 103222 - protein, 15 aa, Homo Sapiens
YSNKCFKIFGFMEEE

SEQ ID NO: 103223 - protein, 15 aa, Homo Sapiens
SNKCFKIFGFMEEER

SEQ ID NO: 103224 - protein, 15 aa, Homo Sapiens
NKCFKIFGFMEEERK

SEQ ID NO: 103225 - protein, 15 aa, Homo Sapiens
KCFKIFGFMEEERKN

SEQ ID NO: 103226 - protein, 15 aa, Homo Sapiens
CFKIFGFMEEERKNW

SEQ ID NO: 103227 - protein, 15 aa, Homo Sapiens
FKIFGFMEEERKNWQ

SEQ ID NO: 103228 - protein, 15 aa, Homo Sapiens
KIFGFMEEERKNWQE

SEQ ID NO: 103229 - protein, 15 aa, Homo Sapiens
IFGFMEEERKNWQEA

SEQ ID NO: 103230 - protein, 15 aa, Homo Sapiens
FGFMEEERKNWQEAR

SEQ ID NO: 103231 - protein, 15 aa, Homo Sapiens
GFMEEERKNWQEARK

SEQ ID NO: 103232 - protein, 15 aa, Homo Sapiens
FMEEERKNWQEARKA

SEQ ID NO: 103233 - protein, 15 aa, Homo Sapiens
MEEERKNWQEARKAC

SEQ ID NO: 103234 - protein, 15 aa, Homo Sapiens
EEERKNWQEARKACI

SEQ ID NO: 103235 - protein, 15 aa, Homo Sapiens
EERKNWQEARKACIG

SEQ ID NO: 103236 - protein, 15 aa, Homo Sapiens
ERKNWQEARKACIGF

SEQ ID NO: 103237 - protein, 15 aa, Homo Sapiens
RKNWQEARKACIGFG

SEQ ID NO: 103238 - protein, 15 aa, Homo Sapiens
KNWQEARKACIGFGG

SEQ ID NO: 103239 - protein, 15 aa, Homo Sapiens
NWQEARKACIGFGGN

SEQ ID NO: 103240 - protein, 15 aa, Homo Sapiens
WQEARKACIGFGGNL

SEQ ID NO: 103241 - protein, 15 aa, Homo Sapiens
QEARKACIGFGGNLV

SEQ ID NO: 103242 - protein, 15 aa, Homo Sapiens
EARKACIGFGGNLVS

SEQ ID NO: 103243 - protein, 15 aa, Homo Sapiens
ARKACIGFGGNLVSI

SEQ ID NO: 103244 - protein, 15 aa, Homo Sapiens
RKACIGFGGNLVSIQ

SEQ ID NO: 103245 - protein, 15 aa, Homo Sapiens
KACIGFGGNLVSIQN

SEQ ID NO: 103246 - protein, 15 aa, Homo Sapiens
ACIGFGGNLVSIQNE

SEQ ID NO: 103247 - protein, 15 aa, Homo Sapiens
CIGFGGNLVSIQNEK

SEQ ID NO: 103248 - protein, 15 aa, Homo Sapiens
IGFGGNLVSIQNEKE

SEQ ID NO: 103249 - protein, 15 aa, Homo Sapiens
GFGGNLVSIQNEKEQ

SEQ ID NO: 103250 - protein, 15 aa, Homo Sapiens
FGGNLVSIQNEKEQA

SEQ ID NO: 103251 - protein, 15 aa, Homo Sapiens
GGNLVSIQNEKEQAF

SEQ ID NO: 103252 - protein, 15 aa, Homo Sapiens
GNLVSIQNEKEQAFL

SEQ ID NO: 103253 - protein, 15 aa, Homo Sapiens
NLVSIQNEKEQAFLT

SEQ ID NO: 103254 - protein, 15 aa, Homo Sapiens
LVSIQNEKEQAFLTY

SEQ ID NO: 103255 - protein, 15 aa, Homo Sapiens
VSIQNEKEQAFLTYH

SEQ ID NO: 103256 - protein, 15 aa, Homo Sapiens
SIQNEKEQAFLTYHM

SEQ ID NO: 103257 - protein, 15 aa, Homo Sapiens
IQNEKEQAFLTYHMK

SEQ ID NO: 103258 - protein, 15 aa, Homo Sapiens
QNEKEQAFLTYHMKD

SEQ ID NO: 103259 - protein, 15 aa, Homo Sapiens
NEKEQAFLTYHMKDS

SEQ ID NO: 103260 - protein, 15 aa, Homo Sapiens
EKEQAFLTYHMKDST

SEQ ID NO: 103261 - protein, 15 aa, Homo Sapiens
KEQAFLTYHMKDSTF

SEQ ID NO: 103262 - protein, 15 aa, Homo Sapiens
EQAFLTYHMKDSTFS

SEQ ID NO: 103263 - protein, 15 aa, Homo Sapiens
QAFLTYHMKDSTFSA

SEQ ID NO: 103264 - protein, 15 aa, Homo Sapiens
AFLTYHMKDSTFSAW

SEQ ID NO: 103265 - protein, 15 aa, Homo Sapiens
FLTYHMKDSTFSAWT

SEQ ID NO: 103266 - protein, 15 aa, Homo Sapiens
LTYHMKDSTFSAWTG

SEQ ID NO: 103267 - protein, 15 aa, Homo Sapiens
TYHMKDSTFSAWTGL

SEQ ID NO: 103268 - protein, 15 aa, Homo Sapiens
YHMKDSTFSAWTGLN

SEQ ID NO: 103269 - protein, 15 aa, Homo Sapiens
HMKDSTFSAWTGLND

SEQ ID NO: 103270 - protein, 15 aa, Homo Sapiens
MKDSTFSAWTGLNDV

SEQ ID NO: 103271 - protein, 15 aa, Homo Sapiens
KDSTFSAWTGLNDVN

SEQ ID NO: 103272 - protein, 15 aa, Homo Sapiens
DSTFSAWTGLNDVNS

SEQ ID NO: 103273 - protein, 15 aa, Homo Sapiens
STFSAWTGLNDVNSE

SEQ ID NO: 103274 - protein, 15 aa, Homo Sapiens
TFSAWTGLNDVNSEH

SEQ ID NO: 103275 - protein, 15 aa, Homo Sapiens
FSAWTGLNDVNSEHT

SEQ ID NO: 103276 - protein, 15 aa, Homo Sapiens
SAWTGLNDVNSEHTF

SEQ ID NO: 103277 - protein, 15 aa, Homo Sapiens
AWTGLNDVNSEHTFL

SEQ ID NO: 103278 - protein, 15 aa, Homo Sapiens
WTGLNDVNSEHTFLW

SEQ ID NO: 103279 - protein, 15 aa, Homo Sapiens
TGLNDVNSEHTFLWT

SEQ ID NO: 103280 - protein, 15 aa, Homo Sapiens
GLNDVNSEHTFLWTD

SEQ ID NO: 103281 - protein, 15 aa, Homo Sapiens
LNDVNSEHTFLWTDG

SEQ ID NO: 103282 - protein, 15 aa, Homo Sapiens
NDVNSEHTFLWTDGR

SEQ ID NO: 103283 - protein, 15 aa, Homo Sapiens
DVNSEHTFLWTDGRG

SEQ ID NO: 103284 - protein, 15 aa, Homo Sapiens
VNSEHTFLWTDGRGV

SEQ ID NO: 103285 - protein, 15 aa, Homo Sapiens
NSEHTFLWTDGRGVH

SEQ ID NO: 103286 - protein, 15 aa, Homo Sapiens
SEHTFLWTDGRGVHY

SEQ ID NO: 103287 - protein, 15 aa, Homo Sapiens
EHTFLWTDGRGVHYT

SEQ ID NO: 103288 - protein, 15 aa, Homo Sapiens
HTFLWTDGRGVHYTN

SEQ ID NO: 103289 - protein, 15 aa, Homo Sapiens
TFLWTDGRGVHYTNW

SEQ ID NO: 103290 - protein, 15 aa, Homo Sapiens
FLWTDGRGVHYTNWG

SEQ ID NO: 103291 - protein, 15 aa, Homo Sapiens
LWTDGRGVHYTNWGK

SEQ ID NO: 103292 - protein, 15 aa, Homo Sapiens
WTDGRGVHYTNWGKG

SEQ ID NO: 103293 - protein, 15 aa, Homo Sapiens
TDGRGVHYTNWGKGY

SEQ ID NO: 103294 - protein, 15 aa, Homo Sapiens
DGRGVHYTNWGKGYP

SEQ ID NO: 103295 - protein, 15 aa, Homo Sapiens
GRGVHYTNWGKGYPG

SEQ ID NO: 103296 - protein, 15 aa, Homo Sapiens
RGVHYTNWGKGYPGG

SEQ ID NO: 103297 - protein, 15 aa, Homo Sapiens
GVHYTNWGKGYPGGR

SEQ ID NO: 103298 - protein, 15 aa, Homo Sapiens
VHYTNWGKGYPGGRR

SEQ ID NO: 103299 - protein, 15 aa, Homo Sapiens
HYTNWGKGYPGGRRS

SEQ ID NO: 103300 - protein, 15 aa, Homo Sapiens
YTNWGKGYPGGRRSS

SEQ ID NO: 103301 - protein, 15 aa, Homo Sapiens
TNWGKGYPGGRRSSL

SEQ ID NO: 103302 - protein, 15 aa, Homo Sapiens
NWGKGYPGGRRSSLS

SEQ ID NO: 103303 - protein, 15 aa, Homo Sapiens
WGKGYPGGRRSSLSY

SEQ ID NO: 103304 - protein, 15 aa, Homo Sapiens
GKGYPGGRRSSLSYE

SEQ ID NO: 103305 - protein, 15 aa, Homo Sapiens
KGYPGGRRSSLSYED

SEQ ID NO: 103306 - protein, 15 aa, Homo Sapiens
GYPGGRRSSLSYEDA

SEQ ID NO: 103307 - protein, 15 aa, Homo Sapiens
YPGGRRSSLSYEDAD

SEQ ID NO: 103308 - protein, 15 aa, Homo Sapiens
PGGRRSSLSYEDADC

SEQ ID NO: 103309 - protein, 15 aa, Homo Sapiens
GGRRSSLSYEDADCV

SEQ ID NO: 103310 - protein, 15 aa, Homo Sapiens
GRRSSLSYEDADCVV

SEQ ID NO: 103311 - protein, 15 aa, Homo Sapiens
RRSSLSYEDADCVVI

SEQ ID NO: 103312 - protein, 15 aa, Homo Sapiens
RSSLSYEDADCVVII

SEQ ID NO: 103313 - protein, 15 aa, Homo Sapiens
SSLSYEDADCVVIIG

SEQ ID NO: 103314 - protein, 15 aa, Homo Sapiens
SLSYEDADCVVIIGG

SEQ ID NO: 103315 - protein, 15 aa, Homo Sapiens
LSYEDADCVVIIGGA

SEQ ID NO: 103316 - protein, 15 aa, Homo Sapiens
SYEDADCVVIIGGAS

SEQ ID NO: 103317 - protein, 15 aa, Homo Sapiens
YEDADCVVIIGGASN

SEQ ID NO: 103318 - protein, 15 aa, Homo Sapiens
EDADCVVIIGGASNE

SEQ ID NO: 103319 - protein, 15 aa, Homo Sapiens
DADCVVIIGGASNEA

SEQ ID NO: 103320 - protein, 15 aa, Homo Sapiens
ADCVVIIGGASNEAG

SEQ ID NO: 103321 - protein, 15 aa, Homo Sapiens
DCVVIIGGASNEAGK

SEQ ID NO: 103322 - protein, 15 aa, Homo Sapiens
CVVIIGGASNEAGKW

SEQ ID NO: 103323 - protein, 15 aa, Homo Sapiens
VVIIGGASNEAGKWM

SEQ ID NO: 103324 - protein, 15 aa, Homo Sapiens
VIIGGASNEAGKWMD

SEQ ID NO: 103325 - protein, 15 aa, Homo Sapiens
IIGGASNEAGKWMDD

SEQ ID NO: 103326 - protein, 15 aa, Homo Sapiens
IGGASNEAGKWMDDT

SEQ ID NO: 103327 - protein, 15 aa, Homo Sapiens
GGASNEAGKWMDDTC

SEQ ID NO: 103328 - protein, 15 aa, Homo Sapiens
GASNEAGKWMDDTCD

SEQ ID NO: 103329 - protein, 15 aa, Homo Sapiens
ASNEAGKWMDDTCDS

SEQ ID NO: 103330 - protein, 15 aa, Homo Sapiens
SNEAGKWMDDTCDSK

SEQ ID NO: 103331 - protein, 15 aa, Homo Sapiens
NEAGKWMDDTCDSKR

SEQ ID NO: 103332 - protein, 15 aa, Homo Sapiens
EAGKWMDDTCDSKRG

SEQ ID NO: 103333 - protein, 15 aa, Homo Sapiens
AGKWMDDTCDSKRGY

SEQ ID NO: 103334 - protein, 15 aa, Homo Sapiens
GKWMDDTCDSKRGYI

SEQ ID NO: 103335 - protein, 15 aa, Homo Sapiens
KWMDDTCDSKRGYIC

SEQ ID NO: 103336 - protein, 15 aa, Homo Sapiens
WMDDTCDSKRGYICQ

SEQ ID NO: 103337 - protein, 15 aa, Homo Sapiens
MDDTCDSKRGYICQT

SEQ ID NO: 103338 - protein, 15 aa, Homo Sapiens
DDTCDSKRGYICQTR

SEQ ID NO: 103339 - protein, 15 aa, Homo Sapiens
DTCDSKRGYICQTRS

SEQ ID NO: 103340 - protein, 15 aa, Homo Sapiens
TCDSKRGYICQTRSD

SEQ ID NO: 103341 - protein, 15 aa, Homo Sapiens
CDSKRGYICQTRSDP

SEQ ID NO: 103342 - protein, 15 aa, Homo Sapiens
DSKRGYICQTRSDPS

SEQ ID NO: 103343 - protein, 15 aa, Homo Sapiens
SKRGYICQTRSDPSL

SEQ ID NO: 103344 - protein, 15 aa, Homo Sapiens
KRGYICQTRSDPSLT

SEQ ID NO: 103345 - protein, 15 aa, Homo Sapiens
RGYICQTRSDPSLTN

SEQ ID NO: 103346 - protein, 15 aa, Homo Sapiens
GYICQTRSDPSLTNP

SEQ ID NO: 103347 - protein, 15 aa, Homo Sapiens
YICQTRSDPSLTNPP

SEQ ID NO: 103348 - protein, 15 aa, Homo Sapiens
ICQTRSDPSLTNPPA

SEQ ID NO: 103349 - protein, 15 aa, Homo Sapiens
CQTRSDPSLTNPPAT

SEQ ID NO: 103350 - protein, 15 aa, Homo Sapiens
QTRSDPSLTNPPATI

SEQ ID NO: 103351 - protein, 15 aa, Homo Sapiens
TRSDPSLTNPPATIQ

SEQ ID NO: 103352 - protein, 15 aa, Homo Sapiens
RSDPSLTNPPATIQT

SEQ ID NO: 103353 - protein, 15 aa, Homo Sapiens
SDPSLTNPPATIQTD

SEQ ID NO: 103354 - protein, 15 aa, Homo Sapiens
DPSLTNPPATIQTDG

SEQ ID NO: 103355 - protein, 15 aa, Homo Sapiens
PSLTNPPATIQTDGF

SEQ ID NO: 103356 - protein, 15 aa, Homo Sapiens
SLTNPPATIQTDGFV

SEQ ID NO: 103357 - protein, 15 aa, Homo Sapiens
LTNPPATIQTDGFVK

SEQ ID NO: 103358 - protein, 15 aa, Homo Sapiens
TNPPATIQTDGFVKY

SEQ ID NO: 103359 - protein, 15 aa, Homo Sapiens
NPPATIQTDGFVKYG

SEQ ID NO: 103360 - protein, 15 aa, Homo Sapiens
PPATIQTDGFVKYGK

SEQ ID NO: 103361 - protein, 15 aa, Homo Sapiens
PATIQTDGFVKYGKS

SEQ ID NO: 103362 - protein, 15 aa, Homo Sapiens
ATIQTDGFVKYGKSS

SEQ ID NO: 103363 - protein, 15 aa, Homo Sapiens
TIQTDGFVKYGKSSY

SEQ ID NO: 103364 - protein, 15 aa, Homo Sapiens
IQTDGFVKYGKSSYS

SEQ ID NO: 103365 - protein, 15 aa, Homo Sapiens
QTDGFVKYGKSSYSL

SEQ ID NO: 103366 - protein, 15 aa, Homo Sapiens
TDGFVKYGKSSYSLM

SEQ ID NO: 103367 - protein, 15 aa, Homo Sapiens
DGFVKYGKSSYSLMR

SEQ ID NO: 103368 - protein, 15 aa, Homo Sapiens
GFVKYGKSSYSLMRQ

SEQ ID NO: 103369 - protein, 15 aa, Homo Sapiens
FVKYGKSSYSLMRQK

SEQ ID NO: 103370 - protein, 15 aa, Homo Sapiens
VKYGKSSYSLMRQKF

SEQ ID NO: 103371 - protein, 15 aa, Homo Sapiens
KYGKSSYSLMRQKFQ

SEQ ID NO: 103372 - protein, 15 aa, Homo Sapiens
YGKSSYSLMRQKFQW

SEQ ID NO: 103373 - protein, 15 aa, Homo Sapiens
GKSSYSLMRQKFQWH

SEQ ID NO: 103374 - protein, 15 aa, Homo Sapiens
KSSYSLMRQKFQWHE

SEQ ID NO: 103375 - protein, 15 aa, Homo Sapiens
SSYSLMRQKFQWHEA

SEQ ID NO: 103376 - protein, 15 aa, Homo Sapiens
SYSLMRQKFQWHEAE

SEQ ID NO: 103377 - protein, 15 aa, Homo Sapiens
YSLMRQKFQWHEAET

SEQ ID NO: 103378 - protein, 15 aa, Homo Sapiens
SLMRQKFQWHEAETY

SEQ ID NO: 103379 - protein, 15 aa, Homo Sapiens
LMRQKFQWHEAETYC

SEQ ID NO: 103380 - protein, 15 aa, Homo Sapiens
MRQKFQWHEAETYCK

SEQ ID NO: 103381 - protein, 15 aa, Homo Sapiens
RQKFQWHEAETYCKL

SEQ ID NO: 103382 - protein, 15 aa, Homo Sapiens
QKFQWHEAETYCKLH

SEQ ID NO: 103383 - protein, 15 aa, Homo Sapiens
KFQWHEAETYCKLHN

SEQ ID NO: 103384 - protein, 15 aa, Homo Sapiens
FQWHEAETYCKLHNS

SEQ ID NO: 103385 - protein, 15 aa, Homo Sapiens
QWHEAETYCKLHNSL

SEQ ID NO: 103386 - protein, 15 aa, Homo Sapiens
WHEAETYCKLHNSLI

SEQ ID NO: 103387 - protein, 15 aa, Homo Sapiens
HEAETYCKLHNSLIA

SEQ ID NO: 103388 - protein, 15 aa, Homo Sapiens
EAETYCKLHNSLIAS

SEQ ID NO: 103389 - protein, 15 aa, Homo Sapiens
AETYCKLHNSLIASI

SEQ ID NO: 103390 - protein, 15 aa, Homo Sapiens
ETYCKLHNSLIASIL

SEQ ID NO: 103391 - protein, 15 aa, Homo Sapiens
TYCKLHNSLIASILD

SEQ ID NO: 103392 - protein, 15 aa, Homo Sapiens
YCKLHNSLIASILDP

SEQ ID NO: 103393 - protein, 15 aa, Homo Sapiens
CKLHNSLIASILDPY

SEQ ID NO: 103394 - protein, 15 aa, Homo Sapiens
KLHNSLIASILDPYS

SEQ ID NO: 103395 - protein, 15 aa, Homo Sapiens
LHNSLIASILDPYSN

SEQ ID NO: 103396 - protein, 15 aa, Homo Sapiens
HNSLIASILDPYSNA

SEQ ID NO: 103397 - protein, 15 aa, Homo Sapiens
NSLIASILDPYSNAF

SEQ ID NO: 103398 - protein, 15 aa, Homo Sapiens
SLIASILDPYSNAFA

SEQ ID NO: 103399 - protein, 15 aa, Homo Sapiens
LIASILDPYSNAFAW

SEQ ID NO: 103400 - protein, 15 aa, Homo Sapiens
IASILDPYSNAFAWL

SEQ ID NO: 103401 - protein, 15 aa, Homo Sapiens
ASILDPYSNAFAWLQ

SEQ ID NO: 103402 - protein, 15 aa, Homo Sapiens
SILDPYSNAFAWLQM

SEQ ID NO: 103403 - protein, 15 aa, Homo Sapiens
ILDPYSNAFAWLQME

SEQ ID NO: 103404 - protein, 15 aa, Homo Sapiens
LDPYSNAFAWLQMET

SEQ ID NO: 103405 - protein, 15 aa, Homo Sapiens
DPYSNAFAWLQMETS

SEQ ID NO: 103406 - protein, 15 aa, Homo Sapiens
PYSNAFAWLQMETSN

SEQ ID NO: 103407 - protein, 15 aa, Homo Sapiens
YSNAFAWLQMETSNE

SEQ ID NO: 103408 - protein, 15 aa, Homo Sapiens
SNAFAWLQMETSNER

SEQ ID NO: 103409 - protein, 15 aa, Homo Sapiens
NAFAWLQMETSNERV

SEQ ID NO: 103410 - protein, 15 aa, Homo Sapiens
AFAWLQMETSNERVW

SEQ ID NO: 103411 - protein, 15 aa, Homo Sapiens
FAWLQMETSNERVWI

SEQ ID NO: 103412 - protein, 15 aa, Homo Sapiens
AWLQMETSNERVWIA

SEQ ID NO: 103413 - protein, 15 aa, Homo Sapiens
WLQMETSNERVWIAL

SEQ ID NO: 103414 - protein, 15 aa, Homo Sapiens
LQMETSNERVWIALN

SEQ ID NO: 103415 - protein, 15 aa, Homo Sapiens
QMETSNERVWIALNS

SEQ ID NO: 103416 - protein, 15 aa, Homo Sapiens
METSNERVWIALNSN

SEQ ID NO: 103417 - protein, 15 aa, Homo Sapiens
ETSNERVWIALNSNL

SEQ ID NO: 103418 - protein, 15 aa, Homo Sapiens
TSNERVWIALNSNLT

SEQ ID NO: 103419 - protein, 15 aa, Homo Sapiens
SNERVWIALNSNLTD

SEQ ID NO: 103420 - protein, 15 aa, Homo Sapiens
NERVWIALNSNLTDN

SEQ ID NO: 103421 - protein, 15 aa, Homo Sapiens
ERVWIALNSNLTDNQ

SEQ ID NO: 103422 - protein, 15 aa, Homo Sapiens
RVWIALNSNLTDNQY

SEQ ID NO: 103423 - protein, 15 aa, Homo Sapiens
VWIALNSNLTDNQYT

SEQ ID NO: 103424 - protein, 15 aa, Homo Sapiens
WIALNSNLTDNQYTW

SEQ ID NO: 103425 - protein, 15 aa, Homo Sapiens
IALNSNLTDNQYTWT

SEQ ID NO: 103426 - protein, 15 aa, Homo Sapiens
ALNSNLTDNQYTWTD

SEQ ID NO: 103427 - protein, 15 aa, Homo Sapiens
LNSNLTDNQYTWTDK

SEQ ID NO: 103428 - protein, 15 aa, Homo Sapiens
NSNLTDNQYTWTDKW

SEQ ID NO: 103429 - protein, 15 aa, Homo Sapiens
SNLTDNQYTWTDKWR

SEQ ID NO: 103430 - protein, 15 aa, Homo Sapiens
NLTDNQYTWTDKWRV

SEQ ID NO: 103431 - protein, 15 aa, Homo Sapiens
LTDNQYTWTDKWRVR

SEQ ID NO: 103432 - protein, 15 aa, Homo Sapiens
TDNQYTWTDKWRVRY

SEQ ID NO: 103433 - protein, 15 aa, Homo Sapiens
DNQYTWTDKWRVRYT

SEQ ID NO: 103434 - protein, 15 aa, Homo Sapiens
NQYTWTDKWRVRYTN

SEQ ID NO: 103435 - protein, 15 aa, Homo Sapiens
QYTWTDKWRVRYTNW

SEQ ID NO: 103436 - protein, 15 aa, Homo Sapiens
YTWTDKWRVRYTNWA

SEQ ID NO: 103437 - protein, 15 aa, Homo Sapiens
TWTDKWRVRYTNWAA

SEQ ID NO: 103438 - protein, 15 aa, Homo Sapiens
WTDKWRVRYTNWAAD

SEQ ID NO: 103439 - protein, 15 aa, Homo Sapiens
TDKWRVRYTNWAADE

SEQ ID NO: 103440 - protein, 15 aa, Homo Sapiens
DKWRVRYTNWAADEP

SEQ ID NO: 103441 - protein, 15 aa, Homo Sapiens
KWRVRYTNWAADEPK

SEQ ID NO: 103442 - protein, 15 aa, Homo Sapiens
WRVRYTNWAADEPKL

SEQ ID NO: 103443 - protein, 15 aa, Homo Sapiens
RVRYTNWAADEPKLK

SEQ ID NO: 103444 - protein, 15 aa, Homo Sapiens
VRYTNWAADEPKLKS

SEQ ID NO: 103445 - protein, 15 aa, Homo Sapiens
RYTNWAADEPKLKSA

SEQ ID NO: 103446 - protein, 15 aa, Homo Sapiens
YTNWAADEPKLKSAC

SEQ ID NO: 103447 - protein, 15 aa, Homo Sapiens
TNWAADEPKLKSACV

SEQ ID NO: 103448 - protein, 15 aa, Homo Sapiens
NWAADEPKLKSACVY

SEQ ID NO: 103449 - protein, 15 aa, Homo Sapiens
WAADEPKLKSACVYL

SEQ ID NO: 103450 - protein, 15 aa, Homo Sapiens
AADEPKLKSACVYLD

SEQ ID NO: 103451 - protein, 15 aa, Homo Sapiens
ADEPKLKSACVYLDL

SEQ ID NO: 103452 - protein, 15 aa, Homo Sapiens
DEPKLKSACVYLDLD

SEQ ID NO: 103453 - protein, 15 aa, Homo Sapiens
EPKLKSACVYLDLDG

SEQ ID NO: 103454 - protein, 15 aa, Homo Sapiens
PKLKSACVYLDLDGY

SEQ ID NO: 103455 - protein, 15 aa, Homo Sapiens
KLKSACVYLDLDGYW

SEQ ID NO: 103456 - protein, 15 aa, Homo Sapiens
LKSACVYLDLDGYWK

SEQ ID NO: 103457 - protein, 15 aa, Homo Sapiens
KSACVYLDLDGYWKT

SEQ ID NO: 103458 - protein, 15 aa, Homo Sapiens
SACVYLDLDGYWKTA

SEQ ID NO: 103459 - protein, 15 aa, Homo Sapiens
ACVYLDLDGYWKTAH

SEQ ID NO: 103460 - protein, 15 aa, Homo Sapiens
CVYLDLDGYWKTAHC

SEQ ID NO: 103461 - protein, 15 aa, Homo Sapiens
VYLDLDGYWKTAHCN

SEQ ID NO: 103462 - protein, 15 aa, Homo Sapiens
YLDLDGYWKTAHCNE

SEQ ID NO: 103463 - protein, 15 aa, Homo Sapiens
LDLDGYWKTAHCNES

SEQ ID NO: 103464 - protein, 15 aa, Homo Sapiens
DLDGYWKTAHCNESF

SEQ ID NO: 103465 - protein, 15 aa, Homo Sapiens
LDGYWKTAHCNESFY

SEQ ID NO: 103466 - protein, 15 aa, Homo Sapiens
DGYWKTAHCNESFYF

SEQ ID NO: 103467 - protein, 15 aa, Homo Sapiens
GYWKTAHCNESFYFL

SEQ ID NO: 103468 - protein, 15 aa, Homo Sapiens
YWKTAHCNESFYFLC

SEQ ID NO: 103469 - protein, 15 aa, Homo Sapiens
WKTAHCNESFYFLCK

SEQ ID NO: 103470 - protein, 15 aa, Homo Sapiens
KTAHCNESFYFLCKR

SEQ ID NO: 103471 - protein, 15 aa, Homo Sapiens
TAHCNESFYFLCKRS

SEQ ID NO: 103472 - protein, 15 aa, Homo Sapiens
AHCNESFYFLCKRSD

SEQ ID NO: 103473 - protein, 15 aa, Homo Sapiens
HCNESFYFLCKRSDE

SEQ ID NO: 103474 - protein, 15 aa, Homo Sapiens
CNESFYFLCKRSDEI

SEQ ID NO: 103475 - protein, 15 aa, Homo Sapiens
NESFYFLCKRSDEIP

SEQ ID NO: 103476 - protein, 15 aa, Homo Sapiens
ESFYFLCKRSDEIPA

SEQ ID NO: 103477 - protein, 15 aa, Homo Sapiens
SFYFLCKRSDEIPAT

SEQ ID NO: 103478 - protein, 15 aa, Homo Sapiens
FYFLCKRSDEIPATE

SEQ ID NO: 103479 - protein, 15 aa, Homo Sapiens
YFLCKRSDEIPATEP

SEQ ID NO: 103480 - protein, 15 aa, Homo Sapiens
FLCKRSDEIPATEPP

SEQ ID NO: 103481 - protein, 15 aa, Homo Sapiens
LCKRSDEIPATEPPQ

SEQ ID NO: 103482 - protein, 15 aa, Homo Sapiens
CKRSDEIPATEPPQL

SEQ ID NO: 103483 - protein, 15 aa, Homo Sapiens
KRSDEIPATEPPQLP

SEQ ID NO: 103484 - protein, 15 aa, Homo Sapiens
RSDEIPATEPPQLPG

SEQ ID NO: 103485 - protein, 15 aa, Homo Sapiens
SDEIPATEPPQLPGR

SEQ ID NO: 103486 - protein, 15 aa, Homo Sapiens
DEIPATEPPQLPGRC

SEQ ID NO: 103487 - protein, 15 aa, Homo Sapiens
EIPATEPPQLPGRCP

SEQ ID NO: 103488 - protein, 15 aa, Homo Sapiens
IPATEPPQLPGRCPE

SEQ ID NO: 103489 - protein, 15 aa, Homo Sapiens
PATEPPQLPGRCPES

SEQ ID NO: 103490 - protein, 15 aa, Homo Sapiens
ATEPPQLPGRCPESD

SEQ ID NO: 103491 - protein, 15 aa, Homo Sapiens
TEPPQLPGRCPESDH

SEQ ID NO: 103492 - protein, 15 aa, Homo Sapiens
EPPQLPGRCPESDHT

SEQ ID NO: 103493 - protein, 15 aa, Homo Sapiens
PPQLPGRCPESDHTA

SEQ ID NO: 103494 - protein, 15 aa, Homo Sapiens
PQLPGRCPESDHTAW

SEQ ID NO: 103495 - protein, 15 aa, Homo Sapiens
QLPGRCPESDHTAWI

SEQ ID NO: 103496 - protein, 15 aa, Homo Sapiens
LPGRCPESDHTAWIP

SEQ ID NO: 103497 - protein, 15 aa, Homo Sapiens
PGRCPESDHTAWIPF

SEQ ID NO: 103498 - protein, 15 aa, Homo Sapiens
GRCPESDHTAWIPFH

SEQ ID NO: 103499 - protein, 15 aa, Homo Sapiens
RCPESDHTAWIPFHG

SEQ ID NO: 103500 - protein, 15 aa, Homo Sapiens
CPESDHTAWIPFHGH

SEQ ID NO: 103501 - protein, 15 aa, Homo Sapiens
PESDHTAWIPFHGHC

SEQ ID NO: 103502 - protein, 15 aa, Homo Sapiens
ESDHTAWIPFHGHCY

SEQ ID NO: 103503 - protein, 15 aa, Homo Sapiens
SDHTAWIPFHGHCYY

SEQ ID NO: 103504 - protein, 15 aa, Homo Sapiens
DHTAWIPFHGHCYYI

SEQ ID NO: 103505 - protein, 15 aa, Homo Sapiens
HTAWIPFHGHCYYIE

SEQ ID NO: 103506 - protein, 15 aa, Homo Sapiens
TAWIPFHGHCYYIES

SEQ ID NO: 103507 - protein, 15 aa, Homo Sapiens
AWIPFHGHCYYIESS

SEQ ID NO: 103508 - protein, 15 aa, Homo Sapiens
WIPFHGHCYYIESSY

SEQ ID NO: 103509 - protein, 15 aa, Homo Sapiens
IPFHGHCYYIESSYT

SEQ ID NO: 103510 - protein, 15 aa, Homo Sapiens
PFHGHCYYIESSYTR

SEQ ID NO: 103511 - protein, 15 aa, Homo Sapiens
FHGHCYYIESSYTRN

SEQ ID NO: 103512 - protein, 15 aa, Homo Sapiens
HGHCYYIESSYTRNW

SEQ ID NO: 103513 - protein, 15 aa, Homo Sapiens
GHCYYIESSYTRNWG

SEQ ID NO: 103514 - protein, 15 aa, Homo Sapiens
HCYYIESSYTRNWGQ

SEQ ID NO: 103515 - protein, 15 aa, Homo Sapiens
CYYIESSYTRNWGQA

SEQ ID NO: 103516 - protein, 15 aa, Homo Sapiens
YYIESSYTRNWGQAS

SEQ ID NO: 103517 - protein, 15 aa, Homo Sapiens
YIESSYTRNWGQASL

SEQ ID NO: 103518 - protein, 15 aa, Homo Sapiens
IESSYTRNWGQASLE

SEQ ID NO: 103519 - protein, 15 aa, Homo Sapiens
ESSYTRNWGQASLEC

SEQ ID NO: 103520 - protein, 15 aa, Homo Sapiens
SSYTRNWGQASLECL

SEQ ID NO: 103521 - protein, 15 aa, Homo Sapiens
SYTRNWGQASLECLR

SEQ ID NO: 103522 - protein, 15 aa, Homo Sapiens
YTRNWGQASLECLRM

SEQ ID NO: 103523 - protein, 15 aa, Homo Sapiens
TRNWGQASLECLRMG

SEQ ID NO: 103524 - protein, 15 aa, Homo Sapiens
RNWGQASLECLRMGS

SEQ ID NO: 103525 - protein, 15 aa, Homo Sapiens
NWGQASLECLRMGSS

SEQ ID NO: 103526 - protein, 15 aa, Homo Sapiens
WGQASLECLRMGSSL

SEQ ID NO: 103527 - protein, 15 aa, Homo Sapiens
GQASLECLRMGSSLV

SEQ ID NO: 103528 - protein, 15 aa, Homo Sapiens
QASLECLRMGSSLVS

SEQ ID NO: 103529 - protein, 15 aa, Homo Sapiens
ASLECLRMGSSLVSI

SEQ ID NO: 103530 - protein, 15 aa, Homo Sapiens
SLECLRMGSSLVSIE

SEQ ID NO: 103531 - protein, 15 aa, Homo Sapiens
LECLRMGSSLVSIES

SEQ ID NO: 103532 - protein, 15 aa, Homo Sapiens
ECLRMGSSLVSIESA

SEQ ID NO: 103533 - protein, 15 aa, Homo Sapiens
CLRMGSSLVSIESAA

SEQ ID NO: 103534 - protein, 15 aa, Homo Sapiens
LRMGSSLVSIESAAE

SEQ ID NO: 103535 - protein, 15 aa, Homo Sapiens
RMGSSLVSIESAAES

SEQ ID NO: 103536 - protein, 15 aa, Homo Sapiens
MGSSLVSIESAAESS

SEQ ID NO: 103537 - protein, 15 aa, Homo Sapiens
GSSLVSIESAAESSF

SEQ ID NO: 103538 - protein, 15 aa, Homo Sapiens
SSLVSIESAAESSFL

SEQ ID NO: 103539 - protein, 15 aa, Homo Sapiens
SLVSIESAAESSFLS

SEQ ID NO: 103540 - protein, 15 aa, Homo Sapiens
LVSIESAAESSFLSY

SEQ ID NO: 103541 - protein, 15 aa, Homo Sapiens
VSIESAAESSFLSYR

SEQ ID NO: 103542 - protein, 15 aa, Homo Sapiens
SIESAAESSFLSYRV

SEQ ID NO: 103543 - protein, 15 aa, Homo Sapiens
IESAAESSFLSYRVE

SEQ ID NO: 103544 - protein, 15 aa, Homo Sapiens
ESAAESSFLSYRVEP

SEQ ID NO: 103545 - protein, 15 aa, Homo Sapiens
SAAESSFLSYRVEPL

SEQ ID NO: 103546 - protein, 15 aa, Homo Sapiens
AAESSFLSYRVEPLK

SEQ ID NO: 103547 - protein, 15 aa, Homo Sapiens
AESSFLSYRVEPLKS

SEQ ID NO: 103548 - protein, 15 aa, Homo Sapiens
ESSFLSYRVEPLKSK

SEQ ID NO: 103549 - protein, 15 aa, Homo Sapiens
SSFLSYRVEPLKSKT

SEQ ID NO: 103550 - protein, 15 aa, Homo Sapiens
SFLSYRVEPLKSKTN

SEQ ID NO: 103551 - protein, 15 aa, Homo Sapiens
FLSYRVEPLKSKTNF

SEQ ID NO: 103552 - protein, 15 aa, Homo Sapiens
LSYRVEPLKSKTNFW

SEQ ID NO: 103553 - protein, 15 aa, Homo Sapiens
SYRVEPLKSKTNFWI

SEQ ID NO: 103554 - protein, 15 aa, Homo Sapiens
YRVEPLKSKTNFWIG

SEQ ID NO: 103555 - protein, 15 aa, Homo Sapiens
RVEPLKSKTNFWIGL

SEQ ID NO: 103556 - protein, 15 aa, Homo Sapiens
VEPLKSKTNFWIGLF

SEQ ID NO: 103557 - protein, 15 aa, Homo Sapiens
EPLKSKTNFWIGLFR

SEQ ID NO: 103558 - protein, 15 aa, Homo Sapiens
PLKSKTNFWIGLFRN

SEQ ID NO: 103559 - protein, 15 aa, Homo Sapiens
LKSKTNFWIGLFRNV

SEQ ID NO: 103560 - protein, 15 aa, Homo Sapiens
KSKTNFWIGLFRNVE

SEQ ID NO: 103561 - protein, 15 aa, Homo Sapiens
SKTNFWIGLFRNVEG

SEQ ID NO: 103562 - protein, 15 aa, Homo Sapiens
KTNFWIGLFRNVEGT

SEQ ID NO: 103563 - protein, 15 aa, Homo Sapiens
TNFWIGLFRNVEGTW

SEQ ID NO: 103564 - protein, 15 aa, Homo Sapiens
NFWIGLFRNVEGTWL

SEQ ID NO: 103565 - protein, 15 aa, Homo Sapiens
FWIGLFRNVEGTWLW

SEQ ID NO: 103566 - protein, 15 aa, Homo Sapiens
WIGLFRNVEGTWLWI

SEQ ID NO: 103567 - protein, 15 aa, Homo Sapiens
IGLFRNVEGTWLWIN

SEQ ID NO: 103568 - protein, 15 aa, Homo Sapiens
GLFRNVEGTWLWINN

SEQ ID NO: 103569 - protein, 15 aa, Homo Sapiens
LFRNVEGTWLWINNS

SEQ ID NO: 103570 - protein, 15 aa, Homo Sapiens
FRNVEGTWLWINNSP

SEQ ID NO: 103571 - protein, 15 aa, Homo Sapiens
RNVEGTWLWINNSPV

SEQ ID NO: 103572 - protein, 15 aa, Homo Sapiens
NVEGTWLWINNSPVS

SEQ ID NO: 103573 - protein, 15 aa, Homo Sapiens
VEGTWLWINNSPVSF

SEQ ID NO: 103574 - protein, 15 aa, Homo Sapiens
EGTWLWINNSPVSFV

SEQ ID NO: 103575 - protein, 15 aa, Homo Sapiens
GTWLWINNSPVSFVN

SEQ ID NO: 103576 - protein, 15 aa, Homo Sapiens
TWLWINNSPVSFVNW

SEQ ID NO: 103577 - protein, 15 aa, Homo Sapiens
WLWINNSPVSFVNWN

SEQ ID NO: 103578 - protein, 15 aa, Homo Sapiens
LWINNSPVSFVNWNT

SEQ ID NO: 103579 - protein, 15 aa, Homo Sapiens
WINNSPVSFVNWNTG

SEQ ID NO: 103580 - protein, 15 aa, Homo Sapiens
INNSPVSFVNWNTGD

SEQ ID NO: 103581 - protein, 15 aa, Homo Sapiens
NNSPVSFVNWNTGDP

SEQ ID NO: 103582 - protein, 15 aa, Homo Sapiens
NSPVSFVNWNTGDPS

SEQ ID NO: 103583 - protein, 15 aa, Homo Sapiens
SPVSFVNWNTGDPSG

SEQ ID NO: 103584 - protein, 15 aa, Homo Sapiens
PVSFVNWNTGDPSGE

SEQ ID NO: 103585 - protein, 15 aa, Homo Sapiens
VSFVNWNTGDPSGER

SEQ ID NO: 103586 - protein, 15 aa, Homo Sapiens
SFVNWNTGDPSGERN

SEQ ID NO: 103587 - protein, 15 aa, Homo Sapiens
FVNWNTGDPSGERND

SEQ ID NO: 103588 - protein, 15 aa, Homo Sapiens
VNWNTGDPSGERNDC

SEQ ID NO: 103589 - protein, 15 aa, Homo Sapiens
NWNTGDPSGERNDCV

SEQ ID NO: 103590 - protein, 15 aa, Homo Sapiens
WNTGDPSGERNDCVA

SEQ ID NO: 103591 - protein, 15 aa, Homo Sapiens
NTGDPSGERNDCVAL

SEQ ID NO: 103592 - protein, 15 aa, Homo Sapiens
TGDPSGERNDCVALH

SEQ ID NO: 103593 - protein, 15 aa, Homo Sapiens
GDPSGERNDCVALHA

SEQ ID NO: 103594 - protein, 15 aa, Homo Sapiens
DPSGERNDCVALHAS

SEQ ID NO: 103595 - protein, 15 aa, Homo Sapiens
PSGERNDCVALHASS

SEQ ID NO: 103596 - protein, 15 aa, Homo Sapiens
SGERNDCVALHASSG

SEQ ID NO: 103597 - protein, 15 aa, Homo Sapiens
GERNDCVALHASSGF

SEQ ID NO: 103598 - protein, 15 aa, Homo Sapiens
ERNDCVALHASSGFW

SEQ ID NO: 103599 - protein, 15 aa, Homo Sapiens
RNDCVALHASSGFWS

SEQ ID NO: 103600 - protein, 15 aa, Homo Sapiens
NDCVALHASSGFWSN

SEQ ID NO: 103601 - protein, 15 aa, Homo Sapiens
DCVALHASSGFWSNI

SEQ ID NO: 103602 - protein, 15 aa, Homo Sapiens
CVALHASSGFWSNIH

SEQ ID NO: 103603 - protein, 15 aa, Homo Sapiens
VALHASSGFWSNIHC

SEQ ID NO: 103604 - protein, 15 aa, Homo Sapiens
ALHASSGFWSNIHCS

SEQ ID NO: 103605 - protein, 15 aa, Homo Sapiens
LHASSGFWSNIHCSS

SEQ ID NO: 103606 - protein, 15 aa, Homo Sapiens
HASSGFWSNIHCSSY

SEQ ID NO: 103607 - protein, 15 aa, Homo Sapiens
ASSGFWSNIHCSSYK

SEQ ID NO: 103608 - protein, 15 aa, Homo Sapiens
SSGFWSNIHCSSYKG

SEQ ID NO: 103609 - protein, 15 aa, Homo Sapiens
SGFWSNIHCSSYKGY

SEQ ID NO: 103610 - protein, 15 aa, Homo Sapiens
GFWSNIHCSSYKGYI

SEQ ID NO: 103611 - protein, 15 aa, Homo Sapiens
FWSNIHCSSYKGYIC

SEQ ID NO: 103612 - protein, 15 aa, Homo Sapiens
WSNIHCSSYKGYICK

SEQ ID NO: 103613 - protein, 15 aa, Homo Sapiens
SNIHCSSYKGYICKR

SEQ ID NO: 103614 - protein, 15 aa, Homo Sapiens
NIHCSSYKGYICKRP

SEQ ID NO: 103615 - protein, 15 aa, Homo Sapiens
IHCSSYKGYICKRPK

SEQ ID NO: 103616 - protein, 15 aa, Homo Sapiens
HCSSYKGYICKRPKI

SEQ ID NO: 103617 - protein, 15 aa, Homo Sapiens
CSSYKGYICKRPKII

SEQ ID NO: 103618 - protein, 15 aa, Homo Sapiens
SSYKGYICKRPKIID

SEQ ID NO: 103619 - protein, 15 aa, Homo Sapiens
SYKGYICKRPKIIDA

SEQ ID NO: 103620 - protein, 15 aa, Homo Sapiens
YKGYICKRPKIIDAK

SEQ ID NO: 103621 - protein, 15 aa, Homo Sapiens
KGYICKRPKIIDAKP

SEQ ID NO: 103622 - protein, 15 aa, Homo Sapiens
GYICKRPKIIDAKPT

SEQ ID NO: 103623 - protein, 15 aa, Homo Sapiens
YICKRPKIIDAKPTH

SEQ ID NO: 103624 - protein, 15 aa, Homo Sapiens
ICKRPKIIDAKPTHE

SEQ ID NO: 103625 - protein, 15 aa, Homo Sapiens
CKRPKIIDAKPTHEL

SEQ ID NO: 103626 - protein, 15 aa, Homo Sapiens
KRPKIIDAKPTHELL

SEQ ID NO: 103627 - protein, 15 aa, Homo Sapiens
RPKIIDAKPTHELLT

SEQ ID NO: 103628 - protein, 15 aa, Homo Sapiens
PKIIDAKPTHELLTT

SEQ ID NO: 103629 - protein, 15 aa, Homo Sapiens
KIIDAKPTHELLTTK

SEQ ID NO: 103630 - protein, 15 aa, Homo Sapiens
IIDAKPTHELLTTKA

SEQ ID NO: 103631 - protein, 15 aa, Homo Sapiens
IDAKPTHELLTTKAD

SEQ ID NO: 103632 - protein, 15 aa, Homo Sapiens
DAKPTHELLTTKADT

SEQ ID NO: 103633 - protein, 15 aa, Homo Sapiens
AKPTHELLTTKADTR

SEQ ID NO: 103634 - protein, 15 aa, Homo Sapiens
KPTHELLTTKADTRK

SEQ ID NO: 103635 - protein, 15 aa, Homo Sapiens
PTHELLTTKADTRKM

SEQ ID NO: 103636 - protein, 15 aa, Homo Sapiens
THELLTTKADTRKMD

SEQ ID NO: 103637 - protein, 15 aa, Homo Sapiens
HELLTTKADTRKMDP

SEQ ID NO: 103638 - protein, 15 aa, Homo Sapiens
ELLTTKADTRKMDPS

SEQ ID NO: 103639 - protein, 15 aa, Homo Sapiens
LLTTKADTRKMDPSK

SEQ ID NO: 103640 - protein, 15 aa, Homo Sapiens
LTTKADTRKMDPSKP

SEQ ID NO: 103641 - protein, 15 aa, Homo Sapiens
TTKADTRKMDPSKPS

SEQ ID NO: 103642 - protein, 15 aa, Homo Sapiens
TKADTRKMDPSKPSS

SEQ ID NO: 103643 - protein, 15 aa, Homo Sapiens
KADTRKMDPSKPSSN

SEQ ID NO: 103644 - protein, 15 aa, Homo Sapiens
ADTRKMDPSKPSSNV

SEQ ID NO: 103645 - protein, 15 aa, Homo Sapiens
DTRKMDPSKPSSNVA

SEQ ID NO: 103646 - protein, 15 aa, Homo Sapiens
TRKMDPSKPSSNVAG

SEQ ID NO: 103647 - protein, 15 aa, Homo Sapiens
RKMDPSKPSSNVAGV

SEQ ID NO: 103648 - protein, 15 aa, Homo Sapiens
KMDPSKPSSNVAGVV

SEQ ID NO: 103649 - protein, 15 aa, Homo Sapiens
MDPSKPSSNVAGVVI

SEQ ID NO: 103650 - protein, 15 aa, Homo Sapiens
DPSKPSSNVAGVVII

SEQ ID NO: 103651 - protein, 15 aa, Homo Sapiens
PSKPSSNVAGVVIIV

SEQ ID NO: 103652 - protein, 15 aa, Homo Sapiens
SKPSSNVAGVVIIVI

SEQ ID NO: 103653 - protein, 15 aa, Homo Sapiens
KPSSNVAGVVIIVIL

SEQ ID NO: 103654 - protein, 15 aa, Homo Sapiens
PSSNVAGVVIIVILL

SEQ ID NO: 103655 - protein, 15 aa, Homo Sapiens
SSNVAGVVIIVILLI

SEQ ID NO: 103656 - protein, 15 aa, Homo Sapiens
SNVAGVVIIVILLIL

SEQ ID NO: 103657 - protein, 15 aa, Homo Sapiens
NVAGVVIIVILLILT

SEQ ID NO: 103658 - protein, 15 aa, Homo Sapiens
VAGVVIIVILLILTG

SEQ ID NO: 103659 - protein, 15 aa, Homo Sapiens
AGVVIIVILLILTGA

SEQ ID NO: 103660 - protein, 15 aa, Homo Sapiens
GVVIIVILLILTGAG

SEQ ID NO: 103661 - protein, 15 aa, Homo Sapiens
VVIIVILLILTGAGL

SEQ ID NO: 103662 - protein, 15 aa, Homo Sapiens
VIIVILLILTGAGLA

SEQ ID NO: 103663 - protein, 15 aa, Homo Sapiens
IIVILLILTGAGLAA

SEQ ID NO: 103664 - protein, 15 aa, Homo Sapiens
IVILLILTGAGLAAY

SEQ ID NO: 103665 - protein, 15 aa, Homo Sapiens
VILLILTGAGLAAYF

SEQ ID NO: 103666 - protein, 15 aa, Homo Sapiens
ILLILTGAGLAAYFF

SEQ ID NO: 103667 - protein, 15 aa, Homo Sapiens
LLILTGAGLAAYFFY

SEQ ID NO: 103668 - protein, 15 aa, Homo Sapiens
LILTGAGLAAYFFYK

SEQ ID NO: 103669 - protein, 15 aa, Homo Sapiens
ILTGAGLAAYFFYKK

SEQ ID NO: 103670 - protein, 15 aa, Homo Sapiens
LTGAGLAAYFFYKKR

SEQ ID NO: 103671 - protein, 15 aa, Homo Sapiens
TGAGLAAYFFYKKRR

SEQ ID NO: 103672 - protein, 15 aa, Homo Sapiens
GAGLAAYFFYKKRRV

SEQ ID NO: 103673 - protein, 15 aa, Homo Sapiens
AGLAAYFFYKKRRVH

SEQ ID NO: 103674 - protein, 15 aa, Homo Sapiens
GLAAYFFYKKRRVHL

SEQ ID NO: 103675 - protein, 15 aa, Homo Sapiens
LAAYFFYKKRRVHLP

SEQ ID NO: 103676 - protein, 15 aa, Homo Sapiens
AAYFFYKKRRVHLPQ

SEQ ID NO: 103677 - protein, 15 aa, Homo Sapiens
AYFFYKKRRVHLPQE

SEQ ID NO: 103678 - protein, 15 aa, Homo Sapiens
YFFYKKRRVHLPQEG

SEQ ID NO: 103679 - protein, 15 aa, Homo Sapiens
FFYKKRRVHLPQEGA

SEQ ID NO: 103680 - protein, 15 aa, Homo Sapiens
FYKKRRVHLPQEGAF

SEQ ID NO: 103681 - protein, 15 aa, Homo Sapiens
YKKRRVHLPQEGAFE

SEQ ID NO: 103682 - protein, 15 aa, Homo Sapiens
KKRRVHLPQEGAFEN

SEQ ID NO: 103683 - protein, 15 aa, Homo Sapiens
KRRVHLPQEGAFENT

SEQ ID NO: 103684 - protein, 15 aa, Homo Sapiens
RRVHLPQEGAFENTL

SEQ ID NO: 103685 - protein, 15 aa, Homo Sapiens
RVHLPQEGAFENTLY

SEQ ID NO: 103686 - protein, 15 aa, Homo Sapiens
VHLPQEGAFENTLYF

SEQ ID NO: 103687 - protein, 15 aa, Homo Sapiens
HLPQEGAFENTLYFN

SEQ ID NO: 103688 - protein, 15 aa, Homo Sapiens
LPQEGAFENTLYFNS

SEQ ID NO: 103689 - protein, 15 aa, Homo Sapiens
PQEGAFENTLYFNSQ

SEQ ID NO: 103690 - protein, 15 aa, Homo Sapiens
QEGAFENTLYFNSQS

SEQ ID NO: 103691 - protein, 15 aa, Homo Sapiens
EGAFENTLYFNSQSS

SEQ ID NO: 103692 - protein, 15 aa, Homo Sapiens
GAFENTLYFNSQSSP

SEQ ID NO: 103693 - protein, 15 aa, Homo Sapiens
AFENTLYFNSQSSPG

SEQ ID NO: 103694 - protein, 15 aa, Homo Sapiens
FENTLYFNSQSSPGT

SEQ ID NO: 103695 - protein, 15 aa, Homo Sapiens
ENTLYFNSQSSPGTS

SEQ ID NO: 103696 - protein, 15 aa, Homo Sapiens
NTLYFNSQSSPGTSD

SEQ ID NO: 103697 - protein, 15 aa, Homo Sapiens
TLYFNSQSSPGTSDM

SEQ ID NO: 103698 - protein, 15 aa, Homo Sapiens
LYFNSQSSPGTSDMK

SEQ ID NO: 103699 - protein, 15 aa, Homo Sapiens
YFNSQSSPGTSDMKD

SEQ ID NO: 103700 - protein, 15 aa, Homo Sapiens
FNSQSSPGTSDMKDL

SEQ ID NO: 103701 - protein, 15 aa, Homo Sapiens
NSQSSPGTSDMKDLV

SEQ ID NO: 103702 - protein, 15 aa, Homo Sapiens
SQSSPGTSDMKDLVG

SEQ ID NO: 103703 - protein, 15 aa, Homo Sapiens
QSSPGTSDMKDLVGN

SEQ ID NO: 103704 - protein, 15 aa, Homo Sapiens
SSPGTSDMKDLVGNI

SEQ ID NO: 103705 - protein, 15 aa, Homo Sapiens
SPGTSDMKDLVGNIE

SEQ ID NO: 103706 - protein, 15 aa, Homo Sapiens
PGTSDMKDLVGNIEQ

SEQ ID NO: 103707 - protein, 15 aa, Homo Sapiens
GTSDMKDLVGNIEQN

SEQ ID NO: 103708 - protein, 15 aa, Homo Sapiens
TSDMKDLVGNIEQNE

SEQ ID NO: 103709 - protein, 15 aa, Homo Sapiens
SDMKDLVGNIEQNEH

SEQ ID NO: 103710 - protein, 15 aa, Homo Sapiens
DMKDLVGNIEQNEHS

SEQ ID NO: 103711 - protein, 15 aa, Homo Sapiens
MKDLVGNIEQNEHSV

SEQ ID NO: 103712 - protein, 15 aa, Homo Sapiens
KDLVGNIEQNEHSVI

SEQ ID NO: 103713 - protein, 16 aa, Homo Sapiens
MRLPLLLVFASVIPGA

SEQ ID NO: 103714 - protein, 16 aa, Homo Sapiens
RLPLLLVFASVIPGAV

SEQ ID NO: 103715 - protein, 16 aa, Homo Sapiens
LPLLLVFASVIPGAVL

SEQ ID NO: 103716 - protein, 16 aa, Homo Sapiens
PLLLVFASVIPGAVLL

SEQ ID NO: 103717 - protein, 16 aa, Homo Sapiens
LLLVFASVIPGAVLLL

SEQ ID NO: 103718 - protein, 16 aa, Homo Sapiens
LLVFASVIPGAVLLLD

SEQ ID NO: 103719 - protein, 16 aa, Homo Sapiens
LVFASVIPGAVLLLDT

SEQ ID NO: 103720 - protein, 16 aa, Homo Sapiens
VFASVIPGAVLLLDTR

SEQ ID NO: 103721 - protein, 16 aa, Homo Sapiens
FASVIPGAVLLLDTRQ

SEQ ID NO: 103722 - protein, 16 aa, Homo Sapiens
ASVIPGAVLLLDTRQF

SEQ ID NO: 103723 - protein, 16 aa, Homo Sapiens
SVIPGAVLLLDTRQFL

SEQ ID NO: 103724 - protein, 16 aa, Homo Sapiens
VIPGAVLLLDTRQFLI

SEQ ID NO: 103725 - protein, 16 aa, Homo Sapiens
IPGAVLLLDTRQFLIY

SEQ ID NO: 103726 - protein, 16 aa, Homo Sapiens
PGAVLLLDTRQFLIYN

SEQ ID NO: 103727 - protein, 16 aa, Homo Sapiens
GAVLLLDTRQFLIYNE

SEQ ID NO: 103728 - protein, 16 aa, Homo Sapiens
AVLLLDTRQFLIYNED

SEQ ID NO: 103729 - protein, 16 aa, Homo Sapiens
VLLLDTRQFLIYNEDH

SEQ ID NO: 103730 - protein, 16 aa, Homo Sapiens
LLLDTRQFLIYNEDHK

SEQ ID NO: 103731 - protein, 16 aa, Homo Sapiens
LLDTRQFLIYNEDHKR

SEQ ID NO: 103732 - protein, 16 aa, Homo Sapiens
LDTRQFLIYNEDHKRC

SEQ ID NO: 103733 - protein, 16 aa, Homo Sapiens
DTRQFLIYNEDHKRCV

SEQ ID NO: 103734 - protein, 16 aa, Homo Sapiens
TRQFLIYNEDHKRCVD

SEQ ID NO: 103735 - protein, 16 aa, Homo Sapiens
RQFLIYNEDHKRCVDA

SEQ ID NO: 103736 - protein, 16 aa, Homo Sapiens
QFLIYNEDHKRCVDAV

SEQ ID NO: 103737 - protein, 16 aa, Homo Sapiens
FLIYNEDHKRCVDAVS

SEQ ID NO: 103738 - protein, 16 aa, Homo Sapiens
LIYNEDHKRCVDAVSP

SEQ ID NO: 103739 - protein, 16 aa, Homo Sapiens
IYNEDHKRCVDAVSPS

SEQ ID NO: 103740 - protein, 16 aa, Homo Sapiens
YNEDHKRCVDAVSPSA

SEQ ID NO: 103741 - protein, 16 aa, Homo Sapiens
NEDHKRCVDAVSPSAV

SEQ ID NO: 103742 - protein, 16 aa, Homo Sapiens
EDHKRCVDAVSPSAVQ

SEQ ID NO: 103743 - protein, 16 aa, Homo Sapiens
DHKRCVDAVSPSAVQT

SEQ ID NO: 103744 - protein, 16 aa, Homo Sapiens
HKRCVDAVSPSAVQTA

SEQ ID NO: 103745 - protein, 16 aa, Homo Sapiens
KRCVDAVSPSAVQTAA

SEQ ID NO: 103746 - protein, 16 aa, Homo Sapiens
RCVDAVSPSAVQTAAC

SEQ ID NO: 103747 - protein, 16 aa, Homo Sapiens
CVDAVSPSAVQTAACN

SEQ ID NO: 103748 - protein, 16 aa, Homo Sapiens
VDAVSPSAVQTAACNQ

SEQ ID NO: 103749 - protein, 16 aa, Homo Sapiens
DAVSPSAVQTAACNQD

SEQ ID NO: 103750 - protein, 16 aa, Homo Sapiens
AVSPSAVQTAACNQDA

SEQ ID NO: 103751 - protein, 16 aa, Homo Sapiens
VSPSAVQTAACNQDAE

SEQ ID NO: 103752 - protein, 16 aa, Homo Sapiens
SPSAVQTAACNQDAES

SEQ ID NO: 103753 - protein, 16 aa, Homo Sapiens
PSAVQTAACNQDAESQ

SEQ ID NO: 103754 - protein, 16 aa, Homo Sapiens
SAVQTAACNQDAESQK

SEQ ID NO: 103755 - protein, 16 aa, Homo Sapiens
AVQTAACNQDAESQKF

SEQ ID NO: 103756 - protein, 16 aa, Homo Sapiens
VQTAACNQDAESQKFR

SEQ ID NO: 103757 - protein, 16 aa, Homo Sapiens
QTAACNQDAESQKFRW

SEQ ID NO: 103758 - protein, 16 aa, Homo Sapiens
TAACNQDAESQKFRWV

SEQ ID NO: 103759 - protein, 16 aa, Homo Sapiens
AACNQDAESQKFRWVS

SEQ ID NO: 103760 - protein, 16 aa, Homo Sapiens
ACNQDAESQKFRWVSE

SEQ ID NO: 103761 - protein, 16 aa, Homo Sapiens
CNQDAESQKFRWVSES

SEQ ID NO: 103762 - protein, 16 aa, Homo Sapiens
NQDAESQKFRWVSESQ

SEQ ID NO: 103763 - protein, 16 aa, Homo Sapiens
QDAESQKFRWVSESQI

SEQ ID NO: 103764 - protein, 16 aa, Homo Sapiens
DAESQKFRWVSESQIM

SEQ ID NO: 103765 - protein, 16 aa, Homo Sapiens
AESQKFRWVSESQIMS

SEQ ID NO: 103766 - protein, 16 aa, Homo Sapiens
ESQKFRWVSESQIMSV

SEQ ID NO: 103767 - protein, 16 aa, Homo Sapiens
SQKFRWVSESQIMSVA

SEQ ID NO: 103768 - protein, 16 aa, Homo Sapiens
QKFRWVSESQIMSVAF

SEQ ID NO: 103769 - protein, 16 aa, Homo Sapiens
KFRWVSESQIMSVAFK

SEQ ID NO: 103770 - protein, 16 aa, Homo Sapiens
FRWVSESQIMSVAFKL

SEQ ID NO: 103771 - protein, 16 aa, Homo Sapiens
RWVSESQIMSVAFKLC

SEQ ID NO: 103772 - protein, 16 aa, Homo Sapiens
WVSESQIMSVAFKLCL

SEQ ID NO: 103773 - protein, 16 aa, Homo Sapiens
VSESQIMSVAFKLCLG

SEQ ID NO: 103774 - protein, 16 aa, Homo Sapiens
SESQIMSVAFKLCLGV

SEQ ID NO: 103775 - protein, 16 aa, Homo Sapiens
ESQIMSVAFKLCLGVP

SEQ ID NO: 103776 - protein, 16 aa, Homo Sapiens
SQIMSVAFKLCLGVPS

SEQ ID NO: 103777 - protein, 16 aa, Homo Sapiens
QIMSVAFKLCLGVPSK

SEQ ID NO: 103778 - protein, 16 aa, Homo Sapiens
IMSVAFKLCLGVPSKT

SEQ ID NO: 103779 - protein, 16 aa, Homo Sapiens
MSVAFKLCLGVPSKTD

SEQ ID NO: 103780 - protein, 16 aa, Homo Sapiens
SVAFKLCLGVPSKTDW

SEQ ID NO: 103781 - protein, 16 aa, Homo Sapiens
VAFKLCLGVPSKTDWV

SEQ ID NO: 103782 - protein, 16 aa, Homo Sapiens
AFKLCLGVPSKTDWVA

SEQ ID NO: 103783 - protein, 16 aa, Homo Sapiens
FKLCLGVPSKTDWVAI

SEQ ID NO: 103784 - protein, 16 aa, Homo Sapiens
KLCLGVPSKTDWVAIT

SEQ ID NO: 103785 - protein, 16 aa, Homo Sapiens
LCLGVPSKTDWVAITL

SEQ ID NO: 103786 - protein, 16 aa, Homo Sapiens
CLGVPSKTDWVAITLY

SEQ ID NO: 103787 - protein, 16 aa, Homo Sapiens
LGVPSKTDWVAITLYA

SEQ ID NO: 103788 - protein, 16 aa, Homo Sapiens
GVPSKTDWVAITLYAC

SEQ ID NO: 103789 - protein, 16 aa, Homo Sapiens
VPSKTDWVAITLYACD

SEQ ID NO: 103790 - protein, 16 aa, Homo Sapiens
PSKTDWVAITLYACDS

SEQ ID NO: 103791 - protein, 16 aa, Homo Sapiens
SKTDWVAITLYACDSK

SEQ ID NO: 103792 - protein, 16 aa, Homo Sapiens
KTDWVAITLYACDSKS

SEQ ID NO: 103793 - protein, 16 aa, Homo Sapiens
TDWVAITLYACDSKSE

SEQ ID NO: 103794 - protein, 16 aa, Homo Sapiens
DWVAITLYACDSKSEF

SEQ ID NO: 103795 - protein, 16 aa, Homo Sapiens
WVAITLYACDSKSEFQ

SEQ ID NO: 103796 - protein, 16 aa, Homo Sapiens
VAITLYACDSKSEFQK

SEQ ID NO: 103797 - protein, 16 aa, Homo Sapiens
AITLYACDSKSEFQKW

SEQ ID NO: 103798 - protein, 16 aa, Homo Sapiens
ITLYACDSKSEFQKWE

SEQ ID NO: 103799 - protein, 16 aa, Homo Sapiens
TLYACDSKSEFQKWEC

SEQ ID NO: 103800 - protein, 16 aa, Homo Sapiens
LYACDSKSEFQKWECK

SEQ ID NO: 103801 - protein, 16 aa, Homo Sapiens
YACDSKSEFQKWECKN

SEQ ID NO: 103802 - protein, 16 aa, Homo Sapiens
ACDSKSEFQKWECKND

SEQ ID NO: 103803 - protein, 16 aa, Homo Sapiens
CDSKSEFQKWECKNDT

SEQ ID NO: 103804 - protein, 16 aa, Homo Sapiens
DSKSEFQKWECKNDTL

SEQ ID NO: 103805 - protein, 16 aa, Homo Sapiens
SKSEFQKWECKNDTLL

SEQ ID NO: 103806 - protein, 16 aa, Homo Sapiens
KSEFQKWECKNDTLLG

SEQ ID NO: 103807 - protein, 16 aa, Homo Sapiens
SEFQKWECKNDTLLGI

SEQ ID NO: 103808 - protein, 16 aa, Homo Sapiens
EFQKWECKNDTLLGIK

SEQ ID NO: 103809 - protein, 16 aa, Homo Sapiens
FQKWECKNDTLLGIKG

SEQ ID NO: 103810 - protein, 16 aa, Homo Sapiens
QKWECKNDTLLGIKGE

SEQ ID NO: 103811 - protein, 16 aa, Homo Sapiens
KWECKNDTLLGIKGED

SEQ ID NO: 103812 - protein, 16 aa, Homo Sapiens
WECKNDTLLGIKGEDL

SEQ ID NO: 103813 - protein, 16 aa, Homo Sapiens
ECKNDTLLGIKGEDLF

SEQ ID NO: 103814 - protein, 16 aa, Homo Sapiens
CKNDTLLGIKGEDLFF

SEQ ID NO: 103815 - protein, 16 aa, Homo Sapiens
KNDTLLGIKGEDLFFN

SEQ ID NO: 103816 - protein, 16 aa, Homo Sapiens
NDTLLGIKGEDLFFNY

SEQ ID NO: 103817 - protein, 16 aa, Homo Sapiens
DTLLGIKGEDLFFNYG

SEQ ID NO: 103818 - protein, 16 aa, Homo Sapiens
TLLGIKGEDLFFNYGN

SEQ ID NO: 103819 - protein, 16 aa, Homo Sapiens
LLGIKGEDLFFNYGNR

SEQ ID NO: 103820 - protein, 16 aa, Homo Sapiens
LGIKGEDLFFNYGNRQ

SEQ ID NO: 103821 - protein, 16 aa, Homo Sapiens
GIKGEDLFFNYGNRQE

SEQ ID NO: 103822 - protein, 16 aa, Homo Sapiens
IKGEDLFFNYGNRQEK

SEQ ID NO: 103823 - protein, 16 aa, Homo Sapiens
KGEDLFFNYGNRQEKN

SEQ ID NO: 103824 - protein, 16 aa, Homo Sapiens
GEDLFFNYGNRQEKNI

SEQ ID NO: 103825 - protein, 16 aa, Homo Sapiens
EDLFFNYGNRQEKNIM

SEQ ID NO: 103826 - protein, 16 aa, Homo Sapiens
DLFFNYGNRQEKNIML

SEQ ID NO: 103827 - protein, 16 aa, Homo Sapiens
LFFNYGNRQEKNIMLY

SEQ ID NO: 103828 - protein, 16 aa, Homo Sapiens
FFNYGNRQEKNIMLYK

SEQ ID NO: 103829 - protein, 16 aa, Homo Sapiens
FNYGNRQEKNIMLYKG

SEQ ID NO: 103830 - protein, 16 aa, Homo Sapiens
NYGNRQEKNIMLYKGS

SEQ ID NO: 103831 - protein, 16 aa, Homo Sapiens
YGNRQEKNIMLYKGSG

SEQ ID NO: 103832 - protein, 16 aa, Homo Sapiens
GNRQEKNIMLYKGSGL

SEQ ID NO: 103833 - protein, 16 aa, Homo Sapiens
NRQEKNIMLYKGSGLW

SEQ ID NO: 103834 - protein, 16 aa, Homo Sapiens
RQEKNIMLYKGSGLWS

SEQ ID NO: 103835 - protein, 16 aa, Homo Sapiens
QEKNIMLYKGSGLWSR

SEQ ID NO: 103836 - protein, 16 aa, Homo Sapiens
EKNIMLYKGSGLWSRW

SEQ ID NO: 103837 - protein, 16 aa, Homo Sapiens
KNIMLYKGSGLWSRWK

SEQ ID NO: 103838 - protein, 16 aa, Homo Sapiens
NIMLYKGSGLWSRWKI

SEQ ID NO: 103839 - protein, 16 aa, Homo Sapiens
IMLYKGSGLWSRWKIY

SEQ ID NO: 103840 - protein, 16 aa, Homo Sapiens
MLYKGSGLWSRWKIYG

SEQ ID NO: 103841 - protein, 16 aa, Homo Sapiens
LYKGSGLWSRWKIYGT

SEQ ID NO: 103842 - protein, 16 aa, Homo Sapiens
YKGSGLWSRWKIYGTT

SEQ ID NO: 103843 - protein, 16 aa, Homo Sapiens
KGSGLWSRWKIYGTTD

SEQ ID NO: 103844 - protein, 16 aa, Homo Sapiens
GSGLWSRWKIYGTTDN

SEQ ID NO: 103845 - protein, 16 aa, Homo Sapiens
SGLWSRWKIYGTTDNL

SEQ ID NO: 103846 - protein, 16 aa, Homo Sapiens
GLWSRWKIYGTTDNLC

SEQ ID NO: 103847 - protein, 16 aa, Homo Sapiens
LWSRWKIYGTTDNLCS

SEQ ID NO: 103848 - protein, 16 aa, Homo Sapiens
WSRWKIYGTTDNLCSR

SEQ ID NO: 103849 - protein, 16 aa, Homo Sapiens
SRWKIYGTTDNLCSRG

SEQ ID NO: 103850 - protein, 16 aa, Homo Sapiens
RWKIYGTTDNLCSRGY

SEQ ID NO: 103851 - protein, 16 aa, Homo Sapiens
WKIYGTTDNLCSRGYE

SEQ ID NO: 103852 - protein, 16 aa, Homo Sapiens
KIYGTTDNLCSRGYEA

SEQ ID NO: 103853 - protein, 16 aa, Homo Sapiens
IYGTTDNLCSRGYEAM

SEQ ID NO: 103854 - protein, 16 aa, Homo Sapiens
YGTTDNLCSRGYEAMY

SEQ ID NO: 103855 - protein, 16 aa, Homo Sapiens
GTTDNLCSRGYEAMYT

SEQ ID NO: 103856 - protein, 16 aa, Homo Sapiens
TTDNLCSRGYEAMYTL

SEQ ID NO: 103857 - protein, 16 aa, Homo Sapiens
TDNLCSRGYEAMYTLL

SEQ ID NO: 103858 - protein, 16 aa, Homo Sapiens
DNLCSRGYEAMYTLLG

SEQ ID NO: 103859 - protein, 16 aa, Homo Sapiens
NLCSRGYEAMYTLLGN

SEQ ID NO: 103860 - protein, 16 aa, Homo Sapiens
LCSRGYEAMYTLLGNA

SEQ ID NO: 103861 - protein, 16 aa, Homo Sapiens
CSRGYEAMYTLLGNAN

SEQ ID NO: 103862 - protein, 16 aa, Homo Sapiens
SRGYEAMYTLLGNANG

SEQ ID NO: 103863 - protein, 16 aa, Homo Sapiens
RGYEAMYTLLGNANGA

SEQ ID NO: 103864 - protein, 16 aa, Homo Sapiens
GYEAMYTLLGNANGAT

SEQ ID NO: 103865 - protein, 16 aa, Homo Sapiens
YEAMYTLLGNANGATC

SEQ ID NO: 103866 - protein, 16 aa, Homo Sapiens
EAMYTLLGNANGATCA

SEQ ID NO: 103867 - protein, 16 aa, Homo Sapiens
AMYTLLGNANGATCAF

SEQ ID NO: 103868 - protein, 16 aa, Homo Sapiens
MYTLLGNANGATCAFP

SEQ ID NO: 103869 - protein, 16 aa, Homo Sapiens
YTLLGNANGATCAFPF

SEQ ID NO: 103870 - protein, 16 aa, Homo Sapiens
TLLGNANGATCAFPFK

SEQ ID NO: 103871 - protein, 16 aa, Homo Sapiens
LLGNANGATCAFPFKF

SEQ ID NO: 103872 - protein, 16 aa, Homo Sapiens
LGNANGATCAFPFKFE

SEQ ID NO: 103873 - protein, 16 aa, Homo Sapiens
GNANGATCAFPFKFEN

SEQ ID NO: 103874 - protein, 16 aa, Homo Sapiens
NANGATCAFPFKFENK

SEQ ID NO: 103875 - protein, 16 aa, Homo Sapiens
ANGATCAFPFKFENKW

SEQ ID NO: 103876 - protein, 16 aa, Homo Sapiens
NGATCAFPFKFENKWY

SEQ ID NO: 103877 - protein, 16 aa, Homo Sapiens
GATCAFPFKFENKWYA

SEQ ID NO: 103878 - protein, 16 aa, Homo Sapiens
ATCAFPFKFENKWYAD

SEQ ID NO: 103879 - protein, 16 aa, Homo Sapiens
TCAFPFKFENKWYADC

SEQ ID NO: 103880 - protein, 16 aa, Homo Sapiens
CAFPFKFENKWYADCT

SEQ ID NO: 103881 - protein, 16 aa, Homo Sapiens
AFPFKFENKWYADCTS

SEQ ID NO: 103882 - protein, 16 aa, Homo Sapiens
FPFKFENKWYADCTSA

SEQ ID NO: 103883 - protein, 16 aa, Homo Sapiens
PFKFENKWYADCTSAG

SEQ ID NO: 103884 - protein, 16 aa, Homo Sapiens
FKFENKWYADCTSAGR

SEQ ID NO: 103885 - protein, 16 aa, Homo Sapiens
KFENKWYADCTSAGRS

SEQ ID NO: 103886 - protein, 16 aa, Homo Sapiens
FENKWYADCTSAGRSD

SEQ ID NO: 103887 - protein, 16 aa, Homo Sapiens
ENKWYADCTSAGRSDG

SEQ ID NO: 103888 - protein, 16 aa, Homo Sapiens
NKWYADCTSAGRSDGW

SEQ ID NO: 103889 - protein, 16 aa, Homo Sapiens
KWYADCTSAGRSDGWL

SEQ ID NO: 103890 - protein, 16 aa, Homo Sapiens
WYADCTSAGRSDGWLW

SEQ ID NO: 103891 - protein, 16 aa, Homo Sapiens
YADCTSAGRSDGWLWC

SEQ ID NO: 103892 - protein, 16 aa, Homo Sapiens
ADCTSAGRSDGWLWCG

SEQ ID NO: 103893 - protein, 16 aa, Homo Sapiens
DCTSAGRSDGWLWCGT

SEQ ID NO: 103894 - protein, 16 aa, Homo Sapiens
CTSAGRSDGWLWCGTT

SEQ ID NO: 103895 - protein, 16 aa, Homo Sapiens
TSAGRSDGWLWCGTTT

SEQ ID NO: 103896 - protein, 16 aa, Homo Sapiens
SAGRSDGWLWCGTTTD

SEQ ID NO: 103897 - protein, 16 aa, Homo Sapiens
AGRSDGWLWCGTTTDY

SEQ ID NO: 103898 - protein, 16 aa, Homo Sapiens
GRSDGWLWCGTTTDYD

SEQ ID NO: 103899 - protein, 16 aa, Homo Sapiens
RSDGWLWCGTTTDYDT

SEQ ID NO: 103900 - protein, 16 aa, Homo Sapiens
SDGWLWCGTTTDYDTD

SEQ ID NO: 103901 - protein, 16 aa, Homo Sapiens
DGWLWCGTTTDYDTDK

SEQ ID NO: 103902 - protein, 16 aa, Homo Sapiens
GWLWCGTTTDYDTDKL

SEQ ID NO: 103903 - protein, 16 aa, Homo Sapiens
WLWCGTTTDYDTDKLF

SEQ ID NO: 103904 - protein, 16 aa, Homo Sapiens
LWCGTTTDYDTDKLFG

SEQ ID NO: 103905 - protein, 16 aa, Homo Sapiens
WCGTTTDYDTDKLFGY

SEQ ID NO: 103906 - protein, 16 aa, Homo Sapiens
CGTTTDYDTDKLFGYC

SEQ ID NO: 103907 - protein, 16 aa, Homo Sapiens
GTTTDYDTDKLFGYCP

SEQ ID NO: 103908 - protein, 16 aa, Homo Sapiens
TTTDYDTDKLFGYCPL

SEQ ID NO: 103909 - protein, 16 aa, Homo Sapiens
TTDYDTDKLFGYCPLK

SEQ ID NO: 103910 - protein, 16 aa, Homo Sapiens
TDYDTDKLFGYCPLKF

SEQ ID NO: 103911 - protein, 16 aa, Homo Sapiens
DYDTDKLFGYCPLKFE

SEQ ID NO: 103912 - protein, 16 aa, Homo Sapiens
YDTDKLFGYCPLKFEG

SEQ ID NO: 103913 - protein, 16 aa, Homo Sapiens
DTDKLFGYCPLKFEGS

SEQ ID NO: 103914 - protein, 16 aa, Homo Sapiens
TDKLFGYCPLKFEGSE

SEQ ID NO: 103915 - protein, 16 aa, Homo Sapiens
DKLFGYCPLKFEGSES

SEQ ID NO: 103916 - protein, 16 aa, Homo Sapiens
KLFGYCPLKFEGSESL

SEQ ID NO: 103917 - protein, 16 aa, Homo Sapiens
LFGYCPLKFEGSESLW

SEQ ID NO: 103918 - protein, 16 aa, Homo Sapiens
FGYCPLKFEGSESLWN

SEQ ID NO: 103919 - protein, 16 aa, Homo Sapiens
GYCPLKFEGSESLWNK

SEQ ID NO: 103920 - protein, 16 aa, Homo Sapiens
YCPLKFEGSESLWNKD

SEQ ID NO: 103921 - protein, 16 aa, Homo Sapiens
CPLKFEGSESLWNKDP

SEQ ID NO: 103922 - protein, 16 aa, Homo Sapiens
PLKFEGSESLWNKDPL

SEQ ID NO: 103923 - protein, 16 aa, Homo Sapiens
LKFEGSESLWNKDPLT

SEQ ID NO: 103924 - protein, 16 aa, Homo Sapiens
KFEGSESLWNKDPLTS

SEQ ID NO: 103925 - protein, 16 aa, Homo Sapiens
FEGSESLWNKDPLTSV

SEQ ID NO: 103926 - protein, 16 aa, Homo Sapiens
EGSESLWNKDPLTSVS

SEQ ID NO: 103927 - protein, 16 aa, Homo Sapiens
GSESLWNKDPLTSVSY

SEQ ID NO: 103928 - protein, 16 aa, Homo Sapiens
SESLWNKDPLTSVSYQ

SEQ ID NO: 103929 - protein, 16 aa, Homo Sapiens
ESLWNKDPLTSVSYQI

SEQ ID NO: 103930 - protein, 16 aa, Homo Sapiens
SLWNKDPLTSVSYQIN

SEQ ID NO: 103931 - protein, 16 aa, Homo Sapiens
LWNKDPLTSVSYQINS

SEQ ID NO: 103932 - protein, 16 aa, Homo Sapiens
WNKDPLTSVSYQINSK

SEQ ID NO: 103933 - protein, 16 aa, Homo Sapiens
NKDPLTSVSYQINSKS

SEQ ID NO: 103934 - protein, 16 aa, Homo Sapiens
KDPLTSVSYQINSKSA

SEQ ID NO: 103935 - protein, 16 aa, Homo Sapiens
DPLTSVSYQINSKSAL

SEQ ID NO: 103936 - protein, 16 aa, Homo Sapiens
PLTSVSYQINSKSALS

SEQ ID NO: 103937 - protein, 16 aa, Homo Sapiens
LTSVSYQINSKSALSW

SEQ ID NO: 103938 - protein, 16 aa, Homo Sapiens
TSVSYQINSKSALSWH

SEQ ID NO: 103939 - protein, 16 aa, Homo Sapiens
SVSYQINSKSALSWHQ

SEQ ID NO: 103940 - protein, 16 aa, Homo Sapiens
VSYQINSKSALSWHQA

SEQ ID NO: 103941 - protein, 16 aa, Homo Sapiens
SYQINSKSALSWHQAR

SEQ ID NO: 103942 - protein, 16 aa, Homo Sapiens
YQINSKSALSWHQARK

SEQ ID NO: 103943 - protein, 16 aa, Homo Sapiens
QINSKSALSWHQARKS

SEQ ID NO: 103944 - protein, 16 aa, Homo Sapiens
INSKSALSWHQARKSC

SEQ ID NO: 103945 - protein, 16 aa, Homo Sapiens
NSKSALSWHQARKSCQ

SEQ ID NO: 103946 - protein, 16 aa, Homo Sapiens
SKSALSWHQARKSCQQ

SEQ ID NO: 103947 - protein, 16 aa, Homo Sapiens
KSALSWHQARKSCQQQ

SEQ ID NO: 103948 - protein, 16 aa, Homo Sapiens
SALSWHQARKSCQQQN

SEQ ID NO: 103949 - protein, 16 aa, Homo Sapiens
ALSWHQARKSCQQQNA

SEQ ID NO: 103950 - protein, 16 aa, Homo Sapiens
LSWHQARKSCQQQNAE

SEQ ID NO: 103951 - protein, 16 aa, Homo Sapiens
SWHQARKSCQQQNAEL

SEQ ID NO: 103952 - protein, 16 aa, Homo Sapiens
WHQARKSCQQQNAELL

SEQ ID NO: 103953 - protein, 16 aa, Homo Sapiens
HQARKSCQQQNAELLS

SEQ ID NO: 103954 - protein, 16 aa, Homo Sapiens
QARKSCQQQNAELLSI

SEQ ID NO: 103955 - protein, 16 aa, Homo Sapiens
ARKSCQQQNAELLSIT

SEQ ID NO: 103956 - protein, 16 aa, Homo Sapiens
RKSCQQQNAELLSITE

SEQ ID NO: 103957 - protein, 16 aa, Homo Sapiens
KSCQQQNAELLSITEI

SEQ ID NO: 103958 - protein, 16 aa, Homo Sapiens
SCQQQNAELLSITEIH

SEQ ID NO: 103959 - protein, 16 aa, Homo Sapiens
CQQQNAELLSITEIHE

SEQ ID NO: 103960 - protein, 16 aa, Homo Sapiens
QQQNAELLSITEIHEQ

SEQ ID NO: 103961 - protein, 16 aa, Homo Sapiens
QQNAELLSITEIHEQT

SEQ ID NO: 103962 - protein, 16 aa, Homo Sapiens
QNAELLSITEIHEQTY

SEQ ID NO: 103963 - protein, 16 aa, Homo Sapiens
NAELLSITEIHEQTYL

SEQ ID NO: 103964 - protein, 16 aa, Homo Sapiens
AELLSITEIHEQTYLT

SEQ ID NO: 103965 - protein, 16 aa, Homo Sapiens
ELLSITEIHEQTYLTG

SEQ ID NO: 103966 - protein, 16 aa, Homo Sapiens
LLSITEIHEQTYLTGL

SEQ ID NO: 103967 - protein, 16 aa, Homo Sapiens
LSITEIHEQTYLTGLT

SEQ ID NO: 103968 - protein, 16 aa, Homo Sapiens
SITEIHEQTYLTGLTS

SEQ ID NO: 103969 - protein, 16 aa, Homo Sapiens
ITEIHEQTYLTGLTSS

SEQ ID NO: 103970 - protein, 16 aa, Homo Sapiens
TEIHEQTYLTGLTSSL

SEQ ID NO: 103971 - protein, 16 aa, Homo Sapiens
EIHEQTYLTGLTSSLT

SEQ ID NO: 103972 - protein, 16 aa, Homo Sapiens
IHEQTYLTGLTSSLTS

SEQ ID NO: 103973 - protein, 16 aa, Homo Sapiens
HEQTYLTGLTSSLTSG

SEQ ID NO: 103974 - protein, 16 aa, Homo Sapiens
EQTYLTGLTSSLTSGL

SEQ ID NO: 103975 - protein, 16 aa, Homo Sapiens
QTYLTGLTSSLTSGLW

SEQ ID NO: 103976 - protein, 16 aa, Homo Sapiens
TYLTGLTSSLTSGLWI

SEQ ID NO: 103977 - protein, 16 aa, Homo Sapiens
YLTGLTSSLTSGLWIG

SEQ ID NO: 103978 - protein, 16 aa, Homo Sapiens
LTGLTSSLTSGLWIGL

SEQ ID NO: 103979 - protein, 16 aa, Homo Sapiens
TGLTSSLTSGLWIGLN

SEQ ID NO: 103980 - protein, 16 aa, Homo Sapiens
GLTSSLTSGLWIGLNS

SEQ ID NO: 103981 - protein, 16 aa, Homo Sapiens
LTSSLTSGLWIGLNSL

SEQ ID NO: 103982 - protein, 16 aa, Homo Sapiens
TSSLTSGLWIGLNSLS

SEQ ID NO: 103983 - protein, 16 aa, Homo Sapiens
SSLTSGLWIGLNSLSF

SEQ ID NO: 103984 - protein, 16 aa, Homo Sapiens
SLTSGLWIGLNSLSFN

SEQ ID NO: 103985 - protein, 16 aa, Homo Sapiens
LTSGLWIGLNSLSFNS

SEQ ID NO: 103986 - protein, 16 aa, Homo Sapiens
TSGLWIGLNSLSFNSG

SEQ ID NO: 103987 - protein, 16 aa, Homo Sapiens
SGLWIGLNSLSFNSGW

SEQ ID NO: 103988 - protein, 16 aa, Homo Sapiens
GLWIGLNSLSFNSGWQ

SEQ ID NO: 103989 - protein, 16 aa, Homo Sapiens
LWIGLNSLSFNSGWQW

SEQ ID NO: 103990 - protein, 16 aa, Homo Sapiens
WIGLNSLSFNSGWQWS

SEQ ID NO: 103991 - protein, 16 aa, Homo Sapiens
IGLNSLSFNSGWQWSD

SEQ ID NO: 103992 - protein, 16 aa, Homo Sapiens
GLNSLSFNSGWQWSDR

SEQ ID NO: 103993 - protein, 16 aa, Homo Sapiens
LNSLSFNSGWQWSDRS

SEQ ID NO: 103994 - protein, 16 aa, Homo Sapiens
NSLSFNSGWQWSDRSP

SEQ ID NO: 103995 - protein, 16 aa, Homo Sapiens
SLSFNSGWQWSDRSPF

SEQ ID NO: 103996 - protein, 16 aa, Homo Sapiens
LSFNSGWQWSDRSPFR

SEQ ID NO: 103997 - protein, 16 aa, Homo Sapiens
SFNSGWQWSDRSPFRY

SEQ ID NO: 103998 - protein, 16 aa, Homo Sapiens
FNSGWQWSDRSPFRYL

SEQ ID NO: 103999 - protein, 16 aa, Homo Sapiens
NSGWQWSDRSPFRYLN

SEQ ID NO: 104000 - protein, 16 aa, Homo Sapiens
SGWQWSDRSPFRYLNW

SEQ ID NO: 104001 - protein, 16 aa, Homo Sapiens
GWQWSDRSPFRYLNWL

SEQ ID NO: 104002 - protein, 16 aa, Homo Sapiens
WQWSDRSPFRYLNWLP

SEQ ID NO: 104003 - protein, 16 aa, Homo Sapiens
QWSDRSPFRYLNWLPG

SEQ ID NO: 104004 - protein, 16 aa, Homo Sapiens
WSDRSPFRYLNWLPGS

SEQ ID NO: 104005 - protein, 16 aa, Homo Sapiens
SDRSPFRYLNWLPGSP

SEQ ID NO: 104006 - protein, 16 aa, Homo Sapiens
DRSPFRYLNWLPGSPS

SEQ ID NO: 104007 - protein, 16 aa, Homo Sapiens
RSPFRYLNWLPGSPSA

SEQ ID NO: 104008 - protein, 16 aa, Homo Sapiens
SPFRYLNWLPGSPSAE

SEQ ID NO: 104009 - protein, 16 aa, Homo Sapiens
PFRYLNWLPGSPSAEP

SEQ ID NO: 104010 - protein, 16 aa, Homo Sapiens
FRYLNWLPGSPSAEPG

SEQ ID NO: 104011 - protein, 16 aa, Homo Sapiens
RYLNWLPGSPSAEPGK

SEQ ID NO: 104012 - protein, 16 aa, Homo Sapiens
YLNWLPGSPSAEPGKS

SEQ ID NO: 104013 - protein, 16 aa, Homo Sapiens
LNWLPGSPSAEPGKSC

SEQ ID NO: 104014 - protein, 16 aa, Homo Sapiens
NWLPGSPSAEPGKSCV

SEQ ID NO: 104015 - protein, 16 aa, Homo Sapiens
WLPGSPSAEPGKSCVS

SEQ ID NO: 104016 - protein, 16 aa, Homo Sapiens
LPGSPSAEPGKSCVSL

SEQ ID NO: 104017 - protein, 16 aa, Homo Sapiens
PGSPSAEPGKSCVSLN

SEQ ID NO: 104018 - protein, 16 aa, Homo Sapiens
GSPSAEPGKSCVSLNP

SEQ ID NO: 104019 - protein, 16 aa, Homo Sapiens
SPSAEPGKSCVSLNPG

SEQ ID NO: 104020 - protein, 16 aa, Homo Sapiens
PSAEPGKSCVSLNPGK

SEQ ID NO: 104021 - protein, 16 aa, Homo Sapiens
SAEPGKSCVSLNPGKN

SEQ ID NO: 104022 - protein, 16 aa, Homo Sapiens
AEPGKSCVSLNPGKNA

SEQ ID NO: 104023 - protein, 16 aa, Homo Sapiens
EPGKSCVSLNPGKNAK

SEQ ID NO: 104024 - protein, 16 aa, Homo Sapiens
PGKSCVSLNPGKNAKW

SEQ ID NO: 104025 - protein, 16 aa, Homo Sapiens
GKSCVSLNPGKNAKWE

SEQ ID NO: 104026 - protein, 16 aa, Homo Sapiens
KSCVSLNPGKNAKWEN

SEQ ID NO: 104027 - protein, 16 aa, Homo Sapiens
SCVSLNPGKNAKWENL

SEQ ID NO: 104028 - protein, 16 aa, Homo Sapiens
CVSLNPGKNAKWENLE

SEQ ID NO: 104029 - protein, 16 aa, Homo Sapiens
VSLNPGKNAKWENLEC

SEQ ID NO: 104030 - protein, 16 aa, Homo Sapiens
SLNPGKNAKWENLECV

SEQ ID NO: 104031 - protein, 16 aa, Homo Sapiens
LNPGKNAKWENLECVQ

SEQ ID NO: 104032 - protein, 16 aa, Homo Sapiens
NPGKNAKWENLECVQK

SEQ ID NO: 104033 - protein, 16 aa, Homo Sapiens
PGKNAKWENLECVQKL

SEQ ID NO: 104034 - protein, 16 aa, Homo Sapiens
GKNAKWENLECVQKLG

SEQ ID NO: 104035 - protein, 16 aa, Homo Sapiens
KNAKWENLECVQKLGY

SEQ ID NO: 104036 - protein, 16 aa, Homo Sapiens
NAKWENLECVQKLGYI

SEQ ID NO: 104037 - protein, 16 aa, Homo Sapiens
AKWENLECVQKLGYIC

SEQ ID NO: 104038 - protein, 16 aa, Homo Sapiens
KWENLECVQKLGYICK

SEQ ID NO: 104039 - protein, 16 aa, Homo Sapiens
WENLECVQKLGYICKK

SEQ ID NO: 104040 - protein, 16 aa, Homo Sapiens
ENLECVQKLGYICKKG

SEQ ID NO: 104041 - protein, 16 aa, Homo Sapiens
NLECVQKLGYICKKGN

SEQ ID NO: 104042 - protein, 16 aa, Homo Sapiens
LECVQKLGYICKKGNT

SEQ ID NO: 104043 - protein, 16 aa, Homo Sapiens
ECVQKLGYICKKGNTT

SEQ ID NO: 104044 - protein, 16 aa, Homo Sapiens
CVQKLGYICKKGNTTL

SEQ ID NO: 104045 - protein, 16 aa, Homo Sapiens
VQKLGYICKKGNTTLN

SEQ ID NO: 104046 - protein, 16 aa, Homo Sapiens
QKLGYICKKGNTTLNS

SEQ ID NO: 104047 - protein, 16 aa, Homo Sapiens
KLGYICKKGNTTLNSF

SEQ ID NO: 104048 - protein, 16 aa, Homo Sapiens
LGYICKKGNTTLNSFV

SEQ ID NO: 104049 - protein, 16 aa, Homo Sapiens
GYICKKGNTTLNSFVI

SEQ ID NO: 104050 - protein, 16 aa, Homo Sapiens
YICKKGNTTLNSFVIP

SEQ ID NO: 104051 - protein, 16 aa, Homo Sapiens
ICKKGNTTLNSFVIPS

SEQ ID NO: 104052 - protein, 16 aa, Homo Sapiens
CKKGNTTLNSFVIPSE

SEQ ID NO: 104053 - protein, 16 aa, Homo Sapiens
KKGNTTLNSFVIPSES

SEQ ID NO: 104054 - protein, 16 aa, Homo Sapiens
KGNTTLNSFVIPSESD

SEQ ID NO: 104055 - protein, 16 aa, Homo Sapiens
GNTTLNSFVIPSESDV

SEQ ID NO: 104056 - protein, 16 aa, Homo Sapiens
NTTLNSFVIPSESDVP

SEQ ID NO: 104057 - protein, 16 aa, Homo Sapiens
TTLNSFVIPSESDVPT

SEQ ID NO: 104058 - protein, 16 aa, Homo Sapiens
TLNSFVIPSESDVPTH

SEQ ID NO: 104059 - protein, 16 aa, Homo Sapiens
LNSFVIPSESDVPTHC

SEQ ID NO: 104060 - protein, 16 aa, Homo Sapiens
NSFVIPSESDVPTHCP

SEQ ID NO: 104061 - protein, 16 aa, Homo Sapiens
SFVIPSESDVPTHCPS

SEQ ID NO: 104062 - protein, 16 aa, Homo Sapiens
FVIPSESDVPTHCPSQ

SEQ ID NO: 104063 - protein, 16 aa, Homo Sapiens
VIPSESDVPTHCPSQW

SEQ ID NO: 104064 - protein, 16 aa, Homo Sapiens
IPSESDVPTHCPSQWW

SEQ ID NO: 104065 - protein, 16 aa, Homo Sapiens
PSESDVPTHCPSQWWP

SEQ ID NO: 104066 - protein, 16 aa, Homo Sapiens
SESDVPTHCPSQWWPY

SEQ ID NO: 104067 - protein, 16 aa, Homo Sapiens
ESDVPTHCPSQWWPYA

SEQ ID NO: 104068 - protein, 16 aa, Homo Sapiens
SDVPTHCPSQWWPYAG

SEQ ID NO: 104069 - protein, 16 aa, Homo Sapiens
DVPTHCPSQWWPYAGH

SEQ ID NO: 104070 - protein, 16 aa, Homo Sapiens
VPTHCPSQWWPYAGHC

SEQ ID NO: 104071 - protein, 16 aa, Homo Sapiens
PTHCPSQWWPYAGHCY

SEQ ID NO: 104072 - protein, 16 aa, Homo Sapiens
THCPSQWWPYAGHCYK

SEQ ID NO: 104073 - protein, 16 aa, Homo Sapiens
HCPSQWWPYAGHCYKI

SEQ ID NO: 104074 - protein, 16 aa, Homo Sapiens
CPSQWWPYAGHCYKIH

SEQ ID NO: 104075 - protein, 16 aa, Homo Sapiens
PSQWWPYAGHCYKIHR

SEQ ID NO: 104076 - protein, 16 aa, Homo Sapiens
SQWWPYAGHCYKIHRD

SEQ ID NO: 104077 - protein, 16 aa, Homo Sapiens
QWWPYAGHCYKIHRDE

SEQ ID NO: 104078 - protein, 16 aa, Homo Sapiens
WWPYAGHCYKIHRDEK

SEQ ID NO: 104079 - protein, 16 aa, Homo Sapiens
WPYAGHCYKIHRDEKK

SEQ ID NO: 104080 - protein, 16 aa, Homo Sapiens
PYAGHCYKIHRDEKKI

SEQ ID NO: 104081 - protein, 16 aa, Homo Sapiens
YAGHCYKIHRDEKKIQ

SEQ ID NO: 104082 - protein, 16 aa, Homo Sapiens
AGHCYKIHRDEKKIQR

SEQ ID NO: 104083 - protein, 16 aa, Homo Sapiens
GHCYKIHRDEKKIQRD

SEQ ID NO: 104084 - protein, 16 aa, Homo Sapiens
HCYKIHRDEKKIQRDA

SEQ ID NO: 104085 - protein, 16 aa, Homo Sapiens
CYKIHRDEKKIQRDAL

SEQ ID NO: 104086 - protein, 16 aa, Homo Sapiens
YKIHRDEKKIQRDALT

SEQ ID NO: 104087 - protein, 16 aa, Homo Sapiens
KIHRDEKKIQRDALTT

SEQ ID NO: 104088 - protein, 16 aa, Homo Sapiens
IHRDEKKIQRDALTTC

SEQ ID NO: 104089 - protein, 16 aa, Homo Sapiens
HRDEKKIQRDALTTCR

SEQ ID NO: 104090 - protein, 16 aa, Homo Sapiens
RDEKKIQRDALTTCRK

SEQ ID NO: 104091 - protein, 16 aa, Homo Sapiens
DEKKIQRDALTTCRKE

SEQ ID NO: 104092 - protein, 16 aa, Homo Sapiens
EKKIQRDALTTCRKEG

SEQ ID NO: 104093 - protein, 16 aa, Homo Sapiens
KKIQRDALTTCRKEGG

SEQ ID NO: 104094 - protein, 16 aa, Homo Sapiens
KIQRDALTTCRKEGGD

SEQ ID NO: 104095 - protein, 16 aa, Homo Sapiens
IQRDALTTCRKEGGDL

SEQ ID NO: 104096 - protein, 16 aa, Homo Sapiens
QRDALTTCRKEGGDLA

SEQ ID NO: 104097 - protein, 16 aa, Homo Sapiens
RDALTTCRKEGGDLAS

SEQ ID NO: 104098 - protein, 16 aa, Homo Sapiens
DALTTCRKEGGDLASI

SEQ ID NO: 104099 - protein, 16 aa, Homo Sapiens
ALTTCRKEGGDLASIH

SEQ ID NO: 104100 - protein, 16 aa, Homo Sapiens
LTTCRKEGGDLASIHT

SEQ ID NO: 104101 - protein, 16 aa, Homo Sapiens
TTCRKEGGDLASIHTI

SEQ ID NO: 104102 - protein, 16 aa, Homo Sapiens
TCRKEGGDLASIHTIE

SEQ ID NO: 104103 - protein, 16 aa, Homo Sapiens
CRKEGGDLASIHTIEE

SEQ ID NO: 104104 - protein, 16 aa, Homo Sapiens
RKEGGDLASIHTIEEF

SEQ ID NO: 104105 - protein, 16 aa, Homo Sapiens
KEGGDLASIHTIEEFD

SEQ ID NO: 104106 - protein, 16 aa, Homo Sapiens
EGGDLASIHTIEEFDF

SEQ ID NO: 104107 - protein, 16 aa, Homo Sapiens
GGDLASIHTIEEFDFI

SEQ ID NO: 104108 - protein, 16 aa, Homo Sapiens
GDLASIHTIEEFDFII

SEQ ID NO: 104109 - protein, 16 aa, Homo Sapiens
DLASIHTIEEFDFIIS

SEQ ID NO: 104110 - protein, 16 aa, Homo Sapiens
LASIHTIEEFDFIISQ

SEQ ID NO: 104111 - protein, 16 aa, Homo Sapiens
ASIHTIEEFDFIISQL

SEQ ID NO: 104112 - protein, 16 aa, Homo Sapiens
SIHTIEEFDFIISQLG

SEQ ID NO: 104113 - protein, 16 aa, Homo Sapiens
IHTIEEFDFIISQLGY

SEQ ID NO: 104114 - protein, 16 aa, Homo Sapiens
HTIEEFDFIISQLGYE

SEQ ID NO: 104115 - protein, 16 aa, Homo Sapiens
TIEEFDFIISQLGYEP

SEQ ID NO: 104116 - protein, 16 aa, Homo Sapiens
IEEFDFIISQLGYEPN

SEQ ID NO: 104117 - protein, 16 aa, Homo Sapiens
EEFDFIISQLGYEPND

SEQ ID NO: 104118 - protein, 16 aa, Homo Sapiens
EFDFIISQLGYEPNDE

SEQ ID NO: 104119 - protein, 16 aa, Homo Sapiens
FDFIISQLGYEPNDEL

SEQ ID NO: 104120 - protein, 16 aa, Homo Sapiens
DFIISQLGYEPNDELW

SEQ ID NO: 104121 - protein, 16 aa, Homo Sapiens
FIISQLGYEPNDELWI

SEQ ID NO: 104122 - protein, 16 aa, Homo Sapiens
IISQLGYEPNDELWIG

SEQ ID NO: 104123 - protein, 16 aa, Homo Sapiens
ISQLGYEPNDELWIGL

SEQ ID NO: 104124 - protein, 16 aa, Homo Sapiens
SQLGYEPNDELWIGLN

SEQ ID NO: 104125 - protein, 16 aa, Homo Sapiens
QLGYEPNDELWIGLND

SEQ ID NO: 104126 - protein, 16 aa, Homo Sapiens
LGYEPNDELWIGLNDI

SEQ ID NO: 104127 - protein, 16 aa, Homo Sapiens
GYEPNDELWIGLNDIK

SEQ ID NO: 104128 - protein, 16 aa, Homo Sapiens
YEPNDELWIGLNDIKI

SEQ ID NO: 104129 - protein, 16 aa, Homo Sapiens
EPNDELWIGLNDIKIQ

SEQ ID NO: 104130 - protein, 16 aa, Homo Sapiens
PNDELWIGLNDIKIQM

SEQ ID NO: 104131 - protein, 16 aa, Homo Sapiens
NDELWIGLNDIKIQMY

SEQ ID NO: 104132 - protein, 16 aa, Homo Sapiens
DELWIGLNDIKIQMYF

SEQ ID NO: 104133 - protein, 16 aa, Homo Sapiens
ELWIGLNDIKIQMYFE

SEQ ID NO: 104134 - protein, 16 aa, Homo Sapiens
LWIGLNDIKIQMYFEW

SEQ ID NO: 104135 - protein, 16 aa, Homo Sapiens
WIGLNDIKIQMYFEWS

SEQ ID NO: 104136 - protein, 16 aa, Homo Sapiens
IGLNDIKIQMYFEWSD

SEQ ID NO: 104137 - protein, 16 aa, Homo Sapiens
GLNDIKIQMYFEWSDG

SEQ ID NO: 104138 - protein, 16 aa, Homo Sapiens
LNDIKIQMYFEWSDGT

SEQ ID NO: 104139 - protein, 16 aa, Homo Sapiens
NDIKIQMYFEWSDGTP

SEQ ID NO: 104140 - protein, 16 aa, Homo Sapiens
DIKIQMYFEWSDGTPV

SEQ ID NO: 104141 - protein, 16 aa, Homo Sapiens
IKIQMYFEWSDGTPVT

SEQ ID NO: 104142 - protein, 16 aa, Homo Sapiens
KIQMYFEWSDGTPVTF

SEQ ID NO: 104143 - protein, 16 aa, Homo Sapiens
IQMYFEWSDGTPVTFT

SEQ ID NO: 104144 - protein, 16 aa, Homo Sapiens
QMYFEWSDGTPVTFTK

SEQ ID NO: 104145 - protein, 16 aa, Homo Sapiens
MYFEWSDGTPVTFTKW

SEQ ID NO: 104146 - protein, 16 aa, Homo Sapiens
YFEWSDGTPVTFTKWL

SEQ ID NO: 104147 - protein, 16 aa, Homo Sapiens
FEWSDGTPVTFTKWLR

SEQ ID NO: 104148 - protein, 16 aa, Homo Sapiens
EWSDGTPVTFTKWLRG

SEQ ID NO: 104149 - protein, 16 aa, Homo Sapiens
WSDGTPVTFTKWLRGE

SEQ ID NO: 104150 - protein, 16 aa, Homo Sapiens
SDGTPVTFTKWLRGEP

SEQ ID NO: 104151 - protein, 16 aa, Homo Sapiens
DGTPVTFTKWLRGEPS

SEQ ID NO: 104152 - protein, 16 aa, Homo Sapiens
GTPVTFTKWLRGEPSH

SEQ ID NO: 104153 - protein, 16 aa, Homo Sapiens
TPVTFTKWLRGEPSHE

SEQ ID NO: 104154 - protein, 16 aa, Homo Sapiens
PVTFTKWLRGEPSHEN

SEQ ID NO: 104155 - protein, 16 aa, Homo Sapiens
VTFTKWLRGEPSHENN

SEQ ID NO: 104156 - protein, 16 aa, Homo Sapiens
TFTKWLRGEPSHENNR

SEQ ID NO: 104157 - protein, 16 aa, Homo Sapiens
FTKWLRGEPSHENNRQ

SEQ ID NO: 104158 - protein, 16 aa, Homo Sapiens
TKWLRGEPSHENNRQE

SEQ ID NO: 104159 - protein, 16 aa, Homo Sapiens
KWLRGEPSHENNRQED

SEQ ID NO: 104160 - protein, 16 aa, Homo Sapiens
WLRGEPSHENNRQEDC

SEQ ID NO: 104161 - protein, 16 aa, Homo Sapiens
LRGEPSHENNRQEDCV

SEQ ID NO: 104162 - protein, 16 aa, Homo Sapiens
RGEPSHENNRQEDCVV

SEQ ID NO: 104163 - protein, 16 aa, Homo Sapiens
GEPSHENNRQEDCVVM

SEQ ID NO: 104164 - protein, 16 aa, Homo Sapiens
EPSHENNRQEDCVVMK

SEQ ID NO: 104165 - protein, 16 aa, Homo Sapiens
PSHENNRQEDCVVMKG

SEQ ID NO: 104166 - protein, 16 aa, Homo Sapiens
SHENNRQEDCVVMKGK

SEQ ID NO: 104167 - protein, 16 aa, Homo Sapiens
HENNRQEDCVVMKGKD

SEQ ID NO: 104168 - protein, 16 aa, Homo Sapiens
ENNRQEDCVVMKGKDG

SEQ ID NO: 104169 - protein, 16 aa, Homo Sapiens
NNRQEDCVVMKGKDGY

SEQ ID NO: 104170 - protein, 16 aa, Homo Sapiens
NRQEDCVVMKGKDGYW

SEQ ID NO: 104171 - protein, 16 aa, Homo Sapiens
RQEDCVVMKGKDGYWA

SEQ ID NO: 104172 - protein, 16 aa, Homo Sapiens
QEDCVVMKGKDGYWAD

SEQ ID NO: 104173 - protein, 16 aa, Homo Sapiens
EDCVVMKGKDGYWADR

SEQ ID NO: 104174 - protein, 16 aa, Homo Sapiens
DCVVMKGKDGYWADRG

SEQ ID NO: 104175 - protein, 16 aa, Homo Sapiens
CVVMKGKDGYWADRGC

SEQ ID NO: 104176 - protein, 16 aa, Homo Sapiens
VVMKGKDGYWADRGCE

SEQ ID NO: 104177 - protein, 16 aa, Homo Sapiens
VMKGKDGYWADRGCEW

SEQ ID NO: 104178 - protein, 16 aa, Homo Sapiens
MKGKDGYWADRGCEWP

SEQ ID NO: 104179 - protein, 16 aa, Homo Sapiens
KGKDGYWADRGCEWPL

SEQ ID NO: 104180 - protein, 16 aa, Homo Sapiens
GKDGYWADRGCEWPLG

SEQ ID NO: 104181 - protein, 16 aa, Homo Sapiens
KDGYWADRGCEWPLGY

SEQ ID NO: 104182 - protein, 16 aa, Homo Sapiens
DGYWADRGCEWPLGYI

SEQ ID NO: 104183 - protein, 16 aa, Homo Sapiens
GYWADRGCEWPLGYIC

SEQ ID NO: 104184 - protein, 16 aa, Homo Sapiens
YWADRGCEWPLGYICK

SEQ ID NO: 104185 - protein, 16 aa, Homo Sapiens
WADRGCEWPLGYICKM

SEQ ID NO: 104186 - protein, 16 aa, Homo Sapiens
ADRGCEWPLGYICKMK

SEQ ID NO: 104187 - protein, 16 aa, Homo Sapiens
DRGCEWPLGYICKMKS

SEQ ID NO: 104188 - protein, 16 aa, Homo Sapiens
RGCEWPLGYICKMKSR

SEQ ID NO: 104189 - protein, 16 aa, Homo Sapiens
GCEWPLGYICKMKSRS

SEQ ID NO: 104190 - protein, 16 aa, Homo Sapiens
CEWPLGYICKMKSRSQ

SEQ ID NO: 104191 - protein, 16 aa, Homo Sapiens
EWPLGYICKMKSRSQG

SEQ ID NO: 104192 - protein, 16 aa, Homo Sapiens
WPLGYICKMKSRSQGP

SEQ ID NO: 104193 - protein, 16 aa, Homo Sapiens
PLGYICKMKSRSQGPE

SEQ ID NO: 104194 - protein, 16 aa, Homo Sapiens
LGYICKMKSRSQGPEI

SEQ ID NO: 104195 - protein, 16 aa, Homo Sapiens
GYICKMKSRSQGPEIV

SEQ ID NO: 104196 - protein, 16 aa, Homo Sapiens
YICKMKSRSQGPEIVE

SEQ ID NO: 104197 - protein, 16 aa, Homo Sapiens
ICKMKSRSQGPEIVEV

SEQ ID NO: 104198 - protein, 16 aa, Homo Sapiens
CKMKSRSQGPEIVEVE

SEQ ID NO: 104199 - protein, 16 aa, Homo Sapiens
KMKSRSQGPEIVEVEK

SEQ ID NO: 104200 - protein, 16 aa, Homo Sapiens
MKSRSQGPEIVEVEKG

SEQ ID NO: 104201 - protein, 16 aa, Homo Sapiens
KSRSQGPEIVEVEKGC

SEQ ID NO: 104202 - protein, 16 aa, Homo Sapiens
SRSQGPEIVEVEKGCR

SEQ ID NO: 104203 - protein, 16 aa, Homo Sapiens
RSQGPEIVEVEKGCRK

SEQ ID NO: 104204 - protein, 16 aa, Homo Sapiens
SQGPEIVEVEKGCRKG

SEQ ID NO: 104205 - protein, 16 aa, Homo Sapiens
QGPEIVEVEKGCRKGW

SEQ ID NO: 104206 - protein, 16 aa, Homo Sapiens
GPEIVEVEKGCRKGWK

SEQ ID NO: 104207 - protein, 16 aa, Homo Sapiens
PEIVEVEKGCRKGWKK

SEQ ID NO: 104208 - protein, 16 aa, Homo Sapiens
EIVEVEKGCRKGWKKH

SEQ ID NO: 104209 - protein, 16 aa, Homo Sapiens
IVEVEKGCRKGWKKHH

SEQ ID NO: 104210 - protein, 16 aa, Homo Sapiens
VEVEKGCRKGWKKHHF

SEQ ID NO: 104211 - protein, 16 aa, Homo Sapiens
EVEKGCRKGWKKHHFY

SEQ ID NO: 104212 - protein, 16 aa, Homo Sapiens
VEKGCRKGWKKHHFYC

SEQ ID NO: 104213 - protein, 16 aa, Homo Sapiens
EKGCRKGWKKHHFYCY

SEQ ID NO: 104214 - protein, 16 aa, Homo Sapiens
KGCRKGWKKHHFYCYM

SEQ ID NO: 104215 - protein, 16 aa, Homo Sapiens
GCRKGWKKHHFYCYMI

SEQ ID NO: 104216 - protein, 16 aa, Homo Sapiens
CRKGWKKHHFYCYMIG

SEQ ID NO: 104217 - protein, 16 aa, Homo Sapiens
RKGWKKHHFYCYMIGH

SEQ ID NO: 104218 - protein, 16 aa, Homo Sapiens
KGWKKHHFYCYMIGHT

SEQ ID NO: 104219 - protein, 16 aa, Homo Sapiens
GWKKHHFYCYMIGHTL

SEQ ID NO: 104220 - protein, 16 aa, Homo Sapiens
WKKHHFYCYMIGHTLS

SEQ ID NO: 104221 - protein, 16 aa, Homo Sapiens
KKHHFYCYMIGHTLST

SEQ ID NO: 104222 - protein, 16 aa, Homo Sapiens
KHHFYCYMIGHTLSTF

SEQ ID NO: 104223 - protein, 16 aa, Homo Sapiens
HHFYCYMIGHTLSTFA

SEQ ID NO: 104224 - protein, 16 aa, Homo Sapiens
HFYCYMIGHTLSTFAE

SEQ ID NO: 104225 - protein, 16 aa, Homo Sapiens
FYCYMIGHTLSTFAEA

SEQ ID NO: 104226 - protein, 16 aa, Homo Sapiens
YCYMIGHTLSTFAEAN

SEQ ID NO: 104227 - protein, 16 aa, Homo Sapiens
CYMIGHTLSTFAEANQ

SEQ ID NO: 104228 - protein, 16 aa, Homo Sapiens
YMIGHTLSTFAEANQT

SEQ ID NO: 104229 - protein, 16 aa, Homo Sapiens
MIGHTLSTFAEANQTC

SEQ ID NO: 104230 - protein, 16 aa, Homo Sapiens
IGHTLSTFAEANQTCN

SEQ ID NO: 104231 - protein, 16 aa, Homo Sapiens
GHTLSTFAEANQTCNN

SEQ ID NO: 104232 - protein, 16 aa, Homo Sapiens
HTLSTFAEANQTCNNE

SEQ ID NO: 104233 - protein, 16 aa, Homo Sapiens
TLSTFAEANQTCNNEN

SEQ ID NO: 104234 - protein, 16 aa, Homo Sapiens
LSTFAEANQTCNNENA

SEQ ID NO: 104235 - protein, 16 aa, Homo Sapiens
STFAEANQTCNNENAY

SEQ ID NO: 104236 - protein, 16 aa, Homo Sapiens
TFAEANQTCNNENAYL

SEQ ID NO: 104237 - protein, 16 aa, Homo Sapiens
FAEANQTCNNENAYLT

SEQ ID NO: 104238 - protein, 16 aa, Homo Sapiens
AEANQTCNNENAYLTT

SEQ ID NO: 104239 - protein, 16 aa, Homo Sapiens
EANQTCNNENAYLTTI

SEQ ID NO: 104240 - protein, 16 aa, Homo Sapiens
ANQTCNNENAYLTTIE

SEQ ID NO: 104241 - protein, 16 aa, Homo Sapiens
NQTCNNENAYLTTIED

SEQ ID NO: 104242 - protein, 16 aa, Homo Sapiens
QTCNNENAYLTTIEDR

SEQ ID NO: 104243 - protein, 16 aa, Homo Sapiens
TCNNENAYLTTIEDRY

SEQ ID NO: 104244 - protein, 16 aa, Homo Sapiens
CNNENAYLTTIEDRYE

SEQ ID NO: 104245 - protein, 16 aa, Homo Sapiens
NNENAYLTTIEDRYEQ

SEQ ID NO: 104246 - protein, 16 aa, Homo Sapiens
NENAYLTTIEDRYEQA

SEQ ID NO: 104247 - protein, 16 aa, Homo Sapiens
ENAYLTTIEDRYEQAF

SEQ ID NO: 104248 - protein, 16 aa, Homo Sapiens
NAYLTTIEDRYEQAFL

SEQ ID NO: 104249 - protein, 16 aa, Homo Sapiens
AYLTTIEDRYEQAFLT

SEQ ID NO: 104250 - protein, 16 aa, Homo Sapiens
YLTTIEDRYEQAFLTS

SEQ ID NO: 104251 - protein, 16 aa, Homo Sapiens
LTTIEDRYEQAFLTSF

SEQ ID NO: 104252 - protein, 16 aa, Homo Sapiens
TTIEDRYEQAFLTSFV

SEQ ID NO: 104253 - protein, 16 aa, Homo Sapiens
TIEDRYEQAFLTSFVG

SEQ ID NO: 104254 - protein, 16 aa, Homo Sapiens
IEDRYEQAFLTSFVGL

SEQ ID NO: 104255 - protein, 16 aa, Homo Sapiens
EDRYEQAFLTSFVGLR

SEQ ID NO: 104256 - protein, 16 aa, Homo Sapiens
DRYEQAFLTSFVGLRP

SEQ ID NO: 104257 - protein, 16 aa, Homo Sapiens
RYEQAFLTSFVGLRPE

SEQ ID NO: 104258 - protein, 16 aa, Homo Sapiens
YEQAFLTSFVGLRPEK

SEQ ID NO: 104259 - protein, 16 aa, Homo Sapiens
EQAFLTSFVGLRPEKY

SEQ ID NO: 104260 - protein, 16 aa, Homo Sapiens
QAFLTSFVGLRPEKYF

SEQ ID NO: 104261 - protein, 16 aa, Homo Sapiens
AFLTSFVGLRPEKYFW

SEQ ID NO: 104262 - protein, 16 aa, Homo Sapiens
FLTSFVGLRPEKYFWT

SEQ ID NO: 104263 - protein, 16 aa, Homo Sapiens
LTSFVGLRPEKYFWTG

SEQ ID NO: 104264 - protein, 16 aa, Homo Sapiens
TSFVGLRPEKYFWTGL

SEQ ID NO: 104265 - protein, 16 aa, Homo Sapiens
SFVGLRPEKYFWTGLS

SEQ ID NO: 104266 - protein, 16 aa, Homo Sapiens
FVGLRPEKYFWTGLSD

SEQ ID NO: 104267 - protein, 16 aa, Homo Sapiens
VGLRPEKYFWTGLSDI

SEQ ID NO: 104268 - protein, 16 aa, Homo Sapiens
GLRPEKYFWTGLSDIQ

SEQ ID NO: 104269 - protein, 16 aa, Homo Sapiens
LRPEKYFWTGLSDIQT

SEQ ID NO: 104270 - protein, 16 aa, Homo Sapiens
RPEKYFWTGLSDIQTK

SEQ ID NO: 104271 - protein, 16 aa, Homo Sapiens
PEKYFWTGLSDIQTKG

SEQ ID NO: 104272 - protein, 16 aa, Homo Sapiens
EKYFWTGLSDIQTKGT

SEQ ID NO: 104273 - protein, 16 aa, Homo Sapiens
KYFWTGLSDIQTKGTF

SEQ ID NO: 104274 - protein, 16 aa, Homo Sapiens
YFWTGLSDIQTKGTFQ

SEQ ID NO: 104275 - protein, 16 aa, Homo Sapiens
FWTGLSDIQTKGTFQW

SEQ ID NO: 104276 - protein, 16 aa, Homo Sapiens
WTGLSDIQTKGTFQWT

SEQ ID NO: 104277 - protein, 16 aa, Homo Sapiens
TGLSDIQTKGTFQWTI

SEQ ID NO: 104278 - protein, 16 aa, Homo Sapiens
GLSDIQTKGTFQWTIE

SEQ ID NO: 104279 - protein, 16 aa, Homo Sapiens
LSDIQTKGTFQWTIEE

SEQ ID NO: 104280 - protein, 16 aa, Homo Sapiens
SDIQTKGTFQWTIEEE

SEQ ID NO: 104281 - protein, 16 aa, Homo Sapiens
DIQTKGTFQWTIEEEV

SEQ ID NO: 104282 - protein, 16 aa, Homo Sapiens
IQTKGTFQWTIEEEVR

SEQ ID NO: 104283 - protein, 16 aa, Homo Sapiens
QTKGTFQWTIEEEVRF

SEQ ID NO: 104284 - protein, 16 aa, Homo Sapiens
TKGTFQWTIEEEVRFT

SEQ ID NO: 104285 - protein, 16 aa, Homo Sapiens
KGTFQWTIEEEVRFTH

SEQ ID NO: 104286 - protein, 16 aa, Homo Sapiens
GTFQWTIEEEVRFTHW

SEQ ID NO: 104287 - protein, 16 aa, Homo Sapiens
TFQWTIEEEVRFTHWN

SEQ ID NO: 104288 - protein, 16 aa, Homo Sapiens
FQWTIEEEVRFTHWNS

SEQ ID NO: 104289 - protein, 16 aa, Homo Sapiens
QWTIEEEVRFTHWNSD

SEQ ID NO: 104290 - protein, 16 aa, Homo Sapiens
WTIEEEVRFTHWNSDM

SEQ ID NO: 104291 - protein, 16 aa, Homo Sapiens
TIEEEVRFTHWNSDMP

SEQ ID NO: 104292 - protein, 16 aa, Homo Sapiens
IEEEVRFTHWNSDMPG

SEQ ID NO: 104293 - protein, 16 aa, Homo Sapiens
EEEVRFTHWNSDMPGR

SEQ ID NO: 104294 - protein, 16 aa, Homo Sapiens
EEVRFTHWNSDMPGRK

SEQ ID NO: 104295 - protein, 16 aa, Homo Sapiens
EVRFTHWNSDMPGRKP

SEQ ID NO: 104296 - protein, 16 aa, Homo Sapiens
VRFTHWNSDMPGRKPG

SEQ ID NO: 104297 - protein, 16 aa, Homo Sapiens
RFTHWNSDMPGRKPGC

SEQ ID NO: 104298 - protein, 16 aa, Homo Sapiens
FTHWNSDMPGRKPGCV

SEQ ID NO: 104299 - protein, 16 aa, Homo Sapiens
THWNSDMPGRKPGCVA

SEQ ID NO: 104300 - protein, 16 aa, Homo Sapiens
HWNSDMPGRKPGCVAM

SEQ ID NO: 104301 - protein, 16 aa, Homo Sapiens
WNSDMPGRKPGCVAMR

SEQ ID NO: 104302 - protein, 16 aa, Homo Sapiens
NSDMPGRKPGCVAMRT

SEQ ID NO: 104303 - protein, 16 aa, Homo Sapiens
SDMPGRKPGCVAMRTG

SEQ ID NO: 104304 - protein, 16 aa, Homo Sapiens
DMPGRKPGCVAMRTGI

SEQ ID NO: 104305 - protein, 16 aa, Homo Sapiens
MPGRKPGCVAMRTGIA

SEQ ID NO: 104306 - protein, 16 aa, Homo Sapiens
PGRKPGCVAMRTGIAG

SEQ ID NO: 104307 - protein, 16 aa, Homo Sapiens
GRKPGCVAMRTGIAGG

SEQ ID NO: 104308 - protein, 16 aa, Homo Sapiens
RKPGCVAMRTGIAGGL

SEQ ID NO: 104309 - protein, 16 aa, Homo Sapiens
KPGCVAMRTGIAGGLW

SEQ ID NO: 104310 - protein, 16 aa, Homo Sapiens
PGCVAMRTGIAGGLWD

SEQ ID NO: 104311 - protein, 16 aa, Homo Sapiens
GCVAMRTGIAGGLWDV

SEQ ID NO: 104312 - protein, 16 aa, Homo Sapiens
CVAMRTGIAGGLWDVL

SEQ ID NO: 104313 - protein, 16 aa, Homo Sapiens
VAMRTGIAGGLWDVLK

SEQ ID NO: 104314 - protein, 16 aa, Homo Sapiens
AMRTGIAGGLWDVLKC

SEQ ID NO: 104315 - protein, 16 aa, Homo Sapiens
MRTGIAGGLWDVLKCD

SEQ ID NO: 104316 - protein, 16 aa, Homo Sapiens
RTGIAGGLWDVLKCDE

SEQ ID NO: 104317 - protein, 16 aa, Homo Sapiens
TGIAGGLWDVLKCDEK

SEQ ID NO: 104318 - protein, 16 aa, Homo Sapiens
GIAGGLWDVLKCDEKA

SEQ ID NO: 104319 - protein, 16 aa, Homo Sapiens
IAGGLWDVLKCDEKAK

SEQ ID NO: 104320 - protein, 16 aa, Homo Sapiens
AGGLWDVLKCDEKAKF

SEQ ID NO: 104321 - protein, 16 aa, Homo Sapiens
GGLWDVLKCDEKAKFV

SEQ ID NO: 104322 - protein, 16 aa, Homo Sapiens
GLWDVLKCDEKAKFVC

SEQ ID NO: 104323 - protein, 16 aa, Homo Sapiens
LWDVLKCDEKAKFVCK

SEQ ID NO: 104324 - protein, 16 aa, Homo Sapiens
WDVLKCDEKAKFVCKH

SEQ ID NO: 104325 - protein, 16 aa, Homo Sapiens
DVLKCDEKAKFVCKHW

SEQ ID NO: 104326 - protein, 16 aa, Homo Sapiens
VLKCDEKAKFVCKHWA

SEQ ID NO: 104327 - protein, 16 aa, Homo Sapiens
LKCDEKAKFVCKHWAE

SEQ ID NO: 104328 - protein, 16 aa, Homo Sapiens
KCDEKAKFVCKHWAEG

SEQ ID NO: 104329 - protein, 16 aa, Homo Sapiens
CDEKAKFVCKHWAEGV

SEQ ID NO: 104330 - protein, 16 aa, Homo Sapiens
DEKAKFVCKHWAEGVT

SEQ ID NO: 104331 - protein, 16 aa, Homo Sapiens
EKAKFVCKHWAEGVTH

SEQ ID NO: 104332 - protein, 16 aa, Homo Sapiens
KAKFVCKHWAEGVTHP

SEQ ID NO: 104333 - protein, 16 aa, Homo Sapiens
AKFVCKHWAEGVTHPP

SEQ ID NO: 104334 - protein, 16 aa, Homo Sapiens
KFVCKHWAEGVTHPPK

SEQ ID NO: 104335 - protein, 16 aa, Homo Sapiens
FVCKHWAEGVTHPPKP

SEQ ID NO: 104336 - protein, 16 aa, Homo Sapiens
VCKHWAEGVTHPPKPT

SEQ ID NO: 104337 - protein, 16 aa, Homo Sapiens
CKHWAEGVTHPPKPTT

SEQ ID NO: 104338 - protein, 16 aa, Homo Sapiens
KHWAEGVTHPPKPTTT

SEQ ID NO: 104339 - protein, 16 aa, Homo Sapiens
HWAEGVTHPPKPTTTP

SEQ ID NO: 104340 - protein, 16 aa, Homo Sapiens
WAEGVTHPPKPTTTPE

SEQ ID NO: 104341 - protein, 16 aa, Homo Sapiens
AEGVTHPPKPTTTPEP

SEQ ID NO: 104342 - protein, 16 aa, Homo Sapiens
EGVTHPPKPTTTPEPK

SEQ ID NO: 104343 - protein, 16 aa, Homo Sapiens
GVTHPPKPTTTPEPKC

SEQ ID NO: 104344 - protein, 16 aa, Homo Sapiens
VTHPPKPTTTPEPKCP

SEQ ID NO: 104345 - protein, 16 aa, Homo Sapiens
THPPKPTTTPEPKCPE

SEQ ID NO: 104346 - protein, 16 aa, Homo Sapiens
HPPKPTTTPEPKCPED

SEQ ID NO: 104347 - protein, 16 aa, Homo Sapiens
PPKPTTTPEPKCPEDW

SEQ ID NO: 104348 - protein, 16 aa, Homo Sapiens
PKPTTTPEPKCPEDWG

SEQ ID NO: 104349 - protein, 16 aa, Homo Sapiens
KPTTTPEPKCPEDWGA

SEQ ID NO: 104350 - protein, 16 aa, Homo Sapiens
PTTTPEPKCPEDWGAS

SEQ ID NO: 104351 - protein, 16 aa, Homo Sapiens
TTTPEPKCPEDWGASS

SEQ ID NO: 104352 - protein, 16 aa, Homo Sapiens
TTPEPKCPEDWGASSR

SEQ ID NO: 104353 - protein, 16 aa, Homo Sapiens
TPEPKCPEDWGASSRT

SEQ ID NO: 104354 - protein, 16 aa, Homo Sapiens
PEPKCPEDWGASSRTS

SEQ ID NO: 104355 - protein, 16 aa, Homo Sapiens
EPKCPEDWGASSRTSL

SEQ ID NO: 104356 - protein, 16 aa, Homo Sapiens
PKCPEDWGASSRTSLC

SEQ ID NO: 104357 - protein, 16 aa, Homo Sapiens
KCPEDWGASSRTSLCF

SEQ ID NO: 104358 - protein, 16 aa, Homo Sapiens
CPEDWGASSRTSLCFK

SEQ ID NO: 104359 - protein, 16 aa, Homo Sapiens
PEDWGASSRTSLCFKL

SEQ ID NO: 104360 - protein, 16 aa, Homo Sapiens
EDWGASSRTSLCFKLY

SEQ ID NO: 104361 - protein, 16 aa, Homo Sapiens
DWGASSRTSLCFKLYA

SEQ ID NO: 104362 - protein, 16 aa, Homo Sapiens
WGASSRTSLCFKLYAK

SEQ ID NO: 104363 - protein, 16 aa, Homo Sapiens
GASSRTSLCFKLYAKG

SEQ ID NO: 104364 - protein, 16 aa, Homo Sapiens
ASSRTSLCFKLYAKGK

SEQ ID NO: 104365 - protein, 16 aa, Homo Sapiens
SSRTSLCFKLYAKGKI

SEQ ID NO: 104366 - protein, 16 aa, Homo Sapiens [sequence omitted]

SEQ ID NO: 104367 - protein, 16 aa, Homo Sapiens
RTSLCFKLYAKGKIEK

SEQ ID NO: 104368 - protein, 16 aa, Homo Sapiens
TSLCFKLYAKGKIEKK

SEQ ID NO: 104369 - protein, 16 aa, Homo Sapiens
SLCFKLYAKGKIEKKT

SEQ ID NO: 104370 - protein, 16 aa, Homo Sapiens
LCFKLYAKGKIEKKTW

SEQ ID NO: 104371 - protein, 16 aa, Homo Sapiens
CFKLYAKGKIEKKTWF

SEQ ID NO: 104372 - protein, 16 aa, Homo Sapiens
FKLYAKGKIEKKTWFE

SEQ ID NO: 104373 - protein, 16 aa, Homo Sapiens
KLYAKGKIEKKTWFES

SEQ ID NO: 104374 - protein, 16 aa, Homo Sapiens
LYAKGKIEKKTWFESR

SEQ ID NO: 104375 - protein, 16 aa, Homo Sapiens
YAKGKIEKKTWFESRD

SEQ ID NO: 104376 - protein, 16 aa, Homo Sapiens
AKGKIEKKTWFESRDF

SEQ ID NO: 104377 - protein, 16 aa, Homo Sapiens
KGKIEKKTWFESRDFC

SEQ ID NO: 104378 - protein, 16 aa, Homo Sapiens
GKIEKKTWFESRDFCR

SEQ ID NO: 104379 - protein, 16 aa, Homo Sapiens
KIEKKTWFESRDFCRA

SEQ ID NO: 104380 - protein, 16 aa, Homo Sapiens
IEKKTWFESRDFCRAL

SEQ ID NO: 104381 - protein, 16 aa, Homo Sapiens
EKKTWFESRDFCRALG

SEQ ID NO: 104382 - protein, 16 aa, Homo Sapiens
KKTWFESRDFCRALGG

SEQ ID NO: 104383 - protein, 16 aa, Homo Sapiens
KTWFESRDFCRALGGD

SEQ ID NO: 104384 - protein, 16 aa, Homo Sapiens
TWFESRDFCRALGGDL

SEQ ID NO: 104385 - protein, 16 aa, Homo Sapiens
WFESRDFCRALGGDLA

SEQ ID NO: 104386 - protein, 16 aa, Homo Sapiens
FESRDFCRALGGDLAS

SEQ ID NO: 104387 - protein, 16 aa, Homo Sapiens
ESRDFCRALGGDLASI

SEQ ID NO: 104388 - protein, 16 aa, Homo Sapiens
SRDFCRALGGDLASIN

SEQ ID NO: 104389 - protein, 16 aa, Homo Sapiens
RDFCRALGGDLASINN

SEQ ID NO: 104390 - protein, 16 aa, Homo Sapiens
DFCRALGGDLASINNK

SEQ ID NO: 104391 - protein, 16 aa, Homo Sapiens
FCRALGGDLASINNKE

SEQ ID NO: 104392 - protein, 16 aa, Homo Sapiens
CRALGGDLASINNKEE

SEQ ID NO: 104393 - protein, 16 aa, Homo Sapiens
RALGGDLASINNKEEQ

SEQ ID NO: 104394 - protein, 16 aa, Homo Sapiens
ALGGDLASINNKEEQQ

SEQ ID NO: 104395 - protein, 16 aa, Homo Sapiens
LGGDLASINNKEEQQT

SEQ ID NO: 104396 - protein, 16 aa, Homo Sapiens
GGDLASINNKEEQQTI

SEQ ID NO: 104397 - protein, 16 aa, Homo Sapiens
GDLASINNKEEQQTIW

SEQ ID NO: 104398 - protein, 16 aa, Homo Sapiens
DLASINNKEEQQTIWR

SEQ ID NO: 104399 - protein, 16 aa, Homo Sapiens
LASINNKEEQQTIWRL

SEQ ID NO: 104400 - protein, 16 aa, Homo Sapiens
ASINNKEEQQTIWRLI

SEQ ID NO: 104401 - protein, 16 aa, Homo Sapiens
SINNKEEQQTIWRLIT

SEQ ID NO: 104402 - protein, 16 aa, Homo Sapiens
INNKEEQQTIWRLITA

SEQ ID NO: 104403 - protein, 16 aa, Homo Sapiens
NNKEEQQTIWRLITAS

SEQ ID NO: 104404 - protein, 16 aa, Homo Sapiens
NKEEQQTIWRLITASG

SEQ ID NO: 104405 - protein, 16 aa, Homo Sapiens
KEEQQTIWRLITASGS

SEQ ID NO: 104406 - protein, 16 aa, Homo Sapiens
EEQQTIWRLITASGSY

SEQ ID NO: 104407 - protein, 16 aa, Homo Sapiens
EQQTIWRLITASGSYH

SEQ ID NO: 104408 - protein, 16 aa, Homo Sapiens
QQTIWRLITASGSYHK

SEQ ID NO: 104409 - protein, 16 aa, Homo Sapiens
QTIWRLITASGSYHKL

SEQ ID NO: 104410 - protein, 16 aa, Homo Sapiens
TIWRLITASGSYHKLF

SEQ ID NO: 104411 - protein, 16 aa, Homo Sapiens
IWRLITASGSYHKLFW

SEQ ID NO: 104412 - protein, 16 aa, Homo Sapiens
WRLITASGSYHKLFWL

SEQ ID NO: 104413 - protein, 16 aa, Homo Sapiens
RLITASGSYHKLFWLG

SEQ ID NO: 104414 - protein, 16 aa, Homo Sapiens
LITASGSYHKLFWLGL

SEQ ID NO: 104415 - protein, 16 aa, Homo Sapiens
ITASGSYHKLFWLGLT

SEQ ID NO: 104416 - protein, 16 aa, Homo Sapiens
TASGSYHKLFWLGLTY

SEQ ID NO: 104417 - protein, 16 aa, Homo Sapiens
ASGSYHKLFWLGLTYG

SEQ ID NO: 104418 - protein, 16 aa, Homo Sapiens
SGSYHKLFWLGLTYGS

SEQ ID NO: 104419 - protein, 16 aa, Homo Sapiens
GSYHKLFWLGLTYGSP

SEQ ID NO: 104420 - protein, 16 aa, Homo Sapiens
SYHKLFWLGLTYGSPS

SEQ ID NO: 104421 - protein, 16 aa, Homo Sapiens
YHKLFWLGLTYGSPSE

SEQ ID NO: 104422 - protein, 16 aa, Homo Sapiens
HKLFWLGLTYGSPSEG

SEQ ID NO: 104423 - protein, 16 aa, Homo Sapiens
KLFWLGLTYGSPSEGF

SEQ ID NO: 104424 - protein, 16 aa, Homo Sapiens
LFWLGLTYGSPSEGFT

SEQ ID NO: 104425 - protein, 16 aa, Homo Sapiens
FWLGLTYGSPSEGFTW

SEQ ID NO: 104426 - protein, 16 aa, Homo Sapiens
WLGLTYGSPSEGFTWS

SEQ ID NO: 104427 - protein, 16 aa, Homo Sapiens
LGLTYGSPSEGFTWSD

SEQ ID NO: 104428 - protein, 16 aa, Homo Sapiens
GLTYGSPSEGFTWSDG

SEQ ID NO: 104429 - protein, 16 aa, Homo Sapiens
LTYGSPSEGFTWSDGS

SEQ ID NO: 104430 - protein, 16 aa, Homo Sapiens
TYGSPSEGFTWSDGSP

SEQ ID NO: 104431 - protein, 16 aa, Homo Sapiens
YGSPSEGFTWSDGSPV

SEQ ID NO: 104432 - protein, 16 aa, Homo Sapiens
GSPSEGFTWSDGSPVS

SEQ ID NO: 104433 - protein, 16 aa, Homo Sapiens
SPSEGFTWSDGSPVSY

SEQ ID NO: 104434 - protein, 16 aa, Homo Sapiens
PSEGFTWSDGSPVSYE

SEQ ID NO: 104435 - protein, 16 aa, Homo Sapiens
SEGFTWSDGSPVSYEN

SEQ ID NO: 104436 - protein, 16 aa, Homo Sapiens
EGFTWSDGSPVSYENW

SEQ ID NO: 104437 - protein, 16 aa, Homo Sapiens
GFTWSDGSPVSYENWA

SEQ ID NO: 104438 - protein, 16 aa, Homo Sapiens
FTWSDGSPVSYENWAY

SEQ ID NO: 104439 - protein, 16 aa, Homo Sapiens
TWSDGSPVSYENWAYG

SEQ ID NO: 104440 - protein, 16 aa, Homo Sapiens
WSDGSPVSYENWAYGE

SEQ ID NO: 104441 - protein, 16 aa, Homo Sapiens
SDGSPVSYENWAYGEP

SEQ ID NO: 104442 - protein, 16 aa, Homo Sapiens
DGSPVSYENWAYGEPN

SEQ ID NO: 104443 - protein, 16 aa, Homo Sapiens
GSPVSYENWAYGEPNN

SEQ ID NO: 104444 - protein, 16 aa, Homo Sapiens
SPVSYENWAYGEPNNY

SEQ ID NO: 104445 - protein, 16 aa, Homo Sapiens
PVSYENWAYGEPNNYQ

SEQ ID NO: 104446 - protein, 16 aa, Homo Sapiens
VSYENWAYGEPNNYQN

SEQ ID NO: 104447 - protein, 16 aa, Homo Sapiens
SYENWAYGEPNNYQNV

SEQ ID NO: 104448 - protein, 16 aa, Homo Sapiens
YENWAYGEPNNYQNVE

SEQ ID NO: 104449 - protein, 16 aa, Homo Sapiens
ENWAYGEPNNYQNVEY

SEQ ID NO: 104450 - protein, 16 aa, Homo Sapiens
NWAYGEPNNYQNVEYC

SEQ ID NO: 104451 - protein, 16 aa, Homo Sapiens
WAYGEPNNYQNVEYCG

SEQ ID NO: 104452 - protein, 16 aa, Homo Sapiens
AYGEPNNYQNVEYCGE

SEQ ID NO: 104453 - protein, 16 aa, Homo Sapiens
YGEPNNYQNVEYCGEL

SEQ ID NO: 104454 - protein, 16 aa, Homo Sapiens
GEPNNYQNVEYCGELK

SEQ ID NO: 104455 - protein, 16 aa, Homo Sapiens
EPNNYQNVEYCGELKG

SEQ ID NO: 104456 - protein, 16 aa, Homo Sapiens
PNNYQNVEYCGELKGD

SEQ ID NO: 104457 - protein, 16 aa, Homo Sapiens
NNYQNVEYCGELKGDP

SEQ ID NO: 104458 - protein, 16 aa, Homo Sapiens
NYQNVEYCGELKGDPT

SEQ ID NO: 104459 - protein, 16 aa, Homo Sapiens
YQNVEYCGELKGDPTM

SEQ ID NO: 104460 - protein, 16 aa, Homo Sapiens
QNVEYCGELKGDPTMS

SEQ ID NO: 104461 - protein, 16 aa, Homo Sapiens
NVEYCGELKGDPTMSW

SEQ ID NO: 104462 - protein, 16 aa, Homo Sapiens
VEYCGELKGDPTMSWN

SEQ ID NO: 104463 - protein, 16 aa, Homo Sapiens
EYCGELKGDPTMSWND

SEQ ID NO: 104464 - protein, 16 aa, Homo Sapiens
YCGELKGDPTMSWNDI

SEQ ID NO: 104465 - protein, 16 aa, Homo Sapiens
CGELKGDPTMSWNDIN

SEQ ID NO: 104466 - protein, 16 aa, Homo Sapiens
GELKGDPTMSWNDINC

SEQ ID NO: 104467 - protein, 16 aa, Homo Sapiens
ELKGDPTMSWNDINCE

SEQ ID NO: 104468 - protein, 16 aa, Homo Sapiens
LKGDPTMSWNDINCEH

SEQ ID NO: 104469 - protein, 16 aa, Homo Sapiens
KGDPTMSWNDINCEHL

SEQ ID NO: 104470 - protein, 16 aa, Homo Sapiens
GDPTMSWNDINCEHLN

SEQ ID NO: 104471 - protein, 16 aa, Homo Sapiens
DPTMSWNDINCEHLNN

SEQ ID NO: 104472 - protein, 16 aa, Homo Sapiens
PTMSWNDINCEHLNNW

SEQ ID NO: 104473 - protein, 16 aa, Homo Sapiens
TMSWNDINCEHLNNWI

SEQ ID NO: 104474 - protein, 16 aa, Homo Sapiens
MSWNDINCEHLNNWIC

SEQ ID NO: 104475 - protein, 16 aa, Homo Sapiens
SWNDINCEHLNNWICQ

SEQ ID NO: 104476 - protein, 16 aa, Homo Sapiens
WNDINCEHLNNWICQI

SEQ ID NO: 104477 - protein, 16 aa, Homo Sapiens
NDINCEHLNNWICQIQ

SEQ ID NO: 104478 - protein, 16 aa, Homo Sapiens
DINCEHLNNWICQIQK

SEQ ID NO: 104479 - protein, 16 aa, Homo Sapiens
INCEHLNNWICQIQKG

SEQ ID NO: 104480 - protein, 16 aa, Homo Sapiens
NCEHLNNWICQIQKGQ

SEQ ID NO: 104481 - protein, 16 aa, Homo Sapiens
CEHLNNWICQIQKGQT

SEQ ID NO: 104482 - protein, 16 aa, Homo Sapiens
EHLNNWICQIQKGQTP

SEQ ID NO: 104483 - protein, 16 aa, Homo Sapiens
HLNNWICQIQKGQTPK

SEQ ID NO: 104484 - protein, 16 aa, Homo Sapiens
LNNWICQIQKGQTPKP

SEQ ID NO: 104485 - protein, 16 aa, Homo Sapiens
NNWICQIQKGQTPKPE

SEQ ID NO: 104486 - protein, 16 aa, Homo Sapiens
NWICQIQKGQTPKPEP

SEQ ID NO: 104487 - protein, 16 aa, Homo Sapiens
WICQIQKGQTPKPEPT

SEQ ID NO: 104488 - protein, 16 aa, Homo Sapiens
ICQIQKGQTPKPEPTP

SEQ ID NO: 104489 - protein, 16 aa, Homo Sapiens
CQIQKGQTPKPEPTPA

SEQ ID NO: 104490 - protein, 16 aa, Homo Sapiens
QIQKGQTPKPEPTPAP

SEQ ID NO: 104491 - protein, 16 aa, Homo Sapiens
IQKGQTPKPEPTPAPQ

SEQ ID NO: 104492 - protein, 16 aa, Homo Sapiens
QKGQTPKPEPTPAPQD

SEQ ID NO: 104493 - protein, 16 aa, Homo Sapiens
KGQTPKPEPTPAPQDN

SEQ ID NO: 104494 - protein, 16 aa, Homo Sapiens
GQTPKPEPTPAPQDNP

SEQ ID NO: 104495 - protein, 16 aa, Homo Sapiens
QTPKPEPTPAPQDNPP

SEQ ID NO: 104496 - protein, 16 aa, Homo Sapiens
TPKPEPTPAPQDNPPV

SEQ ID NO: 104497 - protein, 16 aa, Homo Sapiens
PKPEPTPAPQDNPPVT

SEQ ID NO: 104498 - protein, 16 aa, Homo Sapiens
KPEPTPAPQDNPPVTE

SEQ ID NO: 104499 - protein, 16 aa, Homo Sapiens
PEPTPAPQDNPPVTED

SEQ ID NO: 104500 - protein, 16 aa, Homo Sapiens
EPTPAPQDNPPVTEDG

SEQ ID NO: 104501 - protein, 16 aa, Homo Sapiens
PTPAPQDNPPVTEDGW

SEQ ID NO: 104502 - protein, 16 aa, Homo Sapiens
TPAPQDNPPVTEDGWV

SEQ ID NO: 104503 - protein, 16 aa, Homo Sapiens
PAPQDNPPVTEDGWVI

SEQ ID NO: 104504 - protein, 16 aa, Homo Sapiens
APQDNPPVTEDGWVIY

SEQ ID NO: 104505 - protein, 16 aa, Homo Sapiens
PQDNPPVTEDGWVIYK

SEQ ID NO: 104506 - protein, 16 aa, Homo Sapiens
QDNPPVTEDGWVIYKD

SEQ ID NO: 104507 - protein, 16 aa, Homo Sapiens
DNPPVTEDGWVIYKDY

SEQ ID NO: 104508 - protein, 16 aa, Homo Sapiens
NPPVTEDGWVIYKDYQ

SEQ ID NO: 104509 - protein, 16 aa, Homo Sapiens
PPVTEDGWVIYKDYQY

SEQ ID NO: 104510 - protein, 16 aa, Homo Sapiens
PVTEDGWVIYKDYQYY

SEQ ID NO: 104511 - protein, 16 aa, Homo Sapiens
VTEDGWVIYKDYQYYF

SEQ ID NO: 104512 - protein, 16 aa, Homo Sapiens
TEDGWVIYKDYQYYFS

SEQ ID NO: 104513 - protein, 16 aa, Homo Sapiens
EDGWVIYKDYQYYFSK

SEQ ID NO: 104514 - protein, 16 aa, Homo Sapiens
DGWVIYKDYQYYFSKE

SEQ ID NO: 104515 - protein, 16 aa, Homo Sapiens
GWVIYKDYQYYFSKEK

SEQ ID NO: 104516 - protein, 16 aa, Homo Sapiens
WVIYKDYQYYFSKEKE

SEQ ID NO: 104517 - protein, 16 aa, Homo Sapiens
VIYKDYQYYFSKEKET

SEQ ID NO: 104518 - protein, 16 aa, Homo Sapiens
IYKDYQYYFSKEKETM

SEQ ID NO: 104519 - protein, 16 aa, Homo Sapiens
YKDYQYYFSKEKETMD

SEQ ID NO: 104520 - protein, 16 aa, Homo Sapiens
KDYQYYFSKEKETMDN

SEQ ID NO: 104521 - protein, 16 aa, Homo Sapiens
DYQYYFSKEKETMDNA

SEQ ID NO: 104522 - protein, 16 aa, Homo Sapiens
YQYYFSKEKETMDNAR

SEQ ID NO: 104523 - protein, 16 aa, Homo Sapiens
QYYFSKEKETMDNARA

SEQ ID NO: 104524 - protein, 16 aa, Homo Sapiens
YYFSKEKETMDNARAF

SEQ ID NO: 104525 - protein, 16 aa, Homo Sapiens
YFSKEKETMDNARAFC

SEQ ID NO: 104526 - protein, 16 aa, Homo Sapiens
FSKEKETMDNARAFCK

SEQ ID NO: 104527 - protein, 16 aa, Homo Sapiens
SKEKETMDNARAFCKR

SEQ ID NO: 104528 - protein, 16 aa, Homo Sapiens
KEKETMDNARAFCKRN

SEQ ID NO: 104529 - protein, 16 aa, Homo Sapiens
EKETMDNARAFCKRNF

SEQ ID NO: 104530 - protein, 16 aa, Homo Sapiens
KETMDNARAFCKRNFG

SEQ ID NO: 104531 - protein, 16 aa, Homo Sapiens
ETMDNARAFCKRNFGD

SEQ ID NO: 104532 - protein, 16 aa, Homo Sapiens
TMDNARAFCKRNFGDL

SEQ ID NO: 104533 - protein, 16 aa, Homo Sapiens
MDNARAFCKRNFGDLV

SEQ ID NO: 104534 - protein, 16 aa, Homo Sapiens
DNARAFCKRNFGDLVS

SEQ ID NO: 104535 - protein, 16 aa, Homo Sapiens
NARAFCKRNFGDLVSI

SEQ ID NO: 104536 - protein, 16 aa, Homo Sapiens
ARAFCKRNFGDLVSIQ

SEQ ID NO: 104537 - protein, 16 aa, Homo Sapiens
RAFCKRNFGDLVSIQS

SEQ ID NO: 104538 - protein, 16 aa, Homo Sapiens
AFCKRNFGDLVSIQSE

SEQ ID NO: 104539 - protein, 16 aa, Homo Sapiens
FCKRNFGDLVSIQSES

SEQ ID NO: 104540 - protein, 16 aa, Homo Sapiens
CKRNFGDLVSIQSESE

SEQ ID NO: 104541 - protein, 16 aa, Homo Sapiens
KRNFGDLVSIQSESEK

SEQ ID NO: 104542 - protein, 16 aa, Homo Sapiens
RNFGDLVSIQSESEKK

SEQ ID NO: 104543 - protein, 16 aa, Homo Sapiens
NFGDLVSIQSESEKKF

SEQ ID NO: 104544 - protein, 16 aa, Homo Sapiens
FGDLVSIQSESEKKFL

SEQ ID NO: 104545 - protein, 16 aa, Homo Sapiens
GDLVSIQSESEKKFLW

SEQ ID NO: 104546 - protein, 16 aa, Homo Sapiens
DLVSIQSESEKKFLWK

SEQ ID NO: 104547 - protein, 16 aa, Homo Sapiens
LVSIQSESEKKFLWKY

SEQ ID NO: 104548 - protein, 16 aa, Homo Sapiens
VSIQSESEKKFLWKYV

SEQ ID NO: 104549 - protein, 16 aa, Homo Sapiens
SIQSESEKKFLWKYVN

SEQ ID NO: 104550 - protein, 16 aa, Homo Sapiens
IQSESEKKFLWKYVNR

SEQ ID NO: 104551 - protein, 16 aa, Homo Sapiens
QSESEKKFLWKYVNRN

SEQ ID NO: 104552 - protein, 16 aa, Homo Sapiens
SESEKKFLWKYVNRND

SEQ ID NO: 104553 - protein, 16 aa, Homo Sapiens
ESEKKFLWKYVNRNDA

SEQ ID NO: 104554 - protein, 16 aa, Homo Sapiens
SEKKFLWKYVNRNDAQ

SEQ ID NO: 104555 - protein, 16 aa, Homo Sapiens
EKKFLWKYVNRNDAQS

SEQ ID NO: 104556 - protein, 16 aa, Homo Sapiens
KKFLWKYVNRNDAQSA

SEQ ID NO: 104557 - protein, 16 aa, Homo Sapiens
KFLWKYVNRNDAQSAY

SEQ ID NO: 104558 - protein, 16 aa, Homo Sapiens
FLWKYVNRNDAQSAYF

SEQ ID NO: 104559 - protein, 16 aa, Homo Sapiens
LWKYVNRNDAQSAYFI

SEQ ID NO: 104560 - protein, 16 aa, Homo Sapiens
WKYVNRNDAQSAYFIG

SEQ ID NO: 104561 - protein, 16 aa, Homo Sapiens
KYVNRNDAQSAYFIGL

SEQ ID NO: 104562 - protein, 16 aa, Homo Sapiens
YVNRNDAQSAYFIGLL

SEQ ID NO: 104563 - protein, 16 aa, Homo Sapiens
VNRNDAQSAYFIGLLI

SEQ ID NO: 104564 - protein, 16 aa, Homo Sapiens
NRNDAQSAYFIGLLIS

SEQ ID NO: 104565 - protein, 16 aa, Homo Sapiens
RNDAQSAYFIGLLISL

SEQ ID NO: 104566 - protein, 16 aa, Homo Sapiens
NDAQSAYFIGLLISLD

SEQ ID NO: 104567 - protein, 16 aa, Homo Sapiens
DAQSAYFIGLLISLDK

SEQ ID NO: 104568 - protein, 16 aa, Homo Sapiens
AQSAYFIGLLISLDKK

SEQ ID NO: 104569 - protein, 16 aa, Homo Sapiens
QSAYFIGLLISLDKKF

SEQ ID NO: 104570 - protein, 16 aa, Homo Sapiens
SAYFIGLLISLDKKFA

SEQ ID NO: 104571 - protein, 16 aa, Homo Sapiens
AYFIGLLISLDKKFAW

SEQ ID NO: 104572 - protein, 16 aa, Homo Sapiens
YFIGLLISLDKKFAWM

SEQ ID NO: 104573 - protein, 16 aa, Homo Sapiens
FIGLLISLDKKFAWMD

SEQ ID NO: 104574 - protein, 16 aa, Homo Sapiens
IGLLISLDKKFAWMDG

SEQ ID NO: 104575 - protein, 16 aa, Homo Sapiens
GLLISLDKKFAWMDGS

SEQ ID NO: 104576 - protein, 16 aa, Homo Sapiens
LLISLDKKFAWMDGSK

SEQ ID NO: 104577 - protein, 16 aa, Homo Sapiens
LISLDKKFAWMDGSKV

SEQ ID NO: 104578 - protein, 16 aa, Homo Sapiens
ISLDKKFAWMDGSKVD

SEQ ID NO: 104579 - protein, 16 aa, Homo Sapiens
SLDKKFAWMDGSKVDY

SEQ ID NO: 104580 - protein, 16 aa, Homo Sapiens
LDKKFAWMDGSKVDYV

SEQ ID NO: 104581 - protein, 16 aa, Homo Sapiens
DKKFAWMDGSKVDYVS

SEQ ID NO: 104582 - protein, 16 aa, Homo Sapiens
KKFAWMDGSKVDYVSW

SEQ ID NO: 104583 - protein, 16 aa, Homo Sapiens
KFAWMDGSKVDYVSWA

SEQ ID NO: 104584 - protein, 16 aa, Homo Sapiens
FAWMDGSKVDYVSWAT

SEQ ID NO: 104585 - protein, 16 aa, Homo Sapiens
AWMDGSKVDYVSWATG

SEQ ID NO: 104586 - protein, 16 aa, Homo Sapiens
WMDGSKVDYVSWATGE

SEQ ID NO: 104587 - protein, 16 aa, Homo Sapiens
MDGSKVDYVSWATGEP

SEQ ID NO: 104588 - protein, 16 aa, Homo Sapiens
DGSKVDYVSWATGEPN

SEQ ID NO: 104589 - protein, 16 aa, Homo Sapiens
GSKVDYVSWATGEPNF

SEQ ID NO: 104590 - protein, 16 aa, Homo Sapiens
SKVDYVSWATGEPNFA

SEQ ID NO: 104591 - protein, 16 aa, Homo Sapiens
KVDYVSWATGEPNFAN

SEQ ID NO: 104592 - protein, 16 aa, Homo Sapiens
VDYVSWATGEPNFANE

SEQ ID NO: 104593 - protein, 16 aa, Homo Sapiens
DYVSWATGEPNFANED

SEQ ID NO: 104594 - protein, 16 aa, Homo Sapiens
YVSWATGEPNFANEDE

SEQ ID NO: 104595 - protein, 16 aa, Homo Sapiens
VSWATGEPNFANEDEN

SEQ ID NO: 104596 - protein, 16 aa, Homo Sapiens
SWATGEPNFANEDENC

SEQ ID NO: 104597 - protein, 16 aa, Homo Sapiens
WATGEPNFANEDENCV

SEQ ID NO: 104598 - protein, 16 aa, Homo Sapiens
ATGEPNFANEDENCVT

SEQ ID NO: 104599 - protein, 16 aa, Homo Sapiens
TGEPNFANEDENCVTM

SEQ ID NO: 104600 - protein, 16 aa, Homo Sapiens
GEPNFANEDENCVTMY

SEQ ID NO: 104601 - protein, 16 aa, Homo Sapiens
EPNFANEDENCVTMYS

SEQ ID NO: 104602 - protein, 16 aa, Homo Sapiens
PNFANEDENCVTMYSN

SEQ ID NO: 104603 - protein, 16 aa, Homo Sapiens
NFANEDENCVTMYSNS

SEQ ID NO: 104604 - protein, 16 aa, Homo Sapiens
FANEDENCVTMYSNSG

SEQ ID NO: 104605 - protein, 16 aa, Homo Sapiens
ANEDENCVTMYSNSGF

SEQ ID NO: 104606 - protein, 16 aa, Homo Sapiens
NEDENCVTMYSNSGFW

SEQ ID NO: 104607 - protein, 16 aa, Homo Sapiens
EDENCVTMYSNSGFWN

SEQ ID NO: 104608 - protein, 16 aa, Homo Sapiens
DENCVTMYSNSGFWND

SEQ ID NO: 104609 - protein, 16 aa, Homo Sapiens
ENCVTMYSNSGFWNDI

SEQ ID NO: 104610 - protein, 16 aa, Homo Sapiens
NCVTMYSNSGFWNDIN

SEQ ID NO: 104611 - protein, 16 aa, Homo Sapiens
CVTMYSNSGFWNDINC

SEQ ID NO: 104612 - protein, 16 aa, Homo Sapiens
VTMYSNSGFWNDINCG

SEQ ID NO: 104613 - protein, 16 aa, Homo Sapiens
TMYSNSGFWNDINCGY

SEQ ID NO: 104614 - protein, 16 aa, Homo Sapiens
MYSNSGFWNDINCGYP

SEQ ID NO: 104615 - protein, 16 aa, Homo Sapiens
YSNSGFWNDINCGYPN

SEQ ID NO: 104616 - protein, 16 aa, Homo Sapiens
SNSGFWNDINCGYPNA

SEQ ID NO: 104617 - protein, 16 aa, Homo Sapiens
NSGFWNDINCGYPNAF

SEQ ID NO: 104618 - protein, 16 aa, Homo Sapiens
SGFWNDINCGYPNAFI

SEQ ID NO: 104619 - protein, 16 aa, Homo Sapiens
GFWNDINCGYPNAFIC

SEQ ID NO: 104620 - protein, 16 aa, Homo Sapiens
FWNDINCGYPNAFICQ

SEQ ID NO: 104621 - protein, 16 aa, Homo Sapiens
WNDINCGYPNAFICQR

SEQ ID NO: 104622 - protein, 16 aa, Homo Sapiens
NDINCGYPNAFICQRH

SEQ ID NO: 104623 - protein, 16 aa, Homo Sapiens
DINCGYPNAFICQRHN

SEQ ID NO: 104624 - protein, 16 aa, Homo Sapiens
INCGYPNAFICQRHNS

SEQ ID NO: 104625 - protein, 16 aa, Homo Sapiens
NCGYPNAFICQRHNSS

SEQ ID NO: 104626 - protein, 16 aa, Homo Sapiens
CGYPNAFICQRHNSSI

SEQ ID NO: 104627 - protein, 16 aa, Homo Sapiens
GYPNAFICQRHNSSIN

SEQ ID NO: 104628 - protein, 16 aa, Homo Sapiens
YPNAFICQRHNSSINA

SEQ ID NO: 104629 - protein, 16 aa, Homo Sapiens
PNAFICQRHNSSINAT

SEQ ID NO: 104630 - protein, 16 aa, Homo Sapiens
NAFICQRHNSSINATT

SEQ ID NO: 104631 - protein, 16 aa, Homo Sapiens
AFICQRHNSSINATTV

SEQ ID NO: 104632 - protein, 16 aa, Homo Sapiens
FICQRHNSSINATTVM

SEQ ID NO: 104633 - protein, 16 aa, Homo Sapiens
ICQRHNSSINATTVMP

SEQ ID NO: 104634 - protein, 16 aa, Homo Sapiens
CQRHNSSINATTVMPT

SEQ ID NO: 104635 - protein, 16 aa, Homo Sapiens
QRHNSSINATTVMPTM

SEQ ID NO: 104636 - protein, 16 aa, Homo Sapiens
RHNSSINATTVMPTMP

SEQ ID NO: 104637 - protein, 16 aa, Homo Sapiens
HNSSINATTVMPTMPS

SEQ ID NO: 104638 - protein, 16 aa, Homo Sapiens
NSSINATTVMPTMPSV

SEQ ID NO: 104639 - protein, 16 aa, Homo Sapiens
SSINATTVMPTMPSVP

SEQ ID NO: 104640 - protein, 16 aa, Homo Sapiens
SINATTVMPTMPSVPS

SEQ ID NO: 104641 - protein, 16 aa, Homo Sapiens
INATTVMPTMPSVPSG

SEQ ID NO: 104642 - protein, 16 aa, Homo Sapiens
NATTVMPTMPSVPSGC

SEQ ID NO: 104643 - protein, 16 aa, Homo Sapiens
ATTVMPTMPSVPSGCK

SEQ ID NO: 104644 - protein, 16 aa, Homo Sapiens
TTVMPTMPSVPSGCKE

SEQ ID NO: 104645 - protein, 16 aa, Homo Sapiens
TVMPTMPSVPSGCKEG

SEQ ID NO: 104646 - protein, 16 aa, Homo Sapiens
VMPTMPSVPSGCKEGW

SEQ ID NO: 104647 - protein, 16 aa, Homo Sapiens
MPTMPSVPSGCKEGWN

SEQ ID NO: 104648 - protein, 16 aa, Homo Sapiens
PTMPSVPSGCKEGWNF

SEQ ID NO: 104649 - protein, 16 aa, Homo Sapiens
TMPSVPSGCKEGWNFY

SEQ ID NO: 104650 - protein, 16 aa, Homo Sapiens
MPSVPSGCKEGWNFYS

SEQ ID NO: 104651 - protein, 16 aa, Homo Sapiens
PSVPSGCKEGWNFYSN

SEQ ID NO: 104652 - protein, 16 aa, Homo Sapiens
SVPSGCKEGWNFYSNK

SEQ ID NO: 104653 - protein, 16 aa, Homo Sapiens
VPSGCKEGWNFYSNKC

SEQ ID NO: 104654 - protein, 16 aa, Homo Sapiens
PSGCKEGWNFYSNKCF

SEQ ID NO: 104655 - protein, 16 aa, Homo Sapiens
SGCKEGWNFYSNKCFK

SEQ ID NO: 104656 - protein, 16 aa, Homo Sapiens
GCKEGWNFYSNKCFKI

SEQ ID NO: 104657 - protein, 16 aa, Homo Sapiens
CKEGWNFYSNKCFKIF

SEQ ID NO: 104658 - protein, 16 aa, Homo Sapiens
KEGWNFYSNKCFKIFG

SEQ ID NO: 104659 - protein, 16 aa, Homo Sapiens
EGWNFYSNKCFKIFGF

SEQ ID NO: 104660 - protein, 16 aa, Homo Sapiens
GWNFYSNKCFKIFGFM

SEQ ID NO: 104661 - protein, 16 aa, Homo Sapiens
WNFYSNKCFKIFGFME

SEQ ID NO: 104662 - protein, 16 aa, Homo Sapiens
NFYSNKCFKIFGFMEE

SEQ ID NO: 104663 - protein, 16 aa, Homo Sapiens
FYSNKCFKIFGFMEEE

SEQ ID NO: 104664 - protein, 16 aa, Homo Sapiens
YSNKCFKIFGFMEEER

SEQ ID NO: 104665 - protein, 16 aa, Homo Sapiens
SNKCFKIFGFMEEERK

SEQ ID NO: 104666 - protein, 16 aa, Homo Sapiens
NKCFKIFGFMEEERKN

SEQ ID NO: 104667 - protein, 16 aa, Homo Sapiens
KCFKIFGFMEEERKNW

SEQ ID NO: 104668 - protein, 16 aa, Homo Sapiens
CFKIFGFMEEERKNWQ

SEQ ID NO: 104669 - protein, 16 aa, Homo Sapiens
FKIFGFMEEERKNWQE

SEQ ID NO: 104670 - protein, 16 aa, Homo Sapiens
KIFGFMEEERKNWQEA

SEQ ID NO: 104671 - protein, 16 aa, Homo Sapiens
IFGFMEEERKNWQEAR

SEQ ID NO: 104672 - protein, 16 aa, Homo Sapiens
FGFMEEERKNWQEARK

SEQ ID NO: 104673 - protein, 16 aa, Homo Sapiens
GFMEEERKNWQEARKA

SEQ ID NO: 104674 - protein, 16 aa, Homo Sapiens
FMEEERKNWQEARKAC

SEQ ID NO: 104675 - protein, 16 aa, Homo Sapiens
MEEERKNWQEARKACI

SEQ ID NO: 104676 - protein, 16 aa, Homo Sapiens
EEERKNWQEARKACIG

SEQ ID NO: 104677 - protein, 16 aa, Homo Sapiens
EERKNWQEARKACIGF

SEQ ID NO: 104678 - protein, 16 aa, Homo Sapiens
ERKNWQEARKACIGFG

SEQ ID NO: 104679 - protein, 16 aa, Homo Sapiens
RKNWQEARKACIGFGG

SEQ ID NO: 104680 - protein, 16 aa, Homo Sapiens
KNWQEARKACIGFGGN

SEQ ID NO: 104681 - protein, 16 aa, Homo Sapiens
NWQEARKACIGFGGNL

SEQ ID NO: 104682 - protein, 16 aa, Homo Sapiens
WQEARKACIGFGGNLV

SEQ ID NO: 104683 - protein, 16 aa, Homo Sapiens
QEARKACIGFGGNLVS

SEQ ID NO: 104684 - protein, 16 aa, Homo Sapiens
EARKACIGFGGNLVSI

SEQ ID NO: 104685 - protein, 16 aa, Homo Sapiens
ARKACIGFGGNLVSIQ

SEQ ID NO: 104686 - protein, 16 aa, Homo Sapiens
RKACIGFGGNLVSIQN

SEQ ID NO: 104687 - protein, 16 aa, Homo Sapiens
KACIGFGGNLVSIQNE

SEQ ID NO: 104688 - protein, 16 aa, Homo Sapiens
ACIGFGGNLVSIQNEK

SEQ ID NO: 104689 - protein, 16 aa, Homo Sapiens
CIGFGGNLVSIQNEKE

SEQ ID NO: 104690 - protein, 16 aa, Homo Sapiens
IGFGGNLVSIQNEKEQ

SEQ ID NO: 104691 - protein, 16 aa, Homo Sapiens
GFGGNLVSIQNEKEQA

SEQ ID NO: 104692 - protein, 16 aa, Homo Sapiens
FGGNLVSIQNEKEQAF

SEQ ID NO: 104693 - protein, 16 aa, Homo Sapiens
GGNLVSIQNEKEQAFL

SEQ ID NO: 104694 - protein, 16 aa, Homo Sapiens
GNLVSIQNEKEQAFLT

SEQ ID NO: 104695 - protein, 16 aa, Homo Sapiens
NLVSIQNEKEQAFLTY

SEQ ID NO: 104696 - protein, 16 aa, Homo Sapiens
LVSIQNEKEQAFLTYH

SEQ ID NO: 104697 - protein, 16 aa, Homo Sapiens
VSIQNEKEQAFLTYHM

SEQ ID NO: 104698 - protein, 16 aa, Homo Sapiens
SIQNEKEQAFLTYHMK

SEQ ID NO: 104699 - protein, 16 aa, Homo Sapiens
IQNEKEQAFLTYHMKD

SEQ ID NO: 104700 - protein, 16 aa, Homo Sapiens
QNEKEQAFLTYHMKDS

SEQ ID NO: 104701 - protein, 16 aa, Homo Sapiens
NEKEQAFLTYHMKDST

SEQ ID NO: 104702 - protein, 16 aa, Homo Sapiens
EKEQAFLTYHMKDSTF

SEQ ID NO: 104703 - protein, 16 aa, Homo Sapiens
KEQAFLTYHMKDSTFS

SEQ ID NO: 104704 - protein, 16 aa, Homo Sapiens
EQAFLTYHMKDSTFSA

SEQ ID NO: 104705 - protein, 16 aa, Homo Sapiens
QAFLTYHMKDSTFSAW

SEQ ID NO: 104706 - protein, 16 aa, Homo Sapiens
AFLTYHMKDSTFSAWT

SEQ ID NO: 104707 - protein, 16 aa, Homo Sapiens
FLTYHMKDSTFSAWTG

SEQ ID NO: 104708 - protein, 16 aa, Homo Sapiens
LTYHMKDSTFSAWTGL

SEQ ID NO: 104709 - protein, 16 aa, Homo Sapiens
TYHMKDSTFSAWTGLN

SEQ ID NO: 104710 - protein, 16 aa, Homo Sapiens
YHMKDSTFSAWTGLND

SEQ ID NO: 104711 - protein, 16 aa, Homo Sapiens
HMKDSTFSAWTGLNDV

SEQ ID NO: 104712 - protein, 16 aa, Homo Sapiens
MKDSTFSAWTGLNDVN

SEQ ID NO: 104713 - protein, 16 aa, Homo Sapiens
KDSTFSAWTGLNDVNS

SEQ ID NO: 104714 - protein, 16 aa, Homo Sapiens
DSTFSAWTGLNDVNSE

SEQ ID NO: 104715 - protein, 16 aa, Homo Sapiens
STFSAWTGLNDVNSEH

SEQ ID NO: 104716 - protein, 16 aa, Homo Sapiens
TFSAWTGLNDVNSEHT

SEQ ID NO: 104717 - protein, 16 aa, Homo Sapiens
FSAWTGLNDVNSEHTF

SEQ ID NO: 104718 - protein, 16 aa, Homo Sapiens
SAWTGLNDVNSEHTFL

SEQ ID NO: 104719 - protein, 16 aa, Homo Sapiens
AWTGLNDVNSEHTFLW

SEQ ID NO: 104720 - protein, 16 aa, Homo Sapiens
WTGLNDVNSEHTFLWT

SEQ ID NO: 104721 - protein, 16 aa, Homo Sapiens
TGLNDVNSEHTFLWTD

SEQ ID NO: 104722 - protein, 16 aa, Homo Sapiens
GLNDVNSEHTFLWTDG

SEQ ID NO: 104723 - protein, 16 aa, Homo Sapiens
LNDVNSEHTFLWTDGR

SEQ ID NO: 104724 - protein, 16 aa, Homo Sapiens
NDVNSEHTFLWTDGRG

SEQ ID NO: 104725 - protein, 16 aa, Homo Sapiens
DVNSEHTFLWTDGRGV

SEQ ID NO: 104726 - protein, 16 aa, Homo Sapiens
VNSEHTFLWTDGRGVH

SEQ ID NO: 104727 - protein, 16 aa, Homo Sapiens
NSEHTFLWTDGRGVHY

SEQ ID NO: 104728 - protein, 16 aa, Homo Sapiens
SEHTFLWTDGRGVHYT

SEQ ID NO: 104729 - protein, 16 aa, Homo Sapiens
EHTFLWTDGRGVHYTN

SEQ ID NO: 104730 - protein, 16 aa, Homo Sapiens
HTFLWTDGRGVHYTNW

SEQ ID NO: 104731 - protein, 16 aa, Homo Sapiens
TFLWTDGRGVHYTNWG

SEQ ID NO: 104732 - protein, 16 aa, Homo Sapiens
FLWTDGRGVHYTNWGK

SEQ ID NO: 104733 - protein, 16 aa, Homo Sapiens
LWTDGRGVHYTNWGKG

SEQ ID NO: 104734 - protein, 16 aa, Homo Sapiens
WTDGRGVHYTNWGKGY

SEQ ID NO: 104735 - protein, 16 aa, Homo Sapiens
TDGRGVHYTNWGKGYP

SEQ ID NO: 104736 - protein, 16 aa, Homo Sapiens
DGRGVHYTNWGKGYPG

SEQ ID NO: 104737 - protein, 16 aa, Homo Sapiens
GRGVHYTNWGKGYPGG

SEQ ID NO: 104738 - protein, 16 aa, Homo Sapiens
RGVHYTNWGKGYPGGR

SEQ ID NO: 104739 - protein, 16 aa, Homo Sapiens
GVHYTNWGKGYPGGRR

SEQ ID NO: 104740 - protein, 16 aa, Homo Sapiens
VHYTNWGKGYPGGRRS

SEQ ID NO: 104741 - protein, 16 aa, Homo Sapiens
HYTNWGKGYPGGRRSS

SEQ ID NO: 104742 - protein, 16 aa, Homo Sapiens
YTNWGKGYPGGRRSSL

SEQ ID NO: 104743 - protein, 16 aa, Homo Sapiens
TNWGKGYPGGRRSSLS

SEQ ID NO: 104744 - protein, 16 aa, Homo Sapiens
NWGKGYPGGRRSSLSY

SEQ ID NO: 104745 - protein, 16 aa, Homo Sapiens
WGKGYPGGRRSSLSYE

SEQ ID NO: 104746 - protein, 16 aa, Homo Sapiens
GKGYPGGRRSSLSYED

SEQ ID NO: 104747 - protein, 16 aa, Homo Sapiens
KGYPGGRRSSLSYEDA

SEQ ID NO: 104748 - protein, 16 aa, Homo Sapiens
GYPGGRRSSLSYEDAD

SEQ ID NO: 104749 - protein, 16 aa, Homo Sapiens
YPGGRRSSLSYEDADC

SEQ ID NO: 104750 - protein, 16 aa, Homo Sapiens
PGGRRSSLSYEDADCV

SEQ ID NO: 104751 - protein, 16 aa, Homo Sapiens
GGRRSSLSYEDADCVV

SEQ ID NO: 104752 - protein, 16 aa, Homo Sapiens
GRRSSLSYEDADCVVI

SEQ ID NO: 104753 - protein, 16 aa, Homo Sapiens
RRSSLSYEDADCVVII

SEQ ID NO: 104754 - protein, 16 aa, Homo Sapiens
RSSLSYEDADCVVIIG

SEQ ID NO: 104755 - protein, 16 aa, Homo Sapiens
SSLSYEDADCVVIIGG

SEQ ID NO: 104756 - protein, 16 aa, Homo Sapiens
SLSYEDADCVVIIGGA

SEQ ID NO: 104757 - protein, 16 aa, Homo Sapiens
LSYEDADCVVIIGGAS

SEQ ID NO: 104758 - protein, 16 aa, Homo Sapiens
SYEDADCVVIIGGASN

SEQ ID NO: 104759 - protein, 16 aa, Homo Sapiens
YEDADCVVIIGGASNE

SEQ ID NO: 104760 - protein, 16 aa, Homo Sapiens
EDADCVVIIGGASNEA

SEQ ID NO: 104761 - protein, 16 aa, Homo Sapiens
DADCVVIIGGASNEAG

SEQ ID NO: 104762 - protein, 16 aa, Homo Sapiens
ADCVVIIGGASNEAGK

SEQ ID NO: 104763 - protein, 16 aa, Homo Sapiens
DCVVIIGGASNEAGKW

SEQ ID NO: 104764 - protein, 16 aa, Homo Sapiens
CVVIIGGASNEAGKWM

SEQ ID NO: 104765 - protein, 16 aa, Homo Sapiens
VVIIGGASNEAGKWMD

SEQ ID NO: 104766 - protein, 16 aa, Homo Sapiens
VIIGGASNEAGKWMDD

SEQ ID NO: 104767 - protein, 16 aa, Homo Sapiens
IIGGASNEAGKWMDDT

SEQ ID NO: 104768 - protein, 16 aa, Homo Sapiens
IGGASNEAGKWMDDTC

SEQ ID NO: 104769 - protein, 16 aa, Homo Sapiens
GGASNEAGKWMDDTCD

SEQ ID NO: 104770 - protein, 16 aa, Homo Sapiens
GASNEAGKWMDDTCDS

SEQ ID NO: 104771 - protein, 16 aa, Homo Sapiens
ASNEAGKWMDDTCDSK

SEQ ID NO: 104772 - protein, 16 aa, Homo Sapiens
SNEAGKWMDDTCDSKR

SEQ ID NO: 104773 - protein, 16 aa, Homo Sapiens
NEAGKWMDDTCDSKRG

SEQ ID NO: 104774 - protein, 16 aa, Homo Sapiens
EAGKWMDDTCDSKRGY

SEQ ID NO: 104775 - protein, 16 aa, Homo Sapiens
AGKWMDDTCDSKRGYI

SEQ ID NO: 104776 - protein, 16 aa, Homo Sapiens
GKWMDDTCDSKRGYIC

SEQ ID NO: 104777 - protein, 16 aa, Homo Sapiens
KWMDDTCDSKRGYICQ

SEQ ID NO: 104778 - protein, 16 aa, Homo Sapiens
WMDDTCDSKRGYICQT

SEQ ID NO: 104779 - protein, 16 aa, Homo Sapiens
MDDTCDSKRGYICQTR

SEQ ID NO: 104780 - protein, 16 aa, Homo Sapiens
DDTCDSKRGYICQTRS

SEQ ID NO: 104781 - protein, 16 aa, Homo Sapiens
DTCDSKRGYICQTRSD

SEQ ID NO: 104782 - protein, 16 aa, Homo Sapiens
TCDSKRGYICQTRSDP

SEQ ID NO: 104783 - protein, 16 aa, Homo Sapiens
CDSKRGYICQTRSDPS

SEQ ID NO: 104784 - protein, 16 aa, Homo Sapiens
DSKRGYICQTRSDPSL

SEQ ID NO: 104785 - protein, 16 aa, Homo Sapiens
SKRGYICQTRSDPSLT

SEQ ID NO: 104786 - protein, 16 aa, Homo Sapiens
KRGYICQTRSDPSLTN

SEQ ID NO: 104787 - protein, 16 aa, Homo Sapiens
RGYICQTRSDPSLTNP

SEQ ID NO: 104788 - protein, 16 aa, Homo Sapiens
GYICQTRSDPSLTNPP

SEQ ID NO: 104789 - protein, 16 aa, Homo Sapiens
YICQTRSDPSLTNPPA

SEQ ID NO: 104790 - protein, 16 aa, Homo Sapiens
ICQTRSDPSLTNPPAT

SEQ ID NO: 104791 - protein, 16 aa, Homo Sapiens
CQTRSDPSLTNPPATI

SEQ ID NO: 104792 - protein, 16 aa, Homo Sapiens
QTRSDPSLTNPPATIQ

SEQ ID NO: 104793 - protein, 16 aa, Homo Sapiens
TRSDPSLTNPPATIQT

SEQ ID NO: 104794 - protein, 16 aa, Homo Sapiens
RSDPSLTNPPATIQTD

SEQ ID NO: 104795 - protein, 16 aa, Homo Sapiens
SDPSLTNPPATIQTDG

SEQ ID NO: 104796 - protein, 16 aa, Homo Sapiens
DPSLTNPPATIQTDGF

SEQ ID NO: 104797 - protein, 16 aa, Homo Sapiens
PSLTNPPATIQTDGFV

SEQ ID NO: 104798 - protein, 16 aa, Homo Sapiens
SLTNPPATIQTDGFVK

SEQ ID NO: 104799 - protein, 16 aa, Homo Sapiens
LTNPPATIQTDGFVKY

SEQ ID NO: 104800 - protein, 16 aa, Homo Sapiens
TNPPATIQTDGFVKYG

SEQ ID NO: 104801 - protein, 16 aa, Homo Sapiens
NPPATIQTDGFVKYGK

SEQ ID NO: 104802 - protein, 16 aa, Homo Sapiens
PPATIQTDGFVKYGKS

SEQ ID NO: 104803 - protein, 16 aa, Homo Sapiens
PATIQTDGFVKYGKSS

SEQ ID NO: 104804 - protein, 16 aa, Homo Sapiens
ATIQTDGFVKYGKSSY

SEQ ID NO: 104805 - protein, 16 aa, Homo Sapiens
TIQTDGFVKYGKSSYS

SEQ ID NO: 104806 - protein, 16 aa, Homo Sapiens
IQTDGFVKYGKSSYSL

SEQ ID NO: 104807 - protein, 16 aa, Homo Sapiens
QTDGFVKYGKSSYSLM

SEQ ID NO: 104808 - protein, 16 aa, Homo Sapiens
TDGFVKYGKSSYSLMR

SEQ ID NO: 104809 - protein, 16 aa, Homo Sapiens
DGFVKYGKSSYSLMRQ

SEQ ID NO: 104810 - protein, 16 aa, Homo Sapiens
GFVKYGKSSYSLMRQK

SEQ ID NO: 104811 - protein, 16 aa, Homo Sapiens
FVKYGKSSYSLMRQKF

SEQ ID NO: 104812 - protein, 16 aa, Homo Sapiens
VKYGKSSYSLMRQKFQ

SEQ ID NO: 104813 - protein, 16 aa, Homo Sapiens
KYGKSSYSLMRQKFQW

SEQ ID NO: 104814 - protein, 16 aa, Homo Sapiens
YGKSSYSLMRQKFQWH

SEQ ID NO: 104815 - protein, 16 aa, Homo Sapiens
GKSSYSLMRQKFQWHE

SEQ ID NO: 104816 - protein, 16 aa, Homo Sapiens
KSSYSLMRQKFQWHEA

SEQ ID NO: 104817 - protein, 16 aa, Homo Sapiens
SSYSLMRQKFQWHEAE

SEQ ID NO: 104818 - protein, 16 aa, Homo Sapiens
SYSLMRQKFQWHEAET

SEQ ID NO: 104819 - protein, 16 aa, Homo Sapiens
YSLMRQKFQWHEAETY

SEQ ID NO: 104820 - protein, 16 aa, Homo Sapiens
SLMRQKFQWHEAETYC

SEQ ID NO: 104821 - protein, 16 aa, Homo Sapiens
LMRQKFQWHEAETYCK

SEQ ID NO: 104822 - protein, 16 aa, Homo Sapiens
MRQKFQWHEAETYCKL

SEQ ID NO: 104823 - protein, 16 aa, Homo Sapiens
RQKFQWHEAETYCKLH

SEQ ID NO: 104824 - protein, 16 aa, Homo Sapiens
QKFQWHEAETYCKLHN

SEQ ID NO: 104825 - protein, 16 aa, Homo Sapiens
KFQWHEAETYCKLHNS

SEQ ID NO: 104826 - protein, 16 aa, Homo Sapiens
FQWHEAETYCKLHNSL

SEQ ID NO: 104827 - protein, 16 aa, Homo Sapiens
QWHEAETYCKLHNSLI

SEQ ID NO: 104828 - protein, 16 aa, Homo Sapiens
WHEAETYCKLHNSLIA

SEQ ID NO: 104829 - protein, 16 aa, Homo Sapiens
HEAETYCKLHNSLIAS

SEQ ID NO: 104830 - protein, 16 aa, Homo Sapiens
EAETYCKLHNSLIASI

SEQ ID NO: 104831 - protein, 16 aa, Homo Sapiens
AETYCKLHNSLIASIL

SEQ ID NO: 104832 - protein, 16 aa, Homo Sapiens
ETYCKLHNSLIASILD

SEQ ID NO: 104833 - protein, 16 aa, Homo Sapiens
TYCKLHNSLIASILDP

SEQ ID NO: 104834 - protein, 16 aa, Homo Sapiens
YCKLHNSLIASILDPY

SEQ ID NO: 104835 - protein, 16 aa, Homo Sapiens
CKLHNSLIASILDPYS

SEQ ID NO: 104836 - protein, 16 aa, Homo Sapiens
KLHNSLIASILDPYSN

SEQ ID NO: 104837 - protein, 16 aa, Homo Sapiens
LHNSLIASILDPYSNA

SEQ ID NO: 104838 - protein, 16 aa, Homo Sapiens
HNSLIASILDPYSNAF

SEQ ID NO: 104839 - protein, 16 aa, Homo Sapiens
NSLIASILDPYSNAFA

SEQ ID NO: 104840 - protein, 16 aa, Homo Sapiens
SLIASILDPYSNAFAW

SEQ ID NO: 104841 - protein, 16 aa, Homo Sapiens
LIASILDPYSNAFAWL

SEQ ID NO: 104842 - protein, 16 aa, Homo Sapiens
IASILDPYSNAFAWLQ

SEQ ID NO: 104843 - protein, 16 aa, Homo Sapiens
ASILDPYSNAFAWLQM

SEQ ID NO: 104844 - protein, 16 aa, Homo Sapiens
SILDPYSNAFAWLQME

SEQ ID NO: 104845 - protein, 16 aa, Homo Sapiens
ILDPYSNAFAWLQMET

SEQ ID NO: 104846 - protein, 16 aa, Homo Sapiens
LDPYSNAFAWLQMETS

SEQ ID NO: 104847 - protein, 16 aa, Homo Sapiens
DPYSNAFAWLQMETSN

SEQ ID NO: 104848 - protein, 16 aa, Homo Sapiens
PYSNAFAWLQMETSNE

SEQ ID NO: 104849 - protein, 16 aa, Homo Sapiens
YSNAFAWLQMETSNER

SEQ ID NO: 104850 - protein, 16 aa, Homo Sapiens
SNAFAWLQMETSNERV

SEQ ID NO: 104851 - protein, 16 aa, Homo Sapiens
NAFAWLQMETSNERVW

SEQ ID NO: 104852 - protein, 16 aa, Homo Sapiens
AFAWLQMETSNERVWI

SEQ ID NO: 104853 - protein, 16 aa, Homo Sapiens
FAWLQMETSNERVWIA

SEQ ID NO: 104854 - protein, 16 aa, Homo Sapiens
AWLQMETSNERVWIAL

SEQ ID NO: 104855 - protein, 16 aa, Homo Sapiens
WLQMETSNERVWIALN

SEQ ID NO: 104856 - protein, 16 aa, Homo Sapiens
LQMETSNERVWIALNS

SEQ ID NO: 104857 - protein, 16 aa, Homo Sapiens
QMETSNERVWIALNSN

SEQ ID NO: 104858 - protein, 16 aa, Homo Sapiens
METSNERVWIALNSNL

SEQ ID NO: 104859 - protein, 16 aa, Homo Sapiens
ETSNERVWIALNSNLT

SEQ ID NO: 104860 - protein, 16 aa, Homo Sapiens
TSNERVWIALNSNLTD

SEQ ID NO: 104861 - protein, 16 aa, Homo Sapiens
SNERVWIALNSNLTDN

SEQ ID NO: 104862 - protein, 16 aa, Homo Sapiens
NERVWIALNSNLTDNQ

SEQ ID NO: 104863 - protein, 16 aa, Homo Sapiens
ERVWIALNSNLTDNQY

SEQ ID NO: 104864 - protein, 16 aa, Homo Sapiens
RVWIALNSNLTDNQYT

SEQ ID NO: 104865 - protein, 16 aa, Homo Sapiens
VWIALNSNLTDNQYTW

SEQ ID NO: 104866 - protein, 16 aa, Homo Sapiens
WIALNSNLTDNQYTWT

SEQ ID NO: 104867 - protein, 16 aa, Homo Sapiens
IALNSNLTDNQYTWTD

SEQ ID NO: 104868 - protein, 16 aa, Homo Sapiens
ALNSNLTDNQYTWTDK

SEQ ID NO: 104869 - protein, 16 aa, Homo Sapiens
LNSNLTDNQYTWTDKW

SEQ ID NO: 104870 - protein, 16 aa, Homo Sapiens
NSNLTDNQYTWTDKWR

SEQ ID NO: 104871 - protein, 16 aa, Homo Sapiens
SNLTDNQYTWTDKWRV

SEQ ID NO: 104872 - protein, 16 aa, Homo Sapiens
NLTDNQYTWTDKWRVR

SEQ ID NO: 104873 - protein, 16 aa, Homo Sapiens
LTDNQYTWTDKWRVRY

SEQ ID NO: 104874 - protein, 16 aa, Homo Sapiens
TDNQYTWTDKWRVRYT

SEQ ID NO: 104875 - protein, 16 aa, Homo Sapiens
DNQYTWTDKWRVRYTN

SEQ ID NO: 104876 - protein, 16 aa, Homo Sapiens
NQYTWTDKWRVRYTNW

SEQ ID NO: 104877 - protein, 16 aa, Homo Sapiens
QYTWTDKWRVRYTNWA

SEQ ID NO: 104878 - protein, 16 aa, Homo Sapiens
YTWTDKWRVRYTNWAA

SEQ ID NO: 104879 - protein, 16 aa, Homo Sapiens
TWTDKWRVRYTNWAAD

SEQ ID NO: 104880 - protein, 16 aa, Homo Sapiens
WTDKWRVRYTNWAADE

SEQ ID NO: 104881 - protein, 16 aa, Homo Sapiens
TDKWRVRYTNWAADEP

SEQ ID NO: 104882 - protein, 16 aa, Homo Sapiens
DKWRVRYTNWAADEPK

SEQ ID NO: 104883 - protein, 16 aa, Homo Sapiens
KWRVRYTNWAADEPKL

SEQ ID NO: 104884 - protein, 16 aa, Homo Sapiens
WRVRYTNWAADEPKLK

SEQ ID NO: 104885 - protein, 16 aa, Homo Sapiens
RVRYTNWAADEPKLKS

SEQ ID NO: 104886 - protein, 16 aa, Homo Sapiens
VRYTNWAADEPKLKSA

SEQ ID NO: 104887 - protein, 16 aa, Homo Sapiens
RYTNWAADEPKLKSAC

SEQ ID NO: 104888 - protein, 16 aa, Homo Sapiens
YTNWAADEPKLKSACV

SEQ ID NO: 104889 - protein, 16 aa, Homo Sapiens
TNWAADEPKLKSACVY

SEQ ID NO: 104890 - protein, 16 aa, Homo Sapiens
NWAADEPKLKSACVYL

SEQ ID NO: 104891 - protein, 16 aa, Homo Sapiens
WAADEPKLKSACVYLD

SEQ ID NO: 104892 - protein, 16 aa, Homo Sapiens
AADEPKLKSACVYLDL

SEQ ID NO: 104893 - protein, 16 aa, Homo Sapiens
ADEPKLKSACVYLDLD

SEQ ID NO: 104894 - protein, 16 aa, Homo Sapiens
DEPKLKSACVYLDLDG

SEQ ID NO: 104895 - protein, 16 aa, Homo Sapiens
EPKLKSACVYLDLDGY

SEQ ID NO: 104896 - protein, 16 aa, Homo Sapiens
PKLKSACVYLDLDGYW

SEQ ID NO: 104897 - protein, 16 aa, Homo Sapiens
KLKSACVYLDLDGYWK

SEQ ID NO: 104898 - protein, 16 aa, Homo Sapiens
LKSACVYLDLDGYWKT

SEQ ID NO: 104899 - protein, 16 aa, Homo Sapiens
KSACVYLDLDGYWKTA

SEQ ID NO: 104900 - protein, 16 aa, Homo Sapiens
SACVYLDLDGYWKTAH

SEQ ID NO: 104901 - protein, 16 aa, Homo Sapiens
ACVYLDLDGYWKTAHC

SEQ ID NO: 104902 - protein, 16 aa, Homo Sapiens
CVYLDLDGYWKTAHCN

SEQ ID NO: 104903 - protein, 16 aa, Homo Sapiens
VYLDLDGYWKTAHCNE

SEQ ID NO: 104904 - protein, 16 aa, Homo Sapiens
YLDLDGYWKTAHCNES

SEQ ID NO: 104905 - protein, 16 aa, Homo Sapiens
LDLDGYWKTAHCNESF

SEQ ID NO: 104906 - protein, 16 aa, Homo Sapiens
DLDGYWKTAHCNESFY

SEQ ID NO: 104907 - protein, 16 aa, Homo Sapiens
LDGYWKTAHCNESFYF

SEQ ID NO: 104908 - protein, 16 aa, Homo Sapiens
DGYWKTAHCNESFYFL

SEQ ID NO: 104909 - protein, 16 aa, Homo Sapiens
GYWKTAHCNESFYFLC

SEQ ID NO: 104910 - protein, 16 aa, Homo Sapiens
YWKTAHCNESFYFLCK

SEQ ID NO: 104911 - protein, 16 aa, Homo Sapiens
WKTAHCNESFYFLCKR

SEQ ID NO: 104912 - protein, 16 aa, Homo Sapiens
KTAHCNESFYFLCKRS

SEQ ID NO: 104913 - protein, 16 aa, Homo Sapiens
TAHCNESFYFLCKRSD

SEQ ID NO: 104914 - protein, 16 aa, Homo Sapiens
AHCNESFYFLCKRSDE

SEQ ID NO: 104915 - protein, 16 aa, Homo Sapiens
HCNESFYFLCKRSDEI

SEQ ID NO: 104916 - protein, 16 aa, Homo Sapiens
CNESFYFLCKRSDEIP

SEQ ID NO: 104917 - protein, 16 aa, Homo Sapiens
NESFYFLCKRSDEIPA

SEQ ID NO: 104918 - protein, 16 aa, Homo Sapiens
ESFYFLCKRSDEIPAT

SEQ ID NO: 104919 - protein, 16 aa, Homo Sapiens
SFYFLCKRSDEIPATE

SEQ ID NO: 104920 - protein, 16 aa, Homo Sapiens
FYFLCKRSDEIPATEP

SEQ ID NO: 104921 - protein, 16 aa, Homo Sapiens
YFLCKRSDEIPATEPP

SEQ ID NO: 104922 - protein, 16 aa, Homo Sapiens
FLCKRSDEIPATEPPQ

SEQ ID NO: 104923 - protein, 16 aa, Homo Sapiens
LCKRSDEIPATEPPQL

SEQ ID NO: 104924 - protein, 16 aa, Homo Sapiens
CKRSDEIPATEPPQLP

SEQ ID NO: 104925 - protein, 16 aa, Homo Sapiens
KRSDEIPATEPPQLPG

SEQ ID NO: 104926 - protein, 16 aa, Homo Sapiens
RSDEIPATEPPQLPGR

SEQ ID NO: 104927 - protein, 16 aa, Homo Sapiens
SDEIPATEPPQLPGRC

SEQ ID NO: 104928 - protein, 16 aa, Homo Sapiens
DEIPATEPPQLPGRCP

SEQ ID NO: 104929 - protein, 16 aa, Homo Sapiens
EIPATEPPQLPGRCPE

SEQ ID NO: 104930 - protein, 16 aa, Homo Sapiens
IPATEPPQLPGRCPES

SEQ ID NO: 104931 - protein, 16 aa, Homo Sapiens
PATEPPQLPGRCPESD

SEQ ID NO: 104932 - protein, 16 aa, Homo Sapiens
ATEPPQLPGRCPESDH

SEQ ID NO: 104933 - protein, 16 aa, Homo Sapiens
TEPPQLPGRCPESDHT

SEQ ID NO: 104934 - protein, 16 aa, Homo Sapiens
EPPQLPGRCPESDHTA

SEQ ID NO: 104935 - protein, 16 aa, Homo Sapiens
PPQLPGRCPESDHTAW

SEQ ID NO: 104936 - protein, 16 aa, Homo Sapiens
PQLPGRCPESDHTAWI

SEQ ID NO: 104937 - protein, 16 aa, Homo Sapiens
QLPGRCPESDHTAWIP

SEQ ID NO: 104938 - protein, 16 aa, Homo Sapiens
LPGRCPESDHTAWIPF

SEQ ID NO: 104939 - protein, 16 aa, Homo Sapiens
PGRCPESDHTAWIPFH

SEQ ID NO: 104940 - protein, 16 aa, Homo Sapiens
GRCPESDHTAWIPFHG

SEQ ID NO: 104941 - protein, 16 aa, Homo Sapiens
RCPESDHTAWIPFHGH

SEQ ID NO: 104942 - protein, 16 aa, Homo Sapiens
CPESDHTAWIPFHGHC

SEQ ID NO: 104943 - protein, 16 aa, Homo Sapiens
PESDHTAWIPFHGHCY

SEQ ID NO: 104944 - protein, 16 aa, Homo Sapiens
ESDHTAWIPFHGHCYY

SEQ ID NO: 104945 - protein, 16 aa, Homo Sapiens
SDHTAWIPFHGHCYYI

SEQ ID NO: 104946 - protein, 16 aa, Homo Sapiens
DHTAWIPFHGHCYYIE

SEQ ID NO: 104947 - protein, 16 aa, Homo Sapiens
HTAWIPFHGHCYYIES

SEQ ID NO: 104948 - protein, 16 aa, Homo Sapiens
TAWIPFHGHCYYIESS

SEQ ID NO: 104949 - protein, 16 aa, Homo Sapiens
AWIPFHGHCYYIESSY

SEQ ID NO: 104950 - protein, 16 aa, Homo Sapiens
WIPFHGHCYYIESSYT

SEQ ID NO: 104951 - protein, 16 aa, Homo Sapiens
IPFHGHCYYIESSYTR

SEQ ID NO: 104952 - protein, 16 aa, Homo Sapiens
PFHGHCYYIESSYTRN

SEQ ID NO: 104953 - protein, 16 aa, Homo Sapiens
FHGHCYYIESSYTRNW

SEQ ID NO: 104954 - protein, 16 aa, Homo Sapiens
HGHCYYIESSYTRNWG

SEQ ID NO: 104955 - protein, 16 aa, Homo Sapiens
GHCYYIESSYTRNWGQ

SEQ ID NO: 104956 - protein, 16 aa, Homo Sapiens
HCYYIESSYTRNWGQA

SEQ ID NO: 104957 - protein, 16 aa, Homo Sapiens
CYYIESSYTRNWGQAS

SEQ ID NO: 104958 - protein, 16 aa, Homo Sapiens
YYIESSYTRNWGQASL

SEQ ID NO: 104959 - protein, 16 aa, Homo Sapiens
YIESSYTRNWGQASLE

SEQ ID NO: 104960 - protein, 16 aa, Homo Sapiens
IESSYTRNWGQASLEC

SEQ ID NO: 104961 - protein, 16 aa, Homo Sapiens
ESSYTRNWGQASLECL

SEQ ID NO: 104962 - protein, 16 aa, Homo Sapiens
SSYTRNWGQASLECLR

SEQ ID NO: 104963 - protein, 16 aa, Homo Sapiens
SYTRNWGQASLECLRM

SEQ ID NO: 104964 - protein, 16 aa, Homo Sapiens
YTRNWGQASLECLRMG

SEQ ID NO: 104965 - protein, 16 aa, Homo Sapiens
TRNWGQASLECLRMGS

SEQ ID NO: 104966 - protein, 16 aa, Homo Sapiens
RNWGQASLECLRMGSS

SEQ ID NO: 104967 - protein, 16 aa, Homo Sapiens
NWGQASLECLRMGSSL

SEQ ID NO: 104968 - protein, 16 aa, Homo Sapiens
WGQASLECLRMGSSLV

SEQ ID NO: 104969 - protein, 16 aa, Homo Sapiens
GQASLECLRMGSSLVS

SEQ ID NO: 104970 - protein, 16 aa, Homo Sapiens
QASLECLRMGSSLVSI

SEQ ID NO: 104971 - protein, 16 aa, Homo Sapiens
ASLECLRMGSSLVSIE

SEQ ID NO: 104972 - protein, 16 aa, Homo Sapiens
SLECLRMGSSLVSIES

SEQ ID NO: 104973 - protein, 16 aa, Homo Sapiens
LECLRMGSSLVSIESA

SEQ ID NO: 104974 - protein, 16 aa, Homo Sapiens
ECLRMGSSLVSIESAA

SEQ ID NO: 104975 - protein, 16 aa, Homo Sapiens
CLRMGSSLVSIESAAE

SEQ ID NO: 104976 - protein, 16 aa, Homo Sapiens
LRMGSSLVSIESAAES

SEQ ID NO: 104977 - protein, 16 aa, Homo Sapiens
RMGSSLVSIESAAESS

SEQ ID NO: 104978 - protein, 16 aa, Homo Sapiens
MGSSLVSIESAAESSF

SEQ ID NO: 104979 - protein, 16 aa, Homo Sapiens
GSSLVSIESAAESSFL

SEQ ID NO: 104980 - protein, 16 aa, Homo Sapiens
SSLVSIESAAESSFLS

SEQ ID NO: 104981 - protein, 16 aa, Homo Sapiens
SLVSIESAAESSFLSY

SEQ ID NO: 104982 - protein, 16 aa, Homo Sapiens
LVSIESAAESSFLSYR

SEQ ID NO: 104983 - protein, 16 aa, Homo Sapiens
VSIESAAESSFLSYRV

SEQ ID NO: 104984 - protein, 16 aa, Homo Sapiens
SIESAAESSFLSYRVE

SEQ ID NO: 104985 - protein, 16 aa, Homo Sapiens
IESAAESSFLSYRVEP

SEQ ID NO: 104986 - protein, 16 aa, Homo Sapiens
ESAAESSFLSYRVEPL

SEQ ID NO: 104987 - protein, 16 aa, Homo Sapiens
SAAESSFLSYRVEPLK

SEQ ID NO: 104988 - protein, 16 aa, Homo Sapiens
AAESSFLSYRVEPLKS

SEQ ID NO: 104989 - protein, 16 aa, Homo Sapiens
AESSFLSYRVEPLKSK

SEQ ID NO: 104990 - protein, 16 aa, Homo Sapiens
ESSFLSYRVEPLKSKT

SEQ ID NO: 104991 - protein, 16 aa, Homo Sapiens
SSFLSYRVEPLKSKTN

SEQ ID NO: 104992 - protein, 16 aa, Homo Sapiens
SFLSYRVEPLKSKTNF

SEQ ID NO: 104993 - protein, 16 aa, Homo Sapiens
FLSYRVEPLKSKTNFW

SEQ ID NO: 104994 - protein, 16 aa, Homo Sapiens
LSYRVEPLKSKTNFWI

SEQ ID NO: 104995 - protein, 16 aa, Homo Sapiens
SYRVEPLKSKTNFWIG

SEQ ID NO: 104996 - protein, 16 aa, Homo Sapiens
YRVEPLKSKTNFWIGL

SEQ ID NO: 104997 - protein, 16 aa, Homo Sapiens
RVEPLKSKTNFWIGLF

SEQ ID NO: 104998 - protein, 16 aa, Homo Sapiens
VEPLKSKTNFWIGLFR

SEQ ID NO: 104999 - protein, 16 aa, Homo Sapiens
EPLKSKTNFWIGLFRN

SEQ ID NO: 105000 - protein, 16 aa, Homo Sapiens
PLKSKTNFWIGLFRNV

SEQ ID NO: 105001 - protein, 16 aa, Homo Sapiens
LKSKTNFWIGLFRNVE

SEQ ID NO: 105002 - protein, 16 aa, Homo Sapiens
KSKTNFWIGLFRNVEG

SEQ ID NO: 105003 - protein, 16 aa, Homo Sapiens
SKTNFWIGLFRNVEGT

SEQ ID NO: 105004 - protein, 16 aa, Homo Sapiens
KTNFWIGLFRNVEGTW

SEQ ID NO: 105005 - protein, 16 aa, Homo Sapiens
TNFWIGLFRNVEGTWL

SEQ ID NO: 105006 - protein, 16 aa, Homo Sapiens
NFWIGLFRNVEGTWLW

SEQ ID NO: 105007 - protein, 16 aa, Homo Sapiens
FWIGLFRNVEGTWLWI

SEQ ID NO: 105008 - protein, 16 aa, Homo Sapiens
WIGLFRNVEGTWLWIN

SEQ ID NO: 105009 - protein, 16 aa, Homo Sapiens
IGLFRNVEGTWLWINN

SEQ ID NO: 105010 - protein, 16 aa, Homo Sapiens
GLFRNVEGTWLWINNS

SEQ ID NO: 105011 - protein, 16 aa, Homo Sapiens
LFRNVEGTWLWINNSP

SEQ ID NO: 105012 - protein, 16 aa, Homo Sapiens
FRNVEGTWLWINNSPV

SEQ ID NO: 105013 - protein, 16 aa, Homo Sapiens
RNVEGTWLWINNSPVS

SEQ ID NO: 105014 - protein, 16 aa, Homo Sapiens
NVEGTWLWINNSPVSF

SEQ ID NO: 105015 - protein, 16 aa, Homo Sapiens
VEGTWLWINNSPVSFV

SEQ ID NO: 105016 - protein, 16 aa, Homo Sapiens
EGTWLWINNSPVSFVN

SEQ ID NO: 105017 - protein, 16 aa, Homo Sapiens
GTWLWINNSPVSFVNW

SEQ ID NO: 105018 - protein, 16 aa, Homo Sapiens
TWLWINNSPVSFVNWN

SEQ ID NO: 105019 - protein, 16 aa, Homo Sapiens
WLWINNSPVSFVNWNT

SEQ ID NO: 105020 - protein, 16 aa, Homo Sapiens
LWINNSPVSFVNWNTG

SEQ ID NO: 105021 - protein, 16 aa, Homo Sapiens
WINNSPVSFVNWNTGD

SEQ ID NO: 105022 - protein, 16 aa, Homo Sapiens
INNSPVSFVNWNTGDP

SEQ ID NO: 105023 - protein, 16 aa, Homo Sapiens
NNSPVSFVNWNTGDPS

SEQ ID NO: 105024 - protein, 16 aa, Homo Sapiens
NSPVSFVNWNTGDPSG

SEQ ID NO: 105025 - protein, 16 aa, Homo Sapiens
SPVSFVNWNTGDPSGE

SEQ ID NO: 105026 - protein, 16 aa, Homo Sapiens
PVSFVNWNTGDPSGER

SEQ ID NO: 105027 - protein, 16 aa, Homo Sapiens
VSFVNWNTGDPSGERN

SEQ ID NO: 105028 - protein, 16 aa, Homo Sapiens
SFVNWNTGDPSGERND

SEQ ID NO: 105029 - protein, 16 aa, Homo Sapiens
FVNWNTGDPSGERNDC

SEQ ID NO: 105030 - protein, 16 aa, Homo Sapiens
VNWNTGDPSGERNDCV

SEQ ID NO: 105031 - protein, 16 aa, Homo Sapiens
NWNTGDPSGERNDCVA

SEQ ID NO: 105032 - protein, 16 aa, Homo Sapiens
WNTGDPSGERNDCVAL

SEQ ID NO: 105033 - protein, 16 aa, Homo Sapiens
NTGDPSGERNDCVALH

SEQ ID NO: 105034 - protein, 16 aa, Homo Sapiens
TGDPSGERNDCVALHA

SEQ ID NO: 105035 - protein, 16 aa, Homo Sapiens
GDPSGERNDCVALHAS

SEQ ID NO: 105036 - protein, 16 aa, Homo Sapiens
DPSGERNDCVALHASS

SEQ ID NO: 105037 - protein, 16 aa, Homo Sapiens
PSGERNDCVALHASSG

SEQ ID NO: 105038 - protein, 16 aa, Homo Sapiens
SGERNDCVALHASSGF

SEQ ID NO: 105039 - protein, 16 aa, Homo Sapiens
GERNDCVALHASSGFW

SEQ ID NO: 105040 - protein, 16 aa, Homo Sapiens
ERNDCVALHASSGFWS

SEQ ID NO: 105041 - protein, 16 aa, Homo Sapiens
RNDCVALHASSGFWSN

SEQ ID NO: 105042 - protein, 16 aa, Homo Sapiens
NDCVALHASSGFWSNI

SEQ ID NO: 105043 - protein, 16 aa, Homo Sapiens
DCVALHASSGFWSNIH

SEQ ID NO: 105044 - protein, 16 aa, Homo Sapiens
CVALHASSGFWSNIHC

SEQ ID NO: 105045 - protein, 16 aa, Homo Sapiens
VALHASSGFWSNIHCS

SEQ ID NO: 105046 - protein, 16 aa, Homo Sapiens
ALHASSGFWSNIHCSS

SEQ ID NO: 105047 - protein, 16 aa, Homo Sapiens
LHASSGFWSNIHCSSY

SEQ ID NO: 105048 - protein, 16 aa, Homo Sapiens
HASSGFWSNIHCSSYK

SEQ ID NO: 105049 - protein, 16 aa, Homo Sapiens
ASSGFWSNIHCSSYKG

SEQ ID NO: 105050 - protein, 16 aa, Homo Sapiens
SSGFWSNIHCSSYKGY

SEQ ID NO: 105051 - protein, 16 aa, Homo Sapiens
SGFWSNIHCSSYKGYI

SEQ ID NO: 105052 - protein, 16 aa, Homo Sapiens
GFWSNIHCSSYKGYIC

SEQ ID NO: 105053 - protein, 16 aa, Homo Sapiens
FWSNIHCSSYKGYICK

SEQ ID NO: 105054 - protein, 16 aa, Homo Sapiens
WSNIHCSSYKGYICKR

SEQ ID NO: 105055 - protein, 16 aa, Homo Sapiens
SNIHCSSYKGYICKRP

SEQ ID NO: 105056 - protein, 16 aa, Homo Sapiens
NIHCSSYKGYICKRPK

SEQ ID NO: 105057 - protein, 16 aa, Homo Sapiens
IHCSSYKGYICKRPKI

SEQ ID NO: 105058 - protein, 16 aa, Homo Sapiens
HCSSYKGYICKRPKII

SEQ ID NO: 105059 - protein, 16 aa, Homo Sapiens
CSSYKGYICKRPKIID

SEQ ID NO: 105060 - protein, 16 aa, Homo Sapiens
SSYKGYICKRPKIIDA

SEQ ID NO: 105061 - protein, 16 aa, Homo Sapiens
SYKGYICKRPKIIDAK

SEQ ID NO: 105062 - protein, 16 aa, Homo Sapiens
YKGYICKRPKIIDAKP

SEQ ID NO: 105063 - protein, 16 aa, Homo Sapiens
KGYICKRPKIIDAKPT

SEQ ID NO: 105064 - protein, 16 aa, Homo Sapiens
GYICKRPKIIDAKPTH

SEQ ID NO: 105065 - protein, 16 aa, Homo Sapiens
YICKRPKIIDAKPTHE

SEQ ID NO: 105066 - protein, 16 aa, Homo Sapiens
ICKRPKIIDAKPTHEL

SEQ ID NO: 105067 - protein, 16 aa, Homo Sapiens
CKRPKIIDAKPTHELL

SEQ ID NO: 105068 - protein, 16 aa, Homo Sapiens
KRPKIIDAKPTHELLT

SEQ ID NO: 105069 - protein, 16 aa, Homo Sapiens
RPKIIDAKPTHELLTT

SEQ ID NO: 105070 - protein, 16 aa, Homo Sapiens
PKIIDAKPTHELLTTK

SEQ ID NO: 105071 - protein, 16 aa, Homo Sapiens
KIIDAKPTHELLTTKA

SEQ ID NO: 105072 - protein, 16 aa, Homo Sapiens
IIDAKPTHELLTTKAD

SEQ ID NO: 105073 - protein, 16 aa, Homo Sapiens
IDAKPTHELLTTKADT

SEQ ID NO: 105074 - protein, 16 aa, Homo Sapiens
DAKPTHELLTTKADTR

SEQ ID NO: 105075 - protein, 16 aa, Homo Sapiens
AKPTHELLTTKADTRK

SEQ ID NO: 105076 - protein, 16 aa, Homo Sapiens
KPTHELLTTKADTRKM

SEQ ID NO: 105077 - protein, 16 aa, Homo Sapiens
PTHELLTTKADTRKMD

SEQ ID NO: 105078 - protein, 16 aa, Homo Sapiens
THELLTTKADTRKMDP

SEQ ID NO: 105079 - protein, 16 aa, Homo Sapiens
HELLTTKADTRKMDPS

SEQ ID NO: 105080 - protein, 16 aa, Homo Sapiens
ELLTTKADTRKMDPSK

SEQ ID NO: 105081 - protein, 16 aa, Homo Sapiens
LLTTKADTRKMDPSKP

SEQ ID NO: 105082 - protein, 16 aa, Homo Sapiens
LTTKADTRKMDPSKPS

SEQ ID NO: 105083 - protein, 16 aa, Homo Sapiens
TTKADTRKMDPSKPSS

SEQ ID NO: 105084 - protein, 16 aa, Homo Sapiens
TKADTRKMDPSKPSSN

SEQ ID NO: 105085 - protein, 16 aa, Homo Sapiens
KADTRKMDPSKPSSNV

SEQ ID NO: 105086 - protein, 16 aa, Homo Sapiens
ADTRKMDPSKPSSNVA

SEQ ID NO: 105087 - protein, 16 aa, Homo Sapiens
DTRKMDPSKPSSNVAG

SEQ ID NO: 105088 - protein, 16 aa, Homo Sapiens
TRKMDPSKPSSNVAGV

SEQ ID NO: 105089 - protein, 16 aa, Homo Sapiens
RKMDPSKPSSNVAGVV

SEQ ID NO: 105090 - protein, 16 aa, Homo Sapiens
KMDPSKPSSNVAGVVI

SEQ ID NO: 105091 - protein, 16 aa, Homo Sapiens
MDPSKPSSNVAGVVII

SEQ ID NO: 105092 - protein, 16 aa, Homo Sapiens
DPSKPSSNVAGVVIIV

SEQ ID NO: 105093 - protein, 16 aa, Homo Sapiens
PSKPSSNVAGVVIIVI

SEQ ID NO: 105094 - protein, 16 aa, Homo Sapiens
SKPSSNVAGVVIIVIL

SEQ ID NO: 105095 - protein, 16 aa, Homo Sapiens
KPSSNVAGVVIIVILL

SEQ ID NO: 105096 - protein, 16 aa, Homo Sapiens
PSSNVAGVVIIVILLI

SEQ ID NO: 105097 - protein, 16 aa, Homo Sapiens
SSNVAGVVIIVILLIL

SEQ ID NO: 105098 - protein, 16 aa, Homo Sapiens
SNVAGVVIIVILLILT

SEQ ID NO: 105099 - protein, 16 aa, Homo Sapiens
NVAGVVIIVILLILTG

SEQ ID NO: 105100 - protein, 16 aa, Homo Sapiens
VAGVVIIVILLILTGA

SEQ ID NO: 105101 - protein, 16 aa, Homo Sapiens
AGVVIIVILLILTGAG

SEQ ID NO: 105102 - protein, 16 aa, Homo Sapiens
GVVIIVILLILTGAGL

SEQ ID NO: 105103 - protein, 16 aa, Homo Sapiens
VVIIVILLILTGAGLA

SEQ ID NO: 105104 - protein, 16 aa, Homo Sapiens
VIIVILLILTGAGLAA

SEQ ID NO: 105105 - protein, 16 aa, Homo Sapiens
IIVILLILTGAGLAAY

SEQ ID NO: 105106 - protein, 16 aa, Homo Sapiens
IVILLILTGAGLAAYF

SEQ ID NO: 105107 - protein, 16 aa, Homo Sapiens
VILLILTGAGLAAYFF

SEQ ID NO: 105108 - protein, 16 aa, Homo Sapiens
ILLILTGAGLAAYFFY

SEQ ID NO: 105109 - protein, 16 aa, Homo Sapiens
LLILTGAGLAAYFFYK

SEQ ID NO: 105110 - protein, 16 aa, Homo Sapiens
LILTGAGLAAYFFYKK

SEQ ID NO: 105111 - protein, 16 aa, Homo Sapiens
ILTGAGLAAYFFYKKR

SEQ ID NO: 105112 - protein, 16 aa, Homo Sapiens
LTGAGLAAYFFYKKRR

SEQ ID NO: 105113 - protein, 16 aa, Homo Sapiens
TGAGLAAYFFYKKRRV

SEQ ID NO: 105114 - protein, 16 aa, Homo Sapiens
GAGLAAYFFYKKRRVH

SEQ ID NO: 105115 - protein, 16 aa, Homo Sapiens
AGLAAYFFYKKRRVHL

SEQ ID NO: 105116 - protein, 16 aa, Homo Sapiens
GLAAYFFYKKRRVHLP

SEQ ID NO: 105117 - protein, 16 aa, Homo Sapiens
LAAYFFYKKRRVHLPQ

SEQ ID NO: 105118 - protein, 16 aa, Homo Sapiens
AAYFFYKKRRVHLPQE

SEQ ID NO: 105119 - protein, 16 aa, Homo Sapiens
AYFFYKKRRVHLPQEG

SEQ ID NO: 105120 - protein, 16 aa, Homo Sapiens
YFFYKKRRVHLPQEGA

SEQ ID NO: 105121 - protein, 16 aa, Homo Sapiens
FFYKKRRVHLPQEGAF

SEQ ID NO: 105122 - protein, 16 aa, Homo Sapiens
FYKKRRVHLPQEGAFE

SEQ ID NO: 105123 - protein, 16 aa, Homo Sapiens
YKKRRVHLPQEGAFEN

SEQ ID NO: 105124 - protein, 16 aa, Homo Sapiens
KKRRVHLPQEGAFENT

SEQ ID NO: 105125 - protein, 16 aa, Homo Sapiens
KRRVHLPQEGAFENTL

SEQ ID NO: 105126 - protein, 16 aa, Homo Sapiens
RRVHLPQEGAFENTLY

SEQ ID NO: 105127 - protein, 16 aa, Homo Sapiens
RVHLPQEGAFENTLYF

SEQ ID NO: 105128 - protein, 16 aa, Homo Sapiens
VHLPQEGAFENTLYFN

SEQ ID NO: 105129 - protein, 16 aa, Homo Sapiens
HLPQEGAFENTLYFNS

SEQ ID NO: 105130 - protein, 16 aa, Homo Sapiens
LPQEGAFENTLYFNSQ

SEQ ID NO: 105131 - protein, 16 aa, Homo Sapiens
PQEGAFENTLYFNSQS

SEQ ID NO: 105132 - protein, 16 aa, Homo Sapiens
QEGAFENTLYFNSQSS

SEQ ID NO: 105133 - protein, 16 aa, Homo Sapiens
EGAFENTLYFNSQSSP

SEQ ID NO: 105134 - protein, 16 aa, Homo Sapiens
GAFENTLYFNSQSSPG

SEQ ID NO: 105135 - protein, 16 aa, Homo Sapiens
AFENTLYFNSQSSPGT

SEQ ID NO: 105136 - protein, 16 aa, Homo Sapiens
FENTLYFNSQSSPGTS

SEQ ID NO: 105137 - protein, 16 aa, Homo Sapiens
ENTLYFNSQSSPGTSD

SEQ ID NO: 105138 - protein, 16 aa, Homo Sapiens
NTLYFNSQSSPGTSDM

SEQ ID NO: 105139 - protein, 16 aa, Homo Sapiens
TLYFNSQSSPGTSDMK

SEQ ID NO: 105140 - protein, 16 aa, Homo Sapiens
LYFNSQSSPGTSDMKD

SEQ ID NO: 105141 - protein, 16 aa, Homo Sapiens
YFNSQSSPGTSDMKDL

SEQ ID NO: 105142 - protein, 16 aa, Homo Sapiens
FNSQSSPGTSDMKDLV

SEQ ID NO: 105143 - protein, 16 aa, Homo Sapiens
NSQSSPGTSDMKDLVG

SEQ ID NO: 105144 - protein, 16 aa, Homo Sapiens
SQSSPGTSDMKDLVGN

SEQ ID NO: 105145 - protein, 16 aa, Homo Sapiens
QSSPGTSDMKDLVGNI

SEQ ID NO: 105146 - protein, 16 aa, Homo Sapiens
SSPGTSDMKDLVGNIE

SEQ ID NO: 105147 - protein, 16 aa, Homo Sapiens
SPGTSDMKDLVGNIEQ

SEQ ID NO: 105148 - protein, 16 aa, Homo Sapiens
PGTSDMKDLVGNIEQN

SEQ ID NO: 105149 - protein, 16 aa, Homo Sapiens
GTSDMKDLVGNIEQNE

SEQ ID NO: 105150 - protein, 16 aa, Homo Sapiens
TSDMKDLVGNIEQNEH

SEQ ID NO: 105151 - protein, 16 aa, Homo Sapiens
SDMKDLVGNIEQNEHS

SEQ ID NO: 105152 - protein, 16 aa, Homo Sapiens
DMKDLVGNIEQNEHSV

SEQ ID NO: 105153 - protein, 16 aa, Homo Sapiens
MKDLVGNIEQNEHSVI

SEQ ID NO: 105154 - protein, 171 aa, Homo Sapiens
MTEYKLVVVGAGGVGKSALTIQLIQNHFVDEYDPTIEDSYRKQVVIDGETCLLDILDTAGQEEYSAMRDQYMRTGEGFLCVFAINNTKSFEDIHQYREQIKRVKDSDDVPMVLVGNKCDLAARTVESRQAQDLARSYGIPYIETSAKTRQGVEDAFYTLVREIRQHKLRKL

SEQ ID NO: 105155 - protein, 8 aa, Homo Sapiens
MTEYKLVV

SEQ ID NO: 105156 - protein, 8 aa, Homo Sapiens
TEYKLVVV

SEQ ID NO: 105157 - protein, 8 aa, Homo Sapiens
VVVGAGGV

SEQ ID NO: 105158 - protein, 8 aa, Homo Sapiens
SALTIQLI

SEQ ID NO: 105159 - protein, 8 aa, Homo Sapiens
ALTIQLIQ

SEQ ID NO: 105160 - protein, 8 aa, Homo Sapiens
IQLIQNHF

SEQ ID NO: 105161 - protein, 8 aa, Homo Sapiens
QLIQNHFV

SEQ ID NO: 105162 - protein, 8 aa, Homo Sapiens
FVDEYDPT

SEQ ID NO: 105163 - protein, 8 aa, Homo Sapiens
DPTIEDSY

SEQ ID NO: 105164 - protein, 8 aa, Homo Sapiens
PTIEDSYR

SEQ ID NO: 105165 - protein, 8 aa, Homo Sapiens
TIEDSYRK

SEQ ID NO: 105166 - protein, 8 aa, Homo Sapiens
SYRKQVVI

SEQ ID NO: 105167 - protein, 8 aa, Homo Sapiens
KQVVIDGE

SEQ ID NO: 105168 - protein, 8 aa, Homo Sapiens
VVIDGETC

SEQ ID NO: 105169 - protein, 8 aa, Homo Sapiens
VIDGETCL

SEQ ID NO: 105170 - protein, 8 aa, Homo Sapiens
GETCLLDI

SEQ ID NO: 105171 - protein, 8 aa, Homo Sapiens
ETCLLDIL

SEQ ID NO: 105172 - protein, 8 aa, Homo Sapiens
CLLDILDT

SEQ ID NO: 105173 - protein, 8 aa, Homo Sapiens
LLDILDTA

SEQ ID NO: 105174 - protein, 8 aa, Homo Sapiens
DTAGQEEY

SEQ ID NO: 105175 - protein, 8 aa, Homo Sapiens
GQEEYSAM

SEQ ID NO: 105176 - protein, 8 aa, Homo Sapiens
YSAMRDQY

SEQ ID NO: 105177 - protein, 8 aa, Homo Sapiens
AMRDQYMR

SEQ ID NO: 105178 - protein, 8 aa, Homo Sapiens
YMRTGEGF

SEQ ID NO: 105179 - protein, 8 aa, Homo Sapiens
GEGFLCVF

SEQ ID NO: 105180 - protein, 8 aa, Homo Sapiens
EGFLCVFA

SEQ ID NO: 105181 - protein, 8 aa, Homo Sapiens
GFLCVFAI

SEQ ID NO: 105182 - protein, 8 aa, Homo Sapiens
CVFAINNT

SEQ ID NO: 105183 - protein, 8 aa, Homo Sapiens
VFAINNTK

SEQ ID NO: 105184 - protein, 8 aa, Homo Sapiens
SFEDIHQY

SEQ ID NO: 105185 - protein, 8 aa, Homo Sapiens
HQYREQIK

SEQ ID NO: 105186 - protein, 8 aa, Homo Sapiens
QYREQIKR

SEQ ID NO: 105187 - protein, 8 aa, Homo Sapiens
DSDDVPMV

SEQ ID NO: 105188 - protein, 8 aa, Homo Sapiens
VPMVLVGN

SEQ ID NO: 105189 - protein, 8 aa, Homo Sapiens
AARTVESR

SEQ ID NO: 105190 - protein, 8 aa, Homo Sapiens
RQAQDLAR

SEQ ID NO: 105191 - protein, 8 aa, Homo Sapiens
AQDLARSY

SEQ ID NO: 105192 - protein, 8 aa, Homo Sapiens
DLARSYGI

SEQ ID NO: 105193 - protein, 8 aa, Homo Sapiens
RSYGIPYI

SEQ ID NO: 105194 - protein, 8 aa, Homo Sapiens
IPYIETSA

SEQ ID NO: 105195 - protein, 8 aa, Homo Sapiens
PYIETSAK

SEQ ID NO: 105196 - protein, 8 aa, Homo Sapiens
SAKTRQGV

SEQ ID NO: 105197 - protein, 8 aa, Homo Sapiens
RQGVEDAF

SEQ ID NO: 105198 - protein, 8 aa, Homo Sapiens
QGVEDAFY

SEQ ID NO: 105199 - protein, 8 aa, Homo Sapiens
VEDAFYTL

SEQ ID NO: 105200 - protein, 8 aa, Homo Sapiens
EDAFYTLV

SEQ ID NO: 105201 - protein, 8 aa, Homo Sapiens
DAFYTLVR

SEQ ID NO: 105202 - protein, 8 aa, Homo Sapiens
FYTLVREI

SEQ ID NO: 105203 - protein, 8 aa, Homo Sapiens
YTLVREIR

SEQ ID NO: 105204 - protein, 8 aa, Homo Sapiens
REIRQHKL

SEQ ID NO: 105205 - protein, 8 aa, Homo Sapiens
EIRQHKLR

SEQ ID NO: 105206 - protein, 9 aa, Homo Sapiens
MTEYKLVVV

SEQ ID NO: 105207 - protein, 9 aa, Homo Sapiens
LVVVGAGGV

SEQ ID NO: 105208 - protein, 9 aa, Homo Sapiens
VVGAGGVGK

SEQ ID NO: 105209 - protein, 9 aa, Homo Sapiens
TIQLIQNHF

SEQ ID NO: 105210 - protein, 9 aa, Homo Sapiens
IQLIQNHFV

SEQ ID NO: 105211 - protein, 9 aa, Homo Sapiens
IQNHFVDEY

SEQ ID NO: 105212 - protein, 9 aa, Homo Sapiens
FVDEYDPTI

SEQ ID NO: 105213 - protein, 9 aa, Homo Sapiens
DPTIEDSYR

SEQ ID NO: 105214 - protein, 9 aa, Homo Sapiens
PTIEDSYRK

SEQ ID NO: 105215 - protein, 9 aa, Homo Sapiens
VVIDGETCL

SEQ ID NO: 105216 - protein, 9 aa, Homo Sapiens
VIDGETCLL

SEQ ID NO: 105217 - protein, 9 aa, Homo Sapiens
GETCLLDIL

SEQ ID NO: 105218 - protein, 9 aa, Homo Sapiens
CLLDILDTA

SEQ ID NO: 105219 - protein, 9 aa, Homo Sapiens
GQEEYSAMR

SEQ ID NO: 105220 - protein, 9 aa, Homo Sapiens
EYSAMRDQY

SEQ ID NO: 105221 - protein, 9 aa, Homo Sapiens
YSAMRDQYM

SEQ ID NO: 105222 - protein, 9 aa, Homo Sapiens
SAMRDQYMR

SEQ ID NO: 105223 - protein, 9 aa, Homo Sapiens
AMRDQYMRT

SEQ ID NO: 105224 - protein, 9 aa, Homo Sapiens
QYMRTGEGF

SEQ ID NO: 105225 - protein, 9 aa, Homo Sapiens
YMRTGEGFL

SEQ ID NO: 105226 - protein, 9 aa, Homo Sapiens
RTGEGFLCV

SEQ ID NO: 105227 - protein, 9 aa, Homo Sapiens
EGFLCVFAI

SEQ ID NO: 105228 - protein, 9 aa, Homo Sapiens
CVFAINNTK

SEQ ID NO: 105229 - protein, 9 aa, Homo Sapiens
FAINNTKSF

SEQ ID NO: 105230 - protein, 9 aa, Homo Sapiens
KSFEDIHQY

SEQ ID NO: 105231 - protein, 9 aa, Homo Sapiens
SFEDIHQYR

SEQ ID NO: 105232 - protein, 9 aa, Homo Sapiens
HQYREQIKR

SEQ ID NO: 105233 - protein, 9 aa, Homo Sapiens
YREQIKRVK

SEQ ID NO: 105234 - protein, 9 aa, Homo Sapiens
KDSDDVPMV

SEQ ID NO: 105235 - protein, 9 aa, Homo Sapiens
VPMVLVGNK

SEQ ID NO: 105236 - protein, 9 aa, Homo Sapiens
VLVGNKCDL

SEQ ID NO: 105237 - protein, 9 aa, Homo Sapiens
LAARTVESR

SEQ ID NO: 105238 - protein, 9 aa, Homo Sapiens
RQAQDLARS

SEQ ID NO: 105239 - protein, 9 aa, Homo Sapiens
QAQDLARSY

SEQ ID NO: 105240 - protein, 9 aa, Homo Sapiens
LARSYGIPY

SEQ ID NO: 105241 - protein, 9 aa, Homo Sapiens
GIPYIETSA

SEQ ID NO: 105242 - protein, 9 aa, Homo Sapiens
IPYIETSAK

SEQ ID NO: 105243 - protein, 9 aa, Homo Sapiens
YIETSAKTR

SEQ ID NO: 105244 - protein, 9 aa, Homo Sapiens
TSAKTRQGV

SEQ ID NO: 105245 - protein, 9 aa, Homo Sapiens
RQGVEDAFY

SEQ ID NO: 105246 - protein, 9 aa, Homo Sapiens
GVEDAFYTL

SEQ ID NO: 105247 - protein, 9 aa, Homo Sapiens
VEDAFYTLV

SEQ ID NO: 105248 - protein, 9 aa, Homo Sapiens
EDAFYTLVR

SEQ ID NO: 105249 - protein, 9 aa, Homo Sapiens
FYTLVREIR

SEQ ID NO: 105250 - protein, 9 aa, Homo Sapiens
LVREIRQHK

SEQ ID NO: 105251 - protein, 9 aa, Homo Sapiens
EIRQHKLRK

SEQ ID NO: 105252 - protein, 10 aa, Homo Sapiens
KLVVVGAGGV

SEQ ID NO: 105253 - protein, 10 aa, Homo Sapiens
VVVGAGGVGK

SEQ ID NO: 105254 - protein, 10 aa, Homo Sapiens
LTIQLIQNHF

SEQ ID NO: 105255 - protein, 10 aa, Homo Sapiens
TIQLIQNHFV

SEQ ID NO: 105256 - protein, 10 aa, Homo Sapiens
LIQNHFVDEY

SEQ ID NO: 105257 - protein, 10 aa, Homo Sapiens
TIEDSYRKQV

SEQ ID NO: 105258 - protein, 10 aa, Homo Sapiens
KQVVIDGETC

SEQ ID NO: 105259 - protein, 10 aa, Homo Sapiens
QVVIDGETCL

SEQ ID NO: 105260 - protein, 10 aa, Homo Sapiens
VVIDGETCLL

SEQ ID NO: 105261 - protein, 10 aa, Homo Sapiens
LLDILDTAGQ

SEQ ID NO: 105262 - protein, 10 aa, Homo Sapiens
ILDTAGQEEY

SEQ ID NO: 105263 - protein, 10 aa, Homo Sapiens
DTAGQEEYSA

SEQ ID NO: 105264 - protein, 10 aa, Homo Sapiens
TAGQEEYSAM

SEQ ID NO: 105265 - protein, 10 aa, Homo Sapiens
EEYSAMRDQY

SEQ ID NO: 105266 - protein, 10 aa, Homo Sapiens
YSAMRDQYMR

SEQ ID NO: 105267 - protein, 10 aa, Homo Sapiens
DQYMRTGEGF

SEQ ID NO: 105268 - protein, 10 aa, Homo Sapiens
QYMRTGEGFL

SEQ ID NO: 105269 - protein, 10 aa, Homo Sapiens
YMRTGEGFLC

SEQ ID NO: 105270 - protein, 10 aa, Homo Sapiens
RTGEGFLCVF

SEQ ID NO: 105271 - protein, 10 aa, Homo Sapiens
GEGFLCVFAI

SEQ ID NO: 105272 - protein, 10 aa, Homo Sapiens
FLCVFAINNT

SEQ ID NO: 105273 - protein, 10 aa, Homo Sapiens
CVFAINNTKS

SEQ ID NO: 105274 - protein, 10 aa, Homo Sapiens
VFAINNTKSF

SEQ ID NO: 105275 - protein, 10 aa, Homo Sapiens
KSFEDIHQYR

SEQ ID NO: 105276 - protein, 10 aa, Homo Sapiens
DIHQYREQIK

SEQ ID NO: 105277 - protein, 10 aa, Homo Sapiens
HQYREQIKRV

SEQ ID NO: 105278 - protein, 10 aa, Homo Sapiens
QYREQIKRVK

SEQ ID NO: 105279 - protein, 10 aa, Homo Sapiens
RVKDSDDVPM

SEQ ID NO: 105280 - protein, 10 aa, Homo Sapiens
VKDSDDVPMV

SEQ ID NO: 105281 - protein, 10 aa, Homo Sapiens
DSDDVPMVLV

SEQ ID NO: 105282 - protein, 10 aa, Homo Sapiens
DVPMVLVGNK

SEQ ID NO: 105283 - protein, 10 aa, Homo Sapiens
VPMVLVGNKC

SEQ ID NO: 105284 - protein, 10 aa, Homo Sapiens
VLVGNKCDLA

SEQ ID NO: 105285 - protein, 10 aa, Homo Sapiens
DLAARTVESR

SEQ ID NO: 105286 - protein, 10 aa, Homo Sapiens
ESRQAQDLAR

SEQ ID NO: 105287 - protein, 10 aa, Homo Sapiens
RQAQDLARSY

SEQ ID NO: 105288 - protein, 10 aa, Homo Sapiens
AQDLARSYGI

SEQ ID NO: 105289 - protein, 10 aa, Homo Sapiens
DLARSYGIPY

SEQ ID NO: 105290 - protein, 10 aa, Homo Sapiens
YGIPYIETSA

SEQ ID NO: 105291 - protein, 10 aa, Homo Sapiens
GIPYIETSAK

SEQ ID NO: 105292 - protein, 10 aa, Homo Sapiens
IPYIETSAKT

SEQ ID NO: 105293 - protein, 10 aa, Homo Sapiens
ETSAKTRQGV

SEQ ID NO: 105294 - protein, 10 aa, Homo Sapiens
KTRQGVEDAF

SEQ ID NO: 105295 - protein, 10 aa, Homo Sapiens
RQGVEDAFYT

SEQ ID NO: 105296 - protein, 10 aa, Homo Sapiens
QGVEDAFYTL

SEQ ID NO: 105297 - protein, 10 aa, Homo Sapiens
GVEDAFYTLV

SEQ ID NO: 105298 - protein, 10 aa, Homo Sapiens
DAFYTLVREI

SEQ ID NO: 105299 - protein, 10 aa, Homo Sapiens
AFYTLVREIR

SEQ ID NO: 105300 - protein, 10 aa, Homo Sapiens
TLVREIRQHK

SEQ ID NO: 105301 - protein, 10 aa, Homo Sapiens
LVREIRQHKL

SEQ ID NO: 105302 - protein, 10 aa, Homo Sapiens
EIRQHKLRKL

SEQ ID NO: 105303 - protein, 11 aa, Homo Sapiens
MTEYKLVVVGA

SEQ ID NO: 105304 - protein, 11 aa, Homo Sapiens
LVVVGAGGVGK

SEQ ID NO: 105305 - protein, 11 aa, Homo Sapiens
GVGKSALTIQL

SEQ ID NO: 105306 - protein, 11 aa, Homo Sapiens
LTIQLIQNHFV

SEQ ID NO: 105307 - protein, 11 aa, Homo Sapiens
QLIQNHFVDEY

SEQ ID NO: 105308 - protein, 11 aa, Homo Sapiens
DEYDPTIEDSY

SEQ ID NO: 105309 - protein, 11 aa, Homo Sapiens
EYDPTIEDSYR

SEQ ID NO: 105310 - protein, 11 aa, Homo Sapiens
PTIEDSYRKQV

SEQ ID NO: 105311 - protein, 11 aa, Homo Sapiens
TIEDSYRKQVV

SEQ ID NO: 105312 - protein, 11 aa, Homo Sapiens
KQVVIDGETCL

SEQ ID NO: 105313 - protein, 11 aa, Homo Sapiens
QVVIDGETCLL

SEQ ID NO: 105314 - protein, 11 aa, Homo Sapiens
VIDGETCLLDI

SEQ ID NO: 105315 - protein, 11 aa, Homo Sapiens
ETCLLDILDTA

SEQ ID NO: 105316 - protein, 11 aa, Homo Sapiens
CLLDILDTAGQ

SEQ ID NO: 105317 - protein, 11 aa, Homo Sapiens
DILDTAGQEEY

SEQ ID NO: 105318 - protein, 11 aa, Homo Sapiens
DTAGQEEYSAM

SEQ ID NO: 105319 - protein, 11 aa, Homo Sapiens
TAGQEEYSAMR

SEQ ID NO: 105320 - protein, 11 aa, Homo Sapiens
EEYSAMRDQYM

SEQ ID NO: 105321 - protein, 11 aa, Homo Sapiens
EYSAMRDQYMR

SEQ ID NO: 105322 - protein, 11 aa, Homo Sapiens
YMRTGEGFLCV

SEQ ID NO: 105323 - protein, 11 aa, Homo Sapiens
RTGEGFLCVFA

SEQ ID NO: 105324 - protein, 11 aa, Homo Sapiens
FLCVFAINNTK

SEQ ID NO: 105325 - protein, 11 aa, Homo Sapiens
CVFAINNTKSF

SEQ ID NO: 105326 - protein, 11 aa, Homo Sapiens
NTKSFEDIHQY

SEQ ID NO: 105327 - protein, 11 aa, Homo Sapiens
TKSFEDIHQYR

SEQ ID NO: 105328 - protein, 11 aa, Homo Sapiens
FEDIHQYREQI

SEQ ID NO: 105329 - protein, 11 aa, Homo Sapiens
DIHQYREQIKR

SEQ ID NO: 105330 - protein, 11 aa, Homo Sapiens
HQYREQIKRVK

SEQ ID NO: 105331 - protein, 11 aa, Homo Sapiens
KRVKDSDDVPM

SEQ ID NO: 105332 - protein, 11 aa, Homo Sapiens
RVKDSDDVPMV

SEQ ID NO: 105333 - protein, 11 aa, Homo Sapiens
KDSDDVPMVLV

SEQ ID NO: 105334 - protein, 11 aa, Homo Sapiens
VLVGNKCDLAA

SEQ ID NO: 105335 - protein, 11 aa, Homo Sapiens
LVGNKCDLAAR

SEQ ID NO: 105336 - protein, 11 aa, Homo Sapiens
SRQAQDLARSY

SEQ ID NO: 105337 - protein, 11 aa, Homo Sapiens
QAQDLARSYGI

SEQ ID NO: 105338 - protein, 11 aa, Homo Sapiens
DLARSYGIPYI

SEQ ID NO: 105339 - protein, 11 aa, Homo Sapiens
IPYIETSAKTR

SEQ ID NO: 105340 - protein, 11 aa, Homo Sapiens
KTRQGVEDAFY

SEQ ID NO: 105341 - protein, 11 aa, Homo Sapiens
RQGVEDAFYTL

SEQ ID NO: 105342 - protein, 11 aa, Homo Sapiens
QGVEDAFYTLV

SEQ ID NO: 105343 - protein, 11 aa, Homo Sapiens
GVEDAFYTLVR

SEQ ID NO: 105344 - protein, 11 aa, Homo Sapiens
DAFYTLVREIR

SEQ ID NO: 105345 - protein, 11 aa, Homo Sapiens
YTLVREIRQHK

SEQ ID NO: 105346 - protein, 11 aa, Homo Sapiens
TLVREIRQHKL

SEQ ID NO: 105347 - protein, 11 aa, Homo Sapiens
LVREIRQHKLR

SEQ ID NO: 105348 - protein, 11 aa, Homo Sapiens
REIRQHKLRKL

SEQ ID NO: 105349 - protein, 13 aa, Homo Sapiens
MTEYKLVVVGAGG

SEQ ID NO: 105350 - protein, 13 aa, Homo Sapiens
TEYKLVVVGAGGV

SEQ ID NO: 105351 - protein, 13 aa, Homo Sapiens
EYKLVVVGAGGVG

SEQ ID NO: 105352 - protein, 13 aa, Homo Sapiens
YKLVVVGAGGVGK

SEQ ID NO: 105353 - protein, 13 aa, Homo Sapiens
KLVVVGAGGVGKS

SEQ ID NO: 105354 - protein, 13 aa, Homo Sapiens
LVVVGAGGVGKSA

SEQ ID NO: 105355 - protein, 13 aa, Homo Sapiens
VVVGAGGVGKSAL

SEQ ID NO: 105356 - protein, 13 aa, Homo Sapiens
VVGAGGVGKSALT

SEQ ID NO: 105357 - protein, 13 aa, Homo Sapiens
VGAGGVGKSALTI

SEQ ID NO: 105358 - protein, 13 aa, Homo Sapiens
GAGGVGKSALTIQ

SEQ ID NO: 105359 - protein, 13 aa, Homo Sapiens
AGGVGKSALTIQL

SEQ ID NO: 105360 - protein, 13 aa, Homo Sapiens
GGVGKSALTIQLI

SEQ ID NO: 105361 - protein, 13 aa, Homo Sapiens
GVGKSALTIQLIQ

SEQ ID NO: 105362 - protein, 13 aa, Homo Sapiens
VGKSALTIQLIQN

SEQ ID NO: 105363 - protein, 13 aa, Homo Sapiens
GKSALTIQLIQNH

SEQ ID NO: 105364 - protein, 13 aa, Homo Sapiens
KSALTIQLIQNHF

SEQ ID NO: 105365 - protein, 13 aa, Homo Sapiens
SALTIQLIQNHFV

SEQ ID NO: 105366 - protein, 13 aa, Homo Sapiens
ALTIQLIQNHFVD

SEQ ID NO: 105367 - protein, 13 aa, Homo Sapiens
LTIQLIQNHFVDE

SEQ ID NO: 105368 - protein, 13 aa, Homo Sapiens
TIQLIQNHFVDEY

SEQ ID NO: 105369 - protein, 13 aa, Homo Sapiens
IQLIQNHFVDEYD

SEQ ID NO: 105370 - protein, 13 aa, Homo Sapiens
QLIQNHFVDEYDP

SEQ ID NO: 105371 - protein, 13 aa, Homo Sapiens
LIQNHFVDEYDPT

SEQ ID NO: 105372 - protein, 13 aa, Homo Sapiens
IQNHFVDEYDPTI

SEQ ID NO: 105373 - protein, 13 aa, Homo Sapiens
QNHFVDEYDPTIE

SEQ ID NO: 105374 - protein, 13 aa, Homo Sapiens
NHFVDEYDPTIED

SEQ ID NO: 105375 - protein, 13 aa, Homo Sapiens
HFVDEYDPTIEDS

SEQ ID NO: 105376 - protein, 13 aa, Homo Sapiens
FVDEYDPTIEDSY

SEQ ID NO: 105377 - protein, 13 aa, Homo Sapiens
VDEYDPTIEDSYR

SEQ ID NO: 105378 - protein, 13 aa, Homo Sapiens
DEYDPTIEDSYRK

SEQ ID NO: 105379 - protein, 13 aa, Homo Sapiens
EYDPTIEDSYRKQ

SEQ ID NO: 105380 - protein, 13 aa, Homo Sapiens
YDPTIEDSYRKQV

SEQ ID NO: 105381 - protein, 13 aa, Homo Sapiens
DPTIEDSYRKQVV

SEQ ID NO: 105382 - protein, 13 aa, Homo Sapiens
PTIEDSYRKQVVI

SEQ ID NO: 105383 - protein, 13 aa, Homo Sapiens
TIEDSYRKQVVID

SEQ ID NO: 105384 - protein, 13 aa, Homo Sapiens
IEDSYRKQVVIDG

SEQ ID NO: 105385 - protein, 13 aa, Homo Sapiens
EDSYRKQVVIDGE

SEQ ID NO: 105386 - protein, 13 aa, Homo Sapiens
DSYRKQVVIDGET

SEQ ID NO: 105387 - protein, 13 aa, Homo Sapiens
SYRKQVVIDGETC

SEQ ID NO: 105388 - protein, 13 aa, Homo Sapiens
YRKQVVIDGETCL

SEQ ID NO: 105389 - protein, 13 aa, Homo Sapiens
RKQVVIDGETCLL

SEQ ID NO: 105390 - protein, 13 aa, Homo Sapiens
KQVVIDGETCLLD

SEQ ID NO: 105391 - protein, 13 aa, Homo Sapiens
QVVIDGETCLLDI

SEQ ID NO: 105392 - protein, 13 aa, Homo Sapiens
VVIDGETCLLDIL

SEQ ID NO: 105393 - protein, 13 aa, Homo Sapiens
VIDGETCLLDILD

SEQ ID NO: 105394 - protein, 13 aa, Homo Sapiens
IDGETCLLDILDT

SEQ ID NO: 105395 - protein, 13 aa, Homo Sapiens
DGETCLLDILDTA

SEQ ID NO: 105396 - protein, 13 aa, Homo Sapiens
GETCLLDILDTAG

SEQ ID NO: 105397 - protein, 13 aa, Homo Sapiens
ETCLLDILDTAGQ

SEQ ID NO: 105398 - protein, 13 aa, Homo Sapiens
TCLLDILDTAGQE

SEQ ID NO: 105399 - protein, 13 aa, Homo Sapiens
CLLDILDTAGQEE

SEQ ID NO: 105400 - protein, 13 aa, Homo Sapiens
LLDILDTAGQEEY

SEQ ID NO: 105401 - protein, 13 aa, Homo Sapiens
LDILDTAGQEEYS

SEQ ID NO: 105402 - protein, 13 aa, Homo Sapiens
DILDTAGQEEYSA

SEQ ID NO: 105403 - protein, 13 aa, Homo Sapiens
ILDTAGQEEYSAM

SEQ ID NO: 105404 - protein, 13 aa, Homo Sapiens
LDTAGQEEYSAMR

SEQ ID NO: 105405 - protein, 13 aa, Homo Sapiens
DTAGQEEYSAMRD

SEQ ID NO: 105406 - protein, 13 aa, Homo Sapiens
TAGQEEYSAMRDQ

SEQ ID NO: 105407 - protein, 13 aa, Homo Sapiens
AGQEEYSAMRDQY

SEQ ID NO: 105408 - protein, 13 aa, Homo Sapiens
GQEEYSAMRDQYM

SEQ ID NO: 105409 - protein, 13 aa, Homo Sapiens
QEEYSAMRDQYMR

SEQ ID NO: 105410 - protein, 13 aa, Homo Sapiens
EEYSAMRDQYMRT

SEQ ID NO: 105411 - protein, 13 aa, Homo Sapiens
EYSAMRDQYMRTG

SEQ ID NO: 105412 - protein, 13 aa, Homo Sapiens
YSAMRDQYMRTGE

SEQ ID NO: 105413 - protein, 13 aa, Homo Sapiens
SAMRDQYMRTGEG

SEQ ID NO: 105414 - protein, 13 aa, Homo Sapiens
AMRDQYMRTGEGF

SEQ ID NO: 105415 - protein, 13 aa, Homo Sapiens
MRDQYMRTGEGFL

SEQ ID NO: 105416 - protein, 13 aa, Homo Sapiens
RDQYMRTGEGFLC

SEQ ID NO: 105417 - protein, 13 aa, Homo Sapiens
DQYMRTGEGFLCV

SEQ ID NO: 105418 - protein, 13 aa, Homo Sapiens
QYMRTGEGFLCVF

SEQ ID NO: 105419 - protein, 13 aa, Homo Sapiens
YMRTGEGFLCVFA

SEQ ID NO: 105420 - protein, 13 aa, Homo Sapiens
MRTGEGFLCVFAI

SEQ ID NO: 105421 - protein, 13 aa, Homo Sapiens
RTGEGFLCVFAIN

SEQ ID NO: 105422 - protein, 13 aa, Homo Sapiens
TGEGFLCVFAINN

SEQ ID NO: 105423 - protein, 13 aa, Homo Sapiens
GEGFLCVFAINNT

SEQ ID NO: 105424 - protein, 13 aa, Homo Sapiens
EGFLCVFAINNTK

SEQ ID NO: 105425 - protein, 13 aa, Homo Sapiens
GFLCVFAINNTKS

SEQ ID NO: 105426 - protein, 13 aa, Homo Sapiens
FLCVFAINNTKSF

SEQ ID NO: 105427 - protein, 13 aa, Homo Sapiens
LCVFAINNTKSFE

SEQ ID NO: 105428 - protein, 13 aa, Homo Sapiens
CVFAINNTKSFED

SEQ ID NO: 105429 - protein, 13 aa, Homo Sapiens
VFAINNTKSFEDI

SEQ ID NO: 105430 - protein, 13 aa, Homo Sapiens
FAINNTKSFEDIH

SEQ ID NO: 105431 - protein, 13 aa, Homo Sapiens
AINNTKSFEDIHQ

SEQ ID NO: 105432 - protein, 13 aa, Homo Sapiens
INNTKSFEDIHQY

SEQ ID NO: 105433 - protein, 13 aa, Homo Sapiens
NNTKSFEDIHQYR

SEQ ID NO: 105434 - protein, 13 aa, Homo Sapiens
NTKSFEDIHQYRE

SEQ ID NO: 105435 - protein, 13 aa, Homo Sapiens
TKSFEDIHQYREQ

SEQ ID NO: 105436 - protein, 13 aa, Homo Sapiens
KSFEDIHQYREQI

SEQ ID NO: 105437 - protein, 13 aa, Homo Sapiens
SFEDIHQYREQIK

SEQ ID NO: 105438 - protein, 13 aa, Homo Sapiens
FEDIHQYREQIKR

SEQ ID NO: 105439 - protein, 13 aa, Homo Sapiens
EDIHQYREQIKRV

SEQ ID NO: 105440 - protein, 13 aa, Homo Sapiens
DIHQYREQIKRVK

SEQ ID NO: 105441 - protein, 13 aa, Homo Sapiens
IHQYREQIKRVKD

SEQ ID NO: 105442 - protein, 13 aa, Homo Sapiens
HQYREQIKRVKDS

SEQ ID NO: 105443 - protein, 13 aa, Homo Sapiens
QYREQIKRVKDSD

SEQ ID NO: 105444 - protein, 13 aa, Homo Sapiens
YREQIKRVKDSDD

SEQ ID NO: 105445 - protein, 13 aa, Homo Sapiens
REQIKRVKDSDDV

SEQ ID NO: 105446 - protein, 13 aa, Homo Sapiens
EQIKRVKDSDDVP

SEQ ID NO: 105447 - protein, 13 aa, Homo Sapiens
QIKRVKDSDDVPM

SEQ ID NO: 105448 - protein, 13 aa, Homo Sapiens
IKRVKDSDDVPMV

SEQ ID NO: 105449 - protein, 13 aa, Homo Sapiens
KRVKDSDDVPMVL

SEQ ID NO: 105450 - protein, 13 aa, Homo Sapiens
RVKDSDDVPMVLV

SEQ ID NO: 105451 - protein, 13 aa, Homo Sapiens
VKDSDDVPMVLVG

SEQ ID NO: 105452 - protein, 13 aa, Homo Sapiens
KDSDDVPMVLVGN

SEQ ID NO: 105453 - protein, 13 aa, Homo Sapiens
DSDDVPMVLVGNK

SEQ ID NO: 105454 - protein, 13 aa, Homo Sapiens
SDDVPMVLVGNKC

SEQ ID NO: 105455 - protein, 13 aa, Homo Sapiens
DDVPMVLVGNKCD

SEQ ID NO: 105456 - protein, 13 aa, Homo Sapiens
DVPMVLVGNKCDL

SEQ ID NO: 105457 - protein, 13 aa, Homo Sapiens
VPMVLVGNKCDLA

SEQ ID NO: 105458 - protein, 13 aa, Homo Sapiens
PMVLVGNKCDLAA

SEQ ID NO: 105459 - protein, 13 aa, Homo Sapiens
MVLVGNKCDLAAR

SEQ ID NO: 105460 - protein, 13 aa, Homo Sapiens
VLVGNKCDLAART

SEQ ID NO: 105461 - protein, 13 aa, Homo Sapiens
LVGNKCDLAARTV

SEQ ID NO: 105462 - protein, 13 aa, Homo Sapiens
VGNKCDLAARTVE

SEQ ID NO: 105463 - protein, 13 aa, Homo Sapiens
GNKCDLAARTVES

SEQ ID NO: 105464 - protein, 13 aa, Homo Sapiens
NKCDLAARTVESR

SEQ ID NO: 105465 - protein, 13 aa, Homo Sapiens
KCDLAARTVESRQ

SEQ ID NO: 105466 - protein, 13 aa, Homo Sapiens
CDLAARTVESRQA

SEQ ID NO: 105467 - protein, 13 aa, Homo Sapiens
DLAARTVESRQAQ

SEQ ID NO: 105468 - protein, 13 aa, Homo Sapiens
LAARTVESRQAQD

SEQ ID NO: 105469 - protein, 13 aa, Homo Sapiens
AARTVESRQAQDL

SEQ ID NO: 105470 - protein, 13 aa, Homo Sapiens
ARTVESRQAQDLA

SEQ ID NO: 105471 - protein, 13 aa, Homo Sapiens
RTVESRQAQDLAR

SEQ ID NO: 105472 - protein, 13 aa, Homo Sapiens
TVESRQAQDLARS

SEQ ID NO: 105473 - protein, 13 aa, Homo Sapiens
VESRQAQDLARSY

SEQ ID NO: 105474 - protein, 13 aa, Homo Sapiens
ESRQAQDLARSYG

SEQ ID NO: 105475 - protein, 13 aa, Homo Sapiens
SRQAQDLARSYGI

SEQ ID NO: 105476 - protein, 13 aa, Homo Sapiens
RQAQDLARSYGIP

SEQ ID NO: 105477 - protein, 13 aa, Homo Sapiens
QAQDLARSYGIPY

SEQ ID NO: 105478 - protein, 13 aa, Homo Sapiens
AQDLARSYGIPYI

SEQ ID NO: 105479 - protein, 13 aa, Homo Sapiens
QDLARSYGIPYIE

SEQ ID NO: 105480 - protein, 13 aa, Homo Sapiens
DLARSYGIPYIET

SEQ ID NO: 105481 - protein, 13 aa, Homo Sapiens
LARSYGIPYIETS

SEQ ID NO: 105482 - protein, 13 aa, Homo Sapiens
ARSYGIPYIETSA

SEQ ID NO: 105483 - protein, 13 aa, Homo Sapiens
RSYGIPYIETSAK

SEQ ID NO: 105484 - protein, 13 aa, Homo Sapiens
SYGIPYIETSAKT

SEQ ID NO: 105485 - protein, 13 aa, Homo Sapiens
YGIPYIETSAKTR

SEQ ID NO: 105486 - protein, 13 aa, Homo Sapiens
GIPYIETSAKTRQ

SEQ ID NO: 105487 - protein, 13 aa, Homo Sapiens
IPYIETSAKTRQG

SEQ ID NO: 105488 - protein, 13 aa, Homo Sapiens
PYIETSAKTRQGV

SEQ ID NO: 105489 - protein, 13 aa, Homo Sapiens
YIETSAKTRQGVE

SEQ ID NO: 105490 - protein, 13 aa, Homo Sapiens
IETSAKTRQGVED

SEQ ID NO: 105491 - protein, 13 aa, Homo Sapiens
ETSAKTRQGVEDA

SEQ ID NO: 105492 - protein, 13 aa, Homo Sapiens
TSAKTRQGVEDAF

SEQ ID NO: 105493 - protein, 13 aa, Homo Sapiens
SAKTRQGVEDAFY

SEQ ID NO: 105494 - protein, 13 aa, Homo Sapiens
AKTRQGVEDAFYT

SEQ ID NO: 105495 - protein, 13 aa, Homo Sapiens
KTRQGVEDAFYTL

SEQ ID NO: 105496 - protein, 13 aa, Homo Sapiens
TRQGVEDAFYTLV

SEQ ID NO: 105497 - protein, 13 aa, Homo Sapiens
RQGVEDAFYTLVR

SEQ ID NO: 105498 - protein, 13 aa, Homo Sapiens
QGVEDAFYTLVRE

SEQ ID NO: 105499 - protein, 13 aa, Homo Sapiens
GVEDAFYTLVREI

SEQ ID NO: 105500 - protein, 13 aa, Homo Sapiens
VEDAFYTLVREIR

SEQ ID NO: 105501 - protein, 13 aa, Homo Sapiens
EDAFYTLVREIRQ

SEQ ID NO: 105502 - protein, 13 aa, Homo Sapiens
DAFYTLVREIRQH

SEQ ID NO: 105503 - protein, 13 aa, Homo Sapiens
AFYTLVREIRQHK

SEQ ID NO: 105504 - protein, 13 aa, Homo Sapiens
FYTLVREIRQHKL

SEQ ID NO: 105505 - protein, 13 aa, Homo Sapiens
YTLVREIRQHKLR

SEQ ID NO: 105506 - protein, 13 aa, Homo Sapiens
TLVREIRQHKLRK

SEQ ID NO: 105507 - protein, 13 aa, Homo Sapiens
LVREIRQHKLRKL

SEQ ID NO: 105508 - protein, 14 aa, Homo Sapiens
MTEYKLVVVGAGGV

SEQ ID NO: 105509 - protein, 14 aa, Homo Sapiens
TEYKLVVVGAGGVG

SEQ ID NO: 105510 - protein, 14 aa, Homo Sapiens
EYKLVVVGAGGVGK

SEQ ID NO: 105511 - protein, 14 aa, Homo Sapiens
YKLVVVGAGGVGKS

SEQ ID NO: 105512 - protein, 14 aa, Homo Sapiens
KLVVVGAGGVGKSA

SEQ ID NO: 105513 - protein, 14 aa, Homo Sapiens
LVVVGAGGVGKSAL

SEQ ID NO: 105514 - protein, 14 aa, Homo Sapiens
VVVGAGGVGKSALT

SEQ ID NO: 105515 - protein, 14 aa, Homo Sapiens
VVGAGGVGKSALTI

SEQ ID NO: 105516 - protein, 14 aa, Homo Sapiens
VGAGGVGKSALTIQ

SEQ ID NO: 105517 - protein, 14 aa, Homo Sapiens
GAGGVGKSALTIQL

SEQ ID NO: 105518 - protein, 14 aa, Homo Sapiens
AGGVGKSALTIQLI

SEQ ID NO: 105519 - protein, 14 aa, Homo Sapiens
GGVGKSALTIQLIQ

SEQ ID NO: 105520 - protein, 14 aa, Homo Sapiens
GVGKSALTIQLIQN

SEQ ID NO: 105521 - protein, 14 aa, Homo Sapiens
VGKSALTIQLIQNH

SEQ ID NO: 105522 - protein, 14 aa, Homo Sapiens
GKSALTIQLIQNHF

SEQ ID NO: 105523 - protein, 14 aa, Homo Sapiens
KSALTIQLIQNHFV

SEQ ID NO: 105524 - protein, 14 aa, Homo Sapiens
SALTIQLIQNHFVD

SEQ ID NO: 105525 - protein, 14 aa, Homo Sapiens
ALTIQLIQNHFVDE

SEQ ID NO: 105526 - protein, 14 aa, Homo Sapiens
LTIQLIQNHFVDEY

SEQ ID NO: 105527 - protein, 14 aa, Homo Sapiens
TIQLIQNHFVDEYD

SEQ ID NO: 105528 - protein, 14 aa, Homo Sapiens
IQLIQNHFVDEYDP

SEQ ID NO: 105529 - protein, 14 aa, Homo Sapiens
QLIQNHFVDEYDPT

SEQ ID NO: 105530 - protein, 14 aa, Homo Sapiens
LIQNHFVDEYDPTI

SEQ ID NO: 105531 - protein, 14 aa, Homo Sapiens
IQNHFVDEYDPTIE

SEQ ID NO: 105532 - protein, 14 aa, Homo Sapiens
QNHFVDEYDPTIED

SEQ ID NO: 105533 - protein, 14 aa, Homo Sapiens
NHFVDEYDPTIEDS

SEQ ID NO: 105534 - protein, 14 aa, Homo Sapiens
HFVDEYDPTIEDSY

SEQ ID NO: 105535 - protein, 14 aa, Homo Sapiens
FVDEYDPTIEDSYR

SEQ ID NO: 105536 - protein, 14 aa, Homo Sapiens
VDEYDPTIEDSYRK

SEQ ID NO: 105537 - protein, 14 aa, Homo Sapiens
DEYDPTIEDSYRKQ

SEQ ID NO: 105538 - protein, 14 aa, Homo Sapiens
EYDPTIEDSYRKQV

SEQ ID NO: 105539 - protein, 14 aa, Homo Sapiens
YDPTIEDSYRKQVV

SEQ ID NO: 105540 - protein, 14 aa, Homo Sapiens
DPTIEDSYRKQVVI

SEQ ID NO: 105541 - protein, 14 aa, Homo Sapiens
PTIEDSYRKQVVID

SEQ ID NO: 105542 - protein, 14 aa, Homo Sapiens
TIEDSYRKQVVIDG

SEQ ID NO: 105543 - protein, 14 aa, Homo Sapiens
IEDSYRKQVVIDGE

SEQ ID NO: 105544 - protein, 14 aa, Homo Sapiens
EDSYRKQVVIDGET

SEQ ID NO: 105545 - protein, 14 aa, Homo Sapiens
DSYRKQVVIDGETC

SEQ ID NO: 105546 - protein, 14 aa, Homo Sapiens
SYRKQVVIDGETCL

SEQ ID NO: 105547 - protein, 14 aa, Homo Sapiens
YRKQVVIDGETCLL

SEQ ID NO: 105548 - protein, 14 aa, Homo Sapiens
RKQVVIDGETCLLD

SEQ ID NO: 105549 - protein, 14 aa, Homo Sapiens
KQVVIDGETCLLDI

SEQ ID NO: 105550 - protein, 14 aa, Homo Sapiens
QVVIDGETCLLDIL

SEQ ID NO: 105551 - protein, 14 aa, Homo Sapiens
VVIDGETCLLDILD

SEQ ID NO: 105552 - protein, 14 aa, Homo Sapiens
VIDGETCLLDILDT

SEQ ID NO: 105553 - protein, 14 aa, Homo Sapiens
IDGETCLLDILDTA

SEQ ID NO: 105554 - protein, 14 aa, Homo Sapiens
DGETCLLDILDTAG

SEQ ID NO: 105555 - protein, 14 aa, Homo Sapiens
GETCLLDILDTAGQ

SEQ ID NO: 105556 - protein, 14 aa, Homo Sapiens
ETCLLDILDTAGQE

SEQ ID NO: 105557 - protein, 14 aa, Homo Sapiens
TCLLDILDTAGQEE

SEQ ID NO: 105558 - protein, 14 aa, Homo Sapiens
CLLDILDTAGQEEY

SEQ ID NO: 105559 - protein, 14 aa, Homo Sapiens
LLDILDTAGQEEYS

SEQ ID NO: 105560 - protein, 14 aa, Homo Sapiens
LDILDTAGQEEYSA

SEQ ID NO: 105561 - protein, 14 aa, Homo Sapiens
DILDTAGQEEYSAM

SEQ ID NO: 105562 - protein, 14 aa, Homo Sapiens
ILDTAGQEEYSAMR

SEQ ID NO: 105563 - protein, 14 aa, Homo Sapiens
LDTAGQEEYSAMRD

SEQ ID NO: 105564 - protein, 14 aa, Homo Sapiens
DTAGQEEYSAMRDQ

SEQ ID NO: 105565 - protein, 14 aa, Homo Sapiens
TAGQEEYSAMRDQY

SEQ ID NO: 105566 - protein, 14 aa, Homo Sapiens
AGQEEYSAMRDQYM

SEQ ID NO: 105567 - protein, 14 aa, Homo Sapiens
GQEEYSAMRDQYMR

SEQ ID NO: 105568 - protein, 14 aa, Homo Sapiens
QEEYSAMRDQYMRT

SEQ ID NO: 105569 - protein, 14 aa, Homo Sapiens
EEYSAMRDQYMRTG

SEQ ID NO: 105570 - protein, 14 aa, Homo Sapiens
EYSAMRDQYMRTGE

SEQ ID NO: 105571 - protein, 14 aa, Homo Sapiens
YSAMRDQYMRTGEG

SEQ ID NO: 105572 - protein, 14 aa, Homo Sapiens
SAMRDQYMRTGEGF

SEQ ID NO: 105573 - protein, 14 aa, Homo Sapiens
AMRDQYMRTGEGFL

SEQ ID NO: 105574 - protein, 14 aa, Homo Sapiens
MRDQYMRTGEGFLC

SEQ ID NO: 105575 - protein, 14 aa, Homo Sapiens
RDQYMRTGEGFLCV

SEQ ID NO: 105576 - protein, 14 aa, Homo Sapiens
DQYMRTGEGFLCVF

SEQ ID NO: 105577 - protein, 14 aa, Homo Sapiens
QYMRTGEGFLCVFA

SEQ ID NO: 105578 - protein, 14 aa, Homo Sapiens
YMRTGEGFLCVFAI

SEQ ID NO: 105579 - protein, 14 aa, Homo Sapiens
MRTGEGFLCVFAIN

SEQ ID NO: 105580 - protein, 14 aa, Homo Sapiens
RTGEGFLCVFAINN

SEQ ID NO: 105581 - protein, 14 aa, Homo Sapiens
TGEGFLCVFAINNT

SEQ ID NO: 105582 - protein, 14 aa, Homo Sapiens
GEGFLCVFAINNTK

SEQ ID NO: 105583 - protein, 14 aa, Homo Sapiens
EGFLCVFAINNTKS

SEQ ID NO: 105584 - protein, 14 aa, Homo Sapiens
GFLCVFAINNTKSF

SEQ ID NO: 105585 - protein, 14 aa, Homo Sapiens
FLCVFAINNTKSFE

SEQ ID NO: 105586 - protein, 14 aa, Homo Sapiens
LCVFAINNTKSFED

SEQ ID NO: 105587 - protein, 14 aa, Homo Sapiens
CVFAINNTKSFEDI

SEQ ID NO: 105588 - protein, 14 aa, Homo Sapiens
VFAINNTKSFEDIH

SEQ ID NO: 105589 - protein, 14 aa, Homo Sapiens
FAINNTKSFEDIHQ

SEQ ID NO: 105590 - protein, 14 aa, Homo Sapiens
AINNTKSFEDIHQY

SEQ ID NO: 105591 - protein, 14 aa, Homo Sapiens
INNTKSFEDIHQYR

SEQ ID NO: 105592 - protein, 14 aa, Homo Sapiens
NNTKSFEDIHQYRE

SEQ ID NO: 105593 - protein, 14 aa, Homo Sapiens
NTKSFEDIHQYREQ

SEQ ID NO: 105594 - protein, 14 aa, Homo Sapiens
TKSFEDIHQYREQI

SEQ ID NO: 105595 - protein, 14 aa, Homo Sapiens
KSFEDIHQYREQIK

SEQ ID NO: 105596 - protein, 14 aa, Homo Sapiens
SFEDIHQYREQIKR

SEQ ID NO: 105597 - protein, 14 aa, Homo Sapiens
FEDIHQYREQIKRV

SEQ ID NO: 105598 - protein, 14 aa, Homo Sapiens
EDIHQYREQIKRVK

SEQ ID NO: 105599 - protein, 14 aa, Homo Sapiens
DIHQYREQIKRVKD

SEQ ID NO: 105600 - protein, 14 aa, Homo Sapiens
IHQYREQIKRVKDS

SEQ ID NO: 105601 - protein, 14 aa, Homo Sapiens
HQYREQIKRVKDSD

SEQ ID NO: 105602 - protein, 14 aa, Homo Sapiens
QYREQIKRVKDSDD

SEQ ID NO: 105603 - protein, 14 aa, Homo Sapiens
YREQIKRVKDSDDV

SEQ ID NO: 105604 - protein, 14 aa, Homo Sapiens
REQIKRVKDSDDVP

SEQ ID NO: 105605 - protein, 14 aa, Homo Sapiens
EQIKRVKDSDDVPM

SEQ ID NO: 105606 - protein, 14 aa, Homo Sapiens
QIKRVKDSDDVPMV

SEQ ID NO: 105607 - protein, 14 aa, Homo Sapiens
IKRVKDSDDVPMVL

SEQ ID NO: 105608 - protein, 14 aa, Homo Sapiens
KRVKDSDDVPMVLV

SEQ ID NO: 105609 - protein, 14 aa, Homo Sapiens
RVKDSDDVPMVLVG

SEQ ID NO: 105610 - protein, 14 aa, Homo Sapiens
VKDSDDVPMVLVGN

SEQ ID NO: 105611 - protein, 14 aa, Homo Sapiens
KDSDDVPMVLVGNK

SEQ ID NO: 105612 - protein, 14 aa, Homo Sapiens
DSDDVPMVLVGNKC

SEQ ID NO: 105613 - protein, 14 aa, Homo Sapiens
SDDVPMVLVGNKCD

SEQ ID NO: 105614 - protein, 14 aa, Homo Sapiens
DDVPMVLVGNKCDL

SEQ ID NO: 105615 - protein, 14 aa, Homo Sapiens
DVPMVLVGNKCDLA

SEQ ID NO: 105616 - protein, 14 aa, Homo Sapiens
VPMVLVGNKCDLAA

SEQ ID NO: 105617 - protein, 14 aa, Homo Sapiens
PMVLVGNKCDLAAR

SEQ ID NO: 105618 - protein, 14 aa, Homo Sapiens
MVLVGNKCDLAART

SEQ ID NO: 105619 - protein, 14 aa, Homo Sapiens
VLVGNKCDLAARTV

SEQ ID NO: 105620 - protein, 14 aa, Homo Sapiens
LVGNKCDLAARTVE

SEQ ID NO: 105621 - protein, 14 aa, Homo Sapiens
VGNKCDLAARTVES

SEQ ID NO: 105622 - protein, 14 aa, Homo Sapiens
GNKCDLAARTVESR

SEQ ID NO: 105623 - protein, 14 aa, Homo Sapiens
NKCDLAARTVESRQ

SEQ ID NO: 105624 - protein, 14 aa, Homo Sapiens
KCDLAARTVESRQA

SEQ ID NO: 105625 - protein, 14 aa, Homo Sapiens
CDLAARTVESRQAQ

SEQ ID NO: 105626 - protein, 14 aa, Homo Sapiens
DLAARTVESRQAQD

SEQ ID NO: 105627 - protein, 14 aa, Homo Sapiens
LAARTVESRQAQDL

SEQ ID NO: 105628 - protein, 14 aa, Homo Sapiens
AARTVESRQAQDLA

SEQ ID NO: 105629 - protein, 14 aa, Homo Sapiens
ARTVESRQAQDLAR

SEQ ID NO: 105630 - protein, 14 aa, Homo Sapiens
RTVESRQAQDLARS

SEQ ID NO: 105631 - protein, 14 aa, Homo Sapiens
TVESRQAQDLARSY

SEQ ID NO: 105632 - protein, 14 aa, Homo Sapiens
VESRQAQDLARSYG

SEQ ID NO: 105633 - protein, 14 aa, Homo Sapiens
ESRQAQDLARSYGI

SEQ ID NO: 105634 - protein, 14 aa, Homo Sapiens
SRQAQDLARSYGIP

SEQ ID NO: 105635 - protein, 14 aa, Homo Sapiens
RQAQDLARSYGIPY

SEQ ID NO: 105636 - protein, 14 aa, Homo Sapiens
QAQDLARSYGIPYI

SEQ ID NO: 105637 - protein, 14 aa, Homo Sapiens
AQDLARSYGIPYIE

SEQ ID NO: 105638 - protein, 14 aa, Homo Sapiens
QDLARSYGIPYIET

SEQ ID NO: 105639 - protein, 14 aa, Homo Sapiens
DLARSYGIPYIETS

SEQ ID NO: 105640 - protein, 14 aa, Homo Sapiens
LARSYGIPYIETSA

SEQ ID NO: 105641 - protein, 14 aa, Homo Sapiens
ARSYGIPYIETSAK

SEQ ID NO: 105642 - protein, 14 aa, Homo Sapiens
RSYGIPYIETSAKT

SEQ ID NO: 105643 - protein, 14 aa, Homo Sapiens
SYGIPYIETSAKTR

SEQ ID NO: 105644 - protein, 14 aa, Homo Sapiens
YGIPYIETSAKTRQ

SEQ ID NO: 105645 - protein, 14 aa, Homo Sapiens
GIPYIETSAKTRQG

SEQ ID NO: 105646 - protein, 14 aa, Homo Sapiens
IPYIETSAKTRQGV

SEQ ID NO: 105647 - protein, 14 aa, Homo Sapiens
PYIETSAKTRQGVE

SEQ ID NO: 105648 - protein, 14 aa, Homo Sapiens
YIETSAKTRQGVED

SEQ ID NO: 105649 - protein, 14 aa, Homo Sapiens
IETSAKTRQGVEDA

SEQ ID NO: 105650 - protein, 14 aa, Homo Sapiens
ETSAKTRQGVEDAF

SEQ ID NO: 105651 - protein, 14 aa, Homo Sapiens
TSAKTRQGVEDAFY

SEQ ID NO: 105652 - protein, 14 aa, Homo Sapiens
SAKTRQGVEDAFYT

SEQ ID NO: 105653 - protein, 14 aa, Homo Sapiens
AKTRQGVEDAFYTL

SEQ ID NO: 105654 - protein, 14 aa, Homo Sapiens
KTRQGVEDAFYTLV

SEQ ID NO: 105655 - protein, 14 aa, Homo Sapiens
TRQGVEDAFYTLVR

SEQ ID NO: 105656 - protein, 14 aa, Homo Sapiens
RQGVEDAFYTLVRE

SEQ ID NO: 105657 - protein, 14 aa, Homo Sapiens
QGVEDAFYTLVREI

SEQ ID NO: 105658 - protein, 14 aa, Homo Sapiens
GVEDAFYTLVREIR

SEQ ID NO: 105659 - protein, 14 aa, Homo Sapiens
VEDAFYTLVREIRQ

SEQ ID NO: 105660 - protein, 14 aa, Homo Sapiens
EDAFYTLVREIRQH

SEQ ID NO: 105661 - protein, 14 aa, Homo Sapiens
DAFYTLVREIRQHK

SEQ ID NO: 105662 - protein, 14 aa, Homo Sapiens
AFYTLVREIRQHKL

SEQ ID NO: 105663 - protein, 14 aa, Homo Sapiens
FYTLVREIRQHKLR

SEQ ID NO: 105664 - protein, 14 aa, Homo Sapiens
YTLVREIRQHKLRK

SEQ ID NO: 105665 - protein, 14 aa, Homo Sapiens
TLVREIRQHKLRKL

SEQ ID NO: 105666 - protein, 15 aa, Homo Sapiens
MTEYKLVVVGAGGVG

SEQ ID NO: 105667 - protein, 15 aa, Homo Sapiens
TEYKLVVVGAGGVGK

SEQ ID NO: 105668 - protein, 15 aa, Homo Sapiens
EYKLVVVGAGGVGKS

SEQ ID NO: 105669 - protein, 15 aa, Homo Sapiens
YKLVVVGAGGVGKSA

SEQ ID NO: 105670 - protein, 15 aa, Homo Sapiens
KLVVVGAGGVGKSAL

SEQ ID NO: 105671 - protein, 15 aa, Homo Sapiens
LVVVGAGGVGKSALT

SEQ ID NO: 105672 - protein, 15 aa, Homo Sapiens
VVVGAGGVGKSALTI

SEQ ID NO: 105673 - protein, 15 aa, Homo Sapiens
VVGAGGVGKSALTIQ

SEQ ID NO: 105674 - protein, 15 aa, Homo Sapiens
VGAGGVGKSALTIQL

SEQ ID NO: 105675 - protein, 15 aa, Homo Sapiens
GAGGVGKSALTIQLI

SEQ ID NO: 105676 - protein, 15 aa, Homo Sapiens
AGGVGKSALTIQLIQ

SEQ ID NO: 105677 - protein, 15 aa, Homo Sapiens
GGVGKSALTIQLIQN

SEQ ID NO: 105678 - protein, 15 aa, Homo Sapiens
GVGKSALTIQLIQNH

SEQ ID NO: 105679 - protein, 15 aa, Homo Sapiens
VGKSALTIQLIQNHF

SEQ ID NO: 105680 - protein, 15 aa, Homo Sapiens
GKSALTIQLIQNHFV

SEQ ID NO: 105681 - protein, 15 aa, Homo Sapiens
KSALTIQLIQNHFVD

SEQ ID NO: 105682 - protein, 15 aa, Homo Sapiens
SALTIQLIQNHFVDE

SEQ ID NO: 105683 - protein, 15 aa, Homo Sapiens
ALTIQLIQNHFVDEY

SEQ ID NO: 105684 - protein, 15 aa, Homo Sapiens
LTIQLIQNHFVDEYD

SEQ ID NO: 105685 - protein, 15 aa, Homo Sapiens
TIQLIQNHFVDEYDP

SEQ ID NO: 105686 - protein, 15 aa, Homo Sapiens
IQLIQNHFVDEYDPT

SEQ ID NO: 105687 - protein, 15 aa, Homo Sapiens
QLIQNHFVDEYDPTI

SEQ ID NO: 105688 - protein, 15 aa, Homo Sapiens
LIQNHFVDEYDPTIE

SEQ ID NO: 105689 - protein, 15 aa, Homo Sapiens
IQNHFVDEYDPTIED

SEQ ID NO: 105690 - protein, 15 aa, Homo Sapiens
QNHFVDEYDPTIEDS

SEQ ID NO: 105691 - protein, 15 aa, Homo Sapiens
NHFVDEYDPTIEDSY

SEQ ID NO: 105692 - protein, 15 aa, Homo Sapiens
HFVDEYDPTIEDSYR

SEQ ID NO: 105693 - protein, 15 aa, Homo Sapiens
FVDEYDPTIEDSYRK

SEQ ID NO: 105694 - protein, 15 aa, Homo Sapiens
VDEYDPTIEDSYRKQ

SEQ ID NO: 105695 - protein, 15 aa, Homo Sapiens
DEYDPTIEDSYRKQV

SEQ ID NO: 105696 - protein, 15 aa, Homo Sapiens
EYDPTIEDSYRKQVV

SEQ ID NO: 105697 - protein, 15 aa, Homo Sapiens
YDPTIEDSYRKQVVI

SEQ ID NO: 105698 - protein, 15 aa, Homo Sapiens
DPTIEDSYRKQVVID

SEQ ID NO: 105699 - protein, 15 aa, Homo Sapiens
PTIEDSYRKQVVIDG

SEQ ID NO: 105700 - protein, 15 aa, Homo Sapiens
TIEDSYRKQVVIDGE

SEQ ID NO: 105701 - protein, 15 aa, Homo Sapiens
IEDSYRKQVVIDGET

SEQ ID NO: 105702 - protein, 15 aa, Homo Sapiens
EDSYRKQVVIDGETC

SEQ ID NO: 105703 - protein, 15 aa, Homo Sapiens
DSYRKQVVIDGETCL

SEQ ID NO: 105704 - protein, 15 aa, Homo Sapiens
SYRKQVVIDGETCLL

SEQ ID NO: 105705 - protein, 15 aa, Homo Sapiens
YRKQVVIDGETCLLD

SEQ ID NO: 105706 - protein, 15 aa, Homo Sapiens
RKQVVIDGETCLLDI

SEQ ID NO: 105707 - protein, 15 aa, Homo Sapiens
KQVVIDGETCLLDIL

SEQ ID NO: 105708 - protein, 15 aa, Homo Sapiens
QVVIDGETCLLDILD

SEQ ID NO: 105709 - protein, 15 aa, Homo Sapiens
VVIDGETCLLDILDT

SEQ ID NO: 105710 - protein, 15 aa, Homo Sapiens
VIDGETCLLDILDTA

SEQ ID NO: 105711 - protein, 15 aa, Homo Sapiens
IDGETCLLDILDTAG

SEQ ID NO: 105712 - protein, 15 aa, Homo Sapiens
DGETCLLDILDTAGQ

SEQ ID NO: 105713 - protein, 15 aa, Homo Sapiens
GETCLLDILDTAGQE

SEQ ID NO: 105714 - protein, 15 aa, Homo Sapiens
ETCLLDILDTAGQEE

SEQ ID NO: 105715 - protein, 15 aa, Homo Sapiens
TCLLDILDTAGQEEY

SEQ ID NO: 105716 - protein, 15 aa, Homo Sapiens
CLLDILDTAGQEEYS

SEQ ID NO: 105717 - protein, 15 aa, Homo Sapiens
LLDILDTAGQEEYSA

SEQ ID NO: 105718 - protein, 15 aa, Homo Sapiens
LDILDTAGQEEYSAM

SEQ ID NO: 105719 - protein, 15 aa, Homo Sapiens
DILDTAGQEEYSAMR

SEQ ID NO: 105720 - protein, 15 aa, Homo Sapiens
ILDTAGQEEYSAMRD

SEQ ID NO: 105721 - protein, 15 aa, Homo Sapiens
LDTAGQEEYSAMRDQ

SEQ ID NO: 105722 - protein, 15 aa, Homo Sapiens
DTAGQEEYSAMRDQY

SEQ ID NO: 105723 - protein, 15 aa, Homo Sapiens
TAGQEEYSAMRDQYM

SEQ ID NO: 105724 - protein, 15 aa, Homo Sapiens
AGQEEYSAMRDQYMR

SEQ ID NO: 105725 - protein, 15 aa, Homo Sapiens
GQEEYSAMRDQYMRT

SEQ ID NO: 105726 - protein, 15 aa, Homo Sapiens
QEEYSAMRDQYMRTG

SEQ ID NO: 105727 - protein, 15 aa, Homo Sapiens
EEYSAMRDQYMRTGE

SEQ ID NO: 105728 - protein, 15 aa, Homo Sapiens
EYSAMRDQYMRTGEG

SEQ ID NO: 105729 - protein, 15 aa, Homo Sapiens
YSAMRDQYMRTGEGF

SEQ ID NO: 105730 - protein, 15 aa, Homo Sapiens
SAMRDQYMRTGEGFL

SEQ ID NO: 105731 - protein, 15 aa, Homo Sapiens
AMRDQYMRTGEGFLC

SEQ ID NO: 105732 - protein, 15 aa, Homo Sapiens
MRDQYMRTGEGFLCV

SEQ ID NO: 105733 - protein, 15 aa, Homo Sapiens
RDQYMRTGEGFLCVF

SEQ ID NO: 105734 - protein, 15 aa, Homo Sapiens
DQYMRTGEGFLCVFA

SEQ ID NO: 105735 - protein, 15 aa, Homo Sapiens
QYMRTGEGFLCVFAI

SEQ ID NO: 105736 - protein, 15 aa, Homo Sapiens
YMRTGEGFLCVFAIN

SEQ ID NO: 105737 - protein, 15 aa, Homo Sapiens
MRTGEGFLCVFAINN

SEQ ID NO: 105738 - protein, 15 aa, Homo Sapiens
RTGEGFLCVFAINNT

SEQ ID NO: 105739 - protein, 15 aa, Homo Sapiens
TGEGFLCVFAINNTK

SEQ ID NO: 105740 - protein, 15 aa, Homo Sapiens
GEGFLCVFAINNTKS

SEQ ID NO: 105741 - protein, 15 aa, Homo Sapiens
EGFLCVFAINNTKSF

SEQ ID NO: 105742 - protein, 15 aa, Homo Sapiens
GFLCVFAINNTKSFE

SEQ ID NO: 105743 - protein, 15 aa, Homo Sapiens
FLCVFAINNTKSFED

SEQ ID NO: 105744 - protein, 15 aa, Homo Sapiens
LCVFAINNTKSFEDI

SEQ ID NO: 105745 - protein, 15 aa, Homo Sapiens
CVFAINNTKSFEDIH

SEQ ID NO: 105746 - protein, 15 aa, Homo Sapiens
VFAINNTKSFEDIHQ

SEQ ID NO: 105747 - protein, 15 aa, Homo Sapiens
FAINNTKSFEDIHQY

SEQ ID NO: 105748 - protein, 15 aa, Homo Sapiens
AINNTKSFEDIHQYR

SEQ ID NO: 105749 - protein, 15 aa, Homo Sapiens
INNTKSFEDIHQYRE

SEQ ID NO: 105750 - protein, 15 aa, Homo Sapiens
NNTKSFEDIHQYREQ

SEQ ID NO: 105751 - protein, 15 aa, Homo Sapiens
NTKSFEDIHQYREQI

SEQ ID NO: 105752 - protein, 15 aa, Homo Sapiens
TKSFEDIHQYREQIK

SEQ ID NO: 105753 - protein, 15 aa, Homo Sapiens
KSFEDIHQYREQIKR

SEQ ID NO: 105754 - protein, 15 aa, Homo Sapiens
SFEDIHQYREQIKRV

SEQ ID NO: 105755 - protein, 15 aa, Homo Sapiens
FEDIHQYREQIKRVK

SEQ ID NO: 105756 - protein, 15 aa, Homo Sapiens
EDIHQYREQIKRVKD

SEQ ID NO: 105757 - protein, 15 aa, Homo Sapiens
DIHQYREQIKRVKDS

SEQ ID NO: 105758 - protein, 15 aa, Homo Sapiens
IHQYREQIKRVKDSD

SEQ ID NO: 105759 - protein, 15 aa, Homo Sapiens
HQYREQIKRVKDSDD

SEQ ID NO: 105760 - protein, 15 aa, Homo Sapiens
QYREQIKRVKDSDDV

SEQ ID NO: 105761 - protein, 15 aa, Homo Sapiens
YREQIKRVKDSDDVP

SEQ ID NO: 105762 - protein, 15 aa, Homo Sapiens
REQIKRVKDSDDVPM

SEQ ID NO: 105763 - protein, 15 aa, Homo Sapiens
EQIKRVKDSDDVPMV

SEQ ID NO: 105764 - protein, 15 aa, Homo Sapiens
QIKRVKDSDDVPMVL

SEQ ID NO: 105765 - protein, 15 aa, Homo Sapiens
IKRVKDSDDVPMVLV

SEQ ID NO: 105766 - protein, 15 aa, Homo Sapiens
KRVKDSDDVPMVLVG

SEQ ID NO: 105767 - protein, 15 aa, Homo Sapiens
RVKDSDDVPMVLVGN

SEQ ID NO: 105768 - protein, 15 aa, Homo Sapiens
VKDSDDVPMVLVGNK

SEQ ID NO: 105769 - protein, 15 aa, Homo Sapiens
KDSDDVPMVLVGNKC

SEQ ID NO: 105770 - protein, 15 aa, Homo Sapiens
DSDDVPMVLVGNKCD

SEQ ID NO: 105771 - protein, 15 aa, Homo Sapiens
SDDVPMVLVGNKCDL

SEQ ID NO: 105772 - protein, 15 aa, Homo Sapiens
DDVPMVLVGNKCDLA

SEQ ID NO: 105773 - protein, 15 aa, Homo Sapiens
DVPMVLVGNKCDLAA

SEQ ID NO: 105774 - protein, 15 aa, Homo Sapiens
VPMVLVGNKCDLAAR

SEQ ID NO: 105775 - protein, 15 aa, Homo Sapiens
PMVLVGNKCDLAART

SEQ ID NO: 105776 - protein, 15 aa, Homo Sapiens
MVLVGNKCDLAARTV

SEQ ID NO: 105777 - protein, 15 aa, Homo Sapiens
VLVGNKCDLAARTVE

SEQ ID NO: 105778 - protein, 15 aa, Homo Sapiens
LVGNKCDLAARTVES

SEQ ID NO: 105779 - protein, 15 aa, Homo Sapiens
VGNKCDLAARTVESR

SEQ ID NO: 105780 - protein, 15 aa, Homo Sapiens
GNKCDLAARTVESRQ

SEQ ID NO: 105781 - protein, 15 aa, Homo Sapiens
NKCDLAARTVESRQA

SEQ ID NO: 105782 - protein, 15 aa, Homo Sapiens
KCDLAARTVESRQAQ

SEQ ID NO: 105783 - protein, 15 aa, Homo Sapiens
CDLAARTVESRQAQD

SEQ ID NO: 105784 - protein, 15 aa, Homo Sapiens
DLAARTVESRQAQDL

SEQ ID NO: 105785 - protein, 15 aa, Homo Sapiens
LAARTVESRQAQDLA

SEQ ID NO: 105786 - protein, 15 aa, Homo Sapiens
AARTVESRQAQDLAR

SEQ ID NO: 105787 - protein, 15 aa, Homo Sapiens
ARTVESRQAQDLARS

SEQ ID NO: 105788 - protein, 15 aa, Homo Sapiens
RTVESRQAQDLARSY

SEQ ID NO: 105789 - protein, 15 aa, Homo Sapiens
TVESRQAQDLARSYG

SEQ ID NO: 105790 - protein, 15 aa, Homo Sapiens
VESRQAQDLARSYGI

SEQ ID NO: 105791 - protein, 15 aa, Homo Sapiens
ESRQAQDLARSYGIP

SEQ ID NO: 105792 - protein, 15 aa, Homo Sapiens
SRQAQDLARSYGIPY

SEQ ID NO: 105793 - protein, 15 aa, Homo Sapiens
RQAQDLARSYGIPYI

SEQ ID NO: 105794 - protein, 15 aa, Homo Sapiens
QAQDLARSYGIPYIE

SEQ ID NO: 105795 - protein, 15 aa, Homo Sapiens
AQDLARSYGIPYIET

SEQ ID NO: 105796 - protein, 15 aa, Homo Sapiens
QDLARSYGIPYIETS

SEQ ID NO: 105797 - protein, 15 aa, Homo Sapiens
DLARSYGIPYIETSA

SEQ ID NO: 105798 - protein, 15 aa, Homo Sapiens
LARSYGIPYIETSAK

SEQ ID NO: 105799 - protein, 15 aa, Homo Sapiens
ARSYGIPYIETSAKT

SEQ ID NO: 105800 - protein, 15 aa, Homo Sapiens
RSYGIPYIETSAKTR

SEQ ID NO: 105801 - protein, 15 aa, Homo Sapiens
SYGIPYIETSAKTRQ

SEQ ID NO: 105802 - protein, 15 aa, Homo Sapiens
YGIPYIETSAKTRQG

SEQ ID NO: 105803 - protein, 15 aa, Homo Sapiens
GIPYIETSAKTRQGV

SEQ ID NO: 105804 - protein, 15 aa, Homo Sapiens
IPYIETSAKTRQGVE

SEQ ID NO: 105805 - protein, 15 aa, Homo Sapiens
PYIETSAKTRQGVED

SEQ ID NO: 105806 - protein, 15 aa, Homo Sapiens
YIETSAKTRQGVEDA

SEQ ID NO: 105807 - protein, 15 aa, Homo Sapiens
IETSAKTRQGVEDAF

SEQ ID NO: 105808 - protein, 15 aa, Homo Sapiens
ETSAKTRQGVEDAFY

SEQ ID NO: 105809 - protein, 15 aa, Homo Sapiens
TSAKTRQGVEDAFYT

SEQ ID NO: 105810 - protein, 15 aa, Homo Sapiens
SAKTRQGVEDAFYTL

SEQ ID NO: 105811 - protein, 15 aa, Homo Sapiens
AKTRQGVEDAFYTLV

SEQ ID NO: 105812 - protein, 15 aa, Homo Sapiens
KTRQGVEDAFYTLVR

SEQ ID NO: 105813 - protein, 15 aa, Homo Sapiens
TRQGVEDAFYTLVRE

SEQ ID NO: 105814 - protein, 15 aa, Homo Sapiens
RQGVEDAFYTLVREI

SEQ ID NO: 105815 - protein, 15 aa, Homo Sapiens
QGVEDAFYTLVREIR

SEQ ID NO: 105816 - protein, 15 aa, Homo Sapiens
GVEDAFYTLVREIRQ

SEQ ID NO: 105817 - protein, 15 aa, Homo Sapiens
VEDAFYTLVREIRQH

SEQ ID NO: 105818 - protein, 15 aa, Homo Sapiens
EDAFYTLVREIRQHK

SEQ ID NO: 105819 - protein, 15 aa, Homo Sapiens
DAFYTLVREIRQHKL

SEQ ID NO: 105820 - protein, 15 aa, Homo Sapiens
AFYTLVREIRQHKLR

SEQ ID NO: 105821 - protein, 15 aa, Homo Sapiens
FYTLVREIRQHKLRK

SEQ ID NO: 105822 - protein, 15 aa, Homo Sapiens
YTLVREIRQHKLRKL

SEQ ID NO: 105823 - protein, 16 aa, Homo Sapiens
MTEYKLVVVGAGGVGK

SEQ ID NO: 105824 - protein, 16 aa, Homo Sapiens
TEYKLVVVGAGGVGKS

SEQ ID NO: 105825 - protein, 16 aa, Homo Sapiens
EYKLVVVGAGGVGKSA

SEQ ID NO: 105826 - protein, 16 aa, Homo Sapiens
YKLVVVGAGGVGKSAL

SEQ ID NO: 105827 - protein, 16 aa, Homo Sapiens
KLVVVGAGGVGKSALT

SEQ ID NO: 105828 - protein, 16 aa, Homo Sapiens
LVVVGAGGVGKSALTI

SEQ ID NO: 105829 - protein, 16 aa, Homo Sapiens
VVVGAGGVGKSALTIQ

SEQ ID NO: 105830 - protein, 16 aa, Homo Sapiens
VVGAGGVGKSALTIQL

SEQ ID NO: 105831 - protein, 16 aa, Homo Sapiens
VGAGGVGKSALTIQLI

SEQ ID NO: 105832 - protein, 16 aa, Homo Sapiens
GAGGVGKSALTIQLIQ

SEQ ID NO: 105833 - protein, 16 aa, Homo Sapiens
AGGVGKSALTIQLIQN

SEQ ID NO: 105834 - protein, 16 aa, Homo Sapiens
GGVGKSALTIQLIQNH

SEQ ID NO: 105835 - protein, 16 aa, Homo Sapiens
GVGKSALTIQLIQNHF

SEQ ID NO: 105836 - protein, 16 aa, Homo Sapiens
VGKSALTIQLIQNHFV

SEQ ID NO: 105837 - protein, 16 aa, Homo Sapiens
GKSALTIQLIQNHFVD

SEQ ID NO: 105838 - protein, 16 aa, Homo Sapiens
KSALTIQLIQNHFVDE

SEQ ID NO: 105839 - protein, 16 aa, Homo Sapiens
SALTIQLIQNHFVDEY

SEQ ID NO: 105840 - protein, 16 aa, Homo Sapiens
ALTIQLIQNHFVDEYD

SEQ ID NO: 105841 - protein, 16 aa, Homo Sapiens
LTIQLIQNHFVDEYDP

SEQ ID NO: 105842 - protein, 16 aa, Homo Sapiens
TIQLIQNHFVDEYDPT

SEQ ID NO: 105843 - protein, 16 aa, Homo Sapiens
IQLIQNHFVDEYDPTI

SEQ ID NO: 105844 - protein, 16 aa, Homo Sapiens
QLIQNHFVDEYDPTIE

SEQ ID NO: 105845 - protein, 16 aa, Homo Sapiens
LIQNHFVDEYDPTIED

SEQ ID NO: 105846 - protein, 16 aa, Homo Sapiens
IQNHFVDEYDPTIEDS

SEQ ID NO: 105847 - protein, 16 aa, Homo Sapiens
QNHFVDEYDPTIEDSY

SEQ ID NO: 105848 - protein, 16 aa, Homo Sapiens
NHFVDEYDPTIEDSYR

SEQ ID NO: 105849 - protein, 16 aa, Homo Sapiens
HFVDEYDPTIEDSYRK

SEQ ID NO: 105850 - protein, 16 aa, Homo Sapiens
FVDEYDPTIEDSYRKQ

SEQ ID NO: 105851 - protein, 16 aa, Homo Sapiens
VDEYDPTIEDSYRKQV

SEQ ID NO: 105852 - protein, 16 aa, Homo Sapiens
DEYDPTIEDSYRKQVV

SEQ ID NO: 105853 - protein, 16 aa, Homo Sapiens
EYDPTIEDSYRKQVVI

SEQ ID NO: 105854 - protein, 16 aa, Homo Sapiens
YDPTIEDSYRKQVVID

SEQ ID NO: 105855 - protein, 16 aa, Homo Sapiens
DPTIEDSYRKQVVIDG

SEQ ID NO: 105856 - protein, 16 aa, Homo Sapiens
PTIEDSYRKQVVIDGE

SEQ ID NO: 105857 - protein, 16 aa, Homo Sapiens
TIEDSYRKQVVIDGET

SEQ ID NO: 105858 - protein, 16 aa, Homo Sapiens
IEDSYRKQVVIDGETC

SEQ ID NO: 105859 - protein, 16 aa, Homo Sapiens
EDSYRKQVVIDGETCL

SEQ ID NO: 105860 - protein, 16 aa, Homo Sapiens
DSYRKQVVIDGETCLL

SEQ ID NO: 105861 - protein, 16 aa, Homo Sapiens
SYRKQVVIDGETCLLD

SEQ ID NO: 105862 - protein, 16 aa, Homo Sapiens
YRKQVVIDGETCLLDI

SEQ ID NO: 105863 - protein, 16 aa, Homo Sapiens
RKQVVIDGETCLLDIL

SEQ ID NO: 105864 - protein, 16 aa, Homo Sapiens
KQVVIDGETCLLDILD

SEQ ID NO: 105865 - protein, 16 aa, Homo Sapiens
QVVIDGETCLLDILDT

SEQ ID NO: 105866 - protein, 16 aa, Homo Sapiens
VVIDGETCLLDILDTA

SEQ ID NO: 105867 - protein, 16 aa, Homo Sapiens
VIDGETCLLDILDTAG

SEQ ID NO: 105868 - protein, 16 aa, Homo Sapiens
IDGETCLLDILDTAGQ

SEQ ID NO: 105869 - protein, 16 aa, Homo Sapiens
DGETCLLDILDTAGQE

SEQ ID NO: 105870 - protein, 16 aa, Homo Sapiens
GETCLLDILDTAGQEE

SEQ ID NO: 105871 - protein, 16 aa, Homo Sapiens
ETCLLDILDTAGQEEY

SEQ ID NO: 105872 - protein, 16 aa, Homo Sapiens
TCLLDILDTAGQEEYS

SEQ ID NO: 105873 - protein, 16 aa, Homo Sapiens
CLLDILDTAGQEEYSA

SEQ ID NO: 105874 - protein, 16 aa, Homo Sapiens
LLDILDTAGQEEYSAM

SEQ ID NO: 105875 - protein, 16 aa, Homo Sapiens
LDILDTAGQEEYSAMR

SEQ ID NO: 105876 - protein, 16 aa, Homo Sapiens
DILDTAGQEEYSAMRD

SEQ ID NO: 105877 - protein, 16 aa, Homo Sapiens
ILDTAGQEEYSAMRDQ

SEQ ID NO: 105878 - protein, 16 aa, Homo Sapiens
LDTAGQEEYSAMRDQY

SEQ ID NO: 105879 - protein, 16 aa, Homo Sapiens
DTAGQEEYSAMRDQYM

SEQ ID NO: 105880 - protein, 16 aa, Homo Sapiens
TAGQEEYSAMRDQYMR

SEQ ID NO: 105881 - protein, 16 aa, Homo Sapiens
AGQEEYSAMRDQYMRT

SEQ ID NO: 105882 - protein, 16 aa, Homo Sapiens
GQEEYSAMRDQYMRTG

SEQ ID NO: 105883 - protein, 16 aa, Homo Sapiens
QEEYSAMRDQYMRTGE

SEQ ID NO: 105884 - protein, 16 aa, Homo Sapiens
EEYSAMRDQYMRTGEG

SEQ ID NO: 105885 - protein, 16 aa, Homo Sapiens
EYSAMRDQYMRTGEGF

SEQ ID NO: 105886 - protein, 16 aa, Homo Sapiens
YSAMRDQYMRTGEGFL

SEQ ID NO: 105887 - protein, 16 aa, Homo Sapiens
SAMRDQYMRTGEGFLC

SEQ ID NO: 105888 - protein, 16 aa, Homo Sapiens
AMRDQYMRTGEGFLCV

SEQ ID NO: 105889 - protein, 16 aa, Homo Sapiens
MRDQYMRTGEGFLCVF

SEQ ID NO: 105890 - protein, 16 aa, Homo Sapiens
RDQYMRTGEGFLCVFA

SEQ ID NO: 105891 - protein, 16 aa, Homo Sapiens
DQYMRTGEGFLCVFAI

SEQ ID NO: 105892 - protein, 16 aa, Homo Sapiens
QYMRTGEGFLCVFAIN

SEQ ID NO: 105893 - protein, 16 aa, Homo Sapiens
YMRTGEGFLCVFAINN

SEQ ID NO: 105894 - protein, 16 aa, Homo Sapiens
MRTGEGFLCVFAINNT

SEQ ID NO: 105895 - protein, 16 aa, Homo Sapiens
RTGEGFLCVFAINNTK

SEQ ID NO: 105896 - protein, 16 aa, Homo Sapiens
TGEGFLCVFAINNTKS

SEQ ID NO: 105897 - protein, 16 aa, Homo Sapiens
GEGFLCVFAINNTKSF

SEQ ID NO: 105898 - protein, 16 aa, Homo Sapiens
EGFLCVFAINNTKSFE

SEQ ID NO: 105899 - protein, 16 aa, Homo Sapiens
GFLCVFAINNTKSFED

SEQ ID NO: 105900 - protein, 16 aa, Homo Sapiens
FLCVFAINNTKSFEDI

SEQ ID NO: 105901 - protein, 16 aa, Homo Sapiens
LCVFAINNTKSFEDIH

SEQ ID NO: 105902 - protein, 16 aa, Homo Sapiens
CVFAINNTKSFEDIHQ

SEQ ID NO: 105903 - protein, 16 aa, Homo Sapiens
VFAINNTKSFEDIHQY

SEQ ID NO: 105904 - protein, 16 aa, Homo Sapiens
FAINNTKSFEDIHQYR

SEQ ID NO: 105905 - protein, 16 aa, Homo Sapiens
AINNTKSFEDIHQYRE

SEQ ID NO: 105906 - protein, 16 aa, Homo Sapiens
INNTKSFEDIHQYREQ

SEQ ID NO: 105907 - protein, 16 aa, Homo Sapiens
NNTKSFEDIHQYREQI

SEQ ID NO: 105908 - protein, 16 aa, Homo Sapiens
NTKSFEDIHQYREQIK

SEQ ID NO: 105909 - protein, 16 aa, Homo Sapiens
TKSFEDIHQYREQIKR

SEQ ID NO: 105910 - protein, 16 aa, Homo Sapiens
KSFEDIHQYREQIKRV

SEQ ID NO: 105911 - protein, 16 aa, Homo Sapiens
SFEDIHQYREQIKRVK

SEQ ID NO: 105912 - protein, 16 aa, Homo Sapiens
FEDIHQYREQIKRVKD

SEQ ID NO: 105913 - protein, 16 aa, Homo Sapiens
EDIHQYREQIKRVKDS

SEQ ID NO: 105914 - protein, 16 aa, Homo Sapiens
DIHQYREQIKRVKDSD

SEQ ID NO: 105915 - protein, 16 aa, Homo Sapiens
IHQYREQIKRVKDSDD

SEQ ID NO: 105916 - protein, 16 aa, Homo Sapiens
HQYREQIKRVKDSDDV

SEQ ID NO: 105917 - protein, 16 aa, Homo Sapiens
QYREQIKRVKDSDDVP

SEQ ID NO: 105918 - protein, 16 aa, Homo Sapiens
YREQIKRVKDSDDVPM

SEQ ID NO: 105919 - protein, 16 aa, Homo Sapiens
REQIKRVKDSDDVPMV

SEQ ID NO: 105920 - protein, 16 aa, Homo Sapiens
EQIKRVKDSDDVPMVL

SEQ ID NO: 105921 - protein, 16 aa, Homo Sapiens
QIKRVKDSDDVPMVLV

SEQ ID NO: 105922 - protein, 16 aa, Homo Sapiens
IKRVKDSDDVPMVLVG

SEQ ID NO: 105923 - protein, 16 aa, Homo Sapiens
KRVKDSDDVPMVLVGN

SEQ ID NO: 105924 - protein, 16 aa, Homo Sapiens
RVKDSDDVPMVLVGNK

SEQ ID NO: 105925 - protein, 16 aa, Homo Sapiens
VKDSDDVPMVLVGNKC

SEQ ID NO: 105926 - protein, 16 aa, Homo Sapiens
KDSDDVPMVLVGNKCD

SEQ ID NO: 105927 - protein, 16 aa, Homo Sapiens
DSDDVPMVLVGNKCDL

SEQ ID NO: 105928 - protein, 16 aa, Homo Sapiens
SDDVPMVLVGNKCDLA

SEQ ID NO: 105929 - protein, 16 aa, Homo Sapiens
DDVPMVLVGNKCDLAA

SEQ ID NO: 105930 - protein, 16 aa, Homo Sapiens
DVPMVLVGNKCDLAAR

SEQ ID NO: 105931 - protein, 16 aa, Homo Sapiens
VPMVLVGNKCDLAART

SEQ ID NO: 105932 - protein, 16 aa, Homo Sapiens
PMVLVGNKCDLAARTV

SEQ ID NO: 105933 - protein, 16 aa, Homo Sapiens
MVLVGNKCDLAARTVE

SEQ ID NO: 105934 - protein, 16 aa, Homo Sapiens
VLVGNKCDLAARTVES

SEQ ID NO: 105935 - protein, 16 aa, Homo Sapiens
LVGNKCDLAARTVESR

SEQ ID NO: 105936 - protein, 16 aa, Homo Sapiens
VGNKCDLAARTVESRQ

SEQ ID NO: 105937 - protein, 16 aa, Homo Sapiens
GNKCDLAARTVESRQA

SEQ ID NO: 105938 - protein, 16 aa, Homo Sapiens
NKCDLAARTVESRQAQ

SEQ ID NO: 105939 - protein, 16 aa, Homo Sapiens
KCDLAARTVESRQAQD

SEQ ID NO: 105940 - protein, 16 aa, Homo Sapiens
CDLAARTVESRQAQDL

SEQ ID NO: 105941 - protein, 16 aa, Homo Sapiens
DLAARTVESRQAQDLA

SEQ ID NO: 105942 - protein, 16 aa, Homo Sapiens
LAARTVESRQAQDLAR

SEQ ID NO: 105943 - protein, 16 aa, Homo Sapiens
AARTVESRQAQDLARS

SEQ ID NO: 105944 - protein, 16 aa, Homo Sapiens
ARTVESRQAQDLARSY

SEQ ID NO: 105945 - protein, 16 aa, Homo Sapiens
RTVESRQAQDLARSYG

SEQ ID NO: 105946 - protein, 16 aa, Homo Sapiens
TVESRQAQDLARSYGI

SEQ ID NO: 105947 - protein, 16 aa, Homo Sapiens
VESRQAQDLARSYGIP

SEQ ID NO: 105948 - protein, 16 aa, Homo Sapiens
ESRQAQDLARSYGIPY

SEQ ID NO: 105949 - protein, 16 aa, Homo Sapiens
SRQAQDLARSYGIPYI

SEQ ID NO: 105950 - protein, 16 aa, Homo Sapiens
RQAQDLARSYGIPYIE

SEQ ID NO: 105951 - protein, 16 aa, Homo Sapiens
QAQDLARSYGIPYIET

SEQ ID NO: 105952 - protein, 16 aa, Homo Sapiens
AQDLARSYGIPYIETS

SEQ ID NO: 105953 - protein, 16 aa, Homo Sapiens
QDLARSYGIPYIETSA

SEQ ID NO: 105954 - protein, 16 aa, Homo Sapiens
DLARSYGIPYIETSAK

SEQ ID NO: 105955 - protein, 16 aa, Homo Sapiens
LARSYGIPYIETSAKT

SEQ ID NO: 105956 - protein, 16 aa, Homo Sapiens
ARSYGIPYIETSAKTR

SEQ ID NO: 105957 - protein, 16 aa, Homo Sapiens
RSYGIPYIETSAKTRQ

SEQ ID NO: 105958 - protein, 16 aa, Homo Sapiens
SYGIPYIETSAKTRQG

SEQ ID NO: 105959 - protein, 16 aa, Homo Sapiens
YGIPYIETSAKTRQGV

SEQ ID NO: 105960 - protein, 16 aa, Homo Sapiens
GIPYIETSAKTRQGVE

SEQ ID NO: 105961 - protein, 16 aa, Homo Sapiens
IPYIETSAKTRQGVED

SEQ ID NO: 105962 - protein, 16 aa, Homo Sapiens
PYIETSAKTRQGVEDA

SEQ ID NO: 105963 - protein, 16 aa, Homo Sapiens
YIETSAKTRQGVEDAF

SEQ ID NO: 105964 - protein, 16 aa, Homo Sapiens
IETSAKTRQGVEDAFY

SEQ ID NO: 105965 - protein, 16 aa, Homo Sapiens
ETSAKTRQGVEDAFYT

SEQ ID NO: 105966 - protein, 16 aa, Homo Sapiens
TSAKTRQGVEDAFYTL

SEQ ID NO: 105967 - protein, 16 aa, Homo Sapiens
SAKTRQGVEDAFYTLV

SEQ ID NO: 105968 - protein, 16 aa, Homo Sapiens
AKTRQGVEDAFYTLVR

SEQ ID NO: 105969 - protein, 16 aa, Homo Sapiens
KTRQGVEDAFYTLVRE

SEQ ID NO: 105970 - protein, 16 aa, Homo Sapiens
TRQGVEDAFYTLVREI

SEQ ID NO: 105971 - protein, 16 aa, Homo Sapiens
RQGVEDAFYTLVREIR

SEQ ID NO: 105972 - protein, 16 aa, Homo Sapiens
QGVEDAFYTLVREIRQ

SEQ ID NO: 105973 - protein, 16 aa, Homo Sapiens
GVEDAFYTLVREIRQH

SEQ ID NO: 105974 - protein, 16 aa, Homo Sapiens
VEDAFYTLVREIRQHK

SEQ ID NO: 105975 - protein, 16 aa, Homo Sapiens
EDAFYTLVREIRQHKL

SEQ ID NO: 105976 - protein, 16 aa, Homo Sapiens
DAFYTLVREIRQHKLR

SEQ ID NO: 105977 - protein, 16 aa, Homo Sapiens
AFYTLVREIRQHKLRK

SEQ ID NO: 105978 - protein, 16 aa, Homo Sapiens
FYTLVREIRQHKLRKL

SEQ ID NO: 105979 - protein, 298 aa, Homo Sapiens
MGPKDSAKCLHRGPQPSHWAAGDGPTQERCGPRSLGSPVLGLDTCRAWDHVDGQILGQLRPLTEEEEEEGAGATLSRGPAFPGMGSEELRLASFYDWPLTAEVPPELLAAAGFFHTGHQDKVRCFFCYGGLQSWKRGDDPWTEHAKWFPSCQFLLRSKGRDFVHSVQETHSQLLGSWDPWEEPEDAAPVAPSVPASGYPELPTPRREVQSESAQEPGGVSPAEAQRAWWVLEPPGARDVEAQLRRLQEERTCKVCLDRAVSIVFVPCGHLVCAECAPGLQLCPICRAPVRSRVRTFLS

SEQ ID NO: 105980 - protein, 8 aa, Homo Sapiens
DSAKCLHR

SEQ ID NO: 105981 - protein, 8 aa, Homo Sapiens
RGPQPSHW

SEQ ID NO: 105982 - protein, 8 aa, Homo Sapiens
WAAGDGPT

SEQ ID NO: 105983 - protein, 8 aa, Homo Sapiens
TQERCGPR

SEQ ID NO: 105984 - protein, 8 aa, Homo Sapiens
RSLGSPVL

SEQ ID NO: 105985 - protein, 8 aa, Homo Sapiens
GQILGQLR

SEQ ID NO: 105986 - protein, 8 aa, Homo Sapiens
ILGQLRPL

SEQ ID NO: 105987 - protein, 8 aa, Homo Sapiens
EEEEEEGA

SEQ ID NO: 105988 - protein, 8 aa, Homo Sapiens
EEGAGATL

SEQ ID NO: 105989 - protein, 8 aa, Homo Sapiens
TLSRGPAF

SEQ ID NO: 105990 - protein, 8 aa, Homo Sapiens
EELRLASF

SEQ ID NO: 105991 - protein, 8 aa, Homo Sapiens
ELRLASFY

SEQ ID NO: 105992 - protein, 8 aa, Homo Sapiens
RLASFYDW

SEQ ID NO: 105993 - protein, 8 aa, Homo Sapiens
FYDWPLTA

SEQ ID NO: 105994 - protein, 8 aa, Homo Sapiens
AEVPPELL

SEQ ID NO: 105995 - protein, 8 aa, Homo Sapiens
VPPELLAA

SEQ ID NO: 105996 - protein, 8 aa, Homo Sapiens
PPELLAAA

SEQ ID NO: 105997 - protein, 8 aa, Homo Sapiens
ELLAAAGF

SEQ ID NO: 105998 - protein, 8 aa, Homo Sapiens
LLAAAGFF

SEQ ID NO: 105999 - protein, 8 aa, Homo Sapiens
KVRCFFCY

SEQ ID NO: 106000 - protein, 8 aa, Homo Sapiens
CYGGLQSW

SEQ ID NO: 106001 - protein, 8 aa, Homo Sapiens
DPWTEHAK

SEQ ID NO: 106002 - protein, 8 aa, Homo Sapiens
WTEHAKWF

SEQ ID NO: 106003 - protein, 8 aa, Homo Sapiens
KWFPSCQF

SEQ ID NO: 106004 - protein, 8 aa, Homo Sapiens
WFPSCQFL

SEQ ID NO: 106005 - protein, 8 aa, Homo Sapiens
FPSCQFLL

SEQ ID NO: 106006 - protein, 8 aa, Homo Sapiens
PSCQFLLR

SEQ ID NO: 106007 - protein, 8 aa, Homo Sapiens
CQFLLRSK

SEQ ID NO: 106008 - protein, 8 aa, Homo Sapiens
GRDFVHSV

SEQ ID NO: 106009 - protein, 8 aa, Homo Sapiens
QETHSQLL

SEQ ID NO: 106010 - protein, 8 aa, Homo Sapiens
HSQLLGSW

SEQ ID NO: 106011 - protein, 8 aa, Homo Sapiens
EPEDAAPV

SEQ ID NO: 106012 - protein, 8 aa, Homo Sapiens
DAAPVAPS

SEQ ID NO: 106013 - protein, 8 aa, Homo Sapiens
AAPVAPSV

SEQ ID NO: 106014 - protein, 8 aa, Homo Sapiens
LPTPRREV

SEQ ID NO: 106015 - protein, 8 aa, Homo Sapiens
REVQSESA

SEQ ID NO: 106016 - protein, 8 aa, Homo Sapiens
SAQEPGGV

SEQ ID NO: 106017 - protein, 8 aa, Homo Sapiens
EPGGVSPA

SEQ ID NO: 106018 - protein, 8 aa, Homo Sapiens
VSPAEAQR

SEQ ID NO: 106019 - protein, 8 aa, Homo Sapiens
AEAQRAWW

SEQ ID NO: 106020 - protein, 8 aa, Homo Sapiens
EAQRAWWV

SEQ ID NO: 106021 - protein, 8 aa, Homo Sapiens
AQRAWWVL

SEQ ID NO: 106022 - protein, 8 aa, Homo Sapiens
WVLEPPGA

SEQ ID NO: 106023 - protein, 8 aa, Homo Sapiens
DVEAQLRR

SEQ ID NO: 106024 - protein, 8 aa, Homo Sapiens
VEAQLRRL

SEQ ID NO: 106025 - protein, 8 aa, Homo Sapiens
RLQEERTC

SEQ ID NO: 106026 - protein, 8 aa, Homo Sapiens
KVCLDRAV

SEQ ID NO: 106027 - protein, 8 aa, Homo Sapiens
CLDRAVSI

SEQ ID NO: 106028 - protein, 8 aa, Homo Sapiens
RAVSIVFV

SEQ ID NO: 106029 - protein, 8 aa, Homo Sapiens
VFVPCGHL

SEQ ID NO: 106030 - protein, 8 aa, Homo Sapiens
FVPCGHLV

SEQ ID NO: 106031 - protein, 8 aa, Homo Sapiens
HLVCAECA

SEQ ID NO: 106032 - protein, 8 aa, Homo Sapiens
ECAPGLQL

SEQ ID NO: 106033 - protein, 8 aa, Homo Sapiens
LQLCPICR

SEQ ID NO: 106034 - protein, 8 aa, Homo Sapiens
QLCPICRA

SEQ ID NO: 106035 - protein, 8 aa, Homo Sapiens
CPICRAPV

SEQ ID NO: 106036 - protein, 8 aa, Homo Sapiens
RSRVRTFL

SEQ ID NO: 106037 - protein, 9 aa, Homo Sapiens
GPQPSHWAA

SEQ ID NO: 106038 - protein, 9 aa, Homo Sapiens
QERCGPRSL

SEQ ID NO: 106039 - protein, 9 aa, Homo Sapiens
GPRSLGSPV

SEQ ID NO: 106040 - protein, 9 aa, Homo Sapiens
SLGSPVLGL

SEQ ID NO: 106041 - protein, 9 aa, Homo Sapiens
VLGLDTCRA

SEQ ID NO: 106042 - protein, 9 aa, Homo Sapiens
DTCRAWDHV

SEQ ID NO: 106043 - protein, 9 aa, Homo Sapiens
QILGQLRPL

SEQ ID NO: 106044 - protein, 9 aa, Homo Sapiens
ILGQLRPLT

SEQ ID NO: 106045 - protein, 9 aa, Homo Sapiens
EEEEEGAGA

SEQ ID NO: 106046 - protein, 9 aa, Homo Sapiens
EEEGAGATL

SEQ ID NO: 106047 - protein, 9 aa, Homo Sapiens
EGAGATLSR

SEQ ID NO: 106048 - protein, 9 aa, Homo Sapiens
ATLSRGPAF

SEQ ID NO: 106049 - protein, 9 aa, Homo Sapiens
FPGMGSEEL

SEQ ID NO: 106050 - protein, 9 aa, Homo Sapiens
GMGSEELRL

SEQ ID NO: 106051 - protein, 9 aa, Homo Sapiens
EELRLASFY

SEQ ID NO: 106052 - protein, 9 aa, Homo Sapiens
RLASFYDWP

SEQ ID NO: 106053 - protein, 9 aa, Homo Sapiens
LASFYDWPL

SEQ ID NO: 106054 - protein, 9 aa, Homo Sapiens
SFYDWPLTA

SEQ ID NO: 106055 - protein, 9 aa, Homo Sapiens
YDWPLTAEV

SEQ ID NO: 106056 - protein, 9 aa, Homo Sapiens
WPLTAEVPP

SEQ ID NO: 106057 - protein, 9 aa, Homo Sapiens
LTAEVPPEL

SEQ ID NO: 106058 - protein, 9 aa, Homo Sapiens
AEVPPELLA

SEQ ID NO: 106059 - protein, 9 aa, Homo Sapiens
EVPPELLAA

SEQ ID NO: 106060 - protein, 9 aa, Homo Sapiens
VPPELLAAA

SEQ ID NO: 106061 - protein, 9 aa, Homo Sapiens
PELLAAAGF

SEQ ID NO: 106062 - protein, 9 aa, Homo Sapiens
ELLAAAGFF

SEQ ID NO: 106063 - protein, 9 aa, Homo Sapiens
LLAAAGFFH

SEQ ID NO: 106064 - protein, 9 aa, Homo Sapiens
LAAAGFFHT

SEQ ID NO: 106065 - protein, 9 aa, Homo Sapiens
KVRCFFCYG

SEQ ID NO: 106066 - protein, 9 aa, Homo Sapiens
RCFFCYGGL

SEQ ID NO: 106067 - protein, 9 aa, Homo Sapiens
CYGGLQSWK

SEQ ID NO: 106068 - protein, 9 aa, Homo Sapiens
DPWTEHAKW

SEQ ID NO: 106069 - protein, 9 aa, Homo Sapiens
PWTEHAKWF

SEQ ID NO: 106070 - protein, 9 aa, Homo Sapiens
KWFPSCQFL

SEQ ID NO: 106071 - protein, 9 aa, Homo Sapiens
WFPSCQFLL

SEQ ID NO: 106072 - protein, 9 aa, Homo Sapiens
FPSCQFLLR

SEQ ID NO: 106073 - protein, 9 aa, Homo Sapiens
QFLLRSKGR

SEQ ID NO: 106074 - protein, 9 aa, Homo Sapiens
LLRSKGRDF

SEQ ID NO: 106075 - protein, 9 aa, Homo Sapiens
RSKGRDFVH

SEQ ID NO: 106076 - protein, 9 aa, Homo Sapiens
KGRDFVHSV

SEQ ID NO: 106077 - protein, 9 aa, Homo Sapiens
SVQETHSQL

SEQ ID NO: 106078 - protein, 9 aa, Homo Sapiens
EPEDAAPVA

SEQ ID NO: 106079 - protein, 9 aa, Homo Sapiens
DAAPVAPSV

SEQ ID NO: 106080 - protein, 9 aa, Homo Sapiens
APVAPSVPA

SEQ ID NO: 106081 - protein, 9 aa, Homo Sapiens
APSVPASGY

SEQ ID NO: 106082 - protein, 9 aa, Homo Sapiens
VPASGYPEL

SEQ ID NO: 106083 - protein, 9 aa, Homo Sapiens
GYPELPTPR

SEQ ID NO: 106084 - protein, 9 aa, Homo Sapiens
ELPTPRREV

SEQ ID NO: 106085 - protein, 9 aa, Homo Sapiens
LPTPRREVQ

SEQ ID NO: 106086 - protein, 9 aa, Homo Sapiens
ESAQEPGGV

SEQ ID NO: 106087 - protein, 9 aa, Homo Sapiens
GVSPAEAQR

SEQ ID NO: 106088 - protein, 9 aa, Homo Sapiens
SPAEAQRAW

SEQ ID NO: 106089 - protein, 9 aa, Homo Sapiens
AEAQRAWWV

SEQ ID NO: 106090 - protein, 9 aa, Homo Sapiens
EAQRAWWVL

SEQ ID NO: 106091 - protein, 9 aa, Homo Sapiens
GARDVEAQL

SEQ ID NO: 106092 - protein, 9 aa, Homo Sapiens
DVEAQLRRL

SEQ ID NO: 106093 - protein, 9 aa, Homo Sapiens
AQLRRLQEE

SEQ ID NO: 106094 - protein, 9 aa, Homo Sapiens
QLRRLQEER

SEQ ID NO: 106095 - protein, 9 aa, Homo Sapiens
RLQEERTCK

SEQ ID NO: 106096 - protein, 9 aa, Homo Sapiens
LQEERTCKV

SEQ ID NO: 106097 - protein, 9 aa, Homo Sapiens
EERTCKVCL

SEQ ID NO: 106098 - protein, 9 aa, Homo Sapiens
RTCKVCLDR

SEQ ID NO: 106099 - protein, 9 aa, Homo Sapiens
CLDRAVSIV

SEQ ID NO: 106100 - protein, 9 aa, Homo Sapiens
DRAVSIVFV

SEQ ID NO: 106101 - protein, 9 aa, Homo Sapiens
VFVPCGHLV

SEQ ID NO: 106102 - protein, 9 aa, Homo Sapiens
FVPCGHLVC

SEQ ID NO: 106103 - protein, 9 aa, Homo Sapiens
VPCGHLVCA

SEQ ID NO: 106104 - protein, 9 aa, Homo Sapiens
AECAPGLQL

SEQ ID NO: 106105 - protein, 9 aa, Homo Sapiens
APGLQLCPI

SEQ ID NO: 106106 - protein, 9 aa, Homo Sapiens
GLQLCPICR

SEQ ID NO: 106107 - protein, 9 aa, Homo Sapiens
LQLCPICRA

SEQ ID NO: 106108 - protein, 9 aa, Homo Sapiens
LCPICRAPV

SEQ ID NO: 106109 - protein, 9 aa, Homo Sapiens
CPICRAPVR

SEQ ID NO: 106110 - protein, 9 aa, Homo Sapiens
CRAPVRSRV

SEQ ID NO: 106111 - protein, 9 aa, Homo Sapiens
RAPVRSRVR

SEQ ID NO: 106112 - protein, 9 aa, Homo Sapiens
APVRSRVRT

SEQ ID NO: 106113 - protein, 9 aa, Homo Sapiens
RSRVRTFLS

SEQ ID NO: 106114 - protein, 10 aa, Homo Sapiens
SAKCLHRGPQ

SEQ ID NO: 106115 - protein, 10 aa, Homo Sapiens
TQERCGPRSL

SEQ ID NO: 106116 - protein, 10 aa, Homo Sapiens
GPRSLGSPVL

SEQ ID NO: 106117 - protein, 10 aa, Homo Sapiens
RSLGSPVLGL

SEQ ID NO: 106118 - protein, 10 aa, Homo Sapiens
RAWDHVDGQI

SEQ ID NO: 106119 - protein, 10 aa, Homo Sapiens
HVDGQILGQL

SEQ ID NO: 106120 - protein, 10 aa, Homo Sapiens
GQILGQLRPL

SEQ ID NO: 106121 - protein, 10 aa, Homo Sapiens
EEEEEEGAGA

SEQ ID NO: 106122 - protein, 10 aa, Homo Sapiens
EEEEEGAGAT

SEQ ID NO: 106123 - protein, 10 aa, Homo Sapiens
EEEEGAGATL

SEQ ID NO: 106124 - protein, 10 aa, Homo Sapiens
AFPGMGSEEL

SEQ ID NO: 106125 - protein, 10 aa, Homo Sapiens
FPGMGSEELR

SEQ ID NO: 106126 - protein, 10 aa, Homo Sapiens
GMGSEELRLA

SEQ ID NO: 106127 - protein, 10 aa, Homo Sapiens
RLASFYDWPL

SEQ ID NO: 106128 - protein, 10 aa, Homo Sapiens
FYDWPLTAEV

SEQ ID NO: 106129 - protein, 10 aa, Homo Sapiens
WPLTAEVPPE

SEQ ID NO: 106130 - protein, 10 aa, Homo Sapiens
PLTAEVPPEL

SEQ ID NO: 106131 - protein, 10 aa, Homo Sapiens
LTAEVPPELL

SEQ ID NO: 106132 - protein, 10 aa, Homo Sapiens
AEVPPELLAA

SEQ ID NO: 106133 - protein, 10 aa, Homo Sapiens
EVPPELLAAA

SEQ ID NO: 106134 - protein, 10 aa, Homo Sapiens
VPPELLAAAG

SEQ ID NO: 106135 - protein, 10 aa, Homo Sapiens
PPELLAAAGF

SEQ ID NO: 106136 - protein, 10 aa, Homo Sapiens
PELLAAAGFF

SEQ ID NO: 106137 - protein, 10 aa, Homo Sapiens
LLAAAGFFHT

SEQ ID NO: 106138 - protein, 10 aa, Homo Sapiens
GFFHTGHQDK

SEQ ID NO: 106139 - protein, 10 aa, Homo Sapiens
FFHTGHQDKV

SEQ ID NO: 106140 - protein, 10 aa, Homo Sapiens
FFCYGGLQSW

SEQ ID NO: 106141 - protein, 10 aa, Homo Sapiens
FCYGGLQSWK

SEQ ID NO: 106142 - protein, 10 aa, Homo Sapiens
CYGGLQSWKR

SEQ ID NO: 106143 - protein, 10 aa, Homo Sapiens
QSWKRGDDPW

SEQ ID NO: 106144 - protein, 10 aa, Homo Sapiens
DPWTEHAKWF

SEQ ID NO: 106145 - protein, 10 aa, Homo Sapiens
KWFPSCQFLL

SEQ ID NO: 106146 - protein, 10 aa, Homo Sapiens
WFPSCQFLLR

SEQ ID NO: 106147 - protein, 10 aa, Homo Sapiens
FPSCQFLLRS

SEQ ID NO: 106148 - protein, 10 aa, Homo Sapiens
PSCQFLLRSK

SEQ ID NO: 106149 - protein, 10 aa, Homo Sapiens
CQFLLRSKGR

SEQ ID NO: 106150 - protein, 10 aa, Homo Sapiens
FLLRSKGRDF

SEQ ID NO: 106151 - protein, 10 aa, Homo Sapiens
LLRSKGRDFV

SEQ ID NO: 106152 - protein, 10 aa, Homo Sapiens
SKGRDFVHSV

SEQ ID NO: 106153 - protein, 10 aa, Homo Sapiens
KGRDFVHSVQ

SEQ ID NO: 106154 - protein, 10 aa, Homo Sapiens
SVQETHSQLL

SEQ ID NO: 106155 - protein, 10 aa, Homo Sapiens
ETHSQLLGSW

SEQ ID NO: 106156 - protein, 10 aa, Homo Sapiens
DPWEEPEDAA

SEQ ID NO: 106157 - protein, 10 aa, Homo Sapiens
WEEPEDAAPV

SEQ ID NO: 106158 - protein, 10 aa, Homo Sapiens
EDAAPVAPSV

SEQ ID NO: 106159 - protein, 10 aa, Homo Sapiens
APVAPSVPAS

SEQ ID NO: 106160 - protein, 10 aa, Homo Sapiens
SVPASGYPEL

SEQ ID NO: 106161 - protein, 10 aa, Homo Sapiens
LPTPRREVQS

SEQ ID NO: 106162 - protein, 10 aa, Homo Sapiens
SESAQEPGGV

SEQ ID NO: 106163 - protein, 10 aa, Homo Sapiens
AQEPGGVSPA

SEQ ID NO: 106164 - protein, 10 aa, Homo Sapiens
EPGGVSPAEA

SEQ ID NO: 106165 - protein, 10 aa, Homo Sapiens
VSPAEAQRAW

SEQ ID NO: 106166 - protein, 10 aa, Homo Sapiens
SPAEAQRAWW

SEQ ID NO: 106167 - protein, 10 aa, Homo Sapiens
AEAQRAWWVL

SEQ ID NO: 106168 - protein, 10 aa, Homo Sapiens
VLEPPGARDV

SEQ ID NO: 106169 - protein, 10 aa, Homo Sapiens
AQLRRLQEER

SEQ ID NO: 106170 - protein, 10 aa, Homo Sapiens
RRLQEERTCK

SEQ ID NO: 106171 - protein, 10 aa, Homo Sapiens
RLQEERTCKV

SEQ ID NO: 106172 - protein, 10 aa, Homo Sapiens
QEERTCKVCL

SEQ ID NO: 106173 - protein, 10 aa, Homo Sapiens
VCLDRAVSIV

SEQ ID NO: 106174 - protein, 10 aa, Homo Sapiens
CLDRAVSIVF

SEQ ID NO: 106175 - protein, 10 aa, Homo Sapiens
IVFVPCGHLV

SEQ ID NO: 106176 - protein, 10 aa, Homo Sapiens
FVPCGHLVCA

SEQ ID NO: 106177 - protein, 10 aa, Homo Sapiens
VPCGHLVCAE

SEQ ID NO: 106178 - protein, 10 aa, Homo Sapiens
CAPGLQLCPI

SEQ ID NO: 106179 - protein, 10 aa, Homo Sapiens
GLQLCPICRA

SEQ ID NO: 106180 - protein, 10 aa, Homo Sapiens
QLCPICRAPV

SEQ ID NO: 106181 - protein, 10 aa, Homo Sapiens
APVRSRVRTF

SEQ ID NO: 106182 - protein, 10 aa, Homo Sapiens
PVRSRVRTFL

SEQ ID NO: 106183 - protein, 11 aa, Homo Sapiens
CLHRGPQPSHW

SEQ ID NO: 106184 - protein, 11 aa, Homo Sapiens
WAAGDGPTQER

SEQ ID NO: 106185 - protein, 11 aa, Homo Sapiens
SPVLGLDTCRA

SEQ ID NO: 106186 - protein, 11 aa, Homo Sapiens
GLDTCRAWDHV

SEQ ID NO: 106187 - protein, 11 aa, Homo Sapiens
RAWDHVDGQIL

SEQ ID NO: 106188 - protein, 11 aa, Homo Sapiens
HVDGQILGQLR

SEQ ID NO: 106189 - protein, 11 aa, Homo Sapiens
GQILGQLRPLT

SEQ ID NO: 106190 - protein, 11 aa, Homo Sapiens
PLTEEEEEEGA

SEQ ID NO: 106191 - protein, 11 aa, Homo Sapiens
EEEEEEGAGAT

SEQ ID NO: 106192 - protein, 11 aa, Homo Sapiens
EEEEEGAGATL

SEQ ID NO: 106193 - protein, 11 aa, Homo Sapiens
TLSRGPAFPGM

SEQ ID NO: 106194 - protein, 11 aa, Homo Sapiens
PAFPGMGSEEL

SEQ ID NO: 106195 - protein, 11 aa, Homo Sapiens
FPGMGSEELRL

SEQ ID NO: 106196 - protein, 11 aa, Homo Sapiens
EELRLASFYDW

SEQ ID NO: 106197 - protein, 11 aa, Homo Sapiens
RLASFYDWPLT

SEQ ID NO: 106198 - protein, 11 aa, Homo Sapiens
SFYDWPLTAEV

SEQ ID NO: 106199 - protein, 11 aa, Homo Sapiens
WPLTAEVPPEL

SEQ ID NO: 106200 - protein, 11 aa, Homo Sapiens
PLTAEVPPELL

SEQ ID NO: 106201 - protein, 11 aa, Homo Sapiens
LTAEVPPELLA

SEQ ID NO: 106202 - protein, 11 aa, Homo Sapiens
AEVPPELLAAA

SEQ ID NO: 106203 - protein, 11 aa, Homo Sapiens
VPPELLAAAGF

SEQ ID NO: 106204 - protein, 11 aa, Homo Sapiens
PPELLAAAGFF

SEQ ID NO: 106205 - protein, 11 aa, Homo Sapiens
ELLAAAGFFHT

SEQ ID NO: 106206 - protein, 11 aa, Homo Sapiens
LLAAAGFFHTG

SEQ ID NO: 106207 - protein, 11 aa, Homo Sapiens
AGFFHTGHQDK

SEQ ID NO: 106208 - protein, 11 aa, Homo Sapiens
GFFHTGHQDKV

SEQ ID NO: 106209 - protein, 11 aa, Homo Sapiens
KVRCFFCYGGL

SEQ ID NO: 106210 - protein, 11 aa, Homo Sapiens
FFCYGGLQSWK

SEQ ID NO: 106211 - protein, 11 aa, Homo Sapiens
RGDDPWTEHAK

SEQ ID NO: 106212 - protein, 11 aa, Homo Sapiens
KWFPSCQFLLR

SEQ ID NO: 106213 - protein, 11 aa, Homo Sapiens
QFLLRSKGRDF

SEQ ID NO: 106214 - protein, 11 aa, Homo Sapiens
FLLRSKGRDFV

SEQ ID NO: 106215 - protein, 11 aa, Homo Sapiens
SQLLGSWDPWE

SEQ ID NO: 106216 - protein, 11 aa, Homo Sapiens
QLLGSWDPWEE

SEQ ID NO: 106217 - protein, 11 aa, Homo Sapiens
DPWEEPEDAAP

SEQ ID NO: 106218 - protein, 11 aa, Homo Sapiens
EPEDAAPVAPS

SEQ ID NO: 106219 - protein, 11 aa, Homo Sapiens
DAAPVAPSVPA

SEQ ID NO: 106220 - protein, 11 aa, Homo Sapiens
APVAPSVPASG

SEQ ID NO: 106221 - protein, 11 aa, Homo Sapiens
PVAPSVPASGY

SEQ ID NO: 106222 - protein, 11 aa, Homo Sapiens
VPASGYPELPT

SEQ ID NO: 106223 - protein, 11 aa, Homo Sapiens
ASGYPELPTPR

SEQ ID NO: 106224 - protein, 11 aa, Homo Sapiens
YPELPTPRREV

SEQ ID NO: 106225 - protein, 11 aa, Homo Sapiens
TPRREVQSESA

SEQ ID NO: 106226 - protein, 11 aa, Homo Sapiens
GVSPAEAQRAW

SEQ ID NO: 106227 - protein, 11 aa, Homo Sapiens
VSPAEAQRAWW

SEQ ID NO: 106228 - protein, 11 aa, Homo Sapiens
SPAEAQRAWWV

SEQ ID NO: 106229 - protein, 11 aa, Homo Sapiens
RAWWVLEPPGA

SEQ ID NO: 106230 - protein, 11 aa, Homo Sapiens
AWWVLEPPGAR

SEQ ID NO: 106231 - protein, 11 aa, Homo Sapiens
WVLEPPGARDV

SEQ ID NO: 106232 - protein, 11 aa, Homo Sapiens
GARDVEAQLRR

SEQ ID NO: 106233 - protein, 11 aa, Homo Sapiens
EAQLRRLQEER

SEQ ID NO: 106234 - protein, 11 aa, Homo Sapiens
AQLRRLQEERT

SEQ ID NO: 106235 - protein, 11 aa, Homo Sapiens
RRLQEERTCKV

SEQ ID NO: 106236 - protein, 11 aa, Homo Sapiens
LQEERTCKVCL

SEQ ID NO: 106237 - protein, 11 aa, Homo Sapiens
CLDRAVSIVFV

SEQ ID NO: 106238 - protein, 11 aa, Homo Sapiens
SIVFVPCGHLV

SEQ ID NO: 106239 - protein, 11 aa, Homo Sapiens
HLVCAECAPGL

SEQ ID NO: 106240 - protein, 11 aa, Homo Sapiens
ECAPGLQLCPI

SEQ ID NO: 106241 - protein, 11 aa, Homo Sapiens
LQLCPICRAPV

SEQ ID NO: 106242 - protein, 11 aa, Homo Sapiens
QLCPICRAPVR

SEQ ID NO: 106243 - protein, 11 aa, Homo Sapiens
CPICRAPVRSR

SEQ ID NO: 106244 - protein, 11 aa, Homo Sapiens
PICRAPVRSRV

SEQ ID NO: 106245 - protein, 11 aa, Homo Sapiens
APVRSRVRTFL

SEQ ID NO: 106246 - protein, 13 aa, Homo Sapiens
MGPKDSAKCLHRG

SEQ ID NO: 106247 - protein, 13 aa, Homo Sapiens
GPKDSAKCLHRGP

SEQ ID NO: 106248 - protein, 13 aa, Homo Sapiens
PKDSAKCLHRGPQ

SEQ ID NO: 106249 - protein, 13 aa, Homo Sapiens
KDSAKCLHRGPQP

SEQ ID NO: 106250 - protein, 13 aa, Homo Sapiens
DSAKCLHRGPQPS

SEQ ID NO: 106251 - protein, 13 aa, Homo Sapiens
SAKCLHRGPQPSH

SEQ ID NO: 106252 - protein, 13 aa, Homo Sapiens
AKCLHRGPQPSHW

SEQ ID NO: 106253 - protein, 13 aa, Homo Sapiens
KCLHRGPQPSHWA

SEQ ID NO: 106254 - protein, 13 aa, Homo Sapiens
CLHRGPQPSHWAA

SEQ ID NO: 106255 - protein, 13 aa, Homo Sapiens
LHRGPQPSHWAAG

SEQ ID NO: 106256 - protein, 13 aa, Homo Sapiens
HRGPQPSHWAAGD

SEQ ID NO: 106257 - protein, 13 aa, Homo Sapiens
RGPQPSHWAAGDG

SEQ ID NO: 106258 - protein, 13 aa, Homo Sapiens
GPQPSHWAAGDGP

SEQ ID NO: 106259 - protein, 13 aa, Homo Sapiens
PQPSHWAAGDGPT

SEQ ID NO: 106260 - protein, 13 aa, Homo Sapiens
QPSHWAAGDGPTQ

SEQ ID NO: 106261 - protein, 13 aa, Homo Sapiens
PSHWAAGDGPTQE

SEQ ID NO: 106262 - protein, 13 aa, Homo Sapiens
SHWAAGDGPTQER

SEQ ID NO: 106263 - protein, 13 aa, Homo Sapiens
HWAAGDGPTQERC

SEQ ID NO: 106264 - protein, 13 aa, Homo Sapiens
WAAGDGPTQERCG

SEQ ID NO: 106265 - protein, 13 aa, Homo Sapiens
AAGDGPTQERCGP

SEQ ID NO: 106266 - protein, 13 aa, Homo Sapiens
AGDGPTQERCGPR

SEQ ID NO: 106267 - protein, 13 aa, Homo Sapiens
GDGPTQERCGPRS

SEQ ID NO: 106268 - protein, 13 aa, Homo Sapiens
DGPTQERCGPRSL

SEQ ID NO: 106269 - protein, 13 aa, Homo Sapiens
GPTQERCGPRSLG

SEQ ID NO: 106270 - protein, 13 aa, Homo Sapiens
PTQERCGPRSLGS

SEQ ID NO: 106271 - protein, 13 aa, Homo Sapiens
TQERCGPRSLGSP

SEQ ID NO: 106272 - protein, 13 aa, Homo Sapiens
QERCGPRSLGSPV

SEQ ID NO: 106273 - protein, 13 aa, Homo Sapiens
ERCGPRSLGSPVL

SEQ ID NO: 106274 - protein, 13 aa, Homo Sapiens
RCGPRSLGSPVLG

SEQ ID NO: 106275 - protein, 13 aa, Homo Sapiens
CGPRSLGSPVLGL

SEQ ID NO: 106276 - protein, 13 aa, Homo Sapiens
GPRSLGSPVLGLD

SEQ ID NO: 106277 - protein, 13 aa, Homo Sapiens
PRSLGSPVLGLDT

SEQ ID NO: 106278 - protein, 13 aa, Homo Sapiens
RSLGSPVLGLDTC

SEQ ID NO: 106279 - protein, 13 aa, Homo Sapiens
SLGSPVLGLDTCR

SEQ ID NO: 106280 - protein, 13 aa, Homo Sapiens
LGSPVLGLDTCRA

SEQ ID NO: 106281 - protein, 13 aa, Homo Sapiens
GSPVLGLDTCRAW

SEQ ID NO: 106282 - protein, 13 aa, Homo Sapiens
SPVLGLDTCRAWD

SEQ ID NO: 106283 - protein, 13 aa, Homo Sapiens
PVLGLDTCRAWDH

SEQ ID NO: 106284 - protein, 13 aa, Homo Sapiens
VLGLDTCRAWDHV

SEQ ID NO: 106285 - protein, 13 aa, Homo Sapiens
LGLDTCRAWDHVD

SEQ ID NO: 106286 - protein, 13 aa, Homo Sapiens
GLDTCRAWDHVDG

SEQ ID NO: 106287 - protein, 13 aa, Homo Sapiens
LDTCRAWDHVDGQ

SEQ ID NO: 106288 - protein, 13 aa, Homo Sapiens
DTCRAWDHVDGQI

SEQ ID NO: 106289 - protein, 13 aa, Homo Sapiens
TCRAWDHVDGQIL

SEQ ID NO: 106290 - protein, 13 aa, Homo Sapiens
CRAWDHVDGQILG

SEQ ID NO: 106291 - protein, 13 aa, Homo Sapiens
RAWDHVDGQILGQ

SEQ ID NO: 106292 - protein, 13 aa, Homo Sapiens
AWDHVDGQILGQL

SEQ ID NO: 106293 - protein, 13 aa, Homo Sapiens
WDHVDGQILGQLR

SEQ ID NO: 106294 - protein, 13 aa, Homo Sapiens
DHVDGQILGQLRP

SEQ ID NO: 106295 - protein, 13 aa, Homo Sapiens
HVDGQILGQLRPL

SEQ ID NO: 106296 - protein, 13 aa, Homo Sapiens
VDGQILGQLRPLT

SEQ ID NO: 106297 - protein, 13 aa, Homo Sapiens
DGQILGQLRPLTE

SEQ ID NO: 106298 - protein, 13 aa, Homo Sapiens
GQILGQLRPLTEE

SEQ ID NO: 106299 - protein, 13 aa, Homo Sapiens
QILGQLRPLTEEE

SEQ ID NO: 106300 - protein, 13 aa, Homo Sapiens
ILGQLRPLTEEEE

SEQ ID NO: 106301 - protein, 13 aa, Homo Sapiens
LGQLRPLTEEEEE

SEQ ID NO: 106302 - protein, 13 aa, Homo Sapiens
GQLRPLTEEEEEE

SEQ ID NO: 106303 - protein, 13 aa, Homo Sapiens
QLRPLTEEEEEEG

SEQ ID NO: 106304 - protein, 13 aa, Homo Sapiens
LRPLTEEEEEEGA

SEQ ID NO: 106305 - protein, 13 aa, Homo Sapiens
RPLTEEEEEEGAG

SEQ ID NO: 106306 - protein, 13 aa, Homo Sapiens
PLTEEEEEEGAGA

SEQ ID NO: 106307 - protein, 13 aa, Homo Sapiens
LTEEEEEEGAGAT

SEQ ID NO: 106308 - protein, 13 aa, Homo Sapiens
TEEEEEEGAGATL

SEQ ID NO: 106309 - protein, 13 aa, Homo Sapiens
EEEEEEGAGATLS

SEQ ID NO: 106310 - protein, 13 aa, Homo Sapiens
EEEEEGAGATLSR

SEQ ID NO: 106311 - protein, 13 aa, Homo Sapiens
EEEEGAGATLSRG

SEQ ID NO: 106312 - protein, 13 aa, Homo Sapiens
EEEGAGATLSRGP

SEQ ID NO: 106313 - protein, 13 aa, Homo Sapiens
EEGAGATLSRGPA

SEQ ID NO: 106314 - protein, 13 aa, Homo Sapiens
EGAGATLSRGPAF

SEQ ID NO: 106315 - protein, 13 aa, Homo Sapiens
GAGATLSRGPAFP

SEQ ID NO: 106316 - protein, 13 aa, Homo Sapiens
AGATLSRGPAFPG

SEQ ID NO: 106317 - protein, 13 aa, Homo Sapiens
GATLSRGPAFPGM

SEQ ID NO: 106318 - protein, 13 aa, Homo Sapiens
ATLSRGPAFPGMG

SEQ ID NO: 106319 - protein, 13 aa, Homo Sapiens
TLSRGPAFPGMGS

SEQ ID NO: 106320 - protein, 13 aa, Homo Sapiens
LSRGPAFPGMGSE

SEQ ID NO: 106321 - protein, 13 aa, Homo Sapiens
SRGPAFPGMGSEE

SEQ ID NO: 106322 - protein, 13 aa, Homo Sapiens
RGPAFPGMGSEEL

SEQ ID NO: 106323 - protein, 13 aa, Homo Sapiens
GPAFPGMGSEELR

SEQ ID NO: 106324 - protein, 13 aa, Homo Sapiens
PAFPGMGSEELRL

SEQ ID NO: 106325 - protein, 13 aa, Homo Sapiens
AFPGMGSEELRLA

SEQ ID NO: 106326 - protein, 13 aa, Homo Sapiens
FPGMGSEELRLAS

SEQ ID NO: 106327 - protein, 13 aa, Homo Sapiens
PGMGSEELRLASF

SEQ ID NO: 106328 - protein, 13 aa, Homo Sapiens
GMGSEELRLASFY

SEQ ID NO: 106329 - protein, 13 aa, Homo Sapiens
MGSEELRLASFYD

SEQ ID NO: 106330 - protein, 13 aa, Homo Sapiens
GSEELRLASFYDW

SEQ ID NO: 106331 - protein, 13 aa, Homo Sapiens
SEELRLASFYDWP

SEQ ID NO: 106332 - protein, 13 aa, Homo Sapiens
EELRLASFYDWPL

SEQ ID NO: 106333 - protein, 13 aa, Homo Sapiens
ELRLASFYDWPLT

SEQ ID NO: 106334 - protein, 13 aa, Homo Sapiens
LRLASFYDWPLTA

SEQ ID NO: 106335 - protein, 13 aa, Homo Sapiens
RLASFYDWPLTAE

SEQ ID NO: 106336 - protein, 13 aa, Homo Sapiens
LASFYDWPLTAEV

SEQ ID NO: 106337 - protein, 13 aa, Homo Sapiens
ASFYDWPLTAEVP

SEQ ID NO: 106338 - protein, 13 aa, Homo Sapiens
SFYDWPLTAEVPP

SEQ ID NO: 106339 - protein, 13 aa, Homo Sapiens
FYDWPLTAEVPPE

SEQ ID NO: 106340 - protein, 13 aa, Homo Sapiens
YDWPLTAEVPPEL

SEQ ID NO: 106341 - protein, 13 aa, Homo Sapiens
DWPLTAEVPPELL

SEQ ID NO: 106342 - protein, 13 aa, Homo Sapiens
WPLTAEVPPELLA

SEQ ID NO: 106343 - protein, 13 aa, Homo Sapiens
PLTAEVPPELLAA

SEQ ID NO: 106344 - protein, 13 aa, Homo Sapiens
LTAEVPPELLAAA

SEQ ID NO: 106345 - protein, 13 aa, Homo Sapiens
TAEVPPELLAAAG

SEQ ID NO: 106346 - protein, 13 aa, Homo Sapiens
AEVPPELLAAAGF

SEQ ID NO: 106347 - protein, 13 aa, Homo Sapiens
EVPPELLAAAGFF

SEQ ID NO: 106348 - protein, 13 aa, Homo Sapiens
VPPELLAAAGFFH

SEQ ID NO: 106349 - protein, 13 aa, Homo Sapiens
PPELLAAAGFFHT

SEQ ID NO: 106350 - protein, 13 aa, Homo Sapiens
PELLAAAGFFHTG

SEQ ID NO: 106351 - protein, 13 aa, Homo Sapiens
ELLAAAGFFHTGH

SEQ ID NO: 106352 - protein, 13 aa, Homo Sapiens
LLAAAGFFHTGHQ

SEQ ID NO: 106353 - protein, 13 aa, Homo Sapiens
LAAAGFFHTGHQD

SEQ ID NO: 106354 - protein, 13 aa, Homo Sapiens
AAAGFFHTGHQDK

SEQ ID NO: 106355 - protein, 13 aa, Homo Sapiens
AAGFFHTGHQDKV

SEQ ID NO: 106356 - protein, 13 aa, Homo Sapiens
AGFFHTGHQDKVR

SEQ ID NO: 106357 - protein, 13 aa, Homo Sapiens
GFFHTGHQDKVRC

SEQ ID NO: 106358 - protein, 13 aa, Homo Sapiens
FFHTGHQDKVRCF

SEQ ID NO: 106359 - protein, 13 aa, Homo Sapiens
FHTGHQDKVRCFF

SEQ ID NO: 106360 - protein, 13 aa, Homo Sapiens
HTGHQDKVRCFFC

SEQ ID NO: 106361 - protein, 13 aa, Homo Sapiens
TGHQDKVRCFFCY

SEQ ID NO: 106362 - protein, 13 aa, Homo Sapiens
GHQDKVRCFFCYG

SEQ ID NO: 106363 - protein, 13 aa, Homo Sapiens
HQDKVRCFFCYGG

SEQ ID NO: 106364 - protein, 13 aa, Homo Sapiens
QDKVRCFFCYGGL

SEQ ID NO: 106365 - protein, 13 aa, Homo Sapiens
DKVRCFFCYGGLQ

SEQ ID NO: 106366 - protein, 13 aa, Homo Sapiens
KVRCFFCYGGLQS

SEQ ID NO: 106367 - protein, 13 aa, Homo Sapiens
VRCFFCYGGLQSW

SEQ ID NO: 106368 - protein, 13 aa, Homo Sapiens
RCFFCYGGLQSWK

SEQ ID NO: 106369 - protein, 13 aa, Homo Sapiens
CFFCYGGLQSWKR

SEQ ID NO: 106370 - protein, 13 aa, Homo Sapiens
FFCYGGLQSWKRG

SEQ ID NO: 106371 - protein, 13 aa, Homo Sapiens
FCYGGLQSWKRGD

SEQ ID NO: 106372 - protein, 13 aa, Homo Sapiens
CYGGLQSWKRGDD

SEQ ID NO: 106373 - protein, 13 aa, Homo Sapiens
YGGLQSWKRGDDP

SEQ ID NO: 106374 - protein, 13 aa, Homo Sapiens
GGLQSWKRGDDPW

SEQ ID NO: 106375 - protein, 13 aa, Homo Sapiens
GLQSWKRGDDPWT

SEQ ID NO: 106376 - protein, 13 aa, Homo Sapiens
LQSWKRGDDPWTE

SEQ ID NO: 106377 - protein, 13 aa, Homo Sapiens
QSWKRGDDPWTEH

SEQ ID NO: 106378 - protein, 13 aa, Homo Sapiens
SWKRGDDPWTEHA

SEQ ID NO: 106379 - protein, 13 aa, Homo Sapiens
WKRGDDPWTEHAK

SEQ ID NO: 106380 - protein, 13 aa, Homo Sapiens
KRGDDPWTEHAKW

SEQ ID NO: 106381 - protein, 13 aa, Homo Sapiens
RGDDPWTEHAKWF

SEQ ID NO: 106382 - protein, 13 aa, Homo Sapiens
GDDPWTEHAKWFP

SEQ ID NO: 106383 - protein, 13 aa, Homo Sapiens
DDPWTEHAKWFPS

SEQ ID NO: 106384 - protein, 13 aa, Homo Sapiens
DPWTEHAKWFPSC

SEQ ID NO: 106385 - protein, 13 aa, Homo Sapiens
PWTEHAKWFPSCQ

SEQ ID NO: 106386 - protein, 13 aa, Homo Sapiens
WTEHAKWFPSCQF

SEQ ID NO: 106387 - protein, 13 aa, Homo Sapiens
TEHAKWFPSCQFL

SEQ ID NO: 106388 - protein, 13 aa, Homo Sapiens
EHAKWFPSCQFLL

SEQ ID NO: 106389 - protein, 13 aa, Homo Sapiens
HAKWFPSCQFLLR

SEQ ID NO: 106390 - protein, 13 aa, Homo Sapiens
AKWFPSCQFLLRS

SEQ ID NO: 106391 - protein, 13 aa, Homo Sapiens
KWFPSCQFLLRSK

SEQ ID NO: 106392 - protein, 13 aa, Homo Sapiens
WFPSCQFLLRSKG

SEQ ID NO: 106393 - protein, 13 aa, Homo Sapiens
FPSCQFLLRSKGR

SEQ ID NO: 106394 - protein, 13 aa, Homo Sapiens
PSCQFLLRSKGRD

SEQ ID NO: 106395 - protein, 13 aa, Homo Sapiens
SCQFLLRSKGRDF

SEQ ID NO: 106396 - protein, 13 aa, Homo Sapiens
CQFLLRSKGRDFV

SEQ ID NO: 106397 - protein, 13 aa, Homo Sapiens
QFLLRSKGRDFVH

SEQ ID NO: 106398 - protein, 13 aa, Homo Sapiens
FLLRSKGRDFVHS

SEQ ID NO: 106399 - protein, 13 aa, Homo Sapiens
LLRSKGRDFVHSV

SEQ ID NO: 106400 - protein, 13 aa, Homo Sapiens
LRSKGRDFVHSVQ

SEQ ID NO: 106401 - protein, 13 aa, Homo Sapiens
RSKGRDFVHSVQE

SEQ ID NO: 106402 - protein, 13 aa, Homo Sapiens
SKGRDFVHSVQET

SEQ ID NO: 106403 - protein, 13 aa, Homo Sapiens
KGRDFVHSVQETH

SEQ ID NO: 106404 - protein, 13 aa, Homo Sapiens
GRDFVHSVQETHS

SEQ ID NO: 106405 - protein, 13 aa, Homo Sapiens
RDFVHSVQETHSQ

SEQ ID NO: 106406 - protein, 13 aa, Homo Sapiens
DFVHSVQETHSQL

SEQ ID NO: 106407 - protein, 13 aa, Homo Sapiens
FVHSVQETHSQLL

SEQ ID NO: 106408 - protein, 13 aa, Homo Sapiens
VHSVQETHSQLLG

SEQ ID NO: 106409 - protein, 13 aa, Homo Sapiens
HSVQETHSQLLGS

SEQ ID NO: 106410 - protein, 13 aa, Homo Sapiens
SVQETHSQLLGSW

SEQ ID NO: 106411 - protein, 13 aa, Homo Sapiens
VQETHSQLLGSWD

SEQ ID NO: 106412 - protein, 13 aa, Homo Sapiens
QETHSQLLGSWDP

SEQ ID NO: 106413 - protein, 13 aa, Homo Sapiens
ETHSQLLGSWDPW

SEQ ID NO: 106414 - protein, 13 aa, Homo Sapiens
THSQLLGSWDPWE

SEQ ID NO: 106415 - protein, 13 aa, Homo Sapiens
HSQLLGSWDPWEE

SEQ ID NO: 106416 - protein, 13 aa, Homo Sapiens
SQLLGSWDPWEEP

SEQ ID NO: 106417 - protein, 13 aa, Homo Sapiens
QLLGSWDPWEEPE

SEQ ID NO: 106418 - protein, 13 aa, Homo Sapiens
LLGSWDPWEEPED

SEQ ID NO: 106419 - protein, 13 aa, Homo Sapiens
LGSWDPWEEPEDA

SEQ ID NO: 106420 - protein, 13 aa, Homo Sapiens
GSWDPWEEPEDAA

SEQ ID NO: 106421 - protein, 13 aa, Homo Sapiens
SWDPWEEPEDAAP

SEQ ID NO: 106422 - protein, 13 aa, Homo Sapiens
WDPWEEPEDAAPV

SEQ ID NO: 106423 - protein, 13 aa, Homo Sapiens
DPWEEPEDAAPVA

SEQ ID NO: 106424 - protein, 13 aa, Homo Sapiens
PWEEPEDAAPVAP

SEQ ID NO: 106425 - protein, 13 aa, Homo Sapiens
WEEPEDAAPVAPS

SEQ ID NO: 106426 - protein, 13 aa, Homo Sapiens
EEPEDAAPVAPSV

SEQ ID NO: 106427 - protein, 13 aa, Homo Sapiens
EPEDAAPVAPSVP

SEQ ID NO: 106428 - protein, 13 aa, Homo Sapiens
PEDAAPVAPSVPA

SEQ ID NO: 106429 - protein, 13 aa, Homo Sapiens
EDAAPVAPSVPAS

SEQ ID NO: 106430 - protein, 13 aa, Homo Sapiens
DAAPVAPSVPASG

SEQ ID NO: 106431 - protein, 13 aa, Homo Sapiens
AAPVAPSVPASGY

SEQ ID NO: 106432 - protein, 13 aa, Homo Sapiens
APVAPSVPASGYP

SEQ ID NO: 106433 - protein, 13 aa, Homo Sapiens
PVAPSVPASGYPE

SEQ ID NO: 106434 - protein, 13 aa, Homo Sapiens
VAPSVPASGYPEL

SEQ ID NO: 106435 - protein, 13 aa, Homo Sapiens
APSVPASGYPELP

SEQ ID NO: 106436 - protein, 13 aa, Homo Sapiens
PSVPASGYPELPT

SEQ ID NO: 106437 - protein, 13 aa, Homo Sapiens
SVPASGYPELPTP

SEQ ID NO: 106438 - protein, 13 aa, Homo Sapiens
VPASGYPELPTPR

SEQ ID NO: 106439 - protein, 13 aa, Homo Sapiens
PASGYPELPTPRR

SEQ ID NO: 106440 - protein, 13 aa, Homo Sapiens
ASGYPELPTPRRE

SEQ ID NO: 106441 - protein, 13 aa, Homo Sapiens
SGYPELPTPRREV

SEQ ID NO: 106442 - protein, 13 aa, Homo Sapiens
GYPELPTPRREVQ

SEQ ID NO: 106443 - protein, 13 aa, Homo Sapiens
YPELPTPRREVQS

SEQ ID NO: 106444 - protein, 13 aa, Homo Sapiens
PELPTPRREVQSE

SEQ ID NO: 106445 - protein, 13 aa, Homo Sapiens
ELPTPRREVQSES

SEQ ID NO: 106446 - protein, 13 aa, Homo Sapiens
LPTPRREVQSESA

SEQ ID NO: 106447 - protein, 13 aa, Homo Sapiens
PTPRREVQSESAQ

SEQ ID NO: 106448 - protein, 13 aa, Homo Sapiens
TPRREVQSESAQE

SEQ ID NO: 106449 - protein, 13 aa, Homo Sapiens
PRREVQSESAQEP

SEQ ID NO: 106450 - protein, 13 aa, Homo Sapiens
RREVQSESAQEPG

SEQ ID NO: 106451 - protein, 13 aa, Homo Sapiens
REVQSESAQEPGG

SEQ ID NO: 106452 - protein, 13 aa, Homo Sapiens
EVQSESAQEPGGV

SEQ ID NO: 106453 - protein, 13 aa, Homo Sapiens
VQSESAQEPGGVS

SEQ ID NO: 106454 - protein, 13 aa, Homo Sapiens
QSESAQEPGGVSP

SEQ ID NO: 106455 - protein, 13 aa, Homo Sapiens
SESAQEPGGVSPA

SEQ ID NO: 106456 - protein, 13 aa, Homo Sapiens
ESAQEPGGVSPAE

SEQ ID NO: 106457 - protein, 13 aa, Homo Sapiens
SAQEPGGVSPAEA

SEQ ID NO: 106458 - protein, 13 aa, Homo Sapiens
AQEPGGVSPAEAQ

SEQ ID NO: 106459 - protein, 13 aa, Homo Sapiens
QEPGGVSPAEAQR

SEQ ID NO: 106460 - protein, 13 aa, Homo Sapiens
EPGGVSPAEAQRA

SEQ ID NO: 106461 - protein, 13 aa, Homo Sapiens
PGGVSPAEAQRAW

SEQ ID NO: 106462 - protein, 13 aa, Homo Sapiens
GGVSPAEAQRAWW

SEQ ID NO: 106463 - protein, 13 aa, Homo Sapiens
GVSPAEAQRAWWV

SEQ ID NO: 106464 - protein, 13 aa, Homo Sapiens
VSPAEAQRAWWVL

SEQ ID NO: 106465 - protein, 13 aa, Homo Sapiens
SPAEAQRAWWVLE

SEQ ID NO: 106466 - protein, 13 aa, Homo Sapiens
PAEAQRAWWVLEP

SEQ ID NO: 106467 - protein, 13 aa, Homo Sapiens
AEAQRAWWVLEPP

SEQ ID NO: 106468 - protein, 13 aa, Homo Sapiens
EAQRAWWVLEPPG

SEQ ID NO: 106469 - protein, 13 aa, Homo Sapiens
AQRAWWVLEPPGA

SEQ ID NO: 106470 - protein, 13 aa, Homo Sapiens
QRAWWVLEPPGAR

SEQ ID NO: 106471 - protein, 13 aa, Homo Sapiens
RAWWVLEPPGARD

SEQ ID NO: 106472 - protein, 13 aa, Homo Sapiens
AWWVLEPPGARDV

SEQ ID NO: 106473 - protein, 13 aa, Homo Sapiens
WWVLEPPGARDVE

SEQ ID NO: 106474 - protein, 13 aa, Homo Sapiens
WVLEPPGARDVEA

SEQ ID NO: 106475 - protein, 13 aa, Homo Sapiens
VLEPPGARDVEAQ

SEQ ID NO: 106476 - protein, 13 aa, Homo Sapiens
LEPPGARDVEAQL

SEQ ID NO: 106477 - protein, 13 aa, Homo Sapiens
EPPGARDVEAQLR

SEQ ID NO: 106478 - protein, 13 aa, Homo Sapiens
PPGARDVEAQLRR

SEQ ID NO: 106479 - protein, 13 aa, Homo Sapiens
PGARDVEAQLRRL

SEQ ID NO: 106480 - protein, 13 aa, Homo Sapiens
GARDVEAQLRRLQ

SEQ ID NO: 106481 - protein, 13 aa, Homo Sapiens
ARDVEAQLRRLQE

SEQ ID NO: 106482 - protein, 13 aa, Homo Sapiens
RDVEAQLRRLQEE

SEQ ID NO: 106483 - protein, 13 aa, Homo Sapiens
DVEAQLRRLQEER

SEQ ID NO: 106484 - protein, 13 aa, Homo Sapiens
VEAQLRRLQEERT

SEQ ID NO: 106485 - protein, 13 aa, Homo Sapiens
EAQLRRLQEERTC

SEQ ID NO: 106486 - protein, 13 aa, Homo Sapiens
AQLRRLQEERTCK

SEQ ID NO: 106487 - protein, 13 aa, Homo Sapiens
QLRRLQEERTCKV

SEQ ID NO: 106488 - protein, 13 aa, Homo Sapiens
LRRLQEERTCKVC

SEQ ID NO: 106489 - protein, 13 aa, Homo Sapiens
RRLQEERTCKVCL

SEQ ID NO: 106490 - protein, 13 aa, Homo Sapiens
RLQEERTCKVCLD

SEQ ID NO: 106491 - protein, 13 aa, Homo Sapiens
LQEERTCKVCLDR

SEQ ID NO: 106492 - protein, 13 aa, Homo Sapiens
QEERTCKVCLDRA

SEQ ID NO: 106493 - protein, 13 aa, Homo Sapiens
EERTCKVCLDRAV

SEQ ID NO: 106494 - protein, 13 aa, Homo Sapiens
ERTCKVCLDRAVS

SEQ ID NO: 106495 - protein, 13 aa, Homo Sapiens
RTCKVCLDRAVSI

SEQ ID NO: 106496 - protein, 13 aa, Homo Sapiens
TCKVCLDRAVSIV

SEQ ID NO: 106497 - protein, 13 aa, Homo Sapiens
CKVCLDRAVSIVF

SEQ ID NO: 106498 - protein, 13 aa, Homo Sapiens
KVCLDRAVSIVFV

SEQ ID NO: 106499 - protein, 13 aa, Homo Sapiens
VCLDRAVSIVFVP

SEQ ID NO: 106500 - protein, 13 aa, Homo Sapiens
CLDRAVSIVFVPC

SEQ ID NO: 106501 - protein, 13 aa, Homo Sapiens
LDRAVSIVFVPCG

SEQ ID NO: 106502 - protein, 13 aa, Homo Sapiens
DRAVSIVFVPCGH

SEQ ID NO: 106503 - protein, 13 aa, Homo Sapiens
RAVSIVFVPCGHL

SEQ ID NO: 106504 - protein, 13 aa, Homo Sapiens
AVSIVFVPCGHLV

SEQ ID NO: 106505 - protein, 13 aa, Homo Sapiens
VSIVFVPCGHLVC

SEQ ID NO: 106506 - protein, 13 aa, Homo Sapiens
SIVFVPCGHLVCA

SEQ ID NO: 106507 - protein, 13 aa, Homo Sapiens
IVFVPCGHLVCAE

SEQ ID NO: 106508 - protein, 13 aa, Homo Sapiens
VFVPCGHLVCAEC

SEQ ID NO: 106509 - protein, 13 aa, Homo Sapiens
FVPCGHLVCAECA

SEQ ID NO: 106510 - protein, 13 aa, Homo Sapiens
VPCGHLVCAECAP

SEQ ID NO: 106511 - protein, 13 aa, Homo Sapiens
PCGHLVCAECAPG

SEQ ID NO: 106512 - protein, 13 aa, Homo Sapiens
CGHLVCAECAPGL

SEQ ID NO: 106513 - protein, 13 aa, Homo Sapiens
GHLVCAECAPGLQ

SEQ ID NO: 106514 - protein, 13 aa, Homo Sapiens
HLVCAECAPGLQL

SEQ ID NO: 106515 - protein, 13 aa, Homo Sapiens
LVCAECAPGLQLC

SEQ ID NO: 106516 - protein, 13 aa, Homo Sapiens
VCAECAPGLQLCP

SEQ ID NO: 106517 - protein, 13 aa, Homo Sapiens
CAECAPGLQLCPI

SEQ ID NO: 106518 - protein, 13 aa, Homo Sapiens
AECAPGLQLCPIC

SEQ ID NO: 106519 - protein, 13 aa, Homo Sapiens
ECAPGLQLCPICR

SEQ ID NO: 106520 - protein, 13 aa, Homo Sapiens
CAPGLQLCPICRA

SEQ ID NO: 106521 - protein, 13 aa, Homo Sapiens
APGLQLCPICRAP

SEQ ID NO: 106522 - protein, 13 aa, Homo Sapiens
PGLQLCPICRAPV

SEQ ID NO: 106523 - protein, 13 aa, Homo Sapiens
GLQLCPICRAPVR

SEQ ID NO: 106524 - protein, 13 aa, Homo Sapiens
LQLCPICRAPVRS

SEQ ID NO: 106525 - protein, 13 aa, Homo Sapiens
QLCPICRAPVRSR

SEQ ID NO: 106526 - protein, 13 aa, Homo Sapiens
LCPICRAPVRSRV

SEQ ID NO: 106527 - protein, 13 aa, Homo Sapiens
CPICRAPVRSRVR

SEQ ID NO: 106528 - protein, 13 aa, Homo Sapiens
PICRAPVRSRVRT

SEQ ID NO: 106529 - protein, 13 aa, Homo Sapiens
ICRAPVRSRVRTF

SEQ ID NO: 106530 - protein, 13 aa, Homo Sapiens
CRAPVRSRVRTFL

SEQ ID NO: 106531 - protein, 13 aa, Homo Sapiens
RAPVRSRVRTFLS

SEQ ID NO: 106532 - protein, 14 aa, Homo Sapiens
MGPKDSAKCLHRGP

SEQ ID NO: 106533 - protein, 14 aa, Homo Sapiens
GPKDSAKCLHRGPQ

SEQ ID NO: 106534 - protein, 14 aa, Homo Sapiens
PKDSAKCLHRGPQP

SEQ ID NO: 106535 - protein, 14 aa, Homo Sapiens
KDSAKCLHRGPQPS

SEQ ID NO: 106536 - protein, 14 aa, Homo Sapiens
DSAKCLHRGPQPSH

SEQ ID NO: 106537 - protein, 14 aa, Homo Sapiens
SAKCLHRGPQPSHW

SEQ ID NO: 106538 - protein, 14 aa, Homo Sapiens
AKCLHRGPQPSHWA

SEQ ID NO: 106539 - protein, 14 aa, Homo Sapiens
KCLHRGPQPSHWAA

SEQ ID NO: 106540 - protein, 14 aa, Homo Sapiens
CLHRGPQPSHWAAG

SEQ ID NO: 106541 - protein, 14 aa, Homo Sapiens
LHRGPQPSHWAAGD

SEQ ID NO: 106542 - protein, 14 aa, Homo Sapiens
HRGPQPSHWAAGDG

SEQ ID NO: 106543 - protein, 14 aa, Homo Sapiens
RGPQPSHWAAGDGP

SEQ ID NO: 106544 - protein, 14 aa, Homo Sapiens
GPQPSHWAAGDGPT

SEQ ID NO: 106545 - protein, 14 aa, Homo Sapiens
PQPSHWAAGDGPTQ

SEQ ID NO: 106546 - protein, 14 aa, Homo Sapiens
QPSHWAAGDGPTQE

SEQ ID NO: 106547 - protein, 14 aa, Homo Sapiens
PSHWAAGDGPTQER

SEQ ID NO: 106548 - protein, 14 aa, Homo Sapiens
SHWAAGDGPTQERC

SEQ ID NO: 106549 - protein, 14 aa, Homo Sapiens
HWAAGDGPTQERCG

SEQ ID NO: 106550 - protein, 14 aa, Homo Sapiens
WAAGDGPTQERCGP

SEQ ID NO: 106551 - protein, 14 aa, Homo Sapiens
AAGDGPTQERCGPR

SEQ ID NO: 106552 - protein, 14 aa, Homo Sapiens
AGDGPTQERCGPRS

SEQ ID NO: 106553 - protein, 14 aa, Homo Sapiens
GDGPTQERCGPRSL

SEQ ID NO: 106554 - protein, 14 aa, Homo Sapiens
DGPTQERCGPRSLG

SEQ ID NO: 106555 - protein, 14 aa, Homo Sapiens
GPTQERCGPRSLGS

SEQ ID NO: 106556 - protein, 14 aa, Homo Sapiens
PTQERCGPRSLGSP

SEQ ID NO: 106557 - protein, 14 aa, Homo Sapiens
TQERCGPRSLGSPV

SEQ ID NO: 106558 - protein, 14 aa, Homo Sapiens
QERCGPRSLGSPVL

SEQ ID NO: 106559 - protein, 14 aa, Homo Sapiens
ERCGPRSLGSPVLG

SEQ ID NO: 106560 - protein, 14 aa, Homo Sapiens
RCGPRSLGSPVLGL

SEQ ID NO: 106561 - protein, 14 aa, Homo Sapiens
CGPRSLGSPVLGLD

SEQ ID NO: 106562 - protein, 14 aa, Homo Sapiens
GPRSLGSPVLGLDT

SEQ ID NO: 106563 - protein, 14 aa, Homo Sapiens
PRSLGSPVLGLDTC

SEQ ID NO: 106564 - protein, 14 aa, Homo Sapiens
RSLGSPVLGLDTCR

SEQ ID NO: 106565 - protein, 14 aa, Homo Sapiens
SLGSPVLGLDTCRA

SEQ ID NO: 106566 - protein, 14 aa, Homo Sapiens
LGSPVLGLDTCRAW

SEQ ID NO: 106567 - protein, 14 aa, Homo Sapiens
GSPVLGLDTCRAWD

SEQ ID NO: 106568 - protein, 14 aa, Homo Sapiens
SPVLGLDTCRAWDH

SEQ ID NO: 106569 - protein, 14 aa, Homo Sapiens
PVLGLDTCRAWDHV

SEQ ID NO: 106570 - protein, 14 aa, Homo Sapiens
VLGLDTCRAWDHVD

SEQ ID NO: 106571 - protein, 14 aa, Homo Sapiens
LGLDTCRAWDHVDG

SEQ ID NO: 106572 - protein, 14 aa, Homo Sapiens
GLDTCRAWDHVDGQ

SEQ ID NO: 106573 - protein, 14 aa, Homo Sapiens
LDTCRAWDHVDGQI

SEQ ID NO: 106574 - protein, 14 aa, Homo Sapiens
DTCRAWDHVDGQIL

SEQ ID NO: 106575 - protein, 14 aa, Homo Sapiens
TCRAWDHVDGQILG

SEQ ID NO: 106576 - protein, 14 aa, Homo Sapiens
CRAWDHVDGQILGQ

SEQ ID NO: 106577 - protein, 14 aa, Homo Sapiens
RAWDHVDGQILGQL

SEQ ID NO: 106578 - protein, 14 aa, Homo Sapiens
AWDHVDGQILGQLR

SEQ ID NO: 106579 - protein, 14 aa, Homo Sapiens
WDHVDGQILGQLRP

SEQ ID NO: 106580 - protein, 14 aa, Homo Sapiens
DHVDGQILGQLRPL

SEQ ID NO: 106581 - protein, 14 aa, Homo Sapiens
HVDGQILGQLRPLT

SEQ ID NO: 106582 - protein, 14 aa, Homo Sapiens
VDGQILGQLRPLTE

SEQ ID NO: 106583 - protein, 14 aa, Homo Sapiens
DGQILGQLRPLTEE

SEQ ID NO: 106584 - protein, 14 aa, Homo Sapiens
GQILGQLRPLTEEE

SEQ ID NO: 106585 - protein, 14 aa, Homo Sapiens
QILGQLRPLTEEEE

SEQ ID NO: 106586 - protein, 14 aa, Homo Sapiens
ILGQLRPLTEEEEE

SEQ ID NO: 106587 - protein, 14 aa, Homo Sapiens
LGQLRPLTEEEEEE

SEQ ID NO: 106588 - protein, 14 aa, Homo Sapiens
GQLRPLTEEEEEEG

SEQ ID NO: 106589 - protein, 14 aa, Homo Sapiens
QLRPLTEEEEEEGA

SEQ ID NO: 106590 - protein, 14 aa, Homo Sapiens
LRPLTEEEEEEGAG

SEQ ID NO: 106591 - protein, 14 aa, Homo Sapiens
RPLTEEEEEEGAGA

SEQ ID NO: 106592 - protein, 14 aa, Homo Sapiens
PLTEEEEEEGAGAT

SEQ ID NO: 106593 - protein, 14 aa, Homo Sapiens
LTEEEEEEGAGATL

SEQ ID NO: 106594 - protein, 14 aa, Homo Sapiens
TEEEEEEGAGATLS

SEQ ID NO: 106595 - protein, 14 aa, Homo Sapiens
EEEEEEGAGATLSR

SEQ ID NO: 106596 - protein, 14 aa, Homo Sapiens
EEEEEGAGATLSRG

SEQ ID NO: 106597 - protein, 14 aa, Homo Sapiens
EEEEGAGATLSRGP

SEQ ID NO: 106598 - protein, 14 aa, Homo Sapiens
EEEGAGATLSRGPA

SEQ ID NO: 106599 - protein, 14 aa, Homo Sapiens
EEGAGATLSRGPAF

SEQ ID NO: 106600 - protein, 14 aa, Homo Sapiens
EGAGATLSRGPAFP

SEQ ID NO: 106601 - protein, 14 aa, Homo Sapiens
GAGATLSRGPAFPG

SEQ ID NO: 106602 - protein, 14 aa, Homo Sapiens
AGATLSRGPAFPGM

SEQ ID NO: 106603 - protein, 14 aa, Homo Sapiens
GATLSRGPAFPGMG

SEQ ID NO: 106604 - protein, 14 aa, Homo Sapiens
ATLSRGPAFPGMGS

SEQ ID NO: 106605 - protein, 14 aa, Homo Sapiens
TLSRGPAFPGMGSE

SEQ ID NO: 106606 - protein, 14 aa, Homo Sapiens
LSRGPAFPGMGSEE

SEQ ID NO: 106607 - protein, 14 aa, Homo Sapiens
SRGPAFPGMGSEEL

SEQ ID NO: 106608 - protein, 14 aa, Homo Sapiens
RGPAFPGMGSEELR

SEQ ID NO: 106609 - protein, 14 aa, Homo Sapiens
GPAFPGMGSEELRL

SEQ ID NO: 106610 - protein, 14 aa, Homo Sapiens
PAFPGMGSEELRLA

SEQ ID NO: 106611 - protein, 14 aa, Homo Sapiens
AFPGMGSEELRLAS

SEQ ID NO: 106612 - protein, 14 aa, Homo Sapiens
FPGMGSEELRLASF

SEQ ID NO: 106613 - protein, 14 aa, Homo Sapiens
PGMGSEELRLASFY

SEQ ID NO: 106614 - protein, 14 aa, Homo Sapiens
GMGSEELRLASFYD

SEQ ID NO: 106615 - protein, 14 aa, Homo Sapiens
MGSEELRLASFYDW

SEQ ID NO: 106616 - protein, 14 aa, Homo Sapiens
GSEELRLASFYDWP

SEQ ID NO: 106617 - protein, 14 aa, Homo Sapiens
SEELRLASFYDWPL

SEQ ID NO: 106618 - protein, 14 aa, Homo Sapiens
EELRLASFYDWPLT

SEQ ID NO: 106619 - protein, 14 aa, Homo Sapiens
ELRLASFYDWPLTA

SEQ ID NO: 106620 - protein, 14 aa, Homo Sapiens
LRLASFYDWPLTAE

SEQ ID NO: 106621 - protein, 14 aa, Homo Sapiens
RLASFYDWPLTAEV

SEQ ID NO: 106622 - protein, 14 aa, Homo Sapiens
LASFYDWPLTAEVP

SEQ ID NO: 106623 - protein, 14 aa, Homo Sapiens
ASFYDWPLTAEVPP

SEQ ID NO: 106624 - protein, 14 aa, Homo Sapiens
SFYDWPLTAEVPPE

SEQ ID NO: 106625 - protein, 14 aa, Homo Sapiens
FYDWPLTAEVPPEL

SEQ ID NO: 106626 - protein, 14 aa, Homo Sapiens
YDWPLTAEVPPELL

SEQ ID NO: 106627 - protein, 14 aa, Homo Sapiens
DWPLTAEVPPELLA

SEQ ID NO: 106628 - protein, 14 aa, Homo Sapiens
WPLTAEVPPELLAA

SEQ ID NO: 106629 - protein, 14 aa, Homo Sapiens
PLTAEVPPELLAAA

SEQ ID NO: 106630 - protein, 14 aa, Homo Sapiens
LTAEVPPELLAAAG

SEQ ID NO: 106631 - protein, 14 aa, Homo Sapiens
TAEVPPELLAAAGF

SEQ ID NO: 106632 - protein, 14 aa, Homo Sapiens
AEVPPELLAAAGFF

SEQ ID NO: 106633 - protein, 14 aa, Homo Sapiens
EVPPELLAAAGFFH

SEQ ID NO: 106634 - protein, 14 aa, Homo Sapiens
VPPELLAAAGFFHT

SEQ ID NO: 106635 - protein, 14 aa, Homo Sapiens
PPELLAAAGFFHTG

SEQ ID NO: 106636 - protein, 14 aa, Homo Sapiens
PELLAAAGFFHTGH

SEQ ID NO: 106637 - protein, 14 aa, Homo Sapiens
ELLAAAGFFHTGHQ

SEQ ID NO: 106638 - protein, 14 aa, Homo Sapiens
LLAAAGFFHTGHQD

SEQ ID NO: 106639 - protein, 14 aa, Homo Sapiens
LAAAGFFHTGHQDK

SEQ ID NO: 106640 - protein, 14 aa, Homo Sapiens
AAAGFFHTGHQDKV

SEQ ID NO: 106641 - protein, 14 aa, Homo Sapiens
AAGFFHTGHQDKVR

SEQ ID NO: 106642 - protein, 14 aa, Homo Sapiens
AGFFHTGHQDKVRC

SEQ ID NO: 106643 - protein, 14 aa, Homo Sapiens
GFFHTGHQDKVRCF

SEQ ID NO: 106644 - protein, 14 aa, Homo Sapiens
FFHTGHQDKVRCFF

SEQ ID NO: 106645 - protein, 14 aa, Homo Sapiens
FHTGHQDKVRCFFC

SEQ ID NO: 106646 - protein, 14 aa, Homo Sapiens
HTGHQDKVRCFFCY

SEQ ID NO: 106647 - protein, 14 aa, Homo Sapiens
TGHQDKVRCFFCYG

SEQ ID NO: 106648 - protein, 14 aa, Homo Sapiens
GHQDKVRCFFCYGG

SEQ ID NO: 106649 - protein, 14 aa, Homo Sapiens
HQDKVRCFFCYGGL

SEQ ID NO: 106650 - protein, 14 aa, Homo Sapiens
QDKVRCFFCYGGLQ

SEQ ID NO: 106651 - protein, 14 aa, Homo Sapiens
DKVRCFFCYGGLQS

SEQ ID NO: 106652 - protein, 14 aa, Homo Sapiens
KVRCFFCYGGLQSW

SEQ ID NO: 106653 - protein, 14 aa, Homo Sapiens
VRCFFCYGGLQSWK

SEQ ID NO: 106654 - protein, 14 aa, Homo Sapiens
RCFFCYGGLQSWKR

SEQ ID NO: 106655 - protein, 14 aa, Homo Sapiens
CFFCYGGLQSWKRG

SEQ ID NO: 106656 - protein, 14 aa, Homo Sapiens
FFCYGGLQSWKRGD

SEQ ID NO: 106657 - protein, 14 aa, Homo Sapiens
FCYGGLQSWKRGDD

SEQ ID NO: 106658 - protein, 14 aa, Homo Sapiens
CYGGLQSWKRGDDP

SEQ ID NO: 106659 - protein, 14 aa, Homo Sapiens
YGGLQSWKRGDDPW

SEQ ID NO: 106660 - protein, 14 aa, Homo Sapiens
GGLQSWKRGDDPWT

SEQ ID NO: 106661 - protein, 14 aa, Homo Sapiens
GLQSWKRGDDPWTE

SEQ ID NO: 106662 - protein, 14 aa, Homo Sapiens
LQSWKRGDDPWTEH

SEQ ID NO: 106663 - protein, 14 aa, Homo Sapiens
QSWKRGDDPWTEHA

SEQ ID NO: 106664 - protein, 14 aa, Homo Sapiens
SWKRGDDPWTEHAK

SEQ ID NO: 106665 - protein, 14 aa, Homo Sapiens
WKRGDDPWTEHAKW

SEQ ID NO: 106666 - protein, 14 aa, Homo Sapiens
KRGDDPWTEHAKWF

SEQ ID NO: 106667 - protein, 14 aa, Homo Sapiens
RGDDPWTEHAKWFP

SEQ ID NO: 106668 - protein, 14 aa, Homo Sapiens
GDDPWTEHAKWFPS

SEQ ID NO: 106669 - protein, 14 aa, Homo Sapiens
DDPWTEHAKWFPSC

SEQ ID NO: 106670 - protein, 14 aa, Homo Sapiens
DPWTEHAKWFPSCQ

SEQ ID NO: 106671 - protein, 14 aa, Homo Sapiens
PWTEHAKWFPSCQF

SEQ ID NO: 106672 - protein, 14 aa, Homo Sapiens
WTEHAKWFPSCQFL

SEQ ID NO: 106673 - protein, 14 aa, Homo Sapiens
TEHAKWFPSCQFLL

SEQ ID NO: 106674 - protein, 14 aa, Homo Sapiens
EHAKWFPSCQFLLR

SEQ ID NO: 106675 - protein, 14 aa, Homo Sapiens
HAKWFPSCQFLLRS

SEQ ID NO: 106676 - protein, 14 aa, Homo Sapiens
AKWFPSCQFLLRSK

SEQ ID NO: 106677 - protein, 14 aa, Homo Sapiens
KWFPSCQFLLRSKG

SEQ ID NO: 106678 - protein, 14 aa, Homo Sapiens
WFPSCQFLLRSKGR

SEQ ID NO: 106679 - protein, 14 aa, Homo Sapiens
FPSCQFLLRSKGRD

SEQ ID NO: 106680 - protein, 14 aa, Homo Sapiens
PSCQFLLRSKGRDF

SEQ ID NO: 106681 - protein, 14 aa, Homo Sapiens
SCQFLLRSKGRDFV

SEQ ID NO: 106682 - protein, 14 aa, Homo Sapiens
CQFLLRSKGRDFVH

SEQ ID NO: 106683 - protein, 14 aa, Homo Sapiens
QFLLRSKGRDFVHS

SEQ ID NO: 106684 - protein, 14 aa, Homo Sapiens
FLLRSKGRDFVHSV

SEQ ID NO: 106685 - protein, 14 aa, Homo Sapiens
LLRSKGRDFVHSVQ

SEQ ID NO: 106686 - protein, 14 aa, Homo Sapiens
LRSKGRDFVHSVQE

SEQ ID NO: 106687 - protein, 14 aa, Homo Sapiens
RSKGRDFVHSVQET

SEQ ID NO: 106688 - protein, 14 aa, Homo Sapiens
SKGRDFVHSVQETH

SEQ ID NO: 106689 - protein, 14 aa, Homo Sapiens
KGRDFVHSVQETHS

SEQ ID NO: 106690 - protein, 14 aa, Homo Sapiens
GRDFVHSVQETHSQ

SEQ ID NO: 106691 - protein, 14 aa, Homo Sapiens
RDFVHSVQETHSQL

SEQ ID NO: 106692 - protein, 14 aa, Homo Sapiens
DFVHSVQETHSQLL

SEQ ID NO: 106693 - protein, 14 aa, Homo Sapiens
FVHSVQETHSQLLG

SEQ ID NO: 106694 - protein, 14 aa, Homo Sapiens
VHSVQETHSQLLGS

SEQ ID NO: 106695 - protein, 14 aa, Homo Sapiens
HSVQETHSQLLGSW

SEQ ID NO: 106696 - protein, 14 aa, Homo Sapiens
SVQETHSQLLGSWD

SEQ ID NO: 106697 - protein, 14 aa, Homo Sapiens
VQETHSQLLGSWDP

SEQ ID NO: 106698 - protein, 14 aa, Homo Sapiens
QETHSQLLGSWDPW

SEQ ID NO: 106699 - protein, 14 aa, Homo Sapiens
ETHSQLLGSWDPWE

SEQ ID NO: 106700 - protein, 14 aa, Homo Sapiens
THSQLLGSWDPWEE

SEQ ID NO: 106701 - protein, 14 aa, Homo Sapiens
HSQLLGSWDPWEEP

SEQ ID NO: 106702 - protein, 14 aa, Homo Sapiens
SQLLGSWDPWEEPE

SEQ ID NO: 106703 - protein, 14 aa, Homo Sapiens
QLLGSWDPWEEPED

SEQ ID NO: 106704 - protein, 14 aa, Homo Sapiens
LLGSWDPWEEPEDA

SEQ ID NO: 106705 - protein, 14 aa, Homo Sapiens
LGSWDPWEEPEDAA

SEQ ID NO: 106706 - protein, 14 aa, Homo Sapiens
GSWDPWEEPEDAAP

SEQ ID NO: 106707 - protein, 14 aa, Homo Sapiens
SWDPWEEPEDAAPV

SEQ ID NO: 106708 - protein, 14 aa, Homo Sapiens
WDPWEEPEDAAPVA

SEQ ID NO: 106709 - protein, 14 aa, Homo Sapiens
DPWEEPEDAAPVAP

SEQ ID NO: 106710 - protein, 14 aa, Homo Sapiens
PWEEPEDAAPVAPS

SEQ ID NO: 106711 - protein, 14 aa, Homo Sapiens
WEEPEDAAPVAPSV

SEQ ID NO: 106712 - protein, 14 aa, Homo Sapiens
EEPEDAAPVAPSVP

SEQ ID NO: 106713 - protein, 14 aa, Homo Sapiens
EPEDAAPVAPSVPA

SEQ ID NO: 106714 - protein, 14 aa, Homo Sapiens
PEDAAPVAPSVPAS

SEQ ID NO: 106715 - protein, 14 aa, Homo Sapiens
EDAAPVAPSVPASG

SEQ ID NO: 106716 - protein, 14 aa, Homo Sapiens
DAAPVAPSVPASGY

SEQ ID NO: 106717 - protein, 14 aa, Homo Sapiens
AAPVAPSVPASGYP

SEQ ID NO: 106718 - protein, 14 aa, Homo Sapiens
APVAPSVPASGYPE

SEQ ID NO: 106719 - protein, 14 aa, Homo Sapiens
PVAPSVPASGYPEL

SEQ ID NO: 106720 - protein, 14 aa, Homo Sapiens
VAPSVPASGYPELP

SEQ ID NO: 106721 - protein, 14 aa, Homo Sapiens
APSVPASGYPELPT

SEQ ID NO: 106722 - protein, 14 aa, Homo Sapiens
PSVPASGYPELPTP

SEQ ID NO: 106723 - protein, 14 aa, Homo Sapiens
SVPASGYPELPTPR

SEQ ID NO: 106724 - protein, 14 aa, Homo Sapiens
VPASGYPELPTPRR

SEQ ID NO: 106725 - protein, 14 aa, Homo Sapiens
PASGYPELPTPRRE

SEQ ID NO: 106726 - protein, 14 aa, Homo Sapiens
ASGYPELPTPRREV

SEQ ID NO: 106727 - protein, 14 aa, Homo Sapiens
SGYPELPTPRREVQ

SEQ ID NO: 106728 - protein, 14 aa, Homo Sapiens
GYPELPTPRREVQS

SEQ ID NO: 106729 - protein, 14 aa, Homo Sapiens
YPELPTPRREVQSE

SEQ ID NO: 106730 - protein, 14 aa, Homo Sapiens
PELPTPRREVQSES

SEQ ID NO: 106731 - protein, 14 aa, Homo Sapiens
ELPTPRREVQSESA

SEQ ID NO: 106732 - protein, 14 aa, Homo Sapiens
LPTPRREVQSESAQ

SEQ ID NO: 106733 - protein, 14 aa, Homo Sapiens
PTPRREVQSESAQE

SEQ ID NO: 106734 - protein, 14 aa, Homo Sapiens
TPRREVQSESAQEP

SEQ ID NO: 106735 - protein, 14 aa, Homo Sapiens
PRREVQSESAQEPG

SEQ ID NO: 106736 - protein, 14 aa, Homo Sapiens
RREVQSESAQEPGG

SEQ ID NO: 106737 - protein, 14 aa, Homo Sapiens
REVQSESAQEPGGV

SEQ ID NO: 106738 - protein, 14 aa, Homo Sapiens
EVQSESAQEPGGVS

SEQ ID NO: 106739 - protein, 14 aa, Homo Sapiens
VQSESAQEPGGVSP

SEQ ID NO: 106740 - protein, 14 aa, Homo Sapiens
QSESAQEPGGVSPA

SEQ ID NO: 106741 - protein, 14 aa, Homo Sapiens
SESAQEPGGVSPAE

SEQ ID NO: 106742 - protein, 14 aa, Homo Sapiens
ESAQEPGGVSPAEA

SEQ ID NO: 106743 - protein, 14 aa, Homo Sapiens
SAQEPGGVSPAEAQ

SEQ ID NO: 106744 - protein, 14 aa, Homo Sapiens
AQEPGGVSPAEAQR

SEQ ID NO: 106745 - protein, 14 aa, Homo Sapiens
QEPGGVSPAEAQRA

SEQ ID NO: 106746 - protein, 14 aa, Homo Sapiens
EPGGVSPAEAQRAW

SEQ ID NO: 106747 - protein, 14 aa, Homo Sapiens
PGGVSPAEAQRAWW

SEQ ID NO: 106748 - protein, 14 aa, Homo Sapiens
GGVSPAEAQRAWWV

SEQ ID NO: 106749 - protein, 14 aa, Homo Sapiens
GVSPAEAQRAWWVL

SEQ ID NO: 106750 - protein, 14 aa, Homo Sapiens
VSPAEAQRAWWVLE

SEQ ID NO: 106751 - protein, 14 aa, Homo Sapiens
SPAEAQRAWWVLEP

SEQ ID NO: 106752 - protein, 14 aa, Homo Sapiens
PAEAQRAWWVLEPP

SEQ ID NO: 106753 - protein, 14 aa, Homo Sapiens
AEAQRAWWVLEPPG

SEQ ID NO: 106754 - protein, 14 aa, Homo Sapiens
EAQRAWWVLEPPGA

SEQ ID NO: 106755 - protein, 14 aa, Homo Sapiens
AQRAWWVLEPPGAR

SEQ ID NO: 106756 - protein, 14 aa, Homo Sapiens
QRAWWVLEPPGARD

SEQ ID NO: 106757 - protein, 14 aa, Homo Sapiens
RAWWVLEPPGARDV

SEQ ID NO: 106758 - protein, 14 aa, Homo Sapiens
AWWVLEPPGARDVE

SEQ ID NO: 106759 - protein, 14 aa, Homo Sapiens
WWVLEPPGARDVEA

SEQ ID NO: 106760 - protein, 14 aa, Homo Sapiens
WVLEPPGARDVEAQ

SEQ ID NO: 106761 - protein, 14 aa, Homo Sapiens
VLEPPGARDVEAQL

SEQ ID NO: 106762 - protein, 14 aa, Homo Sapiens
LEPPGARDVEAQLR

SEQ ID NO: 106763 - protein, 14 aa, Homo Sapiens
EPPGARDVEAQLRR

SEQ ID NO: 106764 - protein, 14 aa, Homo Sapiens
PPGARDVEAQLRRL

SEQ ID NO: 106765 - protein, 14 aa, Homo Sapiens
PGARDVEAQLRRLQ

SEQ ID NO: 106766 - protein, 14 aa, Homo Sapiens
GARDVEAQLRRLQE

SEQ ID NO: 106767 - protein, 14 aa, Homo Sapiens
ARDVEAQLRRLQEE

SEQ ID NO: 106768 - protein, 14 aa, Homo Sapiens
RDVEAQLRRLQEER

SEQ ID NO: 106769 - protein, 14 aa, Homo Sapiens
DVEAQLRRLQEERT

SEQ ID NO: 106770 - protein, 14 aa, Homo Sapiens
VEAQLRRLQEERTC

SEQ ID NO: 106771 - protein, 14 aa, Homo Sapiens
EAQLRRLQEERTCK

SEQ ID NO: 106772 - protein, 14 aa, Homo Sapiens
AQLRRLQEERTCKV

SEQ ID NO: 106773 - protein, 14 aa, Homo Sapiens
QLRRLQEERTCKVC

SEQ ID NO: 106774 - protein, 14 aa, Homo Sapiens
LRRLQEERTCKVCL

SEQ ID NO: 106775 - protein, 14 aa, Homo Sapiens
RRLQEERTCKVCLD

SEQ ID NO: 106776 - protein, 14 aa, Homo Sapiens
RLQEERTCKVCLDR

SEQ ID NO: 106777 - protein, 14 aa, Homo Sapiens
LQEERTCKVCLDRA

SEQ ID NO: 106778 - protein, 14 aa, Homo Sapiens
QEERTCKVCLDRAV

SEQ ID NO: 106779 - protein, 14 aa, Homo Sapiens
EERTCKVCLDRAVS

SEQ ID NO: 106780 - protein, 14 aa, Homo Sapiens
ERTCKVCLDRAVSI

SEQ ID NO: 106781 - protein, 14 aa, Homo Sapiens
RTCKVCLDRAVSIV

SEQ ID NO: 106782 - protein, 14 aa, Homo Sapiens
TCKVCLDRAVSIVF

SEQ ID NO: 106783 - protein, 14 aa, Homo Sapiens
CKVCLDRAVSIVFV

SEQ ID NO: 106784 - protein, 14 aa, Homo Sapiens
KVCLDRAVSIVFVP

SEQ ID NO: 106785 - protein, 14 aa, Homo Sapiens
VCLDRAVSIVFVPC

SEQ ID NO: 106786 - protein, 14 aa, Homo Sapiens
CLDRAVSIVFVPCG

SEQ ID NO: 106787 - protein, 14 aa, Homo Sapiens
LDRAVSIVFVPCGH

SEQ ID NO: 106788 - protein, 14 aa, Homo Sapiens
DRAVSIVFVPCGHL

SEQ ID NO: 106789 - protein, 14 aa, Homo Sapiens
RAVSIVFVPCGHLV

SEQ ID NO: 106790 - protein, 14 aa, Homo Sapiens
AVSIVFVPCGHLVC

SEQ ID NO: 106791 - protein, 14 aa, Homo Sapiens
VSIVFVPCGHLVCA

SEQ ID NO: 106792 - protein, 14 aa, Homo Sapiens
SIVFVPCGHLVCAE

SEQ ID NO: 106793 - protein, 14 aa, Homo Sapiens
IVFVPCGHLVCAEC

SEQ ID NO: 106794 - protein, 14 aa, Homo Sapiens
VFVPCGHLVCAECA

SEQ ID NO: 106795 - protein, 14 aa, Homo Sapiens
FVPCGHLVCAECAP

SEQ ID NO: 106796 - protein, 14 aa, Homo Sapiens
VPCGHLVCAECAPG

SEQ ID NO: 106797 - protein, 14 aa, Homo Sapiens
PCGHLVCAECAPGL

SEQ ID NO: 106798 - protein, 14 aa, Homo Sapiens
CGHLVCAECAPGLQ

SEQ ID NO: 106799 - protein, 14 aa, Homo Sapiens
GHLVCAECAPGLQL

SEQ ID NO: 106800 - protein, 14 aa, Homo Sapiens
HLVCAECAPGLQLC

SEQ ID NO: 106801 - protein, 14 aa, Homo Sapiens
LVCAECAPGLQLCP

SEQ ID NO: 106802 - protein, 14 aa, Homo Sapiens
VCAECAPGLQLCPI

SEQ ID NO: 106803 - protein, 14 aa, Homo Sapiens
CAECAPGLQLCPIC

SEQ ID NO: 106804 - protein, 14 aa, Homo Sapiens
AECAPGLQLCPICR

SEQ ID NO: 106805 - protein, 14 aa, Homo Sapiens
ECAPGLQLCPICRA

SEQ ID NO: 106806 - protein, 14 aa, Homo Sapiens
CAPGLQLCPICRAP

SEQ ID NO: 106807 - protein, 14 aa, Homo Sapiens
APGLQLCPICRAPV

SEQ ID NO: 106808 - protein, 14 aa, Homo Sapiens
PGLQLCPICRAPVR

SEQ ID NO: 106809 - protein, 14 aa, Homo Sapiens
GLQLCPICRAPVRS

SEQ ID NO: 106810 - protein, 14 aa, Homo Sapiens
LQLCPICRAPVRSR

SEQ ID NO: 106811 - protein, 14 aa, Homo Sapiens
QLCPICRAPVRSRV

SEQ ID NO: 106812 - protein, 14 aa, Homo Sapiens
LCPICRAPVRSRVR

SEQ ID NO: 106813 - protein, 14 aa, Homo Sapiens
CPICRAPVRSRVRT

SEQ ID NO: 106814 - protein, 14 aa, Homo Sapiens
PICRAPVRSRVRTF

SEQ ID NO: 106815 - protein, 14 aa, Homo Sapiens
ICRAPVRSRVRTFL

SEQ ID NO: 106816 - protein, 14 aa, Homo Sapiens
CRAPVRSRVRTFLS

SEQ ID NO: 106817 - protein, 15 aa, Homo Sapiens
MGPKDSAKCLHRGPQ

SEQ ID NO: 106818 - protein, 15 aa, Homo Sapiens
GPKDSAKCLHRGPQP

SEQ ID NO: 106819 - protein, 15 aa, Homo Sapiens
PKDSAKCLHRGPQPS

SEQ ID NO: 106820 - protein, 15 aa, Homo Sapiens
KDSAKCLHRGPQPSH

SEQ ID NO: 106821 - protein, 15 aa, Homo Sapiens
DSAKCLHRGPQPSHW

SEQ ID NO: 106822 - protein, 15 aa, Homo Sapiens
SAKCLHRGPQPSHWA

SEQ ID NO: 106823 - protein, 15 aa, Homo Sapiens
AKCLHRGPQPSHWAA

SEQ ID NO: 106824 - protein, 15 aa, Homo Sapiens
KCLHRGPQPSHWAAG

SEQ ID NO: 106825 - protein, 15 aa, Homo Sapiens
CLHRGPQPSHWAAGD

SEQ ID NO: 106826 - protein, 15 aa, Homo Sapiens
LHRGPQPSHWAAGDG

SEQ ID NO: 106827 - protein, 15 aa, Homo Sapiens
HRGPQPSHWAAGDGP

SEQ ID NO: 106828 - protein, 15 aa, Homo Sapiens
RGPQPSHWAAGDGPT

SEQ ID NO: 106829 - protein, 15 aa, Homo Sapiens
GPQPSHWAAGDGPTQ

SEQ ID NO: 106830 - protein, 15 aa, Homo Sapiens
PQPSHWAAGDGPTQE

SEQ ID NO: 106831 - protein, 15 aa, Homo Sapiens
QPSHWAAGDGPTQER

SEQ ID NO: 106832 - protein, 15 aa, Homo Sapiens
PSHWAAGDGPTQERC

SEQ ID NO: 106833 - protein, 15 aa, Homo Sapiens
SHWAAGDGPTQERCG

SEQ ID NO: 106834 - protein, 15 aa, Homo Sapiens
HWAAGDGPTQERCGP

SEQ ID NO: 106835 - protein, 15 aa, Homo Sapiens
WAAGDGPTQERCGPR

SEQ ID NO: 106836 - protein, 15 aa, Homo Sapiens
AAGDGPTQERCGPRS

SEQ ID NO: 106837 - protein, 15 aa, Homo Sapiens
AGDGPTQERCGPRSL

SEQ ID NO: 106838 - protein, 15 aa, Homo Sapiens
GDGPTQERCGPRSLG

SEQ ID NO: 106839 - protein, 15 aa, Homo Sapiens
DGPTQERCGPRSLGS

SEQ ID NO: 106840 - protein, 15 aa, Homo Sapiens
GPTQERCGPRSLGSP

SEQ ID NO: 106841 - protein, 15 aa, Homo Sapiens
PTQERCGPRSLGSPV

SEQ ID NO: 106842 - protein, 15 aa, Homo Sapiens
TQERCGPRSLGSPVL

SEQ ID NO: 106843 - protein, 15 aa, Homo Sapiens
QERCGPRSLGSPVLG

SEQ ID NO: 106844 - protein, 15 aa, Homo Sapiens
ERCGPRSLGSPVLGL

SEQ ID NO: 106845 - protein, 15 aa, Homo Sapiens
RCGPRSLGSPVLGLD

SEQ ID NO: 106846 - protein, 15 aa, Homo Sapiens
CGPRSLGSPVLGLDT

SEQ ID NO: 106847 - protein, 15 aa, Homo Sapiens
GPRSLGSPVLGLDTC

SEQ ID NO: 106848 - protein, 15 aa, Homo Sapiens
PRSLGSPVLGLDTCR

SEQ ID NO: 106849 - protein, 15 aa, Homo Sapiens
RSLGSPVLGLDTCRA

SEQ ID NO: 106850 - protein, 15 aa, Homo Sapiens
SLGSPVLGLDTCRAW

SEQ ID NO: 106851 - protein, 15 aa, Homo Sapiens
LGSPVLGLDTCRAWD

SEQ ID NO: 106852 - protein, 15 aa, Homo Sapiens
GSPVLGLDTCRAWDH

SEQ ID NO: 106853 - protein, 15 aa, Homo Sapiens
SPVLGLDTCRAWDHV

SEQ ID NO: 106854 - protein, 15 aa, Homo Sapiens
PVLGLDTCRAWDHVD

SEQ ID NO: 106855 - protein, 15 aa, Homo Sapiens
VLGLDTCRAWDHVDG

SEQ ID NO: 106856 - protein, 15 aa, Homo Sapiens
LGLDTCRAWDHVDGQ

SEQ ID NO: 106857 - protein, 15 aa, Homo Sapiens
GLDTCRAWDHVDGQI

SEQ ID NO: 106858 - protein, 15 aa, Homo Sapiens
LDTCRAWDHVDGQIL

SEQ ID NO: 106859 - protein, 15 aa, Homo Sapiens
DTCRAWDHVDGQILG

SEQ ID NO: 106860 - protein, 15 aa, Homo Sapiens
TCRAWDHVDGQILGQ

SEQ ID NO: 106861 - protein, 15 aa, Homo Sapiens
CRAWDHVDGQILGQL

SEQ ID NO: 106862 - protein, 15 aa, Homo Sapiens
RAWDHVDGQILGQLR

SEQ ID NO: 106863 - protein, 15 aa, Homo Sapiens
AWDHVDGQILGQLRP

SEQ ID NO: 106864 - protein, 15 aa, Homo Sapiens
WDHVDGQILGQLRPL

SEQ ID NO: 106865 - protein, 15 aa, Homo Sapiens
DHVDGQILGQLRPLT

SEQ ID NO: 106866 - protein, 15 aa, Homo Sapiens
HVDGQILGQLRPLTE

SEQ ID NO: 106867 - protein, 15 aa, Homo Sapiens
VDGQILGQLRPLTEE

SEQ ID NO: 106868 - protein, 15 aa, Homo Sapiens
DGQILGQLRPLTEEE

SEQ ID NO: 106869 - protein, 15 aa, Homo Sapiens
GQILGQLRPLTEEEE

SEQ ID NO: 106870 - protein, 15 aa, Homo Sapiens
QILGQLRPLTEEEEE

SEQ ID NO: 106871 - protein, 15 aa, Homo Sapiens
ILGQLRPLTEEEEEE

SEQ ID NO: 106872 - protein, 15 aa, Homo Sapiens
LGQLRPLTEEEEEEG

SEQ ID NO: 106873 - protein, 15 aa, Homo Sapiens
GQLRPLTEEEEEEGA

SEQ ID NO: 106874 - protein, 15 aa, Homo Sapiens
QLRPLTEEEEEEGAG

SEQ ID NO: 106875 - protein, 15 aa, Homo Sapiens
LRPLTEEEEEEGAGA

SEQ ID NO: 106876 - protein, 15 aa, Homo Sapiens
RPLTEEEEEEGAGAT

SEQ ID NO: 106877 - protein, 15 aa, Homo Sapiens
PLTEEEEEEGAGATL

SEQ ID NO: 106878 - protein, 15 aa, Homo Sapiens
LTEEEEEEGAGATLS

SEQ ID NO: 106879 - protein, 15 aa, Homo Sapiens
TEEEEEEGAGATLSR

SEQ ID NO: 106880 - protein, 15 aa, Homo Sapiens
EEEEEEGAGATLSRG

SEQ ID NO: 106881 - protein, 15 aa, Homo Sapiens
EEEEEGAGATLSRGP

SEQ ID NO: 106882 - protein, 15 aa, Homo Sapiens
EEEEGAGATLSRGPA

SEQ ID NO: 106883 - protein, 15 aa, Homo Sapiens
EEEGAGATLSRGPAF

SEQ ID NO: 106884 - protein, 15 aa, Homo Sapiens
EEGAGATLSRGPAFP

SEQ ID NO: 106885 - protein, 15 aa, Homo Sapiens
EGAGATLSRGPAFPG

SEQ ID NO: 106886 - protein, 15 aa, Homo Sapiens
GAGATLSRGPAFPGM

SEQ ID NO: 106887 - protein, 15 aa, Homo Sapiens
AGATLSRGPAFPGMG

SEQ ID NO: 106888 - protein, 15 aa, Homo Sapiens
GATLSRGPAFPGMGS

SEQ ID NO: 106889 - protein, 15 aa, Homo Sapiens
ATLSRGPAFPGMGSE

SEQ ID NO: 106890 - protein, 15 aa, Homo Sapiens
TLSRGPAFPGMGSEE

SEQ ID NO: 106891 - protein, 15 aa, Homo Sapiens
LSRGPAFPGMGSEEL

SEQ ID NO: 106892 - protein, 15 aa, Homo Sapiens
SRGPAFPGMGSEELR

SEQ ID NO: 106893 - protein, 15 aa, Homo Sapiens
RGPAFPGMGSEELRL

SEQ ID NO: 106894 - protein, 15 aa, Homo Sapiens
GPAFPGMGSEELRLA

SEQ ID NO: 106895 - protein, 15 aa, Homo Sapiens
PAFPGMGSEELRLAS

SEQ ID NO: 106896 - protein, 15 aa, Homo Sapiens
AFPGMGSEELRLASF

SEQ ID NO: 106897 - protein, 15 aa, Homo Sapiens
FPGMGSEELRLASFY

SEQ ID NO: 106898 - protein, 15 aa, Homo Sapiens
PGMGSEELRLASFYD

SEQ ID NO: 106899 - protein, 15 aa, Homo Sapiens
GMGSEELRLASFYDW

SEQ ID NO: 106900 - protein, 15 aa, Homo Sapiens
MGSEELRLASFYDWP

SEQ ID NO: 106901 - protein, 15 aa, Homo Sapiens
GSEELRLASFYDWPL

SEQ ID NO: 106902 - protein, 15 aa, Homo Sapiens
SEELRLASFYDWPLT

SEQ ID NO: 106903 - protein, 15 aa, Homo Sapiens
EELRLASFYDWPLTA

SEQ ID NO: 106904 - protein, 15 aa, Homo Sapiens
ELRLASFYDWPLTAE

SEQ ID NO: 106905 - protein, 15 aa, Homo Sapiens
LRLASFYDWPLTAEV

SEQ ID NO: 106906 - protein, 15 aa, Homo Sapiens
RLASFYDWPLTAEVP

SEQ ID NO: 106907 - protein, 15 aa, Homo Sapiens
LASFYDWPLTAEVPP

SEQ ID NO: 106908 - protein, 15 aa, Homo Sapiens
ASFYDWPLTAEVPPE

SEQ ID NO: 106909 - protein, 15 aa, Homo Sapiens
SFYDWPLTAEVPPEL

SEQ ID NO: 106910 - protein, 15 aa, Homo Sapiens
FYDWPLTAEVPPELL

SEQ ID NO: 106911 - protein, 15 aa, Homo Sapiens
YDWPLTAEVPPELLA

SEQ ID NO: 106912 - protein, 15 aa, Homo Sapiens
DWPLTAEVPPELLAA

SEQ ID NO: 106913 - protein, 15 aa, Homo Sapiens
WPLTAEVPPELLAAA

SEQ ID NO: 106914 - protein, 15 aa, Homo Sapiens
PLTAEVPPELLAAAG

SEQ ID NO: 106915 - protein, 15 aa, Homo Sapiens
LTAEVPPELLAAAGF

SEQ ID NO: 106916 - protein, 15 aa, Homo Sapiens
TAEVPPELLAAAGFF

SEQ ID NO: 106917 - protein, 15 aa, Homo Sapiens
AEVPPELLAAAGFFH

SEQ ID NO: 106918 - protein, 15 aa, Homo Sapiens
EVPPELLAAAGFFHT

SEQ ID NO: 106919 - protein, 15 aa, Homo Sapiens
VPPELLAAAGFFHTG

SEQ ID NO: 106920 - protein, 15 aa, Homo Sapiens
PPELLAAAGFFHTGH

SEQ ID NO: 106921 - protein, 15 aa, Homo Sapiens
PELLAAAGFFHTGHQ

SEQ ID NO: 106922 - protein, 15 aa, Homo Sapiens
ELLAAAGFFHTGHQD

SEQ ID NO: 106923 - protein, 15 aa, Homo Sapiens
LLAAAGFFHTGHQDK

SEQ ID NO: 106924 - protein, 15 aa, Homo Sapiens
LAAAGFFHTGHQDKV

SEQ ID NO: 106925 - protein, 15 aa, Homo Sapiens
AAAGFFHTGHQDKVR

SEQ ID NO: 106926 - protein, 15 aa, Homo Sapiens
AAGFFHTGHQDKVRC

SEQ ID NO: 106927 - protein, 15 aa, Homo Sapiens
AGFFHTGHQDKVRCF

SEQ ID NO: 106928 - protein, 15 aa, Homo Sapiens
GFFHTGHQDKVRCFF

SEQ ID NO: 106929 - protein, 15 aa, Homo Sapiens
FFHTGHQDKVRCFFC

SEQ ID NO: 106930 - protein, 15 aa, Homo Sapiens
FHTGHQDKVRCFFCY

SEQ ID NO: 106931 - protein, 15 aa, Homo Sapiens
HTGHQDKVRCFFCYG

SEQ ID NO: 106932 - protein, 15 aa, Homo Sapiens
TGHQDKVRCFFCYGG

SEQ ID NO: 106933 - protein, 15 aa, Homo Sapiens
GHQDKVRCFFCYGGL

SEQ ID NO: 106934 - protein, 15 aa, Homo Sapiens
HQDKVRCFFCYGGLQ

SEQ ID NO: 106935 - protein, 15 aa, Homo Sapiens
QDKVRCFFCYGGLQS

SEQ ID NO: 106936 - protein, 15 aa, Homo Sapiens
DKVRCFFCYGGLQSW

SEQ ID NO: 106937 - protein, 15 aa, Homo Sapiens
KVRCFFCYGGLQSWK

SEQ ID NO: 106938 - protein, 15 aa, Homo Sapiens
VRCFFCYGGLQSWKR

SEQ ID NO: 106939 - protein, 15 aa, Homo Sapiens
RCFFCYGGLQSWKRG

SEQ ID NO: 106940 - protein, 15 aa, Homo Sapiens
CFFCYGGLQSWKRGD

SEQ ID NO: 106941 - protein, 15 aa, Homo Sapiens
FFCYGGLQSWKRGDD

SEQ ID NO: 106942 - protein, 15 aa, Homo Sapiens
FCYGGLQSWKRGDDP

SEQ ID NO: 106943 - protein, 15 aa, Homo Sapiens
CYGGLQSWKRGDDPW

SEQ ID NO: 106944 - protein, 15 aa, Homo Sapiens
YGGLQSWKRGDDPWT

SEQ ID NO: 106945 - protein, 15 aa, Homo Sapiens
GGLQSWKRGDDPWTE

SEQ ID NO: 106946 - protein, 15 aa, Homo Sapiens
GLQSWKRGDDPWTEH

SEQ ID NO: 106947 - protein, 15 aa, Homo Sapiens
LQSWKRGDDPWTEHA

SEQ ID NO: 106948 - protein, 15 aa, Homo Sapiens
QSWKRGDDPWTEHAK

SEQ ID NO: 106949 - protein, 15 aa, Homo Sapiens
SWKRGDDPWTEHAKW

SEQ ID NO: 106950 - protein, 15 aa, Homo Sapiens
WKRGDDPWTEHAKWF

SEQ ID NO: 106951 - protein, 15 aa, Homo Sapiens
KRGDDPWTEHAKWFP

SEQ ID NO: 106952 - protein, 15 aa, Homo Sapiens
RGDDPWTEHAKWFPS

SEQ ID NO: 106953 - protein, 15 aa, Homo Sapiens
GDDPWTEHAKWFPSC

SEQ ID NO: 106954 - protein, 15 aa, Homo Sapiens
DDPWTEHAKWFPSCQ

SEQ ID NO: 106955 - protein, 15 aa, Homo Sapiens
DPWTEHAKWFPSCQF

SEQ ID NO: 106956 - protein, 15 aa, Homo Sapiens
PWTEHAKWFPSCQFL

SEQ ID NO: 106957 - protein, 15 aa, Homo Sapiens
WTEHAKWFPSCQFLL

SEQ ID NO: 106958 - protein, 15 aa, Homo Sapiens
TEHAKWFPSCQFLLR

SEQ ID NO: 106959 - protein, 15 aa, Homo Sapiens
EHAKWFPSCQFLLRS

SEQ ID NO: 106960 - protein, 15 aa, Homo Sapiens
HAKWFPSCQFLLRSK

SEQ ID NO: 106961 - protein, 15 aa, Homo Sapiens
AKWFPSCQFLLRSKG

SEQ ID NO: 106962 - protein, 15 aa, Homo Sapiens
KWFPSCQFLLRSKGR

SEQ ID NO: 106963 - protein, 15 aa, Homo Sapiens
WFPSCQFLLRSKGRD

SEQ ID NO: 106964 - protein, 15 aa, Homo Sapiens
FPSCQFLLRSKGRDF

SEQ ID NO: 106965 - protein, 15 aa, Homo Sapiens
PSCQFLLRSKGRDFV

SEQ ID NO: 106966 - protein, 15 aa, Homo Sapiens
SCQFLLRSKGRDFVH

SEQ ID NO: 106967 - protein, 15 aa, Homo Sapiens
CQFLLRSKGRDFVHS

SEQ ID NO: 106968 - protein, 15 aa, Homo Sapiens
QFLLRSKGRDFVHSV

SEQ ID NO: 106969 - protein, 15 aa, Homo Sapiens
FLLRSKGRDFVHSVQ

SEQ ID NO: 106970 - protein, 15 aa, Homo Sapiens
LLRSKGRDFVHSVQE

SEQ ID NO: 106971 - protein, 15 aa, Homo Sapiens
LRSKGRDFVHSVQET

SEQ ID NO: 106972 - protein, 15 aa, Homo Sapiens
RSKGRDFVHSVQETH

SEQ ID NO: 106973 - protein, 15 aa, Homo Sapiens
SKGRDFVHSVQETHS

SEQ ID NO: 106974 - protein, 15 aa, Homo Sapiens
KGRDFVHSVQETHSQ

SEQ ID NO: 106975 - protein, 15 aa, Homo Sapiens
GRDFVHSVQETHSQL

SEQ ID NO: 106976 - protein, 15 aa, Homo Sapiens
RDFVHSVQETHSQLL

SEQ ID NO: 106977 - protein, 15 aa, Homo Sapiens
DFVHSVQETHSQLLG

SEQ ID NO: 106978 - protein, 15 aa, Homo Sapiens
FVHSVQETHSQLLGS

SEQ ID NO: 106979 - protein, 15 aa, Homo Sapiens
VHSVQETHSQLLGSW

SEQ ID NO: 106980 - protein, 15 aa, Homo Sapiens
HSVQETHSQLLGSWD

SEQ ID NO: 106981 - protein, 15 aa, Homo Sapiens
SVQETHSQLLGSWDP

SEQ ID NO: 106982 - protein, 15 aa, Homo Sapiens
VQETHSQLLGSWDPW

SEQ ID NO: 106983 - protein, 15 aa, Homo Sapiens
QETHSQLLGSWDPWE

SEQ ID NO: 106984 - protein, 15 aa, Homo Sapiens
ETHSQLLGSWDPWEE

SEQ ID NO: 106985 - protein, 15 aa, Homo Sapiens
THSQLLGSWDPWEEP

SEQ ID NO: 106986 - protein, 15 aa, Homo Sapiens
HSQLLGSWDPWEEPE

SEQ ID NO: 106987 - protein, 15 aa, Homo Sapiens
SQLLGSWDPWEEPED

SEQ ID NO: 106988 - protein, 15 aa, Homo Sapiens
QLLGSWDPWEEPEDA

SEQ ID NO: 106989 - protein, 15 aa, Homo Sapiens
LLGSWDPWEEPEDAA

SEQ ID NO: 106990 - protein, 15 aa, Homo Sapiens
LGSWDPWEEPEDAAP

SEQ ID NO: 106991 - protein, 15 aa, Homo Sapiens
GSWDPWEEPEDAAPV

SEQ ID NO: 106992 - protein, 15 aa, Homo Sapiens
SWDPWEEPEDAAPVA

SEQ ID NO: 106993 - protein, 15 aa, Homo Sapiens
WDPWEEPEDAAPVAP

SEQ ID NO: 106994 - protein, 15 aa, Homo Sapiens
DPWEEPEDAAPVAPS

SEQ ID NO: 106995 - protein, 15 aa, Homo Sapiens
PWEEPEDAAPVAPSV

SEQ ID NO: 106996 - protein, 15 aa, Homo Sapiens
WEEPEDAAPVAPSVP

SEQ ID NO: 106997 - protein, 15 aa, Homo Sapiens
EEPEDAAPVAPSVPA

SEQ ID NO: 106998 - protein, 15 aa, Homo Sapiens
EPEDAAPVAPSVPAS

SEQ ID NO: 106999 - protein, 15 aa, Homo Sapiens
PEDAAPVAPSVPASG

SEQ ID NO: 107000 - protein, 15 aa, Homo Sapiens
EDAAPVAPSVPASGY

SEQ ID NO: 107001 - protein, 15 aa, Homo Sapiens
DAAPVAPSVPASGYP

SEQ ID NO: 107002 - protein, 15 aa, Homo Sapiens
AAPVAPSVPASGYPE

SEQ ID NO: 107003 - protein, 15 aa, Homo Sapiens
APVAPSVPASGYPEL

SEQ ID NO: 107004 - protein, 15 aa, Homo Sapiens
PVAPSVPASGYPELP

SEQ ID NO: 107005 - protein, 15 aa, Homo Sapiens
VAPSVPASGYPELPT

SEQ ID NO: 107006 - protein, 15 aa, Homo Sapiens
APSVPASGYPELPTP

SEQ ID NO: 107007 - protein, 15 aa, Homo Sapiens
PSVPASGYPELPTPR

SEQ ID NO: 107008 - protein, 15 aa, Homo Sapiens
SVPASGYPELPTPRR

SEQ ID NO: 107009 - protein, 15 aa, Homo Sapiens
VPASGYPELPTPRRE

SEQ ID NO: 107010 - protein, 15 aa, Homo Sapiens
PASGYPELPTPRREV

SEQ ID NO: 107011 - protein, 15 aa, Homo Sapiens
ASGYPELPTPRREVQ

SEQ ID NO: 107012 - protein, 15 aa, Homo Sapiens
SGYPELPTPRREVQS

SEQ ID NO: 107013 - protein, 15 aa, Homo Sapiens
GYPELPTPRREVQSE

SEQ ID NO: 107014 - protein, 15 aa, Homo Sapiens
YPELPTPRREVQSES

SEQ ID NO: 107015 - protein, 15 aa, Homo Sapiens
PELPTPRREVQSESA

SEQ ID NO: 107016 - protein, 15 aa, Homo Sapiens
ELPTPRREVQSESAQ

SEQ ID NO: 107017 - protein, 15 aa, Homo Sapiens
LPTPRREVQSESAQE

SEQ ID NO: 107018 - protein, 15 aa, Homo Sapiens
PTPRREVQSESAQEP

SEQ ID NO: 107019 - protein, 15 aa, Homo Sapiens
TPRREVQSESAQEPG

SEQ ID NO: 107020 - protein, 15 aa, Homo Sapiens
PRREVQSESAQEPGG

SEQ ID NO: 107021 - protein, 15 aa, Homo Sapiens
RREVQSESAQEPGGV

SEQ ID NO: 107022 - protein, 15 aa, Homo Sapiens
REVQSESAQEPGGVS

SEQ ID NO: 107023 - protein, 15 aa, Homo Sapiens
EVQSESAQEPGGVSP

SEQ ID NO: 107024 - protein, 15 aa, Homo Sapiens
VQSESAQEPGGVSPA

SEQ ID NO: 107025 - protein, 15 aa, Homo Sapiens
QSESAQEPGGVSPAE

SEQ ID NO: 107026 - protein, 15 aa, Homo Sapiens
SESAQEPGGVSPAEA

SEQ ID NO: 107027 - protein, 15 aa, Homo Sapiens
ESAQEPGGVSPAEAQ

SEQ ID NO: 107028 - protein, 15 aa, Homo Sapiens
SAQEPGGVSPAEAQR

SEQ ID NO: 107029 - protein, 15 aa, Homo Sapiens
AQEPGGVSPAEAQRA

SEQ ID NO: 107030 - protein, 15 aa, Homo Sapiens
QEPGGVSPAEAQRAW

SEQ ID NO: 107031 - protein, 15 aa, Homo Sapiens
EPGGVSPAEAQRAWW

SEQ ID NO: 107032 - protein, 15 aa, Homo Sapiens
PGGVSPAEAQRAWWV

SEQ ID NO: 107033 - protein, 15 aa, Homo Sapiens
GGVSPAEAQRAWWVL

SEQ ID NO: 107034 - protein, 15 aa, Homo Sapiens
GVSPAEAQRAWWVLE

SEQ ID NO: 107035 - protein, 15 aa, Homo Sapiens
VSPAEAQRAWWVLEP

SEQ ID NO: 107036 - protein, 15 aa, Homo Sapiens
SPAEAQRAWWVLEPP

SEQ ID NO: 107037 - protein, 15 aa, Homo Sapiens
PAEAQRAWWVLEPPG

SEQ ID NO: 107038 - protein, 15 aa, Homo Sapiens
AEAQRAWWVLEPPGA

SEQ ID NO: 107039 - protein, 15 aa, Homo Sapiens
EAQRAWWVLEPPGAR

SEQ ID NO: 107040 - protein, 15 aa, Homo Sapiens
AQRAWWVLEPPGARD

SEQ ID NO: 107041 - protein, 15 aa, Homo Sapiens
QRAWWVLEPPGARDV

SEQ ID NO: 107042 - protein, 15 aa, Homo Sapiens
RAWWVLEPPGARDVE

SEQ ID NO: 107043 - protein, 15 aa, Homo Sapiens
AWWVLEPPGARDVEA

SEQ ID NO: 107044 - protein, 15 aa, Homo Sapiens
WWVLEPPGARDVEAQ

SEQ ID NO: 107045 - protein, 15 aa, Homo Sapiens
WVLEPPGARDVEAQL

SEQ ID NO: 107046 - protein, 15 aa, Homo Sapiens
VLEPPGARDVEAQLR

SEQ ID NO: 107047 - protein, 15 aa, Homo Sapiens
LEPPGARDVEAQLRR

SEQ ID NO: 107048 - protein, 15 aa, Homo Sapiens
EPPGARDVEAQLRRL

SEQ ID NO: 107049 - protein, 15 aa, Homo Sapiens
PPGARDVEAQLRRLQ

SEQ ID NO: 107050 - protein, 15 aa, Homo Sapiens
PGARDVEAQLRRLQE

SEQ ID NO: 107051 - protein, 15 aa, Homo Sapiens
GARDVEAQLRRLQEE

SEQ ID NO: 107052 - protein, 15 aa, Homo Sapiens
ARDVEAQLRRLQEER

SEQ ID NO: 107053 - protein, 15 aa, Homo Sapiens
RDVEAQLRRLQEERT

SEQ ID NO: 107054 - protein, 15 aa, Homo Sapiens
DVEAQLRRLQEERTC

SEQ ID NO: 107055 - protein, 15 aa, Homo Sapiens
VEAQLRRLQEERTCK

SEQ ID NO: 107056 - protein, 15 aa, Homo Sapiens
EAQLRRLQEERTCKV

SEQ ID NO: 107057 - protein, 15 aa, Homo Sapiens
AQLRRLQEERTCKVC

SEQ ID NO: 107058 - protein, 15 aa, Homo Sapiens
QLRRLQEERTCKVCL

SEQ ID NO: 107059 - protein, 15 aa, Homo Sapiens
LRRLQEERTCKVCLD

SEQ ID NO: 107060 - protein, 15 aa, Homo Sapiens
RRLQEERTCKVCLDR

SEQ ID NO: 107061 - protein, 15 aa, Homo Sapiens
RLQEERTCKVCLDRA

SEQ ID NO: 107062 - protein, 15 aa, Homo Sapiens
LQEERTCKVCLDRAV

SEQ ID NO: 107063 - protein, 15 aa, Homo Sapiens
QEERTCKVCLDRAVS

SEQ ID NO: 107064 - protein, 15 aa, Homo Sapiens
EERTCKVCLDRAVSI

SEQ ID NO: 107065 - protein, 15 aa, Homo Sapiens
ERTCKVCLDRAVSIV

SEQ ID NO: 107066 - protein, 15 aa, Homo Sapiens
RTCKVCLDRAVSIVF

SEQ ID NO: 107067 - protein, 15 aa, Homo Sapiens
TCKVCLDRAVSIVFV

SEQ ID NO: 107068 - protein, 15 aa, Homo Sapiens
CKVCLDRAVSIVFVP

SEQ ID NO: 107069 - protein, 15 aa, Homo Sapiens
KVCLDRAVSIVFVPC

SEQ ID NO: 107070 - protein, 15 aa, Homo Sapiens
VCLDRAVSIVFVPCG

SEQ ID NO: 107071 - protein, 15 aa, Homo Sapiens
CLDRAVSIVFVPCGH

SEQ ID NO: 107072 - protein, 15 aa, Homo Sapiens
LDRAVSIVFVPCGHL

SEQ ID NO: 107073 - protein, 15 aa, Homo Sapiens
DRAVSIVFVPCGHLV

SEQ ID NO: 107074 - protein, 15 aa, Homo Sapiens
RAVSIVFVPCGHLVC

SEQ ID NO: 107075 - protein, 15 aa, Homo Sapiens
AVSIVFVPCGHLVCA

SEQ ID NO: 107076 - protein, 15 aa, Homo Sapiens
VSIVFVPCGHLVCAE

SEQ ID NO: 107077 - protein, 15 aa, Homo Sapiens
SIVFVPCGHLVCAEC

SEQ ID NO: 107078 - protein, 15 aa, Homo Sapiens
IVFVPCGHLVCAECA

SEQ ID NO: 107079 - protein, 15 aa, Homo Sapiens
VFVPCGHLVCAECAP

SEQ ID NO: 107080 - protein, 15 aa, Homo Sapiens
FVPCGHLVCAECAPG

SEQ ID NO: 107081 - protein, 15 aa, Homo Sapiens
VPCGHLVCAECAPGL

SEQ ID NO: 107082 - protein, 15 aa, Homo Sapiens
PCGHLVCAECAPGLQ

SEQ ID NO: 107083 - protein, 15 aa, Homo Sapiens
CGHLVCAECAPGLQL

SEQ ID NO: 107084 - protein, 15 aa, Homo Sapiens
GHLVCAECAPGLQLC

SEQ ID NO: 107085 - protein, 15 aa, Homo Sapiens
HLVCAECAPGLQLCP

SEQ ID NO: 107086 - protein, 15 aa, Homo Sapiens
LVCAECAPGLQLCPI

SEQ ID NO: 107087 - protein, 15 aa, Homo Sapiens
VCAECAPGLQLCPIC

SEQ ID NO: 107088 - protein, 15 aa, Homo Sapiens
CAECAPGLQLCPICR

SEQ ID NO: 107089 - protein, 15 aa, Homo Sapiens
AECAPGLQLCPICRA

SEQ ID NO: 107090 - protein, 15 aa, Homo Sapiens
ECAPGLQLCPICRAP

SEQ ID NO: 107091 - protein, 15 aa, Homo Sapiens
CAPGLQLCPICRAPV

SEQ ID NO: 107092 - protein, 15 aa, Homo Sapiens
APGLQLCPICRAPVR

SEQ ID NO: 107093 - protein, 15 aa, Homo Sapiens
PGLQLCPICRAPVRS

SEQ ID NO: 107094 - protein, 15 aa, Homo Sapiens
GLQLCPICRAPVRSR

SEQ ID NO: 107095 - protein, 15 aa, Homo Sapiens
LQLCPICRAPVRSRV

SEQ ID NO: 107096 - protein, 15 aa, Homo Sapiens
QLCPICRAPVRSRVR

SEQ ID NO: 107097 - protein, 15 aa, Homo Sapiens
LCPICRAPVRSRVRT

SEQ ID NO: 107098 - protein, 15 aa, Homo Sapiens
CPICRAPVRSRVRTF

SEQ ID NO: 107099 - protein, 15 aa, Homo Sapiens
PICRAPVRSRVRTFL

SEQ ID NO: 107100 - protein, 15 aa, Homo Sapiens
ICRAPVRSRVRTFLS

SEQ ID NO: 107101 - protein, 16 aa, Homo Sapiens
MGPKDSAKCLHRGPQP

SEQ ID NO: 107102 - protein, 16 aa, Homo Sapiens
GPKDSAKCLHRGPQPS

SEQ ID NO: 107103 - protein, 16 aa, Homo Sapiens
PKDSAKCLHRGPQPSH

SEQ ID NO: 107104 - protein, 16 aa, Homo Sapiens
KDSAKCLHRGPQPSHW

SEQ ID NO: 107105 - protein, 16 aa, Homo Sapiens
DSAKCLHRGPQPSHWA

SEQ ID NO: 107106 - protein, 16 aa, Homo Sapiens
SAKCLHRGPQPSHWAA

SEQ ID NO: 107107 - protein, 16 aa, Homo Sapiens
AKCLHRGPQPSHWAAG

SEQ ID NO: 107108 - protein, 16 aa, Homo Sapiens
KCLHRGPQPSHWAAGD

SEQ ID NO: 107109 - protein, 16 aa, Homo Sapiens
CLHRGPQPSHWAAGDG

SEQ ID NO: 107110 - protein, 16 aa, Homo Sapiens
LHRGPQPSHWAAGDGP

SEQ ID NO: 107111 - protein, 16 aa, Homo Sapiens
HRGPQPSHWAAGDGPT

SEQ ID NO: 107112 - protein, 16 aa, Homo Sapiens
RGPQPSHWAAGDGPTQ

SEQ ID NO: 107113 - protein, 16 aa, Homo Sapiens
GPQPSHWAAGDGPTQE

SEQ ID NO: 107114 - protein, 16 aa, Homo Sapiens
PQPSHWAAGDGPTQER

SEQ ID NO: 107115 - protein, 16 aa, Homo Sapiens
QPSHWAAGDGPTQERC

SEQ ID NO: 107116 - protein, 16 aa, Homo Sapiens
PSHWAAGDGPTQERCG

SEQ ID NO: 107117 - protein, 16 aa, Homo Sapiens
SHWAAGDGPTQERCGP

SEQ ID NO: 107118 - protein, 16 aa, Homo Sapiens
HWAAGDGPTQERCGPR

SEQ ID NO: 107119 - protein, 16 aa, Homo Sapiens
WAAGDGPTQERCGPRS

SEQ ID NO: 107120 - protein, 16 aa, Homo Sapiens
AAGDGPTQERCGPRSL

SEQ ID NO: 107121 - protein, 16 aa, Homo Sapiens
AGDGPTQERCGPRSLG

SEQ ID NO: 107122 - protein, 16 aa, Homo Sapiens
GDGPTQERCGPRSLGS

SEQ ID NO: 107123 - protein, 16 aa, Homo Sapiens
DGPTQERCGPRSLGSP

SEQ ID NO: 107124 - protein, 16 aa, Homo Sapiens
GPTQERCGPRSLGSPV

SEQ ID NO: 107125 - protein, 16 aa, Homo Sapiens
PTQERCGPRSLGSPVL

SEQ ID NO: 107126 - protein, 16 aa, Homo Sapiens
TQERCGPRSLGSPVLG

SEQ ID NO: 107127 - protein, 16 aa, Homo Sapiens
QERCGPRSLGSPVLGL

SEQ ID NO: 107128 - protein, 16 aa, Homo Sapiens
ERCGPRSLGSPVLGLD

SEQ ID NO: 107129 - protein, 16 aa, Homo Sapiens
RCGPRSLGSPVLGLDT

SEQ ID NO: 107130 - protein, 16 aa, Homo Sapiens
CGPRSLGSPVLGLDTC

SEQ ID NO: 107131 - protein, 16 aa, Homo Sapiens
GPRSLGSPVLGLDTCR

SEQ ID NO: 107132 - protein, 16 aa, Homo Sapiens
PRSLGSPVLGLDTCRA

SEQ ID NO: 107133 - protein, 16 aa, Homo Sapiens
RSLGSPVLGLDTCRAW

SEQ ID NO: 107134 - protein, 16 aa, Homo Sapiens
SLGSPVLGLDTCRAWD

SEQ ID NO: 107135 - protein, 16 aa, Homo Sapiens
LGSPVLGLDTCRAWDH

SEQ ID NO: 107136 - protein, 16 aa, Homo Sapiens
GSPVLGLDTCRAWDHV

SEQ ID NO: 107137 - protein, 16 aa, Homo Sapiens
SPVLGLDTCRAWDHVD

SEQ ID NO: 107138 - protein, 16 aa, Homo Sapiens
PVLGLDTCRAWDHVDG

SEQ ID NO: 107139 - protein, 16 aa, Homo Sapiens
VLGLDTCRAWDHVDGQ

SEQ ID NO: 107140 - protein, 16 aa, Homo Sapiens
LGLDTCRAWDHVDGQI

SEQ ID NO: 107141 - protein, 16 aa, Homo Sapiens
GLDTCRAWDHVDGQIL

SEQ ID NO: 107142 - protein, 16 aa, Homo Sapiens
LDTCRAWDHVDGQILG

SEQ ID NO: 107143 - protein, 16 aa, Homo Sapiens
DTCRAWDHVDGQILGQ

SEQ ID NO: 107144 - protein, 16 aa, Homo Sapiens
TCRAWDHVDGQILGQL

SEQ ID NO: 107145 - protein, 16 aa, Homo Sapiens
CRAWDHVDGQILGQLR

SEQ ID NO: 107146 - protein, 16 aa, Homo Sapiens
RAWDHVDGQILGQLRP

SEQ ID NO: 107147 - protein, 16 aa, Homo Sapiens
AWDHVDGQILGQLRPL

SEQ ID NO: 107148 - protein, 16 aa, Homo Sapiens
WDHVDGQILGQLRPLT

SEQ ID NO: 107149 - protein, 16 aa, Homo Sapiens
DHVDGQILGQLRPLTE

SEQ ID NO: 107150 - protein, 16 aa, Homo Sapiens
HVDGQILGQLRPLTEE

SEQ ID NO: 107151 - protein, 16 aa, Homo Sapiens
VDGQILGQLRPLTEEE

SEQ ID NO: 107152 - protein, 16 aa, Homo Sapiens
DGQILGQLRPLTEEEE

SEQ ID NO: 107153 - protein, 16 aa, Homo Sapiens
GQILGQLRPLTEEEEE

SEQ ID NO: 107154 - protein, 16 aa, Homo Sapiens
QILGQLRPLTEEEEEE

SEQ ID NO: 107155 - protein, 16 aa, Homo Sapiens
ILGQLRPLTEEEEEEG

SEQ ID NO: 107156 - protein, 16 aa, Homo Sapiens
LGQLRPLTEEEEEEGA

SEQ ID NO: 107157 - protein, 16 aa, Homo Sapiens
GQLRPLTEEEEEEGAG

SEQ ID NO: 107158 - protein, 16 aa, Homo Sapiens
QLRPLTEEEEEEGAGA

SEQ ID NO: 107159 - protein, 16 aa, Homo Sapiens
LRPLTEEEEEEGAGAT

SEQ ID NO: 107160 - protein, 16 aa, Homo Sapiens
RPLTEEEEEEGAGATL

SEQ ID NO: 107161 - protein, 16 aa, Homo Sapiens
PLTEEEEEEGAGATLS

SEQ ID NO: 107162 - protein, 16 aa, Homo Sapiens
LTEEEEEEGAGATLSR

SEQ ID NO: 107163 - protein, 16 aa, Homo Sapiens
TEEEEEEGAGATLSRG

SEQ ID NO: 107164 - protein, 16 aa, Homo Sapiens
EEEEEEGAGATLSRGP

SEQ ID NO: 107165 - protein, 16 aa, Homo Sapiens
EEEEEGAGATLSRGPA

SEQ ID NO: 107166 - protein, 16 aa, Homo Sapiens
EEEEGAGATLSRGPAF

SEQ ID NO: 107167 - protein, 16 aa, Homo Sapiens
EEEGAGATLSRGPAFP

SEQ ID NO: 107168 - protein, 16 aa, Homo Sapiens
EEGAGATLSRGPAFPG

SEQ ID NO: 107169 - protein, 16 aa, Homo Sapiens
EGAGATLSRGPAFPGM

SEQ ID NO: 107170 - protein, 16 aa, Homo Sapiens
GAGATLSRGPAFPGMG

SEQ ID NO: 107171 - protein, 16 aa, Homo Sapiens
AGATLSRGPAFPGMGS

SEQ ID NO: 107172 - protein, 16 aa, Homo Sapiens
GATLSRGPAFPGMGSE

SEQ ID NO: 107173 - protein, 16 aa, Homo Sapiens
ATLSRGPAFPGMGSEE

SEQ ID NO: 107174 - protein, 16 aa, Homo Sapiens
TLSRGPAFPGMGSEEL

SEQ ID NO: 107175 - protein, 16 aa, Homo Sapiens
LSRGPAFPGMGSEELR

SEQ ID NO: 107176 - protein, 16 aa, Homo Sapiens
SRGPAFPGMGSEELRL

SEQ ID NO: 107177 - protein, 16 aa, Homo Sapiens
RGPAFPGMGSEELRLA

SEQ ID NO: 107178 - protein, 16 aa, Homo Sapiens
GPAFPGMGSEELRLAS

SEQ ID NO: 107179 - protein, 16 aa, Homo Sapiens
PAFPGMGSEELRLASF

SEQ ID NO: 107180 - protein, 16 aa, Homo Sapiens
AFPGMGSEELRLASFY

SEQ ID NO: 107181 - protein, 16 aa, Homo Sapiens
FPGMGSEELRLASFYD

SEQ ID NO: 107182 - protein, 16 aa, Homo Sapiens
PGMGSEELRLASFYDW

SEQ ID NO: 107183 - protein, 16 aa, Homo Sapiens
GMGSEELRLASFYDWP

SEQ ID NO: 107184 - protein, 16 aa, Homo Sapiens
MGSEELRLASFYDWPL

SEQ ID NO: 107185 - protein, 16 aa, Homo Sapiens
GSEELRLASFYDWPLT

SEQ ID NO: 107186 - protein, 16 aa, Homo Sapiens
SEELRLASFYDWPLTA

SEQ ID NO: 107187 - protein, 16 aa, Homo Sapiens
EELRLASFYDWPLTAE

SEQ ID NO: 107188 - protein, 16 aa, Homo Sapiens
ELRLASFYDWPLTAEV

SEQ ID NO: 107189 - protein, 16 aa, Homo Sapiens
LRLASFYDWPLTAEVP

SEQ ID NO: 107190 - protein, 16 aa, Homo Sapiens
RLASFYDWPLTAEVPP

SEQ ID NO: 107191 - protein, 16 aa, Homo Sapiens
LASFYDWPLTAEVPPE

SEQ ID NO: 107192 - protein, 16 aa, Homo Sapiens
ASFYDWPLTAEVPPEL

SEQ ID NO: 107193 - protein, 16 aa, Homo Sapiens
SFYDWPLTAEVPPELL

SEQ ID NO: 107194 - protein, 16 aa, Homo Sapiens
FYDWPLTAEVPPELLA

SEQ ID NO: 107195 - protein, 16 aa, Homo Sapiens
YDWPLTAEVPPELLAA

SEQ ID NO: 107196 - protein, 16 aa, Homo Sapiens
DWPLTAEVPPELLAAA

SEQ ID NO: 107197 - protein, 16 aa, Homo Sapiens
WPLTAEVPPELLAAAG

SEQ ID NO: 107198 - protein, 16 aa, Homo Sapiens
PLTAEVPPELLAAAGF

SEQ ID NO: 107199 - protein, 16 aa, Homo Sapiens
LTAEVPPELLAAAGFF

SEQ ID NO: 107200 - protein, 16 aa, Homo Sapiens
TAEVPPELLAAAGFFH

SEQ ID NO: 107201 - protein, 16 aa, Homo Sapiens
AEVPPELLAAAGFFHT

SEQ ID NO: 107202 - protein, 16 aa, Homo Sapiens
EVPPELLAAAGFFHTG

SEQ ID NO: 107203 - protein, 16 aa, Homo Sapiens
VPPELLAAAGFFHTGH

SEQ ID NO: 107204 - protein, 16 aa, Homo Sapiens
PPELLAAAGFFHTGHQ

SEQ ID NO: 107205 - protein, 16 aa, Homo Sapiens
PELLAAAGFFHTGHQD

SEQ ID NO: 107206 - protein, 16 aa, Homo Sapiens
ELLAAAGFFHTGHQDK

SEQ ID NO: 107207 - protein, 16 aa, Homo Sapiens
LLAAAGFFHTGHQDKV

SEQ ID NO: 107208 - protein, 16 aa, Homo Sapiens
LAAAGFFHTGHQDKVR

SEQ ID NO: 107209 - protein, 16 aa, Homo Sapiens
AAAGFFHTGHQDKVRC

SEQ ID NO: 107210 - protein, 16 aa, Homo Sapiens
AAGFFHTGHQDKVRCF

SEQ ID NO: 107211 - protein, 16 aa, Homo Sapiens
AGFFHTGHQDKVRCFF

SEQ ID NO: 107212 - protein, 16 aa, Homo Sapiens
GFFHTGHQDKVRCFFC

SEQ ID NO: 107213 - protein, 16 aa, Homo Sapiens
FFHTGHQDKVRCFFCY

SEQ ID NO: 107214 - protein, 16 aa, Homo Sapiens
FHTGHQDKVRCFFCYG

SEQ ID NO: 107215 - protein, 16 aa, Homo Sapiens
HTGHQDKVRCFFCYGG

SEQ ID NO: 107216 - protein, 16 aa, Homo Sapiens
TGHQDKVRCFFCYGGL

SEQ ID NO: 107217 - protein, 16 aa, Homo Sapiens
GHQDKVRCFFCYGGLQ

SEQ ID NO: 107218 - protein, 16 aa, Homo Sapiens
HQDKVRCFFCYGGLQS

SEQ ID NO: 107219 - protein, 16 aa, Homo Sapiens
QDKVRCFFCYGGLQSW

SEQ ID NO: 107220 - protein, 16 aa, Homo Sapiens
DKVRCFFCYGGLQSWK

SEQ ID NO: 107221 - protein, 16 aa, Homo Sapiens
KVRCFFCYGGLQSWKR

SEQ ID NO: 107222 - protein, 16 aa, Homo Sapiens
VRCFFCYGGLQSWKRG

SEQ ID NO: 107223 - protein, 16 aa, Homo Sapiens
RCFFCYGGLQSWKRGD

SEQ ID NO: 107224 - protein, 16 aa, Homo Sapiens
CFFCYGGLQSWKRGDD

SEQ ID NO: 107225 - protein, 16 aa, Homo Sapiens
FFCYGGLQSWKRGDDP

SEQ ID NO: 107226 - protein, 16 aa, Homo Sapiens
FCYGGLQSWKRGDDPW

SEQ ID NO: 107227 - protein, 16 aa, Homo Sapiens
CYGGLQSWKRGDDPWT

SEQ ID NO: 107228 - protein, 16 aa, Homo Sapiens
YGGLQSWKRGDDPWTE

SEQ ID NO: 107229 - protein, 16 aa, Homo Sapiens
GGLQSWKRGDDPWTEH

SEQ ID NO: 107230 - protein, 16 aa, Homo Sapiens
GLQSWKRGDDPWTEHA

SEQ ID NO: 107231 - protein, 16 aa, Homo Sapiens
LQSWKRGDDPWTEHAK

SEQ ID NO: 107232 - protein, 16 aa, Homo Sapiens
QSWKRGDDPWTEHAKW

SEQ ID NO: 107233 - protein, 16 aa, Homo Sapiens
SWKRGDDPWTEHAKWF

SEQ ID NO: 107234 - protein, 16 aa, Homo Sapiens
WKRGDDPWTEHAKWFP

SEQ ID NO: 107235 - protein, 16 aa, Homo Sapiens
KRGDDPWTEHAKWFPS

SEQ ID NO: 107236 - protein, 16 aa, Homo Sapiens
RGDDPWTEHAKWFPSC

SEQ ID NO: 107237 - protein, 16 aa, Homo Sapiens
GDDPWTEHAKWFPSCQ

SEQ ID NO: 107238 - protein, 16 aa, Homo Sapiens
DDPWTEHAKWFPSCQF

SEQ ID NO: 107239 - protein, 16 aa, Homo Sapiens
DPWTEHAKWFPSCQFL

SEQ ID NO: 107240 - protein, 16 aa, Homo Sapiens
PWTEHAKWFPSCQFLL

SEQ ID NO: 107241 - protein, 16 aa, Homo Sapiens
WTEHAKWFPSCQFLLR

SEQ ID NO: 107242 - protein, 16 aa, Homo Sapiens
TEHAKWFPSCQFLLRS

SEQ ID NO: 107243 - protein, 16 aa, Homo Sapiens
EHAKWFPSCQFLLRSK

SEQ ID NO: 107244 - protein, 16 aa, Homo Sapiens
HAKWFPSCQFLLRSKG

SEQ ID NO: 107245 - protein, 16 aa, Homo Sapiens
AKWFPSCQFLLRSKGR

SEQ ID NO: 107246 - protein, 16 aa, Homo Sapiens
KWFPSCQFLLRSKGRD

SEQ ID NO: 107247 - protein, 16 aa, Homo Sapiens
WFPSCQFLLRSKGRDF

SEQ ID NO: 107248 - protein, 16 aa, Homo Sapiens
FPSCQFLLRSKGRDFV

SEQ ID NO: 107249 - protein, 16 aa, Homo Sapiens
PSCQFLLRSKGRDFVH

SEQ ID NO: 107250 - protein, 16 aa, Homo Sapiens
SCQFLLRSKGRDFVHS

SEQ ID NO: 107251 - protein, 16 aa, Homo Sapiens
CQFLLRSKGRDFVHSV

SEQ ID NO: 107252 - protein, 16 aa, Homo Sapiens
QFLLRSKGRDFVHSVQ

SEQ ID NO: 107253 - protein, 16 aa, Homo Sapiens
FLLRSKGRDFVHSVQE

SEQ ID NO: 107254 - protein, 16 aa, Homo Sapiens
LLRSKGRDFVHSVQET

SEQ ID NO: 107255 - protein, 16 aa, Homo Sapiens
LRSKGRDFVHSVQETH

SEQ ID NO: 107256 - protein, 16 aa, Homo Sapiens
RSKGRDFVHSVQETHS

SEQ ID NO: 107257 - protein, 16 aa, Homo Sapiens
SKGRDFVHSVQETHSQ

SEQ ID NO: 107258 - protein, 16 aa, Homo Sapiens
KGRDFVHSVQETHSQL

SEQ ID NO: 107259 - protein, 16 aa, Homo Sapiens
GRDFVHSVQETHSQLL

SEQ ID NO: 107260 - protein, 16 aa, Homo Sapiens
RDFVHSVQETHSQLLG

SEQ ID NO: 107261 - protein, 16 aa, Homo Sapiens
DFVHSVQETHSQLLGS

SEQ ID NO: 107262 - protein, 16 aa, Homo Sapiens
FVHSVQETHSQLLGSW

SEQ ID NO: 107263 - protein, 16 aa, Homo Sapiens
VHSVQETHSQLLGSWD

SEQ ID NO: 107264 - protein, 16 aa, Homo Sapiens
HSVQETHSQLLGSWDP

SEQ ID NO: 107265 - protein, 16 aa, Homo Sapiens
SVQETHSQLLGSWDPW

SEQ ID NO: 107266 - protein, 16 aa, Homo Sapiens
VQETHSQLLGSWDPWE

SEQ ID NO: 107267 - protein, 16 aa, Homo Sapiens
QETHSQLLGSWDPWEE

SEQ ID NO: 107268 - protein, 16 aa, Homo Sapiens
ETHSQLLGSWDPWEEP

SEQ ID NO: 107269 - protein, 16 aa, Homo Sapiens
THSQLLGSWDPWEEPE

SEQ ID NO: 107270 - protein, 16 aa, Homo Sapiens
HSQLLGSWDPWEEPED

SEQ ID NO: 107271 - protein, 16 aa, Homo Sapiens
SQLLGSWDPWEEPEDA

SEQ ID NO: 107272 - protein, 16 aa, Homo Sapiens
QLLGSWDPWEEPEDAA

SEQ ID NO: 107273 - protein, 16 aa, Homo Sapiens
LLGSWDPWEEPEDAAP

SEQ ID NO: 107274 - protein, 16 aa, Homo Sapiens
LGSWDPWEEPEDAAPV

SEQ ID NO: 107275 - protein, 16 aa, Homo Sapiens
GSWDPWEEPEDAAPVA

SEQ ID NO: 107276 - protein, 16 aa, Homo Sapiens
SWDPWEEPEDAAPVAP

SEQ ID NO: 107277 - protein, 16 aa, Homo Sapiens
WDPWEEPEDAAPVAPS

SEQ ID NO: 107278 - protein, 16 aa, Homo Sapiens
DPWEEPEDAAPVAPSV

SEQ ID NO: 107279 - protein, 16 aa, Homo Sapiens
PWEEPEDAAPVAPSVP

SEQ ID NO: 107280 - protein, 16 aa, Homo Sapiens
WEEPEDAAPVAPSVPA

SEQ ID NO: 107281 - protein, 16 aa, Homo Sapiens
EEPEDAAPVAPSVPAS

SEQ ID NO: 107282 - protein, 16 aa, Homo Sapiens
EPEDAAPVAPSVPASG

SEQ ID NO: 107283 - protein, 16 aa, Homo Sapiens
PEDAAPVAPSVPASGY

SEQ ID NO: 107284 - protein, 16 aa, Homo Sapiens
EDAAPVAPSVPASGYP

SEQ ID NO: 107285 - protein, 16 aa, Homo Sapiens
DAAPVAPSVPASGYPE

SEQ ID NO: 107286 - protein, 16 aa, Homo Sapiens
AAPVAPSVPASGYPEL

SEQ ID NO: 107287 - protein, 16 aa, Homo Sapiens
APVAPSVPASGYPELP

SEQ ID NO: 107288 - protein, 16 aa, Homo Sapiens
PVAPSVPASGYPELPT

SEQ ID NO: 107289 - protein, 16 aa, Homo Sapiens
VAPSVPASGYPELPTP

SEQ ID NO: 107290 - protein, 16 aa, Homo Sapiens
APSVPASGYPELPTPR

SEQ ID NO: 107291 - protein, 16 aa, Homo Sapiens
PSVPASGYPELPTPRR

SEQ ID NO: 107292 - protein, 16 aa, Homo Sapiens
SVPASGYPELPTPRRE

SEQ ID NO: 107293 - protein, 16 aa, Homo Sapiens
VPASGYPELPTPRREV

SEQ ID NO: 107294 - protein, 16 aa, Homo Sapiens
PASGYPELPTPRREVQ

SEQ ID NO: 107295 - protein, 16 aa, Homo Sapiens
ASGYPELPTPRREVQS

SEQ ID NO: 107296 - protein, 16 aa, Homo Sapiens
SGYPELPTPRREVQSE

SEQ ID NO: 107297 - protein, 16 aa, Homo Sapiens
GYPELPTPRREVQSES

SEQ ID NO: 107298 - protein, 16 aa, Homo Sapiens
YPELPTPRREVQSESA

SEQ ID NO: 107299 - protein, 16 aa, Homo Sapiens
PELPTPRREVQSESAQ

SEQ ID NO: 107300 - protein, 16 aa, Homo Sapiens
ELPTPRREVQSESAQE

SEQ ID NO: 107301 - protein, 16 aa, Homo Sapiens
LPTPRREVQSESAQEP

SEQ ID NO: 107302 - protein, 16 aa, Homo Sapiens
PTPRREVQSESAQEPG

SEQ ID NO: 107303 - protein, 16 aa, Homo Sapiens
TPRREVQSESAQEPGG

SEQ ID NO: 107304 - protein, 16 aa, Homo Sapiens
PRREVQSESAQEPGGV

SEQ ID NO: 107305 - protein, 16 aa, Homo Sapiens
RREVQSESAQEPGGVS

SEQ ID NO: 107306 - protein, 16 aa, Homo Sapiens
REVQSESAQEPGGVSP

SEQ ID NO: 107307 - protein, 16 aa, Homo Sapiens
EVQSESAQEPGGVSPA

SEQ ID NO: 107308 - protein, 16 aa, Homo Sapiens
VQSESAQEPGGVSPAE

SEQ ID NO: 107309 - protein, 16 aa, Homo Sapiens
QSESAQEPGGVSPAEA

SEQ ID NO: 107310 - protein, 16 aa, Homo Sapiens
SESAQEPGGVSPAEAQ

SEQ ID NO: 107311 - protein, 16 aa, Homo Sapiens
ESAQEPGGVSPAEAQR

SEQ ID NO: 107312 - protein, 16 aa, Homo Sapiens
SAQEPGGVSPAEAQRA

SEQ ID NO: 107313 - protein, 16 aa, Homo Sapiens
AQEPGGVSPAEAQRAW

SEQ ID NO: 107314 - protein, 16 aa, Homo Sapiens
QEPGGVSPAEAQRAWW

SEQ ID NO: 107315 - protein, 16 aa, Homo Sapiens
EPGGVSPAEAQRAWWV

SEQ ID NO: 107316 - protein, 16 aa, Homo Sapiens
PGGVSPAEAQRAWWVL

SEQ ID NO: 107317 - protein, 16 aa, Homo Sapiens
GGVSPAEAQRAWWVLE

SEQ ID NO: 107318 - protein, 16 aa, Homo Sapiens
GVSPAEAQRAWWVLEP

SEQ ID NO: 107319 - protein, 16 aa, Homo Sapiens
VSPAEAQRAWWVLEPP

SEQ ID NO: 107320 - protein, 16 aa, Homo Sapiens
SPAEAQRAWWVLEPPG

SEQ ID NO: 107321 - protein, 16 aa, Homo Sapiens
PAEAQRAWWVLEPPGA

SEQ ID NO: 107322 - protein, 16 aa, Homo Sapiens
AEAQRAWWVLEPPGAR

SEQ ID NO: 107323 - protein, 16 aa, Homo Sapiens
EAQRAWWVLEPPGARD

SEQ ID NO: 107324 - protein, 16 aa, Homo Sapiens
AQRAWWVLEPPGARDV

SEQ ID NO: 107325 - protein, 16 aa, Homo Sapiens
QRAWWVLEPPGARDVE

SEQ ID NO: 107326 - protein, 16 aa, Homo Sapiens
RAWWVLEPPGARDVEA

SEQ ID NO: 107327 - protein, 16 aa, Homo Sapiens
AWWVLEPPGARDVEAQ

SEQ ID NO: 107328 - protein, 16 aa, Homo Sapiens
WWVLEPPGARDVEAQL

SEQ ID NO: 107329 - protein, 16 aa, Homo Sapiens
WVLEPPGARDVEAQLR

SEQ ID NO: 107330 - protein, 16 aa, Homo Sapiens
VLEPPGARDVEAQLRR

SEQ ID NO: 107331 - protein, 16 aa, Homo Sapiens
LEPPGARDVEAQLRRL

SEQ ID NO: 107332 - protein, 16 aa, Homo Sapiens
EPPGARDVEAQLRRLQ

SEQ ID NO: 107333 - protein, 16 aa, Homo Sapiens
PPGARDVEAQLRRLQE

SEQ ID NO: 107334 - protein, 16 aa, Homo Sapiens
PGARDVEAQLRRLQEE

SEQ ID NO: 107335 - protein, 16 aa, Homo Sapiens
GARDVEAQLRRLQEER

SEQ ID NO: 107336 - protein, 16 aa, Homo Sapiens
ARDVEAQLRRLQEERT

SEQ ID NO: 107337 - protein, 16 aa, Homo Sapiens
RDVEAQLRRLQEERTC

SEQ ID NO: 107338 - protein, 16 aa, Homo Sapiens
DVEAQLRRLQEERTCK

SEQ ID NO: 107339 - protein, 16 aa, Homo Sapiens
VEAQLRRLQEERTCKV

SEQ ID NO: 107340 - protein, 16 aa, Homo Sapiens
EAQLRRLQEERTCKVC

SEQ ID NO: 107341 - protein, 16 aa, Homo Sapiens
AQLRRLQEERTCKVCL

SEQ ID NO: 107342 - protein, 16 aa, Homo Sapiens
QLRRLQEERTCKVCLD

SEQ ID NO: 107343 - protein, 16 aa, Homo Sapiens
LRRLQEERTCKVCLDR

SEQ ID NO: 107344 - protein, 16 aa, Homo Sapiens
RRLQEERTCKVCLDRA

SEQ ID NO: 107345 - protein, 16 aa, Homo Sapiens
RLQEERTCKVCLDRAV

SEQ ID NO: 107346 - protein, 16 aa, Homo Sapiens
LQEERTCKVCLDRAVS

SEQ ID NO: 107347 - protein, 16 aa, Homo Sapiens
QEERTCKVCLDRAVSI

SEQ ID NO: 107348 - protein, 16 aa, Homo Sapiens
EERTCKVCLDRAVSIV

SEQ ID NO: 107349 - protein, 16 aa, Homo Sapiens
ERTCKVCLDRAVSIVF

SEQ ID NO: 107350 - protein, 16 aa, Homo Sapiens
RTCKVCLDRAVSIVFV

SEQ ID NO: 107351 - protein, 16 aa, Homo Sapiens
TCKVCLDRAVSIVFVP

SEQ ID NO: 107352 - protein, 16 aa, Homo Sapiens
CKVCLDRAVSIVFVPC

SEQ ID NO: 107353 - protein, 16 aa, Homo Sapiens
KVCLDRAVSIVFVPCG

SEQ ID NO: 107354 - protein, 16 aa, Homo Sapiens
VCLDRAVSIVFVPCGH

SEQ ID NO: 107355 - protein, 16 aa, Homo Sapiens
CLDRAVSIVFVPCGHL

SEQ ID NO: 107356 - protein, 16 aa, Homo Sapiens
LDRAVSIVFVPCGHLV

SEQ ID NO: 107357 - protein, 16 aa, Homo Sapiens
DRAVSIVFVPCGHLVC

SEQ ID NO: 107358 - protein, 16 aa, Homo Sapiens
RAVSIVFVPCGHLVCA

SEQ ID NO: 107359 - protein, 16 aa, Homo Sapiens
AVSIVFVPCGHLVCAE

SEQ ID NO: 107360 - protein, 16 aa, Homo Sapiens
VSIVFVPCGHLVCAEC

SEQ ID NO: 107361 - protein, 16 aa, Homo Sapiens
SIVFVPCGHLVCAECA

SEQ ID NO: 107362 - protein, 16 aa, Homo Sapiens
IVFVPCGHLVCAECAP

SEQ ID NO: 107363 - protein, 16 aa, Homo Sapiens
VFVPCGHLVCAECAPG

SEQ ID NO: 107364 - protein, 16 aa, Homo Sapiens
FVPCGHLVCAECAPGL

SEQ ID NO: 107365 - protein, 16 aa, Homo Sapiens
VPCGHLVCAECAPGLQ

SEQ ID NO: 107366 - protein, 16 aa, Homo Sapiens
PCGHLVCAECAPGLQL

SEQ ID NO: 107367 - protein, 16 aa, Homo Sapiens
CGHLVCAECAPGLQLC

SEQ ID NO: 107368 - protein, 16 aa, Homo Sapiens
GHLVCAECAPGLQLCP

SEQ ID NO: 107369 - protein, 16 aa, Homo Sapiens
HLVCAECAPGLQLCPI

SEQ ID NO: 107370 - protein, 16 aa, Homo Sapiens
LVCAECAPGLQLCPIC

SEQ ID NO: 107371 - protein, 16 aa, Homo Sapiens
VCAECAPGLQLCPICR

SEQ ID NO: 107372 - protein, 16 aa, Homo Sapiens
CAECAPGLQLCPICRA

SEQ ID NO: 107373 - protein, 16 aa, Homo Sapiens
AECAPGLQLCPICRAP

SEQ ID NO: 107374 - protein, 16 aa, Homo Sapiens
ECAPGLQLCPICRAPV

SEQ ID NO: 107375 - protein, 16 aa, Homo Sapiens
CAPGLQLCPICRAPVR

SEQ ID NO: 107376 - protein, 16 aa, Homo Sapiens
APGLQLCPICRAPVRS

SEQ ID NO: 107377 - protein, 16 aa, Homo Sapiens
PGLQLCPICRAPVRSR

SEQ ID NO: 107378 - protein, 16 aa, Homo Sapiens
GLQLCPICRAPVRSRV

SEQ ID NO: 107379 - protein, 16 aa, Homo Sapiens
LQLCPICRAPVRSRVR

SEQ ID NO: 107380 - protein, 16 aa, Homo Sapiens
QLCPICRAPVRSRVRT

SEQ ID NO: 107381 - protein, 16 aa, Homo Sapiens
LCPICRAPVRSRVRTF

SEQ ID NO: 107382 - protein, 16 aa, Homo Sapiens
CPICRAPVRSRVRTFL

SEQ ID NO: 107383 - protein, 16 aa, Homo Sapiens
PICRAPVRSRVRTFLS

SEQ ID NO: 107384 - protein, 459 aa, Homo Sapiens
MAPLCPSPWLPLLIPAPAPGLTVQLLLSLLLLMPVHPQRLPRMQEDSPLGGGSSGEDDPLGEEDLPSEEDSPREEDPPGEEDLPGEEDLPGEEDLPEVKPKSEEEGSLKLEDLPTVEAPGDPQEPQNNAHRDKEGDDQSHWRYGGDPPWPRVSPACAGRFQSPVDIRPQLAAFCPALRPLELLGFQLPPLPELRLRNNGHSVQLTLPPGLEMALGPGREYRALQLHLHWGAAGRPGSEHTVEGHRFPAEIHVVHLSTAFARVDEALGRPGGLAVLAAFLEEGPEENSAYEQLLSRLEEIAEEGSETQVPGLDISALLPSDFSRYFQYEGSLTTPPCAQGVIWTVFNQTVMLSAKQLHTLSDTLWGPGDSRLQLNFRATQPLNGRVIEASFPAGVDSSPRAAEPVQLNSCLAAGDILALVFGLLFAVTSVAFLVQMRRQHRRGTKGGVSYRPAEVAETGA

SEQ ID NO: 107385 - protein, 9 aa, Homo Sapiens
MAPLCPSPW

SEQ ID NO: 107386 - protein, 9 aa, Homo Sapiens
APLCPSPWL

SEQ ID NO: 107387 - protein, 9 aa, Homo Sapiens
CPSPWLPLL

SEQ ID NO: 107388 - protein, 9 aa, Homo Sapiens
LPLLIPAPA

SEQ ID NO: 107389 - protein, 9 aa, Homo Sapiens
LIPAPAPGL

SEQ ID NO: 107390 - protein, 9 aa, Homo Sapiens
IPAPAPGLT

SEQ ID NO: 107391 - protein, 9 aa, Homo Sapiens
APAPGLTVQ

SEQ ID NO: 107392 - protein, 9 aa, Homo Sapiens
APGLTVQLL

SEQ ID NO: 107393 - protein, 9 aa, Homo Sapiens
LTVQLLLSL

SEQ ID NO: 107394 - protein, 9 aa, Homo Sapiens
TVQLLLSLL

SEQ ID NO: 107395 - protein, 9 aa, Homo Sapiens
VQLLLSLLL

SEQ ID NO: 107396 - protein, 9 aa, Homo Sapiens
QLLLSLLLL

SEQ ID NO: 107397 - protein, 9 aa, Homo Sapiens
LLLSLLLLM

SEQ ID NO: 107398 - protein, 9 aa, Homo Sapiens
LSLLLLMPV

SEQ ID NO: 107399 - protein, 9 aa, Homo Sapiens
LLLMPVHPQ

SEQ ID NO: 107400 - protein, 9 aa, Homo Sapiens
LLMPVHPQR

SEQ ID NO: 107401 - protein, 9 aa, Homo Sapiens
LMPVHPQRL

SEQ ID NO: 107402 - protein, 9 aa, Homo Sapiens
MPVHPQRLP

SEQ ID NO: 107403 - protein, 9 aa, Homo Sapiens
PVHPQRLPR

SEQ ID NO: 107404 - protein, 9 aa, Homo Sapiens
LPSEEDSPR

SEQ ID NO: 107405 - protein, 9 aa, Homo Sapiens
LPGEEDLPG

SEQ ID NO: 107406 - protein, 9 aa, Homo Sapiens
LPGEEDLPE

SEQ ID NO: 107407 - protein, 9 aa, Homo Sapiens
KSEEEGSLK

SEQ ID NO: 107408 - protein, 9 aa, Homo Sapiens
SEEEGSLKL

SEQ ID NO: 107409 - protein, 9 aa, Homo Sapiens
LKLEDLPTV

SEQ ID NO: 107410 - protein, 9 aa, Homo Sapiens
GGDPPWPRV

SEQ ID NO: 107411 - protein, 9 aa, Homo Sapiens
PPWPRVSPA

SEQ ID NO: 107412 - protein, 9 aa, Homo Sapiens
WPRVSPACA

SEQ ID NO: 107413 - protein, 9 aa, Homo Sapiens
RVSPACAGR

SEQ ID NO: 107414 - protein, 9 aa, Homo Sapiens
CAGRFQSPV

SEQ ID NO: 107415 - protein, 9 aa, Homo Sapiens
RFQSPVDIR

SEQ ID NO: 107416 - protein, 9 aa, Homo Sapiens
FQSPVDIRP

SEQ ID NO: 107417 - protein, 9 aa, Homo Sapiens
SPVDIRPQL

SEQ ID NO: 107418 - protein, 9 aa, Homo Sapiens
DIRPQLAAF

SEQ ID NO: 107419 - protein, 9 aa, Homo Sapiens
PQLAAFCPA

SEQ ID NO: 107420 - protein, 9 aa, Homo Sapiens
QLAAFCPAL

SEQ ID NO: 107421 - protein, 9 aa, Homo Sapiens
LAAFCPALR

SEQ ID NO: 107422 - protein, 9 aa, Homo Sapiens
CPALRPLEL

SEQ ID NO: 107423 - protein, 9 aa, Homo Sapiens
PLELLGFQL

SEQ ID NO: 107424 - protein, 9 aa, Homo Sapiens
ELLGFQLPP

SEQ ID NO: 107425 - protein, 9 aa, Homo Sapiens
LLGFQLPPL

SEQ ID NO: 107426 - protein, 9 aa, Homo Sapiens
FQLPPLPEL

SEQ ID NO: 107427 - protein, 9 aa, Homo Sapiens
LPPLPELRL

SEQ ID NO: 107428 - protein, 9 aa, Homo Sapiens
RLRNNGHSV

SEQ ID NO: 107429 - protein, 9 aa, Homo Sapiens
VQLTLPPGL

SEQ ID NO: 107430 - protein, 9 aa, Homo Sapiens
LTLPPGLEM

SEQ ID NO: 107431 - protein, 9 aa, Homo Sapiens
TLPPGLEMA

SEQ ID NO: 107432 - protein, 9 aa, Homo Sapiens
LPPGLEMAL

SEQ ID NO: 107433 - protein, 9 aa, Homo Sapiens
MALGPGREY

SEQ ID NO: 107434 - protein, 9 aa, Homo Sapiens
ALGPGREYR

SEQ ID NO: 107435 - protein, 9 aa, Homo Sapiens
GPGREYRAL

SEQ ID NO: 107436 - protein, 9 aa, Homo Sapiens
EYRALQLHL

SEQ ID NO: 107437 - protein, 9 aa, Homo Sapiens
RALQLHLHW

SEQ ID NO: 107438 - protein, 9 aa, Homo Sapiens
LQLHLHWGA

SEQ ID NO: 107439 - protein, 9 aa, Homo Sapiens
QLHLHWGAA

SEQ ID NO: 107440 - protein, 9 aa, Homo Sapiens
HLHWGAAGR

SEQ ID NO: 107441 - protein, 9 aa, Homo Sapiens
GRPGSEHTV

SEQ ID NO: 107442 - protein, 9 aa, Homo Sapiens
TVEGHRFPA

SEQ ID NO: 107443 - protein, 9 aa, Homo Sapiens
EGHRFPAEI

SEQ ID NO: 107444 - protein, 9 aa, Homo Sapiens
HRFPAEIHV

SEQ ID NO: 107445 - protein, 9 aa, Homo Sapiens
RFPAEIHVV

SEQ ID NO: 107446 - protein, 9 aa, Homo Sapiens
FPAEIHVVH

SEQ ID NO: 107447 - protein, 9 aa, Homo Sapiens
AEIHVVHLS

SEQ ID NO: 107448 - protein, 9 aa, Homo Sapiens
HVVHLSTAF

SEQ ID NO: 107449 - protein, 9 aa, Homo Sapiens
VVHLSTAFA

SEQ ID NO: 107450 - protein, 9 aa, Homo Sapiens
HLSTAFARV

SEQ ID NO: 107451 - protein, 9 aa, Homo Sapiens
TAFARVDEA

SEQ ID NO: 107452 - protein, 9 aa, Homo Sapiens
EALGRPGGL

SEQ ID NO: 107453 - protein, 9 aa, Homo Sapiens
ALGRPGGLA

SEQ ID NO: 107454 - protein, 9 aa, Homo Sapiens
LGRPGGLAV

SEQ ID NO: 107455 - protein, 9 aa, Homo Sapiens
RPGGLAVLA

SEQ ID NO: 107456 - protein, 9 aa, Homo Sapiens
GLAVLAAFL

SEQ ID NO: 107457 - protein, 9 aa, Homo Sapiens
VLAAFLEEG

SEQ ID NO: 107458 - protein, 9 aa, Homo Sapiens
FLEEGPEEN

SEQ ID NO: 107459 - protein, 9 aa, Homo Sapiens
EEGPEENSA

SEQ ID NO: 107460 - protein, 9 aa, Homo Sapiens
EGPEENSAY

SEQ ID NO: 107461 - protein, 9 aa, Homo Sapiens
EENSAYEQL

SEQ ID NO: 107462 - protein, 9 aa, Homo Sapiens
SAYEQLLSR

SEQ ID NO: 107463 - protein, 9 aa, Homo Sapiens
AYEQLLSRL

SEQ ID NO: 107464 - protein, 9 aa, Homo Sapiens
QLLSRLEEI

SEQ ID NO: 107465 - protein, 9 aa, Homo Sapiens
LLSRLEEIA

SEQ ID NO: 107466 - protein, 9 aa, Homo Sapiens
EEIAEEGSE

SEQ ID NO: 107467 - protein, 9 aa, Homo Sapiens
AEEGSETQV

SEQ ID NO: 107468 - protein, 9 aa, Homo Sapiens
TQVPGLDIS

SEQ ID NO: 107469 - protein, 9 aa, Homo Sapiens
QVPGLDISA

SEQ ID NO: 107470 - protein, 9 aa, Homo Sapiens
VPGLDISAL

SEQ ID NO: 107471 - protein, 9 aa, Homo Sapiens
ISALLPSDF

SEQ ID NO: 107472 - protein, 9 aa, Homo Sapiens
ALLPSDFSR

SEQ ID NO: 107473 - protein, 9 aa, Homo Sapiens
LLPSDFSRY

SEQ ID NO: 107474 - protein, 9 aa, Homo Sapiens
LPSDFSRYF

SEQ ID NO: 107475 - protein, 9 aa, Homo Sapiens
SDFSRYFQY

SEQ ID NO: 107476 - protein, 9 aa, Homo Sapiens
RYFQYEGSL

SEQ ID NO: 107477 - protein, 9 aa, Homo Sapiens
FQYEGSLTT

SEQ ID NO: 107478 - protein, 9 aa, Homo Sapiens
SLTTPPCAQ

SEQ ID NO: 107479 - protein, 9 aa, Homo Sapiens
TTPPCAQGV

SEQ ID NO: 107480 - protein, 9 aa, Homo Sapiens
TPPCAQGVI

SEQ ID NO: 107481 - protein, 9 aa, Homo Sapiens
PPCAQGVIW

SEQ ID NO: 107482 - protein, 9 aa, Homo Sapiens
CAQGVIWTV

SEQ ID NO: 107483 - protein, 9 aa, Homo Sapiens
AQGVIWTVF

SEQ ID NO: 107484 - protein, 9 aa, Homo Sapiens
GVIWTVFNQ

SEQ ID NO: 107485 - protein, 9 aa, Homo Sapiens
WTVFNQTVM

SEQ ID NO: 107486 - protein, 9 aa, Homo Sapiens
TVFNQTVML

SEQ ID NO: 107487 - protein, 9 aa, Homo Sapiens
NQTVMLSAK

SEQ ID NO: 107488 - protein, 9 aa, Homo Sapiens
MLSAKQLHT

SEQ ID NO: 107489 - protein, 9 aa, Homo Sapiens
LSAKQLHTL

SEQ ID NO: 107490 - protein, 9 aa, Homo Sapiens
KQLHTLSDT

SEQ ID NO: 107491 - protein, 9 aa, Homo Sapiens
QLHTLSDTL

SEQ ID NO: 107492 - protein, 9 aa, Homo Sapiens
TLSDTLWGP

SEQ ID NO: 107493 - protein, 9 aa, Homo Sapiens
GPGDSRLQL

SEQ ID NO: 107494 - protein, 9 aa, Homo Sapiens
DSRLQLNFR

SEQ ID NO: 107495 - protein, 9 aa, Homo Sapiens
RATQPLNGR

SEQ ID NO: 107496 - protein, 9 aa, Homo Sapiens
ATQPLNGRV

SEQ ID NO: 107497 - protein, 9 aa, Homo Sapiens
PLNGRVIEA

SEQ ID NO: 107498 - protein, 9 aa, Homo Sapiens
RVIEASFPA

SEQ ID NO: 107499 - protein, 9 aa, Homo Sapiens
IEASFPAGV

SEQ ID NO: 107500 - protein, 9 aa, Homo Sapiens
FPAGVDSSP

SEQ ID NO: 107501 - protein, 9 aa, Homo Sapiens
SSPRAAEPV

SEQ ID NO: 107502 - protein, 9 aa, Homo Sapiens
EPVQLNSCL

SEQ ID NO: 107503 - protein, 9 aa, Homo Sapiens
VQLNSCLAA

SEQ ID NO: 107504 - protein, 9 aa, Homo Sapiens
CLAAGDILA

SEQ ID NO: 107505 - protein, 9 aa, Homo Sapiens
LAAGDILAL

SEQ ID NO: 107506 - protein, 9 aa, Homo Sapiens
AAGDILALV

SEQ ID NO: 107507 - protein, 9 aa, Homo Sapiens
DILALVFGL

SEQ ID NO: 107508 - protein, 9 aa, Homo Sapiens
ILALVFGLL

SEQ ID NO: 107509 - protein, 9 aa, Homo Sapiens
LALVFGLLF

SEQ ID NO: 107510 - protein, 9 aa, Homo Sapiens
ALVFGLLFA

SEQ ID NO: 107511 - protein, 9 aa, Homo Sapiens
LVFGLLFAV

SEQ ID NO: 107512 - protein, 9 aa, Homo Sapiens
GLLFAVTSV

SEQ ID NO: 107513 - protein, 9 aa, Homo Sapiens
LLFAVTSVA

SEQ ID NO: 107514 - protein, 9 aa, Homo Sapiens
LFAVTSVAF

SEQ ID NO: 107515 - protein, 9 aa, Homo Sapiens
FAVTSVAFL

SEQ ID NO: 107516 - protein, 9 aa, Homo Sapiens
AVTSVAFLV

SEQ ID NO: 107517 - protein, 9 aa, Homo Sapiens
SVAFLVQMR

SEQ ID NO: 107518 - protein, 9 aa, Homo Sapiens
VAFLVQMRR

SEQ ID NO: 107519 - protein, 9 aa, Homo Sapiens
LVQMRRQHR

SEQ ID NO: 107520 - protein, 9 aa, Homo Sapiens
VQMRRQHRR

SEQ ID NO: 107521 - protein, 9 aa, Homo Sapiens
RRQHRRGTK

SEQ ID NO: 107522 - protein, 9 aa, Homo Sapiens
RGTKGGVSY

SEQ ID NO: 107523 - protein, 9 aa, Homo Sapiens
GTKGGVSYR

SEQ ID NO: 107524 - protein, 9 aa, Homo Sapiens
GVSYRPAEV

SEQ ID NO: 107525 - protein, 10 aa, Homo Sapiens
MAPLCPSPWL

SEQ ID NO: 107526 - protein, 10 aa, Homo Sapiens
PLCPSPWLPL

SEQ ID NO: 107527 - protein, 10 aa, Homo Sapiens
CPSPWLPLLI

SEQ ID NO: 107528 - protein, 10 aa, Homo Sapiens
SPWLPLLIPA

SEQ ID NO: 107529 - protein, 10 aa, Homo Sapiens
WLPLLIPAPA

SEQ ID NO: 107530 - protein, 10 aa, Homo Sapiens
LPLLIPAPAP

SEQ ID NO: 107531 - protein, 10 aa, Homo Sapiens
LLIPAPAPGL

SEQ ID NO: 107532 - protein, 10 aa, Homo Sapiens
IPAPAPGLTV

SEQ ID NO: 107533 - protein, 10 aa, Homo Sapiens
APAPGLTVQL

SEQ ID NO: 107534 - protein, 10 aa, Homo Sapiens
APGLTVQLLL

SEQ ID NO: 107535 - protein, 10 aa, Homo Sapiens
GLTVQLLLSL

SEQ ID NO: 107536 - protein, 10 aa, Homo Sapiens
LTVQLLLSLL

SEQ ID NO: 107537 - protein, 10 aa, Homo Sapiens
VQLLLSLLLL

SEQ ID NO: 107538 - protein, 10 aa, Homo Sapiens
QLLLSLLLLM

SEQ ID NO: 107539 - protein, 10 aa, Homo Sapiens
LLLSLLLLMP

SEQ ID NO: 107540 - protein, 10 aa, Homo Sapiens
LLSLLLLMPV

SEQ ID NO: 107541 - protein, 10 aa, Homo Sapiens
LLLLMPVHPQ

SEQ ID NO: 107542 - protein, 10 aa, Homo Sapiens
LLLMPVHPQR

SEQ ID NO: 107543 - protein, 10 aa, Homo Sapiens
LLMPVHPQRL

SEQ ID NO: 107544 - protein, 10 aa, Homo Sapiens
MPVHPQRLPR

SEQ ID NO: 107545 - protein, 10 aa, Homo Sapiens
PVHPQRLPRM

SEQ ID NO: 107546 - protein, 10 aa, Homo Sapiens
LPRMQEDSPL

SEQ ID NO: 107547 - protein, 10 aa, Homo Sapiens
DPLGEEDLPS

SEQ ID NO: 107548 - protein, 10 aa, Homo Sapiens
EEDPPGEEDL

SEQ ID NO: 107549 - protein, 10 aa, Homo Sapiens
EEDLPGEEDL

SEQ ID NO: 107550 - protein, 10 aa, Homo Sapiens
EEDLPGEEDL

SEQ ID NO: 107551 - protein, 10 aa, Homo Sapiens
LPGEEDLPEV

SEQ ID NO: 107552 - protein, 10 aa, Homo Sapiens
KPKSEEEGSL

SEQ ID NO: 107553 - protein, 10 aa, Homo Sapiens
SLKLEDLPTV

SEQ ID NO: 107554 - protein, 10 aa, Homo Sapiens
KLEDLPTVEA

SEQ ID NO: 107555 - protein, 10 aa, Homo Sapiens
DPQEPQNNAH

SEQ ID NO: 107556 - protein, 10 aa, Homo Sapiens
EGDDQSHWRY

SEQ ID NO: 107557 - protein, 10 aa, Homo Sapiens
RYGGDPPWPR

SEQ ID NO: 107558 - protein, 10 aa, Homo Sapiens
YGGDPPWPRV

SEQ ID NO: 107559 - protein, 10 aa, Homo Sapiens
DPPWPRVSPA

SEQ ID NO: 107560 - protein, 10 aa, Homo Sapiens
WPRVSPACAG

SEQ ID NO: 107561 - protein, 10 aa, Homo Sapiens
RVSPACAGRF

SEQ ID NO: 107562 - protein, 10 aa, Homo Sapiens
ACAGRFQSPV

SEQ ID NO: 107563 - protein, 10 aa, Homo Sapiens
FQSPVDIRPQ

SEQ ID NO: 107564 - protein, 10 aa, Homo Sapiens
SPVDIRPQLA

SEQ ID NO: 107565 - protein, 10 aa, Homo Sapiens
RPQLAAFCPA

SEQ ID NO: 107566 - protein, 10 aa, Homo Sapiens
PQLAAFCPAL

SEQ ID NO: 107567 - protein, 10 aa, Homo Sapiens
QLAAFCPALR

SEQ ID NO: 107568 - protein, 10 aa, Homo Sapiens
AAFCPALRPL

SEQ ID NO: 107569 - protein, 10 aa, Homo Sapiens
CPALRPLELL

SEQ ID NO: 107570 - protein, 10 aa, Homo Sapiens
ALRPLELLGF

SEQ ID NO: 107571 - protein, 10 aa, Homo Sapiens
RPLELLGFQL

SEQ ID NO: 107572 - protein, 10 aa, Homo Sapiens
ELLGFQLPPL

SEQ ID NO: 107573 - protein, 10 aa, Homo Sapiens
GFQLPPLPEL

SEQ ID NO: 107574 - protein, 10 aa, Homo Sapiens
QLPPLPELRL

SEQ ID NO: 107575 - protein, 10 aa, Homo Sapiens
LTLPPGLEMA

SEQ ID NO: 107576 - protein, 10 aa, Homo Sapiens
TLPPGLEMAL

SEQ ID NO: 107577 - protein, 10 aa, Homo Sapiens
EMALGPGREY

SEQ ID NO: 107578 - protein, 10 aa, Homo Sapiens
MALGPGREYR

SEQ ID NO: 107579 - protein, 10 aa, Homo Sapiens
ALGPGREYRA

SEQ ID NO: 107580 - protein, 10 aa, Homo Sapiens
REYRALQLHL

SEQ ID NO: 107581 - protein, 10 aa, Homo Sapiens
ALQLHLHWGA

SEQ ID NO: 107582 - protein, 10 aa, Homo Sapiens
LQLHLHWGAA

SEQ ID NO: 107583 - protein, 10 aa, Homo Sapiens
AGRPGSEHTV

SEQ ID NO: 107584 - protein, 10 aa, Homo Sapiens
SEHTVEGHRF

SEQ ID NO: 107585 - protein, 10 aa, Homo Sapiens
HTVEGHRFPA

SEQ ID NO: 107586 - protein, 10 aa, Homo Sapiens
HRFPAEIHVV

SEQ ID NO: 107587 - protein, 10 aa, Homo Sapiens
FPAEIHVVHL

SEQ ID NO: 107588 - protein, 10 aa, Homo Sapiens
AEIHVVHLST

SEQ ID NO: 107589 - protein, 10 aa, Homo Sapiens
HVVHLSTAFA

SEQ ID NO: 107590 - protein, 10 aa, Homo Sapiens
VVHLSTAFAR

SEQ ID NO: 107591 - protein, 10 aa, Homo Sapiens
STAFARVDEA

SEQ ID NO: 107592 - protein, 10 aa, Homo Sapiens
TAFARVDEAL

SEQ ID NO: 107593 - protein, 10 aa, Homo Sapiens
FARVDEALGR

SEQ ID NO: 107594 - protein, 10 aa, Homo Sapiens
DEALGRPGGL

SEQ ID NO: 107595 - protein, 10 aa, Homo Sapiens
EALGRPGGLA

SEQ ID NO: 107596 - protein, 10 aa, Homo Sapiens
ALGRPGGLAV

SEQ ID NO: 107597 - protein, 10 aa, Homo Sapiens
RPGGLAVLAA

SEQ ID NO: 107598 - protein, 10 aa, Homo Sapiens
FLEEGPEENS

SEQ ID NO: 107599 - protein, 10 aa, Homo Sapiens
EEGPEENSAY

SEQ ID NO: 107600 - protein, 10 aa, Homo Sapiens
PEENSAYEQL

SEQ ID NO: 107601 - protein, 10 aa, Homo Sapiens
EENSAYEQLL

SEQ ID NO: 107602 - protein, 10 aa, Homo Sapiens
NSAYEQLLSR

SEQ ID NO: 107603 - protein, 10 aa, Homo Sapiens
SAYEQLLSRL

SEQ ID NO: 107604 - protein, 10 aa, Homo Sapiens
QLLSRLEEIA

SEQ ID NO: 107605 - protein, 10 aa, Homo Sapiens
EEIAEEGSET

SEQ ID NO: 107606 - protein, 10 aa, Homo Sapiens
IAEEGSETQV

SEQ ID NO: 107607 - protein, 10 aa, Homo Sapiens
TQVPGLDISA

SEQ ID NO: 107608 - protein, 10 aa, Homo Sapiens
QVPGLDISAL

SEQ ID NO: 107609 - protein, 10 aa, Homo Sapiens
VPGLDISALL

SEQ ID NO: 107610 - protein, 10 aa, Homo Sapiens
DISALLPSDF

SEQ ID NO: 107611 - protein, 10 aa, Homo Sapiens
SALLPSDFSR

SEQ ID NO: 107612 - protein, 10 aa, Homo Sapiens
ALLPSDFSRY

SEQ ID NO: 107613 - protein, 10 aa, Homo Sapiens
LLPSDFSRYF

SEQ ID NO: 107614 - protein, 10 aa, Homo Sapiens
SRYFQYEGSL

SEQ ID NO: 107615 - protein, 10 aa, Homo Sapiens
FQYEGSLTTP

SEQ ID NO: 107616 - protein, 10 aa, Homo Sapiens
LTTPPCAQGV

SEQ ID NO: 107617 - protein, 10 aa, Homo Sapiens
TTPPCAQGVI

SEQ ID NO: 107618 - protein, 10 aa, Homo Sapiens
TPPCAQGVIW

SEQ ID NO: 107619 - protein, 10 aa, Homo Sapiens
PCAQGVIWTV

SEQ ID NO: 107620 - protein, 10 aa, Homo Sapiens
CAQGVIWTVF

SEQ ID NO: 107621 - protein, 10 aa, Homo Sapiens
VIWTVFNQTV

SEQ ID NO: 107622 - protein, 10 aa, Homo Sapiens
WTVFNQTVML

SEQ ID NO: 107623 - protein, 10 aa, Homo Sapiens
TVFNQTVMLS

SEQ ID NO: 107624 - protein, 10 aa, Homo Sapiens
VMLSAKQLHT

SEQ ID NO: 107625 - protein, 10 aa, Homo Sapiens
MLSAKQLHTL

SEQ ID NO: 107626 - protein, 10 aa, Homo Sapiens
KQLHTLSDTL

SEQ ID NO: 107627 - protein, 10 aa, Homo Sapiens
DTLWGPGDSR

SEQ ID NO: 107628 - protein, 10 aa, Homo Sapiens
TLWGPGDSRL

SEQ ID NO: 107629 - protein, 10 aa, Homo Sapiens
RLQLNFRATQ

SEQ ID NO: 107630 - protein, 10 aa, Homo Sapiens
QLNFRATQPL

SEQ ID NO: 107631 - protein, 10 aa, Homo Sapiens
RATQPLNGRV

SEQ ID NO: 107632 - protein, 10 aa, Homo Sapiens
VIEASFPAGV

SEQ ID NO: 107633 - protein, 10 aa, Homo Sapiens
FPAGVDSSPR

SEQ ID NO: 107634 - protein, 10 aa, Homo Sapiens
DSSPRAAEPV

SEQ ID NO: 107635 - protein, 10 aa, Homo Sapiens
SPRAAEPVQL

SEQ ID NO: 107636 - protein, 10 aa, Homo Sapiens
AEPVQLNSCL

SEQ ID NO: 107637 - protein, 10 aa, Homo Sapiens
EPVQLNSCLA

SEQ ID NO: 107638 - protein, 10 aa, Homo Sapiens
CLAAGDILAL

SEQ ID NO: 107639 - protein, 10 aa, Homo Sapiens
LAAGDILALV

SEQ ID NO: 107640 - protein, 10 aa, Homo Sapiens
AAGDILALVF

SEQ ID NO: 107641 - protein, 10 aa, Homo Sapiens
DILALVFGLL

SEQ ID NO: 107642 - protein, 10 aa, Homo Sapiens
ILALVFGLLF

SEQ ID NO: 107643 - protein, 10 aa, Homo Sapiens
LALVFGLLFA

SEQ ID NO: 107644 - protein, 10 aa, Homo Sapiens
ALVFGLLFAV

SEQ ID NO: 107645 - protein, 10 aa, Homo Sapiens
LVFGLLFAVT

SEQ ID NO: 107646 - protein, 10 aa, Homo Sapiens
FGLLFAVTSV

SEQ ID NO: 107647 - protein, 10 aa, Homo Sapiens
GLLFAVTSVA

SEQ ID NO: 107648 - protein, 10 aa, Homo Sapiens
LLFAVTSVAF

SEQ ID NO: 107649 - protein, 10 aa, Homo Sapiens
LFAVTSVAFL

SEQ ID NO: 107650 - protein, 10 aa, Homo Sapiens
FAVTSVAFLV

SEQ ID NO: 107651 - protein, 10 aa, Homo Sapiens
VTSVAFLVQM

SEQ ID NO: 107652 - protein, 10 aa, Homo Sapiens
TSVAFLVQMR

SEQ ID NO: 107653 - protein, 10 aa, Homo Sapiens
SVAFLVQMRR

SEQ ID NO: 107654 - protein, 10 aa, Homo Sapiens
FLVQMRRQHR

SEQ ID NO: 107655 - protein, 10 aa, Homo Sapiens
LVQMRRQHRR

SEQ ID NO: 107656 - protein, 10 aa, Homo Sapiens
MRRQHRRGTK

SEQ ID NO: 107657 - protein, 10 aa, Homo Sapiens
RRGTKGGVSY

SEQ ID NO: 107658 - protein, 10 aa, Homo Sapiens
RGTKGGVSYR

SEQ ID NO: 107659 - protein, 10 aa, Homo Sapiens
RPAEVAETGA

SEQ ID NO: 107660 - protein, 11 aa, Homo Sapiens
APLCPSPWLPL

SEQ ID NO: 107661 - protein, 11 aa, Homo Sapiens
PLCPSPWLPLL

SEQ ID NO: 107662 - protein, 11 aa, Homo Sapiens
SPWLPLLIPAP

SEQ ID NO: 107663 - protein, 11 aa, Homo Sapiens
LPLLIPAPAPG

SEQ ID NO: 107664 - protein, 11 aa, Homo Sapiens
PLLIPAPAPGL

SEQ ID NO: 107665 - protein, 11 aa, Homo Sapiens
LLIPAPAPGLT

SEQ ID NO: 107666 - protein, 11 aa, Homo Sapiens
LIPAPAPGLTV

SEQ ID NO: 107667 - protein, 11 aa, Homo Sapiens
APAPGLTVQLL

SEQ ID NO: 107668 - protein, 11 aa, Homo Sapiens
GLTVQLLLSLL

SEQ ID NO: 107669 - protein, 11 aa, Homo Sapiens
LTVQLLLSLLL

SEQ ID NO: 107670 - protein, 11 aa, Homo Sapiens
VQLLLSLLLLM

SEQ ID NO: 107671 - protein, 11 aa, Homo Sapiens
LLLSLLLLMPV

SEQ ID NO: 107672 - protein, 11 aa, Homo Sapiens
SLLLLMPVHPQ

SEQ ID NO: 107673 - protein, 11 aa, Homo Sapiens
LLLLMPVHPQR

SEQ ID NO: 107674 - protein, 11 aa, Homo Sapiens
LLLMPVHPQRL

SEQ ID NO: 107675 - protein, 11 aa, Homo Sapiens
LMPVHPQRLPR

SEQ ID NO: 107676 - protein, 11 aa, Homo Sapiens
MPVHPQRLPRM

SEQ ID NO: 107677 - protein, 11 aa, Homo Sapiens
RLPRMQEDSPL

SEQ ID NO: 107678 - protein, 11 aa, Homo Sapiens
GEDDPLGEEDL

SEQ ID NO: 107679 - protein, 11 aa, Homo Sapiens
REEDPPGEEDL

SEQ ID NO: 107680 - protein, 11 aa, Homo Sapiens
GEEDLPGEEDL

SEQ ID NO: 107681 - protein, 11 aa, Homo Sapiens
GEEDLPGEEDL

SEQ ID NO: 107682 - protein, 11 aa, Homo Sapiens
DLPGEEDLPEV

SEQ ID NO: 107683 - protein, 11 aa, Homo Sapiens
EEEGSLKLEDL

SEQ ID NO: 107684 - protein, 11 aa, Homo Sapiens
DPQEPQNNAHR

SEQ ID NO: 107685 - protein, 11 aa, Homo Sapiens
WRYGGDPPWPR

SEQ ID NO: 107686 - protein, 11 aa, Homo Sapiens
RYGGDPPWPRV

SEQ ID NO: 107687 - protein, 11 aa, Homo Sapiens
PPWPRVSPACA

SEQ ID NO: 107688 - protein, 11 aa, Homo Sapiens
PACAGRFQSPV

SEQ ID NO: 107689 - protein, 11 aa, Homo Sapiens
FQSPVDIRPQL

SEQ ID NO: 107690 - protein, 11 aa, Homo Sapiens
SPVDIRPQLAA

SEQ ID NO: 107691 - protein, 11 aa, Homo Sapiens
PVDIRPQLAAF

SEQ ID NO: 107692 - protein, 11 aa, Homo Sapiens
RPQLAAFCPAL

SEQ ID NO: 107693 - protein, 11 aa, Homo Sapiens
PQLAAFCPALR

SEQ ID NO: 107694 - protein, 11 aa, Homo Sapiens
LAAFCPALRPL

SEQ ID NO: 107695 - protein, 11 aa, Homo Sapiens
AFCPALRPLEL

SEQ ID NO: 107696 - protein, 11 aa, Homo Sapiens
FCPALRPLELL

SEQ ID NO: 107697 - protein, 11 aa, Homo Sapiens
ALRPLELLGFQ

SEQ ID NO: 107698 - protein, 11 aa, Homo Sapiens
LELLGFQLPPL

SEQ ID NO: 107699 - protein, 11 aa, Homo Sapiens
ELLGFQLPPLP

SEQ ID NO: 107700 - protein, 11 aa, Homo Sapiens
GFQLPPLPELR

SEQ ID NO: 107701 - protein, 11 aa, Homo Sapiens
FQLPPLPELRL

SEQ ID NO: 107702 - protein, 11 aa, Homo Sapiens
ELRLRNNGHSV

SEQ ID NO: 107703 - protein, 11 aa, Homo Sapiens
RLRNNGHSVQL

SEQ ID NO: 107704 - protein, 11 aa, Homo Sapiens
VQLTLPPGLEM

SEQ ID NO: 107705 - protein, 11 aa, Homo Sapiens
QLTLPPGLEMA

SEQ ID NO: 107706 - protein, 11 aa, Homo Sapiens
LTLPPGLEMAL

SEQ ID NO: 107707 - protein, 11 aa, Homo Sapiens
TLPPGLEMALG

SEQ ID NO: 107708 - protein, 11 aa, Homo Sapiens
LPPGLEMALGP

SEQ ID NO: 107709 - protein, 11 aa, Homo Sapiens
LEMALGPGREY

SEQ ID NO: 107710 - protein, 11 aa, Homo Sapiens
EMALGPGREYR

SEQ ID NO: 107711 - protein, 11 aa, Homo Sapiens
ALGPGREYRAL

SEQ ID NO: 107712 - protein, 11 aa, Homo Sapiens
GPGREYRALQL

SEQ ID NO: 107713 - protein, 11 aa, Homo Sapiens
EYRALQLHLHW

SEQ ID NO: 107714 - protein, 11 aa, Homo Sapiens
RALQLHLHWGA

SEQ ID NO: 107715 - protein, 11 aa, Homo Sapiens
ALQLHLHWGAA

SEQ ID NO: 107716 - protein, 11 aa, Homo Sapiens
QLHLHWGAAGR

SEQ ID NO: 107717 - protein, 11 aa, Homo Sapiens
AAGRPGSEHTV

SEQ ID NO: 107718 - protein, 11 aa, Homo Sapiens
TVEGHRFPAEI

SEQ ID NO: 107719 - protein, 11 aa, Homo Sapiens
RFPAEIHVVHL

SEQ ID NO: 107720 - protein, 11 aa, Homo Sapiens
FPAEIHVVHLS

SEQ ID NO: 107721 - protein, 11 aa, Homo Sapiens
AEIHVVHLSTA

SEQ ID NO: 107722 - protein, 11 aa, Homo Sapiens
EIHVVHLSTAF

SEQ ID NO: 107723 - protein, 11 aa, Homo Sapiens
HVVHLSTAFAR

SEQ ID NO: 107724 - protein, 11 aa, Homo Sapiens
VVHLSTAFARV

SEQ ID NO: 107725 - protein, 11 aa, Homo Sapiens
STAFARVDEAL

SEQ ID NO: 107726 - protein, 11 aa, Homo Sapiens
EALGRPGGLAV

SEQ ID NO: 107727 - protein, 11 aa, Homo Sapiens
ALGRPGGLAVL

SEQ ID NO: 107728 - protein, 11 aa, Homo Sapiens
RPGGLAVLAAF

SEQ ID NO: 107729 - protein, 11 aa, Homo Sapiens
FLEEGPEENSA

SEQ ID NO: 107730 - protein, 11 aa, Homo Sapiens
LEEGPEENSAY

SEQ ID NO: 107731 - protein, 11 aa, Homo Sapiens
GPEENSAYEQL

SEQ ID NO: 107732 - protein, 11 aa, Homo Sapiens
PEENSAYEQLL

SEQ ID NO: 107733 - protein, 11 aa, Homo Sapiens
EENSAYEQLLS

SEQ ID NO: 107734 - protein, 11 aa, Homo Sapiens
ENSAYEQLLSR

SEQ ID NO: 107735 - protein, 11 aa, Homo Sapiens
NSAYEQLLSRL

SEQ ID NO: 107736 - protein, 11 aa, Homo Sapiens
EEIAEEGSETQ

SEQ ID NO: 107737 - protein, 11 aa, Homo Sapiens
EIAEEGSETQV

SEQ ID NO: 107738 - protein, 11 aa, Homo Sapiens
EEGSETQVPGL

SEQ ID NO: 107739 - protein, 11 aa, Homo Sapiens
ETQVPGLDISA

SEQ ID NO: 107740 - protein, 11 aa, Homo Sapiens
TQVPGLDISAL

SEQ ID NO: 107741 - protein, 11 aa, Homo Sapiens
QVPGLDISALL

SEQ ID NO: 107742 - protein, 11 aa, Homo Sapiens
ISALLPSDFSR

SEQ ID NO: 107743 - protein, 11 aa, Homo Sapiens
SALLPSDFSRY

SEQ ID NO: 107744 - protein, 11 aa, Homo Sapiens
ALLPSDFSRYF

SEQ ID NO: 107745 - protein, 11 aa, Homo Sapiens
LLPSDFSRYFQ

SEQ ID NO: 107746 - protein, 11 aa, Homo Sapiens
LPSDFSRYFQY

SEQ ID NO: 107747 - protein, 11 aa, Homo Sapiens
FQYEGSLTTPP

SEQ ID NO: 107748 - protein, 11 aa, Homo Sapiens
SLTTPPCAQGV

SEQ ID NO: 107749 - protein, 11 aa, Homo Sapiens
LTTPPCAQGVI

SEQ ID NO: 107750 - protein, 11 aa, Homo Sapiens
TTPPCAQGVIW

SEQ ID NO: 107751 - protein, 11 aa, Homo Sapiens
GVIWTVFNQTV

SEQ ID NO: 107752 - protein, 11 aa, Homo Sapiens
VIWTVFNQTVM

SEQ ID NO: 107753 - protein, 11 aa, Homo Sapiens
IWTVFNQTVML

SEQ ID NO: 107754 - protein, 11 aa, Homo Sapiens
TVFNQTVMLSA

SEQ ID NO: 107755 - protein, 11 aa, Homo Sapiens
VFNQTVMLSAK

SEQ ID NO: 107756 - protein, 11 aa, Homo Sapiens
VMLSAKQLHTL

SEQ ID NO: 107757 - protein, 11 aa, Homo Sapiens
MLSAKQLHTLS

SEQ ID NO: 107758 - protein, 11 aa, Homo Sapiens
KQLHTLSDTLW

SEQ ID NO: 107759 - protein, 11 aa, Homo Sapiens
DTLWGPGDSRL

SEQ ID NO: 107760 - protein, 11 aa, Homo Sapiens
TLWGPGDSRLQ

SEQ ID NO: 107761 - protein, 11 aa, Homo Sapiens
LQLNFRATQPL

SEQ ID NO: 107762 - protein, 11 aa, Homo Sapiens
NFRATQPLNGR

SEQ ID NO: 107763 - protein, 11 aa, Homo Sapiens
FRATQPLNGRV

SEQ ID NO: 107764 - protein, 11 aa, Homo Sapiens
RATQPLNGRVI

SEQ ID NO: 107765 - protein, 11 aa, Homo Sapiens
RVIEASFPAGV

SEQ ID NO: 107766 - protein, 11 aa, Homo Sapiens
FPAGVDSSPRA

SEQ ID NO: 107767 - protein, 11 aa, Homo Sapiens
AEPVQLNSCLA

SEQ ID NO: 107768 - protein, 11 aa, Homo Sapiens
EPVQLNSCLAA

SEQ ID NO: 107769 - protein, 11 aa, Homo Sapiens
QLNSCLAAGDI

SEQ ID NO: 107770 - protein, 11 aa, Homo Sapiens
CLAAGDILALV

SEQ ID NO: 107771 - protein, 11 aa, Homo Sapiens
LAAGDILALVF

SEQ ID NO: 107772 - protein, 11 aa, Homo Sapiens
ILALVFGLLFA

SEQ ID NO: 107773 - protein, 11 aa, Homo Sapiens
LALVFGLLFAV

SEQ ID NO: 107774 - protein, 11 aa, Homo Sapiens
ALVFGLLFAVT

SEQ ID NO: 107775 - protein, 11 aa, Homo Sapiens
GLLFAVTSVAF

SEQ ID NO: 107776 - protein, 11 aa, Homo Sapiens
LLFAVTSVAFL

SEQ ID NO: 107777 - protein, 11 aa, Homo Sapiens
LFAVTSVAFLV

SEQ ID NO: 107778 - protein, 11 aa, Homo Sapiens
FAVTSVAFLVQ

SEQ ID NO: 107779 - protein, 11 aa, Homo Sapiens
AVTSVAFLVQM

SEQ ID NO: 107780 - protein, 11 aa, Homo Sapiens
VTSVAFLVQMR

SEQ ID NO: 107781 - protein, 11 aa, Homo Sapiens
TSVAFLVQMRR

SEQ ID NO: 107782 - protein, 11 aa, Homo Sapiens
AFLVQMRRQHR

SEQ ID NO: 107783 - protein, 11 aa, Homo Sapiens
FLVQMRRQHRR

SEQ ID NO: 107784 - protein, 11 aa, Homo Sapiens
QMRRQHRRGTK

SEQ ID NO: 107785 - protein, 11 aa, Homo Sapiens
RQHRRGTKGGV

SEQ ID NO: 107786 - protein, 11 aa, Homo Sapiens
HRRGTKGGVSY

SEQ ID NO: 107787 - protein, 11 aa, Homo Sapiens
RRGTKGGVSYR

SEQ ID NO: 107788 - protein, 11 aa, Homo Sapiens
GTKGGVSYRPA

SEQ ID NO: 107789 - protein, 13 aa, Homo Sapiens
MAPLCPSPWLPLL

SEQ ID NO: 107790 - protein, 13 aa, Homo Sapiens
APLCPSPWLPLLI

SEQ ID NO: 107791 - protein, 13 aa, Homo Sapiens
PLCPSPWLPLLIP

SEQ ID NO: 107792 - protein, 13 aa, Homo Sapiens
LCPSPWLPLLIPA

SEQ ID NO: 107793 - protein, 13 aa, Homo Sapiens
CPSPWLPLLIPAP

SEQ ID NO: 107794 - protein, 13 aa, Homo Sapiens
PSPWLPLLIPAPA

SEQ ID NO: 107795 - protein, 13 aa, Homo Sapiens
SPWLPLLIPAPAP

SEQ ID NO: 107796 - protein, 13 aa, Homo Sapiens
PWLPLLIPAPAPG

SEQ ID NO: 107797 - protein, 13 aa, Homo Sapiens
WLPLLIPAPAPGL

SEQ ID NO: 107798 - protein, 13 aa, Homo Sapiens
LPLLIPAPAPGLT

SEQ ID NO: 107799 - protein, 13 aa, Homo Sapiens
PLLIPAPAPGLTV

SEQ ID NO: 107800 - protein, 13 aa, Homo Sapiens
LLIPAPAPGLTVQ

SEQ ID NO: 107801 - protein, 13 aa, Homo Sapiens
LIPAPAPGLTVQL

SEQ ID NO: 107802 - protein, 13 aa, Homo Sapiens
IPAPAPGLTVQLL

SEQ ID NO: 107803 - protein, 13 aa, Homo Sapiens
PAPAPGLTVQLLL

SEQ ID NO: 107804 - protein, 13 aa, Homo Sapiens
APAPGLTVQLLLS

SEQ ID NO: 107805 - protein, 13 aa, Homo Sapiens
PAPGLTVQLLLSL

SEQ ID NO: 107806 - protein, 13 aa, Homo Sapiens
APGLTVQLLLSLL

SEQ ID NO: 107807 - protein, 13 aa, Homo Sapiens
PGLTVQLLLSLLL

SEQ ID NO: 107808 - protein, 13 aa, Homo Sapiens
GLTVQLLLSLLLL

SEQ ID NO: 107809 - protein, 13 aa, Homo Sapiens
LTVQLLLSLLLLM

SEQ ID NO: 107810 - protein, 13 aa, Homo Sapiens
TVQLLLSLLLLMP

SEQ ID NO: 107811 - protein, 13 aa, Homo Sapiens
VQLLLSLLLLMPV

SEQ ID NO: 107812 - protein, 13 aa, Homo Sapiens
QLLLSLLLLMPVH

SEQ ID NO: 107813 - protein, 13 aa, Homo Sapiens
LLLSLLLLMPVHP

SEQ ID NO: 107814 - protein, 13 aa, Homo Sapiens
LLSLLLLMPVHPQ

SEQ ID NO: 107815 - protein, 13 aa, Homo Sapiens
LSLLLLMPVHPQR

SEQ ID NO: 107816 - protein, 13 aa, Homo Sapiens
SLLLLMPVHPQRL

SEQ ID NO: 107817 - protein, 13 aa, Homo Sapiens
LLLLMPVHPQRLP

SEQ ID NO: 107818 - protein, 13 aa, Homo Sapiens
LLLMPVHPQRLPR

SEQ ID NO: 107819 - protein, 13 aa, Homo Sapiens
LLMPVHPQRLPRM

SEQ ID NO: 107820 - protein, 13 aa, Homo Sapiens
LMPVHPQRLPRMQ

SEQ ID NO: 107821 - protein, 13 aa, Homo Sapiens
MPVHPQRLPRMQE

SEQ ID NO: 107822 - protein, 13 aa, Homo Sapiens
PVHPQRLPRMQED

SEQ ID NO: 107823 - protein, 13 aa, Homo Sapiens
VHPQRLPRMQEDS

SEQ ID NO: 107824 - protein, 13 aa, Homo Sapiens
HPQRLPRMQEDSP

SEQ ID NO: 107825 - protein, 13 aa, Homo Sapiens
PQRLPRMQEDSPL

SEQ ID NO: 107826 - protein, 13 aa, Homo Sapiens
QRLPRMQEDSPLG

SEQ ID NO: 107827 - protein, 13 aa, Homo Sapiens
RLPRMQEDSPLGG

SEQ ID NO: 107828 - protein, 13 aa, Homo Sapiens
LPRMQEDSPLGGG

SEQ ID NO: 107829 - protein, 13 aa, Homo Sapiens
PRMQEDSPLGGGS

SEQ ID NO: 107830 - protein, 13 aa, Homo Sapiens
RMQEDSPLGGGSS

SEQ ID NO: 107831 - protein, 13 aa, Homo Sapiens
MQEDSPLGGGSSG

SEQ ID NO: 107832 - protein, 13 aa, Homo Sapiens
QEDSPLGGGSSGE

SEQ ID NO: 107833 - protein, 13 aa, Homo Sapiens
EDSPLGGGSSGED

SEQ ID NO: 107834 - protein, 13 aa, Homo Sapiens
DSPLGGGSSGEDD

SEQ ID NO: 107835 - protein, 13 aa, Homo Sapiens
SPLGGGSSGEDDP

SEQ ID NO: 107836 - protein, 13 aa, Homo Sapiens
PLGGGSSGEDDPL

SEQ ID NO: 107837 - protein, 13 aa, Homo Sapiens
LGGGSSGEDDPLG

SEQ ID NO: 107838 - protein, 13 aa, Homo Sapiens
GGGSSGEDDPLGE

SEQ ID NO: 107839 - protein, 13 aa, Homo Sapiens
GGSSGEDDPLGEE

SEQ ID NO: 107840 - protein, 13 aa, Homo Sapiens
GSSGEDDPLGEED

SEQ ID NO: 107841 - protein, 13 aa, Homo Sapiens
SSGEDDPLGEEDL

SEQ ID NO: 107842 - protein, 13 aa, Homo Sapiens
SGEDDPLGEEDLP

SEQ ID NO: 107843 - protein, 13 aa, Homo Sapiens
GEDDPLGEEDLPS

SEQ ID NO: 107844 - protein, 13 aa, Homo Sapiens
EDDPLGEEDLPSE

SEQ ID NO: 107845 - protein, 13 aa, Homo Sapiens
DDPLGEEDLPSEE

SEQ ID NO: 107846 - protein, 13 aa, Homo Sapiens
DPLGEEDLPSEED

SEQ ID NO: 107847 - protein, 13 aa, Homo Sapiens
PLGEEDLPSEEDS

SEQ ID NO: 107848 - protein, 13 aa, Homo Sapiens
LGEEDLPSEEDSP

SEQ ID NO: 107849 - protein, 13 aa, Homo Sapiens
GEEDLPSEEDSPR

SEQ ID NO: 107850 - protein, 13 aa, Homo Sapiens
EEDLPSEEDSPRE

SEQ ID NO: 107851 - protein, 13 aa, Homo Sapiens
EDLPSEEDSPREE

SEQ ID NO: 107852 - protein, 13 aa, Homo Sapiens
DLPSEEDSPREED

SEQ ID NO: 107853 - protein, 13 aa, Homo Sapiens
LPSEEDSPREEDP

SEQ ID NO: 107854 - protein, 13 aa, Homo Sapiens
PSEEDSPREEDPP

SEQ ID NO: 107855 - protein, 13 aa, Homo Sapiens
SEEDSPREEDPPG

SEQ ID NO: 107856 - protein, 13 aa, Homo Sapiens
EEDSPREEDPPGE

SEQ ID NO: 107857 - protein, 13 aa, Homo Sapiens
EDSPREEDPPGEE

SEQ ID NO: 107858 - protein, 13 aa, Homo Sapiens
DSPREEDPPGEED

SEQ ID NO: 107859 - protein, 13 aa, Homo Sapiens
SPREEDPPGEEDL

SEQ ID NO: 107860 - protein, 13 aa, Homo Sapiens
PREEDPPGEEDLP

SEQ ID NO: 107861 - protein, 13 aa, Homo Sapiens
REEDPPGEEDLPG

SEQ ID NO: 107862 - protein, 13 aa, Homo Sapiens
EEDPPGEEDLPGE

SEQ ID NO: 107863 - protein, 13 aa, Homo Sapiens
EDPPGEEDLPGEE

SEQ ID NO: 107864 - protein, 13 aa, Homo Sapiens
DPPGEEDLPGEED

SEQ ID NO: 107865 - protein, 13 aa, Homo Sapiens
PPGEEDLPGEEDL

SEQ ID NO: 107866 - protein, 13 aa, Homo Sapiens
PGEEDLPGEEDLP

SEQ ID NO: 107867 - protein, 13 aa, Homo Sapiens
GEEDLPGEEDLPG

SEQ ID NO: 107868 - protein, 13 aa, Homo Sapiens
EEDLPGEEDLPGE

SEQ ID NO: 107869 - protein, 13 aa, Homo Sapiens
EDLPGEEDLPGEE

SEQ ID NO: 107870 - protein, 13 aa, Homo Sapiens
DLPGEEDLPGEED

SEQ ID NO: 107871 - protein, 13 aa, Homo Sapiens
LPGEEDLPGEEDL

SEQ ID NO: 107872 - protein, 13 aa, Homo Sapiens
PGEEDLPGEEDLP

SEQ ID NO: 107873 - protein, 13 aa, Homo Sapiens
GEEDLPGEEDLPE

SEQ ID NO: 107874 - protein, 13 aa, Homo Sapiens
EEDLPGEEDLPEV

SEQ ID NO: 107875 - protein, 13 aa, Homo Sapiens
EDLPGEEDLPEVK

SEQ ID NO: 107876 - protein, 13 aa, Homo Sapiens
DLPGEEDLPEVKP

SEQ ID NO: 107877 - protein, 13 aa, Homo Sapiens
LPGEEDLPEVKPK

SEQ ID NO: 107878 - protein, 13 aa, Homo Sapiens
PGEEDLPEVKPKS

SEQ ID NO: 107879 - protein, 13 aa, Homo Sapiens
GEEDLPEVKPKSE

SEQ ID NO: 107880 - protein, 13 aa, Homo Sapiens
EEDLPEVKPKSEE

SEQ ID NO: 107881 - protein, 13 aa, Homo Sapiens
EDLPEVKPKSEEE

SEQ ID NO: 107882 - protein, 13 aa, Homo Sapiens
DLPEVKPKSEEEG

SEQ ID NO: 107883 - protein, 13 aa, Homo Sapiens
LPEVKPKSEEEGS

SEQ ID NO: 107884 - protein, 13 aa, Homo Sapiens
PEVKPKSEEEGSL

SEQ ID NO: 107885 - protein, 13 aa, Homo Sapiens
EVKPKSEEEGSLK

SEQ ID NO: 107886 - protein, 13 aa, Homo Sapiens
VKPKSEEEGSLKL

SEQ ID NO: 107887 - protein, 13 aa, Homo Sapiens
KPKSEEEGSLKLE

SEQ ID NO: 107888 - protein, 13 aa, Homo Sapiens
PKSEEEGSLKLED

SEQ ID NO: 107889 - protein, 13 aa, Homo Sapiens
KSEEEGSLKLEDL

SEQ ID NO: 107890 - protein, 13 aa, Homo Sapiens
SEEEGSLKLEDLP

SEQ ID NO: 107891 - protein, 13 aa, Homo Sapiens
EEEGSLKLEDLPT

SEQ ID NO: 107892 - protein, 13 aa, Homo Sapiens
EEGSLKLEDLPTV

SEQ ID NO: 107893 - protein, 13 aa, Homo Sapiens
EGSLKLEDLPTVE

SEQ ID NO: 107894 - protein, 13 aa, Homo Sapiens
GSLKLEDLPTVEA

SEQ ID NO: 107895 - protein, 13 aa, Homo Sapiens
SLKLEDLPTVEAP

SEQ ID NO: 107896 - protein, 13 aa, Homo Sapiens
LKLEDLPTVEAPG

SEQ ID NO: 107897 - protein, 13 aa, Homo Sapiens
KLEDLPTVEAPGD

SEQ ID NO: 107898 - protein, 13 aa, Homo Sapiens
LEDLPTVEAPGDP

SEQ ID NO: 107899 - protein, 13 aa, Homo Sapiens
EDLPTVEAPGDPQ

SEQ ID NO: 107900 - protein, 13 aa, Homo Sapiens
DLPTVEAPGDPQE

SEQ ID NO: 107901 - protein, 13 aa, Homo Sapiens
LPTVEAPGDPQEP

SEQ ID NO: 107902 - protein, 13 aa, Homo Sapiens
PTVEAPGDPQEPQ

SEQ ID NO: 107903 - protein, 13 aa, Homo Sapiens
TVEAPGDPQEPQN

SEQ ID NO: 107904 - protein, 13 aa, Homo Sapiens
VEAPGDPQEPQNN

SEQ ID NO: 107905 - protein, 13 aa, Homo Sapiens
EAPGDPQEPQNNA

SEQ ID NO: 107906 - protein, 13 aa, Homo Sapiens
APGDPQEPQNNAH

SEQ ID NO: 107907 - protein, 13 aa, Homo Sapiens
PGDPQEPQNNAHR

SEQ ID NO: 107908 - protein, 13 aa, Homo Sapiens
GDPQEPQNNAHRD

SEQ ID NO: 107909 - protein, 13 aa, Homo Sapiens
DPQEPQNNAHRDK

SEQ ID NO: 107910 - protein, 13 aa, Homo Sapiens
PQEPQNNAHRDKE

SEQ ID NO: 107911 - protein, 13 aa, Homo Sapiens
QEPQNNAHRDKEG

SEQ ID NO: 107912 - protein, 13 aa, Homo Sapiens
EPQNNAHRDKEGD

SEQ ID NO: 107913 - protein, 13 aa, Homo Sapiens
PQNNAHRDKEGDD

SEQ ID NO: 107914 - protein, 13 aa, Homo Sapiens
QNNAHRDKEGDDQ

SEQ ID NO: 107915 - protein, 13 aa, Homo Sapiens
NNAHRDKEGDDQS

SEQ ID NO: 107916 - protein, 13 aa, Homo Sapiens
NAHRDKEGDDQSH

SEQ ID NO: 107917 - protein, 13 aa, Homo Sapiens
AHRDKEGDDQSHW

SEQ ID NO: 107918 - protein, 13 aa, Homo Sapiens
HRDKEGDDQSHWR

SEQ ID NO: 107919 - protein, 13 aa, Homo Sapiens
RDKEGDDQSHWRY

SEQ ID NO: 107920 - protein, 13 aa, Homo Sapiens
DKEGDDQSHWRYG

SEQ ID NO: 107921 - protein, 13 aa, Homo Sapiens
KEGDDQSHWRYGG

SEQ ID NO: 107922 - protein, 13 aa, Homo Sapiens
EGDDQSHWRYGGD

SEQ ID NO: 107923 - protein, 13 aa, Homo Sapiens
GDDQSHWRYGGDP

SEQ ID NO: 107924 - protein, 13 aa, Homo Sapiens
DDQSHWRYGGDPP

SEQ ID NO: 107925 - protein, 13 aa, Homo Sapiens
DQSHWRYGGDPPW

SEQ ID NO: 107926 - protein, 13 aa, Homo Sapiens
QSHWRYGGDPPWP

SEQ ID NO: 107927 - protein, 13 aa, Homo Sapiens
SHWRYGGDPPWPR

SEQ ID NO: 107928 - protein, 13 aa, Homo Sapiens
HWRYGGDPPWPRV

SEQ ID NO: 107929 - protein, 13 aa, Homo Sapiens
WRYGGDPPWPRVS

SEQ ID NO: 107930 - protein, 13 aa, Homo Sapiens
RYGGDPPWPRVSP

SEQ ID NO: 107931 - protein, 13 aa, Homo Sapiens
YGGDPPWPRVSPA

SEQ ID NO: 107932 - protein, 13 aa, Homo Sapiens
GGDPPWPRVSPAC

SEQ ID NO: 107933 - protein, 13 aa, Homo Sapiens
GDPPWPRVSPACA

SEQ ID NO: 107934 - protein, 13 aa, Homo Sapiens
DPPWPRVSPACAG

SEQ ID NO: 107935 - protein, 13 aa, Homo Sapiens
PPWPRVSPACAGR

SEQ ID NO: 107936 - protein, 13 aa, Homo Sapiens
PWPRVSPACAGRF

SEQ ID NO: 107937 - protein, 13 aa, Homo Sapiens
WPRVSPACAGRFQ

SEQ ID NO: 107938 - protein, 13 aa, Homo Sapiens
PRVSPACAGRFQS

SEQ ID NO: 107939 - protein, 13 aa, Homo Sapiens
RVSPACAGRFQSP

SEQ ID NO: 107940 - protein, 13 aa, Homo Sapiens
VSPACAGRFQSPV

SEQ ID NO: 107941 - protein, 13 aa, Homo Sapiens
SPACAGRFQSPVD

SEQ ID NO: 107942 - protein, 13 aa, Homo Sapiens
PACAGRFQSPVDI

SEQ ID NO: 107943 - protein, 13 aa, Homo Sapiens
ACAGRFQSPVDIR

SEQ ID NO: 107944 - protein, 13 aa, Homo Sapiens
CAGRFQSPVDIRP

SEQ ID NO: 107945 - protein, 13 aa, Homo Sapiens
AGRFQSPVDIRPQ

SEQ ID NO: 107946 - protein, 13 aa, Homo Sapiens
GRFQSPVDIRPQL

SEQ ID NO: 107947 - protein, 13 aa, Homo Sapiens
RFQSPVDIRPQLA

SEQ ID NO: 107948 - protein, 13 aa, Homo Sapiens
FQSPVDIRPQLAA

SEQ ID NO: 107949 - protein, 13 aa, Homo Sapiens
QSPVDIRPQLAAF

SEQ ID NO: 107950 - protein, 13 aa, Homo Sapiens
SPVDIRPQLAAFC

SEQ ID NO: 107951 - protein, 13 aa, Homo Sapiens
PVDIRPQLAAFCP

SEQ ID NO: 107952 - protein, 13 aa, Homo Sapiens
VDIRPQLAAFCPA

SEQ ID NO: 107953 - protein, 13 aa, Homo Sapiens
DIRPQLAAFCPAL

SEQ ID NO: 107954 - protein, 13 aa, Homo Sapiens
IRPQLAAFCPALR

SEQ ID NO: 107955 - protein, 13 aa, Homo Sapiens
RPQLAAFCPALRP

SEQ ID NO: 107956 - protein, 13 aa, Homo Sapiens
PQLAAFCPALRPL

SEQ ID NO: 107957 - protein, 13 aa, Homo Sapiens
QLAAFCPALRPLE

SEQ ID NO: 107958 - protein, 13 aa, Homo Sapiens
LAAFCPALRPLEL

SEQ ID NO: 107959 - protein, 13 aa, Homo Sapiens
AAFCPALRPLELL

SEQ ID NO: 107960 - protein, 13 aa, Homo Sapiens
AFCPALRPLELLG

SEQ ID NO: 107961 - protein, 13 aa, Homo Sapiens
FCPALRPLELLGF

SEQ ID NO: 107962 - protein, 13 aa, Homo Sapiens
CPALRPLELLGFQ

SEQ ID NO: 107963 - protein, 13 aa, Homo Sapiens
PALRPLELLGFQL

SEQ ID NO: 107964 - protein, 13 aa, Homo Sapiens
ALRPLELLGFQLP

SEQ ID NO: 107965 - protein, 13 aa, Homo Sapiens
LRPLELLGFQLPP

SEQ ID NO: 107966 - protein, 13 aa, Homo Sapiens
RPLELLGFQLPPL

SEQ ID NO: 107967 - protein, 13 aa, Homo Sapiens
PLELLGFQLPPLP

SEQ ID NO: 107968 - protein, 13 aa, Homo Sapiens
LELLGFQLPPLPE

SEQ ID NO: 107969 - protein, 13 aa, Homo Sapiens
ELLGFQLPPLPEL

SEQ ID NO: 107970 - protein, 13 aa, Homo Sapiens
LLGFQLPPLPELR

SEQ ID NO: 107971 - protein, 13 aa, Homo Sapiens
LGFQLPPLPELRL

SEQ ID NO: 107972 - protein, 13 aa, Homo Sapiens
GFQLPPLPELRLR

SEQ ID NO: 107973 - protein, 13 aa, Homo Sapiens
FQLPPLPELRLRN

SEQ ID NO: 107974 - protein, 13 aa, Homo Sapiens
QLPPLPELRLRNN

SEQ ID NO: 107975 - protein, 13 aa, Homo Sapiens
LPPLPELRLRNNG

SEQ ID NO: 107976 - protein, 13 aa, Homo Sapiens
PPLPELRLRNNGH

SEQ ID NO: 107977 - protein, 13 aa, Homo Sapiens
PLPELRLRNNGHS

SEQ ID NO: 107978 - protein, 13 aa, Homo Sapiens
LPELRLRNNGHSV

SEQ ID NO: 107979 - protein, 13 aa, Homo Sapiens
PELRLRNNGHSVQ

SEQ ID NO: 107980 - protein, 13 aa, Homo Sapiens
ELRLRNNGHSVQL

SEQ ID NO: 107981 - protein, 13 aa, Homo Sapiens
LRLRNNGHSVQLT

SEQ ID NO: 107982 - protein, 13 aa, Homo Sapiens
RLRNNGHSVQLTL

SEQ ID NO: 107983 - protein, 13 aa, Homo Sapiens
LRNNGHSVQLTLP

SEQ ID NO: 107984 - protein, 13 aa, Homo Sapiens
RNNGHSVQLTLPP

SEQ ID NO: 107985 - protein, 13 aa, Homo Sapiens
NNGHSVQLTLPPG

SEQ ID NO: 107986 - protein, 13 aa, Homo Sapiens
NGHSVQLTLPPGL

SEQ ID NO: 107987 - protein, 13 aa, Homo Sapiens
GHSVQLTLPPGLE

SEQ ID NO: 107988 - protein, 13 aa, Homo Sapiens
HSVQLTLPPGLEM

SEQ ID NO: 107989 - protein, 13 aa, Homo Sapiens
SVQLTLPPGLEMA

SEQ ID NO: 107990 - protein, 13 aa, Homo Sapiens
VQLTLPPGLEMAL

SEQ ID NO: 107991 - protein, 13 aa, Homo Sapiens
QLTLPPGLEMALG

SEQ ID NO: 107992 - protein, 13 aa, Homo Sapiens
LTLPPGLEMALGP

SEQ ID NO: 107993 - protein, 13 aa, Homo Sapiens
TLPPGLEMALGPG

SEQ ID NO: 107994 - protein, 13 aa, Homo Sapiens
LPPGLEMALGPGR

SEQ ID NO: 107995 - protein, 13 aa, Homo Sapiens
PPGLEMALGPGRE

SEQ ID NO: 107996 - protein, 13 aa, Homo Sapiens
PGLEMALGPGREY

SEQ ID NO: 107997 - protein, 13 aa, Homo Sapiens
GLEMALGPGREYR

SEQ ID NO: 107998 - protein, 13 aa, Homo Sapiens
LEMALGPGREYRA

SEQ ID NO: 107999 - protein, 13 aa, Homo Sapiens
EMALGPGREYRAL

SEQ ID NO: 108000 - protein, 13 aa, Homo Sapiens
MALGPGREYRALQ

SEQ ID NO: 108001 - protein, 13 aa, Homo Sapiens
ALGPGREYRALQL

SEQ ID NO: 108002 - protein, 13 aa, Homo Sapiens
LGPGREYRALQLH

SEQ ID NO: 108003 - protein, 13 aa, Homo Sapiens
GPGREYRALQLHL

SEQ ID NO: 108004 - protein, 13 aa, Homo Sapiens
PGREYRALQLHLH

SEQ ID NO: 108005 - protein, 13 aa, Homo Sapiens
GREYRALQLHLHW

SEQ ID NO: 108006 - protein, 13 aa, Homo Sapiens
REYRALQLHLHWG

SEQ ID NO: 108007 - protein, 13 aa, Homo Sapiens
EYRALQLHLHWGA

SEQ ID NO: 108008 - protein, 13 aa, Homo Sapiens
YRALQLHLHWGAA

SEQ ID NO: 108009 - protein, 13 aa, Homo Sapiens
RALQLHLHWGAAG

SEQ ID NO: 108010 - protein, 13 aa, Homo Sapiens
ALQLHLHWGAAGR

SEQ ID NO: 108011 - protein, 13 aa, Homo Sapiens
LQLHLHWGAAGRP

SEQ ID NO: 108012 - protein, 13 aa, Homo Sapiens
QLHLHWGAAGRPG

SEQ ID NO: 108013 - protein, 13 aa, Homo Sapiens
LHLHWGAAGRPGS

SEQ ID NO: 108014 - protein, 13 aa, Homo Sapiens
HLHWGAAGRPGSE

SEQ ID NO: 108015 - protein, 13 aa, Homo Sapiens
LHWGAAGRPGSEH

SEQ ID NO: 108016 - protein, 13 aa, Homo Sapiens
HWGAAGRPGSEHT

SEQ ID NO: 108017 - protein, 13 aa, Homo Sapiens
WGAAGRPGSEHTV

SEQ ID NO: 108018 - protein, 13 aa, Homo Sapiens
GAAGRPGSEHTVE

SEQ ID NO: 108019 - protein, 13 aa, Homo Sapiens
AAGRPGSEHTVEG

SEQ ID NO: 108020 - protein, 13 aa, Homo Sapiens
AGRPGSEHTVEGH

SEQ ID NO: 108021 - protein, 13 aa, Homo Sapiens
GRPGSEHTVEGHR

SEQ ID NO: 108022 - protein, 13 aa, Homo Sapiens
RPGSEHTVEGHRF

SEQ ID NO: 108023 - protein, 13 aa, Homo Sapiens
PGSEHTVEGHRFP

SEQ ID NO: 108024 - protein, 13 aa, Homo Sapiens
GSEHTVEGHRFPA

SEQ ID NO: 108025 - protein, 13 aa, Homo Sapiens
SEHTVEGHRFPAE

SEQ ID NO: 108026 - protein, 13 aa, Homo Sapiens
EHTVEGHRFPAEI

SEQ ID NO: 108027 - protein, 13 aa, Homo Sapiens
HTVEGHRFPAEIH

SEQ ID NO: 108028 - protein, 13 aa, Homo Sapiens
TVEGHRFPAEIHV

SEQ ID NO: 108029 - protein, 13 aa, Homo Sapiens
VEGHRFPAEIHVV

SEQ ID NO: 108030 - protein, 13 aa, Homo Sapiens
EGHRFPAEIHVVH

SEQ ID NO: 108031 - protein, 13 aa, Homo Sapiens
GHRFPAEIHVVHL

SEQ ID NO: 108032 - protein, 13 aa, Homo Sapiens
HRFPAEIHVVHLS

SEQ ID NO: 108033 - protein, 13 aa, Homo Sapiens
RFPAEIHVVHLST

SEQ ID NO: 108034 - protein, 13 aa, Homo Sapiens
FPAEIHVVHLSTA

SEQ ID NO: 108035 - protein, 13 aa, Homo Sapiens
PAEIHVVHLSTAF

SEQ ID NO: 108036 - protein, 13 aa, Homo Sapiens
AEIHVVHLSTAFA

SEQ ID NO: 108037 - protein, 13 aa, Homo Sapiens
EIHVVHLSTAFAR

SEQ ID NO: 108038 - protein, 13 aa, Homo Sapiens
IHVVHLSTAFARV

SEQ ID NO: 108039 - protein, 13 aa, Homo Sapiens
HVVHLSTAFARVD

SEQ ID NO: 108040 - protein, 13 aa, Homo Sapiens
VVHLSTAFARVDE

SEQ ID NO: 108041 - protein, 13 aa, Homo Sapiens
VHLSTAFARVDEA

SEQ ID NO: 108042 - protein, 13 aa, Homo Sapiens
HLSTAFARVDEAL

SEQ ID NO: 108043 - protein, 13 aa, Homo Sapiens
LSTAFARVDEALG

SEQ ID NO: 108044 - protein, 13 aa, Homo Sapiens
STAFARVDEALGR

SEQ ID NO: 108045 - protein, 13 aa, Homo Sapiens
TAFARVDEALGRP

SEQ ID NO: 108046 - protein, 13 aa, Homo Sapiens
AFARVDEALGRPG

SEQ ID NO: 108047 - protein, 13 aa, Homo Sapiens
FARVDEALGRPGG

SEQ ID NO: 108048 - protein, 13 aa, Homo Sapiens
ARVDEALGRPGGL

SEQ ID NO: 108049 - protein, 13 aa, Homo Sapiens
RVDEALGRPGGLA

SEQ ID NO: 108050 - protein, 13 aa, Homo Sapiens
VDEALGRPGGLAV

SEQ ID NO: 108051 - protein, 13 aa, Homo Sapiens
DEALGRPGGLAVL

SEQ ID NO: 108052 - protein, 13 aa, Homo Sapiens
EALGRPGGLAVLA

SEQ ID NO: 108053 - protein, 13 aa, Homo Sapiens
ALGRPGGLAVLAA

SEQ ID NO: 108054 - protein, 13 aa, Homo Sapiens
LGRPGGLAVLAAF

SEQ ID NO: 108055 - protein, 13 aa, Homo Sapiens
GRPGGLAVLAAFL

SEQ ID NO: 108056 - protein, 13 aa, Homo Sapiens
RPGGLAVLAAFLE

SEQ ID NO: 108057 - protein, 13 aa, Homo Sapiens
PGGLAVLAAFLEE

SEQ ID NO: 108058 - protein, 13 aa, Homo Sapiens
GGLAVLAAFLEEG

SEQ ID NO: 108059 - protein, 13 aa, Homo Sapiens
GLAVLAAFLEEGP

SEQ ID NO: 108060 - protein, 13 aa, Homo Sapiens
LAVLAAFLEEGPE

SEQ ID NO: 108061 - protein, 13 aa, Homo Sapiens
AVLAAFLEEGPEE

SEQ ID NO: 108062 - protein, 13 aa, Homo Sapiens
VLAAFLEEGPEEN

SEQ ID NO: 108063 - protein, 13 aa, Homo Sapiens
LAAFLEEGPEENS

SEQ ID NO: 108064 - protein, 13 aa, Homo Sapiens
AAFLEEGPEENSA

SEQ ID NO: 108065 - protein, 13 aa, Homo Sapiens
AFLEEGPEENSAY

SEQ ID NO: 108066 - protein, 13 aa, Homo Sapiens
FLEEGPEENSAYE

SEQ ID NO: 108067 - protein, 13 aa, Homo Sapiens
LEEGPEENSAYEQ

SEQ ID NO: 108068 - protein, 13 aa, Homo Sapiens
EEGPEENSAYEQL

SEQ ID NO: 108069 - protein, 13 aa, Homo Sapiens
EGPEENSAYEQLL

SEQ ID NO: 108070 - protein, 13 aa, Homo Sapiens
GPEENSAYEQLLS

SEQ ID NO: 108071 - protein, 13 aa, Homo Sapiens
PEENSAYEQLLSR

SEQ ID NO: 108072 - protein, 13 aa, Homo Sapiens
EENSAYEQLLSRL

SEQ ID NO: 108073 - protein, 13 aa, Homo Sapiens
ENSAYEQLLSRLE

SEQ ID NO: 108074 - protein, 13 aa, Homo Sapiens
NSAYEQLLSRLEE

SEQ ID NO: 108075 - protein, 13 aa, Homo Sapiens
SAYEQLLSRLEEI

SEQ ID NO: 108076 - protein, 13 aa, Homo Sapiens
AYEQLLSRLEEIA

SEQ ID NO: 108077 - protein, 13 aa, Homo Sapiens
YEQLLSRLEEIAE

SEQ ID NO: 108078 - protein, 13 aa, Homo Sapiens
EQLLSRLEEIAEE

SEQ ID NO: 108079 - protein, 13 aa, Homo Sapiens
QLLSRLEEIAEEG

SEQ ID NO: 108080 - protein, 13 aa, Homo Sapiens
LLSRLEEIAEEGS

SEQ ID NO: 108081 - protein, 13 aa, Homo Sapiens
LSRLEEIAEEGSE

SEQ ID NO: 108082 - protein, 13 aa, Homo Sapiens
SRLEEIAEEGSET

SEQ ID NO: 108083 - protein, 13 aa, Homo Sapiens
RLEEIAEEGSETQ

SEQ ID NO: 108084 - protein, 13 aa, Homo Sapiens
LEEIAEEGSETQV

SEQ ID NO: 108085 - protein, 13 aa, Homo Sapiens
EEIAEEGSETQVP

SEQ ID NO: 108086 - protein, 13 aa, Homo Sapiens
EIAEEGSETQVPG

SEQ ID NO: 108087 - protein, 13 aa, Homo Sapiens
IAEEGSETQVPGL

SEQ ID NO: 108088 - protein, 13 aa, Homo Sapiens
AEEGSETQVPGLD

SEQ ID NO: 108089 - protein, 13 aa, Homo Sapiens
EEGSETQVPGLDI

SEQ ID NO: 108090 - protein, 13 aa, Homo Sapiens
EGSETQVPGLDIS

SEQ ID NO: 108091 - protein, 13 aa, Homo Sapiens
GSETQVPGLDISA

SEQ ID NO: 108092 - protein, 13 aa, Homo Sapiens
SETQVPGLDISAL

SEQ ID NO: 108093 - protein, 13 aa, Homo Sapiens
ETQVPGLDISALL

SEQ ID NO: 108094 - protein, 13 aa, Homo Sapiens
TQVPGLDISALLP

SEQ ID NO: 108095 - protein, 13 aa, Homo Sapiens
QVPGLDISALLPS

SEQ ID NO: 108096 - protein, 13 aa, Homo Sapiens
VPGLDISALLPSD

SEQ ID NO: 108097 - protein, 13 aa, Homo Sapiens
PGLDISALLPSDF

SEQ ID NO: 108098 - protein, 13 aa, Homo Sapiens
GLDISALLPSDFS

SEQ ID NO: 108099 - protein, 13 aa, Homo Sapiens
LDISALLPSDFSR

SEQ ID NO: 108100 - protein, 13 aa, Homo Sapiens
DISALLPSDFSRY

SEQ ID NO: 108101 - protein, 13 aa, Homo Sapiens
ISALLPSDFSRYF

SEQ ID NO: 108102 - protein, 13 aa, Homo Sapiens
SALLPSDFSRYFQ

SEQ ID NO: 108103 - protein, 13 aa, Homo Sapiens
ALLPSDFSRYFQY

SEQ ID NO: 108104 - protein, 13 aa, Homo Sapiens
LLPSDFSRYFQYE

SEQ ID NO: 108105 - protein, 13 aa, Homo Sapiens
LPSDFSRYFQYEG

SEQ ID NO: 108106 - protein, 13 aa, Homo Sapiens
PSDFSRYFQYEGS

SEQ ID NO: 108107 - protein, 13 aa, Homo Sapiens
SDFSRYFQYEGSL

SEQ ID NO: 108108 - protein, 13 aa, Homo Sapiens
DFSRYFQYEGSLT

SEQ ID NO: 108109 - protein, 13 aa, Homo Sapiens
FSRYFQYEGSLTT

SEQ ID NO: 108110 - protein, 13 aa, Homo Sapiens
SRYFQYEGSLTTP

SEQ ID NO: 108111 - protein, 13 aa, Homo Sapiens
RYFQYEGSLTTPP

SEQ ID NO: 108112 - protein, 13 aa, Homo Sapiens
YFQYEGSLTTPPC

SEQ ID NO: 108113 - protein, 13 aa, Homo Sapiens
FQYEGSLTTPPCA

SEQ ID NO: 108114 - protein, 13 aa, Homo Sapiens
QYEGSLTTPPCAQ

SEQ ID NO: 108115 - protein, 13 aa, Homo Sapiens
YEGSLTTPPCAQG

SEQ ID NO: 108116 - protein, 13 aa, Homo Sapiens
EGSLTTPPCAQGV

SEQ ID NO: 108117 - protein, 13 aa, Homo Sapiens
GSLTTPPCAQGVI

SEQ ID NO: 108118 - protein, 13 aa, Homo Sapiens
SLTTPPCAQGVIW

SEQ ID NO: 108119 - protein, 13 aa, Homo Sapiens
LTTPPCAQGVIWT

SEQ ID NO: 108120 - protein, 13 aa, Homo Sapiens
TTPPCAQGVIWTV

SEQ ID NO: 108121 - protein, 13 aa, Homo Sapiens
TPPCAQGVIWTVF

SEQ ID NO: 108122 - protein, 13 aa, Homo Sapiens
PPCAQGVIWTVFN

SEQ ID NO: 108123 - protein, 13 aa, Homo Sapiens
PCAQGVIWTVFNQ

SEQ ID NO: 108124 - protein, 13 aa, Homo Sapiens
CAQGVIWTVFNQT

SEQ ID NO: 108125 - protein, 13 aa, Homo Sapiens
AQGVIWTVFNQTV

SEQ ID NO: 108126 - protein, 13 aa, Homo Sapiens
QGVIWTVFNQTVM

SEQ ID NO: 108127 - protein, 13 aa, Homo Sapiens
GVIWTVFNQTVML

SEQ ID NO: 108128 - protein, 13 aa, Homo Sapiens
VIWTVFNQTVMLS

SEQ ID NO: 108129 - protein, 13 aa, Homo Sapiens
IWTVFNQTVMLSA

SEQ ID NO: 108130 - protein, 13 aa, Homo Sapiens
WTVFNQTVMLSAK

SEQ ID NO: 108131 - protein, 13 aa, Homo Sapiens
TVFNQTVMLSAKQ

SEQ ID NO: 108132 - protein, 13 aa, Homo Sapiens
VFNQTVMLSAKQL

SEQ ID NO: 108133 - protein, 13 aa, Homo Sapiens
FNQTVMLSAKQLH

SEQ ID NO: 108134 - protein, 13 aa, Homo Sapiens
NQTVMLSAKQLHT

SEQ ID NO: 108135 - protein, 13 aa, Homo Sapiens
QTVMLSAKQLHTL

SEQ ID NO: 108136 - protein, 13 aa, Homo Sapiens
TVMLSAKQLHTLS

SEQ ID NO: 108137 - protein, 13 aa, Homo Sapiens
VMLSAKQLHTLSD

SEQ ID NO: 108138 - protein, 13 aa, Homo Sapiens
MLSAKQLHTLSDT

SEQ ID NO: 108139 - protein, 13 aa, Homo Sapiens
LSAKQLHTLSDTL

SEQ ID NO: 108140 - protein, 13 aa, Homo Sapiens
SAKQLHTLSDTLW

SEQ ID NO: 108141 - protein, 13 aa, Homo Sapiens
AKQLHTLSDTLWG

SEQ ID NO: 108142 - protein, 13 aa, Homo Sapiens
KQLHTLSDTLWGP

SEQ ID NO: 108143 - protein, 13 aa, Homo Sapiens
QLHTLSDTLWGPG

SEQ ID NO: 108144 - protein, 13 aa, Homo Sapiens
LHTLSDTLWGPGD

SEQ ID NO: 108145 - protein, 13 aa, Homo Sapiens
HTLSDTLWGPGDS

SEQ ID NO: 108146 - protein, 13 aa, Homo Sapiens
TLSDTLWGPGDSR

SEQ ID NO: 108147 - protein, 13 aa, Homo Sapiens
LSDTLWGPGDSRL

SEQ ID NO: 108148 - protein, 13 aa, Homo Sapiens
SDTLWGPGDSRLQ

SEQ ID NO: 108149 - protein, 13 aa, Homo Sapiens
DTLWGPGDSRLQL

SEQ ID NO: 108150 - protein, 13 aa, Homo Sapiens
TLWGPGDSRLQLN

SEQ ID NO: 108151 - protein, 13 aa, Homo Sapiens
LWGPGDSRLQLNF

SEQ ID NO: 108152 - protein, 13 aa, Homo Sapiens
WGPGDSRLQLNFR

SEQ ID NO: 108153 - protein, 13 aa, Homo Sapiens
GPGDSRLQLNFRA

SEQ ID NO: 108154 - protein, 13 aa, Homo Sapiens
PGDSRLQLNFRAT

SEQ ID NO: 108155 - protein, 13 aa, Homo Sapiens
GDSRLQLNFRATQ

SEQ ID NO: 108156 - protein, 13 aa, Homo Sapiens
DSRLQLNFRATQP

SEQ ID NO: 108157 - protein, 13 aa, Homo Sapiens
SRLQLNFRATQPL

SEQ ID NO: 108158 - protein, 13 aa, Homo Sapiens
RLQLNFRATQPLN

SEQ ID NO: 108159 - protein, 13 aa, Homo Sapiens
LQLNFRATQPLNG

SEQ ID NO: 108160 - protein, 13 aa, Homo Sapiens
QLNFRATQPLNGR

SEQ ID NO: 108161 - protein, 13 aa, Homo Sapiens
LNFRATQPLNGRV

SEQ ID NO: 108162 - protein, 13 aa, Homo Sapiens
NFRATQPLNGRVI

SEQ ID NO: 108163 - protein, 13 aa, Homo Sapiens
FRATQPLNGRVIE

SEQ ID NO: 108164 - protein, 13 aa, Homo Sapiens
RATQPLNGRVIEA

SEQ ID NO: 108165 - protein, 13 aa, Homo Sapiens
ATQPLNGRVIEAS

SEQ ID NO: 108166 - protein, 13 aa, Homo Sapiens
TQPLNGRVIEASF

SEQ ID NO: 108167 - protein, 13 aa, Homo Sapiens
QPLNGRVIEASFP

SEQ ID NO: 108168 - protein, 13 aa, Homo Sapiens
PLNGRVIEASFPA

SEQ ID NO: 108169 - protein, 13 aa, Homo Sapiens
LNGRVIEASFPAG

SEQ ID NO: 108170 - protein, 13 aa, Homo Sapiens
NGRVIEASFPAGV

SEQ ID NO: 108171 - protein, 13 aa, Homo Sapiens
GRVIEASFPAGVD

SEQ ID NO: 108172 - protein, 13 aa, Homo Sapiens
RVIEASFPAGVDS

SEQ ID NO: 108173 - protein, 13 aa, Homo Sapiens
VIEASFPAGVDSS

SEQ ID NO: 108174 - protein, 13 aa, Homo Sapiens
IEASFPAGVDSSP

SEQ ID NO: 108175 - protein, 13 aa, Homo Sapiens
EASFPAGVDSSPR

SEQ ID NO: 108176 - protein, 13 aa, Homo Sapiens
ASFPAGVDSSPRA

SEQ ID NO: 108177 - protein, 13 aa, Homo Sapiens
SFPAGVDSSPRAA

SEQ ID NO: 108178 - protein, 13 aa, Homo Sapiens
FPAGVDSSPRAAE

SEQ ID NO: 108179 - protein, 13 aa, Homo Sapiens
PAGVDSSPRAAEP

SEQ ID NO: 108180 - protein, 13 aa, Homo Sapiens
AGVDSSPRAAEPV

SEQ ID NO: 108181 - protein, 13 aa, Homo Sapiens
GVDSSPRAAEPVQ

SEQ ID NO: 108182 - protein, 13 aa, Homo Sapiens
VDSSPRAAEPVQL

SEQ ID NO: 108183 - protein, 13 aa, Homo Sapiens
DSSPRAAEPVQLN

SEQ ID NO: 108184 - protein, 13 aa, Homo Sapiens
SSPRAAEPVQLNS

SEQ ID NO: 108185 - protein, 13 aa, Homo Sapiens
SPRAAEPVQLNSC

SEQ ID NO: 108186 - protein, 13 aa, Homo Sapiens
PRAAEPVQLNSCL

SEQ ID NO: 108187 - protein, 13 aa, Homo Sapiens
RAAEPVQLNSCLA

SEQ ID NO: 108188 - protein, 13 aa, Homo Sapiens
AAEPVQLNSCLAA

SEQ ID NO: 108189 - protein, 13 aa, Homo Sapiens
AEPVQLNSCLAAG

SEQ ID NO: 108190 - protein, 13 aa, Homo Sapiens
EPVQLNSCLAAGD

SEQ ID NO: 108191 - protein, 13 aa, Homo Sapiens
PVQLNSCLAAGDI

SEQ ID NO: 108192 - protein, 13 aa, Homo Sapiens
VQLNSCLAAGDIL

SEQ ID NO: 108193 - protein, 13 aa, Homo Sapiens
QLNSCLAAGDILA

SEQ ID NO: 108194 - protein, 13 aa, Homo Sapiens
LNSCLAAGDILAL

SEQ ID NO: 108195 - protein, 13 aa, Homo Sapiens
NSCLAAGDILALV

SEQ ID NO: 108196 - protein, 13 aa, Homo Sapiens
SCLAAGDILALVF

SEQ ID NO: 108197 - protein, 13 aa, Homo Sapiens
CLAAGDILALVFG

SEQ ID NO: 108198 - protein, 13 aa, Homo Sapiens
LAAGDILALVFGL

SEQ ID NO: 108199 - protein, 13 aa, Homo Sapiens
AAGDILALVFGLL

SEQ ID NO: 108200 - protein, 13 aa, Homo Sapiens
AGDILALVFGLLF

SEQ ID NO: 108201 - protein, 13 aa, Homo Sapiens
GDILALVFGLLFA

SEQ ID NO: 108202 - protein, 13 aa, Homo Sapiens
DILALVFGLLFAV

SEQ ID NO: 108203 - protein, 13 aa, Homo Sapiens
ILALVFGLLFAVT

SEQ ID NO: 108204 - protein, 13 aa, Homo Sapiens
LALVFGLLFAVTS

SEQ ID NO: 108205 - protein, 13 aa, Homo Sapiens
ALVFGLLFAVTSV

SEQ ID NO: 108206 - protein, 13 aa, Homo Sapiens
LVFGLLFAVTSVA

SEQ ID NO: 108207 - protein, 13 aa, Homo Sapiens
VFGLLFAVTSVAF

SEQ ID NO: 108208 - protein, 13 aa, Homo Sapiens
FGLLFAVTSVAFL

SEQ ID NO: 108209 - protein, 13 aa, Homo Sapiens
GLLFAVTSVAFLV

SEQ ID NO: 108210 - protein, 13 aa, Homo Sapiens
LLFAVTSVAFLVQ

SEQ ID NO: 108211 - protein, 13 aa, Homo Sapiens
LFAVTSVAFLVQM

SEQ ID NO: 108212 - protein, 13 aa, Homo Sapiens
FAVTSVAFLVQMR

SEQ ID NO: 108213 - protein, 13 aa, Homo Sapiens
AVTSVAFLVQMRR

SEQ ID NO: 108214 - protein, 13 aa, Homo Sapiens
VTSVAFLVQMRRQ

SEQ ID NO: 108215 - protein, 13 aa, Homo Sapiens
TSVAFLVQMRRQH

SEQ ID NO: 108216 - protein, 13 aa, Homo Sapiens
SVAFLVQMRRQHR

SEQ ID NO: 108217 - protein, 13 aa, Homo Sapiens
VAFLVQMRRQHRR

SEQ ID NO: 108218 - protein, 13 aa, Homo Sapiens
AFLVQMRRQHRRG

SEQ ID NO: 108219 - protein, 13 aa, Homo Sapiens
FLVQMRRQHRRGT

SEQ ID NO: 108220 - protein, 13 aa, Homo Sapiens
LVQMRRQHRRGTK

SEQ ID NO: 108221 - protein, 13 aa, Homo Sapiens
VQMRRQHRRGTKG

SEQ ID NO: 108222 - protein, 13 aa, Homo Sapiens
QMRRQHRRGTKGG

SEQ ID NO: 108223 - protein, 13 aa, Homo Sapiens
MRRQHRRGTKGGV

SEQ ID NO: 108224 - protein, 13 aa, Homo Sapiens
RRQHRRGTKGGVS

SEQ ID NO: 108225 - protein, 13 aa, Homo Sapiens
RQHRRGTKGGVSY

SEQ ID NO: 108226 - protein, 13 aa, Homo Sapiens
QHRRGTKGGVSYR

SEQ ID NO: 108227 - protein, 13 aa, Homo Sapiens
HRRGTKGGVSYRP

SEQ ID NO: 108228 - protein, 13 aa, Homo Sapiens
RRGTKGGVSYRPA

SEQ ID NO: 108229 - protein, 13 aa, Homo Sapiens
RGTKGGVSYRPAE

SEQ ID NO: 108230 - protein, 13 aa, Homo Sapiens
GTKGGVSYRPAEV

SEQ ID NO: 108231 - protein, 13 aa, Homo Sapiens
TKGGVSYRPAEVA

SEQ ID NO: 108232 - protein, 13 aa, Homo Sapiens
KGGVSYRPAEVAE

SEQ ID NO: 108233 - protein, 13 aa, Homo Sapiens
GGVSYRPAEVAET

SEQ ID NO: 108234 - protein, 13 aa, Homo Sapiens
GVSYRPAEVAETG

SEQ ID NO: 108235 - protein, 13 aa, Homo Sapiens
VSYRPAEVAETGA

SEQ ID NO: 108236 - protein, 14 aa, Homo Sapiens
MAPLCPSPWLPLLI

SEQ ID NO: 108237 - protein, 14 aa, Homo Sapiens
APLCPSPWLPLLIP

SEQ ID NO: 108238 - protein, 14 aa, Homo Sapiens
PLCPSPWLPLLIPA

SEQ ID NO: 108239 - protein, 14 aa, Homo Sapiens
LCPSPWLPLLIPAP

SEQ ID NO: 108240 - protein, 14 aa, Homo Sapiens
CPSPWLPLLIPAPA

SEQ ID NO: 108241 - protein, 14 aa, Homo Sapiens
PSPWLPLLIPAPAP

SEQ ID NO: 108242 - protein, 14 aa, Homo Sapiens
SPWLPLLIPAPAPG

SEQ ID NO: 108243 - protein, 14 aa, Homo Sapiens
PWLPLLIPAPAPGL

SEQ ID NO: 108244 - protein, 14 aa, Homo Sapiens
WLPLLIPAPAPGLT

SEQ ID NO: 108245 - protein, 14 aa, Homo Sapiens
LPLLIPAPAPGLTV

SEQ ID NO: 108246 - protein, 14 aa, Homo Sapiens
PLLIPAPAPGLTVQ

SEQ ID NO: 108247 - protein, 14 aa, Homo Sapiens
LLIPAPAPGLTVQL

SEQ ID NO: 108248 - protein, 14 aa, Homo Sapiens
LIPAPAPGLTVQLL

SEQ ID NO: 108249 - protein, 14 aa, Homo Sapiens
IPAPAPGLTVQLLL

SEQ ID NO: 108250 - protein, 14 aa, Homo Sapiens
PAPAPGLTVQLLLS

SEQ ID NO: 108251 - protein, 14 aa, Homo Sapiens
APAPGLTVQLLLSL

SEQ ID NO: 108252 - protein, 14 aa, Homo Sapiens
PAPGLTVQLLLSLL

SEQ ID NO: 108253 - protein, 14 aa, Homo Sapiens
APGLTVQLLLSLLL

SEQ ID NO: 108254 - protein, 14 aa, Homo Sapiens
PGLTVQLLLSLLLL

SEQ ID NO: 108255 - protein, 14 aa, Homo Sapiens
GLTVQLLLSLLLLM

SEQ ID NO: 108256 - protein, 14 aa, Homo Sapiens
LTVQLLLSLLLLMP

SEQ ID NO: 108257 - protein, 14 aa, Homo Sapiens
TVQLLLSLLLLMPV

SEQ ID NO: 108258 - protein, 14 aa, Homo Sapiens
VQLLLSLLLLMPVH

SEQ ID NO: 108259 - protein, 14 aa, Homo Sapiens
QLLLSLLLLMPVHP

SEQ ID NO: 108260 - protein, 14 aa, Homo Sapiens
LLLSLLLLMPVHPQ

SEQ ID NO: 108261 - protein, 14 aa, Homo Sapiens
LLSLLLLMPVHPQR

SEQ ID NO: 108262 - protein, 14 aa, Homo Sapiens
LSLLLLMPVHPQRL

SEQ ID NO: 108263 - protein, 14 aa, Homo Sapiens
SLLLLMPVHPQRLP

SEQ ID NO: 108264 - protein, 14 aa, Homo Sapiens
LLLLMPVHPQRLPR

SEQ ID NO: 108265 - protein, 14 aa, Homo Sapiens
LLLMPVHPQRLPRM

SEQ ID NO: 108266 - protein, 14 aa, Homo Sapiens
LLMPVHPQRLPRMQ

SEQ ID NO: 108267 - protein, 14 aa, Homo Sapiens
LMPVHPQRLPRMQE

SEQ ID NO: 108268 - protein, 14 aa, Homo Sapiens
MPVHPQRLPRMQED

SEQ ID NO: 108269 - protein, 14 aa, Homo Sapiens
PVHPQRLPRMQEDS

SEQ ID NO: 108270 - protein, 14 aa, Homo Sapiens
VHPQRLPRMQEDSP

SEQ ID NO: 108271 - protein, 14 aa, Homo Sapiens
HPQRLPRMQEDSPL

SEQ ID NO: 108272 - protein, 14 aa, Homo Sapiens
PQRLPRMQEDSPLG

SEQ ID NO: 108273 - protein, 14 aa, Homo Sapiens
QRLPRMQEDSPLGG

SEQ ID NO: 108274 - protein, 14 aa, Homo Sapiens
RLPRMQEDSPLGGG

SEQ ID NO: 108275 - protein, 14 aa, Homo Sapiens
LPRMQEDSPLGGGS

SEQ ID NO: 108276 - protein, 14 aa, Homo Sapiens
PRMQEDSPLGGGSS

SEQ ID NO: 108277 - protein, 14 aa, Homo Sapiens
RMQEDSPLGGGSSG

SEQ ID NO: 108278 - protein, 14 aa, Homo Sapiens
MQEDSPLGGGSSGE

SEQ ID NO: 108279 - protein, 14 aa, Homo Sapiens
QEDSPLGGGSSGED

SEQ ID NO: 108280 - protein, 14 aa, Homo Sapiens
EDSPLGGGSSGEDD

SEQ ID NO: 108281 - protein, 14 aa, Homo Sapiens
DSPLGGGSSGEDDP

SEQ ID NO: 108282 - protein, 14 aa, Homo Sapiens
SPLGGGSSGEDDPL

SEQ ID NO: 108283 - protein, 14 aa, Homo Sapiens
PLGGGSSGEDDPLG

SEQ ID NO: 108284 - protein, 14 aa, Homo Sapiens
LGGGSSGEDDPLGE

SEQ ID NO: 108285 - protein, 14 aa, Homo Sapiens
GGGSSGEDDPLGEE

SEQ ID NO: 108286 - protein, 14 aa, Homo Sapiens
GGSSGEDDPLGEED

SEQ ID NO: 108287 - protein, 14 aa, Homo Sapiens
GSSGEDDPLGEEDL

SEQ ID NO: 108288 - protein, 14 aa, Homo Sapiens
SSGEDDPLGEEDLP

SEQ ID NO: 108289 - protein, 14 aa, Homo Sapiens
SGEDDPLGEEDLPS

SEQ ID NO: 108290 - protein, 14 aa, Homo Sapiens
GEDDPLGEEDLPSE

SEQ ID NO: 108291 - protein, 14 aa, Homo Sapiens
EDDPLGEEDLPSEE

SEQ ID NO: 108292 - protein, 14 aa, Homo Sapiens
DDPLGEEDLPSEED

SEQ ID NO: 108293 - protein, 14 aa, Homo Sapiens
DPLGEEDLPSEEDS

SEQ ID NO: 108294 - protein, 14 aa, Homo Sapiens
PLGEEDLPSEEDSP

SEQ ID NO: 108295 - protein, 14 aa, Homo Sapiens
LGEEDLPSEEDSPR

SEQ ID NO: 108296 - protein, 14 aa, Homo Sapiens
GEEDLPSEEDSPRE

SEQ ID NO: 108297 - protein, 14 aa, Homo Sapiens
EEDLPSEEDSPREE

SEQ ID NO: 108298 - protein, 14 aa, Homo Sapiens
EDLPSEEDSPREED

SEQ ID NO: 108299 - protein, 14 aa, Homo Sapiens
DLPSEEDSPREEDP

SEQ ID NO: 108300 - protein, 14 aa, Homo Sapiens
LPSEEDSPREEDPP

SEQ ID NO: 108301 - protein, 14 aa, Homo Sapiens
PSEEDSPREEDPPG

SEQ ID NO: 108302 - protein, 14 aa, Homo Sapiens
SEEDSPREEDPPGE

SEQ ID NO: 108303 - protein, 14 aa, Homo Sapiens
EEDSPREEDPPGEE

SEQ ID NO: 108304 - protein, 14 aa, Homo Sapiens
EDSPREEDPPGEED

SEQ ID NO: 108305 - protein, 14 aa, Homo Sapiens
DSPREEDPPGEEDL

SEQ ID NO: 108306 - protein, 14 aa, Homo Sapiens
SPREEDPPGEEDLP

SEQ ID NO: 108307 - protein, 14 aa, Homo Sapiens
PREEDPPGEEDLPG

SEQ ID NO: 108308 - protein, 14 aa, Homo Sapiens
REEDPPGEEDLPGE

SEQ ID NO: 108309 - protein, 14 aa, Homo Sapiens
EEDPPGEEDLPGEE

SEQ ID NO: 108310 - protein, 14 aa, Homo Sapiens
EDPPGEEDLPGEED

SEQ ID NO: 108311 - protein, 14 aa, Homo Sapiens
DPPGEEDLPGEEDL

SEQ ID NO: 108312 - protein, 14 aa, Homo Sapiens
PPGEEDLPGEEDLP

SEQ ID NO: 108313 - protein, 14 aa, Homo Sapiens
PGEEDLPGEEDLPG

SEQ ID NO: 108314 - protein, 14 aa, Homo Sapiens
GEEDLPGEEDLPGE

SEQ ID NO: 108315 - protein, 14 aa, Homo Sapiens
EEDLPGEEDLPGEE

SEQ ID NO: 108316 - protein, 14 aa, Homo Sapiens
EDLPGEEDLPGEED

SEQ ID NO: 108317 - protein, 14 aa, Homo Sapiens
DLPGEEDLPGEEDL

SEQ ID NO: 108318 - protein, 14 aa, Homo Sapiens
LPGEEDLPGEEDLP

SEQ ID NO: 108319 - protein, 14 aa, Homo Sapiens
PGEEDLPGEEDLPE

SEQ ID NO: 108320 - protein, 14 aa, Homo Sapiens
GEEDLPGEEDLPEV

SEQ ID NO: 108321 - protein, 14 aa, Homo Sapiens
EEDLPGEEDLPEVK

SEQ ID NO: 108322 - protein, 14 aa, Homo Sapiens
EDLPGEEDLPEVKP

SEQ ID NO: 108323 - protein, 14 aa, Homo Sapiens
DLPGEEDLPEVKPK

SEQ ID NO: 108324 - protein, 14 aa, Homo Sapiens
LPGEEDLPEVKPKS

SEQ ID NO: 108325 - protein, 14 aa, Homo Sapiens
PGEEDLPEVKPKSE

SEQ ID NO: 108326 - protein, 14 aa, Homo Sapiens
GEEDLPEVKPKSEE

SEQ ID NO: 108327 - protein, 14 aa, Homo Sapiens
EEDLPEVKPKSEEE

SEQ ID NO: 108328 - protein, 14 aa, Homo Sapiens
EDLPEVKPKSEEEG

SEQ ID NO: 108329 - protein, 14 aa, Homo Sapiens
DLPEVKPKSEEEGS

SEQ ID NO: 108330 - protein, 14 aa, Homo Sapiens
LPEVKPKSEEEGSL

SEQ ID NO: 108331 - protein, 14 aa, Homo Sapiens
PEVKPKSEEEGSLK

SEQ ID NO: 108332 - protein, 14 aa, Homo Sapiens
EVKPKSEEEGSLKL

SEQ ID NO: 108333 - protein, 14 aa, Homo Sapiens
VKPKSEEEGSLKLE

SEQ ID NO: 108334 - protein, 14 aa, Homo Sapiens
KPKSEEEGSLKLED

SEQ ID NO: 108335 - protein, 14 aa, Homo Sapiens
PKSEEEGSLKLEDL

SEQ ID NO: 108336 - protein, 14 aa, Homo Sapiens
KSEEEGSLKLEDLP

SEQ ID NO: 108337 - protein, 14 aa, Homo Sapiens
SEEEGSLKLEDLPT

SEQ ID NO: 108338 - protein, 14 aa, Homo Sapiens
EEEGSLKLEDLPTV

SEQ ID NO: 108339 - protein, 14 aa, Homo Sapiens
EEGSLKLEDLPTVE

SEQ ID NO: 108340 - protein, 14 aa, Homo Sapiens
EGSLKLEDLPTVEA

SEQ ID NO: 108341 - protein, 14 aa, Homo Sapiens
GSLKLEDLPTVEAP

SEQ ID NO: 108342 - protein, 14 aa, Homo Sapiens
SLKLEDLPTVEAPG

SEQ ID NO: 108343 - protein, 14 aa, Homo Sapiens
LKLEDLPTVEAPGD

SEQ ID NO: 108344 - protein, 14 aa, Homo Sapiens
KLEDLPTVEAPGDP

SEQ ID NO: 108345 - protein, 14 aa, Homo Sapiens
LEDLPTVEAPGDPQ

SEQ ID NO: 108346 - protein, 14 aa, Homo Sapiens
EDLPTVEAPGDPQE

SEQ ID NO: 108347 - protein, 14 aa, Homo Sapiens
DLPTVEAPGDPQEP

SEQ ID NO: 108348 - protein, 14 aa, Homo Sapiens
LPTVEAPGDPQEPQ

SEQ ID NO: 108349 - protein, 14 aa, Homo Sapiens
PTVEAPGDPQEPQN

SEQ ID NO: 108350 - protein, 14 aa, Homo Sapiens
TVEAPGDPQEPQNN

SEQ ID NO: 108351 - protein, 14 aa, Homo Sapiens
VEAPGDPQEPQNNA

SEQ ID NO: 108352 - protein, 14 aa, Homo Sapiens
EAPGDPQEPQNNAH

SEQ ID NO: 108353 - protein, 14 aa, Homo Sapiens
APGDPQEPQNNAHR

SEQ ID NO: 108354 - protein, 14 aa, Homo Sapiens
PGDPQEPQNNAHRD

SEQ ID NO: 108355 - protein, 14 aa, Homo Sapiens
GDPQEPQNNAHRDK

SEQ ID NO: 108356 - protein, 14 aa, Homo Sapiens
DPQEPQNNAHRDKE

SEQ ID NO: 108357 - protein, 14 aa, Homo Sapiens
PQEPQNNAHRDKEG

SEQ ID NO: 108358 - protein, 14 aa, Homo Sapiens
QEPQNNAHRDKEGD

SEQ ID NO: 108359 - protein, 14 aa, Homo Sapiens
EPQNNAHRDKEGDD

SEQ ID NO: 108360 - protein, 14 aa, Homo Sapiens
PQNNAHRDKEGDDQ

SEQ ID NO: 108361 - protein, 14 aa, Homo Sapiens
QNNAHRDKEGDDQS

SEQ ID NO: 108362 - protein, 14 aa, Homo Sapiens
NNAHRDKEGDDQSH

SEQ ID NO: 108363 - protein, 14 aa, Homo Sapiens
NAHRDKEGDDQSHW

SEQ ID NO: 108364 - protein, 14 aa, Homo Sapiens
AHRDKEGDDQSHWR

SEQ ID NO: 108365 - protein, 14 aa, Homo Sapiens
HRDKEGDDQSHWRY

SEQ ID NO: 108366 - protein, 14 aa, Homo Sapiens
RDKEGDDQSHWRYG

SEQ ID NO: 108367 - protein, 14 aa, Homo Sapiens
DKEGDDQSHWRYGG

SEQ ID NO: 108368 - protein, 14 aa, Homo Sapiens
KEGDDQSHWRYGGD

SEQ ID NO: 108369 - protein, 14 aa, Homo Sapiens
EGDDQSHWRYGGDP

SEQ ID NO: 108370 - protein, 14 aa, Homo Sapiens
GDDQSHWRYGGDPP

SEQ ID NO: 108371 - protein, 14 aa, Homo Sapiens
DDQSHWRYGGDPPW

SEQ ID NO: 108372 - protein, 14 aa, Homo Sapiens
DQSHWRYGGDPPWP

SEQ ID NO: 108373 - protein, 14 aa, Homo Sapiens
QSHWRYGGDPPWPR

SEQ ID NO: 108374 - protein, 14 aa, Homo Sapiens
SHWRYGGDPPWPRV

SEQ ID NO: 108375 - protein, 14 aa, Homo Sapiens
HWRYGGDPPWPRVS

SEQ ID NO: 108376 - protein, 14 aa, Homo Sapiens
WRYGGDPPWPRVSP

SEQ ID NO: 108377 - protein, 14 aa, Homo Sapiens
RYGGDPPWPRVSPA

SEQ ID NO: 108378 - protein, 14 aa, Homo Sapiens
YGGDPPWPRVSPAC

SEQ ID NO: 108379 - protein, 14 aa, Homo Sapiens
GGDPPWPRVSPACA

SEQ ID NO: 108380 - protein, 14 aa, Homo Sapiens
GDPPWPRVSPACAG

SEQ ID NO: 108381 - protein, 14 aa, Homo Sapiens
DPPWPRVSPACAGR

SEQ ID NO: 108382 - protein, 14 aa, Homo Sapiens
PPWPRVSPACAGRF

SEQ ID NO: 108383 - protein, 14 aa, Homo Sapiens
PWPRVSPACAGRFQ

SEQ ID NO: 108384 - protein, 14 aa, Homo Sapiens
WPRVSPACAGRFQS

SEQ ID NO: 108385 - protein, 14 aa, Homo Sapiens
PRVSPACAGRFQSP

SEQ ID NO: 108386 - protein, 14 aa, Homo Sapiens
RVSPACAGRFQSPV

SEQ ID NO: 108387 - protein, 14 aa, Homo Sapiens
VSPACAGRFQSPVD

SEQ ID NO: 108388 - protein, 14 aa, Homo Sapiens
SPACAGRFQSPVDI

SEQ ID NO: 108389 - protein, 14 aa, Homo Sapiens
PACAGRFQSPVDIR

SEQ ID NO: 108390 - protein, 14 aa, Homo Sapiens
ACAGRFQSPVDIRP

SEQ ID NO: 108391 - protein, 14 aa, Homo Sapiens
CAGRFQSPVDIRPQ

SEQ ID NO: 108392 - protein, 14 aa, Homo Sapiens
AGRFQSPVDIRPQL

SEQ ID NO: 108393 - protein, 14 aa, Homo Sapiens
GRFQSPVDIRPQLA

SEQ ID NO: 108394 - protein, 14 aa, Homo Sapiens
RFQSPVDIRPQLAA

SEQ ID NO: 108395 - protein, 14 aa, Homo Sapiens
FQSPVDIRPQLAAF

SEQ ID NO: 108396 - protein, 14 aa, Homo Sapiens
QSPVDIRPQLAAFC

SEQ ID NO: 108397 - protein, 14 aa, Homo Sapiens
SPVDIRPQLAAFCP

SEQ ID NO: 108398 - protein, 14 aa, Homo Sapiens
PVDIRPQLAAFCPA

SEQ ID NO: 108399 - protein, 14 aa, Homo Sapiens
VDIRPQLAAFCPAL

SEQ ID NO: 108400 - protein, 14 aa, Homo Sapiens
DIRPQLAAFCPALR

SEQ ID NO: 108401 - protein, 14 aa, Homo Sapiens
IRPQLAAFCPALRP

SEQ ID NO: 108402 - protein, 14 aa, Homo Sapiens
RPQLAAFCPALRPL

SEQ ID NO: 108403 - protein, 14 aa, Homo Sapiens
PQLAAFCPALRPLE

SEQ ID NO: 108404 - protein, 14 aa, Homo Sapiens
QLAAFCPALRPLEL

SEQ ID NO: 108405 - protein, 14 aa, Homo Sapiens
LAAFCPALRPLELL

SEQ ID NO: 108406 - protein, 14 aa, Homo Sapiens
AAFCPALRPLELLG

SEQ ID NO: 108407 - protein, 14 aa, Homo Sapiens
AFCPALRPLELLGF

SEQ ID NO: 108408 - protein, 14 aa, Homo Sapiens
FCPALRPLELLGFQ

SEQ ID NO: 108409 - protein, 14 aa, Homo Sapiens
CPALRPLELLGFQL

SEQ ID NO: 108410 - protein, 14 aa, Homo Sapiens
PALRPLELLGFQLP

SEQ ID NO: 108411 - protein, 14 aa, Homo Sapiens
ALRPLELLGFQLPP

SEQ ID NO: 108412 - protein, 14 aa, Homo Sapiens
LRPLELLGFQLPPL

SEQ ID NO: 108413 - protein, 14 aa, Homo Sapiens
RPLELLGFQLPPLP

SEQ ID NO: 108414 - protein, 14 aa, Homo Sapiens
PLELLGFQLPPLPE

SEQ ID NO: 108415 - protein, 14 aa, Homo Sapiens
LELLGFQLPPLPEL

SEQ ID NO: 108416 - protein, 14 aa, Homo Sapiens
ELLGFQLPPLPELR

SEQ ID NO: 108417 - protein, 14 aa, Homo Sapiens
LLGFQLPPLPELRL

SEQ ID NO: 108418 - protein, 14 aa, Homo Sapiens
LGFQLPPLPELRLR

SEQ ID NO: 108419 - protein, 14 aa, Homo Sapiens
GFQLPPLPELRLRN

SEQ ID NO: 108420 - protein, 14 aa, Homo Sapiens
FQLPPLPELRLRNN

SEQ ID NO: 108421 - protein, 14 aa, Homo Sapiens
QLPPLPELRLRNNG

SEQ ID NO: 108422 - protein, 14 aa, Homo Sapiens
LPPLPELRLRNNGH

SEQ ID NO: 108423 - protein, 14 aa, Homo Sapiens
PPLPELRLRNNGHS

SEQ ID NO: 108424 - protein, 14 aa, Homo Sapiens
PLPELRLRNNGHSV

SEQ ID NO: 108425 - protein, 14 aa, Homo Sapiens
LPELRLRNNGHSVQ

SEQ ID NO: 108426 - protein, 14 aa, Homo Sapiens
PELRLRNNGHSVQL

SEQ ID NO: 108427 - protein, 14 aa, Homo Sapiens
ELRLRNNGHSVQLT

SEQ ID NO: 108428 - protein, 14 aa, Homo Sapiens
LRLRNNGHSVQLTL

SEQ ID NO: 108429 - protein, 14 aa, Homo Sapiens
RLRNNGHSVQLTLP

SEQ ID NO: 108430 - protein, 14 aa, Homo Sapiens
LRNNGHSVQLTLPP

SEQ ID NO: 108431 - protein, 14 aa, Homo Sapiens
RNNGHSVQLTLPPG

SEQ ID NO: 108432 - protein, 14 aa, Homo Sapiens
NNGHSVQLTLPPGL

SEQ ID NO: 108433 - protein, 14 aa, Homo Sapiens
NGHSVQLTLPPGLE

SEQ ID NO: 108434 - protein, 14 aa, Homo Sapiens
GHSVQLTLPPGLEM

SEQ ID NO: 108435 - protein, 14 aa, Homo Sapiens
HSVQLTLPPGLEMA

SEQ ID NO: 108436 - protein, 14 aa, Homo Sapiens
SVQLTLPPGLEMAL

SEQ ID NO: 108437 - protein, 14 aa, Homo Sapiens
VQLTLPPGLEMALG

SEQ ID NO: 108438 - protein, 14 aa, Homo Sapiens
QLTLPPGLEMALGP

SEQ ID NO: 108439 - protein, 14 aa, Homo Sapiens
LTLPPGLEMALGPG

SEQ ID NO: 108440 - protein, 14 aa, Homo Sapiens
TLPPGLEMALGPGR

SEQ ID NO: 108441 - protein, 14 aa, Homo Sapiens
LPPGLEMALGPGRE

SEQ ID NO: 108442 - protein, 14 aa, Homo Sapiens
PPGLEMALGPGREY

SEQ ID NO: 108443 - protein, 14 aa, Homo Sapiens
PGLEMALGPGREYR

SEQ ID NO: 108444 - protein, 14 aa, Homo Sapiens
GLEMALGPGREYRA

SEQ ID NO: 108445 - protein, 14 aa, Homo Sapiens
LEMALGPGREYRAL

SEQ ID NO: 108446 - protein, 14 aa, Homo Sapiens
EMALGPGREYRALQ

SEQ ID NO: 108447 - protein, 14 aa, Homo Sapiens
MALGPGREYRALQL

SEQ ID NO: 108448 - protein, 14 aa, Homo Sapiens
ALGPGREYRALQLH

SEQ ID NO: 108449 - protein, 14 aa, Homo Sapiens
LGPGREYRALQLHL

SEQ ID NO: 108450 - protein, 14 aa, Homo Sapiens
GPGREYRALQLHLH

SEQ ID NO: 108451 - protein, 14 aa, Homo Sapiens
PGREYRALQLHLHW

SEQ ID NO: 108452 - protein, 14 aa, Homo Sapiens
GREYRALQLHLHWG

SEQ ID NO: 108453 - protein, 14 aa, Homo Sapiens
REYRALQLHLHWGA

SEQ ID NO: 108454 - protein, 14 aa, Homo Sapiens
EYRALQLHLHWGAA

SEQ ID NO: 108455 - protein, 14 aa, Homo Sapiens
YRALQLHLHWGAAG

SEQ ID NO: 108456 - protein, 14 aa, Homo Sapiens
RALQLHLHWGAAGR

SEQ ID NO: 108457 - protein, 14 aa, Homo Sapiens
ALQLHLHWGAAGRP

SEQ ID NO: 108458 - protein, 14 aa, Homo Sapiens
LQLHLHWGAAGRPG

SEQ ID NO: 108459 - protein, 14 aa, Homo Sapiens
QLHLHWGAAGRPGS

SEQ ID NO: 108460 - protein, 14 aa, Homo Sapiens
LHLHWGAAGRPGSE

SEQ ID NO: 108461 - protein, 14 aa, Homo Sapiens
HLHWGAAGRPGSEH

SEQ ID NO: 108462 - protein, 14 aa, Homo Sapiens
LHWGAAGRPGSEHT

SEQ ID NO: 108463 - protein, 14 aa, Homo Sapiens
HWGAAGRPGSEHTV

SEQ ID NO: 108464 - protein, 14 aa, Homo Sapiens
WGAAGRPGSEHTVE

SEQ ID NO: 108465 - protein, 14 aa, Homo Sapiens
GAAGRPGSEHTVEG

SEQ ID NO: 108466 - protein, 14 aa, Homo Sapiens
AAGRPGSEHTVEGH

SEQ ID NO: 108467 - protein, 14 aa, Homo Sapiens
AGRPGSEHTVEGHR

SEQ ID NO: 108468 - protein, 14 aa, Homo Sapiens
GRPGSEHTVEGHRF

SEQ ID NO: 108469 - protein, 14 aa, Homo Sapiens
RPGSEHTVEGHRFP

SEQ ID NO: 108470 - protein, 14 aa, Homo Sapiens
PGSEHTVEGHRFPA

SEQ ID NO: 108471 - protein, 14 aa, Homo Sapiens
GSEHTVEGHRFPAE

SEQ ID NO: 108472 - protein, 14 aa, Homo Sapiens
SEHTVEGHRFPAEI

SEQ ID NO: 108473 - protein, 14 aa, Homo Sapiens
EHTVEGHRFPAEIH

SEQ ID NO: 108474 - protein, 14 aa, Homo Sapiens
HTVEGHRFPAEIHV

SEQ ID NO: 108475 - protein, 14 aa, Homo Sapiens
TVEGHRFPAEIHVV

SEQ ID NO: 108476 - protein, 14 aa, Homo Sapiens
VEGHRFPAEIHVVH

SEQ ID NO: 108477 - protein, 14 aa, Homo Sapiens
EGHRFPAEIHVVHL

SEQ ID NO: 108478 - protein, 14 aa, Homo Sapiens
GHRFPAEIHVVHLS

SEQ ID NO: 108479 - protein, 14 aa, Homo Sapiens
HRFPAEIHVVHLST

SEQ ID NO: 108480 - protein, 14 aa, Homo Sapiens
RFPAEIHVVHLSTA

SEQ ID NO: 108481 - protein, 14 aa, Homo Sapiens
FPAEIHVVHLSTAF

SEQ ID NO: 108482 - protein, 14 aa, Homo Sapiens
PAEIHVVHLSTAFA

SEQ ID NO: 108483 - protein, 14 aa, Homo Sapiens
AEIHVVHLSTAFAR

SEQ ID NO: 108484 - protein, 14 aa, Homo Sapiens
EIHVVHLSTAFARV

SEQ ID NO: 108485 - protein, 14 aa, Homo Sapiens
IHVVHLSTAFARVD

SEQ ID NO: 108486 - protein, 14 aa, Homo Sapiens
HVVHLSTAFARVDE

SEQ ID NO: 108487 - protein, 14 aa, Homo Sapiens
VVHLSTAFARVDEA

SEQ ID NO: 108488 - protein, 14 aa, Homo Sapiens
VHLSTAFARVDEAL

SEQ ID NO: 108489 - protein, 14 aa, Homo Sapiens
HLSTAFARVDEALG

SEQ ID NO: 108490 - protein, 14 aa, Homo Sapiens
LSTAFARVDEALGR

SEQ ID NO: 108491 - protein, 14 aa, Homo Sapiens
STAFARVDEALGRP

SEQ ID NO: 108492 - protein, 14 aa, Homo Sapiens
TAFARVDEALGRPG

SEQ ID NO: 108493 - protein, 14 aa, Homo Sapiens
AFARVDEALGRPGG

SEQ ID NO: 108494 - protein, 14 aa, Homo Sapiens
FARVDEALGRPGGL

SEQ ID NO: 108495 - protein, 14 aa, Homo Sapiens
ARVDEALGRPGGLA

SEQ ID NO: 108496 - protein, 14 aa, Homo Sapiens
RVDEALGRPGGLAV

SEQ ID NO: 108497 - protein, 14 aa, Homo Sapiens
VDEALGRPGGLAVL

SEQ ID NO: 108498 - protein, 14 aa, Homo Sapiens
DEALGRPGGLAVLA

SEQ ID NO: 108499 - protein, 14 aa, Homo Sapiens
EALGRPGGLAVLAA

SEQ ID NO: 108500 - protein, 14 aa, Homo Sapiens
ALGRPGGLAVLAAF

SEQ ID NO: 108501 - protein, 14 aa, Homo Sapiens
LGRPGGLAVLAAFL

SEQ ID NO: 108502 - protein, 14 aa, Homo Sapiens
GRPGGLAVLAAFLE

SEQ ID NO: 108503 - protein, 14 aa, Homo Sapiens
RPGGLAVLAAFLEE

SEQ ID NO: 108504 - protein, 14 aa, Homo Sapiens
PGGLAVLAAFLEEG

SEQ ID NO: 108505 - protein, 14 aa, Homo Sapiens
GGLAVLAAFLEEGP

SEQ ID NO: 108506 - protein, 14 aa, Homo Sapiens
GLAVLAAFLEEGPE

SEQ ID NO: 108507 - protein, 14 aa, Homo Sapiens
LAVLAAFLEEGPEE

SEQ ID NO: 108508 - protein, 14 aa, Homo Sapiens
AVLAAFLEEGPEEN

SEQ ID NO: 108509 - protein, 14 aa, Homo Sapiens
VLAAFLEEGPEENS

SEQ ID NO: 108510 - protein, 14 aa, Homo Sapiens
LAAFLEEGPEENSA

SEQ ID NO: 108511 - protein, 14 aa, Homo Sapiens
AAFLEEGPEENSAY

SEQ ID NO: 108512 - protein, 14 aa, Homo Sapiens
AFLEEGPEENSAYE

SEQ ID NO: 108513 - protein, 14 aa, Homo Sapiens
FLEEGPEENSAYEQ

SEQ ID NO: 108514 - protein, 14 aa, Homo Sapiens
LEEGPEENSAYEQL

SEQ ID NO: 108515 - protein, 14 aa, Homo Sapiens
EEGPEENSAYEQLL

SEQ ID NO: 108516 - protein, 14 aa, Homo Sapiens
EGPEENSAYEQLLS

SEQ ID NO: 108517 - protein, 14 aa, Homo Sapiens
GPEENSAYEQLLSR

SEQ ID NO: 108518 - protein, 14 aa, Homo Sapiens
PEENSAYEQLLSRL

SEQ ID NO: 108519 - protein, 14 aa, Homo Sapiens
EENSAYEQLLSRLE

SEQ ID NO: 108520 - protein, 14 aa, Homo Sapiens
ENSAYEQLLSRLEE

SEQ ID NO: 108521 - protein, 14 aa, Homo Sapiens
NSAYEQLLSRLEEI

SEQ ID NO: 108522 - protein, 14 aa, Homo Sapiens
SAYEQLLSRLEEIA

SEQ ID NO: 108523 - protein, 14 aa, Homo Sapiens
AYEQLLSRLEEIAE

SEQ ID NO: 108524 - protein, 14 aa, Homo Sapiens
YEQLLSRLEEIAEE

SEQ ID NO: 108525 - protein, 14 aa, Homo Sapiens
EQLLSRLEEIAEEG

SEQ ID NO: 108526 - protein, 14 aa, Homo Sapiens
QLLSRLEEIAEEGS

SEQ ID NO: 108527 - protein, 14 aa, Homo Sapiens
LLSRLEEIAEEGSE

SEQ ID NO: 108528 - protein, 14 aa, Homo Sapiens
LSRLEEIAEEGSET

SEQ ID NO: 108529 - protein, 14 aa, Homo Sapiens
SRLEEIAEEGSETQ

SEQ ID NO: 108530 - protein, 14 aa, Homo Sapiens
RLEEIAEEGSETQV

SEQ ID NO: 108531 - protein, 14 aa, Homo Sapiens
LEEIAEEGSETQVP

SEQ ID NO: 108532 - protein, 14 aa, Homo Sapiens
EEIAEEGSETQVPG

SEQ ID NO: 108533 - protein, 14 aa, Homo Sapiens
EIAEEGSETQVPGL

SEQ ID NO: 108534 - protein, 14 aa, Homo Sapiens
IAEEGSETQVPGLD

SEQ ID NO: 108535 - protein, 14 aa, Homo Sapiens
AEEGSETQVPGLDI

SEQ ID NO: 108536 - protein, 14 aa, Homo Sapiens
EEGSETQVPGLDIS

SEQ ID NO: 108537 - protein, 14 aa, Homo Sapiens
EGSETQVPGLDISA

SEQ ID NO: 108538 - protein, 14 aa, Homo Sapiens
GSETQVPGLDISAL

SEQ ID NO: 108539 - protein, 14 aa, Homo Sapiens
SETQVPGLDISALL

SEQ ID NO: 108540 - protein, 14 aa, Homo Sapiens
ETQVPGLDISALLP

SEQ ID NO: 108541 - protein, 14 aa, Homo Sapiens
TQVPGLDISALLPS

SEQ ID NO: 108542 - protein, 14 aa, Homo Sapiens
QVPGLDISALLPSD

SEQ ID NO: 108543 - protein, 14 aa, Homo Sapiens
VPGLDISALLPSDF

SEQ ID NO: 108544 - protein, 14 aa, Homo Sapiens
PGLDISALLPSDFS

SEQ ID NO: 108545 - protein, 14 aa, Homo Sapiens
GLDISALLPSDFSR

SEQ ID NO: 108546 - protein, 14 aa, Homo Sapiens
LDISALLPSDFSRY

SEQ ID NO: 108547 - protein, 14 aa, Homo Sapiens
DISALLPSDFSRYF

SEQ ID NO: 108548 - protein, 14 aa, Homo Sapiens
ISALLPSDFSRYFQ

SEQ ID NO: 108549 - protein, 14 aa, Homo Sapiens
SALLPSDFSRYFQY

SEQ ID NO: 108550 - protein, 14 aa, Homo Sapiens
ALLPSDFSRYFQYE

SEQ ID NO: 108551 - protein, 14 aa, Homo Sapiens
LLPSDFSRYFQYEG

SEQ ID NO: 108552 - protein, 14 aa, Homo Sapiens
LPSDFSRYFQYEGS

SEQ ID NO: 108553 - protein, 14 aa, Homo Sapiens
PSDFSRYFQYEGSL

SEQ ID NO: 108554 - protein, 14 aa, Homo Sapiens
SDFSRYFQYEGSLT

SEQ ID NO: 108555 - protein, 14 aa, Homo Sapiens
DFSRYFQYEGSLTT

SEQ ID NO: 108556 - protein, 14 aa, Homo Sapiens
FSRYFQYEGSLTTP

SEQ ID NO: 108557 - protein, 14 aa, Homo Sapiens
SRYFQYEGSLTTPP

SEQ ID NO: 108558 - protein, 14 aa, Homo Sapiens
RYFQYEGSLTTPPC

SEQ ID NO: 108559 - protein, 14 aa, Homo Sapiens
YFQYEGSLTTPPCA

SEQ ID NO: 108560 - protein, 14 aa, Homo Sapiens
FQYEGSLTTPPCAQ

SEQ ID NO: 108561 - protein, 14 aa, Homo Sapiens
QYEGSLTTPPCAQG

SEQ ID NO: 108562 - protein, 14 aa, Homo Sapiens
YEGSLTTPPCAQGV

SEQ ID NO: 108563 - protein, 14 aa, Homo Sapiens
EGSLTTPPCAQGVI

SEQ ID NO: 108564 - protein, 14 aa, Homo Sapiens
GSLTTPPCAQGVIW

SEQ ID NO: 108565 - protein, 14 aa, Homo Sapiens
SLTTPPCAQGVIWT

SEQ ID NO: 108566 - protein, 14 aa, Homo Sapiens
LTTPPCAQGVIWTV

SEQ ID NO: 108567 - protein, 14 aa, Homo Sapiens
TTPPCAQGVIWTVF

SEQ ID NO: 108568 - protein, 14 aa, Homo Sapiens
TPPCAQGVIWTVFN

SEQ ID NO: 108569 - protein, 14 aa, Homo Sapiens
PPCAQGVIWTVFNQ

SEQ ID NO: 108570 - protein, 14 aa, Homo Sapiens
PCAQGVIWTVFNQT

SEQ ID NO: 108571 - protein, 14 aa, Homo Sapiens
CAQGVIWTVFNQTV

SEQ ID NO: 108572 - protein, 14 aa, Homo Sapiens
AQGVIWTVFNQTVM

SEQ ID NO: 108573 - protein, 14 aa, Homo Sapiens
QGVIWTVFNQTVML

SEQ ID NO: 108574 - protein, 14 aa, Homo Sapiens
GVIWTVFNQTVMLS

SEQ ID NO: 108575 - protein, 14 aa, Homo Sapiens
VIWTVFNQTVMLSA

SEQ ID NO: 108576 - protein, 14 aa, Homo Sapiens
IWTVFNQTVMLSAK

SEQ ID NO: 108577 - protein, 14 aa, Homo Sapiens
WTVFNQTVMLSAKQ

SEQ ID NO: 108578 - protein, 14 aa, Homo Sapiens
TVFNQTVMLSAKQL

SEQ ID NO: 108579 - protein, 14 aa, Homo Sapiens
VFNQTVMLSAKQLH

SEQ ID NO: 108580 - protein, 14 aa, Homo Sapiens
FNQTVMLSAKQLHT

SEQ ID NO: 108581 - protein, 14 aa, Homo Sapiens
NQTVMLSAKQLHTL

SEQ ID NO: 108582 - protein, 14 aa, Homo Sapiens
QTVMLSAKQLHTLS

SEQ ID NO: 108583 - protein, 14 aa, Homo Sapiens
TVMLSAKQLHTLSD

SEQ ID NO: 108584 - protein, 14 aa, Homo Sapiens
VMLSAKQLHTLSDT

SEQ ID NO: 108585 - protein, 14 aa, Homo Sapiens
MLSAKQLHTLSDTL

SEQ ID NO: 108586 - protein, 14 aa, Homo Sapiens
LSAKQLHTLSDTLW

SEQ ID NO: 108587 - protein, 14 aa, Homo Sapiens
SAKQLHTLSDTLWG

SEQ ID NO: 108588 - protein, 14 aa, Homo Sapiens
AKQLHTLSDTLWGP

SEQ ID NO: 108589 - protein, 14 aa, Homo Sapiens
KQLHTLSDTLWGPG

SEQ ID NO: 108590 - protein, 14 aa, Homo Sapiens
QLHTLSDTLWGPGD

SEQ ID NO: 108591 - protein, 14 aa, Homo Sapiens
LHTLSDTLWGPGDS

SEQ ID NO: 108592 - protein, 14 aa, Homo Sapiens
HTLSDTLWGPGDSR

SEQ ID NO: 108593 - protein, 14 aa, Homo Sapiens
TLSDTLWGPGDSRL

SEQ ID NO: 108594 - protein, 14 aa, Homo Sapiens
LSDTLWGPGDSRLQ

SEQ ID NO: 108595 - protein, 14 aa, Homo Sapiens
SDTLWGPGDSRLQL

SEQ ID NO: 108596 - protein, 14 aa, Homo Sapiens
DTLWGPGDSRLQLN

SEQ ID NO: 108597 - protein, 14 aa, Homo Sapiens
TLWGPGDSRLQLNF

SEQ ID NO: 108598 - protein, 14 aa, Homo Sapiens
LWGPGDSRLQLNFR

SEQ ID NO: 108599 - protein, 14 aa, Homo Sapiens
WGPGDSRLQLNFRA

SEQ ID NO: 108600 - protein, 14 aa, Homo Sapiens
GPGDSRLQLNFRAT

SEQ ID NO: 108601 - protein, 14 aa, Homo Sapiens
PGDSRLQLNFRATQ

SEQ ID NO: 108602 - protein, 14 aa, Homo Sapiens
GDSRLQLNFRATQP

SEQ ID NO: 108603 - protein, 14 aa, Homo Sapiens
DSRLQLNFRATQPL

SEQ ID NO: 108604 - protein, 14 aa, Homo Sapiens
SRLQLNFRATQPLN

SEQ ID NO: 108605 - protein, 14 aa, Homo Sapiens
RLQLNFRATQPLNG

SEQ ID NO: 108606 - protein, 14 aa, Homo Sapiens
LQLNFRATQPLNGR

SEQ ID NO: 108607 - protein, 14 aa, Homo Sapiens
QLNFRATQPLNGRV

SEQ ID NO: 108608 - protein, 14 aa, Homo Sapiens
LNFRATQPLNGRVI

SEQ ID NO: 108609 - protein, 14 aa, Homo Sapiens
NFRATQPLNGRVIE

SEQ ID NO: 108610 - protein, 14 aa, Homo Sapiens
FRATQPLNGRVIEA

SEQ ID NO: 108611 - protein, 14 aa, Homo Sapiens
RATQPLNGRVIEAS

SEQ ID NO: 108612 - protein, 14 aa, Homo Sapiens
ATQPLNGRVIEASF

SEQ ID NO: 108613 - protein, 14 aa, Homo Sapiens
TQPLNGRVIEASFP

SEQ ID NO: 108614 - protein, 14 aa, Homo Sapiens
QPLNGRVIEASFPA

SEQ ID NO: 108615 - protein, 14 aa, Homo Sapiens
PLNGRVIEASFPAG

SEQ ID NO: 108616 - protein, 14 aa, Homo Sapiens
LNGRVIEASFPAGV

SEQ ID NO: 108617 - protein, 14 aa, Homo Sapiens
NGRVIEASFPAGVD

SEQ ID NO: 108618 - protein, 14 aa, Homo Sapiens
GRVIEASFPAGVDS

SEQ ID NO: 108619 - protein, 14 aa, Homo Sapiens
RVIEASFPAGVDSS

SEQ ID NO: 108620 - protein, 14 aa, Homo Sapiens
VIEASFPAGVDSSP

SEQ ID NO: 108621 - protein, 14 aa, Homo Sapiens
IEASFPAGVDSSPR

SEQ ID NO: 108622 - protein, 14 aa, Homo Sapiens
EASFPAGVDSSPRA

SEQ ID NO: 108623 - protein, 14 aa, Homo Sapiens
ASFPAGVDSSPRAA

SEQ ID NO: 108624 - protein, 14 aa, Homo Sapiens
SFPAGVDSSPRAAE

SEQ ID NO: 108625 - protein, 14 aa, Homo Sapiens
FPAGVDSSPRAAEP

SEQ ID NO: 108626 - protein, 14 aa, Homo Sapiens
PAGVDSSPRAAEPV

SEQ ID NO: 108627 - protein, 14 aa, Homo Sapiens
AGVDSSPRAAEPVQ

SEQ ID NO: 108628 - protein, 14 aa, Homo Sapiens
GVDSSPRAAEPVQL

SEQ ID NO: 108629 - protein, 14 aa, Homo Sapiens
VDSSPRAAEPVQLN

SEQ ID NO: 108630 - protein, 14 aa, Homo Sapiens
DSSPRAAEPVQLNS

SEQ ID NO: 108631 - protein, 14 aa, Homo Sapiens
SSPRAAEPVQLNSC

SEQ ID NO: 108632 - protein, 14 aa, Homo Sapiens
SPRAAEPVQLNSCL

SEQ ID NO: 108633 - protein, 14 aa, Homo Sapiens
PRAAEPVQLNSCLA

SEQ ID NO: 108634 - protein, 14 aa, Homo Sapiens
RAAEPVQLNSCLAA

SEQ ID NO: 108635 - protein, 14 aa, Homo Sapiens
AAEPVQLNSCLAAG

SEQ ID NO: 108636 - protein, 14 aa, Homo Sapiens
AEPVQLNSCLAAGD

SEQ ID NO: 108637 - protein, 14 aa, Homo Sapiens
EPVQLNSCLAAGDI

SEQ ID NO: 108638 - protein, 14 aa, Homo Sapiens
PVQLNSCLAAGDIL

SEQ ID NO: 108639 - protein, 14 aa, Homo Sapiens
VQLNSCLAAGDILA

SEQ ID NO: 108640 - protein, 14 aa, Homo Sapiens
QLNSCLAAGDILAL

SEQ ID NO: 108641 - protein, 14 aa, Homo Sapiens
LNSCLAAGDILALV

SEQ ID NO: 108642 - protein, 14 aa, Homo Sapiens
NSCLAAGDILALVF

SEQ ID NO: 108643 - protein, 14 aa, Homo Sapiens
SCLAAGDILALVFG

SEQ ID NO: 108644 - protein, 14 aa, Homo Sapiens
CLAAGDILALVFGL

SEQ ID NO: 108645 - protein, 14 aa, Homo Sapiens
LAAGDILALVFGLL

SEQ ID NO: 108646 - protein, 14 aa, Homo Sapiens
AAGDILALVFGLLF

SEQ ID NO: 108647 - protein, 14 aa, Homo Sapiens
AGDILALVFGLLFA

SEQ ID NO: 108648 - protein, 14 aa, Homo Sapiens
GDILALVFGLLFAV

SEQ ID NO: 108649 - protein, 14 aa, Homo Sapiens
DILALVFGLLFAVT

SEQ ID NO: 108650 - protein, 14 aa, Homo Sapiens
ILALVFGLLFAVTS

SEQ ID NO: 108651 - protein, 14 aa, Homo Sapiens
LALVFGLLFAVTSV

SEQ ID NO: 108652 - protein, 14 aa, Homo Sapiens
ALVFGLLFAVTSVA

SEQ ID NO: 108653 - protein, 14 aa, Homo Sapiens
LVFGLLFAVTSVAF

SEQ ID NO: 108654 - protein, 14 aa, Homo Sapiens
VFGLLFAVTSVAFL

SEQ ID NO: 108655 - protein, 14 aa, Homo Sapiens
FGLLFAVTSVAFLV

SEQ ID NO: 108656 - protein, 14 aa, Homo Sapiens
GLLFAVTSVAFLVQ

SEQ ID NO: 108657 - protein, 14 aa, Homo Sapiens
LLFAVTSVAFLVQM

SEQ ID NO: 108658 - protein, 14 aa, Homo Sapiens
LFAVTSVAFLVQMR

SEQ ID NO: 108659 - protein, 14 aa, Homo Sapiens
FAVTSVAFLVQMRR

SEQ ID NO: 108660 - protein, 14 aa, Homo Sapiens
AVTSVAFLVQMRRQ

SEQ ID NO: 108661 - protein, 14 aa, Homo Sapiens
VTSVAFLVQMRRQH

SEQ ID NO: 108662 - protein, 14 aa, Homo Sapiens
TSVAFLVQMRRQHR

SEQ ID NO: 108663 - protein, 14 aa, Homo Sapiens
SVAFLVQMRRQHRR

SEQ ID NO: 108664 - protein, 14 aa, Homo Sapiens
VAFLVQMRRQHRRG

SEQ ID NO: 108665 - protein, 14 aa, Homo Sapiens
AFLVQMRRQHRRGT

SEQ ID NO: 108666 - protein, 14 aa, Homo Sapiens
FLVQMRRQHRRGTK

SEQ ID NO: 108667 - protein, 14 aa, Homo Sapiens
LVQMRRQHRRGTKG

SEQ ID NO: 108668 - protein, 14 aa, Homo Sapiens
VQMRRQHRRGTKGG

SEQ ID NO: 108669 - protein, 14 aa, Homo Sapiens
QMRRQHRRGTKGGV

SEQ ID NO: 108670 - protein, 14 aa, Homo Sapiens
MRRQHRRGTKGGVS

SEQ ID NO: 108671 - protein, 14 aa, Homo Sapiens
RRQHRRGTKGGVSY

SEQ ID NO: 108672 - protein, 14 aa, Homo Sapiens
RQHRRGTKGGVSYR

SEQ ID NO: 108673 - protein, 14 aa, Homo Sapiens
QHRRGTKGGVSYRP

SEQ ID NO: 108674 - protein, 14 aa, Homo Sapiens
HRRGTKGGVSYRPA

SEQ ID NO: 108675 - protein, 14 aa, Homo Sapiens
RRGTKGGVSYRPAE

SEQ ID NO: 108676 - protein, 14 aa, Homo Sapiens
RGTKGGVSYRPAEV

SEQ ID NO: 108677 - protein, 14 aa, Homo Sapiens
GTKGGVSYRPAEVA

SEQ ID NO: 108678 - protein, 14 aa, Homo Sapiens
TKGGVSYRPAEVAE

SEQ ID NO: 108679 - protein, 14 aa, Homo Sapiens
KGGVSYRPAEVAET

SEQ ID NO: 108680 - protein, 14 aa, Homo Sapiens
GGVSYRPAEVAETG

SEQ ID NO: 108681 - protein, 14 aa, Homo Sapiens
GVSYRPAEVAETGA

SEQ ID NO: 108682 - protein, 15 aa, Homo Sapiens
MAPLCPSPWLPLLIP

SEQ ID NO: 108683 - protein, 15 aa, Homo Sapiens
APLCPSPWLPLLIPA

SEQ ID NO: 108684 - protein, 15 aa, Homo Sapiens
PLCPSPWLPLLIPAP

SEQ ID NO: 108685 - protein, 15 aa, Homo Sapiens
LCPSPWLPLLIPAPA

SEQ ID NO: 108686 - protein, 15 aa, Homo Sapiens
CPSPWLPLLIPAPAP

SEQ ID NO: 108687 - protein, 15 aa, Homo Sapiens
PSPWLPLLIPAPAPG

SEQ ID NO: 108688 - protein, 15 aa, Homo Sapiens
SPWLPLLIPAPAPGL

SEQ ID NO: 108689 - protein, 15 aa, Homo Sapiens
PWLPLLIPAPAPGLT

SEQ ID NO: 108690 - protein, 15 aa, Homo Sapiens
WLPLLIPAPAPGLTV

SEQ ID NO: 108691 - protein, 15 aa, Homo Sapiens
LPLLIPAPAPGLTVQ

SEQ ID NO: 108692 - protein, 15 aa, Homo Sapiens
PLLIPAPAPGLTVQL

SEQ ID NO: 108693 - protein, 15 aa, Homo Sapiens
LLIPAPAPGLTVQLL

SEQ ID NO: 108694 - protein, 15 aa, Homo Sapiens
LIPAPAPGLTVQLLL

SEQ ID NO: 108695 - protein, 15 aa, Homo Sapiens
IPAPAPGLTVQLLLS

SEQ ID NO: 108696 - protein, 15 aa, Homo Sapiens
PAPAPGLTVQLLLSL

SEQ ID NO: 108697 - protein, 15 aa, Homo Sapiens
APAPGLTVQLLLSLL

SEQ ID NO: 108698 - protein, 15 aa, Homo Sapiens
PAPGLTVQLLLSLLL

SEQ ID NO: 108699 - protein, 15 aa, Homo Sapiens
APGLTVQLLLSLLLL

SEQ ID NO: 108700 - protein, 15 aa, Homo Sapiens
PGLTVQLLLSLLLLM

SEQ ID NO: 108701 - protein, 15 aa, Homo Sapiens
GLTVQLLLSLLLLMP

SEQ ID NO: 108702 - protein, 15 aa, Homo Sapiens
LTVQLLLSLLLLMPV

SEQ ID NO: 108703 - protein, 15 aa, Homo Sapiens
TVQLLLSLLLLMPVH

SEQ ID NO: 108704 - protein, 15 aa, Homo Sapiens
VQLLLSLLLLMPVHP

SEQ ID NO: 108705 - protein, 15 aa, Homo Sapiens
QLLLSLLLLMPVHPQ

SEQ ID NO: 108706 - protein, 15 aa, Homo Sapiens
LLLSLLLLMPVHPQR

SEQ ID NO: 108707 - protein, 15 aa, Homo Sapiens
LLSLLLLMPVHPQRL

SEQ ID NO: 108708 - protein, 15 aa, Homo Sapiens
LSLLLLMPVHPQRLP

SEQ ID NO: 108709 - protein, 15 aa, Homo Sapiens
SLLLLMPVHPQRLPR

SEQ ID NO: 108710 - protein, 15 aa, Homo Sapiens
LLLLMPVHPQRLPRM

SEQ ID NO: 108711 - protein, 15 aa, Homo Sapiens
LLLMPVHPQRLPRMQ

SEQ ID NO: 108712 - protein, 15 aa, Homo Sapiens
LLMPVHPQRLPRMQE

SEQ ID NO: 108713 - protein, 15 aa, Homo Sapiens
LMPVHPQRLPRMQED

SEQ ID NO: 108714 - protein, 15 aa, Homo Sapiens
MPVHPQRLPRMQEDS

SEQ ID NO: 108715 - protein, 15 aa, Homo Sapiens
PVHPQRLPRMQEDSP

SEQ ID NO: 108716 - protein, 15 aa, Homo Sapiens
VHPQRLPRMQEDSPL

SEQ ID NO: 108717 - protein, 15 aa, Homo Sapiens
HPQRLPRMQEDSPLG

SEQ ID NO: 108718 - protein, 15 aa, Homo Sapiens
PQRLPRMQEDSPLGG

SEQ ID NO: 108719 - protein, 15 aa, Homo Sapiens
QRLPRMQEDSPLGGG

SEQ ID NO: 108720 - protein, 15 aa, Homo Sapiens
RLPRMQEDSPLGGGS

SEQ ID NO: 108721 - protein, 15 aa, Homo Sapiens
LPRMQEDSPLGGGSS

SEQ ID NO: 108722 - protein, 15 aa, Homo Sapiens
PRMQEDSPLGGGSSG

SEQ ID NO: 108723 - protein, 15 aa, Homo Sapiens
RMQEDSPLGGGSSGE

SEQ ID NO: 108724 - protein, 15 aa, Homo Sapiens
MQEDSPLGGGSSGED

SEQ ID NO: 108725 - protein, 15 aa, Homo Sapiens
QEDSPLGGGSSGEDD

SEQ ID NO: 108726 - protein, 15 aa, Homo Sapiens
EDSPLGGGSSGEDDP

SEQ ID NO: 108727 - protein, 15 aa, Homo Sapiens
DSPLGGGSSGEDDPL

SEQ ID NO: 108728 - protein, 15 aa, Homo Sapiens
SPLGGGSSGEDDPLG

SEQ ID NO: 108729 - protein, 15 aa, Homo Sapiens
PLGGGSSGEDDPLGE

SEQ ID NO: 108730 - protein, 15 aa, Homo Sapiens
LGGGSSGEDDPLGEE

SEQ ID NO: 108731 - protein, 15 aa, Homo Sapiens
GGGSSGEDDPLGEED

SEQ ID NO: 108732 - protein, 15 aa, Homo Sapiens
GGSSGEDDPLGEEDL

SEQ ID NO: 108733 - protein, 15 aa, Homo Sapiens
GSSGEDDPLGEEDLP

SEQ ID NO: 108734 - protein, 15 aa, Homo Sapiens
SSGEDDPLGEEDLPS

SEQ ID NO: 108735 - protein, 15 aa, Homo Sapiens
SGEDDPLGEEDLPSE

SEQ ID NO: 108736 - protein, 15 aa, Homo Sapiens
GEDDPLGEEDLPSEE

SEQ ID NO: 108737 - protein, 15 aa, Homo Sapiens
EDDPLGEEDLPSEED

SEQ ID NO: 108738 - protein, 15 aa, Homo Sapiens
DDPLGEEDLPSEEDS

SEQ ID NO: 108739 - protein, 15 aa, Homo Sapiens
DPLGEEDLPSEEDSP

SEQ ID NO: 108740 - protein, 15 aa, Homo Sapiens
PLGEEDLPSEEDSPR

SEQ ID NO: 108741 - protein, 15 aa, Homo Sapiens
LGEEDLPSEEDSPRE

SEQ ID NO: 108742 - protein, 15 aa, Homo Sapiens
GEEDLPSEEDSPREE

SEQ ID NO: 108743 - protein, 15 aa, Homo Sapiens
EEDLPSEEDSPREED

SEQ ID NO: 108744 - protein, 15 aa, Homo Sapiens
EDLPSEEDSPREEDP

SEQ ID NO: 108745 - protein, 15 aa, Homo Sapiens
DLPSEEDSPREEDPP

SEQ ID NO: 108746 - protein, 15 aa, Homo Sapiens
LPSEEDSPREEDPPG

SEQ ID NO: 108747 - protein, 15 aa, Homo Sapiens
PSEEDSPREEDPPGE

SEQ ID NO: 108748 - protein, 15 aa, Homo Sapiens
SEEDSPREEDPPGEE

SEQ ID NO: 108749 - protein, 15 aa, Homo Sapiens
EEDSPREEDPPGEED

SEQ ID NO: 108750 - protein, 15 aa, Homo Sapiens
EDSPREEDPPGEEDL

SEQ ID NO: 108751 - protein, 15 aa, Homo Sapiens
DSPREEDPPGEEDLP

SEQ ID NO: 108752 - protein, 15 aa, Homo Sapiens
SPREEDPPGEEDLPG

SEQ ID NO: 108753 - protein, 15 aa, Homo Sapiens
PREEDPPGEEDLPGE

SEQ ID NO: 108754 - protein, 15 aa, Homo Sapiens
REEDPPGEEDLPGEE

SEQ ID NO: 108755 - protein, 15 aa, Homo Sapiens
EEDPPGEEDLPGEED

SEQ ID NO: 108756 - protein, 15 aa, Homo Sapiens
EDPPGEEDLPGEEDL

SEQ ID NO: 108757 - protein, 15 aa, Homo Sapiens
DPPGEEDLPGEEDLP

SEQ ID NO: 108758 - protein, 15 aa, Homo Sapiens
PPGEEDLPGEEDLPG

SEQ ID NO: 108759 - protein, 15 aa, Homo Sapiens
PGEEDLPGEEDLPGE

SEQ ID NO: 108760 - protein, 15 aa, Homo Sapiens
GEEDLPGEEDLPGEE

SEQ ID NO: 108761 - protein, 15 aa, Homo Sapiens
EEDLPGEEDLPGEED

SEQ ID NO: 108762 - protein, 15 aa, Homo Sapiens
EDLPGEEDLPGEEDL

SEQ ID NO: 108763 - protein, 15 aa, Homo Sapiens
DLPGEEDLPGEEDLP

SEQ ID NO: 108764 - protein, 15 aa, Homo Sapiens
LPGEEDLPGEEDLPE

SEQ ID NO: 108765 - protein, 15 aa, Homo Sapiens
PGEEDLPGEEDLPEV

SEQ ID NO: 108766 - protein, 15 aa, Homo Sapiens
GEEDLPGEEDLPEVK

SEQ ID NO: 108767 - protein, 15 aa, Homo Sapiens
EEDLPGEEDLPEVKP

SEQ ID NO: 108768 - protein, 15 aa, Homo Sapiens
EDLPGEEDLPEVKPK

SEQ ID NO: 108769 - protein, 15 aa, Homo Sapiens
DLPGEEDLPEVKPKS

SEQ ID NO: 108770 - protein, 15 aa, Homo Sapiens
LPGEEDLPEVKPKSE

SEQ ID NO: 108771 - protein, 15 aa, Homo Sapiens
PGEEDLPEVKPKSEE

SEQ ID NO: 108772 - protein, 15 aa, Homo Sapiens
GEEDLPEVKPKSEEE

SEQ ID NO: 108773 - protein, 15 aa, Homo Sapiens
EEDLPEVKPKSEEEG

SEQ ID NO: 108774 - protein, 15 aa, Homo Sapiens
EDLPEVKPKSEEEGS

SEQ ID NO: 108775 - protein, 15 aa, Homo Sapiens
DLPEVKPKSEEEGSL

SEQ ID NO: 108776 - protein, 15 aa, Homo Sapiens
LPEVKPKSEEEGSLK

SEQ ID NO: 108777 - protein, 15 aa, Homo Sapiens
PEVKPKSEEEGSLKL

SEQ ID NO: 108778 - protein, 15 aa, Homo Sapiens
EVKPKSEEEGSLKLE

SEQ ID NO: 108779 - protein, 15 aa, Homo Sapiens
VKPKSEEEGSLKLED

SEQ ID NO: 108780 - protein, 15 aa, Homo Sapiens
KPKSEEEGSLKLEDL

SEQ ID NO: 108781 - protein, 15 aa, Homo Sapiens
PKSEEEGSLKLEDLP

SEQ ID NO: 108782 - protein, 15 aa, Homo Sapiens
KSEEEGSLKLEDLPT

SEQ ID NO: 108783 - protein, 15 aa, Homo Sapiens
SEEEGSLKLEDLPTV

SEQ ID NO: 108784 - protein, 15 aa, Homo Sapiens
EEEGSLKLEDLPTVE

SEQ ID NO: 108785 - protein, 15 aa, Homo Sapiens
EEGSLKLEDLPTVEA

SEQ ID NO: 108786 - protein, 15 aa, Homo Sapiens
EGSLKLEDLPTVEAP

SEQ ID NO: 108787 - protein, 15 aa, Homo Sapiens
GSLKLEDLPTVEAPG

SEQ ID NO: 108788 - protein, 15 aa, Homo Sapiens
SLKLEDLPTVEAPGD

SEQ ID NO: 108789 - protein, 15 aa, Homo Sapiens
LKLEDLPTVEAPGDP

SEQ ID NO: 108790 - protein, 15 aa, Homo Sapiens
KLEDLPTVEAPGDPQ

SEQ ID NO: 108791 - protein, 15 aa, Homo Sapiens
LEDLPTVEAPGDPQE

SEQ ID NO: 108792 - protein, 15 aa, Homo Sapiens
EDLPTVEAPGDPQEP

SEQ ID NO: 108793 - protein, 15 aa, Homo Sapiens
DLPTVEAPGDPQEPQ

SEQ ID NO: 108794 - protein, 15 aa, Homo Sapiens
LPTVEAPGDPQEPQN

SEQ ID NO: 108795 - protein, 15 aa, Homo Sapiens
PTVEAPGDPQEPQNN

SEQ ID NO: 108796 - protein, 15 aa, Homo Sapiens
TVEAPGDPQEPQNNA

SEQ ID NO: 108797 - protein, 15 aa, Homo Sapiens
VEAPGDPQEPQNNAH

SEQ ID NO: 108798 - protein, 15 aa, Homo Sapiens
EAPGDPQEPQNNAHR

SEQ ID NO: 108799 - protein, 15 aa, Homo Sapiens
APGDPQEPQNNAHRD

SEQ ID NO: 108800 - protein, 15 aa, Homo Sapiens
PGDPQEPQNNAHRDK

SEQ ID NO: 108801 - protein, 15 aa, Homo Sapiens
GDPQEPQNNAHRDKE

SEQ ID NO: 108802 - protein, 15 aa, Homo Sapiens
DPQEPQNNAHRDKEG

SEQ ID NO: 108803 - protein, 15 aa, Homo Sapiens
PQEPQNNAHRDKEGD

SEQ ID NO: 108804 - protein, 15 aa, Homo Sapiens
QEPQNNAHRDKEGDD

SEQ ID NO: 108805 - protein, 15 aa, Homo Sapiens
EPQNNAHRDKEGDDQ

SEQ ID NO: 108806 - protein, 15 aa, Homo Sapiens
PQNNAHRDKEGDDQS

SEQ ID NO: 108807 - protein, 15 aa, Homo Sapiens
QNNAHRDKEGDDQSH

SEQ ID NO: 108808 - protein, 15 aa, Homo Sapiens
NNAHRDKEGDDQSHW

SEQ ID NO: 108809 - protein, 15 aa, Homo Sapiens
NAHRDKEGDDQSHWR

SEQ ID NO: 108810 - protein, 15 aa, Homo Sapiens
AHRDKEGDDQSHWRY

SEQ ID NO: 108811 - protein, 15 aa, Homo Sapiens
HRDKEGDDQSHWRYG

SEQ ID NO: 108812 - protein, 15 aa, Homo Sapiens
RDKEGDDQSHWRYGG

SEQ ID NO: 108813 - protein, 15 aa, Homo Sapiens
DKEGDDQSHWRYGGD

SEQ ID NO: 108814 - protein, 15 aa, Homo Sapiens
KEGDDQSHWRYGGDP

SEQ ID NO: 108815 - protein, 15 aa, Homo Sapiens
EGDDQSHWRYGGDPP

SEQ ID NO: 108816 - protein, 15 aa, Homo Sapiens
GDDQSHWRYGGDPPW

SEQ ID NO: 108817 - protein, 15 aa, Homo Sapiens
DDQSHWRYGGDPPWP

SEQ ID NO: 108818 - protein, 15 aa, Homo Sapiens
DQSHWRYGGDPPWPR

SEQ ID NO: 108819 - protein, 15 aa, Homo Sapiens
QSHWRYGGDPPWPRV

SEQ ID NO: 108820 - protein, 15 aa, Homo Sapiens
SHWRYGGDPPWPRVS

SEQ ID NO: 108821 - protein, 15 aa, Homo Sapiens
HWRYGGDPPWPRVSP

SEQ ID NO: 108822 - protein, 15 aa, Homo Sapiens
WRYGGDPPWPRVSPA

SEQ ID NO: 108823 - protein, 15 aa, Homo Sapiens
RYGGDPPWPRVSPAC

SEQ ID NO: 108824 - protein, 15 aa, Homo Sapiens
YGGDPPWPRVSPACA

SEQ ID NO: 108825 - protein, 15 aa, Homo Sapiens
GGDPPWPRVSPACAG

SEQ ID NO: 108826 - protein, 15 aa, Homo Sapiens
GDPPWPRVSPACAGR

SEQ ID NO: 108827 - protein, 15 aa, Homo Sapiens
DPPWPRVSPACAGRF

SEQ ID NO: 108828 - protein, 15 aa, Homo Sapiens
PPWPRVSPACAGRFQ

SEQ ID NO: 108829 - protein, 15 aa, Homo Sapiens
PWPRVSPACAGRFQS

SEQ ID NO: 108830 - protein, 15 aa, Homo Sapiens
WPRVSPACAGRFQSP

SEQ ID NO: 108831 - protein, 15 aa, Homo Sapiens
PRVSPACAGRFQSPV

SEQ ID NO: 108832 - protein, 15 aa, Homo Sapiens
RVSPACAGRFQSPVD

SEQ ID NO: 108833 - protein, 15 aa, Homo Sapiens
VSPACAGRFQSPVDI

SEQ ID NO: 108834 - protein, 15 aa, Homo Sapiens
SPACAGRFQSPVDIR

SEQ ID NO: 108835 - protein, 15 aa, Homo Sapiens
PACAGRFQSPVDIRP

SEQ ID NO: 108836 - protein, 15 aa, Homo Sapiens
ACAGRFQSPVDIRPQ

SEQ ID NO: 108837 - protein, 15 aa, Homo Sapiens
CAGRFQSPVDIRPQL

SEQ ID NO: 108838 - protein, 15 aa, Homo Sapiens
AGRFQSPVDIRPQLA

SEQ ID NO: 108839 - protein, 15 aa, Homo Sapiens
GRFQSPVDIRPQLAA

SEQ ID NO: 108840 - protein, 15 aa, Homo Sapiens
RFQSPVDIRPQLAAF

SEQ ID NO: 108841 - protein, 15 aa, Homo Sapiens
FQSPVDIRPQLAAFC

SEQ ID NO: 108842 - protein, 15 aa, Homo Sapiens
QSPVDIRPQLAAFCP

SEQ ID NO: 108843 - protein, 15 aa, Homo Sapiens
SPVDIRPQLAAFCPA

SEQ ID NO: 108844 - protein, 15 aa, Homo Sapiens
PVDIRPQLAAFCPAL

SEQ ID NO: 108845 - protein, 15 aa, Homo Sapiens
VDIRPQLAAFCPALR

SEQ ID NO: 108846 - protein, 15 aa, Homo Sapiens
DIRPQLAAFCPALRP

SEQ ID NO: 108847 - protein, 15 aa, Homo Sapiens
IRPQLAAFCPALRPL

SEQ ID NO: 108848 - protein, 15 aa, Homo Sapiens
RPQLAAFCPALRPLE

SEQ ID NO: 108849 - protein, 15 aa, Homo Sapiens
PQLAAFCPALRPLEL

SEQ ID NO: 108850 - protein, 15 aa, Homo Sapiens
QLAAFCPALRPLELL

SEQ ID NO: 108851 - protein, 15 aa, Homo Sapiens
LAAFCPALRPLELLG

SEQ ID NO: 108852 - protein, 15 aa, Homo Sapiens
AAFCPALRPLELLGF

SEQ ID NO: 108853 - protein, 15 aa, Homo Sapiens
AFCPALRPLELLGFQ

SEQ ID NO: 108854 - protein, 15 aa, Homo Sapiens
FCPALRPLELLGFQL

SEQ ID NO: 108855 - protein, 15 aa, Homo Sapiens
CPALRPLELLGFQLP

SEQ ID NO: 108856 - protein, 15 aa, Homo Sapiens
PALRPLELLGFQLPP

SEQ ID NO: 108857 - protein, 15 aa, Homo Sapiens
ALRPLELLGFQLPPL

SEQ ID NO: 108858 - protein, 15 aa, Homo Sapiens
LRPLELLGFQLPPLP

SEQ ID NO: 108859 - protein, 15 aa, Homo Sapiens
RPLELLGFQLPPLPE

SEQ ID NO: 108860 - protein, 15 aa, Homo Sapiens
PLELLGFQLPPLPEL

SEQ ID NO: 108861 - protein, 15 aa, Homo Sapiens
LELLGFQLPPLPELR

SEQ ID NO: 108862 - protein, 15 aa, Homo Sapiens
ELLGFQLPPLPELRL

SEQ ID NO: 108863 - protein, 15 aa, Homo Sapiens
LLGFQLPPLPELRLR

SEQ ID NO: 108864 - protein, 15 aa, Homo Sapiens
LGFQLPPLPELRLRN

SEQ ID NO: 108865 - protein, 15 aa, Homo Sapiens
GFQLPPLPELRLRNN

SEQ ID NO: 108866 - protein, 15 aa, Homo Sapiens
FQLPPLPELRLRNNG

SEQ ID NO: 108867 - protein, 15 aa, Homo Sapiens
QLPPLPELRLRNNGH

SEQ ID NO: 108868 - protein, 15 aa, Homo Sapiens
LPPLPELRLRNNGHS

SEQ ID NO: 108869 - protein, 15 aa, Homo Sapiens
PPLPELRLRNNGHSV

SEQ ID NO: 108870 - protein, 15 aa, Homo Sapiens
PLPELRLRNNGHSVQ

SEQ ID NO: 108871 - protein, 15 aa, Homo Sapiens
LPELRLRNNGHSVQL

SEQ ID NO: 108872 - protein, 15 aa, Homo Sapiens
PELRLRNNGHSVQLT

SEQ ID NO: 108873 - protein, 15 aa, Homo Sapiens
ELRLRNNGHSVQLTL

SEQ ID NO: 108874 - protein, 15 aa, Homo Sapiens
LRLRNNGHSVQLTLP

SEQ ID NO: 108875 - protein, 15 aa, Homo Sapiens
RLRNNGHSVQLTLPP

SEQ ID NO: 108876 - protein, 15 aa, Homo Sapiens
LRNNGHSVQLTLPPG

SEQ ID NO: 108877 - protein, 15 aa, Homo Sapiens
RNNGHSVQLTLPPGL

SEQ ID NO: 108878 - protein, 15 aa, Homo Sapiens
NNGHSVQLTLPPGLE

SEQ ID NO: 108879 - protein, 15 aa, Homo Sapiens
NGHSVQLTLPPGLEM

SEQ ID NO: 108880 - protein, 15 aa, Homo Sapiens
GHSVQLTLPPGLEMA

SEQ ID NO: 108881 - protein, 15 aa, Homo Sapiens
HSVQLTLPPGLEMAL

SEQ ID NO: 108882 - protein, 15 aa, Homo Sapiens
SVQLTLPPGLEMALG

SEQ ID NO: 108883 - protein, 15 aa, Homo Sapiens
VQLTLPPGLEMALGP

SEQ ID NO: 108884 - protein, 15 aa, Homo Sapiens
QLTLPPGLEMALGPG

SEQ ID NO: 108885 - protein, 15 aa, Homo Sapiens
LTLPPGLEMALGPGR

SEQ ID NO: 108886 - protein, 15 aa, Homo Sapiens
TLPPGLEMALGPGRE

SEQ ID NO: 108887 - protein, 15 aa, Homo Sapiens
LPPGLEMALGPGREY

SEQ ID NO: 108888 - protein, 15 aa, Homo Sapiens
PPGLEMALGPGREYR

SEQ ID NO: 108889 - protein, 15 aa, Homo Sapiens
PGLEMALGPGREYRA

SEQ ID NO: 108890 - protein, 15 aa, Homo Sapiens
GLEMALGPGREYRAL

SEQ ID NO: 108891 - protein, 15 aa, Homo Sapiens
LEMALGPGREYRALQ

SEQ ID NO: 108892 - protein, 15 aa, Homo Sapiens
EMALGPGREYRALQL

SEQ ID NO: 108893 - protein, 15 aa, Homo Sapiens
MALGPGREYRALQLH

SEQ ID NO: 108894 - protein, 15 aa, Homo Sapiens
ALGPGREYRALQLHL

SEQ ID NO: 108895 - protein, 15 aa, Homo Sapiens
LGPGREYRALQLHLH

SEQ ID NO: 108896 - protein, 15 aa, Homo Sapiens
GPGREYRALQLHLHW

SEQ ID NO: 108897 - protein, 15 aa, Homo Sapiens
PGREYRALQLHLHWG

SEQ ID NO: 108898 - protein, 15 aa, Homo Sapiens
GREYRALQLHLHWGA

SEQ ID NO: 108899 - protein, 15 aa, Homo Sapiens
REYRALQLHLHWGAA

SEQ ID NO: 108900 - protein, 15 aa, Homo Sapiens
EYRALQLHLHWGAAG

SEQ ID NO: 108901 - protein, 15 aa, Homo Sapiens
YRALQLHLHWGAAGR

SEQ ID NO: 108902 - protein, 15 aa, Homo Sapiens
RALQLHLHWGAAGRP

SEQ ID NO: 108903 - protein, 15 aa, Homo Sapiens
ALQLHLHWGAAGRPG

SEQ ID NO: 108904 - protein, 15 aa, Homo Sapiens
LQLHLHWGAAGRPGS

SEQ ID NO: 108905 - protein, 15 aa, Homo Sapiens
QLHLHWGAAGRPGSE

SEQ ID NO: 108906 - protein, 15 aa, Homo Sapiens
LHLHWGAAGRPGSEH

SEQ ID NO: 108907 - protein, 15 aa, Homo Sapiens
HLHWGAAGRPGSEHT

SEQ ID NO: 108908 - protein, 15 aa, Homo Sapiens
LHWGAAGRPGSEHTV

SEQ ID NO: 108909 - protein, 15 aa, Homo Sapiens
HWGAAGRPGSEHTVE

SEQ ID NO: 108910 - protein, 15 aa, Homo Sapiens
WGAAGRPGSEHTVEG

SEQ ID NO: 108911 - protein, 15 aa, Homo Sapiens
GAAGRPGSEHTVEGH

SEQ ID NO: 108912 - protein, 15 aa, Homo Sapiens
AAGRPGSEHTVEGHR

SEQ ID NO: 108913 - protein, 15 aa, Homo Sapiens
AGRPGSEHTVEGHRF

SEQ ID NO: 108914 - protein, 15 aa, Homo Sapiens
GRPGSEHTVEGHRFP

SEQ ID NO: 108915 - protein, 15 aa, Homo Sapiens
RPGSEHTVEGHRFPA

SEQ ID NO: 108916 - protein, 15 aa, Homo Sapiens
PGSEHTVEGHRFPAE

SEQ ID NO: 108917 - protein, 15 aa, Homo Sapiens
GSEHTVEGHRFPAEI

SEQ ID NO: 108918 - protein, 15 aa, Homo Sapiens
SEHTVEGHRFPAEIH

SEQ ID NO: 108919 - protein, 15 aa, Homo Sapiens
EHTVEGHRFPAEIHV

SEQ ID NO: 108920 - protein, 15 aa, Homo Sapiens
HTVEGHRFPAEIHVV

SEQ ID NO: 108921 - protein, 15 aa, Homo Sapiens
TVEGHRFPAEIHVVH

SEQ ID NO: 108922 - protein, 15 aa, Homo Sapiens
VEGHRFPAEIHVVHL

SEQ ID NO: 108923 - protein, 15 aa, Homo Sapiens
EGHRFPAEIHVVHLS

SEQ ID NO: 108924 - protein, 15 aa, Homo Sapiens
GHRFPAEIHVVHLST

SEQ ID NO: 108925 - protein, 15 aa, Homo Sapiens
HRFPAEIHVVHLSTA

SEQ ID NO: 108926 - protein, 15 aa, Homo Sapiens
RFPAEIHVVHLSTAF

SEQ ID NO: 108927 - protein, 15 aa, Homo Sapiens
FPAEIHVVHLSTAFA

SEQ ID NO: 108928 - protein, 15 aa, Homo Sapiens
PAEIHVVHLSTAFAR

SEQ ID NO: 108929 - protein, 15 aa, Homo Sapiens
AEIHVVHLSTAFARV

SEQ ID NO: 108930 - protein, 15 aa, Homo Sapiens
EIHVVHLSTAFARVD

SEQ ID NO: 108931 - protein, 15 aa, Homo Sapiens
IHVVHLSTAFARVDE

SEQ ID NO: 108932 - protein, 15 aa, Homo Sapiens
HVVHLSTAFARVDEA

SEQ ID NO: 108933 - protein, 15 aa, Homo Sapiens
VVHLSTAFARVDEAL

SEQ ID NO: 108934 - protein, 15 aa, Homo Sapiens
VHLSTAFARVDEALG

SEQ ID NO: 108935 - protein, 15 aa, Homo Sapiens
HLSTAFARVDEALGR

SEQ ID NO: 108936 - protein, 15 aa, Homo Sapiens
LSTAFARVDEALGRP

SEQ ID NO: 108937 - protein, 15 aa, Homo Sapiens
STAFARVDEALGRPG

SEQ ID NO: 108938 - protein, 15 aa, Homo Sapiens
TAFARVDEALGRPGG

SEQ ID NO: 108939 - protein, 15 aa, Homo Sapiens
AFARVDEALGRPGGL

SEQ ID NO: 108940 - protein, 15 aa, Homo Sapiens
FARVDEALGRPGGLA

SEQ ID NO: 108941 - protein, 15 aa, Homo Sapiens
ARVDEALGRPGGLAV

SEQ ID NO: 108942 - protein, 15 aa, Homo Sapiens
RVDEALGRPGGLAVL

SEQ ID NO: 108943 - protein, 15 aa, Homo Sapiens
VDEALGRPGGLAVLA

SEQ ID NO: 108944 - protein, 15 aa, Homo Sapiens
DEALGRPGGLAVLAA

SEQ ID NO: 108945 - protein, 15 aa, Homo Sapiens
EALGRPGGLAVLAAF

SEQ ID NO: 108946 - protein, 15 aa, Homo Sapiens
ALGRPGGLAVLAAFL

SEQ ID NO: 108947 - protein, 15 aa, Homo Sapiens
LGRPGGLAVLAAFLE

SEQ ID NO: 108948 - protein, 15 aa, Homo Sapiens
GRPGGLAVLAAFLEE

SEQ ID NO: 108949 - protein, 15 aa, Homo Sapiens
RPGGLAVLAAFLEEG

SEQ ID NO: 108950 - protein, 15 aa, Homo Sapiens
PGGLAVLAAFLEEGP

SEQ ID NO: 108951 - protein, 15 aa, Homo Sapiens
GGLAVLAAFLEEGPE

SEQ ID NO: 108952 - protein, 15 aa, Homo Sapiens
GLAVLAAFLEEGPEE

SEQ ID NO: 108953 - protein, 15 aa, Homo Sapiens
LAVLAAFLEEGPEEN

SEQ ID NO: 108954 - protein, 15 aa, Homo Sapiens
AVLAAFLEEGPEENS

SEQ ID NO: 108955 - protein, 15 aa, Homo Sapiens
VLAAFLEEGPEENSA

SEQ ID NO: 108956 - protein, 15 aa, Homo Sapiens
LAAFLEEGPEENSAY

SEQ ID NO: 108957 - protein, 15 aa, Homo Sapiens
AAFLEEGPEENSAYE

SEQ ID NO: 108958 - protein, 15 aa, Homo Sapiens
AFLEEGPEENSAYEQ

SEQ ID NO: 108959 - protein, 15 aa, Homo Sapiens
FLEEGPEENSAYEQL

SEQ ID NO: 108960 - protein, 15 aa, Homo Sapiens
LEEGPEENSAYEQLL

SEQ ID NO: 108961 - protein, 15 aa, Homo Sapiens
EEGPEENSAYEQLLS

SEQ ID NO: 108962 - protein, 15 aa, Homo Sapiens
EGPEENSAYEQLLSR

SEQ ID NO: 108963 - protein, 15 aa, Homo Sapiens
GPEENSAYEQLLSRL

SEQ ID NO: 108964 - protein, 15 aa, Homo Sapiens
PEENSAYEQLLSRLE

SEQ ID NO: 108965 - protein, 15 aa, Homo Sapiens
EENSAYEQLLSRLEE

SEQ ID NO: 108966 - protein, 15 aa, Homo Sapiens
ENSAYEQLLSRLEEI

SEQ ID NO: 108967 - protein, 15 aa, Homo Sapiens
NSAYEQLLSRLEEIA

SEQ ID NO: 108968 - protein, 15 aa, Homo Sapiens
SAYEQLLSRLEEIAE

SEQ ID NO: 108969 - protein, 15 aa, Homo Sapiens
AYEQLLSRLEEIAEE

SEQ ID NO: 108970 - protein, 15 aa, Homo Sapiens
YEQLLSRLEEIAEEG

SEQ ID NO: 108971 - protein, 15 aa, Homo Sapiens
EQLLSRLEEIAEEGS

SEQ ID NO: 108972 - protein, 15 aa, Homo Sapiens
QLLSRLEEIAEEGSE

SEQ ID NO: 108973 - protein, 15 aa, Homo Sapiens
LLSRLEEIAEEGSET

SEQ ID NO: 108974 - protein, 15 aa, Homo Sapiens
LSRLEEIAEEGSETQ

SEQ ID NO: 108975 - protein, 15 aa, Homo Sapiens
SRLEEIAEEGSETQV

SEQ ID NO: 108976 - protein, 15 aa, Homo Sapiens
RLEEIAEEGSETQVP

SEQ ID NO: 108977 - protein, 15 aa, Homo Sapiens
LEEIAEEGSETQVPG

SEQ ID NO: 108978 - protein, 15 aa, Homo Sapiens
EEIAEEGSETQVPGL

SEQ ID NO: 108979 - protein, 15 aa, Homo Sapiens
EIAEEGSETQVPGLD

SEQ ID NO: 108980 - protein, 15 aa, Homo Sapiens
IAEEGSETQVPGLDI

SEQ ID NO: 108981 - protein, 15 aa, Homo Sapiens
AEEGSETQVPGLDIS

SEQ ID NO: 108982 - protein, 15 aa, Homo Sapiens
EEGSETQVPGLDISA

SEQ ID NO: 108983 - protein, 15 aa, Homo Sapiens
EGSETQVPGLDISAL

SEQ ID NO: 108984 - protein, 15 aa, Homo Sapiens
GSETQVPGLDISALL

SEQ ID NO: 108985 - protein, 15 aa, Homo Sapiens
SETQVPGLDISALLP

SEQ ID NO: 108986 - protein, 15 aa, Homo Sapiens
ETQVPGLDISALLPS

SEQ ID NO: 108987 - protein, 15 aa, Homo Sapiens
TQVPGLDISALLPSD

SEQ ID NO: 108988 - protein, 15 aa, Homo Sapiens
QVPGLDISALLPSDF

SEQ ID NO: 108989 - protein, 15 aa, Homo Sapiens
VPGLDISALLPSDFS

SEQ ID NO: 108990 - protein, 15 aa, Homo Sapiens
PGLDISALLPSDFSR

SEQ ID NO: 108991 - protein, 15 aa, Homo Sapiens
GLDISALLPSDFSRY

SEQ ID NO: 108992 - protein, 15 aa, Homo Sapiens
LDISALLPSDFSRYF

SEQ ID NO: 108993 - protein, 15 aa, Homo Sapiens
DISALLPSDFSRYFQ

SEQ ID NO: 108994 - protein, 15 aa, Homo Sapiens
ISALLPSDFSRYFQY

SEQ ID NO: 108995 - protein, 15 aa, Homo Sapiens
SALLPSDFSRYFQYE

SEQ ID NO: 108996 - protein, 15 aa, Homo Sapiens
ALLPSDFSRYFQYEG

SEQ ID NO: 108997 - protein, 15 aa, Homo Sapiens
LLPSDFSRYFQYEGS

SEQ ID NO: 108998 - protein, 15 aa, Homo Sapiens
LPSDFSRYFQYEGSL

SEQ ID NO: 108999 - protein, 15 aa, Homo Sapiens
PSDFSRYFQYEGSLT

SEQ ID NO: 109000 - protein, 15 aa, Homo Sapiens
SDFSRYFQYEGSLTT

SEQ ID NO: 109001 - protein, 15 aa, Homo Sapiens
DFSRYFQYEGSLTTP

SEQ ID NO: 109002 - protein, 15 aa, Homo Sapiens
FSRYFQYEGSLTTPP

SEQ ID NO: 109003 - protein, 15 aa, Homo Sapiens
SRYFQYEGSLTTPPC

SEQ ID NO: 109004 - protein, 15 aa, Homo Sapiens
RYFQYEGSLTTPPCA

SEQ ID NO: 109005 - protein, 15 aa, Homo Sapiens
YFQYEGSLTTPPCAQ

SEQ ID NO: 109006 - protein, 15 aa, Homo Sapiens
FQYEGSLTTPPCAQG

SEQ ID NO: 109007 - protein, 15 aa, Homo Sapiens
QYEGSLTTPPCAQGV

SEQ ID NO: 109008 - protein, 15 aa, Homo Sapiens
YEGSLTTPPCAQGVI

SEQ ID NO: 109009 - protein, 15 aa, Homo Sapiens
EGSLTTPPCAQGVIW

SEQ ID NO: 109010 - protein, 15 aa, Homo Sapiens
GSLTTPPCAQGVIWT

SEQ ID NO: 109011 - protein, 15 aa, Homo Sapiens
SLTTPPCAQGVIWTV

SEQ ID NO: 109012 - protein, 15 aa, Homo Sapiens
LTTPPCAQGVIWTVF

SEQ ID NO: 109013 - protein, 15 aa, Homo Sapiens
TTPPCAQGVIWTVFN

SEQ ID NO: 109014 - protein, 15 aa, Homo Sapiens
TPPCAQGVIWTVFNQ

SEQ ID NO: 109015 - protein, 15 aa, Homo Sapiens
PPCAQGVIWTVFNQT

SEQ ID NO: 109016 - protein, 15 aa, Homo Sapiens
PCAQGVIWTVFNQTV

SEQ ID NO: 109017 - protein, 15 aa, Homo Sapiens
CAQGVIWTVFNQTVM

SEQ ID NO: 109018 - protein, 15 aa, Homo Sapiens
AQGVIWTVFNQTVML

SEQ ID NO: 109019 - protein, 15 aa, Homo Sapiens
QGVIWTVFNQTVMLS

SEQ ID NO: 109020 - protein, 15 aa, Homo Sapiens
GVIWTVFNQTVMLSA

SEQ ID NO: 109021 - protein, 15 aa, Homo Sapiens
VIWTVFNQTVMLSAK

SEQ ID NO: 109022 - protein, 15 aa, Homo Sapiens
IWTVFNQTVMLSAKQ

SEQ ID NO: 109023 - protein, 15 aa, Homo Sapiens
WTVFNQTVMLSAKQL

SEQ ID NO: 109024 - protein, 15 aa, Homo Sapiens
TVFNQTVMLSAKQLH

SEQ ID NO: 109025 - protein, 15 aa, Homo Sapiens
VFNQTVMLSAKQLHT

SEQ ID NO: 109026 - protein, 15 aa, Homo Sapiens
FNQTVMLSAKQLHTL

SEQ ID NO: 109027 - protein, 15 aa, Homo Sapiens
NQTVMLSAKQLHTLS

SEQ ID NO: 109028 - protein, 15 aa, Homo Sapiens
QTVMLSAKQLHTLSD

SEQ ID NO: 109029 - protein, 15 aa, Homo Sapiens
TVMLSAKQLHTLSDT

SEQ ID NO: 109030 - protein, 15 aa, Homo Sapiens
VMLSAKQLHTLSDTL

SEQ ID NO: 109031 - protein, 15 aa, Homo Sapiens
MLSAKQLHTLSDTLW

SEQ ID NO: 109032 - protein, 15 aa, Homo Sapiens
LSAKQLHTLSDTLWG

SEQ ID NO: 109033 - protein, 15 aa, Homo Sapiens
SAKQLHTLSDTLWGP

SEQ ID NO: 109034 - protein, 15 aa, Homo Sapiens
AKQLHTLSDTLWGPG

SEQ ID NO: 109035 - protein, 15 aa, Homo Sapiens
KQLHTLSDTLWGPGD

SEQ ID NO: 109036 - protein, 15 aa, Homo Sapiens
QLHTLSDTLWGPGDS

SEQ ID NO: 109037 - protein, 15 aa, Homo Sapiens
LHTLSDTLWGPGDSR

SEQ ID NO: 109038 - protein, 15 aa, Homo Sapiens
HTLSDTLWGPGDSRL

SEQ ID NO: 109039 - protein, 15 aa, Homo Sapiens
TLSDTLWGPGDSRLQ

SEQ ID NO: 109040 - protein, 15 aa, Homo Sapiens
LSDTLWGPGDSRLQL

SEQ ID NO: 109041 - protein, 15 aa, Homo Sapiens
SDTLWGPGDSRLQLN

SEQ ID NO: 109042 - protein, 15 aa, Homo Sapiens
DTLWGPGDSRLQLNF

SEQ ID NO: 109043 - protein, 15 aa, Homo Sapiens
TLWGPGDSRLQLNFR

SEQ ID NO: 109044 - protein, 15 aa, Homo Sapiens
LWGPGDSRLQLNFRA

SEQ ID NO: 109045 - protein, 15 aa, Homo Sapiens
WGPGDSRLQLNFRAT

SEQ ID NO: 109046 - protein, 15 aa, Homo Sapiens
GPGDSRLQLNFRATQ

SEQ ID NO: 109047 - protein, 15 aa, Homo Sapiens
PGDSRLQLNFRATQP

SEQ ID NO: 109048 - protein, 15 aa, Homo Sapiens
GDSRLQLNFRATQPL

SEQ ID NO: 109049 - protein, 15 aa, Homo Sapiens
DSRLQLNFRATQPLN

SEQ ID NO: 109050 - protein, 15 aa, Homo Sapiens
SRLQLNFRATQPLNG

SEQ ID NO: 109051 - protein, 15 aa, Homo Sapiens
RLQLNFRATQPLNGR

SEQ ID NO: 109052 - protein, 15 aa, Homo Sapiens
LQLNFRATQPLNGRV

SEQ ID NO: 109053 - protein, 15 aa, Homo Sapiens
QLNFRATQPLNGRVI

SEQ ID NO: 109054 - protein, 15 aa, Homo Sapiens
LNFRATQPLNGRVIE

SEQ ID NO: 109055 - protein, 15 aa, Homo Sapiens
NFRATQPLNGRVIEA

SEQ ID NO: 109056 - protein, 15 aa, Homo Sapiens
FRATQPLNGRVIEAS

SEQ ID NO: 109057 - protein, 15 aa, Homo Sapiens
RATQPLNGRVIEASF

SEQ ID NO: 109058 - protein, 15 aa, Homo Sapiens
ATQPLNGRVIEASFP

SEQ ID NO: 109059 - protein, 15 aa, Homo Sapiens
TQPLNGRVIEASFPA

SEQ ID NO: 109060 - protein, 15 aa, Homo Sapiens
QPLNGRVIEASFPAG

SEQ ID NO: 109061 - protein, 15 aa, Homo Sapiens
PLNGRVIEASFPAGV

SEQ ID NO: 109062 - protein, 15 aa, Homo Sapiens
LNGRVIEASFPAGVD

SEQ ID NO: 109063 - protein, 15 aa, Homo Sapiens
NGRVIEASFPAGVDS

SEQ ID NO: 109064 - protein, 15 aa, Homo Sapiens
GRVIEASFPAGVDSS

SEQ ID NO: 109065 - protein, 15 aa, Homo Sapiens
RVIEASFPAGVDSSP

SEQ ID NO: 109066 - protein, 15 aa, Homo Sapiens
VIEASFPAGVDSSPR

SEQ ID NO: 109067 - protein, 15 aa, Homo Sapiens
IEASFPAGVDSSPRA

SEQ ID NO: 109068 - protein, 15 aa, Homo Sapiens
EASFPAGVDSSPRAA

SEQ ID NO: 109069 - protein, 15 aa, Homo Sapiens
ASFPAGVDSSPRAAE

SEQ ID NO: 109070 - protein, 15 aa, Homo Sapiens
SFPAGVDSSPRAAEP

SEQ ID NO: 109071 - protein, 15 aa, Homo Sapiens
FPAGVDSSPRAAEPV

SEQ ID NO: 109072 - protein, 15 aa, Homo Sapiens
PAGVDSSPRAAEPVQ

SEQ ID NO: 109073 - protein, 15 aa, Homo Sapiens
AGVDSSPRAAEPVQL

SEQ ID NO: 109074 - protein, 15 aa, Homo Sapiens
GVDSSPRAAEPVQLN

SEQ ID NO: 109075 - protein, 15 aa, Homo Sapiens
VDSSPRAAEPVQLNS

SEQ ID NO: 109076 - protein, 15 aa, Homo Sapiens
DSSPRAAEPVQLNSC

SEQ ID NO: 109077 - protein, 15 aa, Homo Sapiens
SSPRAAEPVQLNSCL

SEQ ID NO: 109078 - protein, 15 aa, Homo Sapiens
SPRAAEPVQLNSCLA

SEQ ID NO: 109079 - protein, 15 aa, Homo Sapiens
PRAAEPVQLNSCLAA

SEQ ID NO: 109080 - protein, 15 aa, Homo Sapiens
RAAEPVQLNSCLAAG

SEQ ID NO: 109081 - protein, 15 aa, Homo Sapiens
AAEPVQLNSCLAAGD

SEQ ID NO: 109082 - protein, 15 aa, Homo Sapiens
AEPVQLNSCLAAGDI

SEQ ID NO: 109083 - protein, 15 aa, Homo Sapiens
EPVQLNSCLAAGDIL

SEQ ID NO: 109084 - protein, 15 aa, Homo Sapiens
PVQLNSCLAAGDILA

SEQ ID NO: 109085 - protein, 15 aa, Homo Sapiens
VQLNSCLAAGDILAL

SEQ ID NO: 109086 - protein, 15 aa, Homo Sapiens
QLNSCLAAGDILALV

SEQ ID NO: 109087 - protein, 15 aa, Homo Sapiens
LNSCLAAGDILALVF

SEQ ID NO: 109088 - protein, 15 aa, Homo Sapiens
NSCLAAGDILALVFG

SEQ ID NO: 109089 - protein, 15 aa, Homo Sapiens
SCLAAGDILALVFGL

SEQ ID NO: 109090 - protein, 15 aa, Homo Sapiens
CLAAGDILALVFGLL

SEQ ID NO: 109091 - protein, 15 aa, Homo Sapiens
LAAGDILALVFGLLF

SEQ ID NO: 109092 - protein, 15 aa, Homo Sapiens
AAGDILALVFGLLFA

SEQ ID NO: 109093 - protein, 15 aa, Homo Sapiens
AGDILALVFGLLFAV

SEQ ID NO: 109094 - protein, 15 aa, Homo Sapiens
GDILALVFGLLFAVT

SEQ ID NO: 109095 - protein, 15 aa, Homo Sapiens
DILALVFGLLFAVTS

SEQ ID NO: 109096 - protein, 15 aa, Homo Sapiens
ILALVFGLLFAVTSV

SEQ ID NO: 109097 - protein, 15 aa, Homo Sapiens
LALVFGLLFAVTSVA

SEQ ID NO: 109098 - protein, 15 aa, Homo Sapiens
ALVFGLLFAVTSVAF

SEQ ID NO: 109099 - protein, 15 aa, Homo Sapiens
LVFGLLFAVTSVAFL

SEQ ID NO: 109100 - protein, 15 aa, Homo Sapiens
VFGLLFAVTSVAFLV

SEQ ID NO: 109101 - protein, 15 aa, Homo Sapiens
FGLLFAVTSVAFLVQ

SEQ ID NO: 109102 - protein, 15 aa, Homo Sapiens
GLLFAVTSVAFLVQM

SEQ ID NO: 109103 - protein, 15 aa, Homo Sapiens
LLFAVTSVAFLVQMR

SEQ ID NO: 109104 - protein, 15 aa, Homo Sapiens
LFAVTSVAFLVQMRR

SEQ ID NO: 109105 - protein, 15 aa, Homo Sapiens
FAVTSVAFLVQMRRQ

SEQ ID NO: 109106 - protein, 15 aa, Homo Sapiens
AVTSVAFLVQMRRQH

SEQ ID NO: 109107 - protein, 15 aa, Homo Sapiens
VTSVAFLVQMRRQHR

SEQ ID NO: 109108 - protein, 15 aa, Homo Sapiens
TSVAFLVQMRRQHRR

SEQ ID NO: 109109 - protein, 15 aa, Homo Sapiens
SVAFLVQMRRQHRRG

SEQ ID NO: 109110 - protein, 15 aa, Homo Sapiens
VAFLVQMRRQHRRGT

SEQ ID NO: 109111 - protein, 15 aa, Homo Sapiens
AFLVQMRRQHRRGTK

SEQ ID NO: 109112 - protein, 15 aa, Homo Sapiens
FLVQMRRQHRRGTKG

SEQ ID NO: 109113 - protein, 15 aa, Homo Sapiens
LVQMRRQHRRGTKGG

SEQ ID NO: 109114 - protein, 15 aa, Homo Sapiens
VQMRRQHRRGTKGGV

SEQ ID NO: 109115 - protein, 15 aa, Homo Sapiens
QMRRQHRRGTKGGVS

SEQ ID NO: 109116 - protein, 15 aa, Homo Sapiens
MRRQHRRGTKGGVSY

SEQ ID NO: 109117 - protein, 15 aa, Homo Sapiens
RRQHRRGTKGGVSYR

SEQ ID NO: 109118 - protein, 15 aa, Homo Sapiens
RQHRRGTKGGVSYRP

SEQ ID NO: 109119 - protein, 15 aa, Homo Sapiens
QHRRGTKGGVSYRPA

SEQ ID NO: 109120 - protein, 15 aa, Homo Sapiens
HRRGTKGGVSYRPAE

SEQ ID NO: 109121 - protein, 15 aa, Homo Sapiens
RRGTKGGVSYRPAEV

SEQ ID NO: 109122 - protein, 15 aa, Homo Sapiens
RGTKGGVSYRPAEVA

SEQ ID NO: 109123 - protein, 15 aa, Homo Sapiens
GTKGGVSYRPAEVAE

SEQ ID NO: 109124 - protein, 15 aa, Homo Sapiens
TKGGVSYRPAEVAET

SEQ ID NO: 109125 - protein, 15 aa, Homo Sapiens
KGGVSYRPAEVAETG

SEQ ID NO: 109126 - protein, 15 aa, Homo Sapiens
GGVSYRPAEVAETGA

SEQ ID NO: 109127 - protein, 16 aa, Homo Sapiens
MAPLCPSPWLPLLIPA

SEQ ID NO: 109128 - protein, 16 aa, Homo Sapiens
APLCPSPWLPLLIPAP

SEQ ID NO: 109129 - protein, 16 aa, Homo Sapiens
PLCPSPWLPLLIPAPA

SEQ ID NO: 109130 - protein, 16 aa, Homo Sapiens
LCPSPWLPLLIPAPAP

SEQ ID NO: 109131 - protein, 16 aa, Homo Sapiens
CPSPWLPLLIPAPAPG

SEQ ID NO: 109132 - protein, 16 aa, Homo Sapiens
PSPWLPLLIPAPAPGL

SEQ ID NO: 109133 - protein, 16 aa, Homo Sapiens
SPWLPLLIPAPAPGLT

SEQ ID NO: 109134 - protein, 16 aa, Homo Sapiens
PWLPLLIPAPAPGLTV

SEQ ID NO: 109135 - protein, 16 aa, Homo Sapiens
WLPLLIPAPAPGLTVQ

SEQ ID NO: 109136 - protein, 16 aa, Homo Sapiens
LPLLIPAPAPGLTVQL

SEQ ID NO: 109137 - protein, 16 aa, Homo Sapiens
PLLIPAPAPGLTVQLL

SEQ ID NO: 109138 - protein, 16 aa, Homo Sapiens
LLIPAPAPGLTVQLLL

SEQ ID NO: 109139 - protein, 16 aa, Homo Sapiens
LIPAPAPGLTVQLLLS

SEQ ID NO: 109140 - protein, 16 aa, Homo Sapiens
IPAPAPGLTVQLLLSL

SEQ ID NO: 109141 - protein, 16 aa, Homo Sapiens
PAPAPGLTVQLLLSLL

SEQ ID NO: 109142 - protein, 16 aa, Homo Sapiens
APAPGLTVQLLLSLLL

SEQ ID NO: 109143 - protein, 16 aa, Homo Sapiens
PAPGLTVQLLLSLLLL

SEQ ID NO: 109144 - protein, 16 aa, Homo Sapiens
APGLTVQLLLSLLLLM

SEQ ID NO: 109145 - protein, 16 aa, Homo Sapiens
PGLTVQLLLSLLLLMP

SEQ ID NO: 109146 - protein, 16 aa, Homo Sapiens
GLTVQLLLSLLLLMPV

SEQ ID NO: 109147 - protein, 16 aa, Homo Sapiens
LTVQLLLSLLLLMPVH

SEQ ID NO: 109148 - protein, 16 aa, Homo Sapiens
TVQLLLSLLLLMPVHP

SEQ ID NO: 109149 - protein, 16 aa, Homo Sapiens
VQLLLSLLLLMPVHPQ

SEQ ID NO: 109150 - protein, 16 aa, Homo Sapiens
QLLLSLLLLMPVHPQR

SEQ ID NO: 109151 - protein, 16 aa, Homo Sapiens
LLLSLLLLMPVHPQRL

SEQ ID NO: 109152 - protein, 16 aa, Homo Sapiens
LLSLLLLMPVHPQRLP

SEQ ID NO: 109153 - protein, 16 aa, Homo Sapiens
LSLLLLMPVHPQRLPR

SEQ ID NO: 109154 - protein, 16 aa, Homo Sapiens
SLLLLMPVHPQRLPRM

SEQ ID NO: 109155 - protein, 16 aa, Homo Sapiens
LLLLMPVHPQRLPRMQ

SEQ ID NO: 109156 - protein, 16 aa, Homo Sapiens
LLLMPVHPQRLPRMQE

SEQ ID NO: 109157 - protein, 16 aa, Homo Sapiens
LLMPVHPQRLPRMQED

SEQ ID NO: 109158 - protein, 16 aa, Homo Sapiens
LMPVHPQRLPRMQEDS

SEQ ID NO: 109159 - protein, 16 aa, Homo Sapiens
MPVHPQRLPRMQEDSP

SEQ ID NO: 109160 - protein, 16 aa, Homo Sapiens
PVHPQRLPRMQEDSPL

SEQ ID NO: 109161 - protein, 16 aa, Homo Sapiens
VHPQRLPRMQEDSPLG

SEQ ID NO: 109162 - protein, 16 aa, Homo Sapiens
HPQRLPRMQEDSPLGG

SEQ ID NO: 109163 - protein, 16 aa, Homo Sapiens
PQRLPRMQEDSPLGGG

SEQ ID NO: 109164 - protein, 16 aa, Homo Sapiens
QRLPRMQEDSPLGGGS

SEQ ID NO: 109165 - protein, 16 aa, Homo Sapiens
RLPRMQEDSPLGGGSS

SEQ ID NO: 109166 - protein, 16 aa, Homo Sapiens
LPRMQEDSPLGGGSSG

SEQ ID NO: 109167 - protein, 16 aa, Homo Sapiens
PRMQEDSPLGGGSSGE

SEQ ID NO: 109168 - protein, 16 aa, Homo Sapiens
RMQEDSPLGGGSSGED

SEQ ID NO: 109169 - protein, 16 aa, Homo Sapiens
MQEDSPLGGGSSGEDD

SEQ ID NO: 109170 - protein, 16 aa, Homo Sapiens
QEDSPLGGGSSGEDDP

SEQ ID NO: 109171 - protein, 16 aa, Homo Sapiens
EDSPLGGGSSGEDDPL

SEQ ID NO: 109172 - protein, 16 aa, Homo Sapiens
DSPLGGGSSGEDDPLG

SEQ ID NO: 109173 - protein, 16 aa, Homo Sapiens
SPLGGGSSGEDDPLGE

SEQ ID NO: 109174 - protein, 16 aa, Homo Sapiens
PLGGGSSGEDDPLGEE

SEQ ID NO: 109175 - protein, 16 aa, Homo Sapiens
LGGGSSGEDDPLGEED

SEQ ID NO: 109176 - protein, 16 aa, Homo Sapiens
GGGSSGEDDPLGEEDL

SEQ ID NO: 109177 - protein, 16 aa, Homo Sapiens
GGSSGEDDPLGEEDLP

SEQ ID NO: 109178 - protein, 16 aa, Homo Sapiens
GSSGEDDPLGEEDLPS

SEQ ID NO: 109179 - protein, 16 aa, Homo Sapiens
SSGEDDPLGEEDLPSE

SEQ ID NO: 109180 - protein, 16 aa, Homo Sapiens
SGEDDPLGEEDLPSEE

SEQ ID NO: 109181 - protein, 16 aa, Homo Sapiens
GEDDPLGEEDLPSEED

SEQ ID NO: 109182 - protein, 16 aa, Homo Sapiens
EDDPLGEEDLPSEEDS

SEQ ID NO: 109183 - protein, 16 aa, Homo Sapiens
DDPLGEEDLPSEEDSP

SEQ ID NO: 109184 - protein, 16 aa, Homo Sapiens
DPLGEEDLPSEEDSPR

SEQ ID NO: 109185 - protein, 16 aa, Homo Sapiens
PLGEEDLPSEEDSPRE

SEQ ID NO: 109186 - protein, 16 aa, Homo Sapiens
LGEEDLPSEEDSPREE

SEQ ID NO: 109187 - protein, 16 aa, Homo Sapiens
GEEDLPSEEDSPREED

SEQ ID NO: 109188 - protein, 16 aa, Homo Sapiens
EEDLPSEEDSPREEDP

SEQ ID NO: 109189 - protein, 16 aa, Homo Sapiens
EDLPSEEDSPREEDPP

SEQ ID NO: 109190 - protein, 16 aa, Homo Sapiens
DLPSEEDSPREEDPPG

SEQ ID NO: 109191 - protein, 16 aa, Homo Sapiens
LPSEEDSPREEDPPGE

SEQ ID NO: 109192 - protein, 16 aa, Homo Sapiens
PSEEDSPREEDPPGEE

SEQ ID NO: 109193 - protein, 16 aa, Homo Sapiens
SEEDSPREEDPPGEED

SEQ ID NO: 109194 - protein, 16 aa, Homo Sapiens
EEDSPREEDPPGEEDL

SEQ ID NO: 109195 - protein, 16 aa, Homo Sapiens
EDSPREEDPPGEEDLP

SEQ ID NO: 109196 - protein, 16 aa, Homo Sapiens
DSPREEDPPGEEDLPG

SEQ ID NO: 109197 - protein, 16 aa, Homo Sapiens
SPREEDPPGEEDLPGE

SEQ ID NO: 109198 - protein, 16 aa, Homo Sapiens
PREEDPPGEEDLPGEE

SEQ ID NO: 109199 - protein, 16 aa, Homo Sapiens
REEDPPGEEDLPGEED

SEQ ID NO: 109200 - protein, 16 aa, Homo Sapiens
EEDPPGEEDLPGEEDL

SEQ ID NO: 109201 - protein, 16 aa, Homo Sapiens
EDPPGEEDLPGEEDLP

SEQ ID NO: 109202 - protein, 16 aa, Homo Sapiens
DPPGEEDLPGEEDLPG

SEQ ID NO: 109203 - protein, 16 aa, Homo Sapiens
PPGEEDLPGEEDLPGE

SEQ ID NO: 109204 - protein, 16 aa, Homo Sapiens
PGEEDLPGEEDLPGEE

SEQ ID NO: 109205 - protein, 16 aa, Homo Sapiens
GEEDLPGEEDLPGEED

SEQ ID NO: 109206 - protein, 16 aa, Homo Sapiens
EEDLPGEEDLPGEEDL

SEQ ID NO: 109207 - protein, 16 aa, Homo Sapiens
EDLPGEEDLPGEEDLP

SEQ ID NO: 109208 - protein, 16 aa, Homo Sapiens
DLPGEEDLPGEEDLPE

SEQ ID NO: 109209 - protein, 16 aa, Homo Sapiens
LPGEEDLPGEEDLPEV

SEQ ID NO: 109210 - protein, 16 aa, Homo Sapiens
PGEEDLPGEEDLPEVK

SEQ ID NO: 109211 - protein, 16 aa, Homo Sapiens
GEEDLPGEEDLPEVKP

SEQ ID NO: 109212 - protein, 16 aa, Homo Sapiens
EEDLPGEEDLPEVKPK

SEQ ID NO: 109213 - protein, 16 aa, Homo Sapiens
EDLPGEEDLPEVKPKS

SEQ ID NO: 109214 - protein, 16 aa, Homo Sapiens
DLPGEEDLPEVKPKSE

SEQ ID NO: 109215 - protein, 16 aa, Homo Sapiens
LPGEEDLPEVKPKSEE

SEQ ID NO: 109216 - protein, 16 aa, Homo Sapiens
PGEEDLPEVKPKSEEE

SEQ ID NO: 109217 - protein, 16 aa, Homo Sapiens
GEEDLPEVKPKSEEEG

SEQ ID NO: 109218 - protein, 16 aa, Homo Sapiens
EEDLPEVKPKSEEEGS

SEQ ID NO: 109219 - protein, 16 aa, Homo Sapiens
EDLPEVKPKSEEEGSL

SEQ ID NO: 109220 - protein, 16 aa, Homo Sapiens
DLPEVKPKSEEEGSLK

SEQ ID NO: 109221 - protein, 16 aa, Homo Sapiens
LPEVKPKSEEEGSLKL

SEQ ID NO: 109222 - protein, 16 aa, Homo Sapiens
PEVKPKSEEEGSLKLE

SEQ ID NO: 109223 - protein, 16 aa, Homo Sapiens
EVKPKSEEEGSLKLED

SEQ ID NO: 109224 - protein, 16 aa, Homo Sapiens
VKPKSEEEGSLKLEDL

SEQ ID NO: 109225 - protein, 16 aa, Homo Sapiens
KPKSEEEGSLKLEDLP

SEQ ID NO: 109226 - protein, 16 aa, Homo Sapiens
PKSEEEGSLKLEDLPT

SEQ ID NO: 109227 - protein, 16 aa, Homo Sapiens
KSEEEGSLKLEDLPTV

SEQ ID NO: 109228 - protein, 16 aa, Homo Sapiens
SEEEGSLKLEDLPTVE

SEQ ID NO: 109229 - protein, 16 aa, Homo Sapiens
EEEGSLKLEDLPTVEA

SEQ ID NO: 109230 - protein, 16 aa, Homo Sapiens
EEGSLKLEDLPTVEAP

SEQ ID NO: 109231 - protein, 16 aa, Homo Sapiens
EGSLKLEDLPTVEAPG

SEQ ID NO: 109232 - protein, 16 aa, Homo Sapiens
GSLKLEDLPTVEAPGD

SEQ ID NO: 109233 - protein, 16 aa, Homo Sapiens
SLKLEDLPTVEAPGDP

SEQ ID NO: 109234 - protein, 16 aa, Homo Sapiens
LKLEDLPTVEAPGDPQ

SEQ ID NO: 109235 - protein, 16 aa, Homo Sapiens
KLEDLPTVEAPGDPQE

SEQ ID NO: 109236 - protein, 16 aa, Homo Sapiens
LEDLPTVEAPGDPQEP

SEQ ID NO: 109237 - protein, 16 aa, Homo Sapiens
EDLPTVEAPGDPQEPQ

SEQ ID NO: 109238 - protein, 16 aa, Homo Sapiens
DLPTVEAPGDPQEPQN

SEQ ID NO: 109239 - protein, 16 aa, Homo Sapiens
LPTVEAPGDPQEPQNN

SEQ ID NO: 109240 - protein, 16 aa, Homo Sapiens
PTVEAPGDPQEPQNNA

SEQ ID NO: 109241 - protein, 16 aa, Homo Sapiens
TVEAPGDPQEPQNNAH

SEQ ID NO: 109242 - protein, 16 aa, Homo Sapiens
VEAPGDPQEPQNNAHR

SEQ ID NO: 109243 - protein, 16 aa, Homo Sapiens
EAPGDPQEPQNNAHRD

SEQ ID NO: 109244 - protein, 16 aa, Homo Sapiens
APGDPQEPQNNAHRDK

SEQ ID NO: 109245 - protein, 16 aa, Homo Sapiens
PGDPQEPQNNAHRDKE

SEQ ID NO: 109246 - protein, 16 aa, Homo Sapiens
GDPQEPQNNAHRDKEG

SEQ ID NO: 109247 - protein, 16 aa, Homo Sapiens
DPQEPQNNAHRDKEGD

SEQ ID NO: 109248 - protein, 16 aa, Homo Sapiens
PQEPQNNAHRDKEGDD

SEQ ID NO: 109249 - protein, 16 aa, Homo Sapiens
QEPQNNAHRDKEGDDQ

SEQ ID NO: 109250 - protein, 16 aa, Homo Sapiens
EPQNNAHRDKEGDDQS

SEQ ID NO: 109251 - protein, 16 aa, Homo Sapiens
PQNNAHRDKEGDDQSH

SEQ ID NO: 109252 - protein, 16 aa, Homo Sapiens
QNNAHRDKEGDDQSHW

SEQ ID NO: 109253 - protein, 16 aa, Homo Sapiens
NNAHRDKEGDDQSHWR

SEQ ID NO: 109254 - protein, 16 aa, Homo Sapiens
NAHRDKEGDDQSHWRY

SEQ ID NO: 109255 - protein, 16 aa, Homo Sapiens
AHRDKEGDDQSHWRYG

SEQ ID NO: 109256 - protein, 16 aa, Homo Sapiens
HRDKEGDDQSHWRYGG

SEQ ID NO: 109257 - protein, 16 aa, Homo Sapiens
RDKEGDDQSHWRYGGD

SEQ ID NO: 109258 - protein, 16 aa, Homo Sapiens
DKEGDDQSHWRYGGDP

SEQ ID NO: 109259 - protein, 16 aa, Homo Sapiens
KEGDDQSHWRYGGDPP

SEQ ID NO: 109260 - protein, 16 aa, Homo Sapiens
EGDDQSHWRYGGDPPW

SEQ ID NO: 109261 - protein, 16 aa, Homo Sapiens
GDDQSHWRYGGDPPWP

SEQ ID NO: 109262 - protein, 16 aa, Homo Sapiens
DDQSHWRYGGDPPWPR

SEQ ID NO: 109263 - protein, 16 aa, Homo Sapiens
DQSHWRYGGDPPWPRV

SEQ ID NO: 109264 - protein, 16 aa, Homo Sapiens
QSHWRYGGDPPWPRVS

SEQ ID NO: 109265 - protein, 16 aa, Homo Sapiens
SHWRYGGDPPWPRVSP

SEQ ID NO: 109266 - protein, 16 aa, Homo Sapiens
HWRYGGDPPWPRVSPA

SEQ ID NO: 109267 - protein, 16 aa, Homo Sapiens
WRYGGDPPWPRVSPAC

SEQ ID NO: 109268 - protein, 16 aa, Homo Sapiens
RYGGDPPWPRVSPACA

SEQ ID NO: 109269 - protein, 16 aa, Homo Sapiens
YGGDPPWPRVSPACAG

SEQ ID NO: 109270 - protein, 16 aa, Homo Sapiens
GGDPPWPRVSPACAGR

SEQ ID NO: 109271 - protein, 16 aa, Homo Sapiens
GDPPWPRVSPACAGRF

SEQ ID NO: 109272 - protein, 16 aa, Homo Sapiens
DPPWPRVSPACAGRFQ

SEQ ID NO: 109273 - protein, 16 aa, Homo Sapiens
PPWPRVSPACAGRFQS

SEQ ID NO: 109274 - protein, 16 aa, Homo Sapiens
PWPRVSPACAGRFQSP

SEQ ID NO: 109275 - protein, 16 aa, Homo Sapiens
WPRVSPACAGRFQSPV

SEQ ID NO: 109276 - protein, 16 aa, Homo Sapiens
PRVSPACAGRFQSPVD

SEQ ID NO: 109277 - protein, 16 aa, Homo Sapiens
RVSPACAGRFQSPVDI

SEQ ID NO: 109278 - protein, 16 aa, Homo Sapiens
VSPACAGRFQSPVDIR

SEQ ID NO: 109279 - protein, 16 aa, Homo Sapiens
SPACAGRFQSPVDIRP

SEQ ID NO: 109280 - protein, 16 aa, Homo Sapiens
PACAGRFQSPVDIRPQ

SEQ ID NO: 109281 - protein, 16 aa, Homo Sapiens
ACAGRFQSPVDIRPQL

SEQ ID NO: 109282 - protein, 16 aa, Homo Sapiens
CAGRFQSPVDIRPQLA

SEQ ID NO: 109283 - protein, 16 aa, Homo Sapiens
AGRFQSPVDIRPQLAA

SEQ ID NO: 109284 - protein, 16 aa, Homo Sapiens
GRFQSPVDIRPQLAAF

SEQ ID NO: 109285 - protein, 16 aa, Homo Sapiens
RFQSPVDIRPQLAAFC

SEQ ID NO: 109286 - protein, 16 aa, Homo Sapiens
FQSPVDIRPQLAAFCP

SEQ ID NO: 109287 - protein, 16 aa, Homo Sapiens
QSPVDIRPQLAAFCPA

SEQ ID NO: 109288 - protein, 16 aa, Homo Sapiens
SPVDIRPQLAAFCPAL

SEQ ID NO: 109289 - protein, 16 aa, Homo Sapiens
PVDIRPQLAAFCPALR

SEQ ID NO: 109290 - protein, 16 aa, Homo Sapiens
VDIRPQLAAFCPALRP

SEQ ID NO: 109291 - protein, 16 aa, Homo Sapiens
DIRPQLAAFCPALRPL

SEQ ID NO: 109292 - protein, 16 aa, Homo Sapiens
IRPQLAAFCPALRPLE

SEQ ID NO: 109293 - protein, 16 aa, Homo Sapiens
RPQLAAFCPALRPLEL

SEQ ID NO: 109294 - protein, 16 aa, Homo Sapiens
PQLAAFCPALRPLELL

SEQ ID NO: 109295 - protein, 16 aa, Homo Sapiens
QLAAFCPALRPLELLG

SEQ ID NO: 109296 - protein, 16 aa, Homo Sapiens
LAAFCPALRPLELLGF

SEQ ID NO: 109297 - protein, 16 aa, Homo Sapiens
AAFCPALRPLELLGFQ

SEQ ID NO: 109298 - protein, 16 aa, Homo Sapiens
AFCPALRPLELLGFQL

SEQ ID NO: 109299 - protein, 16 aa, Homo Sapiens
FCPALRPLELLGFQLP

SEQ ID NO: 109300 - protein, 16 aa, Homo Sapiens
CPALRPLELLGFQLPP

SEQ ID NO: 109301 - protein, 16 aa, Homo Sapiens
PALRPLELLGFQLPPL

SEQ ID NO: 109302 - protein, 16 aa, Homo Sapiens
ALRPLELLGFQLPPLP

SEQ ID NO: 109303 - protein, 16 aa, Homo Sapiens
LRPLELLGFQLPPLPE

SEQ ID NO: 109304 - protein, 16 aa, Homo Sapiens
RPLELLGFQLPPLPEL

SEQ ID NO: 109305 - protein, 16 aa, Homo Sapiens
PLELLGFQLPPLPELR

SEQ ID NO: 109306 - protein, 16 aa, Homo Sapiens
LELLGFQLPPLPELRL

SEQ ID NO: 109307 - protein, 16 aa, Homo Sapiens
ELLGFQLPPLPELRLR

SEQ ID NO: 109308 - protein, 16 aa, Homo Sapiens
LLGFQLPPLPELRLRN

SEQ ID NO: 109309 - protein, 16 aa, Homo Sapiens
LGFQLPPLPELRLRNN

SEQ ID NO: 109310 - protein, 16 aa, Homo Sapiens
GFQLPPLPELRLRNNG

SEQ ID NO: 109311 - protein, 16 aa, Homo Sapiens
FQLPPLPELRLRNNGH

SEQ ID NO: 109312 - protein, 16 aa, Homo Sapiens
QLPPLPELRLRNNGHS

SEQ ID NO: 109313 - protein, 16 aa, Homo Sapiens
LPPLPELRLRNNGHSV

SEQ ID NO: 109314 - protein, 16 aa, Homo Sapiens
PPLPELRLRNNGHSVQ

SEQ ID NO: 109315 - protein, 16 aa, Homo Sapiens
PLPELRLRNNGHSVQL

SEQ ID NO: 109316 - protein, 16 aa, Homo Sapiens
LPELRLRNNGHSVQLT

SEQ ID NO: 109317 - protein, 16 aa, Homo Sapiens
PELRLRNNGHSVQLTL

SEQ ID NO: 109318 - protein, 16 aa, Homo Sapiens
ELRLRNNGHSVQLTLP

SEQ ID NO: 109319 - protein, 16 aa, Homo Sapiens
LRLRNNGHSVQLTLPP

SEQ ID NO: 109320 - protein, 16 aa, Homo Sapiens
RLRNNGHSVQLTLPPG

SEQ ID NO: 109321 - protein, 16 aa, Homo Sapiens
LRNNGHSVQLTLPPGL

SEQ ID NO: 109322 - protein, 16 aa, Homo Sapiens
RNNGHSVQLTLPPGLE

SEQ ID NO: 109323 - protein, 16 aa, Homo Sapiens
NNGHSVQLTLPPGLEM

SEQ ID NO: 109324 - protein, 16 aa, Homo Sapiens
NGHSVQLTLPPGLEMA

SEQ ID NO: 109325 - protein, 16 aa, Homo Sapiens
GHSVQLTLPPGLEMAL

SEQ ID NO: 109326 - protein, 16 aa, Homo Sapiens
HSVQLTLPPGLEMALG

SEQ ID NO: 109327 - protein, 16 aa, Homo Sapiens
SVQLTLPPGLEMALGP

SEQ ID NO: 109328 - protein, 16 aa, Homo Sapiens
VQLTLPPGLEMALGPG

SEQ ID NO: 109329 - protein, 16 aa, Homo Sapiens
QLTLPPGLEMALGPGR

SEQ ID NO: 109330 - protein, 16 aa, Homo Sapiens
LTLPPGLEMALGPGRE

SEQ ID NO: 109331 - protein, 16 aa, Homo Sapiens
TLPPGLEMALGPGREY

SEQ ID NO: 109332 - protein, 16 aa, Homo Sapiens
LPPGLEMALGPGREYR

SEQ ID NO: 109333 - protein, 16 aa, Homo Sapiens
PPGLEMALGPGREYRA

SEQ ID NO: 109334 - protein, 16 aa, Homo Sapiens
PGLEMALGPGREYRAL

SEQ ID NO: 109335 - protein, 16 aa, Homo Sapiens
GLEMALGPGREYRALQ

SEQ ID NO: 109336 - protein, 16 aa, Homo Sapiens
LEMALGPGREYRALQL

SEQ ID NO: 109337 - protein, 16 aa, Homo Sapiens
EMALGPGREYRALQLH

SEQ ID NO: 109338 - protein, 16 aa, Homo Sapiens
MALGPGREYRALQLHL

SEQ ID NO: 109339 - protein, 16 aa, Homo Sapiens
ALGPGREYRALQLHLH

SEQ ID NO: 109340 - protein, 16 aa, Homo Sapiens
LGPGREYRALQLHLHW

SEQ ID NO: 109341 - protein, 16 aa, Homo Sapiens
GPGREYRALQLHLHWG

SEQ ID NO: 109342 - protein, 16 aa, Homo Sapiens
PGREYRALQLHLHWGA

SEQ ID NO: 109343 - protein, 16 aa, Homo Sapiens
GREYRALQLHLHWGAA

SEQ ID NO: 109344 - protein, 16 aa, Homo Sapiens
REYRALQLHLHWGAAG

SEQ ID NO: 109345 - protein, 16 aa, Homo Sapiens
EYRALQLHLHWGAAGR

SEQ ID NO: 109346 - protein, 16 aa, Homo Sapiens
YRALQLHLHWGAAGRP

SEQ ID NO: 109347 - protein, 16 aa, Homo Sapiens
RALQLHLHWGAAGRPG

SEQ ID NO: 109348 - protein, 16 aa, Homo Sapiens
ALQLHLHWGAAGRPGS

SEQ ID NO: 109349 - protein, 16 aa, Homo Sapiens
LQLHLHWGAAGRPGSE

SEQ ID NO: 109350 - protein, 16 aa, Homo Sapiens
QLHLHWGAAGRPGSEH

SEQ ID NO: 109351 - protein, 16 aa, Homo Sapiens
LHLHWGAAGRPGSEHT

SEQ ID NO: 109352 - protein, 16 aa, Homo Sapiens
HLHWGAAGRPGSEHTV

SEQ ID NO: 109353 - protein, 16 aa, Homo Sapiens
LHWGAAGRPGSEHTVE

SEQ ID NO: 109354 - protein, 16 aa, Homo Sapiens
HWGAAGRPGSEHTVEG

SEQ ID NO: 109355 - protein, 16 aa, Homo Sapiens
WGAAGRPGSEHTVEGH

SEQ ID NO: 109356 - protein, 16 aa, Homo Sapiens
GAAGRPGSEHTVEGHR

SEQ ID NO: 109357 - protein, 16 aa, Homo Sapiens
AAGRPGSEHTVEGHRF

SEQ ID NO: 109358 - protein, 16 aa, Homo Sapiens
AGRPGSEHTVEGHRFP

SEQ ID NO: 109359 - protein, 16 aa, Homo Sapiens
GRPGSEHTVEGHRFPA

SEQ ID NO: 109360 - protein, 16 aa, Homo Sapiens
RPGSEHTVEGHRFPAE

SEQ ID NO: 109361 - protein, 16 aa, Homo Sapiens
PGSEHTVEGHRFPAEI

SEQ ID NO: 109362 - protein, 16 aa, Homo Sapiens
GSEHTVEGHRFPAEIH

SEQ ID NO: 109363 - protein, 16 aa, Homo Sapiens
SEHTVEGHRFPAEIHV

SEQ ID NO: 109364 - protein, 16 aa, Homo Sapiens
EHTVEGHRFPAEIHVV

SEQ ID NO: 109365 - protein, 16 aa, Homo Sapiens
HTVEGHRFPAEIHVVH

SEQ ID NO: 109366 - protein, 16 aa, Homo Sapiens
TVEGHRFPAEIHVVHL

SEQ ID NO: 109367 - protein, 16 aa, Homo Sapiens
VEGHRFPAEIHVVHLS

SEQ ID NO: 109368 - protein, 16 aa, Homo Sapiens
EGHRFPAEIHVVHLST

SEQ ID NO: 109369 - protein, 16 aa, Homo Sapiens
GHRFPAEIHVVHLSTA

SEQ ID NO: 109370 - protein, 16 aa, Homo Sapiens
HRFPAEIHVVHLSTAF

SEQ ID NO: 109371 - protein, 16 aa, Homo Sapiens
RFPAEIHVVHLSTAFA

SEQ ID NO: 109372 - protein, 16 aa, Homo Sapiens
FPAEIHVVHLSTAFAR

SEQ ID NO: 109373 - protein, 16 aa, Homo Sapiens
PAEIHVVHLSTAFARV

SEQ ID NO: 109374 - protein, 16 aa, Homo Sapiens
AEIHVVHLSTAFARVD

SEQ ID NO: 109375 - protein, 16 aa, Homo Sapiens
EIHVVHLSTAFARVDE

SEQ ID NO: 109376 - protein, 16 aa, Homo Sapiens
IHVVHLSTAFARVDEA

SEQ ID NO: 109377 - protein, 16 aa, Homo Sapiens
HVVHLSTAFARVDEAL

SEQ ID NO: 109378 - protein, 16 aa, Homo Sapiens
VVHLSTAFARVDEALG

SEQ ID NO: 109379 - protein, 16 aa, Homo Sapiens
VHLSTAFARVDEALGR

SEQ ID NO: 109380 - protein, 16 aa, Homo Sapiens
HLSTAFARVDEALGRP

SEQ ID NO: 109381 - protein, 16 aa, Homo Sapiens
LSTAFARVDEALGRPG

SEQ ID NO: 109382 - protein, 16 aa, Homo Sapiens
STAFARVDEALGRPGG

SEQ ID NO: 109383 - protein, 16 aa, Homo Sapiens
TAFARVDEALGRPGGL

SEQ ID NO: 109384 - protein, 16 aa, Homo Sapiens
AFARVDEALGRPGGLA

SEQ ID NO: 109385 - protein, 16 aa, Homo Sapiens
FARVDEALGRPGGLAV

SEQ ID NO: 109386 - protein, 16 aa, Homo Sapiens
ARVDEALGRPGGLAVL

SEQ ID NO: 109387 - protein, 16 aa, Homo Sapiens
RVDEALGRPGGLAVLA

SEQ ID NO: 109388 - protein, 16 aa, Homo Sapiens
VDEALGRPGGLAVLAA

SEQ ID NO: 109389 - protein, 16 aa, Homo Sapiens
DEALGRPGGLAVLAAF

SEQ ID NO: 109390 - protein, 16 aa, Homo Sapiens
EALGRPGGLAVLAAFL

SEQ ID NO: 109391 - protein, 16 aa, Homo Sapiens
ALGRPGGLAVLAAFLE

SEQ ID NO: 109392 - protein, 16 aa, Homo Sapiens
LGRPGGLAVLAAFLEE

SEQ ID NO: 109393 - protein, 16 aa, Homo Sapiens
GRPGGLAVLAAFLEEG

SEQ ID NO: 109394 - protein, 16 aa, Homo Sapiens
RPGGLAVLAAFLEEGP

SEQ ID NO: 109395 - protein, 16 aa, Homo Sapiens
PGGLAVLAAFLEEGPE

SEQ ID NO: 109396 - protein, 16 aa, Homo Sapiens
GGLAVLAAFLEEGPEE

SEQ ID NO: 109397 - protein, 16 aa, Homo Sapiens
GLAVLAAFLEEGPEEN

SEQ ID NO: 109398 - protein, 16 aa, Homo Sapiens
LAVLAAFLEEGPEENS

SEQ ID NO: 109399 - protein, 16 aa, Homo Sapiens
AVLAAFLEEGPEENSA

SEQ ID NO: 109400 - protein, 16 aa, Homo Sapiens
VLAAFLEEGPEENSAY

SEQ ID NO: 109401 - protein, 16 aa, Homo Sapiens
LAAFLEEGPEENSAYE

SEQ ID NO: 109402 - protein, 16 aa, Homo Sapiens
AAFLEEGPEENSAYEQ

SEQ ID NO: 109403 - protein, 16 aa, Homo Sapiens
AFLEEGPEENSAYEQL

SEQ ID NO: 109404 - protein, 16 aa, Homo Sapiens
FLEEGPEENSAYEQLL

SEQ ID NO: 109405 - protein, 16 aa, Homo Sapiens
LEEGPEENSAYEQLLS

SEQ ID NO: 109406 - protein, 16 aa, Homo Sapiens
EEGPEENSAYEQLLSR

SEQ ID NO: 109407 - protein, 16 aa, Homo Sapiens
EGPEENSAYEQLLSRL

SEQ ID NO: 109408 - protein, 16 aa, Homo Sapiens
GPEENSAYEQLLSRLE

SEQ ID NO: 109409 - protein, 16 aa, Homo Sapiens
PEENSAYEQLLSRLEE

SEQ ID NO: 109410 - protein, 16 aa, Homo Sapiens
EENSAYEQLLSRLEEI

SEQ ID NO: 109411 - protein, 16 aa, Homo Sapiens
ENSAYEQLLSRLEEIA

SEQ ID NO: 109412 - protein, 16 aa, Homo Sapiens
NSAYEQLLSRLEEIAE

SEQ ID NO: 109413 - protein, 16 aa, Homo Sapiens
SAYEQLLSRLEEIAEE

SEQ ID NO: 109414 - protein, 16 aa, Homo Sapiens
AYEQLLSRLEEIAEEG

SEQ ID NO: 109415 - protein, 16 aa, Homo Sapiens
YEQLLSRLEEIAEEGS

SEQ ID NO: 109416 - protein, 16 aa, Homo Sapiens
EQLLSRLEEIAEEGSE

SEQ ID NO: 109417 - protein, 16 aa, Homo Sapiens
QLLSRLEEIAEEGSET

SEQ ID NO: 109418 - protein, 16 aa, Homo Sapiens
LLSRLEEIAEEGSETQ

SEQ ID NO: 109419 - protein, 16 aa, Homo Sapiens
LSRLEEIAEEGSETQV

SEQ ID NO: 109420 - protein, 16 aa, Homo Sapiens
SRLEEIAEEGSETQVP

SEQ ID NO: 109421 - protein, 16 aa, Homo Sapiens
RLEEIAEEGSETQVPG

SEQ ID NO: 109422 - protein, 16 aa, Homo Sapiens
LEEIAEEGSETQVPGL

SEQ ID NO: 109423 - protein, 16 aa, Homo Sapiens
EEIAEEGSETQVPGLD

SEQ ID NO: 109424 - protein, 16 aa, Homo Sapiens
EIAEEGSETQVPGLDI

SEQ ID NO: 109425 - protein, 16 aa, Homo Sapiens
IAEEGSETQVPGLDIS

SEQ ID NO: 109426 - protein, 16 aa, Homo Sapiens
AEEGSETQVPGLDISA

SEQ ID NO: 109427 - protein, 16 aa, Homo Sapiens
EEGSETQVPGLDISAL

SEQ ID NO: 109428 - protein, 16 aa, Homo Sapiens
EGSETQVPGLDISALL

SEQ ID NO: 109429 - protein, 16 aa, Homo Sapiens
GSETQVPGLDISALLP

SEQ ID NO: 109430 - protein, 16 aa, Homo Sapiens
SETQVPGLDISALLPS

SEQ ID NO: 109431 - protein, 16 aa, Homo Sapiens
ETQVPGLDISALLPSD

SEQ ID NO: 109432 - protein, 16 aa, Homo Sapiens
TQVPGLDISALLPSDF

SEQ ID NO: 109433 - protein, 16 aa, Homo Sapiens
QVPGLDISALLPSDFS

SEQ ID NO: 109434 - protein, 16 aa, Homo Sapiens
VPGLDISALLPSDFSR

SEQ ID NO: 109435 - protein, 16 aa, Homo Sapiens
PGLDISALLPSDFSRY

SEQ ID NO: 109436 - protein, 16 aa, Homo Sapiens
GLDISALLPSDFSRYF

SEQ ID NO: 109437 - protein, 16 aa, Homo Sapiens
LDISALLPSDFSRYFQ

SEQ ID NO: 109438 - protein, 16 aa, Homo Sapiens
DISALLPSDFSRYFQY

SEQ ID NO: 109439 - protein, 16 aa, Homo Sapiens
ISALLPSDFSRYFQYE

SEQ ID NO: 109440 - protein, 16 aa, Homo Sapiens
SALLPSDFSRYFQYEG

SEQ ID NO: 109441 - protein, 16 aa, Homo Sapiens
ALLPSDFSRYFQYEGS

SEQ ID NO: 109442 - protein, 16 aa, Homo Sapiens
LLPSDFSRYFQYEGSL

SEQ ID NO: 109443 - protein, 16 aa, Homo Sapiens
LPSDFSRYFQYEGSLT

SEQ ID NO: 109444 - protein, 16 aa, Homo Sapiens
PSDFSRYFQYEGSLTT

SEQ ID NO: 109445 - protein, 16 aa, Homo Sapiens
SDFSRYFQYEGSLTTP

SEQ ID NO: 109446 - protein, 16 aa, Homo Sapiens
DFSRYFQYEGSLTTPP

SEQ ID NO: 109447 - protein, 16 aa, Homo Sapiens
FSRYFQYEGSLTTPPC

SEQ ID NO: 109448 - protein, 16 aa, Homo Sapiens
SRYFQYEGSLTTPPCA

SEQ ID NO: 109449 - protein, 16 aa, Homo Sapiens
RYFQYEGSLTTPPCAQ

SEQ ID NO: 109450 - protein, 16 aa, Homo Sapiens
YFQYEGSLTTPPCAQG

SEQ ID NO: 109451 - protein, 16 aa, Homo Sapiens
FQYEGSLTTPPCAQGV

SEQ ID NO: 109452 - protein, 16 aa, Homo Sapiens
QYEGSLTTPPCAQGVI

SEQ ID NO: 109453 - protein, 16 aa, Homo Sapiens
YEGSLTTPPCAQGVIW

SEQ ID NO: 109454 - protein, 16 aa, Homo Sapiens
EGSLTTPPCAQGVIWT

SEQ ID NO: 109455 - protein, 16 aa, Homo Sapiens
GSLTTPPCAQGVIWTV

SEQ ID NO: 109456 - protein, 16 aa, Homo Sapiens
SLTTPPCAQGVIWTVF

SEQ ID NO: 109457 - protein, 16 aa, Homo Sapiens
LTTPPCAQGVIWTVFN

SEQ ID NO: 109458 - protein, 16 aa, Homo Sapiens
TTPPCAQGVIWTVFNQ

SEQ ID NO: 109459 - protein, 16 aa, Homo Sapiens
TPPCAQGVIWTVFNQT

SEQ ID NO: 109460 - protein, 16 aa, Homo Sapiens
PPCAQGVIWTVFNQTV

SEQ ID NO: 109461 - protein, 16 aa, Homo Sapiens
PCAQGVIWTVFNQTVM

SEQ ID NO: 109462 - protein, 16 aa, Homo Sapiens
CAQGVIWTVFNQTVML

SEQ ID NO: 109463 - protein, 16 aa, Homo Sapiens
AQGVIWTVFNQTVMLS

SEQ ID NO: 109464 - protein, 16 aa, Homo Sapiens
QGVIWTVFNQTVMLSA

SEQ ID NO: 109465 - protein, 16 aa, Homo Sapiens
GVIWTVFNQTVMLSAK

SEQ ID NO: 109466 - protein, 16 aa, Homo Sapiens
VIWTVFNQTVMLSAKQ

SEQ ID NO: 109467 - protein, 16 aa, Homo Sapiens
IWTVFNQTVMLSAKQL

SEQ ID NO: 109468 - protein, 16 aa, Homo Sapiens
WTVFNQTVMLSAKQLH

SEQ ID NO: 109469 - protein, 16 aa, Homo Sapiens
TVFNQTVMLSAKQLHT

SEQ ID NO: 109470 - protein, 16 aa, Homo Sapiens
VFNQTVMLSAKQLHTL

SEQ ID NO: 109471 - protein, 16 aa, Homo Sapiens
FNQTVMLSAKQLHTLS

SEQ ID NO: 109472 - protein, 16 aa, Homo Sapiens
NQTVMLSAKQLHTLSD

SEQ ID NO: 109473 - protein, 16 aa, Homo Sapiens
QTVMLSAKQLHTLSDT

SEQ ID NO: 109474 - protein, 16 aa, Homo Sapiens
TVMLSAKQLHTLSDTL

SEQ ID NO: 109475 - protein, 16 aa, Homo Sapiens
VMLSAKQLHTLSDTLW

SEQ ID NO: 109476 - protein, 16 aa, Homo Sapiens
MLSAKQLHTLSDTLWG

SEQ ID NO: 109477 - protein, 16 aa, Homo Sapiens
LSAKQLHTLSDTLWGP

SEQ ID NO: 109478 - protein, 16 aa, Homo Sapiens
SAKQLHTLSDTLWGPG

SEQ ID NO: 109479 - protein, 16 aa, Homo Sapiens
AKQLHTLSDTLWGPGD

SEQ ID NO: 109480 - protein, 16 aa, Homo Sapiens
KQLHTLSDTLWGPGDS

SEQ ID NO: 109481 - protein, 16 aa, Homo Sapiens
QLHTLSDTLWGPGDSR

SEQ ID NO: 109482 - protein, 16 aa, Homo Sapiens
LHTLSDTLWGPGDSRL

SEQ ID NO: 109483 - protein, 16 aa, Homo Sapiens
HTLSDTLWGPGDSRLQ

SEQ ID NO: 109484 - protein, 16 aa, Homo Sapiens
TLSDTLWGPGDSRLQL

SEQ ID NO: 109485 - protein, 16 aa, Homo Sapiens
LSDTLWGPGDSRLQLN

SEQ ID NO: 109486 - protein, 16 aa, Homo Sapiens
SDTLWGPGDSRLQLNF

SEQ ID NO: 109487 - protein, 16 aa, Homo Sapiens
DTLWGPGDSRLQLNFR

SEQ ID NO: 109488 - protein, 16 aa, Homo Sapiens
TLWGPGDSRLQLNFRA

SEQ ID NO: 109489 - protein, 16 aa, Homo Sapiens
LWGPGDSRLQLNFRAT

SEQ ID NO: 109490 - protein, 16 aa, Homo Sapiens
WGPGDSRLQLNFRATQ

SEQ ID NO: 109491 - protein, 16 aa, Homo Sapiens
GPGDSRLQLNFRATQP

SEQ ID NO: 109492 - protein, 16 aa, Homo Sapiens
PGDSRLQLNFRATQPL

SEQ ID NO: 109493 - protein, 16 aa, Homo Sapiens
GDSRLQLNFRATQPLN

SEQ ID NO: 109494 - protein, 16 aa, Homo Sapiens
DSRLQLNFRATQPLNG

SEQ ID NO: 109495 - protein, 16 aa, Homo Sapiens
SRLQLNFRATQPLNGR

SEQ ID NO: 109496 - protein, 16 aa, Homo Sapiens
RLQLNFRATQPLNGRV

SEQ ID NO: 109497 - protein, 16 aa, Homo Sapiens
LQLNFRATQPLNGRVI

SEQ ID NO: 109498 - protein, 16 aa, Homo Sapiens
QLNFRATQPLNGRVIE

SEQ ID NO: 109499 - protein, 16 aa, Homo Sapiens
LNFRATQPLNGRVIEA

SEQ ID NO: 109500 - protein, 16 aa, Homo Sapiens
NFRATQPLNGRVIEAS

SEQ ID NO: 109501 - protein, 16 aa, Homo Sapiens
FRATQPLNGRVIEASF

SEQ ID NO: 109502 - protein, 16 aa, Homo Sapiens
RATQPLNGRVIEASFP

SEQ ID NO: 109503 - protein, 16 aa, Homo Sapiens
ATQPLNGRVIEASFPA

SEQ ID NO: 109504 - protein, 16 aa, Homo Sapiens
TQPLNGRVIEASFPAG

SEQ ID NO: 109505 - protein, 16 aa, Homo Sapiens
QPLNGRVIEASFPAGV

SEQ ID NO: 109506 - protein, 16 aa, Homo Sapiens
PLNGRVIEASFPAGVD

SEQ ID NO: 109507 - protein, 16 aa, Homo Sapiens
LNGRVIEASFPAGVDS

SEQ ID NO: 109508 - protein, 16 aa, Homo Sapiens
NGRVIEASFPAGVDSS

SEQ ID NO: 109509 - protein, 16 aa, Homo Sapiens
GRVIEASFPAGVDSSP

SEQ ID NO: 109510 - protein, 16 aa, Homo Sapiens
RVIEASFPAGVDSSPR

SEQ ID NO: 109511 - protein, 16 aa, Homo Sapiens
VIEASFPAGVDSSPRA

SEQ ID NO: 109512 - protein, 16 aa, Homo Sapiens
IEASFPAGVDSSPRAA

SEQ ID NO: 109513 - protein, 16 aa, Homo Sapiens
EASFPAGVDSSPRAAE

SEQ ID NO: 109514 - protein, 16 aa, Homo Sapiens
ASFPAGVDSSPRAAEP

SEQ ID NO: 109515 - protein, 16 aa, Homo Sapiens
SFPAGVDSSPRAAEPV

SEQ ID NO: 109516 - protein, 16 aa, Homo Sapiens
FPAGVDSSPRAAEPVQ

SEQ ID NO: 109517 - protein, 16 aa, Homo Sapiens
PAGVDSSPRAAEPVQL

SEQ ID NO: 109518 - protein, 16 aa, Homo Sapiens
AGVDSSPRAAEPVQLN

SEQ ID NO: 109519 - protein, 16 aa, Homo Sapiens
GVDSSPRAAEPVQLNS

SEQ ID NO: 109520 - protein, 16 aa, Homo Sapiens
VDSSPRAAEPVQLNSC

SEQ ID NO: 109521 - protein, 16 aa, Homo Sapiens
DSSPRAAEPVQLNSCL

SEQ ID NO: 109522 - protein, 16 aa, Homo Sapiens
SSPRAAEPVQLNSCLA

SEQ ID NO: 109523 - protein, 16 aa, Homo Sapiens
SPRAAEPVQLNSCLAA

SEQ ID NO: 109524 - protein, 16 aa, Homo Sapiens
PRAAEPVQLNSCLAAG

SEQ ID NO: 109525 - protein, 16 aa, Homo Sapiens
RAAEPVQLNSCLAAGD

SEQ ID NO: 109526 - protein, 16 aa, Homo Sapiens
AAEPVQLNSCLAAGDI

SEQ ID NO: 109527 - protein, 16 aa, Homo Sapiens
AEPVQLNSCLAAGDIL

SEQ ID NO: 109528 - protein, 16 aa, Homo Sapiens
EPVQLNSCLAAGDILA

SEQ ID NO: 109529 - protein, 16 aa, Homo Sapiens
PVQLNSCLAAGDILAL

SEQ ID NO: 109530 - protein, 16 aa, Homo Sapiens
VQLNSCLAAGDILALV

SEQ ID NO: 109531 - protein, 16 aa, Homo Sapiens
QLNSCLAAGDILALVF

SEQ ID NO: 109532 - protein, 16 aa, Homo Sapiens
LNSCLAAGDILALVFG

SEQ ID NO: 109533 - protein, 16 aa, Homo Sapiens
NSCLAAGDILALVFGL

SEQ ID NO: 109534 - protein, 16 aa, Homo Sapiens
SCLAAGDILALVFGLL

SEQ ID NO: 109535 - protein, 16 aa, Homo Sapiens
CLAAGDILALVFGLLF

SEQ ID NO: 109536 - protein, 16 aa, Homo Sapiens
LAAGDILALVFGLLFA

SEQ ID NO: 109537 - protein, 16 aa, Homo Sapiens
AAGDILALVFGLLFAV

SEQ ID NO: 109538 - protein, 16 aa, Homo Sapiens
AGDILALVFGLLFAVT

SEQ ID NO: 109539 - protein, 16 aa, Homo Sapiens
GDILALVFGLLFAVTS

SEQ ID NO: 109540 - protein, 16 aa, Homo Sapiens
DILALVFGLLFAVTSV

SEQ ID NO: 109541 - protein, 16 aa, Homo Sapiens
ILALVFGLLFAVTSVA

SEQ ID NO: 109542 - protein, 16 aa, Homo Sapiens
LALVFGLLFAVTSVAF

SEQ ID NO: 109543 - protein, 16 aa, Homo Sapiens
ALVFGLLFAVTSVAFL

SEQ ID NO: 109544 - protein, 16 aa, Homo Sapiens
LVFGLLFAVTSVAFLV

SEQ ID NO: 109545 - protein, 16 aa, Homo Sapiens
VFGLLFAVTSVAFLVQ

SEQ ID NO: 109546 - protein, 16 aa, Homo Sapiens
FGLLFAVTSVAFLVQM

SEQ ID NO: 109547 - protein, 16 aa, Homo Sapiens
GLLFAVTSVAFLVQMR

SEQ ID NO: 109548 - protein, 16 aa, Homo Sapiens
LLFAVTSVAFLVQMRR

SEQ ID NO: 109549 - protein, 16 aa, Homo Sapiens
LFAVTSVAFLVQMRRQ

SEQ ID NO: 109550 - protein, 16 aa, Homo Sapiens
FAVTSVAFLVQMRRQH

SEQ ID NO: 109551 - protein, 16 aa, Homo Sapiens
AVTSVAFLVQMRRQHR

SEQ ID NO: 109552 - protein, 16 aa, Homo Sapiens
VTSVAFLVQMRRQHRR

SEQ ID NO: 109553 - protein, 16 aa, Homo Sapiens
TSVAFLVQMRRQHRRG

SEQ ID NO: 109554 - protein, 16 aa, Homo Sapiens
SVAFLVQMRRQHRRGT

SEQ ID NO: 109555 - protein, 16 aa, Homo Sapiens
VAFLVQMRRQHRRGTK

SEQ ID NO: 109556 - protein, 16 aa, Homo Sapiens
AFLVQMRRQHRRGTKG

SEQ ID NO: 109557 - protein, 16 aa, Homo Sapiens
FLVQMRRQHRRGTKGG

SEQ ID NO: 109558 - protein, 16 aa, Homo Sapiens
LVQMRRQHRRGTKGGV

SEQ ID NO: 109559 - protein, 16 aa, Homo Sapiens
VQMRRQHRRGTKGGVS

SEQ ID NO: 109560 - protein, 16 aa, Homo Sapiens
QMRRQHRRGTKGGVSY

SEQ ID NO: 109561 - protein, 16 aa, Homo Sapiens
MRRQHRRGTKGGVSYR

SEQ ID NO: 109562 - protein, 16 aa, Homo Sapiens
RRQHRRGTKGGVSYRP

SEQ ID NO: 109563 - protein, 16 aa, Homo Sapiens
RQHRRGTKGGVSYRPA

SEQ ID NO: 109564 - protein, 16 aa, Homo Sapiens
QHRRGTKGGVSYRPAE

SEQ ID NO: 109565 - protein, 16 aa, Homo Sapiens
HRRGTKGGVSYRPAEV

SEQ ID NO: 109566 - protein, 16 aa, Homo Sapiens
RRGTKGGVSYRPAEVA

SEQ ID NO: 109567 - protein, 16 aa, Homo Sapiens
RGTKGGVSYRPAEVAE

SEQ ID NO: 109568 - protein, 16 aa, Homo Sapiens
GTKGGVSYRPAEVAET

SEQ ID NO: 109569 - protein, 16 aa, Homo Sapiens
TKGGVSYRPAEVAETG

SEQ ID NO: 109570 - protein, 16 aa, Homo Sapiens
KGGVSYRPAEVAETGA

SEQ ID NO: 109571 - protein, 8 aa, Homo Sapiens
HLADSPAV

SEQ ID NO: 109572 - protein, 8 aa, Homo Sapiens
FLTGMTVA

SEQ ID NO: 109573 - protein, 8 aa, Homo Sapiens
AAWMATYL

SEQ ID NO: 109574 - protein, 8 aa, Homo Sapiens
VLVSRIAA

SEQ ID NO: 109575 - protein, 8 aa, Homo Sapiens
YQSFEQVV

SEQ ID NO: 109576 - protein, 8 aa, Homo Sapiens
GALCVESV

SEQ ID NO: 109577 - protein, 8 aa, Homo Sapiens
VLLGSLFS

SEQ ID NO: 109578 - protein, 8 aa, Homo Sapiens
FLTGMTVA

SEQ ID NO: 109579 - protein, 8 aa, Homo Sapiens
HLADSPAV

SEQ ID NO: 109580 - protein, 8 aa, Homo Sapiens
YQSFEQVV

SEQ ID NO: 109581 - protein, 8 aa, Homo Sapiens
TVAGVVLL

SEQ ID NO: 109582 - protein, 8 aa, Homo Sapiens
FLSYKLSQ

SEQ ID NO: 109583 - protein, 8 aa, Homo Sapiens
MAAVKQAL

SEQ ID NO: 109584 - protein, 8 aa, Homo Sapiens
SLDAREVI

SEQ ID NO: 109585 - protein, 8 aa, Homo Sapiens
ELYGNNAA

SEQ ID NO: 109586 - protein, 8 aa, Homo Sapiens
MTVAGVVL

SEQ ID NO: 109587 - protein, 8 aa, Homo Sapiens
VLVSRIAA

SEQ ID NO: 109588 - protein, 8 aa, Homo Sapiens
SQSNRELV

SEQ ID NO: 109589 - protein, 8 aa, Homo Sapiens
FLTGMTVA

SEQ ID NO: 109590 - protein, 8 aa, Homo Sapiens
HLADSPAV

SEQ ID NO: 109591 - protein, 8 aa, Homo Sapiens
VLVSRIAA

SEQ ID NO: 109592 - protein, 8 aa, Homo Sapiens
MQVLVSRI

SEQ ID NO: 109593 - protein, 8 aa, Homo Sapiens
FLSYKLSQ

SEQ ID NO: 109594 - protein, 8 aa, Homo Sapiens
GVNWGRIV

SEQ ID NO: 109595 - protein, 8 aa, Homo Sapiens
GMTVAGVV

SEQ ID NO: 109596 - protein, 8 aa, Homo Sapiens
YQSFEQVV

SEQ ID NO: 109597 - protein, 8 aa, Homo Sapiens
RIAAWMAT

SEQ ID NO: 109598 - protein, 8 aa, Homo Sapiens
EVIPMAAV

SEQ ID NO: 109599 - protein, 8 aa, Homo Sapiens
SQSNRELV

SEQ ID NO: 109600 - protein, 8 aa, Homo Sapiens
MTVAGVVL

SEQ ID NO: 109601 - protein, 8 aa, Homo Sapiens
GALCVESV

SEQ ID NO: 109602 - protein, 8 aa, Homo Sapiens
GVVLLGSL

SEQ ID NO: 109603 - protein, 8 aa, Homo Sapiens
TVAGVVLL

SEQ ID NO: 109604 - protein, 8 aa, Homo Sapiens
HLADSPAV

SEQ ID NO: 109605 - protein, 8 aa, Homo Sapiens
SVDKEMQV

SEQ ID NO: 109606 - protein, 8 aa, Homo Sapiens
HLADSPAV

SEQ ID NO: 109607 - protein, 8 aa, Homo Sapiens
MQVLVSRI

SEQ ID NO: 109608 - protein, 8 aa, Homo Sapiens
FLTGMTVA

SEQ ID NO: 109609 - protein, 8 aa, Homo Sapiens
SQSNRELV

SEQ ID NO: 109610 - protein, 8 aa, Homo Sapiens
YQSFEQVV

SEQ ID NO: 109611 - protein, 8 aa, Homo Sapiens
RIVAFFSF

SEQ ID NO: 109612 - protein, 8 aa, Homo Sapiens
RIAAWMAT

SEQ ID NO: 109613 - protein, 8 aa, Homo Sapiens
GALCVESV

SEQ ID NO: 109614 - protein, 8 aa, Homo Sapiens
AAWMATYL

SEQ ID NO: 109615 - protein, 8 aa, Homo Sapiens
MTVAGVVL

SEQ ID NO: 109616 - protein, 8 aa, Homo Sapiens
VLVSRIAA

SEQ ID NO: 109617 - protein, 8 aa, Homo Sapiens
SEMETPSA

SEQ ID NO: 109618 - protein, 8 aa, Homo Sapiens
EVIPMAAV

SEQ ID NO: 109619 - protein, 8 aa, Homo Sapiens
SVDKEMQV

SEQ ID NO: 109620 - protein, 8 aa, Homo Sapiens
HLADSPAV

SEQ ID NO: 109621 - protein, 8 aa, Homo Sapiens
SVDKEMQV

SEQ ID NO: 109622 - protein, 8 aa, Homo Sapiens
FLTGMTVA

SEQ ID NO: 109623 - protein, 8 aa, Homo Sapiens
SLDAREVI

SEQ ID NO: 109624 - protein, 8 aa, Homo Sapiens
ELYGNNAA

SEQ ID NO: 109625 - protein, 8 aa, Homo Sapiens
TVAGVVLL

SEQ ID NO: 109626 - protein, 8 aa, Homo Sapiens
YLNDHLEP

SEQ ID NO: 109627 - protein, 8 aa, Homo Sapiens
EVIPMAAV

SEQ ID NO: 109628 - protein, 8 aa, Homo Sapiens
GMTVAGVV

SEQ ID NO: 109629 - protein, 8 aa, Homo Sapiens
VLVSRIAA

SEQ ID NO: 109630 - protein, 8 aa, Homo Sapiens
VLLGSLFS

SEQ ID NO: 109631 - protein, 8 aa, Homo Sapiens
GVNWGRIV

SEQ ID NO: 109632 - protein, 8 aa, Homo Sapiens
WFLTGMTV

SEQ ID NO: 109633 - protein, 8 aa, Homo Sapiens
SFGGALCV

SEQ ID NO: 109634 - protein, 8 aa, Homo Sapiens
SSLDAREV

SEQ ID NO: 109635 - protein, 8 aa, Homo Sapiens
DLTSQLHI

SEQ ID NO: 109636 - protein, 8 aa, Homo Sapiens
YQSFEQVV

SEQ ID NO: 109637 - protein, 8 aa, Homo Sapiens
PMAAVKQA

SEQ ID NO: 109638 - protein, 8 aa, Homo Sapiens
FLSYKLSQ

SEQ ID NO: 109639 - protein, 8 aa, Homo Sapiens
AAWMATYL

SEQ ID NO: 109640 - protein, 8 aa, Homo Sapiens
SQSNRELV

SEQ ID NO: 109641 - protein, 8 aa, Homo Sapiens
GALCVESV

SEQ ID NO: 109642 - protein, 8 aa, Homo Sapiens
HLADSPAV

SEQ ID NO: 109643 - protein, 8 aa, Homo Sapiens
ELYGNNAA

SEQ ID NO: 109644 - protein, 8 aa, Homo Sapiens
FLTGMTVA

SEQ ID NO: 109645 - protein, 8 aa, Homo Sapiens
SVDKEMQV

SEQ ID NO: 109646 - protein, 8 aa, Homo Sapiens
SLDAREVI

SEQ ID NO: 109647 - protein, 8 aa, Homo Sapiens
VLVSRIAA

SEQ ID NO: 109648 - protein, 8 aa, Homo Sapiens
YLNDHLEP

SEQ ID NO: 109649 - protein, 8 aa, Homo Sapiens
YQSFEQVV

SEQ ID NO: 109650 - protein, 8 aa, Homo Sapiens
EVIPMAAV

SEQ ID NO: 109651 - protein, 8 aa, Homo Sapiens
VLLGSLFS

SEQ ID NO: 109652 - protein, 8 aa, Homo Sapiens
FLSYKLSQ

SEQ ID NO: 109653 - protein, 8 aa, Homo Sapiens
WFLTGMTV

SEQ ID NO: 109654 - protein, 8 aa, Homo Sapiens
GMTVAGVV

SEQ ID NO: 109655 - protein, 8 aa, Homo Sapiens
HLADSPAV

SEQ ID NO: 109656 - protein, 8 aa, Homo Sapiens
SVDKEMQV

SEQ ID NO: 109657 - protein, 8 aa, Homo Sapiens
FLTGMTVA

SEQ ID NO: 109658 - protein, 8 aa, Homo Sapiens
ELYGNNAA

SEQ ID NO: 109659 - protein, 8 aa, Homo Sapiens
EVIPMAAV

SEQ ID NO: 109660 - protein, 8 aa, Homo Sapiens
TVAGVVLL

SEQ ID NO: 109661 - protein, 8 aa, Homo Sapiens
SLDAREVI

SEQ ID NO: 109662 - protein, 8 aa, Homo Sapiens
SFGGALCV

SEQ ID NO: 109663 - protein, 8 aa, Homo Sapiens
GMTVAGVV

SEQ ID NO: 109664 - protein, 8 aa, Homo Sapiens
AAWMATYL

SEQ ID NO: 109665 - protein, 8 aa, Homo Sapiens
VLVSRIAA

SEQ ID NO: 109666 - protein, 8 aa, Homo Sapiens
WFLTGMTV

SEQ ID NO: 109667 - protein, 8 aa, Homo Sapiens
FLSYKLSQ

SEQ ID NO: 109668 - protein, 8 aa, Homo Sapiens
DLTSQLHI

SEQ ID NO: 109669 - protein, 8 aa, Homo Sapiens
GVNWGRIV

SEQ ID NO: 109670 - protein, 8 aa, Homo Sapiens
PMAAVKQA

SEQ ID NO: 109671 - protein, 8 aa, Homo Sapiens
AYQSFEQV

SEQ ID NO: 109672 - protein, 8 aa, Homo Sapiens
VLLGSLFS

SEQ ID NO: 109673 - protein, 8 aa, Homo Sapiens
GALCVESV

SEQ ID NO: 109674 - protein, 8 aa, Homo Sapiens
HLADSPAV

SEQ ID NO: 109675 - protein, 8 aa, Homo Sapiens
FLTGMTVA

SEQ ID NO: 109676 - protein, 8 aa, Homo Sapiens
SVDKEMQV

SEQ ID NO: 109677 - protein, 8 aa, Homo Sapiens
SLDAREVI

SEQ ID NO: 109678 - protein, 8 aa, Homo Sapiens
TVAGVVLL

SEQ ID NO: 109679 - protein, 8 aa, Homo Sapiens
ELYGNNAA

SEQ ID NO: 109680 - protein, 8 aa, Homo Sapiens
WFLTGMTV

SEQ ID NO: 109681 - protein, 8 aa, Homo Sapiens
AAWMATYL

SEQ ID NO: 109682 - protein, 8 aa, Homo Sapiens
DLTSQLHI

SEQ ID NO: 109683 - protein, 8 aa, Homo Sapiens
VLLGSLFS

SEQ ID NO: 109684 - protein, 8 aa, Homo Sapiens
LSYKLSQK

SEQ ID NO: 109685 - protein, 8 aa, Homo Sapiens
VVDFLSYK

SEQ ID NO: 109686 - protein, 8 aa, Homo Sapiens
LLGSLFSR

SEQ ID NO: 109687 - protein, 8 aa, Homo Sapiens
VVDFLSYK

SEQ ID NO: 109688 - protein, 8 aa, Homo Sapiens
LSYKLSQK

SEQ ID NO: 109689 - protein, 8 aa, Homo Sapiens
VIPMAAVK

SEQ ID NO: 109690 - protein, 8 aa, Homo Sapiens
QVVNELFR

SEQ ID NO: 109691 - protein, 8 aa, Homo Sapiens
LVVDFLSY

SEQ ID NO: 109692 - protein, 8 aa, Homo Sapiens
NAAAESRK

SEQ ID NO: 109693 - protein, 8 aa, Homo Sapiens
NWGRIVAF

SEQ ID NO: 109694 - protein, 8 aa, Homo Sapiens
RIVAFFSF

SEQ ID NO: 109695 - protein, 8 aa, Homo Sapiens
VVLLGSLF

SEQ ID NO: 109696 - protein, 8 aa, Homo Sapiens
NWGRIVAF

SEQ ID NO: 109697 - protein, 8 aa, Homo Sapiens
AYQSFEQV

SEQ ID NO: 109698 - protein, 8 aa, Homo Sapiens
EVIPMAAV

SEQ ID NO: 109699 - protein, 8 aa, Homo Sapiens
LVVDFLSY

SEQ ID NO: 109700 - protein, 8 aa, Homo Sapiens
EVIPMAAV

SEQ ID NO: 109701 - protein, 8 aa, Homo Sapiens
LVVDFLSY

SEQ ID NO: 109702 - protein, 8 aa, Homo Sapiens
HITPGTAY

SEQ ID NO: 109703 - protein, 8 aa, Homo Sapiens
ELRYRRAF

SEQ ID NO: 109704 - protein, 8 aa, Homo Sapiens
RIVAFFSF

SEQ ID NO: 109705 - protein, 8 aa, Homo Sapiens
HITPGTAY

SEQ ID NO: 109706 - protein, 8 aa, Homo Sapiens
LVVDFLSY

SEQ ID NO: 109707 - protein, 8 aa, Homo Sapiens
KGQERFNR

SEQ ID NO: 109708 - protein, 8 aa, Homo Sapiens
LLGSLFSR

SEQ ID NO: 109709 - protein, 8 aa, Homo Sapiens
EMQVLVSR

SEQ ID NO: 109710 - protein, 8 aa, Homo Sapiens
HSSSLDAR

SEQ ID NO: 109711 - protein, 8 aa, Homo Sapiens
AAVKQALR

SEQ ID NO: 109712 - protein, 8 aa, Homo Sapiens
EFELRYRR

SEQ ID NO: 109713 - protein, 8 aa, Homo Sapiens
QVVNELFR

SEQ ID NO: 109714 - protein, 8 aa, Homo Sapiens
LSYKLSQK

SEQ ID NO: 109715 - protein, 8 aa, Homo Sapiens
EFELRYRR

SEQ ID NO: 109716 - protein, 8 aa, Homo Sapiens
EMQVLVSR

SEQ ID NO: 109717 - protein, 8 aa, Homo Sapiens
DEFELRYR

SEQ ID NO: 109718 - protein, 8 aa, Homo Sapiens
ESRKGQER

SEQ ID NO: 109719 - protein, 8 aa, Homo Sapiens
LLGSLFSR

SEQ ID NO: 109720 - protein, 8 aa, Homo Sapiens
HSSSLDAR

SEQ ID NO: 109721 - protein, 8 aa, Homo Sapiens
QVVNELFR

SEQ ID NO: 109722 - protein, 8 aa, Homo Sapiens
HSSSLDAR

SEQ ID NO: 109723 - protein, 8 aa, Homo Sapiens
NAAAESRK

SEQ ID NO: 109724 - protein, 8 aa, Homo Sapiens
LSYKLSQK

SEQ ID NO: 109725 - protein, 8 aa, Homo Sapiens
EMQVLVSR

SEQ ID NO: 109726 - protein, 8 aa, Homo Sapiens
NNAAAESR

SEQ ID NO: 109727 - protein, 8 aa, Homo Sapiens
AAVKQALR

SEQ ID NO: 109728 - protein, 8 aa, Homo Sapiens
ESRKGQER

SEQ ID NO: 109729 - protein, 8 aa, Homo Sapiens
IAAWMATY

SEQ ID NO: 109730 - protein, 8 aa, Homo Sapiens
EFELRYRR

SEQ ID NO: 109731 - protein, 8 aa, Homo Sapiens
TAYQSFEQ

SEQ ID NO: 109732 - protein, 8 aa, Homo Sapiens
VVDFLSYK

SEQ ID NO: 109733 - protein, 8 aa, Homo Sapiens
DEFELRYR

SEQ ID NO: 109734 - protein, 8 aa, Homo Sapiens
FSDVEENR

SEQ ID NO: 109735 - protein, 8 aa, Homo Sapiens
LLGSLFSR

SEQ ID NO: 109736 - protein, 8 aa, Homo Sapiens
EVIPMAAV

SEQ ID NO: 109737 - protein, 8 aa, Homo Sapiens
TVAGVVLL

SEQ ID NO: 109738 - protein, 8 aa, Homo Sapiens
TGMTVAGV

SEQ ID NO: 109739 - protein, 8 aa, Homo Sapiens
MTVAGVVL

SEQ ID NO: 109740 - protein, 8 aa, Homo Sapiens
MAAVKQAL

SEQ ID NO: 109741 - protein, 8 aa, Homo Sapiens
HLADSPAV

SEQ ID NO: 109742 - protein, 8 aa, Homo Sapiens
ERFNRWFL

SEQ ID NO: 109743 - protein, 8 aa, Homo Sapiens
DSPAVNGA

SEQ ID NO: 109744 - protein, 8 aa, Homo Sapiens
ELYGNNAA

SEQ ID NO: 109745 - protein, 8 aa, Homo Sapiens
EAGDEFEL

SEQ ID NO: 109746 - protein, 8 aa, Homo Sapiens
EVIPMAAV

SEQ ID NO: 109747 - protein, 8 aa, Homo Sapiens
HLADSPAV

SEQ ID NO: 109748 - protein, 8 aa, Homo Sapiens
ELYGNNAA

SEQ ID NO: 109749 - protein, 8 aa, Homo Sapiens
MTVAGVVL

SEQ ID NO: 109750 - protein, 8 aa, Homo Sapiens
TVAGVVLL

SEQ ID NO: 109751 - protein, 8 aa, Homo Sapiens
EAGDEFEL

SEQ ID NO: 109752 - protein, 8 aa, Homo Sapiens
SVDKEMQV

SEQ ID NO: 109753 - protein, 8 aa, Homo Sapiens
WFLTGMTV

SEQ ID NO: 109754 - protein, 8 aa, Homo Sapiens
SPAVNGAT

SEQ ID NO: 109755 - protein, 8 aa, Homo Sapiens
MAAVKQAL

SEQ ID NO: 109756 - protein, 8 aa, Homo Sapiens
AAWMATYL

SEQ ID NO: 109757 - protein, 8 aa, Homo Sapiens
ELRYRRAF

SEQ ID NO: 109758 - protein, 8 aa, Homo Sapiens
LVVDFLSY

SEQ ID NO: 109759 - protein, 8 aa, Homo Sapiens
RIVAFFSF

SEQ ID NO: 109760 - protein, 8 aa, Homo Sapiens
HITPGTAY

SEQ ID NO: 109761 - protein, 8 aa, Homo Sapiens
IAAWMATY

SEQ ID NO: 109762 - protein, 8 aa, Homo Sapiens
ELRYRRAF

SEQ ID NO: 109763 - protein, 8 aa, Homo Sapiens
VVLLGSLF

SEQ ID NO: 109764 - protein, 8 aa, Homo Sapiens
QERFNRWF

SEQ ID NO: 109765 - protein, 8 aa, Homo Sapiens
RELVVDFL

SEQ ID NO: 109766 - protein, 8 aa, Homo Sapiens
FEQVVNEL

SEQ ID NO: 109767 - protein, 8 aa, Homo Sapiens
NRWFLTGM

SEQ ID NO: 109768 - protein, 8 aa, Homo Sapiens
IAAWMATY

SEQ ID NO: 109769 - protein, 8 aa, Homo Sapiens
LVVDFLSY

SEQ ID NO: 109770 - protein, 8 aa, Homo Sapiens
MAAVKQAL

SEQ ID NO: 109771 - protein, 8 aa, Homo Sapiens
HITPGTAY

SEQ ID NO: 109772 - protein, 8 aa, Homo Sapiens
DAREVIPM

SEQ ID NO: 109773 - protein, 8 aa, Homo Sapiens
FFSFGGAL

SEQ ID NO: 109774 - protein, 8 aa, Homo Sapiens
SPAVNGAT

SEQ ID NO: 109775 - protein, 8 aa, Homo Sapiens
AAWMATYL

SEQ ID NO: 109776 - protein, 8 aa, Homo Sapiens
MTVAGVVL

SEQ ID NO: 109777 - protein, 8 aa, Homo Sapiens
RELVVDFL

SEQ ID NO: 109778 - protein, 8 aa, Homo Sapiens
FEQVVNEL

SEQ ID NO: 109779 - protein, 8 aa, Homo Sapiens
RELVVDFL

SEQ ID NO: 109780 - protein, 8 aa, Homo Sapiens
KEMQVLVS

SEQ ID NO: 109781 - protein, 8 aa, Homo Sapiens
REVIPMAA

SEQ ID NO: 109782 - protein, 8 aa, Homo Sapiens
LVSRIAAW

SEQ ID NO: 109783 - protein, 8 aa, Homo Sapiens
IAAWMATY

SEQ ID NO: 109784 - protein, 8 aa, Homo Sapiens
LSQKGYSW

SEQ ID NO: 109785 - protein, 8 aa, Homo Sapiens
KGYSWSQF

SEQ ID NO: 109786 - protein, 8 aa, Homo Sapiens
RIVAFFSF

SEQ ID NO: 109787 - protein, 8 aa, Homo Sapiens
AINGNPSW

SEQ ID NO: 109788 - protein, 9 aa, Homo Sapiens
FSDLTSQLH

SEQ ID NO: 109789 - protein, 9 aa, Homo Sapiens
FSFGGALCV

SEQ ID NO: 109790 - protein, 9 aa, Homo Sapiens
MTVAGVVLL

SEQ ID NO: 109791 - protein, 9 aa, Homo Sapiens
YLNDHLEPW

SEQ ID NO: 109792 - protein, 9 aa, Homo Sapiens
MTVAGVVLL

SEQ ID NO: 109793 - protein, 9 aa, Homo Sapiens
IAAWMATYL

SEQ ID NO: 109794 - protein, 9 aa, Homo Sapiens
FLTGMTVAG

SEQ ID NO: 109795 - protein, 9 aa, Homo Sapiens
FLSYKLSQK

SEQ ID NO: 109796 - protein, 9 aa, Homo Sapiens
LVSRIAAWM

SEQ ID NO: 109797 - protein, 9 aa, Homo Sapiens
VVDFLSYKL

SEQ ID NO: 109798 - protein, 9 aa, Homo Sapiens
ELYGNNAAA

SEQ ID NO: 109799 - protein, 9 aa, Homo Sapiens
PMAAVKQAL

SEQ ID NO: 109800 - protein, 9 aa, Homo Sapiens
GMTVAGVVL

SEQ ID NO: 109801 - protein, 9 aa, Homo Sapiens
LTGMTVAGV

SEQ ID NO: 109802 - protein, 9 aa, Homo Sapiens
MTVAGVVLL

SEQ ID NO: 109803 - protein, 9 aa, Homo Sapiens
IAAWMATYL

SEQ ID NO: 109804 - protein, 9 aa, Homo Sapiens
AVKQALREA

SEQ ID NO: 109805 - protein, 9 aa, Homo Sapiens
QLHITPGTA

SEQ ID NO: 109806 - protein, 9 aa, Homo Sapiens
YLNDHLEPW

SEQ ID NO: 109807 - protein, 9 aa, Homo Sapiens
TAYQSFEQV

SEQ ID NO: 109808 - protein, 9 aa, Homo Sapiens
FLSYKLSQK

SEQ ID NO: 109809 - protein, 9 aa, Homo Sapiens
LTGMTVAGV

SEQ ID NO: 109810 - protein, 9 aa, Homo Sapiens
MTVAGVVLL

SEQ ID NO: 109811 - protein, 9 aa, Homo Sapiens
SQLHITPGT

SEQ ID NO: 109812 - protein, 9 aa, Homo Sapiens
MTVAGVVLL

SEQ ID NO: 109813 - protein, 9 aa, Homo Sapiens
TAYQSFEQV

SEQ ID NO: 109814 - protein, 9 aa, Homo Sapiens
SQSNRELVV

SEQ ID NO: 109815 - protein, 9 aa, Homo Sapiens
FSFGGALCV

SEQ ID NO: 109816 - protein, 9 aa, Homo Sapiens
REVIPMAAV

SEQ ID NO: 109817 - protein, 9 aa, Homo Sapiens
IAAWMATYL

SEQ ID NO: 109818 - protein, 9 aa, Homo Sapiens
MQVLVSRIA

SEQ ID NO: 109819 - protein, 9 aa, Homo Sapiens
LTGMTVAGV

SEQ ID NO: 109820 - protein, 9 aa, Homo Sapiens
YLNDHLEPW

SEQ ID NO: 109821 - protein, 9 aa, Homo Sapiens
SEMETPSAI

SEQ ID NO: 109822 - protein, 9 aa, Homo Sapiens
ELYGNNAAA

SEQ ID NO: 109823 - protein, 9 aa, Homo Sapiens
FSFGGALCV

SEQ ID NO: 109824 - protein, 9 aa, Homo Sapiens
PMAAVKQAL

SEQ ID NO: 109825 - protein, 9 aa, Homo Sapiens
YLNDHLEPW

SEQ ID NO: 109826 - protein, 9 aa, Homo Sapiens
SVDKEMQVL

SEQ ID NO: 109827 - protein, 9 aa, Homo Sapiens
VVDFLSYKL

SEQ ID NO: 109828 - protein, 9 aa, Homo Sapiens
MTVAGVVLL

SEQ ID NO: 109829 - protein, 9 aa, Homo Sapiens
HITPGTAYQ

SEQ ID NO: 109830 - protein, 9 aa, Homo Sapiens
TAYQSFEQV

SEQ ID NO: 109831 - protein, 9 aa, Homo Sapiens
VLLGSLFSR

SEQ ID NO: 109832 - protein, 9 aa, Homo Sapiens
FLTGMTVAG

SEQ ID NO: 109833 - protein, 9 aa, Homo Sapiens
GVNWGRIVA

SEQ ID NO: 109834 - protein, 9 aa, Homo Sapiens
GMTVAGVVL

SEQ ID NO: 109835 - protein, 9 aa, Homo Sapiens
GGWDTFVEL

SEQ ID NO: 109836 - protein, 9 aa, Homo Sapiens
AFSDLTSQL

SEQ ID NO: 109837 - protein, 9 aa, Homo Sapiens
HLEPWIQEN

SEQ ID NO: 109838 - protein, 9 aa, Homo Sapiens
ELYGNNAAA

SEQ ID NO: 109839 - protein, 9 aa, Homo Sapiens
PMAAVKQAL

SEQ ID NO: 109840 - protein, 9 aa, Homo Sapiens
FSFGGALCV

SEQ ID NO: 109841 - protein, 9 aa, Homo Sapiens
YLNDHLEPW

SEQ ID NO: 109842 - protein, 9 aa, Homo Sapiens
VLLGSLFSR

SEQ ID NO: 109843 - protein, 9 aa, Homo Sapiens
VVDFLSYKL

SEQ ID NO: 109844 - protein, 9 aa, Homo Sapiens
SVDKEMQVL

SEQ ID NO: 109845 - protein, 9 aa, Homo Sapiens
FLTGMTVAG

SEQ ID NO: 109846 - protein, 9 aa, Homo Sapiens
AYQSFEQVV

SEQ ID NO: 109847 - protein, 9 aa, Homo Sapiens
ELYGNNAAA

SEQ ID NO: 109848 - protein, 9 aa, Homo Sapiens
PMAAVKQAL

SEQ ID NO: 109849 - protein, 9 aa, Homo Sapiens
FSFGGALCV

SEQ ID NO: 109850 - protein, 9 aa, Homo Sapiens
TAYQSFEQV

SEQ ID NO: 109851 - protein, 9 aa, Homo Sapiens
HITPGTAYQ

SEQ ID NO: 109852 - protein, 9 aa, Homo Sapiens
GMTVAGVVL

SEQ ID NO: 109853 - protein, 9 aa, Homo Sapiens
PMAAVKQAL

SEQ ID NO: 109854 - protein, 9 aa, Homo Sapiens
FSFGGALCV

SEQ ID NO: 109855 - protein, 9 aa, Homo Sapiens
ELYGNNAAA

SEQ ID NO: 109856 - protein, 9 aa, Homo Sapiens
TAYQSFEQV

SEQ ID NO: 109857 - protein, 9 aa, Homo Sapiens
YLNDHLEPW

SEQ ID NO: 109858 - protein, 9 aa, Homo Sapiens
VLLGSLFSR

SEQ ID NO: 109859 - protein, 9 aa, Homo Sapiens
LTGMTVAGV

SEQ ID NO: 109860 - protein, 9 aa, Homo Sapiens
LLGSLFSRK

SEQ ID NO: 109861 - protein, 9 aa, Homo Sapiens
FLSYKLSQK

SEQ ID NO: 109862 - protein, 9 aa, Homo Sapiens
RIAAWMATY

SEQ ID NO: 109863 - protein, 9 aa, Homo Sapiens
VLLGSLFSR

SEQ ID NO: 109864 - protein, 9 aa, Homo Sapiens
LVVDFLSYK

SEQ ID NO: 109865 - protein, 9 aa, Homo Sapiens
LVVDFLSYK

SEQ ID NO: 109866 - protein, 9 aa, Homo Sapiens
LLGSLFSRK

SEQ ID NO: 109867 - protein, 9 aa, Homo Sapiens
VLLGSLFSR

SEQ ID NO: 109868 - protein, 9 aa, Homo Sapiens
RIAAWMATY

SEQ ID NO: 109869 - protein, 9 aa, Homo Sapiens
ALCVESVDK

SEQ ID NO: 109870 - protein, 9 aa, Homo Sapiens
EVIPMAAVK

SEQ ID NO: 109871 - protein, 9 aa, Homo Sapiens
FLSYKLSQK

SEQ ID NO: 109872 - protein, 9 aa, Homo Sapiens
RYRRAFSDL

SEQ ID NO: 109873 - protein, 9 aa, Homo Sapiens
NWGRIVAFF

SEQ ID NO: 109874 - protein, 9 aa, Homo Sapiens
GRIVAFFSF

SEQ ID NO: 109875 - protein, 9 aa, Homo Sapiens
NWGRIVAFF

SEQ ID NO: 109876 - protein, 9 aa, Homo Sapiens
RYRRAFSDL

SEQ ID NO: 109877 - protein, 9 aa, Homo Sapiens
RYRRAFSDL

SEQ ID NO: 109878 - protein, 9 aa, Homo Sapiens
SFEQVVNEL

SEQ ID NO: 109879 - protein, 9 aa, Homo Sapiens
AYQSFEQVV

SEQ ID NO: 109880 - protein, 9 aa, Homo Sapiens
ELVVDFLSY

SEQ ID NO: 109881 - protein, 9 aa, Homo Sapiens
RIAAWMATY

SEQ ID NO: 109882 - protein, 9 aa, Homo Sapiens
RIAAWMATY

SEQ ID NO: 109883 - protein, 9 aa, Homo Sapiens
ELVVDFLSY

SEQ ID NO: 109884 - protein, 9 aa, Homo Sapiens
LVSRIAAWM

SEQ ID NO: 109885 - protein, 9 aa, Homo Sapiens
SVDKEMQVL

SEQ ID NO: 109886 - protein, 9 aa, Homo Sapiens
EVIPMAAVK

SEQ ID NO: 109887 - protein, 9 aa, Homo Sapiens
MTVAGVVLL

SEQ ID NO: 109888 - protein, 9 aa, Homo Sapiens
LHITPGTAY

SEQ ID NO: 109889 - protein, 9 aa, Homo Sapiens
ELVVDFLSY

SEQ ID NO: 109890 - protein, 9 aa, Homo Sapiens
RIAAWMATY

SEQ ID NO: 109891 - protein, 9 aa, Homo Sapiens
MAAVKQALR

SEQ ID NO: 109892 - protein, 9 aa, Homo Sapiens
VLLGSLFSR

SEQ ID NO: 109893 - protein, 9 aa, Homo Sapiens
LVVDFLSYK

SEQ ID NO: 109894 - protein, 9 aa, Homo Sapiens
KEMQVLVSR

SEQ ID NO: 109895 - protein, 9 aa, Homo Sapiens
DEFELRYRR

SEQ ID NO: 109896 - protein, 9 aa, Homo Sapiens
MAAVKQALR

SEQ ID NO: 109897 - protein, 9 aa, Homo Sapiens
ELRYRRAFS

SEQ ID NO: 109898 - protein, 9 aa, Homo Sapiens
VLLGSLFSR

SEQ ID NO: 109899 - protein, 9 aa, Homo Sapiens
EAGDEFELR

SEQ ID NO: 109900 - protein, 9 aa, Homo Sapiens
QFSDVEENR

SEQ ID NO: 109901 - protein, 9 aa, Homo Sapiens
EVIPMAAVK

SEQ ID NO: 109902 - protein, 9 aa, Homo Sapiens
MAAVKQALR

SEQ ID NO: 109903 - protein, 9 aa, Homo Sapiens
LVVDFLSYK

SEQ ID NO: 109904 - protein, 9 aa, Homo Sapiens
EAGDEFELR

SEQ ID NO: 109905 - protein, 9 aa, Homo Sapiens
EQVVNELFR

SEQ ID NO: 109906 - protein, 9 aa, Homo Sapiens
FLSYKLSQK

SEQ ID NO: 109907 - protein, 9 aa, Homo Sapiens
DEFELRYRR

SEQ ID NO: 109908 - protein, 9 aa, Homo Sapiens
QFSDVEENR

SEQ ID NO: 109909 - protein, 9 aa, Homo Sapiens
NNAAAESRK

SEQ ID NO: 109910 - protein, 9 aa, Homo Sapiens
VLLGSLFSR

SEQ ID NO: 109911 - protein, 9 aa, Homo Sapiens
MTVAGVVLL

SEQ ID NO: 109912 - protein, 9 aa, Homo Sapiens
TAYQSFEQV

SEQ ID NO: 109913 - protein, 9 aa, Homo Sapiens
TGMTVAGVV

SEQ ID NO: 109914 - protein, 9 aa, Homo Sapiens
MSQSNRELV

SEQ ID NO: 109915 - protein, 9 aa, Homo Sapiens
YSWSQFSDV

SEQ ID NO: 109916 - protein, 9 aa, Homo Sapiens
FSFGGALCV

SEQ ID NO: 109917 - protein, 9 aa, Homo Sapiens
ESVDKEMQV

SEQ ID NO: 109918 - protein, 9 aa, Homo Sapiens
MATYLNDHL

SEQ ID NO: 109919 - protein, 9 aa, Homo Sapiens
ELYGNNAAA

SEQ ID NO: 109920 - protein, 9 aa, Homo Sapiens
VAFFSFGGA

SEQ ID NO: 109921 - protein, 9 aa, Homo Sapiens
LTGMTVAGV

SEQ ID NO: 109922 - protein, 9 aa, Homo Sapiens
IAAWMATYL

SEQ ID NO: 109923 - protein, 9 aa, Homo Sapiens
MTVAGVVLL

SEQ ID NO: 109924 - protein, 9 aa, Homo Sapiens
TAYQSFEQV

SEQ ID NO: 109925 - protein, 9 aa, Homo Sapiens
ELYGNNAAA

SEQ ID NO: 109926 - protein, 9 aa, Homo Sapiens
FSFGGALCV

SEQ ID NO: 109927 - protein, 9 aa, Homo Sapiens
LTGMTVAGV

SEQ ID NO: 109928 - protein, 9 aa, Homo Sapiens
YSWSQFSDV

SEQ ID NO: 109929 - protein, 9 aa, Homo Sapiens
APEGTESEM

SEQ ID NO: 109930 - protein, 9 aa, Homo Sapiens
SPAVNGATG

SEQ ID NO: 109931 - protein, 9 aa, Homo Sapiens
TPGTAYQSF

SEQ ID NO: 109932 - protein, 9 aa, Homo Sapiens
FELRYRRAF

SEQ ID NO: 109933 - protein, 9 aa, Homo Sapiens
RIAAWMATY

SEQ ID NO: 109934 - protein, 9 aa, Homo Sapiens
ALREAGDEF

SEQ ID NO: 109935 - protein, 9 aa, Homo Sapiens
FELRYRRAF

SEQ ID NO: 109936 - protein, 9 aa, Homo Sapiens
QERFNRWFL

SEQ ID NO: 109937 - protein, 9 aa, Homo Sapiens
FEQVVNELF

SEQ ID NO: 109938 - protein, 9 aa, Homo Sapiens
QENGGWDTF

SEQ ID NO: 109939 - protein, 9 aa, Homo Sapiens
GRIVAFFSF

SEQ ID NO: 109940 - protein, 9 aa, Homo Sapiens
RRAFSDLTS

SEQ ID NO: 109941 - protein, 9 aa, Homo Sapiens
TPGTAYQSF

SEQ ID NO: 109942 - protein, 9 aa, Homo Sapiens
IAAWMATYL

SEQ ID NO: 109943 - protein, 9 aa, Homo Sapiens
APEGTESEM

SEQ ID NO: 109944 - protein, 9 aa, Homo Sapiens
ELVVDFLSY

SEQ ID NO: 109945 - protein, 9 aa, Homo Sapiens
LHITPGTAY

SEQ ID NO: 109946 - protein, 9 aa, Homo Sapiens
NPSWHLADS

SEQ ID NO: 109947 - protein, 9 aa, Homo Sapiens
RIAAWMATY

SEQ ID NO: 109948 - protein, 9 aa, Homo Sapiens
REAGDEFEL

SEQ ID NO: 109949 - protein, 9 aa, Homo Sapiens
QERFNRWFL

SEQ ID NO: 109950 - protein, 9 aa, Homo Sapiens
QENGGWDTF

SEQ ID NO: 109951 - protein, 9 aa, Homo Sapiens
FEQVVNELF

SEQ ID NO: 109952 - protein, 9 aa, Homo Sapiens
FELRYRRAF

SEQ ID NO: 109953 - protein, 9 aa, Homo Sapiens
SEMETPSAI

SEQ ID NO: 109954 - protein, 9 aa, Homo Sapiens
FELRYRRAF

SEQ ID NO: 109955 - protein, 9 aa, Homo Sapiens
QENGGWDTF

SEQ ID NO: 109956 - protein, 9 aa, Homo Sapiens
SEMETPSAI

SEQ ID NO: 109957 - protein, 9 aa, Homo Sapiens
RELVVDFLS

SEQ ID NO: 109958 - protein, 9 aa, Homo Sapiens
REVIPMAAV

SEQ ID NO: 109959 - protein, 9 aa, Homo Sapiens
IAAWMATYL

SEQ ID NO: 109960 - protein, 9 aa, Homo Sapiens
IPMAAVKQA

SEQ ID NO: 109961 - protein, 9 aa, Homo Sapiens
SAINGNPSW

SEQ ID NO: 109962 - protein, 9 aa, Homo Sapiens
KLSQKGYSW

SEQ ID NO: 109963 - protein, 9 aa, Homo Sapiens
IAAWMATYL

SEQ ID NO: 109964 - protein, 9 aa, Homo Sapiens
YLNDHLEPW

SEQ ID NO: 109965 - protein, 10 aa, Homo Sapiens
FSDLTSQLHI

SEQ ID NO: 109966 - protein, 10 aa, Homo Sapiens
YLNDHLEPWI

SEQ ID NO: 109967 - protein, 10 aa, Homo Sapiens
FLTGMTVAGV

SEQ ID NO: 109968 - protein, 10 aa, Homo Sapiens
RIAAWMATYL

SEQ ID NO: 109969 - protein, 10 aa, Homo Sapiens
WMATYLNDHL

SEQ ID NO: 109970 - protein, 10 aa, Homo Sapiens
LVVDFLSYKL

SEQ ID NO: 109971 - protein, 10 aa, Homo Sapiens
SLDAREVIPM

SEQ ID NO: 109972 - protein, 10 aa, Homo Sapiens
VLVSRIAAWM

SEQ ID NO: 109973 - protein, 10 aa, Homo Sapiens
SVDKEMQVLV

SEQ ID NO: 109974 - protein, 10 aa, Homo Sapiens
GMTVAGVVLL

SEQ ID NO: 109975 - protein, 10 aa, Homo Sapiens
FLTGMTVAGV

SEQ ID NO: 109976 - protein, 10 aa, Homo Sapiens
WMATYLNDHL

SEQ ID NO: 109977 - protein, 10 aa, Homo Sapiens
RIAAWMATYL

SEQ ID NO: 109978 - protein, 10 aa, Homo Sapiens
LVVDFLSYKL

SEQ ID NO: 109979 - protein, 10 aa, Homo Sapiens
RAFSDLTSQL

SEQ ID NO: 109980 - protein, 10 aa, Homo Sapiens
SLDAREVIPM

SEQ ID NO: 109981 - protein, 10 aa, Homo Sapiens
YLNDHLEPWI

SEQ ID NO: 109982 - protein, 10 aa, Homo Sapiens
GMTVAGVVLL

SEQ ID NO: 109983 - protein, 10 aa, Homo Sapiens
FGGALCVESV

SEQ ID NO: 109984 - protein, 10 aa, Homo Sapiens
VLVSRIAAWM

SEQ ID NO: 109985 - protein, 10 aa, Homo Sapiens
FLTGMTVAGV

SEQ ID NO: 109986 - protein, 10 aa, Homo Sapiens
YLNDHLEPWI

SEQ ID NO: 109987 - protein, 10 aa, Homo Sapiens
RIAAWMATYL

SEQ ID NO: 109988 - protein, 10 aa, Homo Sapiens
WMATYLNDHL

SEQ ID NO: 109989 - protein, 10 aa, Homo Sapiens
VLVSRIAAWM

SEQ ID NO: 109990 - protein, 10 aa, Homo Sapiens
IVAFFSFGGA

SEQ ID NO: 109991 - protein, 10 aa, Homo Sapiens
LVVDFLSYKL

SEQ ID NO: 109992 - protein, 10 aa, Homo Sapiens
VVNELFRDGV

SEQ ID NO: 109993 - protein, 10 aa, Homo Sapiens
GMTVAGVVLL

SEQ ID NO: 109994 - protein, 10 aa, Homo Sapiens
RAFSDLTSQL

SEQ ID NO: 109995 - protein, 10 aa, Homo Sapiens
LTGMTVAGVV

SEQ ID NO: 109996 - protein, 10 aa, Homo Sapiens
GTAYQSFEQV

SEQ ID NO: 109997 - protein, 10 aa, Homo Sapiens
FLTGMTVAGV

SEQ ID NO: 109998 - protein, 10 aa, Homo Sapiens
YLNDHLEPWI

SEQ ID NO: 109999 - protein, 10 aa, Homo Sapiens
SLDAREVIPM

SEQ ID NO: 110000 - protein, 10 aa, Homo Sapiens
RIAAWMATYL

SEQ ID NO: 110001 - protein, 10 aa, Homo Sapiens
LVVDFLSYKL

SEQ ID NO: 110002 - protein, 10 aa, Homo Sapiens
AINGNPSWHL

SEQ ID NO: 110003 - protein, 10 aa, Homo Sapiens
FLTGMTVAGV

SEQ ID NO: 110004 - protein, 10 aa, Homo Sapiens
RIAAWMATYL

SEQ ID NO: 110005 - protein, 10 aa, Homo Sapiens
YLNDHLEPWI

SEQ ID NO: 110006 - protein, 10 aa, Homo Sapiens
MQVLVSRIAA

SEQ ID NO: 110007 - protein, 10 aa, Homo Sapiens
LVVDFLSYKL

SEQ ID NO: 110008 - protein, 10 aa, Homo Sapiens
WMATYLNDHL

SEQ ID NO: 110009 - protein, 10 aa, Homo Sapiens
SQLHITPGTA

SEQ ID NO: 110010 - protein, 10 aa, Homo Sapiens
GTAYQSFEQV

SEQ ID NO: 110011 - protein, 10 aa, Homo Sapiens
SVDKEMQVLV

SEQ ID NO: 110012 - protein, 10 aa, Homo Sapiens
RAFSDLTSQL

SEQ ID NO: 110013 - protein, 10 aa, Homo Sapiens
KEMQVLVSRI

SEQ ID NO: 110014 - protein, 10 aa, Homo Sapiens
IQENGGWDTF

SEQ ID NO: 110015 - protein, 10 aa, Homo Sapiens
IVAFFSFGGA

SEQ ID NO: 110016 - protein, 10 aa, Homo Sapiens
VVNELFRDGV

SEQ ID NO: 110017 - protein, 10 aa, Homo Sapiens
TAYQSFEQVV

SEQ ID NO: 110018 - protein, 10 aa, Homo Sapiens
FLTGMTVAGV

SEQ ID NO: 110019 - protein, 10 aa, Homo Sapiens
YLNDHLEPWI

SEQ ID NO: 110020 - protein, 10 aa, Homo Sapiens
SVDKEMQVLV

SEQ ID NO: 110021 - protein, 10 aa, Homo Sapiens
SLDAREVIPM

SEQ ID NO: 110022 - protein, 10 aa, Homo Sapiens
GMTVAGVVLL

SEQ ID NO: 110023 - protein, 10 aa, Homo Sapiens
LVVDFLSYKL

SEQ ID NO: 110024 - protein, 10 aa, Homo Sapiens
RIAAWMATYL

SEQ ID NO: 110025 - protein, 10 aa, Homo Sapiens
VVNELFRDGV

SEQ ID NO: 110026 - protein, 10 aa, Homo Sapiens
AINGNPSWHL

SEQ ID NO: 110027 - protein, 10 aa, Homo Sapiens
WMATYLNDHL

SEQ ID NO: 110028 - protein, 10 aa, Homo Sapiens
TAYQSFEQVV

SEQ ID NO: 110029 - protein, 10 aa, Homo Sapiens
VLVSRIAAWM

SEQ ID NO: 110030 - protein, 10 aa, Homo Sapiens
FFSFGGALCV

SEQ ID NO: 110031 - protein, 10 aa, Homo Sapiens
VLLGSLFSRK

SEQ ID NO: 110032 - protein, 10 aa, Homo Sapiens
RAFSDLTSQL

SEQ ID NO: 110033 - protein, 10 aa, Homo Sapiens
GTAYQSFEQV

SEQ ID NO: 110034 - protein, 10 aa, Homo Sapiens
FLTGMTVAGV

SEQ ID NO: 110035 - protein, 10 aa, Homo Sapiens
YLNDHLEPWI

SEQ ID NO: 110036 - protein, 10 aa, Homo Sapiens
SVDKEMQVLV

SEQ ID NO: 110037 - protein, 10 aa, Homo Sapiens
WMATYLNDHL

SEQ ID NO: 110038 - protein, 10 aa, Homo Sapiens
VVNELFRDGV

SEQ ID NO: 110039 - protein, 10 aa, Homo Sapiens
LVVDFLSYKL

SEQ ID NO: 110040 - protein, 10 aa, Homo Sapiens
VLVSRIAAWM

SEQ ID NO: 110041 - protein, 10 aa, Homo Sapiens
SLDAREVIPM

SEQ ID NO: 110042 - protein, 10 aa, Homo Sapiens
AINGNPSWHL

SEQ ID NO: 110043 - protein, 10 aa, Homo Sapiens
RIAAWMATYL

SEQ ID NO: 110044 - protein, 10 aa, Homo Sapiens
FFSFGGALCV

SEQ ID NO: 110045 - protein, 10 aa, Homo Sapiens
VLLGSLFSRK

SEQ ID NO: 110046 - protein, 10 aa, Homo Sapiens
TAYQSFEQVV

SEQ ID NO: 110047 - protein, 10 aa, Homo Sapiens
ELYGNNAAAE

SEQ ID NO: 110048 - protein, 10 aa, Homo Sapiens
GMTVAGVVLL

SEQ ID NO: 110049 - protein, 10 aa, Homo Sapiens
FLTGMTVAGV

SEQ ID NO: 110050 - protein, 10 aa, Homo Sapiens
YLNDHLEPWI

SEQ ID NO: 110051 - protein, 10 aa, Homo Sapiens
SVDKEMQVLV

SEQ ID NO: 110052 - protein, 10 aa, Homo Sapiens
WMATYLNDHL

SEQ ID NO: 110053 - protein, 10 aa, Homo Sapiens
RIAAWMATYL

SEQ ID NO: 110054 - protein, 10 aa, Homo Sapiens
AINGNPSWHL

SEQ ID NO: 110055 - protein, 10 aa, Homo Sapiens
VLVSRIAAWM

SEQ ID NO: 110056 - protein, 10 aa, Homo Sapiens
LVVDFLSYKL

SEQ ID NO: 110057 - protein, 10 aa, Homo Sapiens
SLDAREVIPM

SEQ ID NO: 110058 - protein, 10 aa, Homo Sapiens
GMTVAGVVLL

SEQ ID NO: 110059 - protein, 10 aa, Homo Sapiens
TAYQSFEQVV

SEQ ID NO: 110060 - protein, 10 aa, Homo Sapiens
FFSFGGALCV

SEQ ID NO: 110061 - protein, 10 aa, Homo Sapiens
GTAYQSFEQV

SEQ ID NO: 110062 - protein, 10 aa, Homo Sapiens
FLTGMTVAGV

SEQ ID NO: 110063 - protein, 10 aa, Homo Sapiens
YLNDHLEPWI

SEQ ID NO: 110064 - protein, 10 aa, Homo Sapiens
WMATYLNDHL

SEQ ID NO: 110065 - protein, 10 aa, Homo Sapiens
AINGNPSWHL

SEQ ID NO: 110066 - protein, 10 aa, Homo Sapiens
LVVDFLSYKL

SEQ ID NO: 110067 - protein, 10 aa, Homo Sapiens
SVDKEMQVLV

SEQ ID NO: 110068 - protein, 10 aa, Homo Sapiens
RIAAWMATYL

SEQ ID NO: 110069 - protein, 10 aa, Homo Sapiens
SLDAREVIPM

SEQ ID NO: 110070 - protein, 10 aa, Homo Sapiens
VLVSRIAAWM

SEQ ID NO: 110071 - protein, 10 aa, Homo Sapiens
VLLGSLFSRK

SEQ ID NO: 110072 - protein, 10 aa, Homo Sapiens
ELVVDFLSYK

SEQ ID NO: 110073 - protein, 10 aa, Homo Sapiens
GALCVESVDK

SEQ ID NO: 110074 - protein, 10 aa, Homo Sapiens
VVLLGSLFSR

SEQ ID NO: 110075 - protein, 10 aa, Homo Sapiens
REVIPMAAVK

SEQ ID NO: 110076 - protein, 10 aa, Homo Sapiens
VLLGSLFSRK

SEQ ID NO: 110077 - protein, 10 aa, Homo Sapiens
VVLLGSLFSR

SEQ ID NO: 110078 - protein, 10 aa, Homo Sapiens
GALCVESVDK

SEQ ID NO: 110079 - protein, 10 aa, Homo Sapiens
SQFSDVEENR

SEQ ID NO: 110080 - protein, 10 aa, Homo Sapiens
SFEQVVNELF

SEQ ID NO: 110081 - protein, 10 aa, Homo Sapiens
TYLNDHLEPW

SEQ ID NO: 110082 - protein, 10 aa, Homo Sapiens
SFEQVVNELF

SEQ ID NO: 110083 - protein, 10 aa, Homo Sapiens
TYLNDHLEPW

SEQ ID NO: 110084 - protein, 10 aa, Homo Sapiens
ITPGTAYQSF

SEQ ID NO: 110085 - protein, 10 aa, Homo Sapiens
TYLNDHLEPW

SEQ ID NO: 110086 - protein, 10 aa, Homo Sapiens
SFEQVVNELF

SEQ ID NO: 110087 - protein, 10 aa, Homo Sapiens
ITPGTAYQSF

SEQ ID NO: 110088 - protein, 10 aa, Homo Sapiens
EAPEGTESEM

SEQ ID NO: 110089 - protein, 10 aa, Homo Sapiens
RIAAWMATYL

SEQ ID NO: 110090 - protein, 10 aa, Homo Sapiens
ITPGTAYQSF

SEQ ID NO: 110091 - protein, 10 aa, Homo Sapiens
VLVSRIAAWM

SEQ ID NO: 110092 - protein, 10 aa, Homo Sapiens
EAPEGTESEM

SEQ ID NO: 110093 - protein, 10 aa, Homo Sapiens
ESVDKEMQVL

SEQ ID NO: 110094 - protein, 10 aa, Homo Sapiens
EFELRYRRAF

SEQ ID NO: 110095 - protein, 10 aa, Homo Sapiens
QLHITPGTAY

SEQ ID NO: 110096 - protein, 10 aa, Homo Sapiens
VVLLGSLFSR

SEQ ID NO: 110097 - protein, 10 aa, Homo Sapiens
LFRDGVNWGR

SEQ ID NO: 110098 - protein, 10 aa, Homo Sapiens
SRKGQERFNR

SEQ ID NO: 110099 - protein, 10 aa, Homo Sapiens
PMAAVKQALR

SEQ ID NO: 110100 - protein, 10 aa, Homo Sapiens
VVLLGSLFSR

SEQ ID NO: 110101 - protein, 10 aa, Homo Sapiens
LFRDGVNWGR

SEQ ID NO: 110102 - protein, 10 aa, Homo Sapiens
DFLSYKLSQK

SEQ ID NO: 110103 - protein, 10 aa, Homo Sapiens
ELVVDFLSYK

SEQ ID NO: 110104 - protein, 10 aa, Homo Sapiens
SQFSDVEENR

SEQ ID NO: 110105 - protein, 10 aa, Homo Sapiens
VVLLGSLFSR

SEQ ID NO: 110106 - protein, 10 aa, Homo Sapiens
YGNNAAAESR

SEQ ID NO: 110107 - protein, 10 aa, Homo Sapiens
EVIPMAAVKQ

SEQ ID NO: 110108 - protein, 10 aa, Homo Sapiens
MATYLNDHLE

SEQ ID NO: 110109 - protein, 10 aa, Homo Sapiens
IVAFFSFGGA

SEQ ID NO: 110110 - protein, 10 aa, Homo Sapiens
GTAYQSFEQV

SEQ ID NO: 110111 - protein, 10 aa, Homo Sapiens
LVVDFLSYKL

SEQ ID NO: 110112 - protein, 10 aa, Homo Sapiens
QSFEQVVNEL

SEQ ID NO: 110113 - protein, 10 aa, Homo Sapiens
FLTGMTVAGV

SEQ ID NO: 110114 - protein, 10 aa, Homo Sapiens
TAYQSFEQVV

SEQ ID NO: 110115 - protein, 10 aa, Homo Sapiens
RIAAWMATYL

SEQ ID NO: 110116 - protein, 10 aa, Homo Sapiens
NGATGHSSSL

SEQ ID NO: 110117 - protein, 10 aa, Homo Sapiens
TVAGVVLLGS

SEQ ID NO: 110118 - protein, 10 aa, Homo Sapiens
FGGALCVESV

SEQ ID NO: 110119 - protein, 10 aa, Homo Sapiens
VVNELFRDGV

SEQ ID NO: 110120 - protein, 10 aa, Homo Sapiens
LVSRIAAWMA

SEQ ID NO: 110121 - protein, 10 aa, Homo Sapiens
TGMTVAGVVL

SEQ ID NO: 110122 - protein, 10 aa, Homo Sapiens
SVDKEMQVLV

SEQ ID NO: 110123 - protein, 10 aa, Homo Sapiens
FLTGMTVAGV

SEQ ID NO: 110124 - protein, 10 aa, Homo Sapiens
TAYQSFEQVV

SEQ ID NO: 110125 - protein, 10 aa, Homo Sapiens
LVVDFLSYKL

SEQ ID NO: 110126 - protein, 10 aa, Homo Sapiens
RIAAWMATYL

SEQ ID NO: 110127 - protein, 10 aa, Homo Sapiens
GTAYQSFEQV

SEQ ID NO: 110128 - protein, 10 aa, Homo Sapiens
IPMAAVKQAL

SEQ ID NO: 110129 - protein, 10 aa, Homo Sapiens
SQKGYSWSQF

SEQ ID NO: 110130 - protein, 10 aa, Homo Sapiens
QLHITPGTAY

SEQ ID NO: 110131 - protein, 10 aa, Homo Sapiens
GVNWGRIVAF

SEQ ID NO: 110132 - protein, 10 aa, Homo Sapiens
IQENGGWDTF

SEQ ID NO: 110133 - protein, 10 aa, Homo Sapiens
LSYKLSQKGY

SEQ ID NO: 110134 - protein, 10 aa, Homo Sapiens
RELVVDFLSY

SEQ ID NO: 110135 - protein, 10 aa, Homo Sapiens
SRIAAWMATY

SEQ ID NO: 110136 - protein, 10 aa, Homo Sapiens
RRAFSDLTSQ

SEQ ID NO: 110137 - protein, 10 aa, Homo Sapiens
IPMAAVKQAL

SEQ ID NO: 110138 - protein, 10 aa, Homo Sapiens
EPWIQENGGW

SEQ ID NO: 110139 - protein, 10 aa, Homo Sapiens
EAGDEFELRY

SEQ ID NO: 110140 - protein, 10 aa, Homo Sapiens
EAPEGTESEM

SEQ ID NO: 110141 - protein, 10 aa, Homo Sapiens
QALREAGDEF

SEQ ID NO: 110142 - protein, 10 aa, Homo Sapiens
SPAVNGATGH

SEQ ID NO: 110143 - protein, 10 aa, Homo Sapiens
TPSAINGNPS

SEQ ID NO: 110144 - protein, 10 aa, Homo Sapiens
GVNWGRIVAF

SEQ ID NO: 110145 - protein, 10 aa, Homo Sapiens
VAFFSFGGAL

SEQ ID NO: 110146 - protein, 10 aa, Homo Sapiens
FVELYGNNAA

SEQ ID NO: 110147 - protein, 10 aa, Homo Sapiens
AESRKGQERF

SEQ ID NO: 110148 - protein, 10 aa, Homo Sapiens
EPWIQENGGW

SEQ ID NO: 110149 - protein, 10 aa, Homo Sapiens
QSNRELVVDF

SEQ ID NO: 110150 - protein, 10 aa, Homo Sapiens
QVLVSRIAAW

SEQ ID NO: 110151 - protein, 10 aa, Homo Sapiens
PSAINGNPSW

SEQ ID NO: 110152 - protein, 11 aa, Homo Sapiens
FLTGMTVAGVV

SEQ ID NO: 110153 - protein, 11 aa, Homo Sapiens
SLDAREVIPMA

SEQ ID NO: 110154 - protein, 11 aa, Homo Sapiens
VLVSRIAAWMA

SEQ ID NO: 110155 - protein, 11 aa, Homo Sapiens
HLADSPAVNGA

SEQ ID NO: 110156 - protein, 11 aa, Homo Sapiens
YLNDHLEPWIQ

SEQ ID NO: 110157 - protein, 11 aa, Homo Sapiens
ALREAGDEFEL

SEQ ID NO: 110158 - protein, 11 aa, Homo Sapiens
YQSFEQVVNEL

SEQ ID NO: 110159 - protein, 11 aa, Homo Sapiens
HLADSPAVNGA

SEQ ID NO: 110160 - protein, 11 aa, Homo Sapiens
FLTGMTVAGVV

SEQ ID NO: 110161 - protein, 11 aa, Homo Sapiens
YQSFEQVVNEL

SEQ ID NO: 110162 - protein, 11 aa, Homo Sapiens
ALREAGDEFEL

SEQ ID NO: 110163 - protein, 11 aa, Homo Sapiens
YLNDHLEPWIQ

SEQ ID NO: 110164 - protein, 11 aa, Homo Sapiens
IVAFFSFGGAL

SEQ ID NO: 110165 - protein, 11 aa, Homo Sapiens
TVAGVVLLGSL

SEQ ID NO: 110166 - protein, 11 aa, Homo Sapiens
VLVSRIAAWMA

SEQ ID NO: 110167 - protein, 11 aa, Homo Sapiens
KLSQKGYSWSQ

SEQ ID NO: 110168 - protein, 11 aa, Homo Sapiens
ELVVDFLSYKL

SEQ ID NO: 110169 - protein, 11 aa, Homo Sapiens
SLDAREVIPMA

SEQ ID NO: 110170 - protein, 11 aa, Homo Sapiens
FLTGMTVAGVV

SEQ ID NO: 110171 - protein, 11 aa, Homo Sapiens
HLADSPAVNGA

SEQ ID NO: 110172 - protein, 11 aa, Homo Sapiens
RIVAFFSFGGA

SEQ ID NO: 110173 - protein, 11 aa, Homo Sapiens
VLVSRIAAWMA

SEQ ID NO: 110174 - protein, 11 aa, Homo Sapiens
TVAGVVLLGSL

SEQ ID NO: 110175 - protein, 11 aa, Homo Sapiens
ALREAGDEFEL

SEQ ID NO: 110176 - protein, 11 aa, Homo Sapiens
YQSFEQVVNEL

SEQ ID NO: 110177 - protein, 11 aa, Homo Sapiens
YLNDHLEPWIQ

SEQ ID NO: 110178 - protein, 11 aa, Homo Sapiens
AINGNPSWHLA

SEQ ID NO: 110179 - protein, 11 aa, Homo Sapiens
FNRWFLTGMTV

SEQ ID NO: 110180 - protein, 11 aa, Homo Sapiens
IVAFFSFGGAL

SEQ ID NO: 110181 - protein, 11 aa, Homo Sapiens
SLDAREVIPMA

SEQ ID NO: 110182 - protein, 11 aa, Homo Sapiens
MAAVKQALREA

SEQ ID NO: 110183 - protein, 11 aa, Homo Sapiens
QVVNELFRDGV

SEQ ID NO: 110184 - protein, 11 aa, Homo Sapiens
FLTGMTVAGVV

SEQ ID NO: 110185 - protein, 11 aa, Homo Sapiens
ALREAGDEFEL

SEQ ID NO: 110186 - protein, 11 aa, Homo Sapiens
VLVSRIAAWMA

SEQ ID NO: 110187 - protein, 11 aa, Homo Sapiens
YLNDHLEPWIQ

SEQ ID NO: 110188 - protein, 11 aa, Homo Sapiens
SLDAREVIPMA

SEQ ID NO: 110189 - protein, 11 aa, Homo Sapiens
FLTGMTVAGVV

SEQ ID NO: 110190 - protein, 11 aa, Homo Sapiens
RIVAFFSFGGA

SEQ ID NO: 110191 - protein, 11 aa, Homo Sapiens
IQENGGWDTFV

SEQ ID NO: 110192 - protein, 11 aa, Homo Sapiens
YQSFEQVVNEL

SEQ ID NO: 110193 - protein, 11 aa, Homo Sapiens
SAINGNPSWHL

SEQ ID NO: 110194 - protein, 11 aa, Homo Sapiens
QVVNELFRDGV

SEQ ID NO: 110195 - protein, 11 aa, Homo Sapiens
VLVSRIAAWMA

SEQ ID NO: 110196 - protein, 11 aa, Homo Sapiens
KQALREAGDEF

SEQ ID NO: 110197 - protein, 11 aa, Homo Sapiens
HLADSPAVNGA

SEQ ID NO: 110198 - protein, 11 aa, Homo Sapiens
TVAGVVLLGSL

SEQ ID NO: 110199 - protein, 11 aa, Homo Sapiens
ALREAGDEFEL

SEQ ID NO: 110200 - protein, 11 aa, Homo Sapiens
SQLHITPGTAY

SEQ ID NO: 110201 - protein, 11 aa, Homo Sapiens
FLTGMTVAGVV

SEQ ID NO: 110202 - protein, 11 aa, Homo Sapiens
SLDAREVIPMA

SEQ ID NO: 110203 - protein, 11 aa, Homo Sapiens
YLNDHLEPWIQ

SEQ ID NO: 110204 - protein, 11 aa, Homo Sapiens
ALREAGDEFEL

SEQ ID NO: 110205 - protein, 11 aa, Homo Sapiens
HLADSPAVNGA

SEQ ID NO: 110206 - protein, 11 aa, Homo Sapiens
VLVSRIAAWMA

SEQ ID NO: 110207 - protein, 11 aa, Homo Sapiens
KLSQKGYSWSQ

SEQ ID NO: 110208 - protein, 11 aa, Homo Sapiens
ELVVDFLSYKL

SEQ ID NO: 110209 - protein, 11 aa, Homo Sapiens
TVAGVVLLGSL

SEQ ID NO: 110210 - protein, 11 aa, Homo Sapiens
AINGNPSWHLA

SEQ ID NO: 110211 - protein, 11 aa, Homo Sapiens
WFLTGMTVAGV

SEQ ID NO: 110212 - protein, 11 aa, Homo Sapiens
AFFSFGGALCV

SEQ ID NO: 110213 - protein, 11 aa, Homo Sapiens
SFGGALCVESV

SEQ ID NO: 110214 - protein, 11 aa, Homo Sapiens
VIPMAAVKQAL

SEQ ID NO: 110215 - protein, 11 aa, Homo Sapiens
QVVNELFRDGV

SEQ ID NO: 110216 - protein, 11 aa, Homo Sapiens
FRDGVNWGRIV

SEQ ID NO: 110217 - protein, 11 aa, Homo Sapiens
SAINGNPSWHL

SEQ ID NO: 110218 - protein, 11 aa, Homo Sapiens
ELYGNNAAAES

SEQ ID NO: 110219 - protein, 11 aa, Homo Sapiens
CVESVDKEMQV

SEQ ID NO: 110220 - protein, 11 aa, Homo Sapiens
GTAYQSFEQVV

SEQ ID NO: 110221 - protein, 11 aa, Homo Sapiens
IVAFFSFGGAL

SEQ ID NO: 110222 - protein, 11 aa, Homo Sapiens
FLTGMTVAGVV

SEQ ID NO: 110223 - protein, 11 aa, Homo Sapiens
YLNDHLEPWIQ

SEQ ID NO: 110224 - protein, 11 aa, Homo Sapiens
ALREAGDEFEL

SEQ ID NO: 110225 - protein, 11 aa, Homo Sapiens
SLDAREVIPMA

SEQ ID NO: 110226 - protein, 11 aa, Homo Sapiens
HLADSPAVNGA

SEQ ID NO: 110227 - protein, 11 aa, Homo Sapiens
VLVSRIAAWMA

SEQ ID NO: 110228 - protein, 11 aa, Homo Sapiens
VIPMAAVKQAL

SEQ ID NO: 110229 - protein, 11 aa, Homo Sapiens
KLSQKGYSWSQ

SEQ ID NO: 110230 - protein, 11 aa, Homo Sapiens
WFLTGMTVAGV

SEQ ID NO: 110231 - protein, 11 aa, Homo Sapiens
ELVVDFLSYKL

SEQ ID NO: 110232 - protein, 11 aa, Homo Sapiens
FRDGVNWGRIV

SEQ ID NO: 110233 - protein, 11 aa, Homo Sapiens
FLTGMTVAGVV

SEQ ID NO: 110234 - protein, 11 aa, Homo Sapiens
ALREAGDEFEL

SEQ ID NO: 110235 - protein, 11 aa, Homo Sapiens
SLDAREVIPMA

SEQ ID NO: 110236 - protein, 11 aa, Homo Sapiens
VLVSRIAAWMA

SEQ ID NO: 110237 - protein, 11 aa, Homo Sapiens
CVESVDKEMQV

SEQ ID NO: 110238 - protein, 11 aa, Homo Sapiens
HLADSPAVNGA

SEQ ID NO: 110239 - protein, 11 aa, Homo Sapiens
SFGGALCVESV

SEQ ID NO: 110240 - protein, 11 aa, Homo Sapiens
YLNDHLEPWIQ

SEQ ID NO: 110241 - protein, 11 aa, Homo Sapiens
KLSQKGYSWSQ

SEQ ID NO: 110242 - protein, 11 aa, Homo Sapiens
ELVVDFLSYKL

SEQ ID NO: 110243 - protein, 11 aa, Homo Sapiens
TVAGVVLLGSL

SEQ ID NO: 110244 - protein, 11 aa, Homo Sapiens
AFFSFGGALCV

SEQ ID NO: 110245 - protein, 11 aa, Homo Sapiens
IQENGGWDTFV

SEQ ID NO: 110246 - protein, 11 aa, Homo Sapiens
QVVNELFRDGV

SEQ ID NO: 110247 - protein, 11 aa, Homo Sapiens
VIPMAAVKQAL

SEQ ID NO: 110248 - protein, 11 aa, Homo Sapiens
ELYGNNAAAES

SEQ ID NO: 110249 - protein, 11 aa, Homo Sapiens
SAINGNPSWHL

SEQ ID NO: 110250 - protein, 11 aa, Homo Sapiens
WFLTGMTVAGV

SEQ ID NO: 110251 - protein, 11 aa, Homo Sapiens
AINGNPSWHLA

SEQ ID NO: 110252 - protein, 11 aa, Homo Sapiens
FLTGMTVAGVV

SEQ ID NO: 110253 - protein, 11 aa, Homo Sapiens
HLADSPAVNGA

SEQ ID NO: 110254 - protein, 11 aa, Homo Sapiens
YLNDHLEPWIQ

SEQ ID NO: 110255 - protein, 11 aa, Homo Sapiens
SLDAREVIPMA

SEQ ID NO: 110256 - protein, 11 aa, Homo Sapiens
ALREAGDEFEL

SEQ ID NO: 110257 - protein, 11 aa, Homo Sapiens
WFLTGMTVAGV

SEQ ID NO: 110258 - protein, 11 aa, Homo Sapiens
VLVSRIAAWMA

SEQ ID NO: 110259 - protein, 11 aa, Homo Sapiens
VVLLGSLFSRK

SEQ ID NO: 110260 - protein, 11 aa, Homo Sapiens
VVLLGSLFSRK

SEQ ID NO: 110261 - protein, 11 aa, Homo Sapiens
GVVLLGSLFSR

SEQ ID NO: 110262 - protein, 11 aa, Homo Sapiens
ATGHSSSLDAR

SEQ ID NO: 110263 - protein, 11 aa, Homo Sapiens
RELVVDFLSYK

SEQ ID NO: 110264 - protein, 11 aa, Homo Sapiens
NWGRIVAFFSF

SEQ ID NO: 110265 - protein, 11 aa, Homo Sapiens
TYLNDHLEPWI

SEQ ID NO: 110266 - protein, 11 aa, Homo Sapiens
AWMATYLNDHL

SEQ ID NO: 110267 - protein, 11 aa, Homo Sapiens
SYKLSQKGYSW

SEQ ID NO: 110268 - protein, 11 aa, Homo Sapiens
NWGRIVAFFSF

SEQ ID NO: 110269 - protein, 11 aa, Homo Sapiens
TYLNDHLEPWI

SEQ ID NO: 110270 - protein, 11 aa, Homo Sapiens
AWMATYLNDHL

SEQ ID NO: 110271 - protein, 11 aa, Homo Sapiens
TYLNDHLEPWI

SEQ ID NO: 110272 - protein, 11 aa, Homo Sapiens
AWMATYLNDHL

SEQ ID NO: 110273 - protein, 11 aa, Homo Sapiens
SYKLSQKGYSW

SEQ ID NO: 110274 - protein, 11 aa, Homo Sapiens
HITPGTAYQSF

SEQ ID NO: 110275 - protein, 11 aa, Homo Sapiens
QVLVSRIAAWM

SEQ ID NO: 110276 - protein, 11 aa, Homo Sapiens
HITPGTAYQSF

SEQ ID NO: 110277 - protein, 11 aa, Homo Sapiens
WIQENGGWDTF

SEQ ID NO: 110278 - protein, 11 aa, Homo Sapiens
FLSYKLSQKGY

SEQ ID NO: 110279 - protein, 11 aa, Homo Sapiens
DGVNWGRIVAF

SEQ ID NO: 110280 - protein, 11 aa, Homo Sapiens
TVAGVVLLGSL

SEQ ID NO: 110281 - protein, 11 aa, Homo Sapiens
SQLHITPGTAY

SEQ ID NO: 110282 - protein, 11 aa, Homo Sapiens
VVLLGSLFSRK

SEQ ID NO: 110283 - protein, 11 aa, Homo Sapiens
RYRRAFSDLTS

SEQ ID NO: 110284 - protein, 11 aa, Homo Sapiens
GVVLLGSLFSR

SEQ ID NO: 110285 - protein, 11 aa, Homo Sapiens
SFEQVVNELFR

SEQ ID NO: 110286 - protein, 11 aa, Homo Sapiens
ESRKGQERFNR

SEQ ID NO: 110287 - protein, 11 aa, Homo Sapiens
ATGHSSSLDAR

SEQ ID NO: 110288 - protein, 11 aa, Homo Sapiens
RELVVDFLSYK

SEQ ID NO: 110289 - protein, 11 aa, Homo Sapiens
LYGNNAAAESR

SEQ ID NO: 110290 - protein, 11 aa, Homo Sapiens
ESRKGQERFNR

SEQ ID NO: 110291 - protein, 11 aa, Homo Sapiens
ELFRDGVNWGR

SEQ ID NO: 110292 - protein, 11 aa, Homo Sapiens
EAGDEFELRYR

SEQ ID NO: 110293 - protein, 11 aa, Homo Sapiens
SFEQVVNELFR

SEQ ID NO: 110294 - protein, 11 aa, Homo Sapiens
GVVLLGSLFSR

SEQ ID NO: 110295 - protein, 11 aa, Homo Sapiens
EFELRYRRAFS

SEQ ID NO: 110296 - protein, 11 aa, Homo Sapiens
ELFRDGVNWGR

SEQ ID NO: 110297 - protein, 11 aa, Homo Sapiens
WSQFSDVEENR

SEQ ID NO: 110298 - protein, 11 aa, Homo Sapiens
ESRKGQERFNR

SEQ ID NO: 110299 - protein, 11 aa, Homo Sapiens
EAGDEFELRYR

SEQ ID NO: 110300 - protein, 11 aa, Homo Sapiens
GVVLLGSLFSR

SEQ ID NO: 110301 - protein, 11 aa, Homo Sapiens
IPMAAVKQALR

SEQ ID NO: 110302 - protein, 11 aa, Homo Sapiens
SFEQVVNELFR

SEQ ID NO: 110303 - protein, 11 aa, Homo Sapiens
TVAGVVLLGSL

SEQ ID NO: 110304 - protein, 11 aa, Homo Sapiens
QVVNELFRDGV

SEQ ID NO: 110305 - protein, 11 aa, Homo Sapiens
IVAFFSFGGAL

SEQ ID NO: 110306 - protein, 11 aa, Homo Sapiens
ESVDKEMQVLV

SEQ ID NO: 110307 - protein, 11 aa, Homo Sapiens
TGMTVAGVVLL

SEQ ID NO: 110308 - protein, 11 aa, Homo Sapiens
ELVVDFLSYKL

SEQ ID NO: 110309 - protein, 11 aa, Homo Sapiens
RIVAFFSFGGA

SEQ ID NO: 110310 - protein, 11 aa, Homo Sapiens
DTFVELYGNNA

SEQ ID NO: 110311 - protein, 11 aa, Homo Sapiens
EVIPMAAVKQA

SEQ ID NO: 110312 - protein, 11 aa, Homo Sapiens
GTAYQSFEQVV

SEQ ID NO: 110313 - protein, 11 aa, Homo Sapiens
DAREVIPMAAV

SEQ ID NO: 110314 - protein, 11 aa, Homo Sapiens
HLADSPAVNGA

SEQ ID NO: 110315 - protein, 11 aa, Homo Sapiens
MTVAGVVLLGS

SEQ ID NO: 110316 - protein, 11 aa, Homo Sapiens
ETPSAINGNPS

SEQ ID NO: 110317 - protein, 11 aa, Homo Sapiens
FLTGMTVAGVV

SEQ ID NO: 110318 - protein, 11 aa, Homo Sapiens
HSSSLDAREVI

SEQ ID NO: 110319 - protein, 11 aa, Homo Sapiens
SAINGNPSWHL

SEQ ID NO: 110320 - protein, 11 aa, Homo Sapiens
DAREVIPMAAV

SEQ ID NO: 110321 - protein, 11 aa, Homo Sapiens
ESVDKEMQVLV

SEQ ID NO: 110322 - protein, 11 aa, Homo Sapiens
HLADSPAVNGA

SEQ ID NO: 110323 - protein, 11 aa, Homo Sapiens
PSWHLADSPAV

SEQ ID NO: 110324 - protein, 11 aa, Homo Sapiens
WFLTGMTVAGV

SEQ ID NO: 110325 - protein, 11 aa, Homo Sapiens
EVIPMAAVKQA

SEQ ID NO: 110326 - protein, 11 aa, Homo Sapiens
ELVVDFLSYKL

SEQ ID NO: 110327 - protein, 11 aa, Homo Sapiens
TVAGVVLLGSL

SEQ ID NO: 110328 - protein, 11 aa, Homo Sapiens
DTFVELYGNNA

SEQ ID NO: 110329 - protein, 11 aa, Homo Sapiens
IVAFFSFGGAL

SEQ ID NO: 110330 - protein, 11 aa, Homo Sapiens
NPSWHLADSPA

SEQ ID NO: 110331 - protein, 11 aa, Homo Sapiens
SPAVNGATGHS

SEQ ID NO: 110332 - protein, 11 aa, Homo Sapiens
SQLHITPGTAY

SEQ ID NO: 110333 - protein, 11 aa, Homo Sapiens
KQALREAGDEF

SEQ ID NO: 110334 - protein, 11 aa, Homo Sapiens
SQSNRELVVDF

SEQ ID NO: 110335 - protein, 11 aa, Homo Sapiens
YQSFEQVVNEL

SEQ ID NO: 110336 - protein, 11 aa, Homo Sapiens
MQVLVSRIAAW

SEQ ID NO: 110337 - protein, 11 aa, Homo Sapiens
VSRIAAWMATY

SEQ ID NO: 110338 - protein, 11 aa, Homo Sapiens
FLSYKLSQKGY

SEQ ID NO: 110339 - protein, 11 aa, Homo Sapiens
WIQENGGWDTF

SEQ ID NO: 110340 - protein, 11 aa, Homo Sapiens
QSFEQVVNELF

SEQ ID NO: 110341 - protein, 11 aa, Homo Sapiens
HITPGTAYQSF

SEQ ID NO: 110342 - protein, 11 aa, Homo Sapiens
GVNWGRIVAFF

SEQ ID NO: 110343 - protein, 11 aa, Homo Sapiens
DEFELRYRRAF

SEQ ID NO: 110344 - protein, 11 aa, Homo Sapiens
REAGDEFELRY

SEQ ID NO: 110345 - protein, 11 aa, Homo Sapiens
SQLHITPGTAY

SEQ ID NO: 110346 - protein, 11 aa, Homo Sapiens
VESVDKEMQVL

SEQ ID NO: 110347 - protein, 11 aa, Homo Sapiens
LEPWIQENGGW

SEQ ID NO: 110348 - protein, 11 aa, Homo Sapiens
FNRWFLTGMTV

SEQ ID NO: 110349 - protein, 11 aa, Homo Sapiens
RRAFSDLTSQL

SEQ ID NO: 110350 - protein, 11 aa, Homo Sapiens
SRIAAWMATYL

SEQ ID NO: 110351 - protein, 11 aa, Homo Sapiens
NPSWHLADSPA

SEQ ID NO: 110352 - protein, 11 aa, Homo Sapiens
TPSAINGNPSW

SEQ ID NO: 110353 - protein, 11 aa, Homo Sapiens
WIQENGGWDTF

SEQ ID NO: 110354 - protein, 11 aa, Homo Sapiens
DGVNWGRIVAF

SEQ ID NO: 110355 - protein, 11 aa, Homo Sapiens
YQSFEQVVNEL

SEQ ID NO: 110356 - protein, 11 aa, Homo Sapiens
VESVDKEMQVL

SEQ ID NO: 110357 - protein, 11 aa, Homo Sapiens
TESEMETPSAI

SEQ ID NO: 110358 - protein, 11 aa, Homo Sapiens
EENRTEAPEGT

SEQ ID NO: 110359 - protein, 11 aa, Homo Sapiens
TPSAINGNPSW

SEQ ID NO: 110360 - protein, 11 aa, Homo Sapiens
NPSWHLADSPA

SEQ ID NO: 110361 - protein, 11 aa, Homo Sapiens
ATYLNDHLEPW

SEQ ID NO: 110362 - protein, 11 aa, Homo Sapiens
ATYLNDHLEPW

SEQ ID NO: 110363 - protein, 11 aa, Homo Sapiens
QSFEQVVNELF

SEQ ID NO: 110364 - protein, 15 aa, Homo Sapiens
RWFLTGMTVAGVVLL

SEQ ID NO: 110365 - protein, 9 aa, Homo Sapiens
LTGMTVAGV

SEQ ID NO: 110366 - protein, 15 aa, Homo Sapiens
RFNRWFLTGMTVAGV

SEQ ID NO: 110367 - protein, 9 aa, Homo Sapiens
FLTGMTVAG

SEQ ID NO: 110368 - protein, 15 aa, Homo Sapiens
FNRWFLTGMTVAGVV

SEQ ID NO: 110369 - protein, 9 aa, Homo Sapiens
LTGMTVAGV

SEQ ID NO: 110370 - protein, 15 aa, Homo Sapiens
NRWFLTGMTVAGVVL

SEQ ID NO: 110371 - protein, 9 aa, Homo Sapiens
LTGMTVAGV

SEQ ID NO: 110372 - protein, 15 aa, Homo Sapiens
WFLTGMTVAGVVLLG

SEQ ID NO: 110373 - protein, 9 aa, Homo Sapiens
LTGMTVAGV

SEQ ID NO: 110374 - protein, 15 aa, Homo Sapiens
DAREVIPMAAVKQAL

SEQ ID NO: 110375 - protein, 9 aa, Homo Sapiens
VIPMAAVKQ

SEQ ID NO: 110376 - protein, 15 aa, Homo Sapiens
AREVIPMAAVKQALR

SEQ ID NO: 110377 - protein, 9 aa, Homo Sapiens
VIPMAAVKQ

SEQ ID NO: 110378 - protein, 15 aa, Homo Sapiens
REVIPMAAVKQALRE

SEQ ID NO: 110379 - protein, 9 aa, Homo Sapiens
VIPMAAVKQ

SEQ ID NO: 110380 - protein, 15 aa, Homo Sapiens
LDAREVIPMAAVKQA

SEQ ID NO: 110381 - protein, 9 aa, Homo Sapiens
VIPMAAVKQ

SEQ ID NO: 110382 - protein, 15 aa, Homo Sapiens
KEMQVLVSRIAAWMA

SEQ ID NO: 110383 - protein, 9 aa, Homo Sapiens
MQVLVSRIA

SEQ ID NO: 110384 - protein, 15 aa, Homo Sapiens
LTSQLHITPGTAYQS

SEQ ID NO: 110385 - protein, 9 aa, Homo Sapiens
LHITPGTAY

SEQ ID NO: 110386 - protein, 15 aa, Homo Sapiens
TSQLHITPGTAYQSF

SEQ ID NO: 110387 - protein, 9 aa, Homo Sapiens
ITPGTAYQS

SEQ ID NO: 110388 - protein, 15 aa, Homo Sapiens
SLDAREVIPMAAVKQ

SEQ ID NO: 110389 - protein, 9 aa, Homo Sapiens
AREVIPMAA

SEQ ID NO: 110390 - protein, 15 aa, Homo Sapiens
SQLHITPGTAYQSFE

SEQ ID NO: 110391 - protein, 9 aa, Homo Sapiens
ITPGTAYQS

SEQ ID NO: 110392 - protein, 15 aa, Homo Sapiens
FLTGMTVAGVVLLGS

SEQ ID NO: 110393 - protein, 9 aa, Homo Sapiens
LTGMTVAGV

SEQ ID NO: 110394 - protein, 15 aa, Homo Sapiens
DKEMQVLVSRIAAWM

SEQ ID NO: 110395 - protein, 9 aa, Homo Sapiens
MQVLVSRIA

SEQ ID NO: 110396 - protein, 15 aa, Homo Sapiens
QLHITPGTAYQSFEQ

SEQ ID NO: 110397 - protein, 9 aa, Homo Sapiens
ITPGTAYQS

SEQ ID NO: 110398 - protein, 15 aa, Homo Sapiens
LHITPGTAYQSFEQV

SEQ ID NO: 110399 - protein, 9 aa, Homo Sapiens
ITPGTAYQS

SEQ ID NO: 110400 - protein, 15 aa, Homo Sapiens
SVDKEMQVLVSRIAA

SEQ ID NO: 110401 - protein, 9 aa, Homo Sapiens
MQVLVSRIA

SEQ ID NO: 110402 - protein, 15 aa, Homo Sapiens
EVIPMAAVKQALREA

SEQ ID NO: 110403 - protein, 9 aa, Homo Sapiens
IPMAAVKQA

SEQ ID NO: 110404 - protein, 15 aa, Homo Sapiens
ESVDKEMQVLVSRIA

SEQ ID NO: 110405 - protein, 9 aa, Homo Sapiens
VDKEMQVLV

SEQ ID NO: 110406 - protein, 15 aa, Homo Sapiens
VDKEMQVLVSRIAAW

SEQ ID NO: 110407 - protein, 9 aa, Homo Sapiens
MQVLVSRIA

SEQ ID NO: 110408 - protein, 15 aa, Homo Sapiens
LTGMTVAGVVLLGSL

SEQ ID NO: 110409 - protein, 9 aa, Homo Sapiens
LTGMTVAGV

SEQ ID NO: 110410 - protein, 15 aa, Homo Sapiens
ERFNRWFLTGMTVAG

SEQ ID NO: 110411 - protein, 9 aa, Homo Sapiens
FNRWFLTGM

SEQ ID NO: 110412 - protein, 15 aa, Homo Sapiens
ETPSAINGNPSWHLA

SEQ ID NO: 110413 - protein, 9 aa, Homo Sapiens
INGNPSWHL

SEQ ID NO: 110414 - protein, 15 aa, Homo Sapiens
TPSAINGNPSWHLAD

SEQ ID NO: 110415 - protein, 9 aa, Homo Sapiens
INGNPSWHL

SEQ ID NO: 110416 - protein, 15 aa, Homo Sapiens
PSAINGNPSWHLADS

SEQ ID NO: 110417 - protein, 9 aa, Homo Sapiens
INGNPSWHL

SEQ ID NO: 110418 - protein, 15 aa, Homo Sapiens
SAINGNPSWHLADSP

SEQ ID NO: 110419 - protein, 9 aa, Homo Sapiens
INGNPSWHL

SEQ ID NO: 110420 - protein, 15 aa, Homo Sapiens
METPSAINGNPSWHL

SEQ ID NO: 110421 - protein, 9 aa, Homo Sapiens
PSAINGNPS

SEQ ID NO: 110422 - protein, 15 aa, Homo Sapiens
EMQVLVSRIAAWMAT

SEQ ID NO: 110423 - protein, 9 aa, Homo Sapiens
MQVLVSRIA

SEQ ID NO: 110424 - protein, 15 aa, Homo Sapiens
VIPMAAVKQALREAG

SEQ ID NO: 110425 - protein, 9 aa, Homo Sapiens
VIPMAAVKQ

SEQ ID NO: 110426 - protein, 15 aa, Homo Sapiens
MQVLVSRIAAWMATY

SEQ ID NO: 110427 - protein, 9 aa, Homo Sapiens
MQVLVSRIA

SEQ ID NO: 110428 - protein, 15 aa, Homo Sapiens
VLVSRIAAWMATYLN

SEQ ID NO: 110429 - protein, 9 aa, Homo Sapiens
IAAWMATYL

SEQ ID NO: 110430 - protein, 15 aa, Homo Sapiens
GMTVAGVVLLGSLFS

SEQ ID NO: 110431 - protein, 9 aa, Homo Sapiens
MTVAGVVLL

SEQ ID NO: 110432 - protein, 15 aa, Homo Sapiens
MTVAGVVLLGSLFSR

SEQ ID NO: 110433 - protein, 9 aa, Homo Sapiens
VVLLGSLFS

SEQ ID NO: 110434 - protein, 15 aa, Homo Sapiens
INGNPSWHLADSPAV

SEQ ID NO: 110435 - protein, 9 aa, Homo Sapiens
INGNPSWHL

SEQ ID NO: 110436 - protein, 15 aa, Homo Sapiens
VELYGNNAAAESRKG

SEQ ID NO: 110437 - protein, 9 aa, Homo Sapiens
YGNNAAAES

SEQ ID NO: 110438 - protein, 15 aa, Homo Sapiens
TVAGVVLLGSLFSRK

SEQ ID NO: 110439 - protein, 9 aa, Homo Sapiens
VVLLGSLFS

SEQ ID NO: 110440 - protein, 15 aa, Homo Sapiens
QVLVSRIAAWMATYL

SEQ ID NO: 110441 - protein, 9 aa, Homo Sapiens
VSRIAAWMA

SEQ ID NO: 110442 - protein, 15 aa, Homo Sapiens
FVELYGNNAAAESRK

SEQ ID NO: 110443 - protein, 9 aa, Homo Sapiens
YGNNAAAES

SEQ ID NO: 110444 - protein, 15 aa, Homo Sapiens
ELYGNNAAAESRKGQ

SEQ ID NO: 110445 - protein, 9 aa, Homo Sapiens
YGNNAAAES

SEQ ID NO: 110446 - protein, 15 aa, Homo Sapiens
LRYRRAFSDLTSQLH

SEQ ID NO: 110447 - protein, 9 aa, Homo Sapiens
YRRAFSDLT

SEQ ID NO: 110448 - protein, 15 aa, Homo Sapiens
LVSRIAAWMATYLND

SEQ ID NO: 110449 - protein, 9 aa, Homo Sapiens
IAAWMATYL

SEQ ID NO: 110450 - protein, 15 aa, Homo Sapiens
TFVELYGNNAAAESR

SEQ ID NO: 110451 - protein, 9 aa, Homo Sapiens
YGNNAAAES

SEQ ID NO: 110452 - protein, 15 aa, Homo Sapiens
DTFVELYGNNAAAES

SEQ ID NO: 110453 - protein, 9 aa, Homo Sapiens
FVELYGNNA

SEQ ID NO: 110454 - protein, 15 aa, Homo Sapiens
NPSWHLADSPAVNGA

SEQ ID NO: 110455 - protein, 9 aa, Homo Sapiens
WHLADSPAV

SEQ ID NO: 110456 - protein, 15 aa, Homo Sapiens
PSWHLADSPAVNGAT

SEQ ID NO: 110457 - protein, 9 aa, Homo Sapiens
WHLADSPAV

SEQ ID NO: 110458 - protein, 15 aa, Homo Sapiens
TGMTVAGVVLLGSLF

SEQ ID NO: 110459 - protein, 9 aa, Homo Sapiens
MTVAGVVLL

SEQ ID NO: 110460 - protein, 15 aa, Homo Sapiens
VSRIAAWMATYLNDH

SEQ ID NO: 110461 - protein, 9 aa, Homo Sapiens
IAAWMATYL

SEQ ID NO: 110462 - protein, 15 aa, Homo Sapiens
GNPSWHLADSPAVNG

SEQ ID NO: 110463 - protein, 9 aa, Homo Sapiens
WHLADSPAV

SEQ ID NO: 110464 - protein, 15 aa, Homo Sapiens
LADSPAVNGATGHSS

SEQ ID NO: 110465 - protein, 9 aa, Homo Sapiens
LADSPAVNG

SEQ ID NO: 110466 - protein, 15 aa, Homo Sapiens
ELRYRRAFSDLTSQL

SEQ ID NO: 110467 - protein, 9 aa, Homo Sapiens
YRRAFSDLT

SEQ ID NO: 110468 - protein, 15 aa, Homo Sapiens
SRIAAWMATYLNDHL

SEQ ID NO: 110469 - protein, 9 aa, Homo Sapiens
IAAWMATYL

SEQ ID NO: 110470 - protein, 15 aa, Homo Sapiens
FELRYRRAFSDLTSQ

SEQ ID NO: 110471 - protein, 9 aa, Homo Sapiens
YRRAFSDLT

SEQ ID NO: 110472 - protein, 15 aa, Homo Sapiens
EFELRYRRAFSDLTS

SEQ ID NO: 110473 - protein, 9 aa, Homo Sapiens
YRRAFSDLT

SEQ ID NO: 110474 - protein, 15 aa, Homo Sapiens
DEFELRYRRAFSDLT

SEQ ID NO: 110475 - protein, 9 aa, Homo Sapiens
LRYRRAFSD

SEQ ID NO: 110476 - protein, 15 aa, Homo Sapiens
IVAFFSFGGALCVES

SEQ ID NO: 110477 - protein, 9 aa, Homo Sapiens
FSFGGALCV

SEQ ID NO: 110478 - protein, 15 aa, Homo Sapiens
SWHLADSPAVNGATG

SEQ ID NO: 110479 - protein, 9 aa, Homo Sapiens
LADSPAVNG

SEQ ID NO: 110480 - protein, 15 aa, Homo Sapiens
DSPAVNGATGHSSSL

SEQ ID NO: 110481 - protein, 9 aa, Homo Sapiens
VNGATGHSS

SEQ ID NO: 110482 - protein, 15 aa, Homo Sapiens
SPAVNGATGHSSSLD

SEQ ID NO: 110483 - protein, 9 aa, Homo Sapiens
VNGATGHSS

SEQ ID NO: 110484 - protein, 15 aa, Homo Sapiens
VAFFSFGGALCVESV

SEQ ID NO: 110485 - protein, 9 aa, Homo Sapiens
FSFGGALCV

SEQ ID NO: 110486 - protein, 15 aa, Homo Sapiens
ADSPAVNGATGHSSS

SEQ ID NO: 110487 - protein, 9 aa, Homo Sapiens
VNGATGHSS

SEQ ID NO: 110488 - protein, 15 aa, Homo Sapiens
AFFSFGGALCVESVD

SEQ ID NO: 110489 - protein, 9 aa, Homo Sapiens
FSFGGALCV

SEQ ID NO: 110490 - protein, 15 aa, Homo Sapiens
WHLADSPAVNGATGH

SEQ ID NO: 110491 - protein, 9 aa, Homo Sapiens
LADSPAVNG

SEQ ID NO: 110492 - protein, 15 aa, Homo Sapiens
HITPGTAYQSFEQVV

SEQ ID NO: 110493 - protein, 9 aa, Homo Sapiens
ITPGTAYQS

SEQ ID NO: 110494 - protein, 15 aa, Homo Sapiens
ITPGTAYQSFEQVVN

SEQ ID NO: 110495 - protein, 9 aa, Homo Sapiens
ITPGTAYQS

SEQ ID NO: 110496 - protein, 15 aa, Homo Sapiens
AINGNPSWHLADSPA

SEQ ID NO: 110497 - protein, 9 aa, Homo Sapiens
INGNPSWHL

SEQ ID NO: 110498 - protein, 15 aa, Homo Sapiens
PAVNGATGHSSSLDA

SEQ ID NO: 110499 - protein, 9 aa, Homo Sapiens
VNGATGHSS

SEQ ID NO: 110500 - protein, 15 aa, Homo Sapiens
RYRRAFSDLTSQLHI

SEQ ID NO: 110501 - protein, 9 aa, Homo Sapiens
YRRAFSDLT

SEQ ID NO: 110502 - protein, 15 aa, Homo Sapiens
YRRAFSDLTSQLHIT

SEQ ID NO: 110503 - protein, 9 aa, Homo Sapiens
YRRAFSDLT

SEQ ID NO: 110504 - protein, 15 aa, Homo Sapiens
NGNPSWHLADSPAVN

SEQ ID NO: 110505 - protein, 9 aa, Homo Sapiens
WHLADSPAV

SEQ ID NO: 110506 - protein, 15 aa, Homo Sapiens
GRIVAFFSFGGALCV

SEQ ID NO: 110507 - protein, 9 aa, Homo Sapiens
IVAFFSFGG

SEQ ID NO: 110508 - protein, 15 aa, Homo Sapiens
LYGNNAAAESRKGQE

SEQ ID NO: 110509 - protein, 9 aa, Homo Sapiens
YGNNAAAES

SEQ ID NO: 110510 - protein, 15 aa, Homo Sapiens
RIAAWMATYLNDHLE

SEQ ID NO: 110511 - protein, 9 aa, Homo Sapiens
AAWMATYLN

SEQ ID NO: 110512 - protein, 15 aa, Homo Sapiens
YGNNAAAESRKGQER

SEQ ID NO: 110513 - protein, 9 aa, Homo Sapiens
YGNNAAAES

SEQ ID NO: 110514 - protein, 15 aa, Homo Sapiens
RIVAFFSFGGALCVE

SEQ ID NO: 110515 - protein, 9 aa, Homo Sapiens
FSFGGALCV

SEQ ID NO: 110516 - protein, 15 aa, Homo Sapiens
FRDGVNWGRIVAFFS

SEQ ID NO: 110517 - protein, 9 aa, Homo Sapiens
VNWGRIVAF

SEQ ID NO: 110518 - protein, 15 aa, Homo Sapiens
FFSFGGALCVESVDK

SEQ ID NO: 110519 - protein, 9 aa, Homo Sapiens
FSFGGALCV

SEQ ID NO: 110520 - protein, 15 aa, Homo Sapiens
FSFGGALCVESVDKE

SEQ ID NO: 110521 - protein, 9 aa, Homo Sapiens
FSFGGALCV

SEQ ID NO: 110522 - protein, 15 aa, Homo Sapiens
RDGVNWGRIVAFFSF

SEQ ID NO: 110523 - protein, 9 aa, Homo Sapiens
VNWGRIVAF

SEQ ID NO: 110524 - protein, 15 aa, Homo Sapiens
DGVNWGRIVAFFSFG

SEQ ID NO: 110525 - protein, 9 aa, Homo Sapiens
VNWGRIVAF

SEQ ID NO: 110526 - protein, 15 aa, Homo Sapiens
IPMAAVKQALREAGD

SEQ ID NO: 110527 - protein, 9 aa, Homo Sapiens
IPMAAVKQA

SEQ ID NO: 110528 - protein, 15 aa, Homo Sapiens
RRAFSDLTSQLHITP

SEQ ID NO: 110529 - protein, 9 aa, Homo Sapiens
FSDLTSQLH

SEQ ID NO: 110530 - protein, 15 aa, Homo Sapiens
RAFSDLTSQLHITPG

SEQ ID NO: 110531 - protein, 9 aa, Homo Sapiens
FSDLTSQLH

SEQ ID NO: 110532 - protein, 15 aa, Homo Sapiens
HLADSPAVNGATGHS

SEQ ID NO: 110533 - protein, 9 aa, Homo Sapiens
LADSPAVNG

SEQ ID NO: 110534 - protein, 15 aa, Homo Sapiens
GVNWGRIVAFFSFGG

SEQ ID NO: 110535 - protein, 9 aa, Homo Sapiens
VNWGRIVAF

SEQ ID NO: 110536 - protein, 14 aa, Homo Sapiens
AAWMATYLNDHLEP

SEQ ID NO: 110537 - protein, 9 aa, Homo Sapiens
IAAWMATYL

SEQ ID NO: 110538 - protein, 15 aa, Homo Sapiens
AVNGATGHSSSLDAR

SEQ ID NO: 110539 - protein, 9 aa, Homo Sapiens
VNGATGHSS

SEQ ID NO: 110540 - protein, 15 aa, Homo Sapiens
VNWGRIVAFFSFGGA

SEQ ID NO: 110541 - protein, 9 aa, Homo Sapiens
VNWGRIVAF

SEQ ID NO: 110542 - protein, 15 aa, Homo Sapiens
ELVVDFLSYKLSQKG

SEQ ID NO: 110543 - protein, 9 aa, Homo Sapiens
VVDFLSYKL

SEQ ID NO: 110544 - protein, 15 aa, Homo Sapiens
ELFRDGVNWGRIVAF

SEQ ID NO: 110545 - protein, 9 aa, Homo Sapiens
FRDGVNWGR

SEQ ID NO: 110546 - protein, 15 aa, Homo Sapiens
VNGATGHSSSLDARE

SEQ ID NO: 110547 - protein, 9 aa, Homo Sapiens
VNGATGHSS

SEQ ID NO: 110548 - protein, 15 aa, Homo Sapiens
LFRDGVNWGRIVAFF

SEQ ID NO: 110549 - protein, 9 aa, Homo Sapiens
VNWGRIVAF

SEQ ID NO: 110550 - protein, 15 aa, Homo Sapiens
LVVDFLSYKLSQKGY

SEQ ID NO: 110551 - protein, 9 aa, Homo Sapiens
LSYKLSQKG

SEQ ID NO: 110552 - protein, 15 aa, Homo Sapiens
VVDFLSYKLSQKGYS

SEQ ID NO: 110553 - protein, 9 aa, Homo Sapiens
LSYKLSQKG

SEQ ID NO: 110554 - protein, 15 aa, Homo Sapiens
QERFNRWFLTGMTVA

SEQ ID NO: 110555 - protein, 9 aa, Homo Sapiens
FNRWFLTGM

SEQ ID NO: 110556 - protein, 15 aa, Homo Sapiens
ESEMETPSAINGNPS

SEQ ID NO: 110557 - protein, 9 aa, Homo Sapiens
METPSAING

SEQ ID NO: 110558 - protein, 15 aa, Homo Sapiens
GTESEMETPSAINGN

SEQ ID NO: 110559 - protein, 9 aa, Homo Sapiens
METPSAING

SEQ ID NO: 110560 - protein, 15 aa, Homo Sapiens
DLTSQLHITPGTAYQ

SEQ ID NO: 110561 - protein, 9 aa, Homo Sapiens
LHITPGTAY

SEQ ID NO: 110562 - protein, 15 aa, Homo Sapiens
EGTESEMETPSAING

SEQ ID NO: 110563 - protein, 9 aa, Homo Sapiens
ESEMETPSA

SEQ ID NO: 110564 - protein, 15 aa, Homo Sapiens
SEMETPSAINGNPSW

SEQ ID NO: 110565 - protein, 9 aa, Homo Sapiens
METPSAING

SEQ ID NO: 110566 - protein, 15 aa, Homo Sapiens
SDLTSQLHITPGTAY

SEQ ID NO: 110567 - protein, 9 aa, Homo Sapiens
SQLHITPGT

SEQ ID NO: 110568 - protein, 15 aa, Homo Sapiens
VDFLSYKLSQKGYSW

SEQ ID NO: 110569 - protein, 9 aa, Homo Sapiens
LSYKLSQKG

SEQ ID NO: 110570 - protein, 15 aa, Homo Sapiens
TESEMETPSAINGNP

SEQ ID NO: 110571 - protein, 9 aa, Homo Sapiens
METPSAING

SEQ ID NO: 110572 - protein, 15 aa, Homo Sapiens
AAWMATYLNDHLEPW

SEQ ID NO: 110573 - protein, 9 aa, Homo Sapiens
AAWMATYLN

SEQ ID NO: 110574 - protein, 15 aa, Homo Sapiens
DFLSYKLSQKGYSWS

SEQ ID NO: 110575 - protein, 9 aa, Homo Sapiens
LSYKLSQKG

SEQ ID NO: 110576 - protein, 15 aa, Homo Sapiens
AFSDLTSQLHITPGT

SEQ ID NO: 110577 - protein, 9 aa, Homo Sapiens
FSDLTSQLH

SEQ ID NO: 110578 - protein, 15 aa, Homo Sapiens
FSDLTSQLHITPGTA

SEQ ID NO: 110579 - protein, 9 aa, Homo Sapiens
FSDLTSQLH

SEQ ID NO: 110580 - protein, 15 aa, Homo Sapiens
WGRIVAFFSFGGALC

SEQ ID NO: 110581 - protein, 9 aa, Homo Sapiens
IVAFFSFGG

SEQ ID NO: 110582 - protein, 15 aa, Homo Sapiens
GQERFNRWFLTGMTV

SEQ ID NO: 110583 - protein, 9 aa, Homo Sapiens
FNRWFLTGM

SEQ ID NO: 110584 - protein, 15 aa, Homo Sapiens
LRYRRAFSDLTSQLH

SEQ ID NO: 110585 - protein, 9 aa, Homo Sapiens
YRRAFSDLT

SEQ ID NO: 110586 - protein, 15 aa, Homo Sapiens
FELRYRRAFSDLTSQ

SEQ ID NO: 110587 - protein, 9 aa, Homo Sapiens
YRRAFSDLT

SEQ ID NO: 110588 - protein, 15 aa, Homo Sapiens
EFELRYRRAFSDLTS

SEQ ID NO: 110589 - protein, 9 aa, Homo Sapiens
YRRAFSDLT

SEQ ID NO: 110590 - protein, 15 aa, Homo Sapiens
DEFELRYRRAFSDLT

SEQ ID NO: 110591 - protein, 9 aa, Homo Sapiens
DEFELRYRR

SEQ ID NO: 110592 - protein, 15 aa, Homo Sapiens
ELRYRRAFSDLTSQL

SEQ ID NO: 110593 - protein, 9 aa, Homo Sapiens
YRRAFSDLT

SEQ ID NO: 110594 - protein, 15 aa, Homo Sapiens
NGGWDTFVELYGNNA

SEQ ID NO: 110595 - protein, 9 aa, Homo Sapiens
WDTFVELYG

SEQ ID NO: 110596 - protein, 15 aa, Homo Sapiens
GGWDTFVELYGNNAA

SEQ ID NO: 110597 - protein, 9 aa, Homo Sapiens
FVELYGNNA

SEQ ID NO: 110598 - protein, 15 aa, Homo Sapiens
WDTFVELYGNNAAAE

SEQ ID NO: 110599 - protein, 9 aa, Homo Sapiens
FVELYGNNA

SEQ ID NO: 110600 - protein, 15 aa, Homo Sapiens
GWDTFVELYGNNAAA

SEQ ID NO: 110601 - protein, 9 aa, Homo Sapiens
FVELYGNNA

SEQ ID NO: 110602 - protein, 15 aa, Homo Sapiens
DTFVELYGNNAAAES

SEQ ID NO: 110603 - protein, 9 aa, Homo Sapiens
FVELYGNNA

SEQ ID NO: 110604 - protein, 15 aa, Homo Sapiens
RYRRAFSDLTSQLHI

SEQ ID NO: 110605 - protein, 9 aa, Homo Sapiens
YRRAFSDLT

SEQ ID NO: 110606 - protein, 15 aa, Homo Sapiens
YRRAFSDLTSQLHIT

SEQ ID NO: 110607 - protein, 9 aa, Homo Sapiens
YRRAFSDLT

SEQ ID NO: 110608 - protein, 15 aa, Homo Sapiens
ESVDKEMQVLVSRIA

SEQ ID NO: 110609 - protein, 9 aa, Homo Sapiens
KEMQVLVSR

SEQ ID NO: 110610 - protein, 15 aa, Homo Sapiens
VDKEMQVLVSRIAAW

SEQ ID NO: 110611 - protein, 9 aa, Homo Sapiens
MQVLVSRIA

SEQ ID NO: 110612 - protein, 15 aa, Homo Sapiens
ERFNRWFLTGMTVAG

SEQ ID NO: 110613 - protein, 9 aa, Homo Sapiens
WFLTGMTVA

SEQ ID NO: 110614 - protein, 15 aa, Homo Sapiens
SVDKEMQVLVSRIAA

SEQ ID NO: 110615 - protein, 9 aa, Homo Sapiens
MQVLVSRIA

SEQ ID NO: 110616 - protein, 15 aa, Homo Sapiens
RFNRWFLTGMTVAGV

SEQ ID NO: 110617 - protein, 9 aa, Homo Sapiens
FLTGMTVAG

SEQ ID NO: 110618 - protein, 15 aa, Homo Sapiens
FNRWFLTGMTVAGVV

SEQ ID NO: 110619 - protein, 9 aa, Homo Sapiens
FLTGMTVAG

SEQ ID NO: 110620 - protein, 15 aa, Homo Sapiens
KEMQVLVSRIAAWMA

SEQ ID NO: 110621 - protein, 9 aa, Homo Sapiens
MQVLVSRIA

SEQ ID NO: 110622 - protein, 15 aa, Homo Sapiens
DKEMQVLVSRIAAWM

SEQ ID NO: 110623 - protein, 9 aa, Homo Sapiens
MQVLVSRIA

SEQ ID NO: 110624 - protein, 15 aa, Homo Sapiens
NRWFLTGMTVAGVVL

SEQ ID NO: 110625 - protein, 9 aa, Homo Sapiens
FLTGMTVAG

SEQ ID NO: 110626 - protein, 15 aa, Homo Sapiens
AAWMATYLNDHLEPW

SEQ ID NO: 110627 - protein, 9 aa, Homo Sapiens
WMATYLNDH

SEQ ID NO: 110628 - protein, 15 aa, Homo Sapiens
SRIAAWMATYLNDHL

SEQ ID NO: 110629 - protein, 9 aa, Homo Sapiens
WMATYLNDH

SEQ ID NO: 110630 - protein, 15 aa, Homo Sapiens
RIAAWMATYLNDHLE

SEQ ID NO: 110631 - protein, 9 aa, Homo Sapiens
WMATYLNDH

SEQ ID NO: 110632 - protein, 15 aa, Homo Sapiens
IAAWMATYLNDHLEP

SEQ ID NO: 110633 - protein, 9 aa, Homo Sapiens
WMATYLNDH

SEQ ID NO: 110634 - protein, 15 aa, Homo Sapiens
VSRIAAWMATYLNDH

SEQ ID NO: 110635 - protein, 9 aa, Homo Sapiens
AAWMATYLN

SEQ ID NO: 110636 - protein, 15 aa, Homo Sapiens
TVAGVVLLGSLFSRK

SEQ ID NO: 110637 - protein, 9 aa, Homo Sapiens
VVLLGSLFS

SEQ ID NO: 110638 - protein, 15 aa, Homo Sapiens
RFNRWFLTGMTVAGV

SEQ ID NO: 110639 - protein, 9 aa, Homo Sapiens
FLTGMTVAG

SEQ ID NO: 110640 - protein, 15 aa, Homo Sapiens
FNRWFLTGMTVAGVV

SEQ ID NO: 110641 - protein, 9 aa, Homo Sapiens
FLTGMTVAG

SEQ ID NO: 110642 - protein, 15 aa, Homo Sapiens
NRWFLTGMTVAGVVL

SEQ ID NO: 110643 - protein, 9 aa, Homo Sapiens
FLTGMTVAG

SEQ ID NO: 110644 - protein, 15 aa, Homo Sapiens
ERFNRWFLTGMTVAG

SEQ ID NO: 110645 - protein, 9 aa, Homo Sapiens
WFLTGMTVA

SEQ ID NO: 110646 - protein, 15 aa, Homo Sapiens
AWMATYLNDHLEPWI

SEQ ID NO: 110647 - protein, 9 aa, Homo Sapiens
WMATYLNDH

SEQ ID NO: 110648 - protein, 15 aa, Homo Sapiens
RWFLTGMTVAGVVLL

SEQ ID NO: 110649 - protein, 9 aa, Homo Sapiens
FLTGMTVAG

SEQ ID NO: 110650 - protein, 15 aa, Homo Sapiens
DTFVELYGNNAAAES

SEQ ID NO: 110651 - protein, 9 aa, Homo Sapiens
FVELYGNNA

SEQ ID NO: 110652 - protein, 15 aa, Homo Sapiens
GWDTFVELYGNNAAA

SEQ ID NO: 110653 - protein, 9 aa, Homo Sapiens
FVELYGNNA

SEQ ID NO: 110654 - protein, 15 aa, Homo Sapiens
WMATYLNDHLEPWIQ

SEQ ID NO: 110655 - protein, 9 aa, Homo Sapiens
WMATYLNDH

SEQ ID NO: 110656 - protein, 15 aa, Homo Sapiens
WDTFVELYGNNAAAE

SEQ ID NO: 110657 - protein, 9 aa, Homo Sapiens
FVELYGNNA

SEQ ID NO: 110658 - protein, 15 aa, Homo Sapiens
GGWDTFVELYGNNAA

SEQ ID NO: 110659 - protein, 9 aa, Homo Sapiens
FVELYGNNA

SEQ ID NO: 110660 - protein, 15 aa, Homo Sapiens
NGGWDTFVELYGNNA

SEQ ID NO: 110661 - protein, 9 aa, Homo Sapiens
GWDTFVELY

SEQ ID NO: 110662 - protein, 15 aa, Homo Sapiens
TAYQSFEQVVNELFR

SEQ ID NO: 110663 - protein, 9 aa, Homo Sapiens
YQSFEQVVN

SEQ ID NO: 110664 - protein, 15 aa, Homo Sapiens
GTAYQSFEQVVNELF

SEQ ID NO: 110665 - protein, 9 aa, Homo Sapiens
YQSFEQVVN

SEQ ID NO: 110666 - protein, 15 aa, Homo Sapiens
TPGTAYQSFEQVVNE

SEQ ID NO: 110667 - protein, 9 aa, Homo Sapiens
YQSFEQVVN

SEQ ID NO: 110668 - protein, 15 aa, Homo Sapiens
PGTAYQSFEQVVNEL

SEQ ID NO: 110669 - protein, 9 aa, Homo Sapiens
YQSFEQVVN

SEQ ID NO: 110670 - protein, 15 aa, Homo Sapiens
ITPGTAYQSFEQVVN

SEQ ID NO: 110671 - protein, 9 aa, Homo Sapiens
AYQSFEQVV

SEQ ID NO: 110672 - protein, 15 aa, Homo Sapiens
VSRIAAWMATYLNDH

SEQ ID NO: 110673 - protein, 9 aa, Homo Sapiens
AAWMATYLN

SEQ ID NO: 110674 - protein, 15 aa, Homo Sapiens
LVSRIAAWMATYLND

SEQ ID NO: 110675 - protein, 9 aa, Homo Sapiens
AAWMATYLN

SEQ ID NO: 110676 - protein, 15 aa, Homo Sapiens
VLVSRIAAWMATYLN

SEQ ID NO: 110677 - protein, 9 aa, Homo Sapiens
IAAWMATYL

SEQ ID NO: 110678 - protein, 15 aa, Homo Sapiens
SRIAAWMATYLNDHL

SEQ ID NO: 110679 - protein, 9 aa, Homo Sapiens
AAWMATYLN

SEQ ID NO: 110680 - protein, 15 aa, Homo Sapiens
LRYRRAFSDLTSQLH

SEQ ID NO: 110681 - protein, 9 aa, Homo Sapiens
YRRAFSDLT

SEQ ID NO: 110682 - protein, 15 aa, Homo Sapiens
FELRYRRAFSDLTSQ

SEQ ID NO: 110683 - protein, 9 aa, Homo Sapiens
YRRAFSDLT

SEQ ID NO: 110684 - protein, 15 aa, Homo Sapiens
EFELRYRRAFSDLTS

SEQ ID NO: 110685 - protein, 9 aa, Homo Sapiens
YRRAFSDLT

SEQ ID NO: 110686 - protein, 15 aa, Homo Sapiens
RIAAWMATYLNDHLE

SEQ ID NO: 110687 - protein, 9 aa, Homo Sapiens
AAWMATYLN

SEQ ID NO: 110688 - protein, 15 aa, Homo Sapiens
AYQSFEQVVNELFRD

SEQ ID NO: 110689 - protein, 9 aa, Homo Sapiens
YQSFEQVVN

SEQ ID NO: 110690 - protein, 15 aa, Homo Sapiens
YQSFEQVVNELFRDG

SEQ ID NO: 110691 - protein, 9 aa, Homo Sapiens
YQSFEQVVN

SEQ ID NO: 110692 - protein, 15 aa, Homo Sapiens
ELRYRRAFSDLTSQL

SEQ ID NO: 110693 - protein, 9 aa, Homo Sapiens
YRRAFSDLT

SEQ ID NO: 110694 - protein, 15 aa, Homo Sapiens
SQKGYSWSQFSDVEE

SEQ ID NO: 110695 - protein, 9 aa, Homo Sapiens
GYSWSQFSD

SEQ ID NO: 110696 - protein, 15 aa, Homo Sapiens
DEFELRYRRAFSDLT

SEQ ID NO: 110697 - protein, 9 aa, Homo Sapiens
LRYRRAFSD

SEQ ID NO: 110698 - protein, 15 aa, Homo Sapiens
QKGYSWSQFSDVEEN

SEQ ID NO: 110699 - protein, 9 aa, Homo Sapiens
WSQFSDVEE

SEQ ID NO: 110700 - protein, 15 aa, Homo Sapiens
RYRRAFSDLTSQLHI

SEQ ID NO: 110701 - protein, 9 aa, Homo Sapiens
YRRAFSDLT

SEQ ID NO: 110702 - protein, 15 aa, Homo Sapiens
KGYSWSQFSDVEENR

SEQ ID NO: 110703 - protein, 9 aa, Homo Sapiens
WSQFSDVEE

SEQ ID NO: 110704 - protein, 15 aa, Homo Sapiens
IAAWMATYLNDHLEP

SEQ ID NO: 110705 - protein, 9 aa, Homo Sapiens
AAWMATYLN

SEQ ID NO: 110706 - protein, 15 aa, Homo Sapiens
GYSWSQFSDVEENRT

SEQ ID NO: 110707 - protein, 9 aa, Homo Sapiens
WSQFSDVEE

SEQ ID NO: 110708 - protein, 15 aa, Homo Sapiens
KEMQVLVSRIAAWMA

SEQ ID NO: 110709 - protein, 9 aa, Homo Sapiens
VLVSRIAAW

SEQ ID NO: 110710 - protein, 15 aa, Homo Sapiens
MQVLVSRIAAWMATY

SEQ ID NO: 110711 - protein, 9 aa, Homo Sapiens
VLVSRIAAW

SEQ ID NO: 110712 - protein, 15 aa, Homo Sapiens
EMQVLVSRIAAWMAT

SEQ ID NO: 110713 - protein, 9 aa, Homo Sapiens
VLVSRIAAW

SEQ ID NO: 110714 - protein, 15 aa, Homo Sapiens
DKEMQVLVSRIAAWM

SEQ ID NO: 110715 - protein, 9 aa, Homo Sapiens
VLVSRIAAW

SEQ ID NO: 110716 - protein, 15 aa, Homo Sapiens
QVLVSRIAAWMATYL

SEQ ID NO: 110717 - protein, 9 aa, Homo Sapiens
VLVSRIAAW

SEQ ID NO: 110718 - protein, 15 aa, Homo Sapiens
ETPSAINGNPSWHLA

SEQ ID NO: 110719 - protein, 9 aa, Homo Sapiens
INGNPSWHL

SEQ ID NO: 110720 - protein, 15 aa, Homo Sapiens
METPSAINGNPSWHL

SEQ ID NO: 110721 - protein, 9 aa, Homo Sapiens
AINGNPSWH

SEQ ID NO: 110722 - protein, 15 aa, Homo Sapiens
VDKEMQVLVSRIAAW

SEQ ID NO: 110723 - protein, 9 aa, Homo Sapiens
MQVLVSRIA

SEQ ID NO: 110724 - protein, 15 aa, Homo Sapiens
TPSAINGNPSWHLAD

SEQ ID NO: 110725 - protein, 9 aa, Homo Sapiens
INGNPSWHL

SEQ ID NO: 110726 - protein, 15 aa, Homo Sapiens
PSAINGNPSWHLADS

SEQ ID NO: 110727 - protein, 9 aa, Homo Sapiens
INGNPSWHL

SEQ ID NO: 110728 - protein, 15 aa, Homo Sapiens
VLVSRIAAWMATYLN

SEQ ID NO: 110729 - protein, 9 aa, Homo Sapiens
VLVSRIAAW

SEQ ID NO: 110730 - protein, 15 aa, Homo Sapiens
SAINGNPSWHLADSP

SEQ ID NO: 110731 - protein, 9 aa, Homo Sapiens
INGNPSWHL

SEQ ID NO: 110732 - protein, 15 aa, Homo Sapiens
LRYRRAFSDLTSQLH

SEQ ID NO: 110733 - protein, 9 aa, Homo Sapiens
YRRAFSDLT

SEQ ID NO: 110734 - protein, 15 aa, Homo Sapiens
RYRRAFSDLTSQLHI

SEQ ID NO: 110735 - protein, 9 aa, Homo Sapiens
FSDLTSQLH

SEQ ID NO: 110736 - protein, 15 aa, Homo Sapiens
YRRAFSDLTSQLHIT

SEQ ID NO: 110737 - protein, 9 aa, Homo Sapiens
FSDLTSQLH

SEQ ID NO: 110738 - protein, 15 aa, Homo Sapiens
INGNPSWHLADSPAV

SEQ ID NO: 110739 - protein, 9 aa, Homo Sapiens
INGNPSWHL

SEQ ID NO: 110740 - protein, 15 aa, Homo Sapiens
PSWHLADSPAVNGAT

SEQ ID NO: 110741 - protein, 9 aa, Homo Sapiens
WHLADSPAV

SEQ ID NO: 110742 - protein, 15 aa, Homo Sapiens
NPSWHLADSPAVNGA

SEQ ID NO: 110743 - protein, 9 aa, Homo Sapiens
WHLADSPAV

SEQ ID NO: 110744 - protein, 15 aa, Homo Sapiens
GNPSWHLADSPAVNG

SEQ ID NO: 110745 - protein, 9 aa, Homo Sapiens
WHLADSPAV

SEQ ID NO: 110746 - protein, 15 aa, Homo Sapiens
INGNPSWHLADSPAV

SEQ ID NO: 110747 - protein, 9 aa, Homo Sapiens
SWHLADSPA

SEQ ID NO: 110748 - protein, 15 aa, Homo Sapiens
NGNPSWHLADSPAVN

SEQ ID NO: 110749 - protein, 9 aa, Homo Sapiens
WHLADSPAV

SEQ ID NO: 110750 - protein, 15 aa, Homo Sapiens
SWHLADSPAVNGATG

SEQ ID NO: 110751 - protein, 9 aa, Homo Sapiens
WHLADSPAV

SEQ ID NO: 110752 - protein, 15 aa, Homo Sapiens
WHLADSPAVNGATGH

SEQ ID NO: 110753 - protein, 9 aa, Homo Sapiens
WHLADSPAV

SEQ ID NO: 110754 - protein, 15 aa, Homo Sapiens
RWFLTGMTVAGVVLL

SEQ ID NO: 110755 - protein, 9 aa, Homo Sapiens
FLTGMTVAG

SEQ ID NO: 110756 - protein, 15 aa, Homo Sapiens
WFLTGMTVAGVVLLG

SEQ ID NO: 110757 - protein, 9 aa, Homo Sapiens
MTVAGVVLL

SEQ ID NO: 110758 - protein, 15 aa, Homo Sapiens
FLTGMTVAGVVLLGS

SEQ ID NO: 110759 - protein, 9 aa, Homo Sapiens
MTVAGVVLL

SEQ ID NO: 110760 - protein, 15 aa, Homo Sapiens
KEMQVLVSRIAAWMA

SEQ ID NO: 110761 - protein, 9 aa, Homo Sapiens
MQVLVSRIA

SEQ ID NO: 110762 - protein, 15 aa, Homo Sapiens
FRDGVNWGRIVAFFS

SEQ ID NO: 110763 - protein, 9 aa, Homo Sapiens
GVNWGRIVA

SEQ ID NO: 110764 - protein, 15 aa, Homo Sapiens
DKEMQVLVSRIAAWM

SEQ ID NO: 110765 - protein, 9 aa, Homo Sapiens
MQVLVSRIA

SEQ ID NO: 110766 - protein, 15 aa, Homo Sapiens
VDKEMQVLVSRIAAW

SEQ ID NO: 110767 - protein, 9 aa, Homo Sapiens
MQVLVSRIA

SEQ ID NO: 110768 - protein, 15 aa, Homo Sapiens
RDGVNWGRIVAFFSF

SEQ ID NO: 110769 - protein, 9 aa, Homo Sapiens
GVNWGRIVA

SEQ ID NO: 110770 - protein, 15 aa, Homo Sapiens
SVDKEMQVLVSRIAA

SEQ ID NO: 110771 - protein, 9 aa, Homo Sapiens
MQVLVSRIA

SEQ ID NO: 110772 - protein, 15 aa, Homo Sapiens
MTVAGVVLLGSLFSR

SEQ ID NO: 110773 - protein, 9 aa, Homo Sapiens
VVLLGSLFS

SEQ ID NO: 110774 - protein, 15 aa, Homo Sapiens
TGMTVAGVVLLGSLF

SEQ ID NO: 110775 - protein, 9 aa, Homo Sapiens
MTVAGVVLL

SEQ ID NO: 110776 - protein, 15 aa, Homo Sapiens
FLTGMTVAGVVLLGS

SEQ ID NO: 110777 - protein, 9 aa, Homo Sapiens
MTVAGVVLL

SEQ ID NO: 110778 - protein, 15 aa, Homo Sapiens
GMTVAGVVLLGSLFS

SEQ ID NO: 110779 - protein, 9 aa, Homo Sapiens
MTVAGVVLL

SEQ ID NO: 110780 - protein, 15 aa, Homo Sapiens
RWFLTGMTVAGVVLL

SEQ ID NO: 110781 - protein, 9 aa, Homo Sapiens
FLTGMTVAG

SEQ ID NO: 110782 - protein, 15 aa, Homo Sapiens
LTGMTVAGVVLLGSL

SEQ ID NO: 110783 - protein, 9 aa, Homo Sapiens
MTVAGVVLL

SEQ ID NO: 110784 - protein, 15 aa, Homo Sapiens
WFLTGMTVAGVVLLG

SEQ ID NO: 110785 - protein, 9 aa, Homo Sapiens
MTVAGVVLL

SEQ ID NO: 110786 - protein, 15 aa, Homo Sapiens
DTFVELYGNNAAAES

SEQ ID NO: 110787 - protein, 9 aa, Homo Sapiens
VELYGNNAA

SEQ ID NO: 110788 - protein, 15 aa, Homo Sapiens
TFVELYGNNAAAESR

SEQ ID NO: 110789 - protein, 9 aa, Homo Sapiens
YGNNAAAES

SEQ ID NO: 110790 - protein, 15 aa, Homo Sapiens
FVELYGNNAAAESRK

SEQ ID NO: 110791 - protein, 9 aa, Homo Sapiens
YGNNAAAES

SEQ ID NO: 110792 - protein, 15 aa, Homo Sapiens
VELYGNNAAAESRKG

SEQ ID NO: 110793 - protein, 9 aa, Homo Sapiens
YGNNAAAES

SEQ ID NO: 110794 - protein, 15 aa, Homo Sapiens
TVAGVVLLGSLFSRK

SEQ ID NO: 110795 - protein, 9 aa, Homo Sapiens
VVLLGSLFS

SEQ ID NO: 110796 - protein, 15 aa, Homo Sapiens
ELYGNNAAAESRKGQ

SEQ ID NO: 110797 - protein, 9 aa, Homo Sapiens
YGNNAAAES

SEQ ID NO: 110798 - protein, 15 aa, Homo Sapiens
TVAGVVLLGSLFSRK

SEQ ID NO: 110799 - protein, 9 aa, Homo Sapiens
VLLGSLFSR

SEQ ID NO: 110800 - protein, 15 aa, Homo Sapiens
MTVAGVVLLGSLFSR

SEQ ID NO: 110801 - protein, 9 aa, Homo Sapiens
VVLLGSLFS

SEQ ID NO: 110802 - protein, 15 aa, Homo Sapiens
RELVVDFLSYKLSQK

SEQ ID NO: 110803 - protein, 9 aa, Homo Sapiens
LVVDFLSYK

SEQ ID NO: 110804 - protein, 15 aa, Homo Sapiens
ELVVDFLSYKLSQKG

SEQ ID NO: 110805 - protein, 9 aa, Homo Sapiens
FLSYKLSQK

SEQ ID NO: 110806 - protein, 15 aa, Homo Sapiens
KEMQVLVSRIAAWMA

SEQ ID NO: 110807 - protein, 9 aa, Homo Sapiens
MQVLVSRIA

SEQ ID NO: 110808 - protein, 15 aa, Homo Sapiens
DKEMQVLVSRIAAWM

SEQ ID NO: 110809 - protein, 9 aa, Homo Sapiens
MQVLVSRIA

SEQ ID NO: 110810 - protein, 15 aa, Homo Sapiens
RFNRWFLTGMTVAGV

SEQ ID NO: 110811 - protein, 9 aa, Homo Sapiens
FNRWFLTGM

SEQ ID NO: 110812 - protein, 15 aa, Homo Sapiens
SRIAAWMATYLNDHL

SEQ ID NO: 110813 - protein, 9 aa, Homo Sapiens
WMATYLNDH

SEQ ID NO: 110814 - protein, 15 aa, Homo Sapiens
FNRWFLTGMTVAGVV

SEQ ID NO: 110815 - protein, 9 aa, Homo Sapiens
LTGMTVAGV

SEQ ID NO: 110816 - protein, 15 aa, Homo Sapiens
LVVDFLSYKLSQKGY

SEQ ID NO: 110817 - protein, 9 aa, Homo Sapiens
FLSYKLSQK

SEQ ID NO: 110818 - protein, 15 aa, Homo Sapiens
NRELVVDFLSYKLSQ

SEQ ID NO: 110819 - protein, 9 aa, Homo Sapiens
LVVDFLSYK

SEQ ID NO: 110820 - protein, 15 aa, Homo Sapiens
VNWGRIVAFFSFGGA

SEQ ID NO: 110821 - protein, 9 aa, Homo Sapiens
IVAFFSFGG

SEQ ID NO: 110822 - protein, 15 aa, Homo Sapiens
SNRELVVDFLSYKLS

SEQ ID NO: 110823 - protein, 9 aa, Homo Sapiens
LVVDFLSYK

SEQ ID NO: 110824 - protein, 15 aa, Homo Sapiens
MQVLVSRIAAWMATY

SEQ ID NO: 110825 - protein, 9 aa, Homo Sapiens
LVSRIAAWM

SEQ ID NO: 110826 - protein, 15 aa, Homo Sapiens
VSRIAAWMATYLNDH

SEQ ID NO: 110827 - protein, 9 aa, Homo Sapiens
IAAWMATYL

SEQ ID NO: 110828 - protein, 15 aa, Homo Sapiens
EMQVLVSRIAAWMAT

SEQ ID NO: 110829 - protein, 9 aa, Homo Sapiens
VLVSRIAAW

SEQ ID NO: 110830 - protein, 15 aa, Homo Sapiens
RIAAWMATYLNDHLE

SEQ ID NO: 110831 - protein, 9 aa, Homo Sapiens
WMATYLNDH

SEQ ID NO: 110832 - protein, 15 aa, Homo Sapiens
NELFRDGVNWGRIVA

SEQ ID NO: 110833 - protein, 9 aa, Homo Sapiens
LFRDGVNWG

SEQ ID NO: 110834 - protein, 15 aa, Homo Sapiens
QVVNELFRDGVNWGR

SEQ ID NO: 110835 - protein, 9 aa, Homo Sapiens
LFRDGVNWG

SEQ ID NO: 110836 - protein, 15 aa, Homo Sapiens
VVNELFRDGVNWGRI

SEQ ID NO: 110837 - protein, 9 aa, Homo Sapiens
LFRDGVNWG

SEQ ID NO: 110838 - protein, 15 aa, Homo Sapiens
IAAWMATYLNDHLEP

SEQ ID NO: 110839 - protein, 9 aa, Homo Sapiens
WMATYLNDH

SEQ ID NO: 110840 - protein, 15 aa, Homo Sapiens
WGRIVAFFSFGGALC

SEQ ID NO: 110841 - protein, 9 aa, Homo Sapiens
IVAFFSFGG

SEQ ID NO: 110842 - protein, 15 aa, Homo Sapiens
NWGRIVAFFSFGGAL

SEQ ID NO: 110843 - protein, 9 aa, Homo Sapiens
IVAFFSFGG

SEQ ID NO: 110844 - protein, 15 aa, Homo Sapiens
QERFNRWFLTGMTVA

SEQ ID NO: 110845 - protein, 9 aa, Homo Sapiens
FNRWFLTGM

SEQ ID NO: 110846 - protein, 15 aa, Homo Sapiens
ERFNRWFLTGMTVAG

SEQ ID NO: 110847 - protein, 9 aa, Homo Sapiens
FNRWFLTGM

SEQ ID NO: 110848 - protein, 15 aa, Homo Sapiens
GRIVAFFSFGGALCV

SEQ ID NO: 110849 - protein, 9 aa, Homo Sapiens
IVAFFSFGG

SEQ ID NO: 110850 - protein, 15 aa, Homo Sapiens
VVDFLSYKLSQKGYS

SEQ ID NO: 110851 - protein, 9 aa, Homo Sapiens
FLSYKLSQK

SEQ ID NO: 110852 - protein, 15 aa, Homo Sapiens
VDKEMQVLVSRIAAW

SEQ ID NO: 110853 - protein, 9 aa, Homo Sapiens
MQVLVSRIA

SEQ ID NO: 110854 - protein, 15 aa, Homo Sapiens
AAWMATYLNDHLEPW

SEQ ID NO: 110855 - protein, 9 aa, Homo Sapiens
WMATYLNDH

SEQ ID NO: 110856 - protein, 15 aa, Homo Sapiens
QSNRELVVDFLSYKL

SEQ ID NO: 110857 - protein, 9 aa, Homo Sapiens
LVVDFLSYK

SEQ ID NO: 110858 - protein, 15 aa, Homo Sapiens
VNELFRDGVNWGRIV

SEQ ID NO: 110859 - protein, 9 aa, Homo Sapiens
LFRDGVNWG

SEQ ID NO: 110860 - protein, 15 aa, Homo Sapiens
GVNWGRIVAFFSFGG

SEQ ID NO: 110861 - protein, 9 aa, Homo Sapiens
VNWGRIVAF

SEQ ID NO: 110862 - protein, 15 aa, Homo Sapiens
ELFRDGVNWGRIVAF

SEQ ID NO: 110863 - protein, 9 aa, Homo Sapiens
LFRDGVNWG

SEQ ID NO: 110864 - protein, 15 aa, Homo Sapiens
GMTVAGVVLLGSLFS

SEQ ID NO: 110865 - protein, 9 aa, Homo Sapiens
VAGVVLLGS

SEQ ID NO: 110866 - protein, 15 aa, Homo Sapiens
EQVVNELFRDGVNWG

SEQ ID NO: 110867 - protein, 9 aa, Homo Sapiens
VVNELFRDG

SEQ ID NO: 110868 - protein, 15 aa, Homo Sapiens
RIVAFFSFGGALCVE

SEQ ID NO: 110869 - protein, 9 aa, Homo Sapiens
IVAFFSFGG

SEQ ID NO: 110870 - protein, 15 aa, Homo Sapiens
NRWFLTGMTVAGVVL

SEQ ID NO: 110871 - protein, 9 aa, Homo Sapiens
LTGMTVAGV

SEQ ID NO: 110872 - protein, 15 aa, Homo Sapiens
LRYRRAFSDLTSQLH

SEQ ID NO: 110873 - protein, 9 aa, Homo Sapiens
YRRAFSDLT

SEQ ID NO: 110874 - protein, 15 aa, Homo Sapiens
RYRRAFSDLTSQLHI

SEQ ID NO: 110875 - protein, 9 aa, Homo Sapiens
FSDLTSQLH

SEQ ID NO: 110876 - protein, 9 aa, Homo Sapiens
QLFEELQEL

SEQ ID NO: 110877 - protein, 10 aa, Homo Sapiens
YLNDHLEPWI

SEQ ID NO: 110878 - protein, 9 aa, Artificial Sequence
  Irrelevant peptide
GLQHWVPEL

SEQ ID NO: 110879 - protein, 9 aa, Artificial Sequence
  Non-sense
GLAGDVSAV

SEQ ID NO: 110880 - protein, 9 aa, Human Cytomegalovirus (HCMV)
NLVPMVATV

SEQ ID NO: 110881 - protein, 9 aa, Human Immunodeficiency Virus (HIV)
ILKEPVHGV

SEQ ID NO: 110882 - protein, 9 aa, Artificial Sequence
  Non-sense
ALIAPVHAV

SEQ ID NO: 110883 - protein, 9 aa, Epstein Barr Virus (EBV)
GLCTLVAML

SEQ ID NO: 110884 - protein, 9 aa, Human Cytomegalovirus (HCMV)
VTEHDTLLY

SEQ ID NO: 110885 - protein, 9 aa, Homo Sapiens
IVDCLTEMY

SEQ ID NO: 110886 - protein, 10 aa, Human Cytomegalovirus (HCMV)
TPRVTGGGAM

SEQ ID NO: 110887 - protein, 11 aa, Human Cytomegalovirus (HCMV)
RPHERNGFTVL

SEQ ID NO: 110888 - protein, 10 aa, Human Immunodeficiency Virus (HIV)
TPGPGVRYPL

SEQ ID NO: 110889 - protein, 14 aa, Homo Sapiens
GLNDIFEAQKIEWH

SEQ ID NO: 110890 - protein, 13 aa, Homo Sapiens
AGFKGEQGPKGEP

SEQ ID NO: 110891 - protein, 9 aa, Human Cytomegalovirus (HCMV)
QYDPVAALF

SEQ ID NO: 110892 - protein, 9 aa, Human Cytomegalovirus
VYALPLKML

SEQ ID NO: 110893 - protein, 15 aa, Artificial Sequence
  Artificial sequence
SLNDIFEAQKIEWHE

SEQ ID NO: 110894 - protein, 15 aa, Artificial Sequence
  Artificial sequence
PQPQPKPQPKPEPET

SEQ ID NO: 110895 - protein, 9 aa, Homo Sapiens
  BINDING 4: pivaloyl coupled to lysin at pos. 4
ILAKFLHWL

SEQ ID NO: 110896 - protein, 239 aa, Homo sapiens
MAHAGRTGYDNREIVMKYIHYKLSQRGYEWDAGDVGAAPPGAAPAPGIFSSQPGHTPHPAASRDPVARTSPLQTPAAPGAAAGPALSPVPPVVHLTLRQAGDDFSRRYRRDFAEMSSQLHLTPFTARGRFATVVEELFRDGVNWGRIVAFFEFGGVMCVESVNREMSPLVDNIALWMTEYLNRHLHTWIQDNGGWDAFVELYGPSMRPLFDFSWLSLKTLLSLALVGACITLGAYLGHK

SEQ ID NO: 110897 - protein, 233 aa, Homo sapiens
MSQSNRELVVDFLSYKLSQKGYSWSQFSDVEENRTEAPEGTESEMETPSAINGNPSWHLADSPAVNGATGHSSSLDAREVIPMAAVKQALREAGDEFELRYRRAFSDLTSQLHITPGTAYQSFEQVVNELFRDGVNWGRIVAFFSFGGALCVESVDKEMQVLVSRIAAWMATYLNDHLEPWIQENGGWDTFVELYGNNAAAESRKGQERFNRWFLTGMTVAGVVLLGSLFSRK

SEQ ID NO: 110898 - protein, 142 aa, Homo sapiens
MGAPTLPPAWQPFLKDHRISTFKNWPFLEGCACTPERMAEAGFIHCPTENEPDLAQCFFCFKELEGWEPDDDPIEEHKKHSSGCAFLSVKKQFEELTLGEFLKLDRERAKNKIAKETNNKKKEFEETAKKVRRAIEQLAAMD

SEQ ID NO: 110899 - protein, 350 aa, Homo sapiens [sequence omitted]

SEQ ID NO: 110900 - protein, 8 aa, Homo sapiens
HLADSPAV

SEQ ID NO: 110901 - protein, 8 aa, Homo sapiens
FLTGMTVA

SEQ ID NO: 110902 - protein, 8 aa, Homo sapiens
AAWMATYL

SEQ ID NO: 110903 - protein, 8 aa, Homo sapiens
VLVSRIAA

SEQ ID NO: 110904 - protein, 8 aa, Homo sapiens
YQSFEQVV

SEQ ID NO: 110905 - protein, 8 aa, Homo sapiens
GALCVESV

SEQ ID NO: 110906 - protein, 8 aa, Homo sapiens
VLLGSLFS

SEQ ID NO: 110907 - protein, 8 aa, Homo sapiens
FLTGMTVA

SEQ ID NO: 110908 - protein, 8 aa, Homo sapiens
HLADSPAV

SEQ ID NO: 110909 - protein, 8 aa, Homo sapiens
YQSFEQVV

SEQ ID NO: 110910 - protein, 8 aa, Homo sapiens
TVAGVVLL

SEQ ID NO: 110911 - protein, 8 aa, Homo sapiens
FLSYKLSQ

SEQ ID NO: 110912 - protein, 8 aa, Homo sapiens
MAAVKQAL

SEQ ID NO: 110913 - protein, 8 aa, Homo sapiens
SLDAREVI

SEQ ID NO: 110914 - protein, 8 aa, Homo sapiens
ELYGNNAA

SEQ ID NO: 110915 - protein, 8 aa, Homo sapiens
MTVAGVVL

SEQ ID NO: 110916 - protein, 8 aa, Homo sapiens
VLVSRIAA

SEQ ID NO: 110917 - protein, 8 aa, Homo sapiens
SQSNRELV

SEQ ID NO: 110918 - protein, 8 aa, Homo sapiens
FLTGMTVA

SEQ ID NO: 110919 - protein, 8 aa, Homo sapiens
HLADSPAV

SEQ ID NO: 110920 - protein, 8 aa, Homo sapiens
VLVSRIAA

SEQ ID NO: 110921 - protein, 8 aa, Homo sapiens
MQVLVSRI

SEQ ID NO: 110922 - protein, 8 aa, Homo sapiens
FLSYKLSQ

SEQ ID NO: 110923 - protein, 8 aa, Homo sapiens
GVNWGRIV

SEQ ID NO: 110924 - protein, 8 aa, Homo sapiens
GMTVAGVV

SEQ ID NO: 110925 - protein, 8 aa, Homo sapiens
YQSFEQVV

SEQ ID NO: 110926 - protein, 8 aa, Homo sapiens
RIAAWMAT

SEQ ID NO: 110927 - protein, 8 aa, Homo sapiens
EVIPMAAV

SEQ ID NO: 110928 - protein, 8 aa, Homo sapiens
SQSNRELV

SEQ ID NO: 110929 - protein, 8 aa, Homo sapiens
MTVAGVVL

SEQ ID NO: 110930 - protein, 8 aa, Homo sapiens
GALCVESV

SEQ ID NO: 110931 - protein, 8 aa, Homo sapiens
GVVLLGSL

SEQ ID NO: 110932 - protein, 8 aa, Homo sapiens
TVAGVVLL

SEQ ID NO: 110933 - protein, 8 aa, Homo sapiens
HLADSPAV

SEQ ID NO: 110934 - protein, 8 aa, Homo sapiens
SVDKEMQV

SEQ ID NO: 110935 - protein, 8 aa, Homo sapiens
HLADSPAV

SEQ ID NO: 110936 - protein, 8 aa, Homo sapiens
MQVLVSRI

SEQ ID NO: 110937 - protein, 8 aa, Homo sapiens
FLTGMTVA

SEQ ID NO: 110938 - protein, 8 aa, Homo sapiens
SQSNRELV

SEQ ID NO: 110939 - protein, 8 aa, Homo sapiens
YQSFEQVV

SEQ ID NO: 110940 - protein, 8 aa, Homo sapiens
RIVAFFSF

SEQ ID NO: 110941 - protein, 8 aa, Homo sapiens
RIAAWMAT

SEQ ID NO: 110942 - protein, 8 aa, Homo sapiens
GALCVESV

SEQ ID NO: 110943 - protein, 8 aa, Homo sapiens
AAWMATYL

SEQ ID NO: 110944 - protein, 8 aa, Homo sapiens
MTVAGVVL

SEQ ID NO: 110945 - protein, 8 aa, Homo sapiens
VLVSRIAA

SEQ ID NO: 110946 - protein, 8 aa, Homo sapiens
SEMETPSA

SEQ ID NO: 110947 - protein, 8 aa, Homo sapiens
EVIPMAAV

SEQ ID NO: 110948 - protein, 8 aa, Homo sapiens
SVDKEMQV

SEQ ID NO: 110949 - protein, 8 aa, Homo sapiens
HLADSPAV

SEQ ID NO: 110950 - protein, 8 aa, Homo sapiens
SVDKEMQV

SEQ ID NO: 110951 - protein, 8 aa, Homo sapiens
FLTGMTVA

SEQ ID NO: 110952 - protein, 8 aa, Homo sapiens
SLDAREVI

SEQ ID NO: 110953 - protein, 8 aa, Homo sapiens
ELYGNNAA

SEQ ID NO: 110954 - protein, 8 aa, Homo sapiens
TVAGVVLL

SEQ ID NO: 110955 - protein, 8 aa, Homo sapiens
YLNDHLEP

SEQ ID NO: 110956 - protein, 8 aa, Homo sapiens
EVIPMAAV

SEQ ID NO: 110957 - protein, 8 aa, Homo sapiens
GMTVAGVV

SEQ ID NO: 110958 - protein, 8 aa, Homo sapiens
VLVSRIAA

SEQ ID NO: 110959 - protein, 8 aa, Homo sapiens
VLLGSLFS

SEQ ID NO: 110960 - protein, 8 aa, Homo sapiens
GVNWGRIV

SEQ ID NO: 110961 - protein, 8 aa, Homo sapiens
WFLTGMTV

SEQ ID NO: 110962 - protein, 8 aa, Homo sapiens
SFGGALCV

SEQ ID NO: 110963 - protein, 8 aa, Homo sapiens
SSLDAREV

SEQ ID NO: 110964 - protein, 8 aa, Homo sapiens
DLTSQLHI

SEQ ID NO: 110965 - protein, 8 aa, Homo sapiens
YQSFEQVV

SEQ ID NO: 110966 - protein, 8 aa, Homo sapiens
PMAAVKQA

SEQ ID NO: 110967 - protein, 8 aa, Homo sapiens
FLSYKLSQ

SEQ ID NO: 110968 - protein, 8 aa, Homo sapiens
AAWMATYL

SEQ ID NO: 110969 - protein, 8 aa, Homo sapiens
SQSNRELV

SEQ ID NO: 110970 - protein, 8 aa, Homo sapiens
GALCVESV

SEQ ID NO: 110971 - protein, 8 aa, Homo sapiens
HLADSPAV

SEQ ID NO: 110972 - protein, 8 aa, Homo sapiens
ELYGNNAA

SEQ ID NO: 110973 - protein, 8 aa, Homo sapiens
FLTGMTVA

SEQ ID NO: 110974 - protein, 8 aa, Homo sapiens
SVDKEMQV

SEQ ID NO: 110975 - protein, 8 aa, Homo sapiens
SLDAREVI

SEQ ID NO: 110976 - protein, 8 aa, Homo sapiens
VLVSRIAA

SEQ ID NO: 110977 - protein, 8 aa, Homo sapiens
YLNDHLEP

SEQ ID NO: 110978 - protein, 8 aa, Homo sapiens
YQSFEQVV

SEQ ID NO: 110979 - protein, 8 aa, Homo sapiens
EVIPMAAV

SEQ ID NO: 110980 - protein, 8 aa, Homo sapiens
VLLGSLFS

SEQ ID NO: 110981 - protein, 8 aa, Homo sapiens
FLSYKLSQ

SEQ ID NO: 110982 - protein, 8 aa, Homo sapiens
WFLTGMTV

SEQ ID NO: 110983 - protein, 8 aa, Homo sapiens
GMTVAGVV

SEQ ID NO: 110984 - protein, 8 aa, Homo sapiens
HLADSPAV

SEQ ID NO: 110985 - protein, 8 aa, Homo sapiens
SVDKEMQV

SEQ ID NO: 110986 - protein, 8 aa, Homo sapiens
FLTGMTVA

SEQ ID NO: 110987 - protein, 8 aa, Homo sapiens
ELYGNNAA

SEQ ID NO: 110988 - protein, 8 aa, Homo sapiens
EVIPMAAV

SEQ ID NO: 110989 - protein, 8 aa, Homo sapiens
TVAGVVLL

SEQ ID NO: 110990 - protein, 8 aa, Homo sapiens
SLDAREVI

SEQ ID NO: 110991 - protein, 8 aa, Homo sapiens
SFGGALCV

SEQ ID NO: 110992 - protein, 8 aa, Homo sapiens
GMTVAGVV

SEQ ID NO: 110993 - protein, 8 aa, Homo sapiens
AAWMATYL

SEQ ID NO: 110994 - protein, 8 aa, Homo sapiens
VLVSRIAA

SEQ ID NO: 110995 - protein, 8 aa, Homo sapiens
WFLTGMTV

SEQ ID NO: 110996 - protein, 8 aa, Homo sapiens
FLSYKLSQ

SEQ ID NO: 110997 - protein, 8 aa, Homo sapiens
DLTSQLHI

SEQ ID NO: 110998 - protein, 8 aa, Homo sapiens
GVNWGRIV

SEQ ID NO: 110999 - protein, 8 aa, Homo sapiens
PMAAVKQA

SEQ ID NO: 111000 - protein, 8 aa, Homo sapiens
AYQSFEQV

SEQ ID NO: 111001 - protein, 8 aa, Homo sapiens
VLLGSLFS

SEQ ID NO: 111002 - protein, 8 aa, Homo sapiens
GALCVESV

SEQ ID NO: 111003 - protein, 8 aa, Homo sapiens
HLADSPAV

SEQ ID NO: 111004 - protein, 8 aa, Homo sapiens
FLTGMTVA

SEQ ID NO: 111005 - protein, 8 aa, Homo sapiens
SVDKEMQV

SEQ ID NO: 111006 - protein, 8 aa, Homo sapiens
SLDAREVI

SEQ ID NO: 111007 - protein, 8 aa, Homo sapiens
TVAGVVLL

SEQ ID NO: 111008 - protein, 8 aa, Homo sapiens
ELYGNNAA

SEQ ID NO: 111009 - protein, 8 aa, Homo sapiens
WFLTGMTV

SEQ ID NO: 111010 - protein, 8 aa, Homo sapiens
AAWMATYL

SEQ ID NO: 111011 - protein, 8 aa, Homo sapiens
DLTSQLHI

SEQ ID NO: 111012 - protein, 8 aa, Homo sapiens
VLLGSLFS

SEQ ID NO: 111013 - protein, 8 aa, Homo sapiens
LSYKLSQK

SEQ ID NO: 111014 - protein, 8 aa, Homo sapiens
VVDFLSYK

SEQ ID NO: 111015 - protein, 8 aa, Homo sapiens
LLGSLFSR

SEQ ID NO: 111016 - protein, 8 aa, Homo sapiens
VVDFLSYK

SEQ ID NO: 111017 - protein, 8 aa, Homo sapiens
LSYKLSQK

SEQ ID NO: 111018 - protein, 8 aa, Homo sapiens
VIPMAAVK

SEQ ID NO: 111019 - protein, 8 aa, Homo sapiens
QVVNELFR

SEQ ID NO: 111020 - protein, 8 aa, Homo sapiens
LVVDFLSY

SEQ ID NO: 111021 - protein, 8 aa, Homo sapiens
NAAAESRK

SEQ ID NO: 111022 - protein, 8 aa, Homo sapiens
NWGRIVAF

SEQ ID NO: 111023 - protein, 8 aa, Homo sapiens
RIVAFFSF

SEQ ID NO: 111024 - protein, 8 aa, Homo sapiens
VVLLGSLF

SEQ ID NO: 111025 - protein, 8 aa, Homo sapiens
NWGRIVAF

SEQ ID NO: 111026 - protein, 8 aa, Homo sapiens
AYQSFEQV

SEQ ID NO: 111027 - protein, 8 aa, Homo sapiens
EVIPMAAV

SEQ ID NO: 111028 - protein, 8 aa, Homo sapiens
LVVDFLSY

SEQ ID NO: 111029 - protein, 8 aa, Homo sapiens
EVIPMAAV

SEQ ID NO: 111030 - protein, 8 aa, Homo sapiens
LVVDFLSY

SEQ ID NO: 111031 - protein, 8 aa, Homo sapiens
HITPGTAY

SEQ ID NO: 111032 - protein, 8 aa, Homo sapiens
ELRYRRAF

SEQ ID NO: 111033 - protein, 8 aa, Homo sapiens
RIVAFFSF

SEQ ID NO: 111034 - protein, 8 aa, Homo sapiens
HITPGTAY

SEQ ID NO: 111035 - protein, 8 aa, Homo sapiens
LVVDFLSY

SEQ ID NO: 111036 - protein, 8 aa, Homo sapiens
KGQERFNR

SEQ ID NO: 111037 - protein, 8 aa, Homo sapiens
LLGSLFSR

SEQ ID NO: 111038 - protein, 8 aa, Homo sapiens
EMQVLVSR

SEQ ID NO: 111039 - protein, 8 aa, Homo sapiens
HSSSLDAR

SEQ ID NO: 111040 - protein, 8 aa, Homo sapiens
AAVKQALR

SEQ ID NO: 111041 - protein, 8 aa, Homo sapiens
EFELRYRR

SEQ ID NO: 111042 - protein, 8 aa, Homo sapiens
QVVNELFR

SEQ ID NO: 111043 - protein, 8 aa, Homo sapiens
LSYKLSQK

SEQ ID NO: 111044 - protein, 8 aa, Homo sapiens
EFELRYRR

SEQ ID NO: 111045 - protein, 8 aa, Homo sapiens
EMQVLVSR

SEQ ID NO: 111046 - protein, 8 aa, Homo sapiens
DEFELRYR

SEQ ID NO: 111047 - protein, 8 aa, Homo sapiens
ESRKGQER

SEQ ID NO: 111048 - protein, 8 aa, Homo sapiens
LLGSLFSR

SEQ ID NO: 111049 - protein, 8 aa, Homo sapiens
HSSSLDAR

SEQ ID NO: 111050 - protein, 8 aa, Homo sapiens
QVVNELFR

SEQ ID NO: 111051 - protein, 8 aa, Homo sapiens
HSSSLDAR

SEQ ID NO: 111052 - protein, 8 aa, Homo sapiens
NAAAESRK

SEQ ID NO: 111053 - protein, 8 aa, Homo sapiens
LSYKLSQK

SEQ ID NO: 111054 - protein, 8 aa, Homo sapiens
EMQVLVSR

SEQ ID NO: 111055 - protein, 8 aa, Homo sapiens
NNAAAESR

SEQ ID NO: 111056 - protein, 8 aa, Homo sapiens
AAVKQALR

SEQ ID NO: 111057 - protein, 8 aa, Homo sapiens
ESRKGQER

SEQ ID NO: 111058 - protein, 8 aa, Homo sapiens
IAAWMATY

SEQ ID NO: 111059 - protein, 8 aa, Homo sapiens
EFELRYRR

SEQ ID NO: 111060 - protein, 8 aa, Homo sapiens
TAYQSFEQ

SEQ ID NO: 111061 - protein, 8 aa, Homo sapiens
VVDFLSYK

SEQ ID NO: 111062 - protein, 8 aa, Homo sapiens
DEFELRYR

SEQ ID NO: 111063 - protein, 8 aa, Homo sapiens
FSDVEENR

SEQ ID NO: 111064 - protein, 8 aa, Homo sapiens
LLGSLFSR

SEQ ID NO: 111065 - protein, 8 aa, Homo sapiens
EVIPMAAV

SEQ ID NO: 111066 - protein, 8 aa, Homo sapiens
TVAGVVLL

SEQ ID NO: 111067 - protein, 8 aa, Homo sapiens
TGMTVAGV

SEQ ID NO: 111068 - protein, 8 aa, Homo sapiens
MTVAGVVL

SEQ ID NO: 111069 - protein, 8 aa, Homo sapiens
MAAVKQAL

SEQ ID NO: 111070 - protein, 8 aa, Homo sapiens
HLADSPAV

SEQ ID NO: 111071 - protein, 8 aa, Homo sapiens
ERFNRWFL

SEQ ID NO: 111072 - protein, 8 aa, Homo sapiens
DSPAVNGA

SEQ ID NO: 111073 - protein, 8 aa, Homo sapiens
ELYGNNAA

SEQ ID NO: 111074 - protein, 8 aa, Homo sapiens
EAGDEFEL

SEQ ID NO: 111075 - protein, 8 aa, Homo sapiens
EVIPMAAV

SEQ ID NO: 111076 - protein, 8 aa, Homo sapiens
HLADSPAV

SEQ ID NO: 111077 - protein, 8 aa, Homo sapiens
ELYGNNAA

SEQ ID NO: 111078 - protein, 8 aa, Homo sapiens
MTVAGVVL

SEQ ID NO: 111079 - protein, 8 aa, Homo sapiens
TVAGVVLL

SEQ ID NO: 111080 - protein, 8 aa, Homo sapiens
EAGDEFEL

SEQ ID NO: 111081 - protein, 8 aa, Homo sapiens
SVDKEMQV

SEQ ID NO: 111082 - protein, 8 aa, Homo sapiens
WFLTGMTV

SEQ ID NO: 111083 - protein, 8 aa, Homo sapiens
SPAVNGAT

SEQ ID NO: 111084 - protein, 8 aa, Homo sapiens
MAAVKQAL

SEQ ID NO: 111085 - protein, 8 aa, Homo sapiens
AAWMATYL

SEQ ID NO: 111086 - protein, 8 aa, Homo sapiens
ELRYRRAF

SEQ ID NO: 111087 - protein, 8 aa, Homo sapiens
LVVDFLSY

SEQ ID NO: 111088 - protein, 8 aa, Homo sapiens
RIVAFFSF

SEQ ID NO: 111089 - protein, 8 aa, Homo sapiens
HITPGTAY

SEQ ID NO: 111090 - protein, 8 aa, Homo sapiens
IAAWMATY

SEQ ID NO: 111091 - protein, 8 aa, Homo sapiens
ELRYRRAF

SEQ ID NO: 111092 - protein, 8 aa, Homo sapiens
VVLLGSLF

SEQ ID NO: 111093 - protein, 8 aa, Homo sapiens
QERFNRWF

SEQ ID NO: 111094 - protein, 8 aa, Homo sapiens
RELVVDFL

SEQ ID NO: 111095 - protein, 8 aa, Homo sapiens
FEQVVNEL

SEQ ID NO: 111096 - protein, 8 aa, Homo sapiens
NRWFLTGM

SEQ ID NO: 111097 - protein, 8 aa, Homo sapiens
IAAWMATY

SEQ ID NO: 111098 - protein, 8 aa, Homo sapiens
LVVDFLSY

SEQ ID NO: 111099 - protein, 8 aa, Homo sapiens
MAAVKQAL

SEQ ID NO: 111100 - protein, 8 aa, Homo sapiens
HITPGTAY

SEQ ID NO: 111101 - protein, 8 aa, Homo sapiens
DAREVIPM

SEQ ID NO: 111102 - protein, 8 aa, Homo sapiens
FFSFGGAL

SEQ ID NO: 111103 - protein, 8 aa, Homo sapiens
SPAVNGAT

SEQ ID NO: 111104 - protein, 8 aa, Homo sapiens
AAWMATYL

SEQ ID NO: 111105 - protein, 8 aa, Homo sapiens
MTVAGVVL

SEQ ID NO: 111106 - protein, 8 aa, Homo sapiens
RELVVDFL

SEQ ID NO: 111107 - protein, 8 aa, Homo sapiens
FEQVVNEL

SEQ ID NO: 111108 - protein, 8 aa, Homo sapiens
RELVVDFL

SEQ ID NO: 111109 - protein, 8 aa, Homo sapiens
KEMQVLVS

SEQ ID NO: 111110 - protein, 8 aa, Homo sapiens
REVIPMAA

SEQ ID NO: 111111 - protein, 8 aa, Homo sapiens
LVSRIAAW

SEQ ID NO: 111112 - protein, 8 aa, Homo sapiens
IAAWMATY

SEQ ID NO: 111113 - protein, 8 aa, Homo sapiens
LSQKGYSW

SEQ ID NO: 111114 - protein, 8 aa, Homo sapiens
KGYSWSQF

SEQ ID NO: 111115 - protein, 8 aa, Homo sapiens
RIVAFFSF

SEQ ID NO: 111116 - protein, 8 aa, Homo sapiens
AINGNPSW

SEQ ID NO: 111117 - protein, 9 aa, Homo sapiens
FSDLTSQLH

SEQ ID NO: 111118 - protein, 9 aa, Homo sapiens
FSFGGALCV

SEQ ID NO: 111119 - protein, 9 aa, Homo sapiens
MTVAGVVLL

SEQ ID NO: 111120 - protein, 9 aa, Homo sapiens
YLNDHLEPW

SEQ ID NO: 111121 - protein, 9 aa, Homo sapiens
MTVAGVVLL

SEQ ID NO: 111122 - protein, 9 aa, Homo sapiens
IAAWMATYL

SEQ ID NO: 111123 - protein, 9 aa, Homo sapiens
FLTGMTVAG

SEQ ID NO: 111124 - protein, 9 aa, Homo sapiens
FLSYKLSQK

SEQ ID NO: 111125 - protein, 9 aa, Homo sapiens
LVSRIAAWM

SEQ ID NO: 111126 - protein, 9 aa, Homo sapiens
VVDFLSYKL

SEQ ID NO: 111127 - protein, 9 aa, Homo sapiens
ELYGNNAAA

SEQ ID NO: 111128 - protein, 9 aa, Homo sapiens
PMAAVKQAL

SEQ ID NO: 111129 - protein, 9 aa, Homo sapiens
GMTVAGVVL

SEQ ID NO: 111130 - protein, 9 aa, Homo sapiens
LTGMTVAGV

SEQ ID NO: 111131 - protein, 9 aa, Homo sapiens
MTVAGVVLL

SEQ ID NO: 111132 - protein, 9 aa, Homo sapiens
IAAWMATYL

SEQ ID NO: 111133 - protein, 9 aa, Homo sapiens
AVKQALREA

SEQ ID NO: 111134 - protein, 9 aa, Homo sapiens
QLHITPGTA

SEQ ID NO: 111135 - protein, 9 aa, Homo sapiens
YLNDHLEPW

SEQ ID NO: 111136 - protein, 9 aa, Homo sapiens
TAYQSFEQV

SEQ ID NO: 111137 - protein, 9 aa, Homo sapiens
FLSYKLSQK

SEQ ID NO: 111138 - protein, 9 aa, Homo sapiens
LTGMTVAGV

SEQ ID NO: 111139 - protein, 9 aa, Homo sapiens
MTVAGVVLL

SEQ ID NO: 111140 - protein, 9 aa, Homo sapiens
SQLHITPGT

SEQ ID NO: 111141 - protein, 9 aa, Homo sapiens
MTVAGVVLL

SEQ ID NO: 111142 - protein, 9 aa, Homo sapiens
TAYQSFEQV

SEQ ID NO: 111143 - protein, 9 aa, Homo sapiens
SQSNRELVV

SEQ ID NO: 111144 - protein, 9 aa, Homo sapiens
FSFGGALCV

SEQ ID NO: 111145 - protein, 9 aa, Homo sapiens
REVIPMAAV

SEQ ID NO: 111146 - protein, 9 aa, Homo sapiens
IAAWMATYL

SEQ ID NO: 111147 - protein, 9 aa, Homo sapiens
MQVLVSRIA

SEQ ID NO: 111148 - protein, 9 aa, Homo sapiens
LTGMTVAGV

SEQ ID NO: 111149 - protein, 9 aa, Homo sapiens
YLNDHLEPW

SEQ ID NO: 111150 - protein, 9 aa, Homo sapiens
SEMETPSAI

SEQ ID NO: 111151 - protein, 9 aa, Homo sapiens
ELYGNNAAA

SEQ ID NO: 111152 - protein, 9 aa, Homo sapiens
FSFGGALCV

SEQ ID NO: 111153 - protein, 9 aa, Homo sapiens
PMAAVKQAL

SEQ ID NO: 111154 - protein, 9 aa, Homo sapiens
YLNDHLEPW

SEQ ID NO: 111155 - protein, 9 aa, Homo sapiens
SVDKEMQVL

SEQ ID NO: 111156 - protein, 9 aa, Homo sapiens
VVDFLSYKL

SEQ ID NO: 111157 - protein, 9 aa, Homo sapiens
MTVAGVVLL

SEQ ID NO: 111158 - protein, 9 aa, Homo sapiens
HITPGTAYQ

SEQ ID NO: 111159 - protein, 9 aa, Homo sapiens
TAYQSFEQV

SEQ ID NO: 111160 - protein, 9 aa, Homo sapiens
VLLGSLFSR

SEQ ID NO: 111161 - protein, 9 aa, Homo sapiens
FLTGMTVAG

SEQ ID NO: 111162 - protein, 9 aa, Homo sapiens
GVNWGRIVA

SEQ ID NO: 111163 - protein, 9 aa, Homo sapiens
GMTVAGVVL

SEQ ID NO: 111164 - protein, 9 aa, Homo sapiens
GGWDTFVEL

SEQ ID NO: 111165 - protein, 9 aa, Homo sapiens
AFSDLTSQL

SEQ ID NO: 111166 - protein, 9 aa, Homo sapiens
HLEPWIQEN

SEQ ID NO: 111167 - protein, 9 aa, Homo sapiens
ELYGNNAAA

SEQ ID NO: 111168 - protein, 9 aa, Homo sapiens
PMAAVKQAL

SEQ ID NO: 111169 - protein, 9 aa, Homo sapiens
FSFGGALCV

SEQ ID NO: 111170 - protein, 9 aa, Homo sapiens
YLNDHLEPW

SEQ ID NO: 111171 - protein, 9 aa, Homo sapiens
VLLGSLFSR

SEQ ID NO: 111172 - protein, 9 aa, Homo sapiens
VVDFLSYKL

SEQ ID NO: 111173 - protein, 9 aa, Homo sapiens
SVDKEMQVL

SEQ ID NO: 111174 - protein, 9 aa, Homo sapiens
FLTGMTVAG

SEQ ID NO: 111175 - protein, 9 aa, Homo sapiens
AYQSFEQVV

SEQ ID NO: 111176 - protein, 9 aa, Homo sapiens
ELYGNNAAA

SEQ ID NO: 111177 - protein, 9 aa, Homo sapiens
PMAAVKQAL

SEQ ID NO: 111178 - protein, 9 aa, Homo sapiens
FSFGGALCV

SEQ ID NO: 111179 - protein, 9 aa, Homo sapiens
TAYQSFEQV

SEQ ID NO: 111180 - protein, 9 aa, Homo sapiens
HITPGTAYQ

SEQ ID NO: 111181 - protein, 9 aa, Homo sapiens
GMTVAGVVL

SEQ ID NO: 111182 - protein, 9 aa, Homo sapiens
PMAAVKQAL

SEQ ID NO: 111183 - protein, 9 aa, Homo sapiens
FSFGGALCV

SEQ ID NO: 111184 - protein, 9 aa, Homo sapiens
ELYGNNAAA

SEQ ID NO: 111185 - protein, 9 aa, Homo sapiens
TAYQSFEQV

SEQ ID NO: 111186 - protein, 9 aa, Homo sapiens
YLNDHLEPW

SEQ ID NO: 111187 - protein, 9 aa, Homo sapiens
VLLGSLFSR

SEQ ID NO: 111188 - protein, 9 aa, Homo sapiens
LTGMTVAGV

SEQ ID NO: 111189 - protein, 9 aa, Homo sapiens
LLGSLFSRK

SEQ ID NO: 111190 - protein, 9 aa, Homo sapiens
FLSYKLSQK

SEQ ID NO: 111191 - protein, 9 aa, Homo sapiens
RIAAWMATY

SEQ ID NO: 111192 - protein, 9 aa, Homo sapiens
VLLGSLFSR

SEQ ID NO: 111193 - protein, 9 aa, Homo sapiens
LVVDFLSYK

SEQ ID NO: 111194 - protein, 9 aa, Homo sapiens
LVVDFLSYK

SEQ ID NO: 111195 - protein, 9 aa, Homo sapiens
LLGSLFSRK

SEQ ID NO: 111196 - protein, 9 aa, Homo sapiens
VLLGSLFSR

SEQ ID NO: 111197 - protein, 9 aa, Homo sapiens
RIAAWMATY

SEQ ID NO: 111198 - protein, 9 aa, Homo sapiens
ALCVESVDK

SEQ ID NO: 111199 - protein, 9 aa, Homo sapiens
EVIPMAAVK

SEQ ID NO: 111200 - protein, 9 aa, Homo sapiens
FLSYKLSQK

SEQ ID NO: 111201 - protein, 9 aa, Homo sapiens
RYRRAFSDL

SEQ ID NO: 111202 - protein, 9 aa, Homo sapiens
NWGRIVAFF

SEQ ID NO: 111203 - protein, 9 aa, Homo sapiens
GRIVAFFSF

SEQ ID NO: 111204 - protein, 9 aa, Homo sapiens
NWGRIVAFF

SEQ ID NO: 111205 - protein, 9 aa, Homo sapiens
RYRRAFSDL

SEQ ID NO: 111206 - protein, 9 aa, Homo sapiens
RYRRAFSDL

SEQ ID NO: 111207 - protein, 9 aa, Homo sapiens
SFEQVVNEL

SEQ ID NO: 111208 - protein, 9 aa, Homo sapiens
AYQSFEQVV

SEQ ID NO: 111209 - protein, 9 aa, Homo sapiens
ELVVDFLSY

SEQ ID NO: 111210 - protein, 9 aa, Homo sapiens
RIAAWMATY

SEQ ID NO: 111211 - protein, 9 aa, Homo sapiens
RIAAWMATY

SEQ ID NO: 111212 - protein, 9 aa, Homo sapiens
ELVVDFLSY

SEQ ID NO: 111213 - protein, 9 aa, Homo sapiens
LVSRIAAWM

SEQ ID NO: 111214 - protein, 9 aa, Homo sapiens
SVDKEMQVL

SEQ ID NO: 111215 - protein, 9 aa, Homo sapiens
EVIPMAAVK

SEQ ID NO: 111216 - protein, 9 aa, Homo sapiens
MTVAGVVLL

SEQ ID NO: 111217 - protein, 9 aa, Homo sapiens
LHITPGTAY

SEQ ID NO: 111218 - protein, 9 aa, Homo sapiens
ELVVDFLSY

SEQ ID NO: 111219 - protein, 9 aa, Homo sapiens
RIAAWMATY

SEQ ID NO: 111220 - protein, 9 aa, Homo sapiens
MAAVKQALR

SEQ ID NO: 111221 - protein, 9 aa, Homo sapiens
VLLGSLFSR

SEQ ID NO: 111222 - protein, 9 aa, Homo sapiens
LVVDFLSYK

SEQ ID NO: 111223 - protein, 9 aa, Homo sapiens
KEMQVLVSR

SEQ ID NO: 111224 - protein, 9 aa, Homo sapiens
DEFELRYRR

SEQ ID NO: 111225 - protein, 9 aa, Homo sapiens
MAAVKQALR

SEQ ID NO: 111226 - protein, 9 aa, Homo sapiens
ELRYRRAFS

SEQ ID NO: 111227 - protein, 9 aa, Homo sapiens
VLLGSLFSR

SEQ ID NO: 111228 - protein, 9 aa, Homo sapiens
EAGDEFELR

SEQ ID NO: 111229 - protein, 9 aa, Homo sapiens
QFSDVEENR

SEQ ID NO: 111230 - protein, 9 aa, Homo sapiens
EVIPMAAVK

SEQ ID NO: 111231 - protein, 9 aa, Homo sapiens
MAAVKQALR

SEQ ID NO: 111232 - protein, 9 aa, Homo sapiens
LVVDFLSYK

SEQ ID NO: 111233 - protein, 9 aa, Homo sapiens
EAGDEFELR

SEQ ID NO: 111234 - protein, 9 aa, Homo sapiens
EQVVNELFR

SEQ ID NO: 111235 - protein, 9 aa, Homo sapiens
FLSYKLSQK

SEQ ID NO: 111236 - protein, 9 aa, Homo sapiens
DEFELRYRR

SEQ ID NO: 111237 - protein, 9 aa, Homo sapiens
QFSDVEENR

SEQ ID NO: 111238 - protein, 9 aa, Homo sapiens
NNAAAESRK

SEQ ID NO: 111239 - protein, 9 aa, Homo sapiens
VLLGSLFSR

SEQ ID NO: 111240 - protein, 9 aa, Homo sapiens
MTVAGVVLL

SEQ ID NO: 111241 - protein, 9 aa, Homo sapiens
TAYQSFEQV

SEQ ID NO: 111242 - protein, 9 aa, Homo sapiens
TGMTVAGVV

SEQ ID NO: 111243 - protein, 9 aa, Homo sapiens
MSQSNRELV

SEQ ID NO: 111244 - protein, 9 aa, Homo sapiens
YSWSQFSDV

SEQ ID NO: 111245 - protein, 9 aa, Homo sapiens
FSFGGALCV

SEQ ID NO: 111246 - protein, 9 aa, Homo sapiens
ESVDKEMQV

SEQ ID NO: 111247 - protein, 9 aa, Homo sapiens
MATYLNDHL

SEQ ID NO: 111248 - protein, 9 aa, Homo sapiens
ELYGNNAAA

SEQ ID NO: 111249 - protein, 9 aa, Homo sapiens
VAFFSFGGA

SEQ ID NO: 111250 - protein, 9 aa, Homo sapiens
LTGMTVAGV

SEQ ID NO: 111251 - protein, 9 aa, Homo sapiens
IAAWMATYL

SEQ ID NO: 111252 - protein, 9 aa, Homo sapiens
MTVAGVVLL

SEQ ID NO: 111253 - protein, 9 aa, Homo sapiens
TAYQSFEQV

SEQ ID NO: 111254 - protein, 9 aa, Homo sapiens
ELYGNNAAA

SEQ ID NO: 111255 - protein, 9 aa, Homo sapiens
FSFGGALCV

SEQ ID NO: 111256 - protein, 9 aa, Homo sapiens
LTGMTVAGV

SEQ ID NO: 111257 - protein, 9 aa, Homo sapiens
YSWSQFSDV

SEQ ID NO: 111258 - protein, 9 aa, Homo sapiens
APEGTESEM

SEQ ID NO: 111259 - protein, 9 aa, Homo sapiens
SPAVNGATG

SEQ ID NO: 111260 - protein, 9 aa, Homo sapiens
TPGTAYQSF

SEQ ID NO: 111261 - protein, 9 aa, Homo sapiens
FELRYRRAF

SEQ ID NO: 111262 - protein, 9 aa, Homo sapiens
RIAAWMATY

SEQ ID NO: 111263 - protein, 9 aa, Homo sapiens
ALREAGDEF

SEQ ID NO: 111264 - protein, 9 aa, Homo sapiens
FELRYRRAF

SEQ ID NO: 111265 - protein, 9 aa, Homo sapiens
QERFNRWFL

SEQ ID NO: 111266 - protein, 9 aa, Homo sapiens
FEQVVNELF

SEQ ID NO: 111267 - protein, 9 aa, Homo sapiens
QENGGWDTF

SEQ ID NO: 111268 - protein, 9 aa, Homo sapiens
GRIVAFFSF

SEQ ID NO: 111269 - protein, 9 aa, Homo sapiens
RRAFSDLTS

SEQ ID NO: 111270 - protein, 9 aa, Homo sapiens
TPGTAYQSF

SEQ ID NO: 111271 - protein, 9 aa, Homo sapiens
IAAWMATYL

SEQ ID NO: 111272 - protein, 9 aa, Homo sapiens
APEGTESEM

SEQ ID NO: 111273 - protein, 9 aa, Homo sapiens
ELVVDFLSY

SEQ ID NO: 111274 - protein, 9 aa, Homo sapiens
LHITPGTAY

SEQ ID NO: 111275 - protein, 9 aa, Homo sapiens
NPSWHLADS

SEQ ID NO: 111276 - protein, 9 aa, Homo sapiens
RIAAWMATY

SEQ ID NO: 111277 - protein, 9 aa, Homo sapiens
REAGDEFEL

SEQ ID NO: 111278 - protein, 9 aa, Homo sapiens
QERFNRWFL

SEQ ID NO: 111279 - protein, 9 aa, Homo sapiens
QENGGWDTF

SEQ ID NO: 111280 - protein, 9 aa, Homo sapiens
FEQVVNELF

SEQ ID NO: 111281 - protein, 9 aa, Homo sapiens
FELRYRRAF

SEQ ID NO: 111282 - protein, 9 aa, Homo sapiens
SEMETPSAI

SEQ ID NO: 111283 - protein, 9 aa, Homo sapiens
FELRYRRAF

SEQ ID NO: 111284 - protein, 9 aa, Homo sapiens
QENGGWDTF

SEQ ID NO: 111285 - protein, 9 aa, Homo sapiens
SEMETPSAI

SEQ ID NO: 111286 - protein, 9 aa, Homo sapiens
RELVVDFLS

SEQ ID NO: 111287 - protein, 9 aa, Homo sapiens
REVIPMAAV

SEQ ID NO: 111288 - protein, 9 aa, Homo sapiens
IAAWMATYL

SEQ ID NO: 111289 - protein, 9 aa, Homo sapiens
IPMAAVKQA

SEQ ID NO: 111290 - protein, 9 aa, Homo sapiens
SAINGNPSW

SEQ ID NO: 111291 - protein, 9 aa, Homo sapiens
KLSQKGYSW

SEQ ID NO: 111292 - protein, 9 aa, Homo sapiens
IAAWMATYL

SEQ ID NO: 111293 - protein, 9 aa, Homo sapiens
YLNDHLEPW

SEQ ID NO: 111294 - protein, 10 aa, Homo sapiens
FSDLTSQLHI

SEQ ID NO: 111295 - protein, 10 aa, Homo sapiens
YLNDHLEPWI

SEQ ID NO: 111296 - protein, 10 aa, Homo sapiens
FLTGMTVAGV

SEQ ID NO: 111297 - protein, 10 aa, Homo sapiens
RIAAWMATYL

SEQ ID NO: 111298 - protein, 10 aa, Homo sapiens
WMATYLNDHL

SEQ ID NO: 111299 - protein, 10 aa, Homo sapiens
LVVDFLSYKL

SEQ ID NO: 111300 - protein, 10 aa, Homo sapiens
SLDAREVIPM

SEQ ID NO: 111301 - protein, 10 aa, Homo sapiens
VLVSRIAAWM

SEQ ID NO: 111302 - protein, 10 aa, Homo sapiens
SVDKEMQVLV

SEQ ID NO: 111303 - protein, 10 aa, Homo sapiens
GMTVAGVVLL

SEQ ID NO: 111304 - protein, 10 aa, Homo sapiens
FLTGMTVAGV

SEQ ID NO: 111305 - protein, 10 aa, Homo sapiens
WMATYLNDHL

SEQ ID NO: 111306 - protein, 10 aa, Homo sapiens
RIAAWMATYL

SEQ ID NO: 111307 - protein, 10 aa, Homo sapiens
LVVDFLSYKL

SEQ ID NO: 111308 - protein, 10 aa, Homo sapiens
RAFSDLTSQL

SEQ ID NO: 111309 - protein, 10 aa, Homo sapiens
SLDAREVIPM

SEQ ID NO: 111310 - protein, 10 aa, Homo sapiens
YLNDHLEPWI

SEQ ID NO: 111311 - protein, 10 aa, Homo sapiens
GMTVAGVVLL

SEQ ID NO: 111312 - protein, 10 aa, Homo sapiens
FGGALCVESV

SEQ ID NO: 111313 - protein, 10 aa, Homo sapiens
VLVSRIAAWM

SEQ ID NO: 111314 - protein, 10 aa, Homo sapiens
FLTGMTVAGV

SEQ ID NO: 111315 - protein, 10 aa, Homo sapiens
YLNDHLEPWI

SEQ ID NO: 111316 - protein, 10 aa, Homo sapiens
RIAAWMATYL

SEQ ID NO: 111317 - protein, 10 aa, Homo sapiens
WMATYLNDHL

SEQ ID NO: 111318 - protein, 10 aa, Homo sapiens
VLVSRIAAWM

SEQ ID NO: 111319 - protein, 10 aa, Homo sapiens
IVAFFSFGGA

SEQ ID NO: 111320 - protein, 10 aa, Homo sapiens
LVVDFLSYKL

SEQ ID NO: 111321 - protein, 10 aa, Homo sapiens
VVNELFRDGV

SEQ ID NO: 111322 - protein, 10 aa, Homo sapiens
GMTVAGVVLL

SEQ ID NO: 111323 - protein, 10 aa, Homo sapiens
RAFSDLTSQL

SEQ ID NO: 111324 - protein, 10 aa, Homo sapiens
LTGMTVAGVV

SEQ ID NO: 111325 - protein, 10 aa, Homo sapiens
GTAYQSFEQV

SEQ ID NO: 111326 - protein, 10 aa, Homo sapiens
FLTGMTVAGV

SEQ ID NO: 111327 - protein, 10 aa, Homo sapiens
YLNDHLEPWI

SEQ ID NO: 111328 - protein, 10 aa, Homo sapiens
SLDAREVIPM

SEQ ID NO: 111329 - protein, 10 aa, Homo sapiens
RIAAWMATYL

SEQ ID NO: 111330 - protein, 10 aa, Homo sapiens
LVVDFLSYKL

SEQ ID NO: 111331 - protein, 10 aa, Homo sapiens
AINGNPSWHL

SEQ ID NO: 111332 - protein, 10 aa, Homo sapiens
FLTGMTVAGV

SEQ ID NO: 111333 - protein, 10 aa, Homo sapiens
RIAAWMATYL

SEQ ID NO: 111334 - protein, 10 aa, Homo sapiens
YLNDHLEPWI

SEQ ID NO: 111335 - protein, 10 aa, Homo sapiens
MQVLVSRIAA

SEQ ID NO: 111336 - protein, 10 aa, Homo sapiens
LVVDFLSYKL

SEQ ID NO: 111337 - protein, 10 aa, Homo sapiens
WMATYLNDHL

SEQ ID NO: 111338 - protein, 10 aa, Homo sapiens
SQLHITPGTA

SEQ ID NO: 111339 - protein, 10 aa, Homo sapiens
GTAYQSFEQV

SEQ ID NO: 111340 - protein, 10 aa, Homo sapiens
SVDKEMQVLV

SEQ ID NO: 111341 - protein, 10 aa, Homo sapiens
RAFSDLTSQL

SEQ ID NO: 111342 - protein, 10 aa, Homo sapiens
KEMQVLVSRI

SEQ ID NO: 111343 - protein, 10 aa, Homo sapiens
IQENGGWDTF

SEQ ID NO: 111344 - protein, 10 aa, Homo sapiens
IVAFFSFGGA

SEQ ID NO: 111345 - protein, 10 aa, Homo sapiens
VVNELFRDGV

SEQ ID NO: 111346 - protein, 10 aa, Homo sapiens
TAYQSFEQVV

SEQ ID NO: 111347 - protein, 10 aa, Homo sapiens
FLTGMTVAGV

SEQ ID NO: 111348 - protein, 10 aa, Homo sapiens
YLNDHLEPWI

SEQ ID NO: 111349 - protein, 10 aa, Homo sapiens
SVDKEMQVLV

SEQ ID NO: 111350 - protein, 10 aa, Homo sapiens
SLDAREVIPM

SEQ ID NO: 111351 - protein, 10 aa, Homo sapiens
GMTVAGVVLL

SEQ ID NO: 111352 - protein, 10 aa, Homo sapiens
LVVDFLSYKL

SEQ ID NO: 111353 - protein, 10 aa, Homo sapiens
RIAAWMATYL

SEQ ID NO: 111354 - protein, 10 aa, Homo sapiens
VVNELFRDGV

SEQ ID NO: 111355 - protein, 10 aa, Homo sapiens
AINGNPSWHL

SEQ ID NO: 111356 - protein, 10 aa, Homo sapiens
WMATYLNDHL

SEQ ID NO: 111357 - protein, 10 aa, Homo sapiens
TAYQSFEQVV

SEQ ID NO: 111358 - protein, 10 aa, Homo sapiens
VLVSRIAAWM

SEQ ID NO: 111359 - protein, 10 aa, Homo sapiens
FFSFGGALCV

SEQ ID NO: 111360 - protein, 10 aa, Homo sapiens
VLLGSLFSRK

SEQ ID NO: 111361 - protein, 10 aa, Homo sapiens
RAFSDLTSQL

SEQ ID NO: 111362 - protein, 10 aa, Homo sapiens
GTAYQSFEQV

SEQ ID NO: 111363 - protein, 10 aa, Homo sapiens
FLTGMTVAGV

SEQ ID NO: 111364 - protein, 10 aa, Homo sapiens
YLNDHLEPWI

SEQ ID NO: 111365 - protein, 10 aa, Homo sapiens
SVDKEMQVLV

SEQ ID NO: 111366 - protein, 10 aa, Homo sapiens
WMATYLNDHL

SEQ ID NO: 111367 - protein, 10 aa, Homo sapiens
VVNELFRDGV

SEQ ID NO: 111368 - protein, 10 aa, Homo sapiens
LVVDFLSYKL

SEQ ID NO: 111369 - protein, 10 aa, Homo sapiens
VLVSRIAAWM

SEQ ID NO: 111370 - protein, 10 aa, Homo sapiens
SLDAREVIPM

SEQ ID NO: 111371 - protein, 10 aa, Homo sapiens
AINGNPSWHL

SEQ ID NO: 111372 - protein, 10 aa, Homo sapiens
RIAAWMATYL

SEQ ID NO: 111373 - protein, 10 aa, Homo sapiens
FFSFGGALCV

SEQ ID NO: 111374 - protein, 10 aa, Homo sapiens
VLLGSLFSRK

SEQ ID NO: 111375 - protein, 10 aa, Homo sapiens
TAYQSFEQVV

SEQ ID NO: 111376 - protein, 10 aa, Homo sapiens
ELYGNNAAAE

SEQ ID NO: 111377 - protein, 10 aa, Homo sapiens
GMTVAGVVLL

SEQ ID NO: 111378 - protein, 10 aa, Homo sapiens
FLTGMTVAGV

SEQ ID NO: 111379 - protein, 10 aa, Homo sapiens
YLNDHLEPWI

SEQ ID NO: 111380 - protein, 10 aa, Homo sapiens
SVDKEMQVLV

SEQ ID NO: 111381 - protein, 10 aa, Homo sapiens
WMATYLNDHL

SEQ ID NO: 111382 - protein, 10 aa, Homo sapiens
RIAAWMATYL

SEQ ID NO: 111383 - protein, 10 aa, Homo sapiens
AINGNPSWHL

SEQ ID NO: 111384 - protein, 10 aa, Homo sapiens
VLVSRIAAWM

SEQ ID NO: 111385 - protein, 10 aa, Homo sapiens
LVVDFLSYKL

SEQ ID NO: 111386 - protein, 10 aa, Homo sapiens
SLDAREVIPM

SEQ ID NO: 111387 - protein, 10 aa, Homo sapiens
GMTVAGVVLL

SEQ ID NO: 111388 - protein, 10 aa, Homo sapiens
TAYQSFEQVV

SEQ ID NO: 111389 - protein, 10 aa, Homo sapiens
FFSFGGALCV

SEQ ID NO: 111390 - protein, 10 aa, Homo sapiens
GTAYQSFEQV

SEQ ID NO: 111391 - protein, 10 aa, Homo sapiens
FLTGMTVAGV

SEQ ID NO: 111392 - protein, 10 aa, Homo sapiens
YLNDHLEPWI

SEQ ID NO: 111393 - protein, 10 aa, Homo sapiens
WMATYLNDHL

SEQ ID NO: 111394 - protein, 10 aa, Homo sapiens
AINGNPSWHL

SEQ ID NO: 111395 - protein, 10 aa, Homo sapiens
LVVDFLSYKL

SEQ ID NO: 111396 - protein, 10 aa, Homo sapiens
SVDKEMQVLV

SEQ ID NO: 111397 - protein, 10 aa, Homo sapiens
RIAAWMATYL

SEQ ID NO: 111398 - protein, 10 aa, Homo sapiens
SLDAREVIPM

SEQ ID NO: 111399 - protein, 10 aa, Homo sapiens
VLVSRIAAWM

SEQ ID NO: 111400 - protein, 10 aa, Homo sapiens
VLLGSLFSRK

SEQ ID NO: 111401 - protein, 10 aa, Homo sapiens
ELVVDFLSYK

SEQ ID NO: 111402 - protein, 10 aa, Homo sapiens
GALCVESVDK

SEQ ID NO: 111403 - protein, 10 aa, Homo sapiens
VVLLGSLFSR

SEQ ID NO: 111404 - protein, 10 aa, Homo sapiens
REVIPMAAVK

SEQ ID NO: 111405 - protein, 10 aa, Homo sapiens
VLLGSLFSRK

SEQ ID NO: 111406 - protein, 10 aa, Homo sapiens
VVLLGSLFSR

SEQ ID NO: 111407 - protein, 10 aa, Homo sapiens
GALCVESVDK

SEQ ID NO: 111408 - protein, 10 aa, Homo sapiens
SQFSDVEENR

SEQ ID NO: 111409 - protein, 10 aa, Homo sapiens
SFEQVVNELF

SEQ ID NO: 111410 - protein, 10 aa, Homo sapiens
TYLNDHLEPW

SEQ ID NO: 111411 - protein, 10 aa, Homo sapiens
SFEQVVNELF

SEQ ID NO: 111412 - protein, 10 aa, Homo sapiens
TYLNDHLEPW

SEQ ID NO: 111413 - protein, 10 aa, Homo sapiens
ITPGTAYQSF

SEQ ID NO: 111414 - protein, 10 aa, Homo sapiens
TYLNDHLEPW

SEQ ID NO: 111415 - protein, 10 aa, Homo sapiens
SFEQVVNELF

SEQ ID NO: 111416 - protein, 10 aa, Homo sapiens
ITPGTAYQSF

SEQ ID NO: 111417 - protein, 10 aa, Homo sapiens
EAPEGTESEM

SEQ ID NO: 111418 - protein, 10 aa, Homo sapiens
RIAAWMATYL

SEQ ID NO: 111419 - protein, 10 aa, Homo sapiens
ITPGTAYQSF

SEQ ID NO: 111420 - protein, 10 aa, Homo sapiens
VLVSRIAAWM

SEQ ID NO: 111421 - protein, 10 aa, Homo sapiens
EAPEGTESEM

SEQ ID NO: 111422 - protein, 10 aa, Homo sapiens
ESVDKEMQVL

SEQ ID NO: 111423 - protein, 10 aa, Homo sapiens
EFELRYRRAF

SEQ ID NO: 111424 - protein, 10 aa, Homo sapiens
QLHITPGTAY

SEQ ID NO: 111425 - protein, 10 aa, Homo sapiens
VVLLGSLFSR

SEQ ID NO: 111426 - protein, 10 aa, Homo sapiens
LFRDGVNWGR

SEQ ID NO: 111427 - protein, 10 aa, Homo sapiens
SRKGQERFNR

SEQ ID NO: 111428 - protein, 10 aa, Homo sapiens
PMAAVKQALR

SEQ ID NO: 111429 - protein, 10 aa, Homo sapiens
VVLLGSLFSR

SEQ ID NO: 111430 - protein, 10 aa, Homo sapiens
LFRDGVNWGR

SEQ ID NO: 111431 - protein, 10 aa, Homo sapiens
DFLSYKLSQK

SEQ ID NO: 111432 - protein, 10 aa, Homo sapiens
ELVVDFLSYK

SEQ ID NO: 111433 - protein, 10 aa, Homo sapiens
SQFSDVEENR

SEQ ID NO: 111434 - protein, 10 aa, Homo sapiens
VVLLGSLFSR

SEQ ID NO: 111435 - protein, 10 aa, Homo sapiens
YGNNAAAESR

SEQ ID NO: 111436 - protein, 10 aa, Homo sapiens
EVIPMAAVKQ

SEQ ID NO: 111437 - protein, 10 aa, Homo sapiens
MATYLNDHLE

SEQ ID NO: 111438 - protein, 10 aa, Homo sapiens
IVAFFSFGGA

SEQ ID NO: 111439 - protein, 10 aa, Homo sapiens
GTAYQSFEQV

SEQ ID NO: 111440 - protein, 10 aa, Homo sapiens
LVVDFLSYKL

SEQ ID NO: 111441 - protein, 10 aa, Homo sapiens
QSFEQVVNEL

SEQ ID NO: 111442 - protein, 10 aa, Homo sapiens
FLTGMTVAGV

SEQ ID NO: 111443 - protein, 10 aa, Homo sapiens
TAYQSFEQVV

SEQ ID NO: 111444 - protein, 10 aa, Homo sapiens
RIAAWMATYL

SEQ ID NO: 111445 - protein, 10 aa, Homo sapiens
NGATGHSSSL

SEQ ID NO: 111446 - protein, 10 aa, Homo sapiens
TVAGVVLLGS

SEQ ID NO: 111447 - protein, 10 aa, Homo sapiens
FGGALCVESV

SEQ ID NO: 111448 - protein, 10 aa, Homo sapiens
VVNELFRDGV

SEQ ID NO: 111449 - protein, 10 aa, Homo sapiens
LVSRIAAWMA

SEQ ID NO: 111450 - protein, 10 aa, Homo sapiens
TGMTVAGVVL

SEQ ID NO: 111451 - protein, 10 aa, Homo sapiens
SVDKEMQVLV

SEQ ID NO: 111452 - protein, 10 aa, Homo sapiens
FLTGMTVAGV

SEQ ID NO: 111453 - protein, 10 aa, Homo sapiens
TAYQSFEQVV

SEQ ID NO: 111454 - protein, 10 aa, Homo sapiens
LVVDFLSYKL

SEQ ID NO: 111455 - protein, 10 aa, Homo sapiens
RIAAWMATYL

SEQ ID NO: 111456 - protein, 10 aa, Homo sapiens
GTAYQSFEQV

SEQ ID NO: 111457 - protein, 10 aa, Homo sapiens
IPMAAVKQAL

SEQ ID NO: 111458 - protein, 10 aa, Homo sapiens
SQKGYSWSQF

SEQ ID NO: 111459 - protein, 10 aa, Homo sapiens
QLHITPGTAY

SEQ ID NO: 111460 - protein, 10 aa, Homo sapiens
GVNWGRIVAF

SEQ ID NO: 111461 - protein, 10 aa, Homo sapiens
IQENGGWDTF

SEQ ID NO: 111462 - protein, 10 aa, Homo sapiens
LSYKLSQKGY

SEQ ID NO: 111463 - protein, 10 aa, Homo sapiens
RELVVDFLSY

SEQ ID NO: 111464 - protein, 10 aa, Homo sapiens
SRIAAWMATY

SEQ ID NO: 111465 - protein, 10 aa, Homo sapiens
RRAFSDLTSQ

SEQ ID NO: 111466 - protein, 10 aa, Homo sapiens
IPMAAVKQAL

SEQ ID NO: 111467 - protein, 10 aa, Homo sapiens
EPWIQENGGW

SEQ ID NO: 111468 - protein, 10 aa, Homo sapiens
EAGDEFELRY

SEQ ID NO: 111469 - protein, 10 aa, Homo sapiens
EAPEGTESEM

SEQ ID NO: 111470 - protein, 10 aa, Homo sapiens
QALREAGDEF

SEQ ID NO: 111471 - protein, 10 aa, Homo sapiens
SPAVNGATGH

SEQ ID NO: 111472 - protein, 10 aa, Homo sapiens
TPSAINGNPS

SEQ ID NO: 111473 - protein, 10 aa, Homo sapiens
GVNWGRIVAF

SEQ ID NO: 111474 - protein, 10 aa, Homo sapiens
VAFFSFGGAL

SEQ ID NO: 111475 - protein, 10 aa, Homo sapiens
FVELYGNNAA

SEQ ID NO: 111476 - protein, 10 aa, Homo sapiens
AESRKGQERF

SEQ ID NO: 111477 - protein, 10 aa, Homo sapiens
EPWIQENGGW

SEQ ID NO: 111478 - protein, 10 aa, Homo sapiens
QSNRELVVDF

SEQ ID NO: 111479 - protein, 10 aa, Homo sapiens
QVLVSRIAAW

SEQ ID NO: 111480 - protein, 10 aa, Homo sapiens
PSAINGNPSW

SEQ ID NO: 111481 - protein, 11 aa, Homo sapiens
FLTGMTVAGVV

SEQ ID NO: 111482 - protein, 11 aa, Homo sapiens
SLDAREVIPMA

SEQ ID NO: 111483 - protein, 11 aa, Homo sapiens
VLVSRIAAWMA

SEQ ID NO: 111484 - protein, 11 aa, Homo sapiens
HLADSPAVNGA

SEQ ID NO: 111485 - protein, 11 aa, Homo sapiens
YLNDHLEPWIQ

SEQ ID NO: 111486 - protein, 11 aa, Homo sapiens
ALREAGDEFEL

SEQ ID NO: 111487 - protein, 11 aa, Homo sapiens
YQSFEQVVNEL

SEQ ID NO: 111488 - protein, 11 aa, Homo sapiens
HLADSPAVNGA

SEQ ID NO: 111489 - protein, 11 aa, Homo sapiens
FLTGMTVAGVV

SEQ ID NO: 111490 - protein, 11 aa, Homo sapiens
YQSFEQVVNEL

SEQ ID NO: 111491 - protein, 11 aa, Homo sapiens
ALREAGDEFEL

SEQ ID NO: 111492 - protein, 11 aa, Homo sapiens
YLNDHLEPWIQ

SEQ ID NO: 111493 - protein, 11 aa, Homo sapiens
IVAFFSFGGAL

SEQ ID NO: 111494 - protein, 11 aa, Homo sapiens
TVAGVVLLGSL

SEQ ID NO: 111495 - protein, 11 aa, Homo sapiens
VLVSRIAAWMA

SEQ ID NO: 111496 - protein, 11 aa, Homo sapiens
KLSQKGYSWSQ

SEQ ID NO: 111497 - protein, 11 aa, Homo sapiens
ELVVDFLSYKL

SEQ ID NO: 111498 - protein, 11 aa, Homo sapiens
SLDAREVIPMA

SEQ ID NO: 111499 - protein, 11 aa, Homo sapiens
FLTGMTVAGVV

SEQ ID NO: 111500 - protein, 11 aa, Homo sapiens
HLADSPAVNGA

SEQ ID NO: 111501 - protein, 11 aa, Homo sapiens
RIVAFFSFGGA

SEQ ID NO: 111502 - protein, 11 aa, Homo sapiens
VLVSRIAAWMA

SEQ ID NO: 111503 - protein, 11 aa, Homo sapiens
TVAGVVLLGSL

SEQ ID NO: 111504 - protein, 11 aa, Homo sapiens
ALREAGDEFEL

SEQ ID NO: 111505 - protein, 11 aa, Homo sapiens
YQSFEQVVNEL

SEQ ID NO: 111506 - protein, 11 aa, Homo sapiens
YLNDHLEPWIQ

SEQ ID NO: 111507 - protein, 11 aa, Homo sapiens
AINGNPSWHLA

SEQ ID NO: 111508 - protein, 11 aa, Homo sapiens
FNRWFLTGMTV

SEQ ID NO: 111509 - protein, 11 aa, Homo sapiens
IVAFFSFGGAL

SEQ ID NO: 111510 - protein, 11 aa, Homo sapiens
SLDAREVIPMA

SEQ ID NO: 111511 - protein, 11 aa, Homo sapiens
MAAVKQALREA

SEQ ID NO: 111512 - protein, 11 aa, Homo sapiens
QVVNELFRDGV

SEQ ID NO: 111513 - protein, 11 aa, Homo sapiens
FLTGMTVAGVV

SEQ ID NO: 111514 - protein, 11 aa, Homo sapiens
ALREAGDEFEL

SEQ ID NO: 111515 - protein, 11 aa, Homo sapiens
VLVSRIAAWMA

SEQ ID NO: 111516 - protein, 11 aa, Homo sapiens
YLNDHLEPWIQ

SEQ ID NO: 111517 - protein, 11 aa, Homo sapiens
SLDAREVIPMA

SEQ ID NO: 111518 - protein, 11 aa, Homo sapiens
FLTGMTVAGVV

SEQ ID NO: 111519 - protein, 11 aa, Homo sapiens
RIVAFFSFGGA

SEQ ID NO: 111520 - protein, 11 aa, Homo sapiens
IQENGGWDTFV

SEQ ID NO: 111521 - protein, 11 aa, Homo sapiens
YQSFEQVVNEL

SEQ ID NO: 111522 - protein, 11 aa, Homo sapiens
SAINGNPSWHL

SEQ ID NO: 111523 - protein, 11 aa, Homo sapiens
QVVNELFRDGV

SEQ ID NO: 111524 - protein, 11 aa, Homo sapiens
VLVSRIAAWMA

SEQ ID NO: 111525 - protein, 11 aa, Homo sapiens
KQALREAGDEF

SEQ ID NO: 111526 - protein, 11 aa, Homo sapiens
HLADSPAVNGA

SEQ ID NO: 111527 - protein, 11 aa, Homo sapiens
TVAGVVLLGSL

SEQ ID NO: 111528 - protein, 11 aa, Homo sapiens
ALREAGDEFEL

SEQ ID NO: 111529 - protein, 11 aa, Homo sapiens
SQLHITPGTAY

SEQ ID NO: 111530 - protein, 11 aa, Homo sapiens
FLTGMTVAGVV

SEQ ID NO: 111531 - protein, 11 aa, Homo sapiens
SLDAREVIPMA

SEQ ID NO: 111532 - protein, 11 aa, Homo sapiens
YLNDHLEPWIQ

SEQ ID NO: 111533 - protein, 11 aa, Homo sapiens
ALREAGDEFEL

SEQ ID NO: 111534 - protein, 11 aa, Homo sapiens
HLADSPAVNGA

SEQ ID NO: 111535 - protein, 11 aa, Homo sapiens
VLVSRIAAWMA

SEQ ID NO: 111536 - protein, 11 aa, Homo sapiens
KLSQKGYSWSQ

SEQ ID NO: 111537 - protein, 11 aa, Homo sapiens
ELVVDFLSYKL

SEQ ID NO: 111538 - protein, 11 aa, Homo sapiens
TVAGVVLLGSL

SEQ ID NO: 111539 - protein, 11 aa, Homo sapiens
AINGNPSWHLA

SEQ ID NO: 111540 - protein, 11 aa, Homo sapiens
WFLTGMTVAGV

SEQ ID NO: 111541 - protein, 11 aa, Homo sapiens
AFFSFGGALCV

SEQ ID NO: 111542 - protein, 11 aa, Homo sapiens
SFGGALCVESV

SEQ ID NO: 111543 - protein, 11 aa, Homo sapiens
VIPMAAVKQAL

SEQ ID NO: 111544 - protein, 11 aa, Homo sapiens
QVVNELFRDGV

SEQ ID NO: 111545 - protein, 11 aa, Homo sapiens
FRDGVNWGRIV

SEQ ID NO: 111546 - protein, 11 aa, Homo sapiens
SAINGNPSWHL

SEQ ID NO: 111547 - protein, 11 aa, Homo sapiens
ELYGNNAAAES

SEQ ID NO: 111548 - protein, 11 aa, Homo sapiens
CVESVDKEMQV

SEQ ID NO: 111549 - protein, 11 aa, Homo sapiens
GTAYQSFEQVV

SEQ ID NO: 111550 - protein, 11 aa, Homo sapiens
IVAFFSFGGAL

SEQ ID NO: 111551 - protein, 11 aa, Homo sapiens
FLTGMTVAGVV

SEQ ID NO: 111552 - protein, 11 aa, Homo sapiens
YLNDHLEPWIQ

SEQ ID NO: 111553 - protein, 11 aa, Homo sapiens
ALREAGDEFEL

SEQ ID NO: 111554 - protein, 11 aa, Homo sapiens
SLDAREVIPMA

SEQ ID NO: 111555 - protein, 11 aa, Homo sapiens
HLADSPAVNGA

SEQ ID NO: 111556 - protein, 11 aa, Homo sapiens
VLVSRIAAWMA

SEQ ID NO: 111557 - protein, 11 aa, Homo sapiens
VIPMAAVKQAL

SEQ ID NO: 111558 - protein, 11 aa, Homo sapiens
KLSQKGYSWSQ

SEQ ID NO: 111559 - protein, 11 aa, Homo sapiens
WFLTGMTVAGV

SEQ ID NO: 111560 - protein, 11 aa, Homo sapiens
ELVVDFLSYKL

SEQ ID NO: 111561 - protein, 11 aa, Homo sapiens
FRDGVNWGRIV

SEQ ID NO: 111562 - protein, 11 aa, Homo sapiens
FLTGMTVAGVV

SEQ ID NO: 111563 - protein, 11 aa, Homo sapiens
ALREAGDEFEL

SEQ ID NO: 111564 - protein, 11 aa, Homo sapiens
SLDAREVIPMA

SEQ ID NO: 111565 - protein, 11 aa, Homo sapiens
VLVSRIAAWMA

SEQ ID NO: 111566 - protein, 11 aa, Homo sapiens
CVESVDKEMQV

SEQ ID NO: 111567 - protein, 11 aa, Homo sapiens
HLADSPAVNGA

SEQ ID NO: 111568 - protein, 11 aa, Homo sapiens
SFGGALCVESV

SEQ ID NO: 111569 - protein, 11 aa, Homo sapiens
YLNDHLEPWIQ

SEQ ID NO: 111570 - protein, 11 aa, Homo sapiens
KLSQKGYSWSQ

SEQ ID NO: 111571 - protein, 11 aa, Homo sapiens
ELVVDFLSYKL

SEQ ID NO: 111572 - protein, 11 aa, Homo sapiens
TVAGVVLLGSL

SEQ ID NO: 111573 - protein, 11 aa, Homo sapiens
AFFSFGGALCV

SEQ ID NO: 111574 - protein, 11 aa, Homo sapiens
IQENGGWDTFV

SEQ ID NO: 111575 - protein, 11 aa, Homo sapiens
QVVNELFRDGV

SEQ ID NO: 111576 - protein, 11 aa, Homo sapiens
VIPMAAVKQAL

SEQ ID NO: 111577 - protein, 11 aa, Homo sapiens
ELYGNNAAAES

SEQ ID NO: 111578 - protein, 11 aa, Homo sapiens
SAINGNPSWHL

SEQ ID NO: 111579 - protein, 11 aa, Homo sapiens
WFLTGMTVAGV

SEQ ID NO: 111580 - protein, 11 aa, Homo sapiens
AINGNPSWHLA

SEQ ID NO: 111581 - protein, 11 aa, Homo sapiens
FLTGMTVAGVV

SEQ ID NO: 111582 - protein, 11 aa, Homo sapiens
HLADSPAVNGA

SEQ ID NO: 111583 - protein, 11 aa, Homo sapiens
YLNDHLEPWIQ

SEQ ID NO: 111584 - protein, 11 aa, Homo sapiens
SLDAREVIPMA

SEQ ID NO: 111585 - protein, 11 aa, Homo sapiens
ALREAGDEFEL

SEQ ID NO: 111586 - protein, 11 aa, Homo sapiens
WFLTGMTVAGV

SEQ ID NO: 111587 - protein, 11 aa, Homo sapiens
VLVSRIAAWMA

SEQ ID NO: 111588 - protein, 11 aa, Homo sapiens
VVLLGSLFSRK

SEQ ID NO: 111589 - protein, 11 aa, Homo sapiens
VVLLGSLFSRK

SEQ ID NO: 111590 - protein, 11 aa, Homo sapiens
GVVLLGSLFSR

SEQ ID NO: 111591 - protein, 11 aa, Homo sapiens
ATGHSSSLDAR

SEQ ID NO: 111592 - protein, 11 aa, Homo sapiens
RELVVDFLSYK

SEQ ID NO: 111593 - protein, 11 aa, Homo sapiens
NWGRIVAFFSF

SEQ ID NO: 111594 - protein, 11 aa, Homo sapiens
TYLNDHLEPWI

SEQ ID NO: 111595 - protein, 11 aa, Homo sapiens
AWMATYLNDHL

SEQ ID NO: 111596 - protein, 11 aa, Homo sapiens
SYKLSQKGYSW

SEQ ID NO: 111597 - protein, 11 aa, Homo sapiens
NWGRIVAFFSF

SEQ ID NO: 111598 - protein, 11 aa, Homo sapiens
TYLNDHLEPWI

SEQ ID NO: 111599 - protein, 11 aa, Homo sapiens
AWMATYLNDHL

SEQ ID NO: 111600 - protein, 11 aa, Homo sapiens
TYLNDHLEPWI

SEQ ID NO: 111601 - protein, 11 aa, Homo sapiens
AWMATYLNDHL

SEQ ID NO: 111602 - protein, 11 aa, Homo sapiens
SYKLSQKGYSW

SEQ ID NO: 111603 - protein, 11 aa, Homo sapiens
HITPGTAYQSF

SEQ ID NO: 111604 - protein, 11 aa, Homo sapiens
QVLVSRIAAWM

SEQ ID NO: 111605 - protein, 11 aa, Homo sapiens
HITPGTAYQSF

SEQ ID NO: 111606 - protein, 11 aa, Homo sapiens
WIQENGGWDTF

SEQ ID NO: 111607 - protein, 11 aa, Homo sapiens
FLSYKLSQKGY

SEQ ID NO: 111608 - protein, 11 aa, Homo sapiens
DGVNWGRIVAF

SEQ ID NO: 111609 - protein, 11 aa, Homo sapiens
TVAGVVLLGSL

SEQ ID NO: 111610 - protein, 11 aa, Homo sapiens
SQLHITPGTAY

SEQ ID NO: 111611 - protein, 11 aa, Homo sapiens
VVLLGSLFSRK

SEQ ID NO: 111612 - protein, 11 aa, Homo sapiens
RYRRAFSDLTS

SEQ ID NO: 111613 - protein, 11 aa, Homo sapiens
GVVLLGSLFSR

SEQ ID NO: 111614 - protein, 11 aa, Homo sapiens
SFEQVVNELFR

SEQ ID NO: 111615 - protein, 11 aa, Homo sapiens
ESRKGQERFNR

SEQ ID NO: 111616 - protein, 11 aa, Homo sapiens
ATGHSSSLDAR

SEQ ID NO: 111617 - protein, 11 aa, Homo sapiens
RELVVDFLSYK

SEQ ID NO: 111618 - protein, 11 aa, Homo sapiens
LYGNNAAAESR

SEQ ID NO: 111619 - protein, 11 aa, Homo sapiens
ESRKGQERFNR

SEQ ID NO: 111620 - protein, 11 aa, Homo sapiens
ELFRDGVNWGR

SEQ ID NO: 111621 - protein, 11 aa, Homo sapiens
EAGDEFELRYR

SEQ ID NO: 111622 - protein, 11 aa, Homo sapiens
SFEQVVNELFR

SEQ ID NO: 111623 - protein, 11 aa, Homo sapiens
GVVLLGSLFSR

SEQ ID NO: 111624 - protein, 11 aa, Homo sapiens
EFELRYRRAFS

SEQ ID NO: 111625 - protein, 11 aa, Homo sapiens
ELFRDGVNWGR

SEQ ID NO: 111626 - protein, 11 aa, Homo sapiens
WSQFSDVEENR

SEQ ID NO: 111627 - protein, 11 aa, Homo sapiens
ESRKGQERFNR

SEQ ID NO: 111628 - protein, 11 aa, Homo sapiens
EAGDEFELRYR

SEQ ID NO: 111629 - protein, 11 aa, Homo sapiens
GVVLLGSLFSR

SEQ ID NO: 111630 - protein, 11 aa, Homo sapiens
IPMAAVKQALR

SEQ ID NO: 111631 - protein, 11 aa, Homo sapiens
SFEQVVNELFR

SEQ ID NO: 111632 - protein, 11 aa, Homo sapiens
TVAGVVLLGSL

SEQ ID NO: 111633 - protein, 11 aa, Homo sapiens
QVVNELFRDGV

SEQ ID NO: 111634 - protein, 11 aa, Homo sapiens
IVAFFSFGGAL

SEQ ID NO: 111635 - protein, 11 aa, Homo sapiens
ESVDKEMQVLV

SEQ ID NO: 111636 - protein, 11 aa, Homo sapiens
TGMTVAGVVLL

SEQ ID NO: 111637 - protein, 11 aa, Homo sapiens
ELVVDFLSYKL

SEQ ID NO: 111638 - protein, 11 aa, Homo sapiens
RIVAFFSFGGA

SEQ ID NO: 111639 - protein, 11 aa, Homo sapiens
DTFVELYGNNA

SEQ ID NO: 111640 - protein, 11 aa, Homo sapiens
EVIPMAAVKQA

SEQ ID NO: 111641 - protein, 11 aa, Homo sapiens
GTAYQSFEQVV

SEQ ID NO: 111642 - protein, 11 aa, Homo sapiens
DAREVIPMAAV

SEQ ID NO: 111643 - protein, 11 aa, Homo sapiens
HLADSPAVNGA

SEQ ID NO: 111644 - protein, 11 aa, Homo sapiens
MTVAGVVLLGS

SEQ ID NO: 111645 - protein, 11 aa, Homo sapiens
ETPSAINGNPS

SEQ ID NO: 111646 - protein, 11 aa, Homo sapiens
FLTGMTVAGVV

SEQ ID NO: 111647 - protein, 11 aa, Homo sapiens
HSSSLDAREVI

SEQ ID NO: 111648 - protein, 11 aa, Homo sapiens
SAINGNPSWHL

SEQ ID NO: 111649 - protein, 11 aa, Homo sapiens
DAREVIPMAAV

SEQ ID NO: 111650 - protein, 11 aa, Homo sapiens
ESVDKEMQVLV

SEQ ID NO: 111651 - protein, 11 aa, Homo sapiens
HLADSPAVNGA

SEQ ID NO: 111652 - protein, 11 aa, Homo sapiens
PSWHLADSPAV

SEQ ID NO: 111653 - protein, 11 aa, Homo sapiens
WFLTGMTVAGV

SEQ ID NO: 111654 - protein, 11 aa, Homo sapiens
EVIPMAAVKQA

SEQ ID NO: 111655 - protein, 11 aa, Homo sapiens
ELVVDFLSYKL

SEQ ID NO: 111656 - protein, 11 aa, Homo sapiens
TVAGVVLLGSL

SEQ ID NO: 111657 - protein, 11 aa, Homo sapiens
DTFVELYGNNA

SEQ ID NO: 111658 - protein, 11 aa, Homo sapiens
IVAFFSFGGAL

SEQ ID NO: 111659 - protein, 11 aa, Homo sapiens
NPSWHLADSPA

SEQ ID NO: 111660 - protein, 11 aa, Homo sapiens
SPAVNGATGHS

SEQ ID NO: 111661 - protein, 11 aa, Homo sapiens
SQLHITPGTAY

SEQ ID NO: 111662 - protein, 11 aa, Homo sapiens
KQALREAGDEF

SEQ ID NO: 111663 - protein, 11 aa, Homo sapiens
SQSNRELVVDF

SEQ ID NO: 111664 - protein, 11 aa, Homo sapiens
YQSFEQVVNEL

SEQ ID NO: 111665 - protein, 11 aa, Homo sapiens
MQVLVSRIAAW

SEQ ID NO: 111666 - protein, 11 aa, Homo sapiens
VSRIAAWMATY

SEQ ID NO: 111667 - protein, 11 aa, Homo sapiens
FLSYKLSQKGY

SEQ ID NO: 111668 - protein, 11 aa, Homo sapiens
WIQENGGWDTF

SEQ ID NO: 111669 - protein, 11 aa, Homo sapiens
QSFEQVVNELF

SEQ ID NO: 111670 - protein, 11 aa, Homo sapiens
HITPGTAYQSF

SEQ ID NO: 111671 - protein, 11 aa, Homo sapiens
GVNWGRIVAFF

SEQ ID NO: 111672 - protein, 11 aa, Homo sapiens
DEFELRYRRAF

SEQ ID NO: 111673 - protein, 11 aa, Homo sapiens
REAGDEFELRY

SEQ ID NO: 111674 - protein, 11 aa, Homo sapiens
SQLHITPGTAY

SEQ ID NO: 111675 - protein, 11 aa, Homo sapiens
VESVDKEMQVL

SEQ ID NO: 111676 - protein, 11 aa, Homo sapiens
LEPWIQENGGW

SEQ ID NO: 111677 - protein, 11 aa, Homo sapiens
FNRWFLTGMTV

SEQ ID NO: 111678 - protein, 11 aa, Homo sapiens
RRAFSDLTSQL

SEQ ID NO: 111679 - protein, 11 aa, Homo sapiens
SRIAAWMATYL

SEQ ID NO: 111680 - protein, 11 aa, Homo sapiens
NPSWHLADSPA

SEQ ID NO: 111681 - protein, 11 aa, Homo sapiens
TPSAINGNPSW

SEQ ID NO: 111682 - protein, 11 aa, Homo sapiens
WIQENGGWDTF

SEQ ID NO: 111683 - protein, 11 aa, Homo sapiens
DGVNWGRIVAF

SEQ ID NO: 111684 - protein, 11 aa, Homo sapiens
YQSFEQVVNEL

SEQ ID NO: 111685 - protein, 11 aa, Homo sapiens
VESVDKEMQVL

SEQ ID NO: 111686 - protein, 11 aa, Homo sapiens
TESEMETPSAI

SEQ ID NO: 111687 - protein, 11 aa, Homo sapiens
EENRTEAPEGT

SEQ ID NO: 111688 - protein, 11 aa, Homo sapiens
TPSAINGNPSW

SEQ ID NO: 111689 - protein, 11 aa, Homo sapiens
NPSWHLADSPA

SEQ ID NO: 111690 - protein, 11 aa, Homo sapiens
ATYLNDHLEPW

SEQ ID NO: 111691 - protein, 11 aa, Homo sapiens
ATYLNDHLEPW

SEQ ID NO: 111692 - protein, 11 aa, Homo sapiens
QSFEQVVNELF

SEQ ID NO: 111693 - protein, 8 aa, Homo sapiens
ALSPVPPV

SEQ ID NO: 111694 - protein, 8 aa, Homo sapiens
TLLSLALV

SEQ ID NO: 111695 - protein, 8 aa, Homo sapiens
ALWMTEYL

SEQ ID NO: 111696 - protein, 8 aa, Homo sapiens
GVMCVESV

SEQ ID NO: 111697 - protein, 8 aa, Homo sapiens
PLFDFSWL

SEQ ID NO: 111698 - protein, 8 aa, Homo sapiens
SLKTLLSL

SEQ ID NO: 111699 - protein, 8 aa, Homo sapiens
ALSPVPPV

SEQ ID NO: 111700 - protein, 8 aa, Homo sapiens
WLSLKTLL

SEQ ID NO: 111701 - protein, 8 aa, Homo sapiens
SLKTLLSL

SEQ ID NO: 111702 - protein, 8 aa, Homo sapiens
PLFDFSWL

SEQ ID NO: 111703 - protein, 8 aa, Homo sapiens
ALWMTEYL

SEQ ID NO: 111704 - protein, 8 aa, Homo sapiens
GVMCVESV

SEQ ID NO: 111705 - protein, 8 aa, Homo sapiens
TLLSLALV

SEQ ID NO: 111706 - protein, 8 aa, Homo sapiens
EMSSQLHL

SEQ ID NO: 111707 - protein, 8 aa, Homo sapiens
LVGACITL

SEQ ID NO: 111708 - protein, 8 aa, Homo sapiens
FATVVEEL

SEQ ID NO: 111709 - protein, 8 aa, Homo sapiens
PLVDNIAL

SEQ ID NO: 111710 - protein, 8 aa, Homo sapiens
YLNRHLHT

SEQ ID NO: 111711 - protein, 8 aa, Homo sapiens
FDFSWLSL

SEQ ID NO: 111712 - protein, 8 aa, Homo sapiens
ALSPVPPV

SEQ ID NO: 111713 - protein, 8 aa, Homo sapiens
SLKTLLSL

SEQ ID NO: 111714 - protein, 8 aa, Homo sapiens
GVMCVESV

SEQ ID NO: 111715 - protein, 8 aa, Homo sapiens
YLNRHLHT

SEQ ID NO: 111716 - protein, 8 aa, Homo sapiens
TLLSLALV

SEQ ID NO: 111717 - protein, 8 aa, Homo sapiens
WLSLKTLL

SEQ ID NO: 111718 - protein, 8 aa, Homo sapiens
GVNWGRIV

SEQ ID NO: 111719 - protein, 8 aa, Homo sapiens
FTARGRFA

SEQ ID NO: 111720 - protein, 8 aa, Homo sapiens
ALWMTEYL

SEQ ID NO: 111721 - protein, 8 aa, Homo sapiens
PLFDFSWL

SEQ ID NO: 111722 - protein, 8 aa, Homo sapiens
ALSPVPPV

SEQ ID NO: 111723 - protein, 8 aa, Homo sapiens
ALWMTEYL

SEQ ID NO: 111724 - protein, 8 aa, Homo sapiens
TLLSLALV

SEQ ID NO: 111725 - protein, 8 aa, Homo sapiens
GVMCVESV

SEQ ID NO: 111726 - protein, 8 aa, Homo sapiens
LVGACITL

SEQ ID NO: 111727 - protein, 8 aa, Homo sapiens
ALSPVPPV

SEQ ID NO: 111728 - protein, 8 aa, Homo sapiens
GVMCVESV

SEQ ID NO: 111729 - protein, 8 aa, Homo sapiens
SQLHLTPF

SEQ ID NO: 111730 - protein, 8 aa, Homo sapiens
TLLSLALV

SEQ ID NO: 111731 - protein, 8 aa, Homo sapiens
RIVAFFEF

SEQ ID NO: 111732 - protein, 8 aa, Homo sapiens
KTLLSLAL

SEQ ID NO: 111733 - protein, 8 aa, Homo sapiens
ALWMTEYL

SEQ ID NO: 111734 - protein, 8 aa, Homo sapiens
LVGACITL

SEQ ID NO: 111735 - protein, 8 aa, Homo sapiens
FTARGRFA

SEQ ID NO: 111736 - protein, 8 aa, Homo sapiens
WLSLKTLL

SEQ ID NO: 111737 - protein, 8 aa, Homo sapiens
FATVVEEL

SEQ ID NO: 111738 - protein, 8 aa, Homo sapiens
RQAGDDFS

SEQ ID NO: 111739 - protein, 8 aa, Homo sapiens
ALSPVPPV

SEQ ID NO: 111740 - protein, 8 aa, Homo sapiens
TLLSLALV

SEQ ID NO: 111741 - protein, 8 aa, Homo sapiens
ALWMTEYL

SEQ ID NO: 111742 - protein, 8 aa, Homo sapiens
PLFDFSWL

SEQ ID NO: 111743 - protein, 8 aa, Homo sapiens
PLVDNIAL

SEQ ID NO: 111744 - protein, 8 aa, Homo sapiens
SLKTLLSL

SEQ ID NO: 111745 - protein, 8 aa, Homo sapiens
WLSLKTLL

SEQ ID NO: 111746 - protein, 8 aa, Homo sapiens
YLNRHLHT

SEQ ID NO: 111747 - protein, 8 aa, Homo sapiens
EMSSQLHL

SEQ ID NO: 111748 - protein, 8 aa, Homo sapiens
GVNWGRIV

SEQ ID NO: 111749 - protein, 8 aa, Homo sapiens
GVMCVESV

SEQ ID NO: 111750 - protein, 8 aa, Homo sapiens
AFFEFGGV

SEQ ID NO: 111751 - protein, 8 aa, Homo sapiens
PVPPVVHL

SEQ ID NO: 111752 - protein, 8 aa, Homo sapiens
CITLGAYL

SEQ ID NO: 111753 - protein, 8 aa, Homo sapiens
LVGACITL

SEQ ID NO: 111754 - protein, 8 aa, Homo sapiens
ALVGACIT

SEQ ID NO: 111755 - protein, 8 aa, Homo sapiens
YEWDAGDV

SEQ ID NO: 111756 - protein, 8 aa, Homo sapiens
EFGGVMCV

SEQ ID NO: 111757 - protein, 8 aa, Homo sapiens
SLALVGAC

SEQ ID NO: 111758 - protein, 8 aa, Homo sapiens
ALSPVPPV

SEQ ID NO: 111759 - protein, 8 aa, Homo sapiens
ALWMTEYL

SEQ ID NO: 111760 - protein, 8 aa, Homo sapiens
TLLSLALV

SEQ ID NO: 111761 - protein, 8 aa, Homo sapiens
PLFDFSWL

SEQ ID NO: 111762 - protein, 8 aa, Homo sapiens
PLVDNIAL

SEQ ID NO: 111763 - protein, 8 aa, Homo sapiens
SLKTLLSL

SEQ ID NO: 111764 - protein, 8 aa, Homo sapiens
YLNRHLHT

SEQ ID NO: 111765 - protein, 8 aa, Homo sapiens
EMSSQLHL

SEQ ID NO: 111766 - protein, 8 aa, Homo sapiens
WLSLKTLL

SEQ ID NO: 111767 - protein, 8 aa, Homo sapiens
YEWDAGDV

SEQ ID NO: 111768 - protein, 8 aa, Homo sapiens
GVMCVESV

SEQ ID NO: 111769 - protein, 8 aa, Homo sapiens
ALSPVPPV

SEQ ID NO: 111770 - protein, 8 aa, Homo sapiens
ALWMTEYL

SEQ ID NO: 111771 - protein, 8 aa, Homo sapiens
TLLSLALV

SEQ ID NO: 111772 - protein, 8 aa, Homo sapiens
PLFDFSWL

SEQ ID NO: 111773 - protein, 8 aa, Homo sapiens
PLVDNIAL

SEQ ID NO: 111774 - protein, 8 aa, Homo sapiens
SLKTLLSL

SEQ ID NO: 111775 - protein, 8 aa, Homo sapiens
WLSLKTLL

SEQ ID NO: 111776 - protein, 8 aa, Homo sapiens
EMSSQLHL

SEQ ID NO: 111777 - protein, 8 aa, Homo sapiens
GVMCVESV

SEQ ID NO: 111778 - protein, 8 aa, Homo sapiens
YLNRHLHT

SEQ ID NO: 111779 - protein, 8 aa, Homo sapiens
ALVGACIT

SEQ ID NO: 111780 - protein, 8 aa, Homo sapiens
LVGACITL

SEQ ID NO: 111781 - protein, 8 aa, Homo sapiens
PVPPVVHL

SEQ ID NO: 111782 - protein, 8 aa, Homo sapiens
EFGGVMCV

SEQ ID NO: 111783 - protein, 8 aa, Homo sapiens
CITLGAYL

SEQ ID NO: 111784 - protein, 8 aa, Homo sapiens
GVNWGRIV

SEQ ID NO: 111785 - protein, 8 aa, Homo sapiens
ALSPVPPV

SEQ ID NO: 111786 - protein, 8 aa, Homo sapiens
ALWMTEYL

SEQ ID NO: 111787 - protein, 8 aa, Homo sapiens
TLLSLALV

SEQ ID NO: 111788 - protein, 8 aa, Homo sapiens
PLFDFSWL

SEQ ID NO: 111789 - protein, 8 aa, Homo sapiens
PLVDNIAL

SEQ ID NO: 111790 - protein, 8 aa, Homo sapiens
EMSSQLHL

SEQ ID NO: 111791 - protein, 8 aa, Homo sapiens
WLSLKTLL

SEQ ID NO: 111792 - protein, 8 aa, Homo sapiens
GVMCVESV

SEQ ID NO: 111793 - protein, 8 aa, Homo sapiens
SLKTLLSL

SEQ ID NO: 111794 - protein, 8 aa, Homo sapiens
YEWDAGDV

SEQ ID NO: 111795 - protein, 8 aa, Homo sapiens
YLNRHLHT

SEQ ID NO: 111796 - protein, 8 aa, Homo sapiens
VMKYIHYK

SEQ ID NO: 111797 - protein, 8 aa, Homo sapiens
IVMKYIHY

SEQ ID NO: 111798 - protein, 8 aa, Homo sapiens
HLTPFTAR

SEQ ID NO: 111799 - protein, 8 aa, Homo sapiens
ELYGPSMR

SEQ ID NO: 111800 - protein, 8 aa, Homo sapiens
VMKYIHYK

SEQ ID NO: 111801 - protein, 8 aa, Homo sapiens
TVVEELFR

SEQ ID NO: 111802 - protein, 8 aa, Homo sapiens
IVMKYIHY

SEQ ID NO: 111803 - protein, 8 aa, Homo sapiens
NWGRIVAF

SEQ ID NO: 111804 - protein, 8 aa, Homo sapiens
RIVAFFEF

SEQ ID NO: 111805 - protein, 8 aa, Homo sapiens
SMRPLFDF

SEQ ID NO: 111806 - protein, 8 aa, Homo sapiens
PFTARGRF

SEQ ID NO: 111807 - protein, 8 aa, Homo sapiens
NWGRIVAF

SEQ ID NO: 111808 - protein, 8 aa, Homo sapiens
SWLSLKTL

SEQ ID NO: 111809 - protein, 8 aa, Homo sapiens
SMRPLFDF

SEQ ID NO: 111810 - protein, 8 aa, Homo sapiens
RIVAFFEF

SEQ ID NO: 111811 - protein, 8 aa, Homo sapiens
IVMKYIHY

SEQ ID NO: 111812 - protein, 8 aa, Homo sapiens
EMSSQLHL

SEQ ID NO: 111813 - protein, 8 aa, Homo sapiens
RIVAFFEF

SEQ ID NO: 111814 - protein, 8 aa, Homo sapiens
EIVMKYIH

SEQ ID NO: 111815 - protein, 8 aa, Homo sapiens
ATVVEELF

SEQ ID NO: 111816 - protein, 8 aa, Homo sapiens
IVMKYIHY

SEQ ID NO: 111817 - protein, 8 aa, Homo sapiens
ACITLGAY

SEQ ID NO: 111818 - protein, 8 aa, Homo sapiens
VMKYIHYK

SEQ ID NO: 111819 - protein, 8 aa, Homo sapiens
ASRDPVAR

SEQ ID NO: 111820 - protein, 8 aa, Homo sapiens
RGRFATVV

SEQ ID NO: 111821 - protein, 8 aa, Homo sapiens
EMSSQLHL

SEQ ID NO: 111822 - protein, 8 aa, Homo sapiens
SMRPLFDF

SEQ ID NO: 111823 - protein, 8 aa, Homo sapiens
VMKYIHYK

SEQ ID NO: 111824 - protein, 8 aa, Homo sapiens
HLTPFTAR

SEQ ID NO: 111825 - protein, 8 aa, Homo sapiens
ASRDPVAR

SEQ ID NO: 111826 - protein, 8 aa, Homo sapiens
DFSRRYRR

SEQ ID NO: 111827 - protein, 8 aa, Homo sapiens
WMTEYLNR

SEQ ID NO: 111828 - protein, 8 aa, Homo sapiens
TVVEELFR

SEQ ID NO: 111829 - protein, 8 aa, Homo sapiens
DFSRRYRR

SEQ ID NO: 111830 - protein, 8 aa, Homo sapiens
HLTPFTAR

SEQ ID NO: 111831 - protein, 8 aa, Homo sapiens
DFSWLSLK

SEQ ID NO: 111832 - protein, 8 aa, Homo sapiens
DDFSRRYR

SEQ ID NO: 111833 - protein, 8 aa, Homo sapiens
ELYGPSMR

SEQ ID NO: 111834 - protein, 8 aa, Homo sapiens
TVVEELFR

SEQ ID NO: 111835 - protein, 8 aa, Homo sapiens
VMKYIHYK

SEQ ID NO: 111836 - protein, 8 aa, Homo sapiens
TVVEELFR

SEQ ID NO: 111837 - protein, 8 aa, Homo sapiens
ELYGPSMR

SEQ ID NO: 111838 - protein, 8 aa, Homo sapiens
HLTPFTAR

SEQ ID NO: 111839 - protein, 8 aa, Homo sapiens
DFSWLSLK

SEQ ID NO: 111840 - protein, 8 aa, Homo sapiens
TPFTARGR

SEQ ID NO: 111841 - protein, 8 aa, Homo sapiens
TPHPAASR

SEQ ID NO: 111842 - protein, 8 aa, Homo sapiens
DDFSRRYR

SEQ ID NO: 111843 - protein, 8 aa, Homo sapiens
VMKYIHYK

SEQ ID NO: 111844 - protein, 8 aa, Homo sapiens
QAGDDFSR

SEQ ID NO: 111845 - protein, 8 aa, Homo sapiens
WMTEYLNR

SEQ ID NO: 111846 - protein, 8 aa, Homo sapiens
MCVESVNR

SEQ ID NO: 111847 - protein, 8 aa, Homo sapiens
DFSRRYRR

SEQ ID NO: 111848 - protein, 8 aa, Homo sapiens
PVVHLTLR

SEQ ID NO: 111849 - protein, 8 aa, Homo sapiens
GVMCVESV

SEQ ID NO: 111850 - protein, 8 aa, Homo sapiens
MSPLVDNI

SEQ ID NO: 111851 - protein, 8 aa, Homo sapiens
FTARGRFA

SEQ ID NO: 111852 - protein, 8 aa, Homo sapiens
FATVVEEL

SEQ ID NO: 111853 - protein, 8 aa, Homo sapiens
QTPAAPGA

SEQ ID NO: 111854 - protein, 8 aa, Homo sapiens
TLLSLALV

SEQ ID NO: 111855 - protein, 8 aa, Homo sapiens
FTARGRFA

SEQ ID NO: 111856 - protein, 8 aa, Homo sapiens
EMSSQLHL

SEQ ID NO: 111857 - protein, 8 aa, Homo sapiens
ALSPVPPV

SEQ ID NO: 111858 - protein, 8 aa, Homo sapiens
GPSMRPLF

SEQ ID NO: 111859 - protein, 8 aa, Homo sapiens
TPAAPGAA

SEQ ID NO: 111860 - protein, 8 aa, Homo sapiens
SPLQTPAA

SEQ ID NO: 111861 - protein, 8 aa, Homo sapiens
PPVVHLTL

SEQ ID NO: 111862 - protein, 8 aa, Homo sapiens
RPLFDFSW

SEQ ID NO: 111863 - protein, 8 aa, Homo sapiens
SQLHLTPF

SEQ ID NO: 111864 - protein, 8 aa, Homo sapiens
SMRPLFDF

SEQ ID NO: 111865 - protein, 8 aa, Homo sapiens
IVMKYIHY

SEQ ID NO: 111866 - protein, 8 aa, Homo sapiens
RIVAFFEF

SEQ ID NO: 111867 - protein, 8 aa, Homo sapiens
VELYGPSM

SEQ ID NO: 111868 - protein, 8 aa, Homo sapiens
TEYLNRHL

SEQ ID NO: 111869 - protein, 8 aa, Homo sapiens
IALWMTEY

SEQ ID NO: 111870 - protein, 8 aa, Homo sapiens
SQLHLTPF

SEQ ID NO: 111871 - protein, 8 aa, Homo sapiens
FEFGGVMC

SEQ ID NO: 111872 - protein, 8 aa, Homo sapiens
IALWMTEY

SEQ ID NO: 111873 - protein, 8 aa, Homo sapiens
FFEFGGVM

SEQ ID NO: 111874 - protein, 8 aa, Homo sapiens
SPLQTPAA

SEQ ID NO: 111875 - protein, 8 aa, Homo sapiens
FAEMSSQL

SEQ ID NO: 111876 - protein, 8 aa, Homo sapiens
SPVPPVVH

SEQ ID NO: 111877 - protein, 8 aa, Homo sapiens
TPAAPGAA

SEQ ID NO: 111878 - protein, 8 aa, Homo sapiens
FATVVEEL

SEQ ID NO: 111879 - protein, 8 aa, Homo sapiens
TEYLNRHL

SEQ ID NO: 111880 - protein, 8 aa, Homo sapiens
REIVMKYI

SEQ ID NO: 111881 - protein, 8 aa, Homo sapiens
FEFGGVMC

SEQ ID NO: 111882 - protein, 8 aa, Homo sapiens
REIVMKYI

SEQ ID NO: 111883 - protein, 8 aa, Homo sapiens
AEMSSQLH

SEQ ID NO: 111884 - protein, 8 aa, Homo sapiens
EELFRDGV

SEQ ID NO: 111885 - protein, 8 aa, Homo sapiens
REIVMKYI

SEQ ID NO: 111886 - protein, 8 aa, Homo sapiens
LALVGACI

SEQ ID NO: 111887 - protein, 8 aa, Homo sapiens
PPVVHLTL

SEQ ID NO: 111888 - protein, 8 aa, Homo sapiens
RPLFDFSW

SEQ ID NO: 111889 - protein, 8 aa, Homo sapiens
GPSMRPLF

SEQ ID NO: 111890 - protein, 8 aa, Homo sapiens
TPAAPGAA

SEQ ID NO: 111891 - protein, 8 aa, Homo sapiens
SPLQTPAA

SEQ ID NO: 111892 - protein, 8 aa, Homo sapiens
APPGAAPA

SEQ ID NO: 111893 - protein, 8 aa, Homo sapiens
SPLVDNIA

SEQ ID NO: 111894 - protein, 8 aa, Homo sapiens
VPPVVHLT

SEQ ID NO: 111895 - protein, 8 aa, Homo sapiens
LSQRGYEW

SEQ ID NO: 111896 - protein, 8 aa, Homo sapiens
RIVAFFEF

SEQ ID NO: 111897 - protein, 8 aa, Homo sapiens
LVDNIALW

SEQ ID NO: 111898 - protein, 8 aa, Homo sapiens
IALWMTEY

SEQ ID NO: 111899 - protein, 9 aa, Homo sapiens
NIALWMTEY

SEQ ID NO: 111900 - protein, 9 aa, Homo sapiens
ALSPVPPVV

SEQ ID NO: 111901 - protein, 9 aa, Homo sapiens
ALVGACITL

SEQ ID NO: 111902 - protein, 9 aa, Homo sapiens
KTLLSLALV

SEQ ID NO: 111903 - protein, 9 aa, Homo sapiens
LLSLALVGA

SEQ ID NO: 111904 - protein, 9 aa, Homo sapiens
IALWMTEYL

SEQ ID NO: 111905 - protein, 9 aa, Homo sapiens
LLSLALVGA

SEQ ID NO: 111906 - protein, 9 aa, Homo sapiens
VMKYIHYKL

SEQ ID NO: 111907 - protein, 9 aa, Homo sapiens
ALVGACITL

SEQ ID NO: 111908 - protein, 9 aa, Homo sapiens
SLKTLLSLA

SEQ ID NO: 111909 - protein, 9 aa, Homo sapiens
SVNREMSPL

SEQ ID NO: 111910 - protein, 9 aa, Homo sapiens
AAGPALSPV

SEQ ID NO: 111911 - protein, 9 aa, Homo sapiens
ALSPVPPVV

SEQ ID NO: 111912 - protein, 9 aa, Homo sapiens
EMSPLVDNI

SEQ ID NO: 111913 - protein, 9 aa, Homo sapiens
SLALVGACI

SEQ ID NO: 111914 - protein, 9 aa, Homo sapiens
RTSPLQTPA

SEQ ID NO: 111915 - protein, 9 aa, Homo sapiens
SMRPLFDFS

SEQ ID NO: 111916 - protein, 9 aa, Homo sapiens
YLNRHLHTW

SEQ ID NO: 111917 - protein, 9 aa, Homo sapiens
IALWMTEYL

SEQ ID NO: 111918 - protein, 9 aa, Homo sapiens
KTLLSLALV

SEQ ID NO: 111919 - protein, 9 aa, Homo sapiens
EMSSQLHLT

SEQ ID NO: 111920 - protein, 9 aa, Homo sapiens
SLKTLLSLA

SEQ ID NO: 111921 - protein, 9 aa, Homo sapiens
ALSPVPPVV

SEQ ID NO: 111922 - protein, 9 aa, Homo sapiens
LLSLALVGA

SEQ ID NO: 111923 - protein, 9 aa, Homo sapiens
AAGPALSPV

SEQ ID NO: 111924 - protein, 9 aa, Homo sapiens
SVNREMSPL

SEQ ID NO: 111925 - protein, 9 aa, Homo sapiens
TARGRFATV

SEQ ID NO: 111926 - protein, 9 aa, Homo sapiens
VMKYIHYKL

SEQ ID NO: 111927 - protein, 9 aa, Homo sapiens
ALVGACITL

SEQ ID NO: 111928 - protein, 9 aa, Homo sapiens
SLALVGACI

SEQ ID NO: 111929 - protein, 9 aa, Homo sapiens
KTLLSLALV

SEQ ID NO: 111930 - protein, 9 aa, Homo sapiens
RTSPLQTPA

SEQ ID NO: 111931 - protein, 9 aa, Homo sapiens
VAFFEFGGV

SEQ ID NO: 111932 - protein, 9 aa, Homo sapiens
EMSPLVDNI

SEQ ID NO: 111933 - protein, 9 aa, Homo sapiens
QLHLTPFTA

SEQ ID NO: 111934 - protein, 9 aa, Homo sapiens
SMRPLFDFS

SEQ ID NO: 111935 - protein, 9 aa, Homo sapiens
YLNRHLHTW

SEQ ID NO: 111936 - protein, 9 aa, Homo sapiens
ALSPVPPVV

SEQ ID NO: 111937 - protein, 9 aa, Homo sapiens
ALVGACITL

SEQ ID NO: 111938 - protein, 9 aa, Homo sapiens
AAGPALSPV

SEQ ID NO: 111939 - protein, 9 aa, Homo sapiens
KTLLSLALV

SEQ ID NO: 111940 - protein, 9 aa, Homo sapiens
AAGPALSPV

SEQ ID NO: 111941 - protein, 9 aa, Homo sapiens
SQLHLTPFT

SEQ ID NO: 111942 - protein, 9 aa, Homo sapiens
LQTPAAPGA

SEQ ID NO: 111943 - protein, 9 aa, Homo sapiens
FEFGGVMCV

SEQ ID NO: 111944 - protein, 9 aa, Homo sapiens
ALVGACITL

SEQ ID NO: 111945 - protein, 9 aa, Homo sapiens
LLSLALVGA

SEQ ID NO: 111946 - protein, 9 aa, Homo sapiens
ALSPVPPVV

SEQ ID NO: 111947 - protein, 9 aa, Homo sapiens
FTARGRFAT

SEQ ID NO: 111948 - protein, 9 aa, Homo sapiens
IQDNGGWDA

SEQ ID NO: 111949 - protein, 9 aa, Homo sapiens
IALWMTEYL

SEQ ID NO: 111950 - protein, 9 aa, Homo sapiens
AAPPGAAPA

SEQ ID NO: 111951 - protein, 9 aa, Homo sapiens
TARGRFATV

SEQ ID NO: 111952 - protein, 9 aa, Homo sapiens
VAFFEFGGV

SEQ ID NO: 111953 - protein, 9 aa, Homo sapiens
RTSPLQTPA

SEQ ID NO: 111954 - protein, 9 aa, Homo sapiens
ALSPVPPVV

SEQ ID NO: 111955 - protein, 9 aa, Homo sapiens
ALVGACITL

SEQ ID NO: 111956 - protein, 9 aa, Homo sapiens
PLFDFSWLS

SEQ ID NO: 111957 - protein, 9 aa, Homo sapiens
FEFGGVMCV

SEQ ID NO: 111958 - protein, 9 aa, Homo sapiens
YLNRHLHTW

SEQ ID NO: 111959 - protein, 9 aa, Homo sapiens
SLALVGACI

SEQ ID NO: 111960 - protein, 9 aa, Homo sapiens
LLSLALVGA

SEQ ID NO: 111961 - protein, 9 aa, Homo sapiens
EMSPLVDNI

SEQ ID NO: 111962 - protein, 9 aa, Homo sapiens
QLHLTPFTA

SEQ ID NO: 111963 - protein, 9 aa, Homo sapiens
SLKTLLSLA

SEQ ID NO: 111964 - protein, 9 aa, Homo sapiens
LVDNIALWM

SEQ ID NO: 111965 - protein, 9 aa, Homo sapiens
KTLLSLALV

SEQ ID NO: 111966 - protein, 9 aa, Homo sapiens
GVNWGRIVA

SEQ ID NO: 111967 - protein, 9 aa, Homo sapiens
VMKYIHYKL

SEQ ID NO: 111968 - protein, 9 aa, Homo sapiens
AAGPALSPV

SEQ ID NO: 111969 - protein, 9 aa, Homo sapiens
EMSSQLHLT

SEQ ID NO: 111970 - protein, 9 aa, Homo sapiens
TGYDNREIV

SEQ ID NO: 111971 - protein, 9 aa, Homo sapiens
HLTPFTARG

SEQ ID NO: 111972 - protein, 9 aa, Homo sapiens
ELYGPSMRP

SEQ ID NO: 111973 - protein, 9 aa, Homo sapiens
GGWDAFVEL

SEQ ID NO: 111974 - protein, 9 aa, Homo sapiens
IALWMTEYL

SEQ ID NO: 111975 - protein, 9 aa, Homo sapiens
ALWMTEYLN

SEQ ID NO: 111976 - protein, 9 aa, Homo sapiens
AAPPGAAPA

SEQ ID NO: 111977 - protein, 9 aa, Homo sapiens
ALSPVPPVV

SEQ ID NO: 111978 - protein, 9 aa, Homo sapiens
ALVGACITL

SEQ ID NO: 111979 - protein, 9 aa, Homo sapiens
YLNRHLHTW

SEQ ID NO: 111980 - protein, 9 aa, Homo sapiens
FEFGGVMCV

SEQ ID NO: 111981 - protein, 9 aa, Homo sapiens
PLFDFSWLS

SEQ ID NO: 111982 - protein, 9 aa, Homo sapiens
VMKYIHYKL

SEQ ID NO: 111983 - protein, 9 aa, Homo sapiens
LLSLALVGA

SEQ ID NO: 111984 - protein, 9 aa, Homo sapiens
SLALVGACI

SEQ ID NO: 111985 - protein, 9 aa, Homo sapiens
EMSPLVDNI

SEQ ID NO: 111986 - protein, 9 aa, Homo sapiens
QLHLTPFTA

SEQ ID NO: 111987 - protein, 9 aa, Homo sapiens
FTARGRFAT

SEQ ID NO: 111988 - protein, 9 aa, Homo sapiens
ALSPVPPVV

SEQ ID NO: 111989 - protein, 9 aa, Homo sapiens
ALVGACITL

SEQ ID NO: 111990 - protein, 9 aa, Homo sapiens
AAGPALSPV

SEQ ID NO: 111991 - protein, 9 aa, Homo sapiens
FEFGGVMCV

SEQ ID NO: 111992 - protein, 9 aa, Homo sapiens
SLALVGACI

SEQ ID NO: 111993 - protein, 9 aa, Homo sapiens
VMKYIHYKL

SEQ ID NO: 111994 - protein, 9 aa, Homo sapiens
PLFDFSWLS

SEQ ID NO: 111995 - protein, 9 aa, Homo sapiens
QLHLTPFTA

SEQ ID NO: 111996 - protein, 9 aa, Homo sapiens
SLKTLLSLA

SEQ ID NO: 111997 - protein, 9 aa, Homo sapiens
YLNRHLHTW

SEQ ID NO: 111998 - protein, 9 aa, Homo sapiens
TARGRFATV

SEQ ID NO: 111999 - protein, 9 aa, Homo sapiens
ALSPVPPVV

SEQ ID NO: 112000 - protein, 9 aa, Homo sapiens
FEFGGVMCV

SEQ ID NO: 112001 - protein, 9 aa, Homo sapiens
ALVGACITL

SEQ ID NO: 112002 - protein, 9 aa, Homo sapiens
AAGPALSPV

SEQ ID NO: 112003 - protein, 9 aa, Homo sapiens
LLSLALVGA

SEQ ID NO: 112004 - protein, 9 aa, Homo sapiens
PALSPVPPV

SEQ ID NO: 112005 - protein, 9 aa, Homo sapiens
EMSPLVDNI

SEQ ID NO: 112006 - protein, 9 aa, Homo sapiens
EMSSQLHLT

SEQ ID NO: 112007 - protein, 9 aa, Homo sapiens
YLNRHLHTW

SEQ ID NO: 112008 - protein, 9 aa, Homo sapiens
IVMKYIHYK

SEQ ID NO: 112009 - protein, 9 aa, Homo sapiens
TLGAYLGHK

SEQ ID NO: 112010 - protein, 9 aa, Homo sapiens
FDFSWLSLK

SEQ ID NO: 112011 - protein, 9 aa, Homo sapiens
IVMKYIHYK

SEQ ID NO: 112012 - protein, 9 aa, Homo sapiens
TLGAYLGHK

SEQ ID NO: 112013 - protein, 9 aa, Homo sapiens
ATVVEELFR

SEQ ID NO: 112014 - protein, 9 aa, Homo sapiens
NWGRIVAFF

SEQ ID NO: 112015 - protein, 9 aa, Homo sapiens
PSMRPLFDF

SEQ ID NO: 112016 - protein, 9 aa, Homo sapiens
GRIVAFFEF

SEQ ID NO: 112017 - protein, 9 aa, Homo sapiens
IVMKYIHYK

SEQ ID NO: 112018 - protein, 9 aa, Homo sapiens
RYRRDFAEM

SEQ ID NO: 112019 - protein, 9 aa, Homo sapiens
RFATVVEEL

SEQ ID NO: 112020 - protein, 9 aa, Homo sapiens
NWGRIVAFF

SEQ ID NO: 112021 - protein, 9 aa, Homo sapiens
RFATVVEEL

SEQ ID NO: 112022 - protein, 9 aa, Homo sapiens
SWLSLKTLL

SEQ ID NO: 112023 - protein, 9 aa, Homo sapiens
RYRRDFAEM

SEQ ID NO: 112024 - protein, 9 aa, Homo sapiens
RFATVVEEL

SEQ ID NO: 112025 - protein, 9 aa, Homo sapiens
LYGPSMRPL

SEQ ID NO: 112026 - protein, 9 aa, Homo sapiens
EIVMKYIHY

SEQ ID NO: 112027 - protein, 9 aa, Homo sapiens
NIALWMTEY

SEQ ID NO: 112028 - protein, 9 aa, Homo sapiens
EIVMKYIHY

SEQ ID NO: 112029 - protein, 9 aa, Homo sapiens
NIALWMTEY

SEQ ID NO: 112030 - protein, 9 aa, Homo sapiens
SVNREMSPL

SEQ ID NO: 112031 - protein, 9 aa, Homo sapiens
YLNRHLHTW

SEQ ID NO: 112032 - protein, 9 aa, Homo sapiens
FVELYGPSM

SEQ ID NO: 112033 - protein, 9 aa, Homo sapiens
LVDNIALWM

SEQ ID NO: 112034 - protein, 9 aa, Homo sapiens
NIALWMTEY

SEQ ID NO: 112035 - protein, 9 aa, Homo sapiens
EIVMKYIHY

SEQ ID NO: 112036 - protein, 9 aa, Homo sapiens
IVMKYIHYK

SEQ ID NO: 112037 - protein, 9 aa, Homo sapiens
MAHAGRTGY

SEQ ID NO: 112038 - protein, 9 aa, Homo sapiens
TLGAYLGHK

SEQ ID NO: 112039 - protein, 9 aa, Homo sapiens
NIALWMTEY

SEQ ID NO: 112040 - protein, 9 aa, Homo sapiens
IVMKYIHYK

SEQ ID NO: 112041 - protein, 9 aa, Homo sapiens
YIHYKLSQR

SEQ ID NO: 112042 - protein, 9 aa, Homo sapiens
VMCVESVNR

SEQ ID NO: 112043 - protein, 9 aa, Homo sapiens
RQAGDDFSR

SEQ ID NO: 112044 - protein, 9 aa, Homo sapiens
VMKYIHYKL

SEQ ID NO: 112045 - protein, 9 aa, Homo sapiens
ATVVEELFR

SEQ ID NO: 112046 - protein, 9 aa, Homo sapiens
DDFSRRYRR

SEQ ID NO: 112047 - protein, 9 aa, Homo sapiens
YIHYKLSQR

SEQ ID NO: 112048 - protein, 9 aa, Homo sapiens
HTPHPAASR

SEQ ID NO: 112049 - protein, 9 aa, Homo sapiens
IVMKYIHYK

SEQ ID NO: 112050 - protein, 9 aa, Homo sapiens
IVMKYIHYK

SEQ ID NO: 112051 - protein, 9 aa, Homo sapiens
YIHYKLSQR

SEQ ID NO: 112052 - protein, 9 aa, Homo sapiens
HTPHPAASR

SEQ ID NO: 112053 - protein, 9 aa, Homo sapiens
LTPFTARGR

SEQ ID NO: 112054 - protein, 9 aa, Homo sapiens
ATVVEELFR

SEQ ID NO: 112055 - protein, 9 aa, Homo sapiens
DDFSRRYRR

SEQ ID NO: 112056 - protein, 9 aa, Homo sapiens
FDFSWLSLK

SEQ ID NO: 112057 - protein, 9 aa, Homo sapiens
QAGDDFSRR

SEQ ID NO: 112058 - protein, 9 aa, Homo sapiens
NIALWMTEY

SEQ ID NO: 112059 - protein, 9 aa, Homo sapiens
TLGAYLGHK

SEQ ID NO: 112060 - protein, 9 aa, Homo sapiens
MAHAGRTGY

SEQ ID NO: 112061 - protein, 9 aa, Homo sapiens
FTARGRFAT

SEQ ID NO: 112062 - protein, 9 aa, Homo sapiens
VAFFEFGGV

SEQ ID NO: 112063 - protein, 9 aa, Homo sapiens
HPAASRDPV

SEQ ID NO: 112064 - protein, 9 aa, Homo sapiens
QTPAAPGAA

SEQ ID NO: 112065 - protein, 9 aa, Homo sapiens
SVNREMSPL

SEQ ID NO: 112066 - protein, 9 aa, Homo sapiens
TARGRFATV

SEQ ID NO: 112067 - protein, 9 aa, Homo sapiens
TGYDNREIV

SEQ ID NO: 112068 - protein, 9 aa, Homo sapiens
EMSPLVDNI

SEQ ID NO: 112069 - protein, 9 aa, Homo sapiens
RTSPLQTPA

SEQ ID NO: 112070 - protein, 9 aa, Homo sapiens
VGACITLGA

SEQ ID NO: 112071 - protein, 9 aa, Homo sapiens
MSPLVDNIA

SEQ ID NO: 112072 - protein, 9 aa, Homo sapiens
FEFGGVMCV

SEQ ID NO: 112073 - protein, 9 aa, Homo sapiens
PALSPVPPV

SEQ ID NO: 112074 - protein, 9 aa, Homo sapiens
DVGAAPPGA

SEQ ID NO: 112075 - protein, 9 aa, Homo sapiens
HPAASRDPV

SEQ ID NO: 112076 - protein, 9 aa, Homo sapiens
EMSPLVDNI

SEQ ID NO: 112077 - protein, 9 aa, Homo sapiens
FTARGRFAT

SEQ ID NO: 112078 - protein, 9 aa, Homo sapiens
KTLLSLALV

SEQ ID NO: 112079 - protein, 9 aa, Homo sapiens
TPAAPGAAA

SEQ ID NO: 112080 - protein, 9 aa, Homo sapiens
IALWMTEYL

SEQ ID NO: 112081 - protein, 9 aa, Homo sapiens
HPAASRDPV

SEQ ID NO: 112082 - protein, 9 aa, Homo sapiens
DPVARTSPL

SEQ ID NO: 112083 - protein, 9 aa, Homo sapiens
SPLVDNIAL

SEQ ID NO: 112084 - protein, 9 aa, Homo sapiens
TPAAPGAAA

SEQ ID NO: 112085 - protein, 9 aa, Homo sapiens
RPLFDFSWL

SEQ ID NO: 112086 - protein, 9 aa, Homo sapiens
SPVPPVVHL

SEQ ID NO: 112087 - protein, 9 aa, Homo sapiens
APGAAAGPA

SEQ ID NO: 112088 - protein, 9 aa, Homo sapiens
VPPVVHLTL

SEQ ID NO: 112089 - protein, 9 aa, Homo sapiens
TPFTARGRF

SEQ ID NO: 112090 - protein, 9 aa, Homo sapiens
TARGRFATV

SEQ ID NO: 112091 - protein, 9 aa, Homo sapiens
MAHAGRTGY

SEQ ID NO: 112092 - protein, 9 aa, Homo sapiens
SSQLHLTPF

SEQ ID NO: 112093 - protein, 9 aa, Homo sapiens
FEFGGVMCV

SEQ ID NO: 112094 - protein, 9 aa, Homo sapiens
DNREIVMKY

SEQ ID NO: 112095 - protein, 9 aa, Homo sapiens
IALWMTEYL

SEQ ID NO: 112096 - protein, 9 aa, Homo sapiens
GRIVAFFEF

SEQ ID NO: 112097 - protein, 9 aa, Homo sapiens
RRYRRDFAE

SEQ ID NO: 112098 - protein, 9 aa, Homo sapiens
SPLVDNIAL

SEQ ID NO: 112099 - protein, 9 aa, Homo sapiens
MAHAGRTGY

SEQ ID NO: 112100 - protein, 9 aa, Homo sapiens
FVELYGPSM

SEQ ID NO: 112101 - protein, 9 aa, Homo sapiens
TPFTARGRF

SEQ ID NO: 112102 - protein, 9 aa, Homo sapiens
IALWMTEYL

SEQ ID NO: 112103 - protein, 9 aa, Homo sapiens
DPVARTSPL

SEQ ID NO: 112104 - protein, 9 aa, Homo sapiens
FATVVEELF

SEQ ID NO: 112105 - protein, 9 aa, Homo sapiens
TPAAPGAAA

SEQ ID NO: 112106 - protein, 9 aa, Homo sapiens
NIALWMTEY

SEQ ID NO: 112107 - protein, 9 aa, Homo sapiens
FAEMSSQLH

SEQ ID NO: 112108 - protein, 9 aa, Homo sapiens
AEMSSQLHL

SEQ ID NO: 112109 - protein, 9 aa, Homo sapiens
FEFGGVMCV

SEQ ID NO: 112110 - protein, 9 aa, Homo sapiens
AEMSSQLHL

SEQ ID NO: 112111 - protein, 9 aa, Homo sapiens
FEFGGVMCV

SEQ ID NO: 112112 - protein, 9 aa, Homo sapiens
AEMSSQLHL

SEQ ID NO: 112113 - protein, 9 aa, Homo sapiens
AEMSSQLHL

SEQ ID NO: 112114 - protein, 9 aa, Homo sapiens
AEMSSQLHL

SEQ ID NO: 112115 - protein, 9 aa, Homo sapiens
VPPVVHLTL

SEQ ID NO: 112116 - protein, 9 aa, Homo sapiens
RPLFDFSWL

SEQ ID NO: 112117 - protein, 9 aa, Homo sapiens
SPLVDNIAL

SEQ ID NO: 112118 - protein, 9 aa, Homo sapiens
IALWMTEYL

SEQ ID NO: 112119 - protein, 9 aa, Homo sapiens
TPAAPGAAA

SEQ ID NO: 112120 - protein, 9 aa, Homo sapiens
HPAASRDPV

SEQ ID NO: 112121 - protein, 9 aa, Homo sapiens
APGAAAGPA

SEQ ID NO: 112122 - protein, 9 aa, Homo sapiens
QPGHTPHPA

SEQ ID NO: 112123 - protein, 9 aa, Homo sapiens
YLNRHLHTW

SEQ ID NO: 112124 - protein, 9 aa, Homo sapiens
KLSQRGYEW

SEQ ID NO: 112125 - protein, 9 aa, Homo sapiens
FATVVEELF

SEQ ID NO: 112126 - protein, 9 aa, Homo sapiens
GAAPAPGIF

SEQ ID NO: 112127 - protein, 10 aa, Homo sapiens
YLNRHLHTWI

SEQ ID NO: 112128 - protein, 10 aa, Homo sapiens
IVMKYIHYKL

SEQ ID NO: 112129 - protein, 10 aa, Homo sapiens
TLLSLALVGA

SEQ ID NO: 112130 - protein, 10 aa, Homo sapiens
PLFDFSWLSL

SEQ ID NO: 112131 - protein, 10 aa, Homo sapiens
WLSLKTLLSL

SEQ ID NO: 112132 - protein, 10 aa, Homo sapiens
FTARGRFATV

SEQ ID NO: 112133 - protein, 10 aa, Homo sapiens
NIALWMTEYL

SEQ ID NO: 112134 - protein, 10 aa, Homo sapiens
WMTEYLNRHL

SEQ ID NO: 112135 - protein, 10 aa, Homo sapiens
TLLSLALVGA

SEQ ID NO: 112136 - protein, 10 aa, Homo sapiens
NIALWMTEYL

SEQ ID NO: 112137 - protein, 10 aa, Homo sapiens
WLSLKTLLSL

SEQ ID NO: 112138 - protein, 10 aa, Homo sapiens
SLKTLLSLAL

SEQ ID NO: 112139 - protein, 10 aa, Homo sapiens
WMTEYLNRHL

SEQ ID NO: 112140 - protein, 10 aa, Homo sapiens
PLFDFSWLSL

SEQ ID NO: 112141 - protein, 10 aa, Homo sapiens
AAAGPALSPV

SEQ ID NO: 112142 - protein, 10 aa, Homo sapiens
IVMKYIHYKL

SEQ ID NO: 112143 - protein, 10 aa, Homo sapiens
FTARGRFATV

SEQ ID NO: 112144 - protein, 10 aa, Homo sapiens
ELYGPSMRPL

SEQ ID NO: 112145 - protein, 10 aa, Homo sapiens
YLNRHLHTWI

SEQ ID NO: 112146 - protein, 10 aa, Homo sapiens
LVGACITLGA

SEQ ID NO: 112147 - protein, 10 aa, Homo sapiens
IVAFFEFGGV

SEQ ID NO: 112148 - protein, 10 aa, Homo sapiens
YLNRHLHTWI

SEQ ID NO: 112149 - protein, 10 aa, Homo sapiens
FTARGRFATV

SEQ ID NO: 112150 - protein, 10 aa, Homo sapiens
WLSLKTLLSL

SEQ ID NO: 112151 - protein, 10 aa, Homo sapiens
SLKTLLSLAL

SEQ ID NO: 112152 - protein, 10 aa, Homo sapiens
NIALWMTEYL

SEQ ID NO: 112153 - protein, 10 aa, Homo sapiens
SVNREMSPLV

SEQ ID NO: 112154 - protein, 10 aa, Homo sapiens
IVAFFEFGGV

SEQ ID NO: 112155 - protein, 10 aa, Homo sapiens
AAAGPALSPV

SEQ ID NO: 112156 - protein, 10 aa, Homo sapiens
WMTEYLNRHL

SEQ ID NO: 112157 - protein, 10 aa, Homo sapiens
TLLSLALVGA

SEQ ID NO: 112158 - protein, 10 aa, Homo sapiens
IVMKYIHYKL

SEQ ID NO: 112159 - protein, 10 aa, Homo sapiens
LVGACITLGA

SEQ ID NO: 112160 - protein, 10 aa, Homo sapiens
ELYGPSMRPL

SEQ ID NO: 112161 - protein, 10 aa, Homo sapiens
SQPGHTPHPA

SEQ ID NO: 112162 - protein, 10 aa, Homo sapiens
LLSLALVGAC

SEQ ID NO: 112163 - protein, 10 aa, Homo sapiens
TARGRFATVV

SEQ ID NO: 112164 - protein, 10 aa, Homo sapiens
YLNRHLHTWI

SEQ ID NO: 112165 - protein, 10 aa, Homo sapiens
FTARGRFATV

SEQ ID NO: 112166 - protein, 10 aa, Homo sapiens
IVMKYIHYKL

SEQ ID NO: 112167 - protein, 10 aa, Homo sapiens
AAAGPALSPV

SEQ ID NO: 112168 - protein, 10 aa, Homo sapiens
SVNREMSPLV

SEQ ID NO: 112169 - protein, 10 aa, Homo sapiens
FTARGRFATV

SEQ ID NO: 112170 - protein, 10 aa, Homo sapiens
SQLHLTPFTA

SEQ ID NO: 112171 - protein, 10 aa, Homo sapiens
IQDNGGWDAF

SEQ ID NO: 112172 - protein, 10 aa, Homo sapiens
WLSLKTLLSL

SEQ ID NO: 112173 - protein, 10 aa, Homo sapiens
SQPGHTPHPA

SEQ ID NO: 112174 - protein, 10 aa, Homo sapiens
YLNRHLHTWI

SEQ ID NO: 112175 - protein, 10 aa, Homo sapiens
AAAGPALSPV

SEQ ID NO: 112176 - protein, 10 aa, Homo sapiens
WMTEYLNRHL

SEQ ID NO: 112177 - protein, 10 aa, Homo sapiens
SVNREMSPLV

SEQ ID NO: 112178 - protein, 10 aa, Homo sapiens
NIALWMTEYL

SEQ ID NO: 112179 - protein, 10 aa, Homo sapiens
TLLSLALVGA

SEQ ID NO: 112180 - protein, 10 aa, Homo sapiens
IVAFFEFGGV

SEQ ID NO: 112181 - protein, 10 aa, Homo sapiens
LQTPAAPGAA

SEQ ID NO: 112182 - protein, 10 aa, Homo sapiens
IVMKYIHYKL

SEQ ID NO: 112183 - protein, 10 aa, Homo sapiens
YEWDAGDVGA

SEQ ID NO: 112184 - protein, 10 aa, Homo sapiens
PLFDFSWLSL

SEQ ID NO: 112185 - protein, 10 aa, Homo sapiens
RTSPLQTPAA

SEQ ID NO: 112186 - protein, 10 aa, Homo sapiens
LVGACITLGA

SEQ ID NO: 112187 - protein, 10 aa, Homo sapiens
PLFDFSWLSL

SEQ ID NO: 112188 - protein, 10 aa, Homo sapiens
YLNRHLHTWI

SEQ ID NO: 112189 - protein, 10 aa, Homo sapiens
ELYGPSMRPL

SEQ ID NO: 112190 - protein, 10 aa, Homo sapiens
WLSLKTLLSL

SEQ ID NO: 112191 - protein, 10 aa, Homo sapiens
TLLSLALVGA

SEQ ID NO: 112192 - protein, 10 aa, Homo sapiens
FTARGRFATV

SEQ ID NO: 112193 - protein, 10 aa, Homo sapiens
PLVDNIALWM

SEQ ID NO: 112194 - protein, 10 aa, Homo sapiens
SLKTLLSLAL

SEQ ID NO: 112195 - protein, 10 aa, Homo sapiens
WMTEYLNRHL

SEQ ID NO: 112196 - protein, 10 aa, Homo sapiens
SVNREMSPLV

SEQ ID NO: 112197 - protein, 10 aa, Homo sapiens
PVPPVVHLTL

SEQ ID NO: 112198 - protein, 10 aa, Homo sapiens
AAAGPALSPV

SEQ ID NO: 112199 - protein, 10 aa, Homo sapiens
IVMKYIHYKL

SEQ ID NO: 112200 - protein, 10 aa, Homo sapiens
IVAFFEFGGV

SEQ ID NO: 112201 - protein, 10 aa, Homo sapiens
VVEELFRDGV

SEQ ID NO: 112202 - protein, 10 aa, Homo sapiens
NIALWMTEYL

SEQ ID NO: 112203 - protein, 10 aa, Homo sapiens
EMSPLVDNIA

SEQ ID NO: 112204 - protein, 10 aa, Homo sapiens
LVDNIALWMT

SEQ ID NO: 112205 - protein, 10 aa, Homo sapiens
FFEFGGVMCV

SEQ ID NO: 112206 - protein, 10 aa, Homo sapiens
SLALVGACIT

SEQ ID NO: 112207 - protein, 10 aa, Homo sapiens
WIQDNGGWDA

SEQ ID NO: 112208 - protein, 10 aa, Homo sapiens
YLNRHLHTWI

SEQ ID NO: 112209 - protein, 10 aa, Homo sapiens
PLFDFSWLSL

SEQ ID NO: 112210 - protein, 10 aa, Homo sapiens
FTARGRFATV

SEQ ID NO: 112211 - protein, 10 aa, Homo sapiens
SLKTLLSLAL

SEQ ID NO: 112212 - protein, 10 aa, Homo sapiens
ELYGPSMRPL

SEQ ID NO: 112213 - protein, 10 aa, Homo sapiens
WMTEYLNRHL

SEQ ID NO: 112214 - protein, 10 aa, Homo sapiens
WLSLKTLLSL

SEQ ID NO: 112215 - protein, 10 aa, Homo sapiens
TLLSLALVGA

SEQ ID NO: 112216 - protein, 10 aa, Homo sapiens
VVEELFRDGV

SEQ ID NO: 112217 - protein, 10 aa, Homo sapiens
PLVDNIALWM

SEQ ID NO: 112218 - protein, 10 aa, Homo sapiens
IVMKYIHYKL

SEQ ID NO: 112219 - protein, 10 aa, Homo sapiens
SVNREMSPLV

SEQ ID NO: 112220 - protein, 10 aa, Homo sapiens
WIQDNGGWDA

SEQ ID NO: 112221 - protein, 10 aa, Homo sapiens
IVAFFEFGGV

SEQ ID NO: 112222 - protein, 10 aa, Homo sapiens
PVPPVVHLTL

SEQ ID NO: 112223 - protein, 10 aa, Homo sapiens
YEWDAGDVGA

SEQ ID NO: 112224 - protein, 10 aa, Homo sapiens
YLNRHLHTWI

SEQ ID NO: 112225 - protein, 10 aa, Homo sapiens
PLFDFSWLSL

SEQ ID NO: 112226 - protein, 10 aa, Homo sapiens
FTARGRFATV

SEQ ID NO: 112227 - protein, 10 aa, Homo sapiens
ELYGPSMRPL

SEQ ID NO: 112228 - protein, 10 aa, Homo sapiens
WLSLKTLLSL

SEQ ID NO: 112229 - protein, 10 aa, Homo sapiens
PLVDNIALWM

SEQ ID NO: 112230 - protein, 10 aa, Homo sapiens
SVNREMSPLV

SEQ ID NO: 112231 - protein, 10 aa, Homo sapiens
IVMKYIHYKL

SEQ ID NO: 112232 - protein, 10 aa, Homo sapiens
WMTEYLNRHL

SEQ ID NO: 112233 - protein, 10 aa, Homo sapiens
AAAGPALSPV

SEQ ID NO: 112234 - protein, 10 aa, Homo sapiens
PVPPVVHLTL

SEQ ID NO: 112235 - protein, 10 aa, Homo sapiens
SLKTLLSLAL

SEQ ID NO: 112236 - protein, 10 aa, Homo sapiens
TLLSLALVGA

SEQ ID NO: 112237 - protein, 10 aa, Homo sapiens
NIALWMTEYL

SEQ ID NO: 112238 - protein, 10 aa, Homo sapiens
SLALVGACIT

SEQ ID NO: 112239 - protein, 10 aa, Homo sapiens
IVAFFEFGGV

SEQ ID NO: 112240 - protein, 10 aa, Homo sapiens
PLFDFSWLSL

SEQ ID NO: 112241 - protein, 10 aa, Homo sapiens
YLNRHLHTWI

SEQ ID NO: 112242 - protein, 10 aa, Homo sapiens
WLSLKTLLSL

SEQ ID NO: 112243 - protein, 10 aa, Homo sapiens
FTARGRFATV

SEQ ID NO: 112244 - protein, 10 aa, Homo sapiens
ELYGPSMRPL

SEQ ID NO: 112245 - protein, 10 aa, Homo sapiens
PLVDNIALWM

SEQ ID NO: 112246 - protein, 10 aa, Homo sapiens
AAAGPALSPV

SEQ ID NO: 112247 - protein, 10 aa, Homo sapiens
TLLSLALVGA

SEQ ID NO: 112248 - protein, 10 aa, Homo sapiens
WMTEYLNRHL

SEQ ID NO: 112249 - protein, 10 aa, Homo sapiens
PALSPVPPVV

SEQ ID NO: 112250 - protein, 10 aa, Homo sapiens
IVMKYIHYKL

SEQ ID NO: 112251 - protein, 10 aa, Homo sapiens
NIALWMTEYL

SEQ ID NO: 112252 - protein, 10 aa, Homo sapiens
ITLGAYLGHK

SEQ ID NO: 112253 - protein, 10 aa, Homo sapiens
LFDFSWLSLK

SEQ ID NO: 112254 - protein, 10 aa, Homo sapiens
EIVMKYIHYK

SEQ ID NO: 112255 - protein, 10 aa, Homo sapiens
GVMCVESVNR

SEQ ID NO: 112256 - protein, 10 aa, Homo sapiens
ALWMTEYLNR

SEQ ID NO: 112257 - protein, 10 aa, Homo sapiens
ITLGAYLGHK

SEQ ID NO: 112258 - protein, 10 aa, Homo sapiens
GVMCVESVNR

SEQ ID NO: 112259 - protein, 10 aa, Homo sapiens
EIVMKYIHYK

SEQ ID NO: 112260 - protein, 10 aa, Homo sapiens
ALWMTEYLNR

SEQ ID NO: 112261 - protein, 10 aa, Homo sapiens
LFDFSWLSLK

SEQ ID NO: 112262 - protein, 10 aa, Homo sapiens
EYLNRHLHTW

SEQ ID NO: 112263 - protein, 10 aa, Homo sapiens
LYGPSMRPLF

SEQ ID NO: 112264 - protein, 10 aa, Homo sapiens
RFATVVEELF

SEQ ID NO: 112265 - protein, 10 aa, Homo sapiens
GYDNREIVMK

SEQ ID NO: 112266 - protein, 10 aa, Homo sapiens
DFSRRYRRDF

SEQ ID NO: 112267 - protein, 10 aa, Homo sapiens
IVMKYIHYKL

SEQ ID NO: 112268 - protein, 10 aa, Homo sapiens
LTLRQAGDDF

SEQ ID NO: 112269 - protein, 10 aa, Homo sapiens
RFATVVEELF

SEQ ID NO: 112270 - protein, 10 aa, Homo sapiens
LYGPSMRPLF

SEQ ID NO: 112271 - protein, 10 aa, Homo sapiens
EYLNRHLHTW

SEQ ID NO: 112272 - protein, 10 aa, Homo sapiens
EYLNRHLHTW

SEQ ID NO: 112273 - protein, 10 aa, Homo sapiens
RFATVVEELF

SEQ ID NO: 112274 - protein, 10 aa, Homo sapiens
LYGPSMRPLF

SEQ ID NO: 112275 - protein, 10 aa, Homo sapiens
DNIALWMTEY

SEQ ID NO: 112276 - protein, 10 aa, Homo sapiens
ESVNREMSPL

SEQ ID NO: 112277 - protein, 10 aa, Homo sapiens
ELYGPSMRPL

SEQ ID NO: 112278 - protein, 10 aa, Homo sapiens
NIALWMTEYL

SEQ ID NO: 112279 - protein, 10 aa, Homo sapiens
DNIALWMTEY

SEQ ID NO: 112280 - protein, 10 aa, Homo sapiens
ITLGAYLGHK

SEQ ID NO: 112281 - protein, 10 aa, Homo sapiens
KYIHYKLSQR

SEQ ID NO: 112282 - protein, 10 aa, Homo sapiens
LFRDGVNWGR

SEQ ID NO: 112283 - protein, 10 aa, Homo sapiens
GVMCVESVNR

SEQ ID NO: 112284 - protein, 10 aa, Homo sapiens
HLTPFTARGR

SEQ ID NO: 112285 - protein, 10 aa, Homo sapiens
ALWMTEYLNR

SEQ ID NO: 112286 - protein, 10 aa, Homo sapiens
AGDDFSRRYR

SEQ ID NO: 112287 - protein, 10 aa, Homo sapiens
FATVVEELFR

SEQ ID NO: 112288 - protein, 10 aa, Homo sapiens
QLHLTPFTAR

SEQ ID NO: 112289 - protein, 10 aa, Homo sapiens
LFRDGVNWGR

SEQ ID NO: 112290 - protein, 10 aa, Homo sapiens
KYIHYKLSQR

SEQ ID NO: 112291 - protein, 10 aa, Homo sapiens
FATVVEELFR

SEQ ID NO: 112292 - protein, 10 aa, Homo sapiens
ALWMTEYLNR

SEQ ID NO: 112293 - protein, 10 aa, Homo sapiens
FATVVEELFR

SEQ ID NO: 112294 - protein, 10 aa, Homo sapiens
EIVMKYIHYK

SEQ ID NO: 112295 - protein, 10 aa, Homo sapiens
HLTPFTARGR

SEQ ID NO: 112296 - protein, 10 aa, Homo sapiens
FVELYGPSMR

SEQ ID NO: 112297 - protein, 10 aa, Homo sapiens
GVMCVESVNR

SEQ ID NO: 112298 - protein, 10 aa, Homo sapiens
ITLGAYLGHK

SEQ ID NO: 112299 - protein, 10 aa, Homo sapiens
MTEYLNRHLH

SEQ ID NO: 112300 - protein, 10 aa, Homo sapiens
QLHLTPFTAR

SEQ ID NO: 112301 - protein, 10 aa, Homo sapiens
HAGRTGYDNR

SEQ ID NO: 112302 - protein, 10 aa, Homo sapiens
FTARGRFATV

SEQ ID NO: 112303 - protein, 10 aa, Homo sapiens
IVAFFEFGGV

SEQ ID NO: 112304 - protein, 10 aa, Homo sapiens
NIALWMTEYL

SEQ ID NO: 112305 - protein, 10 aa, Homo sapiens
IVMKYIHYKL

SEQ ID NO: 112306 - protein, 10 aa, Homo sapiens
AAAGPALSPV

SEQ ID NO: 112307 - protein, 10 aa, Homo sapiens
QTPAAPGAAA

SEQ ID NO: 112308 - protein, 10 aa, Homo sapiens
MSPLVDNIAL

SEQ ID NO: 112309 - protein, 10 aa, Homo sapiens
ELYGPSMRPL

SEQ ID NO: 112310 - protein, 10 aa, Homo sapiens
ESVNREMSPL

SEQ ID NO: 112311 - protein, 10 aa, Homo sapiens
MRPLFDFSWL

SEQ ID NO: 112312 - protein, 10 aa, Homo sapiens
SVNREMSPLV

SEQ ID NO: 112313 - protein, 10 aa, Homo sapiens
TARGRFATVV

SEQ ID NO: 112314 - protein, 10 aa, Homo sapiens
FTARGRFATV

SEQ ID NO: 112315 - protein, 10 aa, Homo sapiens
ELYGPSMRPL

SEQ ID NO: 112316 - protein, 10 aa, Homo sapiens
PALSPVPPVV

SEQ ID NO: 112317 - protein, 10 aa, Homo sapiens
NIALWMTEYL

SEQ ID NO: 112318 - protein, 10 aa, Homo sapiens
SVNREMSPLV

SEQ ID NO: 112319 - protein, 10 aa, Homo sapiens
AAAGPALSPV

SEQ ID NO: 112320 - protein, 10 aa, Homo sapiens
DVGAAPPGAA

SEQ ID NO: 112321 - protein, 10 aa, Homo sapiens
IVAFFEFGGV

SEQ ID NO: 112322 - protein, 10 aa, Homo sapiens
IVMKYIHYKL

SEQ ID NO: 112323 - protein, 10 aa, Homo sapiens
APGAAAGPAL

SEQ ID NO: 112324 - protein, 10 aa, Homo sapiens
GPALSPVPPV

SEQ ID NO: 112325 - protein, 10 aa, Homo sapiens
HPAASRDPVA

SEQ ID NO: 112326 - protein, 10 aa, Homo sapiens
GPSMRPLFDF

SEQ ID NO: 112327 - protein, 10 aa, Homo sapiens
TARGRFATVV

SEQ ID NO: 112328 - protein, 10 aa, Homo sapiens
APAPGIFSSQ

SEQ ID NO: 112329 - protein, 10 aa, Homo sapiens
GVNWGRIVAF

SEQ ID NO: 112330 - protein, 10 aa, Homo sapiens
MSSQLHLTPF

SEQ ID NO: 112331 - protein, 10 aa, Homo sapiens
IQDNGGWDAF

SEQ ID NO: 112332 - protein, 10 aa, Homo sapiens
REIVMKYIHY

SEQ ID NO: 112333 - protein, 10 aa, Homo sapiens
RRYRRDFAEM

SEQ ID NO: 112334 - protein, 10 aa, Homo sapiens
GRFATVVEEL

SEQ ID NO: 112335 - protein, 10 aa, Homo sapiens
MSSQLHLTPF

SEQ ID NO: 112336 - protein, 10 aa, Homo sapiens
VAFFEFGGVM

SEQ ID NO: 112337 - protein, 10 aa, Homo sapiens
APGAAAGPAL

SEQ ID NO: 112338 - protein, 10 aa, Homo sapiens
LALVGACITL

SEQ ID NO: 112339 - protein, 10 aa, Homo sapiens
MCVESVNREM

SEQ ID NO: 112340 - protein, 10 aa, Homo sapiens
QAGDDFSRRY

SEQ ID NO: 112341 - protein, 10 aa, Homo sapiens
TPAAPGAAAG

SEQ ID NO: 112342 - protein, 10 aa, Homo sapiens
GVNWGRIVAF

SEQ ID NO: 112343 - protein, 10 aa, Homo sapiens
SPLVDNIALW

SEQ ID NO: 112344 - protein, 10 aa, Homo sapiens
REIVMKYIHY

SEQ ID NO: 112345 - protein, 10 aa, Homo sapiens
AEMSSQLHLT

SEQ ID NO: 112346 - protein, 10 aa, Homo sapiens
REIVMKYIHY

SEQ ID NO: 112347 - protein, 10 aa, Homo sapiens
REIVMKYIHY

SEQ ID NO: 112348 - protein, 10 aa, Homo sapiens
EELFRDGVNW

SEQ ID NO: 112349 - protein, 10 aa, Homo sapiens
AEMSSQLHLT

SEQ ID NO: 112350 - protein, 10 aa, Homo sapiens
REIVMKYIHY

SEQ ID NO: 112351 - protein, 10 aa, Homo sapiens
EELFRDGVNW

SEQ ID NO: 112352 - protein, 10 aa, Homo sapiens
LALVGACITL

SEQ ID NO: 112353 - protein, 10 aa, Homo sapiens
PPGAAPAPGI

SEQ ID NO: 112354 - protein, 10 aa, Homo sapiens
SPLVDNIALW

SEQ ID NO: 112355 - protein, 10 aa, Homo sapiens
HPAASRDPVA

SEQ ID NO: 112356 - protein, 10 aa, Homo sapiens
TPFTARGRFA

SEQ ID NO: 112357 - protein, 10 aa, Homo sapiens
QPGHTPHPAA

SEQ ID NO: 112358 - protein, 10 aa, Homo sapiens
GPALSPVPPV

SEQ ID NO: 112359 - protein, 10 aa, Homo sapiens
SPVPPVVHLT

SEQ ID NO: 112360 - protein, 10 aa, Homo sapiens
HTWIQDNGGW

SEQ ID NO: 112361 - protein, 10 aa, Homo sapiens
MSSQLHLTPF

SEQ ID NO: 112362 - protein, 10 aa, Homo sapiens
HTWIQDNGGW

SEQ ID NO: 112363 - protein, 10 aa, Homo sapiens
SMRPLFDFSW

SEQ ID NO: 112364 - protein, 11 aa, Homo sapiens
ALVGACITLGA

SEQ ID NO: 112365 - protein, 11 aa, Homo sapiens
ALSPVPPVVHL

SEQ ID NO: 112366 - protein, 11 aa, Homo sapiens
SLKTLLSLALV

SEQ ID NO: 112367 - protein, 11 aa, Homo sapiens
IQDNGGWDAFV

SEQ ID NO: 112368 - protein, 11 aa, Homo sapiens
LLSLALVGACI

SEQ ID NO: 112369 - protein, 11 aa, Homo sapiens
SLALVGACITL

SEQ ID NO: 112370 - protein, 11 aa, Homo sapiens
RIVAFFEFGGV

SEQ ID NO: 112371 - protein, 11 aa, Homo sapiens
KLSQRGYEWDA

SEQ ID NO: 112372 - protein, 11 aa, Homo sapiens
SMRPLFDFSWL

SEQ ID NO: 112373 - protein, 11 aa, Homo sapiens
SLKTLLSLALV

SEQ ID NO: 112374 - protein, 11 aa, Homo sapiens
SLALVGACITL

SEQ ID NO: 112375 - protein, 11 aa, Homo sapiens
ALSPVPPVVHL

SEQ ID NO: 112376 - protein, 11 aa, Homo sapiens
LLSLALVGACI

SEQ ID NO: 112377 - protein, 11 aa, Homo sapiens
EMSPLVDNIAL

SEQ ID NO: 112378 - protein, 11 aa, Homo sapiens
ALVGACITLGA

SEQ ID NO: 112379 - protein, 11 aa, Homo sapiens
WLSLKTLLSLA

SEQ ID NO: 112380 - protein, 11 aa, Homo sapiens
FTARGRFATVV

SEQ ID NO: 112381 - protein, 11 aa, Homo sapiens
GAAAGPALSPV

SEQ ID NO: 112382 - protein, 11 aa, Homo sapiens
RIVAFFEFGGV

SEQ ID NO: 112383 - protein, 11 aa, Homo sapiens
YLNRHLHTWIQ

SEQ ID NO: 112384 - protein, 11 aa, Homo sapiens
KLSQRGYEWDA

SEQ ID NO: 112385 - protein, 11 aa, Homo sapiens
TVVEELFRDGV

SEQ ID NO: 112386 - protein, 11 aa, Homo sapiens
VGACITLGAYL

SEQ ID NO: 112387 - protein, 11 aa, Homo sapiens
SLKTLLSLALV

SEQ ID NO: 112388 - protein, 11 aa, Homo sapiens
SMRPLFDFSWL

SEQ ID NO: 112389 - protein, 11 aa, Homo sapiens
RIVAFFEFGGV

SEQ ID NO: 112390 - protein, 11 aa, Homo sapiens
GAAAGPALSPV

SEQ ID NO: 112391 - protein, 11 aa, Homo sapiens
WLSLKTLLSLA

SEQ ID NO: 112392 - protein, 11 aa, Homo sapiens
ALSPVPPVVHL

SEQ ID NO: 112393 - protein, 11 aa, Homo sapiens
ALVGACITLGA

SEQ ID NO: 112394 - protein, 11 aa, Homo sapiens
LLSLALVGACI

SEQ ID NO: 112395 - protein, 11 aa, Homo sapiens
FTARGRFATVV

SEQ ID NO: 112396 - protein, 11 aa, Homo sapiens
SLALVGACITL

SEQ ID NO: 112397 - protein, 11 aa, Homo sapiens
YLNRHLHTWIQ

SEQ ID NO: 112398 - protein, 11 aa, Homo sapiens
TVVEELFRDGV

SEQ ID NO: 112399 - protein, 11 aa, Homo sapiens
KLSQRGYEWDA

SEQ ID NO: 112400 - protein, 11 aa, Homo sapiens
ALSPVPPVVHL

SEQ ID NO: 112401 - protein, 11 aa, Homo sapiens
SLALVGACITL

SEQ ID NO: 112402 - protein, 11 aa, Homo sapiens
FTARGRFATVV

SEQ ID NO: 112403 - protein, 11 aa, Homo sapiens
GAAAGPALSPV

SEQ ID NO: 112404 - protein, 11 aa, Homo sapiens
KLSQRGYEWDA

SEQ ID NO: 112405 - protein, 11 aa, Homo sapiens
YLNRHLHTWIQ

SEQ ID NO: 112406 - protein, 11 aa, Homo sapiens
RIVAFFEFGGV

SEQ ID NO: 112407 - protein, 11 aa, Homo sapiens
IQDNGGWDAFV

SEQ ID NO: 112408 - protein, 11 aa, Homo sapiens
FTARGRFATVV

SEQ ID NO: 112409 - protein, 11 aa, Homo sapiens
TVVEELFRDGV

SEQ ID NO: 112410 - protein, 11 aa, Homo sapiens
ALVGACITLGA

SEQ ID NO: 112411 - protein, 11 aa, Homo sapiens
SQPGHTPHPAA

SEQ ID NO: 112412 - protein, 11 aa, Homo sapiens
LQTPAAPGAAA

SEQ ID NO: 112413 - protein, 11 aa, Homo sapiens
GAAAGPALSPV

SEQ ID NO: 112414 - protein, 11 aa, Homo sapiens
KTLLSLALVGA

SEQ ID NO: 112415 - protein, 11 aa, Homo sapiens
ALSPVPPVVHL

SEQ ID NO: 112416 - protein, 11 aa, Homo sapiens
SMRPLFDFSWL

SEQ ID NO: 112417 - protein, 11 aa, Homo sapiens
SLKTLLSLALV

SEQ ID NO: 112418 - protein, 11 aa, Homo sapiens
WLSLKTLLSLA

SEQ ID NO: 112419 - protein, 11 aa, Homo sapiens
YEWDAGDVGAA

SEQ ID NO: 112420 - protein, 11 aa, Homo sapiens
KLSQRGYEWDA

SEQ ID NO: 112421 - protein, 11 aa, Homo sapiens
ALSPVPPVVHL

SEQ ID NO: 112422 - protein, 11 aa, Homo sapiens
SLKTLLSLALV

SEQ ID NO: 112423 - protein, 11 aa, Homo sapiens
SLALVGACITL

SEQ ID NO: 112424 - protein, 11 aa, Homo sapiens
YLNRHLHTWIQ

SEQ ID NO: 112425 - protein, 11 aa, Homo sapiens
EMSPLVDNIAL

SEQ ID NO: 112426 - protein, 11 aa, Homo sapiens
SMRPLFDFSWL

SEQ ID NO: 112427 - protein, 11 aa, Homo sapiens
ALVGACITLGA

SEQ ID NO: 112428 - protein, 11 aa, Homo sapiens
FTARGRFATVV

SEQ ID NO: 112429 - protein, 11 aa, Homo sapiens
IQDNGGWDAFV

SEQ ID NO: 112430 - protein, 11 aa, Homo sapiens
AFFEFGGVMCV

SEQ ID NO: 112431 - protein, 11 aa, Homo sapiens
PLFDFSWLSLK

SEQ ID NO: 112432 - protein, 11 aa, Homo sapiens
TVVEELFRDGV

SEQ ID NO: 112433 - protein, 11 aa, Homo sapiens
PLVDNIALWMT

SEQ ID NO: 112434 - protein, 11 aa, Homo sapiens
KLSQRGYEWDA

SEQ ID NO: 112435 - protein, 11 aa, Homo sapiens
WLSLKTLLSLA

SEQ ID NO: 112436 - protein, 11 aa, Homo sapiens
RIVAFFEFGGV

SEQ ID NO: 112437 - protein, 11 aa, Homo sapiens
ELYGPSMRPLF

SEQ ID NO: 112438 - protein, 11 aa, Homo sapiens
LLSLALVGACI

SEQ ID NO: 112439 - protein, 11 aa, Homo sapiens
GAAAGPALSPV

SEQ ID NO: 112440 - protein, 11 aa, Homo sapiens
FRDGVNWGRIV

SEQ ID NO: 112441 - protein, 11 aa, Homo sapiens
TLLSLALVGAC

SEQ ID NO: 112442 - protein, 11 aa, Homo sapiens
HLTPFTARGRF

SEQ ID NO: 112443 - protein, 11 aa, Homo sapiens
WMTEYLNRHLH

SEQ ID NO: 112444 - protein, 11 aa, Homo sapiens
ALSPVPPVVHL

SEQ ID NO: 112445 - protein, 11 aa, Homo sapiens
YLNRHLHTWIQ

SEQ ID NO: 112446 - protein, 11 aa, Homo sapiens
FTARGRFATVV

SEQ ID NO: 112447 - protein, 11 aa, Homo sapiens
SMRPLFDFSWL

SEQ ID NO: 112448 - protein, 11 aa, Homo sapiens
SLKTLLSLALV

SEQ ID NO: 112449 - protein, 11 aa, Homo sapiens
SLALVGACITL

SEQ ID NO: 112450 - protein, 11 aa, Homo sapiens
EMSPLVDNIAL

SEQ ID NO: 112451 - protein, 11 aa, Homo sapiens
KLSQRGYEWDA

SEQ ID NO: 112452 - protein, 11 aa, Homo sapiens
ALVGACITLGA

SEQ ID NO: 112453 - protein, 11 aa, Homo sapiens
TVVEELFRDGV

SEQ ID NO: 112454 - protein, 11 aa, Homo sapiens
IQDNGGWDAFV

SEQ ID NO: 112455 - protein, 11 aa, Homo sapiens
AFFEFGGVMCV

SEQ ID NO: 112456 - protein, 11 aa, Homo sapiens
RIVAFFEFGGV

SEQ ID NO: 112457 - protein, 11 aa, Homo sapiens
LLSLALVGACI

SEQ ID NO: 112458 - protein, 11 aa, Homo sapiens
PLVDNIALWMT

SEQ ID NO: 112459 - protein, 11 aa, Homo sapiens
PLFDFSWLSLK

SEQ ID NO: 112460 - protein, 11 aa, Homo sapiens
FRDGVNWGRIV

SEQ ID NO: 112461 - protein, 11 aa, Homo sapiens
ALSPVPPVVHL

SEQ ID NO: 112462 - protein, 11 aa, Homo sapiens
SLALVGACITL

SEQ ID NO: 112463 - protein, 11 aa, Homo sapiens
SLKTLLSLALV

SEQ ID NO: 112464 - protein, 11 aa, Homo sapiens
SMRPLFDFSWL

SEQ ID NO: 112465 - protein, 11 aa, Homo sapiens
FTARGRFATVV

SEQ ID NO: 112466 - protein, 11 aa, Homo sapiens
ALVGACITLGA

SEQ ID NO: 112467 - protein, 11 aa, Homo sapiens
IQDNGGWDAFV

SEQ ID NO: 112468 - protein, 11 aa, Homo sapiens
EMSPLVDNIAL

SEQ ID NO: 112469 - protein, 11 aa, Homo sapiens
YLNRHLHTWIQ

SEQ ID NO: 112470 - protein, 11 aa, Homo sapiens
TVVEELFRDGV

SEQ ID NO: 112471 - protein, 11 aa, Homo sapiens
GAAAGPALSPV

SEQ ID NO: 112472 - protein, 11 aa, Homo sapiens
AFFEFGGVMCV

SEQ ID NO: 112473 - protein, 11 aa, Homo sapiens
PLVDNIALWMT

SEQ ID NO: 112474 - protein, 11 aa, Homo sapiens
RIVAFFEFGGV

SEQ ID NO: 112475 - protein, 11 aa, Homo sapiens
EFGGVMCVESV

SEQ ID NO: 112476 - protein, 11 aa, Homo sapiens
WLSLKTLLSLA

SEQ ID NO: 112477 - protein, 11 aa, Homo sapiens
KLSQRGYEWDA

SEQ ID NO: 112478 - protein, 11 aa, Homo sapiens
LLSLALVGACI

SEQ ID NO: 112479 - protein, 11 aa, Homo sapiens
PLFDFSWLSLK

SEQ ID NO: 112480 - protein, 11 aa, Homo sapiens
ALSPVPPVVHL

SEQ ID NO: 112481 - protein, 11 aa, Homo sapiens
IQDNGGWDAFV

SEQ ID NO: 112482 - protein, 11 aa, Homo sapiens
FTARGRFATVV

SEQ ID NO: 112483 - protein, 11 aa, Homo sapiens
EMSPLVDNIAL

SEQ ID NO: 112484 - protein, 11 aa, Homo sapiens
YLNRHLHTWIQ

SEQ ID NO: 112485 - protein, 11 aa, Homo sapiens
SLALVGACITL

SEQ ID NO: 112486 - protein, 11 aa, Homo sapiens
LLSLALVGACI

SEQ ID NO: 112487 - protein, 11 aa, Homo sapiens
PLVDNIALWMT

SEQ ID NO: 112488 - protein, 11 aa, Homo sapiens
GAAAGPALSPV

SEQ ID NO: 112489 - protein, 11 aa, Homo sapiens
SLKTLLSLALV

SEQ ID NO: 112490 - protein, 11 aa, Homo sapiens
SMRPLFDFSWL

SEQ ID NO: 112491 - protein, 11 aa, Homo sapiens
ALVGACITLGA

SEQ ID NO: 112492 - protein, 11 aa, Homo sapiens
PLFDFSWLSLK

SEQ ID NO: 112493 - protein, 11 aa, Homo sapiens
CITLGAYLGHK

SEQ ID NO: 112494 - protein, 11 aa, Homo sapiens
PLFDFSWLSLK

SEQ ID NO: 112495 - protein, 11 aa, Homo sapiens
SQLHLTPFTAR

SEQ ID NO: 112496 - protein, 11 aa, Homo sapiens
CITLGAYLGHK

SEQ ID NO: 112497 - protein, 11 aa, Homo sapiens
IALWMTEYLNR

SEQ ID NO: 112498 - protein, 11 aa, Homo sapiens
TGYDNREIVMK

SEQ ID NO: 112499 - protein, 11 aa, Homo sapiens
NWGRIVAFFEF

SEQ ID NO: 112500 - protein, 11 aa, Homo sapiens
EYLNRHLHTWI

SEQ ID NO: 112501 - protein, 11 aa, Homo sapiens
HYKLSQRGYEW

SEQ ID NO: 112502 - protein, 11 aa, Homo sapiens
LWMTEYLNRHL

SEQ ID NO: 112503 - protein, 11 aa, Homo sapiens
SWLSLKTLLSL

SEQ ID NO: 112504 - protein, 11 aa, Homo sapiens
EYLNRHLHTWI

SEQ ID NO: 112505 - protein, 11 aa, Homo sapiens
NWGRIVAFFEF

SEQ ID NO: 112506 - protein, 11 aa, Homo sapiens
SWLSLKTLLSL

SEQ ID NO: 112507 - protein, 11 aa, Homo sapiens
LWMTEYLNRHL

SEQ ID NO: 112508 - protein, 11 aa, Homo sapiens
EYLNRHLHTWI

SEQ ID NO: 112509 - protein, 11 aa, Homo sapiens
HYKLSQRGYEW

SEQ ID NO: 112510 - protein, 11 aa, Homo sapiens
NWGRIVAFFEF

SEQ ID NO: 112511 - protein, 11 aa, Homo sapiens
YIHYKLSQRGY

SEQ ID NO: 112512 - protein, 11 aa, Homo sapiens
EMSSQLHLTPF

SEQ ID NO: 112513 - protein, 11 aa, Homo sapiens
YIHYKLSQRGY

SEQ ID NO: 112514 - protein, 11 aa, Homo sapiens
EIVMKYIHYKL

SEQ ID NO: 112515 - protein, 11 aa, Homo sapiens
WIQDNGGWDAF

SEQ ID NO: 112516 - protein, 11 aa, Homo sapiens
ELYGPSMRPLF

SEQ ID NO: 112517 - protein, 11 aa, Homo sapiens
LVGACITLGAY

SEQ ID NO: 112518 - protein, 11 aa, Homo sapiens
DGVNWGRIVAF

SEQ ID NO: 112519 - protein, 11 aa, Homo sapiens
PLFDFSWLSLK

SEQ ID NO: 112520 - protein, 11 aa, Homo sapiens
REIVMKYIHYK

SEQ ID NO: 112521 - protein, 11 aa, Homo sapiens
EMSSQLHLTPF

SEQ ID NO: 112522 - protein, 11 aa, Homo sapiens
RFATVVEELFR

SEQ ID NO: 112523 - protein, 11 aa, Homo sapiens
SQLHLTPFTAR

SEQ ID NO: 112524 - protein, 11 aa, Homo sapiens
AFVELYGPSMR

SEQ ID NO: 112525 - protein, 11 aa, Homo sapiens
IALWMTEYLNR

SEQ ID NO: 112526 - protein, 11 aa, Homo sapiens
REIVMKYIHYK

SEQ ID NO: 112527 - protein, 11 aa, Homo sapiens
MKYIHYKLSQR

SEQ ID NO: 112528 - protein, 11 aa, Homo sapiens
QAGDDFSRRYR

SEQ ID NO: 112529 - protein, 11 aa, Homo sapiens
ELFRDGVNWGR

SEQ ID NO: 112530 - protein, 11 aa, Homo sapiens
RFATVVEELFR

SEQ ID NO: 112531 - protein, 11 aa, Homo sapiens
IALWMTEYLNR

SEQ ID NO: 112532 - protein, 11 aa, Homo sapiens
AFVELYGPSMR

SEQ ID NO: 112533 - protein, 11 aa, Homo sapiens
ELFRDGVNWGR

SEQ ID NO: 112534 - protein, 11 aa, Homo sapiens
CITLGAYLGHK

SEQ ID NO: 112535 - protein, 11 aa, Homo sapiens
IALWMTEYLNR

SEQ ID NO: 112536 - protein, 11 aa, Homo sapiens
HPAASRDPVAR

SEQ ID NO: 112537 - protein, 11 aa, Homo sapiens
MKYIHYKLSQR

SEQ ID NO: 112538 - protein, 11 aa, Homo sapiens
QAGDDFSRRYR

SEQ ID NO: 112539 - protein, 11 aa, Homo sapiens
TGYDNREIVMK

SEQ ID NO: 112540 - protein, 11 aa, Homo sapiens
RFATVVEELFR

SEQ ID NO: 112541 - protein, 11 aa, Homo sapiens
TLRQAGDDFSR

SEQ ID NO: 112542 - protein, 11 aa, Homo sapiens
PLFDFSWLSLK

SEQ ID NO: 112543 - protein, 11 aa, Homo sapiens
FTARGRFATVV

SEQ ID NO: 112544 - protein, 11 aa, Homo sapiens
TVVEELFRDGV

SEQ ID NO: 112545 - protein, 11 aa, Homo sapiens
RIVAFFEFGGV

SEQ ID NO: 112546 - protein, 11 aa, Homo sapiens
EIVMKYIHYKL

SEQ ID NO: 112547 - protein, 11 aa, Homo sapiens
GAAAGPALSPV

SEQ ID NO: 112548 - protein, 11 aa, Homo sapiens
EMSPLVDNIAL

SEQ ID NO: 112549 - protein, 11 aa, Homo sapiens
ESVNREMSPLV

SEQ ID NO: 112550 - protein, 11 aa, Homo sapiens
VGACITLGAYL

SEQ ID NO: 112551 - protein, 11 aa, Homo sapiens
TPHPAASRDPV

SEQ ID NO: 112552 - protein, 11 aa, Homo sapiens
FTARGRFATVV

SEQ ID NO: 112553 - protein, 11 aa, Homo sapiens
EMSPLVDNIAL

SEQ ID NO: 112554 - protein, 11 aa, Homo sapiens
TVVEELFRDGV

SEQ ID NO: 112555 - protein, 11 aa, Homo sapiens
ESVNREMSPLV

SEQ ID NO: 112556 - protein, 11 aa, Homo sapiens
RPLFDFSWLSL

SEQ ID NO: 112557 - protein, 11 aa, Homo sapiens
SPVPPVVHLTL

SEQ ID NO: 112558 - protein, 11 aa, Homo sapiens
TPHPAASRDPV

SEQ ID NO: 112559 - protein, 11 aa, Homo sapiens
GPALSPVPPVV

SEQ ID NO: 112560 - protein, 11 aa, Homo sapiens
SPLVDNIALWM

SEQ ID NO: 112561 - protein, 11 aa, Homo sapiens
RGRFATVVEEL

SEQ ID NO: 112562 - protein, 11 aa, Homo sapiens
TPFTARGRFAT

SEQ ID NO: 112563 - protein, 11 aa, Homo sapiens
RQAGDDFSRRY

SEQ ID NO: 112564 - protein, 11 aa, Homo sapiens
WIQDNGGWDAF

SEQ ID NO: 112565 - protein, 11 aa, Homo sapiens
LVGACITLGAY

SEQ ID NO: 112566 - protein, 11 aa, Homo sapiens
YIHYKLSQRGY

SEQ ID NO: 112567 - protein, 11 aa, Homo sapiens
EMSSQLHLTPF

SEQ ID NO: 112568 - protein, 11 aa, Homo sapiens
GVNWGRIVAFF

SEQ ID NO: 112569 - protein, 11 aa, Homo sapiens
TEYLNRHLHTW

SEQ ID NO: 112570 - protein, 11 aa, Homo sapiens
VELYGPSMRPL

SEQ ID NO: 112571 - protein, 11 aa, Homo sapiens
VESVNREMSPL

SEQ ID NO: 112572 - protein, 11 aa, Homo sapiens
VEELFRDGVNW

SEQ ID NO: 112573 - protein, 11 aa, Homo sapiens
GRFATVVEELF

SEQ ID NO: 112574 - protein, 11 aa, Homo sapiens
RRDFAEMSSQL

SEQ ID NO: 112575 - protein, 11 aa, Homo sapiens
RQAGDDFSRRY

SEQ ID NO: 112576 - protein, 11 aa, Homo sapiens
SPLVDNIALWM

SEQ ID NO: 112577 - protein, 11 aa, Homo sapiens
WIQDNGGWDAF

SEQ ID NO: 112578 - protein, 11 aa, Homo sapiens
DAFVELYGPSM

SEQ ID NO: 112579 - protein, 11 aa, Homo sapiens
EMSSQLHLTPF

SEQ ID NO: 112580 - protein, 11 aa, Homo sapiens
TPFTARGRFAT

SEQ ID NO: 112581 - protein, 11 aa, Homo sapiens
LVGACITLGAY

SEQ ID NO: 112582 - protein, 11 aa, Homo sapiens
IVAFFEFGGVM

SEQ ID NO: 112583 - protein, 11 aa, Homo sapiens
SPVPPVVHLTL

SEQ ID NO: 112584 - protein, 11 aa, Homo sapiens
DGVNWGRIVAF

SEQ ID NO: 112585 - protein, 11 aa, Homo sapiens
SRDPVARTSPL

SEQ ID NO: 112586 - protein, 11 aa, Homo sapiens
VELYGPSMRPL

SEQ ID NO: 112587 - protein, 11 aa, Homo sapiens
VESVNREMSPL

SEQ ID NO: 112588 - protein, 11 aa, Homo sapiens
TEYLNRHLHTW

SEQ ID NO: 112589 - protein, 11 aa, Homo sapiens
AEMSSQLHLTP

SEQ ID NO: 112590 - protein, 11 aa, Homo sapiens
APPGAAPAPGI

SEQ ID NO: 112591 - protein, 11 aa, Homo sapiens
GPALSPVPPVV

SEQ ID NO: 112592 - protein, 11 aa, Homo sapiens
SPVPPVVHLTL

SEQ ID NO: 112593 - protein, 11 aa, Homo sapiens
SPLVDNIALWM

SEQ ID NO: 112594 - protein, 11 aa, Homo sapiens
RPLFDFSWLSL

SEQ ID NO: 112595 - protein, 11 aa, Homo sapiens
TPFTARGRFAT

SEQ ID NO: 112596 - protein, 11 aa, Homo sapiens
SPLQTPAAPGA

SEQ ID NO: 112597 - protein, 11 aa, Homo sapiens
PPVVHLTLRQA

SEQ ID NO: 112598 - protein, 11 aa, Homo sapiens
TPHPAASRDPV

SEQ ID NO: 112599 - protein, 11 aa, Homo sapiens
MSPLVDNIALW

SEQ ID NO: 112600 - protein, 11 aa, Homo sapiens
PSMRPLFDFSW

SEQ ID NO: 112601 - protein, 15 aa, Homo sapiens
RWFLTGMTVAGVVLL

SEQ ID NO: 112602 - protein, 9 aa, Homo sapiens
LTGMTVAGV

SEQ ID NO: 112603 - protein, 15 aa, Homo sapiens
RFNRWFLTGMTVAGV

SEQ ID NO: 112604 - protein, 9 aa, Homo sapiens
FLTGMTVAG

SEQ ID NO: 112605 - protein, 15 aa, Homo sapiens
FNRWFLTGMTVAGVV

SEQ ID NO: 112606 - protein, 9 aa, Homo sapiens
LTGMTVAGV

SEQ ID NO: 112607 - protein, 15 aa, Homo sapiens
NRWFLTGMTVAGVVL

SEQ ID NO: 112608 - protein, 9 aa, Homo sapiens
LTGMTVAGV

SEQ ID NO: 112609 - protein, 15 aa, Homo sapiens
WFLTGMTVAGVVLLG

SEQ ID NO: 112610 - protein, 9 aa, Homo sapiens
LTGMTVAGV

SEQ ID NO: 112611 - protein, 15 aa, Homo sapiens
DAREVIPMAAVKQAL

SEQ ID NO: 112612 - protein, 9 aa, Homo sapiens
VIPMAAVKQ

SEQ ID NO: 112613 - protein, 15 aa, Homo sapiens
AREVIPMAAVKQALR

SEQ ID NO: 112614 - protein, 9 aa, Homo sapiens
VIPMAAVKQ

SEQ ID NO: 112615 - protein, 15 aa, Homo sapiens
REVIPMAAVKQALRE

SEQ ID NO: 112616 - protein, 9 aa, Homo sapiens
VIPMAAVKQ

SEQ ID NO: 112617 - protein, 15 aa, Homo sapiens
LDAREVIPMAAVKQA

SEQ ID NO: 112618 - protein, 9 aa, Homo sapiens
VIPMAAVKQ

SEQ ID NO: 112619 - protein, 15 aa, Homo sapiens
KEMQVLVSRIAAWMA

SEQ ID NO: 112620 - protein, 9 aa, Homo sapiens
MQVLVSRIA

SEQ ID NO: 112621 - protein, 15 aa, Homo sapiens
LTSQLHITPGTAYQS

SEQ ID NO: 112622 - protein, 9 aa, Homo sapiens
LHITPGTAY

SEQ ID NO: 112623 - protein, 15 aa, Homo sapiens
TSQLHITPGTAYQSF

SEQ ID NO: 112624 - protein, 9 aa, Homo sapiens
ITPGTAYQS

SEQ ID NO: 112625 - protein, 15 aa, Homo sapiens
SLDAREVIPMAAVKQ

SEQ ID NO: 112626 - protein, 9 aa, Homo sapiens
AREVIPMAA

SEQ ID NO: 112627 - protein, 15 aa, Homo sapiens
SQLHITPGTAYQSFE

SEQ ID NO: 112628 - protein, 9 aa, Homo sapiens
ITPGTAYQS

SEQ ID NO: 112629 - protein, 15 aa, Homo sapiens
FLTGMTVAGVVLLGS

SEQ ID NO: 112630 - protein, 9 aa, Homo sapiens
LTGMTVAGV

SEQ ID NO: 112631 - protein, 15 aa, Homo sapiens
DKEMQVLVSRIAAWM

SEQ ID NO: 112632 - protein, 9 aa, Homo sapiens
MQVLVSRIA

SEQ ID NO: 112633 - protein, 15 aa, Homo sapiens
QLHITPGTAYQSFEQ

SEQ ID NO: 112634 - protein, 9 aa, Homo sapiens
ITPGTAYQS

SEQ ID NO: 112635 - protein, 15 aa, Homo sapiens
LHITPGTAYQSFEQV

SEQ ID NO: 112636 - protein, 9 aa, Homo sapiens
ITPGTAYQS

SEQ ID NO: 112637 - protein, 15 aa, Homo sapiens
SVDKEMQVLVSRIAA

SEQ ID NO: 112638 - protein, 9 aa, Homo sapiens
MQVLVSRIA

SEQ ID NO: 112639 - protein, 15 aa, Homo sapiens
EVIPMAAVKQALREA

SEQ ID NO: 112640 - protein, 9 aa, Homo sapiens
IPMAAVKQA

SEQ ID NO: 112641 - protein, 15 aa, Homo sapiens
ESVDKEMQVLVSRIA

SEQ ID NO: 112642 - protein, 9 aa, Homo sapiens
VDKEMQVLV

SEQ ID NO: 112643 - protein, 15 aa, Homo sapiens
VDKEMQVLVSRIAAW

SEQ ID NO: 112644 - protein, 9 aa, Homo sapiens
MQVLVSRIA

SEQ ID NO: 112645 - protein, 15 aa, Homo sapiens
LTGMTVAGVVLLGSL

SEQ ID NO: 112646 - protein, 9 aa, Homo sapiens
LTGMTVAGV

SEQ ID NO: 112647 - protein, 15 aa, Homo sapiens
ERFNRWFLTGMTVAG

SEQ ID NO: 112648 - protein, 9 aa, Homo sapiens
FNRWFLTGM

SEQ ID NO: 112649 - protein, 15 aa, Homo sapiens
ETPSAINGNPSWHLA

SEQ ID NO: 112650 - protein, 9 aa, Homo sapiens
INGNPSWHL

SEQ ID NO: 112651 - protein, 15 aa, Homo sapiens
TPSAINGNPSWHLAD

SEQ ID NO: 112652 - protein, 9 aa, Homo sapiens
INGNPSWHL

SEQ ID NO: 112653 - protein, 15 aa, Homo sapiens
PSAINGNPSWHLADS

SEQ ID NO: 112654 - protein, 9 aa, Homo sapiens
INGNPSWHL

SEQ ID NO: 112655 - protein, 15 aa, Homo sapiens
SAINGNPSWHLADSP

SEQ ID NO: 112656 - protein, 9 aa, Homo sapiens
INGNPSWHL

SEQ ID NO: 112657 - protein, 15 aa, Homo sapiens
METPSAINGNPSWHL

SEQ ID NO: 112658 - protein, 9 aa, Homo sapiens
PSAINGNPS

SEQ ID NO: 112659 - protein, 15 aa, Homo sapiens
EMQVLVSRIAAWMAT

SEQ ID NO: 112660 - protein, 9 aa, Homo sapiens
MQVLVSRIA

SEQ ID NO: 112661 - protein, 15 aa, Homo sapiens
VIPMAAVKQALREAG

SEQ ID NO: 112662 - protein, 9 aa, Homo sapiens
VIPMAAVKQ

SEQ ID NO: 112663 - protein, 15 aa, Homo sapiens
MQVLVSRIAAWMATY

SEQ ID NO: 112664 - protein, 9 aa, Homo sapiens
MQVLVSRIA

SEQ ID NO: 112665 - protein, 15 aa, Homo sapiens
VLVSRIAAWMATYLN

SEQ ID NO: 112666 - protein, 9 aa, Homo sapiens
IAAWMATYL

SEQ ID NO: 112667 - protein, 15 aa, Homo sapiens
GMTVAGVVLLGSLFS

SEQ ID NO: 112668 - protein, 9 aa, Homo sapiens
MTVAGVVLL

SEQ ID NO: 112669 - protein, 15 aa, Homo sapiens
MTVAGVVLLGSLFSR

SEQ ID NO: 112670 - protein, 9 aa, Homo sapiens
VVLLGSLFS

SEQ ID NO: 112671 - protein, 15 aa, Homo sapiens
INGNPSWHLADSPAV

SEQ ID NO: 112672 - protein, 9 aa, Homo sapiens
INGNPSWHL

SEQ ID NO: 112673 - protein, 15 aa, Homo sapiens
VELYGNNAAAESRKG

SEQ ID NO: 112674 - protein, 9 aa, Homo sapiens
YGNNAAAES

SEQ ID NO: 112675 - protein, 15 aa, Homo sapiens
TVAGVVLLGSLFSRK

SEQ ID NO: 112676 - protein, 9 aa, Homo sapiens
VVLLGSLFS

SEQ ID NO: 112677 - protein, 15 aa, Homo sapiens
QVLVSRIAAWMATYL

SEQ ID NO: 112678 - protein, 9 aa, Homo sapiens
VSRIAAWMA

SEQ ID NO: 112679 - protein, 15 aa, Homo sapiens
FVELYGNNAAAESRK

SEQ ID NO: 112680 - protein, 9 aa, Homo sapiens
YGNNAAAES

SEQ ID NO: 112681 - protein, 15 aa, Homo sapiens
ELYGNNAAAESRKGQ

SEQ ID NO: 112682 - protein, 9 aa, Homo sapiens
YGNNAAAES

SEQ ID NO: 112683 - protein, 15 aa, Homo sapiens
LRYRRAFSDLTSQLH

SEQ ID NO: 112684 - protein, 9 aa, Homo sapiens
YRRAFSDLT

SEQ ID NO: 112685 - protein, 15 aa, Homo sapiens
LVSRIAAWMATYLND

SEQ ID NO: 112686 - protein, 9 aa, Homo sapiens
IAAWMATYL

SEQ ID NO: 112687 - protein, 15 aa, Homo sapiens
TFVELYGNNAAAESR

SEQ ID NO: 112688 - protein, 9 aa, Homo sapiens
YGNNAAAES

SEQ ID NO: 112689 - protein, 15 aa, Homo sapiens
DTFVELYGNNAAAES

SEQ ID NO: 112690 - protein, 9 aa, Homo sapiens
FVELYGNNA

SEQ ID NO: 112691 - protein, 15 aa, Homo sapiens
NPSWHLADSPAVNGA

SEQ ID NO: 112692 - protein, 9 aa, Homo sapiens
WHLADSPAV

SEQ ID NO: 112693 - protein, 15 aa, Homo sapiens
PSWHLADSPAVNGAT

SEQ ID NO: 112694 - protein, 9 aa, Homo sapiens
WHLADSPAV

SEQ ID NO: 112695 - protein, 15 aa, Homo sapiens
TGMTVAGVVLLGSLF

SEQ ID NO: 112696 - protein, 9 aa, Homo sapiens
MTVAGVVLL

SEQ ID NO: 112697 - protein, 15 aa, Homo sapiens
VSRIAAWMATYLNDH

SEQ ID NO: 112698 - protein, 9 aa, Homo sapiens
IAAWMATYL

SEQ ID NO: 112699 - protein, 15 aa, Homo sapiens
GNPSWHLADSPAVNG

SEQ ID NO: 112700 - protein, 9 aa, Homo sapiens
WHLADSPAV

SEQ ID NO: 112701 - protein, 15 aa, Homo sapiens
LADSPAVNGATGHSS

SEQ ID NO: 112702 - protein, 9 aa, Homo sapiens
LADSPAVNG

SEQ ID NO: 112703 - protein, 15 aa, Homo sapiens
ELRYRRAFSDLTSQL

SEQ ID NO: 112704 - protein, 9 aa, Homo sapiens
YRRAFSDLT

SEQ ID NO: 112705 - protein, 15 aa, Homo sapiens
SRIAAWMATYLNDHL

SEQ ID NO: 112706 - protein, 9 aa, Homo sapiens
IAAWMATYL

SEQ ID NO: 112707 - protein, 15 aa, Homo sapiens
FELRYRRAFSDLTSQ

SEQ ID NO: 112708 - protein, 9 aa, Homo sapiens
YRRAFSDLT

SEQ ID NO: 112709 - protein, 15 aa, Homo sapiens
EFELRYRRAFSDLTS

SEQ ID NO: 112710 - protein, 9 aa, Homo sapiens
YRRAFSDLT

SEQ ID NO: 112711 - protein, 15 aa, Homo sapiens
DEFELRYRRAFSDLT

SEQ ID NO: 112712 - protein, 9 aa, Homo sapiens
LRYRRAFSD

SEQ ID NO: 112713 - protein, 15 aa, Homo sapiens
IVAFFSFGGALCVES

SEQ ID NO: 112714 - protein, 9 aa, Homo sapiens
FSFGGALCV

SEQ ID NO: 112715 - protein, 15 aa, Homo sapiens
SWHLADSPAVNGATG

SEQ ID NO: 112716 - protein, 9 aa, Homo sapiens
LADSPAVNG

SEQ ID NO: 112717 - protein, 15 aa, Homo sapiens
DSPAVNGATGHSSSL

SEQ ID NO: 112718 - protein, 9 aa, Homo sapiens
VNGATGHSS

SEQ ID NO: 112719 - protein, 15 aa, Homo sapiens
SPAVNGATGHSSSLD

SEQ ID NO: 112720 - protein, 9 aa, Homo sapiens
VNGATGHSS

SEQ ID NO: 112721 - protein, 15 aa, Homo sapiens
VAFFSFGGALCVESV

SEQ ID NO: 112722 - protein, 9 aa, Homo sapiens
FSFGGALCV

SEQ ID NO: 112723 - protein, 15 aa, Homo sapiens
ADSPAVNGATGHSSS

SEQ ID NO: 112724 - protein, 9 aa, Homo sapiens
VNGATGHSS

SEQ ID NO: 112725 - protein, 15 aa, Homo sapiens
AFFSFGGALCVESVD

SEQ ID NO: 112726 - protein, 9 aa, Homo sapiens
FSFGGALCV

SEQ ID NO: 112727 - protein, 15 aa, Homo sapiens
WHLADSPAVNGATGH

SEQ ID NO: 112728 - protein, 9 aa, Homo sapiens
LADSPAVNG

SEQ ID NO: 112729 - protein, 15 aa, Homo sapiens
HITPGTAYQSFEQVV

SEQ ID NO: 112730 - protein, 9 aa, Homo sapiens
ITPGTAYQS

SEQ ID NO: 112731 - protein, 15 aa, Homo sapiens
ITPGTAYQSFEQVVN

SEQ ID NO: 112732 - protein, 9 aa, Homo sapiens
ITPGTAYQS

SEQ ID NO: 112733 - protein, 15 aa, Homo sapiens
AINGNPSWHLADSPA

SEQ ID NO: 112734 - protein, 9 aa, Homo sapiens
INGNPSWHL

SEQ ID NO: 112735 - protein, 15 aa, Homo sapiens
PAVNGATGHSSSLDA

SEQ ID NO: 112736 - protein, 9 aa, Homo sapiens
VNGATGHSS

SEQ ID NO: 112737 - protein, 15 aa, Homo sapiens
RYRRAFSDLTSQLHI

SEQ ID NO: 112738 - protein, 9 aa, Homo sapiens
YRRAFSDLT

SEQ ID NO: 112739 - protein, 15 aa, Homo sapiens
YRRAFSDLTSQLHIT

SEQ ID NO: 112740 - protein, 9 aa, Homo sapiens
YRRAFSDLT

SEQ ID NO: 112741 - protein, 15 aa, Homo sapiens
NGNPSWHLADSPAVN

SEQ ID NO: 112742 - protein, 9 aa, Homo sapiens
WHLADSPAV

SEQ ID NO: 112743 - protein, 15 aa, Homo sapiens
GRIVAFFSFGGALCV

SEQ ID NO: 112744 - protein, 9 aa, Homo sapiens
IVAFFSFGG

SEQ ID NO: 112745 - protein, 15 aa, Homo sapiens
LYGNNAAAESRKGQE

SEQ ID NO: 112746 - protein, 9 aa, Homo sapiens
YGNNAAAES

SEQ ID NO: 112747 - protein, 15 aa, Homo sapiens
RIAAWMATYLNDHLE

SEQ ID NO: 112748 - protein, 9 aa, Homo sapiens
AAWMATYLN

SEQ ID NO: 112749 - protein, 15 aa, Homo sapiens
YGNNAAAESRKGQER

SEQ ID NO: 112750 - protein, 9 aa, Homo sapiens
YGNNAAAES

SEQ ID NO: 112751 - protein, 15 aa, Homo sapiens
RIVAFFSFGGALCVE

SEQ ID NO: 112752 - protein, 9 aa, Homo sapiens
FSFGGALCV

SEQ ID NO: 112753 - protein, 15 aa, Homo sapiens
FRDGVNWGRIVAFFS

SEQ ID NO: 112754 - protein, 9 aa, Homo sapiens
VNWGRIVAF

SEQ ID NO: 112755 - protein, 15 aa, Homo sapiens
FFSFGGALCVESVDK

SEQ ID NO: 112756 - protein, 9 aa, Homo sapiens
FSFGGALCV

SEQ ID NO: 112757 - protein, 15 aa, Homo sapiens
FSFGGALCVESVDKE

SEQ ID NO: 112758 - protein, 9 aa, Homo sapiens
FSFGGALCV

SEQ ID NO: 112759 - protein, 15 aa, Homo sapiens
RDGVNWGRIVAFFSF

SEQ ID NO: 112760 - protein, 9 aa, Homo sapiens
VNWGRIVAF

SEQ ID NO: 112761 - protein, 15 aa, Homo sapiens
DGVNWGRIVAFFSFG

SEQ ID NO: 112762 - protein, 9 aa, Homo sapiens
VNWGRIVAF

SEQ ID NO: 112763 - protein, 15 aa, Homo sapiens
IPMAAVKQALREAGD

SEQ ID NO: 112764 - protein, 9 aa, Homo sapiens
IPMAAVKQA

SEQ ID NO: 112765 - protein, 15 aa, Homo sapiens
RRAFSDLTSQLHITP

SEQ ID NO: 112766 - protein, 9 aa, Homo sapiens
FSDLTSQLH

SEQ ID NO: 112767 - protein, 15 aa, Homo sapiens
RAFSDLTSQLHITPG

SEQ ID NO: 112768 - protein, 9 aa, Homo sapiens
FSDLTSQLH

SEQ ID NO: 112769 - protein, 15 aa, Homo sapiens
HLADSPAVNGATGHS

SEQ ID NO: 112770 - protein, 9 aa, Homo sapiens
LADSPAVNG

SEQ ID NO: 112771 - protein, 15 aa, Homo sapiens
GVNWGRIVAFFSFGG

SEQ ID NO: 112772 - protein, 9 aa, Homo sapiens
VNWGRIVAF

SEQ ID NO: 112773 - protein, 15 aa, Homo sapiens
IAAWMATYLNDHLEP

SEQ ID NO: 112774 - protein, 9 aa, Homo sapiens
IAAWMATYL

SEQ ID NO: 112775 - protein, 15 aa, Homo sapiens
AVNGATGHSSSLDAR

SEQ ID NO: 112776 - protein, 9 aa, Homo sapiens
VNGATGHSS

SEQ ID NO: 112777 - protein, 15 aa, Homo sapiens
VNWGRIVAFFSFGGA

SEQ ID NO: 112778 - protein, 9 aa, Homo sapiens
VNWGRIVAF

SEQ ID NO: 112779 - protein, 15 aa, Homo sapiens
ELVVDFLSYKLSQKG

SEQ ID NO: 112780 - protein, 9 aa, Homo sapiens
VVDFLSYKL

SEQ ID NO: 112781 - protein, 15 aa, Homo sapiens
ELFRDGVNWGRIVAF

SEQ ID NO: 112782 - protein, 9 aa, Homo sapiens
FRDGVNWGR

SEQ ID NO: 112783 - protein, 15 aa, Homo sapiens
VNGATGHSSSLDARE

SEQ ID NO: 112784 - protein, 9 aa, Homo sapiens
VNGATGHSS

SEQ ID NO: 112785 - protein, 15 aa, Homo sapiens
LFRDGVNWGRIVAFF

SEQ ID NO: 112786 - protein, 9 aa, Homo sapiens
VNWGRIVAF

SEQ ID NO: 112787 - protein, 15 aa, Homo sapiens
LVVDFLSYKLSQKGY

SEQ ID NO: 112788 - protein, 9 aa, Homo sapiens
LSYKLSQKG

SEQ ID NO: 112789 - protein, 15 aa, Homo sapiens
VVDFLSYKLSQKGYS

SEQ ID NO: 112790 - protein, 9 aa, Homo sapiens
LSYKLSQKG

SEQ ID NO: 112791 - protein, 15 aa, Homo sapiens
QERFNRWFLTGMTVA

SEQ ID NO: 112792 - protein, 9 aa, Homo sapiens
FNRWFLTGM

SEQ ID NO: 112793 - protein, 15 aa, Homo sapiens
ESEMETPSAINGNPS

SEQ ID NO: 112794 - protein, 9 aa, Homo sapiens
METPSAING

SEQ ID NO: 112795 - protein, 15 aa, Homo sapiens
GTESEMETPSAINGN

SEQ ID NO: 112796 - protein, 9 aa, Homo sapiens
METPSAING

SEQ ID NO: 112797 - protein, 15 aa, Homo sapiens
DLTSQLHITPGTAYQ

SEQ ID NO: 112798 - protein, 9 aa, Homo sapiens
LHITPGTAY

SEQ ID NO: 112799 - protein, 15 aa, Homo sapiens
EGTESEMETPSAING

SEQ ID NO: 112800 - protein, 9 aa, Homo sapiens
ESEMETPSA

SEQ ID NO: 112801 - protein, 15 aa, Homo sapiens
SEMETPSAINGNPSW

SEQ ID NO: 112802 - protein, 9 aa, Homo sapiens
METPSAING

SEQ ID NO: 112803 - protein, 15 aa, Homo sapiens
SDLTSQLHITPGTAY

SEQ ID NO: 112804 - protein, 9 aa, Homo sapiens
SQLHITPGT

SEQ ID NO: 112805 - protein, 15 aa, Homo sapiens
VDFLSYKLSQKGYSW

SEQ ID NO: 112806 - protein, 9 aa, Homo sapiens
LSYKLSQKG

SEQ ID NO: 112807 - protein, 15 aa, Homo sapiens
TESEMETPSAINGNP

SEQ ID NO: 112808 - protein, 9 aa, Homo sapiens
METPSAING

SEQ ID NO: 112809 - protein, 15 aa, Homo sapiens
AAWMATYLNDHLEPW

SEQ ID NO: 112810 - protein, 9 aa, Homo sapiens
AAWMATYLN

SEQ ID NO: 112811 - protein, 15 aa, Homo sapiens
DFLSYKLSQKGYSWS

SEQ ID NO: 112812 - protein, 9 aa, Homo sapiens
LSYKLSQKG

SEQ ID NO: 112813 - protein, 15 aa, Homo sapiens
AFSDLTSQLHITPGT

SEQ ID NO: 112814 - protein, 9 aa, Homo sapiens
FSDLTSQLH

SEQ ID NO: 112815 - protein, 15 aa, Homo sapiens
FSDLTSQLHITPGTA

SEQ ID NO: 112816 - protein, 9 aa, Homo sapiens
FSDLTSQLH

SEQ ID NO: 112817 - protein, 15 aa, Homo sapiens
WGRIVAFFSFGGALC

SEQ ID NO: 112818 - protein, 9 aa, Homo sapiens
IVAFFSFGG

SEQ ID NO: 112819 - protein, 15 aa, Homo sapiens
GQERFNRWFLTGMTV

SEQ ID NO: 112820 - protein, 9 aa, Homo sapiens
FNRWFLTGM

SEQ ID NO: 112821 - protein, 15 aa, Homo sapiens
LRYRRAFSDLTSQLH

SEQ ID NO: 112822 - protein, 9 aa, Homo sapiens
YRRAFSDLT

SEQ ID NO: 112823 - protein, 15 aa, Homo sapiens
FELRYRRAFSDLTSQ

SEQ ID NO: 112824 - protein, 9 aa, Homo sapiens
YRRAFSDLT

SEQ ID NO: 112825 - protein, 15 aa, Homo sapiens
EFELRYRRAFSDLTS

SEQ ID NO: 112826 - protein, 9 aa, Homo sapiens
YRRAFSDLT

SEQ ID NO: 112827 - protein, 15 aa, Homo sapiens
DEFELRYRRAFSDLT

SEQ ID NO: 112828 - protein, 9 aa, Homo sapiens
DEFELRYRR

SEQ ID NO: 112829 - protein, 15 aa, Homo sapiens
ELRYRRAFSDLTSQL

SEQ ID NO: 112830 - protein, 9 aa, Homo sapiens
YRRAFSDLT

SEQ ID NO: 112831 - protein, 15 aa, Homo sapiens
NGGWDTFVELYGNNA

SEQ ID NO: 112832 - protein, 9 aa, Homo sapiens
WDTFVELYG

SEQ ID NO: 112833 - protein, 15 aa, Homo sapiens
GGWDTFVELYGNNAA

SEQ ID NO: 112834 - protein, 9 aa, Homo sapiens
FVELYGNNA

SEQ ID NO: 112835 - protein, 15 aa, Homo sapiens
WDTFVELYGNNAAAE

SEQ ID NO: 112836 - protein, 9 aa, Homo sapiens
FVELYGNNA

SEQ ID NO: 112837 - protein, 15 aa, Homo sapiens
GWDTFVELYGNNAAA

SEQ ID NO: 112838 - protein, 9 aa, Homo sapiens
FVELYGNNA

SEQ ID NO: 112839 - protein, 15 aa, Homo sapiens
DTFVELYGNNAAAES

SEQ ID NO: 112840 - protein, 9 aa, Homo sapiens
FVELYGNNA

SEQ ID NO: 112841 - protein, 15 aa, Homo sapiens
RYRRAFSDLTSQLHI

SEQ ID NO: 112842 - protein, 9 aa, Homo sapiens
YRRAFSDLT

SEQ ID NO: 112843 - protein, 15 aa, Homo sapiens
YRRAFSDLTSQLHIT

SEQ ID NO: 112844 - protein, 9 aa, Homo sapiens
YRRAFSDLT

SEQ ID NO: 112845 - protein, 15 aa, Homo sapiens
ESVDKEMQVLVSRIA

SEQ ID NO: 112846 - protein, 9 aa, Homo sapiens
KEMQVLVSR

SEQ ID NO: 112847 - protein, 15 aa, Homo sapiens
VDKEMQVLVSRIAAW

SEQ ID NO: 112848 - protein, 9 aa, Homo sapiens
MQVLVSRIA

SEQ ID NO: 112849 - protein, 15 aa, Homo sapiens
ERFNRWFLTGMTVAG

SEQ ID NO: 112850 - protein, 9 aa, Homo sapiens
WFLTGMTVA

SEQ ID NO: 112851 - protein, 15 aa, Homo sapiens
SVDKEMQVLVSRIAA

SEQ ID NO: 112852 - protein, 9 aa, Homo sapiens
MQVLVSRIA

SEQ ID NO: 112853 - protein, 15 aa, Homo sapiens
RFNRWFLTGMTVAGV

SEQ ID NO: 112854 - protein, 9 aa, Homo sapiens
FLTGMTVAG

SEQ ID NO: 112855 - protein, 15 aa, Homo sapiens
FNRWFLTGMTVAGVV

SEQ ID NO: 112856 - protein, 9 aa, Homo sapiens
FLTGMTVAG

SEQ ID NO: 112857 - protein, 15 aa, Homo sapiens
KEMQVLVSRIAAWMA

SEQ ID NO: 112858 - protein, 9 aa, Homo sapiens
MQVLVSRIA

SEQ ID NO: 112859 - protein, 15 aa, Homo sapiens
DKEMQVLVSRIAAWM

SEQ ID NO: 112860 - protein, 9 aa, Homo sapiens
MQVLVSRIA

SEQ ID NO: 112861 - protein, 15 aa, Homo sapiens
NRWFLTGMTVAGVVL

SEQ ID NO: 112862 - protein, 9 aa, Homo sapiens
FLTGMTVAG

SEQ ID NO: 112863 - protein, 15 aa, Homo sapiens
AAWMATYLNDHLEPW

SEQ ID NO: 112864 - protein, 9 aa, Homo sapiens
WMATYLNDH

SEQ ID NO: 112865 - protein, 15 aa, Homo sapiens
SRIAAWMATYLNDHL

SEQ ID NO: 112866 - protein, 9 aa, Homo sapiens
WMATYLNDH

SEQ ID NO: 112867 - protein, 15 aa, Homo sapiens
RIAAWMATYLNDHLE

SEQ ID NO: 112868 - protein, 9 aa, Homo sapiens
WMATYLNDH

SEQ ID NO: 112869 - protein, 15 aa, Homo sapiens
IAAWMATYLNDHLEP

SEQ ID NO: 112870 - protein, 9 aa, Homo sapiens
WMATYLNDH

SEQ ID NO: 112871 - protein, 15 aa, Homo sapiens
VSRIAAWMATYLNDH

SEQ ID NO: 112872 - protein, 9 aa, Homo sapiens
AAWMATYLN

SEQ ID NO: 112873 - protein, 15 aa, Homo sapiens
TVAGVVLLGSLFSRK

SEQ ID NO: 112874 - protein, 9 aa, Homo sapiens
VVLLGSLFS

SEQ ID NO: 112875 - protein, 15 aa, Homo sapiens
RFNRWFLTGMTVAGV

SEQ ID NO: 112876 - protein, 9 aa, Homo sapiens
FLTGMTVAG

SEQ ID NO: 112877 - protein, 15 aa, Homo sapiens
FNRWFLTGMTVAGVV

SEQ ID NO: 112878 - protein, 9 aa, Homo sapiens
FLTGMTVAG

SEQ ID NO: 112879 - protein, 15 aa, Homo sapiens
NRWFLTGMTVAGVVL

SEQ ID NO: 112880 - protein, 9 aa, Homo sapiens
FLTGMTVAG

SEQ ID NO: 112881 - protein, 15 aa, Homo sapiens
ERFNRWFLTGMTVAG

SEQ ID NO: 112882 - protein, 9 aa, Homo sapiens
WFLTGMTVA

SEQ ID NO: 112883 - protein, 15 aa, Homo sapiens
AWMATYLNDHLEPWI

SEQ ID NO: 112884 - protein, 9 aa, Homo sapiens
WMATYLNDH

SEQ ID NO: 112885 - protein, 15 aa, Homo sapiens
RWFLTGMTVAGVVLL

SEQ ID NO: 112886 - protein, 9 aa, Homo sapiens
FLTGMTVAG

SEQ ID NO: 112887 - protein, 15 aa, Homo sapiens
DTFVELYGNNAAAES

SEQ ID NO: 112888 - protein, 9 aa, Homo sapiens
FVELYGNNA

SEQ ID NO: 112889 - protein, 15 aa, Homo sapiens
GWDTFVELYGNNAAA

SEQ ID NO: 112890 - protein, 9 aa, Homo sapiens
FVELYGNNA

SEQ ID NO: 112891 - protein, 15 aa, Homo sapiens
WMATYLNDHLEPWIQ

SEQ ID NO: 112892 - protein, 9 aa, Homo sapiens
WMATYLNDH

SEQ ID NO: 112893 - protein, 15 aa, Homo sapiens
WDTFVELYGNNAAAE

SEQ ID NO: 112894 - protein, 9 aa, Homo sapiens
FVELYGNNA

SEQ ID NO: 112895 - protein, 15 aa, Homo sapiens
GGWDTFVELYGNNAA

SEQ ID NO: 112896 - protein, 9 aa, Homo sapiens
FVELYGNNA

SEQ ID NO: 112897 - protein, 15 aa, Homo sapiens
NGGWDTFVELYGNNA

SEQ ID NO: 112898 - protein, 9 aa, Homo sapiens
GWDTFVELY

SEQ ID NO: 112899 - protein, 15 aa, Homo sapiens
TAYQSFEQVVNELFR

SEQ ID NO: 112900 - protein, 9 aa, Homo sapiens
YQSFEQVVN

SEQ ID NO: 112901 - protein, 15 aa, Homo sapiens
GTAYQSFEQVVNELF

SEQ ID NO: 112902 - protein, 9 aa, Homo sapiens
YQSFEQVVN

SEQ ID NO: 112903 - protein, 15 aa, Homo sapiens
TPGTAYQSFEQVVNE

SEQ ID NO: 112904 - protein, 9 aa, Homo sapiens
YQSFEQVVN

SEQ ID NO: 112905 - protein, 15 aa, Homo sapiens
PGTAYQSFEQVVNEL

SEQ ID NO: 112906 - protein, 9 aa, Homo sapiens
YQSFEQVVN

SEQ ID NO: 112907 - protein, 15 aa, Homo sapiens
ITPGTAYQSFEQVVN

SEQ ID NO: 112908 - protein, 9 aa, Homo sapiens
AYQSFEQVV

SEQ ID NO: 112909 - protein, 15 aa, Homo sapiens
VSRIAAWMATYLNDH

SEQ ID NO: 112910 - protein, 9 aa, Homo sapiens
AAWMATYLN

SEQ ID NO: 112911 - protein, 15 aa, Homo sapiens
LVSRIAAWMATYLND

SEQ ID NO: 112912 - protein, 9 aa, Homo sapiens
AAWMATYLN

SEQ ID NO: 112913 - protein, 15 aa, Homo sapiens
VLVSRIAAWMATYLN

SEQ ID NO: 112914 - protein, 9 aa, Homo sapiens
IAAWMATYL

SEQ ID NO: 112915 - protein, 15 aa, Homo sapiens
SRIAAWMATYLNDHL

SEQ ID NO: 112916 - protein, 9 aa, Homo sapiens
AAWMATYLN

SEQ ID NO: 112917 - protein, 15 aa, Homo sapiens
LRYRRAFSDLTSQLH

SEQ ID NO: 112918 - protein, 9 aa, Homo sapiens
YRRAFSDLT

SEQ ID NO: 112919 - protein, 15 aa, Homo sapiens
FELRYRRAFSDLTSQ

SEQ ID NO: 112920 - protein, 9 aa, Homo sapiens
YRRAFSDLT

SEQ ID NO: 112921 - protein, 15 aa, Homo sapiens
EFELRYRRAFSDLTS

SEQ ID NO: 112922 - protein, 9 aa, Homo sapiens
YRRAFSDLT

SEQ ID NO: 112923 - protein, 15 aa, Homo sapiens
RIAAWMATYLNDHLE

SEQ ID NO: 112924 - protein, 9 aa, Homo sapiens
AAWMATYLN

SEQ ID NO: 112925 - protein, 15 aa, Homo sapiens
AYQSFEQVVNELFRD

SEQ ID NO: 112926 - protein, 9 aa, Homo sapiens
YQSFEQVVN

SEQ ID NO: 112927 - protein, 15 aa, Homo sapiens
YQSFEQVVNELFRDG

SEQ ID NO: 112928 - protein, 9 aa, Homo sapiens
YQSFEQVVN

SEQ ID NO: 112929 - protein, 15 aa, Homo sapiens
ELRYRRAFSDLTSQL

SEQ ID NO: 112930 - protein, 9 aa, Homo sapiens
YRRAFSDLT

SEQ ID NO: 112931 - protein, 15 aa, Homo sapiens
SQKGYSWSQFSDVEE

SEQ ID NO: 112932 - protein, 9 aa, Homo sapiens
GYSWSQFSD

SEQ ID NO: 112933 - protein, 15 aa, Homo sapiens
DEFELRYRRAFSDLT

SEQ ID NO: 112934 - protein, 9 aa, Homo sapiens
LRYRRAFSD

SEQ ID NO: 112935 - protein, 15 aa, Homo sapiens
QKGYSWSQFSDVEEN

SEQ ID NO: 112936 - protein, 9 aa, Homo sapiens
WSQFSDVEE

SEQ ID NO: 112937 - protein, 15 aa, Homo sapiens
RYRRAFSDLTSQLHI

SEQ ID NO: 112938 - protein, 9 aa, Homo sapiens
YRRAFSDLT

SEQ ID NO: 112939 - protein, 15 aa, Homo sapiens
KGYSWSQFSDVEENR

SEQ ID NO: 112940 - protein, 9 aa, Homo sapiens
WSQFSDVEE

SEQ ID NO: 112941 - protein, 15 aa, Homo sapiens
IAAWMATYLNDHLEP

SEQ ID NO: 112942 - protein, 9 aa, Homo sapiens
AAWMATYLN

SEQ ID NO: 112943 - protein, 15 aa, Homo sapiens
GYSWSQFSDVEENRT

SEQ ID NO: 112944 - protein, 9 aa, Homo sapiens
WSQFSDVEE

SEQ ID NO: 112945 - protein, 15 aa, Homo sapiens
KEMQVLVSRIAAWMA

SEQ ID NO: 112946 - protein, 9 aa, Homo sapiens
VLVSRIAAW

SEQ ID NO: 112947 - protein, 15 aa, Homo sapiens
MQVLVSRIAAWMATY

SEQ ID NO: 112948 - protein, 9 aa, Homo sapiens
VLVSRIAAW

SEQ ID NO: 112949 - protein, 15 aa, Homo sapiens
EMQVLVSRIAAWMAT

SEQ ID NO: 112950 - protein, 9 aa, Homo sapiens
VLVSRIAAW

SEQ ID NO: 112951 - protein, 15 aa, Homo sapiens
DKEMQVLVSRIAAWM

SEQ ID NO: 112952 - protein, 9 aa, Homo sapiens
VLVSRIAAW

SEQ ID NO: 112953 - protein, 15 aa, Homo sapiens
QVLVSRIAAWMATYL

SEQ ID NO: 112954 - protein, 9 aa, Homo sapiens
VLVSRIAAW

SEQ ID NO: 112955 - protein, 15 aa, Homo sapiens
ETPSAINGNPSWHLA

SEQ ID NO: 112956 - protein, 9 aa, Homo sapiens
INGNPSWHL

SEQ ID NO: 112957 - protein, 15 aa, Homo sapiens
METPSAINGNPSWHL

SEQ ID NO: 112958 - protein, 9 aa, Homo sapiens
AINGNPSWH

SEQ ID NO: 112959 - protein, 15 aa, Homo sapiens
VDKEMQVLVSRIAAW

SEQ ID NO: 112960 - protein, 9 aa, Homo sapiens
MQVLVSRIA

SEQ ID NO: 112961 - protein, 15 aa, Homo sapiens
TPSAINGNPSWHLAD

SEQ ID NO: 112962 - protein, 9 aa, Homo sapiens
INGNPSWHL

SEQ ID NO: 112963 - protein, 15 aa, Homo sapiens
PSAINGNPSWHLADS

SEQ ID NO: 112964 - protein, 9 aa, Homo sapiens
INGNPSWHL

SEQ ID NO: 112965 - protein, 15 aa, Homo sapiens
VLVSRIAAWMATYLN

SEQ ID NO: 112966 - protein, 9 aa, Homo sapiens
VLVSRIAAW

SEQ ID NO: 112967 - protein, 15 aa, Homo sapiens
SAINGNPSWHLADSP

SEQ ID NO: 112968 - protein, 9 aa, Homo sapiens
INGNPSWHL

SEQ ID NO: 112969 - protein, 15 aa, Homo sapiens
LRYRRAFSDLTSQLH

SEQ ID NO: 112970 - protein, 9 aa, Homo sapiens
YRRAFSDLT

SEQ ID NO: 112971 - protein, 15 aa, Homo sapiens
RYRRAFSDLTSQLHI

SEQ ID NO: 112972 - protein, 9 aa, Homo sapiens
FSDLTSQLH

SEQ ID NO: 112973 - protein, 15 aa, Homo sapiens
YRRAFSDLTSQLHIT

SEQ ID NO: 112974 - protein, 9 aa, Homo sapiens
FSDLTSQLH

SEQ ID NO: 112975 - protein, 15 aa, Homo sapiens
INGNPSWHLADSPAV

SEQ ID NO: 112976 - protein, 9 aa, Homo sapiens
INGNPSWHL

SEQ ID NO: 112977 - protein, 15 aa, Homo sapiens
PSWHLADSPAVNGAT

SEQ ID NO: 112978 - protein, 9 aa, Homo sapiens
WHLADSPAV

SEQ ID NO: 112979 - protein, 15 aa, Homo sapiens
NPSWHLADSPAVNGA

SEQ ID NO: 112980 - protein, 9 aa, Homo sapiens
WHLADSPAV

SEQ ID NO: 112981 - protein, 15 aa, Homo sapiens
GNPSWHLADSPAVNG

SEQ ID NO: 112982 - protein, 9 aa, Homo sapiens
WHLADSPAV

SEQ ID NO: 112983 - protein, 15 aa, Homo sapiens
INGNPSWHLADSPAV

SEQ ID NO: 112984 - protein, 9 aa, Homo sapiens
SWHLADSPA

SEQ ID NO: 112985 - protein, 15 aa, Homo sapiens
NGNPSWHLADSPAVN

SEQ ID NO: 112986 - protein, 9 aa, Homo sapiens
WHLADSPAV

SEQ ID NO: 112987 - protein, 15 aa, Homo sapiens
SWHLADSPAVNGATG

SEQ ID NO: 112988 - protein, 9 aa, Homo sapiens
WHLADSPAV

SEQ ID NO: 112989 - protein, 15 aa, Homo sapiens
WHLADSPAVNGATGH

SEQ ID NO: 112990 - protein, 9 aa, Homo sapiens
WHLADSPAV

SEQ ID NO: 112991 - protein, 15 aa, Homo sapiens
RWFLTGMTVAGVVLL

SEQ ID NO: 112992 - protein, 9 aa, Homo sapiens
FLTGMTVAG

SEQ ID NO: 112993 - protein, 15 aa, Homo sapiens
WFLTGMTVAGVVLLG

SEQ ID NO: 112994 - protein, 9 aa, Homo sapiens
MTVAGVVLL

SEQ ID NO: 112995 - protein, 15 aa, Homo sapiens
FLTGMTVAGVVLLGS

SEQ ID NO: 112996 - protein, 9 aa, Homo sapiens
MTVAGVVLL

SEQ ID NO: 112997 - protein, 15 aa, Homo sapiens
KEMQVLVSRIAAWMA

SEQ ID NO: 112998 - protein, 9 aa, Homo sapiens
MQVLVSRIA

SEQ ID NO: 112999 - protein, 15 aa, Homo sapiens
FRDGVNWGRIVAFFS

SEQ ID NO: 113000 - protein, 9 aa, Homo sapiens
GVNWGRIVA

SEQ ID NO: 113001 - protein, 15 aa, Homo sapiens
DKEMQVLVSRIAAWM

SEQ ID NO: 113002 - protein, 9 aa, Homo sapiens
MQVLVSRIA

SEQ ID NO: 113003 - protein, 15 aa, Homo sapiens
VDKEMQVLVSRIAAW

SEQ ID NO: 113004 - protein, 9 aa, Homo sapiens
MQVLVSRIA

SEQ ID NO: 113005 - protein, 15 aa, Homo sapiens
RDGVNWGRIVAFFSF

SEQ ID NO: 113006 - protein, 9 aa, Homo sapiens
GVNWGRIVA

SEQ ID NO: 113007 - protein, 15 aa, Homo sapiens
SVDKEMQVLVSRIAA

SEQ ID NO: 113008 - protein, 9 aa, Homo sapiens
MQVLVSRIA

SEQ ID NO: 113009 - protein, 15 aa, Homo sapiens
MTVAGVVLLGSLFSR

SEQ ID NO: 113010 - protein, 9 aa, Homo sapiens
VVLLGSLFS

SEQ ID NO: 113011 - protein, 15 aa, Homo sapiens
TGMTVAGVVLLGSLF

SEQ ID NO: 113012 - protein, 9 aa, Homo sapiens
MTVAGVVLL

SEQ ID NO: 113013 - protein, 15 aa, Homo sapiens
FLTGMTVAGVVLLGS

SEQ ID NO: 113014 - protein, 9 aa, Homo sapiens
MTVAGVVLL

SEQ ID NO: 113015 - protein, 15 aa, Homo sapiens
GMTVAGVVLLGSLFS

SEQ ID NO: 113016 - protein, 9 aa, Homo sapiens
MTVAGVVLL

SEQ ID NO: 113017 - protein, 15 aa, Homo sapiens
RWFLTGMTVAGVVLL

SEQ ID NO: 113018 - protein, 9 aa, Homo sapiens
FLTGMTVAG

SEQ ID NO: 113019 - protein, 15 aa, Homo sapiens
LTGMTVAGVVLLGSL

SEQ ID NO: 113020 - protein, 9 aa, Homo sapiens
MTVAGVVLL

SEQ ID NO: 113021 - protein, 15 aa, Homo sapiens
WFLTGMTVAGVVLLG

SEQ ID NO: 113022 - protein, 9 aa, Homo sapiens
MTVAGVVLL

SEQ ID NO: 113023 - protein, 15 aa, Homo sapiens
DTFVELYGNNAAAES

SEQ ID NO: 113024 - protein, 9 aa, Homo sapiens
VELYGNNAA

SEQ ID NO: 113025 - protein, 15 aa, Homo sapiens
TFVELYGNNAAAESR

SEQ ID NO: 113026 - protein, 9 aa, Homo sapiens
YGNNAAAES

SEQ ID NO: 113027 - protein, 15 aa, Homo sapiens
FVELYGNNAAAESRK

SEQ ID NO: 113028 - protein, 9 aa, Homo sapiens
YGNNAAAES

SEQ ID NO: 113029 - protein, 15 aa, Homo sapiens
VELYGNNAAAESRKG

SEQ ID NO: 113030 - protein, 9 aa, Homo sapiens
YGNNAAAES

SEQ ID NO: 113031 - protein, 15 aa, Homo sapiens
TVAGVVLLGSLFSRK

SEQ ID NO: 113032 - protein, 9 aa, Homo sapiens
VVLLGSLFS

SEQ ID NO: 113033 - protein, 15 aa, Homo sapiens
ELYGNNAAAESRKGQ

SEQ ID NO: 113034 - protein, 9 aa, Homo sapiens
YGNNAAAES

SEQ ID NO: 113035 - protein, 15 aa, Homo sapiens
TVAGVVLLGSLFSRK

SEQ ID NO: 113036 - protein, 9 aa, Homo sapiens
VLLGSLFSR

SEQ ID NO: 113037 - protein, 15 aa, Homo sapiens
MTVAGVVLLGSLFSR

SEQ ID NO: 113038 - protein, 9 aa, Homo sapiens
VVLLGSLFS

SEQ ID NO: 113039 - protein, 15 aa, Homo sapiens
RELVVDFLSYKLSQK

SEQ ID NO: 113040 - protein, 9 aa, Homo sapiens
LVVDFLSYK

SEQ ID NO: 113041 - protein, 15 aa, Homo sapiens
ELVVDFLSYKLSQKG

SEQ ID NO: 113042 - protein, 9 aa, Homo sapiens
FLSYKLSQK

SEQ ID NO: 113043 - protein, 15 aa, Homo sapiens
KEMQVLVSRIAAWMA

SEQ ID NO: 113044 - protein, 9 aa, Homo sapiens
MQVLVSRIA

SEQ ID NO: 113045 - protein, 15 aa, Homo sapiens
DKEMQVLVSRIAAWM

SEQ ID NO: 113046 - protein, 9 aa, Homo sapiens
MQVLVSRIA

SEQ ID NO: 113047 - protein, 15 aa, Homo sapiens
RFNRWFLTGMTVAGV

SEQ ID NO: 113048 - protein, 9 aa, Homo sapiens
FNRWFLTGM

SEQ ID NO: 113049 - protein, 15 aa, Homo sapiens
SRIAAWMATYLNDHL

SEQ ID NO: 113050 - protein, 9 aa, Homo sapiens
WMATYLNDH

SEQ ID NO: 113051 - protein, 15 aa, Homo sapiens
FNRWFLTGMTVAGVV

SEQ ID NO: 113052 - protein, 9 aa, Homo sapiens
LTGMTVAGV

SEQ ID NO: 113053 - protein, 15 aa, Homo sapiens
LVVDFLSYKLSQKGY

SEQ ID NO: 113054 - protein, 9 aa, Homo sapiens
FLSYKLSQK

SEQ ID NO: 113055 - protein, 15 aa, Homo sapiens
NRELVVDFLSYKLSQ

SEQ ID NO: 113056 - protein, 9 aa, Homo sapiens
LVVDFLSYK

SEQ ID NO: 113057 - protein, 15 aa, Homo sapiens
VNWGRIVAFFSFGGA

SEQ ID NO: 113058 - protein, 9 aa, Homo sapiens
IVAFFSFGG

SEQ ID NO: 113059 - protein, 15 aa, Homo sapiens
SNRELVVDFLSYKLS

SEQ ID NO: 113060 - protein, 9 aa, Homo sapiens
LVVDFLSYK

SEQ ID NO: 113061 - protein, 15 aa, Homo sapiens
MQVLVSRIAAWMATY

SEQ ID NO: 113062 - protein, 9 aa, Homo sapiens
LVSRIAAWM

SEQ ID NO: 113063 - protein, 15 aa, Homo sapiens
VSRIAAWMATYLNDH

SEQ ID NO: 113064 - protein, 9 aa, Homo sapiens
IAAWMATYL

SEQ ID NO: 113065 - protein, 15 aa, Homo sapiens
EMQVLVSRIAAWMAT

SEQ ID NO: 113066 - protein, 9 aa, Homo sapiens
VLVSRIAAW

SEQ ID NO: 113067 - protein, 15 aa, Homo sapiens
RIAAWMATYLNDHLE

SEQ ID NO: 113068 - protein, 9 aa, Homo sapiens
WMATYLNDH

SEQ ID NO: 113069 - protein, 15 aa, Homo sapiens
NELFRDGVNWGRIVA

SEQ ID NO: 113070 - protein, 9 aa, Homo sapiens
LFRDGVNWG

SEQ ID NO: 113071 - protein, 15 aa, Homo sapiens
QVVNELFRDGVNWGR

SEQ ID NO: 113072 - protein, 9 aa, Homo sapiens
LFRDGVNWG

SEQ ID NO: 113073 - protein, 15 aa, Homo sapiens
VVNELFRDGVNWGRI

SEQ ID NO: 113074 - protein, 9 aa, Homo sapiens
LFRDGVNWG

SEQ ID NO: 113075 - protein, 15 aa, Homo sapiens
IAAWMATYLNDHLEP

SEQ ID NO: 113076 - protein, 9 aa, Homo sapiens
WMATYLNDH

SEQ ID NO: 113077 - protein, 15 aa, Homo sapiens
WGRIVAFFSFGGALC

SEQ ID NO: 113078 - protein, 9 aa, Homo sapiens
IVAFFSFGG

SEQ ID NO: 113079 - protein, 15 aa, Homo sapiens
NWGRIVAFFSFGGAL

SEQ ID NO: 113080 - protein, 9 aa, Homo sapiens
IVAFFSFGG

SEQ ID NO: 113081 - protein, 15 aa, Homo sapiens
QERFNRWFLTGMTVA

SEQ ID NO: 113082 - protein, 9 aa, Homo sapiens
FNRWFLTGM

SEQ ID NO: 113083 - protein, 15 aa, Homo sapiens
ERFNRWFLTGMTVAG

SEQ ID NO: 113084 - protein, 9 aa, Homo sapiens
FNRWFLTGM

SEQ ID NO: 113085 - protein, 15 aa, Homo sapiens
GRIVAFFSFGGALCV

SEQ ID NO: 113086 - protein, 9 aa, Homo sapiens
IVAFFSFGG

SEQ ID NO: 113087 - protein, 15 aa, Homo sapiens
VVDFLSYKLSQKGYS

SEQ ID NO: 113088 - protein, 9 aa, Homo sapiens
FLSYKLSQK

SEQ ID NO: 113089 - protein, 15 aa, Homo sapiens
VDKEMQVLVSRIAAW

SEQ ID NO: 113090 - protein, 9 aa, Homo sapiens
MQVLVSRIA

SEQ ID NO: 113091 - protein, 15 aa, Homo sapiens
AAWMATYLNDHLEPW

SEQ ID NO: 113092 - protein, 9 aa, Homo sapiens
WMATYLNDH

SEQ ID NO: 113093 - protein, 15 aa, Homo sapiens
QSNRELVVDFLSYKL

SEQ ID NO: 113094 - protein, 9 aa, Homo sapiens
LVVDFLSYK

SEQ ID NO: 113095 - protein, 15 aa, Homo sapiens
VNELFRDGVNWGRIV

SEQ ID NO: 113096 - protein, 9 aa, Homo sapiens
LFRDGVNWG

SEQ ID NO: 113097 - protein, 15 aa, Homo sapiens
GVNWGRIVAFFSFGG

SEQ ID NO: 113098 - protein, 9 aa, Homo sapiens
VNWGRIVAF

SEQ ID NO: 113099 - protein, 15 aa, Homo sapiens
ELFRDGVNWGRIVAF

SEQ ID NO: 113100 - protein, 9 aa, Homo sapiens
LFRDGVNWG

SEQ ID NO: 113101 - protein, 15 aa, Homo sapiens
GMTVAGVVLLGSLFS

SEQ ID NO: 113102 - protein, 9 aa, Homo sapiens
VAGVVLLGS

SEQ ID NO: 113103 - protein, 15 aa, Homo sapiens
EQVVNELFRDGVNWG

SEQ ID NO: 113104 - protein, 9 aa, Homo sapiens
VVNELFRDG

SEQ ID NO: 113105 - protein, 15 aa, Homo sapiens
RIVAFFSFGGALCVE

SEQ ID NO: 113106 - protein, 9 aa, Homo sapiens
IVAFFSFGG

SEQ ID NO: 113107 - protein, 15 aa, Homo sapiens
NRWFLTGMTVAGVVL

SEQ ID NO: 113108 - protein, 9 aa, Homo sapiens
LTGMTVAGV

SEQ ID NO: 113109 - protein, 15 aa, Homo sapiens
LRYRRAFSDLTSQLH

SEQ ID NO: 113110 - protein, 9 aa, Homo sapiens
YRRAFSDLT

SEQ ID NO: 113111 - protein, 15 aa, Homo sapiens
RYRRAFSDLTSQLHI

SEQ ID NO: 113112 - protein, 9 aa, Homo sapiens
FSDLTSQLH

SEQ ID NO: 113113 - protein, 15 aa, Homo sapiens
DFSWLSLKTLLSLAL

SEQ ID NO: 113114 - protein, 9 aa, Homo sapiens
WLSLKTLLS

SEQ ID NO: 113115 - protein, 15 aa, Homo sapiens
FSWLSLKTLLSLALV

SEQ ID NO: 113116 - protein, 9 aa, Homo sapiens
LKTLLSLAL

SEQ ID NO: 113117 - protein, 15 aa, Homo sapiens
WLSLKTLLSLALVGA

SEQ ID NO: 113118 - protein, 9 aa, Homo sapiens
LKTLLSLAL

SEQ ID NO: 113119 - protein, 15 aa, Homo sapiens
LSLKTLLSLALVGAC

SEQ ID NO: 113120 - protein, 9 aa, Homo sapiens
LKTLLSLAL

SEQ ID NO: 113121 - protein, 15 aa, Homo sapiens
SWLSLKTLLSLALVG

SEQ ID NO: 113122 - protein, 9 aa, Homo sapiens
LKTLLSLAL

SEQ ID NO: 113123 - protein, 15 aa, Homo sapiens
SLKTLLSLALVGACI

SEQ ID NO: 113124 - protein, 9 aa, Homo sapiens
LKTLLSLAL

SEQ ID NO: 113125 - protein, 15 aa, Homo sapiens
LKTLLSLALVGACIT

SEQ ID NO: 113126 - protein, 9 aa, Homo sapiens
LKTLLSLAL

SEQ ID NO: 113127 - protein, 15 aa, Homo sapiens
RTSPLQTPAAPGAAA

SEQ ID NO: 113128 - protein, 9 aa, Homo sapiens
LQTPAAPGA

SEQ ID NO: 113129 - protein, 15 aa, Homo sapiens
TSPLQTPAAPGAAAG

SEQ ID NO: 113130 - protein, 9 aa, Homo sapiens
LQTPAAPGA

SEQ ID NO: 113131 - protein, 15 aa, Homo sapiens
SPLQTPAAPGAAAGP

SEQ ID NO: 113132 - protein, 9 aa, Homo sapiens
LQTPAAPGA

SEQ ID NO: 113133 - protein, 15 aa, Homo sapiens
VARTSPLQTPAAPGA

SEQ ID NO: 113134 - protein, 9 aa, Homo sapiens
TSPLQTPAA

SEQ ID NO: 113135 - protein, 15 aa, Homo sapiens
ARTSPLQTPAAPGAA

SEQ ID NO: 113136 - protein, 9 aa, Homo sapiens
LQTPAAPGA

SEQ ID NO: 113137 - protein, 15 aa, Homo sapiens
LFDFSWLSLKTLLSL

SEQ ID NO: 113138 - protein, 9 aa, Homo sapiens
WLSLKTLLS

SEQ ID NO: 113139 - protein, 15 aa, Homo sapiens
PLFDFSWLSLKTLLS

SEQ ID NO: 113140 - protein, 9 aa, Homo sapiens
FSWLSLKTL

SEQ ID NO: 113141 - protein, 15 aa, Homo sapiens
FDFSWLSLKTLLSLA

SEQ ID NO: 113142 - protein, 9 aa, Homo sapiens
WLSLKTLLS

SEQ ID NO: 113143 - protein, 15 aa, Homo sapiens
TLLSLALVGACITLG

SEQ ID NO: 113144 - protein, 9 aa, Homo sapiens
LLSLALVGA

SEQ ID NO: 113145 - protein, 15 aa, Homo sapiens
LLSLALVGACITLGA

SEQ ID NO: 113146 - protein, 9 aa, Homo sapiens
LVGACITLG

SEQ ID NO: 113147 - protein, 15 aa, Homo sapiens
LALVGACITLGAYLG

SEQ ID NO: 113148 - protein, 9 aa, Homo sapiens
LVGACITLG

SEQ ID NO: 113149 - protein, 15 aa, Homo sapiens
LSLALVGACITLGAY

SEQ ID NO: 113150 - protein, 9 aa, Homo sapiens
LVGACITLG

SEQ ID NO: 113151 - protein, 15 aa, Homo sapiens
SLALVGACITLGAYL

SEQ ID NO: 113152 - protein, 9 aa, Homo sapiens
LVGACITLG

SEQ ID NO: 113153 - protein, 15 aa, Homo sapiens
RRYRRDFAEMSSQLH

SEQ ID NO: 113154 - protein, 9 aa, Homo sapiens
YRRDFAEMS

SEQ ID NO: 113155 - protein, 15 aa, Homo sapiens
LQTPAAPGAAAGPAL

SEQ ID NO: 113156 - protein, 9 aa, Homo sapiens
LQTPAAPGA

SEQ ID NO: 113157 - protein, 15 aa, Homo sapiens
PLQTPAAPGAAAGPA

SEQ ID NO: 113158 - protein, 9 aa, Homo sapiens
LQTPAAPGA

SEQ ID NO: 113159 - protein, 15 aa, Homo sapiens
YRRDFAEMSSQLHLT

SEQ ID NO: 113160 - protein, 9 aa, Homo sapiens
FAEMSSQLH

SEQ ID NO: 113161 - protein, 15 aa, Homo sapiens
RYRRDFAEMSSQLHL

SEQ ID NO: 113162 - protein, 9 aa, Homo sapiens
FAEMSSQLH

SEQ ID NO: 113163 - protein, 15 aa, Homo sapiens
KTLLSLALVGACITL

SEQ ID NO: 113164 - protein, 9 aa, Homo sapiens
LLSLALVGA

SEQ ID NO: 113165 - protein, 15 aa, Homo sapiens
RRDFAEMSSQLHLTP

SEQ ID NO: 113166 - protein, 9 aa, Homo sapiens
FAEMSSQLH

SEQ ID NO: 113167 - protein, 15 aa, Homo sapiens
RDFAEMSSQLHLTPF

SEQ ID NO: 113168 - protein, 9 aa, Homo sapiens
FAEMSSQLH

SEQ ID NO: 113169 - protein, 15 aa, Homo sapiens
DAGDVGAAPPGAAPA

SEQ ID NO: 113170 - protein, 9 aa, Homo sapiens
VGAAPPGAA

SEQ ID NO: 113171 - protein, 15 aa, Homo sapiens
AGDVGAAPPGAAPAP

SEQ ID NO: 113172 - protein, 9 aa, Homo sapiens
VGAAPPGAA

SEQ ID NO: 113173 - protein, 15 aa, Homo sapiens
EWDAGDVGAAPPGAA

SEQ ID NO: 113174 - protein, 9 aa, Homo sapiens
DVGAAPPGA

SEQ ID NO: 113175 - protein, 15 aa, Homo sapiens
WDAGDVGAAPPGAAP

SEQ ID NO: 113176 - protein, 9 aa, Homo sapiens
VGAAPPGAA

SEQ ID NO: 113177 - protein, 15 aa, Homo sapiens
GDVGAAPPGAAPAPG

SEQ ID NO: 113178 - protein, 9 aa, Homo sapiens
VGAAPPGAA

SEQ ID NO: 113179 - protein, 15 aa, Homo sapiens
RPLFDFSWLSLKTLL

SEQ ID NO: 113180 - protein, 9 aa, Homo sapiens
FSWLSLKTL

SEQ ID NO: 113181 - protein, 15 aa, Homo sapiens
ALVGACITLGAYLGH

SEQ ID NO: 113182 - protein, 9 aa, Homo sapiens
LVGACITLG

SEQ ID NO: 113183 - protein, 15 aa, Homo sapiens
MRPLFDFSWLSLKTL

SEQ ID NO: 113184 - protein, 9 aa, Homo sapiens
DFSWLSLKT

SEQ ID NO: 113185 - protein, 15 aa, Homo sapiens
LVGACITLGAYLGHK

SEQ ID NO: 113186 - protein, 9 aa, Homo sapiens
LVGACITLG

SEQ ID NO: 113187 - protein, 15 aa, Homo sapiens
EIVMKYIHYKLSQRG

SEQ ID NO: 113188 - protein, 9 aa, Homo sapiens
MKYIHYKLS

SEQ ID NO: 113189 - protein, 15 aa, Homo sapiens
IVMKYIHYKLSQRGY

SEQ ID NO: 113190 - protein, 9 aa, Homo sapiens
IHYKLSQRG

SEQ ID NO: 113191 - protein, 15 aa, Homo sapiens
VMKYIHYKLSQRGYE

SEQ ID NO: 113192 - protein, 9 aa, Homo sapiens
IHYKLSQRG

SEQ ID NO: 113193 - protein, 15 aa, Homo sapiens
MKYIHYKLSQRGYEW

SEQ ID NO: 113194 - protein, 9 aa, Homo sapiens
IHYKLSQRG

SEQ ID NO: 113195 - protein, 15 aa, Homo sapiens
KYIHYKLSQRGYEWD

SEQ ID NO: 113196 - protein, 9 aa, Homo sapiens
IHYKLSQRG

SEQ ID NO: 113197 - protein, 15 aa, Homo sapiens
REMSPLVDNIALWMT

SEQ ID NO: 113198 - protein, 9 aa, Homo sapiens
LVDNIALWM

SEQ ID NO: 113199 - protein, 15 aa, Homo sapiens
EMSPLVDNIALWMTE

SEQ ID NO: 113200 - protein, 9 aa, Homo sapiens
VDNIALWMT

SEQ ID NO: 113201 - protein, 15 aa, Homo sapiens
SPLVDNIALWMTEYL

SEQ ID NO: 113202 - protein, 9 aa, Homo sapiens
VDNIALWMT

SEQ ID NO: 113203 - protein, 15 aa, Homo sapiens
MSPLVDNIALWMTEY

SEQ ID NO: 113204 - protein, 9 aa, Homo sapiens
VDNIALWMT

SEQ ID NO: 113205 - protein, 15 aa, Homo sapiens
RDPVARTSPLQTPAA

SEQ ID NO: 113206 - protein, 9 aa, Homo sapiens
VARTSPLQT

SEQ ID NO: 113207 - protein, 15 aa, Homo sapiens
DPVARTSPLQTPAAP

SEQ ID NO: 113208 - protein, 9 aa, Homo sapiens
VARTSPLQT

SEQ ID NO: 113209 - protein, 15 aa, Homo sapiens
PLVDNIALWMTEYLN

SEQ ID NO: 113210 - protein, 9 aa, Homo sapiens
VDNIALWMT

SEQ ID NO: 113211 - protein, 15 aa, Homo sapiens
DAFVELYGPSMRPLF

SEQ ID NO: 113212 - protein, 9 aa, Homo sapiens
FVELYGPSM

SEQ ID NO: 113213 - protein, 15 aa, Homo sapiens
DVGAAPPGAAPAPGI

SEQ ID NO: 113214 - protein, 9 aa, Homo sapiens
VGAAPPGAA

SEQ ID NO: 113215 - protein, 15 aa, Homo sapiens
SRDPVARTSPLQTPA

SEQ ID NO: 113216 - protein, 9 aa, Homo sapiens
VARTSPLQT

SEQ ID NO: 113217 - protein, 15 aa, Homo sapiens
WDAFVELYGPSMRPL

SEQ ID NO: 113218 - protein, 9 aa, Homo sapiens
FVELYGPSM

SEQ ID NO: 113219 - protein, 15 aa, Homo sapiens
ASRDPVARTSPLQTP

SEQ ID NO: 113220 - protein, 9 aa, Homo sapiens
VARTSPLQT

SEQ ID NO: 113221 - protein, 15 aa, Homo sapiens
LSPVPPVVHLTLRQA

SEQ ID NO: 113222 - protein, 9 aa, Homo sapiens
LSPVPPVVH

SEQ ID NO: 113223 - protein, 15 aa, Homo sapiens
DFAEMSSQLHLTPFT

SEQ ID NO: 113224 - protein, 9 aa, Homo sapiens
FAEMSSQLH

SEQ ID NO: 113225 - protein, 15 aa, Homo sapiens
VPPVVHLTLRQAGDD

SEQ ID NO: 113226 - protein, 9 aa, Homo sapiens
VVHLTLRQA

SEQ ID NO: 113227 - protein, 15 aa, Homo sapiens
SPVPPVVHLTLRQAG

SEQ ID NO: 113228 - protein, 9 aa, Homo sapiens
VVHLTLRQA

SEQ ID NO: 113229 - protein, 15 aa, Homo sapiens
PVPPVVHLTLRQAGD

SEQ ID NO: 113230 - protein, 9 aa, Homo sapiens
VVHLTLRQA

SEQ ID NO: 113231 - protein, 15 aa, Homo sapiens
FAEMSSQLHLTPFTA

SEQ ID NO: 113232 - protein, 9 aa, Homo sapiens
FAEMSSQLH

SEQ ID NO: 113233 - protein, 15 aa, Homo sapiens
VGAAPPGAAPAPGIF

SEQ ID NO: 113234 - protein, 9 aa, Homo sapiens
VGAAPPGAA

SEQ ID NO: 113235 - protein, 15 aa, Homo sapiens
PPVVHLTLRQAGDDF

SEQ ID NO: 113236 - protein, 9 aa, Homo sapiens
VVHLTLRQA

SEQ ID NO: 113237 - protein, 15 aa, Homo sapiens
AAAGPALSPVPPVVH

SEQ ID NO: 113238 - protein, 9 aa, Homo sapiens
AAAGPALSP

SEQ ID NO: 113239 - protein, 15 aa, Homo sapiens
ESVNREMSPLVDNIA

SEQ ID NO: 113240 - protein, 9 aa, Homo sapiens
VNREMSPLV

SEQ ID NO: 113241 - protein, 15 aa, Homo sapiens
AASRDPVARTSPLQT

SEQ ID NO: 113242 - protein, 9 aa, Homo sapiens
SRDPVARTS

SEQ ID NO: 113243 - protein, 15 aa, Homo sapiens
SQLHLTPFTARGRFA

SEQ ID NO: 113244 - protein, 9 aa, Homo sapiens
LTPFTARGR

SEQ ID NO: 113245 - protein, 15 aa, Homo sapiens
MSSQLHLTPFTARGR

SEQ ID NO: 113246 - protein, 9 aa, Homo sapiens
LHLTPFTAR

SEQ ID NO: 113247 - protein, 15 aa, Homo sapiens
SSQLHLTPFTARGRF

SEQ ID NO: 113248 - protein, 9 aa, Homo sapiens
LTPFTARGR

SEQ ID NO: 113249 - protein, 15 aa, Homo sapiens
AAGPALSPVPPVVHL

SEQ ID NO: 113250 - protein, 9 aa, Homo sapiens
LSPVPPVVH

SEQ ID NO: 113251 - protein, 15 aa, Homo sapiens
QLHLTPFTARGRFAT

SEQ ID NO: 113252 - protein, 9 aa, Homo sapiens
LTPFTARGR

SEQ ID NO: 113253 - protein, 15 aa, Homo sapiens
AFVELYGPSMRPLFD

SEQ ID NO: 113254 - protein, 9 aa, Homo sapiens
LYGPSMRPL

SEQ ID NO: 113255 - protein, 15 aa, Homo sapiens
VMCVESVNREMSPLV

SEQ ID NO: 113256 - protein, 9 aa, Homo sapiens
VMCVESVNR

SEQ ID NO: 113257 - protein, 15 aa, Homo sapiens
CVESVNREMSPLVDN

SEQ ID NO: 113258 - protein, 9 aa, Homo sapiens
VNREMSPLV

SEQ ID NO: 113259 - protein, 15 aa, Homo sapiens
VESVNREMSPLVDNI

SEQ ID NO: 113260 - protein, 9 aa, Homo sapiens
VNREMSPLV

SEQ ID NO: 113261 - protein, 15 aa, Homo sapiens
FVELYGPSMRPLFDF

SEQ ID NO: 113262 - protein, 9 aa, Homo sapiens
LYGPSMRPL

SEQ ID NO: 113263 - protein, 15 aa, Homo sapiens
MCVESVNREMSPLVD

SEQ ID NO: 113264 - protein, 9 aa, Homo sapiens
VNREMSPLV

SEQ ID NO: 113265 - protein, 15 aa, Homo sapiens
LHLTPFTARGRFATV

SEQ ID NO: 113266 - protein, 9 aa, Homo sapiens
LTPFTARGR

SEQ ID NO: 113267 - protein, 15 aa, Homo sapiens
AGPALSPVPPVVHLT

SEQ ID NO: 113268 - protein, 9 aa, Homo sapiens
LSPVPPVVH

SEQ ID NO: 113269 - protein, 15 aa, Homo sapiens
GPALSPVPPVVHLTL

SEQ ID NO: 113270 - protein, 9 aa, Homo sapiens
LSPVPPVVH

SEQ ID NO: 113271 - protein, 15 aa, Homo sapiens
VAFFEFGGVMCVESV

SEQ ID NO: 113272 - protein, 9 aa, Homo sapiens
FEFGGVMCV

SEQ ID NO: 113273 - protein, 15 aa, Homo sapiens
AFFEFGGVMCVESVN

SEQ ID NO: 113274 - protein, 9 aa, Homo sapiens
FEFGGVMCV

SEQ ID NO: 113275 - protein, 15 aa, Homo sapiens
PGIFSSQPGHTPHPA

SEQ ID NO: 113276 - protein, 9 aa, Homo sapiens
FSSQPGHTP

SEQ ID NO: 113277 - protein, 15 aa, Homo sapiens
VDNIALWMTEYLNRH

SEQ ID NO: 113278 - protein, 9 aa, Homo sapiens
VDNIALWMT

SEQ ID NO: 113279 - protein, 15 aa, Homo sapiens
APAPGIFSSQPGHTP

SEQ ID NO: 113280 - protein, 9 aa, Homo sapiens
IFSSQPGHT

SEQ ID NO: 113281 - protein, 15 aa, Homo sapiens
PALSPVPPVVHLTLR

SEQ ID NO: 113282 - protein, 9 aa, Homo sapiens
LSPVPPVVH

SEQ ID NO: 113283 - protein, 15 aa, Homo sapiens
IVAFFEFGGVMCVES

SEQ ID NO: 113284 - protein, 9 aa, Homo sapiens
FEFGGVMCV

SEQ ID NO: 113285 - protein, 15 aa, Homo sapiens
PVARTSPLQTPAAPG

SEQ ID NO: 113286 - protein, 9 aa, Homo sapiens
VARTSPLQT

SEQ ID NO: 113287 - protein, 15 aa, Homo sapiens
APGIFSSQPGHTPHP

SEQ ID NO: 113288 - protein, 9 aa, Homo sapiens
FSSQPGHTP

SEQ ID NO: 113289 - protein, 15 aa, Homo sapiens
HLTPFTARGRFATVV

SEQ ID NO: 113290 - protein, 9 aa, Homo sapiens
LTPFTARGR

SEQ ID NO: 113291 - protein, 15 aa, Homo sapiens
LTPFTARGRFATVVE

SEQ ID NO: 113292 - protein, 9 aa, Homo sapiens
ARGRFATVV

SEQ ID NO: 113293 - protein, 15 aa, Homo sapiens
ELFRDGVNWGRIVAF

SEQ ID NO: 113294 - protein, 9 aa, Homo sapiens
FRDGVNWGR

SEQ ID NO: 113295 - protein, 15 aa, Homo sapiens
PAPGIFSSQPGHTPH

SEQ ID NO: 113296 - protein, 9 aa, Homo sapiens
FSSQPGHTP

SEQ ID NO: 113297 - protein, 15 aa, Homo sapiens
FRDGVNWGRIVAFFE

SEQ ID NO: 113298 - protein, 9 aa, Homo sapiens
VNWGRIVAF

SEQ ID NO: 113299 - protein, 15 aa, Homo sapiens
LVDNIALWMTEYLNR

SEQ ID NO: 113300 - protein, 9 aa, Homo sapiens
VDNIALWMT

SEQ ID NO: 113301 - protein, 15 aa, Homo sapiens
YIHYKLSQRGYEWDA

SEQ ID NO: 113302 - protein, 9 aa, Homo sapiens
IHYKLSQRG

SEQ ID NO: 113303 - protein, 15 aa, Homo sapiens
LFRDGVNWGRIVAFF

SEQ ID NO: 113304 - protein, 9 aa, Homo sapiens
VNWGRIVAF

SEQ ID NO: 113305 - protein, 15 aa, Homo sapiens
IHYKLSQRGYEWDAG

SEQ ID NO: 113306 - protein, 9 aa, Homo sapiens
IHYKLSQRG

SEQ ID NO: 113307 - protein, 15 aa, Homo sapiens
GIFSSQPGHTPHPAA

SEQ ID NO: 113308 - protein, 9 aa, Homo sapiens
FSSQPGHTP

SEQ ID NO: 113309 - protein, 15 aa, Homo sapiens
AAPGAAAGPALSPVP

SEQ ID NO: 113310 - protein, 9 aa, Homo sapiens
AAAGPALSP

SEQ ID NO: 113311 - protein, 15 aa, Homo sapiens
RDGVNWGRIVAFFEF

SEQ ID NO: 113312 - protein, 9 aa, Homo sapiens
VNWGRIVAF

SEQ ID NO: 113313 - protein, 15 aa, Homo sapiens
TPAAPGAAAGPALSP

SEQ ID NO: 113314 - protein, 9 aa, Homo sapiens
GAAAGPALS

SEQ ID NO: 113315 - protein, 15 aa, Homo sapiens
GWDAFVELYGPSMRP

SEQ ID NO: 113316 - protein, 9 aa, Homo sapiens
FVELYGPSM

SEQ ID NO: 113317 - protein, 15 aa, Homo sapiens
PAAPGAAAGPALSPV

SEQ ID NO: 113318 - protein, 9 aa, Homo sapiens
AAAGPALSP

SEQ ID NO: 113319 - protein, 15 aa, Homo sapiens
APGAAAGPALSPVPP

SEQ ID NO: 113320 - protein, 9 aa, Homo sapiens
AAAGPALSP

SEQ ID NO: 113321 - protein, 15 aa, Homo sapiens
DGVNWGRIVAFFEFG

SEQ ID NO: 113322 - protein, 9 aa, Homo sapiens
VNWGRIVAF

SEQ ID NO: 113323 - protein, 15 aa, Homo sapiens
SRRYRRDFAEMSSQL

SEQ ID NO: 113324 - protein, 9 aa, Homo sapiens
YRRDFAEMS

SEQ ID NO: 113325 - protein, 15 aa, Homo sapiens
PVVHLTLRQAGDDFS

SEQ ID NO: 113326 - protein, 9 aa, Homo sapiens
VVHLTLRQA

SEQ ID NO: 113327 - protein, 15 aa, Homo sapiens
VELYGPSMRPLFDFS

SEQ ID NO: 113328 - protein, 9 aa, Homo sapiens
LYGPSMRPL

SEQ ID NO: 113329 - protein, 15 aa, Homo sapiens
VVHLTLRQAGDDFSR

SEQ ID NO: 113330 - protein, 9 aa, Homo sapiens
VVHLTLRQA

SEQ ID NO: 113331 - protein, 15 aa, Homo sapiens
FSRRYRRDFAEMSSQ

SEQ ID NO: 113332 - protein, 9 aa, Homo sapiens
YRRDFAEMS

SEQ ID NO: 113333 - protein, 15 aa, Homo sapiens
DFSRRYRRDFAEMSS

SEQ ID NO: 113334 - protein, 9 aa, Homo sapiens
YRRDFAEMS

SEQ ID NO: 113335 - protein, 15 aa, Homo sapiens
DDFSRRYRRDFAEMS

SEQ ID NO: 113336 - protein, 9 aa, Homo sapiens
RYRRDFAEM

SEQ ID NO: 113337 - protein, 15 aa, Homo sapiens
GRIVAFFEFGGVMCV

SEQ ID NO: 113338 - protein, 9 aa, Homo sapiens
FFEFGGVMC

SEQ ID NO: 113339 - protein, 15 aa, Homo sapiens
RIVAFFEFGGVMCVE

SEQ ID NO: 113340 - protein, 9 aa, Homo sapiens
FEFGGVMCV

SEQ ID NO: 113341 - protein, 15 aa, Homo sapiens
PGAAAGPALSPVPPV

SEQ ID NO: 113342 - protein, 9 aa, Homo sapiens
AAAGPALSP

SEQ ID NO: 113343 - protein, 15 aa, Homo sapiens
SVNREMSPLVDNIAL

SEQ ID NO: 113344 - protein, 9 aa, Homo sapiens
VNREMSPLV

SEQ ID NO: 113345 - protein, 15 aa, Homo sapiens
FFEFGGVMCVESVNR

SEQ ID NO: 113346 - protein, 9 aa, Homo sapiens
FEFGGVMCV

SEQ ID NO: 113347 - protein, 15 aa, Homo sapiens
VNREMSPLVDNIALW

SEQ ID NO: 113348 - protein, 9 aa, Homo sapiens
VNREMSPLV

SEQ ID NO: 113349 - protein, 15 aa, Homo sapiens
FEFGGVMCVESVNRE

SEQ ID NO: 113350 - protein, 9 aa, Homo sapiens
FEFGGVMCV

SEQ ID NO: 113351 - protein, 15 aa, Homo sapiens
EMSSQLHLTPFTARG

SEQ ID NO: 113352 - protein, 9 aa, Homo sapiens
LHLTPFTAR

SEQ ID NO: 113353 - protein, 15 aa, Homo sapiens
TPFTARGRFATVVEE

SEQ ID NO: 113354 - protein, 9 aa, Homo sapiens
ARGRFATVV

SEQ ID NO: 113355 - protein, 15 aa, Homo sapiens
QTPAAPGAAAGPALS

SEQ ID NO: 113356 - protein, 9 aa, Homo sapiens
APGAAAGPA

SEQ ID NO: 113357 - protein, 15 aa, Homo sapiens
FSSQPGHTPHPAASR

SEQ ID NO: 113358 - protein, 9 aa, Homo sapiens
FSSQPGHTP

SEQ ID NO: 113359 - protein, 15 aa, Homo sapiens
IFSSQPGHTPHPAAS

SEQ ID NO: 113360 - protein, 9 aa, Homo sapiens
FSSQPGHTP

SEQ ID NO: 113361 - protein, 15 aa, Homo sapiens
GAAPPGAAPAPGIFS

SEQ ID NO: 113362 - protein, 9 aa, Homo sapiens
PGAAPAPGI

SEQ ID NO: 113363 - protein, 15 aa, Homo sapiens
PFTARGRFATVVEEL

SEQ ID NO: 113364 - protein, 9 aa, Homo sapiens
ARGRFATVV

SEQ ID NO: 113365 - protein, 15 aa, Homo sapiens
FTARGRFATVVEELF

SEQ ID NO: 113366 - protein, 9 aa, Homo sapiens
ARGRFATVV

SEQ ID NO: 113367 - protein, 15 aa, Homo sapiens
ALWMTEYLNRHLHTW

SEQ ID NO: 113368 - protein, 9 aa, Homo sapiens
WMTEYLNRH

SEQ ID NO: 113369 - protein, 15 aa, Homo sapiens
ALSPVPPVVHLTLRQ

SEQ ID NO: 113370 - protein, 9 aa, Homo sapiens
LSPVPPVVH

SEQ ID NO: 113371 - protein, 15 aa, Homo sapiens
AEMSSQLHLTPFTAR

SEQ ID NO: 113372 - protein, 9 aa, Homo sapiens
SQLHLTPFT

SEQ ID NO: 113373 - protein, 15 aa, Homo sapiens
DNIALWMTEYLNRHL

SEQ ID NO: 113374 - protein, 9 aa, Homo sapiens
WMTEYLNRH

SEQ ID NO: 113375 - protein, 15 aa, Homo sapiens
GGWDAFVELYGPSMR

SEQ ID NO: 113376 - protein, 9 aa, Homo sapiens
FVELYGPSM

SEQ ID NO: 113377 - protein, 15 aa, Homo sapiens
ELYGPSMRPLFDFSW

SEQ ID NO: 113378 - protein, 9 aa, Homo sapiens
LYGPSMRPL

SEQ ID NO: 113379 - protein, 15 aa, Homo sapiens
AAPPGAAPAPGIFSS

SEQ ID NO: 113380 - protein, 9 aa, Homo sapiens
AAPAPGIFS

SEQ ID NO: 113381 - protein, 15 aa, Homo sapiens
GAAAGPALSPVPPVV

SEQ ID NO: 113382 - protein, 9 aa, Homo sapiens
AAAGPALSP

SEQ ID NO: 113383 - protein, 15 aa, Homo sapiens
NIALWMTEYLNRHLH

SEQ ID NO: 113384 - protein, 9 aa, Homo sapiens
WMTEYLNRH

SEQ ID NO: 113385 - protein, 15 aa, Homo sapiens
YEWDAGDVGAAPPGA

SEQ ID NO: 113386 - protein, 9 aa, Homo sapiens
WDAGDVGAA

SEQ ID NO: 113387 - protein, 15 aa, Homo sapiens
AAPAPGIFSSQPGHT

SEQ ID NO: 113388 - protein, 9 aa, Homo sapiens
AAPAPGIFS

SEQ ID NO: 113389 - protein, 15 aa, Homo sapiens
NREMSPLVDNIALWM

SEQ ID NO: 113390 - protein, 9 aa, Homo sapiens
MSPLVDNIA

SEQ ID NO: 113391 - protein, 15 aa, Homo sapiens
PLFDFSWLSLKTLLS

SEQ ID NO: 113392 - protein, 9 aa, Homo sapiens
DFSWLSLKT

SEQ ID NO: 113393 - protein, 15 aa, Homo sapiens
DFSWLSLKTLLSLAL

SEQ ID NO: 113394 - protein, 9 aa, Homo sapiens
WLSLKTLLS

SEQ ID NO: 113395 - protein, 15 aa, Homo sapiens
FSWLSLKTLLSLALV

SEQ ID NO: 113396 - protein, 9 aa, Homo sapiens
WLSLKTLLS

SEQ ID NO: 113397 - protein, 15 aa, Homo sapiens
LFDFSWLSLKTLLSL

SEQ ID NO: 113398 - protein, 9 aa, Homo sapiens
WLSLKTLLS

SEQ ID NO: 113399 - protein, 15 aa, Homo sapiens
FDFSWLSLKTLLSLA

SEQ ID NO: 113400 - protein, 9 aa, Homo sapiens
WLSLKTLLS

SEQ ID NO: 113401 - protein, 15 aa, Homo sapiens
VMCVESVNREMSPLV

SEQ ID NO: 113402 - protein, 9 aa, Homo sapiens
MCVESVNRE

SEQ ID NO: 113403 - protein, 15 aa, Homo sapiens
CVESVNREMSPLVDN

SEQ ID NO: 113404 - protein, 9 aa, Homo sapiens
VNREMSPLV

SEQ ID NO: 113405 - protein, 15 aa, Homo sapiens
MCVESVNREMSPLVD

SEQ ID NO: 113406 - protein, 9 aa, Homo sapiens
VNREMSPLV

SEQ ID NO: 113407 - protein, 15 aa, Homo sapiens
ESVNREMSPLVDNIA

SEQ ID NO: 113408 - protein, 9 aa, Homo sapiens
VNREMSPLV

SEQ ID NO: 113409 - protein, 15 aa, Homo sapiens
VESVNREMSPLVDNI

SEQ ID NO: 113410 - protein, 9 aa, Homo sapiens
VNREMSPLV

SEQ ID NO: 113411 - protein, 15 aa, Homo sapiens
WLSLKTLLSLALVGA

SEQ ID NO: 113412 - protein, 9 aa, Homo sapiens
WLSLKTLLS

SEQ ID NO: 113413 - protein, 15 aa, Homo sapiens
SWLSLKTLLSLALVG

SEQ ID NO: 113414 - protein, 9 aa, Homo sapiens
WLSLKTLLS

SEQ ID NO: 113415 - protein, 15 aa, Homo sapiens
RRYRRDFAEMSSQLH

SEQ ID NO: 113416 - protein, 9 aa, Homo sapiens
YRRDFAEMS

SEQ ID NO: 113417 - protein, 15 aa, Homo sapiens
VDNIALWMTEYLNRH

SEQ ID NO: 113418 - protein, 9 aa, Homo sapiens
NIALWMTEY

SEQ ID NO: 113419 - protein, 15 aa, Homo sapiens
ALWMTEYLNRHLHTW

SEQ ID NO: 113420 - protein, 9 aa, Homo sapiens
WMTEYLNRH

SEQ ID NO: 113421 - protein, 15 aa, Homo sapiens
VDNIALWMTEYLNRH

SEQ ID NO: 113422 - protein, 9 aa, Homo sapiens
IALWMTEYL

SEQ ID NO: 113423 - protein, 15 aa, Homo sapiens
DNIALWMTEYLNRHL

SEQ ID NO: 113424 - protein, 9 aa, Homo sapiens
WMTEYLNRH

SEQ ID NO: 113425 - protein, 15 aa, Homo sapiens
NIALWMTEYLNRHLH

SEQ ID NO: 113426 - protein, 9 aa, Homo sapiens
WMTEYLNRH

SEQ ID NO: 113427 - protein, 15 aa, Homo sapiens
IALWMTEYLNRHLHT

SEQ ID NO: 113428 - protein, 9 aa, Homo sapiens
WMTEYLNRH

SEQ ID NO: 113429 - protein, 15 aa, Homo sapiens
LWMTEYLNRHLHTWI

SEQ ID NO: 113430 - protein, 9 aa, Homo sapiens
WMTEYLNRH

SEQ ID NO: 113431 - protein, 15 aa, Homo sapiens
MSSQLHLTPFTARGR

SEQ ID NO: 113432 - protein, 9 aa, Homo sapiens
HLTPFTARG

SEQ ID NO: 113433 - protein, 15 aa, Homo sapiens
EMSSQLHLTPFTARG

SEQ ID NO: 113434 - protein, 9 aa, Homo sapiens
LHLTPFTAR

SEQ ID NO: 113435 - protein, 15 aa, Homo sapiens
WMTEYLNRHLHTWIQ

SEQ ID NO: 113436 - protein, 9 aa, Homo sapiens
WMTEYLNRH

SEQ ID NO: 113437 - protein, 15 aa, Homo sapiens
SSQLHLTPFTARGRF

SEQ ID NO: 113438 - protein, 9 aa, Homo sapiens
HLTPFTARG

SEQ ID NO: 113439 - protein, 15 aa, Homo sapiens
SQLHLTPFTARGRFA

SEQ ID NO: 113440 - protein, 9 aa, Homo sapiens
HLTPFTARG

SEQ ID NO: 113441 - protein, 15 aa, Homo sapiens
QLHLTPFTARGRFAT

SEQ ID NO: 113442 - protein, 9 aa, Homo sapiens
HLTPFTARG

SEQ ID NO: 113443 - protein, 15 aa, Homo sapiens
APGIFSSQPGHTPHP

SEQ ID NO: 113444 - protein, 9 aa, Homo sapiens
FSSQPGHTP

SEQ ID NO: 113445 - protein, 15 aa, Homo sapiens
PGIFSSQPGHTPHPA

SEQ ID NO: 113446 - protein, 9 aa, Homo sapiens
FSSQPGHTP

SEQ ID NO: 113447 - protein, 15 aa, Homo sapiens
GIFSSQPGHTPHPAA

SEQ ID NO: 113448 - protein, 9 aa, Homo sapiens
SQPGHTPHP

SEQ ID NO: 113449 - protein, 15 aa, Homo sapiens
RRDFAEMSSQLHLTP

SEQ ID NO: 113450 - protein, 9 aa, Homo sapiens
FAEMSSQLH

SEQ ID NO: 113451 - protein, 15 aa, Homo sapiens
FDFSWLSLKTLLSLA

SEQ ID NO: 113452 - protein, 9 aa, Homo sapiens
WLSLKTLLS

SEQ ID NO: 113453 - protein, 15 aa, Homo sapiens
RDFAEMSSQLHLTPF

SEQ ID NO: 113454 - protein, 9 aa, Homo sapiens
FAEMSSQLH

SEQ ID NO: 113455 - protein, 15 aa, Homo sapiens
DFSWLSLKTLLSLAL

SEQ ID NO: 113456 - protein, 9 aa, Homo sapiens
WLSLKTLLS

SEQ ID NO: 113457 - protein, 15 aa, Homo sapiens
FSWLSLKTLLSLALV

SEQ ID NO: 113458 - protein, 9 aa, Homo sapiens
WLSLKTLLS

SEQ ID NO: 113459 - protein, 15 aa, Homo sapiens
PLFDFSWLSLKTLLS

SEQ ID NO: 113460 - protein, 9 aa, Homo sapiens
FSWLSLKTL

SEQ ID NO: 113461 - protein, 15 aa, Homo sapiens
LFDFSWLSLKTLLSL

SEQ ID NO: 113462 - protein, 9 aa, Homo sapiens
WLSLKTLLS

SEQ ID NO: 113463 - protein, 15 aa, Homo sapiens
FDFSWLSLKTLLSLA

SEQ ID NO: 113464 - protein, 9 aa, Homo sapiens
WLSLKTLLS

SEQ ID NO: 113465 - protein, 15 aa, Homo sapiens
DFSWLSLKTLLSLAL

SEQ ID NO: 113466 - protein, 9 aa, Homo sapiens
WLSLKTLLS

SEQ ID NO: 113467 - protein, 15 aa, Homo sapiens
FSWLSLKTLLSLALV

SEQ ID NO: 113468 - protein, 9 aa, Homo sapiens
WLSLKTLLS

SEQ ID NO: 113469 - protein, 15 aa, Homo sapiens
SWLSLKTLLSLALVG

SEQ ID NO: 113470 - protein, 9 aa, Homo sapiens
WLSLKTLLS

SEQ ID NO: 113471 - protein, 15 aa, Homo sapiens
WLSLKTLLSLALVGA

SEQ ID NO: 113472 - protein, 9 aa, Homo sapiens
WLSLKTLLS

SEQ ID NO: 113473 - protein, 15 aa, Homo sapiens
ESVNREMSPLVDNIA

SEQ ID NO: 113474 - protein, 9 aa, Homo sapiens
NREMSPLVD

SEQ ID NO: 113475 - protein, 15 aa, Homo sapiens
CVESVNREMSPLVDN

SEQ ID NO: 113476 - protein, 9 aa, Homo sapiens
NREMSPLVD

SEQ ID NO: 113477 - protein, 15 aa, Homo sapiens
VESVNREMSPLVDNI

SEQ ID NO: 113478 - protein, 9 aa, Homo sapiens
NREMSPLVD

SEQ ID NO: 113479 - protein, 15 aa, Homo sapiens
VDNIALWMTEYLNRH

SEQ ID NO: 113480 - protein, 9 aa, Homo sapiens
IALWMTEYL

SEQ ID NO: 113481 - protein, 15 aa, Homo sapiens
PLVDNIALWMTEYLN

SEQ ID NO: 113482 - protein, 9 aa, Homo sapiens
IALWMTEYL

SEQ ID NO: 113483 - protein, 15 aa, Homo sapiens
DNIALWMTEYLNRHL

SEQ ID NO: 113484 - protein, 9 aa, Homo sapiens
IALWMTEYL

SEQ ID NO: 113485 - protein, 15 aa, Homo sapiens
LVDNIALWMTEYLNR

SEQ ID NO: 113486 - protein, 9 aa, Homo sapiens
IALWMTEYL

SEQ ID NO: 113487 - protein, 15 aa, Homo sapiens
MCVESVNREMSPLVD

SEQ ID NO: 113488 - protein, 9 aa, Homo sapiens
VNREMSPLV

SEQ ID NO: 113489 - protein, 15 aa, Homo sapiens
SPLVDNIALWMTEYL

SEQ ID NO: 113490 - protein, 9 aa, Homo sapiens
NIALWMTEY

SEQ ID NO: 113491 - protein, 15 aa, Homo sapiens
SVNREMSPLVDNIAL

SEQ ID NO: 113492 - protein, 9 aa, Homo sapiens
NREMSPLVD

SEQ ID NO: 113493 - protein, 15 aa, Homo sapiens
RRYRRDFAEMSSQLH

SEQ ID NO: 113494 - protein, 9 aa, Homo sapiens
YRRDFAEMS

SEQ ID NO: 113495 - protein, 15 aa, Homo sapiens
VNREMSPLVDNIALW

SEQ ID NO: 113496 - protein, 9 aa, Homo sapiens
NREMSPLVD

SEQ ID NO: 113497 - protein, 15 aa, Homo sapiens
GPALSPVPPVVHLTL

SEQ ID NO: 113498 - protein, 9 aa, Homo sapiens
LSPVPPVVH

SEQ ID NO: 113499 - protein, 15 aa, Homo sapiens
AGPALSPVPPVVHLT

SEQ ID NO: 113500 - protein, 9 aa, Homo sapiens
LSPVPPVVH

SEQ ID NO: 113501 - protein, 15 aa, Homo sapiens
AAGPALSPVPPVVHL

SEQ ID NO: 113502 - protein, 9 aa, Homo sapiens
LSPVPPVVH

SEQ ID NO: 113503 - protein, 15 aa, Homo sapiens
PALSPVPPVVHLTLR

SEQ ID NO: 113504 - protein, 9 aa, Homo sapiens
LSPVPPVVH

SEQ ID NO: 113505 - protein, 15 aa, Homo sapiens
AAAGPALSPVPPVVH

SEQ ID NO: 113506 - protein, 9 aa, Homo sapiens
ALSPVPPVV

SEQ ID NO: 113507 - protein, 15 aa, Homo sapiens
ALSPVPPVVHLTLRQ

SEQ ID NO: 113508 - protein, 9 aa, Homo sapiens
LSPVPPVVH

SEQ ID NO: 113509 - protein, 15 aa, Homo sapiens
LSPVPPVVHLTLRQA

SEQ ID NO: 113510 - protein, 9 aa, Homo sapiens
LSPVPPVVH

SEQ ID NO: 113511 - protein, 15 aa, Homo sapiens
DAFVELYGPSMRPLF

SEQ ID NO: 113512 - protein, 9 aa, Homo sapiens
VELYGPSMR

SEQ ID NO: 113513 - protein, 15 aa, Homo sapiens
AFVELYGPSMRPLFD

SEQ ID NO: 113514 - protein, 9 aa, Homo sapiens
YGPSMRPLF

SEQ ID NO: 113515 - protein, 15 aa, Homo sapiens
FVELYGPSMRPLFDF

SEQ ID NO: 113516 - protein, 9 aa, Homo sapiens
YGPSMRPLF

SEQ ID NO: 113517 - protein, 15 aa, Homo sapiens
VELYGPSMRPLFDFS

SEQ ID NO: 113518 - protein, 9 aa, Homo sapiens
YGPSMRPLF

SEQ ID NO: 113519 - protein, 15 aa, Homo sapiens
FSWLSLKTLLSLALV

SEQ ID NO: 113520 - protein, 9 aa, Homo sapiens
WLSLKTLLS

SEQ ID NO: 113521 - protein, 15 aa, Homo sapiens
DFSWLSLKTLLSLAL

SEQ ID NO: 113522 - protein, 9 aa, Homo sapiens
WLSLKTLLS

SEQ ID NO: 113523 - protein, 15 aa, Homo sapiens
LFDFSWLSLKTLLSL

SEQ ID NO: 113524 - protein, 9 aa, Homo sapiens
WLSLKTLLS

SEQ ID NO: 113525 - protein, 15 aa, Homo sapiens
FDFSWLSLKTLLSLA

SEQ ID NO: 113526 - protein, 9 aa, Homo sapiens
WLSLKTLLS

SEQ ID NO: 113527 - protein, 15 aa, Homo sapiens
PLFDFSWLSLKTLLS

SEQ ID NO: 113528 - protein, 9 aa, Homo sapiens
FSWLSLKTL

SEQ ID NO: 113529 - protein, 15 aa, Homo sapiens
SWLSLKTLLSLALVG

SEQ ID NO: 113530 - protein, 9 aa, Homo sapiens
WLSLKTLLS

SEQ ID NO: 113531 - protein, 15 aa, Homo sapiens
WLSLKTLLSLALVGA

SEQ ID NO: 113532 - protein, 9 aa, Homo sapiens
WLSLKTLLS

SEQ ID NO: 113533 - protein, 15 aa, Homo sapiens
DAFVELYGPSMRPLF

SEQ ID NO: 113534 - protein, 9 aa, Homo sapiens
VELYGPSMR

SEQ ID NO: 113535 - protein, 15 aa, Homo sapiens
AFVELYGPSMRPLFD

SEQ ID NO: 113536 - protein, 9 aa, Homo sapiens
VELYGPSMR

SEQ ID NO: 113537 - protein, 15 aa, Homo sapiens
SPLVDNIALWMTEYL

SEQ ID NO: 113538 - protein, 9 aa, Homo sapiens
VDNIALWMT

SEQ ID NO: 113539 - protein, 15 aa, Homo sapiens
PLVDNIALWMTEYLN

SEQ ID NO: 113540 - protein, 9 aa, Homo sapiens
VDNIALWMT

SEQ ID NO: 113541 - protein, 15 aa, Homo sapiens
EIVMKYIHYKLSQRG

SEQ ID NO: 113542 - protein, 9 aa, Homo sapiens
YIHYKLSQR

SEQ ID NO: 113543 - protein, 15 aa, Homo sapiens
IVMKYIHYKLSQRGY

SEQ ID NO: 113544 - protein, 9 aa, Homo sapiens
YIHYKLSQR

SEQ ID NO: 113545 - protein, 15 aa, Homo sapiens
VMKYIHYKLSQRGYE

SEQ ID NO: 113546 - protein, 9 aa, Homo sapiens
YIHYKLSQR

SEQ ID NO: 113547 - protein, 15 aa, Homo sapiens
MKYIHYKLSQRGYEW

SEQ ID NO: 113548 - protein, 9 aa, Homo sapiens
YIHYKLSQR

SEQ ID NO: 113549 - protein, 15 aa, Homo sapiens
REIVMKYIHYKLSQR

SEQ ID NO: 113550 - protein, 9 aa, Homo sapiens
IVMKYIHYK

SEQ ID NO: 113551 - protein, 15 aa, Homo sapiens
KYIHYKLSQRGYEWD

SEQ ID NO: 113552 - protein, 9 aa, Homo sapiens
YIHYKLSQR

SEQ ID NO: 113553 - protein, 15 aa, Homo sapiens
MSSQLHLTPFTARGR

SEQ ID NO: 113554 - protein, 9 aa, Homo sapiens
LHLTPFTAR

SEQ ID NO: 113555 - protein, 15 aa, Homo sapiens
SSQLHLTPFTARGRF

SEQ ID NO: 113556 - protein, 9 aa, Homo sapiens
LHLTPFTAR

SEQ ID NO: 113557 - protein, 15 aa, Homo sapiens
YIHYKLSQRGYEWDA

SEQ ID NO: 113558 - protein, 9 aa, Homo sapiens
YIHYKLSQR

SEQ ID NO: 113559 - protein, 15 aa, Homo sapiens
SQLHLTPFTARGRFA

SEQ ID NO: 113560 - protein, 9 aa, Homo sapiens
LHLTPFTAR

SEQ ID NO: 113561 - protein, 15 aa, Homo sapiens
LHLTPFTARGRFATV

SEQ ID NO: 113562 - protein, 9 aa, Homo sapiens
LTPFTARGR

SEQ ID NO: 113563 - protein, 15 aa, Homo sapiens
EELFRDGVNWGRIVA

SEQ ID NO: 113564 - protein, 9 aa, Homo sapiens
LFRDGVNWG

SEQ ID NO: 113565 - protein, 15 aa, Homo sapiens
FSWLSLKTLLSLALV

SEQ ID NO: 113566 - protein, 9 aa, Homo sapiens
WLSLKTLLS

SEQ ID NO: 113567 - protein, 15 aa, Homo sapiens
DFSWLSLKTLLSLAL

SEQ ID NO: 113568 - protein, 9 aa, Homo sapiens
WLSLKTLLS

SEQ ID NO: 113569 - protein, 15 aa, Homo sapiens
QLHLTPFTARGRFAT

SEQ ID NO: 113570 - protein, 9 aa, Homo sapiens
LHLTPFTAR

SEQ ID NO: 113571 - protein, 15 aa, Homo sapiens
SPVPPVVHLTLRQAG

SEQ ID NO: 113572 - protein, 9 aa, Homo sapiens
VVHLTLRQA

SEQ ID NO: 113573 - protein, 15 aa, Homo sapiens
PVPPVVHLTLRQAGD

SEQ ID NO: 113574 - protein, 9 aa, Homo sapiens
VVHLTLRQA

SEQ ID NO: 113575 - protein, 15 aa, Homo sapiens
WLSLKTLLSLALVGA

SEQ ID NO: 113576 - protein, 9 aa, Homo sapiens
LKTLLSLAL

SEQ ID NO: 113577 - protein, 15 aa, Homo sapiens
LFDFSWLSLKTLLSL

SEQ ID NO: 113578 - protein, 9 aa, Homo sapiens
WLSLKTLLS

SEQ ID NO: 113579 - protein, 15 aa, Homo sapiens
VMCVESVNREMSPLV

SEQ ID NO: 113580 - protein, 9 aa, Homo sapiens
VMCVESVNR

SEQ ID NO: 113581 - protein, 15 aa, Homo sapiens
GGWDAFVELYGPSMR

SEQ ID NO: 113582 - protein, 9 aa, Homo sapiens
FVELYGPSM

SEQ ID NO: 113583 - protein, 15 aa, Homo sapiens
WDAFVELYGPSMRPL

SEQ ID NO: 113584 - protein, 9 aa, Homo sapiens
VELYGPSMR

SEQ ID NO: 113585 - protein, 15 aa, Homo sapiens
DAFVELYGPSMRPLF

SEQ ID NO: 113586 - protein, 9 aa, Homo sapiens
FVELYGPSM

SEQ ID NO: 113587 - protein, 15 aa, Homo sapiens
TVVEELFRDGVNWGR

SEQ ID NO: 113588 - protein, 9 aa, Homo sapiens
LFRDGVNWG

SEQ ID NO: 113589 - protein, 15 aa, Homo sapiens
VVEELFRDGVNWGRI

SEQ ID NO: 113590 - protein, 9 aa, Homo sapiens
LFRDGVNWG

SEQ ID NO: 113591 - protein, 15 aa, Homo sapiens
GWDAFVELYGPSMRP

SEQ ID NO: 113592 - protein, 9 aa, Homo sapiens
VELYGPSMR

SEQ ID NO: 113593 - protein, 15 aa, Homo sapiens
ALWMTEYLNRHLHTW

SEQ ID NO: 113594 - protein, 9 aa, Homo sapiens
WMTEYLNRH

SEQ ID NO: 113595 - protein, 15 aa, Homo sapiens
PLFDFSWLSLKTLLS

SEQ ID NO: 113596 - protein, 9 aa, Homo sapiens
LFDFSWLSL

SEQ ID NO: 113597 - protein, 15 aa, Homo sapiens
NIALWMTEYLNRHLH

SEQ ID NO: 113598 - protein, 9 aa, Homo sapiens
WMTEYLNRH

SEQ ID NO: 113599 - protein, 15 aa, Homo sapiens
IALWMTEYLNRHLHT

SEQ ID NO: 113600 - protein, 9 aa, Homo sapiens
WMTEYLNRH

SEQ ID NO: 113601 - protein, 15 aa, Homo sapiens
VEELFRDGVNWGRIV

SEQ ID NO: 113602 - protein, 9 aa, Homo sapiens
LFRDGVNWG

SEQ ID NO: 113603 - protein, 15 aa, Homo sapiens
DNIALWMTEYLNRHL

SEQ ID NO: 113604 - protein, 9 aa, Homo sapiens
WMTEYLNRH

SEQ ID NO: 113605 - protein, 15 aa, Homo sapiens
VPPVVHLTLRQAGDD

SEQ ID NO: 113606 - protein, 9 aa, Homo sapiens
VVHLTLRQA

SEQ ID NO: 113607 - protein, 15 aa, Homo sapiens
FDFSWLSLKTLLSLA

SEQ ID NO: 113608 - protein, 9 aa, Homo sapiens
WLSLKTLLS

SEQ ID NO: 113609 - protein, 15 aa, Homo sapiens
ELFRDGVNWGRIVAF

SEQ ID NO: 113610 - protein, 9 aa, Homo sapiens
LFRDGVNWG

SEQ ID NO: 113611 - protein, 15 aa, Homo sapiens
LSPVPPVVHLTLRQA

SEQ ID NO: 113612 - protein, 9 aa, Homo sapiens
PPVVHLTLR

SEQ ID NO: 113613 - protein, 15 aa, Homo sapiens
SWLSLKTLLSLALVG

SEQ ID NO: 113614 - protein, 9 aa, Homo sapiens
LKTLLSLAL

SEQ ID NO: 113615 - protein, 15 aa, Homo sapiens
PPVVHLTLRQAGDDF

SEQ ID NO: 113616 - protein, 9 aa, Homo sapiens
VVHLTLRQA

SEQ ID NO: 113617 - protein, 15 aa, Homo sapiens
DAFVELYGPSMRPLF

SEQ ID NO: 113618 - protein, 9 aa, Homo sapiens
VELYGPSMR

SEQ ID NO: 113619 - protein, 15 aa, Homo sapiens
AFVELYGPSMRPLFD

SEQ ID NO: 113620 - protein, 9 aa, Homo sapiens
VELYGPSMR

SEQ ID NO: 113621 - protein, 15 aa, Homo sapiens
WDAFVELYGPSMRPL

SEQ ID NO: 113622 - protein, 9 aa, Homo sapiens
VELYGPSMR

SEQ ID NO: 113623 - protein, 15 aa, Homo sapiens
GGWDAFVELYGPSMR

SEQ ID NO: 113624 - protein, 9 aa, Homo sapiens
FVELYGPSM

SEQ ID NO: 113625 - protein, 15 aa, Homo sapiens
GWDAFVELYGPSMRP

SEQ ID NO: 113626 - protein, 9 aa, Homo sapiens
VELYGPSMR

SEQ ID NO: 113627 - protein, 15 aa, Homo sapiens
FVELYGPSMRPLFDF

SEQ ID NO: 113628 - protein, 9 aa, Homo sapiens
VELYGPSMR

SEQ ID NO: 113629 - protein, 15 aa, Homo sapiens
VELYGPSMRPLFDFS

SEQ ID NO: 113630 - protein, 9 aa, Homo sapiens
VELYGPSMR

SEQ ID NO: 113631 - protein, 15 aa, Homo sapiens
AAGPALSPVPPVVHL

SEQ ID NO: 113632 - protein, 9 aa, Homo sapiens
LSPVPPVVH

SEQ ID NO: 113633 - protein, 15 aa, Homo sapiens
AAAGPALSPVPPVVH

SEQ ID NO: 113634 - protein, 9 aa, Homo sapiens
ALSPVPPVV

SEQ ID NO: 113635 - protein, 15 aa, Homo sapiens
VDNIALWMTEYLNRH

SEQ ID NO: 113636 - protein, 9 aa, Homo sapiens
IALWMTEYL

SEQ ID NO: 113637 - protein, 15 aa, Homo sapiens
GPALSPVPPVVHLTL

SEQ ID NO: 113638 - protein, 9 aa, Homo sapiens
LSPVPPVVH

SEQ ID NO: 113639 - protein, 15 aa, Homo sapiens
AGPALSPVPPVVHLT

SEQ ID NO: 113640 - protein, 9 aa, Homo sapiens
LSPVPPVVH

SEQ ID NO: 113641 - protein, 15 aa, Homo sapiens
PALSPVPPVVHLTLR

SEQ ID NO: 113642 - protein, 9 aa, Homo sapiens
LSPVPPVVH

SEQ ID NO: 113643 - protein, 15 aa, Homo sapiens
DNIALWMTEYLNRHL

SEQ ID NO: 113644 - protein, 9 aa, Homo sapiens
WMTEYLNRH

SEQ ID NO: 113645 - protein, 15 aa, Homo sapiens
NIALWMTEYLNRHLH

SEQ ID NO: 113646 - protein, 9 aa, Homo sapiens
LWMTEYLNR

SEQ ID NO: 113647 - protein, 15 aa, Homo sapiens
IALWMTEYLNRHLHT

SEQ ID NO: 113648 - protein, 9 aa, Homo sapiens
WMTEYLNRH

SEQ ID NO: 113649 - protein, 15 aa, Homo sapiens
MKYIHYKLSQRGYEW

SEQ ID NO: 113650 - protein, 9 aa, Homo sapiens
YIHYKLSQR

SEQ ID NO: 113651 - protein, 15 aa, Homo sapiens
VMKYIHYKLSQRGYE

SEQ ID NO: 113652 - protein, 9 aa, Homo sapiens
YIHYKLSQR

SEQ ID NO: 113653 - protein, 8 aa, Homo sapiens
MGAPTLPP

SEQ ID NO: 113654 - protein, 8 aa, Homo sapiens
GAPTLPPA

SEQ ID NO: 113655 - protein, 8 aa, Homo sapiens
APTLPPAW

SEQ ID NO: 113656 - protein, 8 aa, Homo sapiens
PTLPPAWQ

SEQ ID NO: 113657 - protein, 8 aa, Homo sapiens
TLPPAWQP

SEQ ID NO: 113658 - protein, 8 aa, Homo sapiens
LPPAWQPF

SEQ ID NO: 113659 - protein, 8 aa, Homo sapiens
PPAWQPFL

SEQ ID NO: 113660 - protein, 8 aa, Homo sapiens
PAWQPFLK

SEQ ID NO: 113661 - protein, 8 aa, Homo sapiens
AWQPFLKD

SEQ ID NO: 113662 - protein, 8 aa, Homo sapiens
WQPFLKDH

SEQ ID NO: 113663 - protein, 8 aa, Homo sapiens
QPFLKDHR

SEQ ID NO: 113664 - protein, 8 aa, Homo sapiens
PFLKDHRI

SEQ ID NO: 113665 - protein, 8 aa, Homo sapiens
FLKDHRIS

SEQ ID NO: 113666 - protein, 8 aa, Homo sapiens
LKDHRIST

SEQ ID NO: 113667 - protein, 8 aa, Homo sapiens
KDHRISTF

SEQ ID NO: 113668 - protein, 8 aa, Homo sapiens
DHRISTFK

SEQ ID NO: 113669 - protein, 8 aa, Homo sapiens
HRISTFKN

SEQ ID NO: 113670 - protein, 8 aa, Homo sapiens
RISTFKNW

SEQ ID NO: 113671 - protein, 8 aa, Homo sapiens
ISTFKNWP

SEQ ID NO: 113672 - protein, 8 aa, Homo sapiens
STFKNWPF

SEQ ID NO: 113673 - protein, 8 aa, Homo sapiens
TFKNWPFL

SEQ ID NO: 113674 - protein, 8 aa, Homo sapiens
FKNWPFLE

SEQ ID NO: 113675 - protein, 8 aa, Homo sapiens
KNWPFLEG

SEQ ID NO: 113676 - protein, 8 aa, Homo sapiens
NWPFLEGC

SEQ ID NO: 113677 - protein, 8 aa, Homo sapiens
WPFLEGCA

SEQ ID NO: 113678 - protein, 8 aa, Homo sapiens
PFLEGCAC

SEQ ID NO: 113679 - protein, 8 aa, Homo sapiens
FLEGCACT

SEQ ID NO: 113680 - protein, 8 aa, Homo sapiens
LEGCACTP

SEQ ID NO: 113681 - protein, 8 aa, Homo sapiens
EGCACTPE

SEQ ID NO: 113682 - protein, 8 aa, Homo sapiens
GCACTPER

SEQ ID NO: 113683 - protein, 8 aa, Homo sapiens
CACTPERM

SEQ ID NO: 113684 - protein, 8 aa, Homo sapiens
ACTPERMA

SEQ ID NO: 113685 - protein, 8 aa, Homo sapiens
CTPERMAE

SEQ ID NO: 113686 - protein, 8 aa, Homo sapiens
TPERMAEA

SEQ ID NO: 113687 - protein, 8 aa, Homo sapiens
PERMAEAG

SEQ ID NO: 113688 - protein, 8 aa, Homo sapiens
ERMAEAGF

SEQ ID NO: 113689 - protein, 8 aa, Homo sapiens
RMAEAGFI

SEQ ID NO: 113690 - protein, 8 aa, Homo sapiens
MAEAGFIH

SEQ ID NO: 113691 - protein, 8 aa, Homo sapiens
AEAGFIHC

SEQ ID NO: 113692 - protein, 8 aa, Homo sapiens
EAGFIHCP

SEQ ID NO: 113693 - protein, 8 aa, Homo sapiens
AGFIHCPT

SEQ ID NO: 113694 - protein, 8 aa, Homo sapiens
GFIHCPTE

SEQ ID NO: 113695 - protein, 8 aa, Homo sapiens
FIHCPTEN

SEQ ID NO: 113696 - protein, 8 aa, Homo sapiens
IHCPTENE

SEQ ID NO: 113697 - protein, 8 aa, Homo sapiens
HCPTENEP

SEQ ID NO: 113698 - protein, 8 aa, Homo sapiens
CPTENEPD

SEQ ID NO: 113699 - protein, 8 aa, Homo sapiens
PTENEPDL

SEQ ID NO: 113700 - protein, 8 aa, Homo sapiens
TENEPDLA

SEQ ID NO: 113701 - protein, 8 aa, Homo sapiens
ENEPDLAQ

SEQ ID NO: 113702 - protein, 8 aa, Homo sapiens
NEPDLAQC

SEQ ID NO: 113703 - protein, 8 aa, Homo sapiens
EPDLAQCF

SEQ ID NO: 113704 - protein, 8 aa, Homo sapiens
PDLAQCFF

SEQ ID NO: 113705 - protein, 8 aa, Homo sapiens
DLAQCFFC

SEQ ID NO: 113706 - protein, 8 aa, Homo sapiens
LAQCFFCF

SEQ ID NO: 113707 - protein, 8 aa, Homo sapiens
AQCFFCFK

SEQ ID NO: 113708 - protein, 8 aa, Homo sapiens
QCFFCFKE

SEQ ID NO: 113709 - protein, 8 aa, Homo sapiens
CFFCFKEL

SEQ ID NO: 113710 - protein, 8 aa, Homo sapiens
FFCFKELE

SEQ ID NO: 113711 - protein, 8 aa, Homo sapiens
FCFKELEG

SEQ ID NO: 113712 - protein, 8 aa, Homo sapiens
CFKELEGW

SEQ ID NO: 113713 - protein, 8 aa, Homo sapiens
FKELEGWE

SEQ ID NO: 113714 - protein, 8 aa, Homo sapiens
KELEGWEP

SEQ ID NO: 113715 - protein, 8 aa, Homo sapiens
ELEGWEPD

SEQ ID NO: 113716 - protein, 8 aa, Homo sapiens
LEGWEPDD

SEQ ID NO: 113717 - protein, 8 aa, Homo sapiens
EGWEPDDD

SEQ ID NO: 113718 - protein, 8 aa, Homo sapiens
GWEPDDDP

SEQ ID NO: 113719 - protein, 8 aa, Homo sapiens
WEPDDDPI

SEQ ID NO: 113720 - protein, 8 aa, Homo sapiens
EPDDDPIE

SEQ ID NO: 113721 - protein, 8 aa, Homo sapiens
PDDDPIEE

SEQ ID NO: 113722 - protein, 8 aa, Homo sapiens
DDDPIEEH

SEQ ID NO: 113723 - protein, 8 aa, Homo sapiens
DDPIEEHK

SEQ ID NO: 113724 - protein, 8 aa, Homo sapiens
DPIEEHKK

SEQ ID NO: 113725 - protein, 8 aa, Homo sapiens
PIEEHKKH

SEQ ID NO: 113726 - protein, 8 aa, Homo sapiens
IEEHKKHS

SEQ ID NO: 113727 - protein, 8 aa, Homo sapiens
EEHKKHSS

SEQ ID NO: 113728 - protein, 8 aa, Homo sapiens
EHKKHSSG

SEQ ID NO: 113729 - protein, 8 aa, Homo sapiens
HKKHSSGC

SEQ ID NO: 113730 - protein, 8 aa, Homo sapiens
KKHSSGCA

SEQ ID NO: 113731 - protein, 8 aa, Homo sapiens
KHSSGCAF

SEQ ID NO: 113732 - protein, 8 aa, Homo sapiens
HSSGCAFL

SEQ ID NO: 113733 - protein, 8 aa, Homo sapiens
SSGCAFLS

SEQ ID NO: 113734 - protein, 8 aa, Homo sapiens
SGCAFLSV

SEQ ID NO: 113735 - protein, 8 aa, Homo sapiens
GCAFLSVK

SEQ ID NO: 113736 - protein, 8 aa, Homo sapiens
CAFLSVKK

SEQ ID NO: 113737 - protein, 8 aa, Homo sapiens
AFLSVKKQ

SEQ ID NO: 113738 - protein, 8 aa, Homo sapiens
FLSVKKQF

SEQ ID NO: 113739 - protein, 8 aa, Homo sapiens
LSVKKQFE

SEQ ID NO: 113740 - protein, 8 aa, Homo sapiens
SVKKQFEE

SEQ ID NO: 113741 - protein, 8 aa, Homo sapiens
VKKQFEEL

SEQ ID NO: 113742 - protein, 8 aa, Homo sapiens
KKQFEELT

SEQ ID NO: 113743 - protein, 8 aa, Homo sapiens
KQFEELTL

SEQ ID NO: 113744 - protein, 8 aa, Homo sapiens
QFEELTLG

SEQ ID NO: 113745 - protein, 8 aa, Homo sapiens
FEELTLGE

SEQ ID NO: 113746 - protein, 8 aa, Homo sapiens
EELTLGEF

SEQ ID NO: 113747 - protein, 8 aa, Homo sapiens
ELTLGEFL

SEQ ID NO: 113748 - protein, 8 aa, Homo sapiens
LTLGEFLK

SEQ ID NO: 113749 - protein, 8 aa, Homo sapiens
TLGEFLKL

SEQ ID NO: 113750 - protein, 8 aa, Homo sapiens
LGEFLKLD

SEQ ID NO: 113751 - protein, 8 aa, Homo sapiens
GEFLKLDR

SEQ ID NO: 113752 - protein, 8 aa, Homo sapiens
EFLKLDRE

SEQ ID NO: 113753 - protein, 8 aa, Homo sapiens
FLKLDRER

SEQ ID NO: 113754 - protein, 8 aa, Homo sapiens
LKLDRERA

SEQ ID NO: 113755 - protein, 8 aa, Homo sapiens
KLDRERAK

SEQ ID NO: 113756 - protein, 8 aa, Homo sapiens
LDRERAKN

SEQ ID NO: 113757 - protein, 8 aa, Homo sapiens
DRERAKNK

SEQ ID NO: 113758 - protein, 8 aa, Homo sapiens
RERAKNKI

SEQ ID NO: 113759 - protein, 8 aa, Homo sapiens
ERAKNKIA

SEQ ID NO: 113760 - protein, 8 aa, Homo sapiens
RAKNKIAK

SEQ ID NO: 113761 - protein, 8 aa, Homo sapiens
AKNKIAKE

SEQ ID NO: 113762 - protein, 8 aa, Homo sapiens
KNKIAKET

SEQ ID NO: 113763 - protein, 8 aa, Homo sapiens
NKIAKETN

SEQ ID NO: 113764 - protein, 8 aa, Homo sapiens
KIAKETNN

SEQ ID NO: 113765 - protein, 8 aa, Homo sapiens
IAKETNNK

SEQ ID NO: 113766 - protein, 8 aa, Homo sapiens
AKETNNKK

SEQ ID NO: 113767 - protein, 8 aa, Homo sapiens
KETNNKKK

SEQ ID NO: 113768 - protein, 8 aa, Homo sapiens
ETNNKKKE

SEQ ID NO: 113769 - protein, 8 aa, Homo sapiens
TNNKKKEF

SEQ ID NO: 113770 - protein, 8 aa, Homo sapiens
NNKKKEFE

SEQ ID NO: 113771 - protein, 8 aa, Homo sapiens
NKKKEFEE

SEQ ID NO: 113772 - protein, 8 aa, Homo sapiens
KKKEFEET

SEQ ID NO: 113773 - protein, 8 aa, Homo sapiens
KKEFEETA

SEQ ID NO: 113774 - protein, 8 aa, Homo sapiens
KEFEETAK

SEQ ID NO: 113775 - protein, 8 aa, Homo sapiens
EFEETAKK

SEQ ID NO: 113776 - protein, 8 aa, Homo sapiens
FEETAKKV

SEQ ID NO: 113777 - protein, 8 aa, Homo sapiens
EETAKKVR

SEQ ID NO: 113778 - protein, 8 aa, Homo sapiens
ETAKKVRR

SEQ ID NO: 113779 - protein, 8 aa, Homo sapiens
TAKKVRRA

SEQ ID NO: 113780 - protein, 8 aa, Homo sapiens
AKKVRRAI

SEQ ID NO: 113781 - protein, 8 aa, Homo sapiens
KKVRRAIE

SEQ ID NO: 113782 - protein, 8 aa, Homo sapiens
KVRRAIEQ

SEQ ID NO: 113783 - protein, 8 aa, Homo sapiens
VRRAIEQL

SEQ ID NO: 113784 - protein, 8 aa, Homo sapiens
RRAIEQLA

SEQ ID NO: 113785 - protein, 8 aa, Homo sapiens
RAIEQLAA

SEQ ID NO: 113786 - protein, 8 aa, Homo sapiens
AIEQLAAM

SEQ ID NO: 113787 - protein, 8 aa, Homo sapiens
IEQLAAMD

SEQ ID NO: 113788 - protein, 7 aa, Homo sapiens
EQLAAMD

SEQ ID NO: 113789 - protein, 9 aa, Homo sapiens
MGAPTLPPA

SEQ ID NO: 113790 - protein, 9 aa, Homo sapiens
GAPTLPPAW

SEQ ID NO: 113791 - protein, 9 aa, Homo sapiens
APTLPPAWQ

SEQ ID NO: 113792 - protein, 9 aa, Homo sapiens
PTLPPAWQP

SEQ ID NO: 113793 - protein, 9 aa, Homo sapiens
TLPPAWQPF

SEQ ID NO: 113794 - protein, 9 aa, Homo sapiens
LPPAWQPFL

SEQ ID NO: 113795 - protein, 9 aa, Homo sapiens
PPAWQPFLK

SEQ ID NO: 113796 - protein, 9 aa, Homo sapiens
PAWQPFLKD

SEQ ID NO: 113797 - protein, 9 aa, Homo sapiens
AWQPFLKDH

SEQ ID NO: 113798 - protein, 9 aa, Homo sapiens
WQPFLKDHR

SEQ ID NO: 113799 - protein, 9 aa, Homo sapiens
QPFLKDHRI

SEQ ID NO: 113800 - protein, 9 aa, Homo sapiens
PFLKDHRIS

SEQ ID NO: 113801 - protein, 9 aa, Homo sapiens
FLKDHRIST

SEQ ID NO: 113802 - protein, 9 aa, Homo sapiens
LKDHRISTF

SEQ ID NO: 113803 - protein, 9 aa, Homo sapiens
KDHRISTFK

SEQ ID NO: 113804 - protein, 9 aa, Homo sapiens
DHRISTFKN

SEQ ID NO: 113805 - protein, 9 aa, Homo sapiens
HRISTFKNW

SEQ ID NO: 113806 - protein, 9 aa, Homo sapiens
RISTFKNWP

SEQ ID NO: 113807 - protein, 9 aa, Homo sapiens
ISTFKNWPF

SEQ ID NO: 113808 - protein, 9 aa, Homo sapiens
STFKNWPFL

SEQ ID NO: 113809 - protein, 9 aa, Homo sapiens
TFKNWPFLE

SEQ ID NO: 113810 - protein, 9 aa, Homo sapiens
FKNWPFLEG

SEQ ID NO: 113811 - protein, 9 aa, Homo sapiens
KNWPFLEGC

SEQ ID NO: 113812 - protein, 9 aa, Homo sapiens
NWPFLEGCA

SEQ ID NO: 113813 - protein, 9 aa, Homo sapiens
WPFLEGCAC

SEQ ID NO: 113814 - protein, 9 aa, Homo sapiens
PFLEGCACT

SEQ ID NO: 113815 - protein, 9 aa, Homo sapiens
FLEGCACTP

SEQ ID NO: 113816 - protein, 9 aa, Homo sapiens
LEGCACTPE

SEQ ID NO: 113817 - protein, 9 aa, Homo sapiens
EGCACTPER

SEQ ID NO: 113818 - protein, 9 aa, Homo sapiens
GCACTPERM

SEQ ID NO: 113819 - protein, 9 aa, Homo sapiens
CACTPERMA

SEQ ID NO: 113820 - protein, 9 aa, Homo sapiens
ACTPERMAE

SEQ ID NO: 113821 - protein, 9 aa, Homo sapiens
CTPERMAEA

SEQ ID NO: 113822 - protein, 9 aa, Homo sapiens
TPERMAEAG

SEQ ID NO: 113823 - protein, 9 aa, Homo sapiens
PERMAEAGF

SEQ ID NO: 113824 - protein, 9 aa, Homo sapiens
ERMAEAGFI

SEQ ID NO: 113825 - protein, 9 aa, Homo sapiens
RMAEAGFIH

SEQ ID NO: 113826 - protein, 9 aa, Homo sapiens
MAEAGFIHC

SEQ ID NO: 113827 - protein, 9 aa, Homo sapiens
AEAGFIHCP

SEQ ID NO: 113828 - protein, 9 aa, Homo sapiens
EAGFIHCPT

SEQ ID NO: 113829 - protein, 9 aa, Homo sapiens
AGFIHCPTE

SEQ ID NO: 113830 - protein, 9 aa, Homo sapiens
GFIHCPTEN

SEQ ID NO: 113831 - protein, 9 aa, Homo sapiens
FIHCPTENE

SEQ ID NO: 113832 - protein, 9 aa, Homo sapiens
IHCPTENEP

SEQ ID NO: 113833 - protein, 9 aa, Homo sapiens
HCPTENEPD

SEQ ID NO: 113834 - protein, 9 aa, Homo sapiens
CPTENEPDL

SEQ ID NO: 113835 - protein, 9 aa, Homo sapiens
PTENEPDLA

SEQ ID NO: 113836 - protein, 9 aa, Homo sapiens
TENEPDLAQ

SEQ ID NO: 113837 - protein, 9 aa, Homo sapiens
ENEPDLAQC

SEQ ID NO: 113838 - protein, 9 aa, Homo sapiens
NEPDLAQCF

SEQ ID NO: 113839 - protein, 9 aa, Homo sapiens
EPDLAQCFF

SEQ ID NO: 113840 - protein, 9 aa, Homo sapiens
PDLAQCFFC

SEQ ID NO: 113841 - protein, 9 aa, Homo sapiens
DLAQCFFCF

SEQ ID NO: 113842 - protein, 9 aa, Homo sapiens
LAQCFFCFK

SEQ ID NO: 113843 - protein, 9 aa, Homo sapiens
AQCFFCFKE

SEQ ID NO: 113844 - protein, 9 aa, Homo sapiens
QCFFCFKEL

SEQ ID NO: 113845 - protein, 9 aa, Homo sapiens
CFFCFKELE

SEQ ID NO: 113846 - protein, 9 aa, Homo sapiens
FFCFKELEG

SEQ ID NO: 113847 - protein, 9 aa, Homo sapiens
FCFKELEGW

SEQ ID NO: 113848 - protein, 9 aa, Homo sapiens
CFKELEGWE

SEQ ID NO: 113849 - protein, 9 aa, Homo sapiens
FKELEGWEP

SEQ ID NO: 113850 - protein, 9 aa, Homo sapiens
KELEGWEPD

SEQ ID NO: 113851 - protein, 9 aa, Homo sapiens
ELEGWEPDD

SEQ ID NO: 113852 - protein, 9 aa, Homo sapiens
LEGWEPDDD

SEQ ID NO: 113853 - protein, 9 aa, Homo sapiens
EGWEPDDDP

SEQ ID NO: 113854 - protein, 9 aa, Homo sapiens
GWEPDDDPI

SEQ ID NO: 113855 - protein, 9 aa, Homo sapiens
WEPDDDPIE

SEQ ID NO: 113856 - protein, 9 aa, Homo sapiens
EPDDDPIEE

SEQ ID NO: 113857 - protein, 9 aa, Homo sapiens
PDDDPIEEH

SEQ ID NO: 113858 - protein, 9 aa, Homo sapiens
DDDPIEEHK

SEQ ID NO: 113859 - protein, 9 aa, Homo sapiens
DDPIEEHKK

SEQ ID NO: 113860 - protein, 9 aa, Homo sapiens
DPIEEHKKH

SEQ ID NO: 113861 - protein, 9 aa, Homo sapiens
PIEEHKKHS

SEQ ID NO: 113862 - protein, 9 aa, Homo sapiens
IEEHKKHSS

SEQ ID NO: 113863 - protein, 9 aa, Homo sapiens
EEHKKHSSG

SEQ ID NO: 113864 - protein, 9 aa, Homo sapiens
EHKKHSSGC

SEQ ID NO: 113865 - protein, 9 aa, Homo sapiens
HKKHSSGCA

SEQ ID NO: 113866 - protein, 9 aa, Homo sapiens
KKHSSGCAF

SEQ ID NO: 113867 - protein, 9 aa, Homo sapiens
KHSSGCAFL

SEQ ID NO: 113868 - protein, 9 aa, Homo sapiens
HSSGCAFLS

SEQ ID NO: 113869 - protein, 9 aa, Homo sapiens
SSGCAFLSV

SEQ ID NO: 113870 - protein, 9 aa, Homo sapiens
SGCAFLSVK

SEQ ID NO: 113871 - protein, 9 aa, Homo sapiens
GCAFLSVKK

SEQ ID NO: 113872 - protein, 9 aa, Homo sapiens
CAFLSVKKQ

SEQ ID NO: 113873 - protein, 9 aa, Homo sapiens
AFLSVKKQF

SEQ ID NO: 113874 - protein, 9 aa, Homo sapiens
FLSVKKQFE

SEQ ID NO: 113875 - protein, 9 aa, Homo sapiens
LSVKKQFEE

SEQ ID NO: 113876 - protein, 9 aa, Homo sapiens
SVKKQFEEL

SEQ ID NO: 113877 - protein, 9 aa, Homo sapiens
VKKQFEELT

SEQ ID NO: 113878 - protein, 9 aa, Homo sapiens
KKQFEELTL

SEQ ID NO: 113879 - protein, 9 aa, Homo sapiens
KQFEELTLG

SEQ ID NO: 113880 - protein, 9 aa, Homo sapiens
QFEELTLGE

SEQ ID NO: 113881 - protein, 9 aa, Homo sapiens
FEELTLGEF

SEQ ID NO: 113882 - protein, 9 aa, Homo sapiens
EELTLGEFL

SEQ ID NO: 113883 - protein, 9 aa, Homo sapiens
ELTLGEFLK

SEQ ID NO: 113884 - protein, 9 aa, Homo sapiens
LTLGEFLKL

SEQ ID NO: 113885 - protein, 9 aa, Homo sapiens
TLGEFLKLD

SEQ ID NO: 113886 - protein, 9 aa, Homo sapiens
LGEFLKLDR

SEQ ID NO: 113887 - protein, 9 aa, Homo sapiens
GEFLKLDRE

SEQ ID NO: 113888 - protein, 9 aa, Homo sapiens
EFLKLDRER

SEQ ID NO: 113889 - protein, 9 aa, Homo sapiens
FLKLDRERA

SEQ ID NO: 113890 - protein, 9 aa, Homo sapiens
LKLDRERAK

SEQ ID NO: 113891 - protein, 9 aa, Homo sapiens
KLDRERAKN

SEQ ID NO: 113892 - protein, 9 aa, Homo sapiens
LDRERAKNK

SEQ ID NO: 113893 - protein, 9 aa, Homo sapiens
DRERAKNKI

SEQ ID NO: 113894 - protein, 9 aa, Homo sapiens
RERAKNKIA

SEQ ID NO: 113895 - protein, 9 aa, Homo sapiens
ERAKNKIAK

SEQ ID NO: 113896 - protein, 9 aa, Homo sapiens
RAKNKIAKE

SEQ ID NO: 113897 - protein, 9 aa, Homo sapiens
AKNKIAKET

SEQ ID NO: 113898 - protein, 9 aa, Homo sapiens
KNKIAKETN

SEQ ID NO: 113899 - protein, 9 aa, Homo sapiens
NKIAKETNN

SEQ ID NO: 113900 - protein, 9 aa, Homo sapiens
KIAKETNNK

SEQ ID NO: 113901 - protein, 9 aa, Homo sapiens
IAKETNNKK

SEQ ID NO: 113902 - protein, 9 aa, Homo sapiens
AKETNNKKK

SEQ ID NO: 113903 - protein, 9 aa, Homo sapiens
KETNNKKKE

SEQ ID NO: 113904 - protein, 9 aa, Homo sapiens
ETNNKKKEF

SEQ ID NO: 113905 - protein, 9 aa, Homo sapiens
TNNKKKEFE

SEQ ID NO: 113906 - protein, 9 aa, Homo sapiens
NNKKKEFEE

SEQ ID NO: 113907 - protein, 9 aa, Homo sapiens
NKKKEFEET

SEQ ID NO: 113908 - protein, 9 aa, Homo sapiens
KKKEFEETA

SEQ ID NO: 113909 - protein, 9 aa, Homo sapiens
KKEFEETAK

SEQ ID NO: 113910 - protein, 9 aa, Homo sapiens
KEFEETAKK

SEQ ID NO: 113911 - protein, 9 aa, Homo sapiens
EFEETAKKV

SEQ ID NO: 113912 - protein, 9 aa, Homo sapiens
FEETAKKVR

SEQ ID NO: 113913 - protein, 9 aa, Homo sapiens
EETAKKVRR

SEQ ID NO: 113914 - protein, 9 aa, Homo sapiens
ETAKKVRRA

SEQ ID NO: 113915 - protein, 9 aa, Homo sapiens
TAKKVRRAI

SEQ ID NO: 113916 - protein, 9 aa, Homo sapiens
AKKVRRAIE

SEQ ID NO: 113917 - protein, 9 aa, Homo sapiens
KKVRRAIEQ

SEQ ID NO: 113918 - protein, 9 aa, Homo sapiens
KVRRAIEQL

SEQ ID NO: 113919 - protein, 9 aa, Homo sapiens
VRRAIEQLA

SEQ ID NO: 113920 - protein, 9 aa, Homo sapiens
RRAIEQLAA

SEQ ID NO: 113921 - protein, 9 aa, Homo sapiens
RAIEQLAAM

SEQ ID NO: 113922 - protein, 9 aa, Homo sapiens
AIEQLAAMD

SEQ ID NO: 113923 - protein, 10 aa, Homo sapiens
MGAPTLPPAW

SEQ ID NO: 113924 - protein, 10 aa, Homo sapiens
GAPTLPPAWQ

SEQ ID NO: 113925 - protein, 10 aa, Homo sapiens
APTLPPAWQP

SEQ ID NO: 113926 - protein, 10 aa, Homo sapiens
PTLPPAWQPF

SEQ ID NO: 113927 - protein, 10 aa, Homo sapiens
TLPPAWQPFL

SEQ ID NO: 113928 - protein, 10 aa, Homo sapiens
LPPAWQPFLK

SEQ ID NO: 113929 - protein, 10 aa, Homo sapiens
PPAWQPFLKD

SEQ ID NO: 113930 - protein, 10 aa, Homo sapiens
PAWQPFLKDH

SEQ ID NO: 113931 - protein, 10 aa, Homo sapiens
AWQPFLKDHR

SEQ ID NO: 113932 - protein, 10 aa, Homo sapiens
WQPFLKDHRI

SEQ ID NO: 113933 - protein, 10 aa, Homo sapiens
QPFLKDHRIS

SEQ ID NO: 113934 - protein, 10 aa, Homo sapiens
PFLKDHRIST

SEQ ID NO: 113935 - protein, 10 aa, Homo sapiens
FLKDHRISTF

SEQ ID NO: 113936 - protein, 10 aa, Homo sapiens
LKDHRISTFK

SEQ ID NO: 113937 - protein, 10 aa, Homo sapiens
KDHRISTFKN

SEQ ID NO: 113938 - protein, 10 aa, Homo sapiens
DHRISTFKNW

SEQ ID NO: 113939 - protein, 10 aa, Homo sapiens
HRISTFKNWP

SEQ ID NO: 113940 - protein, 10 aa, Homo sapiens
RISTFKNWPF

SEQ ID NO: 113941 - protein, 10 aa, Homo sapiens
ISTFKNWPFL

SEQ ID NO: 113942 - protein, 10 aa, Homo sapiens
STFKNWPFLE

SEQ ID NO: 113943 - protein, 10 aa, Homo sapiens
TFKNWPFLEG

SEQ ID NO: 113944 - protein, 10 aa, Homo sapiens
FKNWPFLEGC

SEQ ID NO: 113945 - protein, 10 aa, Homo sapiens
KNWPFLEGCA

SEQ ID NO: 113946 - protein, 10 aa, Homo sapiens
NWPFLEGCAC

SEQ ID NO: 113947 - protein, 10 aa, Homo sapiens
WPFLEGCACT

SEQ ID NO: 113948 - protein, 10 aa, Homo sapiens
PFLEGCACTP

SEQ ID NO: 113949 - protein, 10 aa, Homo sapiens
FLEGCACTPE

SEQ ID NO: 113950 - protein, 10 aa, Homo sapiens
LEGCACTPER

SEQ ID NO: 113951 - protein, 10 aa, Homo sapiens
EGCACTPERM

SEQ ID NO: 113952 - protein, 10 aa, Homo sapiens
GCACTPERMA

SEQ ID NO: 113953 - protein, 10 aa, Homo sapiens
CACTPERMAE

SEQ ID NO: 113954 - protein, 10 aa, Homo sapiens
ACTPERMAEA

SEQ ID NO: 113955 - protein, 10 aa, Homo sapiens
CTPERMAEAG

SEQ ID NO: 113956 - protein, 10 aa, Homo sapiens
TPERMAEAGF

SEQ ID NO: 113957 - protein, 10 aa, Homo sapiens
PERMAEAGFI

SEQ ID NO: 113958 - protein, 10 aa, Homo sapiens
ERMAEAGFIH

SEQ ID NO: 113959 - protein, 10 aa, Homo sapiens
RMAEAGFIHC

SEQ ID NO: 113960 - protein, 10 aa, Homo sapiens
MAEAGFIHCP

SEQ ID NO: 113961 - protein, 10 aa, Homo sapiens
AEAGFIHCPT

SEQ ID NO: 113962 - protein, 10 aa, Homo sapiens
EAGFIHCPTE

SEQ ID NO: 113963 - protein, 10 aa, Homo sapiens
AGFIHCPTEN

SEQ ID NO: 113964 - protein, 10 aa, Homo sapiens
GFIHCPTENE

SEQ ID NO: 113965 - protein, 10 aa, Homo sapiens
FIHCPTENEP

SEQ ID NO: 113966 - protein, 10 aa, Homo sapiens
IHCPTENEPD

SEQ ID NO: 113967 - protein, 10 aa, Homo sapiens
HCPTENEPDL

SEQ ID NO: 113968 - protein, 10 aa, Homo sapiens
CPTENEPDLA

SEQ ID NO: 113969 - protein, 10 aa, Homo sapiens
PTENEPDLAQ

SEQ ID NO: 113970 - protein, 10 aa, Homo sapiens
TENEPDLAQC

SEQ ID NO: 113971 - protein, 10 aa, Homo sapiens
ENEPDLAQCF

SEQ ID NO: 113972 - protein, 10 aa, Homo sapiens
NEPDLAQCFF

SEQ ID NO: 113973 - protein, 10 aa, Homo sapiens
EPDLAQCFFC

SEQ ID NO: 113974 - protein, 10 aa, Homo sapiens
PDLAQCFFCF

SEQ ID NO: 113975 - protein, 10 aa, Homo sapiens
DLAQCFFCFK

SEQ ID NO: 113976 - protein, 10 aa, Homo sapiens
LAQCFFCFKE

SEQ ID NO: 113977 - protein, 10 aa, Homo sapiens
AQCFFCFKEL

SEQ ID NO: 113978 - protein, 10 aa, Homo sapiens
QCFFCFKELE

SEQ ID NO: 113979 - protein, 10 aa, Homo sapiens
CFFCFKELEG

SEQ ID NO: 113980 - protein, 10 aa, Homo sapiens
FFCFKELEGW

SEQ ID NO: 113981 - protein, 10 aa, Homo sapiens
FCFKELEGWE

SEQ ID NO: 113982 - protein, 10 aa, Homo sapiens
CFKELEGWEP

SEQ ID NO: 113983 - protein, 10 aa, Homo sapiens
FKELEGWEPD

SEQ ID NO: 113984 - protein, 10 aa, Homo sapiens
KELEGWEPDD

SEQ ID NO: 113985 - protein, 10 aa, Homo sapiens
ELEGWEPDDD

SEQ ID NO: 113986 - protein, 10 aa, Homo sapiens
LEGWEPDDDP

SEQ ID NO: 113987 - protein, 10 aa, Homo sapiens
EGWEPDDDPI

SEQ ID NO: 113988 - protein, 10 aa, Homo sapiens
GWEPDDDPIE

SEQ ID NO: 113989 - protein, 10 aa, Homo sapiens
WEPDDDPIEE

SEQ ID NO: 113990 - protein, 10 aa, Homo sapiens
EPDDDPIEEH

SEQ ID NO: 113991 - protein, 10 aa, Homo sapiens
PDDDPIEEHK

SEQ ID NO: 113992 - protein, 10 aa, Homo sapiens
DDDPIEEHKK

SEQ ID NO: 113993 - protein, 10 aa, Homo sapiens
DDPIEEHKKH

SEQ ID NO: 113994 - protein, 10 aa, Homo sapiens
DPIEEHKKHS

SEQ ID NO: 113995 - protein, 10 aa, Homo sapiens
PIEEHKKHSS

SEQ ID NO: 113996 - protein, 10 aa, Homo sapiens
IEEHKKHSSG

SEQ ID NO: 113997 - protein, 10 aa, Homo sapiens
EEHKKHSSGC

SEQ ID NO: 113998 - protein, 10 aa, Homo sapiens
EHKKHSSGCA

SEQ ID NO: 113999 - protein, 10 aa, Homo sapiens
HKKHSSGCAF

SEQ ID NO: 114000 - protein, 10 aa, Homo sapiens
KKHSSGCAFL

SEQ ID NO: 114001 - protein, 10 aa, Homo sapiens
KHSSGCAFLS

SEQ ID NO: 114002 - protein, 10 aa, Homo sapiens
HSSGCAFLSV

SEQ ID NO: 114003 - protein, 10 aa, Homo sapiens
SSGCAFLSVK

SEQ ID NO: 114004 - protein, 10 aa, Homo sapiens
SGCAFLSVKK

SEQ ID NO: 114005 - protein, 10 aa, Homo sapiens
GCAFLSVKKQ

SEQ ID NO: 114006 - protein, 10 aa, Homo sapiens
CAFLSVKKQF

SEQ ID NO: 114007 - protein, 10 aa, Homo sapiens
AFLSVKKQFE

SEQ ID NO: 114008 - protein, 10 aa, Homo sapiens
FLSVKKQFEE

SEQ ID NO: 114009 - protein, 10 aa, Homo sapiens
LSVKKQFEEL

SEQ ID NO: 114010 - protein, 10 aa, Homo sapiens
SVKKQFEELT

SEQ ID NO: 114011 - protein, 10 aa, Homo sapiens
VKKQFEELTL

SEQ ID NO: 114012 - protein, 10 aa, Homo sapiens
KKQFEELTLG

SEQ ID NO: 114013 - protein, 10 aa, Homo sapiens
KQFEELTLGE

SEQ ID NO: 114014 - protein, 10 aa, Homo sapiens
QFEELTLGEF

SEQ ID NO: 114015 - protein, 10 aa, Homo sapiens
FEELTLGEFL

SEQ ID NO: 114016 - protein, 10 aa, Homo sapiens
EELTLGEFLK

SEQ ID NO: 114017 - protein, 10 aa, Homo sapiens
ELTLGEFLKL

SEQ ID NO: 114018 - protein, 10 aa, Homo sapiens
LTLGEFLKLD

SEQ ID NO: 114019 - protein, 10 aa, Homo sapiens
TLGEFLKLDR

SEQ ID NO: 114020 - protein, 10 aa, Homo sapiens
LGEFLKLDRE

SEQ ID NO: 114021 - protein, 10 aa, Homo sapiens
GEFLKLDRER

SEQ ID NO: 114022 - protein, 10 aa, Homo sapiens
EFLKLDRERA

SEQ ID NO: 114023 - protein, 10 aa, Homo sapiens
FLKLDRERAK

SEQ ID NO: 114024 - protein, 10 aa, Homo sapiens
LKLDRERAKN

SEQ ID NO: 114025 - protein, 10 aa, Homo sapiens
KLDRERAKNK

SEQ ID NO: 114026 - protein, 10 aa, Homo sapiens
LDRERAKNKI

SEQ ID NO: 114027 - protein, 10 aa, Homo sapiens
DRERAKNKIA

SEQ ID NO: 114028 - protein, 10 aa, Homo sapiens
RERAKNKIAK

SEQ ID NO: 114029 - protein, 10 aa, Homo sapiens
ERAKNKIAKE

SEQ ID NO: 114030 - protein, 10 aa, Homo sapiens
RAKNKIAKET

SEQ ID NO: 114031 - protein, 10 aa, Homo sapiens
AKNKIAKETN

SEQ ID NO: 114032 - protein, 10 aa, Homo sapiens
KNKIAKETNN

SEQ ID NO: 114033 - protein, 10 aa, Homo sapiens
NKIAKETNNK

SEQ ID NO: 114034 - protein, 10 aa, Homo sapiens
KIAKETNNKK

SEQ ID NO: 114035 - protein, 10 aa, Homo sapiens
IAKETNNKKK

SEQ ID NO: 114036 - protein, 10 aa, Homo sapiens
AKETNNKKKE

SEQ ID NO: 114037 - protein, 10 aa, Homo sapiens
KETNNKKKEF

SEQ ID NO: 114038 - protein, 10 aa, Homo sapiens
ETNNKKKEFE

SEQ ID NO: 114039 - protein, 10 aa, Homo sapiens
TNNKKKEFEE

SEQ ID NO: 114040 - protein, 10 aa, Homo sapiens
NNKKKEFEET

SEQ ID NO: 114041 - protein, 10 aa, Homo sapiens
NKKKEFEETA

SEQ ID NO: 114042 - protein, 10 aa, Homo sapiens
KKKEFEETAK

SEQ ID NO: 114043 - protein, 10 aa, Homo sapiens
KKEFEETAKK

SEQ ID NO: 114044 - protein, 10 aa, Homo sapiens
KEFEETAKKV

SEQ ID NO: 114045 - protein, 10 aa, Homo sapiens
EFEETAKKVR

SEQ ID NO: 114046 - protein, 10 aa, Homo sapiens
FEETAKKVRR

SEQ ID NO: 114047 - protein, 10 aa, Homo sapiens
EETAKKVRRA

SEQ ID NO: 114048 - protein, 10 aa, Homo sapiens
ETAKKVRRAI

SEQ ID NO: 114049 - protein, 10 aa, Homo sapiens
TAKKVRRAIE

SEQ ID NO: 114050 - protein, 10 aa, Homo sapiens
AKKVRRAIEQ

SEQ ID NO: 114051 - protein, 10 aa, Homo sapiens
KKVRRAIEQL

SEQ ID NO: 114052 - protein, 10 aa, Homo sapiens
KVRRAIEQLA

SEQ ID NO: 114053 - protein, 10 aa, Homo sapiens
VRRAIEQLAA

SEQ ID NO: 114054 - protein, 10 aa, Homo sapiens
RRAIEQLAAM

SEQ ID NO: 114055 - protein, 10 aa, Homo sapiens
RAIEQLAAMD

SEQ ID NO: 114056 - protein, 11 aa, Homo sapiens
MGAPTLPPAWQ

SEQ ID NO: 114057 - protein, 11 aa, Homo sapiens
GAPTLPPAWQP

SEQ ID NO: 114058 - protein, 11 aa, Homo sapiens
APTLPPAWQPF

SEQ ID NO: 114059 - protein, 11 aa, Homo sapiens
PTLPPAWQPFL

SEQ ID NO: 114060 - protein, 11 aa, Homo sapiens
TLPPAWQPFLK

SEQ ID NO: 114061 - protein, 11 aa, Homo sapiens
LPPAWQPFLKD

SEQ ID NO: 114062 - protein, 11 aa, Homo sapiens
PPAWQPFLKDH

SEQ ID NO: 114063 - protein, 11 aa, Homo sapiens
PAWQPFLKDHR

SEQ ID NO: 114064 - protein, 11 aa, Homo sapiens
AWQPFLKDHRI

SEQ ID NO: 114065 - protein, 11 aa, Homo sapiens
WQPFLKDHRIS

SEQ ID NO: 114066 - protein, 11 aa, Homo sapiens
QPFLKDHRIST

SEQ ID NO: 114067 - protein, 11 aa, Homo sapiens
PFLKDHRISTF

SEQ ID NO: 114068 - protein, 11 aa, Homo sapiens
FLKDHRISTFK

SEQ ID NO: 114069 - protein, 11 aa, Homo sapiens
LKDHRISTFKN

SEQ ID NO: 114070 - protein, 11 aa, Homo sapiens
KDHRISTFKNW

SEQ ID NO: 114071 - protein, 11 aa, Homo sapiens
DHRISTFKNWP

SEQ ID NO: 114072 - protein, 11 aa, Homo sapiens
HRISTFKNWPF

SEQ ID NO: 114073 - protein, 11 aa, Homo sapiens
RISTFKNWPFL

SEQ ID NO: 114074 - protein, 11 aa, Homo sapiens
ISTFKNWPFLE

SEQ ID NO: 114075 - protein, 11 aa, Homo sapiens
STFKNWPFLEG

SEQ ID NO: 114076 - protein, 11 aa, Homo sapiens
TFKNWPFLEGC

SEQ ID NO: 114077 - protein, 11 aa, Homo sapiens
FKNWPFLEGCA

SEQ ID NO: 114078 - protein, 11 aa, Homo sapiens
KNWPFLEGCAC

SEQ ID NO: 114079 - protein, 11 aa, Homo sapiens
NWPFLEGCACT

SEQ ID NO: 114080 - protein, 11 aa, Homo sapiens
WPFLEGCACTP

SEQ ID NO: 114081 - protein, 11 aa, Homo sapiens
PFLEGCACTPE

SEQ ID NO: 114082 - protein, 11 aa, Homo sapiens
FLEGCACTPER

SEQ ID NO: 114083 - protein, 11 aa, Homo sapiens
LEGCACTPERM

SEQ ID NO: 114084 - protein, 11 aa, Homo sapiens
EGCACTPERMA

SEQ ID NO: 114085 - protein, 11 aa, Homo sapiens
GCACTPERMAE

SEQ ID NO: 114086 - protein, 11 aa, Homo sapiens
CACTPERMAEA

SEQ ID NO: 114087 - protein, 11 aa, Homo sapiens
ACTPERMAEAG

SEQ ID NO: 114088 - protein, 11 aa, Homo sapiens
CTPERMAEAGF

SEQ ID NO: 114089 - protein, 11 aa, Homo sapiens
TPERMAEAGFI

SEQ ID NO: 114090 - protein, 11 aa, Homo sapiens
PERMAEAGFIH

SEQ ID NO: 114091 - protein, 11 aa, Homo sapiens
ERMAEAGFIHC

SEQ ID NO: 114092 - protein, 11 aa, Homo sapiens
RMAEAGFIHCP

SEQ ID NO: 114093 - protein, 11 aa, Homo sapiens
MAEAGFIHCPT

SEQ ID NO: 114094 - protein, 11 aa, Homo sapiens
AEAGFIHCPTE

SEQ ID NO: 114095 - protein, 11 aa, Homo sapiens
EAGFIHCPTEN

SEQ ID NO: 114096 - protein, 11 aa, Homo sapiens
AGFIHCPTENE

SEQ ID NO: 114097 - protein, 11 aa, Homo sapiens
GFIHCPTENEP

SEQ ID NO: 114098 - protein, 11 aa, Homo sapiens
FIHCPTENEPD

SEQ ID NO: 114099 - protein, 11 aa, Homo sapiens
IHCPTENEPDL

SEQ ID NO: 114100 - protein, 11 aa, Homo sapiens
HCPTENEPDLA

SEQ ID NO: 114101 - protein, 11 aa, Homo sapiens
CPTENEPDLAQ

SEQ ID NO: 114102 - protein, 11 aa, Homo sapiens
PTENEPDLAQC

SEQ ID NO: 114103 - protein, 11 aa, Homo sapiens
TENEPDLAQCF

SEQ ID NO: 114104 - protein, 11 aa, Homo sapiens
ENEPDLAQCFF

SEQ ID NO: 114105 - protein, 11 aa, Homo sapiens
NEPDLAQCFFC

SEQ ID NO: 114106 - protein, 11 aa, Homo sapiens
EPDLAQCFFCF

SEQ ID NO: 114107 - protein, 11 aa, Homo sapiens
PDLAQCFFCFK

SEQ ID NO: 114108 - protein, 11 aa, Homo sapiens
DLAQCFFCFKE

SEQ ID NO: 114109 - protein, 11 aa, Homo sapiens
LAQCFFCFKEL

SEQ ID NO: 114110 - protein, 11 aa, Homo sapiens
AQCFFCFKELE

SEQ ID NO: 114111 - protein, 11 aa, Homo sapiens
QCFFCFKELEG

SEQ ID NO: 114112 - protein, 11 aa, Homo sapiens
CFFCFKELEGW

SEQ ID NO: 114113 - protein, 11 aa, Homo sapiens
FFCFKELEGWE

SEQ ID NO: 114114 - protein, 11 aa, Homo sapiens
FCFKELEGWEP

SEQ ID NO: 114115 - protein, 11 aa, Homo sapiens
CFKELEGWEPD

SEQ ID NO: 114116 - protein, 11 aa, Homo sapiens
FKELEGWEPDD

SEQ ID NO: 114117 - protein, 11 aa, Homo sapiens
KELEGWEPDDD

SEQ ID NO: 114118 - protein, 11 aa, Homo sapiens
ELEGWEPDDDP

SEQ ID NO: 114119 - protein, 11 aa, Homo sapiens
LEGWEPDDDPI

SEQ ID NO: 114120 - protein, 11 aa, Homo sapiens
EGWEPDDDPIE

SEQ ID NO: 114121 - protein, 11 aa, Homo sapiens
GWEPDDDPIEE

SEQ ID NO: 114122 - protein, 11 aa, Homo sapiens
WEPDDDPIEEH

SEQ ID NO: 114123 - protein, 11 aa, Homo sapiens
EPDDDPIEEHK

SEQ ID NO: 114124 - protein, 11 aa, Homo sapiens
PDDDPIEEHKK

SEQ ID NO: 114125 - protein, 11 aa, Homo sapiens
DDDPIEEHKKH

SEQ ID NO: 114126 - protein, 11 aa, Homo sapiens
DDPIEEHKKHS

SEQ ID NO: 114127 - protein, 11 aa, Homo sapiens
DPIEEHKKHSS

SEQ ID NO: 114128 - protein, 11 aa, Homo sapiens
PIEEHKKHSSG

SEQ ID NO: 114129 - protein, 11 aa, Homo sapiens
IEEHKKHSSGC

SEQ ID NO: 114130 - protein, 11 aa, Homo sapiens
EEHKKHSSGCA

SEQ ID NO: 114131 - protein, 11 aa, Homo sapiens
EHKKHSSGCAF

SEQ ID NO: 114132 - protein, 11 aa, Homo sapiens
HKKHSSGCAFL

SEQ ID NO: 114133 - protein, 11 aa, Homo sapiens
KKHSSGCAFLS

SEQ ID NO: 114134 - protein, 11 aa, Homo sapiens
KHSSGCAFLSV

SEQ ID NO: 114135 - protein, 11 aa, Homo sapiens
HSSGCAFLSVK

SEQ ID NO: 114136 - protein, 11 aa, Homo sapiens
SSGCAFLSVKK

SEQ ID NO: 114137 - protein, 11 aa, Homo sapiens
SGCAFLSVKKQ

SEQ ID NO: 114138 - protein, 11 aa, Homo sapiens
GCAFLSVKKQF

SEQ ID NO: 114139 - protein, 11 aa, Homo sapiens
CAFLSVKKQFE

SEQ ID NO: 114140 - protein, 11 aa, Homo sapiens
AFLSVKKQFEE

SEQ ID NO: 114141 - protein, 11 aa, Homo sapiens
FLSVKKQFEEL

SEQ ID NO: 114142 - protein, 11 aa, Homo sapiens
LSVKKQFEELT

SEQ ID NO: 114143 - protein, 11 aa, Homo sapiens
SVKKQFEELTL

SEQ ID NO: 114144 - protein, 11 aa, Homo sapiens
VKKQFEELTLG

SEQ ID NO: 114145 - protein, 11 aa, Homo sapiens
KKQFEELTLGE

SEQ ID NO: 114146 - protein, 11 aa, Homo sapiens
KQFEELTLGEF

SEQ ID NO: 114147 - protein, 11 aa, Homo sapiens
QFEELTLGEFL

SEQ ID NO: 114148 - protein, 11 aa, Homo sapiens
FEELTLGEFLK

SEQ ID NO: 114149 - protein, 11 aa, Homo sapiens
EELTLGEFLKL

SEQ ID NO: 114150 - protein, 11 aa, Homo sapiens
ELTLGEFLKLD

SEQ ID NO: 114151 - protein, 11 aa, Homo sapiens
LTLGEFLKLDR

SEQ ID NO: 114152 - protein, 11 aa, Homo sapiens
TLGEFLKLDRE

SEQ ID NO: 114153 - protein, 11 aa, Homo sapiens
LGEFLKLDRER

SEQ ID NO: 114154 - protein, 11 aa, Homo sapiens
GEFLKLDRERA

SEQ ID NO: 114155 - protein, 11 aa, Homo sapiens
EFLKLDRERAK

SEQ ID NO: 114156 - protein, 11 aa, Homo sapiens
FLKLDRERAKN

SEQ ID NO: 114157 - protein, 11 aa, Homo sapiens
LKLDRERAKNK

SEQ ID NO: 114158 - protein, 11 aa, Homo sapiens
KLDRERAKNKI

SEQ ID NO: 114159 - protein, 11 aa, Homo sapiens
LDRERAKNKIA

SEQ ID NO: 114160 - protein, 11 aa, Homo sapiens
DRERAKNKIAK

SEQ ID NO: 114161 - protein, 11 aa, Homo sapiens
RERAKNKIAKE

SEQ ID NO: 114162 - protein, 11 aa, Homo sapiens
ERAKNKIAKET

SEQ ID NO: 114163 - protein, 11 aa, Homo sapiens
RAKNKIAKETN

SEQ ID NO: 114164 - protein, 11 aa, Homo sapiens
AKNKIAKETNN

SEQ ID NO: 114165 - protein, 11 aa, Homo sapiens
KNKIAKETNNK

SEQ ID NO: 114166 - protein, 11 aa, Homo sapiens
NKIAKETNNKK

SEQ ID NO: 114167 - protein, 11 aa, Homo sapiens
KIAKETNNKKK

SEQ ID NO: 114168 - protein, 11 aa, Homo sapiens
IAKETNNKKKE

SEQ ID NO: 114169 - protein, 11 aa, Homo sapiens
AKETNNKKKEF

SEQ ID NO: 114170 - protein, 11 aa, Homo sapiens
KETNNKKKEFE

SEQ ID NO: 114171 - protein, 11 aa, Homo sapiens
ETNNKKKEFEE

SEQ ID NO: 114172 - protein, 11 aa, Homo sapiens
TNNKKKEFEET

SEQ ID NO: 114173 - protein, 11 aa, Homo sapiens
NNKKKEFEETA

SEQ ID NO: 114174 - protein, 11 aa, Homo sapiens
NKKKEFEETAK

SEQ ID NO: 114175 - protein, 11 aa, Homo sapiens
KKKEFEETAKK

SEQ ID NO: 114176 - protein, 11 aa, Homo sapiens
KKEFEETAKKV

SEQ ID NO: 114177 - protein, 11 aa, Homo sapiens
KEFEETAKKVR

SEQ ID NO: 114178 - protein, 11 aa, Homo sapiens
EFEETAKKVRR

SEQ ID NO: 114179 - protein, 11 aa, Homo sapiens
FEETAKKVRRA

SEQ ID NO: 114180 - protein, 11 aa, Homo sapiens
EETAKKVRRAI

SEQ ID NO: 114181 - protein, 11 aa, Homo sapiens
ETAKKVRRAIE

SEQ ID NO: 114182 - protein, 11 aa, Homo sapiens
TAKKVRRAIEQ

SEQ ID NO: 114183 - protein, 11 aa, Homo sapiens
AKKVRRAIEQL

SEQ ID NO: 114184 - protein, 11 aa, Homo sapiens
KKVRRAIEQLA

SEQ ID NO: 114185 - protein, 11 aa, Homo sapiens
KVRRAIEQLAA

SEQ ID NO: 114186 - protein, 11 aa, Homo sapiens
VRRAIEQLAAM

SEQ ID NO: 114187 - protein, 11 aa, Homo sapiens
RRAIEQLAAMD

SEQ ID NO: 114188 - protein, 13 aa, Homo sapiens
MFGLKRNAVIGLN

SEQ ID NO: 114189 - protein, 13 aa, Homo sapiens
FGLKRNAVIGLNL

SEQ ID NO: 114190 - protein, 13 aa, Homo sapiens
GLKRNAVIGLNLY

SEQ ID NO: 114191 - protein, 13 aa, Homo sapiens
LKRNAVIGLNLYC

SEQ ID NO: 114192 - protein, 13 aa, Homo sapiens
KRNAVIGLNLYCG

SEQ ID NO: 114193 - protein, 13 aa, Homo sapiens
RNAVIGLNLYCGG

SEQ ID NO: 114194 - protein, 13 aa, Homo sapiens
NAVIGLNLYCGGA

SEQ ID NO: 114195 - protein, 13 aa, Homo sapiens
AVIGLNLYCGGAG

SEQ ID NO: 114196 - protein, 13 aa, Homo sapiens
VIGLNLYCGGAGL

SEQ ID NO: 114197 - protein, 13 aa, Homo sapiens
IGLNLYCGGAGLG

SEQ ID NO: 114198 - protein, 13 aa, Homo sapiens
GLNLYCGGAGLGA

SEQ ID NO: 114199 - protein, 13 aa, Homo sapiens
LNLYCGGAGLGAG

SEQ ID NO: 114200 - protein, 13 aa, Homo sapiens
NLYCGGAGLGAGS

SEQ ID NO: 114201 - protein, 13 aa, Homo sapiens
LYCGGAGLGAGSG

SEQ ID NO: 114202 - protein, 13 aa, Homo sapiens
YCGGAGLGAGSGG

SEQ ID NO: 114203 - protein, 13 aa, Homo sapiens
CGGAGLGAGSGGA

SEQ ID NO: 114204 - protein, 13 aa, Homo sapiens
GGAGLGAGSGGAT

SEQ ID NO: 114205 - protein, 13 aa, Homo sapiens
GAGLGAGSGGATR

SEQ ID NO: 114206 - protein, 13 aa, Homo sapiens
AGLGAGSGGATRP

SEQ ID NO: 114207 - protein, 13 aa, Homo sapiens
GLGAGSGGATRPG

SEQ ID NO: 114208 - protein, 13 aa, Homo sapiens
LGAGSGGATRPGG

SEQ ID NO: 114209 - protein, 13 aa, Homo sapiens
GAGSGGATRPGGR

SEQ ID NO: 114210 - protein, 13 aa, Homo sapiens
AGSGGATRPGGRL

SEQ ID NO: 114211 - protein, 13 aa, Homo sapiens
GSGGATRPGGRLL

SEQ ID NO: 114212 - protein, 13 aa, Homo sapiens
SGGATRPGGRLLA

SEQ ID NO: 114213 - protein, 13 aa, Homo sapiens
GGATRPGGRLLAT

SEQ ID NO: 114214 - protein, 13 aa, Homo sapiens
GATRPGGRLLATE

SEQ ID NO: 114215 - protein, 13 aa, Homo sapiens
ATRPGGRLLATEK

SEQ ID NO: 114216 - protein, 13 aa, Homo sapiens
TRPGGRLLATEKE

SEQ ID NO: 114217 - protein, 13 aa, Homo sapiens
RPGGRLLATEKEA

SEQ ID NO: 114218 - protein, 13 aa, Homo sapiens
PGGRLLATEKEAS

SEQ ID NO: 114219 - protein, 13 aa, Homo sapiens
GGRLLATEKEASA

SEQ ID NO: 114220 - protein, 13 aa, Homo sapiens
GRLLATEKEASAR

SEQ ID NO: 114221 - protein, 13 aa, Homo sapiens
RLLATEKEASARR

SEQ ID NO: 114222 - protein, 13 aa, Homo sapiens
LLATEKEASARRE

SEQ ID NO: 114223 - protein, 13 aa, Homo sapiens
LATEKEASARREI

SEQ ID NO: 114224 - protein, 13 aa, Homo sapiens
ATEKEASARREIG

SEQ ID NO: 114225 - protein, 13 aa, Homo sapiens
TEKEASARREIGG

SEQ ID NO: 114226 - protein, 13 aa, Homo sapiens
EKEASARREIGGG

SEQ ID NO: 114227 - protein, 13 aa, Homo sapiens
KEASARREIGGGE

SEQ ID NO: 114228 - protein, 13 aa, Homo sapiens
EASARREIGGGEA

SEQ ID NO: 114229 - protein, 13 aa, Homo sapiens
ASARREIGGGEAG

SEQ ID NO: 114230 - protein, 13 aa, Homo sapiens
SARREIGGGEAGA

SEQ ID NO: 114231 - protein, 13 aa, Homo sapiens
ARREIGGGEAGAV

SEQ ID NO: 114232 - protein, 13 aa, Homo sapiens
RREIGGGEAGAVI

SEQ ID NO: 114233 - protein, 13 aa, Homo sapiens
REIGGGEAGAVIG

SEQ ID NO: 114234 - protein, 13 aa, Homo sapiens
EIGGGEAGAVIGG

SEQ ID NO: 114235 - protein, 13 aa, Homo sapiens
IGGGEAGAVIGGS

SEQ ID NO: 114236 - protein, 13 aa, Homo sapiens
GGGEAGAVIGGSA

SEQ ID NO: 114237 - protein, 13 aa, Homo sapiens
GGEAGAVIGGSAG

SEQ ID NO: 114238 - protein, 13 aa, Homo sapiens
GEAGAVIGGSAGA

SEQ ID NO: 114239 - protein, 13 aa, Homo sapiens
EAGAVIGGSAGAS

SEQ ID NO: 114240 - protein, 13 aa, Homo sapiens
AGAVIGGSAGASP

SEQ ID NO: 114241 - protein, 13 aa, Homo sapiens
GAVIGGSAGASPP

SEQ ID NO: 114242 - protein, 13 aa, Homo sapiens
AVIGGSAGASPPS

SEQ ID NO: 114243 - protein, 13 aa, Homo sapiens
VIGGSAGASPPST

SEQ ID NO: 114244 - protein, 13 aa, Homo sapiens
IGGSAGASPPSTL

SEQ ID NO: 114245 - protein, 13 aa, Homo sapiens
GGSAGASPPSTLT

SEQ ID NO: 114246 - protein, 13 aa, Homo sapiens
GSAGASPPSTLTP

SEQ ID NO: 114247 - protein, 13 aa, Homo sapiens
SAGASPPSTLTPD

SEQ ID NO: 114248 - protein, 13 aa, Homo sapiens
AGASPPSTLTPDS

SEQ ID NO: 114249 - protein, 13 aa, Homo sapiens
GASPPSTLTPDSR

SEQ ID NO: 114250 - protein, 13 aa, Homo sapiens
ASPPSTLTPDSRR

SEQ ID NO: 114251 - protein, 13 aa, Homo sapiens
SPPSTLTPDSRRV

SEQ ID NO: 114252 - protein, 13 aa, Homo sapiens
PPSTLTPDSRRVA

SEQ ID NO: 114253 - protein, 13 aa, Homo sapiens
PSTLTPDSRRVAR

SEQ ID NO: 114254 - protein, 13 aa, Homo sapiens
STLTPDSRRVARP

SEQ ID NO: 114255 - protein, 13 aa, Homo sapiens
TLTPDSRRVARPP

SEQ ID NO: 114256 - protein, 13 aa, Homo sapiens
LTPDSRRVARPPP

SEQ ID NO: 114257 - protein, 13 aa, Homo sapiens
TPDSRRVARPPPI

SEQ ID NO: 114258 - protein, 13 aa, Homo sapiens
PDSRRVARPPPIG

SEQ ID NO: 114259 - protein, 13 aa, Homo sapiens
DSRRVARPPPIGA

SEQ ID NO: 114260 - protein, 13 aa, Homo sapiens
SRRVARPPPIGAE

SEQ ID NO: 114261 - protein, 13 aa, Homo sapiens
RRVARPPPIGAEV

SEQ ID NO: 114262 - protein, 13 aa, Homo sapiens
RVARPPPIGAEVP

SEQ ID NO: 114263 - protein, 13 aa, Homo sapiens
VARPPPIGAEVPD

SEQ ID NO: 114264 - protein, 13 aa, Homo sapiens
ARPPPIGAEVPDV

SEQ ID NO: 114265 - protein, 13 aa, Homo sapiens
RPPPIGAEVPDVT

SEQ ID NO: 114266 - protein, 13 aa, Homo sapiens
PPPIGAEVPDVTA

SEQ ID NO: 114267 - protein, 13 aa, Homo sapiens
PPIGAEVPDVTAT

SEQ ID NO: 114268 - protein, 13 aa, Homo sapiens
PIGAEVPDVTATP

SEQ ID NO: 114269 - protein, 13 aa, Homo sapiens
IGAEVPDVTATPA

SEQ ID NO: 114270 - protein, 13 aa, Homo sapiens
GAEVPDVTATPAR

SEQ ID NO: 114271 - protein, 13 aa, Homo sapiens
AEVPDVTATPARL

SEQ ID NO: 114272 - protein, 13 aa, Homo sapiens
EVPDVTATPARLL

SEQ ID NO: 114273 - protein, 13 aa, Homo sapiens
VPDVTATPARLLF

SEQ ID NO: 114274 - protein, 13 aa, Homo sapiens
PDVTATPARLLFF

SEQ ID NO: 114275 - protein, 13 aa, Homo sapiens
DVTATPARLLFFA

SEQ ID NO: 114276 - protein, 13 aa, Homo sapiens
VTATPARLLFFAP

SEQ ID NO: 114277 - protein, 13 aa, Homo sapiens
TATPARLLFFAPT

SEQ ID NO: 114278 - protein, 13 aa, Homo sapiens
ATPARLLFFAPTR

SEQ ID NO: 114279 - protein, 13 aa, Homo sapiens
TPARLLFFAPTRR

SEQ ID NO: 114280 - protein, 13 aa, Homo sapiens
PARLLFFAPTRRA

SEQ ID NO: 114281 - protein, 13 aa, Homo sapiens
ARLLFFAPTRRAA

SEQ ID NO: 114282 - protein, 13 aa, Homo sapiens
RLLFFAPTRRAAP

SEQ ID NO: 114283 - protein, 13 aa, Homo sapiens
LLFFAPTRRAAPL

SEQ ID NO: 114284 - protein, 13 aa, Homo sapiens
LFFAPTRRAAPLE

SEQ ID NO: 114285 - protein, 13 aa, Homo sapiens
FFAPTRRAAPLEE

SEQ ID NO: 114286 - protein, 13 aa, Homo sapiens
FAPTRRAAPLEEM

SEQ ID NO: 114287 - protein, 13 aa, Homo sapiens
APTRRAAPLEEME

SEQ ID NO: 114288 - protein, 13 aa, Homo sapiens
PTRRAAPLEEMEA

SEQ ID NO: 114289 - protein, 13 aa, Homo sapiens
TRRAAPLEEMEAP

SEQ ID NO: 114290 - protein, 13 aa, Homo sapiens
RRAAPLEEMEAPA

SEQ ID NO: 114291 - protein, 13 aa, Homo sapiens
RAAPLEEMEAPAA

SEQ ID NO: 114292 - protein, 13 aa, Homo sapiens
AAPLEEMEAPAAD

SEQ ID NO: 114293 - protein, 13 aa, Homo sapiens
APLEEMEAPAADA

SEQ ID NO: 114294 - protein, 13 aa, Homo sapiens
PLEEMEAPAADAI

SEQ ID NO: 114295 - protein, 13 aa, Homo sapiens
LEEMEAPAADAIM

SEQ ID NO: 114296 - protein, 13 aa, Homo sapiens
EEMEAPAADAIMS

SEQ ID NO: 114297 - protein, 13 aa, Homo sapiens
EMEAPAADAIMSP

SEQ ID NO: 114298 - protein, 13 aa, Homo sapiens
MEAPAADAIMSPE

SEQ ID NO: 114299 - protein, 13 aa, Homo sapiens
EAPAADAIMSPEE

SEQ ID NO: 114300 - protein, 13 aa, Homo sapiens
APAADAIMSPEEE

SEQ ID NO: 114301 - protein, 13 aa, Homo sapiens
PAADAIMSPEEEL

SEQ ID NO: 114302 - protein, 13 aa, Homo sapiens
AADAIMSPEEELD

SEQ ID NO: 114303 - protein, 13 aa, Homo sapiens
ADAIMSPEEELDG

SEQ ID NO: 114304 - protein, 13 aa, Homo sapiens
DAIMSPEEELDGY

SEQ ID NO: 114305 - protein, 13 aa, Homo sapiens
AIMSPEEELDGYE

SEQ ID NO: 114306 - protein, 13 aa, Homo sapiens
IMSPEEELDGYEP

SEQ ID NO: 114307 - protein, 13 aa, Homo sapiens
MSPEEELDGYEPE

SEQ ID NO: 114308 - protein, 13 aa, Homo sapiens
SPEEELDGYEPEP

SEQ ID NO: 114309 - protein, 13 aa, Homo sapiens
PEEELDGYEPEPL

SEQ ID NO: 114310 - protein, 13 aa, Homo sapiens
EEELDGYEPEPLG

SEQ ID NO: 114311 - protein, 13 aa, Homo sapiens
EELDGYEPEPLGK

SEQ ID NO: 114312 - protein, 13 aa, Homo sapiens
ELDGYEPEPLGKR

SEQ ID NO: 114313 - protein, 13 aa, Homo sapiens
LDGYEPEPLGKRP

SEQ ID NO: 114314 - protein, 13 aa, Homo sapiens
DGYEPEPLGKRPA

SEQ ID NO: 114315 - protein, 13 aa, Homo sapiens
GYEPEPLGKRPAV

SEQ ID NO: 114316 - protein, 13 aa, Homo sapiens
YEPEPLGKRPAVL

SEQ ID NO: 114317 - protein, 13 aa, Homo sapiens
EPEPLGKRPAVLP

SEQ ID NO: 114318 - protein, 13 aa, Homo sapiens
PEPLGKRPAVLPL

SEQ ID NO: 114319 - protein, 13 aa, Homo sapiens
EPLGKRPAVLPLL

SEQ ID NO: 114320 - protein, 13 aa, Homo sapiens
PLGKRPAVLPLLE

SEQ ID NO: 114321 - protein, 13 aa, Homo sapiens
LGKRPAVLPLLEL

SEQ ID NO: 114322 - protein, 13 aa, Homo sapiens
GKRPAVLPLLELV

SEQ ID NO: 114323 - protein, 13 aa, Homo sapiens
KRPAVLPLLELVG

SEQ ID NO: 114324 - protein, 13 aa, Homo sapiens
RPAVLPLLELVGE

SEQ ID NO: 114325 - protein, 13 aa, Homo sapiens
PAVLPLLELVGES

SEQ ID NO: 114326 - protein, 13 aa, Homo sapiens
AVLPLLELVGESG

SEQ ID NO: 114327 - protein, 13 aa, Homo sapiens
VLPLLELVGESGN

SEQ ID NO: 114328 - protein, 13 aa, Homo sapiens
LPLLELVGESGNN

SEQ ID NO: 114329 - protein, 13 aa, Homo sapiens
PLLELVGESGNNT

SEQ ID NO: 114330 - protein, 13 aa, Homo sapiens
LLELVGESGNNTS

SEQ ID NO: 114331 - protein, 13 aa, Homo sapiens
LELVGESGNNTST

SEQ ID NO: 114332 - protein, 13 aa, Homo sapiens
ELVGESGNNTSTD

SEQ ID NO: 114333 - protein, 13 aa, Homo sapiens
LVGESGNNTSTDG

SEQ ID NO: 114334 - protein, 13 aa, Homo sapiens
VGESGNNTSTDGS

SEQ ID NO: 114335 - protein, 13 aa, Homo sapiens
GESGNNTSTDGSL

SEQ ID NO: 114336 - protein, 13 aa, Homo sapiens
ESGNNTSTDGSLP

SEQ ID NO: 114337 - protein, 13 aa, Homo sapiens
SGNNTSTDGSLPS

SEQ ID NO: 114338 - protein, 13 aa, Homo sapiens
GNNTSTDGSLPST

SEQ ID NO: 114339 - protein, 13 aa, Homo sapiens
NNTSTDGSLPSTP

SEQ ID NO: 114340 - protein, 13 aa, Homo sapiens
NTSTDGSLPSTPP

SEQ ID NO: 114341 - protein, 13 aa, Homo sapiens
TSTDGSLPSTPPP

SEQ ID NO: 114342 - protein, 13 aa, Homo sapiens
STDGSLPSTPPPA

SEQ ID NO: 114343 - protein, 13 aa, Homo sapiens
TDGSLPSTPPPAE

SEQ ID NO: 114344 - protein, 13 aa, Homo sapiens
DGSLPSTPPPAEE

SEQ ID NO: 114345 - protein, 13 aa, Homo sapiens
GSLPSTPPPAEEE

SEQ ID NO: 114346 - protein, 13 aa, Homo sapiens
SLPSTPPPAEEEE

SEQ ID NO: 114347 - protein, 13 aa, Homo sapiens
LPSTPPPAEEEED

SEQ ID NO: 114348 - protein, 13 aa, Homo sapiens
PSTPPPAEEEEDD

SEQ ID NO: 114349 - protein, 13 aa, Homo sapiens
STPPPAEEEEDDL

SEQ ID NO: 114350 - protein, 13 aa, Homo sapiens
TPPPAEEEEDDLY

SEQ ID NO: 114351 - protein, 13 aa, Homo sapiens
PPPAEEEEDDLYR

SEQ ID NO: 114352 - protein, 13 aa, Homo sapiens
PPAEEEEDDLYRQ

SEQ ID NO: 114353 - protein, 13 aa, Homo sapiens
PAEEEEDDLYRQS

SEQ ID NO: 114354 - protein, 13 aa, Homo sapiens
AEEEEDDLYRQSL

SEQ ID NO: 114355 - protein, 13 aa, Homo sapiens
EEEEDDLYRQSLE

SEQ ID NO: 114356 - protein, 13 aa, Homo sapiens
EEEDDLYRQSLEI

SEQ ID NO: 114357 - protein, 13 aa, Homo sapiens
EEDDLYRQSLEII

SEQ ID NO: 114358 - protein, 13 aa, Homo sapiens
EDDLYRQSLEIIS

SEQ ID NO: 114359 - protein, 13 aa, Homo sapiens
DDLYRQSLEIISR

SEQ ID NO: 114360 - protein, 13 aa, Homo sapiens
DLYRQSLEIISRY

SEQ ID NO: 114361 - protein, 13 aa, Homo sapiens
LYRQSLEIISRYL

SEQ ID NO: 114362 - protein, 13 aa, Homo sapiens
YRQSLEIISRYLR

SEQ ID NO: 114363 - protein, 13 aa, Homo sapiens
RQSLEIISRYLRE

SEQ ID NO: 114364 - protein, 13 aa, Homo sapiens
QSLEIISRYLREQ

SEQ ID NO: 114365 - protein, 13 aa, Homo sapiens
SLEIISRYLREQA

SEQ ID NO: 114366 - protein, 13 aa, Homo sapiens
LEIISRYLREQAT

SEQ ID NO: 114367 - protein, 13 aa, Homo sapiens
EIISRYLREQATG

SEQ ID NO: 114368 - protein, 13 aa, Homo sapiens
IISRYLREQATGA

SEQ ID NO: 114369 - protein, 13 aa, Homo sapiens
ISRYLREQATGAK

SEQ ID NO: 114370 - protein, 13 aa, Homo sapiens
SRYLREQATGAKD

SEQ ID NO: 114371 - protein, 13 aa, Homo sapiens
RYLREQATGAKDT

SEQ ID NO: 114372 - protein, 13 aa, Homo sapiens
YLREQATGAKDTK

SEQ ID NO: 114373 - protein, 13 aa, Homo sapiens
LREQATGAKDTKP

SEQ ID NO: 114374 - protein, 13 aa, Homo sapiens
REQATGAKDTKPM

SEQ ID NO: 114375 - protein, 13 aa, Homo sapiens
EQATGAKDTKPMG

SEQ ID NO: 114376 - protein, 13 aa, Homo sapiens
QATGAKDTKPMGR

SEQ ID NO: 114377 - protein, 13 aa, Homo sapiens
ATGAKDTKPMGRS

SEQ ID NO: 114378 - protein, 13 aa, Homo sapiens
TGAKDTKPMGRSG

SEQ ID NO: 114379 - protein, 13 aa, Homo sapiens
GAKDTKPMGRSGA

SEQ ID NO: 114380 - protein, 13 aa, Homo sapiens
AKDTKPMGRSGAT

SEQ ID NO: 114381 - protein, 13 aa, Homo sapiens
KDTKPMGRSGATS

SEQ ID NO: 114382 - protein, 13 aa, Homo sapiens
DTKPMGRSGATSR

SEQ ID NO: 114383 - protein, 13 aa, Homo sapiens
TKPMGRSGATSRK

SEQ ID NO: 114384 - protein, 13 aa, Homo sapiens
KPMGRSGATSRKA

SEQ ID NO: 114385 - protein, 13 aa, Homo sapiens
PMGRSGATSRKAL

SEQ ID NO: 114386 - protein, 13 aa, Homo sapiens
MGRSGATSRKALE

SEQ ID NO: 114387 - protein, 13 aa, Homo sapiens
GRSGATSRKALET

SEQ ID NO: 114388 - protein, 13 aa, Homo sapiens
RSGATSRKALETL

SEQ ID NO: 114389 - protein, 13 aa, Homo sapiens
SGATSRKALETLR

SEQ ID NO: 114390 - protein, 13 aa, Homo sapiens
GATSRKALETLRR

SEQ ID NO: 114391 - protein, 13 aa, Homo sapiens
ATSRKALETLRRV

SEQ ID NO: 114392 - protein, 13 aa, Homo sapiens
TSRKALETLRRVG

SEQ ID NO: 114393 - protein, 13 aa, Homo sapiens
SRKALETLRRVGD

SEQ ID NO: 114394 - protein, 13 aa, Homo sapiens
RKALETLRRVGDG

SEQ ID NO: 114395 - protein, 13 aa, Homo sapiens
KALETLRRVGDGV

SEQ ID NO: 114396 - protein, 13 aa, Homo sapiens
ALETLRRVGDGVQ

SEQ ID NO: 114397 - protein, 13 aa, Homo sapiens
LETLRRVGDGVQR

SEQ ID NO: 114398 - protein, 13 aa, Homo sapiens
ETLRRVGDGVQRN

SEQ ID NO: 114399 - protein, 13 aa, Homo sapiens
TLRRVGDGVQRNH

SEQ ID NO: 114400 - protein, 13 aa, Homo sapiens
LRRVGDGVQRNHE

SEQ ID NO: 114401 - protein, 13 aa, Homo sapiens
RRVGDGVQRNHET

SEQ ID NO: 114402 - protein, 13 aa, Homo sapiens
RVGDGVQRNHETA

SEQ ID NO: 114403 - protein, 13 aa, Homo sapiens
VGDGVQRNHETAF

SEQ ID NO: 114404 - protein, 13 aa, Homo sapiens
GDGVQRNHETAFQ

SEQ ID NO: 114405 - protein, 13 aa, Homo sapiens
DGVQRNHETAFQG

SEQ ID NO: 114406 - protein, 13 aa, Homo sapiens
GVQRNHETAFQGM

SEQ ID NO: 114407 - protein, 13 aa, Homo sapiens
VQRNHETAFQGML

SEQ ID NO: 114408 - protein, 13 aa, Homo sapiens
QRNHETAFQGMLR

SEQ ID NO: 114409 - protein, 13 aa, Homo sapiens
RNHETAFQGMLRK

SEQ ID NO: 114410 - protein, 13 aa, Homo sapiens
NHETAFQGMLRKL

SEQ ID NO: 114411 - protein, 13 aa, Homo sapiens
HETAFQGMLRKLD

SEQ ID NO: 114412 - protein, 13 aa, Homo sapiens
ETAFQGMLRKLDI

SEQ ID NO: 114413 - protein, 13 aa, Homo sapiens
TAFQGMLRKLDIK

SEQ ID NO: 114414 - protein, 13 aa, Homo sapiens
AFQGMLRKLDIKN

SEQ ID NO: 114415 - protein, 13 aa, Homo sapiens
FQGMLRKLDIKNE

SEQ ID NO: 114416 - protein, 13 aa, Homo sapiens
QGMLRKLDIKNED

SEQ ID NO: 114417 - protein, 13 aa, Homo sapiens
GMLRKLDIKNEDD

SEQ ID NO: 114418 - protein, 13 aa, Homo sapiens
MLRKLDIKNEDDV

SEQ ID NO: 114419 - protein, 13 aa, Homo sapiens
LRKLDIKNEDDVK

SEQ ID NO: 114420 - protein, 13 aa, Homo sapiens
RKLDIKNEDDVKS

SEQ ID NO: 114421 - protein, 13 aa, Homo sapiens
KLDIKNEDDVKSL

SEQ ID NO: 114422 - protein, 13 aa, Homo sapiens
LDIKNEDDVKSLS

SEQ ID NO: 114423 - protein, 13 aa, Homo sapiens
DIKNEDDVKSLSR

SEQ ID NO: 114424 - protein, 13 aa, Homo sapiens
IKNEDDVKSLSRV

SEQ ID NO: 114425 - protein, 13 aa, Homo sapiens
KNEDDVKSLSRVM

SEQ ID NO: 114426 - protein, 13 aa, Homo sapiens
NEDDVKSLSRVMI

SEQ ID NO: 114427 - protein, 13 aa, Homo sapiens
EDDVKSLSRVMIH

SEQ ID NO: 114428 - protein, 13 aa, Homo sapiens
DDVKSLSRVMIHV

SEQ ID NO: 114429 - protein, 13 aa, Homo sapiens
DVKSLSRVMIHVF

SEQ ID NO: 114430 - protein, 13 aa, Homo sapiens
VKSLSRVMIHVFS

SEQ ID NO: 114431 - protein, 13 aa, Homo sapiens
KSLSRVMIHVFSD

SEQ ID NO: 114432 - protein, 13 aa, Homo sapiens
SLSRVMIHVFSDG

SEQ ID NO: 114433 - protein, 13 aa, Homo sapiens
LSRVMIHVFSDGV

SEQ ID NO: 114434 - protein, 13 aa, Homo sapiens
SRVMIHVFSDGVT

SEQ ID NO: 114435 - protein, 13 aa, Homo sapiens
RVMIHVFSDGVTN

SEQ ID NO: 114436 - protein, 13 aa, Homo sapiens
VMIHVFSDGVTNW

SEQ ID NO: 114437 - protein, 13 aa, Homo sapiens
MIHVFSDGVTNWG

SEQ ID NO: 114438 - protein, 13 aa, Homo sapiens
IHVFSDGVTNWGR

SEQ ID NO: 114439 - protein, 13 aa, Homo sapiens
HVFSDGVTNWGRI

SEQ ID NO: 114440 - protein, 13 aa, Homo sapiens
VFSDGVTNWGRIV

SEQ ID NO: 114441 - protein, 13 aa, Homo sapiens
FSDGVTNWGRIVT

SEQ ID NO: 114442 - protein, 13 aa, Homo sapiens
SDGVTNWGRIVTL

SEQ ID NO: 114443 - protein, 13 aa, Homo sapiens
DGVTNWGRIVTLI

SEQ ID NO: 114444 - protein, 13 aa, Homo sapiens
GVTNWGRIVTLIS

SEQ ID NO: 114445 - protein, 13 aa, Homo sapiens
VTNWGRIVTLISF

SEQ ID NO: 114446 - protein, 13 aa, Homo sapiens
TNWGRIVTLISFG

SEQ ID NO: 114447 - protein, 13 aa, Homo sapiens
NWGRIVTLISFGA

SEQ ID NO: 114448 - protein, 13 aa, Homo sapiens
WGRIVTLISFGAF

SEQ ID NO: 114449 - protein, 13 aa, Homo sapiens
GRIVTLISFGAFV

SEQ ID NO: 114450 - protein, 13 aa, Homo sapiens
RIVTLISFGAFVA

SEQ ID NO: 114451 - protein, 13 aa, Homo sapiens
IVTLISFGAFVAK

SEQ ID NO: 114452 - protein, 13 aa, Homo sapiens
VTLISFGAFVAKH

SEQ ID NO: 114453 - protein, 13 aa, Homo sapiens
TLISFGAFVAKHL

SEQ ID NO: 114454 - protein, 13 aa, Homo sapiens
LISFGAFVAKHLK

SEQ ID NO: 114455 - protein, 13 aa, Homo sapiens
ISFGAFVAKHLKT

SEQ ID NO: 114456 - protein, 13 aa, Homo sapiens
SFGAFVAKHLKTI

SEQ ID NO: 114457 - protein, 13 aa, Homo sapiens
FGAFVAKHLKTIN

SEQ ID NO: 114458 - protein, 13 aa, Homo sapiens
GAFVAKHLKTINQ

SEQ ID NO: 114459 - protein, 13 aa, Homo sapiens
AFVAKHLKTINQE

SEQ ID NO: 114460 - protein, 13 aa, Homo sapiens
FVAKHLKTINQES

SEQ ID NO: 114461 - protein, 13 aa, Homo sapiens
VAKHLKTINQESC

SEQ ID NO: 114462 - protein, 13 aa, Homo sapiens
AKHLKTINQESCI

SEQ ID NO: 114463 - protein, 13 aa, Homo sapiens
KHLKTINQESCIE

SEQ ID NO: 114464 - protein, 13 aa, Homo sapiens
HLKTINQESCIEP

SEQ ID NO: 114465 - protein, 13 aa, Homo sapiens
LKTINQESCIEPL

SEQ ID NO: 114466 - protein, 13 aa, Homo sapiens
KTINQESCIEPLA

SEQ ID NO: 114467 - protein, 13 aa, Homo sapiens
TINQESCIEPLAE

SEQ ID NO: 114468 - protein, 13 aa, Homo sapiens
INQESCIEPLAES

SEQ ID NO: 114469 - protein, 13 aa, Homo sapiens
NQESCIEPLAESI

SEQ ID NO: 114470 - protein, 13 aa, Homo sapiens
QESCIEPLAESIT

SEQ ID NO: 114471 - protein, 13 aa, Homo sapiens
ESCIEPLAESITD

SEQ ID NO: 114472 - protein, 13 aa, Homo sapiens
SCIEPLAESITDV

SEQ ID NO: 114473 - protein, 13 aa, Homo sapiens
CIEPLAESITDVL

SEQ ID NO: 114474 - protein, 13 aa, Homo sapiens
IEPLAESITDVLV

SEQ ID NO: 114475 - protein, 13 aa, Homo sapiens
EPLAESITDVLVR

SEQ ID NO: 114476 - protein, 13 aa, Homo sapiens
PLAESITDVLVRT

SEQ ID NO: 114477 - protein, 13 aa, Homo sapiens
LAESITDVLVRTK

SEQ ID NO: 114478 - protein, 13 aa, Homo sapiens
AESITDVLVRTKR

SEQ ID NO: 114479 - protein, 13 aa, Homo sapiens
ESITDVLVRTKRD

SEQ ID NO: 114480 - protein, 13 aa, Homo sapiens
SITDVLVRTKRDW

SEQ ID NO: 114481 - protein, 13 aa, Homo sapiens
ITDVLVRTKRDWL

SEQ ID NO: 114482 - protein, 13 aa, Homo sapiens
TDVLVRTKRDWLV

SEQ ID NO: 114483 - protein, 13 aa, Homo sapiens
DVLVRTKRDWLVK

SEQ ID NO: 114484 - protein, 13 aa, Homo sapiens
VLVRTKRDWLVKQ

SEQ ID NO: 114485 - protein, 13 aa, Homo sapiens
LVRTKRDWLVKQR

SEQ ID NO: 114486 - protein, 13 aa, Homo sapiens
VRTKRDWLVKQRG

SEQ ID NO: 114487 - protein, 13 aa, Homo sapiens
RTKRDWLVKQRGW

SEQ ID NO: 114488 - protein, 13 aa, Homo sapiens
TKRDWLVKQRGWD

SEQ ID NO: 114489 - protein, 13 aa, Homo sapiens
KRDWLVKQRGWDG

SEQ ID NO: 114490 - protein, 13 aa, Homo sapiens
RDWLVKQRGWDGF

SEQ ID NO: 114491 - protein, 13 aa, Homo sapiens
DWLVKQRGWDGFV

SEQ ID NO: 114492 - protein, 13 aa, Homo sapiens
WLVKQRGWDGFVE

SEQ ID NO: 114493 - protein, 13 aa, Homo sapiens
LVKQRGWDGFVEF

SEQ ID NO: 114494 - protein, 13 aa, Homo sapiens
VKQRGWDGFVEFF

SEQ ID NO: 114495 - protein, 13 aa, Homo sapiens
KQRGWDGFVEFFH

SEQ ID NO: 114496 - protein, 13 aa, Homo sapiens
QRGWDGFVEFFHV

SEQ ID NO: 114497 - protein, 13 aa, Homo sapiens
RGWDGFVEFFHVE

SEQ ID NO: 114498 - protein, 13 aa, Homo sapiens
GWDGFVEFFHVED

SEQ ID NO: 114499 - protein, 13 aa, Homo sapiens
WDGFVEFFHVEDL

SEQ ID NO: 114500 - protein, 13 aa, Homo sapiens
DGFVEFFHVEDLE

SEQ ID NO: 114501 - protein, 13 aa, Homo sapiens
GFVEFFHVEDLEG

SEQ ID NO: 114502 - protein, 13 aa, Homo sapiens
FVEFFHVEDLEGG

SEQ ID NO: 114503 - protein, 13 aa, Homo sapiens
VEFFHVEDLEGGI

SEQ ID NO: 114504 - protein, 13 aa, Homo sapiens
EFFHVEDLEGGIR

SEQ ID NO: 114505 - protein, 13 aa, Homo sapiens
FFHVEDLEGGIRN

SEQ ID NO: 114506 - protein, 13 aa, Homo sapiens
FHVEDLEGGIRNV

SEQ ID NO: 114507 - protein, 13 aa, Homo sapiens
HVEDLEGGIRNVL

SEQ ID NO: 114508 - protein, 13 aa, Homo sapiens
VEDLEGGIRNVLL

SEQ ID NO: 114509 - protein, 13 aa, Homo sapiens
EDLEGGIRNVLLA

SEQ ID NO: 114510 - protein, 13 aa, Homo sapiens
DLEGGIRNVLLAF

SEQ ID NO: 114511 - protein, 13 aa, Homo sapiens
LEGGIRNVLLAFA

SEQ ID NO: 114512 - protein, 13 aa, Homo sapiens
EGGIRNVLLAFAG

SEQ ID NO: 114513 - protein, 13 aa, Homo sapiens
GGIRNVLLAFAGV

SEQ ID NO: 114514 - protein, 13 aa, Homo sapiens
GIRNVLLAFAGVA

SEQ ID NO: 114515 - protein, 13 aa, Homo sapiens
IRNVLLAFAGVAG

SEQ ID NO: 114516 - protein, 13 aa, Homo sapiens
RNVLLAFAGVAGV

SEQ ID NO: 114517 - protein, 13 aa, Homo sapiens
NVLLAFAGVAGVG

SEQ ID NO: 114518 - protein, 13 aa, Homo sapiens
VLLAFAGVAGVGA

SEQ ID NO: 114519 - protein, 13 aa, Homo sapiens
LLAFAGVAGVGAG

SEQ ID NO: 114520 - protein, 13 aa, Homo sapiens
LAFAGVAGVGAGL

SEQ ID NO: 114521 - protein, 13 aa, Homo sapiens
AFAGVAGVGAGLA

SEQ ID NO: 114522 - protein, 13 aa, Homo sapiens
FAGVAGVGAGLAY

SEQ ID NO: 114523 - protein, 13 aa, Homo sapiens
AGVAGVGAGLAYL

SEQ ID NO: 114524 - protein, 13 aa, Homo sapiens
GVAGVGAGLAYLI

SEQ ID NO: 114525 - protein, 13 aa, Homo sapiens
VAGVGAGLAYLIR

SEQ ID NO: 114526 - protein, 14 aa, Homo sapiens
MFGLKRNAVIGLNL

SEQ ID NO: 114527 - protein, 14 aa, Homo sapiens
FGLKRNAVIGLNLY

SEQ ID NO: 114528 - protein, 14 aa, Homo sapiens
GLKRNAVIGLNLYC

SEQ ID NO: 114529 - protein, 14 aa, Homo sapiens
LKRNAVIGLNLYCG

SEQ ID NO: 114530 - protein, 14 aa, Homo sapiens
KRNAVIGLNLYCGG

SEQ ID NO: 114531 - protein, 14 aa, Homo sapiens
RNAVIGLNLYCGGA

SEQ ID NO: 114532 - protein, 14 aa, Homo sapiens
NAVIGLNLYCGGAG

SEQ ID NO: 114533 - protein, 14 aa, Homo sapiens
AVIGLNLYCGGAGL

SEQ ID NO: 114534 - protein, 14 aa, Homo sapiens
VIGLNLYCGGAGLG

SEQ ID NO: 114535 - protein, 14 aa, Homo sapiens
IGLNLYCGGAGLGA

SEQ ID NO: 114536 - protein, 14 aa, Homo sapiens
GLNLYCGGAGLGAG

SEQ ID NO: 114537 - protein, 14 aa, Homo sapiens
LNLYCGGAGLGAGS

SEQ ID NO: 114538 - protein, 14 aa, Homo sapiens
NLYCGGAGLGAGSG

SEQ ID NO: 114539 - protein, 14 aa, Homo sapiens
LYCGGAGLGAGSGG

SEQ ID NO: 114540 - protein, 14 aa, Homo sapiens
YCGGAGLGAGSGGA

SEQ ID NO: 114541 - protein, 14 aa, Homo sapiens
CGGAGLGAGSGGAT

SEQ ID NO: 114542 - protein, 14 aa, Homo sapiens
GGAGLGAGSGGATR

SEQ ID NO: 114543 - protein, 14 aa, Homo sapiens
GAGLGAGSGGATRP

SEQ ID NO: 114544 - protein, 14 aa, Homo sapiens
AGLGAGSGGATRPG

SEQ ID NO: 114545 - protein, 14 aa, Homo sapiens
GLGAGSGGATRPGG

SEQ ID NO: 114546 - protein, 14 aa, Homo sapiens
LGAGSGGATRPGGR

SEQ ID NO: 114547 - protein, 14 aa, Homo sapiens
GAGSGGATRPGGRL

SEQ ID NO: 114548 - protein, 14 aa, Homo sapiens
AGSGGATRPGGRLL

SEQ ID NO: 114549 - protein, 14 aa, Homo sapiens
GSGGATRPGGRLLA

SEQ ID NO: 114550 - protein, 14 aa, Homo sapiens
SGGATRPGGRLLAT

SEQ ID NO: 114551 - protein, 14 aa, Homo sapiens
GGATRPGGRLLATE

SEQ ID NO: 114552 - protein, 14 aa, Homo sapiens
GATRPGGRLLATEK

SEQ ID NO: 114553 - protein, 14 aa, Homo sapiens
ATRPGGRLLATEKE

SEQ ID NO: 114554 - protein, 14 aa, Homo sapiens
TRPGGRLLATEKEA

SEQ ID NO: 114555 - protein, 14 aa, Homo sapiens
RPGGRLLATEKEAS

SEQ ID NO: 114556 - protein, 14 aa, Homo sapiens
PGGRLLATEKEASA

SEQ ID NO: 114557 - protein, 14 aa, Homo sapiens
GGRLLATEKEASAR

SEQ ID NO: 114558 - protein, 14 aa, Homo sapiens
GRLLATEKEASARR

SEQ ID NO: 114559 - protein, 14 aa, Homo sapiens
RLLATEKEASARRE

SEQ ID NO: 114560 - protein, 14 aa, Homo sapiens
LLATEKEASARREI

SEQ ID NO: 114561 - protein, 14 aa, Homo sapiens
LATEKEASARREIG

SEQ ID NO: 114562 - protein, 14 aa, Homo sapiens
ATEKEASARREIGG

SEQ ID NO: 114563 - protein, 14 aa, Homo sapiens
TEKEASARREIGGG

SEQ ID NO: 114564 - protein, 14 aa, Homo sapiens
EKEASARREIGGGE

SEQ ID NO: 114565 - protein, 14 aa, Homo sapiens
KEASARREIGGGEA

SEQ ID NO: 114566 - protein, 14 aa, Homo sapiens
EASARREIGGGEAG

SEQ ID NO: 114567 - protein, 14 aa, Homo sapiens
ASARREIGGGEAGA

SEQ ID NO: 114568 - protein, 14 aa, Homo sapiens
SARREIGGGEAGAV

SEQ ID NO: 114569 - protein, 14 aa, Homo sapiens
ARREIGGGEAGAVI

SEQ ID NO: 114570 - protein, 14 aa, Homo sapiens
RREIGGGEAGAVIG

SEQ ID NO: 114571 - protein, 14 aa, Homo sapiens
REIGGGEAGAVIGG

SEQ ID NO: 114572 - protein, 14 aa, Homo sapiens
EIGGGEAGAVIGGS

SEQ ID NO: 114573 - protein, 14 aa, Homo sapiens
IGGGEAGAVIGGSA

SEQ ID NO: 114574 - protein, 14 aa, Homo sapiens
GGGEAGAVIGGSAG

SEQ ID NO: 114575 - protein, 14 aa, Homo sapiens
GGEAGAVIGGSAGA

SEQ ID NO: 114576 - protein, 14 aa, Homo sapiens
GEAGAVIGGSAGAS

SEQ ID NO: 114577 - protein, 14 aa, Homo sapiens
EAGAVIGGSAGASP

SEQ ID NO: 114578 - protein, 14 aa, Homo sapiens
AGAVIGGSAGASPP

SEQ ID NO: 114579 - protein, 14 aa, Homo sapiens
GAVIGGSAGASPPS

SEQ ID NO: 114580 - protein, 14 aa, Homo sapiens
AVIGGSAGASPPST

SEQ ID NO: 114581 - protein, 14 aa, Homo sapiens
VIGGSAGASPPSTL

SEQ ID NO: 114582 - protein, 14 aa, Homo sapiens
IGGSAGASPPSTLT

SEQ ID NO: 114583 - protein, 14 aa, Homo sapiens
GGSAGASPPSTLTP

SEQ ID NO: 114584 - protein, 14 aa, Homo sapiens
GSAGASPPSTLTPD

SEQ ID NO: 114585 - protein, 14 aa, Homo sapiens
SAGASPPSTLTPDS

SEQ ID NO: 114586 - protein, 14 aa, Homo sapiens
AGASPPSTLTPDSR

SEQ ID NO: 114587 - protein, 14 aa, Homo sapiens
GASPPSTLTPDSRR

SEQ ID NO: 114588 - protein, 14 aa, Homo sapiens
ASPPSTLTPDSRRV

SEQ ID NO: 114589 - protein, 14 aa, Homo sapiens
SPPSTLTPDSRRVA

SEQ ID NO: 114590 - protein, 14 aa, Homo sapiens
PPSTLTPDSRRVAR

SEQ ID NO: 114591 - protein, 14 aa, Homo sapiens
PSTLTPDSRRVARP

SEQ ID NO: 114592 - protein, 14 aa, Homo sapiens
STLTPDSRRVARPP

SEQ ID NO: 114593 - protein, 14 aa, Homo sapiens
TLTPDSRRVARPPP

SEQ ID NO: 114594 - protein, 14 aa, Homo sapiens
LTPDSRRVARPPPI

SEQ ID NO: 114595 - protein, 14 aa, Homo sapiens
TPDSRRVARPPPIG

SEQ ID NO: 114596 - protein, 14 aa, Homo sapiens
PDSRRVARPPPIGA

SEQ ID NO: 114597 - protein, 14 aa, Homo sapiens
DSRRVARPPPIGAE

SEQ ID NO: 114598 - protein, 14 aa, Homo sapiens
SRRVARPPPIGAEV

SEQ ID NO: 114599 - protein, 14 aa, Homo sapiens
RRVARPPPIGAEVP

SEQ ID NO: 114600 - protein, 14 aa, Homo sapiens
RVARPPPIGAEVPD

SEQ ID NO: 114601 - protein, 14 aa, Homo sapiens
VARPPPIGAEVPDV

SEQ ID NO: 114602 - protein, 14 aa, Homo sapiens
ARPPPIGAEVPDVT

SEQ ID NO: 114603 - protein, 14 aa, Homo sapiens
RPPPIGAEVPDVTA

SEQ ID NO: 114604 - protein, 14 aa, Homo sapiens
PPPIGAEVPDVTAT

SEQ ID NO: 114605 - protein, 14 aa, Homo sapiens
PPIGAEVPDVTATP

SEQ ID NO: 114606 - protein, 14 aa, Homo sapiens
PIGAEVPDVTATPA

SEQ ID NO: 114607 - protein, 14 aa, Homo sapiens
IGAEVPDVTATPAR

SEQ ID NO: 114608 - protein, 14 aa, Homo sapiens
GAEVPDVTATPARL

SEQ ID NO: 114609 - protein, 14 aa, Homo sapiens
AEVPDVTATPARLL

SEQ ID NO: 114610 - protein, 14 aa, Homo sapiens
EVPDVTATPARLLF

SEQ ID NO: 114611 - protein, 14 aa, Homo sapiens
VPDVTATPARLLFF

SEQ ID NO: 114612 - protein, 14 aa, Homo sapiens
PDVTATPARLLFFA

SEQ ID NO: 114613 - protein, 14 aa, Homo sapiens
DVTATPARLLFFAP

SEQ ID NO: 114614 - protein, 14 aa, Homo sapiens
VTATPARLLFFAPT

SEQ ID NO: 114615 - protein, 14 aa, Homo sapiens
TATPARLLFFAPTR

SEQ ID NO: 114616 - protein, 14 aa, Homo sapiens
ATPARLLFFAPTRR

SEQ ID NO: 114617 - protein, 14 aa, Homo sapiens
TPARLLFFAPTRRA

SEQ ID NO: 114618 - protein, 14 aa, Homo sapiens
PARLLFFAPTRRAA

SEQ ID NO: 114619 - protein, 14 aa, Homo sapiens
ARLLFFAPTRRAAP

SEQ ID NO: 114620 - protein, 14 aa, Homo sapiens
RLLFFAPTRRAAPL

SEQ ID NO: 114621 - protein, 14 aa, Homo sapiens
LLFFAPTRRAAPLE

SEQ ID NO: 114622 - protein, 14 aa, Homo sapiens
LFFAPTRRAAPLEE

SEQ ID NO: 114623 - protein, 14 aa, Homo sapiens
FFAPTRRAAPLEEM

SEQ ID NO: 114624 - protein, 14 aa, Homo sapiens
FAPTRRAAPLEEME

SEQ ID NO: 114625 - protein, 14 aa, Homo sapiens
APTRRAAPLEEMEA

SEQ ID NO: 114626 - protein, 14 aa, Homo sapiens
PTRRAAPLEEMEAP

SEQ ID NO: 114627 - protein, 14 aa, Homo sapiens
TRRAAPLEEMEAPA

SEQ ID NO: 114628 - protein, 14 aa, Homo sapiens
RRAAPLEEMEAPAA

SEQ ID NO: 114629 - protein, 14 aa, Homo sapiens
RAAPLEEMEAPAAD

SEQ ID NO: 114630 - protein, 14 aa, Homo sapiens
AAPLEEMEAPAADA

SEQ ID NO: 114631 - protein, 14 aa, Homo sapiens
APLEEMEAPAADAI

SEQ ID NO: 114632 - protein, 14 aa, Homo sapiens
PLEEMEAPAADAIM

SEQ ID NO: 114633 - protein, 14 aa, Homo sapiens
LEEMEAPAADAIMS

SEQ ID NO: 114634 - protein, 14 aa, Homo sapiens
EEMEAPAADAIMSP

SEQ ID NO: 114635 - protein, 14 aa, Homo sapiens
EMEAPAADAIMSPE

SEQ ID NO: 114636 - protein, 14 aa, Homo sapiens
MEAPAADAIMSPEE

SEQ ID NO: 114637 - protein, 14 aa, Homo sapiens
EAPAADAIMSPEEE

SEQ ID NO: 114638 - protein, 14 aa, Homo sapiens
APAADAIMSPEEEL

SEQ ID NO: 114639 - protein, 14 aa, Homo sapiens
PAADAIMSPEEELD

SEQ ID NO: 114640 - protein, 14 aa, Homo sapiens
AADAIMSPEEELDG

SEQ ID NO: 114641 - protein, 14 aa, Homo sapiens
ADAIMSPEEELDGY

SEQ ID NO: 114642 - protein, 14 aa, Homo sapiens
DAIMSPEEELDGYE

SEQ ID NO: 114643 - protein, 14 aa, Homo sapiens
AIMSPEEELDGYEP

SEQ ID NO: 114644 - protein, 14 aa, Homo sapiens
IMSPEEELDGYEPE

SEQ ID NO: 114645 - protein, 14 aa, Homo sapiens
MSPEEELDGYEPEP

SEQ ID NO: 114646 - protein, 14 aa, Homo sapiens
SPEEELDGYEPEPL

SEQ ID NO: 114647 - protein, 14 aa, Homo sapiens
PEEELDGYEPEPLG

SEQ ID NO: 114648 - protein, 14 aa, Homo sapiens
EEELDGYEPEPLGK

SEQ ID NO: 114649 - protein, 14 aa, Homo sapiens
EELDGYEPEPLGKR

SEQ ID NO: 114650 - protein, 14 aa, Homo sapiens
ELDGYEPEPLGKRP

SEQ ID NO: 114651 - protein, 14 aa, Homo sapiens
LDGYEPEPLGKRPA

SEQ ID NO: 114652 - protein, 14 aa, Homo sapiens
DGYEPEPLGKRPAV

SEQ ID NO: 114653 - protein, 14 aa, Homo sapiens
GYEPEPLGKRPAVL

SEQ ID NO: 114654 - protein, 14 aa, Homo sapiens
YEPEPLGKRPAVLP

SEQ ID NO: 114655 - protein, 14 aa, Homo sapiens
EPEPLGKRPAVLPL

SEQ ID NO: 114656 - protein, 14 aa, Homo sapiens
PEPLGKRPAVLPLL

SEQ ID NO: 114657 - protein, 14 aa, Homo sapiens
EPLGKRPAVLPLLE

SEQ ID NO: 114658 - protein, 14 aa, Homo sapiens
PLGKRPAVLPLLEL

SEQ ID NO: 114659 - protein, 14 aa, Homo sapiens
LGKRPAVLPLLELV

SEQ ID NO: 114660 - protein, 14 aa, Homo sapiens
GKRPAVLPLLELVG

SEQ ID NO: 114661 - protein, 14 aa, Homo sapiens
KRPAVLPLLELVGE

SEQ ID NO: 114662 - protein, 14 aa, Homo sapiens
RPAVLPLLELVGES

SEQ ID NO: 114663 - protein, 14 aa, Homo sapiens
PAVLPLLELVGESG

SEQ ID NO: 114664 - protein, 14 aa, Homo sapiens
AVLPLLELVGESGN

SEQ ID NO: 114665 - protein, 14 aa, Homo sapiens
VLPLLELVGESGNN

SEQ ID NO: 114666 - protein, 14 aa, Homo sapiens
LPLLELVGESGNNT

SEQ ID NO: 114667 - protein, 14 aa, Homo sapiens
PLLELVGESGNNTS

SEQ ID NO: 114668 - protein, 14 aa, Homo sapiens
LLELVGESGNNTST

SEQ ID NO: 114669 - protein, 14 aa, Homo sapiens
LELVGESGNNTSTD

SEQ ID NO: 114670 - protein, 14 aa, Homo sapiens
ELVGESGNNTSTDG

SEQ ID NO: 114671 - protein, 14 aa, Homo sapiens
LVGESGNNTSTDGS

SEQ ID NO: 114672 - protein, 14 aa, Homo sapiens
VGESGNNTSTDGSL

SEQ ID NO: 114673 - protein, 14 aa, Homo sapiens
GESGNNTSTDGSLP

SEQ ID NO: 114674 - protein, 14 aa, Homo sapiens
ESGNNTSTDGSLPS

SEQ ID NO: 114675 - protein, 14 aa, Homo sapiens
SGNNTSTDGSLPST

SEQ ID NO: 114676 - protein, 14 aa, Homo sapiens
GNNTSTDGSLPSTP

SEQ ID NO: 114677 - protein, 14 aa, Homo sapiens
NNTSTDGSLPSTPP

SEQ ID NO: 114678 - protein, 14 aa, Homo sapiens
NTSTDGSLPSTPPP

SEQ ID NO: 114679 - protein, 14 aa, Homo sapiens
TSTDGSLPSTPPPA

SEQ ID NO: 114680 - protein, 14 aa, Homo sapiens
STDGSLPSTPPPAE

SEQ ID NO: 114681 - protein, 14 aa, Homo sapiens
TDGSLPSTPPPAEE

SEQ ID NO: 114682 - protein, 14 aa, Homo sapiens
DGSLPSTPPPAEEE

SEQ ID NO: 114683 - protein, 14 aa, Homo sapiens
GSLPSTPPPAEEEE

SEQ ID NO: 114684 - protein, 14 aa, Homo sapiens
SLPSTPPPAEEEED

SEQ ID NO: 114685 - protein, 14 aa, Homo sapiens
LPSTPPPAEEEEDD

SEQ ID NO: 114686 - protein, 14 aa, Homo sapiens
PSTPPPAEEEEDDL

SEQ ID NO: 114687 - protein, 14 aa, Homo sapiens
STPPPAEEEEDDLY

SEQ ID NO: 114688 - protein, 14 aa, Homo sapiens
TPPPAEEEEDDLYR

SEQ ID NO: 114689 - protein, 14 aa, Homo sapiens
PPPAEEEEDDLYRQ

SEQ ID NO: 114690 - protein, 14 aa, Homo sapiens
PPAEEEEDDLYRQS

SEQ ID NO: 114691 - protein, 14 aa, Homo sapiens
PAEEEEDDLYRQSL

SEQ ID NO: 114692 - protein, 14 aa, Homo sapiens
AEEEEDDLYRQSLE

SEQ ID NO: 114693 - protein, 14 aa, Homo sapiens
EEEEDDLYRQSLEI

SEQ ID NO: 114694 - protein, 14 aa, Homo sapiens
EEEDDLYRQSLEII

SEQ ID NO: 114695 - protein, 14 aa, Homo sapiens
EEDDLYRQSLEIIS

SEQ ID NO: 114696 - protein, 14 aa, Homo sapiens
EDDLYRQSLEIISR

SEQ ID NO: 114697 - protein, 14 aa, Homo sapiens
DDLYRQSLEIISRY

SEQ ID NO: 114698 - protein, 14 aa, Homo sapiens
DLYRQSLEIISRYL

SEQ ID NO: 114699 - protein, 14 aa, Homo sapiens
LYRQSLEIISRYLR

SEQ ID NO: 114700 - protein, 14 aa, Homo sapiens
YRQSLEIISRYLRE

SEQ ID NO: 114701 - protein, 14 aa, Homo sapiens
RQSLEIISRYLREQ

SEQ ID NO: 114702 - protein, 14 aa, Homo sapiens
QSLEIISRYLREQA

SEQ ID NO: 114703 - protein, 14 aa, Homo sapiens
SLEIISRYLREQAT

SEQ ID NO: 114704 - protein, 14 aa, Homo sapiens
LEIISRYLREQATG

SEQ ID NO: 114705 - protein, 14 aa, Homo sapiens
EIISRYLREQATGA

SEQ ID NO: 114706 - protein, 14 aa, Homo sapiens
IISRYLREQATGAK

SEQ ID NO: 114707 - protein, 14 aa, Homo sapiens
ISRYLREQATGAKD

SEQ ID NO: 114708 - protein, 14 aa, Homo sapiens
SRYLREQATGAKDT

SEQ ID NO: 114709 - protein, 14 aa, Homo sapiens
RYLREQATGAKDTK

SEQ ID NO: 114710 - protein, 14 aa, Homo sapiens
YLREQATGAKDTKP

SEQ ID NO: 114711 - protein, 14 aa, Homo sapiens
LREQATGAKDTKPM

SEQ ID NO: 114712 - protein, 14 aa, Homo sapiens
REQATGAKDTKPMG

SEQ ID NO: 114713 - protein, 14 aa, Homo sapiens
EQATGAKDTKPMGR

SEQ ID NO: 114714 - protein, 14 aa, Homo sapiens
QATGAKDTKPMGRS

SEQ ID NO: 114715 - protein, 14 aa, Homo sapiens
ATGAKDTKPMGRSG

SEQ ID NO: 114716 - protein, 14 aa, Homo sapiens
TGAKDTKPMGRSGA

SEQ ID NO: 114717 - protein, 14 aa, Homo sapiens
GAKDTKPMGRSGAT

SEQ ID NO: 114718 - protein, 14 aa, Homo sapiens
AKDTKPMGRSGATS

SEQ ID NO: 114719 - protein, 14 aa, Homo sapiens
KDTKPMGRSGATSR

SEQ ID NO: 114720 - protein, 14 aa, Homo sapiens
DTKPMGRSGATSRK

SEQ ID NO: 114721 - protein, 14 aa, Homo sapiens
TKPMGRSGATSRKA

SEQ ID NO: 114722 - protein, 14 aa, Homo sapiens
KPMGRSGATSRKAL

SEQ ID NO: 114723 - protein, 14 aa, Homo sapiens
PMGRSGATSRKALE

SEQ ID NO: 114724 - protein, 14 aa, Homo sapiens
MGRSGATSRKALET

SEQ ID NO: 114725 - protein, 14 aa, Homo sapiens
GRSGATSRKALETL

SEQ ID NO: 114726 - protein, 14 aa, Homo sapiens
RSGATSRKALETLR

SEQ ID NO: 114727 - protein, 14 aa, Homo sapiens
SGATSRKALETLRR

SEQ ID NO: 114728 - protein, 14 aa, Homo sapiens
GATSRKALETLRRV

SEQ ID NO: 114729 - protein, 14 aa, Homo sapiens
ATSRKALETLRRVG

SEQ ID NO: 114730 - protein, 14 aa, Homo sapiens
TSRKALETLRRVGD

SEQ ID NO: 114731 - protein, 14 aa, Homo sapiens
SRKALETLRRVGDG

SEQ ID NO: 114732 - protein, 14 aa, Homo sapiens
RKALETLRRVGDGV

SEQ ID NO: 114733 - protein, 14 aa, Homo sapiens
KALETLRRVGDGVQ

SEQ ID NO: 114734 - protein, 14 aa, Homo sapiens
ALETLRRVGDGVQR

SEQ ID NO: 114735 - protein, 14 aa, Homo sapiens
LETLRRVGDGVQRN

SEQ ID NO: 114736 - protein, 14 aa, Homo sapiens
ETLRRVGDGVQRNH

SEQ ID NO: 114737 - protein, 14 aa, Homo sapiens
TLRRVGDGVQRNHE

SEQ ID NO: 114738 - protein, 14 aa, Homo sapiens
LRRVGDGVQRNHET

SEQ ID NO: 114739 - protein, 14 aa, Homo sapiens
RRVGDGVQRNHETA

SEQ ID NO: 114740 - protein, 14 aa, Homo sapiens
RVGDGVQRNHETAF

SEQ ID NO: 114741 - protein, 14 aa, Homo sapiens
VGDGVQRNHETAFQ

SEQ ID NO: 114742 - protein, 14 aa, Homo sapiens
GDGVQRNHETAFQG

SEQ ID NO: 114743 - protein, 14 aa, Homo sapiens
DGVQRNHETAFQGM

SEQ ID NO: 114744 - protein, 14 aa, Homo sapiens
GVQRNHETAFQGML

SEQ ID NO: 114745 - protein, 14 aa, Homo sapiens
VQRNHETAFQGMLR

SEQ ID NO: 114746 - protein, 14 aa, Homo sapiens
QRNHETAFQGMLRK

SEQ ID NO: 114747 - protein, 14 aa, Homo sapiens
RNHETAFQGMLRKL

SEQ ID NO: 114748 - protein, 14 aa, Homo sapiens
NHETAFQGMLRKLD

SEQ ID NO: 114749 - protein, 14 aa, Homo sapiens
HETAFQGMLRKLDI

SEQ ID NO: 114750 - protein, 14 aa, Homo sapiens
ETAFQGMLRKLDIK

SEQ ID NO: 114751 - protein, 14 aa, Homo sapiens
TAFQGMLRKLDIKN

SEQ ID NO: 114752 - protein, 14 aa, Homo sapiens
AFQGMLRKLDIKNE

SEQ ID NO: 114753 - protein, 14 aa, Homo sapiens
FQGMLRKLDIKNED

SEQ ID NO: 114754 - protein, 14 aa, Homo sapiens
QGMLRKLDIKNEDD

SEQ ID NO: 114755 - protein, 14 aa, Homo sapiens
GMLRKLDIKNEDDV

SEQ ID NO: 114756 - protein, 14 aa, Homo sapiens
MLRKLDIKNEDDVK

SEQ ID NO: 114757 - protein, 14 aa, Homo sapiens
LRKLDIKNEDDVKS

SEQ ID NO: 114758 - protein, 14 aa, Homo sapiens
RKLDIKNEDDVKSL

SEQ ID NO: 114759 - protein, 14 aa, Homo sapiens
KLDIKNEDDVKSLS

SEQ ID NO: 114760 - protein, 14 aa, Homo sapiens
LDIKNEDDVKSLSR

SEQ ID NO: 114761 - protein, 14 aa, Homo sapiens
DIKNEDDVKSLSRV

SEQ ID NO: 114762 - protein, 14 aa, Homo sapiens
IKNEDDVKSLSRVM

SEQ ID NO: 114763 - protein, 14 aa, Homo sapiens
KNEDDVKSLSRVMI

SEQ ID NO: 114764 - protein, 14 aa, Homo sapiens
NEDDVKSLSRVMIH

SEQ ID NO: 114765 - protein, 14 aa, Homo sapiens
EDDVKSLSRVMIHV

SEQ ID NO: 114766 - protein, 14 aa, Homo sapiens
DDVKSLSRVMIHVF

SEQ ID NO: 114767 - protein, 14 aa, Homo sapiens
DVKSLSRVMIHVFS

SEQ ID NO: 114768 - protein, 14 aa, Homo sapiens
VKSLSRVMIHVFSD

SEQ ID NO: 114769 - protein, 14 aa, Homo sapiens
KSLSRVMIHVFSDG

SEQ ID NO: 114770 - protein, 14 aa, Homo sapiens
SLSRVMIHVFSDGV

SEQ ID NO: 114771 - protein, 14 aa, Homo sapiens
LSRVMIHVFSDGVT

SEQ ID NO: 114772 - protein, 14 aa, Homo sapiens
SRVMIHVFSDGVTN

SEQ ID NO: 114773 - protein, 14 aa, Homo sapiens
RVMIHVFSDGVTNW

SEQ ID NO: 114774 - protein, 14 aa, Homo sapiens
VMIHVFSDGVTNWG

SEQ ID NO: 114775 - protein, 14 aa, Homo sapiens
MIHVFSDGVTNWGR

SEQ ID NO: 114776 - protein, 14 aa, Homo sapiens
IHVFSDGVTNWGRI

SEQ ID NO: 114777 - protein, 14 aa, Homo sapiens
HVFSDGVTNWGRIV

SEQ ID NO: 114778 - protein, 14 aa, Homo sapiens
VFSDGVTNWGRIVT

SEQ ID NO: 114779 - protein, 14 aa, Homo sapiens
FSDGVTNWGRIVTL

SEQ ID NO: 114780 - protein, 14 aa, Homo sapiens
SDGVTNWGRIVTLI

SEQ ID NO: 114781 - protein, 14 aa, Homo sapiens
DGVTNWGRIVTLIS

SEQ ID NO: 114782 - protein, 14 aa, Homo sapiens
GVTNWGRIVTLISF

SEQ ID NO: 114783 - protein, 14 aa, Homo sapiens
VTNWGRIVTLISFG

SEQ ID NO: 114784 - protein, 14 aa, Homo sapiens
TNWGRIVTLISFGA

SEQ ID NO: 114785 - protein, 14 aa, Homo sapiens
NWGRIVTLISFGAF

SEQ ID NO: 114786 - protein, 14 aa, Homo sapiens
WGRIVTLISFGAFV

SEQ ID NO: 114787 - protein, 14 aa, Homo sapiens
GRIVTLISFGAFVA

SEQ ID NO: 114788 - protein, 14 aa, Homo sapiens
RIVTLISFGAFVAK

SEQ ID NO: 114789 - protein, 14 aa, Homo sapiens
IVTLISFGAFVAKH

SEQ ID NO: 114790 - protein, 14 aa, Homo sapiens
VTLISFGAFVAKHL

SEQ ID NO: 114791 - protein, 14 aa, Homo sapiens
TLISFGAFVAKHLK

SEQ ID NO: 114792 - protein, 14 aa, Homo sapiens
LISFGAFVAKHLKT

SEQ ID NO: 114793 - protein, 14 aa, Homo sapiens
ISFGAFVAKHLKTI

SEQ ID NO: 114794 - protein, 14 aa, Homo sapiens
SFGAFVAKHLKTIN

SEQ ID NO: 114795 - protein, 14 aa, Homo sapiens
FGAFVAKHLKTINQ

SEQ ID NO: 114796 - protein, 14 aa, Homo sapiens
GAFVAKHLKTINQE

SEQ ID NO: 114797 - protein, 14 aa, Homo sapiens
AFVAKHLKTINQES

SEQ ID NO: 114798 - protein, 14 aa, Homo sapiens
FVAKHLKTINQESC

SEQ ID NO: 114799 - protein, 14 aa, Homo sapiens
VAKHLKTINQESCI

SEQ ID NO: 114800 - protein, 14 aa, Homo sapiens
AKHLKTINQESCIE

SEQ ID NO: 114801 - protein, 14 aa, Homo sapiens
KHLKTINQESCIEP

SEQ ID NO: 114802 - protein, 14 aa, Homo sapiens
HLKTINQESCIEPL

SEQ ID NO: 114803 - protein, 14 aa, Homo sapiens
LKTINQESCIEPLA

SEQ ID NO: 114804 - protein, 14 aa, Homo sapiens
KTINQESCIEPLAE

SEQ ID NO: 114805 - protein, 14 aa, Homo sapiens
TINQESCIEPLAES

SEQ ID NO: 114806 - protein, 14 aa, Homo sapiens
INQESCIEPLAESI

SEQ ID NO: 114807 - protein, 14 aa, Homo sapiens
NQESCIEPLAESIT

SEQ ID NO: 114808 - protein, 14 aa, Homo sapiens
QESCIEPLAESITD

SEQ ID NO: 114809 - protein, 14 aa, Homo sapiens
ESCIEPLAESITDV

SEQ ID NO: 114810 - protein, 14 aa, Homo sapiens
SCIEPLAESITDVL

SEQ ID NO: 114811 - protein, 14 aa, Homo sapiens
CIEPLAESITDVLV

SEQ ID NO: 114812 - protein, 14 aa, Homo sapiens
IEPLAESITDVLVR

SEQ ID NO: 114813 - protein, 14 aa, Homo sapiens
EPLAESITDVLVRT

SEQ ID NO: 114814 - protein, 14 aa, Homo sapiens
PLAESITDVLVRTK

SEQ ID NO: 114815 - protein, 14 aa, Homo sapiens
LAESITDVLVRTKR

SEQ ID NO: 114816 - protein, 14 aa, Homo sapiens
AESITDVLVRTKRD

SEQ ID NO: 114817 - protein, 14 aa, Homo sapiens
ESITDVLVRTKRDW

SEQ ID NO: 114818 - protein, 14 aa, Homo sapiens
SITDVLVRTKRDWL

SEQ ID NO: 114819 - protein, 14 aa, Homo sapiens
ITDVLVRTKRDWLV

SEQ ID NO: 114820 - protein, 14 aa, Homo sapiens
TDVLVRTKRDWLVK

SEQ ID NO: 114821 - protein, 14 aa, Homo sapiens
DVLVRTKRDWLVKQ

SEQ ID NO: 114822 - protein, 14 aa, Homo sapiens
VLVRTKRDWLVKQR

SEQ ID NO: 114823 - protein, 14 aa, Homo sapiens
LVRTKRDWLVKQRG

SEQ ID NO: 114824 - protein, 14 aa, Homo sapiens
VRTKRDWLVKQRGW

SEQ ID NO: 114825 - protein, 14 aa, Homo sapiens
RTKRDWLVKQRGWD

SEQ ID NO: 114826 - protein, 14 aa, Homo sapiens
TKRDWLVKQRGWDG

SEQ ID NO: 114827 - protein, 14 aa, Homo sapiens
KRDWLVKQRGWDGF

SEQ ID NO: 114828 - protein, 14 aa, Homo sapiens
RDWLVKQRGWDGFV

SEQ ID NO: 114829 - protein, 14 aa, Homo sapiens
DWLVKQRGWDGFVE

SEQ ID NO: 114830 - protein, 14 aa, Homo sapiens
WLVKQRGWDGFVEF

SEQ ID NO: 114831 - protein, 14 aa, Homo sapiens
LVKQRGWDGFVEFF

SEQ ID NO: 114832 - protein, 14 aa, Homo sapiens
VKQRGWDGFVEFFH

SEQ ID NO: 114833 - protein, 14 aa, Homo sapiens
KQRGWDGFVEFFHV

SEQ ID NO: 114834 - protein, 14 aa, Homo sapiens
QRGWDGFVEFFHVE

SEQ ID NO: 114835 - protein, 14 aa, Homo sapiens
RGWDGFVEFFHVED

SEQ ID NO: 114836 - protein, 14 aa, Homo sapiens
GWDGFVEFFHVEDL

SEQ ID NO: 114837 - protein, 14 aa, Homo sapiens
WDGFVEFFHVEDLE

SEQ ID NO: 114838 - protein, 14 aa, Homo sapiens
DGFVEFFHVEDLEG

SEQ ID NO: 114839 - protein, 14 aa, Homo sapiens
GFVEFFHVEDLEGG

SEQ ID NO: 114840 - protein, 14 aa, Homo sapiens
FVEFFHVEDLEGGI

SEQ ID NO: 114841 - protein, 14 aa, Homo sapiens
VEFFHVEDLEGGIR

SEQ ID NO: 114842 - protein, 14 aa, Homo sapiens
EFFHVEDLEGGIRN

SEQ ID NO: 114843 - protein, 14 aa, Homo sapiens
FFHVEDLEGGIRNV

SEQ ID NO: 114844 - protein, 14 aa, Homo sapiens
FHVEDLEGGIRNVL

SEQ ID NO: 114845 - protein, 14 aa, Homo sapiens
HVEDLEGGIRNVLL

SEQ ID NO: 114846 - protein, 14 aa, Homo sapiens
VEDLEGGIRNVLLA

SEQ ID NO: 114847 - protein, 14 aa, Homo sapiens
EDLEGGIRNVLLAF

SEQ ID NO: 114848 - protein, 14 aa, Homo sapiens
DLEGGIRNVLLAFA

SEQ ID NO: 114849 - protein, 14 aa, Homo sapiens
LEGGIRNVLLAFAG

SEQ ID NO: 114850 - protein, 14 aa, Homo sapiens
EGGIRNVLLAFAGV

SEQ ID NO: 114851 - protein, 14 aa, Homo sapiens
GGIRNVLLAFAGVA

SEQ ID NO: 114852 - protein, 14 aa, Homo sapiens
GIRNVLLAFAGVAG

SEQ ID NO: 114853 - protein, 14 aa, Homo sapiens
IRNVLLAFAGVAGV

SEQ ID NO: 114854 - protein, 14 aa, Homo sapiens
RNVLLAFAGVAGVG

SEQ ID NO: 114855 - protein, 14 aa, Homo sapiens
NVLLAFAGVAGVGA

SEQ ID NO: 114856 - protein, 14 aa, Homo sapiens
VLLAFAGVAGVGAG

SEQ ID NO: 114857 - protein, 14 aa, Homo sapiens
LLAFAGVAGVGAGL

SEQ ID NO: 114858 - protein, 14 aa, Homo sapiens
LAFAGVAGVGAGLA

SEQ ID NO: 114859 - protein, 14 aa, Homo sapiens
AFAGVAGVGAGLAY

SEQ ID NO: 114860 - protein, 14 aa, Homo sapiens
FAGVAGVGAGLAYL

SEQ ID NO: 114861 - protein, 14 aa, Homo sapiens
AGVAGVGAGLAYLI

SEQ ID NO: 114862 - protein, 14 aa, Homo sapiens
GVAGVGAGLAYLIR

SEQ ID NO: 114863 - protein, 15 aa, Homo sapiens
MFGLKRNAVIGLNLY

SEQ ID NO: 114864 - protein, 15 aa, Homo sapiens
FGLKRNAVIGLNLYC

SEQ ID NO: 114865 - protein, 15 aa, Homo sapiens
GLKRNAVIGLNLYCG

SEQ ID NO: 114866 - protein, 15 aa, Homo sapiens
LKRNAVIGLNLYCGG

SEQ ID NO: 114867 - protein, 15 aa, Homo sapiens
KRNAVIGLNLYCGGA

SEQ ID NO: 114868 - protein, 15 aa, Homo sapiens
RNAVIGLNLYCGGAG

SEQ ID NO: 114869 - protein, 15 aa, Homo sapiens
NAVIGLNLYCGGAGL

SEQ ID NO: 114870 - protein, 15 aa, Homo sapiens
AVIGLNLYCGGAGLG

SEQ ID NO: 114871 - protein, 15 aa, Homo sapiens
VIGLNLYCGGAGLGA

SEQ ID NO: 114872 - protein, 15 aa, Homo sapiens
IGLNLYCGGAGLGAG

SEQ ID NO: 114873 - protein, 15 aa, Homo sapiens
GLNLYCGGAGLGAGS

SEQ ID NO: 114874 - protein, 15 aa, Homo sapiens
LNLYCGGAGLGAGSG

SEQ ID NO: 114875 - protein, 15 aa, Homo sapiens
NLYCGGAGLGAGSGG

SEQ ID NO: 114876 - protein, 15 aa, Homo sapiens
LYCGGAGLGAGSGGA

SEQ ID NO: 114877 - protein, 15 aa, Homo sapiens
YCGGAGLGAGSGGAT

SEQ ID NO: 114878 - protein, 15 aa, Homo sapiens
CGGAGLGAGSGGATR

SEQ ID NO: 114879 - protein, 15 aa, Homo sapiens
GGAGLGAGSGGATRP

SEQ ID NO: 114880 - protein, 15 aa, Homo sapiens
GAGLGAGSGGATRPG

SEQ ID NO: 114881 - protein, 15 aa, Homo sapiens
AGLGAGSGGATRPGG

SEQ ID NO: 114882 - protein, 15 aa, Homo sapiens
GLGAGSGGATRPGGR

SEQ ID NO: 114883 - protein, 15 aa, Homo sapiens
LGAGSGGATRPGGRL

SEQ ID NO: 114884 - protein, 15 aa, Homo sapiens
GAGSGGATRPGGRLL

SEQ ID NO: 114885 - protein, 15 aa, Homo sapiens
AGSGGATRPGGRLLA

SEQ ID NO: 114886 - protein, 15 aa, Homo sapiens
GSGGATRPGGRLLAT

SEQ ID NO: 114887 - protein, 15 aa, Homo sapiens
SGGATRPGGRLLATE

SEQ ID NO: 114888 - protein, 15 aa, Homo sapiens
GGATRPGGRLLATEK

SEQ ID NO: 114889 - protein, 15 aa, Homo sapiens
GATRPGGRLLATEKE

SEQ ID NO: 114890 - protein, 15 aa, Homo sapiens
ATRPGGRLLATEKEA

SEQ ID NO: 114891 - protein, 15 aa, Homo sapiens
TRPGGRLLATEKEAS

SEQ ID NO: 114892 - protein, 15 aa, Homo sapiens
RPGGRLLATEKEASA

SEQ ID NO: 114893 - protein, 15 aa, Homo sapiens
PGGRLLATEKEASAR

SEQ ID NO: 114894 - protein, 15 aa, Homo sapiens
GGRLLATEKEASARR

SEQ ID NO: 114895 - protein, 15 aa, Homo sapiens
GRLLATEKEASARRE

SEQ ID NO: 114896 - protein, 15 aa, Homo sapiens
RLLATEKEASARREI

SEQ ID NO: 114897 - protein, 15 aa, Homo sapiens
LLATEKEASARREIG

SEQ ID NO: 114898 - protein, 15 aa, Homo sapiens
LATEKEASARREIGG

SEQ ID NO: 114899 - protein, 15 aa, Homo sapiens
ATEKEASARREIGGG

SEQ ID NO: 114900 - protein, 15 aa, Homo sapiens
TEKEASARREIGGGE

SEQ ID NO: 114901 - protein, 15 aa, Homo sapiens
EKEASARREIGGGEA

SEQ ID NO: 114902 - protein, 15 aa, Homo sapiens
KEASARREIGGGEAG

SEQ ID NO: 114903 - protein, 15 aa, Homo sapiens
EASARREIGGGEAGA

SEQ ID NO: 114904 - protein, 15 aa, Homo sapiens
ASARREIGGGEAGAV

SEQ ID NO: 114905 - protein, 15 aa, Homo sapiens
SARREIGGGEAGAVI

SEQ ID NO: 114906 - protein, 15 aa, Homo sapiens
ARREIGGGEAGAVIG

SEQ ID NO: 114907 - protein, 15 aa, Homo sapiens
RREIGGGEAGAVIGG

SEQ ID NO: 114908 - protein, 15 aa, Homo sapiens
REIGGGEAGAVIGGS

SEQ ID NO: 114909 - protein, 15 aa, Homo sapiens
EIGGGEAGAVIGGSA

SEQ ID NO: 114910 - protein, 15 aa, Homo sapiens
IGGGEAGAVIGGSAG

SEQ ID NO: 114911 - protein, 15 aa, Homo sapiens
GGGEAGAVIGGSAGA

SEQ ID NO: 114912 - protein, 15 aa, Homo sapiens
GGEAGAVIGGSAGAS

SEQ ID NO: 114913 - protein, 15 aa, Homo sapiens
GEAGAVIGGSAGASP

SEQ ID NO: 114914 - protein, 15 aa, Homo sapiens
EAGAVIGGSAGASPP

SEQ ID NO: 114915 - protein, 15 aa, Homo sapiens
AGAVIGGSAGASPPS

SEQ ID NO: 114916 - protein, 15 aa, Homo sapiens
GAVIGGSAGASPPST

SEQ ID NO: 114917 - protein, 15 aa, Homo sapiens
AVIGGSAGASPPSTL

SEQ ID NO: 114918 - protein, 15 aa, Homo sapiens
VIGGSAGASPPSTLT

SEQ ID NO: 114919 - protein, 15 aa, Homo sapiens
IGGSAGASPPSTLTP

SEQ ID NO: 114920 - protein, 15 aa, Homo sapiens
GGSAGASPPSTLTPD

SEQ ID NO: 114921 - protein, 15 aa, Homo sapiens
GSAGASPPSTLTPDS

SEQ ID NO: 114922 - protein, 15 aa, Homo sapiens
SAGASPPSTLTPDSR

SEQ ID NO: 114923 - protein, 15 aa, Homo sapiens
AGASPPSTLTPDSRR

SEQ ID NO: 114924 - protein, 15 aa, Homo sapiens
GASPPSTLTPDSRRV

SEQ ID NO: 114925 - protein, 15 aa, Homo sapiens
ASPPSTLTPDSRRVA

SEQ ID NO: 114926 - protein, 15 aa, Homo sapiens
SPPSTLTPDSRRVAR

SEQ ID NO: 114927 - protein, 15 aa, Homo sapiens
PPSTLTPDSRRVARP

SEQ ID NO: 114928 - protein, 15 aa, Homo sapiens
PSTLTPDSRRVARPP

SEQ ID NO: 114929 - protein, 15 aa, Homo sapiens
STLTPDSRRVARPPP

SEQ ID NO: 114930 - protein, 15 aa, Homo sapiens
TLTPDSRRVARPPPI

SEQ ID NO: 114931 - protein, 15 aa, Homo sapiens
LTPDSRRVARPPPIG

SEQ ID NO: 114932 - protein, 15 aa, Homo sapiens
TPDSRRVARPPPIGA

SEQ ID NO: 114933 - protein, 15 aa, Homo sapiens
PDSRRVARPPPIGAE

SEQ ID NO: 114934 - protein, 15 aa, Homo sapiens
DSRRVARPPPIGAEV

SEQ ID NO: 114935 - protein, 15 aa, Homo sapiens
SRRVARPPPIGAEVP

SEQ ID NO: 114936 - protein, 15 aa, Homo sapiens
RRVARPPPIGAEVPD

SEQ ID NO: 114937 - protein, 15 aa, Homo sapiens
RVARPPPIGAEVPDV

SEQ ID NO: 114938 - protein, 15 aa, Homo sapiens
VARPPPIGAEVPDVT

SEQ ID NO: 114939 - protein, 15 aa, Homo sapiens
ARPPPIGAEVPDVTA

SEQ ID NO: 114940 - protein, 15 aa, Homo sapiens
RPPPIGAEVPDVTAT

SEQ ID NO: 114941 - protein, 15 aa, Homo sapiens
PPPIGAEVPDVTATP

SEQ ID NO: 114942 - protein, 15 aa, Homo sapiens
PPIGAEVPDVTATPA

SEQ ID NO: 114943 - protein, 15 aa, Homo sapiens
PIGAEVPDVTATPAR

SEQ ID NO: 114944 - protein, 15 aa, Homo sapiens
IGAEVPDVTATPARL

SEQ ID NO: 114945 - protein, 15 aa, Homo sapiens
GAEVPDVTATPARLL

SEQ ID NO: 114946 - protein, 15 aa, Homo sapiens
AEVPDVTATPARLLF

SEQ ID NO: 114947 - protein, 15 aa, Homo sapiens
EVPDVTATPARLLFF

SEQ ID NO: 114948 - protein, 15 aa, Homo sapiens
VPDVTATPARLLFFA

SEQ ID NO: 114949 - protein, 15 aa, Homo sapiens
PDVTATPARLLFFAP

SEQ ID NO: 114950 - protein, 15 aa, Homo sapiens
DVTATPARLLFFAPT

SEQ ID NO: 114951 - protein, 15 aa, Homo sapiens
VTATPARLLFFAPTR

SEQ ID NO: 114952 - protein, 15 aa, Homo sapiens
TATPARLLFFAPTRR

SEQ ID NO: 114953 - protein, 15 aa, Homo sapiens
ATPARLLFFAPTRRA

SEQ ID NO: 114954 - protein, 15 aa, Homo sapiens
TPARLLFFAPTRRAA

SEQ ID NO: 114955 - protein, 15 aa, Homo sapiens
PARLLFFAPTRRAAP

SEQ ID NO: 114956 - protein, 15 aa, Homo sapiens
ARLLFFAPTRRAAPL

SEQ ID NO: 114957 - protein, 15 aa, Homo sapiens
RLLFFAPTRRAAPLE

SEQ ID NO: 114958 - protein, 15 aa, Homo sapiens
LLFFAPTRRAAPLEE

SEQ ID NO: 114959 - protein, 15 aa, Homo sapiens
LFFAPTRRAAPLEEM

SEQ ID NO: 114960 - protein, 15 aa, Homo sapiens
FFAPTRRAAPLEEME

SEQ ID NO: 114961 - protein, 15 aa, Homo sapiens
FAPTRRAAPLEEMEA

SEQ ID NO: 114962 - protein, 15 aa, Homo sapiens
APTRRAAPLEEMEAP

SEQ ID NO: 114963 - protein, 15 aa, Homo sapiens
PTRRAAPLEEMEAPA

SEQ ID NO: 114964 - protein, 15 aa, Homo sapiens
TRRAAPLEEMEAPAA

SEQ ID NO: 114965 - protein, 15 aa, Homo sapiens
RRAAPLEEMEAPAAD

SEQ ID NO: 114966 - protein, 15 aa, Homo sapiens
RAAPLEEMEAPAADA

SEQ ID NO: 114967 - protein, 15 aa, Homo sapiens
AAPLEEMEAPAADAI

SEQ ID NO: 114968 - protein, 15 aa, Homo sapiens
APLEEMEAPAADAIM

SEQ ID NO: 114969 - protein, 15 aa, Homo sapiens
PLEEMEAPAADAIMS

SEQ ID NO: 114970 - protein, 15 aa, Homo sapiens
LEEMEAPAADAIMSP

SEQ ID NO: 114971 - protein, 15 aa, Homo sapiens
EEMEAPAADAIMSPE

SEQ ID NO: 114972 - protein, 15 aa, Homo sapiens
EMEAPAADAIMSPEE

SEQ ID NO: 114973 - protein, 15 aa, Homo sapiens
MEAPAADAIMSPEEE

SEQ ID NO: 114974 - protein, 15 aa, Homo sapiens
EAPAADAIMSPEEEL

SEQ ID NO: 114975 - protein, 15 aa, Homo sapiens
APAADAIMSPEEELD

SEQ ID NO: 114976 - protein, 15 aa, Homo sapiens
PAADAIMSPEEELDG

SEQ ID NO: 114977 - protein, 15 aa, Homo sapiens
AADAIMSPEEELDGY

SEQ ID NO: 114978 - protein, 15 aa, Homo sapiens
ADAIMSPEEELDGYE

SEQ ID NO: 114979 - protein, 15 aa, Homo sapiens
DAIMSPEEELDGYEP

SEQ ID NO: 114980 - protein, 15 aa, Homo sapiens
AIMSPEEELDGYEPE

SEQ ID NO: 114981 - protein, 15 aa, Homo sapiens
IMSPEEELDGYEPEP

SEQ ID NO: 114982 - protein, 15 aa, Homo sapiens
MSPEEELDGYEPEPL

SEQ ID NO: 114983 - protein, 15 aa, Homo sapiens
SPEEELDGYEPEPLG

SEQ ID NO: 114984 - protein, 15 aa, Homo sapiens
PEEELDGYEPEPLGK

SEQ ID NO: 114985 - protein, 15 aa, Homo sapiens
EEELDGYEPEPLGKR

SEQ ID NO: 114986 - protein, 15 aa, Homo sapiens
EELDGYEPEPLGKRP

SEQ ID NO: 114987 - protein, 15 aa, Homo sapiens
ELDGYEPEPLGKRPA

SEQ ID NO: 114988 - protein, 15 aa, Homo sapiens
LDGYEPEPLGKRPAV

SEQ ID NO: 114989 - protein, 15 aa, Homo sapiens
DGYEPEPLGKRPAVL

SEQ ID NO: 114990 - protein, 15 aa, Homo sapiens
GYEPEPLGKRPAVLP

SEQ ID NO: 114991 - protein, 15 aa, Homo sapiens
YEPEPLGKRPAVLPL

SEQ ID NO: 114992 - protein, 15 aa, Homo sapiens
EPEPLGKRPAVLPLL

SEQ ID NO: 114993 - protein, 15 aa, Homo sapiens
PEPLGKRPAVLPLLE

SEQ ID NO: 114994 - protein, 15 aa, Homo sapiens
EPLGKRPAVLPLLEL

SEQ ID NO: 114995 - protein, 15 aa, Homo sapiens
PLGKRPAVLPLLELV

SEQ ID NO: 114996 - protein, 15 aa, Homo sapiens
LGKRPAVLPLLELVG

SEQ ID NO: 114997 - protein, 15 aa, Homo sapiens
GKRPAVLPLLELVGE

SEQ ID NO: 114998 - protein, 15 aa, Homo sapiens
KRPAVLPLLELVGES

SEQ ID NO: 114999 - protein, 15 aa, Homo sapiens
RPAVLPLLELVGESG

SEQ ID NO: 115000 - protein, 15 aa, Homo sapiens
PAVLPLLELVGESGN

SEQ ID NO: 115001 - protein, 15 aa, Homo sapiens
AVLPLLELVGESGNN

SEQ ID NO: 115002 - protein, 15 aa, Homo sapiens
VLPLLELVGESGNNT

SEQ ID NO: 115003 - protein, 15 aa, Homo sapiens
LPLLELVGESGNNTS

SEQ ID NO: 115004 - protein, 15 aa, Homo sapiens
PLLELVGESGNNTST

SEQ ID NO: 115005 - protein, 15 aa, Homo sapiens
LLELVGESGNNTSTD

SEQ ID NO: 115006 - protein, 15 aa, Homo sapiens
LELVGESGNNTSTDG

SEQ ID NO: 115007 - protein, 15 aa, Homo sapiens
ELVGESGNNTSTDGS

SEQ ID NO: 115008 - protein, 15 aa, Homo sapiens
LVGESGNNTSTDGSL

SEQ ID NO: 115009 - protein, 15 aa, Homo sapiens
VGESGNNTSTDGSLP

SEQ ID NO: 115010 - protein, 15 aa, Homo sapiens
GESGNNTSTDGSLPS

SEQ ID NO: 115011 - protein, 15 aa, Homo sapiens
ESGNNTSTDGSLPST

SEQ ID NO: 115012 - protein, 15 aa, Homo sapiens
SGNNTSTDGSLPSTP

SEQ ID NO: 115013 - protein, 15 aa, Homo sapiens
GNNTSTDGSLPSTPP

SEQ ID NO: 115014 - protein, 15 aa, Homo sapiens
NNTSTDGSLPSTPPP

SEQ ID NO: 115015 - protein, 15 aa, Homo sapiens
NTSTDGSLPSTPPPA

SEQ ID NO: 115016 - protein, 15 aa, Homo sapiens
TSTDGSLPSTPPPAE

SEQ ID NO: 115017 - protein, 15 aa, Homo sapiens
STDGSLPSTPPPAEE

SEQ ID NO: 115018 - protein, 15 aa, Homo sapiens
TDGSLPSTPPPAEEE

SEQ ID NO: 115019 - protein, 15 aa, Homo sapiens
DGSLPSTPPPAEEEE

SEQ ID NO: 115020 - protein, 15 aa, Homo sapiens
GSLPSTPPPAEEEED

SEQ ID NO: 115021 - protein, 15 aa, Homo sapiens
SLPSTPPPAEEEEDD

SEQ ID NO: 115022 - protein, 15 aa, Homo sapiens
LPSTPPPAEEEEDDL

SEQ ID NO: 115023 - protein, 15 aa, Homo sapiens
PSTPPPAEEEEDDLY

SEQ ID NO: 115024 - protein, 15 aa, Homo sapiens
STPPPAEEEEDDLYR

SEQ ID NO: 115025 - protein, 15 aa, Homo sapiens
TPPPAEEEEDDLYRQ

SEQ ID NO: 115026 - protein, 15 aa, Homo sapiens
PPPAEEEEDDLYRQS

SEQ ID NO: 115027 - protein, 15 aa, Homo sapiens
PPAEEEEDDLYRQSL

SEQ ID NO: 115028 - protein, 15 aa, Homo sapiens
PAEEEEDDLYRQSLE

SEQ ID NO: 115029 - protein, 15 aa, Homo sapiens
AEEEEDDLYRQSLEI

SEQ ID NO: 115030 - protein, 15 aa, Homo sapiens
EEEEDDLYRQSLEII

SEQ ID NO: 115031 - protein, 15 aa, Homo sapiens
EEEDDLYRQSLEIIS

SEQ ID NO: 115032 - protein, 15 aa, Homo sapiens
EEDDLYRQSLEIISR

SEQ ID NO: 115033 - protein, 15 aa, Homo sapiens
EDDLYRQSLEIISRY

SEQ ID NO: 115034 - protein, 15 aa, Homo sapiens
DDLYRQSLEIISRYL

SEQ ID NO: 115035 - protein, 15 aa, Homo sapiens
DLYRQSLEIISRYLR

SEQ ID NO: 115036 - protein, 15 aa, Homo sapiens
LYRQSLEIISRYLRE

SEQ ID NO: 115037 - protein, 15 aa, Homo sapiens
YRQSLEIISRYLREQ

SEQ ID NO: 115038 - protein, 15 aa, Homo sapiens
RQSLEIISRYLREQA

SEQ ID NO: 115039 - protein, 15 aa, Homo sapiens
QSLEIISRYLREQAT

SEQ ID NO: 115040 - protein, 15 aa, Homo sapiens
SLEIISRYLREQATG

SEQ ID NO: 115041 - protein, 15 aa, Homo sapiens
LEIISRYLREQATGA

SEQ ID NO: 115042 - protein, 15 aa, Homo sapiens
EIISRYLREQATGAK

SEQ ID NO: 115043 - protein, 15 aa, Homo sapiens
IISRYLREQATGAKD

SEQ ID NO: 115044 - protein, 15 aa, Homo sapiens
ISRYLREQATGAKDT

SEQ ID NO: 115045 - protein, 15 aa, Homo sapiens
SRYLREQATGAKDTK

SEQ ID NO: 115046 - protein, 15 aa, Homo sapiens
RYLREQATGAKDTKP

SEQ ID NO: 115047 - protein, 15 aa, Homo sapiens
YLREQATGAKDTKPM

SEQ ID NO: 115048 - protein, 15 aa, Homo sapiens
LREQATGAKDTKPMG

SEQ ID NO: 115049 - protein, 15 aa, Homo sapiens
REQATGAKDTKPMGR

SEQ ID NO: 115050 - protein, 15 aa, Homo sapiens
EQATGAKDTKPMGRS

SEQ ID NO: 115051 - protein, 15 aa, Homo sapiens
QATGAKDTKPMGRSG

SEQ ID NO: 115052 - protein, 15 aa, Homo sapiens
ATGAKDTKPMGRSGA

SEQ ID NO: 115053 - protein, 15 aa, Homo sapiens
TGAKDTKPMGRSGAT

SEQ ID NO: 115054 - protein, 15 aa, Homo sapiens
GAKDTKPMGRSGATS

SEQ ID NO: 115055 - protein, 15 aa, Homo sapiens
AKDTKPMGRSGATSR

SEQ ID NO: 115056 - protein, 15 aa, Homo sapiens
KDTKPMGRSGATSRK

SEQ ID NO: 115057 - protein, 15 aa, Homo sapiens
DTKPMGRSGATSRKA

SEQ ID NO: 115058 - protein, 15 aa, Homo sapiens
TKPMGRSGATSRKAL

SEQ ID NO: 115059 - protein, 15 aa, Homo sapiens
KPMGRSGATSRKALE

SEQ ID NO: 115060 - protein, 15 aa, Homo sapiens
PMGRSGATSRKALET

SEQ ID NO: 115061 - protein, 15 aa, Homo sapiens
MGRSGATSRKALETL

SEQ ID NO: 115062 - protein, 15 aa, Homo sapiens
GRSGATSRKALETLR

SEQ ID NO: 115063 - protein, 15 aa, Homo sapiens
RSGATSRKALETLRR

SEQ ID NO: 115064 - protein, 15 aa, Homo sapiens
SGATSRKALETLRRV

SEQ ID NO: 115065 - protein, 15 aa, Homo sapiens
GATSRKALETLRRVG

SEQ ID NO: 115066 - protein, 15 aa, Homo sapiens
ATSRKALETLRRVGD

SEQ ID NO: 115067 - protein, 15 aa, Homo sapiens
TSRKALETLRRVGDG

SEQ ID NO: 115068 - protein, 15 aa, Homo sapiens
SRKALETLRRVGDGV

SEQ ID NO: 115069 - protein, 15 aa, Homo sapiens
RKALETLRRVGDGVQ

SEQ ID NO: 115070 - protein, 15 aa, Homo sapiens
KALETLRRVGDGVQR

SEQ ID NO: 115071 - protein, 15 aa, Homo sapiens
ALETLRRVGDGVQRN

SEQ ID NO: 115072 - protein, 15 aa, Homo sapiens
LETLRRVGDGVQRNH

SEQ ID NO: 115073 - protein, 15 aa, Homo sapiens
ETLRRVGDGVQRNHE

SEQ ID NO: 115074 - protein, 15 aa, Homo sapiens
TLRRVGDGVQRNHET

SEQ ID NO: 115075 - protein, 15 aa, Homo sapiens
LRRVGDGVQRNHETA

SEQ ID NO: 115076 - protein, 15 aa, Homo sapiens
RRVGDGVQRNHETAF

SEQ ID NO: 115077 - protein, 15 aa, Homo sapiens
RVGDGVQRNHETAFQ

SEQ ID NO: 115078 - protein, 15 aa, Homo sapiens
VGDGVQRNHETAFQG

SEQ ID NO: 115079 - protein, 15 aa, Homo sapiens
GDGVQRNHETAFQGM

SEQ ID NO: 115080 - protein, 15 aa, Homo sapiens
DGVQRNHETAFQGML

SEQ ID NO: 115081 - protein, 15 aa, Homo sapiens
GVQRNHETAFQGMLR

SEQ ID NO: 115082 - protein, 15 aa, Homo sapiens
VQRNHETAFQGMLRK

SEQ ID NO: 115083 - protein, 15 aa, Homo sapiens
QRNHETAFQGMLRKL

SEQ ID NO: 115084 - protein, 15 aa, Homo sapiens
RNHETAFQGMLRKLD

SEQ ID NO: 115085 - protein, 15 aa, Homo sapiens
NHETAFQGMLRKLDI

SEQ ID NO: 115086 - protein, 15 aa, Homo sapiens
HETAFQGMLRKLDIK

SEQ ID NO: 115087 - protein, 15 aa, Homo sapiens
ETAFQGMLRKLDIKN

SEQ ID NO: 115088 - protein, 15 aa, Homo sapiens
TAFQGMLRKLDIKNE

SEQ ID NO: 115089 - protein, 15 aa, Homo sapiens
AFQGMLRKLDIKNED

SEQ ID NO: 115090 - protein, 15 aa, Homo sapiens
FQGMLRKLDIKNEDD

SEQ ID NO: 115091 - protein, 15 aa, Homo sapiens
QGMLRKLDIKNEDDV

SEQ ID NO: 115092 - protein, 15 aa, Homo sapiens
GMLRKLDIKNEDDVK

SEQ ID NO: 115093 - protein, 15 aa, Homo sapiens
MLRKLDIKNEDDVKS

SEQ ID NO: 115094 - protein, 15 aa, Homo sapiens
LRKLDIKNEDDVKSL

SEQ ID NO: 115095 - protein, 15 aa, Homo sapiens
RKLDIKNEDDVKSLS

SEQ ID NO: 115096 - protein, 15 aa, Homo sapiens
KLDIKNEDDVKSLSR

SEQ ID NO: 115097 - protein, 15 aa, Homo sapiens
LDIKNEDDVKSLSRV

SEQ ID NO: 115098 - protein, 15 aa, Homo sapiens
DIKNEDDVKSLSRVM

SEQ ID NO: 115099 - protein, 15 aa, Homo sapiens
IKNEDDVKSLSRVMI

SEQ ID NO: 115100 - protein, 15 aa, Homo sapiens
KNEDDVKSLSRVMIH

SEQ ID NO: 115101 - protein, 15 aa, Homo sapiens
NEDDVKSLSRVMIHV

SEQ ID NO: 115102 - protein, 15 aa, Homo sapiens
EDDVKSLSRVMIHVF

SEQ ID NO: 115103 - protein, 15 aa, Homo sapiens
DDVKSLSRVMIHVFS

SEQ ID NO: 115104 - protein, 15 aa, Homo sapiens
DVKSLSRVMIHVFSD

SEQ ID NO: 115105 - protein, 15 aa, Homo sapiens
VKSLSRVMIHVFSDG

SEQ ID NO: 115106 - protein, 15 aa, Homo sapiens
KSLSRVMIHVFSDGV

SEQ ID NO: 115107 - protein, 15 aa, Homo sapiens
SLSRVMIHVFSDGVT

SEQ ID NO: 115108 - protein, 15 aa, Homo sapiens
LSRVMIHVFSDGVTN

SEQ ID NO: 115109 - protein, 15 aa, Homo sapiens
SRVMIHVFSDGVTNW

SEQ ID NO: 115110 - protein, 15 aa, Homo sapiens
RVMIHVFSDGVTNWG

SEQ ID NO: 115111 - protein, 15 aa, Homo sapiens
VMIHVFSDGVTNWGR

SEQ ID NO: 115112 - protein, 15 aa, Homo sapiens
MIHVFSDGVTNWGRI

SEQ ID NO: 115113 - protein, 15 aa, Homo sapiens
IHVFSDGVTNWGRIV

SEQ ID NO: 115114 - protein, 15 aa, Homo sapiens
HVFSDGVTNWGRIVT

SEQ ID NO: 115115 - protein, 15 aa, Homo sapiens
VFSDGVTNWGRIVTL

SEQ ID NO: 115116 - protein, 15 aa, Homo sapiens
FSDGVTNWGRIVTLI

SEQ ID NO: 115117 - protein, 15 aa, Homo sapiens
SDGVTNWGRIVTLIS

SEQ ID NO: 115118 - protein, 15 aa, Homo sapiens
DGVTNWGRIVTLISF

SEQ ID NO: 115119 - protein, 15 aa, Homo sapiens
GVTNWGRIVTLISFG

SEQ ID NO: 115120 - protein, 15 aa, Homo sapiens
VTNWGRIVTLISFGA

SEQ ID NO: 115121 - protein, 15 aa, Homo sapiens
TNWGRIVTLISFGAF

SEQ ID NO: 115122 - protein, 15 aa, Homo sapiens
NWGRIVTLISFGAFV

SEQ ID NO: 115123 - protein, 15 aa, Homo sapiens
WGRIVTLISFGAFVA

SEQ ID NO: 115124 - protein, 15 aa, Homo sapiens
GRIVTLISFGAFVAK

SEQ ID NO: 115125 - protein, 15 aa, Homo sapiens
RIVTLISFGAFVAKH

SEQ ID NO: 115126 - protein, 15 aa, Homo sapiens
IVTLISFGAFVAKHL

SEQ ID NO: 115127 - protein, 15 aa, Homo sapiens
VTLISFGAFVAKHLK

SEQ ID NO: 115128 - protein, 15 aa, Homo sapiens
TLISFGAFVAKHLKT

SEQ ID NO: 115129 - protein, 15 aa, Homo sapiens
LISFGAFVAKHLKTI

SEQ ID NO: 115130 - protein, 15 aa, Homo sapiens
ISFGAFVAKHLKTIN

SEQ ID NO: 115131 - protein, 15 aa, Homo sapiens
SFGAFVAKHLKTINQ

SEQ ID NO: 115132 - protein, 15 aa, Homo sapiens
FGAFVAKHLKTINQE

SEQ ID NO: 115133 - protein, 15 aa, Homo sapiens
GAFVAKHLKTINQES

SEQ ID NO: 115134 - protein, 15 aa, Homo sapiens
AFVAKHLKTINQESC

SEQ ID NO: 115135 - protein, 15 aa, Homo sapiens
FVAKHLKTINQESCI

SEQ ID NO: 115136 - protein, 15 aa, Homo sapiens
VAKHLKTINQESCIE

SEQ ID NO: 115137 - protein, 15 aa, Homo sapiens
AKHLKTINQESCIEP

SEQ ID NO: 115138 - protein, 15 aa, Homo sapiens
KHLKTINQESCIEPL

SEQ ID NO: 115139 - protein, 15 aa, Homo sapiens
HLKTINQESCIEPLA

SEQ ID NO: 115140 - protein, 15 aa, Homo sapiens
LKTINQESCIEPLAE

SEQ ID NO: 115141 - protein, 15 aa, Homo sapiens
KTINQESCIEPLAES

SEQ ID NO: 115142 - protein, 15 aa, Homo sapiens
TINQESCIEPLAESI

SEQ ID NO: 115143 - protein, 15 aa, Homo sapiens
INQESCIEPLAESIT

SEQ ID NO: 115144 - protein, 15 aa, Homo sapiens
NQESCIEPLAESITD

SEQ ID NO: 115145 - protein, 15 aa, Homo sapiens
QESCIEPLAESITDV

SEQ ID NO: 115146 - protein, 15 aa, Homo sapiens
ESCIEPLAESITDVL

SEQ ID NO: 115147 - protein, 15 aa, Homo sapiens
SCIEPLAESITDVLV

SEQ ID NO: 115148 - protein, 15 aa, Homo sapiens
CIEPLAESITDVLVR

SEQ ID NO: 115149 - protein, 15 aa, Homo sapiens
IEPLAESITDVLVRT

SEQ ID NO: 115150 - protein, 15 aa, Homo sapiens
EPLAESITDVLVRTK

SEQ ID NO: 115151 - protein, 15 aa, Homo sapiens
PLAESITDVLVRTKR

SEQ ID NO: 115152 - protein, 15 aa, Homo sapiens
LAESITDVLVRTKRD

SEQ ID NO: 115153 - protein, 15 aa, Homo sapiens
AESITDVLVRTKRDW

SEQ ID NO: 115154 - protein, 15 aa, Homo sapiens
ESITDVLVRTKRDWL

SEQ ID NO: 115155 - protein, 15 aa, Homo sapiens
SITDVLVRTKRDWLV

SEQ ID NO: 115156 - protein, 15 aa, Homo sapiens
ITDVLVRTKRDWLVK

SEQ ID NO: 115157 - protein, 15 aa, Homo sapiens
TDVLVRTKRDWLVKQ

SEQ ID NO: 115158 - protein, 15 aa, Homo sapiens
DVLVRTKRDWLVKQR

SEQ ID NO: 115159 - protein, 15 aa, Homo sapiens
VLVRTKRDWLVKQRG

SEQ ID NO: 115160 - protein, 15 aa, Homo sapiens
LVRTKRDWLVKQRGW

SEQ ID NO: 115161 - protein, 15 aa, Homo sapiens
VRTKRDWLVKQRGWD

SEQ ID NO: 115162 - protein, 15 aa, Homo sapiens
RTKRDWLVKQRGWDG

SEQ ID NO: 115163 - protein, 15 aa, Homo sapiens
TKRDWLVKQRGWDGF

SEQ ID NO: 115164 - protein, 15 aa, Homo sapiens
KRDWLVKQRGWDGFV

SEQ ID NO: 115165 - protein, 15 aa, Homo sapiens
RDWLVKQRGWDGFVE

SEQ ID NO: 115166 - protein, 15 aa, Homo sapiens
DWLVKQRGWDGFVEF

SEQ ID NO: 115167 - protein, 15 aa, Homo sapiens
WLVKQRGWDGFVEFF

SEQ ID NO: 115168 - protein, 15 aa, Homo sapiens
LVKQRGWDGFVEFFH

SEQ ID NO: 115169 - protein, 15 aa, Homo sapiens
VKQRGWDGFVEFFHV

SEQ ID NO: 115170 - protein, 15 aa, Homo sapiens
KQRGWDGFVEFFHVE

SEQ ID NO: 115171 - protein, 15 aa, Homo sapiens
QRGWDGFVEFFHVED

SEQ ID NO: 115172 - protein, 15 aa, Homo sapiens
RGWDGFVEFFHVEDL

SEQ ID NO: 115173 - protein, 15 aa, Homo sapiens
GWDGFVEFFHVEDLE

SEQ ID NO: 115174 - protein, 15 aa, Homo sapiens
WDGFVEFFHVEDLEG

SEQ ID NO: 115175 - protein, 15 aa, Homo sapiens
DGFVEFFHVEDLEGG

SEQ ID NO: 115176 - protein, 15 aa, Homo sapiens
GFVEFFHVEDLEGGI

SEQ ID NO: 115177 - protein, 15 aa, Homo sapiens
FVEFFHVEDLEGGIR

SEQ ID NO: 115178 - protein, 15 aa, Homo sapiens
VEFFHVEDLEGGIRN

SEQ ID NO: 115179 - protein, 15 aa, Homo sapiens
EFFHVEDLEGGIRNV

SEQ ID NO: 115180 - protein, 15 aa, Homo sapiens
FFHVEDLEGGIRNVL

SEQ ID NO: 115181 - protein, 15 aa, Homo sapiens
FHVEDLEGGIRNVLL

SEQ ID NO: 115182 - protein, 15 aa, Homo sapiens
HVEDLEGGIRNVLLA

SEQ ID NO: 115183 - protein, 15 aa, Homo sapiens
VEDLEGGIRNVLLAF

SEQ ID NO: 115184 - protein, 15 aa, Homo sapiens
EDLEGGIRNVLLAFA

SEQ ID NO: 115185 - protein, 15 aa, Homo sapiens
DLEGGIRNVLLAFAG

SEQ ID NO: 115186 - protein, 15 aa, Homo sapiens
LEGGIRNVLLAFAGV

SEQ ID NO: 115187 - protein, 15 aa, Homo sapiens
EGGIRNVLLAFAGVA

SEQ ID NO: 115188 - protein, 15 aa, Homo sapiens
GGIRNVLLAFAGVAG

SEQ ID NO: 115189 - protein, 15 aa, Homo sapiens
GIRNVLLAFAGVAGV

SEQ ID NO: 115190 - protein, 15 aa, Homo sapiens
IRNVLLAFAGVAGVG

SEQ ID NO: 115191 - protein, 15 aa, Homo sapiens
RNVLLAFAGVAGVGA

SEQ ID NO: 115192 - protein, 15 aa, Homo sapiens
NVLLAFAGVAGVGAG

SEQ ID NO: 115193 - protein, 15 aa, Homo sapiens
VLLAFAGVAGVGAGL

SEQ ID NO: 115194 - protein, 15 aa, Homo sapiens
LLAFAGVAGVGAGLA

SEQ ID NO: 115195 - protein, 15 aa, Homo sapiens
LAFAGVAGVGAGLAY

SEQ ID NO: 115196 - protein, 15 aa, Homo sapiens
AFAGVAGVGAGLAYL

SEQ ID NO: 115197 - protein, 15 aa, Homo sapiens
FAGVAGVGAGLAYLI

SEQ ID NO: 115198 - protein, 15 aa, Homo sapiens
AGVAGVGAGLAYLIR

SEQ ID NO: 115199 - protein, 16 aa, Homo sapiens
MFGLKRNAVIGLNLYC

SEQ ID NO: 115200 - protein, 16 aa, Homo sapiens
FGLKRNAVIGLNLYCG

SEQ ID NO: 115201 - protein, 16 aa, Homo sapiens
GLKRNAVIGLNLYCGG

SEQ ID NO: 115202 - protein, 16 aa, Homo sapiens
LKRNAVIGLNLYCGGA

SEQ ID NO: 115203 - protein, 16 aa, Homo sapiens
KRNAVIGLNLYCGGAG

SEQ ID NO: 115204 - protein, 16 aa, Homo sapiens
RNAVIGLNLYCGGAGL

SEQ ID NO: 115205 - protein, 16 aa, Homo sapiens
NAVIGLNLYCGGAGLG

SEQ ID NO: 115206 - protein, 16 aa, Homo sapiens
AVIGLNLYCGGAGLGA

SEQ ID NO: 115207 - protein, 16 aa, Homo sapiens
VIGLNLYCGGAGLGAG

SEQ ID NO: 115208 - protein, 16 aa, Homo sapiens
IGLNLYCGGAGLGAGS

SEQ ID NO: 115209 - protein, 16 aa, Homo sapiens
GLNLYCGGAGLGAGSG

SEQ ID NO: 115210 - protein, 16 aa, Homo sapiens
LNLYCGGAGLGAGSGG

SEQ ID NO: 115211 - protein, 16 aa, Homo sapiens
NLYCGGAGLGAGSGGA

SEQ ID NO: 115212 - protein, 16 aa, Homo sapiens
LYCGGAGLGAGSGGAT

SEQ ID NO: 115213 - protein, 16 aa, Homo sapiens
YCGGAGLGAGSGGATR

SEQ ID NO: 115214 - protein, 16 aa, Homo sapiens
CGGAGLGAGSGGATRP

SEQ ID NO: 115215 - protein, 16 aa, Homo sapiens
GGAGLGAGSGGATRPG

SEQ ID NO: 115216 - protein, 16 aa, Homo sapiens
GAGLGAGSGGATRPGG

SEQ ID NO: 115217 - protein, 16 aa, Homo sapiens
AGLGAGSGGATRPGGR

SEQ ID NO: 115218 - protein, 16 aa, Homo sapiens
GLGAGSGGATRPGGRL

SEQ ID NO: 115219 - protein, 16 aa, Homo sapiens
LGAGSGGATRPGGRLL

SEQ ID NO: 115220 - protein, 16 aa, Homo sapiens
GAGSGGATRPGGRLLA

SEQ ID NO: 115221 - protein, 16 aa, Homo sapiens
AGSGGATRPGGRLLAT

SEQ ID NO: 115222 - protein, 16 aa, Homo sapiens
GSGGATRPGGRLLATE

SEQ ID NO: 115223 - protein, 16 aa, Homo sapiens
SGGATRPGGRLLATEK

SEQ ID NO: 115224 - protein, 16 aa, Homo sapiens
GGATRPGGRLLATEKE

SEQ ID NO: 115225 - protein, 16 aa, Homo sapiens
GATRPGGRLLATEKEA

SEQ ID NO: 115226 - protein, 16 aa, Homo sapiens
ATRPGGRLLATEKEAS

SEQ ID NO: 115227 - protein, 16 aa, Homo sapiens
TRPGGRLLATEKEASA

SEQ ID NO: 115228 - protein, 16 aa, Homo sapiens
RPGGRLLATEKEASAR

SEQ ID NO: 115229 - protein, 16 aa, Homo sapiens
PGGRLLATEKEASARR

SEQ ID NO: 115230 - protein, 16 aa, Homo sapiens
GGRLLATEKEASARRE

SEQ ID NO: 115231 - protein, 16 aa, Homo sapiens
GRLLATEKEASARREI

SEQ ID NO: 115232 - protein, 16 aa, Homo sapiens
RLLATEKEASARREIG

SEQ ID NO: 115233 - protein, 16 aa, Homo sapiens
LLATEKEASARREIGG

SEQ ID NO: 115234 - protein, 16 aa, Homo sapiens
LATEKEASARREIGGG

SEQ ID NO: 115235 - protein, 16 aa, Homo sapiens
ATEKEASARREIGGGE

SEQ ID NO: 115236 - protein, 16 aa, Homo sapiens
TEKEASARREIGGGEA

SEQ ID NO: 115237 - protein, 16 aa, Homo sapiens
EKEASARREIGGGEAG

SEQ ID NO: 115238 - protein, 16 aa, Homo sapiens
KEASARREIGGGEAGA

SEQ ID NO: 115239 - protein, 16 aa, Homo sapiens
EASARREIGGGEAGAV

SEQ ID NO: 115240 - protein, 16 aa, Homo sapiens
ASARREIGGGEAGAVI

SEQ ID NO: 115241 - protein, 16 aa, Homo sapiens
SARREIGGGEAGAVIG

SEQ ID NO: 115242 - protein, 16 aa, Homo sapiens
ARREIGGGEAGAVIGG

SEQ ID NO: 115243 - protein, 16 aa, Homo sapiens
RREIGGGEAGAVIGGS

SEQ ID NO: 115244 - protein, 16 aa, Homo sapiens
REIGGGEAGAVIGGSA

SEQ ID NO: 115245 - protein, 16 aa, Homo sapiens
EIGGGEAGAVIGGSAG

SEQ ID NO: 115246 - protein, 16 aa, Homo sapiens
IGGGEAGAVIGGSAGA

SEQ ID NO: 115247 - protein, 16 aa, Homo sapiens
GGGEAGAVIGGSAGAS

SEQ ID NO: 115248 - protein, 16 aa, Homo sapiens
GGEAGAVIGGSAGASP

SEQ ID NO: 115249 - protein, 16 aa, Homo sapiens
GEAGAVIGGSAGASPP

SEQ ID NO: 115250 - protein, 16 aa, Homo sapiens
EAGAVIGGSAGASPPS

SEQ ID NO: 115251 - protein, 16 aa, Homo sapiens
AGAVIGGSAGASPPST

SEQ ID NO: 115252 - protein, 16 aa, Homo sapiens
GAVIGGSAGASPPSTL

SEQ ID NO: 115253 - protein, 16 aa, Homo sapiens
AVIGGSAGASPPSTLT

SEQ ID NO: 115254 - protein, 16 aa, Homo sapiens
VIGGSAGASPPSTLTP

SEQ ID NO: 115255 - protein, 16 aa, Homo sapiens
IGGSAGASPPSTLTPD

SEQ ID NO: 115256 - protein, 16 aa, Homo sapiens
GGSAGASPPSTLTPDS

SEQ ID NO: 115257 - protein, 16 aa, Homo sapiens
GSAGASPPSTLTPDSR

SEQ ID NO: 115258 - protein, 16 aa, Homo sapiens
SAGASPPSTLTPDSRR

SEQ ID NO: 115259 - protein, 16 aa, Homo sapiens
AGASPPSTLTPDSRRV

SEQ ID NO: 115260 - protein, 16 aa, Homo sapiens
GASPPSTLTPDSRRVA

SEQ ID NO: 115261 - protein, 16 aa, Homo sapiens
ASPPSTLTPDSRRVAR

SEQ ID NO: 115262 - protein, 16 aa, Homo sapiens
SPPSTLTPDSRRVARP

SEQ ID NO: 115263 - protein, 16 aa, Homo sapiens
PPSTLTPDSRRVARPP

SEQ ID NO: 115264 - protein, 16 aa, Homo sapiens
PSTLTPDSRRVARPPP

SEQ ID NO: 115265 - protein, 16 aa, Homo sapiens
STLTPDSRRVARPPPI

SEQ ID NO: 115266 - protein, 16 aa, Homo sapiens
TLTPDSRRVARPPPIG

SEQ ID NO: 115267 - protein, 16 aa, Homo sapiens
LTPDSRRVARPPPIGA

SEQ ID NO: 115268 - protein, 16 aa, Homo sapiens
TPDSRRVARPPPIGAE

SEQ ID NO: 115269 - protein, 16 aa, Homo sapiens
PDSRRVARPPPIGAEV

SEQ ID NO: 115270 - protein, 16 aa, Homo sapiens
DSRRVARPPPIGAEVP

SEQ ID NO: 115271 - protein, 16 aa, Homo sapiens
SRRVARPPPIGAEVPD

SEQ ID NO: 115272 - protein, 16 aa, Homo sapiens
RRVARPPPIGAEVPDV

SEQ ID NO: 115273 - protein, 16 aa, Homo sapiens
RVARPPPIGAEVPDVT

SEQ ID NO: 115274 - protein, 16 aa, Homo sapiens
VARPPPIGAEVPDVTA

SEQ ID NO: 115275 - protein, 16 aa, Homo sapiens
ARPPPIGAEVPDVTAT

SEQ ID NO: 115276 - protein, 16 aa, Homo sapiens
RPPPIGAEVPDVTATP

SEQ ID NO: 115277 - protein, 16 aa, Homo sapiens
PPPIGAEVPDVTATPA

SEQ ID NO: 115278 - protein, 16 aa, Homo sapiens
PPIGAEVPDVTATPAR

SEQ ID NO: 115279 - protein, 16 aa, Homo sapiens
PIGAEVPDVTATPARL

SEQ ID NO: 115280 - protein, 16 aa, Homo sapiens
IGAEVPDVTATPARLL

SEQ ID NO: 115281 - protein, 16 aa, Homo sapiens
GAEVPDVTATPARLLF

SEQ ID NO: 115282 - protein, 16 aa, Homo sapiens
AEVPDVTATPARLLFF

SEQ ID NO: 115283 - protein, 16 aa, Homo sapiens
EVPDVTATPARLLFFA

SEQ ID NO: 115284 - protein, 16 aa, Homo sapiens
VPDVTATPARLLFFAP

SEQ ID NO: 115285 - protein, 16 aa, Homo sapiens
PDVTATPARLLFFAPT

SEQ ID NO: 115286 - protein, 16 aa, Homo sapiens
DVTATPARLLFFAPTR

SEQ ID NO: 115287 - protein, 16 aa, Homo sapiens
VTATPARLLFFAPTRR

SEQ ID NO: 115288 - protein, 16 aa, Homo sapiens
TATPARLLFFAPTRRA

SEQ ID NO: 115289 - protein, 16 aa, Homo sapiens
ATPARLLFFAPTRRAA

SEQ ID NO: 115290 - protein, 16 aa, Homo sapiens
TPARLLFFAPTRRAAP

SEQ ID NO: 115291 - protein, 16 aa, Homo sapiens
PARLLFFAPTRRAAPL

SEQ ID NO: 115292 - protein, 16 aa, Homo sapiens
ARLLFFAPTRRAAPLE

SEQ ID NO: 115293 - protein, 16 aa, Homo sapiens
RLLFFAPTRRAAPLEE

SEQ ID NO: 115294 - protein, 16 aa, Homo sapiens
LLFFAPTRRAAPLEEM

SEQ ID NO: 115295 - protein, 16 aa, Homo sapiens
LFFAPTRRAAPLEEME

SEQ ID NO: 115296 - protein, 16 aa, Homo sapiens
FFAPTRRAAPLEEMEA

SEQ ID NO: 115297 - protein, 16 aa, Homo sapiens
FAPTRRAAPLEEMEAP

SEQ ID NO: 115298 - protein, 16 aa, Homo sapiens
APTRRAAPLEEMEAPA

SEQ ID NO: 115299 - protein, 16 aa, Homo sapiens
PTRRAAPLEEMEAPAA

SEQ ID NO: 115300 - protein, 16 aa, Homo sapiens
TRRAAPLEEMEAPAAD

SEQ ID NO: 115301 - protein, 16 aa, Homo sapiens
RRAAPLEEMEAPAADA

SEQ ID NO: 115302 - protein, 16 aa, Homo sapiens
RAAPLEEMEAPAADAI

SEQ ID NO: 115303 - protein, 16 aa, Homo sapiens
AAPLEEMEAPAADAIM

SEQ ID NO: 115304 - protein, 16 aa, Homo sapiens
APLEEMEAPAADAIMS

SEQ ID NO: 115305 - protein, 16 aa, Homo sapiens
PLEEMEAPAADAIMSP

SEQ ID NO: 115306 - protein, 16 aa, Homo sapiens
LEEMEAPAADAIMSPE

SEQ ID NO: 115307 - protein, 16 aa, Homo sapiens
EEMEAPAADAIMSPEE

SEQ ID NO: 115308 - protein, 16 aa, Homo sapiens
EMEAPAADAIMSPEEE

SEQ ID NO: 115309 - protein, 16 aa, Homo sapiens
MEAPAADAIMSPEEEL

SEQ ID NO: 115310 - protein, 16 aa, Homo sapiens
EAPAADAIMSPEEELD

SEQ ID NO: 115311 - protein, 16 aa, Homo sapiens
APAADAIMSPEEELDG

SEQ ID NO: 115312 - protein, 16 aa, Homo sapiens
PAADAIMSPEEELDGY

SEQ ID NO: 115313 - protein, 16 aa, Homo sapiens
AADAIMSPEEELDGYE

SEQ ID NO: 115314 - protein, 16 aa, Homo sapiens
ADAIMSPEEELDGYEP

SEQ ID NO: 115315 - protein, 16 aa, Homo sapiens
DAIMSPEEELDGYEPE

SEQ ID NO: 115316 - protein, 16 aa, Homo sapiens
AIMSPEEELDGYEPEP

SEQ ID NO: 115317 - protein, 16 aa, Homo sapiens
IMSPEEELDGYEPEPL

SEQ ID NO: 115318 - protein, 16 aa, Homo sapiens
MSPEEELDGYEPEPLG

SEQ ID NO: 115319 - protein, 16 aa, Homo sapiens
SPEEELDGYEPEPLGK

SEQ ID NO: 115320 - protein, 16 aa, Homo sapiens
PEEELDGYEPEPLGKR

SEQ ID NO: 115321 - protein, 16 aa, Homo sapiens
EEELDGYEPEPLGKRP

SEQ ID NO: 115322 - protein, 16 aa, Homo sapiens
EELDGYEPEPLGKRPA

SEQ ID NO: 115323 - protein, 16 aa, Homo sapiens
ELDGYEPEPLGKRPAV

SEQ ID NO: 115324 - protein, 16 aa, Homo sapiens
LDGYEPEPLGKRPAVL

SEQ ID NO: 115325 - protein, 16 aa, Homo sapiens
DGYEPEPLGKRPAVLP

SEQ ID NO: 115326 - protein, 16 aa, Homo sapiens
GYEPEPLGKRPAVLPL

SEQ ID NO: 115327 - protein, 16 aa, Homo sapiens
YEPEPLGKRPAVLPLL

SEQ ID NO: 115328 - protein, 16 aa, Homo sapiens
EPEPLGKRPAVLPLLE

SEQ ID NO: 115329 - protein, 16 aa, Homo sapiens
PEPLGKRPAVLPLLEL

SEQ ID NO: 115330 - protein, 16 aa, Homo sapiens
EPLGKRPAVLPLLELV

SEQ ID NO: 115331 - protein, 16 aa, Homo sapiens
PLGKRPAVLPLLELVG

SEQ ID NO: 115332 - protein, 16 aa, Homo sapiens
LGKRPAVLPLLELVGE

SEQ ID NO: 115333 - protein, 16 aa, Homo sapiens
GKRPAVLPLLELVGES

SEQ ID NO: 115334 - protein, 16 aa, Homo sapiens
KRPAVLPLLELVGESG

SEQ ID NO: 115335 - protein, 16 aa, Homo sapiens
RPAVLPLLELVGESGN

SEQ ID NO: 115336 - protein, 16 aa, Homo sapiens
PAVLPLLELVGESGNN

SEQ ID NO: 115337 - protein, 16 aa, Homo sapiens
AVLPLLELVGESGNNT

SEQ ID NO: 115338 - protein, 16 aa, Homo sapiens
VLPLLELVGESGNNTS

SEQ ID NO: 115339 - protein, 16 aa, Homo sapiens
LPLLELVGESGNNTST

SEQ ID NO: 115340 - protein, 16 aa, Homo sapiens
PLLELVGESGNNTSTD

SEQ ID NO: 115341 - protein, 16 aa, Homo sapiens
LLELVGESGNNTSTDG

SEQ ID NO: 115342 - protein, 16 aa, Homo sapiens
LELVGESGNNTSTDGS

SEQ ID NO: 115343 - protein, 16 aa, Homo sapiens
ELVGESGNNTSTDGSL

SEQ ID NO: 115344 - protein, 16 aa, Homo sapiens
LVGESGNNTSTDGSLP

SEQ ID NO: 115345 - protein, 16 aa, Homo sapiens
VGESGNNTSTDGSLPS

SEQ ID NO: 115346 - protein, 16 aa, Homo sapiens
GESGNNTSTDGSLPST

SEQ ID NO: 115347 - protein, 16 aa, Homo sapiens
ESGNNTSTDGSLPSTP

SEQ ID NO: 115348 - protein, 16 aa, Homo sapiens
SGNNTSTDGSLPSTPP

SEQ ID NO: 115349 - protein, 16 aa, Homo sapiens
GNNTSTDGSLPSTPPP

SEQ ID NO: 115350 - protein, 16 aa, Homo sapiens
NNTSTDGSLPSTPPPA

SEQ ID NO: 115351 - protein, 16 aa, Homo sapiens
NTSTDGSLPSTPPPAE

SEQ ID NO: 115352 - protein, 16 aa, Homo sapiens
TSTDGSLPSTPPPAEE

SEQ ID NO: 115353 - protein, 16 aa, Homo sapiens
STDGSLPSTPPPAEEE

SEQ ID NO: 115354 - protein, 16 aa, Homo sapiens
TDGSLPSTPPPAEEEE

SEQ ID NO: 115355 - protein, 16 aa, Homo sapiens
DGSLPSTPPPAEEEED

SEQ ID NO: 115356 - protein, 16 aa, Homo sapiens
GSLPSTPPPAEEEEDD

SEQ ID NO: 115357 - protein, 16 aa, Homo sapiens
SLPSTPPPAEEEEDDL

SEQ ID NO: 115358 - protein, 16 aa, Homo sapiens
LPSTPPPAEEEEDDLY

SEQ ID NO: 115359 - protein, 16 aa, Homo sapiens
PSTPPPAEEEEDDLYR

SEQ ID NO: 115360 - protein, 16 aa, Homo sapiens
STPPPAEEEEDDLYRQ

SEQ ID NO: 115361 - protein, 16 aa, Homo sapiens
TPPPAEEEEDDLYRQS

SEQ ID NO: 115362 - protein, 16 aa, Homo sapiens
PPPAEEEEDDLYRQSL

SEQ ID NO: 115363 - protein, 16 aa, Homo sapiens
PPAEEEEDDLYRQSLE

SEQ ID NO: 115364 - protein, 16 aa, Homo sapiens
PAEEEEDDLYRQSLEI

SEQ ID NO: 115365 - protein, 16 aa, Homo sapiens
AEEEEDDLYRQSLEII

SEQ ID NO: 115366 - protein, 16 aa, Homo sapiens
EEEEDDLYRQSLEIIS

SEQ ID NO: 115367 - protein, 16 aa, Homo sapiens
EEEDDLYRQSLEIISR

SEQ ID NO: 115368 - protein, 16 aa, Homo sapiens
EEDDLYRQSLEIISRY

SEQ ID NO: 115369 - protein, 16 aa, Homo sapiens
EDDLYRQSLEIISRYL

SEQ ID NO: 115370 - protein, 16 aa, Homo sapiens
DDLYRQSLEIISRYLR

SEQ ID NO: 115371 - protein, 16 aa, Homo sapiens
DLYRQSLEIISRYLRE

SEQ ID NO: 115372 - protein, 16 aa, Homo sapiens
LYRQSLEIISRYLREQ

SEQ ID NO: 115373 - protein, 16 aa, Homo sapiens
YRQSLEIISRYLREQA

SEQ ID NO: 115374 - protein, 16 aa, Homo sapiens
RQSLEIISRYLREQAT

SEQ ID NO: 115375 - protein, 16 aa, Homo sapiens
QSLEIISRYLREQATG

SEQ ID NO: 115376 - protein, 16 aa, Homo sapiens
SLEIISRYLREQATGA

SEQ ID NO: 115377 - protein, 16 aa, Homo sapiens
LEIISRYLREQATGAK

SEQ ID NO: 115378 - protein, 16 aa, Homo sapiens
EIISRYLREQATGAKD

SEQ ID NO: 115379 - protein, 16 aa, Homo sapiens
IISRYLREQATGAKDT

SEQ ID NO: 115380 - protein, 16 aa, Homo sapiens
ISRYLREQATGAKDTK

SEQ ID NO: 115381 - protein, 16 aa, Homo sapiens
SRYLREQATGAKDTKP

SEQ ID NO: 115382 - protein, 16 aa, Homo sapiens
RYLREQATGAKDTKPM

SEQ ID NO: 115383 - protein, 16 aa, Homo sapiens
YLREQATGAKDTKPMG

SEQ ID NO: 115384 - protein, 16 aa, Homo sapiens
LREQATGAKDTKPMGR

SEQ ID NO: 115385 - protein, 16 aa, Homo sapiens
REQATGAKDTKPMGRS

SEQ ID NO: 115386 - protein, 16 aa, Homo sapiens
EQATGAKDTKPMGRSG

SEQ ID NO: 115387 - protein, 16 aa, Homo sapiens
QATGAKDTKPMGRSGA

SEQ ID NO: 115388 - protein, 16 aa, Homo sapiens
ATGAKDTKPMGRSGAT

SEQ ID NO: 115389 - protein, 16 aa, Homo sapiens
TGAKDTKPMGRSGATS

SEQ ID NO: 115390 - protein, 16 aa, Homo sapiens
GAKDTKPMGRSGATSR

SEQ ID NO: 115391 - protein, 16 aa, Homo sapiens
AKDTKPMGRSGATSRK

SEQ ID NO: 115392 - protein, 16 aa, Homo sapiens
KDTKPMGRSGATSRKA

SEQ ID NO: 115393 - protein, 16 aa, Homo sapiens
DTKPMGRSGATSRKAL

SEQ ID NO: 115394 - protein, 16 aa, Homo sapiens
TKPMGRSGATSRKALE

SEQ ID NO: 115395 - protein, 16 aa, Homo sapiens
KPMGRSGATSRKALET

SEQ ID NO: 115396 - protein, 16 aa, Homo sapiens
PMGRSGATSRKALETL

SEQ ID NO: 115397 - protein, 16 aa, Homo sapiens
MGRSGATSRKALETLR

SEQ ID NO: 115398 - protein, 16 aa, Homo sapiens
GRSGATSRKALETLRR

SEQ ID NO: 115399 - protein, 16 aa, Homo sapiens
RSGATSRKALETLRRV

SEQ ID NO: 115400 - protein, 16 aa, Homo sapiens
SGATSRKALETLRRVG

SEQ ID NO: 115401 - protein, 16 aa, Homo sapiens
GATSRKALETLRRVGD

SEQ ID NO: 115402 - protein, 16 aa, Homo sapiens
ATSRKALETLRRVGDG

SEQ ID NO: 115403 - protein, 16 aa, Homo sapiens
TSRKALETLRRVGDGV

SEQ ID NO: 115404 - protein, 16 aa, Homo sapiens
SRKALETLRRVGDGVQ

SEQ ID NO: 115405 - protein, 16 aa, Homo sapiens
RKALETLRRVGDGVQR

SEQ ID NO: 115406 - protein, 16 aa, Homo sapiens
KALETLRRVGDGVQRN

SEQ ID NO: 115407 - protein, 16 aa, Homo sapiens
ALETLRRVGDGVQRNH

SEQ ID NO: 115408 - protein, 16 aa, Homo sapiens
LETLRRVGDGVQRNHE

SEQ ID NO: 115409 - protein, 16 aa, Homo sapiens
ETLRRVGDGVQRNHET

SEQ ID NO: 115410 - protein, 16 aa, Homo sapiens
TLRRVGDGVQRNHETA

SEQ ID NO: 115411 - protein, 16 aa, Homo sapiens
LRRVGDGVQRNHETAF

SEQ ID NO: 115412 - protein, 16 aa, Homo sapiens
RRVGDGVQRNHETAFQ

SEQ ID NO: 115413 - protein, 16 aa, Homo sapiens
RVGDGVQRNHETAFQG

SEQ ID NO: 115414 - protein, 16 aa, Homo sapiens
VGDGVQRNHETAFQGM

SEQ ID NO: 115415 - protein, 16 aa, Homo sapiens
GDGVQRNHETAFQGML

SEQ ID NO: 115416 - protein, 16 aa, Homo sapiens
DGVQRNHETAFQGMLR

SEQ ID NO: 115417 - protein, 16 aa, Homo sapiens
GVQRNHETAFQGMLRK

SEQ ID NO: 115418 - protein, 16 aa, Homo sapiens
VQRNHETAFQGMLRKL

SEQ ID NO: 115419 - protein, 16 aa, Homo sapiens
QRNHETAFQGMLRKLD

SEQ ID NO: 115420 - protein, 16 aa, Homo sapiens
RNHETAFQGMLRKLDI

SEQ ID NO: 115421 - protein, 16 aa, Homo sapiens
NHETAFQGMLRKLDIK

SEQ ID NO: 115422 - protein, 16 aa, Homo sapiens
HETAFQGMLRKLDIKN

SEQ ID NO: 115423 - protein, 16 aa, Homo sapiens
ETAFQGMLRKLDIKNE

SEQ ID NO: 115424 - protein, 16 aa, Homo sapiens
TAFQGMLRKLDIKNED

SEQ ID NO: 115425 - protein, 16 aa, Homo sapiens
AFQGMLRKLDIKNEDD

SEQ ID NO: 115426 - protein, 16 aa, Homo sapiens
FQGMLRKLDIKNEDDV

SEQ ID NO: 115427 - protein, 16 aa, Homo sapiens
QGMLRKLDIKNEDDVK

SEQ ID NO: 115428 - protein, 16 aa, Homo sapiens
GMLRKLDIKNEDDVKS

SEQ ID NO: 115429 - protein, 16 aa, Homo sapiens
MLRKLDIKNEDDVKSL

SEQ ID NO: 115430 - protein, 16 aa, Homo sapiens
LRKLDIKNEDDVKSLS

SEQ ID NO: 115431 - protein, 16 aa, Homo sapiens
RKLDIKNEDDVKSLSR

SEQ ID NO: 115432 - protein, 16 aa, Homo sapiens
KLDIKNEDDVKSLSRV

SEQ ID NO: 115433 - protein, 16 aa, Homo sapiens
LDIKNEDDVKSLSRVM

SEQ ID NO: 115434 - protein, 16 aa, Homo sapiens
DIKNEDDVKSLSRVMI

SEQ ID NO: 115435 - protein, 16 aa, Homo sapiens
IKNEDDVKSLSRVMIH

SEQ ID NO: 115436 - protein, 16 aa, Homo sapiens
KNEDDVKSLSRVMIHV

SEQ ID NO: 115437 - protein, 16 aa, Homo sapiens
NEDDVKSLSRVMIHVF

SEQ ID NO: 115438 - protein, 16 aa, Homo sapiens
EDDVKSLSRVMIHVFS

SEQ ID NO: 115439 - protein, 16 aa, Homo sapiens
DDVKSLSRVMIHVFSD

SEQ ID NO: 115440 - protein, 16 aa, Homo sapiens
DVKSLSRVMIHVFSDG

SEQ ID NO: 115441 - protein, 16 aa, Homo sapiens
VKSLSRVMIHVFSDGV

SEQ ID NO: 115442 - protein, 16 aa, Homo sapiens
KSLSRVMIHVFSDGVT

SEQ ID NO: 115443 - protein, 16 aa, Homo sapiens
SLSRVMIHVFSDGVTN

SEQ ID NO: 115444 - protein, 16 aa, Homo sapiens
LSRVMIHVFSDGVTNW

SEQ ID NO: 115445 - protein, 16 aa, Homo sapiens
SRVMIHVFSDGVTNWG

SEQ ID NO: 115446 - protein, 16 aa, Homo sapiens
RVMIHVFSDGVTNWGR

SEQ ID NO: 115447 - protein, 16 aa, Homo sapiens
VMIHVFSDGVTNWGRI

SEQ ID NO: 115448 - protein, 16 aa, Homo sapiens
MIHVFSDGVTNWGRIV

SEQ ID NO: 115449 - protein, 16 aa, Homo sapiens
IHVFSDGVTNWGRIVT

SEQ ID NO: 115450 - protein, 16 aa, Homo sapiens
HVFSDGVTNWGRIVTL

SEQ ID NO: 115451 - protein, 16 aa, Homo sapiens
VFSDGVTNWGRIVTLI

SEQ ID NO: 115452 - protein, 16 aa, Homo sapiens
FSDGVTNWGRIVTLIS

SEQ ID NO: 115453 - protein, 16 aa, Homo sapiens
SDGVTNWGRIVTLISF

SEQ ID NO: 115454 - protein, 16 aa, Homo sapiens
DGVTNWGRIVTLISFG

SEQ ID NO: 115455 - protein, 16 aa, Homo sapiens
GVTNWGRIVTLISFGA

SEQ ID NO: 115456 - protein, 16 aa, Homo sapiens
VTNWGRIVTLISFGAF

SEQ ID NO: 115457 - protein, 16 aa, Homo sapiens
TNWGRIVTLISFGAFV

SEQ ID NO: 115458 - protein, 16 aa, Homo sapiens
NWGRIVTLISFGAFVA

SEQ ID NO: 115459 - protein, 16 aa, Homo sapiens
WGRIVTLISFGAFVAK

SEQ ID NO: 115460 - protein, 16 aa, Homo sapiens
GRIVTLISFGAFVAKH

SEQ ID NO: 115461 - protein, 16 aa, Homo sapiens
RIVTLISFGAFVAKHL

SEQ ID NO: 115462 - protein, 16 aa, Homo sapiens
IVTLISFGAFVAKHLK

SEQ ID NO: 115463 - protein, 16 aa, Homo sapiens
VTLISFGAFVAKHLKT

SEQ ID NO: 115464 - protein, 16 aa, Homo sapiens
TLISFGAFVAKHLKTI

SEQ ID NO: 115465 - protein, 16 aa, Homo sapiens
LISFGAFVAKHLKTIN

SEQ ID NO: 115466 - protein, 16 aa, Homo sapiens
ISFGAFVAKHLKTINQ

SEQ ID NO: 115467 - protein, 16 aa, Homo sapiens
SFGAFVAKHLKTINQE

SEQ ID NO: 115468 - protein, 16 aa, Homo sapiens
FGAFVAKHLKTINQES

SEQ ID NO: 115469 - protein, 16 aa, Homo sapiens
GAFVAKHLKTINQESC

SEQ ID NO: 115470 - protein, 16 aa, Homo sapiens
AFVAKHLKTINQESCI

SEQ ID NO: 115471 - protein, 16 aa, Homo sapiens
FVAKHLKTINQESCIE

SEQ ID NO: 115472 - protein, 16 aa, Homo sapiens
VAKHLKTINQESCIEP

SEQ ID NO: 115473 - protein, 16 aa, Homo sapiens
AKHLKTINQESCIEPL

SEQ ID NO: 115474 - protein, 16 aa, Homo sapiens
KHLKTINQESCIEPLA

SEQ ID NO: 115475 - protein, 16 aa, Homo sapiens
HLKTINQESCIEPLAE

SEQ ID NO: 115476 - protein, 16 aa, Homo sapiens
LKTINQESCIEPLAES

SEQ ID NO: 115477 - protein, 16 aa, Homo sapiens
KTINQESCIEPLAESI

SEQ ID NO: 115478 - protein, 16 aa, Homo sapiens
TINQESCIEPLAESIT

SEQ ID NO: 115479 - protein, 16 aa, Homo sapiens
INQESCIEPLAESITD

SEQ ID NO: 115480 - protein, 16 aa, Homo sapiens
NQESCIEPLAESITDV

SEQ ID NO: 115481 - protein, 16 aa, Homo sapiens
QESCIEPLAESITDVL

SEQ ID NO: 115482 - protein, 16 aa, Homo sapiens
ESCIEPLAESITDVLV

SEQ ID NO: 115483 - protein, 16 aa, Homo sapiens
SCIEPLAESITDVLVR

SEQ ID NO: 115484 - protein, 16 aa, Homo sapiens
CIEPLAESITDVLVRT

SEQ ID NO: 115485 - protein, 16 aa, Homo sapiens
IEPLAESITDVLVRTK

SEQ ID NO: 115486 - protein, 16 aa, Homo sapiens
EPLAESITDVLVRTKR

SEQ ID NO: 115487 - protein, 16 aa, Homo sapiens
PLAESITDVLVRTKRD

SEQ ID NO: 115488 - protein, 16 aa, Homo sapiens
LAESITDVLVRTKRDW

SEQ ID NO: 115489 - protein, 16 aa, Homo sapiens
AESITDVLVRTKRDWL

SEQ ID NO: 115490 - protein, 16 aa, Homo sapiens
ESITDVLVRTKRDWLV

SEQ ID NO: 115491 - protein, 16 aa, Homo sapiens
SITDVLVRTKRDWLVK

SEQ ID NO: 115492 - protein, 16 aa, Homo sapiens
ITDVLVRTKRDWLVKQ

SEQ ID NO: 115493 - protein, 16 aa, Homo sapiens
TDVLVRTKRDWLVKQR

SEQ ID NO: 115494 - protein, 16 aa, Homo sapiens
DVLVRTKRDWLVKQRG

SEQ ID NO: 115495 - protein, 16 aa, Homo sapiens
VLVRTKRDWLVKQRGW

SEQ ID NO: 115496 - protein, 16 aa, Homo sapiens
LVRTKRDWLVKQRGWD

SEQ ID NO: 115497 - protein, 16 aa, Homo sapiens
VRTKRDWLVKQRGWDG

SEQ ID NO: 115498 - protein, 16 aa, Homo sapiens
RTKRDWLVKQRGWDGF

SEQ ID NO: 115499 - protein, 16 aa, Homo sapiens
TKRDWLVKQRGWDGFV

SEQ ID NO: 115500 - protein, 16 aa, Homo sapiens
KRDWLVKQRGWDGFVE

SEQ ID NO: 115501 - protein, 16 aa, Homo sapiens
RDWLVKQRGWDGFVEF

SEQ ID NO: 115502 - protein, 16 aa, Homo sapiens
DWLVKQRGWDGFVEFF

SEQ ID NO: 115503 - protein, 16 aa, Homo sapiens
WLVKQRGWDGFVEFFH

SEQ ID NO: 115504 - protein, 16 aa, Homo sapiens
LVKQRGWDGFVEFFHV

SEQ ID NO: 115505 - protein, 16 aa, Homo sapiens
VKQRGWDGFVEFFHVE

SEQ ID NO: 115506 - protein, 16 aa, Homo sapiens
KQRGWDGFVEFFHVED

SEQ ID NO: 115507 - protein, 16 aa, Homo sapiens
QRGWDGFVEFFHVEDL

SEQ ID NO: 115508 - protein, 16 aa, Homo sapiens
RGWDGFVEFFHVEDLE

SEQ ID NO: 115509 - protein, 16 aa, Homo sapiens
GWDGFVEFFHVEDLEG

SEQ ID NO: 115510 - protein, 16 aa, Homo sapiens
WDGFVEFFHVEDLEGG

SEQ ID NO: 115511 - protein, 16 aa, Homo sapiens
DGFVEFFHVEDLEGGI

SEQ ID NO: 115512 - protein, 16 aa, Homo sapiens
GFVEFFHVEDLEGGIR

SEQ ID NO: 115513 - protein, 16 aa, Homo sapiens
FVEFFHVEDLEGGIRN

SEQ ID NO: 115514 - protein, 16 aa, Homo sapiens
VEFFHVEDLEGGIRNV

SEQ ID NO: 115515 - protein, 16 aa, Homo sapiens
EFFHVEDLEGGIRNVL

SEQ ID NO: 115516 - protein, 16 aa, Homo sapiens
FFHVEDLEGGIRNVLL

SEQ ID NO: 115517 - protein, 16 aa, Homo sapiens
FHVEDLEGGIRNVLLA

SEQ ID NO: 115518 - protein, 16 aa, Homo sapiens
HVEDLEGGIRNVLLAF

SEQ ID NO: 115519 - protein, 16 aa, Homo sapiens
VEDLEGGIRNVLLAFA

SEQ ID NO: 115520 - protein, 16 aa, Homo sapiens
EDLEGGIRNVLLAFAG

SEQ ID NO: 115521 - protein, 16 aa, Homo sapiens
DLEGGIRNVLLAFAGV

SEQ ID NO: 115522 - protein, 16 aa, Homo sapiens
LEGGIRNVLLAFAGVA

SEQ ID NO: 115523 - protein, 16 aa, Homo sapiens
EGGIRNVLLAFAGVAG

SEQ ID NO: 115524 - protein, 16 aa, Homo sapiens
GGIRNVLLAFAGVAGV

SEQ ID NO: 115525 - protein, 16 aa, Homo sapiens
GIRNVLLAFAGVAGVG

SEQ ID NO: 115526 - protein, 16 aa, Homo sapiens
IRNVLLAFAGVAGVGA

SEQ ID NO: 115527 - protein, 16 aa, Homo sapiens
RNVLLAFAGVAGVGAG

SEQ ID NO: 115528 - protein, 16 aa, Homo sapiens
NVLLAFAGVAGVGAGL

SEQ ID NO: 115529 - protein, 16 aa, Homo sapiens
VLLAFAGVAGVGAGLA

SEQ ID NO: 115530 - protein, 16 aa, Homo sapiens
LLAFAGVAGVGAGLAY

SEQ ID NO: 115531 - protein, 16 aa, Homo sapiens
LAFAGVAGVGAGLAYL

SEQ ID NO: 115532 - protein, 16 aa, Homo sapiens
AFAGVAGVGAGLAYLI

SEQ ID NO: 115533 - protein, 16 aa, Homo sapiens
FAGVAGVGAGLAYLIR

SEQ ID NO: 115534 - protein, 9 aa, Homo sapiens
MFGLKRNAV

SEQ ID NO: 115535 - protein, 9 aa, Homo sapiens
FGLKRNAVI

SEQ ID NO: 115536 - protein, 9 aa, Homo sapiens
GLKRNAVIG

SEQ ID NO: 115537 - protein, 9 aa, Homo sapiens
LKRNAVIGL

SEQ ID NO: 115538 - protein, 9 aa, Homo sapiens
KRNAVIGLN

SEQ ID NO: 115539 - protein, 9 aa, Homo sapiens
RNAVIGLNL

SEQ ID NO: 115540 - protein, 9 aa, Homo sapiens
NAVIGLNLY

SEQ ID NO: 115541 - protein, 9 aa, Homo sapiens
AVIGLNLYC

SEQ ID NO: 115542 - protein, 9 aa, Homo sapiens
VIGLNLYCG

SEQ ID NO: 115543 - protein, 9 aa, Homo sapiens
IGLNLYCGG

SEQ ID NO: 115544 - protein, 9 aa, Homo sapiens
GLNLYCGGA

SEQ ID NO: 115545 - protein, 9 aa, Homo sapiens
LNLYCGGAG

SEQ ID NO: 115546 - protein, 9 aa, Homo sapiens
NLYCGGAGL

SEQ ID NO: 115547 - protein, 9 aa, Homo sapiens
LYCGGAGLG

SEQ ID NO: 115548 - protein, 9 aa, Homo sapiens
YCGGAGLGA

SEQ ID NO: 115549 - protein, 9 aa, Homo sapiens
CGGAGLGAG

SEQ ID NO: 115550 - protein, 9 aa, Homo sapiens
GGAGLGAGS

SEQ ID NO: 115551 - protein, 9 aa, Homo sapiens
GAGLGAGSG

SEQ ID NO: 115552 - protein, 9 aa, Homo sapiens
AGLGAGSGG

SEQ ID NO: 115553 - protein, 9 aa, Homo sapiens
GLGAGSGGA

SEQ ID NO: 115554 - protein, 9 aa, Homo sapiens
LGAGSGGAT

SEQ ID NO: 115555 - protein, 9 aa, Homo sapiens
GAGSGGATR

SEQ ID NO: 115556 - protein, 9 aa, Homo sapiens
AGSGGATRP

SEQ ID NO: 115557 - protein, 9 aa, Homo sapiens
GSGGATRPG

SEQ ID NO: 115558 - protein, 9 aa, Homo sapiens
SGGATRPGG

SEQ ID NO: 115559 - protein, 9 aa, Homo sapiens
GGATRPGGR

SEQ ID NO: 115560 - protein, 9 aa, Homo sapiens
GATRPGGRL

SEQ ID NO: 115561 - protein, 9 aa, Homo sapiens
ATRPGGRLL

SEQ ID NO: 115562 - protein, 9 aa, Homo sapiens
TRPGGRLLA

SEQ ID NO: 115563 - protein, 9 aa, Homo sapiens
RPGGRLLAT

SEQ ID NO: 115564 - protein, 9 aa, Homo sapiens
PGGRLLATE

SEQ ID NO: 115565 - protein, 9 aa, Homo sapiens
GGRLLATEK

SEQ ID NO: 115566 - protein, 9 aa, Homo sapiens
GRLLATEKE

SEQ ID NO: 115567 - protein, 9 aa, Homo sapiens
RLLATEKEA

SEQ ID NO: 115568 - protein, 9 aa, Homo sapiens
LLATEKEAS

SEQ ID NO: 115569 - protein, 9 aa, Homo sapiens
LATEKEASA

SEQ ID NO: 115570 - protein, 9 aa, Homo sapiens
ATEKEASAR

SEQ ID NO: 115571 - protein, 9 aa, Homo sapiens
TEKEASARR

SEQ ID NO: 115572 - protein, 9 aa, Homo sapiens
EKEASARRE

SEQ ID NO: 115573 - protein, 9 aa, Homo sapiens
KEASARREI

SEQ ID NO: 115574 - protein, 9 aa, Homo sapiens
EASARREIG

SEQ ID NO: 115575 - protein, 9 aa, Homo sapiens
ASARREIGG

SEQ ID NO: 115576 - protein, 9 aa, Homo sapiens
SARREIGGG

SEQ ID NO: 115577 - protein, 9 aa, Homo sapiens
ARREIGGGE

SEQ ID NO: 115578 - protein, 9 aa, Homo sapiens
RREIGGGEA

SEQ ID NO: 115579 - protein, 9 aa, Homo sapiens
REIGGGEAG

SEQ ID NO: 115580 - protein, 9 aa, Homo sapiens
EIGGGEAGA

SEQ ID NO: 115581 - protein, 9 aa, Homo sapiens
IGGGEAGAV

SEQ ID NO: 115582 - protein, 9 aa, Homo sapiens
GGGEAGAVI

SEQ ID NO: 115583 - protein, 9 aa, Homo sapiens
GGEAGAVIG

SEQ ID NO: 115584 - protein, 9 aa, Homo sapiens
GEAGAVIGG

SEQ ID NO: 115585 - protein, 9 aa, Homo sapiens
EAGAVIGGS

SEQ ID NO: 115586 - protein, 9 aa, Homo sapiens
AGAVIGGSA

SEQ ID NO: 115587 - protein, 9 aa, Homo sapiens
GAVIGGSAG

SEQ ID NO: 115588 - protein, 9 aa, Homo sapiens
AVIGGSAGA

SEQ ID NO: 115589 - protein, 9 aa, Homo sapiens
VIGGSAGAS

SEQ ID NO: 115590 - protein, 9 aa, Homo sapiens
IGGSAGASP

SEQ ID NO: 115591 - protein, 9 aa, Homo sapiens
GGSAGASPP

SEQ ID NO: 115592 - protein, 9 aa, Homo sapiens
GSAGASPPS

SEQ ID NO: 115593 - protein, 9 aa, Homo sapiens
SAGASPPST

SEQ ID NO: 115594 - protein, 9 aa, Homo sapiens
AGASPPSTL

SEQ ID NO: 115595 - protein, 9 aa, Homo sapiens
GASPPSTLT

SEQ ID NO: 115596 - protein, 9 aa, Homo sapiens
ASPPSTLTP

SEQ ID NO: 115597 - protein, 9 aa, Homo sapiens
SPPSTLTPD

SEQ ID NO: 115598 - protein, 9 aa, Homo sapiens
PPSTLTPDS

SEQ ID NO: 115599 - protein, 9 aa, Homo sapiens
PSTLTPDSR

SEQ ID NO: 115600 - protein, 9 aa, Homo sapiens
STLTPDSRR

SEQ ID NO: 115601 - protein, 9 aa, Homo sapiens
TLTPDSRRV

SEQ ID NO: 115602 - protein, 9 aa, Homo sapiens
LTPDSRRVA

SEQ ID NO: 115603 - protein, 9 aa, Homo sapiens
TPDSRRVAR

SEQ ID NO: 115604 - protein, 9 aa, Homo sapiens
PDSRRVARP

SEQ ID NO: 115605 - protein, 9 aa, Homo sapiens
DSRRVARPP

SEQ ID NO: 115606 - protein, 9 aa, Homo sapiens
SRRVARPPP

SEQ ID NO: 115607 - protein, 9 aa, Homo sapiens
RRVARPPPI

SEQ ID NO: 115608 - protein, 9 aa, Homo sapiens
RVARPPPIG

SEQ ID NO: 115609 - protein, 9 aa, Homo sapiens
VARPPPIGA

SEQ ID NO: 115610 - protein, 9 aa, Homo sapiens
ARPPPIGAE

SEQ ID NO: 115611 - protein, 9 aa, Homo sapiens
RPPPIGAEV

SEQ ID NO: 115612 - protein, 9 aa, Homo sapiens
PPPIGAEVP

SEQ ID NO: 115613 - protein, 9 aa, Homo sapiens
PPIGAEVPD

SEQ ID NO: 115614 - protein, 9 aa, Homo sapiens
PIGAEVPDV

SEQ ID NO: 115615 - protein, 9 aa, Homo sapiens
IGAEVPDVT

SEQ ID NO: 115616 - protein, 9 aa, Homo sapiens
GAEVPDVTA

SEQ ID NO: 115617 - protein, 9 aa, Homo sapiens
AEVPDVTAT

SEQ ID NO: 115618 - protein, 9 aa, Homo sapiens
EVPDVTATP

SEQ ID NO: 115619 - protein, 9 aa, Homo sapiens
VPDVTATPA

SEQ ID NO: 115620 - protein, 9 aa, Homo sapiens
PDVTATPAR

SEQ ID NO: 115621 - protein, 9 aa, Homo sapiens
DVTATPARL

SEQ ID NO: 115622 - protein, 9 aa, Homo sapiens
VTATPARLL

SEQ ID NO: 115623 - protein, 9 aa, Homo sapiens
TATPARLLF

SEQ ID NO: 115624 - protein, 9 aa, Homo sapiens
ATPARLLFF

SEQ ID NO: 115625 - protein, 9 aa, Homo sapiens
TPARLLFFA

SEQ ID NO: 115626 - protein, 9 aa, Homo sapiens
PARLLFFAP

SEQ ID NO: 115627 - protein, 9 aa, Homo sapiens
ARLLFFAPT

SEQ ID NO: 115628 - protein, 9 aa, Homo sapiens
RLLFFAPTR

SEQ ID NO: 115629 - protein, 9 aa, Homo sapiens
LLFFAPTRR

SEQ ID NO: 115630 - protein, 9 aa, Homo sapiens
LFFAPTRRA

SEQ ID NO: 115631 - protein, 9 aa, Homo sapiens
FFAPTRRAA

SEQ ID NO: 115632 - protein, 9 aa, Homo sapiens
FAPTRRAAP

SEQ ID NO: 115633 - protein, 9 aa, Homo sapiens
APTRRAAPL

SEQ ID NO: 115634 - protein, 9 aa, Homo sapiens
PTRRAAPLE

SEQ ID NO: 115635 - protein, 9 aa, Homo sapiens
TRRAAPLEE

SEQ ID NO: 115636 - protein, 9 aa, Homo sapiens
RRAAPLEEM

SEQ ID NO: 115637 - protein, 9 aa, Homo sapiens
RAAPLEEME

SEQ ID NO: 115638 - protein, 9 aa, Homo sapiens
AAPLEEMEA

SEQ ID NO: 115639 - protein, 9 aa, Homo sapiens
APLEEMEAP

SEQ ID NO: 115640 - protein, 9 aa, Homo sapiens
PLEEMEAPA

SEQ ID NO: 115641 - protein, 9 aa, Homo sapiens
LEEMEAPAA

SEQ ID NO: 115642 - protein, 9 aa, Homo sapiens
EEMEAPAAD

SEQ ID NO: 115643 - protein, 9 aa, Homo sapiens
EMEAPAADA

SEQ ID NO: 115644 - protein, 9 aa, Homo sapiens
MEAPAADAI

SEQ ID NO: 115645 - protein, 9 aa, Homo sapiens
EAPAADAIM

SEQ ID NO: 115646 - protein, 9 aa, Homo sapiens
APAADAIMS

SEQ ID NO: 115647 - protein, 9 aa, Homo sapiens
PAADAIMSP

SEQ ID NO: 115648 - protein, 9 aa, Homo sapiens
AADAIMSPE

SEQ ID NO: 115649 - protein, 9 aa, Homo sapiens
ADAIMSPEE

SEQ ID NO: 115650 - protein, 9 aa, Homo sapiens
DAIMSPEEE

SEQ ID NO: 115651 - protein, 9 aa, Homo sapiens
AIMSPEEEL

SEQ ID NO: 115652 - protein, 9 aa, Homo sapiens
IMSPEEELD

SEQ ID NO: 115653 - protein, 9 aa, Homo sapiens
MSPEEELDG

SEQ ID NO: 115654 - protein, 9 aa, Homo sapiens
SPEEELDGY

SEQ ID NO: 115655 - protein, 9 aa, Homo sapiens
PEEELDGYE

SEQ ID NO: 115656 - protein, 9 aa, Homo sapiens
EEELDGYEP

SEQ ID NO: 115657 - protein, 9 aa, Homo sapiens
EELDGYEPE

SEQ ID NO: 115658 - protein, 9 aa, Homo sapiens
ELDGYEPEP

SEQ ID NO: 115659 - protein, 9 aa, Homo sapiens
LDGYEPEPL

SEQ ID NO: 115660 - protein, 9 aa, Homo sapiens
DGYEPEPLG

SEQ ID NO: 115661 - protein, 9 aa, Homo sapiens
GYEPEPLGK

SEQ ID NO: 115662 - protein, 9 aa, Homo sapiens
YEPEPLGKR

SEQ ID NO: 115663 - protein, 9 aa, Homo sapiens
EPEPLGKRP

SEQ ID NO: 115664 - protein, 9 aa, Homo sapiens
PEPLGKRPA

SEQ ID NO: 115665 - protein, 9 aa, Homo sapiens
EPLGKRPAV

SEQ ID NO: 115666 - protein, 9 aa, Homo sapiens
PLGKRPAVL

SEQ ID NO: 115667 - protein, 9 aa, Homo sapiens
LGKRPAVLP

SEQ ID NO: 115668 - protein, 9 aa, Homo sapiens
GKRPAVLPL

SEQ ID NO: 115669 - protein, 9 aa, Homo sapiens
KRPAVLPLL

SEQ ID NO: 115670 - protein, 9 aa, Homo sapiens
RPAVLPLLE

SEQ ID NO: 115671 - protein, 9 aa, Homo sapiens
PAVLPLLEL

SEQ ID NO: 115672 - protein, 9 aa, Homo sapiens
AVLPLLELV

SEQ ID NO: 115673 - protein, 9 aa, Homo sapiens
VLPLLELVG

SEQ ID NO: 115674 - protein, 9 aa, Homo sapiens
LPLLELVGE

SEQ ID NO: 115675 - protein, 9 aa, Homo sapiens
PLLELVGES

SEQ ID NO: 115676 - protein, 9 aa, Homo sapiens
LLELVGESG

SEQ ID NO: 115677 - protein, 9 aa, Homo sapiens
LELVGESGN

SEQ ID NO: 115678 - protein, 9 aa, Homo sapiens
ELVGESGNN

SEQ ID NO: 115679 - protein, 9 aa, Homo sapiens
LVGESGNNT

SEQ ID NO: 115680 - protein, 9 aa, Homo sapiens
VGESGNNTS

SEQ ID NO: 115681 - protein, 9 aa, Homo sapiens
GESGNNTST

SEQ ID NO: 115682 - protein, 9 aa, Homo sapiens
ESGNNTSTD

SEQ ID NO: 115683 - protein, 9 aa, Homo sapiens
SGNNTSTDG

SEQ ID NO: 115684 - protein, 9 aa, Homo sapiens
GNNTSTDGS

SEQ ID NO: 115685 - protein, 9 aa, Homo sapiens
NNTSTDGSL

SEQ ID NO: 115686 - protein, 9 aa, Homo sapiens
NTSTDGSLP

SEQ ID NO: 115687 - protein, 9 aa, Homo sapiens
TSTDGSLPS

SEQ ID NO: 115688 - protein, 9 aa, Homo sapiens
STDGSLPST

SEQ ID NO: 115689 - protein, 9 aa, Homo sapiens
TDGSLPSTP

SEQ ID NO: 115690 - protein, 9 aa, Homo sapiens
DGSLPSTPP

SEQ ID NO: 115691 - protein, 9 aa, Homo sapiens
GSLPSTPPP

SEQ ID NO: 115692 - protein, 9 aa, Homo sapiens
SLPSTPPPA

SEQ ID NO: 115693 - protein, 9 aa, Homo sapiens
LPSTPPPAE

SEQ ID NO: 115694 - protein, 9 aa, Homo sapiens
PSTPPPAEE

SEQ ID NO: 115695 - protein, 9 aa, Homo sapiens
STPPPAEEE

SEQ ID NO: 115696 - protein, 9 aa, Homo sapiens
TPPPAEEEE

SEQ ID NO: 115697 - protein, 9 aa, Homo sapiens
PPPAEEEED

SEQ ID NO: 115698 - protein, 9 aa, Homo sapiens
PPAEEEEDD

SEQ ID NO: 115699 - protein, 9 aa, Homo sapiens
PAEEEEDDL

SEQ ID NO: 115700 - protein, 9 aa, Homo sapiens
AEEEEDDLY

SEQ ID NO: 115701 - protein, 9 aa, Homo sapiens
EEEEDDLYR

SEQ ID NO: 115702 - protein, 9 aa, Homo sapiens
EEEDDLYRQ

SEQ ID NO: 115703 - protein, 9 aa, Homo sapiens
EEDDLYRQS

SEQ ID NO: 115704 - protein, 9 aa, Homo sapiens
EDDLYRQSL

SEQ ID NO: 115705 - protein, 9 aa, Homo sapiens
DDLYRQSLE

SEQ ID NO: 115706 - protein, 9 aa, Homo sapiens
DLYRQSLEI

SEQ ID NO: 115707 - protein, 9 aa, Homo sapiens
LYRQSLEII

SEQ ID NO: 115708 - protein, 9 aa, Homo sapiens
YRQSLEIIS

SEQ ID NO: 115709 - protein, 9 aa, Homo sapiens
RQSLEIISR

SEQ ID NO: 115710 - protein, 9 aa, Homo sapiens
QSLEIISRY

SEQ ID NO: 115711 - protein, 9 aa, Homo sapiens
SLEIISRYL

SEQ ID NO: 115712 - protein, 9 aa, Homo sapiens
LEIISRYLR

SEQ ID NO: 115713 - protein, 9 aa, Homo sapiens
EIISRYLRE

SEQ ID NO: 115714 - protein, 9 aa, Homo sapiens
IISRYLREQ

SEQ ID NO: 115715 - protein, 9 aa, Homo sapiens
ISRYLREQA

SEQ ID NO: 115716 - protein, 9 aa, Homo sapiens
SRYLREQAT

SEQ ID NO: 115717 - protein, 9 aa, Homo sapiens
RYLREQATG

SEQ ID NO: 115718 - protein, 9 aa, Homo sapiens
YLREQATGA

SEQ ID NO: 115719 - protein, 9 aa, Homo sapiens
LREQATGAK

SEQ ID NO: 115720 - protein, 9 aa, Homo sapiens
REQATGAKD

SEQ ID NO: 115721 - protein, 9 aa, Homo sapiens
EQATGAKDT

SEQ ID NO: 115722 - protein, 9 aa, Homo sapiens
QATGAKDTK

SEQ ID NO: 115723 - protein, 9 aa, Homo sapiens
ATGAKDTKP

SEQ ID NO: 115724 - protein, 9 aa, Homo sapiens
TGAKDTKPM

SEQ ID NO: 115725 - protein, 9 aa, Homo sapiens
GAKDTKPMG

SEQ ID NO: 115726 - protein, 9 aa, Homo sapiens
AKDTKPMGR

SEQ ID NO: 115727 - protein, 9 aa, Homo sapiens
KDTKPMGRS

SEQ ID NO: 115728 - protein, 9 aa, Homo sapiens
DTKPMGRSG

SEQ ID NO: 115729 - protein, 9 aa, Homo sapiens
TKPMGRSGA

SEQ ID NO: 115730 - protein, 9 aa, Homo sapiens
KPMGRSGAT

SEQ ID NO: 115731 - protein, 9 aa, Homo sapiens
PMGRSGATS

SEQ ID NO: 115732 - protein, 9 aa, Homo sapiens
MGRSGATSR

SEQ ID NO: 115733 - protein, 9 aa, Homo sapiens
GRSGATSRK

SEQ ID NO: 115734 - protein, 9 aa, Homo sapiens
RSGATSRKA

SEQ ID NO: 115735 - protein, 9 aa, Homo sapiens
SGATSRKAL

SEQ ID NO: 115736 - protein, 9 aa, Homo sapiens
GATSRKALE

SEQ ID NO: 115737 - protein, 9 aa, Homo sapiens
ATSRKALET

SEQ ID NO: 115738 - protein, 9 aa, Homo sapiens
TSRKALETL

SEQ ID NO: 115739 - protein, 9 aa, Homo sapiens
SRKALETLR

SEQ ID NO: 115740 - protein, 9 aa, Homo sapiens
RKALETLRR

SEQ ID NO: 115741 - protein, 9 aa, Homo sapiens
KALETLRRV

SEQ ID NO: 115742 - protein, 9 aa, Homo sapiens
ALETLRRVG

SEQ ID NO: 115743 - protein, 9 aa, Homo sapiens
LETLRRVGD

SEQ ID NO: 115744 - protein, 9 aa, Homo sapiens
ETLRRVGDG

SEQ ID NO: 115745 - protein, 9 aa, Homo sapiens
TLRRVGDGV

SEQ ID NO: 115746 - protein, 9 aa, Homo sapiens
LRRVGDGVQ

SEQ ID NO: 115747 - protein, 9 aa, Homo sapiens
RRVGDGVQR

SEQ ID NO: 115748 - protein, 9 aa, Homo sapiens
RVGDGVQRN

SEQ ID NO: 115749 - protein, 9 aa, Homo sapiens
VGDGVQRNH

SEQ ID NO: 115750 - protein, 9 aa, Homo sapiens
GDGVQRNHE

SEQ ID NO: 115751 - protein, 9 aa, Homo sapiens
DGVQRNHET

SEQ ID NO: 115752 - protein, 9 aa, Homo sapiens
GVQRNHETA

SEQ ID NO: 115753 - protein, 9 aa, Homo sapiens
VQRNHETAF

SEQ ID NO: 115754 - protein, 9 aa, Homo sapiens
QRNHETAFQ

SEQ ID NO: 115755 - protein, 9 aa, Homo sapiens
RNHETAFQG

SEQ ID NO: 115756 - protein, 9 aa, Homo sapiens
NHETAFQGM

SEQ ID NO: 115757 - protein, 9 aa, Homo sapiens
HETAFQGML

SEQ ID NO: 115758 - protein, 9 aa, Homo sapiens
ETAFQGMLR

SEQ ID NO: 115759 - protein, 9 aa, Homo sapiens
TAFQGMLRK

SEQ ID NO: 115760 - protein, 9 aa, Homo sapiens
AFQGMLRKL

SEQ ID NO: 115761 - protein, 9 aa, Homo sapiens
FQGMLRKLD

SEQ ID NO: 115762 - protein, 9 aa, Homo sapiens
QGMLRKLDI

SEQ ID NO: 115763 - protein, 9 aa, Homo sapiens
GMLRKLDIK

SEQ ID NO: 115764 - protein, 9 aa, Homo sapiens
MLRKLDIKN

SEQ ID NO: 115765 - protein, 9 aa, Homo sapiens
LRKLDIKNE

SEQ ID NO: 115766 - protein, 9 aa, Homo sapiens
RKLDIKNED

SEQ ID NO: 115767 - protein, 9 aa, Homo sapiens
KLDIKNEDD

SEQ ID NO: 115768 - protein, 9 aa, Homo sapiens
LDIKNEDDV

SEQ ID NO: 115769 - protein, 9 aa, Homo sapiens
DIKNEDDVK

SEQ ID NO: 115770 - protein, 9 aa, Homo sapiens
IKNEDDVKS

SEQ ID NO: 115771 - protein, 9 aa, Homo sapiens
KNEDDVKSL

SEQ ID NO: 115772 - protein, 9 aa, Homo sapiens
NEDDVKSLS

SEQ ID NO: 115773 - protein, 9 aa, Homo sapiens
EDDVKSLSR

SEQ ID NO: 115774 - protein, 9 aa, Homo sapiens
DDVKSLSRV

SEQ ID NO: 115775 - protein, 9 aa, Homo sapiens
DVKSLSRVM

SEQ ID NO: 115776 - protein, 9 aa, Homo sapiens
VKSLSRVMI

SEQ ID NO: 115777 - protein, 9 aa, Homo sapiens
KSLSRVMIH

SEQ ID NO: 115778 - protein, 9 aa, Homo sapiens
SLSRVMIHV

SEQ ID NO: 115779 - protein, 9 aa, Homo sapiens
LSRVMIHVF

SEQ ID NO: 115780 - protein, 9 aa, Homo sapiens
SRVMIHVFS

SEQ ID NO: 115781 - protein, 9 aa, Homo sapiens
RVMIHVFSD

SEQ ID NO: 115782 - protein, 9 aa, Homo sapiens
VMIHVFSDG

SEQ ID NO: 115783 - protein, 9 aa, Homo sapiens
MIHVFSDGV

SEQ ID NO: 115784 - protein, 9 aa, Homo sapiens
IHVFSDGVT

SEQ ID NO: 115785 - protein, 9 aa, Homo sapiens
HVFSDGVTN

SEQ ID NO: 115786 - protein, 9 aa, Homo sapiens
VFSDGVTNW

SEQ ID NO: 115787 - protein, 9 aa, Homo sapiens
FSDGVTNWG

SEQ ID NO: 115788 - protein, 9 aa, Homo sapiens
SDGVTNWGR

SEQ ID NO: 115789 - protein, 9 aa, Homo sapiens
DGVTNWGRI

SEQ ID NO: 115790 - protein, 9 aa, Homo sapiens
GVTNWGRIV

SEQ ID NO: 115791 - protein, 9 aa, Homo sapiens
VTNWGRIVT

SEQ ID NO: 115792 - protein, 9 aa, Homo sapiens
TNWGRIVTL

SEQ ID NO: 115793 - protein, 9 aa, Homo sapiens
NWGRIVTLI

SEQ ID NO: 115794 - protein, 9 aa, Homo sapiens
WGRIVTLIS

SEQ ID NO: 115795 - protein, 9 aa, Homo sapiens
GRIVTLISF

SEQ ID NO: 115796 - protein, 9 aa, Homo sapiens
RIVTLISFG

SEQ ID NO: 115797 - protein, 9 aa, Homo sapiens
IVTLISFGA

SEQ ID NO: 115798 - protein, 9 aa, Homo sapiens
VTLISFGAF

SEQ ID NO: 115799 - protein, 9 aa, Homo sapiens
TLISFGAFV

SEQ ID NO: 115800 - protein, 9 aa, Homo sapiens
LISFGAFVA

SEQ ID NO: 115801 - protein, 9 aa, Homo sapiens
ISFGAFVAK

SEQ ID NO: 115802 - protein, 9 aa, Homo sapiens
SFGAFVAKH

SEQ ID NO: 115803 - protein, 9 aa, Homo sapiens
FGAFVAKHL

SEQ ID NO: 115804 - protein, 9 aa, Homo sapiens
GAFVAKHLK

SEQ ID NO: 115805 - protein, 9 aa, Homo sapiens
AFVAKHLKT

SEQ ID NO: 115806 - protein, 9 aa, Homo sapiens
FVAKHLKTI

SEQ ID NO: 115807 - protein, 9 aa, Homo sapiens
VAKHLKTIN

SEQ ID NO: 115808 - protein, 9 aa, Homo sapiens
AKHLKTINQ

SEQ ID NO: 115809 - protein, 9 aa, Homo sapiens
KHLKTINQE

SEQ ID NO: 115810 - protein, 9 aa, Homo sapiens
HLKTINQES

SEQ ID NO: 115811 - protein, 9 aa, Homo sapiens
LKTINQESC

SEQ ID NO: 115812 - protein, 9 aa, Homo sapiens
KTINQESCI

SEQ ID NO: 115813 - protein, 9 aa, Homo sapiens
TINQESCIE

SEQ ID NO: 115814 - protein, 9 aa, Homo sapiens
INQESCIEP

SEQ ID NO: 115815 - protein, 9 aa, Homo sapiens
NQESCIEPL

SEQ ID NO: 115816 - protein, 9 aa, Homo sapiens
QESCIEPLA

SEQ ID NO: 115817 - protein, 9 aa, Homo sapiens
ESCIEPLAE

SEQ ID NO: 115818 - protein, 9 aa, Homo sapiens
SCIEPLAES

SEQ ID NO: 115819 - protein, 9 aa, Homo sapiens
CIEPLAESI

SEQ ID NO: 115820 - protein, 9 aa, Homo sapiens
IEPLAESIT

SEQ ID NO: 115821 - protein, 9 aa, Homo sapiens
EPLAESITD

SEQ ID NO: 115822 - protein, 9 aa, Homo sapiens
PLAESITDV

SEQ ID NO: 115823 - protein, 9 aa, Homo sapiens
LAESITDVL

SEQ ID NO: 115824 - protein, 9 aa, Homo sapiens
AESITDVLV

SEQ ID NO: 115825 - protein, 9 aa, Homo sapiens
ESITDVLVR

SEQ ID NO: 115826 - protein, 9 aa, Homo sapiens
SITDVLVRT

SEQ ID NO: 115827 - protein, 9 aa, Homo sapiens
ITDVLVRTK

SEQ ID NO: 115828 - protein, 9 aa, Homo sapiens
TDVLVRTKR

SEQ ID NO: 115829 - protein, 9 aa, Homo sapiens
DVLVRTKRD

SEQ ID NO: 115830 - protein, 9 aa, Homo sapiens
VLVRTKRDW

SEQ ID NO: 115831 - protein, 9 aa, Homo sapiens
LVRTKRDWL

SEQ ID NO: 115832 - protein, 9 aa, Homo sapiens
VRTKRDWLV

SEQ ID NO: 115833 - protein, 9 aa, Homo sapiens
RTKRDWLVK

SEQ ID NO: 115834 - protein, 9 aa, Homo sapiens
TKRDWLVKQ

SEQ ID NO: 115835 - protein, 9 aa, Homo sapiens
KRDWLVKQR

SEQ ID NO: 115836 - protein, 9 aa, Homo sapiens
RDWLVKQRG

SEQ ID NO: 115837 - protein, 9 aa, Homo sapiens
DWLVKQRGW

SEQ ID NO: 115838 - protein, 9 aa, Homo sapiens
WLVKQRGWD

SEQ ID NO: 115839 - protein, 9 aa, Homo sapiens
LVKQRGWDG

SEQ ID NO: 115840 - protein, 9 aa, Homo sapiens
VKQRGWDGF

SEQ ID NO: 115841 - protein, 9 aa, Homo sapiens
KQRGWDGFV

SEQ ID NO: 115842 - protein, 9 aa, Homo sapiens
QRGWDGFVE

SEQ ID NO: 115843 - protein, 9 aa, Homo sapiens
RGWDGFVEF

SEQ ID NO: 115844 - protein, 9 aa, Homo sapiens
GWDGFVEFF

SEQ ID NO: 115845 - protein, 9 aa, Homo sapiens
WDGFVEFFH

SEQ ID NO: 115846 - protein, 9 aa, Homo sapiens
DGFVEFFHV

SEQ ID NO: 115847 - protein, 9 aa, Homo sapiens
GFVEFFHVE

SEQ ID NO: 115848 - protein, 9 aa, Homo sapiens
FVEFFHVED

SEQ ID NO: 115849 - protein, 9 aa, Homo sapiens
VEFFHVEDL

SEQ ID NO: 115850 - protein, 9 aa, Homo sapiens
EFFHVEDLE

SEQ ID NO: 115851 - protein, 9 aa, Homo sapiens
FFHVEDLEG

SEQ ID NO: 115852 - protein, 9 aa, Homo sapiens
FHVEDLEGG

SEQ ID NO: 115853 - protein, 9 aa, Homo sapiens
HVEDLEGGI

SEQ ID NO: 115854 - protein, 9 aa, Homo sapiens
VEDLEGGIR

SEQ ID NO: 115855 - protein, 9 aa, Homo sapiens
EDLEGGIRN

SEQ ID NO: 115856 - protein, 9 aa, Homo sapiens
DLEGGIRNV

SEQ ID NO: 115857 - protein, 9 aa, Homo sapiens
LEGGIRNVL

SEQ ID NO: 115858 - protein, 9 aa, Homo sapiens
EGGIRNVLL

SEQ ID NO: 115859 - protein, 9 aa, Homo sapiens
GGIRNVLLA

SEQ ID NO: 115860 - protein, 9 aa, Homo sapiens
GIRNVLLAF

SEQ ID NO: 115861 - protein, 9 aa, Homo sapiens
IRNVLLAFA

SEQ ID NO: 115862 - protein, 9 aa, Homo sapiens
RNVLLAFAG

SEQ ID NO: 115863 - protein, 9 aa, Homo sapiens
NVLLAFAGV

SEQ ID NO: 115864 - protein, 9 aa, Homo sapiens
VLLAFAGVA

SEQ ID NO: 115865 - protein, 9 aa, Homo sapiens
LLAFAGVAG

SEQ ID NO: 115866 - protein, 9 aa, Homo sapiens
LAFAGVAGV

SEQ ID NO: 115867 - protein, 9 aa, Homo sapiens
AFAGVAGVG

SEQ ID NO: 115868 - protein, 9 aa, Homo sapiens
FAGVAGVGA

SEQ ID NO: 115869 - protein, 9 aa, Homo sapiens
AGVAGVGAG

SEQ ID NO: 115870 - protein, 9 aa, Homo sapiens
GVAGVGAGL

SEQ ID NO: 115871 - protein, 9 aa, Homo sapiens
VAGVGAGLA

SEQ ID NO: 115872 - protein, 9 aa, Homo sapiens
AGVGAGLAY

SEQ ID NO: 115873 - protein, 9 aa, Homo sapiens
GVGAGLAYL

SEQ ID NO: 115874 - protein, 9 aa, Homo sapiens
VGAGLAYLI

SEQ ID NO: 115875 - protein, 9 aa, Homo sapiens
GAGLAYLIR

SEQ ID NO: 115876 - protein, 8 aa, Homo sapiens
AGLAYLIR

SEQ ID NO: 115877 - protein, 9 aa, Homo sapiens
MSQSNRELV

SEQ ID NO: 115878 - protein, 9 aa, Homo sapiens
SQSNRELVV

SEQ ID NO: 115879 - protein, 9 aa, Homo sapiens
QSNRELVVD

SEQ ID NO: 115880 - protein, 9 aa, Homo sapiens
SNRELVVDF

SEQ ID NO: 115881 - protein, 9 aa, Homo sapiens
NRELVVDFL

SEQ ID NO: 115882 - protein, 9 aa, Homo sapiens
RELVVDFLS

SEQ ID NO: 115883 - protein, 9 aa, Homo sapiens
ELVVDFLSY

SEQ ID NO: 115884 - protein, 9 aa, Homo sapiens
LVVDFLSYK

SEQ ID NO: 115885 - protein, 9 aa, Homo sapiens
VVDFLSYKL

SEQ ID NO: 115886 - protein, 9 aa, Homo sapiens
VDFLSYKLS

SEQ ID NO: 115887 - protein, 9 aa, Homo sapiens
DFLSYKLSQ

SEQ ID NO: 115888 - protein, 9 aa, Homo sapiens
FLSYKLSQK

SEQ ID NO: 115889 - protein, 9 aa, Homo sapiens
LSYKLSQKG

SEQ ID NO: 115890 - protein, 9 aa, Homo sapiens
SYKLSQKGY

SEQ ID NO: 115891 - protein, 9 aa, Homo sapiens
YKLSQKGYS

SEQ ID NO: 115892 - protein, 9 aa, Homo sapiens
KLSQKGYSW

SEQ ID NO: 115893 - protein, 9 aa, Homo sapiens
LSQKGYSWS

SEQ ID NO: 115894 - protein, 9 aa, Homo sapiens
SQKGYSWSQ

SEQ ID NO: 115895 - protein, 9 aa, Homo sapiens
QKGYSWSQF

SEQ ID NO: 115896 - protein, 9 aa, Homo sapiens
KGYSWSQFS

SEQ ID NO: 115897 - protein, 9 aa, Homo sapiens
GYSWSQFSD

SEQ ID NO: 115898 - protein, 9 aa, Homo sapiens
YSWSQFSDV

SEQ ID NO: 115899 - protein, 9 aa, Homo sapiens
SWSQFSDVE

SEQ ID NO: 115900 - protein, 9 aa, Homo sapiens
WSQFSDVEE

SEQ ID NO: 115901 - protein, 9 aa, Homo sapiens
SQFSDVEEN

SEQ ID NO: 115902 - protein, 9 aa, Homo sapiens
QFSDVEENR

SEQ ID NO: 115903 - protein, 9 aa, Homo sapiens
FSDVEENRT

SEQ ID NO: 115904 - protein, 9 aa, Homo sapiens
SDVEENRTE

SEQ ID NO: 115905 - protein, 9 aa, Homo sapiens
DVEENRTEA

SEQ ID NO: 115906 - protein, 9 aa, Homo sapiens
VEENRTEAP

SEQ ID NO: 115907 - protein, 9 aa, Homo sapiens
EENRTEAPE

SEQ ID NO: 115908 - protein, 9 aa, Homo sapiens
ENRTEAPEG

SEQ ID NO: 115909 - protein, 9 aa, Homo sapiens
NRTEAPEGT

SEQ ID NO: 115910 - protein, 9 aa, Homo sapiens
RTEAPEGTE

SEQ ID NO: 115911 - protein, 9 aa, Homo sapiens
TEAPEGTES

SEQ ID NO: 115912 - protein, 9 aa, Homo sapiens
EAPEGTESE

SEQ ID NO: 115913 - protein, 9 aa, Homo sapiens
APEGTESEM

SEQ ID NO: 115914 - protein, 9 aa, Homo sapiens
PEGTESEME

SEQ ID NO: 115915 - protein, 9 aa, Homo sapiens
EGTESEMET

SEQ ID NO: 115916 - protein, 9 aa, Homo sapiens
GTESEMETP

SEQ ID NO: 115917 - protein, 9 aa, Homo sapiens
TESEMETPS

SEQ ID NO: 115918 - protein, 9 aa, Homo sapiens
ESEMETPSA

SEQ ID NO: 115919 - protein, 9 aa, Homo sapiens
SEMETPSAI

SEQ ID NO: 115920 - protein, 9 aa, Homo sapiens
EMETPSAIN

SEQ ID NO: 115921 - protein, 9 aa, Homo sapiens
METPSAING

SEQ ID NO: 115922 - protein, 9 aa, Homo sapiens
ETPSAINGN

SEQ ID NO: 115923 - protein, 9 aa, Homo sapiens
TPSAINGNP

SEQ ID NO: 115924 - protein, 9 aa, Homo sapiens
PSAINGNPS

SEQ ID NO: 115925 - protein, 9 aa, Homo sapiens
SAINGNPSW

SEQ ID NO: 115926 - protein, 9 aa, Homo sapiens
AINGNPSWH

SEQ ID NO: 115927 - protein, 9 aa, Homo sapiens
INGNPSWHL

SEQ ID NO: 115928 - protein, 9 aa, Homo sapiens
NGNPSWHLA

SEQ ID NO: 115929 - protein, 9 aa, Homo sapiens
GNPSWHLAD

SEQ ID NO: 115930 - protein, 9 aa, Homo sapiens
NPSWHLADS

SEQ ID NO: 115931 - protein, 9 aa, Homo sapiens
PSWHLADSP

SEQ ID NO: 115932 - protein, 9 aa, Homo sapiens
SWHLADSPA

SEQ ID NO: 115933 - protein, 9 aa, Homo sapiens
WHLADSPAV

SEQ ID NO: 115934 - protein, 9 aa, Homo sapiens
HLADSPAVN

SEQ ID NO: 115935 - protein, 9 aa, Homo sapiens
LADSPAVNG

SEQ ID NO: 115936 - protein, 9 aa, Homo sapiens
ADSPAVNGA

SEQ ID NO: 115937 - protein, 9 aa, Homo sapiens
DSPAVNGAT

SEQ ID NO: 115938 - protein, 9 aa, Homo sapiens
SPAVNGATG

SEQ ID NO: 115939 - protein, 9 aa, Homo sapiens
PAVNGATGH

SEQ ID NO: 115940 - protein, 9 aa, Homo sapiens
AVNGATGHS

SEQ ID NO: 115941 - protein, 9 aa, Homo sapiens
VNGATGHSS

SEQ ID NO: 115942 - protein, 9 aa, Homo sapiens
NGATGHSSS

SEQ ID NO: 115943 - protein, 9 aa, Homo sapiens
GATGHSSSL

SEQ ID NO: 115944 - protein, 9 aa, Homo sapiens
ATGHSSSLD

SEQ ID NO: 115945 - protein, 9 aa, Homo sapiens
TGHSSSLDA

SEQ ID NO: 115946 - protein, 9 aa, Homo sapiens
GHSSSLDAR

SEQ ID NO: 115947 - protein, 9 aa, Homo sapiens
HSSSLDARE

SEQ ID NO: 115948 - protein, 9 aa, Homo sapiens
SSSLDAREV

SEQ ID NO: 115949 - protein, 9 aa, Homo sapiens
SSLDAREVI

SEQ ID NO: 115950 - protein, 9 aa, Homo sapiens
SLDAREVIP

SEQ ID NO: 115951 - protein, 9 aa, Homo sapiens
LDAREVIPM

SEQ ID NO: 115952 - protein, 9 aa, Homo sapiens
DAREVIPMA

SEQ ID NO: 115953 - protein, 9 aa, Homo sapiens
AREVIPMAA

SEQ ID NO: 115954 - protein, 9 aa, Homo sapiens
REVIPMAAV

SEQ ID NO: 115955 - protein, 9 aa, Homo sapiens
EVIPMAAVK

SEQ ID NO: 115956 - protein, 9 aa, Homo sapiens
VIPMAAVKQ

SEQ ID NO: 115957 - protein, 9 aa, Homo sapiens
IPMAAVKQA

SEQ ID NO: 115958 - protein, 9 aa, Homo sapiens
PMAAVKQAL

SEQ ID NO: 115959 - protein, 9 aa, Homo sapiens
MAAVKQALR

SEQ ID NO: 115960 - protein, 9 aa, Homo sapiens
AAVKQALRE

SEQ ID NO: 115961 - protein, 9 aa, Homo sapiens
AVKQALREA

SEQ ID NO: 115962 - protein, 9 aa, Homo sapiens
VKQALREAG

SEQ ID NO: 115963 - protein, 9 aa, Homo sapiens
KQALREAGD

SEQ ID NO: 115964 - protein, 9 aa, Homo sapiens
QALREAGDE

SEQ ID NO: 115965 - protein, 9 aa, Homo sapiens
ALREAGDEF

SEQ ID NO: 115966 - protein, 9 aa, Homo sapiens
LREAGDEFE

SEQ ID NO: 115967 - protein, 9 aa, Homo sapiens
REAGDEFEL

SEQ ID NO: 115968 - protein, 9 aa, Homo sapiens
EAGDEFELR

SEQ ID NO: 115969 - protein, 9 aa, Homo sapiens
AGDEFELRY

SEQ ID NO: 115970 - protein, 9 aa, Homo sapiens
GDEFELRYR

SEQ ID NO: 115971 - protein, 9 aa, Homo sapiens
DEFELRYRR

SEQ ID NO: 115972 - protein, 9 aa, Homo sapiens
EFELRYRRA

SEQ ID NO: 115973 - protein, 9 aa, Homo sapiens
FELRYRRAF

SEQ ID NO: 115974 - protein, 9 aa, Homo sapiens
ELRYRRAFS

SEQ ID NO: 115975 - protein, 9 aa, Homo sapiens
LRYRRAFSD

SEQ ID NO: 115976 - protein, 9 aa, Homo sapiens
RYRRAFSDL

SEQ ID NO: 115977 - protein, 9 aa, Homo sapiens
YRRAFSDLT

SEQ ID NO: 115978 - protein, 9 aa, Homo sapiens
RRAFSDLTS

SEQ ID NO: 115979 - protein, 9 aa, Homo sapiens
RAFSDLTSQ

SEQ ID NO: 115980 - protein, 9 aa, Homo sapiens
AFSDLTSQL

SEQ ID NO: 115981 - protein, 9 aa, Homo sapiens
FSDLTSQLH

SEQ ID NO: 115982 - protein, 9 aa, Homo sapiens
SDLTSQLHI

SEQ ID NO: 115983 - protein, 9 aa, Homo sapiens
DLTSQLHIT

SEQ ID NO: 115984 - protein, 9 aa, Homo sapiens
LTSQLHITP

SEQ ID NO: 115985 - protein, 9 aa, Homo sapiens
TSQLHITPG

SEQ ID NO: 115986 - protein, 9 aa, Homo sapiens
SQLHITPGT

SEQ ID NO: 115987 - protein, 9 aa, Homo sapiens
QLHITPGTA

SEQ ID NO: 115988 - protein, 9 aa, Homo sapiens
LHITPGTAY

SEQ ID NO: 115989 - protein, 9 aa, Homo sapiens
HITPGTAYQ

SEQ ID NO: 115990 - protein, 9 aa, Homo sapiens
ITPGTAYQS

SEQ ID NO: 115991 - protein, 9 aa, Homo sapiens
TPGTAYQSF

SEQ ID NO: 115992 - protein, 9 aa, Homo sapiens
PGTAYQSFE

SEQ ID NO: 115993 - protein, 9 aa, Homo sapiens
GTAYQSFEQ

SEQ ID NO: 115994 - protein, 9 aa, Homo sapiens
TAYQSFEQV

SEQ ID NO: 115995 - protein, 9 aa, Homo sapiens
AYQSFEQVV

SEQ ID NO: 115996 - protein, 9 aa, Homo sapiens
YQSFEQVVN

SEQ ID NO: 115997 - protein, 9 aa, Homo sapiens
QSFEQVVNE

SEQ ID NO: 115998 - protein, 9 aa, Homo sapiens
SFEQVVNEL

SEQ ID NO: 115999 - protein, 9 aa, Homo sapiens
FEQVVNELF

SEQ ID NO: 116000 - protein, 9 aa, Homo sapiens
EQVVNELFR

SEQ ID NO: 116001 - protein, 9 aa, Homo sapiens
QVVNELFRD

SEQ ID NO: 116002 - protein, 9 aa, Homo sapiens
VVNELFRDG

SEQ ID NO: 116003 - protein, 9 aa, Homo sapiens
VNELFRDGV

SEQ ID NO: 116004 - protein, 9 aa, Homo sapiens
NELFRDGVN

SEQ ID NO: 116005 - protein, 9 aa, Homo sapiens
ELFRDGVNW

SEQ ID NO: 116006 - protein, 9 aa, Homo sapiens
LFRDGVNWG

SEQ ID NO: 116007 - protein, 9 aa, Homo sapiens
FRDGVNWGR

SEQ ID NO: 116008 - protein, 9 aa, Homo sapiens
RDGVNWGRI

SEQ ID NO: 116009 - protein, 9 aa, Homo sapiens
DGVNWGRIV

SEQ ID NO: 116010 - protein, 9 aa, Homo sapiens
GVNWGRIVA

SEQ ID NO: 116011 - protein, 9 aa, Homo sapiens
VNWGRIVAF

SEQ ID NO: 116012 - protein, 9 aa, Homo sapiens
NWGRIVAFF

SEQ ID NO: 116013 - protein, 9 aa, Homo sapiens
WGRIVAFFS

SEQ ID NO: 116014 - protein, 9 aa, Homo sapiens
GRIVAFFSF

SEQ ID NO: 116015 - protein, 9 aa, Homo sapiens
RIVAFFSFG

SEQ ID NO: 116016 - protein, 9 aa, Homo sapiens
IVAFFSFGG

SEQ ID NO: 116017 - protein, 9 aa, Homo sapiens
VAFFSFGGA

SEQ ID NO: 116018 - protein, 9 aa, Homo sapiens
AFFSFGGAL

SEQ ID NO: 116019 - protein, 9 aa, Homo sapiens
FFSFGGALC

SEQ ID NO: 116020 - protein, 9 aa, Homo sapiens
FSFGGALCV

SEQ ID NO: 116021 - protein, 9 aa, Homo sapiens
SFGGALCVE

SEQ ID NO: 116022 - protein, 9 aa, Homo sapiens
FGGALCVES

SEQ ID NO: 116023 - protein, 9 aa, Homo sapiens
GGALCVESV

SEQ ID NO: 116024 - protein, 9 aa, Homo sapiens
GALCVESVD

SEQ ID NO: 116025 - protein, 9 aa, Homo sapiens
ALCVESVDK

SEQ ID NO: 116026 - protein, 9 aa, Homo sapiens
LCVESVDKE

SEQ ID NO: 116027 - protein, 9 aa, Homo sapiens
CVESVDKEM

SEQ ID NO: 116028 - protein, 9 aa, Homo sapiens
VESVDKEMQ

SEQ ID NO: 116029 - protein, 9 aa, Homo sapiens
ESVDKEMQV

SEQ ID NO: 116030 - protein, 9 aa, Homo sapiens
SVDKEMQVL

SEQ ID NO: 116031 - protein, 9 aa, Homo sapiens
VDKEMQVLV

SEQ ID NO: 116032 - protein, 9 aa, Homo sapiens
DKEMQVLVS

SEQ ID NO: 116033 - protein, 9 aa, Homo sapiens
KEMQVLVSR

SEQ ID NO: 116034 - protein, 9 aa, Homo sapiens
EMQVLVSRI

SEQ ID NO: 116035 - protein, 9 aa, Homo sapiens
MQVLVSRIA

SEQ ID NO: 116036 - protein, 9 aa, Homo sapiens
QVLVSRIAA

SEQ ID NO: 116037 - protein, 9 aa, Homo sapiens
VLVSRIAAW

SEQ ID NO: 116038 - protein, 9 aa, Homo sapiens
LVSRIAAWM

SEQ ID NO: 116039 - protein, 9 aa, Homo sapiens
VSRIAAWMA

SEQ ID NO: 116040 - protein, 9 aa, Homo sapiens
SRIAAWMAT

SEQ ID NO: 116041 - protein, 9 aa, Homo sapiens
RIAAWMATY

SEQ ID NO: 116042 - protein, 9 aa, Homo sapiens
IAAWMATYL

SEQ ID NO: 116043 - protein, 9 aa, Homo sapiens
AAWMATYLN

SEQ ID NO: 116044 - protein, 9 aa, Homo sapiens
AWMATYLND

SEQ ID NO: 116045 - protein, 9 aa, Homo sapiens
WMATYLNDH

SEQ ID NO: 116046 - protein, 9 aa, Homo sapiens
MATYLNDHL

SEQ ID NO: 116047 - protein, 9 aa, Homo sapiens
ATYLNDHLE

SEQ ID NO: 116048 - protein, 9 aa, Homo sapiens
TYLNDHLEP

SEQ ID NO: 116049 - protein, 9 aa, Homo sapiens
YLNDHLEPW

SEQ ID NO: 116050 - protein, 9 aa, Homo sapiens
LNDHLEPWI

SEQ ID NO: 116051 - protein, 9 aa, Homo sapiens
NDHLEPWIQ

SEQ ID NO: 116052 - protein, 9 aa, Homo sapiens
DHLEPWIQE

SEQ ID NO: 116053 - protein, 9 aa, Homo sapiens
HLEPWIQEN

SEQ ID NO: 116054 - protein, 9 aa, Homo sapiens
LEPWIQENG

SEQ ID NO: 116055 - protein, 9 aa, Homo sapiens
EPWIQENGG

SEQ ID NO: 116056 - protein, 9 aa, Homo sapiens
PWIQENGGW

SEQ ID NO: 116057 - protein, 9 aa, Homo sapiens
WIQENGGWD

SEQ ID NO: 116058 - protein, 9 aa, Homo sapiens
IQENGGWDT

SEQ ID NO: 116059 - protein, 9 aa, Homo sapiens
QENGGWDTF

SEQ ID NO: 116060 - protein, 9 aa, Homo sapiens
ENGGWDTFV

SEQ ID NO: 116061 - protein, 9 aa, Homo sapiens
NGGWDTFVE

SEQ ID NO: 116062 - protein, 9 aa, Homo sapiens
GGWDTFVEL

SEQ ID NO: 116063 - protein, 9 aa, Homo sapiens
GWDTFVELY

SEQ ID NO: 116064 - protein, 9 aa, Homo sapiens
WDTFVELYG

SEQ ID NO: 116065 - protein, 9 aa, Homo sapiens
DTFVELYGN

SEQ ID NO: 116066 - protein, 9 aa, Homo sapiens
TFVELYGNN

SEQ ID NO: 116067 - protein, 9 aa, Homo sapiens
FVELYGNNA

SEQ ID NO: 116068 - protein, 9 aa, Homo sapiens
VELYGNNAA

SEQ ID NO: 116069 - protein, 9 aa, Homo sapiens
ELYGNNAAA

SEQ ID NO: 116070 - protein, 9 aa, Homo sapiens
LYGNNAAAE

SEQ ID NO: 116071 - protein, 9 aa, Homo sapiens
YGNNAAAES

SEQ ID NO: 116072 - protein, 9 aa, Homo sapiens
GNNAAAESR

SEQ ID NO: 116073 - protein, 9 aa, Homo sapiens
NNAAAESRK

SEQ ID NO: 116074 - protein, 9 aa, Homo sapiens
NAAAESRKG

SEQ ID NO: 116075 - protein, 9 aa, Homo sapiens
AAAESRKGQ

SEQ ID NO: 116076 - protein, 9 aa, Homo sapiens
AAESRKGQE

SEQ ID NO: 116077 - protein, 9 aa, Homo sapiens
AESRKGQER

SEQ ID NO: 116078 - protein, 9 aa, Homo sapiens
ESRKGQERF

SEQ ID NO: 116079 - protein, 9 aa, Homo sapiens
SRKGQERFN

SEQ ID NO: 116080 - protein, 9 aa, Homo sapiens
RKGQERFNR

SEQ ID NO: 116081 - protein, 9 aa, Homo sapiens
KGQERFNRW

SEQ ID NO: 116082 - protein, 9 aa, Homo sapiens
GQERFNRWF

SEQ ID NO: 116083 - protein, 9 aa, Homo sapiens
QERFNRWFL

SEQ ID NO: 116084 - protein, 9 aa, Homo sapiens
ERFNRWFLT

SEQ ID NO: 116085 - protein, 9 aa, Homo sapiens
RFNRWFLTG

SEQ ID NO: 116086 - protein, 9 aa, Homo sapiens
FNRWFLTGM

SEQ ID NO: 116087 - protein, 9 aa, Homo sapiens
NRWFLTGMT

SEQ ID NO: 116088 - protein, 9 aa, Homo sapiens
RWFLTGMTV

SEQ ID NO: 116089 - protein, 9 aa, Homo sapiens
WFLTGMTVA

SEQ ID NO: 116090 - protein, 9 aa, Homo sapiens
FLTGMTVAG

SEQ ID NO: 116091 - protein, 9 aa, Homo sapiens
LTGMTVAGV

SEQ ID NO: 116092 - protein, 9 aa, Homo sapiens
TGMTVAGVV

SEQ ID NO: 116093 - protein, 9 aa, Homo sapiens
GMTVAGVVL

SEQ ID NO: 116094 - protein, 9 aa, Homo sapiens
MTVAGVVLL

SEQ ID NO: 116095 - protein, 9 aa, Homo sapiens
TVAGVVLLG

SEQ ID NO: 116096 - protein, 9 aa, Homo sapiens
VAGVVLLGS

SEQ ID NO: 116097 - protein, 9 aa, Homo sapiens
AGVVLLGSL

SEQ ID NO: 116098 - protein, 9 aa, Homo sapiens
GVVLLGSLF

SEQ ID NO: 116099 - protein, 9 aa, Homo sapiens
VVLLGSLFS

SEQ ID NO: 116100 - protein, 9 aa, Homo sapiens
VLLGSLFSR

SEQ ID NO: 116101 - protein, 9 aa, Homo sapiens
LLGSLFSRK

SEQ ID NO: 116102 - protein, 8 aa, Homo sapiens
LGSLFSRK

SEQ ID NO: 116103 - protein, 7 aa, Homo sapiens
GSLFSRK

SEQ ID NO: 116104 - protein, 9 aa, Homo sapiens
MAHAGRTGY

SEQ ID NO: 116105 - protein, 9 aa, Homo sapiens
AHAGRTGYD

SEQ ID NO: 116106 - protein, 9 aa, Homo sapiens
HAGRTGYDN

SEQ ID NO: 116107 - protein, 9 aa, Homo sapiens
AGRTGYDNR

SEQ ID NO: 116108 - protein, 9 aa, Homo sapiens
GRTGYDNRE

SEQ ID NO: 116109 - protein, 9 aa, Homo sapiens
RTGYDNREI

SEQ ID NO: 116110 - protein, 9 aa, Homo sapiens
TGYDNREIV

SEQ ID NO: 116111 - protein, 9 aa, Homo sapiens
GYDNREIVM

SEQ ID NO: 116112 - protein, 9 aa, Homo sapiens
YDNREIVMK

SEQ ID NO: 116113 - protein, 9 aa, Homo sapiens
DNREIVMKY

SEQ ID NO: 116114 - protein, 9 aa, Homo sapiens
NREIVMKYI

SEQ ID NO: 116115 - protein, 9 aa, Homo sapiens
REIVMKYIH

SEQ ID NO: 116116 - protein, 9 aa, Homo sapiens
EIVMKYIHY

SEQ ID NO: 116117 - protein, 9 aa, Homo sapiens
IVMKYIHYK

SEQ ID NO: 116118 - protein, 9 aa, Homo sapiens
VMKYIHYKL

SEQ ID NO: 116119 - protein, 9 aa, Homo sapiens
MKYIHYKLS

SEQ ID NO: 116120 - protein, 9 aa, Homo sapiens
KYIHYKLSQ

SEQ ID NO: 116121 - protein, 9 aa, Homo sapiens
YIHYKLSQR

SEQ ID NO: 116122 - protein, 9 aa, Homo sapiens
IHYKLSQRG

SEQ ID NO: 116123 - protein, 9 aa, Homo sapiens
HYKLSQRGY

SEQ ID NO: 116124 - protein, 9 aa, Homo sapiens
YKLSQRGYE

SEQ ID NO: 116125 - protein, 9 aa, Homo sapiens
KLSQRGYEW

SEQ ID NO: 116126 - protein, 9 aa, Homo sapiens
LSQRGYEWD

SEQ ID NO: 116127 - protein, 9 aa, Homo sapiens
SQRGYEWDA

SEQ ID NO: 116128 - protein, 9 aa, Homo sapiens
QRGYEWDAG

SEQ ID NO: 116129 - protein, 9 aa, Homo sapiens
RGYEWDAGD

SEQ ID NO: 116130 - protein, 9 aa, Homo sapiens
GYEWDAGDV

SEQ ID NO: 116131 - protein, 9 aa, Homo sapiens
YEWDAGDVG

SEQ ID NO: 116132 - protein, 9 aa, Homo sapiens
EWDAGDVGA

SEQ ID NO: 116133 - protein, 9 aa, Homo sapiens
WDAGDVGAA

SEQ ID NO: 116134 - protein, 9 aa, Homo sapiens
DAGDVGAAP

SEQ ID NO: 116135 - protein, 9 aa, Homo sapiens
AGDVGAAPP

SEQ ID NO: 116136 - protein, 9 aa, Homo sapiens
GDVGAAPPG

SEQ ID NO: 116137 - protein, 9 aa, Homo sapiens
DVGAAPPGA

SEQ ID NO: 116138 - protein, 9 aa, Homo sapiens
VGAAPPGAA

SEQ ID NO: 116139 - protein, 9 aa, Homo sapiens
GAAPPGAAP

SEQ ID NO: 116140 - protein, 9 aa, Homo sapiens
AAPPGAAPA

SEQ ID NO: 116141 - protein, 9 aa, Homo sapiens
APPGAAPAP

SEQ ID NO: 116142 - protein, 9 aa, Homo sapiens
PPGAAPAPG

SEQ ID NO: 116143 - protein, 9 aa, Homo sapiens
PGAAPAPGI

SEQ ID NO: 116144 - protein, 9 aa, Homo sapiens
GAAPAPGIF

SEQ ID NO: 116145 - protein, 9 aa, Homo sapiens
AAPAPGIFS

SEQ ID NO: 116146 - protein, 9 aa, Homo sapiens
APAPGIFSS

SEQ ID NO: 116147 - protein, 9 aa, Homo sapiens
PAPGIFSSQ

SEQ ID NO: 116148 - protein, 9 aa, Homo sapiens
APGIFSSQP

SEQ ID NO: 116149 - protein, 9 aa, Homo sapiens
PGIFSSQPG

SEQ ID NO: 116150 - protein, 9 aa, Homo sapiens
GIFSSQPGH

SEQ ID NO: 116151 - protein, 9 aa, Homo sapiens
IFSSQPGHT

SEQ ID NO: 116152 - protein, 9 aa, Homo sapiens
FSSQPGHTP

SEQ ID NO: 116153 - protein, 9 aa, Homo sapiens
SSQPGHTPH

SEQ ID NO: 116154 - protein, 9 aa, Homo sapiens
SQPGHTPHP

SEQ ID NO: 116155 - protein, 9 aa, Homo sapiens
QPGHTPHPA

SEQ ID NO: 116156 - protein, 9 aa, Homo sapiens
PGHTPHPAA

SEQ ID NO: 116157 - protein, 9 aa, Homo sapiens
GHTPHPAAS

SEQ ID NO: 116158 - protein, 9 aa, Homo sapiens
HTPHPAASR

SEQ ID NO: 116159 - protein, 9 aa, Homo sapiens
TPHPAASRD

SEQ ID NO: 116160 - protein, 9 aa, Homo sapiens
PHPAASRDP

SEQ ID NO: 116161 - protein, 9 aa, Homo sapiens
HPAASRDPV

SEQ ID NO: 116162 - protein, 9 aa, Homo sapiens
PAASRDPVA

SEQ ID NO: 116163 - protein, 9 aa, Homo sapiens
AASRDPVAR

SEQ ID NO: 116164 - protein, 9 aa, Homo sapiens
ASRDPVART

SEQ ID NO: 116165 - protein, 9 aa, Homo sapiens
SRDPVARTS

SEQ ID NO: 116166 - protein, 9 aa, Homo sapiens
RDPVARTSP

SEQ ID NO: 116167 - protein, 9 aa, Homo sapiens
DPVARTSPL

SEQ ID NO: 116168 - protein, 9 aa, Homo sapiens
PVARTSPLQ

SEQ ID NO: 116169 - protein, 9 aa, Homo sapiens
VARTSPLQT

SEQ ID NO: 116170 - protein, 9 aa, Homo sapiens
ARTSPLQTP

SEQ ID NO: 116171 - protein, 9 aa, Homo sapiens
RTSPLQTPA

SEQ ID NO: 116172 - protein, 9 aa, Homo sapiens
TSPLQTPAA

SEQ ID NO: 116173 - protein, 9 aa, Homo sapiens
SPLQTPAAP

SEQ ID NO: 116174 - protein, 9 aa, Homo sapiens
PLQTPAAPG

SEQ ID NO: 116175 - protein, 9 aa, Homo sapiens
LQTPAAPGA

SEQ ID NO: 116176 - protein, 9 aa, Homo sapiens
QTPAAPGAA

SEQ ID NO: 116177 - protein, 9 aa, Homo sapiens
TPAAPGAAA

SEQ ID NO: 116178 - protein, 9 aa, Homo sapiens
PAAPGAAAG

SEQ ID NO: 116179 - protein, 9 aa, Homo sapiens
AAPGAAAGP

SEQ ID NO: 116180 - protein, 9 aa, Homo sapiens
APGAAAGPA

SEQ ID NO: 116181 - protein, 9 aa, Homo sapiens
PGAAAGPAL

SEQ ID NO: 116182 - protein, 9 aa, Homo sapiens
GAAAGPALS

SEQ ID NO: 116183 - protein, 9 aa, Homo sapiens
AAAGPALSP

SEQ ID NO: 116184 - protein, 9 aa, Homo sapiens
AAGPALSPV

SEQ ID NO: 116185 - protein, 9 aa, Homo sapiens
AGPALSPVP

SEQ ID NO: 116186 - protein, 9 aa, Homo sapiens
GPALSPVPP

SEQ ID NO: 116187 - protein, 9 aa, Homo sapiens
PALSPVPPV

SEQ ID NO: 116188 - protein, 9 aa, Homo sapiens
ALSPVPPVV

SEQ ID NO: 116189 - protein, 9 aa, Homo sapiens
LSPVPPVVH

SEQ ID NO: 116190 - protein, 9 aa, Homo sapiens
SPVPPVVHL

SEQ ID NO: 116191 - protein, 9 aa, Homo sapiens
PVPPVVHLT

SEQ ID NO: 116192 - protein, 9 aa, Homo sapiens
VPPVVHLTL

SEQ ID NO: 116193 - protein, 9 aa, Homo sapiens
PPVVHLTLR

SEQ ID NO: 116194 - protein, 9 aa, Homo sapiens
PVVHLTLRQ

SEQ ID NO: 116195 - protein, 9 aa, Homo sapiens
VVHLTLRQA

SEQ ID NO: 116196 - protein, 9 aa, Homo sapiens
VHLTLRQAG

SEQ ID NO: 116197 - protein, 9 aa, Homo sapiens
HLTLRQAGD

SEQ ID NO: 116198 - protein, 9 aa, Homo sapiens
LTLRQAGDD

SEQ ID NO: 116199 - protein, 9 aa, Homo sapiens
TLRQAGDDF

SEQ ID NO: 116200 - protein, 9 aa, Homo sapiens
LRQAGDDFS

SEQ ID NO: 116201 - protein, 9 aa, Homo sapiens
RQAGDDFSR

SEQ ID NO: 116202 - protein, 9 aa, Homo sapiens
QAGDDFSRR

SEQ ID NO: 116203 - protein, 9 aa, Homo sapiens
AGDDFSRRY

SEQ ID NO: 116204 - protein, 9 aa, Homo sapiens
GDDFSRRYR

SEQ ID NO: 116205 - protein, 9 aa, Homo sapiens
DDFSRRYRR

SEQ ID NO: 116206 - protein, 9 aa, Homo sapiens
DFSRRYRRD

SEQ ID NO: 116207 - protein, 9 aa, Homo sapiens
FSRRYRRDF

SEQ ID NO: 116208 - protein, 9 aa, Homo sapiens
SRRYRRDFA

SEQ ID NO: 116209 - protein, 9 aa, Homo sapiens
RRYRRDFAE

SEQ ID NO: 116210 - protein, 9 aa, Homo sapiens
RYRRDFAEM

SEQ ID NO: 116211 - protein, 9 aa, Homo sapiens
YRRDFAEMS

SEQ ID NO: 116212 - protein, 9 aa, Homo sapiens
RRDFAEMSS

SEQ ID NO: 116213 - protein, 9 aa, Homo sapiens
RDFAEMSSQ

SEQ ID NO: 116214 - protein, 9 aa, Homo sapiens
DFAEMSSQL

SEQ ID NO: 116215 - protein, 9 aa, Homo sapiens
FAEMSSQLH

SEQ ID NO: 116216 - protein, 9 aa, Homo sapiens
AEMSSQLHL

SEQ ID NO: 116217 - protein, 9 aa, Homo sapiens
EMSSQLHLT

SEQ ID NO: 116218 - protein, 9 aa, Homo sapiens
MSSQLHLTP

SEQ ID NO: 116219 - protein, 9 aa, Homo sapiens
SSQLHLTPF

SEQ ID NO: 116220 - protein, 9 aa, Homo sapiens
SQLHLTPFT

SEQ ID NO: 116221 - protein, 9 aa, Homo sapiens
QLHLTPFTA

SEQ ID NO: 116222 - protein, 9 aa, Homo sapiens
LHLTPFTAR

SEQ ID NO: 116223 - protein, 9 aa, Homo sapiens
HLTPFTARG

SEQ ID NO: 116224 - protein, 9 aa, Homo sapiens
LTPFTARGR

SEQ ID NO: 116225 - protein, 9 aa, Homo sapiens
TPFTARGRF

SEQ ID NO: 116226 - protein, 9 aa, Homo sapiens
PFTARGRFA

SEQ ID NO: 116227 - protein, 9 aa, Homo sapiens
FTARGRFAT

SEQ ID NO: 116228 - protein, 9 aa, Homo sapiens
TARGRFATV

SEQ ID NO: 116229 - protein, 9 aa, Homo sapiens
ARGRFATVV

SEQ ID NO: 116230 - protein, 9 aa, Homo sapiens
RGRFATVVE

SEQ ID NO: 116231 - protein, 9 aa, Homo sapiens
GRFATVVEE

SEQ ID NO: 116232 - protein, 9 aa, Homo sapiens
RFATVVEEL

SEQ ID NO: 116233 - protein, 9 aa, Homo sapiens
FATVVEELF

SEQ ID NO: 116234 - protein, 9 aa, Homo sapiens
ATVVEELFR

SEQ ID NO: 116235 - protein, 9 aa, Homo sapiens
TVVEELFRD

SEQ ID NO: 116236 - protein, 9 aa, Homo sapiens
VVEELFRDG

SEQ ID NO: 116237 - protein, 9 aa, Homo sapiens
VEELFRDGV

SEQ ID NO: 116238 - protein, 9 aa, Homo sapiens
EELFRDGVN

SEQ ID NO: 116239 - protein, 9 aa, Homo sapiens
ELFRDGVNW

SEQ ID NO: 116240 - protein, 9 aa, Homo sapiens
LFRDGVNWG

SEQ ID NO: 116241 - protein, 9 aa, Homo sapiens
FRDGVNWGR

SEQ ID NO: 116242 - protein, 9 aa, Homo sapiens
RDGVNWGRI

SEQ ID NO: 116243 - protein, 9 aa, Homo sapiens
DGVNWGRIV

SEQ ID NO: 116244 - protein, 9 aa, Homo sapiens
GVNWGRIVA

SEQ ID NO: 116245 - protein, 9 aa, Homo sapiens
VNWGRIVAF

SEQ ID NO: 116246 - protein, 9 aa, Homo sapiens
NWGRIVAFF

SEQ ID NO: 116247 - protein, 9 aa, Homo sapiens
WGRIVAFFE

SEQ ID NO: 116248 - protein, 9 aa, Homo sapiens
GRIVAFFEF

SEQ ID NO: 116249 - protein, 9 aa, Homo sapiens
RIVAFFEFG

SEQ ID NO: 116250 - protein, 9 aa, Homo sapiens
IVAFFEFGG

SEQ ID NO: 116251 - protein, 9 aa, Homo sapiens
VAFFEFGGV

SEQ ID NO: 116252 - protein, 9 aa, Homo sapiens
AFFEFGGVM

SEQ ID NO: 116253 - protein, 9 aa, Homo sapiens
FFEFGGVMC

SEQ ID NO: 116254 - protein, 9 aa, Homo sapiens
FEFGGVMCV

SEQ ID NO: 116255 - protein, 9 aa, Homo sapiens
EFGGVMCVE

SEQ ID NO: 116256 - protein, 9 aa, Homo sapiens
FGGVMCVES

SEQ ID NO: 116257 - protein, 9 aa, Homo sapiens
GGVMCVESV

SEQ ID NO: 116258 - protein, 9 aa, Homo sapiens
GVMCVESVN

SEQ ID NO: 116259 - protein, 9 aa, Homo sapiens
VMCVESVNR

SEQ ID NO: 116260 - protein, 9 aa, Homo sapiens
MCVESVNRE

SEQ ID NO: 116261 - protein, 9 aa, Homo sapiens
CVESVNREM

SEQ ID NO: 116262 - protein, 9 aa, Homo sapiens
VESVNREMS

SEQ ID NO: 116263 - protein, 9 aa, Homo sapiens
ESVNREMSP

SEQ ID NO: 116264 - protein, 9 aa, Homo sapiens
SVNREMSPL

SEQ ID NO: 116265 - protein, 9 aa, Homo sapiens
VNREMSPLV

SEQ ID NO: 116266 - protein, 9 aa, Homo sapiens
NREMSPLVD

SEQ ID NO: 116267 - protein, 9 aa, Homo sapiens
REMSPLVDN

SEQ ID NO: 116268 - protein, 9 aa, Homo sapiens
EMSPLVDNI

SEQ ID NO: 116269 - protein, 9 aa, Homo sapiens
MSPLVDNIA

SEQ ID NO: 116270 - protein, 9 aa, Homo sapiens
SPLVDNIAL

SEQ ID NO: 116271 - protein, 9 aa, Homo sapiens
PLVDNIALW

SEQ ID NO: 116272 - protein, 9 aa, Homo sapiens
LVDNIALWM

SEQ ID NO: 116273 - protein, 9 aa, Homo sapiens
VDNIALWMT

SEQ ID NO: 116274 - protein, 9 aa, Homo sapiens
DNIALWMTE

SEQ ID NO: 116275 - protein, 9 aa, Homo sapiens
NIALWMTEY

SEQ ID NO: 116276 - protein, 9 aa, Homo sapiens
IALWMTEYL

SEQ ID NO: 116277 - protein, 9 aa, Homo sapiens
ALWMTEYLN

SEQ ID NO: 116278 - protein, 9 aa, Homo sapiens
LWMTEYLNR

SEQ ID NO: 116279 - protein, 9 aa, Homo sapiens
WMTEYLNRH

SEQ ID NO: 116280 - protein, 9 aa, Homo sapiens
MTEYLNRHL

SEQ ID NO: 116281 - protein, 9 aa, Homo sapiens
TEYLNRHLH

SEQ ID NO: 116282 - protein, 9 aa, Homo sapiens
EYLNRHLHT

SEQ ID NO: 116283 - protein, 9 aa, Homo sapiens
YLNRHLHTW

SEQ ID NO: 116284 - protein, 9 aa, Homo sapiens
LNRHLHTWI

SEQ ID NO: 116285 - protein, 9 aa, Homo sapiens
NRHLHTWIQ

SEQ ID NO: 116286 - protein, 9 aa, Homo sapiens
RHLHTWIQD

SEQ ID NO: 116287 - protein, 9 aa, Homo sapiens
HLHTWIQDN

SEQ ID NO: 116288 - protein, 9 aa, Homo sapiens
LHTWIQDNG

SEQ ID NO: 116289 - protein, 9 aa, Homo sapiens
HTWIQDNGG

SEQ ID NO: 116290 - protein, 9 aa, Homo sapiens
TWIQDNGGW

SEQ ID NO: 116291 - protein, 9 aa, Homo sapiens
WIQDNGGWD

SEQ ID NO: 116292 - protein, 9 aa, Homo sapiens
IQDNGGWDA

SEQ ID NO: 116293 - protein, 9 aa, Homo sapiens
QDNGGWDAF

SEQ ID NO: 116294 - protein, 9 aa, Homo sapiens
DNGGWDAFV

SEQ ID NO: 116295 - protein, 9 aa, Homo sapiens
NGGWDAFVE

SEQ ID NO: 116296 - protein, 9 aa, Homo sapiens
GGWDAFVEL

SEQ ID NO: 116297 - protein, 9 aa, Homo sapiens
GWDAFVELY

SEQ ID NO: 116298 - protein, 9 aa, Homo sapiens
WDAFVELYG

SEQ ID NO: 116299 - protein, 9 aa, Homo sapiens
DAFVELYGP

SEQ ID NO: 116300 - protein, 9 aa, Homo sapiens
AFVELYGPS

SEQ ID NO: 116301 - protein, 9 aa, Homo sapiens
FVELYGPSM

SEQ ID NO: 116302 - protein, 9 aa, Homo sapiens
VELYGPSMR

SEQ ID NO: 116303 - protein, 9 aa, Homo sapiens
ELYGPSMRP

SEQ ID NO: 116304 - protein, 9 aa, Homo sapiens
LYGPSMRPL

SEQ ID NO: 116305 - protein, 9 aa, Homo sapiens
YGPSMRPLF

SEQ ID NO: 116306 - protein, 9 aa, Homo sapiens
GPSMRPLFD

SEQ ID NO: 116307 - protein, 9 aa, Homo sapiens
PSMRPLFDF

SEQ ID NO: 116308 - protein, 9 aa, Homo sapiens
SMRPLFDFS

SEQ ID NO: 116309 - protein, 9 aa, Homo sapiens
MRPLFDFSW

SEQ ID NO: 116310 - protein, 9 aa, Homo sapiens
RPLFDFSWL

SEQ ID NO: 116311 - protein, 9 aa, Homo sapiens
PLFDFSWLS

SEQ ID NO: 116312 - protein, 9 aa, Homo sapiens
LFDFSWLSL

SEQ ID NO: 116313 - protein, 9 aa, Homo sapiens
FDFSWLSLK

SEQ ID NO: 116314 - protein, 9 aa, Homo sapiens
DFSWLSLKT

SEQ ID NO: 116315 - protein, 9 aa, Homo sapiens
FSWLSLKTL

SEQ ID NO: 116316 - protein, 9 aa, Homo sapiens
SWLSLKTLL

SEQ ID NO: 116317 - protein, 9 aa, Homo sapiens
WLSLKTLLS

SEQ ID NO: 116318 - protein, 9 aa, Homo sapiens
LSLKTLLSL

SEQ ID NO: 116319 - protein, 9 aa, Homo sapiens
SLKTLLSLA

SEQ ID NO: 116320 - protein, 9 aa, Homo sapiens
LKTLLSLAL

SEQ ID NO: 116321 - protein, 9 aa, Homo sapiens
KTLLSLALV

SEQ ID NO: 116322 - protein, 9 aa, Homo sapiens
TLLSLALVG

SEQ ID NO: 116323 - protein, 9 aa, Homo sapiens
LLSLALVGA

SEQ ID NO: 116324 - protein, 9 aa, Homo sapiens
LSLALVGAC

SEQ ID NO: 116325 - protein, 9 aa, Homo sapiens
SLALVGACI

SEQ ID NO: 116326 - protein, 9 aa, Homo sapiens
LALVGACIT

SEQ ID NO: 116327 - protein, 9 aa, Homo sapiens
ALVGACITL

SEQ ID NO: 116328 - protein, 9 aa, Homo sapiens
LVGACITLG

SEQ ID NO: 116329 - protein, 9 aa, Homo sapiens
VGACITLGA

SEQ ID NO: 116330 - protein, 9 aa, Homo sapiens
GACITLGAY

SEQ ID NO: 116331 - protein, 9 aa, Homo sapiens
ACITLGAYL

SEQ ID NO: 116332 - protein, 9 aa, Homo sapiens
CITLGAYLG

SEQ ID NO: 116333 - protein, 9 aa, Homo sapiens
ITLGAYLGH

SEQ ID NO: 116334 - protein, 9 aa, Homo sapiens
TLGAYLGHK

SEQ ID NO: 116335 - protein, 8 aa, Homo sapiens
LGAYLGHK

SEQ ID NO: 116336 - protein, 7 aa, Homo sapiens
GAYLGHK

SEQ ID NO: 116337 - protein, 9 aa, Homo sapiens
MGPKDSAKC

SEQ ID NO: 116338 - protein, 9 aa, Homo sapiens
GPKDSAKCL

SEQ ID NO: 116339 - protein, 9 aa, Homo sapiens
PKDSAKCLH

SEQ ID NO: 116340 - protein, 9 aa, Homo sapiens
KDSAKCLHR

SEQ ID NO: 116341 - protein, 9 aa, Homo sapiens
DSAKCLHRG

SEQ ID NO: 116342 - protein, 9 aa, Homo sapiens
SAKCLHRGP

SEQ ID NO: 116343 - protein, 9 aa, Homo sapiens
AKCLHRGPQ

SEQ ID NO: 116344 - protein, 9 aa, Homo sapiens
KCLHRGPQP

SEQ ID NO: 116345 - protein, 9 aa, Homo sapiens
CLHRGPQPS

SEQ ID NO: 116346 - protein, 9 aa, Homo sapiens
LHRGPQPSH

SEQ ID NO: 116347 - protein, 9 aa, Homo sapiens
HRGPQPSHW

SEQ ID NO: 116348 - protein, 9 aa, Homo sapiens
RGPQPSHWA

SEQ ID NO: 116349 - protein, 9 aa, Homo sapiens
GPQPSHWAA

SEQ ID NO: 116350 - protein, 9 aa, Homo sapiens
PQPSHWAAG

SEQ ID NO: 116351 - protein, 9 aa, Homo sapiens
QPSHWAAGD

SEQ ID NO: 116352 - protein, 9 aa, Homo sapiens
PSHWAAGDG

SEQ ID NO: 116353 - protein, 9 aa, Homo sapiens
SHWAAGDGP

SEQ ID NO: 116354 - protein, 9 aa, Homo sapiens
HWAAGDGPT

SEQ ID NO: 116355 - protein, 9 aa, Homo sapiens
WAAGDGPTQ

SEQ ID NO: 116356 - protein, 9 aa, Homo sapiens
AAGDGPTQE

SEQ ID NO: 116357 - protein, 9 aa, Homo sapiens
AGDGPTQER

SEQ ID NO: 116358 - protein, 9 aa, Homo sapiens
GDGPTQERC

SEQ ID NO: 116359 - protein, 9 aa, Homo sapiens
DGPTQERCG

SEQ ID NO: 116360 - protein, 9 aa, Homo sapiens
GPTQERCGP

SEQ ID NO: 116361 - protein, 9 aa, Homo sapiens
PTQERCGPR

SEQ ID NO: 116362 - protein, 9 aa, Homo sapiens
TQERCGPRS

SEQ ID NO: 116363 - protein, 9 aa, Homo sapiens
QERCGPRSL

SEQ ID NO: 116364 - protein, 9 aa, Homo sapiens
ERCGPRSLG

SEQ ID NO: 116365 - protein, 9 aa, Homo sapiens
RCGPRSLGS

SEQ ID NO: 116366 - protein, 9 aa, Homo sapiens
CGPRSLGSP

SEQ ID NO: 116367 - protein, 9 aa, Homo sapiens
GPRSLGSPV

SEQ ID NO: 116368 - protein, 9 aa, Homo sapiens
PRSLGSPVL

SEQ ID NO: 116369 - protein, 9 aa, Homo sapiens
RSLGSPVLG

SEQ ID NO: 116370 - protein, 9 aa, Homo sapiens
SLGSPVLGL

SEQ ID NO: 116371 - protein, 9 aa, Homo sapiens
LGSPVLGLD

SEQ ID NO: 116372 - protein, 9 aa, Homo sapiens
GSPVLGLDT

SEQ ID NO: 116373 - protein, 9 aa, Homo sapiens
SPVLGLDTC

SEQ ID NO: 116374 - protein, 9 aa, Homo sapiens
PVLGLDTCR

SEQ ID NO: 116375 - protein, 9 aa, Homo sapiens
VLGLDTCRA

SEQ ID NO: 116376 - protein, 9 aa, Homo sapiens
LGLDTCRAW

SEQ ID NO: 116377 - protein, 9 aa, Homo sapiens
GLDTCRAWD

SEQ ID NO: 116378 - protein, 9 aa, Homo sapiens
LDTCRAWDH

SEQ ID NO: 116379 - protein, 9 aa, Homo sapiens
DTCRAWDHV

SEQ ID NO: 116380 - protein, 9 aa, Homo sapiens
TCRAWDHVD

SEQ ID NO: 116381 - protein, 9 aa, Homo sapiens
CRAWDHVDG

SEQ ID NO: 116382 - protein, 9 aa, Homo sapiens
RAWDHVDGQ

SEQ ID NO: 116383 - protein, 9 aa, Homo sapiens
AWDHVDGQI

SEQ ID NO: 116384 - protein, 9 aa, Homo sapiens
WDHVDGQIL

SEQ ID NO: 116385 - protein, 9 aa, Homo sapiens
DHVDGQILG

SEQ ID NO: 116386 - protein, 9 aa, Homo sapiens
HVDGQILGQ

SEQ ID NO: 116387 - protein, 9 aa, Homo sapiens
VDGQILGQL

SEQ ID NO: 116388 - protein, 9 aa, Homo sapiens
DGQILGQLR

SEQ ID NO: 116389 - protein, 9 aa, Homo sapiens
GQILGQLRP

SEQ ID NO: 116390 - protein, 9 aa, Homo sapiens
QILGQLRPL

SEQ ID NO: 116391 - protein, 9 aa, Homo sapiens
ILGQLRPLT

SEQ ID NO: 116392 - protein, 9 aa, Homo sapiens
LGQLRPLTE

SEQ ID NO: 116393 - protein, 9 aa, Homo sapiens
GQLRPLTEE

SEQ ID NO: 116394 - protein, 9 aa, Homo sapiens
QLRPLTEEE

SEQ ID NO: 116395 - protein, 9 aa, Homo sapiens
LRPLTEEEE

SEQ ID NO: 116396 - protein, 9 aa, Homo sapiens
RPLTEEEEE

SEQ ID NO: 116397 - protein, 9 aa, Homo sapiens
PLTEEEEEE

SEQ ID NO: 116398 - protein, 9 aa, Homo sapiens
LTEEEEEEG

SEQ ID NO: 116399 - protein, 9 aa, Homo sapiens
TEEEEEEGA

SEQ ID NO: 116400 - protein, 9 aa, Homo sapiens
EEEEEEGAG

SEQ ID NO: 116401 - protein, 9 aa, Homo sapiens
EEEEEGAGA

SEQ ID NO: 116402 - protein, 9 aa, Homo sapiens
EEEEGAGAT

SEQ ID NO: 116403 - protein, 9 aa, Homo sapiens
EEEGAGATL

SEQ ID NO: 116404 - protein, 9 aa, Homo sapiens
EEGAGATLS

SEQ ID NO: 116405 - protein, 9 aa, Homo sapiens
EGAGATLSR

SEQ ID NO: 116406 - protein, 9 aa, Homo sapiens
GAGATLSRG

SEQ ID NO: 116407 - protein, 9 aa, Homo sapiens
AGATLSRGP

SEQ ID NO: 116408 - protein, 9 aa, Homo sapiens
GATLSRGPA

SEQ ID NO: 116409 - protein, 9 aa, Homo sapiens
ATLSRGPAF

SEQ ID NO: 116410 - protein, 9 aa, Homo sapiens
TLSRGPAFP

SEQ ID NO: 116411 - protein, 9 aa, Homo sapiens
LSRGPAFPG

SEQ ID NO: 116412 - protein, 9 aa, Homo sapiens
SRGPAFPGM

SEQ ID NO: 116413 - protein, 9 aa, Homo sapiens
RGPAFPGMG

SEQ ID NO: 116414 - protein, 9 aa, Homo sapiens
GPAFPGMGS

SEQ ID NO: 116415 - protein, 9 aa, Homo sapiens
PAFPGMGSE

SEQ ID NO: 116416 - protein, 9 aa, Homo sapiens
AFPGMGSEE

SEQ ID NO: 116417 - protein, 9 aa, Homo sapiens
FPGMGSEEL

SEQ ID NO: 116418 - protein, 9 aa, Homo sapiens
PGMGSEELR

SEQ ID NO: 116419 - protein, 9 aa, Homo sapiens
GMGSEELRL

SEQ ID NO: 116420 - protein, 9 aa, Homo sapiens
MGSEELRLA

SEQ ID NO: 116421 - protein, 9 aa, Homo sapiens
GSEELRLAS

SEQ ID NO: 116422 - protein, 9 aa, Homo sapiens
SEELRLASF

SEQ ID NO: 116423 - protein, 9 aa, Homo sapiens
EELRLASFY

SEQ ID NO: 116424 - protein, 9 aa, Homo sapiens
ELRLASFYD

SEQ ID NO: 116425 - protein, 9 aa, Homo sapiens
LRLASFYDW

SEQ ID NO: 116426 - protein, 9 aa, Homo sapiens
RLASFYDWP

SEQ ID NO: 116427 - protein, 9 aa, Homo sapiens
LASFYDWPL

SEQ ID NO: 116428 - protein, 9 aa, Homo sapiens
ASFYDWPLT

SEQ ID NO: 116429 - protein, 9 aa, Homo sapiens
SFYDWPLTA

SEQ ID NO: 116430 - protein, 9 aa, Homo sapiens
FYDWPLTAE

SEQ ID NO: 116431 - protein, 9 aa, Homo sapiens
YDWPLTAEV

SEQ ID NO: 116432 - protein, 9 aa, Homo sapiens
DWPLTAEVP

SEQ ID NO: 116433 - protein, 9 aa, Homo sapiens
WPLTAEVPP

SEQ ID NO: 116434 - protein, 9 aa, Homo sapiens
PLTAEVPPE

SEQ ID NO: 116435 - protein, 9 aa, Homo sapiens
LTAEVPPEL

SEQ ID NO: 116436 - protein, 9 aa, Homo sapiens
TAEVPPELL

SEQ ID NO: 116437 - protein, 9 aa, Homo sapiens
AEVPPELLA

SEQ ID NO: 116438 - protein, 9 aa, Homo sapiens
EVPPELLAA

SEQ ID NO: 116439 - protein, 9 aa, Homo sapiens
VPPELLAAA

SEQ ID NO: 116440 - protein, 9 aa, Homo sapiens
PPELLAAAG

SEQ ID NO: 116441 - protein, 9 aa, Homo sapiens
PELLAAAGF

SEQ ID NO: 116442 - protein, 9 aa, Homo sapiens
ELLAAAGFF

SEQ ID NO: 116443 - protein, 9 aa, Homo sapiens
LLAAAGFFH

SEQ ID NO: 116444 - protein, 9 aa, Homo sapiens
LAAAGFFHT

SEQ ID NO: 116445 - protein, 9 aa, Homo sapiens
AAAGFFHTG

SEQ ID NO: 116446 - protein, 9 aa, Homo sapiens
AAGFFHTGH

SEQ ID NO: 116447 - protein, 9 aa, Homo sapiens
AGFFHTGHQ

SEQ ID NO: 116448 - protein, 9 aa, Homo sapiens
GFFHTGHQD

SEQ ID NO: 116449 - protein, 9 aa, Homo sapiens
FFHTGHQDK

SEQ ID NO: 116450 - protein, 9 aa, Homo sapiens
FHTGHQDKV

SEQ ID NO: 116451 - protein, 9 aa, Homo sapiens
HTGHQDKVR

SEQ ID NO: 116452 - protein, 9 aa, Homo sapiens
TGHQDKVRC

SEQ ID NO: 116453 - protein, 9 aa, Homo sapiens
GHQDKVRCF

SEQ ID NO: 116454 - protein, 9 aa, Homo sapiens
HQDKVRCFF

SEQ ID NO: 116455 - protein, 9 aa, Homo sapiens
QDKVRCFFC

SEQ ID NO: 116456 - protein, 9 aa, Homo sapiens
DKVRCFFCY

SEQ ID NO: 116457 - protein, 9 aa, Homo sapiens
KVRCFFCYG

SEQ ID NO: 116458 - protein, 9 aa, Homo sapiens
VRCFFCYGG

SEQ ID NO: 116459 - protein, 9 aa, Homo sapiens
RCFFCYGGL

SEQ ID NO: 116460 - protein, 9 aa, Homo sapiens
CFFCYGGLQ

SEQ ID NO: 116461 - protein, 9 aa, Homo sapiens
FFCYGGLQS

SEQ ID NO: 116462 - protein, 9 aa, Homo sapiens
FCYGGLQSW

SEQ ID NO: 116463 - protein, 9 aa, Homo sapiens
CYGGLQSWK

SEQ ID NO: 116464 - protein, 9 aa, Homo sapiens
YGGLQSWKR

SEQ ID NO: 116465 - protein, 9 aa, Homo sapiens
GGLQSWKRG

SEQ ID NO: 116466 - protein, 9 aa, Homo sapiens
GLQSWKRGD

SEQ ID NO: 116467 - protein, 9 aa, Homo sapiens
LQSWKRGDD

SEQ ID NO: 116468 - protein, 9 aa, Homo sapiens
QSWKRGDDP

SEQ ID NO: 116469 - protein, 9 aa, Homo sapiens
SWKRGDDPW

SEQ ID NO: 116470 - protein, 9 aa, Homo sapiens
WKRGDDPWT

SEQ ID NO: 116471 - protein, 9 aa, Homo sapiens
KRGDDPWTE

SEQ ID NO: 116472 - protein, 9 aa, Homo sapiens
RGDDPWTEH

SEQ ID NO: 116473 - protein, 9 aa, Homo sapiens
GDDPWTEHA

SEQ ID NO: 116474 - protein, 9 aa, Homo sapiens
DDPWTEHAK

SEQ ID NO: 116475 - protein, 9 aa, Homo sapiens
DPWTEHAKW

SEQ ID NO: 116476 - protein, 9 aa, Homo sapiens
PWTEHAKWF

SEQ ID NO: 116477 - protein, 9 aa, Homo sapiens
WTEHAKWFP

SEQ ID NO: 116478 - protein, 9 aa, Homo sapiens
TEHAKWFPS

SEQ ID NO: 116479 - protein, 9 aa, Homo sapiens
EHAKWFPSC

SEQ ID NO: 116480 - protein, 9 aa, Homo sapiens
HAKWFPSCQ

SEQ ID NO: 116481 - protein, 9 aa, Homo sapiens
AKWFPSCQF

SEQ ID NO: 116482 - protein, 9 aa, Homo sapiens
KWFPSCQFL

SEQ ID NO: 116483 - protein, 9 aa, Homo sapiens
WFPSCQFLL

SEQ ID NO: 116484 - protein, 9 aa, Homo sapiens
FPSCQFLLR

SEQ ID NO: 116485 - protein, 9 aa, Homo sapiens
PSCQFLLRS

SEQ ID NO: 116486 - protein, 9 aa, Homo sapiens
SCQFLLRSK

SEQ ID NO: 116487 - protein, 9 aa, Homo sapiens
CQFLLRSKG

SEQ ID NO: 116488 - protein, 9 aa, Homo sapiens
QFLLRSKGR

SEQ ID NO: 116489 - protein, 9 aa, Homo sapiens
FLLRSKGRD

SEQ ID NO: 116490 - protein, 9 aa, Homo sapiens
LLRSKGRDF

SEQ ID NO: 116491 - protein, 9 aa, Homo sapiens
LRSKGRDFV

SEQ ID NO: 116492 - protein, 9 aa, Homo sapiens
RSKGRDFVH

SEQ ID NO: 116493 - protein, 9 aa, Homo sapiens
SKGRDFVHS

SEQ ID NO: 116494 - protein, 9 aa, Homo sapiens
KGRDFVHSV

SEQ ID NO: 116495 - protein, 9 aa, Homo sapiens
GRDFVHSVQ

SEQ ID NO: 116496 - protein, 9 aa, Homo sapiens
RDFVHSVQE

SEQ ID NO: 116497 - protein, 9 aa, Homo sapiens
DFVHSVQET

SEQ ID NO: 116498 - protein, 9 aa, Homo sapiens
FVHSVQETH

SEQ ID NO: 116499 - protein, 9 aa, Homo sapiens
VHSVQETHS

SEQ ID NO: 116500 - protein, 9 aa, Homo sapiens
HSVQETHSQ

SEQ ID NO: 116501 - protein, 9 aa, Homo sapiens
SVQETHSQL

SEQ ID NO: 116502 - protein, 9 aa, Homo sapiens
VQETHSQLL

SEQ ID NO: 116503 - protein, 9 aa, Homo sapiens
QETHSQLLG

SEQ ID NO: 116504 - protein, 9 aa, Homo sapiens
ETHSQLLGS

SEQ ID NO: 116505 - protein, 9 aa, Homo sapiens
THSQLLGSW

SEQ ID NO: 116506 - protein, 9 aa, Homo sapiens
HSQLLGSWD

SEQ ID NO: 116507 - protein, 9 aa, Homo sapiens
SQLLGSWDP

SEQ ID NO: 116508 - protein, 9 aa, Homo sapiens
QLLGSWDPW

SEQ ID NO: 116509 - protein, 9 aa, Homo sapiens
LLGSWDPWE

SEQ ID NO: 116510 - protein, 9 aa, Homo sapiens
LGSWDPWEE

SEQ ID NO: 116511 - protein, 9 aa, Homo sapiens
GSWDPWEEP

SEQ ID NO: 116512 - protein, 9 aa, Homo sapiens
SWDPWEEPE

SEQ ID NO: 116513 - protein, 9 aa, Homo sapiens
WDPWEEPED

SEQ ID NO: 116514 - protein, 9 aa, Homo sapiens
DPWEEPEDA

SEQ ID NO: 116515 - protein, 9 aa, Homo sapiens
PWEEPEDAA

SEQ ID NO: 116516 - protein, 9 aa, Homo sapiens
WEEPEDAAP

SEQ ID NO: 116517 - protein, 9 aa, Homo sapiens
EEPEDAAPV

SEQ ID NO: 116518 - protein, 9 aa, Homo sapiens
EPEDAAPVA

SEQ ID NO: 116519 - protein, 9 aa, Homo sapiens
PEDAAPVAP

SEQ ID NO: 116520 - protein, 9 aa, Homo sapiens
EDAAPVAPS

SEQ ID NO: 116521 - protein, 9 aa, Homo sapiens
DAAPVAPSV

SEQ ID NO: 116522 - protein, 9 aa, Homo sapiens
AAPVAPSVP

SEQ ID NO: 116523 - protein, 9 aa, Homo sapiens
APVAPSVPA

SEQ ID NO: 116524 - protein, 9 aa, Homo sapiens
PVAPSVPAS

SEQ ID NO: 116525 - protein, 9 aa, Homo sapiens
VAPSVPASG

SEQ ID NO: 116526 - protein, 9 aa, Homo sapiens
APSVPASGY

SEQ ID NO: 116527 - protein, 9 aa, Homo sapiens
PSVPASGYP

SEQ ID NO: 116528 - protein, 9 aa, Homo sapiens
SVPASGYPE

SEQ ID NO: 116529 - protein, 9 aa, Homo sapiens
VPASGYPEL

SEQ ID NO: 116530 - protein, 9 aa, Homo sapiens
PASGYPELP

SEQ ID NO: 116531 - protein, 9 aa, Homo sapiens
ASGYPELPT

SEQ ID NO: 116532 - protein, 9 aa, Homo sapiens
SGYPELPTP

SEQ ID NO: 116533 - protein, 9 aa, Homo sapiens
GYPELPTPR

SEQ ID NO: 116534 - protein, 9 aa, Homo sapiens
YPELPTPRR

SEQ ID NO: 116535 - protein, 9 aa, Homo sapiens
PELPTPRRE

SEQ ID NO: 116536 - protein, 9 aa, Homo sapiens
ELPTPRREV

SEQ ID NO: 116537 - protein, 9 aa, Homo sapiens
LPTPRREVQ

SEQ ID NO: 116538 - protein, 9 aa, Homo sapiens
PTPRREVQS

SEQ ID NO: 116539 - protein, 9 aa, Homo sapiens
TPRREVQSE

SEQ ID NO: 116540 - protein, 9 aa, Homo sapiens
PRREVQSES

SEQ ID NO: 116541 - protein, 9 aa, Homo sapiens
RREVQSESA

SEQ ID NO: 116542 - protein, 9 aa, Homo sapiens
REVQSESAQ

SEQ ID NO: 116543 - protein, 9 aa, Homo sapiens
EVQSESAQE

SEQ ID NO: 116544 - protein, 9 aa, Homo sapiens
VQSESAQEP

SEQ ID NO: 116545 - protein, 9 aa, Homo sapiens
QSESAQEPG

SEQ ID NO: 116546 - protein, 9 aa, Homo sapiens
SESAQEPGG

SEQ ID NO: 116547 - protein, 9 aa, Homo sapiens
ESAQEPGGV

SEQ ID NO: 116548 - protein, 9 aa, Homo sapiens
SAQEPGGVS

SEQ ID NO: 116549 - protein, 9 aa, Homo sapiens
AQEPGGVSP

SEQ ID NO: 116550 - protein, 9 aa, Homo sapiens
QEPGGVSPA

SEQ ID NO: 116551 - protein, 9 aa, Homo sapiens
EPGGVSPAE

SEQ ID NO: 116552 - protein, 9 aa, Homo sapiens
PGGVSPAEA

SEQ ID NO: 116553 - protein, 9 aa, Homo sapiens
GGVSPAEAQ

SEQ ID NO: 116554 - protein, 9 aa, Homo sapiens
GVSPAEAQR

SEQ ID NO: 116555 - protein, 9 aa, Homo sapiens
VSPAEAQRA

SEQ ID NO: 116556 - protein, 9 aa, Homo sapiens
SPAEAQRAW

SEQ ID NO: 116557 - protein, 9 aa, Homo sapiens
PAEAQRAWW

SEQ ID NO: 116558 - protein, 9 aa, Homo sapiens
AEAQRAWWV

SEQ ID NO: 116559 - protein, 9 aa, Homo sapiens
EAQRAWWVL

SEQ ID NO: 116560 - protein, 9 aa, Homo sapiens
AQRAWWVLE

SEQ ID NO: 116561 - protein, 9 aa, Homo sapiens
QRAWWVLEP

SEQ ID NO: 116562 - protein, 9 aa, Homo sapiens
RAWWVLEPP

SEQ ID NO: 116563 - protein, 9 aa, Homo sapiens
AWWVLEPPG

SEQ ID NO: 116564 - protein, 9 aa, Homo sapiens
WWVLEPPGA

SEQ ID NO: 116565 - protein, 9 aa, Homo sapiens
WVLEPPGAR

SEQ ID NO: 116566 - protein, 9 aa, Homo sapiens
VLEPPGARD

SEQ ID NO: 116567 - protein, 9 aa, Homo sapiens
LEPPGARDV

SEQ ID NO: 116568 - protein, 9 aa, Homo sapiens
EPPGARDVE

SEQ ID NO: 116569 - protein, 9 aa, Homo sapiens
PPGARDVEA

SEQ ID NO: 116570 - protein, 9 aa, Homo sapiens
PGARDVEAQ

SEQ ID NO: 116571 - protein, 9 aa, Homo sapiens
GARDVEAQL

SEQ ID NO: 116572 - protein, 9 aa, Homo sapiens
ARDVEAQLR

SEQ ID NO: 116573 - protein, 9 aa, Homo sapiens
RDVEAQLRR

SEQ ID NO: 116574 - protein, 9 aa, Homo sapiens
DVEAQLRRL

SEQ ID NO: 116575 - protein, 9 aa, Homo sapiens
VEAQLRRLQ

SEQ ID NO: 116576 - protein, 9 aa, Homo sapiens
EAQLRRLQE

SEQ ID NO: 116577 - protein, 9 aa, Homo sapiens
AQLRRLQEE

SEQ ID NO: 116578 - protein, 9 aa, Homo sapiens
QLRRLQEER

SEQ ID NO: 116579 - protein, 9 aa, Homo sapiens
LRRLQEERT

SEQ ID NO: 116580 - protein, 9 aa, Homo sapiens
RRLQEERTC

SEQ ID NO: 116581 - protein, 9 aa, Homo sapiens
RLQEERTCK

SEQ ID NO: 116582 - protein, 9 aa, Homo sapiens
LQEERTCKV

SEQ ID NO: 116583 - protein, 9 aa, Homo sapiens
QEERTCKVC

SEQ ID NO: 116584 - protein, 9 aa, Homo sapiens
EERTCKVCL

SEQ ID NO: 116585 - protein, 9 aa, Homo sapiens
ERTCKVCLD

SEQ ID NO: 116586 - protein, 9 aa, Homo sapiens
RTCKVCLDR

SEQ ID NO: 116587 - protein, 9 aa, Homo sapiens
TCKVCLDRA

SEQ ID NO: 116588 - protein, 9 aa, Homo sapiens
CKVCLDRAV

SEQ ID NO: 116589 - protein, 9 aa, Homo sapiens
KVCLDRAVS

SEQ ID NO: 116590 - protein, 9 aa, Homo sapiens
VCLDRAVSI

SEQ ID NO: 116591 - protein, 9 aa, Homo sapiens
CLDRAVSIV

SEQ ID NO: 116592 - protein, 9 aa, Homo sapiens
LDRAVSIVF

SEQ ID NO: 116593 - protein, 9 aa, Homo sapiens
DRAVSIVFV

SEQ ID NO: 116594 - protein, 9 aa, Homo sapiens
RAVSIVFVP

SEQ ID NO: 116595 - protein, 9 aa, Homo sapiens
AVSIVFVPC

SEQ ID NO: 116596 - protein, 9 aa, Homo sapiens
VSIVFVPCG

SEQ ID NO: 116597 - protein, 9 aa, Homo sapiens
SIVFVPCGH

SEQ ID NO: 116598 - protein, 9 aa, Homo sapiens
IVFVPCGHL

SEQ ID NO: 116599 - protein, 9 aa, Homo sapiens
VFVPCGHLV

SEQ ID NO: 116600 - protein, 9 aa, Homo sapiens
FVPCGHLVC

SEQ ID NO: 116601 - protein, 9 aa, Homo sapiens
VPCGHLVCA

SEQ ID NO: 116602 - protein, 9 aa, Homo sapiens
PCGHLVCAE

SEQ ID NO: 116603 - protein, 9 aa, Homo sapiens
CGHLVCAEC

SEQ ID NO: 116604 - protein, 9 aa, Homo sapiens
GHLVCAECA

SEQ ID NO: 116605 - protein, 9 aa, Homo sapiens
HLVCAECAP

SEQ ID NO: 116606 - protein, 9 aa, Homo sapiens
LVCAECAPG

SEQ ID NO: 116607 - protein, 9 aa, Homo sapiens
VCAECAPGL

SEQ ID NO: 116608 - protein, 9 aa, Homo sapiens
CAECAPGLQ

SEQ ID NO: 116609 - protein, 9 aa, Homo sapiens
AECAPGLQL

SEQ ID NO: 116610 - protein, 9 aa, Homo sapiens
ECAPGLQLC

SEQ ID NO: 116611 - protein, 9 aa, Homo sapiens
CAPGLQLCP

SEQ ID NO: 116612 - protein, 9 aa, Homo sapiens
APGLQLCPI

SEQ ID NO: 116613 - protein, 9 aa, Homo sapiens
PGLQLCPIC

SEQ ID NO: 116614 - protein, 9 aa, Homo sapiens
GLQLCPICR

SEQ ID NO: 116615 - protein, 9 aa, Homo sapiens
LQLCPICRA

SEQ ID NO: 116616 - protein, 9 aa, Homo sapiens
QLCPICRAP

SEQ ID NO: 116617 - protein, 9 aa, Homo sapiens
LCPICRAPV

SEQ ID NO: 116618 - protein, 9 aa, Homo sapiens
CPICRAPVR

SEQ ID NO: 116619 - protein, 9 aa, Homo sapiens
PICRAPVRS

SEQ ID NO: 116620 - protein, 9 aa, Homo sapiens
ICRAPVRSR

SEQ ID NO: 116621 - protein, 9 aa, Homo sapiens
CRAPVRSRV

SEQ ID NO: 116622 - protein, 9 aa, Homo sapiens
RAPVRSRVR

SEQ ID NO: 116623 - protein, 9 aa, Homo sapiens
APVRSRVRT

SEQ ID NO: 116624 - protein, 9 aa, Homo sapiens
PVRSRVRTF

SEQ ID NO: 116625 - protein, 9 aa, Homo sapiens
VRSRVRTFL

SEQ ID NO: 116626 - protein, 9 aa, Homo sapiens
RSRVRTFLS

SEQ ID NO: 116627 - protein, 140 aa, Human papillomavirus (HPV)
MATPIRTVRQLSESLCIPYIDVLLPCNFCNYFLSNAEKLLFDHFDLHLVWRDNLVFGCCQGCARTVSLLEFVLYYQESYEVPEIEEILDRPLLQIELRCVTCIKKLSVAEKLEVVSNGERVHRVRNRLKAKCSLCRLYAI

SEQ ID NO: 116628 - protein, 150 aa, Human papillomavirus (HPV)
MESANASTSATTIDQLCKTFNLSMHTLQINCVFCKNALTTAEIYSYAYKQLKVLFRGGYPYAACACCLEFHGKINQYRHFDYAGYATTVEEETKQDILDVLIRCYLCHKPLCEVEKVKHILTKARFIKLNCTWKGRCLHCWTTCMEDMLP

SEQ ID NO: 116629 - protein, 158 aa, Human papillomavirus (HPV)
MHQKRTAMFQDPQERPRKLPQLCTELQTTIHEIILECVYCKQQLLRREVYDFAFRDLCIVYRDGNPYAVCDKCLKFYSKISEYRHYCYSLYGTTLEQQYNKPLCDLLIRCINCQKPLCPEEKQRHLDKKHRFHNIRGRWTGRCMSCCRSSRTRRETQL

SEQ ID NO: 116630 - protein, 158 aa, Human papillomavirus (HPV)
MARFEDPTRRPYKLPDLCTELNTSLQDIEITCVYCKTVLELTEVFEFAFKDLFVVYRDSIPHAACHKCIDFYSRIRELRHYSDSVYGDTLEKLTNTGLYNLLIRCLRCQKPLNPAEKLRHLNEKRRFHKIAGHYRGQCHSCCNRARQERLQRRRETQV

SEQ ID NO: 116631 - protein, 149 aa, Human papillomavirus (HPV)
MFKNPAERPRKLHELSSALEIPYDELRLNCVYCKGQLTETEVLDFAFTDLTIVYRDDTPYGVCTKCLRFYSKVSEFRWYRYSVYGTTLEKLTNKGICDLLIRCITCQRPLCPEEKQRHLDKKKRFHNIGGRWTGRCIVCWRRPRTETQV

SEQ ID NO: 116632 - protein, 149 aa, Human papillomavirus (HPV)
MFQDTEEKPRTLHDLCQALETTIHNIELQCVECKKPLQRSEVYDFAFADLTVVYREGNPFGICKLCLRFLSKISEYRHYNYSVYGNTLEQTVKKPLNEILIRCIICQRPLCPQEKKRHVDLNKRFHNISGRWAGRCAACWRSRRRETAL

SEQ ID NO: 116633 - protein, 149 aa, Human papillomavirus (HPV)
MFQDPAERPYKLHDLCNEVEESIHEICLNCVYCKQELQRSEVYDFACYDLCIVYREGQPYGVCMKCLKFYSKISEYRWYRYSVYGETLEKQCNKQLCHLLIRCITCQKPLCPVEKQRHLEEKKRFHNIGGRWTGRCMSCWKPTRRETEV

SEQ ID NO: 116634 - protein, 148 aa, Human papillomavirus (HPV)
MFEDPATRPRTLHELCEVLEESVHEIRLQCVQCKKELQRREVYKFLFTDLRIVYRDNNPYGVCIMCLRFLSKISEYRHYQYSLYGKTLEERVRKPLSEITIRCIICQTPLCPEEKERHVNANKRFHNIMGRWTGRCSECWRPRPVTQV

SEQ ID NO: 116635 - protein, 149 aa, Human papillomavirus (HPV)
MFQDAEEKPRTLHDLCQALETSVHEIELKCVECKKTLQRSEVYDFVFADLRIVYRDGNPFAVCKVCLRLLSKISEYRHYNYSLYGETLEQTLKKCLNEILIRCIICQRPLCPQEKKRHVDLNKRFHNISGRWTGRCAVCWRPRRRQTQV

SEQ ID NO: 116636 - protein, 158 aa, Human papillomavirus (HPV)
MALFHNPEERPYKLPDLCRTLDTTLHDVTIDCVYCRRQLQRTEVYEFAFGDLNVVYRDGVPLAACQSCIKFYAKIRELRYYSESVYATTLETITNTKLYDLSIRCMCCLKPLSPAEKLRHLNSKRRFHKIAGNFTGQCRHCWTSKREDRRRTRQETQV

SEQ ID NO: 116637 - protein, 158 aa, Human papillomavirus (HPV); identical to SEQ ID NO: 116636

SEQ ID NO: 116638 - protein, 141 aa, Human papillomavirus (HPV)
MARPKPLTVQQLADTLCIPVLDILIPCRFCTRFLSYIELLGFDYKGLQLIWTEEDFVFACCSSCAHATAQYEFTRFYEHSVNGREIEIVEQKGIGEVVVRCQYCLKRLDLIEKLEVCCKHQQFHRVRGNWKGVCRHCGSIG

SEQ ID NO: 116639 - protein, 141 aa, Human papillomavirus (HPV)
MDRPKPRTVKELADTLAIPVIDLLLPCNFCNRFLSYFELLSFDYKYLQLIWTVEDLVYAICSSCAFASAQFEFMKYFEYSVVGKQIETVANQPIGNITVRCQYCLKKLDLVEKLGVCYKQQYFHRVRDNWKGLCRHCGSIE

SEQ ID NO: 116640 - protein, 103 aa, Human papillomavirus (HPV)
MIGKEVTVQDIILELSEVQPEVLPVDLFCEEELPNEQETEEEPDIERISYKVIAPCGCRHCEVKLRIFVHATEFGIRAFQQLLTGDLQLLCPDCRGNCKHDGS

SEQ ID NO: 116641 - protein, 98 aa, Human papillomavirus (HPV)
MHGRHVTLKDIVLDLQPPDPVGLHCYEQLVDSSEDEVDEVDGQDSQPLKQHYQIVTCCCGCDSNVRLVVQCTETDIREVQQLLLGTLNIVCPICAPKT

SEQ ID NO: 116642 - protein, 103 aa, Human papillomavirus (HPV)
MIGKEVTVQDFTLELSELQPEVLPVDLLCEEELPNEQETEEESDIDRTVFKIIAPCGCSSCEVNLRIFVNATDTGIRTLQDLLISDLQLLCPECRGNCKHGGF

SEQ ID NO: 116643 - protein, 101 aa, Human papillomavirus (HPV)
MHGKYPTLKDIVLELTPDPVGLHCNEQLDSSEDEVDEQATQATQATQHSTLLQCYQILTSCSKCCSNVRLVVECTGPDIHDLHDLLLGTLNIVCPLCAPKS

SEQ ID NO: 116644 - protein, 102 aa, Human papillomavirus (HPV)
MIGKEVTLQDIVLELNELQPEVQPVDLFCEEELPNELQETEVELHIERTAYKVVVPCGCCKVKLRIFITATEFALRTFQNLLFEQLQLLCPECRGNCKHGGS

SEQ ID NO: 116645 - protein, 98 aa, Human papillomavirus (HPV)
MHGDTPTLHEYMLDLQPETTDLYCYEQLNDSSEEEDEIDGPAGQAEPDRAHYNIVTFCCKCDSTLRLCVQSTHVDIRTLEDLLMGTLGIVCPICSQKP

SEQ ID NO: 116646 - protein, 102 aa, Human papillomavirus (HPV)
MIGKEVTLQDIVLELNELQPEVQPVDLFCEEELPNEQQEREEEPQIERASYKVVAPCGCCKVKLRIFISATEFAIRSFQQLLIDELQLLCPDCRGNCKHGGS

SEQ ID NO: 116647 - protein, 101 aa, Human papillomavirus (HPV)
MIGKEVTLQDIVLELNELQPEVQPVDLFCEEELPSEQQETEEELPERTSYKVVTPCGCCKVKLRIFVNATRFAIRTFQNLLFEELQLLCPECRGNCKHGGS

SEQ ID NO: 116648 - protein, 101 aa, Human papillomavirus (HPV); identical to SEQ ID NO: 116647

SEQ ID NO: 116649 - protein, 92 aa, Human papillomavirus (HPV)
MHGTRPSLADITLILEEIPEIIDLHCDEQFDSSEEENNHQLTEPAVQAYGVVTTCCKCGRAVRLVVECGPEDIRDLEQLFLKTLTLVCPHCA

SEQ ID NO: 116650 - protein, 98 aa, Human papillomavirus (HPV)
MRGETPTLQDYVLDLQPKATDLHCYEQLPDSSDEEDVIDSPAGQAKPDTSNYNIVTFCCQCESTLRLCVQSTQVDIRILQELLMGSFGIVCPNCSTRL

SEQ ID NO: 116651 - protein, 93 aa, Human papillomavirus (HPV)
MRGDKATIPDIELEELVLPANLISDESLSPDATAEEEFCPYRIDSKCHNCGCRIRVTVAATEFGIRCFEQLLLKELCLFCPACSRQLPRNGRS

SEQ ID NO: 116652 - protein, 96 aa, Human papillomavirus (HPV)
MIGNQPNVNNLDVNLEELVLPVSLLADEELSPDGDPEEEEHYPYTIDTCCKPCGAGVRFTIIATPSAVITLRQLLLQEVFLTCLRCSRSLFRHGRS

SEQ ID NO: 116653 - protein, 103 aa, Human papillomavirus (HPV)
MHGDTINIQDVILDLVPQPEIDLQCYEQLDYEQFDSSEEDETDNVRNQQARQAEQEACYRIEAECCVCNSIVQLAVLSSRQNVRAVEQLLMGDVSLVCHQCAT

SEQ ID NO: 116654 - protein, 100 aa, Human papillomavirus (HPV)
MHGQVATIKDIVLQELPDVVDLHCNEQLLDSSESESEDERDGVGVQEQLVEQAQQAYGVVTTCGRCYRPVRLVVECRDADVKALQQLLLDNLSIVCPRCA

SEQ ID NO: 116655 - protein, 97 aa, Human papillomavirus (HPV)
MHGKKTTLQDITLDLKPTTEIDLTCYESLDNSEDEDETDSHLDRQAERECYRIVTDCTKCQCTVCLAIESNKADLRVIEELLMGTLGIVCPNCSRNL

SEQ ID NO: 116656 - protein, 101 aa, Human papillomavirus (HPV)
MIGKEATLPDIVLQEEFGQPIDLQCYENLPAEVPAEQDTEEELIQGIPYKVIACCGGGCGSRLRVFVLATDRAIREFQSLLLEELQFLCPECREEIRNGGR

SEQ ID NO: 116657 - protein, 90 aa, Human papillomavirus (HPV)
MHGPKPTVKDIELDLAPEAVPLLCNEQLDSSDEEDCIDVVEPAQQAYRVVTLCTKCSSTLRLVVESSEADIRAFQELLLRTLKIVCPRCA

SEQ ID NO: 116658 - protein, 93 aa, Human papillomavirus (HPV)
MIGKEATIPDIELELQELVQPTDLHCYEELSEEETEEEPQHIPYKIVAPCCFCESKLRLIVVATSFGIRAQEELLFGEVKLVCPGCREKLRHV

SEQ ID NO: 116659 - protein, 100 aa, Human papillomavirus (HPV)
MRGNVPQLKDIVLELTPQPEIDLQCYEQFDSSDEEDEVDNMRDQPARQAGQDTCYRIKVHCCRCSSVVQLAVESSGDSLRIFQQMLLGDLSLVCPWCATN

SEQ ID NO: 116660 - protein, 106 aa, Human papillomavirus (HPV)
MHGPKPTLQEIILHLQPQNEINSVDLQCYEHLSDLEEEYDETDDVNHRQLPARRAEPQRHTIVCMCCKCESRLQFVVESSADDLRSLQQLFLSTLSFVCPWCATHQ

SEQ ID NO: 116661 - protein, 9 aa, Homo sapiens
MPGGCSRGP

SEQ ID NO: 116662 - protein, 9 aa, Homo sapiens
PGGCSRGPA

SEQ ID NO: 116663 - protein, 9 aa, Homo sapiens
GGCSRGPAA

SEQ ID NO: 116664 - protein, 9 aa, Homo sapiens
GCSRGPAAG

SEQ ID NO: 116665 - protein, 9 aa, Homo sapiens
CSRGPAAGD

SEQ ID NO: 116666 - protein, 9 aa, Homo sapiens
SRGPAAGDG

SEQ ID NO: 116667 - protein, 9 aa, Homo sapiens
RGPAAGDGR

SEQ ID NO: 116668 - protein, 9 aa, Homo sapiens
GPAAGDGRL

SEQ ID NO: 116669 - protein, 9 aa, Homo sapiens
PAAGDGRLR

SEQ ID NO: 116670 - protein, 9 aa, Homo sapiens
AAGDGRLRL

SEQ ID NO: 116671 - protein, 9 aa, Homo sapiens
AGDGRLRLA

SEQ ID NO: 116672 - protein, 9 aa, Homo sapiens
GDGRLRLAR

SEQ ID NO: 116673 - protein, 9 aa, Homo sapiens
DGRLRLARL

SEQ ID NO: 116674 - protein, 9 aa, Homo sapiens
GRLRLARLA

SEQ ID NO: 116675 - protein, 9 aa, Homo sapiens
RLRLARLAL

SEQ ID NO: 116676 - protein, 9 aa, Homo sapiens
LRLARLALV

SEQ ID NO: 116677 - protein, 9 aa, Homo sapiens
RLARLALVL

SEQ ID NO: 116678 - protein, 9 aa, Homo sapiens
LARLALVLL

SEQ ID NO: 116679 - protein, 9 aa, Homo sapiens
ARLALVLLG

SEQ ID NO: 116680 - protein, 9 aa, Homo sapiens
RLALVLLGW

SEQ ID NO: 116681 - protein, 9 aa, Homo sapiens
LALVLLGWV

SEQ ID NO: 116682 - protein, 9 aa, Homo sapiens
ALVLLGWVS

SEQ ID NO: 116683 - protein, 9 aa, Homo sapiens
LVLLGWVSS

SEQ ID NO: 116684 - protein, 9 aa, Homo sapiens
VLLGWVSSS

SEQ ID NO: 116685 - protein, 9 aa, Homo sapiens
LLGWVSSSS

SEQ ID NO: 116686 - protein, 9 aa, Homo sapiens
LGWVSSSSP

SEQ ID NO: 116687 - protein, 9 aa, Homo sapiens
GWVSSSSPT

SEQ ID NO: 116688 - protein, 9 aa, Homo sapiens
WVSSSSPTS

SEQ ID NO: 116689 - protein, 9 aa, Homo sapiens
VSSSSPTSS

SEQ ID NO: 116690 - protein, 9 aa, Homo sapiens
SSSSPTSSA

SEQ ID NO: 116691 - protein, 9 aa, Homo sapiens
SSSPTSSAS

SEQ ID NO: 116692 - protein, 9 aa, Homo sapiens
SSPTSSASS

SEQ ID NO: 116693 - protein, 9 aa, Homo sapiens
SPTSSASSF

SEQ ID NO: 116694 - protein, 9 aa, Homo sapiens
PTSSASSFS

SEQ ID NO: 116695 - protein, 9 aa, Homo sapiens
TSSASSFSS

SEQ ID NO: 116696 - protein, 9 aa, Homo sapiens
SSASSFSSS

SEQ ID NO: 116697 - protein, 9 aa, Homo sapiens
SASSFSSSA

SEQ ID NO: 116698 - protein, 9 aa, Homo sapiens
ASSFSSSAP

SEQ ID NO: 116699 - protein, 9 aa, Homo sapiens
SSFSSSAPF

SEQ ID NO: 116700 - protein, 9 aa, Homo sapiens
SFSSSAPFL

SEQ ID NO: 116701 - protein, 9 aa, Homo sapiens
FSSSAPFLA

SEQ ID NO: 116702 - protein, 9 aa, Homo sapiens
SSSAPFLAS

SEQ ID NO: 116703 - protein, 9 aa, Homo sapiens
SSAPFLASA

SEQ ID NO: 116704 - protein, 9 aa, Homo sapiens
SAPFLASAV

SEQ ID NO: 116705 - protein, 9 aa, Homo sapiens
APFLASAVS

SEQ ID NO: 116706 - protein, 9 aa, Homo sapiens
PFLASAVSA

SEQ ID NO: 116707 - protein, 9 aa, Homo sapiens
FLASAVSAQ

SEQ ID NO: 116708 - protein, 9 aa, Homo sapiens
LASAVSAQP

SEQ ID NO: 116709 - protein, 9 aa, Homo sapiens
ASAVSAQPP

SEQ ID NO: 116710 - protein, 9 aa, Homo sapiens
SAVSAQPPL

SEQ ID NO: 116711 - protein, 9 aa, Homo sapiens
AVSAQPPLP

SEQ ID NO: 116712 - protein, 9 aa, Homo sapiens
VSAQPPLPD

SEQ ID NO: 116713 - protein, 9 aa, Homo sapiens
SAQPPLPDQ

SEQ ID NO: 116714 - protein, 9 aa, Homo sapiens
AQPPLPDQC

SEQ ID NO: 116715 - protein, 9 aa, Homo sapiens
QPPLPDQCP

SEQ ID NO: 116716 - protein, 9 aa, Homo sapiens
PPLPDQCPA

SEQ ID NO: 116717 - protein, 9 aa, Homo sapiens
PLPDQCPAL

SEQ ID NO: 116718 - protein, 9 aa, Homo sapiens
LPDQCPALC

SEQ ID NO: 116719 - protein, 9 aa, Homo sapiens
PDQCPALCE

SEQ ID NO: 116720 - protein, 9 aa, Homo sapiens
DQCPALCEC

SEQ ID NO: 116721 - protein, 9 aa, Homo sapiens
QCPALCECS

SEQ ID NO: 116722 - protein, 9 aa, Homo sapiens
CPALCECSE

SEQ ID NO: 116723 - protein, 9 aa, Homo sapiens
PALCECSEA

SEQ ID NO: 116724 - protein, 9 aa, Homo sapiens
ALCECSEAA

SEQ ID NO: 116725 - protein, 9 aa, Homo sapiens
LCECSEAAR

SEQ ID NO: 116726 - protein, 9 aa, Homo sapiens
CECSEAART

SEQ ID NO: 116727 - protein, 9 aa, Homo sapiens
ECSEAARTV

SEQ ID NO: 116728 - protein, 9 aa, Homo sapiens
CSEAARTVK

SEQ ID NO: 116729 - protein, 9 aa, Homo sapiens
SEAARTVKC

SEQ ID NO: 116730 - protein, 9 aa, Homo sapiens
EAARTVKCV

SEQ ID NO: 116731 - protein, 9 aa, Homo sapiens
AARTVKCVN

SEQ ID NO: 116732 - protein, 9 aa, Homo sapiens
ARTVKCVNR

SEQ ID NO: 116733 - protein, 9 aa, Homo sapiens
RTVKCVNRN

SEQ ID NO: 116734 - protein, 9 aa, Homo sapiens
TVKCVNRNL

SEQ ID NO: 116735 - protein, 9 aa, Homo sapiens
VKCVNRNLT

SEQ ID NO: 116736 - protein, 9 aa, Homo sapiens
KCVNRNLTE

SEQ ID NO: 116737 - protein, 9 aa, Homo sapiens
CVNRNLTEV

SEQ ID NO: 116738 - protein, 9 aa, Homo sapiens
VNRNLTEVP

SEQ ID NO: 116739 - protein, 9 aa, Homo sapiens
NRNLTEVPT

SEQ ID NO: 116740 - protein, 9 aa, Homo sapiens
RNLTEVPTD

SEQ ID NO: 116741 - protein, 9 aa, Homo sapiens
NLTEVPTDL

SEQ ID NO: 116742 - protein, 9 aa, Homo sapiens
LTEVPTDLP

SEQ ID NO: 116743 - protein, 9 aa, Homo sapiens
TEVPTDLPA

SEQ ID NO: 116744 - protein, 9 aa, Homo sapiens
EVPTDLPAY

SEQ ID NO: 116745 - protein, 9 aa, Homo sapiens
VPTDLPAYV

SEQ ID NO: 116746 - protein, 9 aa, Homo sapiens
PTDLPAYVR

SEQ ID NO: 116747 - protein, 9 aa, Homo sapiens
TDLPAYVRN

SEQ ID NO: 116748 - protein, 9 aa, Homo sapiens
DLPAYVRNL

SEQ ID NO: 116749 - protein, 9 aa, Homo sapiens
LPAYVRNLF

SEQ ID NO: 116750 - protein, 9 aa, Homo sapiens
PAYVRNLFL

SEQ ID NO: 116751 - protein, 9 aa, Homo sapiens
AYVRNLFLT

SEQ ID NO: 116752 - protein, 9 aa, Homo sapiens
YVRNLFLTG

SEQ ID NO: 116753 - protein, 9 aa, Homo sapiens
VRNLFLTGN

SEQ ID NO: 116754 - protein, 9 aa, Homo sapiens
RNLFLTGNQ

SEQ ID NO: 116755 - protein, 9 aa, Homo sapiens
NLFLTGNQL

SEQ ID NO: 116756 - protein, 9 aa, Homo sapiens
LFLTGNQLA

SEQ ID NO: 116757 - protein, 9 aa, Homo sapiens
FLTGNQLAV

SEQ ID NO: 116758 - protein, 9 aa, Homo sapiens
LTGNQLAVL

SEQ ID NO: 116759 - protein, 9 aa, Homo sapiens
TGNQLAVLP

SEQ ID NO: 116760 - protein, 9 aa, Homo sapiens
GNQLAVLPA

SEQ ID NO: 116761 - protein, 9 aa, Homo sapiens
NQLAVLPAG

SEQ ID NO: 116762 - protein, 9 aa, Homo sapiens
QLAVLPAGA

SEQ ID NO: 116763 - protein, 9 aa, Homo sapiens
LAVLPAGAF

SEQ ID NO: 116764 - protein, 9 aa, Homo sapiens
AVLPAGAFA

SEQ ID NO: 116765 - protein, 9 aa, Homo sapiens
VLPAGAFAR

SEQ ID NO: 116766 - protein, 9 aa, Homo sapiens
LPAGAFARR

SEQ ID NO: 116767 - protein, 9 aa, Homo sapiens
PAGAFARRP

SEQ ID NO: 116768 - protein, 9 aa, Homo sapiens
AGAFARRPP

SEQ ID NO: 116769 - protein, 9 aa, Homo sapiens
GAFARRPPL

SEQ ID NO: 116770 - protein, 9 aa, Homo sapiens
AFARRPPLA

SEQ ID NO: 116771 - protein, 9 aa, Homo sapiens
FARRPPLAE

SEQ ID NO: 116772 - protein, 9 aa, Homo sapiens
ARRPPLAEL

SEQ ID NO: 116773 - protein, 9 aa, Homo sapiens
RRPPLAELA

SEQ ID NO: 116774 - protein, 9 aa, Homo sapiens
RPPLAELAA

SEQ ID NO: 116775 - protein, 9 aa, Homo sapiens
PPLAELAAL

SEQ ID NO: 116776 - protein, 9 aa, Homo sapiens
PLAELAALN

SEQ ID NO: 116777 - protein, 9 aa, Homo sapiens
LAELAALNL

SEQ ID NO: 116778 - protein, 9 aa, Homo sapiens
AELAALNLS

SEQ ID NO: 116779 - protein, 9 aa, Homo sapiens
ELAALNLSG

SEQ ID NO: 116780 - protein, 9 aa, Homo sapiens
LAALNLSGS

SEQ ID NO: 116781 - protein, 9 aa, Homo sapiens
AALNLSGSR

SEQ ID NO: 116782 - protein, 9 aa, Homo sapiens
ALNLSGSRL

SEQ ID NO: 116783 - protein, 9 aa, Homo sapiens
LNLSGSRLD

SEQ ID NO: 116784 - protein, 9 aa, Homo sapiens
NLSGSRLDE

SEQ ID NO: 116785 - protein, 9 aa, Homo sapiens
LSGSRLDEV

SEQ ID NO: 116786 - protein, 9 aa, Homo sapiens
SGSRLDEVR

SEQ ID NO: 116787 - protein, 9 aa, Homo sapiens
GSRLDEVRA

SEQ ID NO: 116788 - protein, 9 aa, Homo sapiens
SRLDEVRAG

SEQ ID NO: 116789 - protein, 9 aa, Homo sapiens
RLDEVRAGA

SEQ ID NO: 116790 - protein, 9 aa, Homo sapiens
LDEVRAGAF

SEQ ID NO: 116791 - protein, 9 aa, Homo sapiens
DEVRAGAFE

SEQ ID NO: 116792 - protein, 9 aa, Homo sapiens
EVRAGAFEH

SEQ ID NO: 116793 - protein, 9 aa, Homo sapiens
VRAGAFEHL

SEQ ID NO: 116794 - protein, 9 aa, Homo sapiens
RAGAFEHLP

SEQ ID NO: 116795 - protein, 9 aa, Homo sapiens
AGAFEHLPS

SEQ ID NO: 116796 - protein, 9 aa, Homo sapiens
GAFEHLPSL

SEQ ID NO: 116797 - protein, 9 aa, Homo sapiens
AFEHLPSLR

SEQ ID NO: 116798 - protein, 9 aa, Homo sapiens
FEHLPSLRQ

SEQ ID NO: 116799 - protein, 9 aa, Homo sapiens
EHLPSLRQL

SEQ ID NO: 116800 - protein, 9 aa, Homo sapiens
HLPSLRQLD

SEQ ID NO: 116801 - protein, 9 aa, Homo sapiens
LPSLRQLDL

SEQ ID NO: 116802 - protein, 9 aa, Homo sapiens
PSLRQLDLS

SEQ ID NO: 116803 - protein, 9 aa, Homo sapiens
SLRQLDLSH

SEQ ID NO: 116804 - protein, 9 aa, Homo sapiens
LRQLDLSHN

SEQ ID NO: 116805 - protein, 9 aa, Homo sapiens
RQLDLSHNP

SEQ ID NO: 116806 - protein, 9 aa, Homo sapiens
QLDLSHNPL

SEQ ID NO: 116807 - protein, 9 aa, Homo sapiens
LDLSHNPLA

SEQ ID NO: 116808 - protein, 9 aa, Homo sapiens
DLSHNPLAD

SEQ ID NO: 116809 - protein, 9 aa, Homo sapiens
LSHNPLADL

SEQ ID NO: 116810 - protein, 9 aa, Homo sapiens
SHNPLADLS

SEQ ID NO: 116811 - protein, 9 aa, Homo sapiens
HNPLADLSP

SEQ ID NO: 116812 - protein, 9 aa, Homo sapiens
NPLADLSPF

SEQ ID NO: 116813 - protein, 9 aa, Homo sapiens
PLADLSPFA

SEQ ID NO: 116814 - protein, 9 aa, Homo sapiens
LADLSPFAF

SEQ ID NO: 116815 - protein, 9 aa, Homo sapiens
ADLSPFAFS

SEQ ID NO: 116816 - protein, 9 aa, Homo sapiens
DLSPFAFSG

SEQ ID NO: 116817 - protein, 9 aa, Homo sapiens
LSPFAFSGS

SEQ ID NO: 116818 - protein, 9 aa, Homo sapiens
SPFAFSGSN

SEQ ID NO: 116819 - protein, 9 aa, Homo sapiens
PFAFSGSNA

SEQ ID NO: 116820 - protein, 9 aa, Homo sapiens
FAFSGSNAS

SEQ ID NO: 116821 - protein, 9 aa, Homo sapiens
AFSGSNASV

SEQ ID NO: 116822 - protein, 9 aa, Homo sapiens
FSGSNASVS

SEQ ID NO: 116823 - protein, 9 aa, Homo sapiens
SGSNASVSA

SEQ ID NO: 116824 - protein, 9 aa, Homo sapiens
GSNASVSAP

SEQ ID NO: 116825 - protein, 9 aa, Homo sapiens
SNASVSAPS

SEQ ID NO: 116826 - protein, 9 aa, Homo sapiens
NASVSAPSP

SEQ ID NO: 116827 - protein, 9 aa, Homo sapiens
ASVSAPSPL

SEQ ID NO: 116828 - protein, 9 aa, Homo sapiens
SVSAPSPLV

SEQ ID NO: 116829 - protein, 9 aa, Homo sapiens
VSAPSPLVE

SEQ ID NO: 116830 - protein, 9 aa, Homo sapiens
SAPSPLVEL

SEQ ID NO: 116831 - protein, 9 aa, Homo sapiens
APSPLVELI

SEQ ID NO: 116832 - protein, 9 aa, Homo sapiens
PSPLVELIL

SEQ ID NO: 116833 - protein, 9 aa, Homo sapiens
SPLVELILN

SEQ ID NO: 116834 - protein, 9 aa, Homo sapiens
PLVELILNH

SEQ ID NO: 116835 - protein, 9 aa, Homo sapiens
LVELILNHI

SEQ ID NO: 116836 - protein, 9 aa, Homo sapiens
VELILNHIV

SEQ ID NO: 116837 - protein, 9 aa, Homo sapiens
ELILNHIVP

SEQ ID NO: 116838 - protein, 9 aa, Homo sapiens
LILNHIVPP

SEQ ID NO: 116839 - protein, 9 aa, Homo sapiens
ILNHIVPPE

SEQ ID NO: 116840 - protein, 9 aa, Homo sapiens
LNHIVPPED

SEQ ID NO: 116841 - protein, 9 aa, Homo sapiens
NHIVPPEDE

SEQ ID NO: 116842 - protein, 9 aa, Homo sapiens
HIVPPEDER

SEQ ID NO: 116843 - protein, 9 aa, Homo sapiens
IVPPEDERQ

SEQ ID NO: 116844 - protein, 9 aa, Homo sapiens
VPPEDERQN

SEQ ID NO: 116845 - protein, 9 aa, Homo sapiens
PPEDERQNR

SEQ ID NO: 116846 - protein, 9 aa, Homo sapiens
PEDERQNRS

SEQ ID NO: 116847 - protein, 9 aa, Homo sapiens
EDERQNRSF

SEQ ID NO: 116848 - protein, 9 aa, Homo sapiens
DERQNRSFE

SEQ ID NO: 116849 - protein, 9 aa, Homo sapiens
ERQNRSFEG

SEQ ID NO: 116850 - protein, 9 aa, Homo sapiens
RQNRSFEGM

SEQ ID NO: 116851 - protein, 9 aa, Homo sapiens
QNRSFEGMV

SEQ ID NO: 116852 - protein, 9 aa, Homo sapiens
NRSFEGMVV

SEQ ID NO: 116853 - protein, 9 aa, Homo sapiens
RSFEGMVVA

SEQ ID NO: 116854 - protein, 9 aa, Homo sapiens
SFEGMVVAA

SEQ ID NO: 116855 - protein, 9 aa, Homo sapiens
FEGMVVAAL

SEQ ID NO: 116856 - protein, 9 aa, Homo sapiens
EGMVVAALL

SEQ ID NO: 116857 - protein, 9 aa, Homo sapiens
GMVVAALLA

SEQ ID NO: 116858 - protein, 9 aa, Homo sapiens
MVVAALLAG

SEQ ID NO: 116859 - protein, 9 aa, Homo sapiens
VVAALLAGR

SEQ ID NO: 116860 - protein, 9 aa, Homo sapiens
VAALLAGRA

SEQ ID NO: 116861 - protein, 9 aa, Homo sapiens
AALLAGRAL

SEQ ID NO: 116862 - protein, 9 aa, Homo sapiens
ALLAGRALQ

SEQ ID NO: 116863 - protein, 9 aa, Homo sapiens
LLAGRALQG

SEQ ID NO: 116864 - protein, 9 aa, Homo sapiens
LAGRALQGL

SEQ ID NO: 116865 - protein, 9 aa, Homo sapiens
AGRALQGLR

SEQ ID NO: 116866 - protein, 9 aa, Homo sapiens
GRALQGLRR

SEQ ID NO: 116867 - protein, 9 aa, Homo sapiens
RALQGLRRL

SEQ ID NO: 116868 - protein, 9 aa, Homo sapiens
ALQGLRRLE

SEQ ID NO: 116869 - protein, 9 aa, Homo sapiens
LQGLRRLEL

SEQ ID NO: 116870 - protein, 9 aa, Homo sapiens
QGLRRLELA

SEQ ID NO: 116871 - protein, 9 aa, Homo sapiens
GLRRLELAS

SEQ ID NO: 116872 - protein, 9 aa, Homo sapiens
LRRLELASN

SEQ ID NO: 116873 - protein, 9 aa, Homo sapiens
RRLELASNH

SEQ ID NO: 116874 - protein, 9 aa, Homo sapiens
RLELASNHF

SEQ ID NO: 116875 - protein, 9 aa, Homo sapiens
LELASNHFL

SEQ ID NO: 116876 - protein, 9 aa, Homo sapiens
ELASNHFLY

SEQ ID NO: 116877 - protein, 9 aa, Homo sapiens
LASNHFLYL

SEQ ID NO: 116878 - protein, 9 aa, Homo sapiens
ASNHFLYLP

SEQ ID NO: 116879 - protein, 9 aa, Homo sapiens
SNHFLYLPR

SEQ ID NO: 116880 - protein, 9 aa, Homo sapiens
NHFLYLPRD

SEQ ID NO: 116881 - protein, 9 aa, Homo sapiens
HFLYLPRDV

SEQ ID NO: 116882 - protein, 9 aa, Homo sapiens
FLYLPRDVL

SEQ ID NO: 116883 - protein, 9 aa, Homo sapiens
LYLPRDVLA

SEQ ID NO: 116884 - protein, 9 aa, Homo sapiens
YLPRDVLAQ

SEQ ID NO: 116885 - protein, 9 aa, Homo sapiens
LPRDVLAQL

SEQ ID NO: 116886 - protein, 9 aa, Homo sapiens
PRDVLAQLP

SEQ ID NO: 116887 - protein, 9 aa, Homo sapiens
RDVLAQLPS

SEQ ID NO: 116888 - protein, 9 aa, Homo sapiens
DVLAQLPSL

SEQ ID NO: 116889 - protein, 9 aa, Homo sapiens
VLAQLPSLR

SEQ ID NO: 116890 - protein, 9 aa, Homo sapiens
LAQLPSLRH

SEQ ID NO: 116891 - protein, 9 aa, Homo sapiens
AQLPSLRHL

SEQ ID NO: 116892 - protein, 9 aa, Homo sapiens
QLPSLRHLD

SEQ ID NO: 116893 - protein, 9 aa, Homo sapiens
LPSLRHLDL

SEQ ID NO: 116894 - protein, 9 aa, Homo sapiens
PSLRHLDLS

SEQ ID NO: 116895 - protein, 9 aa, Homo sapiens
SLRHLDLSN

SEQ ID NO: 116896 - protein, 9 aa, Homo sapiens
LRHLDLSNN

SEQ ID NO: 116897 - protein, 9 aa, Homo sapiens
RHLDLSNNS

SEQ ID NO: 116898 - protein, 9 aa, Homo sapiens
HLDLSNNSL

SEQ ID NO: 116899 - protein, 9 aa, Homo sapiens
LDLSNNSLV

SEQ ID NO: 116900 - protein, 9 aa, Homo sapiens
DLSNNSLVS

SEQ ID NO: 116901 - protein, 9 aa, Homo sapiens
LSNNSLVSL

SEQ ID NO: 116902 - protein, 9 aa, Homo sapiens
SNNSLVSLT

SEQ ID NO: 116903 - protein, 9 aa, Homo sapiens
NNSLVSLTY

SEQ ID NO: 116904 - protein, 9 aa, Homo sapiens
NSLVSLTYV

SEQ ID NO: 116905 - protein, 9 aa, Homo sapiens
SLVSLTYVS

SEQ ID NO: 116906 - protein, 9 aa, Homo sapiens
LVSLTYVSF

SEQ ID NO: 116907 - protein, 9 aa, Homo sapiens
VSLTYVSFR

SEQ ID NO: 116908 - protein, 9 aa, Homo sapiens
SLTYVSFRN

SEQ ID NO: 116909 - protein, 9 aa, Homo sapiens
LTYVSFRNL

SEQ ID NO: 116910 - protein, 9 aa, Homo sapiens
TYVSFRNLT

SEQ ID NO: 116911 - protein, 9 aa, Homo sapiens
YVSFRNLTH

SEQ ID NO: 116912 - protein, 9 aa, Homo sapiens
VSFRNLTHL

SEQ ID NO: 116913 - protein, 9 aa, Homo sapiens
SFRNLTHLE

SEQ ID NO: 116914 - protein, 9 aa, Homo sapiens
FRNLTHLES

SEQ ID NO: 116915 - protein, 9 aa, Homo sapiens
RNLTHLESL

SEQ ID NO: 116916 - protein, 9 aa, Homo sapiens
NLTHLESLH

SEQ ID NO: 116917 - protein, 9 aa, Homo sapiens
LTHLESLHL

SEQ ID NO: 116918 - protein, 9 aa, Homo sapiens
THLESLHLE

SEQ ID NO: 116919 - protein, 9 aa, Homo sapiens
HLESLHLED

SEQ ID NO: 116920 - protein, 9 aa, Homo sapiens
LESLHLEDN

SEQ ID NO: 116921 - protein, 9 aa, Homo sapiens
ESLHLEDNA

SEQ ID NO: 116922 - protein, 9 aa, Homo sapiens
SLHLEDNAL

SEQ ID NO: 116923 - protein, 9 aa, Homo sapiens
LHLEDNALK

SEQ ID NO: 116924 - protein, 9 aa, Homo sapiens
HLEDNALKV

SEQ ID NO: 116925 - protein, 9 aa, Homo sapiens
LEDNALKVL

SEQ ID NO: 116926 - protein, 9 aa, Homo sapiens
EDNALKVLH

SEQ ID NO: 116927 - protein, 9 aa, Homo sapiens
DNALKVLHN

SEQ ID NO: 116928 - protein, 9 aa, Homo sapiens
NALKVLHNG

SEQ ID NO: 116929 - protein, 9 aa, Homo sapiens
ALKVLHNGT

SEQ ID NO: 116930 - protein, 9 aa, Homo sapiens
LKVLHNGTL

SEQ ID NO: 116931 - protein, 9 aa, Homo sapiens
KVLHNGTLA

SEQ ID NO: 116932 - protein, 9 aa, Homo sapiens
VLHNGTLAE

SEQ ID NO: 116933 - protein, 9 aa, Homo sapiens
LHNGTLAEL

SEQ ID NO: 116934 - protein, 9 aa, Homo sapiens
HNGTLAELQ

SEQ ID NO: 116935 - protein, 9 aa, Homo sapiens
NGTLAELQG

SEQ ID NO: 116936 - protein, 9 aa, Homo sapiens
GTLAELQGL

SEQ ID NO: 116937 - protein, 9 aa, Homo sapiens
TLAELQGLP

SEQ ID NO: 116938 - protein, 9 aa, Homo sapiens
LAELQGLPH

SEQ ID NO: 116939 - protein, 9 aa, Homo sapiens
AELQGLPHI

SEQ ID NO: 116940 - protein, 9 aa, Homo sapiens
ELQGLPHIR

SEQ ID NO: 116941 - protein, 9 aa, Homo sapiens
LQGLPHIRV

SEQ ID NO: 116942 - protein, 9 aa, Homo sapiens
QGLPHIRVF

SEQ ID NO: 116943 - protein, 9 aa, Homo sapiens
GLPHIRVFL

SEQ ID NO: 116944 - protein, 9 aa, Homo sapiens
LPHIRVFLD

SEQ ID NO: 116945 - protein, 9 aa, Homo sapiens
PHIRVFLDN

SEQ ID NO: 116946 - protein, 9 aa, Homo sapiens
HIRVFLDNN

SEQ ID NO: 116947 - protein, 9 aa, Homo sapiens
IRVFLDNNP

SEQ ID NO: 116948 - protein, 9 aa, Homo sapiens
RVFLDNNPW

SEQ ID NO: 116949 - protein, 9 aa, Homo sapiens
VFLDNNPWV

SEQ ID NO: 116950 - protein, 9 aa, Homo sapiens
FLDNNPWVC

SEQ ID NO: 116951 - protein, 9 aa, Homo sapiens
LDNNPWVCD

SEQ ID NO: 116952 - protein, 9 aa, Homo sapiens
DNNPWVCDC

SEQ ID NO: 116953 - protein, 9 aa, Homo sapiens
NNPWVCDCH

SEQ ID NO: 116954 - protein, 9 aa, Homo sapiens
NPWVCDCHM

SEQ ID NO: 116955 - protein, 9 aa, Homo sapiens
PWVCDCHMA

SEQ ID NO: 116956 - protein, 9 aa, Homo sapiens
WVCDCHMAD

SEQ ID NO: 116957 - protein, 9 aa, Homo sapiens
VCDCHMADM

SEQ ID NO: 116958 - protein, 9 aa, Homo sapiens
CDCHMADMV

SEQ ID NO: 116959 - protein, 9 aa, Homo sapiens
DCHMADMVT

SEQ ID NO: 116960 - protein, 9 aa, Homo sapiens
CHMADMVTW

SEQ ID NO: 116961 - protein, 9 aa, Homo sapiens
HMADMVTWL

SEQ ID NO: 116962 - protein, 9 aa, Homo sapiens
MADMVTWLK

SEQ ID NO: 116963 - protein, 9 aa, Homo sapiens
ADMVTWLKE

SEQ ID NO: 116964 - protein, 9 aa, Homo sapiens
DMVTWLKET

SEQ ID NO: 116965 - protein, 9 aa, Homo sapiens
MVTWLKETE

SEQ ID NO: 116966 - protein, 9 aa, Homo sapiens
VTWLKETEV

SEQ ID NO: 116967 - protein, 9 aa, Homo sapiens
TWLKETEVV

SEQ ID NO: 116968 - protein, 9 aa, Homo sapiens
WLKETEVVQ

SEQ ID NO: 116969 - protein, 9 aa, Homo sapiens
LKETEVVQG

SEQ ID NO: 116970 - protein, 9 aa, Homo sapiens
KETEVVQGK

SEQ ID NO: 116971 - protein, 9 aa, Homo sapiens
ETEVVQGKD

SEQ ID NO: 116972 - protein, 9 aa, Homo sapiens
TEVVQGKDR

SEQ ID NO: 116973 - protein, 9 aa, Homo sapiens
EVVQGKDRL

SEQ ID NO: 116974 - protein, 9 aa, Homo sapiens
VVQGKDRLT

SEQ ID NO: 116975 - protein, 9 aa, Homo sapiens
VQGKDRLTC

SEQ ID NO: 116976 - protein, 9 aa, Homo sapiens
QGKDRLTCA

SEQ ID NO: 116977 - protein, 9 aa, Homo sapiens
GKDRLTCAY

SEQ ID NO: 116978 - protein, 9 aa, Homo sapiens
KDRLTCAYP

SEQ ID NO: 116979 - protein, 9 aa, Homo sapiens
DRLTCAYPE

SEQ ID NO: 116980 - protein, 9 aa, Homo sapiens
RLTCAYPEK

SEQ ID NO: 116981 - protein, 9 aa, Homo sapiens
LTCAYPEKM

SEQ ID NO: 116982 - protein, 9 aa, Homo sapiens
TCAYPEKMR

SEQ ID NO: 116983 - protein, 9 aa, Homo sapiens
CAYPEKMRN

SEQ ID NO: 116984 - protein, 9 aa, Homo sapiens
AYPEKMRNR

SEQ ID NO: 116985 - protein, 9 aa, Homo sapiens
YPEKMRNRV

SEQ ID NO: 116986 - protein, 9 aa, Homo sapiens
PEKMRNRVL

SEQ ID NO: 116987 - protein, 9 aa, Homo sapiens
EKMRNRVLL

SEQ ID NO: 116988 - protein, 9 aa, Homo sapiens
KMRNRVLLE

SEQ ID NO: 116989 - protein, 9 aa, Homo sapiens
MRNRVLLEL

SEQ ID NO: 116990 - protein, 9 aa, Homo sapiens
RNRVLLELN

SEQ ID NO: 116991 - protein, 9 aa, Homo sapiens
NRVLLELNS

SEQ ID NO: 116992 - protein, 9 aa, Homo sapiens
RVLLELNSA

SEQ ID NO: 116993 - protein, 9 aa, Homo sapiens
VLLELNSAD

SEQ ID NO: 116994 - protein, 9 aa, Homo sapiens
LLELNSADL

SEQ ID NO: 116995 - protein, 9 aa, Homo sapiens
LELNSADLD

SEQ ID NO: 116996 - protein, 9 aa, Homo sapiens
ELNSADLDC

SEQ ID NO: 116997 - protein, 9 aa, Homo sapiens
LNSADLDCD

SEQ ID NO: 116998 - protein, 9 aa, Homo sapiens
NSADLDCDP

SEQ ID NO: 116999 - protein, 9 aa, Homo sapiens
SADLDCDPI

SEQ ID NO: 117000 - protein, 9 aa, Homo sapiens
ADLDCDPIL

SEQ ID NO: 117001 - protein, 9 aa, Homo sapiens
DLDCDPILP

SEQ ID NO: 117002 - protein, 9 aa, Homo sapiens
LDCDPILPP

SEQ ID NO: 117003 - protein, 9 aa, Homo sapiens
DCDPILPPS

SEQ ID NO: 117004 - protein, 9 aa, Homo sapiens
CDPILPPSL

SEQ ID NO: 117005 - protein, 9 aa, Homo sapiens
DPILPPSLQ

SEQ ID NO: 117006 - protein, 9 aa, Homo sapiens
PILPPSLQT

SEQ ID NO: 117007 - protein, 9 aa, Homo sapiens
ILPPSLQTS

SEQ ID NO: 117008 - protein, 9 aa, Homo sapiens
LPPSLQTSY

SEQ ID NO: 117009 - protein, 9 aa, Homo sapiens
PPSLQTSYV

SEQ ID NO: 117010 - protein, 9 aa, Homo sapiens
PSLQTSYVF

SEQ ID NO: 117011 - protein, 9 aa, Homo sapiens
SLQTSYVFL

SEQ ID NO: 117012 - protein, 9 aa, Homo sapiens
LQTSYVFLG

SEQ ID NO: 117013 - protein, 9 aa, Homo sapiens
QTSYVFLGI

SEQ ID NO: 117014 - protein, 9 aa, Homo sapiens
TSYVFLGIV

SEQ ID NO: 117015 - protein, 9 aa, Homo sapiens
SYVFLGIVL

SEQ ID NO: 117016 - protein, 9 aa, Homo sapiens
YVFLGIVLA

SEQ ID NO: 117017 - protein, 9 aa, Homo sapiens
VFLGIVLAL

SEQ ID NO: 117018 - protein, 9 aa, Homo sapiens
FLGIVLALI

SEQ ID NO: 117019 - protein, 9 aa, Homo sapiens
LGIVLALIG

SEQ ID NO: 117020 - protein, 9 aa, Homo sapiens
GIVLALIGA

SEQ ID NO: 117021 - protein, 9 aa, Homo sapiens
IVLALIGAI

SEQ ID NO: 117022 - protein, 9 aa, Homo sapiens
VLALIGAIF

SEQ ID NO: 117023 - protein, 9 aa, Homo sapiens
LALIGAIFL

SEQ ID NO: 117024 - protein, 9 aa, Homo sapiens
ALIGAIFLL

SEQ ID NO: 117025 - protein, 9 aa, Homo sapiens
LIGAIFLLV

SEQ ID NO: 117026 - protein, 9 aa, Homo sapiens
IGAIFLLVL

SEQ ID NO: 117027 - protein, 9 aa, Homo sapiens
GAIFLLVLY

SEQ ID NO: 117028 - protein, 9 aa, Homo sapiens
AIFLLVLYL

SEQ ID NO: 117029 - protein, 9 aa, Homo sapiens
IFLLVLYLN

SEQ ID NO: 117030 - protein, 9 aa, Homo sapiens
FLLVLYLNR

SEQ ID NO: 117031 - protein, 9 aa, Homo sapiens
LLVLYLNRK

SEQ ID NO: 117032 - protein, 9 aa, Homo sapiens
LVLYLNRKG

SEQ ID NO: 117033 - protein, 9 aa, Homo sapiens
VLYLNRKGI

SEQ ID NO: 117034 - protein, 9 aa, Homo sapiens
LYLNRKGIK

SEQ ID NO: 117035 - protein, 9 aa, Homo sapiens
YLNRKGIKK

SEQ ID NO: 117036 - protein, 9 aa, Homo sapiens
LNRKGIKKW

SEQ ID NO: 117037 - protein, 9 aa, Homo sapiens
NRKGIKKWM

SEQ ID NO: 117038 - protein, 9 aa, Homo sapiens
RKGIKKWMH

SEQ ID NO: 117039 - protein, 9 aa, Homo sapiens
KGIKKWMHN

SEQ ID NO: 117040 - protein, 9 aa, Homo sapiens
GIKKWMHNI

SEQ ID NO: 117041 - protein, 9 aa, Homo sapiens
IKKWMHNIR

SEQ ID NO: 117042 - protein, 9 aa, Homo sapiens
KKWMHNIRD

SEQ ID NO: 117043 - protein, 9 aa, Homo sapiens
KWMHNIRDA

SEQ ID NO: 117044 - protein, 9 aa, Homo sapiens
WMHNIRDAC

SEQ ID NO: 117045 - protein, 9 aa, Homo sapiens
MHNIRDACR

SEQ ID NO: 117046 - protein, 9 aa, Homo sapiens
HNIRDACRD

SEQ ID NO: 117047 - protein, 9 aa, Homo sapiens
NIRDACRDH

SEQ ID NO: 117048 - protein, 9 aa, Homo sapiens
IRDACRDHM

SEQ ID NO: 117049 - protein, 9 aa, Homo sapiens
RDACRDHME

SEQ ID NO: 117050 - protein, 9 aa, Homo sapiens
DACRDHMEG

SEQ ID NO: 117051 - protein, 9 aa, Homo sapiens
ACRDHMEGY

SEQ ID NO: 117052 - protein, 9 aa, Homo sapiens
CRDHMEGYH

SEQ ID NO: 117053 - protein, 9 aa, Homo sapiens
RDHMEGYHY

SEQ ID NO: 117054 - protein, 9 aa, Homo sapiens
DHMEGYHYR

SEQ ID NO: 117055 - protein, 9 aa, Homo sapiens
HMEGYHYRY

SEQ ID NO: 117056 - protein, 9 aa, Homo sapiens
MEGYHYRYE

SEQ ID NO: 117057 - protein, 9 aa, Homo sapiens
EGYHYRYEI

SEQ ID NO: 117058 - protein, 9 aa, Homo sapiens
GYHYRYEIN

SEQ ID NO: 117059 - protein, 9 aa, Homo sapiens
YHYRYEINA

SEQ ID NO: 117060 - protein, 9 aa, Homo sapiens
HYRYEINAD

SEQ ID NO: 117061 - protein, 9 aa, Homo sapiens
YRYEINADP

SEQ ID NO: 117062 - protein, 9 aa, Homo sapiens
RYEINADPR

SEQ ID NO: 117063 - protein, 9 aa, Homo sapiens
YEINADPRL

SEQ ID NO: 117064 - protein, 9 aa, Homo sapiens
EINADPRLT

SEQ ID NO: 117065 - protein, 9 aa, Homo sapiens
INADPRLTN

SEQ ID NO: 117066 - protein, 9 aa, Homo sapiens
NADPRLTNL

SEQ ID NO: 117067 - protein, 9 aa, Homo sapiens
ADPRLTNLS

SEQ ID NO: 117068 - protein, 9 aa, Homo sapiens
DPRLTNLSS

SEQ ID NO: 117069 - protein, 9 aa, Homo sapiens
PRLTNLSSN

SEQ ID NO: 117070 - protein, 9 aa, Homo sapiens
RLTNLSSNS

SEQ ID NO: 117071 - protein, 9 aa, Homo sapiens
LTNLSSNSD

SEQ ID NO: 117072 - protein, 9 aa, Homo sapiens
TNLSSNSDV

SEQ ID NO: 117073 - protein, 9 aa, Homo sapiens
MRQSLLFLT

SEQ ID NO: 117074 - protein, 9 aa, Homo sapiens
RQSLLFLTS

SEQ ID NO: 117075 - protein, 9 aa, Homo sapiens
QSLLFLTSV

SEQ ID NO: 117076 - protein, 9 aa, Homo sapiens
SLLFLTSVV

SEQ ID NO: 117077 - protein, 9 aa, Homo sapiens
LLFLTSVVP

SEQ ID NO: 117078 - protein, 9 aa, Homo sapiens
LFLTSVVPF

SEQ ID NO: 117079 - protein, 9 aa, Homo sapiens
FLTSVVPFV

SEQ ID NO: 117080 - protein, 9 aa, Homo sapiens
LTSVVPFVL

SEQ ID NO: 117081 - protein, 9 aa, Homo sapiens
TSVVPFVLA

SEQ ID NO: 117082 - protein, 9 aa, Homo sapiens
SVVPFVLAP

SEQ ID NO: 117083 - protein, 9 aa, Homo sapiens
VVPFVLAPR

SEQ ID NO: 117084 - protein, 9 aa, Homo sapiens
VPFVLAPRP

SEQ ID NO: 117085 - protein, 9 aa, Homo sapiens
PFVLAPRPP

SEQ ID NO: 117086 - protein, 9 aa, Homo sapiens
FVLAPRPPD

SEQ ID NO: 117087 - protein, 9 aa, Homo sapiens
VLAPRPPDD

SEQ ID NO: 117088 - protein, 9 aa, Homo sapiens
LAPRPPDDP

SEQ ID NO: 117089 - protein, 9 aa, Homo sapiens
APRPPDDPG

SEQ ID NO: 117090 - protein, 9 aa, Homo sapiens
PRPPDDPGF

SEQ ID NO: 117091 - protein, 9 aa, Homo sapiens
RPPDDPGFG

SEQ ID NO: 117092 - protein, 9 aa, Homo sapiens
PPDDPGFGP

SEQ ID NO: 117093 - protein, 9 aa, Homo sapiens
PDDPGFGPH

SEQ ID NO: 117094 - protein, 9 aa, Homo sapiens
DDPGFGPHQ

SEQ ID NO: 117095 - protein, 9 aa, Homo sapiens
DPGFGPHQR

SEQ ID NO: 117096 - protein, 9 aa, Homo sapiens
PGFGPHQRL

SEQ ID NO: 117097 - protein, 9 aa, Homo sapiens
GFGPHQRLE

SEQ ID NO: 117098 - protein, 9 aa, Homo sapiens
FGPHQRLEK

SEQ ID NO: 117099 - protein, 9 aa, Homo sapiens
GPHQRLEKL

SEQ ID NO: 117100 - protein, 9 aa, Homo sapiens
PHQRLEKLD

SEQ ID NO: 117101 - protein, 9 aa, Homo sapiens
HQRLEKLDS

SEQ ID NO: 117102 - protein, 9 aa, Homo sapiens
QRLEKLDSL

SEQ ID NO: 117103 - protein, 9 aa, Homo sapiens
RLEKLDSLL

SEQ ID NO: 117104 - protein, 9 aa, Homo sapiens
LEKLDSLLS

SEQ ID NO: 117105 - protein, 9 aa, Homo sapiens
EKLDSLLSD

SEQ ID NO: 117106 - protein, 9 aa, Homo sapiens
KLDSLLSDY

SEQ ID NO: 117107 - protein, 9 aa, Homo sapiens
LDSLLSDYD

SEQ ID NO: 117108 - protein, 9 aa, Homo sapiens
DSLLSDYDI

SEQ ID NO: 117109 - protein, 9 aa, Homo sapiens
SLLSDYDIL

SEQ ID NO: 117110 - protein, 9 aa, Homo sapiens
LLSDYDILS

SEQ ID NO: 117111 - protein, 9 aa, Homo sapiens
LSDYDILSL

SEQ ID NO: 117112 - protein, 9 aa, Homo sapiens
SDYDILSLS

SEQ ID NO: 117113 - protein, 9 aa, Homo sapiens
DYDILSLSN

SEQ ID NO: 117114 - protein, 9 aa, Homo sapiens
YDILSLSNI

SEQ ID NO: 117115 - protein, 9 aa, Homo sapiens
DILSLSNIQ

SEQ ID NO: 117116 - protein, 9 aa, Homo sapiens
ILSLSNIQQ

SEQ ID NO: 117117 - protein, 9 aa, Homo sapiens
LSLSNIQQH

SEQ ID NO: 117118 - protein, 9 aa, Homo sapiens
SLSNIQQHS

SEQ ID NO: 117119 - protein, 9 aa, Homo sapiens
LSNIQQHSV

SEQ ID NO: 117120 - protein, 9 aa, Homo sapiens
SNIQQHSVR

SEQ ID NO: 117121 - protein, 9 aa, Homo sapiens
NIQQHSVRK

SEQ ID NO: 117122 - protein, 9 aa, Homo sapiens
IQQHSVRKR

SEQ ID NO: 117123 - protein, 9 aa, Homo sapiens
QQHSVRKRD

SEQ ID NO: 117124 - protein, 9 aa, Homo sapiens
QHSVRKRDL

SEQ ID NO: 117125 - protein, 9 aa, Homo sapiens
HSVRKRDLQ

SEQ ID NO: 117126 - protein, 9 aa, Homo sapiens
SVRKRDLQT

SEQ ID NO: 117127 - protein, 9 aa, Homo sapiens
VRKRDLQTS

SEQ ID NO: 117128 - protein, 9 aa, Homo sapiens
RKRDLQTST

SEQ ID NO: 117129 - protein, 9 aa, Homo sapiens
KRDLQTSTH

SEQ ID NO: 117130 - protein, 9 aa, Homo sapiens
RDLQTSTHV

SEQ ID NO: 117131 - protein, 9 aa, Homo sapiens
DLQTSTHVE

SEQ ID NO: 117132 - protein, 9 aa, Homo sapiens
LQTSTHVET

SEQ ID NO: 117133 - protein, 9 aa, Homo sapiens
QTSTHVETL

SEQ ID NO: 117134 - protein, 9 aa, Homo sapiens
TSTHVETLL

SEQ ID NO: 117135 - protein, 9 aa, Homo sapiens
STHVETLLT

SEQ ID NO: 117136 - protein, 9 aa, Homo sapiens
THVETLLTF

SEQ ID NO: 117137 - protein, 9 aa, Homo sapiens
HVETLLTFS

SEQ ID NO: 117138 - protein, 9 aa, Homo sapiens
VETLLTFSA

SEQ ID NO: 117139 - protein, 9 aa, Homo sapiens
ETLLTFSAL

SEQ ID NO: 117140 - protein, 9 aa, Homo sapiens
TLLTFSALK

SEQ ID NO: 117141 - protein, 9 aa, Homo sapiens
LLTFSALKR

SEQ ID NO: 117142 - protein, 9 aa, Homo sapiens
LTFSALKRH

SEQ ID NO: 117143 - protein, 9 aa, Homo sapiens
TFSALKRHF

SEQ ID NO: 117144 - protein, 9 aa, Homo sapiens
FSALKRHFK

SEQ ID NO: 117145 - protein, 9 aa, Homo sapiens
SALKRHFKL

SEQ ID NO: 117146 - protein, 9 aa, Homo sapiens
ALKRHFKLY

SEQ ID NO: 117147 - protein, 9 aa, Homo sapiens
LKRHFKLYL

SEQ ID NO: 117148 - protein, 9 aa, Homo sapiens
KRHFKLYLT

SEQ ID NO: 117149 - protein, 9 aa, Homo sapiens
RHFKLYLTS

SEQ ID NO: 117150 - protein, 9 aa, Homo sapiens
HFKLYLTSS

SEQ ID NO: 117151 - protein, 9 aa, Homo sapiens
FKLYLTSST

SEQ ID NO: 117152 - protein, 9 aa, Homo sapiens
KLYLTSSTE

SEQ ID NO: 117153 - protein, 9 aa, Homo sapiens
LYLTSSTER

SEQ ID NO: 117154 - protein, 9 aa, Homo sapiens
YLTSSTERF

SEQ ID NO: 117155 - protein, 9 aa, Homo sapiens
LTSSTERFS

SEQ ID NO: 117156 - protein, 9 aa, Homo sapiens
TSSTERFSQ

SEQ ID NO: 117157 - protein, 9 aa, Homo sapiens
SSTERFSQN

SEQ ID NO: 117158 - protein, 9 aa, Homo sapiens
STERFSQNF

SEQ ID NO: 117159 - protein, 9 aa, Homo sapiens
TERFSQNFK

SEQ ID NO: 117160 - protein, 9 aa, Homo sapiens
ERFSQNFKV

SEQ ID NO: 117161 - protein, 9 aa, Homo sapiens
RFSQNFKVV

SEQ ID NO: 117162 - protein, 9 aa, Homo sapiens
FSQNFKVVV

SEQ ID NO: 117163 - protein, 9 aa, Homo sapiens
SQNFKVVVV

SEQ ID NO: 117164 - protein, 9 aa, Homo sapiens
QNFKVVVVD

SEQ ID NO: 117165 - protein, 9 aa, Homo sapiens
NFKVVVVDG

SEQ ID NO: 117166 - protein, 9 aa, Homo sapiens
FKVVVVDGK

SEQ ID NO: 117167 - protein, 9 aa, Homo sapiens
KVVVVDGKN

SEQ ID NO: 117168 - protein, 9 aa, Homo sapiens
VVVVDGKNE

SEQ ID NO: 117169 - protein, 9 aa, Homo sapiens
VVVDGKNES

SEQ ID NO: 117170 - protein, 9 aa, Homo sapiens
VVDGKNESE

SEQ ID NO: 117171 - protein, 9 aa, Homo sapiens
VDGKNESEY

SEQ ID NO: 117172 - protein, 9 aa, Homo sapiens
DGKNESEYT

SEQ ID NO: 117173 - protein, 9 aa, Homo sapiens
GKNESEYTV

SEQ ID NO: 117174 - protein, 9 aa, Homo sapiens
KNESEYTVK

SEQ ID NO: 117175 - protein, 9 aa, Homo sapiens
NESEYTVKW

SEQ ID NO: 117176 - protein, 9 aa, Homo sapiens
ESEYTVKWQ

SEQ ID NO: 117177 - protein, 9 aa, Homo sapiens
SEYTVKWQD

SEQ ID NO: 117178 - protein, 9 aa, Homo sapiens
EYTVKWQDF

SEQ ID NO: 117179 - protein, 9 aa, Homo sapiens
YTVKWQDFF

SEQ ID NO: 117180 - protein, 9 aa, Homo sapiens
TVKWQDFFT

SEQ ID NO: 117181 - protein, 9 aa, Homo sapiens
VKWQDFFTG

SEQ ID NO: 117182 - protein, 9 aa, Homo sapiens
KWQDFFTGH

SEQ ID NO: 117183 - protein, 9 aa, Homo sapiens
WQDFFTGHV

SEQ ID NO: 117184 - protein, 9 aa, Homo sapiens
QDFFTGHVV

SEQ ID NO: 117185 - protein, 9 aa, Homo sapiens
DFFTGHVVG

SEQ ID NO: 117186 - protein, 9 aa, Homo sapiens
FFTGHVVGE

SEQ ID NO: 117187 - protein, 9 aa, Homo sapiens
FTGHVVGEP

SEQ ID NO: 117188 - protein, 9 aa, Homo sapiens
TGHVVGEPD

SEQ ID NO: 117189 - protein, 9 aa, Homo sapiens
GHVVGEPDS

SEQ ID NO: 117190 - protein, 9 aa, Homo sapiens
HVVGEPDSR

SEQ ID NO: 117191 - protein, 9 aa, Homo sapiens
VVGEPDSRV

SEQ ID NO: 117192 - protein, 9 aa, Homo sapiens
VGEPDSRVL

SEQ ID NO: 117193 - protein, 9 aa, Homo sapiens
GEPDSRVLA

SEQ ID NO: 117194 - protein, 9 aa, Homo sapiens
EPDSRVLAH

SEQ ID NO: 117195 - protein, 9 aa, Homo sapiens
PDSRVLAHI

SEQ ID NO: 117196 - protein, 9 aa, Homo sapiens
DSRVLAHIR

SEQ ID NO: 117197 - protein, 9 aa, Homo sapiens
SRVLAHIRD

SEQ ID NO: 117198 - protein, 9 aa, Homo sapiens
RVLAHIRDD

SEQ ID NO: 117199 - protein, 9 aa, Homo sapiens
VLAHIRDDD

SEQ ID NO: 117200 - protein, 9 aa, Homo sapiens
LAHIRDDDV

SEQ ID NO: 117201 - protein, 9 aa, Homo sapiens
AHIRDDDVI

SEQ ID NO: 117202 - protein, 9 aa, Homo sapiens
HIRDDDVII

SEQ ID NO: 117203 - protein, 9 aa, Homo sapiens
IRDDDVIIR

SEQ ID NO: 117204 - protein, 9 aa, Homo sapiens
RDDDVIIRI

SEQ ID NO: 117205 - protein, 9 aa, Homo sapiens
DDDVIIRIN

SEQ ID NO: 117206 - protein, 9 aa, Homo sapiens
DDVIIRINT

SEQ ID NO: 117207 - protein, 9 aa, Homo sapiens
DVIIRINTD

SEQ ID NO: 117208 - protein, 9 aa, Homo sapiens
VIIRINTDG

SEQ ID NO: 117209 - protein, 9 aa, Homo sapiens
IIRINTDGA

SEQ ID NO: 117210 - protein, 9 aa, Homo sapiens
IRINTDGAE

SEQ ID NO: 117211 - protein, 9 aa, Homo sapiens
RINTDGAEY

SEQ ID NO: 117212 - protein, 9 aa, Homo sapiens
INTDGAEYN

SEQ ID NO: 117213 - protein, 9 aa, Homo sapiens
NTDGAEYNI

SEQ ID NO: 117214 - protein, 9 aa, Homo sapiens
TDGAEYNIE

SEQ ID NO: 117215 - protein, 9 aa, Homo sapiens
DGAEYNIEP

SEQ ID NO: 117216 - protein, 9 aa, Homo sapiens
GAEYNIEPL

SEQ ID NO: 117217 - protein, 9 aa, Homo sapiens
AEYNIEPLW

SEQ ID NO: 117218 - protein, 9 aa, Homo sapiens
EYNIEPLWR

SEQ ID NO: 117219 - protein, 9 aa, Homo sapiens
YNIEPLWRF

SEQ ID NO: 117220 - protein, 9 aa, Homo sapiens
NIEPLWRFV

SEQ ID NO: 117221 - protein, 9 aa, Homo sapiens
IEPLWRFVN

SEQ ID NO: 117222 - protein, 9 aa, Homo sapiens
EPLWRFVND

SEQ ID NO: 117223 - protein, 9 aa, Homo sapiens
PLWRFVNDT

SEQ ID NO: 117224 - protein, 9 aa, Homo sapiens
LWRFVNDTK

SEQ ID NO: 117225 - protein, 9 aa, Homo sapiens
WRFVNDTKD

SEQ ID NO: 117226 - protein, 9 aa, Homo sapiens
RFVNDTKDK

SEQ ID NO: 117227 - protein, 9 aa, Homo sapiens
FVNDTKDKR

SEQ ID NO: 117228 - protein, 9 aa, Homo sapiens
VNDTKDKRM

SEQ ID NO: 117229 - protein, 9 aa, Homo sapiens
NDTKDKRML

SEQ ID NO: 117230 - protein, 9 aa, Homo sapiens
DTKDKRMLV

SEQ ID NO: 117231 - protein, 9 aa, Homo sapiens
TKDKRMLVY

SEQ ID NO: 117232 - protein, 9 aa, Homo sapiens
KDKRMLVYK

SEQ ID NO: 117233 - protein, 9 aa, Homo sapiens
DKRMLVYKS

SEQ ID NO: 117234 - protein, 9 aa, Homo sapiens
KRMLVYKSE

SEQ ID NO: 117235 - protein, 9 aa, Homo sapiens
RMLVYKSED

SEQ ID NO: 117236 - protein, 9 aa, Homo sapiens
MLVYKSEDI

SEQ ID NO: 117237 - protein, 9 aa, Homo sapiens
LVYKSEDIK

SEQ ID NO: 117238 - protein, 9 aa, Homo sapiens
VYKSEDIKN

SEQ ID NO: 117239 - protein, 9 aa, Homo sapiens
YKSEDIKNV

SEQ ID NO: 117240 - protein, 9 aa, Homo sapiens
KSEDIKNVS

SEQ ID NO: 117241 - protein, 9 aa, Homo sapiens
SEDIKNVSR

SEQ ID NO: 117242 - protein, 9 aa, Homo sapiens
EDIKNVSRL

SEQ ID NO: 117243 - protein, 9 aa, Homo sapiens
DIKNVSRLQ

SEQ ID NO: 117244 - protein, 9 aa, Homo sapiens
IKNVSRLQS

SEQ ID NO: 117245 - protein, 9 aa, Homo sapiens
KNVSRLQSP

SEQ ID NO: 117246 - protein, 9 aa, Homo sapiens
NVSRLQSPK

SEQ ID NO: 117247 - protein, 9 aa, Homo sapiens
VSRLQSPKV

SEQ ID NO: 117248 - protein, 9 aa, Homo sapiens
SRLQSPKVC

SEQ ID NO: 117249 - protein, 9 aa, Homo sapiens
RLQSPKVCG

SEQ ID NO: 117250 - protein, 9 aa, Homo sapiens
LQSPKVCGY

SEQ ID NO: 117251 - protein, 9 aa, Homo sapiens
QSPKVCGYL

SEQ ID NO: 117252 - protein, 9 aa, Homo sapiens
SPKVCGYLK

SEQ ID NO: 117253 - protein, 9 aa, Homo sapiens
PKVCGYLKV

SEQ ID NO: 117254 - protein, 9 aa, Homo sapiens
KVCGYLKVD

SEQ ID NO: 117255 - protein, 9 aa, Homo sapiens
VCGYLKVDN

SEQ ID NO: 117256 - protein, 9 aa, Homo sapiens
CGYLKVDNE

SEQ ID NO: 117257 - protein, 9 aa, Homo sapiens
GYLKVDNEE

SEQ ID NO: 117258 - protein, 9 aa, Homo sapiens
YLKVDNEEL

SEQ ID NO: 117259 - protein, 9 aa, Homo sapiens
LKVDNEELL

SEQ ID NO: 117260 - protein, 9 aa, Homo sapiens
KVDNEELLP

SEQ ID NO: 117261 - protein, 9 aa, Homo sapiens
VDNEELLPK

SEQ ID NO: 117262 - protein, 9 aa, Homo sapiens
DNEELLPKG

SEQ ID NO: 117263 - protein, 9 aa, Homo sapiens
NEELLPKGL

SEQ ID NO: 117264 - protein, 9 aa, Homo sapiens
EELLPKGLV

SEQ ID NO: 117265 - protein, 9 aa, Homo sapiens
ELLPKGLVD

SEQ ID NO: 117266 - protein, 9 aa, Homo sapiens
LLPKGLVDR

SEQ ID NO: 117267 - protein, 9 aa, Homo sapiens
LPKGLVDRE

SEQ ID NO: 117268 - protein, 9 aa, Homo sapiens
PKGLVDREP

SEQ ID NO: 117269 - protein, 9 aa, Homo sapiens
KGLVDREPP

SEQ ID NO: 117270 - protein, 9 aa, Homo sapiens
GLVDREPPE

SEQ ID NO: 117271 - protein, 9 aa, Homo sapiens
LVDREPPEE

SEQ ID NO: 117272 - protein, 9 aa, Homo sapiens
VDREPPEEL

SEQ ID NO: 117273 - protein, 9 aa, Homo sapiens
DREPPEELV

SEQ ID NO: 117274 - protein, 9 aa, Homo sapiens
REPPEELVH

SEQ ID NO: 117275 - protein, 9 aa, Homo sapiens
EPPEELVHR

SEQ ID NO: 117276 - protein, 9 aa, Homo sapiens
PPEELVHRV

SEQ ID NO: 117277 - protein, 9 aa, Homo sapiens
PEELVHRVK

SEQ ID NO: 117278 - protein, 9 aa, Homo sapiens
EELVHRVKR

SEQ ID NO: 117279 - protein, 9 aa, Homo sapiens
ELVHRVKRR

SEQ ID NO: 117280 - protein, 9 aa, Homo sapiens
LVHRVKRRA

SEQ ID NO: 117281 - protein, 9 aa, Homo sapiens
VHRVKRRAD

SEQ ID NO: 117282 - protein, 9 aa, Homo sapiens
HRVKRRADP

SEQ ID NO: 117283 - protein, 9 aa, Homo sapiens
RVKRRADPD

SEQ ID NO: 117284 - protein, 9 aa, Homo sapiens
VKRRADPDP

SEQ ID NO: 117285 - protein, 9 aa, Homo sapiens
KRRADPDPM

SEQ ID NO: 117286 - protein, 9 aa, Homo sapiens
RRADPDPMK

SEQ ID NO: 117287 - protein, 9 aa, Homo sapiens
RADPDPMKN

SEQ ID NO: 117288 - protein, 9 aa, Homo sapiens
ADPDPMKNT

SEQ ID NO: 117289 - protein, 9 aa, Homo sapiens
DPDPMKNTC

SEQ ID NO: 117290 - protein, 9 aa, Homo sapiens
PDPMKNTCK

SEQ ID NO: 117291 - protein, 9 aa, Homo sapiens
DPMKNTCKL

SEQ ID NO: 117292 - protein, 9 aa, Homo sapiens
PMKNTCKLL

SEQ ID NO: 117293 - protein, 9 aa, Homo sapiens
MKNTCKLLV

SEQ ID NO: 117294 - protein, 9 aa, Homo sapiens
KNTCKLLVV

SEQ ID NO: 117295 - protein, 9 aa, Homo sapiens
NTCKLLVVA

SEQ ID NO: 117296 - protein, 9 aa, Homo sapiens
TCKLLVVAD

SEQ ID NO: 117297 - protein, 9 aa, Homo sapiens
CKLLVVADH

SEQ ID NO: 117298 - protein, 9 aa, Homo sapiens
KLLVVADHR

SEQ ID NO: 117299 - protein, 9 aa, Homo sapiens
LLVVADHRF

SEQ ID NO: 117300 - protein, 9 aa, Homo sapiens
LVVADHRFY

SEQ ID NO: 117301 - protein, 9 aa, Homo sapiens
VVADHRFYR

SEQ ID NO: 117302 - protein, 9 aa, Homo sapiens
VADHRFYRY

SEQ ID NO: 117303 - protein, 9 aa, Homo sapiens
ADHRFYRYM

SEQ ID NO: 117304 - protein, 9 aa, Homo sapiens
DHRFYRYMG

SEQ ID NO: 117305 - protein, 9 aa, Homo sapiens
HRFYRYMGR

SEQ ID NO: 117306 - protein, 9 aa, Homo sapiens
RFYRYMGRG

SEQ ID NO: 117307 - protein, 9 aa, Homo sapiens
FYRYMGRGE

SEQ ID NO: 117308 - protein, 9 aa, Homo sapiens
YRYMGRGEE

SEQ ID NO: 117309 - protein, 9 aa, Homo sapiens
RYMGRGEES

SEQ ID NO: 117310 - protein, 9 aa, Homo sapiens
YMGRGEEST

SEQ ID NO: 117311 - protein, 9 aa, Homo sapiens
MGRGEESTT

SEQ ID NO: 117312 - protein, 9 aa, Homo sapiens
GRGEESTTT

SEQ ID NO: 117313 - protein, 9 aa, Homo sapiens
RGEESTTTN

SEQ ID NO: 117314 - protein, 9 aa, Homo sapiens
GEESTTTNY

SEQ ID NO: 117315 - protein, 9 aa, Homo sapiens
EESTTTNYL

SEQ ID NO: 117316 - protein, 9 aa, Homo sapiens
ESTTTNYLI

SEQ ID NO: 117317 - protein, 9 aa, Homo sapiens
STTTNYLIE

SEQ ID NO: 117318 - protein, 9 aa, Homo sapiens
TTTNYLIEL

SEQ ID NO: 117319 - protein, 9 aa, Homo sapiens
TTNYLIELI

SEQ ID NO: 117320 - protein, 9 aa, Homo sapiens
TNYLIELID

SEQ ID NO: 117321 - protein, 9 aa, Homo sapiens
NYLIELIDR

SEQ ID NO: 117322 - protein, 9 aa, Homo sapiens
YLIELIDRV

SEQ ID NO: 117323 - protein, 9 aa, Homo sapiens
LIELIDRVD

SEQ ID NO: 117324 - protein, 9 aa, Homo sapiens
IELIDRVDD

SEQ ID NO: 117325 - protein, 9 aa, Homo sapiens
ELIDRVDDI

SEQ ID NO: 117326 - protein, 9 aa, Homo sapiens
LIDRVDDIY

SEQ ID NO: 117327 - protein, 9 aa, Homo sapiens
IDRVDDIYR

SEQ ID NO: 117328 - protein, 9 aa, Homo sapiens
DRVDDIYRN

SEQ ID NO: 117329 - protein, 9 aa, Homo sapiens
RVDDIYRNT

SEQ ID NO: 117330 - protein, 9 aa, Homo sapiens
VDDIYRNTS

SEQ ID NO: 117331 - protein, 9 aa, Homo sapiens
DDIYRNTSW

SEQ ID NO: 117332 - protein, 9 aa, Homo sapiens
DIYRNTSWD

SEQ ID NO: 117333 - protein, 9 aa, Homo sapiens
IYRNTSWDN

SEQ ID NO: 117334 - protein, 9 aa, Homo sapiens
YRNTSWDNA

SEQ ID NO: 117335 - protein, 9 aa, Homo sapiens
RNTSWDNAG

SEQ ID NO: 117336 - protein, 9 aa, Homo sapiens
NTSWDNAGF

SEQ ID NO: 117337 - protein, 9 aa, Homo sapiens
TSWDNAGFK

SEQ ID NO: 117338 - protein, 9 aa, Homo sapiens
SWDNAGFKG

SEQ ID NO: 117339 - protein, 9 aa, Homo sapiens
WDNAGFKGY

SEQ ID NO: 117340 - protein, 9 aa, Homo sapiens
DNAGFKGYG

SEQ ID NO: 117341 - protein, 9 aa, Homo sapiens
NAGFKGYGI

SEQ ID NO: 117342 - protein, 9 aa, Homo sapiens
AGFKGYGIQ

SEQ ID NO: 117343 - protein, 9 aa, Homo sapiens
GFKGYGIQI

SEQ ID NO: 117344 - protein, 9 aa, Homo sapiens
FKGYGIQIE

SEQ ID NO: 117345 - protein, 9 aa, Homo sapiens
KGYGIQIEQ

SEQ ID NO: 117346 - protein, 9 aa, Homo sapiens
GYGIQIEQI

SEQ ID NO: 117347 - protein, 9 aa, Homo sapiens
YGIQIEQIR

SEQ ID NO: 117348 - protein, 9 aa, Homo sapiens
GIQIEQIRI

SEQ ID NO: 117349 - protein, 9 aa, Homo sapiens
IQIEQIRIL

SEQ ID NO: 117350 - protein, 9 aa, Homo sapiens
QIEQIRILK

SEQ ID NO: 117351 - protein, 9 aa, Homo sapiens
IEQIRILKS

SEQ ID NO: 117352 - protein, 9 aa, Homo sapiens
EQIRILKSP

SEQ ID NO: 117353 - protein, 9 aa, Homo sapiens
QIRILKSPQ

SEQ ID NO: 117354 - protein, 9 aa, Homo sapiens
IRILKSPQE

SEQ ID NO: 117355 - protein, 9 aa, Homo sapiens
RILKSPQEV

SEQ ID NO: 117356 - protein, 9 aa, Homo sapiens
ILKSPQEVK

SEQ ID NO: 117357 - protein, 9 aa, Homo sapiens
LKSPQEVKP

SEQ ID NO: 117358 - protein, 9 aa, Homo sapiens
KSPQEVKPG

SEQ ID NO: 117359 - protein, 9 aa, Homo sapiens
SPQEVKPGE

SEQ ID NO: 117360 - protein, 9 aa, Homo sapiens
PQEVKPGEK

SEQ ID NO: 117361 - protein, 9 aa, Homo sapiens
QEVKPGEKH

SEQ ID NO: 117362 - protein, 9 aa, Homo sapiens
EVKPGEKHY

SEQ ID NO: 117363 - protein, 9 aa, Homo sapiens
VKPGEKHYN

SEQ ID NO: 117364 - protein, 9 aa, Homo sapiens
KPGEKHYNM

SEQ ID NO: 117365 - protein, 9 aa, Homo sapiens
PGEKHYNMA

SEQ ID NO: 117366 - protein, 9 aa, Homo sapiens
GEKHYNMAK

SEQ ID NO: 117367 - protein, 9 aa, Homo sapiens
EKHYNMAKS

SEQ ID NO: 117368 - protein, 9 aa, Homo sapiens
KHYNMAKSY

SEQ ID NO: 117369 - protein, 9 aa, Homo sapiens
HYNMAKSYP

SEQ ID NO: 117370 - protein, 9 aa, Homo sapiens
YNMAKSYPN

SEQ ID NO: 117371 - protein, 9 aa, Homo sapiens
NMAKSYPNE

SEQ ID NO: 117372 - protein, 9 aa, Homo sapiens
MAKSYPNEE

SEQ ID NO: 117373 - protein, 9 aa, Homo sapiens
AKSYPNEEK

SEQ ID NO: 117374 - protein, 9 aa, Homo sapiens
KSYPNEEKD

SEQ ID NO: 117375 - protein, 9 aa, Homo sapiens
SYPNEEKDA

SEQ ID NO: 117376 - protein, 9 aa, Homo sapiens
YPNEEKDAW

SEQ ID NO: 117377 - protein, 9 aa, Homo sapiens
PNEEKDAWD

SEQ ID NO: 117378 - protein, 9 aa, Homo sapiens
NEEKDAWDV

SEQ ID NO: 117379 - protein, 9 aa, Homo sapiens
EEKDAWDVK

SEQ ID NO: 117380 - protein, 9 aa, Homo sapiens
EKDAWDVKM

SEQ ID NO: 117381 - protein, 9 aa, Homo sapiens
KDAWDVKML

SEQ ID NO: 117382 - protein, 9 aa, Homo sapiens
DAWDVKMLL

SEQ ID NO: 117383 - protein, 9 aa, Homo sapiens
AWDVKMLLE

SEQ ID NO: 117384 - protein, 9 aa, Homo sapiens
WDVKMLLEQ

SEQ ID NO: 117385 - protein, 9 aa, Homo sapiens
DVKMLLEQF

SEQ ID NO: 117386 - protein, 9 aa, Homo sapiens
VKMLLEQFS

SEQ ID NO: 117387 - protein, 9 aa, Homo sapiens
KMLLEQFSF

SEQ ID NO: 117388 - protein, 9 aa, Homo sapiens
MLLEQFSFD

SEQ ID NO: 117389 - protein, 9 aa, Homo sapiens
LLEQFSFDI

SEQ ID NO: 117390 - protein, 9 aa, Homo sapiens
LEQFSFDIA

SEQ ID NO: 117391 - protein, 9 aa, Homo sapiens
EQFSFDIAE

SEQ ID NO: 117392 - protein, 9 aa, Homo sapiens
QFSFDIAEE

SEQ ID NO: 117393 - protein, 9 aa, Homo sapiens
FSFDIAEEA

SEQ ID NO: 117394 - protein, 9 aa, Homo sapiens
SFDIAEEAS

SEQ ID NO: 117395 - protein, 9 aa, Homo sapiens
FDIAEEASK

SEQ ID NO: 117396 - protein, 9 aa, Homo sapiens
DIAEEASKV

SEQ ID NO: 117397 - protein, 9 aa, Homo sapiens
IAEEASKVC

SEQ ID NO: 117398 - protein, 9 aa, Homo sapiens
AEEASKVCL

SEQ ID NO: 117399 - protein, 9 aa, Homo sapiens
EEASKVCLA

SEQ ID NO: 117400 - protein, 9 aa, Homo sapiens
EASKVCLAH

SEQ ID NO: 117401 - protein, 9 aa, Homo sapiens
ASKVCLAHL

SEQ ID NO: 117402 - protein, 9 aa, Homo sapiens
SKVCLAHLF

SEQ ID NO: 117403 - protein, 9 aa, Homo sapiens
KVCLAHLFT

SEQ ID NO: 117404 - protein, 9 aa, Homo sapiens
VCLAHLFTY

SEQ ID NO: 117405 - protein, 9 aa, Homo sapiens
CLAHLFTYQ

SEQ ID NO: 117406 - protein, 9 aa, Homo sapiens
LAHLFTYQD

SEQ ID NO: 117407 - protein, 9 aa, Homo sapiens
AHLFTYQDF

SEQ ID NO: 117408 - protein, 9 aa, Homo sapiens
HLFTYQDFD

SEQ ID NO: 117409 - protein, 9 aa, Homo sapiens
LFTYQDFDM

SEQ ID NO: 117410 - protein, 9 aa, Homo sapiens
FTYQDFDMG

SEQ ID NO: 117411 - protein, 9 aa, Homo sapiens
TYQDFDMGT

SEQ ID NO: 117412 - protein, 9 aa, Homo sapiens
YQDFDMGTL

SEQ ID NO: 117413 - protein, 9 aa, Homo sapiens
QDFDMGTLG

SEQ ID NO: 117414 - protein, 9 aa, Homo sapiens
DFDMGTLGL

SEQ ID NO: 117415 - protein, 9 aa, Homo sapiens
FDMGTLGLA

SEQ ID NO: 117416 - protein, 9 aa, Homo sapiens
DMGTLGLAY

SEQ ID NO: 117417 - protein, 9 aa, Homo sapiens
MGTLGLAYV

SEQ ID NO: 117418 - protein, 9 aa, Homo sapiens
GTLGLAYVG

SEQ ID NO: 117419 - protein, 9 aa, Homo sapiens
TLGLAYVGS

SEQ ID NO: 117420 - protein, 9 aa, Homo sapiens
LGLAYVGSP

SEQ ID NO: 117421 - protein, 9 aa, Homo sapiens
GLAYVGSPR

SEQ ID NO: 117422 - protein, 9 aa, Homo sapiens
LAYVGSPRA

SEQ ID NO: 117423 - protein, 9 aa, Homo sapiens
AYVGSPRAN

SEQ ID NO: 117424 - protein, 9 aa, Homo sapiens
YVGSPRANS

SEQ ID NO: 117425 - protein, 9 aa, Homo sapiens
VGSPRANSH

SEQ ID NO: 117426 - protein, 9 aa, Homo sapiens
GSPRANSHG

SEQ ID NO: 117427 - protein, 9 aa, Homo sapiens
SPRANSHGG

SEQ ID NO: 117428 - protein, 9 aa, Homo sapiens
PRANSHGGV

SEQ ID NO: 117429 - protein, 9 aa, Homo sapiens
RANSHGGVC

SEQ ID NO: 117430 - protein, 9 aa, Homo sapiens
ANSHGGVCP

SEQ ID NO: 117431 - protein, 9 aa, Homo sapiens
NSHGGVCPK

SEQ ID NO: 117432 - protein, 9 aa, Homo sapiens
SHGGVCPKA

SEQ ID NO: 117433 - protein, 9 aa, Homo sapiens
HGGVCPKAY

SEQ ID NO: 117434 - protein, 9 aa, Homo sapiens
GGVCPKAYY

SEQ ID NO: 117435 - protein, 9 aa, Homo sapiens
GVCPKAYYS

SEQ ID NO: 117436 - protein, 9 aa, Homo sapiens
VCPKAYYSP

SEQ ID NO: 117437 - protein, 9 aa, Homo sapiens
CPKAYYSPV

SEQ ID NO: 117438 - protein, 9 aa, Homo sapiens
PKAYYSPVG

SEQ ID NO: 117439 - protein, 9 aa, Homo sapiens
KAYYSPVGK

SEQ ID NO: 117440 - protein, 9 aa, Homo sapiens
AYYSPVGKK

SEQ ID NO: 117441 - protein, 9 aa, Homo sapiens
YYSPVGKKN

SEQ ID NO: 117442 - protein, 9 aa, Homo sapiens
YSPVGKKNI

SEQ ID NO: 117443 - protein, 9 aa, Homo sapiens
SPVGKKNIY

SEQ ID NO: 117444 - protein, 9 aa, Homo sapiens
PVGKKNIYL

SEQ ID NO: 117445 - protein, 9 aa, Homo sapiens
VGKKNIYLN

SEQ ID NO: 117446 - protein, 9 aa, Homo sapiens
GKKNIYLNS

SEQ ID NO: 117447 - protein, 9 aa, Homo sapiens
KKNIYLNSG

SEQ ID NO: 117448 - protein, 9 aa, Homo sapiens
KNIYLNSGL

SEQ ID NO: 117449 - protein, 9 aa, Homo sapiens
NIYLNSGLT

SEQ ID NO: 117450 - protein, 9 aa, Homo sapiens
IYLNSGLTS

SEQ ID NO: 117451 - protein, 9 aa, Homo sapiens
YLNSGLTST

SEQ ID NO: 117452 - protein, 9 aa, Homo sapiens
LNSGLTSTK

SEQ ID NO: 117453 - protein, 9 aa, Homo sapiens
NSGLTSTKN

SEQ ID NO: 117454 - protein, 9 aa, Homo sapiens
SGLTSTKNY

SEQ ID NO: 117455 - protein, 9 aa, Homo sapiens
GLTSTKNYG

SEQ ID NO: 117456 - protein, 9 aa, Homo sapiens
LTSTKNYGK

SEQ ID NO: 117457 - protein, 9 aa, Homo sapiens
TSTKNYGKT

SEQ ID NO: 117458 - protein, 9 aa, Homo sapiens
STKNYGKTI

SEQ ID NO: 117459 - protein, 9 aa, Homo sapiens
TKNYGKTIL

SEQ ID NO: 117460 - protein, 9 aa, Homo sapiens
KNYGKTILT

SEQ ID NO: 117461 - protein, 9 aa, Homo sapiens
NYGKTILTK

SEQ ID NO: 117462 - protein, 9 aa, Homo sapiens
YGKTILTKE

SEQ ID NO: 117463 - protein, 9 aa, Homo sapiens
GKTILTKEA

SEQ ID NO: 117464 - protein, 9 aa, Homo sapiens
KTILTKEAD

SEQ ID NO: 117465 - protein, 9 aa, Homo sapiens
TILTKEADL

SEQ ID NO: 117466 - protein, 9 aa, Homo sapiens
ILTKEADLV

SEQ ID NO: 117467 - protein, 9 aa, Homo sapiens
LTKEADLVT

SEQ ID NO: 117468 - protein, 9 aa, Homo sapiens
TKEADLVTT

SEQ ID NO: 117469 - protein, 9 aa, Homo sapiens
KEADLVTTH

SEQ ID NO: 117470 - protein, 9 aa, Homo sapiens
EADLVTTHE

SEQ ID NO: 117471 - protein, 9 aa, Homo sapiens
ADLVTTHEL

SEQ ID NO: 117472 - protein, 9 aa, Homo sapiens
DLVTTHELG

SEQ ID NO: 117473 - protein, 9 aa, Homo sapiens
LVTTHELGH

SEQ ID NO: 117474 - protein, 9 aa, Homo sapiens
VTTHELGHN

SEQ ID NO: 117475 - protein, 9 aa, Homo sapiens
TTHELGHNF

SEQ ID NO: 117476 - protein, 9 aa, Homo sapiens
THELGHNFG

SEQ ID NO: 117477 - protein, 9 aa, Homo sapiens
HELGHNFGA

SEQ ID NO: 117478 - protein, 9 aa, Homo sapiens
ELGHNFGAE

SEQ ID NO: 117479 - protein, 9 aa, Homo sapiens
LGHNFGAEH

SEQ ID NO: 117480 - protein, 9 aa, Homo sapiens
GHNFGAEHD

SEQ ID NO: 117481 - protein, 9 aa, Homo sapiens
HNFGAEHDP

SEQ ID NO: 117482 - protein, 9 aa, Homo sapiens
NFGAEHDPD

SEQ ID NO: 117483 - protein, 9 aa, Homo sapiens
FGAEHDPDG

SEQ ID NO: 117484 - protein, 9 aa, Homo sapiens
GAEHDPDGL

SEQ ID NO: 117485 - protein, 9 aa, Homo sapiens
AEHDPDGLA

SEQ ID NO: 117486 - protein, 9 aa, Homo sapiens
EHDPDGLAE

SEQ ID NO: 117487 - protein, 9 aa, Homo sapiens
HDPDGLAEC

SEQ ID NO: 117488 - protein, 9 aa, Homo sapiens
DPDGLAECA

SEQ ID NO: 117489 - protein, 9 aa, Homo sapiens
PDGLAECAP

SEQ ID NO: 117490 - protein, 9 aa, Homo sapiens
DGLAECAPN

SEQ ID NO: 117491 - protein, 9 aa, Homo sapiens
GLAECAPNE

SEQ ID NO: 117492 - protein, 9 aa, Homo sapiens
LAECAPNED

SEQ ID NO: 117493 - protein, 9 aa, Homo sapiens
AECAPNEDQ

SEQ ID NO: 117494 - protein, 9 aa, Homo sapiens
ECAPNEDQG

SEQ ID NO: 117495 - protein, 9 aa, Homo sapiens
CAPNEDQGG

SEQ ID NO: 117496 - protein, 9 aa, Homo sapiens
APNEDQGGK

SEQ ID NO: 117497 - protein, 9 aa, Homo sapiens
PNEDQGGKY

SEQ ID NO: 117498 - protein, 9 aa, Homo sapiens
NEDQGGKYV

SEQ ID NO: 117499 - protein, 9 aa, Homo sapiens
EDQGGKYVM

SEQ ID NO: 117500 - protein, 9 aa, Homo sapiens
DQGGKYVMY

SEQ ID NO: 117501 - protein, 9 aa, Homo sapiens
QGGKYVMYP

SEQ ID NO: 117502 - protein, 9 aa, Homo sapiens
GGKYVMYPI

SEQ ID NO: 117503 - protein, 9 aa, Homo sapiens
GKYVMYPIA

SEQ ID NO: 117504 - protein, 9 aa, Homo sapiens
KYVMYPIAV

SEQ ID NO: 117505 - protein, 9 aa, Homo sapiens
YVMYPIAVS

SEQ ID NO: 117506 - protein, 9 aa, Homo sapiens
VMYPIAVSG

SEQ ID NO: 117507 - protein, 9 aa, Homo sapiens
MYPIAVSGD

SEQ ID NO: 117508 - protein, 9 aa, Homo sapiens
YPIAVSGDH

SEQ ID NO: 117509 - protein, 9 aa, Homo sapiens
PIAVSGDHE

SEQ ID NO: 117510 - protein, 9 aa, Homo sapiens
IAVSGDHEN

SEQ ID NO: 117511 - protein, 9 aa, Homo sapiens
AVSGDHENN

SEQ ID NO: 117512 - protein, 9 aa, Homo sapiens
VSGDHENNK

SEQ ID NO: 117513 - protein, 9 aa, Homo sapiens
SGDHENNKM

SEQ ID NO: 117514 - protein, 9 aa, Homo sapiens
GDHENNKMF

SEQ ID NO: 117515 - protein, 9 aa, Homo sapiens
DHENNKMFS

SEQ ID NO: 117516 - protein, 9 aa, Homo sapiens
HENNKMFSN

SEQ ID NO: 117517 - protein, 9 aa, Homo sapiens
ENNKMFSNC

SEQ ID NO: 117518 - protein, 9 aa, Homo sapiens
NNKMFSNCS

SEQ ID NO: 117519 - protein, 9 aa, Homo sapiens
NKMFSNCSK

SEQ ID NO: 117520 - protein, 9 aa, Homo sapiens
KMFSNCSKQ

SEQ ID NO: 117521 - protein, 9 aa, Homo sapiens
MFSNCSKQS

SEQ ID NO: 117522 - protein, 9 aa, Homo sapiens
FSNCSKQSI

SEQ ID NO: 117523 - protein, 9 aa, Homo sapiens
SNCSKQSIY

SEQ ID NO: 117524 - protein, 9 aa, Homo sapiens
NCSKQSIYK

SEQ ID NO: 117525 - protein, 9 aa, Homo sapiens
CSKQSIYKT

SEQ ID NO: 117526 - protein, 9 aa, Homo sapiens
SKQSIYKTI

SEQ ID NO: 117527 - protein, 9 aa, Homo sapiens
KQSIYKTIE

SEQ ID NO: 117528 - protein, 9 aa, Homo sapiens
QSIYKTIES

SEQ ID NO: 117529 - protein, 9 aa, Homo sapiens
SIYKTIESK

SEQ ID NO: 117530 - protein, 9 aa, Homo sapiens
IYKTIESKA

SEQ ID NO: 117531 - protein, 9 aa, Homo sapiens
YKTIESKAQ

SEQ ID NO: 117532 - protein, 9 aa, Homo sapiens
KTIESKAQE

SEQ ID NO: 117533 - protein, 9 aa, Homo sapiens
TIESKAQEC

SEQ ID NO: 117534 - protein, 9 aa, Homo sapiens
IESKAQECF

SEQ ID NO: 117535 - protein, 9 aa, Homo sapiens
ESKAQECFQ

SEQ ID NO: 117536 - protein, 9 aa, Homo sapiens
SKAQECFQE

SEQ ID NO: 117537 - protein, 9 aa, Homo sapiens
KAQECFQER

SEQ ID NO: 117538 - protein, 9 aa, Homo sapiens
AQECFQERS

SEQ ID NO: 117539 - protein, 9 aa, Homo sapiens
QECFQERSN

SEQ ID NO: 117540 - protein, 9 aa, Homo sapiens
ECFQERSNK

SEQ ID NO: 117541 - protein, 9 aa, Homo sapiens
CFQERSNKV

SEQ ID NO: 117542 - protein, 9 aa, Homo sapiens
FQERSNKVC

SEQ ID NO: 117543 - protein, 9 aa, Homo sapiens
QERSNKVCG

SEQ ID NO: 117544 - protein, 9 aa, Homo sapiens
ERSNKVCGN

SEQ ID NO: 117545 - protein, 9 aa, Homo sapiens
RSNKVCGNS

SEQ ID NO: 117546 - protein, 9 aa, Homo sapiens
SNKVCGNSR

SEQ ID NO: 117547 - protein, 9 aa, Homo sapiens
NKVCGNSRV

SEQ ID NO: 117548 - protein, 9 aa, Homo sapiens
KVCGNSRVD

SEQ ID NO: 117549 - protein, 9 aa, Homo sapiens
VCGNSRVDE

SEQ ID NO: 117550 - protein, 9 aa, Homo sapiens
CGNSRVDEG

SEQ ID NO: 117551 - protein, 9 aa, Homo sapiens
GNSRVDEGE

SEQ ID NO: 117552 - protein, 9 aa, Homo sapiens
NSRVDEGEE

SEQ ID NO: 117553 - protein, 9 aa, Homo sapiens
SRVDEGEEC

SEQ ID NO: 117554 - protein, 9 aa, Homo sapiens
RVDEGEECD

SEQ ID NO: 117555 - protein, 9 aa, Homo sapiens
VDEGEECDP

SEQ ID NO: 117556 - protein, 9 aa, Homo sapiens
DEGEECDPG

SEQ ID NO: 117557 - protein, 9 aa, Homo sapiens
EGEECDPGI

SEQ ID NO: 117558 - protein, 9 aa, Homo sapiens
GEECDPGIM

SEQ ID NO: 117559 - protein, 9 aa, Homo sapiens
EECDPGIMY

SEQ ID NO: 117560 - protein, 9 aa, Homo sapiens
ECDPGIMYL

SEQ ID NO: 117561 - protein, 9 aa, Homo sapiens
CDPGIMYLN

SEQ ID NO: 117562 - protein, 9 aa, Homo sapiens
DPGIMYLNN

SEQ ID NO: 117563 - protein, 9 aa, Homo sapiens
PGIMYLNND

SEQ ID NO: 117564 - protein, 9 aa, Homo sapiens
GIMYLNNDT

SEQ ID NO: 117565 - protein, 9 aa, Homo sapiens
IMYLNNDTC

SEQ ID NO: 117566 - protein, 9 aa, Homo sapiens
MYLNNDTCC

SEQ ID NO: 117567 - protein, 9 aa, Homo sapiens
YLNNDTCCN

SEQ ID NO: 117568 - protein, 9 aa, Homo sapiens
LNNDTCCNS

SEQ ID NO: 117569 - protein, 9 aa, Homo sapiens
NNDTCCNSD

SEQ ID NO: 117570 - protein, 9 aa, Homo sapiens
NDTCCNSDC

SEQ ID NO: 117571 - protein, 9 aa, Homo sapiens
DTCCNSDCT

SEQ ID NO: 117572 - protein, 9 aa, Homo sapiens
TCCNSDCTL

SEQ ID NO: 117573 - protein, 9 aa, Homo sapiens
CCNSDCTLK

SEQ ID NO: 117574 - protein, 9 aa, Homo sapiens
CNSDCTLKE

SEQ ID NO: 117575 - protein, 9 aa, Homo sapiens
NSDCTLKEG

SEQ ID NO: 117576 - protein, 9 aa, Homo sapiens
SDCTLKEGV

SEQ ID NO: 117577 - protein, 9 aa, Homo sapiens
DCTLKEGVQ

SEQ ID NO: 117578 - protein, 9 aa, Homo sapiens
CTLKEGVQC

SEQ ID NO: 117579 - protein, 9 aa, Homo sapiens
TLKEGVQCS

SEQ ID NO: 117580 - protein, 9 aa, Homo sapiens
LKEGVQCSD

SEQ ID NO: 117581 - protein, 9 aa, Homo sapiens
KEGVQCSDR

SEQ ID NO: 117582 - protein, 9 aa, Homo sapiens
EGVQCSDRN

SEQ ID NO: 117583 - protein, 9 aa, Homo sapiens
GVQCSDRNS

SEQ ID NO: 117584 - protein, 9 aa, Homo sapiens
VQCSDRNSP

SEQ ID NO: 117585 - protein, 9 aa, Homo sapiens
QCSDRNSPC

SEQ ID NO: 117586 - protein, 9 aa, Homo sapiens
CSDRNSPCC

SEQ ID NO: 117587 - protein, 9 aa, Homo sapiens
SDRNSPCCK

SEQ ID NO: 117588 - protein, 9 aa, Homo sapiens
DRNSPCCKN

SEQ ID NO: 117589 - protein, 9 aa, Homo sapiens
RNSPCCKNC

SEQ ID NO: 117590 - protein, 9 aa, Homo sapiens
NSPCCKNCQ

SEQ ID NO: 117591 - protein, 9 aa, Homo sapiens
SPCCKNCQF

SEQ ID NO: 117592 - protein, 9 aa, Homo sapiens
PCCKNCQFE

SEQ ID NO: 117593 - protein, 9 aa, Homo sapiens
CCKNCQFET

SEQ ID NO: 117594 - protein, 9 aa, Homo sapiens
CKNCQFETA

SEQ ID NO: 117595 - protein, 9 aa, Homo sapiens
KNCQFETAQ

SEQ ID NO: 117596 - protein, 9 aa, Homo sapiens
NCQFETAQK

SEQ ID NO: 117597 - protein, 9 aa, Homo sapiens
CQFETAQKK

SEQ ID NO: 117598 - protein, 9 aa, Homo sapiens
QFETAQKKC

SEQ ID NO: 117599 - protein, 9 aa, Homo sapiens
FETAQKKCQ

SEQ ID NO: 117600 - protein, 9 aa, Homo sapiens
ETAQKKCQE

SEQ ID NO: 117601 - protein, 9 aa, Homo sapiens
TAQKKCQEA

SEQ ID NO: 117602 - protein, 9 aa, Homo sapiens
AQKKCQEAI

SEQ ID NO: 117603 - protein, 9 aa, Homo sapiens
QKKCQEAIN

SEQ ID NO: 117604 - protein, 9 aa, Homo sapiens
KKCQEAINA

SEQ ID NO: 117605 - protein, 9 aa, Homo sapiens
KCQEAINAT

SEQ ID NO: 117606 - protein, 9 aa, Homo sapiens
CQEAINATC

SEQ ID NO: 117607 - protein, 9 aa, Homo sapiens
QEAINATCK

SEQ ID NO: 117608 - protein, 9 aa, Homo sapiens
EAINATCKG

SEQ ID NO: 117609 - protein, 9 aa, Homo sapiens
AINATCKGV

SEQ ID NO: 117610 - protein, 9 aa, Homo sapiens
INATCKGVS

SEQ ID NO: 117611 - protein, 9 aa, Homo sapiens
NATCKGVSY

SEQ ID NO: 117612 - protein, 9 aa, Homo sapiens
ATCKGVSYC

SEQ ID NO: 117613 - protein, 9 aa, Homo sapiens
TCKGVSYCT

SEQ ID NO: 117614 - protein, 9 aa, Homo sapiens
CKGVSYCTG

SEQ ID NO: 117615 - protein, 9 aa, Homo sapiens
KGVSYCTGN

SEQ ID NO: 117616 - protein, 9 aa, Homo sapiens
GVSYCTGNS

SEQ ID NO: 117617 - protein, 9 aa, Homo sapiens
VSYCTGNSS

SEQ ID NO: 117618 - protein, 9 aa, Homo sapiens
SYCTGNSSE

SEQ ID NO: 117619 - protein, 9 aa, Homo sapiens
YCTGNSSEC

SEQ ID NO: 117620 - protein, 9 aa, Homo sapiens
CTGNSSECP

SEQ ID NO: 117621 - protein, 9 aa, Homo sapiens
TGNSSECPP

SEQ ID NO: 117622 - protein, 9 aa, Homo sapiens
GNSSECPPP

SEQ ID NO: 117623 - protein, 9 aa, Homo sapiens
NSSECPPPG

SEQ ID NO: 117624 - protein, 9 aa, Homo sapiens
SSECPPPGN

SEQ ID NO: 117625 - protein, 9 aa, Homo sapiens
SECPPPGNA

SEQ ID NO: 117626 - protein, 9 aa, Homo sapiens
ECPPPGNAE

SEQ ID NO: 117627 - protein, 9 aa, Homo sapiens
CPPPGNAED

SEQ ID NO: 117628 - protein, 9 aa, Homo sapiens
PPPGNAEDD

SEQ ID NO: 117629 - protein, 9 aa, Homo sapiens
PPGNAEDDT

SEQ ID NO: 117630 - protein, 9 aa, Homo sapiens
PGNAEDDTV

SEQ ID NO: 117631 - protein, 9 aa, Homo sapiens
GNAEDDTVC

SEQ ID NO: 117632 - protein, 9 aa, Homo sapiens
NAEDDTVCL

SEQ ID NO: 117633 - protein, 9 aa, Homo sapiens
AEDDTVCLD

SEQ ID NO: 117634 - protein, 9 aa, Homo sapiens
EDDTVCLDL

SEQ ID NO: 117635 - protein, 9 aa, Homo sapiens
DDTVCLDLG

SEQ ID NO: 117636 - protein, 9 aa, Homo sapiens
DTVCLDLGK

SEQ ID NO: 117637 - protein, 9 aa, Homo sapiens
TVCLDLGKC

SEQ ID NO: 117638 - protein, 9 aa, Homo sapiens
VCLDLGKCK

SEQ ID NO: 117639 - protein, 9 aa, Homo sapiens
CLDLGKCKD

SEQ ID NO: 117640 - protein, 9 aa, Homo sapiens
LDLGKCKDG

SEQ ID NO: 117641 - protein, 9 aa, Homo sapiens
DLGKCKDGK

SEQ ID NO: 117642 - protein, 9 aa, Homo sapiens
LGKCKDGKC

SEQ ID NO: 117643 - protein, 9 aa, Homo sapiens
GKCKDGKCI

SEQ ID NO: 117644 - protein, 9 aa, Homo sapiens
KCKDGKCIP

SEQ ID NO: 117645 - protein, 9 aa, Homo sapiens
CKDGKCIPF

SEQ ID NO: 117646 - protein, 9 aa, Homo sapiens
KDGKCIPFC

SEQ ID NO: 117647 - protein, 9 aa, Homo sapiens
DGKCIPFCE

SEQ ID NO: 117648 - protein, 9 aa, Homo sapiens
GKCIPFCER

SEQ ID NO: 117649 - protein, 9 aa, Homo sapiens
KCIPFCERE

SEQ ID NO: 117650 - protein, 9 aa, Homo sapiens
CIPFCEREQ

SEQ ID NO: 117651 - protein, 9 aa, Homo sapiens
IPFCEREQQ

SEQ ID NO: 117652 - protein, 9 aa, Homo sapiens
PFCEREQQL

SEQ ID NO: 117653 - protein, 9 aa, Homo sapiens
FCEREQQLE

SEQ ID NO: 117654 - protein, 9 aa, Homo sapiens
CEREQQLES

SEQ ID NO: 117655 - protein, 9 aa, Homo sapiens
EREQQLESC

SEQ ID NO: 117656 - protein, 9 aa, Homo sapiens
REQQLESCA

SEQ ID NO: 117657 - protein, 9 aa, Homo sapiens
EQQLESCAC

SEQ ID NO: 117658 - protein, 9 aa, Homo sapiens
QQLESCACN

SEQ ID NO: 117659 - protein, 9 aa, Homo sapiens
QLESCACNE

SEQ ID NO: 117660 - protein, 9 aa, Homo sapiens
LESCACNET

SEQ ID NO: 117661 - protein, 9 aa, Homo sapiens
ESCACNETD

SEQ ID NO: 117662 - protein, 9 aa, Homo sapiens
SCACNETDN

SEQ ID NO: 117663 - protein, 9 aa, Homo sapiens
CACNETDNS

SEQ ID NO: 117664 - protein, 9 aa, Homo sapiens
ACNETDNSC

SEQ ID NO: 117665 - protein, 9 aa, Homo sapiens
CNETDNSCK

SEQ ID NO: 117666 - protein, 9 aa, Homo sapiens
NETDNSCKV

SEQ ID NO: 117667 - protein, 9 aa, Homo sapiens
ETDNSCKVC

SEQ ID NO: 117668 - protein, 9 aa, Homo sapiens
TDNSCKVCC

SEQ ID NO: 117669 - protein, 9 aa, Homo sapiens
DNSCKVCCR

SEQ ID NO: 117670 - protein, 9 aa, Homo sapiens
NSCKVCCRD

SEQ ID NO: 117671 - protein, 9 aa, Homo sapiens
SCKVCCRDL

SEQ ID NO: 117672 - protein, 9 aa, Homo sapiens
CKVCCRDLS

SEQ ID NO: 117673 - protein, 9 aa, Homo sapiens
KVCCRDLSG

SEQ ID NO: 117674 - protein, 9 aa, Homo sapiens
VCCRDLSGR

SEQ ID NO: 117675 - protein, 9 aa, Homo sapiens
CCRDLSGRC

SEQ ID NO: 117676 - protein, 9 aa, Homo sapiens
CRDLSGRCV

SEQ ID NO: 117677 - protein, 9 aa, Homo sapiens
RDLSGRCVP

SEQ ID NO: 117678 - protein, 9 aa, Homo sapiens
DLSGRCVPY

SEQ ID NO: 117679 - protein, 9 aa, Homo sapiens
LSGRCVPYV

SEQ ID NO: 117680 - protein, 9 aa, Homo sapiens
SGRCVPYVD

SEQ ID NO: 117681 - protein, 9 aa, Homo sapiens
GRCVPYVDA

SEQ ID NO: 117682 - protein, 9 aa, Homo sapiens
RCVPYVDAE

SEQ ID NO: 117683 - protein, 9 aa, Homo sapiens
CVPYVDAEQ

SEQ ID NO: 117684 - protein, 9 aa, Homo sapiens
VPYVDAEQK

SEQ ID NO: 117685 - protein, 9 aa, Homo sapiens
PYVDAEQKN

SEQ ID NO: 117686 - protein, 9 aa, Homo sapiens
YVDAEQKNL

SEQ ID NO: 117687 - protein, 9 aa, Homo sapiens
VDAEQKNLF

SEQ ID NO: 117688 - protein, 9 aa, Homo sapiens
DAEQKNLFL

SEQ ID NO: 117689 - protein, 9 aa, Homo sapiens
AEQKNLFLR

SEQ ID NO: 117690 - protein, 9 aa, Homo sapiens
EQKNLFLRK

SEQ ID NO: 117691 - protein, 9 aa, Homo sapiens
QKNLFLRKG

SEQ ID NO: 117692 - protein, 9 aa, Homo sapiens
KNLFLRKGK

SEQ ID NO: 117693 - protein, 9 aa, Homo sapiens
NLFLRKGKP

SEQ ID NO: 117694 - protein, 9 aa, Homo sapiens
LFLRKGKPC

SEQ ID NO: 117695 - protein, 9 aa, Homo sapiens
FLRKGKPCT

SEQ ID NO: 117696 - protein, 9 aa, Homo sapiens
LRKGKPCTV

SEQ ID NO: 117697 - protein, 9 aa, Homo sapiens
RKGKPCTVG

SEQ ID NO: 117698 - protein, 9 aa, Homo sapiens
KGKPCTVGF

SEQ ID NO: 117699 - protein, 9 aa, Homo sapiens
GKPCTVGFC

SEQ ID NO: 117700 - protein, 9 aa, Homo sapiens
KPCTVGFCD

SEQ ID NO: 117701 - protein, 9 aa, Homo sapiens
PCTVGFCDM

SEQ ID NO: 117702 - protein, 9 aa, Homo sapiens
CTVGFCDMN

SEQ ID NO: 117703 - protein, 9 aa, Homo sapiens
TVGFCDMNG

SEQ ID NO: 117704 - protein, 9 aa, Homo sapiens
VGFCDMNGK

SEQ ID NO: 117705 - protein, 9 aa, Homo sapiens
GFCDMNGKC

SEQ ID NO: 117706 - protein, 9 aa, Homo sapiens
FCDMNGKCE

SEQ ID NO: 117707 - protein, 9 aa, Homo sapiens
CDMNGKCEK

SEQ ID NO: 117708 - protein, 9 aa, Homo sapiens
DMNGKCEKR

SEQ ID NO: 117709 - protein, 9 aa, Homo sapiens
MNGKCEKRV

SEQ ID NO: 117710 - protein, 9 aa, Homo sapiens
NGKCEKRVQ

SEQ ID NO: 117711 - protein, 9 aa, Homo sapiens
GKCEKRVQD

SEQ ID NO: 117712 - protein, 9 aa, Homo sapiens
KCEKRVQDV

SEQ ID NO: 117713 - protein, 9 aa, Homo sapiens
CEKRVQDVI

SEQ ID NO: 117714 - protein, 9 aa, Homo sapiens
EKRVQDVIE

SEQ ID NO: 117715 - protein, 9 aa, Homo sapiens
KRVQDVIER

SEQ ID NO: 117716 - protein, 9 aa, Homo sapiens
RVQDVIERF

SEQ ID NO: 117717 - protein, 9 aa, Homo sapiens
VQDVIERFW

SEQ ID NO: 117718 - protein, 9 aa, Homo sapiens
QDVIERFWD

SEQ ID NO: 117719 - protein, 9 aa, Homo sapiens
DVIERFWDF

SEQ ID NO: 117720 - protein, 9 aa, Homo sapiens
VIERFWDFI

SEQ ID NO: 117721 - protein, 9 aa, Homo sapiens
IERFWDFID

SEQ ID NO: 117722 - protein, 9 aa, Homo sapiens
ERFWDFIDQ

SEQ ID NO: 117723 - protein, 9 aa, Homo sapiens
RFWDFIDQL

SEQ ID NO: 117724 - protein, 9 aa, Homo sapiens
FWDFIDQLS

SEQ ID NO: 117725 - protein, 9 aa, Homo sapiens
WDFIDQLSI

SEQ ID NO: 117726 - protein, 9 aa, Homo sapiens
DFIDQLSIN

SEQ ID NO: 117727 - protein, 9 aa, Homo sapiens
FIDQLSINT

SEQ ID NO: 117728 - protein, 9 aa, Homo sapiens
IDQLSINTF

SEQ ID NO: 117729 - protein, 9 aa, Homo sapiens
DQLSINTFG

SEQ ID NO: 117730 - protein, 9 aa, Homo sapiens
QLSINTFGK

SEQ ID NO: 117731 - protein, 9 aa, Homo sapiens
LSINTFGKF

SEQ ID NO: 117732 - protein, 9 aa, Homo sapiens
SINTFGKFL

SEQ ID NO: 117733 - protein, 9 aa, Homo sapiens
INTFGKFLA

SEQ ID NO: 117734 - protein, 9 aa, Homo sapiens
NTFGKFLAD

SEQ ID NO: 117735 - protein, 9 aa, Homo sapiens
TFGKFLADN

SEQ ID NO: 117736 - protein, 9 aa, Homo sapiens
FGKFLADNI

SEQ ID NO: 117737 - protein, 9 aa, Homo sapiens
GKFLADNIV

SEQ ID NO: 117738 - protein, 9 aa, Homo sapiens
KFLADNIVG

SEQ ID NO: 117739 - protein, 9 aa, Homo sapiens
FLADNIVGS

SEQ ID NO: 117740 - protein, 9 aa, Homo sapiens
LADNIVGSV

SEQ ID NO: 117741 - protein, 9 aa, Homo sapiens
ADNIVGSVL

SEQ ID NO: 117742 - protein, 9 aa, Homo sapiens
DNIVGSVLV

SEQ ID NO: 117743 - protein, 9 aa, Homo sapiens
NIVGSVLVF

SEQ ID NO: 117744 - protein, 9 aa, Homo sapiens
IVGSVLVFS

SEQ ID NO: 117745 - protein, 9 aa, Homo sapiens
VGSVLVFSL

SEQ ID NO: 117746 - protein, 9 aa, Homo sapiens
GSVLVFSLI

SEQ ID NO: 117747 - protein, 9 aa, Homo sapiens
SVLVFSLIF

SEQ ID NO: 117748 - protein, 9 aa, Homo sapiens
VLVFSLIFW

SEQ ID NO: 117749 - protein, 9 aa, Homo sapiens
LVFSLIFWI

SEQ ID NO: 117750 - protein, 9 aa, Homo sapiens
VFSLIFWIP

SEQ ID NO: 117751 - protein, 9 aa, Homo sapiens
FSLIFWIPF

SEQ ID NO: 117752 - protein, 9 aa, Homo sapiens
SLIFWIPFS

SEQ ID NO: 117753 - protein, 9 aa, Homo sapiens
LIFWIPFSI

SEQ ID NO: 117754 - protein, 9 aa, Homo sapiens
IFWIPFSIL

SEQ ID NO: 117755 - protein, 9 aa, Homo sapiens
FWIPFSILV

SEQ ID NO: 117756 - protein, 9 aa, Homo sapiens
WIPFSILVH

SEQ ID NO: 117757 - protein, 9 aa, Homo sapiens
IPFSILVHC

SEQ ID NO: 117758 - protein, 9 aa, Homo sapiens
PFSILVHCV

SEQ ID NO: 117759 - protein, 9 aa, Homo sapiens
FSILVHCVD

SEQ ID NO: 117760 - protein, 9 aa, Homo sapiens
SILVHCVDK

SEQ ID NO: 117761 - protein, 9 aa, Homo sapiens
ILVHCVDKK

SEQ ID NO: 117762 - protein, 9 aa, Homo sapiens
LVHCVDKKL

SEQ ID NO: 117763 - protein, 9 aa, Homo sapiens
VHCVDKKLD

SEQ ID NO: 117764 - protein, 9 aa, Homo sapiens
HCVDKKLDK

SEQ ID NO: 117765 - protein, 9 aa, Homo sapiens
CVDKKLDKQ

SEQ ID NO: 117766 - protein, 9 aa, Homo sapiens
VDKKLDKQY

SEQ ID NO: 117767 - protein, 9 aa, Homo sapiens
DKKLDKQYE

SEQ ID NO: 117768 - protein, 9 aa, Homo sapiens
KKLDKQYES

SEQ ID NO: 117769 - protein, 9 aa, Homo sapiens
KLDKQYESL

SEQ ID NO: 117770 - protein, 9 aa, Homo sapiens
LDKQYESLS

SEQ ID NO: 117771 - protein, 9 aa, Homo sapiens
DKQYESLSL

SEQ ID NO: 117772 - protein, 9 aa, Homo sapiens
KQYESLSLF

SEQ ID NO: 117773 - protein, 9 aa, Homo sapiens
QYESLSLFH

SEQ ID NO: 117774 - protein, 9 aa, Homo sapiens
YESLSLFHP

SEQ ID NO: 117775 - protein, 9 aa, Homo sapiens
ESLSLFHPS

SEQ ID NO: 117776 - protein, 9 aa, Homo sapiens
SLSLFHPSN

SEQ ID NO: 117777 - protein, 9 aa, Homo sapiens
LSLFHPSNV

SEQ ID NO: 117778 - protein, 9 aa, Homo sapiens
SLFHPSNVE

SEQ ID NO: 117779 - protein, 9 aa, Homo sapiens
LFHPSNVEM

SEQ ID NO: 117780 - protein, 9 aa, Homo sapiens
FHPSNVEML

SEQ ID NO: 117781 - protein, 9 aa, Homo sapiens
HPSNVEMLS

SEQ ID NO: 117782 - protein, 9 aa, Homo sapiens
PSNVEMLSS

SEQ ID NO: 117783 - protein, 9 aa, Homo sapiens
SNVEMLSSM

SEQ ID NO: 117784 - protein, 9 aa, Homo sapiens
NVEMLSSMD

SEQ ID NO: 117785 - protein, 9 aa, Homo sapiens
VEMLSSMDS

SEQ ID NO: 117786 - protein, 9 aa, Homo sapiens
EMLSSMDSA

SEQ ID NO: 117787 - protein, 9 aa, Homo sapiens
MLSSMDSAS

SEQ ID NO: 117788 - protein, 9 aa, Homo sapiens
LSSMDSASV

SEQ ID NO: 117789 - protein, 9 aa, Homo sapiens
SSMDSASVR

SEQ ID NO: 117790 - protein, 9 aa, Homo sapiens
SMDSASVRI

SEQ ID NO: 117791 - protein, 9 aa, Homo sapiens
MDSASVRII

SEQ ID NO: 117792 - protein, 9 aa, Homo sapiens
DSASVRIIK

SEQ ID NO: 117793 - protein, 9 aa, Homo sapiens
SASVRIIKP

SEQ ID NO: 117794 - protein, 9 aa, Homo sapiens
ASVRIIKPF

SEQ ID NO: 117795 - protein, 9 aa, Homo sapiens
SVRIIKPFP

SEQ ID NO: 117796 - protein, 9 aa, Homo sapiens
VRIIKPFPA

SEQ ID NO: 117797 - protein, 9 aa, Homo sapiens
RIIKPFPAP

SEQ ID NO: 117798 - protein, 9 aa, Homo sapiens
IIKPFPAPQ

SEQ ID NO: 117799 - protein, 9 aa, Homo sapiens
IKPFPAPQT

SEQ ID NO: 117800 - protein, 9 aa, Homo sapiens
KPFPAPQTP

SEQ ID NO: 117801 - protein, 9 aa, Homo sapiens
PFPAPQTPG

SEQ ID NO: 117802 - protein, 9 aa, Homo sapiens
FPAPQTPGR

SEQ ID NO: 117803 - protein, 9 aa, Homo sapiens
PAPQTPGRL

SEQ ID NO: 117804 - protein, 9 aa, Homo sapiens
APQTPGRLQ

SEQ ID NO: 117805 - protein, 9 aa, Homo sapiens
PQTPGRLQP

SEQ ID NO: 117806 - protein, 9 aa, Homo sapiens
QTPGRLQPA

SEQ ID NO: 117807 - protein, 9 aa, Homo sapiens
TPGRLQPAP

SEQ ID NO: 117808 - protein, 9 aa, Homo sapiens
PGRLQPAPV

SEQ ID NO: 117809 - protein, 9 aa, Homo sapiens
GRLQPAPVI

SEQ ID NO: 117810 - protein, 9 aa, Homo sapiens
RLQPAPVIP

SEQ ID NO: 117811 - protein, 9 aa, Homo sapiens
LQPAPVIPS

SEQ ID NO: 117812 - protein, 9 aa, Homo sapiens
QPAPVIPSA

SEQ ID NO: 117813 - protein, 9 aa, Homo sapiens
PAPVIPSAP

SEQ ID NO: 117814 - protein, 9 aa, Homo sapiens
APVIPSAPA

SEQ ID NO: 117815 - protein, 9 aa, Homo sapiens
PVIPSAPAA

SEQ ID NO: 117816 - protein, 9 aa, Homo sapiens
VIPSAPAAP

SEQ ID NO: 117817 - protein, 9 aa, Homo sapiens
IPSAPAAPK

SEQ ID NO: 117818 - protein, 9 aa, Homo sapiens
PSAPAAPKL

SEQ ID NO: 117819 - protein, 9 aa, Homo sapiens
SAPAAPKLD

SEQ ID NO: 117820 - protein, 9 aa, Homo sapiens
APAAPKLDH

SEQ ID NO: 117821 - protein, 9 aa, Homo sapiens
PAAPKLDHQ

SEQ ID NO: 117822 - protein, 9 aa, Homo sapiens
AAPKLDHQR

SEQ ID NO: 117823 - protein, 9 aa, Homo sapiens
APKLDHQRM

SEQ ID NO: 117824 - protein, 9 aa, Homo sapiens
PKLDHQRMD

SEQ ID NO: 117825 - protein, 9 aa, Homo sapiens
KLDHQRMDT

SEQ ID NO: 117826 - protein, 9 aa, Homo sapiens
LDHQRMDTI

SEQ ID NO: 117827 - protein, 9 aa, Homo sapiens
DHQRMDTIQ

SEQ ID NO: 117828 - protein, 9 aa, Homo sapiens
HQRMDTIQE

SEQ ID NO: 117829 - protein, 9 aa, Homo sapiens
QRMDTIQED

SEQ ID NO: 117830 - protein, 9 aa, Homo sapiens
RMDTIQEDP

SEQ ID NO: 117831 - protein, 9 aa, Homo sapiens
MDTIQEDPS

SEQ ID NO: 117832 - protein, 9 aa, Homo sapiens
DTIQEDPST

SEQ ID NO: 117833 - protein, 9 aa, Homo sapiens
TIQEDPSTD

SEQ ID NO: 117834 - protein, 9 aa, Homo sapiens
IQEDPSTDS

SEQ ID NO: 117835 - protein, 9 aa, Homo sapiens
QEDPSTDSH

SEQ ID NO: 117836 - protein, 9 aa, Homo sapiens
EDPSTDSHM

SEQ ID NO: 117837 - protein, 9 aa, Homo sapiens
DPSTDSHMD

SEQ ID NO: 117838 - protein, 9 aa, Homo sapiens
PSTDSHMDE

SEQ ID NO: 117839 - protein, 9 aa, Homo sapiens
STDSHMDED

SEQ ID NO: 117840 - protein, 9 aa, Homo sapiens
TDSHMDEDG

SEQ ID NO: 117841 - protein, 9 aa, Homo sapiens
DSHMDEDGF

SEQ ID NO: 117842 - protein, 9 aa, Homo sapiens
SHMDEDGFE

SEQ ID NO: 117843 - protein, 9 aa, Homo sapiens
HMDEDGFEK

SEQ ID NO: 117844 - protein, 9 aa, Homo sapiens
MDEDGFEKD

SEQ ID NO: 117845 - protein, 9 aa, Homo sapiens
DEDGFEKDP

SEQ ID NO: 117846 - protein, 9 aa, Homo sapiens
EDGFEKDPF

SEQ ID NO: 117847 - protein, 9 aa, Homo sapiens
DGFEKDPFP

SEQ ID NO: 117848 - protein, 9 aa, Homo sapiens
GFEKDPFPN

SEQ ID NO: 117849 - protein, 9 aa, Homo sapiens
FEKDPFPNS

SEQ ID NO: 117850 - protein, 9 aa, Homo sapiens
EKDPFPNSS

SEQ ID NO: 117851 - protein, 9 aa, Homo sapiens
KDPFPNSST

SEQ ID NO: 117852 - protein, 9 aa, Homo sapiens
DPFPNSSTA

SEQ ID NO: 117853 - protein, 9 aa, Homo sapiens
PFPNSSTAA

SEQ ID NO: 117854 - protein, 9 aa, Homo sapiens
FPNSSTAAK

SEQ ID NO: 117855 - protein, 9 aa, Homo sapiens
PNSSTAAKS

SEQ ID NO: 117856 - protein, 9 aa, Homo sapiens
NSSTAAKSF

SEQ ID NO: 117857 - protein, 9 aa, Homo sapiens
SSTAAKSFE

SEQ ID NO: 117858 - protein, 9 aa, Homo sapiens
STAAKSFED

SEQ ID NO: 117859 - protein, 9 aa, Homo sapiens
TAAKSFEDL

SEQ ID NO: 117860 - protein, 9 aa, Homo sapiens
AAKSFEDLT

SEQ ID NO: 117861 - protein, 9 aa, Homo sapiens
AKSFEDLTD

SEQ ID NO: 117862 - protein, 9 aa, Homo sapiens
KSFEDLTDH

SEQ ID NO: 117863 - protein, 9 aa, Homo sapiens
SFEDLTDHP

SEQ ID NO: 117864 - protein, 9 aa, Homo sapiens
FEDLTDHPV

SEQ ID NO: 117865 - protein, 9 aa, Homo sapiens
EDLTDHPVT

SEQ ID NO: 117866 - protein, 9 aa, Homo sapiens
DLTDHPVTR

SEQ ID NO: 117867 - protein, 9 aa, Homo sapiens
LTDHPVTRS

SEQ ID NO: 117868 - protein, 9 aa, Homo sapiens
TDHPVTRSE

SEQ ID NO: 117869 - protein, 9 aa, Homo sapiens
DHPVTRSEK

SEQ ID NO: 117870 - protein, 9 aa, Homo sapiens
HPVTRSEKA

SEQ ID NO: 117871 - protein, 9 aa, Homo sapiens
PVTRSEKAA

SEQ ID NO: 117872 - protein, 9 aa, Homo sapiens
VTRSEKAAS

SEQ ID NO: 117873 - protein, 9 aa, Homo sapiens
TRSEKAASF

SEQ ID NO: 117874 - protein, 9 aa, Homo sapiens
RSEKAASFK

SEQ ID NO: 117875 - protein, 9 aa, Homo sapiens
SEKAASFKL

SEQ ID NO: 117876 - protein, 9 aa, Homo sapiens
EKAASFKLQ

SEQ ID NO: 117877 - protein, 9 aa, Homo sapiens
KAASFKLQR

SEQ ID NO: 117878 - protein, 9 aa, Homo sapiens
AASFKLQRQ

SEQ ID NO: 117879 - protein, 9 aa, Homo sapiens
ASFKLQRQN

SEQ ID NO: 117880 - protein, 9 aa, Homo sapiens
SFKLQRQNR

SEQ ID NO: 117881 - protein, 9 aa, Homo sapiens
FKLQRQNRV

SEQ ID NO: 117882 - protein, 9 aa, Homo sapiens
KLQRQNRVD

SEQ ID NO: 117883 - protein, 9 aa, Homo sapiens
LQRQNRVDS

SEQ ID NO: 117884 - protein, 9 aa, Homo sapiens
QRQNRVDSK

SEQ ID NO: 117885 - protein, 9 aa, Homo sapiens
RQNRVDSKE

SEQ ID NO: 117886 - protein, 9 aa, Homo sapiens
QNRVDSKET

SEQ ID NO: 117887 - protein, 9 aa, Homo sapiens
NRVDSKETE

SEQ ID NO: 117888 - protein, 9 aa, Homo sapiens
RVDSKETEC

SEQ ID NO: 117889 - protein, 9 aa, Homo sapiens
MRQSLLFLT

SEQ ID NO: 117890 - protein, 9 aa, Homo sapiens
RQSLLFLTS

SEQ ID NO: 117891 - protein, 9 aa, Homo sapiens
QSLLFLTSV

SEQ ID NO: 117892 - protein, 9 aa, Homo sapiens
SLLFLTSVV

SEQ ID NO: 117893 - protein, 9 aa, Homo sapiens
LLFLTSVVP

SEQ ID NO: 117894 - protein, 9 aa, Homo sapiens
LFLTSVVPF

SEQ ID NO: 117895 - protein, 9 aa, Homo sapiens
FLTSVVPFV

SEQ ID NO: 117896 - protein, 9 aa, Homo sapiens
LTSVVPFVL

SEQ ID NO: 117897 - protein, 9 aa, Homo sapiens
TSVVPFVLA

SEQ ID NO: 117898 - protein, 9 aa, Homo sapiens
SVVPFVLAP

SEQ ID NO: 117899 - protein, 9 aa, Homo sapiens
VVPFVLAPR

SEQ ID NO: 117900 - protein, 9 aa, Homo sapiens
VPFVLAPRP

SEQ ID NO: 117901 - protein, 9 aa, Homo sapiens
PFVLAPRPP

SEQ ID NO: 117902 - protein, 9 aa, Homo sapiens
FVLAPRPPD

SEQ ID NO: 117903 - protein, 9 aa, Homo sapiens
VLAPRPPDD

SEQ ID NO: 117904 - protein, 9 aa, Homo sapiens
LAPRPPDDP

SEQ ID NO: 117905 - protein, 9 aa, Homo sapiens
APRPPDDPG

SEQ ID NO: 117906 - protein, 9 aa, Homo sapiens
PRPPDDPGF

SEQ ID NO: 117907 - protein, 9 aa, Homo sapiens
RPPDDPGFG

SEQ ID NO: 117908 - protein, 9 aa, Homo sapiens
PPDDPGFGP

SEQ ID NO: 117909 - protein, 9 aa, Homo sapiens
PDDPGFGPH

SEQ ID NO: 117910 - protein, 9 aa, Homo sapiens
DDPGFGPHQ

SEQ ID NO: 117911 - protein, 9 aa, Homo sapiens
DPGFGPHQR

SEQ ID NO: 117912 - protein, 9 aa, Homo sapiens
PGFGPHQRL

SEQ ID NO: 117913 - protein, 9 aa, Homo sapiens
GFGPHQRLE

SEQ ID NO: 117914 - protein, 9 aa, Homo sapiens
FGPHQRLEK

SEQ ID NO: 117915 - protein, 9 aa, Homo sapiens
GPHQRLEKL

SEQ ID NO: 117916 - protein, 9 aa, Homo sapiens
PHQRLEKLD

SEQ ID NO: 117917 - protein, 9 aa, Homo sapiens
HQRLEKLDS

SEQ ID NO: 117918 - protein, 9 aa, Homo sapiens
QRLEKLDSL

SEQ ID NO: 117919 - protein, 9 aa, Homo sapiens
RLEKLDSLL

SEQ ID NO: 117920 - protein, 9 aa, Homo sapiens
LEKLDSLLS

SEQ ID NO: 117921 - protein, 9 aa, Homo sapiens
EKLDSLLSD

SEQ ID NO: 117922 - protein, 9 aa, Homo sapiens
KLDSLLSDY

SEQ ID NO: 117923 - protein, 9 aa, Homo sapiens
LDSLLSDYD

SEQ ID NO: 117924 - protein, 9 aa, Homo sapiens
DSLLSDYDI

SEQ ID NO: 117925 - protein, 9 aa, Homo sapiens
SLLSDYDIL

SEQ ID NO: 117926 - protein, 9 aa, Homo sapiens
LLSDYDILS

SEQ ID NO: 117927 - protein, 9 aa, Homo sapiens
LSDYDILSL

SEQ ID NO: 117928 - protein, 9 aa, Homo sapiens
SDYDILSLS

SEQ ID NO: 117929 - protein, 9 aa, Homo sapiens
DYDILSLSN

SEQ ID NO: 117930 - protein, 9 aa, Homo sapiens
YDILSLSNI

SEQ ID NO: 117931 - protein, 9 aa, Homo sapiens
DILSLSNIQ

SEQ ID NO: 117932 - protein, 9 aa, Homo sapiens
ILSLSNIQQ

SEQ ID NO: 117933 - protein, 9 aa, Homo sapiens
LSLSNIQQH

SEQ ID NO: 117934 - protein, 9 aa, Homo sapiens
SLSNIQQHS

SEQ ID NO: 117935 - protein, 9 aa, Homo sapiens
LSNIQQHSV

SEQ ID NO: 117936 - protein, 9 aa, Homo sapiens
SNIQQHSVR

SEQ ID NO: 117937 - protein, 9 aa, Homo sapiens
NIQQHSVRK

SEQ ID NO: 117938 - protein, 9 aa, Homo sapiens
IQQHSVRKR

SEQ ID NO: 117939 - protein, 9 aa, Homo sapiens
QQHSVRKRD

SEQ ID NO: 117940 - protein, 9 aa, Homo sapiens
QHSVRKRDL

SEQ ID NO: 117941 - protein, 9 aa, Homo sapiens
HSVRKRDLQ

SEQ ID NO: 117942 - protein, 9 aa, Homo sapiens
SVRKRDLQT

SEQ ID NO: 117943 - protein, 9 aa, Homo sapiens
VRKRDLQTS

SEQ ID NO: 117944 - protein, 9 aa, Homo sapiens
RKRDLQTST

SEQ ID NO: 117945 - protein, 9 aa, Homo sapiens
KRDLQTSTH

SEQ ID NO: 117946 - protein, 9 aa, Homo sapiens
RDLQTSTHV

SEQ ID NO: 117947 - protein, 9 aa, Homo sapiens
DLQTSTHVE

SEQ ID NO: 117948 - protein, 9 aa, Homo sapiens
LQTSTHVET

SEQ ID NO: 117949 - protein, 9 aa, Homo sapiens
QTSTHVETL

SEQ ID NO: 117950 - protein, 9 aa, Homo sapiens
TSTHVETLL

SEQ ID NO: 117951 - protein, 9 aa, Homo sapiens
STHVETLLT

SEQ ID NO: 117952 - protein, 9 aa, Homo sapiens
THVETLLTF

SEQ ID NO: 117953 - protein, 9 aa, Homo sapiens
HVETLLTFS

SEQ ID NO: 117954 - protein, 9 aa, Homo sapiens
VETLLTFSA

SEQ ID NO: 117955 - protein, 9 aa, Homo sapiens
ETLLTFSAL

SEQ ID NO: 117956 - protein, 9 aa, Homo sapiens
TLLTFSALK

SEQ ID NO: 117957 - protein, 9 aa, Homo sapiens
LLTFSALKR

SEQ ID NO: 117958 - protein, 9 aa, Homo sapiens
LTFSALKRH

SEQ ID NO: 117959 - protein, 9 aa, Homo sapiens
TFSALKRHF

SEQ ID NO: 117960 - protein, 9 aa, Homo sapiens
FSALKRHFK

SEQ ID NO: 117961 - protein, 9 aa, Homo sapiens
SALKRHFKL

SEQ ID NO: 117962 - protein, 9 aa, Homo sapiens
ALKRHFKLY

SEQ ID NO: 117963 - protein, 9 aa, Homo sapiens
LKRHFKLYL

SEQ ID NO: 117964 - protein, 9 aa, Homo sapiens
KRHFKLYLT

SEQ ID NO: 117965 - protein, 9 aa, Homo sapiens
RHFKLYLTS

SEQ ID NO: 117966 - protein, 9 aa, Homo sapiens
HFKLYLTSS

SEQ ID NO: 117967 - protein, 9 aa, Homo sapiens
FKLYLTSST

SEQ ID NO: 117968 - protein, 9 aa, Homo sapiens
KLYLTSSTE

SEQ ID NO: 117969 - protein, 9 aa, Homo sapiens
LYLTSSTER

SEQ ID NO: 117970 - protein, 9 aa, Homo sapiens
YLTSSTERF

SEQ ID NO: 117971 - protein, 9 aa, Homo sapiens
LTSSTERFS

SEQ ID NO: 117972 - protein, 9 aa, Homo sapiens
TSSTERFSQ

SEQ ID NO: 117973 - protein, 9 aa, Homo sapiens
SSTERFSQN

SEQ ID NO: 117974 - protein, 9 aa, Homo sapiens
STERFSQNF

SEQ ID NO: 117975 - protein, 9 aa, Homo sapiens
TERFSQNFK

SEQ ID NO: 117976 - protein, 9 aa, Homo sapiens
ERFSQNFKV

SEQ ID NO: 117977 - protein, 9 aa, Homo sapiens
RFSQNFKVV

SEQ ID NO: 117978 - protein, 9 aa, Homo sapiens
FSQNFKVVV

SEQ ID NO: 117979 - protein, 9 aa, Homo sapiens
SQNFKVVVV

SEQ ID NO: 117980 - protein, 9 aa, Homo sapiens
QNFKVVVVD

SEQ ID NO: 117981 - protein, 9 aa, Homo sapiens
NFKVVVVDG

SEQ ID NO: 117982 - protein, 9 aa, Homo sapiens
FKVVVVDGK

SEQ ID NO: 117983 - protein, 9 aa, Homo sapiens
KVVVVDGKN

SEQ ID NO: 117984 - protein, 9 aa, Homo sapiens
VVVVDGKNE

SEQ ID NO: 117985 - protein, 9 aa, Homo sapiens
VVVDGKNES

SEQ ID NO: 117986 - protein, 9 aa, Homo sapiens
VVDGKNESE

SEQ ID NO: 117987 - protein, 9 aa, Homo sapiens
VDGKNESEY

SEQ ID NO: 117988 - protein, 9 aa, Homo sapiens
DGKNESEYT

SEQ ID NO: 117989 - protein, 9 aa, Homo sapiens
GKNESEYTV

SEQ ID NO: 117990 - protein, 9 aa, Homo sapiens
KNESEYTVK

SEQ ID NO: 117991 - protein, 9 aa, Homo sapiens
NESEYTVKW

SEQ ID NO: 117992 - protein, 9 aa, Homo sapiens
ESEYTVKWQ

SEQ ID NO: 117993 - protein, 9 aa, Homo sapiens
SEYTVKWQD

SEQ ID NO: 117994 - protein, 9 aa, Homo sapiens
EYTVKWQDF

SEQ ID NO: 117995 - protein, 9 aa, Homo sapiens
YTVKWQDFF

SEQ ID NO: 117996 - protein, 9 aa, Homo sapiens
TVKWQDFFT

SEQ ID NO: 117997 - protein, 9 aa, Homo sapiens
VKWQDFFTG

SEQ ID NO: 117998 - protein, 9 aa, Homo sapiens
KWQDFFTGH

SEQ ID NO: 117999 - protein, 9 aa, Homo sapiens
WQDFFTGHV

SEQ ID NO: 118000 - protein, 9 aa, Homo sapiens
QDFFTGHVV

SEQ ID NO: 118001 - protein, 9 aa, Homo sapiens
DFFTGHVVG

SEQ ID NO: 118002 - protein, 9 aa, Homo sapiens
FFTGHVVGE

SEQ ID NO: 118003 - protein, 9 aa, Homo sapiens
FTGHVVGEP

SEQ ID NO: 118004 - protein, 9 aa, Homo sapiens
TGHVVGEPD

SEQ ID NO: 118005 - protein, 9 aa, Homo sapiens
GHVVGEPDS

SEQ ID NO: 118006 - protein, 9 aa, Homo sapiens
HVVGEPDSR

SEQ ID NO: 118007 - protein, 9 aa, Homo sapiens
VVGEPDSRV

SEQ ID NO: 118008 - protein, 9 aa, Homo sapiens
VGEPDSRVL

SEQ ID NO: 118009 - protein, 9 aa, Homo sapiens
GEPDSRVLA

SEQ ID NO: 118010 - protein, 9 aa, Homo sapiens
EPDSRVLAH

SEQ ID NO: 118011 - protein, 9 aa, Homo sapiens
PDSRVLAHI

SEQ ID NO: 118012 - protein, 9 aa, Homo sapiens
DSRVLAHIR

SEQ ID NO: 118013 - protein, 9 aa, Homo sapiens
SRVLAHIRD

SEQ ID NO: 118014 - protein, 9 aa, Homo sapiens
RVLAHIRDD

SEQ ID NO: 118015 - protein, 9 aa, Homo sapiens
VLAHIRDDD

SEQ ID NO: 118016 - protein, 9 aa, Homo sapiens
LAHIRDDDV

SEQ ID NO: 118017 - protein, 9 aa, Homo sapiens
AHIRDDDVI

SEQ ID NO: 118018 - protein, 9 aa, Homo sapiens
HIRDDDVII

SEQ ID NO: 118019 - protein, 9 aa, Homo sapiens
IRDDDVIIR

SEQ ID NO: 118020 - protein, 9 aa, Homo sapiens
RDDDVIIRI

SEQ ID NO: 118021 - protein, 9 aa, Homo sapiens
DDDVIIRIN

SEQ ID NO: 118022 - protein, 9 aa, Homo sapiens
DDVIIRINT

SEQ ID NO: 118023 - protein, 9 aa, Homo sapiens
DVIIRINTD

SEQ ID NO: 118024 - protein, 9 aa, Homo sapiens
VIIRINTDG

SEQ ID NO: 118025 - protein, 9 aa, Homo sapiens
IIRINTDGA

SEQ ID NO: 118026 - protein, 9 aa, Homo sapiens
IRINTDGAE

SEQ ID NO: 118027 - protein, 9 aa, Homo sapiens
RINTDGAEY

SEQ ID NO: 118028 - protein, 9 aa, Homo sapiens
INTDGAEYN

SEQ ID NO: 118029 - protein, 9 aa, Homo sapiens
NTDGAEYNI

SEQ ID NO: 118030 - protein, 9 aa, Homo sapiens
TDGAEYNIE

SEQ ID NO: 118031 - protein, 9 aa, Homo sapiens
DGAEYNIEP

SEQ ID NO: 118032 - protein, 9 aa, Homo sapiens
GAEYNIEPL

SEQ ID NO: 118033 - protein, 9 aa, Homo sapiens
AEYNIEPLW

SEQ ID NO: 118034 - protein, 9 aa, Homo sapiens
EYNIEPLWR

SEQ ID NO: 118035 - protein, 9 aa, Homo sapiens
YNIEPLWRF

SEQ ID NO: 118036 - protein, 9 aa, Homo sapiens
NIEPLWRFV

SEQ ID NO: 118037 - protein, 9 aa, Homo sapiens
IEPLWRFVN

SEQ ID NO: 118038 - protein, 9 aa, Homo sapiens
EPLWRFVND

SEQ ID NO: 118039 - protein, 9 aa, Homo sapiens
PLWRFVNDT

SEQ ID NO: 118040 - protein, 9 aa, Homo sapiens
LWRFVNDTK

SEQ ID NO: 118041 - protein, 9 aa, Homo sapiens
WRFVNDTKD

SEQ ID NO: 118042 - protein, 9 aa, Homo sapiens
RFVNDTKDK

SEQ ID NO: 118043 - protein, 9 aa, Homo sapiens
FVNDTKDKR

SEQ ID NO: 118044 - protein, 9 aa, Homo sapiens
VNDTKDKRM

SEQ ID NO: 118045 - protein, 9 aa, Homo sapiens
NDTKDKRML

SEQ ID NO: 118046 - protein, 9 aa, Homo sapiens
DTKDKRMLV

SEQ ID NO: 118047 - protein, 9 aa, Homo sapiens
TKDKRMLVY

SEQ ID NO: 118048 - protein, 9 aa, Homo sapiens
KDKRMLVYK

SEQ ID NO: 118049 - protein, 9 aa, Homo sapiens
DKRMLVYKS

SEQ ID NO: 118050 - protein, 9 aa, Homo sapiens
KRMLVYKSE

SEQ ID NO: 118051 - protein, 9 aa, Homo sapiens
RMLVYKSED

SEQ ID NO: 118052 - protein, 9 aa, Homo sapiens
MLVYKSEDI

SEQ ID NO: 118053 - protein, 9 aa, Homo sapiens
LVYKSEDIK

SEQ ID NO: 118054 - protein, 9 aa, Homo sapiens
VYKSEDIKN

SEQ ID NO: 118055 - protein, 9 aa, Homo sapiens
YKSEDIKNV

SEQ ID NO: 118056 - protein, 9 aa, Homo sapiens
KSEDIKNVS

SEQ ID NO: 118057 - protein, 9 aa, Homo sapiens
SEDIKNVSR

SEQ ID NO: 118058 - protein, 9 aa, Homo sapiens
EDIKNVSRL

SEQ ID NO: 118059 - protein, 9 aa, Homo sapiens
DIKNVSRLQ

SEQ ID NO: 118060 - protein, 9 aa, Homo sapiens
IKNVSRLQS

SEQ ID NO: 118061 - protein, 9 aa, Homo sapiens
KNVSRLQSP

SEQ ID NO: 118062 - protein, 9 aa, Homo sapiens
NVSRLQSPK

SEQ ID NO: 118063 - protein, 9 aa, Homo sapiens
VSRLQSPKV

SEQ ID NO: 118064 - protein, 9 aa, Homo sapiens
SRLQSPKVC

SEQ ID NO: 118065 - protein, 9 aa, Homo sapiens
RLQSPKVCG

SEQ ID NO: 118066 - protein, 9 aa, Homo sapiens
LQSPKVCGY

SEQ ID NO: 118067 - protein, 9 aa, Homo sapiens
QSPKVCGYL

SEQ ID NO: 118068 - protein, 9 aa, Homo sapiens
SPKVCGYLK

SEQ ID NO: 118069 - protein, 9 aa, Homo sapiens
PKVCGYLKV

SEQ ID NO: 118070 - protein, 9 aa, Homo sapiens
KVCGYLKVD

SEQ ID NO: 118071 - protein, 9 aa, Homo sapiens
VCGYLKVDN

SEQ ID NO: 118072 - protein, 9 aa, Homo sapiens
CGYLKVDNE

SEQ ID NO: 118073 - protein, 9 aa, Homo sapiens
GYLKVDNEE

SEQ ID NO: 118074 - protein, 9 aa, Homo sapiens
YLKVDNEEL

SEQ ID NO: 118075 - protein, 9 aa, Homo sapiens
LKVDNEELL

SEQ ID NO: 118076 - protein, 9 aa, Homo sapiens
KVDNEELLP

SEQ ID NO: 118077 - protein, 9 aa, Homo sapiens
VDNEELLPK

SEQ ID NO: 118078 - protein, 9 aa, Homo sapiens
DNEELLPKG

SEQ ID NO: 118079 - protein, 9 aa, Homo sapiens
NEELLPKGL

SEQ ID NO: 118080 - protein, 9 aa, Homo sapiens
EELLPKGLV

SEQ ID NO: 118081 - protein, 9 aa, Homo sapiens
ELLPKGLVD

SEQ ID NO: 118082 - protein, 9 aa, Homo sapiens
LLPKGLVDR

SEQ ID NO: 118083 - protein, 9 aa, Homo sapiens
LPKGLVDRE

SEQ ID NO: 118084 - protein, 9 aa, Homo sapiens
PKGLVDREP

SEQ ID NO: 118085 - protein, 9 aa, Homo sapiens
KGLVDREPP

SEQ ID NO: 118086 - protein, 9 aa, Homo sapiens
GLVDREPPE

SEQ ID NO: 118087 - protein, 9 aa, Homo sapiens
LVDREPPEE

SEQ ID NO: 118088 - protein, 9 aa, Homo sapiens
VDREPPEEL

SEQ ID NO: 118089 - protein, 9 aa, Homo sapiens
DREPPEELV

SEQ ID NO: 118090 - protein, 9 aa, Homo sapiens
REPPEELVH

SEQ ID NO: 118091 - protein, 9 aa, Homo sapiens
EPPEELVHR

SEQ ID NO: 118092 - protein, 9 aa, Homo sapiens
PPEELVHRV

SEQ ID NO: 118093 - protein, 9 aa, Homo sapiens
PEELVHRVK

SEQ ID NO: 118094 - protein, 9 aa, Homo sapiens
EELVHRVKR

SEQ ID NO: 118095 - protein, 9 aa, Homo sapiens
ELVHRVKRR

SEQ ID NO: 118096 - protein, 9 aa, Homo sapiens
LVHRVKRRA

SEQ ID NO: 118097 - protein, 9 aa, Homo sapiens
VHRVKRRAD

SEQ ID NO: 118098 - protein, 9 aa, Homo sapiens
HRVKRRADP

SEQ ID NO: 118099 - protein, 9 aa, Homo sapiens
RVKRRADPD

SEQ ID NO: 118100 - protein, 9 aa, Homo sapiens
VKRRADPDP

SEQ ID NO: 118101 - protein, 9 aa, Homo sapiens
KRRADPDPM

SEQ ID NO: 118102 - protein, 9 aa, Homo sapiens
RRADPDPMK

SEQ ID NO: 118103 - protein, 9 aa, Homo sapiens
RADPDPMKN

SEQ ID NO: 118104 - protein, 9 aa, Homo sapiens
ADPDPMKNT

SEQ ID NO: 118105 - protein, 9 aa, Homo sapiens
DPDPMKNTC

SEQ ID NO: 118106 - protein, 9 aa, Homo sapiens
PDPMKNTCK

SEQ ID NO: 118107 - protein, 9 aa, Homo sapiens
DPMKNTCKL

SEQ ID NO: 118108 - protein, 9 aa, Homo sapiens
PMKNTCKLL

SEQ ID NO: 118109 - protein, 9 aa, Homo sapiens
MKNTCKLLV

SEQ ID NO: 118110 - protein, 9 aa, Homo sapiens
KNTCKLLVV

SEQ ID NO: 118111 - protein, 9 aa, Homo sapiens
NTCKLLVVA

SEQ ID NO: 118112 - protein, 9 aa, Homo sapiens
TCKLLVVAD

SEQ ID NO: 118113 - protein, 9 aa, Homo sapiens
CKLLVVADH

SEQ ID NO: 118114 - protein, 9 aa, Homo sapiens
KLLVVADHR

SEQ ID NO: 118115 - protein, 9 aa, Homo sapiens
LLVVADHRF

SEQ ID NO: 118116 - protein, 9 aa, Homo sapiens
LVVADHRFY

SEQ ID NO: 118117 - protein, 9 aa, Homo sapiens
VVADHRFYR

SEQ ID NO: 118118 - protein, 9 aa, Homo sapiens
VADHRFYRY

SEQ ID NO: 118119 - protein, 9 aa, Homo sapiens
ADHRFYRYM

SEQ ID NO: 118120 - protein, 9 aa, Homo sapiens
DHRFYRYMG

SEQ ID NO: 118121 - protein, 9 aa, Homo sapiens
HRFYRYMGR

SEQ ID NO: 118122 - protein, 9 aa, Homo sapiens
RFYRYMGRG

SEQ ID NO: 118123 - protein, 9 aa, Homo sapiens
FYRYMGRGE

SEQ ID NO: 118124 - protein, 9 aa, Homo sapiens
YRYMGRGEE

SEQ ID NO: 118125 - protein, 9 aa, Homo sapiens
RYMGRGEES

SEQ ID NO: 118126 - protein, 9 aa, Homo sapiens
YMGRGEEST

SEQ ID NO: 118127 - protein, 9 aa, Homo sapiens
MGRGEESTT

SEQ ID NO: 118128 - protein, 9 aa, Homo sapiens
GRGEESTTT

SEQ ID NO: 118129 - protein, 9 aa, Homo sapiens
RGEESTTTN

SEQ ID NO: 118130 - protein, 9 aa, Homo sapiens
GEESTTTNY

SEQ ID NO: 118131 - protein, 9 aa, Homo sapiens
EESTTTNYL

SEQ ID NO: 118132 - protein, 9 aa, Homo sapiens
ESTTTNYLI

SEQ ID NO: 118133 - protein, 9 aa, Homo sapiens
STTTNYLIE

SEQ ID NO: 118134 - protein, 9 aa, Homo sapiens
TTTNYLIEL

SEQ ID NO: 118135 - protein, 9 aa, Homo sapiens
TTNYLIELI

SEQ ID NO: 118136 - protein, 9 aa, Homo sapiens
TNYLIELID

SEQ ID NO: 118137 - protein, 9 aa, Homo sapiens
NYLIELIDR

SEQ ID NO: 118138 - protein, 9 aa, Homo sapiens
YLIELIDRV

SEQ ID NO: 118139 - protein, 9 aa, Homo sapiens
LIELIDRVD

SEQ ID NO: 118140 - protein, 9 aa, Homo sapiens
IELIDRVDD

SEQ ID NO: 118141 - protein, 9 aa, Homo sapiens
ELIDRVDDI

SEQ ID NO: 118142 - protein, 9 aa, Homo sapiens
LIDRVDDIY

SEQ ID NO: 118143 - protein, 9 aa, Homo sapiens
IDRVDDIYR

SEQ ID NO: 118144 - protein, 9 aa, Homo sapiens
DRVDDIYRN

SEQ ID NO: 118145 - protein, 9 aa, Homo sapiens
RVDDIYRNT

SEQ ID NO: 118146 - protein, 9 aa, Homo sapiens
VDDIYRNTS

SEQ ID NO: 118147 - protein, 9 aa, Homo sapiens
DDIYRNTSW

SEQ ID NO: 118148 - protein, 9 aa, Homo sapiens
DIYRNTSWD

SEQ ID NO: 118149 - protein, 9 aa, Homo sapiens
IYRNTSWDN

SEQ ID NO: 118150 - protein, 9 aa, Homo sapiens
YRNTSWDNA

SEQ ID NO: 118151 - protein, 9 aa, Homo sapiens
RNTSWDNAG

SEQ ID NO: 118152 - protein, 9 aa, Homo sapiens
NTSWDNAGF

SEQ ID NO: 118153 - protein, 9 aa, Homo sapiens
TSWDNAGFK

SEQ ID NO: 118154 - protein, 9 aa, Homo sapiens
SWDNAGFKG

SEQ ID NO: 118155 - protein, 9 aa, Homo sapiens
WDNAGFKGY

SEQ ID NO: 118156 - protein, 9 aa, Homo sapiens
DNAGFKGYG

SEQ ID NO: 118157 - protein, 9 aa, Homo sapiens
NAGFKGYGI

SEQ ID NO: 118158 - protein, 9 aa, Homo sapiens
AGFKGYGIQ

SEQ ID NO: 118159 - protein, 9 aa, Homo sapiens
GFKGYGIQI

SEQ ID NO: 118160 - protein, 9 aa, Homo sapiens
FKGYGIQIE

SEQ ID NO: 118161 - protein, 9 aa, Homo sapiens
KGYGIQIEQ

SEQ ID NO: 118162 - protein, 9 aa, Homo sapiens
GYGIQIEQI

SEQ ID NO: 118163 - protein, 9 aa, Homo sapiens
YGIQIEQIR

SEQ ID NO: 118164 - protein, 9 aa, Homo sapiens
GIQIEQIRI

SEQ ID NO: 118165 - protein, 9 aa, Homo sapiens
IQIEQIRIL

SEQ ID NO: 118166 - protein, 9 aa, Homo sapiens
QIEQIRILK

SEQ ID NO: 118167 - protein, 9 aa, Homo sapiens
IEQIRILKS

SEQ ID NO: 118168 - protein, 9 aa, Homo sapiens
EQIRILKSP

SEQ ID NO: 118169 - protein, 9 aa, Homo sapiens
QIRILKSPQ

SEQ ID NO: 118170 - protein, 9 aa, Homo sapiens
IRILKSPQE

SEQ ID NO: 118171 - protein, 9 aa, Homo sapiens
RILKSPQEV

SEQ ID NO: 118172 - protein, 9 aa, Homo sapiens
ILKSPQEVK

SEQ ID NO: 118173 - protein, 9 aa, Homo sapiens
LKSPQEVKP

SEQ ID NO: 118174 - protein, 9 aa, Homo sapiens
KSPQEVKPG

SEQ ID NO: 118175 - protein, 9 aa, Homo sapiens
SPQEVKPGE

SEQ ID NO: 118176 - protein, 9 aa, Homo sapiens
PQEVKPGEK

SEQ ID NO: 118177 - protein, 9 aa, Homo sapiens
QEVKPGEKH

SEQ ID NO: 118178 - protein, 9 aa, Homo sapiens
EVKPGEKHY

SEQ ID NO: 118179 - protein, 9 aa, Homo sapiens
VKPGEKHYN

SEQ ID NO: 118180 - protein, 9 aa, Homo sapiens
KPGEKHYNM

SEQ ID NO: 118181 - protein, 9 aa, Homo sapiens
PGEKHYNMA

SEQ ID NO: 118182 - protein, 9 aa, Homo sapiens
GEKHYNMAK

SEQ ID NO: 118183 - protein, 9 aa, Homo sapiens
EKHYNMAKS

SEQ ID NO: 118184 - protein, 9 aa, Homo sapiens
KHYNMAKSY

SEQ ID NO: 118185 - protein, 9 aa, Homo sapiens
HYNMAKSYP

SEQ ID NO: 118186 - protein, 9 aa, Homo sapiens
YNMAKSYPN

SEQ ID NO: 118187 - protein, 9 aa, Homo sapiens
NMAKSYPNE

SEQ ID NO: 118188 - protein, 9 aa, Homo sapiens
MAKSYPNEE

SEQ ID NO: 118189 - protein, 9 aa, Homo sapiens
AKSYPNEEK

SEQ ID NO: 118190 - protein, 9 aa, Homo sapiens
KSYPNEEKD

SEQ ID NO: 118191 - protein, 9 aa, Homo sapiens
SYPNEEKDA

SEQ ID NO: 118192 - protein, 9 aa, Homo sapiens
YPNEEKDAW

SEQ ID NO: 118193 - protein, 9 aa, Homo sapiens
PNEEKDAWD

SEQ ID NO: 118194 - protein, 9 aa, Homo sapiens
NEEKDAWDV

SEQ ID NO: 118195 - protein, 9 aa, Homo sapiens
EEKDAWDVK

SEQ ID NO: 118196 - protein, 9 aa, Homo sapiens
EKDAWDVKM

SEQ ID NO: 118197 - protein, 9 aa, Homo sapiens
KDAWDVKML

SEQ ID NO: 118198 - protein, 9 aa, Homo sapiens
DAWDVKMLL

SEQ ID NO: 118199 - protein, 9 aa, Homo sapiens
AWDVKMLLE

SEQ ID NO: 118200 - protein, 9 aa, Homo sapiens
WDVKMLLEQ

SEQ ID NO: 118201 - protein, 9 aa, Homo sapiens
DVKMLLEQF

SEQ ID NO: 118202 - protein, 9 aa, Homo sapiens
VKMLLEQFS

SEQ ID NO: 118203 - protein, 9 aa, Homo sapiens
KMLLEQFSF

SEQ ID NO: 118204 - protein, 9 aa, Homo sapiens
MLLEQFSFD

SEQ ID NO: 118205 - protein, 9 aa, Homo sapiens
LLEQFSFDI

SEQ ID NO: 118206 - protein, 9 aa, Homo sapiens
LEQFSFDIA

SEQ ID NO: 118207 - protein, 9 aa, Homo sapiens
EQFSFDIAE

SEQ ID NO: 118208 - protein, 9 aa, Homo sapiens
QFSFDIAEE

SEQ ID NO: 118209 - protein, 9 aa, Homo sapiens
FSFDIAEEA

SEQ ID NO: 118210 - protein, 9 aa, Homo sapiens
SFDIAEEAS

SEQ ID NO: 118211 - protein, 9 aa, Homo sapiens
FDIAEEASK

SEQ ID NO: 118212 - protein, 9 aa, Homo sapiens
DIAEEASKV

SEQ ID NO: 118213 - protein, 9 aa, Homo sapiens
IAEEASKVC

SEQ ID NO: 118214 - protein, 9 aa, Homo sapiens
AEEASKVCL

SEQ ID NO: 118215 - protein, 9 aa, Homo sapiens
EEASKVCLA

SEQ ID NO: 118216 - protein, 9 aa, Homo sapiens
EASKVCLAH

SEQ ID NO: 118217 - protein, 9 aa, Homo sapiens
ASKVCLAHL

SEQ ID NO: 118218 - protein, 9 aa, Homo sapiens
SKVCLAHLF

SEQ ID NO: 118219 - protein, 9 aa, Homo sapiens
KVCLAHLFT

SEQ ID NO: 118220 - protein, 9 aa, Homo sapiens
VCLAHLFTY

SEQ ID NO: 118221 - protein, 9 aa, Homo sapiens
CLAHLFTYQ

SEQ ID NO: 118222 - protein, 9 aa, Homo sapiens
LAHLFTYQD

SEQ ID NO: 118223 - protein, 9 aa, Homo sapiens
AHLFTYQDF

SEQ ID NO: 118224 - protein, 9 aa, Homo sapiens
HLFTYQDFD

SEQ ID NO: 118225 - protein, 9 aa, Homo sapiens
LFTYQDFDM

SEQ ID NO: 118226 - protein, 9 aa, Homo sapiens
FTYQDFDMG

SEQ ID NO: 118227 - protein, 9 aa, Homo sapiens
TYQDFDMGT

SEQ ID NO: 118228 - protein, 9 aa, Homo sapiens
YQDFDMGTL

SEQ ID NO: 118229 - protein, 9 aa, Homo sapiens
QDFDMGTLG

SEQ ID NO: 118230 - protein, 9 aa, Homo sapiens
DFDMGTLGL

SEQ ID NO: 118231 - protein, 9 aa, Homo sapiens
FDMGTLGLA

SEQ ID NO: 118232 - protein, 9 aa, Homo sapiens
DMGTLGLAY

SEQ ID NO: 118233 - protein, 9 aa, Homo sapiens
MGTLGLAYV

SEQ ID NO: 118234 - protein, 9 aa, Homo sapiens
GTLGLAYVG

SEQ ID NO: 118235 - protein, 9 aa, Homo sapiens
TLGLAYVGS

SEQ ID NO: 118236 - protein, 9 aa, Homo sapiens
LGLAYVGSP

SEQ ID NO: 118237 - protein, 9 aa, Homo sapiens
GLAYVGSPR

SEQ ID NO: 118238 - protein, 9 aa, Homo sapiens
LAYVGSPRA

SEQ ID NO: 118239 - protein, 9 aa, Homo sapiens
AYVGSPRAN

SEQ ID NO: 118240 - protein, 9 aa, Homo sapiens
YVGSPRANS

SEQ ID NO: 118241 - protein, 9 aa, Homo sapiens
VGSPRANSH

SEQ ID NO: 118242 - protein, 9 aa, Homo sapiens
GSPRANSHG

SEQ ID NO: 118243 - protein, 9 aa, Homo sapiens
SPRANSHGG

SEQ ID NO: 118244 - protein, 9 aa, Homo sapiens
PRANSHGGV

SEQ ID NO: 118245 - protein, 9 aa, Homo sapiens
RANSHGGVC

SEQ ID NO: 118246 - protein, 9 aa, Homo sapiens
ANSHGGVCP

SEQ ID NO: 118247 - protein, 9 aa, Homo sapiens
NSHGGVCPK

SEQ ID NO: 118248 - protein, 9 aa, Homo sapiens
SHGGVCPKA

SEQ ID NO: 118249 - protein, 9 aa, Homo sapiens
HGGVCPKAY

SEQ ID NO: 118250 - protein, 9 aa, Homo sapiens
GGVCPKAYY

SEQ ID NO: 118251 - protein, 9 aa, Homo sapiens
GVCPKAYYS

SEQ ID NO: 118252 - protein, 9 aa, Homo sapiens
VCPKAYYSP

SEQ ID NO: 118253 - protein, 9 aa, Homo sapiens
CPKAYYSPV

SEQ ID NO: 118254 - protein, 9 aa, Homo sapiens
PKAYYSPVG

SEQ ID NO: 118255 - protein, 9 aa, Homo sapiens
KAYYSPVGK

SEQ ID NO: 118256 - protein, 9 aa, Homo sapiens
AYYSPVGKK

SEQ ID NO: 118257 - protein, 9 aa, Homo sapiens
YYSPVGKKN

SEQ ID NO: 118258 - protein, 9 aa, Homo sapiens
YSPVGKKNI

SEQ ID NO: 118259 - protein, 9 aa, Homo sapiens
SPVGKKNIY

SEQ ID NO: 118260 - protein, 9 aa, Homo sapiens
PVGKKNIYL

SEQ ID NO: 118261 - protein, 9 aa, Homo sapiens
VGKKNIYLN

SEQ ID NO: 118262 - protein, 9 aa, Homo sapiens
GKKNIYLNS

SEQ ID NO: 118263 - protein, 9 aa, Homo sapiens
KKNIYLNSG

SEQ ID NO: 118264 - protein, 9 aa, Homo sapiens
KNIYLNSGL

SEQ ID NO: 118265 - protein, 9 aa, Homo sapiens
NIYLNSGLT

SEQ ID NO: 118266 - protein, 9 aa, Homo sapiens
IYLNSGLTS

SEQ ID NO: 118267 - protein, 9 aa, Homo sapiens
YLNSGLTST

SEQ ID NO: 118268 - protein, 9 aa, Homo sapiens
LNSGLTSTK

SEQ ID NO: 118269 - protein, 9 aa, Homo sapiens
NSGLTSTKN

SEQ ID NO: 118270 - protein, 9 aa, Homo sapiens
SGLTSTKNY

SEQ ID NO: 118271 - protein, 9 aa, Homo sapiens
GLTSTKNYG

SEQ ID NO: 118272 - protein, 9 aa, Homo sapiens
LTSTKNYGK

SEQ ID NO: 118273 - protein, 9 aa, Homo sapiens
TSTKNYGKT

SEQ ID NO: 118274 - protein, 9 aa, Homo sapiens
STKNYGKTI

SEQ ID NO: 118275 - protein, 9 aa, Homo sapiens
TKNYGKTIL

SEQ ID NO: 118276 - protein, 9 aa, Homo sapiens
KNYGKTILT

SEQ ID NO: 118277 - protein, 9 aa, Homo sapiens
NYGKTILTK

SEQ ID NO: 118278 - protein, 9 aa, Homo sapiens
YGKTILTKE

SEQ ID NO: 118279 - protein, 9 aa, Homo sapiens
GKTILTKEA

SEQ ID NO: 118280 - protein, 9 aa, Homo sapiens
KTILTKEAD

SEQ ID NO: 118281 - protein, 9 aa, Homo sapiens
TILTKEADL

SEQ ID NO: 118282 - protein, 9 aa, Homo sapiens
ILTKEADLV

SEQ ID NO: 118283 - protein, 9 aa, Homo sapiens
LTKEADLVT

SEQ ID NO: 118284 - protein, 9 aa, Homo sapiens
TKEADLVTT

SEQ ID NO: 118285 - protein, 9 aa, Homo sapiens
KEADLVTTH

SEQ ID NO: 118286 - protein, 9 aa, Homo sapiens
EADLVTTHE

SEQ ID NO: 118287 - protein, 9 aa, Homo sapiens
ADLVTTHEL

SEQ ID NO: 118288 - protein, 9 aa, Homo sapiens
DLVTTHELG

SEQ ID NO: 118289 - protein, 9 aa, Homo sapiens
LVTTHELGH

SEQ ID NO: 118290 - protein, 9 aa, Homo sapiens
VTTHELGHN

SEQ ID NO: 118291 - protein, 9 aa, Homo sapiens
TTHELGHNF

SEQ ID NO: 118292 - protein, 9 aa, Homo sapiens
THELGHNFG

SEQ ID NO: 118293 - protein, 9 aa, Homo sapiens
HELGHNFGA

SEQ ID NO: 118294 - protein, 9 aa, Homo sapiens
ELGHNFGAE

SEQ ID NO: 118295 - protein, 9 aa, Homo sapiens
LGHNFGAEH

SEQ ID NO: 118296 - protein, 9 aa, Homo sapiens
GHNFGAEHD

SEQ ID NO: 118297 - protein, 9 aa, Homo sapiens
HNFGAEHDP

SEQ ID NO: 118298 - protein, 9 aa, Homo sapiens
NFGAEHDPD

SEQ ID NO: 118299 - protein, 9 aa, Homo sapiens
FGAEHDPDG

SEQ ID NO: 118300 - protein, 9 aa, Homo sapiens
GAEHDPDGL

SEQ ID NO: 118301 - protein, 9 aa, Homo sapiens
AEHDPDGLA

SEQ ID NO: 118302 - protein, 9 aa, Homo sapiens
EHDPDGLAE

SEQ ID NO: 118303 - protein, 9 aa, Homo sapiens
HDPDGLAEC

SEQ ID NO: 118304 - protein, 9 aa, Homo sapiens
DPDGLAECA

SEQ ID NO: 118305 - protein, 9 aa, Homo sapiens
PDGLAECAP

SEQ ID NO: 118306 - protein, 9 aa, Homo sapiens
DGLAECAPN

SEQ ID NO: 118307 - protein, 9 aa, Homo sapiens
GLAECAPNE

SEQ ID NO: 118308 - protein, 9 aa, Homo sapiens
LAECAPNED

SEQ ID NO: 118309 - protein, 9 aa, Homo sapiens
AECAPNEDQ

SEQ ID NO: 118310 - protein, 9 aa, Homo sapiens
ECAPNEDQG

SEQ ID NO: 118311 - protein, 9 aa, Homo sapiens
CAPNEDQGG

SEQ ID NO: 118312 - protein, 9 aa, Homo sapiens
APNEDQGGK

SEQ ID NO: 118313 - protein, 9 aa, Homo sapiens
PNEDQGGKY

SEQ ID NO: 118314 - protein, 9 aa, Homo sapiens
NEDQGGKYV

SEQ ID NO: 118315 - protein, 9 aa, Homo sapiens
EDQGGKYVM

SEQ ID NO: 118316 - protein, 9 aa, Homo sapiens
DQGGKYVMY

SEQ ID NO: 118317 - protein, 9 aa, Homo sapiens
QGGKYVMYP

SEQ ID NO: 118318 - protein, 9 aa, Homo sapiens
GGKYVMYPI

SEQ ID NO: 118319 - protein, 9 aa, Homo sapiens
GKYVMYPIA

SEQ ID NO: 118320 - protein, 9 aa, Homo sapiens
KYVMYPIAV

SEQ ID NO: 118321 - protein, 9 aa, Homo sapiens
YVMYPIAVS

SEQ ID NO: 118322 - protein, 9 aa, Homo sapiens
VMYPIAVSG

SEQ ID NO: 118323 - protein, 9 aa, Homo sapiens
MYPIAVSGD

SEQ ID NO: 118324 - protein, 9 aa, Homo sapiens
YPIAVSGDH

SEQ ID NO: 118325 - protein, 9 aa, Homo sapiens
PIAVSGDHE

SEQ ID NO: 118326 - protein, 9 aa, Homo sapiens
IAVSGDHEN

SEQ ID NO: 118327 - protein, 9 aa, Homo sapiens
AVSGDHENN

SEQ ID NO: 118328 - protein, 9 aa, Homo sapiens
VSGDHENNK

SEQ ID NO: 118329 - protein, 9 aa, Homo sapiens
SGDHENNKM

SEQ ID NO: 118330 - protein, 9 aa, Homo sapiens
GDHENNKMF

SEQ ID NO: 118331 - protein, 9 aa, Homo sapiens
DHENNKMFS

SEQ ID NO: 118332 - protein, 9 aa, Homo sapiens
HENNKMFSN

SEQ ID NO: 118333 - protein, 9 aa, Homo sapiens
ENNKMFSNC

SEQ ID NO: 118334 - protein, 9 aa, Homo sapiens
NNKMFSNCS

SEQ ID NO: 118335 - protein, 9 aa, Homo sapiens
NKMFSNCSK

SEQ ID NO: 118336 - protein, 9 aa, Homo sapiens
KMFSNCSKQ

SEQ ID NO: 118337 - protein, 9 aa, Homo sapiens
MFSNCSKQS

SEQ ID NO: 118338 - protein, 9 aa, Homo sapiens
FSNCSKQSI

SEQ ID NO: 118339 - protein, 9 aa, Homo sapiens
SNCSKQSIY

SEQ ID NO: 118340 - protein, 9 aa, Homo sapiens
NCSKQSIYK

SEQ ID NO: 118341 - protein, 9 aa, Homo sapiens
CSKQSIYKT

SEQ ID NO: 118342 - protein, 9 aa, Homo sapiens
SKQSIYKTI

SEQ ID NO: 118343 - protein, 9 aa, Homo sapiens
KQSIYKTIE

SEQ ID NO: 118344 - protein, 9 aa, Homo sapiens
QSIYKTIES

SEQ ID NO: 118345 - protein, 9 aa, Homo sapiens
SIYKTIESK

SEQ ID NO: 118346 - protein, 9 aa, Homo sapiens
IYKTIESKA

SEQ ID NO: 118347 - protein, 9 aa, Homo sapiens
YKTIESKAQ

SEQ ID NO: 118348 - protein, 9 aa, Homo sapiens
KTIESKAQE

SEQ ID NO: 118349 - protein, 9 aa, Homo sapiens
TIESKAQEC

SEQ ID NO: 118350 - protein, 9 aa, Homo sapiens
IESKAQECF

SEQ ID NO: 118351 - protein, 9 aa, Homo sapiens
ESKAQECFQ

SEQ ID NO: 118352 - protein, 9 aa, Homo sapiens
SKAQECFQE

SEQ ID NO: 118353 - protein, 9 aa, Homo sapiens
KAQECFQER

SEQ ID NO: 118354 - protein, 9 aa, Homo sapiens
AQECFQERS

SEQ ID NO: 118355 - protein, 9 aa, Homo sapiens
QECFQERSN

SEQ ID NO: 118356 - protein, 9 aa, Homo sapiens
ECFQERSNK

SEQ ID NO: 118357 - protein, 9 aa, Homo sapiens
CFQERSNKV

SEQ ID NO: 118358 - protein, 9 aa, Homo sapiens
FQERSNKVC

SEQ ID NO: 118359 - protein, 9 aa, Homo sapiens
QERSNKVCG

SEQ ID NO: 118360 - protein, 9 aa, Homo sapiens
ERSNKVCGN

SEQ ID NO: 118361 - protein, 9 aa, Homo sapiens
RSNKVCGNS

SEQ ID NO: 118362 - protein, 9 aa, Homo sapiens
SNKVCGNSR

SEQ ID NO: 118363 - protein, 9 aa, Homo sapiens
NKVCGNSRV

SEQ ID NO: 118364 - protein, 9 aa, Homo sapiens
KVCGNSRVD

SEQ ID NO: 118365 - protein, 9 aa, Homo sapiens
VCGNSRVDE

SEQ ID NO: 118366 - protein, 9 aa, Homo sapiens
CGNSRVDEG

SEQ ID NO: 118367 - protein, 9 aa, Homo sapiens
GNSRVDEGE

SEQ ID NO: 118368 - protein, 9 aa, Homo sapiens
NSRVDEGEE

SEQ ID NO: 118369 - protein, 9 aa, Homo sapiens
SRVDEGEEC

SEQ ID NO: 118370 - protein, 9 aa, Homo sapiens
RVDEGEECD

SEQ ID NO: 118371 - protein, 9 aa, Homo sapiens
VDEGEECDP

SEQ ID NO: 118372 - protein, 9 aa, Homo sapiens
DEGEECDPG

SEQ ID NO: 118373 - protein, 9 aa, Homo sapiens
EGEECDPGI

SEQ ID NO: 118374 - protein, 9 aa, Homo sapiens
GEECDPGIM

SEQ ID NO: 118375 - protein, 9 aa, Homo sapiens
EECDPGIMY

SEQ ID NO: 118376 - protein, 9 aa, Homo sapiens
ECDPGIMYL

SEQ ID NO: 118377 - protein, 9 aa, Homo sapiens
CDPGIMYLN

SEQ ID NO: 118378 - protein, 9 aa, Homo sapiens
DPGIMYLNN

SEQ ID NO: 118379 - protein, 9 aa, Homo sapiens
PGIMYLNND

SEQ ID NO: 118380 - protein, 9 aa, Homo sapiens
GIMYLNNDT

SEQ ID NO: 118381 - protein, 9 aa, Homo sapiens
IMYLNNDTC

SEQ ID NO: 118382 - protein, 9 aa, Homo sapiens
MYLNNDTCC

SEQ ID NO: 118383 - protein, 9 aa, Homo sapiens
YLNNDTCCN

SEQ ID NO: 118384 - protein, 9 aa, Homo sapiens
LNNDTCCNS

SEQ ID NO: 118385 - protein, 9 aa, Homo sapiens
NNDTCCNSD

SEQ ID NO: 118386 - protein, 9 aa, Homo sapiens
NDTCCNSDC

SEQ ID NO: 118387 - protein, 9 aa, Homo sapiens
DTCCNSDCT

SEQ ID NO: 118388 - protein, 9 aa, Homo sapiens
TCCNSDCTL

SEQ ID NO: 118389 - protein, 9 aa, Homo sapiens
CCNSDCTLK

SEQ ID NO: 118390 - protein, 9 aa, Homo sapiens
CNSDCTLKE

SEQ ID NO: 118391 - protein, 9 aa, Homo sapiens
NSDCTLKEG

SEQ ID NO: 118392 - protein, 9 aa, Homo sapiens
SDCTLKEGV

SEQ ID NO: 118393 - protein, 9 aa, Homo sapiens
DCTLKEGVQ

SEQ ID NO: 118394 - protein, 9 aa, Homo sapiens
CTLKEGVQC

SEQ ID NO: 118395 - protein, 9 aa, Homo sapiens
TLKEGVQCS

SEQ ID NO: 118396 - protein, 9 aa, Homo sapiens
LKEGVQCSD

SEQ ID NO: 118397 - protein, 9 aa, Homo sapiens
KEGVQCSDR

SEQ ID NO: 118398 - protein, 9 aa, Homo sapiens
EGVQCSDRN

SEQ ID NO: 118399 - protein, 9 aa, Homo sapiens
GVQCSDRNS

SEQ ID NO: 118400 - protein, 9 aa, Homo sapiens
VQCSDRNSP

SEQ ID NO: 118401 - protein, 9 aa, Homo sapiens
QCSDRNSPC

SEQ ID NO: 118402 - protein, 9 aa, Homo sapiens
CSDRNSPCC

SEQ ID NO: 118403 - protein, 9 aa, Homo sapiens
SDRNSPCCK

SEQ ID NO: 118404 - protein, 9 aa, Homo sapiens
DRNSPCCKN

SEQ ID NO: 118405 - protein, 9 aa, Homo sapiens
RNSPCCKNC

SEQ ID NO: 118406 - protein, 9 aa, Homo sapiens
NSPCCKNCQ

SEQ ID NO: 118407 - protein, 9 aa, Homo sapiens
SPCCKNCQF

SEQ ID NO: 118408 - protein, 9 aa, Homo sapiens
PCCKNCQFE

SEQ ID NO: 118409 - protein, 9 aa, Homo sapiens
CCKNCQFET

SEQ ID NO: 118410 - protein, 9 aa, Homo sapiens
CKNCQFETA

SEQ ID NO: 118411 - protein, 9 aa, Homo sapiens
KNCQFETAQ

SEQ ID NO: 118412 - protein, 9 aa, Homo sapiens
NCQFETAQK

SEQ ID NO: 118413 - protein, 9 aa, Homo sapiens
CQFETAQKK

SEQ ID NO: 118414 - protein, 9 aa, Homo sapiens
QFETAQKKC

SEQ ID NO: 118415 - protein, 9 aa, Homo sapiens
FETAQKKCQ

SEQ ID NO: 118416 - protein, 9 aa, Homo sapiens
ETAQKKCQE

SEQ ID NO: 118417 - protein, 9 aa, Homo sapiens
TAQKKCQEA

SEQ ID NO: 118418 - protein, 9 aa, Homo sapiens
AQKKCQEAI

SEQ ID NO: 118419 - protein, 9 aa, Homo sapiens
QKKCQEAIN

SEQ ID NO: 118420 - protein, 9 aa, Homo sapiens
KKCQEAINA

SEQ ID NO: 118421 - protein, 9 aa, Homo sapiens
KCQEAINAT

SEQ ID NO: 118422 - protein, 9 aa, Homo sapiens
CQEAINATC

SEQ ID NO: 118423 - protein, 9 aa, Homo sapiens
QEAINATCK

SEQ ID NO: 118424 - protein, 9 aa, Homo sapiens
EAINATCKG

SEQ ID NO: 118425 - protein, 9 aa, Homo sapiens
AINATCKGV

SEQ ID NO: 118426 - protein, 9 aa, Homo sapiens
INATCKGVS

SEQ ID NO: 118427 - protein, 9 aa, Homo sapiens
NATCKGVSY

SEQ ID NO: 118428 - protein, 9 aa, Homo sapiens
ATCKGVSYC

SEQ ID NO: 118429 - protein, 9 aa, Homo sapiens
TCKGVSYCT

SEQ ID NO: 118430 - protein, 9 aa, Homo sapiens
CKGVSYCTG

SEQ ID NO: 118431 - protein, 9 aa, Homo sapiens
KGVSYCTGN

SEQ ID NO: 118432 - protein, 9 aa, Homo sapiens
GVSYCTGNS

SEQ ID NO: 118433 - protein, 9 aa, Homo sapiens
VSYCTGNSS

SEQ ID NO: 118434 - protein, 9 aa, Homo sapiens
SYCTGNSSE

SEQ ID NO: 118435 - protein, 9 aa, Homo sapiens
YCTGNSSEC

SEQ ID NO: 118436 - protein, 9 aa, Homo sapiens
CTGNSSECP

SEQ ID NO: 118437 - protein, 9 aa, Homo sapiens
TGNSSECPP

SEQ ID NO: 118438 - protein, 9 aa, Homo sapiens
GNSSECPPP

SEQ ID NO: 118439 - protein, 9 aa, Homo sapiens
NSSECPPPG

SEQ ID NO: 118440 - protein, 9 aa, Homo sapiens
SSECPPPGN

SEQ ID NO: 118441 - protein, 9 aa, Homo sapiens
SECPPPGNA

SEQ ID NO: 118442 - protein, 9 aa, Homo sapiens
ECPPPGNAE

SEQ ID NO: 118443 - protein, 9 aa, Homo sapiens
CPPPGNAED

SEQ ID NO: 118444 - protein, 9 aa, Homo sapiens
PPPGNAEDD

SEQ ID NO: 118445 - protein, 9 aa, Homo sapiens
PPGNAEDDT

SEQ ID NO: 118446 - protein, 9 aa, Homo sapiens
PGNAEDDTV

SEQ ID NO: 118447 - protein, 9 aa, Homo sapiens
GNAEDDTVC

SEQ ID NO: 118448 - protein, 9 aa, Homo sapiens
NAEDDTVCL

SEQ ID NO: 118449 - protein, 9 aa, Homo sapiens
AEDDTVCLD

SEQ ID NO: 118450 - protein, 9 aa, Homo sapiens
EDDTVCLDL

SEQ ID NO: 118451 - protein, 9 aa, Homo sapiens
DDTVCLDLG

SEQ ID NO: 118452 - protein, 9 aa, Homo sapiens
DTVCLDLGK

SEQ ID NO: 118453 - protein, 9 aa, Homo sapiens
TVCLDLGKC

SEQ ID NO: 118454 - protein, 9 aa, Homo sapiens
VCLDLGKCK

SEQ ID NO: 118455 - protein, 9 aa, Homo sapiens
CLDLGKCKD

SEQ ID NO: 118456 - protein, 9 aa, Homo sapiens
LDLGKCKDG

SEQ ID NO: 118457 - protein, 9 aa, Homo sapiens
DLGKCKDGK

SEQ ID NO: 118458 - protein, 9 aa, Homo sapiens
LGKCKDGKC

SEQ ID NO: 118459 - protein, 9 aa, Homo sapiens
GKCKDGKCI

SEQ ID NO: 118460 - protein, 9 aa, Homo sapiens
KCKDGKCIP

SEQ ID NO: 118461 - protein, 9 aa, Homo sapiens
CKDGKCIPF

SEQ ID NO: 118462 - protein, 9 aa, Homo sapiens
KDGKCIPFC

SEQ ID NO: 118463 - protein, 9 aa, Homo sapiens
DGKCIPFCE

SEQ ID NO: 118464 - protein, 9 aa, Homo sapiens
GKCIPFCER

SEQ ID NO: 118465 - protein, 9 aa, Homo sapiens
KCIPFCERE

SEQ ID NO: 118466 - protein, 9 aa, Homo sapiens
CIPFCEREQ

SEQ ID NO: 118467 - protein, 9 aa, Homo sapiens
IPFCEREQQ

SEQ ID NO: 118468 - protein, 9 aa, Homo sapiens
PFCEREQQL

SEQ ID NO: 118469 - protein, 9 aa, Homo sapiens
FCEREQQLE

SEQ ID NO: 118470 - protein, 9 aa, Homo sapiens
CEREQQLES

SEQ ID NO: 118471 - protein, 9 aa, Homo sapiens
EREQQLESC

SEQ ID NO: 118472 - protein, 9 aa, Homo sapiens
REQQLESCA

SEQ ID NO: 118473 - protein, 9 aa, Homo sapiens
EQQLESCAC

SEQ ID NO: 118474 - protein, 9 aa, Homo sapiens
QQLESCACN

SEQ ID NO: 118475 - protein, 9 aa, Homo sapiens
QLESCACNE

SEQ ID NO: 118476 - protein, 9 aa, Homo sapiens
LESCACNET

SEQ ID NO: 118477 - protein, 9 aa, Homo sapiens
ESCACNETD

SEQ ID NO: 118478 - protein, 9 aa, Homo sapiens
SCACNETDN

SEQ ID NO: 118479 - protein, 9 aa, Homo sapiens
CACNETDNS

SEQ ID NO: 118480 - protein, 9 aa, Homo sapiens
ACNETDNSC

SEQ ID NO: 118481 - protein, 9 aa, Homo sapiens
CNETDNSCK

SEQ ID NO: 118482 - protein, 9 aa, Homo sapiens
NETDNSCKV

SEQ ID NO: 118483 - protein, 9 aa, Homo sapiens
ETDNSCKVC

SEQ ID NO: 118484 - protein, 9 aa, Homo sapiens
TDNSCKVCC

SEQ ID NO: 118485 - protein, 9 aa, Homo sapiens
DNSCKVCCR

SEQ ID NO: 118486 - protein, 9 aa, Homo sapiens
NSCKVCCRD

SEQ ID NO: 118487 - protein, 9 aa, Homo sapiens
SCKVCCRDL

SEQ ID NO: 118488 - protein, 9 aa, Homo sapiens
CKVCCRDLS

SEQ ID NO: 118489 - protein, 9 aa, Homo sapiens
KVCCRDLSG

SEQ ID NO: 118490 - protein, 9 aa, Homo sapiens
VCCRDLSGR

SEQ ID NO: 118491 - protein, 9 aa, Homo sapiens
CCRDLSGRC

SEQ ID NO: 118492 - protein, 9 aa, Homo sapiens
CRDLSGRCV

SEQ ID NO: 118493 - protein, 9 aa, Homo sapiens
RDLSGRCVP

SEQ ID NO: 118494 - protein, 9 aa, Homo sapiens
DLSGRCVPY

SEQ ID NO: 118495 - protein, 9 aa, Homo sapiens
LSGRCVPYV

SEQ ID NO: 118496 - protein, 9 aa, Homo sapiens
SGRCVPYVD

SEQ ID NO: 118497 - protein, 9 aa, Homo sapiens
GRCVPYVDA

SEQ ID NO: 118498 - protein, 9 aa, Homo sapiens
RCVPYVDAE

SEQ ID NO: 118499 - protein, 9 aa, Homo sapiens
CVPYVDAEQ

SEQ ID NO: 118500 - protein, 9 aa, Homo sapiens
VPYVDAEQK

SEQ ID NO: 118501 - protein, 9 aa, Homo sapiens
PYVDAEQKN

SEQ ID NO: 118502 - protein, 9 aa, Homo sapiens
YVDAEQKNL

SEQ ID NO: 118503 - protein, 9 aa, Homo sapiens
VDAEQKNLF

SEQ ID NO: 118504 - protein, 9 aa, Homo sapiens
DAEQKNLFL

SEQ ID NO: 118505 - protein, 9 aa, Homo sapiens
AEQKNLFLR

SEQ ID NO: 118506 - protein, 9 aa, Homo sapiens
EQKNLFLRK

SEQ ID NO: 118507 - protein, 9 aa, Homo sapiens
QKNLFLRKG

SEQ ID NO: 118508 - protein, 9 aa, Homo sapiens
KNLFLRKGK

SEQ ID NO: 118509 - protein, 9 aa, Homo sapiens
NLFLRKGKP

SEQ ID NO: 118510 - protein, 9 aa, Homo sapiens
LFLRKGKPC

SEQ ID NO: 118511 - protein, 9 aa, Homo sapiens
FLRKGKPCT

SEQ ID NO: 118512 - protein, 9 aa, Homo sapiens
LRKGKPCTV

SEQ ID NO: 118513 - protein, 9 aa, Homo sapiens
RKGKPCTVG

SEQ ID NO: 118514 - protein, 9 aa, Homo sapiens
KGKPCTVGF

SEQ ID NO: 118515 - protein, 9 aa, Homo sapiens
GKPCTVGFC

SEQ ID NO: 118516 - protein, 9 aa, Homo sapiens
KPCTVGFCD

SEQ ID NO: 118517 - protein, 9 aa, Homo sapiens
PCTVGFCDM

SEQ ID NO: 118518 - protein, 9 aa, Homo sapiens
CTVGFCDMN

SEQ ID NO: 118519 - protein, 9 aa, Homo sapiens
TVGFCDMNG

SEQ ID NO: 118520 - protein, 9 aa, Homo sapiens
VGFCDMNGK

SEQ ID NO: 118521 - protein, 9 aa, Homo sapiens
GFCDMNGKC

SEQ ID NO: 118522 - protein, 9 aa, Homo sapiens
FCDMNGKCE

SEQ ID NO: 118523 - protein, 9 aa, Homo sapiens
CDMNGKCEK

SEQ ID NO: 118524 - protein, 9 aa, Homo sapiens
DMNGKCEKR

SEQ ID NO: 118525 - protein, 9 aa, Homo sapiens
MNGKCEKRV

SEQ ID NO: 118526 - protein, 9 aa, Homo sapiens
NGKCEKRVQ

SEQ ID NO: 118527 - protein, 9 aa, Homo sapiens
GKCEKRVQD

SEQ ID NO: 118528 - protein, 9 aa, Homo sapiens
KCEKRVQDV

SEQ ID NO: 118529 - protein, 9 aa, Homo sapiens
CEKRVQDVI

SEQ ID NO: 118530 - protein, 9 aa, Homo sapiens
EKRVQDVIE

SEQ ID NO: 118531 - protein, 9 aa, Homo sapiens
KRVQDVIER

SEQ ID NO: 118532 - protein, 9 aa, Homo sapiens
RVQDVIERF

SEQ ID NO: 118533 - protein, 9 aa, Homo sapiens
VQDVIERFW

SEQ ID NO: 118534 - protein, 9 aa, Homo sapiens
QDVIERFWD

SEQ ID NO: 118535 - protein, 9 aa, Homo sapiens
DVIERFWDF

SEQ ID NO: 118536 - protein, 9 aa, Homo sapiens
VIERFWDFI

SEQ ID NO: 118537 - protein, 9 aa, Homo sapiens
IERFWDFID

SEQ ID NO: 118538 - protein, 9 aa, Homo sapiens
ERFWDFIDQ

SEQ ID NO: 118539 - protein, 9 aa, Homo sapiens
RFWDFIDQL

SEQ ID NO: 118540 - protein, 9 aa, Homo sapiens
FWDFIDQLS

SEQ ID NO: 118541 - protein, 9 aa, Homo sapiens
WDFIDQLSI

SEQ ID NO: 118542 - protein, 9 aa, Homo sapiens
DFIDQLSIN

SEQ ID NO: 118543 - protein, 9 aa, Homo sapiens
FIDQLSINT

SEQ ID NO: 118544 - protein, 9 aa, Homo sapiens
IDQLSINTF

SEQ ID NO: 118545 - protein, 9 aa, Homo sapiens
DQLSINTFG

SEQ ID NO: 118546 - protein, 9 aa, Homo sapiens
QLSINTFGK

SEQ ID NO: 118547 - protein, 9 aa, Homo sapiens
LSINTFGKF

SEQ ID NO: 118548 - protein, 9 aa, Homo sapiens
SINTFGKFL

SEQ ID NO: 118549 - protein, 9 aa, Homo sapiens
INTFGKFLA

SEQ ID NO: 118550 - protein, 9 aa, Homo sapiens
NTFGKFLAD

SEQ ID NO: 118551 - protein, 9 aa, Homo sapiens
TFGKFLADN

SEQ ID NO: 118552 - protein, 9 aa, Homo sapiens
FGKFLADNI

SEQ ID NO: 118553 - protein, 9 aa, Homo sapiens
GKFLADNIV

SEQ ID NO: 118554 - protein, 9 aa, Homo sapiens
KFLADNIVG

SEQ ID NO: 118555 - protein, 9 aa, Homo sapiens
FLADNIVGS

SEQ ID NO: 118556 - protein, 9 aa, Homo sapiens
LADNIVGSV

SEQ ID NO: 118557 - protein, 9 aa, Homo sapiens
ADNIVGSVL

SEQ ID NO: 118558 - protein, 9 aa, Homo sapiens
DNIVGSVLV

SEQ ID NO: 118559 - protein, 9 aa, Homo sapiens
NIVGSVLVF

SEQ ID NO: 118560 - protein, 9 aa, Homo sapiens
IVGSVLVFS

SEQ ID NO: 118561 - protein, 9 aa, Homo sapiens
VGSVLVFSL

SEQ ID NO: 118562 - protein, 9 aa, Homo sapiens
GSVLVFSLI

SEQ ID NO: 118563 - protein, 9 aa, Homo sapiens
SVLVFSLIF

SEQ ID NO: 118564 - protein, 9 aa, Homo sapiens
VLVFSLIFW

SEQ ID NO: 118565 - protein, 9 aa, Homo sapiens
LVFSLIFWI

SEQ ID NO: 118566 - protein, 9 aa, Homo sapiens
VFSLIFWIP

SEQ ID NO: 118567 - protein, 9 aa, Homo sapiens
FSLIFWIPF

SEQ ID NO: 118568 - protein, 9 aa, Homo sapiens
SLIFWIPFS

SEQ ID NO: 118569 - protein, 9 aa, Homo sapiens
LIFWIPFSI

SEQ ID NO: 118570 - protein, 9 aa, Homo sapiens
IFWIPFSIL

SEQ ID NO: 118571 - protein, 9 aa, Homo sapiens
FWIPFSILV

SEQ ID NO: 118572 - protein, 9 aa, Homo sapiens
WIPFSILVH

SEQ ID NO: 118573 - protein, 9 aa, Homo sapiens
IPFSILVHC

SEQ ID NO: 118574 - protein, 9 aa, Homo sapiens
PFSILVHCV

SEQ ID NO: 118575 - protein, 9 aa, Homo sapiens
FSILVHCVD

SEQ ID NO: 118576 - protein, 9 aa, Homo sapiens
SILVHCVDK

SEQ ID NO: 118577 - protein, 9 aa, Homo sapiens
ILVHCVDKK

SEQ ID NO: 118578 - protein, 9 aa, Homo sapiens
LVHCVDKKL

SEQ ID NO: 118579 - protein, 9 aa, Homo sapiens
VHCVDKKLD

SEQ ID NO: 118580 - protein, 9 aa, Homo sapiens
HCVDKKLDK

SEQ ID NO: 118581 - protein, 9 aa, Homo sapiens
CVDKKLDKQ

SEQ ID NO: 118582 - protein, 9 aa, Homo sapiens
VDKKLDKQY

SEQ ID NO: 118583 - protein, 9 aa, Homo sapiens
DKKLDKQYE

SEQ ID NO: 118584 - protein, 9 aa, Homo sapiens
KKLDKQYES

SEQ ID NO: 118585 - protein, 9 aa, Homo sapiens
KLDKQYESL

SEQ ID NO: 118586 - protein, 9 aa, Homo sapiens
LDKQYESLS

SEQ ID NO: 118587 - protein, 9 aa, Homo sapiens
DKQYESLSL

SEQ ID NO: 118588 - protein, 9 aa, Homo sapiens
KQYESLSLF

SEQ ID NO: 118589 - protein, 9 aa, Homo sapiens
QYESLSLFH

SEQ ID NO: 118590 - protein, 9 aa, Homo sapiens
YESLSLFHP

SEQ ID NO: 118591 - protein, 9 aa, Homo sapiens
ESLSLFHPS

SEQ ID NO: 118592 - protein, 9 aa, Homo sapiens
SLSLFHPSN

SEQ ID NO: 118593 - protein, 9 aa, Homo sapiens
LSLFHPSNV

SEQ ID NO: 118594 - protein, 9 aa, Homo sapiens
SLFHPSNVE

SEQ ID NO: 118595 - protein, 9 aa, Homo sapiens
LFHPSNVEM

SEQ ID NO: 118596 - protein, 9 aa, Homo sapiens
FHPSNVEML

SEQ ID NO: 118597 - protein, 9 aa, Homo sapiens
HPSNVEMLS

SEQ ID NO: 118598 - protein, 9 aa, Homo sapiens
PSNVEMLSS

SEQ ID NO: 118599 - protein, 9 aa, Homo sapiens
SNVEMLSSM

SEQ ID NO: 118600 - protein, 9 aa, Homo sapiens
NVEMLSSMD

SEQ ID NO: 118601 - protein, 9 aa, Homo sapiens
VEMLSSMDS

SEQ ID NO: 118602 - protein, 9 aa, Homo sapiens
EMLSSMDSA

SEQ ID NO: 118603 - protein, 9 aa, Homo sapiens
MLSSMDSAS

SEQ ID NO: 118604 - protein, 9 aa, Homo sapiens
LSSMDSASV

SEQ ID NO: 118605 - protein, 9 aa, Homo sapiens
SSMDSASVR

SEQ ID NO: 118606 - protein, 9 aa, Homo sapiens
SMDSASVRI

SEQ ID NO: 118607 - protein, 9 aa, Homo sapiens
MDSASVRII

SEQ ID NO: 118608 - protein, 9 aa, Homo sapiens
DSASVRIIK

SEQ ID NO: 118609 - protein, 9 aa, Homo sapiens
SASVRIIKP

SEQ ID NO: 118610 - protein, 9 aa, Homo sapiens
ASVRIIKPF

SEQ ID NO: 118611 - protein, 9 aa, Homo sapiens
SVRIIKPFP

SEQ ID NO: 118612 - protein, 9 aa, Homo sapiens
VRIIKPFPA

SEQ ID NO: 118613 - protein, 9 aa, Homo sapiens
RIIKPFPAP

SEQ ID NO: 118614 - protein, 9 aa, Homo sapiens
IIKPFPAPQ

SEQ ID NO: 118615 - protein, 9 aa, Homo sapiens
IKPFPAPQT

SEQ ID NO: 118616 - protein, 9 aa, Homo sapiens
KPFPAPQTP

SEQ ID NO: 118617 - protein, 9 aa, Homo sapiens
PFPAPQTPG

SEQ ID NO: 118618 - protein, 9 aa, Homo sapiens
FPAPQTPGR

SEQ ID NO: 118619 - protein, 9 aa, Homo sapiens
PAPQTPGRL

SEQ ID NO: 118620 - protein, 9 aa, Homo sapiens
APQTPGRLQ

SEQ ID NO: 118621 - protein, 9 aa, Homo sapiens
PQTPGRLQP

SEQ ID NO: 118622 - protein, 9 aa, Homo sapiens
QTPGRLQPA

SEQ ID NO: 118623 - protein, 9 aa, Homo sapiens
TPGRLQPAP

SEQ ID NO: 118624 - protein, 9 aa, Homo sapiens
PGRLQPAPV

SEQ ID NO: 118625 - protein, 9 aa, Homo sapiens
GRLQPAPVI

SEQ ID NO: 118626 - protein, 9 aa, Homo sapiens
RLQPAPVIP

SEQ ID NO: 118627 - protein, 9 aa, Homo sapiens
LQPAPVIPS

SEQ ID NO: 118628 - protein, 9 aa, Homo sapiens
QPAPVIPSA

SEQ ID NO: 118629 - protein, 9 aa, Homo sapiens
PAPVIPSAP

SEQ ID NO: 118630 - protein, 9 aa, Homo sapiens
APVIPSAPA

SEQ ID NO: 118631 - protein, 9 aa, Homo sapiens
PVIPSAPAA

SEQ ID NO: 118632 - protein, 9 aa, Homo sapiens
VIPSAPAAP

SEQ ID NO: 118633 - protein, 9 aa, Homo sapiens
IPSAPAAPK

SEQ ID NO: 118634 - protein, 9 aa, Homo sapiens
PSAPAAPKL

SEQ ID NO: 118635 - protein, 9 aa, Homo sapiens
SAPAAPKLD

SEQ ID NO: 118636 - protein, 9 aa, Homo sapiens
APAAPKLDH

SEQ ID NO: 118637 - protein, 9 aa, Homo sapiens
PAAPKLDHQ

SEQ ID NO: 118638 - protein, 9 aa, Homo sapiens
AAPKLDHQR

SEQ ID NO: 118639 - protein, 9 aa, Homo sapiens
APKLDHQRM

SEQ ID NO: 118640 - protein, 9 aa, Homo sapiens
PKLDHQRMD

SEQ ID NO: 118641 - protein, 9 aa, Homo sapiens
KLDHQRMDT

SEQ ID NO: 118642 - protein, 9 aa, Homo sapiens
LDHQRMDTI

SEQ ID NO: 118643 - protein, 9 aa, Homo sapiens
DHQRMDTIQ

SEQ ID NO: 118644 - protein, 9 aa, Homo sapiens
HQRMDTIQE

SEQ ID NO: 118645 - protein, 9 aa, Homo sapiens
QRMDTIQED

SEQ ID NO: 118646 - protein, 9 aa, Homo sapiens
RMDTIQEDP

SEQ ID NO: 118647 - protein, 9 aa, Homo sapiens
MDTIQEDPS

SEQ ID NO: 118648 - protein, 9 aa, Homo sapiens
DTIQEDPST

SEQ ID NO: 118649 - protein, 9 aa, Homo sapiens
TIQEDPSTD

SEQ ID NO: 118650 - protein, 9 aa, Homo sapiens
IQEDPSTDS

SEQ ID NO: 118651 - protein, 9 aa, Homo sapiens
QEDPSTDSH

SEQ ID NO: 118652 - protein, 9 aa, Homo sapiens
EDPSTDSHM

SEQ ID NO: 118653 - protein, 9 aa, Homo sapiens
DPSTDSHMD

SEQ ID NO: 118654 - protein, 9 aa, Homo sapiens
PSTDSHMDE

SEQ ID NO: 118655 - protein, 9 aa, Homo sapiens
STDSHMDED

SEQ ID NO: 118656 - protein, 9 aa, Homo sapiens
TDSHMDEDG

SEQ ID NO: 118657 - protein, 9 aa, Homo sapiens
DSHMDEDGF

SEQ ID NO: 118658 - protein, 9 aa, Homo sapiens
SHMDEDGFE

SEQ ID NO: 118659 - protein, 9 aa, Homo sapiens
HMDEDGFEK

SEQ ID NO: 118660 - protein, 9 aa, Homo sapiens
MDEDGFEKD

SEQ ID NO: 118661 - protein, 9 aa, Homo sapiens
DEDGFEKDP

SEQ ID NO: 118662 - protein, 9 aa, Homo sapiens
EDGFEKDPF

SEQ ID NO: 118663 - protein, 9 aa, Homo sapiens
DGFEKDPFP

SEQ ID NO: 118664 - protein, 9 aa, Homo sapiens
GFEKDPFPN

SEQ ID NO: 118665 - protein, 9 aa, Homo sapiens
FEKDPFPNS

SEQ ID NO: 118666 - protein, 9 aa, Homo sapiens
EKDPFPNSS

SEQ ID NO: 118667 - protein, 9 aa, Homo sapiens
KDPFPNSST

SEQ ID NO: 118668 - protein, 9 aa, Homo sapiens
DPFPNSSTA

SEQ ID NO: 118669 - protein, 9 aa, Homo sapiens
PFPNSSTAA

SEQ ID NO: 118670 - protein, 9 aa, Homo sapiens
FPNSSTAAK

SEQ ID NO: 118671 - protein, 9 aa, Homo sapiens
PNSSTAAKS

SEQ ID NO: 118672 - protein, 9 aa, Homo sapiens
NSSTAAKSF

SEQ ID NO: 118673 - protein, 9 aa, Homo sapiens
SSTAAKSFE

SEQ ID NO: 118674 - protein, 9 aa, Homo sapiens
STAAKSFED

SEQ ID NO: 118675 - protein, 9 aa, Homo sapiens
TAAKSFEDL

SEQ ID NO: 118676 - protein, 9 aa, Homo sapiens
AAKSFEDLT

SEQ ID NO: 118677 - protein, 9 aa, Homo sapiens
AKSFEDLTD

SEQ ID NO: 118678 - protein, 9 aa, Homo sapiens
KSFEDLTDH

SEQ ID NO: 118679 - protein, 9 aa, Homo sapiens
SFEDLTDHP

SEQ ID NO: 118680 - protein, 9 aa, Homo sapiens
FEDLTDHPV

SEQ ID NO: 118681 - protein, 9 aa, Homo sapiens
EDLTDHPVT

SEQ ID NO: 118682 - protein, 9 aa, Homo sapiens
DLTDHPVTR

SEQ ID NO: 118683 - protein, 9 aa, Homo sapiens
LTDHPVTRS

SEQ ID NO: 118684 - protein, 9 aa, Homo sapiens
TDHPVTRSE

SEQ ID NO: 118685 - protein, 9 aa, Homo sapiens
DHPVTRSEK

SEQ ID NO: 118686 - protein, 9 aa, Homo sapiens
HPVTRSEKA

SEQ ID NO: 118687 - protein, 9 aa, Homo sapiens
PVTRSEKAA

SEQ ID NO: 118688 - protein, 9 aa, Homo sapiens
VTRSEKAAS

SEQ ID NO: 118689 - protein, 9 aa, Homo sapiens
TRSEKAASF

SEQ ID NO: 118690 - protein, 9 aa, Homo sapiens
RSEKAASFK

SEQ ID NO: 118691 - protein, 9 aa, Homo sapiens
SEKAASFKL

SEQ ID NO: 118692 - protein, 9 aa, Homo sapiens
EKAASFKLQ

SEQ ID NO: 118693 - protein, 9 aa, Homo sapiens
KAASFKLQR

SEQ ID NO: 118694 - protein, 9 aa, Homo sapiens
AASFKLQRQ

SEQ ID NO: 118695 - protein, 9 aa, Homo sapiens
ASFKLQRQN

SEQ ID NO: 118696 - protein, 9 aa, Homo sapiens
SFKLQRQNR

SEQ ID NO: 118697 - protein, 9 aa, Homo sapiens
FKLQRQNRV

SEQ ID NO: 118698 - protein, 9 aa, Homo sapiens
KLQRQNRVD

SEQ ID NO: 118699 - protein, 9 aa, Homo sapiens
LQRQNRVDS

SEQ ID NO: 118700 - protein, 9 aa, Homo sapiens
QRQNRVDSK

SEQ ID NO: 118701 - protein, 9 aa, Homo sapiens
RQNRVDSKE

SEQ ID NO: 118702 - protein, 9 aa, Homo sapiens
QNRVDSKET

SEQ ID NO: 118703 - protein, 9 aa, Homo sapiens
NRVDSKETE

SEQ ID NO: 118704 - protein, 9 aa, Homo sapiens
RVDSKETEC

SEQ ID NO: 118705 - protein, 9 aa, Homo sapiens
MGHLSAPLH

SEQ ID NO: 118706 - protein, 9 aa, Homo sapiens
GHLSAPLHR

SEQ ID NO: 118707 - protein, 9 aa, Homo sapiens
HLSAPLHRV

SEQ ID NO: 118708 - protein, 9 aa, Homo sapiens
LSAPLHRVR

SEQ ID NO: 118709 - protein, 9 aa, Homo sapiens
SAPLHRVRV

SEQ ID NO: 118710 - protein, 9 aa, Homo sapiens
APLHRVRVP

SEQ ID NO: 118711 - protein, 9 aa, Homo sapiens
PLHRVRVPW

SEQ ID NO: 118712 - protein, 9 aa, Homo sapiens
LHRVRVPWQ

SEQ ID NO: 118713 - protein, 9 aa, Homo sapiens
HRVRVPWQG

SEQ ID NO: 118714 - protein, 9 aa, Homo sapiens
RVRVPWQGL

SEQ ID NO: 118715 - protein, 9 aa, Homo sapiens
VRVPWQGLL

SEQ ID NO: 118716 - protein, 9 aa, Homo sapiens
RVPWQGLLL

SEQ ID NO: 118717 - protein, 9 aa, Homo sapiens
VPWQGLLLT

SEQ ID NO: 118718 - protein, 9 aa, Homo sapiens
PWQGLLLTA

SEQ ID NO: 118719 - protein, 9 aa, Homo sapiens
WQGLLLTAS

SEQ ID NO: 118720 - protein, 9 aa, Homo sapiens
QGLLLTASL

SEQ ID NO: 118721 - protein, 9 aa, Homo sapiens
GLLLTASLL

SEQ ID NO: 118722 - protein, 9 aa, Homo sapiens
LLLTASLLT

SEQ ID NO: 118723 - protein, 9 aa, Homo sapiens
LLTASLLTF

SEQ ID NO: 118724 - protein, 9 aa, Homo sapiens
LTASLLTFW

SEQ ID NO: 118725 - protein, 9 aa, Homo sapiens
TASLLTFWN

SEQ ID NO: 118726 - protein, 9 aa, Homo sapiens
ASLLTFWNP

SEQ ID NO: 118727 - protein, 9 aa, Homo sapiens
SLLTFWNPP

SEQ ID NO: 118728 - protein, 9 aa, Homo sapiens
LLTFWNPPT

SEQ ID NO: 118729 - protein, 9 aa, Homo sapiens
LTFWNPPTT

SEQ ID NO: 118730 - protein, 9 aa, Homo sapiens
TFWNPPTTA

SEQ ID NO: 118731 - protein, 9 aa, Homo sapiens
FWNPPTTAQ

SEQ ID NO: 118732 - protein, 9 aa, Homo sapiens
WNPPTTAQL

SEQ ID NO: 118733 - protein, 9 aa, Homo sapiens
NPPTTAQLT

SEQ ID NO: 118734 - protein, 9 aa, Homo sapiens
PPTTAQLTT

SEQ ID NO: 118735 - protein, 9 aa, Homo sapiens
PTTAQLTTE

SEQ ID NO: 118736 - protein, 9 aa, Homo sapiens
TTAQLTTES

SEQ ID NO: 118737 - protein, 9 aa, Homo sapiens
TAQLTTESM

SEQ ID NO: 118738 - protein, 9 aa, Homo sapiens
AQLTTESMP

SEQ ID NO: 118739 - protein, 9 aa, Homo sapiens
QLTTESMPF

SEQ ID NO: 118740 - protein, 9 aa, Homo sapiens
LTTESMPFN

SEQ ID NO: 118741 - protein, 9 aa, Homo sapiens
TTESMPFNV

SEQ ID NO: 118742 - protein, 9 aa, Homo sapiens
TESMPFNVA

SEQ ID NO: 118743 - protein, 9 aa, Homo sapiens
ESMPFNVAE

SEQ ID NO: 118744 - protein, 9 aa, Homo sapiens
SMPFNVAEG

SEQ ID NO: 118745 - protein, 9 aa, Homo sapiens
MPFNVAEGK

SEQ ID NO: 118746 - protein, 9 aa, Homo sapiens
PFNVAEGKE

SEQ ID NO: 118747 - protein, 9 aa, Homo sapiens
FNVAEGKEV

SEQ ID NO: 118748 - protein, 9 aa, Homo sapiens
NVAEGKEVL

SEQ ID NO: 118749 - protein, 9 aa, Homo sapiens
VAEGKEVLL

SEQ ID NO: 118750 - protein, 9 aa, Homo sapiens
AEGKEVLLL

SEQ ID NO: 118751 - protein, 9 aa, Homo sapiens
EGKEVLLLV

SEQ ID NO: 118752 - protein, 9 aa, Homo sapiens
GKEVLLLVH

SEQ ID NO: 118753 - protein, 9 aa, Homo sapiens
KEVLLLVHN

SEQ ID NO: 118754 - protein, 9 aa, Homo sapiens
EVLLLVHNL

SEQ ID NO: 118755 - protein, 9 aa, Homo sapiens
VLLLVHNLP

SEQ ID NO: 118756 - protein, 9 aa, Homo sapiens
LLLVHNLPQ

SEQ ID NO: 118757 - protein, 9 aa, Homo sapiens
LLVHNLPQQ

SEQ ID NO: 118758 - protein, 9 aa, Homo sapiens
LVHNLPQQL

SEQ ID NO: 118759 - protein, 9 aa, Homo sapiens
VHNLPQQLF

SEQ ID NO: 118760 - protein, 9 aa, Homo sapiens
HNLPQQLFG

SEQ ID NO: 118761 - protein, 9 aa, Homo sapiens
NLPQQLFGY

SEQ ID NO: 118762 - protein, 9 aa, Homo sapiens
LPQQLFGYS

SEQ ID NO: 118763 - protein, 9 aa, Homo sapiens
PQQLFGYSW

SEQ ID NO: 118764 - protein, 9 aa, Homo sapiens
QQLFGYSWY

SEQ ID NO: 118765 - protein, 9 aa, Homo sapiens
QLFGYSWYK

SEQ ID NO: 118766 - protein, 9 aa, Homo sapiens
LFGYSWYKG

SEQ ID NO: 118767 - protein, 9 aa, Homo sapiens
FGYSWYKGE

SEQ ID NO: 118768 - protein, 9 aa, Homo sapiens
GYSWYKGER

SEQ ID NO: 118769 - protein, 9 aa, Homo sapiens
YSWYKGERV

SEQ ID NO: 118770 - protein, 9 aa, Homo sapiens
SWYKGERVD

SEQ ID NO: 118771 - protein, 9 aa, Homo sapiens
WYKGERVDG

SEQ ID NO: 118772 - protein, 9 aa, Homo sapiens
YKGERVDGN

SEQ ID NO: 118773 - protein, 9 aa, Homo sapiens
KGERVDGNR

SEQ ID NO: 118774 - protein, 9 aa, Homo sapiens
GERVDGNRQ

SEQ ID NO: 118775 - protein, 9 aa, Homo sapiens
ERVDGNRQI

SEQ ID NO: 118776 - protein, 9 aa, Homo sapiens
RVDGNRQIV

SEQ ID NO: 118777 - protein, 9 aa, Homo sapiens
VDGNRQIVG

SEQ ID NO: 118778 - protein, 9 aa, Homo sapiens
DGNRQIVGY

SEQ ID NO: 118779 - protein, 9 aa, Homo sapiens
GNRQIVGYA

SEQ ID NO: 118780 - protein, 9 aa, Homo sapiens
NRQIVGYAI

SEQ ID NO: 118781 - protein, 9 aa, Homo sapiens
RQIVGYAIG

SEQ ID NO: 118782 - protein, 9 aa, Homo sapiens
QIVGYAIGT

SEQ ID NO: 118783 - protein, 9 aa, Homo sapiens
IVGYAIGTQ

SEQ ID NO: 118784 - protein, 9 aa, Homo sapiens
VGYAIGTQQ

SEQ ID NO: 118785 - protein, 9 aa, Homo sapiens
GYAIGTQQA

SEQ ID NO: 118786 - protein, 9 aa, Homo sapiens
YAIGTQQAT

SEQ ID NO: 118787 - protein, 9 aa, Homo sapiens
AIGTQQATP

SEQ ID NO: 118788 - protein, 9 aa, Homo sapiens
IGTQQATPG

SEQ ID NO: 118789 - protein, 9 aa, Homo sapiens
GTQQATPGP

SEQ ID NO: 118790 - protein, 9 aa, Homo sapiens
TQQATPGPA

SEQ ID NO: 118791 - protein, 9 aa, Homo sapiens
QQATPGPAN

SEQ ID NO: 118792 - protein, 9 aa, Homo sapiens
QATPGPANS

SEQ ID NO: 118793 - protein, 9 aa, Homo sapiens
ATPGPANSG

SEQ ID NO: 118794 - protein, 9 aa, Homo sapiens
TPGPANSGR

SEQ ID NO: 118795 - protein, 9 aa, Homo sapiens
PGPANSGRE

SEQ ID NO: 118796 - protein, 9 aa, Homo sapiens
GPANSGRET

SEQ ID NO: 118797 - protein, 9 aa, Homo sapiens
PANSGRETI

SEQ ID NO: 118798 - protein, 9 aa, Homo sapiens
ANSGRETIY

SEQ ID NO: 118799 - protein, 9 aa, Homo sapiens
NSGRETIYP

SEQ ID NO: 118800 - protein, 9 aa, Homo sapiens
SGRETIYPN

SEQ ID NO: 118801 - protein, 9 aa, Homo sapiens
GRETIYPNA

SEQ ID NO: 118802 - protein, 9 aa, Homo sapiens
RETIYPNAS

SEQ ID NO: 118803 - protein, 9 aa, Homo sapiens
ETIYPNASL

SEQ ID NO: 118804 - protein, 9 aa, Homo sapiens
TIYPNASLL

SEQ ID NO: 118805 - protein, 9 aa, Homo sapiens
IYPNASLLI

SEQ ID NO: 118806 - protein, 9 aa, Homo sapiens
YPNASLLIQ

SEQ ID NO: 118807 - protein, 9 aa, Homo sapiens
PNASLLIQN

SEQ ID NO: 118808 - protein, 9 aa, Homo sapiens
NASLLIQNV

SEQ ID NO: 118809 - protein, 9 aa, Homo sapiens
ASLLIQNVT

SEQ ID NO: 118810 - protein, 9 aa, Homo sapiens
SLLIQNVTQ

SEQ ID NO: 118811 - protein, 9 aa, Homo sapiens
LLIQNVTQN

SEQ ID NO: 118812 - protein, 9 aa, Homo sapiens
LIQNVTQND

SEQ ID NO: 118813 - protein, 9 aa, Homo sapiens
IQNVTQNDT

SEQ ID NO: 118814 - protein, 9 aa, Homo sapiens
QNVTQNDTG

SEQ ID NO: 118815 - protein, 9 aa, Homo sapiens
NVTQNDTGF

SEQ ID NO: 118816 - protein, 9 aa, Homo sapiens
VTQNDTGFY

SEQ ID NO: 118817 - protein, 9 aa, Homo sapiens
TQNDTGFYT

SEQ ID NO: 118818 - protein, 9 aa, Homo sapiens
QNDTGFYTL

SEQ ID NO: 118819 - protein, 9 aa, Homo sapiens
NDTGFYTLQ

SEQ ID NO: 118820 - protein, 9 aa, Homo sapiens
DTGFYTLQV

SEQ ID NO: 118821 - protein, 9 aa, Homo sapiens
TGFYTLQVI

SEQ ID NO: 118822 - protein, 9 aa, Homo sapiens
GFYTLQVIK

SEQ ID NO: 118823 - protein, 9 aa, Homo sapiens
FYTLQVIKS

SEQ ID NO: 118824 - protein, 9 aa, Homo sapiens
YTLQVIKSD

SEQ ID NO: 118825 - protein, 9 aa, Homo sapiens
TLQVIKSDL

SEQ ID NO: 118826 - protein, 9 aa, Homo sapiens
LQVIKSDLV

SEQ ID NO: 118827 - protein, 9 aa, Homo sapiens
QVIKSDLVN

SEQ ID NO: 118828 - protein, 9 aa, Homo sapiens
VIKSDLVNE

SEQ ID NO: 118829 - protein, 9 aa, Homo sapiens
IKSDLVNEE

SEQ ID NO: 118830 - protein, 9 aa, Homo sapiens
KSDLVNEEA

SEQ ID NO: 118831 - protein, 9 aa, Homo sapiens
SDLVNEEAT

SEQ ID NO: 118832 - protein, 9 aa, Homo sapiens
DLVNEEATG

SEQ ID NO: 118833 - protein, 9 aa, Homo sapiens
LVNEEATGQ

SEQ ID NO: 118834 - protein, 9 aa, Homo sapiens
VNEEATGQF

SEQ ID NO: 118835 - protein, 9 aa, Homo sapiens
NEEATGQFH

SEQ ID NO: 118836 - protein, 9 aa, Homo sapiens
EEATGQFHV

SEQ ID NO: 118837 - protein, 9 aa, Homo sapiens
EATGQFHVY

SEQ ID NO: 118838 - protein, 9 aa, Homo sapiens
ATGQFHVYP

SEQ ID NO: 118839 - protein, 9 aa, Homo sapiens
TGQFHVYPE

SEQ ID NO: 118840 - protein, 9 aa, Homo sapiens
GQFHVYPEL

SEQ ID NO: 118841 - protein, 9 aa, Homo sapiens
QFHVYPELP

SEQ ID NO: 118842 - protein, 9 aa, Homo sapiens
FHVYPELPK

SEQ ID NO: 118843 - protein, 9 aa, Homo sapiens
HVYPELPKP

SEQ ID NO: 118844 - protein, 9 aa, Homo sapiens
VYPELPKPS

SEQ ID NO: 118845 - protein, 9 aa, Homo sapiens
YPELPKPSI

SEQ ID NO: 118846 - protein, 9 aa, Homo sapiens
PELPKPSIS

SEQ ID NO: 118847 - protein, 9 aa, Homo sapiens
ELPKPSISS

SEQ ID NO: 118848 - protein, 9 aa, Homo sapiens
LPKPSISSN

SEQ ID NO: 118849 - protein, 9 aa, Homo sapiens
PKPSISSNN

SEQ ID NO: 118850 - protein, 9 aa, Homo sapiens
KPSISSNNS

SEQ ID NO: 118851 - protein, 9 aa, Homo sapiens
PSISSNNSN

SEQ ID NO: 118852 - protein, 9 aa, Homo sapiens
SISSNNSNP

SEQ ID NO: 118853 - protein, 9 aa, Homo sapiens
ISSNNSNPV

SEQ ID NO: 118854 - protein, 9 aa, Homo sapiens
SSNNSNPVE

SEQ ID NO: 118855 - protein, 9 aa, Homo sapiens
SNNSNPVED

SEQ ID NO: 118856 - protein, 9 aa, Homo sapiens
NNSNPVEDK

SEQ ID NO: 118857 - protein, 9 aa, Homo sapiens
NSNPVEDKD

SEQ ID NO: 118858 - protein, 9 aa, Homo sapiens
SNPVEDKDA

SEQ ID NO: 118859 - protein, 9 aa, Homo sapiens
NPVEDKDAV

SEQ ID NO: 118860 - protein, 9 aa, Homo sapiens
PVEDKDAVA

SEQ ID NO: 118861 - protein, 9 aa, Homo sapiens
VEDKDAVAF

SEQ ID NO: 118862 - protein, 9 aa, Homo sapiens
EDKDAVAFT

SEQ ID NO: 118863 - protein, 9 aa, Homo sapiens
DKDAVAFTC

SEQ ID NO: 118864 - protein, 9 aa, Homo sapiens
KDAVAFTCE

SEQ ID NO: 118865 - protein, 9 aa, Homo sapiens
DAVAFTCEP

SEQ ID NO: 118866 - protein, 9 aa, Homo sapiens
AVAFTCEPE

SEQ ID NO: 118867 - protein, 9 aa, Homo sapiens
VAFTCEPET

SEQ ID NO: 118868 - protein, 9 aa, Homo sapiens
AFTCEPETQ

SEQ ID NO: 118869 - protein, 9 aa, Homo sapiens
FTCEPETQD

SEQ ID NO: 118870 - protein, 9 aa, Homo sapiens
TCEPETQDT

SEQ ID NO: 118871 - protein, 9 aa, Homo sapiens
CEPETQDTT

SEQ ID NO: 118872 - protein, 9 aa, Homo sapiens
EPETQDTTY

SEQ ID NO: 118873 - protein, 9 aa, Homo sapiens
PETQDTTYL

SEQ ID NO: 118874 - protein, 9 aa, Homo sapiens
ETQDTTYLW

SEQ ID NO: 118875 - protein, 9 aa, Homo sapiens
TQDTTYLWW

SEQ ID NO: 118876 - protein, 9 aa, Homo sapiens
QDTTYLWWI

SEQ ID NO: 118877 - protein, 9 aa, Homo sapiens
DTTYLWWIN

SEQ ID NO: 118878 - protein, 9 aa, Homo sapiens
TTYLWWINN

SEQ ID NO: 118879 - protein, 9 aa, Homo sapiens
TYLWWINNQ

SEQ ID NO: 118880 - protein, 9 aa, Homo sapiens
YLWWINNQS

SEQ ID NO: 118881 - protein, 9 aa, Homo sapiens
LWWINNQSL

SEQ ID NO: 118882 - protein, 9 aa, Homo sapiens
WWINNQSLP

SEQ ID NO: 118883 - protein, 9 aa, Homo sapiens
WINNQSLPV

SEQ ID NO: 118884 - protein, 9 aa, Homo sapiens
INNQSLPVS

SEQ ID NO: 118885 - protein, 9 aa, Homo sapiens
NNQSLPVSP

SEQ ID NO: 118886 - protein, 9 aa, Homo sapiens
NQSLPVSPR

SEQ ID NO: 118887 - protein, 9 aa, Homo sapiens
QSLPVSPRL

SEQ ID NO: 118888 - protein, 9 aa, Homo sapiens
SLPVSPRLQ

SEQ ID NO: 118889 - protein, 9 aa, Homo sapiens
LPVSPRLQL

SEQ ID NO: 118890 - protein, 9 aa, Homo sapiens
PVSPRLQLS

SEQ ID NO: 118891 - protein, 9 aa, Homo sapiens
VSPRLQLSN

SEQ ID NO: 118892 - protein, 9 aa, Homo sapiens
SPRLQLSNG

SEQ ID NO: 118893 - protein, 9 aa, Homo sapiens
PRLQLSNGN

SEQ ID NO: 118894 - protein, 9 aa, Homo sapiens
RLQLSNGNR

SEQ ID NO: 118895 - protein, 9 aa, Homo sapiens
LQLSNGNRT

SEQ ID NO: 118896 - protein, 9 aa, Homo sapiens
QLSNGNRTL

SEQ ID NO: 118897 - protein, 9 aa, Homo sapiens
LSNGNRTLT

SEQ ID NO: 118898 - protein, 9 aa, Homo sapiens
SNGNRTLTL

SEQ ID NO: 118899 - protein, 9 aa, Homo sapiens
NGNRTLTLL

SEQ ID NO: 118900 - protein, 9 aa, Homo sapiens
GNRTLTLLS

SEQ ID NO: 118901 - protein, 9 aa, Homo sapiens
NRTLTLLSV

SEQ ID NO: 118902 - protein, 9 aa, Homo sapiens
RTLTLLSVT

SEQ ID NO: 118903 - protein, 9 aa, Homo sapiens
TLTLLSVTR

SEQ ID NO: 118904 - protein, 9 aa, Homo sapiens
LTLLSVTRN

SEQ ID NO: 118905 - protein, 9 aa, Homo sapiens
TLLSVTRND

SEQ ID NO: 118906 - protein, 9 aa, Homo sapiens
LLSVTRNDT

SEQ ID NO: 118907 - protein, 9 aa, Homo sapiens
LSVTRNDTG

SEQ ID NO: 118908 - protein, 9 aa, Homo sapiens
SVTRNDTGP

SEQ ID NO: 118909 - protein, 9 aa, Homo sapiens
VTRNDTGPY

SEQ ID NO: 118910 - protein, 9 aa, Homo sapiens
TRNDTGPYE

SEQ ID NO: 118911 - protein, 9 aa, Homo sapiens
RNDTGPYEC

SEQ ID NO: 118912 - protein, 9 aa, Homo sapiens
NDTGPYECE

SEQ ID NO: 118913 - protein, 9 aa, Homo sapiens
DTGPYECEI

SEQ ID NO: 118914 - protein, 9 aa, Homo sapiens
TGPYECEIQ

SEQ ID NO: 118915 - protein, 9 aa, Homo sapiens
GPYECEIQN

SEQ ID NO: 118916 - protein, 9 aa, Homo sapiens
PYECEIQNP

SEQ ID NO: 118917 - protein, 9 aa, Homo sapiens
YECEIQNPV

SEQ ID NO: 118918 - protein, 9 aa, Homo sapiens
ECEIQNPVS

SEQ ID NO: 118919 - protein, 9 aa, Homo sapiens
CEIQNPVSA

SEQ ID NO: 118920 - protein, 9 aa, Homo sapiens
EIQNPVSAN

SEQ ID NO: 118921 - protein, 9 aa, Homo sapiens
IQNPVSANR

SEQ ID NO: 118922 - protein, 9 aa, Homo sapiens
QNPVSANRS

SEQ ID NO: 118923 - protein, 9 aa, Homo sapiens
NPVSANRSD

SEQ ID NO: 118924 - protein, 9 aa, Homo sapiens
PVSANRSDP

SEQ ID NO: 118925 - protein, 9 aa, Homo sapiens
VSANRSDPV

SEQ ID NO: 118926 - protein, 9 aa, Homo sapiens
SANRSDPVT

SEQ ID NO: 118927 - protein, 9 aa, Homo sapiens
ANRSDPVTL

SEQ ID NO: 118928 - protein, 9 aa, Homo sapiens
NRSDPVTLN

SEQ ID NO: 118929 - protein, 9 aa, Homo sapiens
RSDPVTLNV

SEQ ID NO: 118930 - protein, 9 aa, Homo sapiens
SDPVTLNVT

SEQ ID NO: 118931 - protein, 9 aa, Homo sapiens
DPVTLNVTY

SEQ ID NO: 118932 - protein, 9 aa, Homo sapiens
PVTLNVTYG

SEQ ID NO: 118933 - protein, 9 aa, Homo sapiens
VTLNVTYGP

SEQ ID NO: 118934 - protein, 9 aa, Homo sapiens
TLNVTYGPD

SEQ ID NO: 118935 - protein, 9 aa, Homo sapiens
LNVTYGPDT

SEQ ID NO: 118936 - protein, 9 aa, Homo sapiens
NVTYGPDTP

SEQ ID NO: 118937 - protein, 9 aa, Homo sapiens
VTYGPDTPT

SEQ ID NO: 118938 - protein, 9 aa, Homo sapiens
TYGPDTPTI

SEQ ID NO: 118939 - protein, 9 aa, Homo sapiens
YGPDTPTIS

SEQ ID NO: 118940 - protein, 9 aa, Homo sapiens
GPDTPTISP

SEQ ID NO: 118941 - protein, 9 aa, Homo sapiens
PDTPTISPS

SEQ ID NO: 118942 - protein, 9 aa, Homo sapiens
DTPTISPSD

SEQ ID NO: 118943 - protein, 9 aa, Homo sapiens
TPTISPSDT

SEQ ID NO: 118944 - protein, 9 aa, Homo sapiens
PTISPSDTY

SEQ ID NO: 118945 - protein, 9 aa, Homo sapiens
TISPSDTYY

SEQ ID NO: 118946 - protein, 9 aa, Homo sapiens
ISPSDTYYR

SEQ ID NO: 118947 - protein, 9 aa, Homo sapiens
SPSDTYYRP

SEQ ID NO: 118948 - protein, 9 aa, Homo sapiens
PSDTYYRPG

SEQ ID NO: 118949 - protein, 9 aa, Homo sapiens
SDTYYRPGA

SEQ ID NO: 118950 - protein, 9 aa, Homo sapiens
DTYYRPGAN

SEQ ID NO: 118951 - protein, 9 aa, Homo sapiens
TYYRPGANL

SEQ ID NO: 118952 - protein, 9 aa, Homo sapiens
YYRPGANLS

SEQ ID NO: 118953 - protein, 9 aa, Homo sapiens
YRPGANLSL

SEQ ID NO: 118954 - protein, 9 aa, Homo sapiens
RPGANLSLS

SEQ ID NO: 118955 - protein, 9 aa, Homo sapiens
PGANLSLSC

SEQ ID NO: 118956 - protein, 9 aa, Homo sapiens
GANLSLSCY

SEQ ID NO: 118957 - protein, 9 aa, Homo sapiens
ANLSLSCYA

SEQ ID NO: 118958 - protein, 9 aa, Homo sapiens
NLSLSCYAA

SEQ ID NO: 118959 - protein, 9 aa, Homo sapiens
LSLSCYAAS

SEQ ID NO: 118960 - protein, 9 aa, Homo sapiens
SLSCYAASN

SEQ ID NO: 118961 - protein, 9 aa, Homo sapiens
LSCYAASNP

SEQ ID NO: 118962 - protein, 9 aa, Homo sapiens
SCYAASNPP

SEQ ID NO: 118963 - protein, 9 aa, Homo sapiens
CYAASNPPA

SEQ ID NO: 118964 - protein, 9 aa, Homo sapiens
YAASNPPAQ

SEQ ID NO: 118965 - protein, 9 aa, Homo sapiens
AASNPPAQY

SEQ ID NO: 118966 - protein, 9 aa, Homo sapiens
ASNPPAQYS

SEQ ID NO: 118967 - protein, 9 aa, Homo sapiens
SNPPAQYSW

SEQ ID NO: 118968 - protein, 9 aa, Homo sapiens
NPPAQYSWL

SEQ ID NO: 118969 - protein, 9 aa, Homo sapiens
PPAQYSWLI

SEQ ID NO: 118970 - protein, 9 aa, Homo sapiens
PAQYSWLIN

SEQ ID NO: 118971 - protein, 9 aa, Homo sapiens
AQYSWLING

SEQ ID NO: 118972 - protein, 9 aa, Homo sapiens
QYSWLINGT

SEQ ID NO: 118973 - protein, 9 aa, Homo sapiens
YSWLINGTF

SEQ ID NO: 118974 - protein, 9 aa, Homo sapiens
SWLINGTFQ

SEQ ID NO: 118975 - protein, 9 aa, Homo sapiens
WLINGTFQQ

SEQ ID NO: 118976 - protein, 9 aa, Homo sapiens
LINGTFQQS

SEQ ID NO: 118977 - protein, 9 aa, Homo sapiens
INGTFQQST

SEQ ID NO: 118978 - protein, 9 aa, Homo sapiens
NGTFQQSTQ

SEQ ID NO: 118979 - protein, 9 aa, Homo sapiens
GTFQQSTQE

SEQ ID NO: 118980 - protein, 9 aa, Homo sapiens
TFQQSTQEL

SEQ ID NO: 118981 - protein, 9 aa, Homo sapiens
FQQSTQELF

SEQ ID NO: 118982 - protein, 9 aa, Homo sapiens
QQSTQELFI

SEQ ID NO: 118983 - protein, 9 aa, Homo sapiens
QSTQELFIP

SEQ ID NO: 118984 - protein, 9 aa, Homo sapiens
STQELFIPN

SEQ ID NO: 118985 - protein, 9 aa, Homo sapiens
TQELFIPNI

SEQ ID NO: 118986 - protein, 9 aa, Homo sapiens
QELFIPNIT

SEQ ID NO: 118987 - protein, 9 aa, Homo sapiens
ELFIPNITV

SEQ ID NO: 118988 - protein, 9 aa, Homo sapiens
LFIPNITVN

SEQ ID NO: 118989 - protein, 9 aa, Homo sapiens
FIPNITVNN

SEQ ID NO: 118990 - protein, 9 aa, Homo sapiens
IPNITVNNS

SEQ ID NO: 118991 - protein, 9 aa, Homo sapiens
PNITVNNSG

SEQ ID NO: 118992 - protein, 9 aa, Homo sapiens
NITVNNSGS

SEQ ID NO: 118993 - protein, 9 aa, Homo sapiens
ITVNNSGSY

SEQ ID NO: 118994 - protein, 9 aa, Homo sapiens
TVNNSGSYT

SEQ ID NO: 118995 - protein, 9 aa, Homo sapiens
VNNSGSYTC

SEQ ID NO: 118996 - protein, 9 aa, Homo sapiens
NNSGSYTCH

SEQ ID NO: 118997 - protein, 9 aa, Homo sapiens
NSGSYTCHA

SEQ ID NO: 118998 - protein, 9 aa, Homo sapiens
SGSYTCHAN

SEQ ID NO: 118999 - protein, 9 aa, Homo sapiens
GSYTCHANN

SEQ ID NO: 119000 - protein, 9 aa, Homo sapiens
SYTCHANNS

SEQ ID NO: 119001 - protein, 9 aa, Homo sapiens
YTCHANNSV

SEQ ID NO: 119002 - protein, 9 aa, Homo sapiens
TCHANNSVT

SEQ ID NO: 119003 - protein, 9 aa, Homo sapiens
CHANNSVTG

SEQ ID NO: 119004 - protein, 9 aa, Homo sapiens
HANNSVTGC

SEQ ID NO: 119005 - protein, 9 aa, Homo sapiens
ANNSVTGCN

SEQ ID NO: 119006 - protein, 9 aa, Homo sapiens
NNSVTGCNR

SEQ ID NO: 119007 - protein, 9 aa, Homo sapiens
NSVTGCNRT

SEQ ID NO: 119008 - protein, 9 aa, Homo sapiens
SVTGCNRTT

SEQ ID NO: 119009 - protein, 9 aa, Homo sapiens
VTGCNRTTV

SEQ ID NO: 119010 - protein, 9 aa, Homo sapiens
TGCNRTTVK

SEQ ID NO: 119011 - protein, 9 aa, Homo sapiens
GCNRTTVKT

SEQ ID NO: 119012 - protein, 9 aa, Homo sapiens
CNRTTVKTI

SEQ ID NO: 119013 - protein, 9 aa, Homo sapiens
NRTTVKTII

SEQ ID NO: 119014 - protein, 9 aa, Homo sapiens
RTTVKTIIV

SEQ ID NO: 119015 - protein, 9 aa, Homo sapiens
TTVKTIIVT

SEQ ID NO: 119016 - protein, 9 aa, Homo sapiens
TVKTIIVTE

SEQ ID NO: 119017 - protein, 9 aa, Homo sapiens
VKTIIVTEL

SEQ ID NO: 119018 - protein, 9 aa, Homo sapiens
KTIIVTELS

SEQ ID NO: 119019 - protein, 9 aa, Homo sapiens
TIIVTELSP

SEQ ID NO: 119020 - protein, 9 aa, Homo sapiens
IIVTELSPV

SEQ ID NO: 119021 - protein, 9 aa, Homo sapiens
IVTELSPVV

SEQ ID NO: 119022 - protein, 9 aa, Homo sapiens
VTELSPVVA

SEQ ID NO: 119023 - protein, 9 aa, Homo sapiens
TELSPVVAK

SEQ ID NO: 119024 - protein, 9 aa, Homo sapiens
ELSPVVAKP

SEQ ID NO: 119025 - protein, 9 aa, Homo sapiens
LSPVVAKPQ

SEQ ID NO: 119026 - protein, 9 aa, Homo sapiens
SPVVAKPQI

SEQ ID NO: 119027 - protein, 9 aa, Homo sapiens
PVVAKPQIK

SEQ ID NO: 119028 - protein, 9 aa, Homo sapiens
VVAKPQIKA

SEQ ID NO: 119029 - protein, 9 aa, Homo sapiens
VAKPQIKAS

SEQ ID NO: 119030 - protein, 9 aa, Homo sapiens
AKPQIKASK

SEQ ID NO: 119031 - protein, 9 aa, Homo sapiens
KPQIKASKT

SEQ ID NO: 119032 - protein, 9 aa, Homo sapiens
PQIKASKTT

SEQ ID NO: 119033 - protein, 9 aa, Homo sapiens
QIKASKTTV

SEQ ID NO: 119034 - protein, 9 aa, Homo sapiens
IKASKTTVT

SEQ ID NO: 119035 - protein, 9 aa, Homo sapiens
KASKTTVTG

SEQ ID NO: 119036 - protein, 9 aa, Homo sapiens
ASKTTVTGD

SEQ ID NO: 119037 - protein, 9 aa, Homo sapiens
SKTTVTGDK

SEQ ID NO: 119038 - protein, 9 aa, Homo sapiens
KTTVTGDKD

SEQ ID NO: 119039 - protein, 9 aa, Homo sapiens
TTVTGDKDS

SEQ ID NO: 119040 - protein, 9 aa, Homo sapiens
TVTGDKDSV

SEQ ID NO: 119041 - protein, 9 aa, Homo sapiens
VTGDKDSVN

SEQ ID NO: 119042 - protein, 9 aa, Homo sapiens
TGDKDSVNL

SEQ ID NO: 119043 - protein, 9 aa, Homo sapiens
GDKDSVNLT

SEQ ID NO: 119044 - protein, 9 aa, Homo sapiens
DKDSVNLTC

SEQ ID NO: 119045 - protein, 9 aa, Homo sapiens
KDSVNLTCS

SEQ ID NO: 119046 - protein, 9 aa, Homo sapiens
DSVNLTCST

SEQ ID NO: 119047 - protein, 9 aa, Homo sapiens
SVNLTCSTN

SEQ ID NO: 119048 - protein, 9 aa, Homo sapiens
VNLTCSTND

SEQ ID NO: 119049 - protein, 9 aa, Homo sapiens
NLTCSTNDT

SEQ ID NO: 119050 - protein, 9 aa, Homo sapiens
LTCSTNDTG

SEQ ID NO: 119051 - protein, 9 aa, Homo sapiens
TCSTNDTGI

SEQ ID NO: 119052 - protein, 9 aa, Homo sapiens
CSTNDTGIS

SEQ ID NO: 119053 - protein, 9 aa, Homo sapiens
STNDTGISI

SEQ ID NO: 119054 - protein, 9 aa, Homo sapiens
TNDTGISIR

SEQ ID NO: 119055 - protein, 9 aa, Homo sapiens
NDTGISIRW

SEQ ID NO: 119056 - protein, 9 aa, Homo sapiens
DTGISIRWF

SEQ ID NO: 119057 - protein, 9 aa, Homo sapiens
TGISIRWFF

SEQ ID NO: 119058 - protein, 9 aa, Homo sapiens
GISIRWFFK

SEQ ID NO: 119059 - protein, 9 aa, Homo sapiens
ISIRWFFKN

SEQ ID NO: 119060 - protein, 9 aa, Homo sapiens
SIRWFFKNQ

SEQ ID NO: 119061 - protein, 9 aa, Homo sapiens
IRWFFKNQS

SEQ ID NO: 119062 - protein, 9 aa, Homo sapiens
RWFFKNQSL

SEQ ID NO: 119063 - protein, 9 aa, Homo sapiens
WFFKNQSLP

SEQ ID NO: 119064 - protein, 9 aa, Homo sapiens
FFKNQSLPS

SEQ ID NO: 119065 - protein, 9 aa, Homo sapiens
FKNQSLPSS

SEQ ID NO: 119066 - protein, 9 aa, Homo sapiens
KNQSLPSSE

SEQ ID NO: 119067 - protein, 9 aa, Homo sapiens
NQSLPSSER

SEQ ID NO: 119068 - protein, 9 aa, Homo sapiens
QSLPSSERM

SEQ ID NO: 119069 - protein, 9 aa, Homo sapiens
SLPSSERMK

SEQ ID NO: 119070 - protein, 9 aa, Homo sapiens
LPSSERMKL

SEQ ID NO: 119071 - protein, 9 aa, Homo sapiens
PSSERMKLS

SEQ ID NO: 119072 - protein, 9 aa, Homo sapiens
SSERMKLSQ

SEQ ID NO: 119073 - protein, 9 aa, Homo sapiens
SERMKLSQG

SEQ ID NO: 119074 - protein, 9 aa, Homo sapiens
ERMKLSQGN

SEQ ID NO: 119075 - protein, 9 aa, Homo sapiens
RMKLSQGNT

SEQ ID NO: 119076 - protein, 9 aa, Homo sapiens
MKLSQGNTT

SEQ ID NO: 119077 - protein, 9 aa, Homo sapiens
KLSQGNTTL

SEQ ID NO: 119078 - protein, 9 aa, Homo sapiens
LSQGNTTLS

SEQ ID NO: 119079 - protein, 9 aa, Homo sapiens
SQGNTTLSI

SEQ ID NO: 119080 - protein, 9 aa, Homo sapiens
QGNTTLSIN

SEQ ID NO: 119081 - protein, 9 aa, Homo sapiens
GNTTLSINP

SEQ ID NO: 119082 - protein, 9 aa, Homo sapiens
NTTLSINPV

SEQ ID NO: 119083 - protein, 9 aa, Homo sapiens
TTLSINPVK

SEQ ID NO: 119084 - protein, 9 aa, Homo sapiens
TLSINPVKR

SEQ ID NO: 119085 - protein, 9 aa, Homo sapiens
LSINPVKRE

SEQ ID NO: 119086 - protein, 9 aa, Homo sapiens
SINPVKRED

SEQ ID NO: 119087 - protein, 9 aa, Homo sapiens
INPVKREDA

SEQ ID NO: 119088 - protein, 9 aa, Homo sapiens
NPVKREDAG

SEQ ID NO: 119089 - protein, 9 aa, Homo sapiens
PVKREDAGT

SEQ ID NO: 119090 - protein, 9 aa, Homo sapiens
VKREDAGTY

SEQ ID NO: 119091 - protein, 9 aa, Homo sapiens
KREDAGTYW

SEQ ID NO: 119092 - protein, 9 aa, Homo sapiens
REDAGTYWC

SEQ ID NO: 119093 - protein, 9 aa, Homo sapiens
EDAGTYWCE

SEQ ID NO: 119094 - protein, 9 aa, Homo sapiens
DAGTYWCEV

SEQ ID NO: 119095 - protein, 9 aa, Homo sapiens
AGTYWCEVF

SEQ ID NO: 119096 - protein, 9 aa, Homo sapiens
GTYWCEVFN

SEQ ID NO: 119097 - protein, 9 aa, Homo sapiens
TYWCEVFNP

SEQ ID NO: 119098 - protein, 9 aa, Homo sapiens
YWCEVFNPI

SEQ ID NO: 119099 - protein, 9 aa, Homo sapiens
WCEVFNPIS

SEQ ID NO: 119100 - protein, 9 aa, Homo sapiens
CEVFNPISK

SEQ ID NO: 119101 - protein, 9 aa, Homo sapiens
EVFNPISKN

SEQ ID NO: 119102 - protein, 9 aa, Homo sapiens
VFNPISKNQ

SEQ ID NO: 119103 - protein, 9 aa, Homo sapiens
FNPISKNQS

SEQ ID NO: 119104 - protein, 9 aa, Homo sapiens
NPISKNQSD

SEQ ID NO: 119105 - protein, 9 aa, Homo sapiens
PISKNQSDP

SEQ ID NO: 119106 - protein, 9 aa, Homo sapiens
ISKNQSDPI

SEQ ID NO: 119107 - protein, 9 aa, Homo sapiens
SKNQSDPIM

SEQ ID NO: 119108 - protein, 9 aa, Homo sapiens
KNQSDPIML

SEQ ID NO: 119109 - protein, 9 aa, Homo sapiens
NQSDPIMLN

SEQ ID NO: 119110 - protein, 9 aa, Homo sapiens
QSDPIMLNV

SEQ ID NO: 119111 - protein, 9 aa, Homo sapiens
SDPIMLNVN

SEQ ID NO: 119112 - protein, 9 aa, Homo sapiens
DPIMLNVNY

SEQ ID NO: 119113 - protein, 9 aa, Homo sapiens
PIMLNVNYN

SEQ ID NO: 119114 - protein, 9 aa, Homo sapiens
IMLNVNYNA

SEQ ID NO: 119115 - protein, 9 aa, Homo sapiens
MLNVNYNAL

SEQ ID NO: 119116 - protein, 9 aa, Homo sapiens
LNVNYNALP

SEQ ID NO: 119117 - protein, 9 aa, Homo sapiens
NVNYNALPQ

SEQ ID NO: 119118 - protein, 9 aa, Homo sapiens
VNYNALPQE

SEQ ID NO: 119119 - protein, 9 aa, Homo sapiens
NYNALPQEN

SEQ ID NO: 119120 - protein, 9 aa, Homo sapiens
YNALPQENG

SEQ ID NO: 119121 - protein, 9 aa, Homo sapiens
NALPQENGL

SEQ ID NO: 119122 - protein, 9 aa, Homo sapiens
ALPQENGLS

SEQ ID NO: 119123 - protein, 9 aa, Homo sapiens
LPQENGLSP

SEQ ID NO: 119124 - protein, 9 aa, Homo sapiens
PQENGLSPG

SEQ ID NO: 119125 - protein, 9 aa, Homo sapiens
QENGLSPGA

SEQ ID NO: 119126 - protein, 9 aa, Homo sapiens
ENGLSPGAI

SEQ ID NO: 119127 - protein, 9 aa, Homo sapiens
NGLSPGAIA

SEQ ID NO: 119128 - protein, 9 aa, Homo sapiens
GLSPGAIAG

SEQ ID NO: 119129 - protein, 9 aa, Homo sapiens
LSPGAIAGI

SEQ ID NO: 119130 - protein, 9 aa, Homo sapiens
SPGAIAGIV

SEQ ID NO: 119131 - protein, 9 aa, Homo sapiens
PGAIAGIVI

SEQ ID NO: 119132 - protein, 9 aa, Homo sapiens
GAIAGIVIG

SEQ ID NO: 119133 - protein, 9 aa, Homo sapiens
AIAGIVIGV

SEQ ID NO: 119134 - protein, 9 aa, Homo sapiens
IAGIVIGVV

SEQ ID NO: 119135 - protein, 9 aa, Homo sapiens
AGIVIGVVA

SEQ ID NO: 119136 - protein, 9 aa, Homo sapiens
GIVIGVVAL

SEQ ID NO: 119137 - protein, 9 aa, Homo sapiens
IVIGVVALV

SEQ ID NO: 119138 - protein, 9 aa, Homo sapiens
VIGVVALVA

SEQ ID NO: 119139 - protein, 9 aa, Homo sapiens
IGVVALVAL

SEQ ID NO: 119140 - protein, 9 aa, Homo sapiens
GVVALVALI

SEQ ID NO: 119141 - protein, 9 aa, Homo sapiens
VVALVALIA

SEQ ID NO: 119142 - protein, 9 aa, Homo sapiens
VALVALIAV

SEQ ID NO: 119143 - protein, 9 aa, Homo sapiens
ALVALIAVA

SEQ ID NO: 119144 - protein, 9 aa, Homo sapiens
LVALIAVAL

SEQ ID NO: 119145 - protein, 9 aa, Homo sapiens
VALIAVALA

SEQ ID NO: 119146 - protein, 9 aa, Homo sapiens
ALIAVALAC

SEQ ID NO: 119147 - protein, 9 aa, Homo sapiens
LIAVALACF

SEQ ID NO: 119148 - protein, 9 aa, Homo sapiens
IAVALACFL

SEQ ID NO: 119149 - protein, 9 aa, Homo sapiens
AVALACFLH

SEQ ID NO: 119150 - protein, 9 aa, Homo sapiens
VALACFLHF

SEQ ID NO: 119151 - protein, 9 aa, Homo sapiens
ALACFLHFG

SEQ ID NO: 119152 - protein, 9 aa, Homo sapiens
LACFLHFGK

SEQ ID NO: 119153 - protein, 9 aa, Homo sapiens
ACFLHFGKT

SEQ ID NO: 119154 - protein, 9 aa, Homo sapiens
CFLHFGKTG

SEQ ID NO: 119155 - protein, 9 aa, Homo sapiens
FLHFGKTGR

SEQ ID NO: 119156 - protein, 9 aa, Homo sapiens
LHFGKTGRA

SEQ ID NO: 119157 - protein, 9 aa, Homo sapiens
HFGKTGRAS

SEQ ID NO: 119158 - protein, 9 aa, Homo sapiens
FGKTGRASD

SEQ ID NO: 119159 - protein, 9 aa, Homo sapiens
GKTGRASDQ

SEQ ID NO: 119160 - protein, 9 aa, Homo sapiens
KTGRASDQR

SEQ ID NO: 119161 - protein, 9 aa, Homo sapiens
TGRASDQRD

SEQ ID NO: 119162 - protein, 9 aa, Homo sapiens
GRASDQRDL

SEQ ID NO: 119163 - protein, 9 aa, Homo sapiens
RASDQRDLT

SEQ ID NO: 119164 - protein, 9 aa, Homo sapiens
ASDQRDLTE

SEQ ID NO: 119165 - protein, 9 aa, Homo sapiens
SDQRDLTEH

SEQ ID NO: 119166 - protein, 9 aa, Homo sapiens
DQRDLTEHK

SEQ ID NO: 119167 - protein, 9 aa, Homo sapiens
QRDLTEHKP

SEQ ID NO: 119168 - protein, 9 aa, Homo sapiens
RDLTEHKPS

SEQ ID NO: 119169 - protein, 9 aa, Homo sapiens
DLTEHKPSV

SEQ ID NO: 119170 - protein, 9 aa, Homo sapiens
LTEHKPSVS

SEQ ID NO: 119171 - protein, 9 aa, Homo sapiens
TEHKPSVSN

SEQ ID NO: 119172 - protein, 9 aa, Homo sapiens
EHKPSVSNH

SEQ ID NO: 119173 - protein, 9 aa, Homo sapiens
HKPSVSNHT

SEQ ID NO: 119174 - protein, 9 aa, Homo sapiens
KPSVSNHTQ

SEQ ID NO: 119175 - protein, 9 aa, Homo sapiens
PSVSNHTQD

SEQ ID NO: 119176 - protein, 9 aa, Homo sapiens
SVSNHTQDH

SEQ ID NO: 119177 - protein, 9 aa, Homo sapiens
VSNHTQDHS

SEQ ID NO: 119178 - protein, 9 aa, Homo sapiens
SNHTQDHSN

SEQ ID NO: 119179 - protein, 9 aa, Homo sapiens
NHTQDHSND

SEQ ID NO: 119180 - protein, 9 aa, Homo sapiens
HTQDHSNDP

SEQ ID NO: 119181 - protein, 9 aa, Homo sapiens
TQDHSNDPP

SEQ ID NO: 119182 - protein, 9 aa, Homo sapiens
QDHSNDPPN

SEQ ID NO: 119183 - protein, 9 aa, Homo sapiens
DHSNDPPNK

SEQ ID NO: 119184 - protein, 9 aa, Homo sapiens
HSNDPPNKM

SEQ ID NO: 119185 - protein, 9 aa, Homo sapiens
SNDPPNKMN

SEQ ID NO: 119186 - protein, 9 aa, Homo sapiens
NDPPNKMNE

SEQ ID NO: 119187 - protein, 9 aa, Homo sapiens
DPPNKMNEV

SEQ ID NO: 119188 - protein, 9 aa, Homo sapiens
PPNKMNEVT

SEQ ID NO: 119189 - protein, 9 aa, Homo sapiens
PNKMNEVTY

SEQ ID NO: 119190 - protein, 9 aa, Homo sapiens
NKMNEVTYS

SEQ ID NO: 119191 - protein, 9 aa, Homo sapiens
KMNEVTYST

SEQ ID NO: 119192 - protein, 9 aa, Homo sapiens
MNEVTYSTL

SEQ ID NO: 119193 - protein, 9 aa, Homo sapiens
NEVTYSTLN

SEQ ID NO: 119194 - protein, 9 aa, Homo sapiens
EVTYSTLNF

SEQ ID NO: 119195 - protein, 9 aa, Homo sapiens
VTYSTLNFE

SEQ ID NO: 119196 - protein, 9 aa, Homo sapiens
TYSTLNFEA

SEQ ID NO: 119197 - protein, 9 aa, Homo sapiens
YSTLNFEAQ

SEQ ID NO: 119198 - protein, 9 aa, Homo sapiens
STLNFEAQQ

SEQ ID NO: 119199 - protein, 9 aa, Homo sapiens
TLNFEAQQP

SEQ ID NO: 119200 - protein, 9 aa, Homo sapiens
LNFEAQQPT

SEQ ID NO: 119201 - protein, 9 aa, Homo sapiens
NFEAQQPTQ

SEQ ID NO: 119202 - protein, 9 aa, Homo sapiens
FEAQQPTQP

SEQ ID NO: 119203 - protein, 9 aa, Homo sapiens
EAQQPTQPT

SEQ ID NO: 119204 - protein, 9 aa, Homo sapiens
AQQPTQPTS

SEQ ID NO: 119205 - protein, 9 aa, Homo sapiens
QQPTQPTSA

SEQ ID NO: 119206 - protein, 9 aa, Homo sapiens
QPTQPTSAS

SEQ ID NO: 119207 - protein, 9 aa, Homo sapiens
PTQPTSASP

SEQ ID NO: 119208 - protein, 9 aa, Homo sapiens
TQPTSASPS

SEQ ID NO: 119209 - protein, 9 aa, Homo sapiens
QPTSASPSL

SEQ ID NO: 119210 - protein, 9 aa, Homo sapiens
PTSASPSLT

SEQ ID NO: 119211 - protein, 9 aa, Homo sapiens
TSASPSLTA

SEQ ID NO: 119212 - protein, 9 aa, Homo sapiens
SASPSLTAT

SEQ ID NO: 119213 - protein, 9 aa, Homo sapiens
ASPSLTATE

SEQ ID NO: 119214 - protein, 9 aa, Homo sapiens
SPSLTATEI

SEQ ID NO: 119215 - protein, 9 aa, Homo sapiens
PSLTATEII

SEQ ID NO: 119216 - protein, 9 aa, Homo sapiens
SLTATEIIY

SEQ ID NO: 119217 - protein, 9 aa, Homo sapiens
LTATEIIYS

SEQ ID NO: 119218 - protein, 9 aa, Homo sapiens
TATEIIYSE

SEQ ID NO: 119219 - protein, 9 aa, Homo sapiens
ATEIIYSEV

SEQ ID NO: 119220 - protein, 9 aa, Homo sapiens
TEIIYSEVK

SEQ ID NO: 119221 - protein, 9 aa, Homo sapiens
EIIYSEVKK

SEQ ID NO: 119222 - protein, 9 aa, Homo sapiens
IIYSEVKKQ

SEQ ID NO: 119223 - protein, 9 aa, Homo sapiens
MGPPSASPH

SEQ ID NO: 119224 - protein, 9 aa, Homo sapiens
GPPSASPHR

SEQ ID NO: 119225 - protein, 9 aa, Homo sapiens
PPSASPHRE

SEQ ID NO: 119226 - protein, 9 aa, Homo sapiens
PSASPHREC

SEQ ID NO: 119227 - protein, 9 aa, Homo sapiens
SASPHRECI

SEQ ID NO: 119228 - protein, 9 aa, Homo sapiens
ASPHRECIP

SEQ ID NO: 119229 - protein, 9 aa, Homo sapiens
SPHRECIPW

SEQ ID NO: 119230 - protein, 9 aa, Homo sapiens
PHRECIPWQ

SEQ ID NO: 119231 - protein, 9 aa, Homo sapiens
HRECIPWQG

SEQ ID NO: 119232 - protein, 9 aa, Homo sapiens
RECIPWQGL

SEQ ID NO: 119233 - protein, 9 aa, Homo sapiens
ECIPWQGLL

SEQ ID NO: 119234 - protein, 9 aa, Homo sapiens
CIPWQGLLL

SEQ ID NO: 119235 - protein, 9 aa, Homo sapiens
IPWQGLLLT

SEQ ID NO: 119236 - protein, 9 aa, Homo sapiens
PWQGLLLTA

SEQ ID NO: 119237 - protein, 9 aa, Homo sapiens
WQGLLLTAS

SEQ ID NO: 119238 - protein, 9 aa, Homo sapiens
QGLLLTASL

SEQ ID NO: 119239 - protein, 9 aa, Homo sapiens
GLLLTASLL

SEQ ID NO: 119240 - protein, 9 aa, Homo sapiens
LLLTASLLN

SEQ ID NO: 119241 - protein, 9 aa, Homo sapiens
LLTASLLNF

SEQ ID NO: 119242 - protein, 9 aa, Homo sapiens
LTASLLNFW

SEQ ID NO: 119243 - protein, 9 aa, Homo sapiens
TASLLNFWN

SEQ ID NO: 119244 - protein, 9 aa, Homo sapiens
ASLLNFWNP

SEQ ID NO: 119245 - protein, 9 aa, Homo sapiens
SLLNFWNPP

SEQ ID NO: 119246 - protein, 9 aa, Homo sapiens
LLNFWNPPT

SEQ ID NO: 119247 - protein, 9 aa, Homo sapiens
LNFWNPPTT

SEQ ID NO: 119248 - protein, 9 aa, Homo sapiens
NFWNPPTTA

SEQ ID NO: 119249 - protein, 9 aa, Homo sapiens
FWNPPTTAK

SEQ ID NO: 119250 - protein, 9 aa, Homo sapiens
WNPPTTAKL

SEQ ID NO: 119251 - protein, 9 aa, Homo sapiens
NPPTTAKLT

SEQ ID NO: 119252 - protein, 9 aa, Homo sapiens
PPTTAKLTI

SEQ ID NO: 119253 - protein, 9 aa, Homo sapiens
PTTAKLTIE

SEQ ID NO: 119254 - protein, 9 aa, Homo sapiens
TTAKLTIES

SEQ ID NO: 119255 - protein, 9 aa, Homo sapiens
TAKLTIESM

SEQ ID NO: 119256 - protein, 9 aa, Homo sapiens
AKLTIESMP

SEQ ID NO: 119257 - protein, 9 aa, Homo sapiens
KLTIESMPL

SEQ ID NO: 119258 - protein, 9 aa, Homo sapiens
LTIESMPLS

SEQ ID NO: 119259 - protein, 9 aa, Homo sapiens
TIESMPLSV

SEQ ID NO: 119260 - protein, 9 aa, Homo sapiens
IESMPLSVA

SEQ ID NO: 119261 - protein, 9 aa, Homo sapiens
ESMPLSVAE

SEQ ID NO: 119262 - protein, 9 aa, Homo sapiens
SMPLSVAEG

SEQ ID NO: 119263 - protein, 9 aa, Homo sapiens
MPLSVAEGK

SEQ ID NO: 119264 - protein, 9 aa, Homo sapiens
PLSVAEGKE

SEQ ID NO: 119265 - protein, 9 aa, Homo sapiens
LSVAEGKEV

SEQ ID NO: 119266 - protein, 9 aa, Homo sapiens
SVAEGKEVL

SEQ ID NO: 119267 - protein, 9 aa, Homo sapiens
VAEGKEVLL

SEQ ID NO: 119268 - protein, 9 aa, Homo sapiens
AEGKEVLLL

SEQ ID NO: 119269 - protein, 9 aa, Homo sapiens
EGKEVLLLV

SEQ ID NO: 119270 - protein, 9 aa, Homo sapiens
GKEVLLLVH

SEQ ID NO: 119271 - protein, 9 aa, Homo sapiens
KEVLLLVHN

SEQ ID NO: 119272 - protein, 9 aa, Homo sapiens
EVLLLVHNL

SEQ ID NO: 119273 - protein, 9 aa, Homo sapiens
VLLLVHNLP

SEQ ID NO: 119274 - protein, 9 aa, Homo sapiens
LLLVHNLPQ

SEQ ID NO: 119275 - protein, 9 aa, Homo sapiens
LLVHNLPQH

SEQ ID NO: 119276 - protein, 9 aa, Homo sapiens
LVHNLPQHL

SEQ ID NO: 119277 - protein, 9 aa, Homo sapiens
VHNLPQHLF

SEQ ID NO: 119278 - protein, 9 aa, Homo sapiens
HNLPQHLFG

SEQ ID NO: 119279 - protein, 9 aa, Homo sapiens
NLPQHLFGY

SEQ ID NO: 119280 - protein, 9 aa, Homo sapiens
LPQHLFGYS

SEQ ID NO: 119281 - protein, 9 aa, Homo sapiens
PQHLFGYSW

SEQ ID NO: 119282 - protein, 9 aa, Homo sapiens
QHLFGYSWY

SEQ ID NO: 119283 - protein, 9 aa, Homo sapiens
HLFGYSWYK

SEQ ID NO: 119284 - protein, 9 aa, Homo sapiens
LFGYSWYKG

SEQ ID NO: 119285 - protein, 9 aa, Homo sapiens
FGYSWYKGE

SEQ ID NO: 119286 - protein, 9 aa, Homo sapiens
GYSWYKGER

SEQ ID NO: 119287 - protein, 9 aa, Homo sapiens
YSWYKGERV

SEQ ID NO: 119288 - protein, 9 aa, Homo sapiens
SWYKGERVD

SEQ ID NO: 119289 - protein, 9 aa, Homo sapiens
WYKGERVDG

SEQ ID NO: 119290 - protein, 9 aa, Homo sapiens
YKGERVDGN

SEQ ID NO: 119291 - protein, 9 aa, Homo sapiens
KGERVDGNS

SEQ ID NO: 119292 - protein, 9 aa, Homo sapiens
GERVDGNSL

SEQ ID NO: 119293 - protein, 9 aa, Homo sapiens
ERVDGNSLI

SEQ ID NO: 119294 - protein, 9 aa, Homo sapiens
RVDGNSLIV

SEQ ID NO: 119295 - protein, 9 aa, Homo sapiens
VDGNSLIVG

SEQ ID NO: 119296 - protein, 9 aa, Homo sapiens
DGNSLIVGY

SEQ ID NO: 119297 - protein, 9 aa, Homo sapiens
GNSLIVGYV

SEQ ID NO: 119298 - protein, 9 aa, Homo sapiens
NSLIVGYVI

SEQ ID NO: 119299 - protein, 9 aa, Homo sapiens
SLIVGYVIG

SEQ ID NO: 119300 - protein, 9 aa, Homo sapiens
LIVGYVIGT

SEQ ID NO: 119301 - protein, 9 aa, Homo sapiens
IVGYVIGTQ

SEQ ID NO: 119302 - protein, 9 aa, Homo sapiens
VGYVIGTQQ

SEQ ID NO: 119303 - protein, 9 aa, Homo sapiens
GYVIGTQQA

SEQ ID NO: 119304 - protein, 9 aa, Homo sapiens
YVIGTQQAT

SEQ ID NO: 119305 - protein, 9 aa, Homo sapiens
VIGTQQATP

SEQ ID NO: 119306 - protein, 9 aa, Homo sapiens
IGTQQATPG

SEQ ID NO: 119307 - protein, 9 aa, Homo sapiens
GTQQATPGA

SEQ ID NO: 119308 - protein, 9 aa, Homo sapiens
TQQATPGAA

SEQ ID NO: 119309 - protein, 9 aa, Homo sapiens
QQATPGAAY

SEQ ID NO: 119310 - protein, 9 aa, Homo sapiens
QATPGAAYS

SEQ ID NO: 119311 - protein, 9 aa, Homo sapiens
ATPGAAYSG

SEQ ID NO: 119312 - protein, 9 aa, Homo sapiens
TPGAAYSGR

SEQ ID NO: 119313 - protein, 9 aa, Homo sapiens
PGAAYSGRE

SEQ ID NO: 119314 - protein, 9 aa, Homo sapiens
GAAYSGRET

SEQ ID NO: 119315 - protein, 9 aa, Homo sapiens
AAYSGRETI

SEQ ID NO: 119316 - protein, 9 aa, Homo sapiens
AYSGRETIY

SEQ ID NO: 119317 - protein, 9 aa, Homo sapiens
YSGRETIYT

SEQ ID NO: 119318 - protein, 9 aa, Homo sapiens
SGRETIYTN

SEQ ID NO: 119319 - protein, 9 aa, Homo sapiens
GRETIYTNA

SEQ ID NO: 119320 - protein, 9 aa, Homo sapiens
RETIYTNAS

SEQ ID NO: 119321 - protein, 9 aa, Homo sapiens
ETIYTNASL

SEQ ID NO: 119322 - protein, 9 aa, Homo sapiens
TIYTNASLL

SEQ ID NO: 119323 - protein, 9 aa, Homo sapiens
IYTNASLLI

SEQ ID NO: 119324 - protein, 9 aa, Homo sapiens
YTNASLLIQ

SEQ ID NO: 119325 - protein, 9 aa, Homo sapiens
TNASLLIQN

SEQ ID NO: 119326 - protein, 9 aa, Homo sapiens
NASLLIQNV

SEQ ID NO: 119327 - protein, 9 aa, Homo sapiens
ASLLIQNVT

SEQ ID NO: 119328 - protein, 9 aa, Homo sapiens
SLLIQNVTQ

SEQ ID NO: 119329 - protein, 9 aa, Homo sapiens
LLIQNVTQN

SEQ ID NO: 119330 - protein, 9 aa, Homo sapiens
LIQNVTQND

SEQ ID NO: 119331 - protein, 9 aa, Homo sapiens
IQNVTQNDI

SEQ ID NO: 119332 - protein, 9 aa, Homo sapiens
QNVTQNDIG

SEQ ID NO: 119333 - protein, 9 aa, Homo sapiens
NVTQNDIGF

SEQ ID NO: 119334 - protein, 9 aa, Homo sapiens
VTQNDIGFY

SEQ ID NO: 119335 - protein, 9 aa, Homo sapiens
TQNDIGFYT

SEQ ID NO: 119336 - protein, 9 aa, Homo sapiens
QNDIGFYTL

SEQ ID NO: 119337 - protein, 9 aa, Homo sapiens
NDIGFYTLQ

SEQ ID NO: 119338 - protein, 9 aa, Homo sapiens
DIGFYTLQV

SEQ ID NO: 119339 - protein, 9 aa, Homo sapiens
IGFYTLQVI

SEQ ID NO: 119340 - protein, 9 aa, Homo sapiens
GFYTLQVIK

SEQ ID NO: 119341 - protein, 9 aa, Homo sapiens
FYTLQVIKS

SEQ ID NO: 119342 - protein, 9 aa, Homo sapiens
YTLQVIKSD

SEQ ID NO: 119343 - protein, 9 aa, Homo sapiens
TLQVIKSDL

SEQ ID NO: 119344 - protein, 9 aa, Homo sapiens
LQVIKSDLV

SEQ ID NO: 119345 - protein, 9 aa, Homo sapiens
QVIKSDLVN

SEQ ID NO: 119346 - protein, 9 aa, Homo sapiens
VIKSDLVNE

SEQ ID NO: 119347 - protein, 9 aa, Homo sapiens
IKSDLVNEE

SEQ ID NO: 119348 - protein, 9 aa, Homo sapiens
KSDLVNEEA

SEQ ID NO: 119349 - protein, 9 aa, Homo sapiens
SDLVNEEAT

SEQ ID NO: 119350 - protein, 9 aa, Homo sapiens
DLVNEEATG

SEQ ID NO: 119351 - protein, 9 aa, Homo sapiens
LVNEEATGQ

SEQ ID NO: 119352 - protein, 9 aa, Homo sapiens
VNEEATGQF

SEQ ID NO: 119353 - protein, 9 aa, Homo sapiens
NEEATGQFH

SEQ ID NO: 119354 - protein, 9 aa, Homo sapiens
EEATGQFHV

SEQ ID NO: 119355 - protein, 9 aa, Homo sapiens
EATGQFHVY

SEQ ID NO: 119356 - protein, 9 aa, Homo sapiens
ATGQFHVYQ

SEQ ID NO: 119357 - protein, 9 aa, Homo sapiens
TGQFHVYQE

SEQ ID NO: 119358 - protein, 9 aa, Homo sapiens
GQFHVYQEN

SEQ ID NO: 119359 - protein, 9 aa, Homo sapiens
QFHVYQENA

SEQ ID NO: 119360 - protein, 9 aa, Homo sapiens
FHVYQENAP

SEQ ID NO: 119361 - protein, 9 aa, Homo sapiens
HVYQENAPG

SEQ ID NO: 119362 - protein, 9 aa, Homo sapiens
VYQENAPGL

SEQ ID NO: 119363 - protein, 9 aa, Homo sapiens
YQENAPGLP

SEQ ID NO: 119364 - protein, 9 aa, Homo sapiens
QENAPGLPV

SEQ ID NO: 119365 - protein, 9 aa, Homo sapiens
ENAPGLPVG

SEQ ID NO: 119366 - protein, 9 aa, Homo sapiens
NAPGLPVGA

SEQ ID NO: 119367 - protein, 9 aa, Homo sapiens
APGLPVGAV

SEQ ID NO: 119368 - protein, 9 aa, Homo sapiens
PGLPVGAVA

SEQ ID NO: 119369 - protein, 9 aa, Homo sapiens
GLPVGAVAG

SEQ ID NO: 119370 - protein, 9 aa, Homo sapiens
LPVGAVAGI

SEQ ID NO: 119371 - protein, 9 aa, Homo sapiens
PVGAVAGIV

SEQ ID NO: 119372 - protein, 9 aa, Homo sapiens
VGAVAGIVT

SEQ ID NO: 119373 - protein, 9 aa, Homo sapiens
GAVAGIVTG

SEQ ID NO: 119374 - protein, 9 aa, Homo sapiens
AVAGIVTGV

SEQ ID NO: 119375 - protein, 9 aa, Homo sapiens
VAGIVTGVL

SEQ ID NO: 119376 - protein, 9 aa, Homo sapiens
AGIVTGVLV

SEQ ID NO: 119377 - protein, 9 aa, Homo sapiens
GIVTGVLVG

SEQ ID NO: 119378 - protein, 9 aa, Homo sapiens
IVTGVLVGV

SEQ ID NO: 119379 - protein, 9 aa, Homo sapiens
VTGVLVGVA

SEQ ID NO: 119380 - protein, 9 aa, Homo sapiens
TGVLVGVAL

SEQ ID NO: 119381 - protein, 9 aa, Homo sapiens
GVLVGVALV

SEQ ID NO: 119382 - protein, 9 aa, Homo sapiens
VLVGVALVA

SEQ ID NO: 119383 - protein, 9 aa, Homo sapiens
LVGVALVAA

SEQ ID NO: 119384 - protein, 9 aa, Homo sapiens
VGVALVAAL

SEQ ID NO: 119385 - protein, 9 aa, Homo sapiens
GVALVAALV

SEQ ID NO: 119386 - protein, 9 aa, Homo sapiens
VALVAALVC

SEQ ID NO: 119387 - protein, 9 aa, Homo sapiens
ALVAALVCF

SEQ ID NO: 119388 - protein, 9 aa, Homo sapiens
LVAALVCFL

SEQ ID NO: 119389 - protein, 9 aa, Homo sapiens
VAALVCFLL

SEQ ID NO: 119390 - protein, 9 aa, Homo sapiens
AALVCFLLL

SEQ ID NO: 119391 - protein, 9 aa, Homo sapiens
ALVCFLLLA

SEQ ID NO: 119392 - protein, 9 aa, Homo sapiens
LVCFLLLAK

SEQ ID NO: 119393 - protein, 9 aa, Homo sapiens
VCFLLLAKT

SEQ ID NO: 119394 - protein, 9 aa, Homo sapiens
CFLLLAKTG

SEQ ID NO: 119395 - protein, 9 aa, Homo sapiens
FLLLAKTGR

SEQ ID NO: 119396 - protein, 9 aa, Homo sapiens
LLLAKTGRT

SEQ ID NO: 119397 - protein, 9 aa, Homo sapiens
LLAKTGRTS

SEQ ID NO: 119398 - protein, 9 aa, Homo sapiens
LAKTGRTSI

SEQ ID NO: 119399 - protein, 9 aa, Homo sapiens
AKTGRTSIQ

SEQ ID NO: 119400 - protein, 9 aa, Homo sapiens
KTGRTSIQR

SEQ ID NO: 119401 - protein, 9 aa, Homo sapiens
TGRTSIQRD

SEQ ID NO: 119402 - protein, 9 aa, Homo sapiens
GRTSIQRDL

SEQ ID NO: 119403 - protein, 9 aa, Homo sapiens
RTSIQRDLK

SEQ ID NO: 119404 - protein, 9 aa, Homo sapiens
TSIQRDLKE

SEQ ID NO: 119405 - protein, 9 aa, Homo sapiens
SIQRDLKEQ

SEQ ID NO: 119406 - protein, 9 aa, Homo sapiens
IQRDLKEQQ

SEQ ID NO: 119407 - protein, 9 aa, Homo sapiens
QRDLKEQQP

SEQ ID NO: 119408 - protein, 9 aa, Homo sapiens
RDLKEQQPQ

SEQ ID NO: 119409 - protein, 9 aa, Homo sapiens
DLKEQQPQA

SEQ ID NO: 119410 - protein, 9 aa, Homo sapiens
LKEQQPQAL

SEQ ID NO: 119411 - protein, 9 aa, Homo sapiens
KEQQPQALA

SEQ ID NO: 119412 - protein, 9 aa, Homo sapiens
EQQPQALAP

SEQ ID NO: 119413 - protein, 9 aa, Homo sapiens
QQPQALAPG

SEQ ID NO: 119414 - protein, 9 aa, Homo sapiens
QPQALAPGR

SEQ ID NO: 119415 - protein, 9 aa, Homo sapiens
PQALAPGRG

SEQ ID NO: 119416 - protein, 9 aa, Homo sapiens
QALAPGRGP

SEQ ID NO: 119417 - protein, 9 aa, Homo sapiens
ALAPGRGPS

SEQ ID NO: 119418 - protein, 9 aa, Homo sapiens
LAPGRGPSH

SEQ ID NO: 119419 - protein, 9 aa, Homo sapiens
APGRGPSHS

SEQ ID NO: 119420 - protein, 9 aa, Homo sapiens
PGRGPSHSS

SEQ ID NO: 119421 - protein, 9 aa, Homo sapiens
GRGPSHSSA

SEQ ID NO: 119422 - protein, 9 aa, Homo sapiens
RGPSHSSAF

SEQ ID NO: 119423 - protein, 9 aa, Homo sapiens
GPSHSSAFS

SEQ ID NO: 119424 - protein, 9 aa, Homo sapiens
PSHSSAFSM

SEQ ID NO: 119425 - protein, 9 aa, Homo sapiens
SHSSAFSMS

SEQ ID NO: 119426 - protein, 9 aa, Homo sapiens
HSSAFSMSP

SEQ ID NO: 119427 - protein, 9 aa, Homo sapiens
SSAFSMSPL

SEQ ID NO: 119428 - protein, 9 aa, Homo sapiens
SAFSMSPLS

SEQ ID NO: 119429 - protein, 9 aa, Homo sapiens
AFSMSPLST

SEQ ID NO: 119430 - protein, 9 aa, Homo sapiens
FSMSPLSTA

SEQ ID NO: 119431 - protein, 9 aa, Homo sapiens
SMSPLSTAQ

SEQ ID NO: 119432 - protein, 9 aa, Homo sapiens
MSPLSTAQA

SEQ ID NO: 119433 - protein, 9 aa, Homo sapiens
SPLSTAQAP

SEQ ID NO: 119434 - protein, 9 aa, Homo sapiens
PLSTAQAPL

SEQ ID NO: 119435 - protein, 9 aa, Homo sapiens
LSTAQAPLP

SEQ ID NO: 119436 - protein, 9 aa, Homo sapiens
STAQAPLPN

SEQ ID NO: 119437 - protein, 9 aa, Homo sapiens
TAQAPLPNP

SEQ ID NO: 119438 - protein, 9 aa, Homo sapiens
AQAPLPNPR

SEQ ID NO: 119439 - protein, 9 aa, Homo sapiens
QAPLPNPRT

SEQ ID NO: 119440 - protein, 9 aa, Homo sapiens
APLPNPRTA

SEQ ID NO: 119441 - protein, 9 aa, Homo sapiens
PLPNPRTAA

SEQ ID NO: 119442 - protein, 9 aa, Homo sapiens
LPNPRTAAS

SEQ ID NO: 119443 - protein, 9 aa, Homo sapiens
PNPRTAASI

SEQ ID NO: 119444 - protein, 9 aa, Homo sapiens
NPRTAASIY

SEQ ID NO: 119445 - protein, 9 aa, Homo sapiens
PRTAASIYE

SEQ ID NO: 119446 - protein, 9 aa, Homo sapiens
RTAASIYEE

SEQ ID NO: 119447 - protein, 9 aa, Homo sapiens
TAASIYEEL

SEQ ID NO: 119448 - protein, 9 aa, Homo sapiens
AASIYEELL

SEQ ID NO: 119449 - protein, 9 aa, Homo sapiens
ASIYEELLK

SEQ ID NO: 119450 - protein, 9 aa, Homo sapiens
SIYEELLKH

SEQ ID NO: 119451 - protein, 9 aa, Homo sapiens
IYEELLKHD

SEQ ID NO: 119452 - protein, 9 aa, Homo sapiens
YEELLKHDT

SEQ ID NO: 119453 - protein, 9 aa, Homo sapiens
EELLKHDTN

SEQ ID NO: 119454 - protein, 9 aa, Homo sapiens
ELLKHDTNI

SEQ ID NO: 119455 - protein, 9 aa, Homo sapiens
LLKHDTNIY

SEQ ID NO: 119456 - protein, 9 aa, Homo sapiens
LKHDTNIYC

SEQ ID NO: 119457 - protein, 9 aa, Homo sapiens
KHDTNIYCR

SEQ ID NO: 119458 - protein, 9 aa, Homo sapiens
HDTNIYCRM

SEQ ID NO: 119459 - protein, 9 aa, Homo sapiens
DTNIYCRMD

SEQ ID NO: 119460 - protein, 9 aa, Homo sapiens
TNIYCRMDH

SEQ ID NO: 119461 - protein, 9 aa, Homo sapiens
NIYCRMDHK

SEQ ID NO: 119462 - protein, 9 aa, Homo sapiens
IYCRMDHKA

SEQ ID NO: 119463 - protein, 9 aa, Homo sapiens
YCRMDHKAE

SEQ ID NO: 119464 - protein, 9 aa, Homo sapiens
CRMDHKAEV

SEQ ID NO: 119465 - protein, 9 aa, Homo sapiens
RMDHKAEVA

SEQ ID NO: 119466 - protein, 9 aa, Homo sapiens
MDHKAEVAS

SEQ ID NO: 119467 - protein, 9 aa, Homo sapiens
MGPPSAPPC

SEQ ID NO: 119468 - protein, 9 aa, Homo sapiens
GPPSAPPCR

SEQ ID NO: 119469 - protein, 9 aa, Homo sapiens
PPSAPPCRL

SEQ ID NO: 119470 - protein, 9 aa, Homo sapiens
PSAPPCRLH

SEQ ID NO: 119471 - protein, 9 aa, Homo sapiens
SAPPCRLHV

SEQ ID NO: 119472 - protein, 9 aa, Homo sapiens
APPCRLHVP

SEQ ID NO: 119473 - protein, 9 aa, Homo sapiens
PPCRLHVPW

SEQ ID NO: 119474 - protein, 9 aa, Homo sapiens
PCRLHVPWK

SEQ ID NO: 119475 - protein, 9 aa, Homo sapiens
CRLHVPWKE

SEQ ID NO: 119476 - protein, 9 aa, Homo sapiens
RLHVPWKEV

SEQ ID NO: 119477 - protein, 9 aa, Homo sapiens
LHVPWKEVL

SEQ ID NO: 119478 - protein, 9 aa, Homo sapiens
HVPWKEVLL

SEQ ID NO: 119479 - protein, 9 aa, Homo sapiens
VPWKEVLLT

SEQ ID NO: 119480 - protein, 9 aa, Homo sapiens
PWKEVLLTA

SEQ ID NO: 119481 - protein, 9 aa, Homo sapiens
WKEVLLTAS

SEQ ID NO: 119482 - protein, 9 aa, Homo sapiens
KEVLLTASL

SEQ ID NO: 119483 - protein, 9 aa, Homo sapiens
EVLLTASLL

SEQ ID NO: 119484 - protein, 9 aa, Homo sapiens
VLLTASLLT

SEQ ID NO: 119485 - protein, 9 aa, Homo sapiens
LLTASLLTF

SEQ ID NO: 119486 - protein, 9 aa, Homo sapiens
LTASLLTFW

SEQ ID NO: 119487 - protein, 9 aa, Homo sapiens
TASLLTFWN

SEQ ID NO: 119488 - protein, 9 aa, Homo sapiens
ASLLTFWNP

SEQ ID NO: 119489 - protein, 9 aa, Homo sapiens
SLLTFWNPP

SEQ ID NO: 119490 - protein, 9 aa, Homo sapiens
LLTFWNPPT

SEQ ID NO: 119491 - protein, 9 aa, Homo sapiens
LTFWNPPTT

SEQ ID NO: 119492 - protein, 9 aa, Homo sapiens
TFWNPPTTA

SEQ ID NO: 119493 - protein, 9 aa, Homo sapiens
FWNPPTTAK

SEQ ID NO: 119494 - protein, 9 aa, Homo sapiens
WNPPTTAKL

SEQ ID NO: 119495 - protein, 9 aa, Homo sapiens
NPPTTAKLT

SEQ ID NO: 119496 - protein, 9 aa, Homo sapiens
PPTTAKLTI

SEQ ID NO: 119497 - protein, 9 aa, Homo sapiens
PTTAKLTIE

SEQ ID NO: 119498 - protein, 9 aa, Homo sapiens
TTAKLTIES

SEQ ID NO: 119499 - protein, 9 aa, Homo sapiens
TAKLTIEST

SEQ ID NO: 119500 - protein, 9 aa, Homo sapiens
AKLTIESTP

SEQ ID NO: 119501 - protein, 9 aa, Homo sapiens
KLTIESTPF

SEQ ID NO: 119502 - protein, 9 aa, Homo sapiens
LTIESTPFN

SEQ ID NO: 119503 - protein, 9 aa, Homo sapiens
TIESTPFNV

SEQ ID NO: 119504 - protein, 9 aa, Homo sapiens
IESTPFNVA

SEQ ID NO: 119505 - protein, 9 aa, Homo sapiens
ESTPFNVAE

SEQ ID NO: 119506 - protein, 9 aa, Homo sapiens
STPFNVAEG

SEQ ID NO: 119507 - protein, 9 aa, Homo sapiens
TPFNVAEGK

SEQ ID NO: 119508 - protein, 9 aa, Homo sapiens
PFNVAEGKE

SEQ ID NO: 119509 - protein, 9 aa, Homo sapiens
FNVAEGKEV

SEQ ID NO: 119510 - protein, 9 aa, Homo sapiens
NVAEGKEVL

SEQ ID NO: 119511 - protein, 9 aa, Homo sapiens
VAEGKEVLL

SEQ ID NO: 119512 - protein, 9 aa, Homo sapiens
AEGKEVLLL

SEQ ID NO: 119513 - protein, 9 aa, Homo sapiens
EGKEVLLLA

SEQ ID NO: 119514 - protein, 9 aa, Homo sapiens
GKEVLLLAH

SEQ ID NO: 119515 - protein, 9 aa, Homo sapiens
KEVLLLAHN

SEQ ID NO: 119516 - protein, 9 aa, Homo sapiens
EVLLLAHNL

SEQ ID NO: 119517 - protein, 9 aa, Homo sapiens
VLLLAHNLP

SEQ ID NO: 119518 - protein, 9 aa, Homo sapiens
LLLAHNLPQ

SEQ ID NO: 119519 - protein, 9 aa, Homo sapiens
LLAHNLPQN

SEQ ID NO: 119520 - protein, 9 aa, Homo sapiens
LAHNLPQNR

SEQ ID NO: 119521 - protein, 9 aa, Homo sapiens
AHNLPQNRI

SEQ ID NO: 119522 - protein, 9 aa, Homo sapiens
HNLPQNRIG

SEQ ID NO: 119523 - protein, 9 aa, Homo sapiens
NLPQNRIGY

SEQ ID NO: 119524 - protein, 9 aa, Homo sapiens
LPQNRIGYS

SEQ ID NO: 119525 - protein, 9 aa, Homo sapiens
PQNRIGYSW

SEQ ID NO: 119526 - protein, 9 aa, Homo sapiens
QNRIGYSWY

SEQ ID NO: 119527 - protein, 9 aa, Homo sapiens
NRIGYSWYK

SEQ ID NO: 119528 - protein, 9 aa, Homo sapiens
RIGYSWYKG

SEQ ID NO: 119529 - protein, 9 aa, Homo sapiens
IGYSWYKGE

SEQ ID NO: 119530 - protein, 9 aa, Homo sapiens
GYSWYKGER

SEQ ID NO: 119531 - protein, 9 aa, Homo sapiens
YSWYKGERV

SEQ ID NO: 119532 - protein, 9 aa, Homo sapiens
SWYKGERVD

SEQ ID NO: 119533 - protein, 9 aa, Homo sapiens
WYKGERVDG

SEQ ID NO: 119534 - protein, 9 aa, Homo sapiens
YKGERVDGN

SEQ ID NO: 119535 - protein, 9 aa, Homo sapiens
KGERVDGNS

SEQ ID NO: 119536 - protein, 9 aa, Homo sapiens
GERVDGNSL

SEQ ID NO: 119537 - protein, 9 aa, Homo sapiens
ERVDGNSLI

SEQ ID NO: 119538 - protein, 9 aa, Homo sapiens
RVDGNSLIV

SEQ ID NO: 119539 - protein, 9 aa, Homo sapiens
VDGNSLIVG

SEQ ID NO: 119540 - protein, 9 aa, Homo sapiens
DGNSLIVGY

SEQ ID NO: 119541 - protein, 9 aa, Homo sapiens
GNSLIVGYV

SEQ ID NO: 119542 - protein, 9 aa, Homo sapiens
NSLIVGYVI

SEQ ID NO: 119543 - protein, 9 aa, Homo sapiens
SLIVGYVIG

SEQ ID NO: 119544 - protein, 9 aa, Homo sapiens
LIVGYVIGT

SEQ ID NO: 119545 - protein, 9 aa, Homo sapiens
IVGYVIGTQ

SEQ ID NO: 119546 - protein, 9 aa, Homo sapiens
VGYVIGTQQ

SEQ ID NO: 119547 - protein, 9 aa, Homo sapiens
GYVIGTQQA

SEQ ID NO: 119548 - protein, 9 aa, Homo sapiens
YVIGTQQAT

SEQ ID NO: 119549 - protein, 9 aa, Homo sapiens
VIGTQQATP

SEQ ID NO: 119550 - protein, 9 aa, Homo sapiens
IGTQQATPG

SEQ ID NO: 119551 - protein, 9 aa, Homo sapiens
GTQQATPGP

SEQ ID NO: 119552 - protein, 9 aa, Homo sapiens
TQQATPGPA

SEQ ID NO: 119553 - protein, 9 aa, Homo sapiens
QQATPGPAY

SEQ ID NO: 119554 - protein, 9 aa, Homo sapiens
QATPGPAYS

SEQ ID NO: 119555 - protein, 9 aa, Homo sapiens
ATPGPAYSG

SEQ ID NO: 119556 - protein, 9 aa, Homo sapiens
TPGPAYSGR

SEQ ID NO: 119557 - protein, 9 aa, Homo sapiens
PGPAYSGRE

SEQ ID NO: 119558 - protein, 9 aa, Homo sapiens
GPAYSGRET

SEQ ID NO: 119559 - protein, 9 aa, Homo sapiens
PAYSGRETI

SEQ ID NO: 119560 - protein, 9 aa, Homo sapiens
AYSGRETIY

SEQ ID NO: 119561 - protein, 9 aa, Homo sapiens
YSGRETIYP

SEQ ID NO: 119562 - protein, 9 aa, Homo sapiens
SGRETIYPN

SEQ ID NO: 119563 - protein, 9 aa, Homo sapiens
GRETIYPNA

SEQ ID NO: 119564 - protein, 9 aa, Homo sapiens
RETIYPNAS

SEQ ID NO: 119565 - protein, 9 aa, Homo sapiens
ETIYPNASL

SEQ ID NO: 119566 - protein, 9 aa, Homo sapiens
TIYPNASLL

SEQ ID NO: 119567 - protein, 9 aa, Homo sapiens
IYPNASLLI

SEQ ID NO: 119568 - protein, 9 aa, Homo sapiens
YPNASLLIQ

SEQ ID NO: 119569 - protein, 9 aa, Homo sapiens
PNASLLIQN

SEQ ID NO: 119570 - protein, 9 aa, Homo sapiens
NASLLIQNV

SEQ ID NO: 119571 - protein, 9 aa, Homo sapiens
ASLLIQNVT

SEQ ID NO: 119572 - protein, 9 aa, Homo sapiens
SLLIQNVTQ

SEQ ID NO: 119573 - protein, 9 aa, Homo sapiens
LLIQNVTQN

SEQ ID NO: 119574 - protein, 9 aa, Homo sapiens
LIQNVTQND

SEQ ID NO: 119575 - protein, 9 aa, Homo sapiens
IQNVTQNDT

SEQ ID NO: 119576 - protein, 9 aa, Homo sapiens
QNVTQNDTG

SEQ ID NO: 119577 - protein, 9 aa, Homo sapiens
NVTQNDTGF

SEQ ID NO: 119578 - protein, 9 aa, Homo sapiens
VTQNDTGFY

SEQ ID NO: 119579 - protein, 9 aa, Homo sapiens
TQNDTGFYT

SEQ ID NO: 119580 - protein, 9 aa, Homo sapiens
QNDTGFYTL

SEQ ID NO: 119581 - protein, 9 aa, Homo sapiens
NDTGFYTLQ

SEQ ID NO: 119582 - protein, 9 aa, Homo sapiens
DTGFYTLQV

SEQ ID NO: 119583 - protein, 9 aa, Homo sapiens
TGFYTLQVI

SEQ ID NO: 119584 - protein, 9 aa, Homo sapiens
GFYTLQVIK

SEQ ID NO: 119585 - protein, 9 aa, Homo sapiens
FYTLQVIKS

SEQ ID NO: 119586 - protein, 9 aa, Homo sapiens
YTLQVIKSD

SEQ ID NO: 119587 - protein, 9 aa, Homo sapiens
TLQVIKSDL

SEQ ID NO: 119588 - protein, 9 aa, Homo sapiens
LQVIKSDLV

SEQ ID NO: 119589 - protein, 9 aa, Homo sapiens
QVIKSDLVN

SEQ ID NO: 119590 - protein, 9 aa, Homo sapiens
VIKSDLVNE

SEQ ID NO: 119591 - protein, 9 aa, Homo sapiens
IKSDLVNEE

SEQ ID NO: 119592 - protein, 9 aa, Homo sapiens
KSDLVNEEA

SEQ ID NO: 119593 - protein, 9 aa, Homo sapiens
SDLVNEEAT

SEQ ID NO: 119594 - protein, 9 aa, Homo sapiens
DLVNEEATG

SEQ ID NO: 119595 - protein, 9 aa, Homo sapiens
LVNEEATGQ

SEQ ID NO: 119596 - protein, 9 aa, Homo sapiens
VNEEATGQF

SEQ ID NO: 119597 - protein, 9 aa, Homo sapiens
NEEATGQFH

SEQ ID NO: 119598 - protein, 9 aa, Homo sapiens
EEATGQFHV

SEQ ID NO: 119599 - protein, 9 aa, Homo sapiens
EATGQFHVY

SEQ ID NO: 119600 - protein, 9 aa, Homo sapiens
ATGQFHVYP

SEQ ID NO: 119601 - protein, 9 aa, Homo sapiens
TGQFHVYPE

SEQ ID NO: 119602 - protein, 9 aa, Homo sapiens
GQFHVYPEL

SEQ ID NO: 119603 - protein, 9 aa, Homo sapiens
QFHVYPELP

SEQ ID NO: 119604 - protein, 9 aa, Homo sapiens
FHVYPELPK

SEQ ID NO: 119605 - protein, 9 aa, Homo sapiens
HVYPELPKP

SEQ ID NO: 119606 - protein, 9 aa, Homo sapiens
VYPELPKPS

SEQ ID NO: 119607 - protein, 9 aa, Homo sapiens
YPELPKPSI

SEQ ID NO: 119608 - protein, 9 aa, Homo sapiens
PELPKPSIS

SEQ ID NO: 119609 - protein, 9 aa, Homo sapiens
ELPKPSISS

SEQ ID NO: 119610 - protein, 9 aa, Homo sapiens
LPKPSISSN

SEQ ID NO: 119611 - protein, 9 aa, Homo sapiens
PKPSISSNN

SEQ ID NO: 119612 - protein, 9 aa, Homo sapiens
KPSISSNNS

SEQ ID NO: 119613 - protein, 9 aa, Homo sapiens
PSISSNNSN

SEQ ID NO: 119614 - protein, 9 aa, Homo sapiens
SISSNNSNP

SEQ ID NO: 119615 - protein, 9 aa, Homo sapiens
ISSNNSNPV

SEQ ID NO: 119616 - protein, 9 aa, Homo sapiens
SSNNSNPVE

SEQ ID NO: 119617 - protein, 9 aa, Homo sapiens
SNNSNPVED

SEQ ID NO: 119618 - protein, 9 aa, Homo sapiens
NNSNPVEDK

SEQ ID NO: 119619 - protein, 9 aa, Homo sapiens
NSNPVEDKD

SEQ ID NO: 119620 - protein, 9 aa, Homo sapiens
SNPVEDKDA

SEQ ID NO: 119621 - protein, 9 aa, Homo sapiens
NPVEDKDAV

SEQ ID NO: 119622 - protein, 9 aa, Homo sapiens
PVEDKDAVA

SEQ ID NO: 119623 - protein, 9 aa, Homo sapiens
VEDKDAVAF

SEQ ID NO: 119624 - protein, 9 aa, Homo sapiens
EDKDAVAFT

SEQ ID NO: 119625 - protein, 9 aa, Homo sapiens
DKDAVAFTC

SEQ ID NO: 119626 - protein, 9 aa, Homo sapiens
KDAVAFTCE

SEQ ID NO: 119627 - protein, 9 aa, Homo sapiens
DAVAFTCEP

SEQ ID NO: 119628 - protein, 9 aa, Homo sapiens
AVAFTCEPE

SEQ ID NO: 119629 - protein, 9 aa, Homo sapiens
VAFTCEPEV

SEQ ID NO: 119630 - protein, 9 aa, Homo sapiens
AFTCEPEVQ

SEQ ID NO: 119631 - protein, 9 aa, Homo sapiens
FTCEPEVQN

SEQ ID NO: 119632 - protein, 9 aa, Homo sapiens
TCEPEVQNT

SEQ ID NO: 119633 - protein, 9 aa, Homo sapiens
CEPEVQNTT

SEQ ID NO: 119634 - protein, 9 aa, Homo sapiens
EPEVQNTTY

SEQ ID NO: 119635 - protein, 9 aa, Homo sapiens
PEVQNTTYL

SEQ ID NO: 119636 - protein, 9 aa, Homo sapiens
EVQNTTYLW

SEQ ID NO: 119637 - protein, 9 aa, Homo sapiens
VQNTTYLWW

SEQ ID NO: 119638 - protein, 9 aa, Homo sapiens
QNTTYLWWV

SEQ ID NO: 119639 - protein, 9 aa, Homo sapiens
NTTYLWWVN

SEQ ID NO: 119640 - protein, 9 aa, Homo sapiens
TTYLWWVNG

SEQ ID NO: 119641 - protein, 9 aa, Homo sapiens
TYLWWVNGQ

SEQ ID NO: 119642 - protein, 9 aa, Homo sapiens
YLWWVNGQS

SEQ ID NO: 119643 - protein, 9 aa, Homo sapiens
LWWVNGQSL

SEQ ID NO: 119644 - protein, 9 aa, Homo sapiens
WWVNGQSLP

SEQ ID NO: 119645 - protein, 9 aa, Homo sapiens
WVNGQSLPV

SEQ ID NO: 119646 - protein, 9 aa, Homo sapiens
VNGQSLPVS

SEQ ID NO: 119647 - protein, 9 aa, Homo sapiens
NGQSLPVSP

SEQ ID NO: 119648 - protein, 9 aa, Homo sapiens
GQSLPVSPR

SEQ ID NO: 119649 - protein, 9 aa, Homo sapiens
QSLPVSPRL

SEQ ID NO: 119650 - protein, 9 aa, Homo sapiens
SLPVSPRLQ

SEQ ID NO: 119651 - protein, 9 aa, Homo sapiens
LPVSPRLQL

SEQ ID NO: 119652 - protein, 9 aa, Homo sapiens
PVSPRLQLS

SEQ ID NO: 119653 - protein, 9 aa, Homo sapiens
VSPRLQLSN

SEQ ID NO: 119654 - protein, 9 aa, Homo sapiens
SPRLQLSNG

SEQ ID NO: 119655 - protein, 9 aa, Homo sapiens
PRLQLSNGN

SEQ ID NO: 119656 - protein, 9 aa, Homo sapiens
RLQLSNGNM

SEQ ID NO: 119657 - protein, 9 aa, Homo sapiens
LQLSNGNMT

SEQ ID NO: 119658 - protein, 9 aa, Homo sapiens
QLSNGNMTL

SEQ ID NO: 119659 - protein, 9 aa, Homo sapiens
LSNGNMTLT

SEQ ID NO: 119660 - protein, 9 aa, Homo sapiens
SNGNMTLTL

SEQ ID NO: 119661 - protein, 9 aa, Homo sapiens
NGNMTLTLL

SEQ ID NO: 119662 - protein, 9 aa, Homo sapiens
GNMTLTLLS

SEQ ID NO: 119663 - protein, 9 aa, Homo sapiens
NMTLTLLSV

SEQ ID NO: 119664 - protein, 9 aa, Homo sapiens
MTLTLLSVK

SEQ ID NO: 119665 - protein, 9 aa, Homo sapiens
TLTLLSVKR

SEQ ID NO: 119666 - protein, 9 aa, Homo sapiens
LTLLSVKRN

SEQ ID NO: 119667 - protein, 9 aa, Homo sapiens
TLLSVKRND

SEQ ID NO: 119668 - protein, 9 aa, Homo sapiens
LLSVKRNDA

SEQ ID NO: 119669 - protein, 9 aa, Homo sapiens
LSVKRNDAG

SEQ ID NO: 119670 - protein, 9 aa, Homo sapiens
SVKRNDAGS

SEQ ID NO: 119671 - protein, 9 aa, Homo sapiens
VKRNDAGSY

SEQ ID NO: 119672 - protein, 9 aa, Homo sapiens
KRNDAGSYE

SEQ ID NO: 119673 - protein, 9 aa, Homo sapiens
RNDAGSYEC

SEQ ID NO: 119674 - protein, 9 aa, Homo sapiens
NDAGSYECE

SEQ ID NO: 119675 - protein, 9 aa, Homo sapiens
DAGSYECEI

SEQ ID NO: 119676 - protein, 9 aa, Homo sapiens
AGSYECEIQ

SEQ ID NO: 119677 - protein, 9 aa, Homo sapiens
GSYECEIQN

SEQ ID NO: 119678 - protein, 9 aa, Homo sapiens
SYECEIQNP

SEQ ID NO: 119679 - protein, 9 aa, Homo sapiens
YECEIQNPA

SEQ ID NO: 119680 - protein, 9 aa, Homo sapiens
ECEIQNPAS

SEQ ID NO: 119681 - protein, 9 aa, Homo sapiens
CEIQNPASA

SEQ ID NO: 119682 - protein, 9 aa, Homo sapiens
EIQNPASAN

SEQ ID NO: 119683 - protein, 9 aa, Homo sapiens
IQNPASANR

SEQ ID NO: 119684 - protein, 9 aa, Homo sapiens
QNPASANRS

SEQ ID NO: 119685 - protein, 9 aa, Homo sapiens
NPASANRSD

SEQ ID NO: 119686 - protein, 9 aa, Homo sapiens
PASANRSDP

SEQ ID NO: 119687 - protein, 9 aa, Homo sapiens
ASANRSDPV

SEQ ID NO: 119688 - protein, 9 aa, Homo sapiens
SANRSDPVT

SEQ ID NO: 119689 - protein, 9 aa, Homo sapiens
ANRSDPVTL

SEQ ID NO: 119690 - protein, 9 aa, Homo sapiens
NRSDPVTLN

SEQ ID NO: 119691 - protein, 9 aa, Homo sapiens
RSDPVTLNV

SEQ ID NO: 119692 - protein, 9 aa, Homo sapiens
SDPVTLNVL

SEQ ID NO: 119693 - protein, 9 aa, Homo sapiens
DPVTLNVLY

SEQ ID NO: 119694 - protein, 9 aa, Homo sapiens
PVTLNVLYG

SEQ ID NO: 119695 - protein, 9 aa, Homo sapiens
VTLNVLYGP

SEQ ID NO: 119696 - protein, 9 aa, Homo sapiens
TLNVLYGPD

SEQ ID NO: 119697 - protein, 9 aa, Homo sapiens
LNVLYGPDG

SEQ ID NO: 119698 - protein, 9 aa, Homo sapiens
NVLYGPDGP

SEQ ID NO: 119699 - protein, 9 aa, Homo sapiens
VLYGPDGPT

SEQ ID NO: 119700 - protein, 9 aa, Homo sapiens
LYGPDGPTI

SEQ ID NO: 119701 - protein, 9 aa, Homo sapiens
YGPDGPTIS

SEQ ID NO: 119702 - protein, 9 aa, Homo sapiens
GPDGPTISP

SEQ ID NO: 119703 - protein, 9 aa, Homo sapiens
PDGPTISPS

SEQ ID NO: 119704 - protein, 9 aa, Homo sapiens
DGPTISPSK

SEQ ID NO: 119705 - protein, 9 aa, Homo sapiens
GPTISPSKA

SEQ ID NO: 119706 - protein, 9 aa, Homo sapiens
PTISPSKAN

SEQ ID NO: 119707 - protein, 9 aa, Homo sapiens
TISPSKANY

SEQ ID NO: 119708 - protein, 9 aa, Homo sapiens
ISPSKANYR

SEQ ID NO: 119709 - protein, 9 aa, Homo sapiens
SPSKANYRP

SEQ ID NO: 119710 - protein, 9 aa, Homo sapiens
PSKANYRPG

SEQ ID NO: 119711 - protein, 9 aa, Homo sapiens
SKANYRPGE

SEQ ID NO: 119712 - protein, 9 aa, Homo sapiens
KANYRPGEN

SEQ ID NO: 119713 - protein, 9 aa, Homo sapiens
ANYRPGENL

SEQ ID NO: 119714 - protein, 9 aa, Homo sapiens
NYRPGENLN

SEQ ID NO: 119715 - protein, 9 aa, Homo sapiens
YRPGENLNL

SEQ ID NO: 119716 - protein, 9 aa, Homo sapiens
RPGENLNLS

SEQ ID NO: 119717 - protein, 9 aa, Homo sapiens
PGENLNLSC

SEQ ID NO: 119718 - protein, 9 aa, Homo sapiens
GENLNLSCH

SEQ ID NO: 119719 - protein, 9 aa, Homo sapiens
ENLNLSCHA

SEQ ID NO: 119720 - protein, 9 aa, Homo sapiens
NLNLSCHAA

SEQ ID NO: 119721 - protein, 9 aa, Homo sapiens
LNLSCHAAS

SEQ ID NO: 119722 - protein, 9 aa, Homo sapiens
NLSCHAASN

SEQ ID NO: 119723 - protein, 9 aa, Homo sapiens
LSCHAASNP

SEQ ID NO: 119724 - protein, 9 aa, Homo sapiens
SCHAASNPP

SEQ ID NO: 119725 - protein, 9 aa, Homo sapiens
CHAASNPPA

SEQ ID NO: 119726 - protein, 9 aa, Homo sapiens
HAASNPPAQ

SEQ ID NO: 119727 - protein, 9 aa, Homo sapiens
AASNPPAQY

SEQ ID NO: 119728 - protein, 9 aa, Homo sapiens
ASNPPAQYS

SEQ ID NO: 119729 - protein, 9 aa, Homo sapiens
SNPPAQYSW

SEQ ID NO: 119730 - protein, 9 aa, Homo sapiens
NPPAQYSWF

SEQ ID NO: 119731 - protein, 9 aa, Homo sapiens
PPAQYSWFI

SEQ ID NO: 119732 - protein, 9 aa, Homo sapiens
PAQYSWFIN

SEQ ID NO: 119733 - protein, 9 aa, Homo sapiens
AQYSWFING

SEQ ID NO: 119734 - protein, 9 aa, Homo sapiens
QYSWFINGT

SEQ ID NO: 119735 - protein, 9 aa, Homo sapiens
YSWFINGTF

SEQ ID NO: 119736 - protein, 9 aa, Homo sapiens
SWFINGTFQ

SEQ ID NO: 119737 - protein, 9 aa, Homo sapiens
WFINGTFQQ

SEQ ID NO: 119738 - protein, 9 aa, Homo sapiens
FINGTFQQS

SEQ ID NO: 119739 - protein, 9 aa, Homo sapiens
INGTFQQST

SEQ ID NO: 119740 - protein, 9 aa, Homo sapiens
NGTFQQSTQ

SEQ ID NO: 119741 - protein, 9 aa, Homo sapiens
GTFQQSTQE

SEQ ID NO: 119742 - protein, 9 aa, Homo sapiens
TFQQSTQEL

SEQ ID NO: 119743 - protein, 9 aa, Homo sapiens
FQQSTQELF

SEQ ID NO: 119744 - protein, 9 aa, Homo sapiens
QQSTQELFI

SEQ ID NO: 119745 - protein, 9 aa, Homo sapiens
QSTQELFIP

SEQ ID NO: 119746 - protein, 9 aa, Homo sapiens
STQELFIPN

SEQ ID NO: 119747 - protein, 9 aa, Homo sapiens
TQELFIPNI

SEQ ID NO: 119748 - protein, 9 aa, Homo sapiens
QELFIPNIT

SEQ ID NO: 119749 - protein, 9 aa, Homo sapiens
ELFIPNITV

SEQ ID NO: 119750 - protein, 9 aa, Homo sapiens
LFIPNITVN

SEQ ID NO: 119751 - protein, 9 aa, Homo sapiens
FIPNITVNN

SEQ ID NO: 119752 - protein, 9 aa, Homo sapiens
IPNITVNNS

SEQ ID NO: 119753 - protein, 9 aa, Homo sapiens
PNITVNNSG

SEQ ID NO: 119754 - protein, 9 aa, Homo sapiens
NITVNNSGS

SEQ ID NO: 119755 - protein, 9 aa, Homo sapiens
ITVNNSGSY

SEQ ID NO: 119756 - protein, 9 aa, Homo sapiens
TVNNSGSYM

SEQ ID NO: 119757 - protein, 9 aa, Homo sapiens
VNNSGSYMC

SEQ ID NO: 119758 - protein, 9 aa, Homo sapiens
NNSGSYMCQ

SEQ ID NO: 119759 - protein, 9 aa, Homo sapiens
NSGSYMCQA

SEQ ID NO: 119760 - protein, 9 aa, Homo sapiens
SGSYMCQAH

SEQ ID NO: 119761 - protein, 9 aa, Homo sapiens
GSYMCQAHN

SEQ ID NO: 119762 - protein, 9 aa, Homo sapiens
SYMCQAHNS

SEQ ID NO: 119763 - protein, 9 aa, Homo sapiens
YMCQAHNSA

SEQ ID NO: 119764 - protein, 9 aa, Homo sapiens
MCQAHNSAT

SEQ ID NO: 119765 - protein, 9 aa, Homo sapiens
CQAHNSATG

SEQ ID NO: 119766 - protein, 9 aa, Homo sapiens
QAHNSATGL

SEQ ID NO: 119767 - protein, 9 aa, Homo sapiens
AHNSATGLN

SEQ ID NO: 119768 - protein, 9 aa, Homo sapiens
HNSATGLNR

SEQ ID NO: 119769 - protein, 9 aa, Homo sapiens
NSATGLNRT

SEQ ID NO: 119770 - protein, 9 aa, Homo sapiens
SATGLNRTT

SEQ ID NO: 119771 - protein, 9 aa, Homo sapiens
ATGLNRTTV

SEQ ID NO: 119772 - protein, 9 aa, Homo sapiens
TGLNRTTVT

SEQ ID NO: 119773 - protein, 9 aa, Homo sapiens
GLNRTTVTM

SEQ ID NO: 119774 - protein, 9 aa, Homo sapiens
LNRTTVTMI

SEQ ID NO: 119775 - protein, 9 aa, Homo sapiens
NRTTVTMIT

SEQ ID NO: 119776 - protein, 9 aa, Homo sapiens
RTTVTMITV

SEQ ID NO: 119777 - protein, 9 aa, Homo sapiens
TTVTMITVS

SEQ ID NO: 119778 - protein, 9 aa, Homo sapiens
TVTMITVSG

SEQ ID NO: 119779 - protein, 9 aa, Homo sapiens
VTMITVSGS

SEQ ID NO: 119780 - protein, 9 aa, Homo sapiens
TMITVSGSA

SEQ ID NO: 119781 - protein, 9 aa, Homo sapiens
MITVSGSAP

SEQ ID NO: 119782 - protein, 9 aa, Homo sapiens
ITVSGSAPV

SEQ ID NO: 119783 - protein, 9 aa, Homo sapiens
TVSGSAPVL

SEQ ID NO: 119784 - protein, 9 aa, Homo sapiens
VSGSAPVLS

SEQ ID NO: 119785 - protein, 9 aa, Homo sapiens
SGSAPVLSA

SEQ ID NO: 119786 - protein, 9 aa, Homo sapiens
GSAPVLSAV

SEQ ID NO: 119787 - protein, 9 aa, Homo sapiens
SAPVLSAVA

SEQ ID NO: 119788 - protein, 9 aa, Homo sapiens
APVLSAVAT

SEQ ID NO: 119789 - protein, 9 aa, Homo sapiens
PVLSAVATV

SEQ ID NO: 119790 - protein, 9 aa, Homo sapiens
VLSAVATVG

SEQ ID NO: 119791 - protein, 9 aa, Homo sapiens
LSAVATVGI

SEQ ID NO: 119792 - protein, 9 aa, Homo sapiens
SAVATVGIT

SEQ ID NO: 119793 - protein, 9 aa, Homo sapiens
AVATVGITI

SEQ ID NO: 119794 - protein, 9 aa, Homo sapiens
VATVGITIG

SEQ ID NO: 119795 - protein, 9 aa, Homo sapiens
ATVGITIGV

SEQ ID NO: 119796 - protein, 9 aa, Homo sapiens
TVGITIGVL

SEQ ID NO: 119797 - protein, 9 aa, Homo sapiens
VGITIGVLA

SEQ ID NO: 119798 - protein, 9 aa, Homo sapiens
GITIGVLAR

SEQ ID NO: 119799 - protein, 9 aa, Homo sapiens
ITIGVLARV

SEQ ID NO: 119800 - protein, 9 aa, Homo sapiens
TIGVLARVA

SEQ ID NO: 119801 - protein, 9 aa, Homo sapiens
IGVLARVAL

SEQ ID NO: 119802 - protein, 9 aa, Homo sapiens
GVLARVALI

SEQ ID NO: 119803 - protein, 9 aa, Homo sapiens
MGPISAPSC

SEQ ID NO: 119804 - protein, 9 aa, Homo sapiens
GPISAPSCR

SEQ ID NO: 119805 - protein, 9 aa, Homo sapiens
PISAPSCRW

SEQ ID NO: 119806 - protein, 9 aa, Homo sapiens
ISAPSCRWR

SEQ ID NO: 119807 - protein, 9 aa, Homo sapiens
SAPSCRWRI

SEQ ID NO: 119808 - protein, 9 aa, Homo sapiens
APSCRWRIP

SEQ ID NO: 119809 - protein, 9 aa, Homo sapiens
PSCRWRIPW

SEQ ID NO: 119810 - protein, 9 aa, Homo sapiens
SCRWRIPWQ

SEQ ID NO: 119811 - protein, 9 aa, Homo sapiens
CRWRIPWQG

SEQ ID NO: 119812 - protein, 9 aa, Homo sapiens
RWRIPWQGL

SEQ ID NO: 119813 - protein, 9 aa, Homo sapiens
WRIPWQGLL

SEQ ID NO: 119814 - protein, 9 aa, Homo sapiens
RIPWQGLLL

SEQ ID NO: 119815 - protein, 9 aa, Homo sapiens
IPWQGLLLT

SEQ ID NO: 119816 - protein, 9 aa, Homo sapiens
PWQGLLLTA

SEQ ID NO: 119817 - protein, 9 aa, Homo sapiens
WQGLLLTAS

SEQ ID NO: 119818 - protein, 9 aa, Homo sapiens
QGLLLTASL

SEQ ID NO: 119819 - protein, 9 aa, Homo sapiens
GLLLTASLF

SEQ ID NO: 119820 - protein, 9 aa, Homo sapiens
LLLTASLFT

SEQ ID NO: 119821 - protein, 9 aa, Homo sapiens
LLTASLFTF

SEQ ID NO: 119822 - protein, 9 aa, Homo sapiens
LTASLFTFW

SEQ ID NO: 119823 - protein, 9 aa, Homo sapiens
TASLFTFWN

SEQ ID NO: 119824 - protein, 9 aa, Homo sapiens
ASLFTFWNP

SEQ ID NO: 119825 - protein, 9 aa, Homo sapiens
SLFTFWNPP

SEQ ID NO: 119826 - protein, 9 aa, Homo sapiens
LFTFWNPPT

SEQ ID NO: 119827 - protein, 9 aa, Homo sapiens
FTFWNPPTT

SEQ ID NO: 119828 - protein, 9 aa, Homo sapiens
TFWNPPTTA

SEQ ID NO: 119829 - protein, 9 aa, Homo sapiens
FWNPPTTAQ

SEQ ID NO: 119830 - protein, 9 aa, Homo sapiens
WNPPTTAQL

SEQ ID NO: 119831 - protein, 9 aa, Homo sapiens
NPPTTAQLT

SEQ ID NO: 119832 - protein, 9 aa, Homo sapiens
PPTTAQLTI

SEQ ID NO: 119833 - protein, 9 aa, Homo sapiens
PTTAQLTIE

SEQ ID NO: 119834 - protein, 9 aa, Homo sapiens
TTAQLTIEA

SEQ ID NO: 119835 - protein, 9 aa, Homo sapiens
TAQLTIEAV

SEQ ID NO: 119836 - protein, 9 aa, Homo sapiens
AQLTIEAVP

SEQ ID NO: 119837 - protein, 9 aa, Homo sapiens
QLTIEAVPS

SEQ ID NO: 119838 - protein, 9 aa, Homo sapiens
LTIEAVPSN

SEQ ID NO: 119839 - protein, 9 aa, Homo sapiens
TIEAVPSNA

SEQ ID NO: 119840 - protein, 9 aa, Homo sapiens
IEAVPSNAA

SEQ ID NO: 119841 - protein, 9 aa, Homo sapiens
EAVPSNAAE

SEQ ID NO: 119842 - protein, 9 aa, Homo sapiens
AVPSNAAEG

SEQ ID NO: 119843 - protein, 9 aa, Homo sapiens
VPSNAAEGK

SEQ ID NO: 119844 - protein, 9 aa, Homo sapiens
PSNAAEGKE

SEQ ID NO: 119845 - protein, 9 aa, Homo sapiens
SNAAEGKEV

SEQ ID NO: 119846 - protein, 9 aa, Homo sapiens
NAAEGKEVL

SEQ ID NO: 119847 - protein, 9 aa, Homo sapiens
AAEGKEVLL

SEQ ID NO: 119848 - protein, 9 aa, Homo sapiens
AEGKEVLLL

SEQ ID NO: 119849 - protein, 9 aa, Homo sapiens
EGKEVLLLV

SEQ ID NO: 119850 - protein, 9 aa, Homo sapiens
GKEVLLLVH

SEQ ID NO: 119851 - protein, 9 aa, Homo sapiens
KEVLLLVHN

SEQ ID NO: 119852 - protein, 9 aa, Homo sapiens
EVLLLVHNL

SEQ ID NO: 119853 - protein, 9 aa, Homo sapiens
VLLLVHNLP

SEQ ID NO: 119854 - protein, 9 aa, Homo sapiens
LLLVHNLPQ

SEQ ID NO: 119855 - protein, 9 aa, Homo sapiens
LLVHNLPQD

SEQ ID NO: 119856 - protein, 9 aa, Homo sapiens
LVHNLPQDP

SEQ ID NO: 119857 - protein, 9 aa, Homo sapiens
VHNLPQDPR

SEQ ID NO: 119858 - protein, 9 aa, Homo sapiens
HNLPQDPRG

SEQ ID NO: 119859 - protein, 9 aa, Homo sapiens
NLPQDPRGY

SEQ ID NO: 119860 - protein, 9 aa, Homo sapiens
LPQDPRGYN

SEQ ID NO: 119861 - protein, 9 aa, Homo sapiens
PQDPRGYNW

SEQ ID NO: 119862 - protein, 9 aa, Homo sapiens
QDPRGYNWY

SEQ ID NO: 119863 - protein, 9 aa, Homo sapiens
DPRGYNWYK

SEQ ID NO: 119864 - protein, 9 aa, Homo sapiens
PRGYNWYKG

SEQ ID NO: 119865 - protein, 9 aa, Homo sapiens
RGYNWYKGE

SEQ ID NO: 119866 - protein, 9 aa, Homo sapiens
GYNWYKGET

SEQ ID NO: 119867 - protein, 9 aa, Homo sapiens
YNWYKGETV

SEQ ID NO: 119868 - protein, 9 aa, Homo sapiens
NWYKGETVD

SEQ ID NO: 119869 - protein, 9 aa, Homo sapiens
WYKGETVDA

SEQ ID NO: 119870 - protein, 9 aa, Homo sapiens
YKGETVDAN

SEQ ID NO: 119871 - protein, 9 aa, Homo sapiens
KGETVDANR

SEQ ID NO: 119872 - protein, 9 aa, Homo sapiens
GETVDANRR

SEQ ID NO: 119873 - protein, 9 aa, Homo sapiens
ETVDANRRI

SEQ ID NO: 119874 - protein, 9 aa, Homo sapiens
TVDANRRII

SEQ ID NO: 119875 - protein, 9 aa, Homo sapiens
VDANRRIIG

SEQ ID NO: 119876 - protein, 9 aa, Homo sapiens
DANRRIIGY

SEQ ID NO: 119877 - protein, 9 aa, Homo sapiens
ANRRIIGYV

SEQ ID NO: 119878 - protein, 9 aa, Homo sapiens
NRRIIGYVI

SEQ ID NO: 119879 - protein, 9 aa, Homo sapiens
RRIIGYVIS

SEQ ID NO: 119880 - protein, 9 aa, Homo sapiens
RIIGYVISN

SEQ ID NO: 119881 - protein, 9 aa, Homo sapiens
IIGYVISNQ

SEQ ID NO: 119882 - protein, 9 aa, Homo sapiens
IGYVISNQQ

SEQ ID NO: 119883 - protein, 9 aa, Homo sapiens
GYVISNQQI

SEQ ID NO: 119884 - protein, 9 aa, Homo sapiens
YVISNQQIT

SEQ ID NO: 119885 - protein, 9 aa, Homo sapiens
VISNQQITP

SEQ ID NO: 119886 - protein, 9 aa, Homo sapiens
ISNQQITPG

SEQ ID NO: 119887 - protein, 9 aa, Homo sapiens
SNQQITPGP

SEQ ID NO: 119888 - protein, 9 aa, Homo sapiens
NQQITPGPA

SEQ ID NO: 119889 - protein, 9 aa, Homo sapiens
QQITPGPAY

SEQ ID NO: 119890 - protein, 9 aa, Homo sapiens
QITPGPAYS

SEQ ID NO: 119891 - protein, 9 aa, Homo sapiens
ITPGPAYSN

SEQ ID NO: 119892 - protein, 9 aa, Homo sapiens
TPGPAYSNR

SEQ ID NO: 119893 - protein, 9 aa, Homo sapiens
PGPAYSNRE

SEQ ID NO: 119894 - protein, 9 aa, Homo sapiens
GPAYSNRET

SEQ ID NO: 119895 - protein, 9 aa, Homo sapiens
PAYSNRETI

SEQ ID NO: 119896 - protein, 9 aa, Homo sapiens
AYSNRETIY

SEQ ID NO: 119897 - protein, 9 aa, Homo sapiens
YSNRETIYP

SEQ ID NO: 119898 - protein, 9 aa, Homo sapiens
SNRETIYPN

SEQ ID NO: 119899 - protein, 9 aa, Homo sapiens
NRETIYPNA

SEQ ID NO: 119900 - protein, 9 aa, Homo sapiens
RETIYPNAS

SEQ ID NO: 119901 - protein, 9 aa, Homo sapiens
ETIYPNASL

SEQ ID NO: 119902 - protein, 9 aa, Homo sapiens
TIYPNASLL

SEQ ID NO: 119903 - protein, 9 aa, Homo sapiens
IYPNASLLM

SEQ ID NO: 119904 - protein, 9 aa, Homo sapiens
YPNASLLMR

SEQ ID NO: 119905 - protein, 9 aa, Homo sapiens
PNASLLMRN

SEQ ID NO: 119906 - protein, 9 aa, Homo sapiens
NASLLMRNV

SEQ ID NO: 119907 - protein, 9 aa, Homo sapiens
ASLLMRNVT

SEQ ID NO: 119908 - protein, 9 aa, Homo sapiens
SLLMRNVTR

SEQ ID NO: 119909 - protein, 9 aa, Homo sapiens
LLMRNVTRN

SEQ ID NO: 119910 - protein, 9 aa, Homo sapiens
LMRNVTRND

SEQ ID NO: 119911 - protein, 9 aa, Homo sapiens
MRNVTRNDT

SEQ ID NO: 119912 - protein, 9 aa, Homo sapiens
RNVTRNDTG

SEQ ID NO: 119913 - protein, 9 aa, Homo sapiens
NVTRNDTGS

SEQ ID NO: 119914 - protein, 9 aa, Homo sapiens
VTRNDTGSY

SEQ ID NO: 119915 - protein, 9 aa, Homo sapiens
TRNDTGSYT

SEQ ID NO: 119916 - protein, 9 aa, Homo sapiens
RNDTGSYTL

SEQ ID NO: 119917 - protein, 9 aa, Homo sapiens
NDTGSYTLQ

SEQ ID NO: 119918 - protein, 9 aa, Homo sapiens
DTGSYTLQV

SEQ ID NO: 119919 - protein, 9 aa, Homo sapiens
TGSYTLQVI

SEQ ID NO: 119920 - protein, 9 aa, Homo sapiens
GSYTLQVIK

SEQ ID NO: 119921 - protein, 9 aa, Homo sapiens
SYTLQVIKL

SEQ ID NO: 119922 - protein, 9 aa, Homo sapiens
YTLQVIKLN

SEQ ID NO: 119923 - protein, 9 aa, Homo sapiens
TLQVIKLNL

SEQ ID NO: 119924 - protein, 9 aa, Homo sapiens
LQVIKLNLM

SEQ ID NO: 119925 - protein, 9 aa, Homo sapiens
QVIKLNLMS

SEQ ID NO: 119926 - protein, 9 aa, Homo sapiens
VIKLNLMSE

SEQ ID NO: 119927 - protein, 9 aa, Homo sapiens
IKLNLMSEE

SEQ ID NO: 119928 - protein, 9 aa, Homo sapiens
KLNLMSEEV

SEQ ID NO: 119929 - protein, 9 aa, Homo sapiens
LNLMSEEVT

SEQ ID NO: 119930 - protein, 9 aa, Homo sapiens
NLMSEEVTG

SEQ ID NO: 119931 - protein, 9 aa, Homo sapiens
LMSEEVTGQ

SEQ ID NO: 119932 - protein, 9 aa, Homo sapiens
MSEEVTGQF

SEQ ID NO: 119933 - protein, 9 aa, Homo sapiens
SEEVTGQFS

SEQ ID NO: 119934 - protein, 9 aa, Homo sapiens
EEVTGQFSV

SEQ ID NO: 119935 - protein, 9 aa, Homo sapiens
EVTGQFSVH

SEQ ID NO: 119936 - protein, 9 aa, Homo sapiens
VTGQFSVHP

SEQ ID NO: 119937 - protein, 9 aa, Homo sapiens
TGQFSVHPE

SEQ ID NO: 119938 - protein, 9 aa, Homo sapiens
GQFSVHPET

SEQ ID NO: 119939 - protein, 9 aa, Homo sapiens
QFSVHPETP

SEQ ID NO: 119940 - protein, 9 aa, Homo sapiens
FSVHPETPK

SEQ ID NO: 119941 - protein, 9 aa, Homo sapiens
SVHPETPKP

SEQ ID NO: 119942 - protein, 9 aa, Homo sapiens
VHPETPKPS

SEQ ID NO: 119943 - protein, 9 aa, Homo sapiens
HPETPKPSI

SEQ ID NO: 119944 - protein, 9 aa, Homo sapiens
PETPKPSIS

SEQ ID NO: 119945 - protein, 9 aa, Homo sapiens
ETPKPSISS

SEQ ID NO: 119946 - protein, 9 aa, Homo sapiens
TPKPSISSN

SEQ ID NO: 119947 - protein, 9 aa, Homo sapiens
PKPSISSNN

SEQ ID NO: 119948 - protein, 9 aa, Homo sapiens
KPSISSNNS

SEQ ID NO: 119949 - protein, 9 aa, Homo sapiens
PSISSNNSN

SEQ ID NO: 119950 - protein, 9 aa, Homo sapiens
SISSNNSNP

SEQ ID NO: 119951 - protein, 9 aa, Homo sapiens
ISSNNSNPV

SEQ ID NO: 119952 - protein, 9 aa, Homo sapiens
SSNNSNPVE

SEQ ID NO: 119953 - protein, 9 aa, Homo sapiens
SNNSNPVED

SEQ ID NO: 119954 - protein, 9 aa, Homo sapiens
NNSNPVEDK

SEQ ID NO: 119955 - protein, 9 aa, Homo sapiens
NSNPVEDKD

SEQ ID NO: 119956 - protein, 9 aa, Homo sapiens
SNPVEDKDA

SEQ ID NO: 119957 - protein, 9 aa, Homo sapiens
NPVEDKDAV

SEQ ID NO: 119958 - protein, 9 aa, Homo sapiens
PVEDKDAVA

SEQ ID NO: 119959 - protein, 9 aa, Homo sapiens
VEDKDAVAF

SEQ ID NO: 119960 - protein, 9 aa, Homo sapiens
EDKDAVAFT

SEQ ID NO: 119961 - protein, 9 aa, Homo sapiens
DKDAVAFTC

SEQ ID NO: 119962 - protein, 9 aa, Homo sapiens
KDAVAFTCE

SEQ ID NO: 119963 - protein, 9 aa, Homo sapiens
DAVAFTCEP

SEQ ID NO: 119964 - protein, 9 aa, Homo sapiens
AVAFTCEPE

SEQ ID NO: 119965 - protein, 9 aa, Homo sapiens
VAFTCEPET

SEQ ID NO: 119966 - protein, 9 aa, Homo sapiens
AFTCEPETQ

SEQ ID NO: 119967 - protein, 9 aa, Homo sapiens
FTCEPETQN

SEQ ID NO: 119968 - protein, 9 aa, Homo sapiens
TCEPETQNT

SEQ ID NO: 119969 - protein, 9 aa, Homo sapiens
CEPETQNTT

SEQ ID NO: 119970 - protein, 9 aa, Homo sapiens
EPETQNTTY

SEQ ID NO: 119971 - protein, 9 aa, Homo sapiens
PETQNTTYL

SEQ ID NO: 119972 - protein, 9 aa, Homo sapiens
ETQNTTYLW

SEQ ID NO: 119973 - protein, 9 aa, Homo sapiens
TQNTTYLWW

SEQ ID NO: 119974 - protein, 9 aa, Homo sapiens
QNTTYLWWV

SEQ ID NO: 119975 - protein, 9 aa, Homo sapiens
NTTYLWWVN

SEQ ID NO: 119976 - protein, 9 aa, Homo sapiens
TTYLWWVNG

SEQ ID NO: 119977 - protein, 9 aa, Homo sapiens
TYLWWVNGQ

SEQ ID NO: 119978 - protein, 9 aa, Homo sapiens
YLWWVNGQS

SEQ ID NO: 119979 - protein, 9 aa, Homo sapiens
LWWVNGQSL

SEQ ID NO: 119980 - protein, 9 aa, Homo sapiens
WWVNGQSLP

SEQ ID NO: 119981 - protein, 9 aa, Homo sapiens
WVNGQSLPV

SEQ ID NO: 119982 - protein, 9 aa, Homo sapiens
VNGQSLPVS

SEQ ID NO: 119983 - protein, 9 aa, Homo sapiens
NGQSLPVSP

SEQ ID NO: 119984 - protein, 9 aa, Homo sapiens
GQSLPVSPR

SEQ ID NO: 119985 - protein, 9 aa, Homo sapiens
QSLPVSPRL

SEQ ID NO: 119986 - protein, 9 aa, Homo sapiens
SLPVSPRLQ

SEQ ID NO: 119987 - protein, 9 aa, Homo sapiens
LPVSPRLQL

SEQ ID NO: 119988 - protein, 9 aa, Homo sapiens
PVSPRLQLS

SEQ ID NO: 119989 - protein, 9 aa, Homo sapiens
VSPRLQLSN

SEQ ID NO: 119990 - protein, 9 aa, Homo sapiens
SPRLQLSNG

SEQ ID NO: 119991 - protein, 9 aa, Homo sapiens
PRLQLSNGN

SEQ ID NO: 119992 - protein, 9 aa, Homo sapiens
RLQLSNGNR

SEQ ID NO: 119993 - protein, 9 aa, Homo sapiens
LQLSNGNRT

SEQ ID NO: 119994 - protein, 9 aa, Homo sapiens
QLSNGNRTL

SEQ ID NO: 119995 - protein, 9 aa, Homo sapiens
LSNGNRTLT

SEQ ID NO: 119996 - protein, 9 aa, Homo sapiens
SNGNRTLTL

SEQ ID NO: 119997 - protein, 9 aa, Homo sapiens
NGNRTLTLL

SEQ ID NO: 119998 - protein, 9 aa, Homo sapiens
GNRTLTLLS

SEQ ID NO: 119999 - protein, 9 aa, Homo sapiens
NRTLTLLSV

SEQ ID NO: 120000 - protein, 9 aa, Homo sapiens
RTLTLLSVT

SEQ ID NO: 120001 - protein, 9 aa, Homo sapiens
TLTLLSVTR

SEQ ID NO: 120002 - protein, 9 aa, Homo sapiens
LTLLSVTRN

SEQ ID NO: 120003 - protein, 9 aa, Homo sapiens
TLLSVTRND

SEQ ID NO: 120004 - protein, 9 aa, Homo sapiens
LLSVTRNDV

SEQ ID NO: 120005 - protein, 9 aa, Homo sapiens
LSVTRNDVG

SEQ ID NO: 120006 - protein, 9 aa, Homo sapiens
SVTRNDVGP

SEQ ID NO: 120007 - protein, 9 aa, Homo sapiens
VTRNDVGPY

SEQ ID NO: 120008 - protein, 9 aa, Homo sapiens
TRNDVGPYE

SEQ ID NO: 120009 - protein, 9 aa, Homo sapiens
RNDVGPYEC

SEQ ID NO: 120010 - protein, 9 aa, Homo sapiens
NDVGPYECE

SEQ ID NO: 120011 - protein, 9 aa, Homo sapiens
DVGPYECEI

SEQ ID NO: 120012 - protein, 9 aa, Homo sapiens
VGPYECEIQ

SEQ ID NO: 120013 - protein, 9 aa, Homo sapiens
GPYECEIQN

SEQ ID NO: 120014 - protein, 9 aa, Homo sapiens
PYECEIQNP

SEQ ID NO: 120015 - protein, 9 aa, Homo sapiens
YECEIQNPA

SEQ ID NO: 120016 - protein, 9 aa, Homo sapiens
ECEIQNPAS

SEQ ID NO: 120017 - protein, 9 aa, Homo sapiens
CEIQNPASA

SEQ ID NO: 120018 - protein, 9 aa, Homo sapiens
EIQNPASAN

SEQ ID NO: 120019 - protein, 9 aa, Homo sapiens
IQNPASANF

SEQ ID NO: 120020 - protein, 9 aa, Homo sapiens
QNPASANFS

SEQ ID NO: 120021 - protein, 9 aa, Homo sapiens
NPASANFSD

SEQ ID NO: 120022 - protein, 9 aa, Homo sapiens
PASANFSDP

SEQ ID NO: 120023 - protein, 9 aa, Homo sapiens
ASANFSDPV

SEQ ID NO: 120024 - protein, 9 aa, Homo sapiens
SANFSDPVT

SEQ ID NO: 120025 - protein, 9 aa, Homo sapiens
ANFSDPVTL

SEQ ID NO: 120026 - protein, 9 aa, Homo sapiens
NFSDPVTLN

SEQ ID NO: 120027 - protein, 9 aa, Homo sapiens
FSDPVTLNV

SEQ ID NO: 120028 - protein, 9 aa, Homo sapiens
SDPVTLNVL

SEQ ID NO: 120029 - protein, 9 aa, Homo sapiens
DPVTLNVLY

SEQ ID NO: 120030 - protein, 9 aa, Homo sapiens
PVTLNVLYG

SEQ ID NO: 120031 - protein, 9 aa, Homo sapiens
VTLNVLYGP

SEQ ID NO: 120032 - protein, 9 aa, Homo sapiens
TLNVLYGPD

SEQ ID NO: 120033 - protein, 9 aa, Homo sapiens
LNVLYGPDA

SEQ ID NO: 120034 - protein, 9 aa, Homo sapiens
NVLYGPDAP

SEQ ID NO: 120035 - protein, 9 aa, Homo sapiens
VLYGPDAPT

SEQ ID NO: 120036 - protein, 9 aa, Homo sapiens
LYGPDAPTI

SEQ ID NO: 120037 - protein, 9 aa, Homo sapiens
YGPDAPTIS

SEQ ID NO: 120038 - protein, 9 aa, Homo sapiens
GPDAPTISP

SEQ ID NO: 120039 - protein, 9 aa, Homo sapiens
PDAPTISPS

SEQ ID NO: 120040 - protein, 9 aa, Homo sapiens
DAPTISPSD

SEQ ID NO: 120041 - protein, 9 aa, Homo sapiens
APTISPSDT

SEQ ID NO: 120042 - protein, 9 aa, Homo sapiens
PTISPSDTY

SEQ ID NO: 120043 - protein, 9 aa, Homo sapiens
TISPSDTYY

SEQ ID NO: 120044 - protein, 9 aa, Homo sapiens
ISPSDTYYH

SEQ ID NO: 120045 - protein, 9 aa, Homo sapiens
SPSDTYYHA

SEQ ID NO: 120046 - protein, 9 aa, Homo sapiens
PSDTYYHAG

SEQ ID NO: 120047 - protein, 9 aa, Homo sapiens
SDTYYHAGV

SEQ ID NO: 120048 - protein, 9 aa, Homo sapiens
DTYYHAGVN

SEQ ID NO: 120049 - protein, 9 aa, Homo sapiens
TYYHAGVNL

SEQ ID NO: 120050 - protein, 9 aa, Homo sapiens
YYHAGVNLN

SEQ ID NO: 120051 - protein, 9 aa, Homo sapiens
YHAGVNLNL

SEQ ID NO: 120052 - protein, 9 aa, Homo sapiens
HAGVNLNLS

SEQ ID NO: 120053 - protein, 9 aa, Homo sapiens
AGVNLNLSC

SEQ ID NO: 120054 - protein, 9 aa, Homo sapiens
GVNLNLSCH

SEQ ID NO: 120055 - protein, 9 aa, Homo sapiens
VNLNLSCHA

SEQ ID NO: 120056 - protein, 9 aa, Homo sapiens
NLNLSCHAA

SEQ ID NO: 120057 - protein, 9 aa, Homo sapiens
LNLSCHAAS

SEQ ID NO: 120058 - protein, 9 aa, Homo sapiens
NLSCHAASN

SEQ ID NO: 120059 - protein, 9 aa, Homo sapiens
LSCHAASNP

SEQ ID NO: 120060 - protein, 9 aa, Homo sapiens
SCHAASNPP

SEQ ID NO: 120061 - protein, 9 aa, Homo sapiens
CHAASNPPS

SEQ ID NO: 120062 - protein, 9 aa, Homo sapiens
HAASNPPSQ

SEQ ID NO: 120063 - protein, 9 aa, Homo sapiens
AASNPPSQY

SEQ ID NO: 120064 - protein, 9 aa, Homo sapiens
ASNPPSQYS

SEQ ID NO: 120065 - protein, 9 aa, Homo sapiens
SNPPSQYSW

SEQ ID NO: 120066 - protein, 9 aa, Homo sapiens
NPPSQYSWS

SEQ ID NO: 120067 - protein, 9 aa, Homo sapiens
PPSQYSWSV

SEQ ID NO: 120068 - protein, 9 aa, Homo sapiens
PSQYSWSVN

SEQ ID NO: 120069 - protein, 9 aa, Homo sapiens
SQYSWSVNG

SEQ ID NO: 120070 - protein, 9 aa, Homo sapiens
QYSWSVNGT

SEQ ID NO: 120071 - protein, 9 aa, Homo sapiens
YSWSVNGTF

SEQ ID NO: 120072 - protein, 9 aa, Homo sapiens
SWSVNGTFQ

SEQ ID NO: 120073 - protein, 9 aa, Homo sapiens
WSVNGTFQQ

SEQ ID NO: 120074 - protein, 9 aa, Homo sapiens
SVNGTFQQY

SEQ ID NO: 120075 - protein, 9 aa, Homo sapiens
VNGTFQQYT

SEQ ID NO: 120076 - protein, 9 aa, Homo sapiens
NGTFQQYTQ

SEQ ID NO: 120077 - protein, 9 aa, Homo sapiens
GTFQQYTQK

SEQ ID NO: 120078 - protein, 9 aa, Homo sapiens
TFQQYTQKL

SEQ ID NO: 120079 - protein, 9 aa, Homo sapiens
FQQYTQKLF

SEQ ID NO: 120080 - protein, 9 aa, Homo sapiens
QQYTQKLFI

SEQ ID NO: 120081 - protein, 9 aa, Homo sapiens
QYTQKLFIP

SEQ ID NO: 120082 - protein, 9 aa, Homo sapiens
YTQKLFIPN

SEQ ID NO: 120083 - protein, 9 aa, Homo sapiens
TQKLFIPNI

SEQ ID NO: 120084 - protein, 9 aa, Homo sapiens
QKLFIPNIT

SEQ ID NO: 120085 - protein, 9 aa, Homo sapiens
KLFIPNITT

SEQ ID NO: 120086 - protein, 9 aa, Homo sapiens
LFIPNITTK

SEQ ID NO: 120087 - protein, 9 aa, Homo sapiens
FIPNITTKN

SEQ ID NO: 120088 - protein, 9 aa, Homo sapiens
IPNITTKNS

SEQ ID NO: 120089 - protein, 9 aa, Homo sapiens
PNITTKNSG

SEQ ID NO: 120090 - protein, 9 aa, Homo sapiens
NITTKNSGS

SEQ ID NO: 120091 - protein, 9 aa, Homo sapiens
ITTKNSGSY

SEQ ID NO: 120092 - protein, 9 aa, Homo sapiens
TTKNSGSYA

SEQ ID NO: 120093 - protein, 9 aa, Homo sapiens
TKNSGSYAC

SEQ ID NO: 120094 - protein, 9 aa, Homo sapiens
KNSGSYACH

SEQ ID NO: 120095 - protein, 9 aa, Homo sapiens
NSGSYACHT

SEQ ID NO: 120096 - protein, 9 aa, Homo sapiens
SGSYACHTT

SEQ ID NO: 120097 - protein, 9 aa, Homo sapiens
GSYACHTTN

SEQ ID NO: 120098 - protein, 9 aa, Homo sapiens
SYACHTTNS

SEQ ID NO: 120099 - protein, 9 aa, Homo sapiens
YACHTTNSA

SEQ ID NO: 120100 - protein, 9 aa, Homo sapiens
ACHTTNSAT

SEQ ID NO: 120101 - protein, 9 aa, Homo sapiens
CHTTNSATG

SEQ ID NO: 120102 - protein, 9 aa, Homo sapiens
HTTNSATGR

SEQ ID NO: 120103 - protein, 9 aa, Homo sapiens
TTNSATGRN

SEQ ID NO: 120104 - protein, 9 aa, Homo sapiens
TNSATGRNR

SEQ ID NO: 120105 - protein, 9 aa, Homo sapiens
NSATGRNRT

SEQ ID NO: 120106 - protein, 9 aa, Homo sapiens
SATGRNRTT

SEQ ID NO: 120107 - protein, 9 aa, Homo sapiens
ATGRNRTTV

SEQ ID NO: 120108 - protein, 9 aa, Homo sapiens
TGRNRTTVR

SEQ ID NO: 120109 - protein, 9 aa, Homo sapiens
GRNRTTVRM

SEQ ID NO: 120110 - protein, 9 aa, Homo sapiens
RNRTTVRMI

SEQ ID NO: 120111 - protein, 9 aa, Homo sapiens
NRTTVRMIT

SEQ ID NO: 120112 - protein, 9 aa, Homo sapiens
RTTVRMITV

SEQ ID NO: 120113 - protein, 9 aa, Homo sapiens
TTVRMITVS

SEQ ID NO: 120114 - protein, 9 aa, Homo sapiens
TVRMITVSD

SEQ ID NO: 120115 - protein, 9 aa, Homo sapiens
VRMITVSDA

SEQ ID NO: 120116 - protein, 9 aa, Homo sapiens
RMITVSDAV

SEQ ID NO: 120117 - protein, 9 aa, Homo sapiens
MITVSDAVV

SEQ ID NO: 120118 - protein, 9 aa, Homo sapiens
ITVSDAVVQ

SEQ ID NO: 120119 - protein, 9 aa, Homo sapiens
TVSDAVVQG

SEQ ID NO: 120120 - protein, 9 aa, Homo sapiens
VSDAVVQGS

SEQ ID NO: 120121 - protein, 9 aa, Homo sapiens
SDAVVQGSS

SEQ ID NO: 120122 - protein, 9 aa, Homo sapiens
DAVVQGSSP

SEQ ID NO: 120123 - protein, 9 aa, Homo sapiens
AVVQGSSPG

SEQ ID NO: 120124 - protein, 9 aa, Homo sapiens
VVQGSSPGL

SEQ ID NO: 120125 - protein, 9 aa, Homo sapiens
VQGSSPGLS

SEQ ID NO: 120126 - protein, 9 aa, Homo sapiens
QGSSPGLSA

SEQ ID NO: 120127 - protein, 9 aa, Homo sapiens
GSSPGLSAR

SEQ ID NO: 120128 - protein, 9 aa, Homo sapiens
SSPGLSARA

SEQ ID NO: 120129 - protein, 9 aa, Homo sapiens
SPGLSARAT

SEQ ID NO: 120130 - protein, 9 aa, Homo sapiens
PGLSARATV

SEQ ID NO: 120131 - protein, 9 aa, Homo sapiens
GLSARATVS

SEQ ID NO: 120132 - protein, 9 aa, Homo sapiens
LSARATVSI

SEQ ID NO: 120133 - protein, 9 aa, Homo sapiens
SARATVSIM

SEQ ID NO: 120134 - protein, 9 aa, Homo sapiens
ARATVSIMI

SEQ ID NO: 120135 - protein, 9 aa, Homo sapiens
RATVSIMIG

SEQ ID NO: 120136 - protein, 9 aa, Homo sapiens
ATVSIMIGV

SEQ ID NO: 120137 - protein, 9 aa, Homo sapiens
TVSIMIGVL

SEQ ID NO: 120138 - protein, 9 aa, Homo sapiens
VSIMIGVLA

SEQ ID NO: 120139 - protein, 9 aa, Homo sapiens
SIMIGVLAR

SEQ ID NO: 120140 - protein, 9 aa, Homo sapiens
IMIGVLARV

SEQ ID NO: 120141 - protein, 9 aa, Homo sapiens
MIGVLARVA

SEQ ID NO: 120142 - protein, 9 aa, Homo sapiens
IGVLARVAL

SEQ ID NO: 120143 - protein, 9 aa, Homo sapiens
GVLARVALI

SEQ ID NO: 120144 - protein, 9 aa, Homo sapiens
MEDYTKIEK

SEQ ID NO: 120145 - protein, 9 aa, Homo sapiens
EDYTKIEKI

SEQ ID NO: 120146 - protein, 9 aa, Homo sapiens
DYTKIEKIG

SEQ ID NO: 120147 - protein, 9 aa, Homo sapiens
YTKIEKIGE

SEQ ID NO: 120148 - protein, 9 aa, Homo sapiens
TKIEKIGEG

SEQ ID NO: 120149 - protein, 9 aa, Homo sapiens
KIEKIGEGT

SEQ ID NO: 120150 - protein, 9 aa, Homo sapiens
IEKIGEGTY

SEQ ID NO: 120151 - protein, 9 aa, Homo sapiens
EKIGEGTYG

SEQ ID NO: 120152 - protein, 9 aa, Homo sapiens
KIGEGTYGV

SEQ ID NO: 120153 - protein, 9 aa, Homo sapiens
IGEGTYGVV

SEQ ID NO: 120154 - protein, 9 aa, Homo sapiens
GEGTYGVVY

SEQ ID NO: 120155 - protein, 9 aa, Homo sapiens
EGTYGVVYK

SEQ ID NO: 120156 - protein, 9 aa, Homo sapiens
GTYGVVYKG

SEQ ID NO: 120157 - protein, 9 aa, Homo sapiens
TYGVVYKGR

SEQ ID NO: 120158 - protein, 9 aa, Homo sapiens
YGVVYKGRH

SEQ ID NO: 120159 - protein, 9 aa, Homo sapiens
GVVYKGRHK

SEQ ID NO: 120160 - protein, 9 aa, Homo sapiens
VVYKGRHKT

SEQ ID NO: 120161 - protein, 9 aa, Homo sapiens
VYKGRHKTT

SEQ ID NO: 120162 - protein, 9 aa, Homo sapiens
YKGRHKTTG

SEQ ID NO: 120163 - protein, 9 aa, Homo sapiens
KGRHKTTGQ

SEQ ID NO: 120164 - protein, 9 aa, Homo sapiens
GRHKTTGQV

SEQ ID NO: 120165 - protein, 9 aa, Homo sapiens
RHKTTGQVV

SEQ ID NO: 120166 - protein, 9 aa, Homo sapiens
HKTTGQVVA

SEQ ID NO: 120167 - protein, 9 aa, Homo sapiens
KTTGQVVAM

SEQ ID NO: 120168 - protein, 9 aa, Homo sapiens
TTGQVVAMK

SEQ ID NO: 120169 - protein, 9 aa, Homo sapiens
TGQVVAMKK

SEQ ID NO: 120170 - protein, 9 aa, Homo sapiens
GQVVAMKKI

SEQ ID NO: 120171 - protein, 9 aa, Homo sapiens
QVVAMKKIR

SEQ ID NO: 120172 - protein, 9 aa, Homo sapiens
VVAMKKIRL

SEQ ID NO: 120173 - protein, 9 aa, Homo sapiens
VAMKKIRLE

SEQ ID NO: 120174 - protein, 9 aa, Homo sapiens
AMKKIRLES

SEQ ID NO: 120175 - protein, 9 aa, Homo sapiens
MKKIRLESE

SEQ ID NO: 120176 - protein, 9 aa, Homo sapiens
KKIRLESEE

SEQ ID NO: 120177 - protein, 9 aa, Homo sapiens
KIRLESEEE

SEQ ID NO: 120178 - protein, 9 aa, Homo sapiens
IRLESEEEG

SEQ ID NO: 120179 - protein, 9 aa, Homo sapiens
RLESEEEGV

SEQ ID NO: 120180 - protein, 9 aa, Homo sapiens
LESEEEGVP

SEQ ID NO: 120181 - protein, 9 aa, Homo sapiens
ESEEEGVPS

SEQ ID NO: 120182 - protein, 9 aa, Homo sapiens
SEEEGVPST

SEQ ID NO: 120183 - protein, 9 aa, Homo sapiens
EEEGVPSTA

SEQ ID NO: 120184 - protein, 9 aa, Homo sapiens
EEGVPSTAI

SEQ ID NO: 120185 - protein, 9 aa, Homo sapiens
EGVPSTAIR

SEQ ID NO: 120186 - protein, 9 aa, Homo sapiens
GVPSTAIRE

SEQ ID NO: 120187 - protein, 9 aa, Homo sapiens
VPSTAIREI

SEQ ID NO: 120188 - protein, 9 aa, Homo sapiens
PSTAIREIS

SEQ ID NO: 120189 - protein, 9 aa, Homo sapiens
STAIREISL

SEQ ID NO: 120190 - protein, 9 aa, Homo sapiens
TAIREISLL

SEQ ID NO: 120191 - protein, 9 aa, Homo sapiens
AIREISLLK

SEQ ID NO: 120192 - protein, 9 aa, Homo sapiens
IREISLLKE

SEQ ID NO: 120193 - protein, 9 aa, Homo sapiens
REISLLKEL

SEQ ID NO: 120194 - protein, 9 aa, Homo sapiens
EISLLKELR

SEQ ID NO: 120195 - protein, 9 aa, Homo sapiens
ISLLKELRH

SEQ ID NO: 120196 - protein, 9 aa, Homo sapiens
SLLKELRHP

SEQ ID NO: 120197 - protein, 9 aa, Homo sapiens
LLKELRHPN

SEQ ID NO: 120198 - protein, 9 aa, Homo sapiens
LKELRHPNI

SEQ ID NO: 120199 - protein, 9 aa, Homo sapiens
KELRHPNIV

SEQ ID NO: 120200 - protein, 9 aa, Homo sapiens
ELRHPNIVS

SEQ ID NO: 120201 - protein, 9 aa, Homo sapiens
LRHPNIVSL

SEQ ID NO: 120202 - protein, 9 aa, Homo sapiens
RHPNIVSLQ

SEQ ID NO: 120203 - protein, 9 aa, Homo sapiens
HPNIVSLQD

SEQ ID NO: 120204 - protein, 9 aa, Homo sapiens
PNIVSLQDV

SEQ ID NO: 120205 - protein, 9 aa, Homo sapiens
NIVSLQDVL

SEQ ID NO: 120206 - protein, 9 aa, Homo sapiens
IVSLQDVLM

SEQ ID NO: 120207 - protein, 9 aa, Homo sapiens
VSLQDVLMQ

SEQ ID NO: 120208 - protein, 9 aa, Homo sapiens
SLQDVLMQD

SEQ ID NO: 120209 - protein, 9 aa, Homo sapiens
LQDVLMQDS

SEQ ID NO: 120210 - protein, 9 aa, Homo sapiens
QDVLMQDSR

SEQ ID NO: 120211 - protein, 9 aa, Homo sapiens
DVLMQDSRL

SEQ ID NO: 120212 - protein, 9 aa, Homo sapiens
VLMQDSRLY

SEQ ID NO: 120213 - protein, 9 aa, Homo sapiens
LMQDSRLYL

SEQ ID NO: 120214 - protein, 9 aa, Homo sapiens
MQDSRLYLI

SEQ ID NO: 120215 - protein, 9 aa, Homo sapiens
QDSRLYLIF

SEQ ID NO: 120216 - protein, 9 aa, Homo sapiens
DSRLYLIFE

SEQ ID NO: 120217 - protein, 9 aa, Homo sapiens
SRLYLIFEF

SEQ ID NO: 120218 - protein, 9 aa, Homo sapiens
RLYLIFEFL

SEQ ID NO: 120219 - protein, 9 aa, Homo sapiens
LYLIFEFLS

SEQ ID NO: 120220 - protein, 9 aa, Homo sapiens
YLIFEFLSM

SEQ ID NO: 120221 - protein, 9 aa, Homo sapiens
LIFEFLSMD

SEQ ID NO: 120222 - protein, 9 aa, Homo sapiens
IFEFLSMDL

SEQ ID NO: 120223 - protein, 9 aa, Homo sapiens
FEFLSMDLK

SEQ ID NO: 120224 - protein, 9 aa, Homo sapiens
EFLSMDLKK

SEQ ID NO: 120225 - protein, 9 aa, Homo sapiens
FLSMDLKKY

SEQ ID NO: 120226 - protein, 9 aa, Homo sapiens
LSMDLKKYL

SEQ ID NO: 120227 - protein, 9 aa, Homo sapiens
SMDLKKYLD

SEQ ID NO: 120228 - protein, 9 aa, Homo sapiens
MDLKKYLDS

SEQ ID NO: 120229 - protein, 9 aa, Homo sapiens
DLKKYLDSI

SEQ ID NO: 120230 - protein, 9 aa, Homo sapiens
LKKYLDSIP

SEQ ID NO: 120231 - protein, 9 aa, Homo sapiens
KKYLDSIPP

SEQ ID NO: 120232 - protein, 9 aa, Homo sapiens
KYLDSIPPG

SEQ ID NO: 120233 - protein, 9 aa, Homo sapiens
YLDSIPPGQ

SEQ ID NO: 120234 - protein, 9 aa, Homo sapiens
LDSIPPGQY

SEQ ID NO: 120235 - protein, 9 aa, Homo sapiens
DSIPPGQYM

SEQ ID NO: 120236 - protein, 9 aa, Homo sapiens
SIPPGQYMD

SEQ ID NO: 120237 - protein, 9 aa, Homo sapiens
IPPGQYMDS

SEQ ID NO: 120238 - protein, 9 aa, Homo sapiens
PPGQYMDSS

SEQ ID NO: 120239 - protein, 9 aa, Homo sapiens
PGQYMDSSL

SEQ ID NO: 120240 - protein, 9 aa, Homo sapiens
GQYMDSSLV

SEQ ID NO: 120241 - protein, 9 aa, Homo sapiens
QYMDSSLVK

SEQ ID NO: 120242 - protein, 9 aa, Homo sapiens
YMDSSLVKS

SEQ ID NO: 120243 - protein, 9 aa, Homo sapiens
MDSSLVKSY

SEQ ID NO: 120244 - protein, 9 aa, Homo sapiens
DSSLVKSYL

SEQ ID NO: 120245 - protein, 9 aa, Homo sapiens
SSLVKSYLY

SEQ ID NO: 120246 - protein, 9 aa, Homo sapiens
SLVKSYLYQ

SEQ ID NO: 120247 - protein, 9 aa, Homo sapiens
LVKSYLYQI

SEQ ID NO: 120248 - protein, 9 aa, Homo sapiens
VKSYLYQIL

SEQ ID NO: 120249 - protein, 9 aa, Homo sapiens
KSYLYQILQ

SEQ ID NO: 120250 - protein, 9 aa, Homo sapiens
SYLYQILQG

SEQ ID NO: 120251 - protein, 9 aa, Homo sapiens
YLYQILQGI

SEQ ID NO: 120252 - protein, 9 aa, Homo sapiens
LYQILQGIV

SEQ ID NO: 120253 - protein, 9 aa, Homo sapiens
YQILQGIVF

SEQ ID NO: 120254 - protein, 9 aa, Homo sapiens
QILQGIVFC

SEQ ID NO: 120255 - protein, 9 aa, Homo sapiens
ILQGIVFCH

SEQ ID NO: 120256 - protein, 9 aa, Homo sapiens
LQGIVFCHS

SEQ ID NO: 120257 - protein, 9 aa, Homo sapiens
QGIVFCHSR

SEQ ID NO: 120258 - protein, 9 aa, Homo sapiens
GIVFCHSRR

SEQ ID NO: 120259 - protein, 9 aa, Homo sapiens
IVFCHSRRV

SEQ ID NO: 120260 - protein, 9 aa, Homo sapiens
VFCHSRRVL

SEQ ID NO: 120261 - protein, 9 aa, Homo sapiens
FCHSRRVLH

SEQ ID NO: 120262 - protein, 9 aa, Homo sapiens
CHSRRVLHR

SEQ ID NO: 120263 - protein, 9 aa, Homo sapiens
HSRRVLHRD

SEQ ID NO: 120264 - protein, 9 aa, Homo sapiens
SRRVLHRDL

SEQ ID NO: 120265 - protein, 9 aa, Homo sapiens
RRVLHRDLK

SEQ ID NO: 120266 - protein, 9 aa, Homo sapiens
RVLHRDLKP

SEQ ID NO: 120267 - protein, 9 aa, Homo sapiens
VLHRDLKPQ

SEQ ID NO: 120268 - protein, 9 aa, Homo sapiens
LHRDLKPQN

SEQ ID NO: 120269 - protein, 9 aa, Homo sapiens
HRDLKPQNL

SEQ ID NO: 120270 - protein, 9 aa, Homo sapiens
RDLKPQNLL

SEQ ID NO: 120271 - protein, 9 aa, Homo sapiens
DLKPQNLLI

SEQ ID NO: 120272 - protein, 9 aa, Homo sapiens
LKPQNLLID

SEQ ID NO: 120273 - protein, 9 aa, Homo sapiens
KPQNLLIDD

SEQ ID NO: 120274 - protein, 9 aa, Homo sapiens
PQNLLIDDK

SEQ ID NO: 120275 - protein, 9 aa, Homo sapiens
QNLLIDDKG

SEQ ID NO: 120276 - protein, 9 aa, Homo sapiens
NLLIDDKGT

SEQ ID NO: 120277 - protein, 9 aa, Homo sapiens
LLIDDKGTI

SEQ ID NO: 120278 - protein, 9 aa, Homo sapiens
LIDDKGTIK

SEQ ID NO: 120279 - protein, 9 aa, Homo sapiens
IDDKGTIKL

SEQ ID NO: 120280 - protein, 9 aa, Homo sapiens
DDKGTIKLA

SEQ ID NO: 120281 - protein, 9 aa, Homo sapiens
DKGTIKLAD

SEQ ID NO: 120282 - protein, 9 aa, Homo sapiens
KGTIKLADF

SEQ ID NO: 120283 - protein, 9 aa, Homo sapiens
GTIKLADFG

SEQ ID NO: 120284 - protein, 9 aa, Homo sapiens
TIKLADFGL

SEQ ID NO: 120285 - protein, 9 aa, Homo sapiens
IKLADFGLA

SEQ ID NO: 120286 - protein, 9 aa, Homo sapiens
KLADFGLAR

SEQ ID NO: 120287 - protein, 9 aa, Homo sapiens
LADFGLARA

SEQ ID NO: 120288 - protein, 9 aa, Homo sapiens
ADFGLARAF

SEQ ID NO: 120289 - protein, 9 aa, Homo sapiens
DFGLARAFG

SEQ ID NO: 120290 - protein, 9 aa, Homo sapiens
FGLARAFGI

SEQ ID NO: 120291 - protein, 9 aa, Homo sapiens
GLARAFGIP

SEQ ID NO: 120292 - protein, 9 aa, Homo sapiens
LARAFGIPI

SEQ ID NO: 120293 - protein, 9 aa, Homo sapiens
ARAFGIPIR

SEQ ID NO: 120294 - protein, 9 aa, Homo sapiens
RAFGIPIRV

SEQ ID NO: 120295 - protein, 9 aa, Homo sapiens
AFGIPIRVY

SEQ ID NO: 120296 - protein, 9 aa, Homo sapiens
FGIPIRVYT

SEQ ID NO: 120297 - protein, 9 aa, Homo sapiens
GIPIRVYTH

SEQ ID NO: 120298 - protein, 9 aa, Homo sapiens
IPIRVYTHE

SEQ ID NO: 120299 - protein, 9 aa, Homo sapiens
PIRVYTHEV

SEQ ID NO: 120300 - protein, 9 aa, Homo sapiens
IRVYTHEVV

SEQ ID NO: 120301 - protein, 9 aa, Homo sapiens
RVYTHEVVT

SEQ ID NO: 120302 - protein, 9 aa, Homo sapiens
VYTHEVVTL

SEQ ID NO: 120303 - protein, 9 aa, Homo sapiens
YTHEVVTLW

SEQ ID NO: 120304 - protein, 9 aa, Homo sapiens
THEVVTLWY

SEQ ID NO: 120305 - protein, 9 aa, Homo sapiens
HEVVTLWYR

SEQ ID NO: 120306 - protein, 9 aa, Homo sapiens
EVVTLWYRS

SEQ ID NO: 120307 - protein, 9 aa, Homo sapiens
VVTLWYRSP

SEQ ID NO: 120308 - protein, 9 aa, Homo sapiens
VTLWYRSPE

SEQ ID NO: 120309 - protein, 9 aa, Homo sapiens
TLWYRSPEV

SEQ ID NO: 120310 - protein, 9 aa, Homo sapiens
LWYRSPEVL

SEQ ID NO: 120311 - protein, 9 aa, Homo sapiens
WYRSPEVLL

SEQ ID NO: 120312 - protein, 9 aa, Homo sapiens
YRSPEVLLG

SEQ ID NO: 120313 - protein, 9 aa, Homo sapiens
RSPEVLLGS

SEQ ID NO: 120314 - protein, 9 aa, Homo sapiens
SPEVLLGSA

SEQ ID NO: 120315 - protein, 9 aa, Homo sapiens
PEVLLGSAR

SEQ ID NO: 120316 - protein, 9 aa, Homo sapiens
EVLLGSARY

SEQ ID NO: 120317 - protein, 9 aa, Homo sapiens
VLLGSARYS

SEQ ID NO: 120318 - protein, 9 aa, Homo sapiens
LLGSARYST

SEQ ID NO: 120319 - protein, 9 aa, Homo sapiens
LGSARYSTP

SEQ ID NO: 120320 - protein, 9 aa, Homo sapiens
GSARYSTPV

SEQ ID NO: 120321 - protein, 9 aa, Homo sapiens
SARYSTPVD

SEQ ID NO: 120322 - protein, 9 aa, Homo sapiens
ARYSTPVDI

SEQ ID NO: 120323 - protein, 9 aa, Homo sapiens
RYSTPVDIW

SEQ ID NO: 120324 - protein, 9 aa, Homo sapiens
YSTPVDIWS

SEQ ID NO: 120325 - protein, 9 aa, Homo sapiens
STPVDIWSI

SEQ ID NO: 120326 - protein, 9 aa, Homo sapiens
TPVDIWSIG

SEQ ID NO: 120327 - protein, 9 aa, Homo sapiens
PVDIWSIGT

SEQ ID NO: 120328 - protein, 9 aa, Homo sapiens
VDIWSIGTI

SEQ ID NO: 120329 - protein, 9 aa, Homo sapiens
DIWSIGTIF

SEQ ID NO: 120330 - protein, 9 aa, Homo sapiens
IWSIGTIFA

SEQ ID NO: 120331 - protein, 9 aa, Homo sapiens
WSIGTIFAE

SEQ ID NO: 120332 - protein, 9 aa, Homo sapiens
SIGTIFAEL

SEQ ID NO: 120333 - protein, 9 aa, Homo sapiens
IGTIFAELA

SEQ ID NO: 120334 - protein, 9 aa, Homo sapiens
GTIFAELAT

SEQ ID NO: 120335 - protein, 9 aa, Homo sapiens
TIFAELATK

SEQ ID NO: 120336 - protein, 9 aa, Homo sapiens
IFAELATKK

SEQ ID NO: 120337 - protein, 9 aa, Homo sapiens
FAELATKKP

SEQ ID NO: 120338 - protein, 9 aa, Homo sapiens
AELATKKPL

SEQ ID NO: 120339 - protein, 9 aa, Homo sapiens
ELATKKPLF

SEQ ID NO: 120340 - protein, 9 aa, Homo sapiens
LATKKPLFH

SEQ ID NO: 120341 - protein, 9 aa, Homo sapiens
ATKKPLFHG

SEQ ID NO: 120342 - protein, 9 aa, Homo sapiens
TKKPLFHGD

SEQ ID NO: 120343 - protein, 9 aa, Homo sapiens
KKPLFHGDS

SEQ ID NO: 120344 - protein, 9 aa, Homo sapiens
KPLFHGDSE

SEQ ID NO: 120345 - protein, 9 aa, Homo sapiens
PLFHGDSEI

SEQ ID NO: 120346 - protein, 9 aa, Homo sapiens
LFHGDSEID

SEQ ID NO: 120347 - protein, 9 aa, Homo sapiens
FHGDSEIDQ

SEQ ID NO: 120348 - protein, 9 aa, Homo sapiens
HGDSEIDQL

SEQ ID NO: 120349 - protein, 9 aa, Homo sapiens
GDSEIDQLF

SEQ ID NO: 120350 - protein, 9 aa, Homo sapiens
DSEIDQLFR

SEQ ID NO: 120351 - protein, 9 aa, Homo sapiens
SEIDQLFRI

SEQ ID NO: 120352 - protein, 9 aa, Homo sapiens
EIDQLFRIF

SEQ ID NO: 120353 - protein, 9 aa, Homo sapiens
IDQLFRIFR

SEQ ID NO: 120354 - protein, 9 aa, Homo sapiens
DQLFRIFRA

SEQ ID NO: 120355 - protein, 9 aa, Homo sapiens
QLFRIFRAL

SEQ ID NO: 120356 - protein, 9 aa, Homo sapiens
LFRIFRALG

SEQ ID NO: 120357 - protein, 9 aa, Homo sapiens
FRIFRALGT

SEQ ID NO: 120358 - protein, 9 aa, Homo sapiens
RIFRALGTP

SEQ ID NO: 120359 - protein, 9 aa, Homo sapiens
IFRALGTPN

SEQ ID NO: 120360 - protein, 9 aa, Homo sapiens
FRALGTPNN

SEQ ID NO: 120361 - protein, 9 aa, Homo sapiens
RALGTPNNE

SEQ ID NO: 120362 - protein, 9 aa, Homo sapiens
ALGTPNNEV

SEQ ID NO: 120363 - protein, 9 aa, Homo sapiens
LGTPNNEVW

SEQ ID NO: 120364 - protein, 9 aa, Homo sapiens
GTPNNEVWP

SEQ ID NO: 120365 - protein, 9 aa, Homo sapiens
TPNNEVWPE

SEQ ID NO: 120366 - protein, 9 aa, Homo sapiens
PNNEVWPEV

SEQ ID NO: 120367 - protein, 9 aa, Homo sapiens
NNEVWPEVE

SEQ ID NO: 120368 - protein, 9 aa, Homo sapiens
NEVWPEVES

SEQ ID NO: 120369 - protein, 9 aa, Homo sapiens
EVWPEVESL

SEQ ID NO: 120370 - protein, 9 aa, Homo sapiens
VWPEVESLQ

SEQ ID NO: 120371 - protein, 9 aa, Homo sapiens
WPEVESLQD

SEQ ID NO: 120372 - protein, 9 aa, Homo sapiens
PEVESLQDY

SEQ ID NO: 120373 - protein, 9 aa, Homo sapiens
EVESLQDYK

SEQ ID NO: 120374 - protein, 9 aa, Homo sapiens
VESLQDYKN

SEQ ID NO: 120375 - protein, 9 aa, Homo sapiens
ESLQDYKNT

SEQ ID NO: 120376 - protein, 9 aa, Homo sapiens
SLQDYKNTF

SEQ ID NO: 120377 - protein, 9 aa, Homo sapiens
LQDYKNTFP

SEQ ID NO: 120378 - protein, 9 aa, Homo sapiens
QDYKNTFPK

SEQ ID NO: 120379 - protein, 9 aa, Homo sapiens
DYKNTFPKW

SEQ ID NO: 120380 - protein, 9 aa, Homo sapiens
YKNTFPKWK

SEQ ID NO: 120381 - protein, 9 aa, Homo sapiens
KNTFPKWKP

SEQ ID NO: 120382 - protein, 9 aa, Homo sapiens
NTFPKWKPG

SEQ ID NO: 120383 - protein, 9 aa, Homo sapiens
TFPKWKPGS

SEQ ID NO: 120384 - protein, 9 aa, Homo sapiens
FPKWKPGSL

SEQ ID NO: 120385 - protein, 9 aa, Homo sapiens
PKWKPGSLA

SEQ ID NO: 120386 - protein, 9 aa, Homo sapiens
KWKPGSLAS

SEQ ID NO: 120387 - protein, 9 aa, Homo sapiens
WKPGSLASH

SEQ ID NO: 120388 - protein, 9 aa, Homo sapiens
KPGSLASHV

SEQ ID NO: 120389 - protein, 9 aa, Homo sapiens
PGSLASHVK

SEQ ID NO: 120390 - protein, 9 aa, Homo sapiens
GSLASHVKN

SEQ ID NO: 120391 - protein, 9 aa, Homo sapiens
SLASHVKNL

SEQ ID NO: 120392 - protein, 9 aa, Homo sapiens
LASHVKNLD

SEQ ID NO: 120393 - protein, 9 aa, Homo sapiens
ASHVKNLDE

SEQ ID NO: 120394 - protein, 9 aa, Homo sapiens
SHVKNLDEN

SEQ ID NO: 120395 - protein, 9 aa, Homo sapiens
HVKNLDENG

SEQ ID NO: 120396 - protein, 9 aa, Homo sapiens
VKNLDENGL

SEQ ID NO: 120397 - protein, 9 aa, Homo sapiens
KNLDENGLD

SEQ ID NO: 120398 - protein, 9 aa, Homo sapiens
NLDENGLDL

SEQ ID NO: 120399 - protein, 9 aa, Homo sapiens
LDENGLDLL

SEQ ID NO: 120400 - protein, 9 aa, Homo sapiens
DENGLDLLS

SEQ ID NO: 120401 - protein, 9 aa, Homo sapiens
ENGLDLLSK

SEQ ID NO: 120402 - protein, 9 aa, Homo sapiens
NGLDLLSKM

SEQ ID NO: 120403 - protein, 9 aa, Homo sapiens
GLDLLSKML

SEQ ID NO: 120404 - protein, 9 aa, Homo sapiens
LDLLSKMLI

SEQ ID NO: 120405 - protein, 9 aa, Homo sapiens
DLLSKMLIY

SEQ ID NO: 120406 - protein, 9 aa, Homo sapiens
LLSKMLIYD

SEQ ID NO: 120407 - protein, 9 aa, Homo sapiens
LSKMLIYDP

SEQ ID NO: 120408 - protein, 9 aa, Homo sapiens
SKMLIYDPA

SEQ ID NO: 120409 - protein, 9 aa, Homo sapiens
KMLIYDPAK

SEQ ID NO: 120410 - protein, 9 aa, Homo sapiens
MLIYDPAKR

SEQ ID NO: 120411 - protein, 9 aa, Homo sapiens
LIYDPAKRI

SEQ ID NO: 120412 - protein, 9 aa, Homo sapiens
IYDPAKRIS

SEQ ID NO: 120413 - protein, 9 aa, Homo sapiens
YDPAKRISG

SEQ ID NO: 120414 - protein, 9 aa, Homo sapiens
DPAKRISGK

SEQ ID NO: 120415 - protein, 9 aa, Homo sapiens
PAKRISGKM

SEQ ID NO: 120416 - protein, 9 aa, Homo sapiens
AKRISGKMA

SEQ ID NO: 120417 - protein, 9 aa, Homo sapiens
KRISGKMAL

SEQ ID NO: 120418 - protein, 9 aa, Homo sapiens
RISGKMALN

SEQ ID NO: 120419 - protein, 9 aa, Homo sapiens
ISGKMALNH

SEQ ID NO: 120420 - protein, 9 aa, Homo sapiens
SGKMALNHP

SEQ ID NO: 120421 - protein, 9 aa, Homo sapiens
GKMALNHPY

SEQ ID NO: 120422 - protein, 9 aa, Homo sapiens
KMALNHPYF

SEQ ID NO: 120423 - protein, 9 aa, Homo sapiens
MALNHPYFN

SEQ ID NO: 120424 - protein, 9 aa, Homo sapiens
ALNHPYFND

SEQ ID NO: 120425 - protein, 9 aa, Homo sapiens
LNHPYFNDL

SEQ ID NO: 120426 - protein, 9 aa, Homo sapiens
NHPYFNDLD

SEQ ID NO: 120427 - protein, 9 aa, Homo sapiens
HPYFNDLDN

SEQ ID NO: 120428 - protein, 9 aa, Homo sapiens
PYFNDLDNQ

SEQ ID NO: 120429 - protein, 9 aa, Homo sapiens
YFNDLDNQI

SEQ ID NO: 120430 - protein, 9 aa, Homo sapiens
FNDLDNQIK

SEQ ID NO: 120431 - protein, 9 aa, Homo sapiens
NDLDNQIKK

SEQ ID NO: 120432 - protein, 9 aa, Homo sapiens
DLDNQIKKM

SEQ ID NO: 120433 - protein, 9 aa, Homo sapiens
MTEYKLVVV

SEQ ID NO: 120434 - protein, 9 aa, Homo sapiens
TEYKLVVVG

SEQ ID NO: 120435 - protein, 9 aa, Homo sapiens
EYKLVVVGA

SEQ ID NO: 120436 - protein, 9 aa, Homo sapiens
YKLVVVGAG

SEQ ID NO: 120437 - protein, 9 aa, Homo sapiens
KLVVVGAGG

SEQ ID NO: 120438 - protein, 9 aa, Homo sapiens
LVVVGAGGV

SEQ ID NO: 120439 - protein, 9 aa, Homo sapiens
VVVGAGGVG

SEQ ID NO: 120440 - protein, 9 aa, Homo sapiens
VVGAGGVGK

SEQ ID NO: 120441 - protein, 9 aa, Homo sapiens
VGAGGVGKS

SEQ ID NO: 120442 - protein, 9 aa, Homo sapiens
GAGGVGKSA

SEQ ID NO: 120443 - protein, 9 aa, Homo sapiens
AGGVGKSAL

SEQ ID NO: 120444 - protein, 9 aa, Homo sapiens
GGVGKSALT

SEQ ID NO: 120445 - protein, 9 aa, Homo sapiens
GVGKSALTI

SEQ ID NO: 120446 - protein, 9 aa, Homo sapiens
VGKSALTIQ

SEQ ID NO: 120447 - protein, 9 aa, Homo sapiens
GKSALTIQL

SEQ ID NO: 120448 - protein, 9 aa, Homo sapiens
KSALTIQLI

SEQ ID NO: 120449 - protein, 9 aa, Homo sapiens
SALTIQLIQ

SEQ ID NO: 120450 - protein, 9 aa, Homo sapiens
ALTIQLIQN

SEQ ID NO: 120451 - protein, 9 aa, Homo sapiens
LTIQLIQNH

SEQ ID NO: 120452 - protein, 9 aa, Homo sapiens
TIQLIQNHF

SEQ ID NO: 120453 - protein, 9 aa, Homo sapiens
IQLIQNHFV

SEQ ID NO: 120454 - protein, 9 aa, Homo sapiens
QLIQNHFVD

SEQ ID NO: 120455 - protein, 9 aa, Homo sapiens
LIQNHFVDE

SEQ ID NO: 120456 - protein, 9 aa, Homo sapiens
IQNHFVDEY

SEQ ID NO: 120457 - protein, 9 aa, Homo sapiens
QNHFVDEYD

SEQ ID NO: 120458 - protein, 9 aa, Homo sapiens
NHFVDEYDP

SEQ ID NO: 120459 - protein, 9 aa, Homo sapiens
HFVDEYDPT

SEQ ID NO: 120460 - protein, 9 aa, Homo sapiens
FVDEYDPTI

SEQ ID NO: 120461 - protein, 9 aa, Homo sapiens
VDEYDPTIE

SEQ ID NO: 120462 - protein, 9 aa, Homo sapiens
DEYDPTIED

SEQ ID NO: 120463 - protein, 9 aa, Homo sapiens
EYDPTIEDS

SEQ ID NO: 120464 - protein, 9 aa, Homo sapiens
YDPTIEDSY

SEQ ID NO: 120465 - protein, 9 aa, Homo sapiens
DPTIEDSYR

SEQ ID NO: 120466 - protein, 9 aa, Homo sapiens
PTIEDSYRK

SEQ ID NO: 120467 - protein, 9 aa, Homo sapiens
TIEDSYRKQ

SEQ ID NO: 120468 - protein, 9 aa, Homo sapiens
IEDSYRKQV

SEQ ID NO: 120469 - protein, 9 aa, Homo sapiens
EDSYRKQVV

SEQ ID NO: 120470 - protein, 9 aa, Homo sapiens
DSYRKQVVI

SEQ ID NO: 120471 - protein, 9 aa, Homo sapiens
SYRKQVVID

SEQ ID NO: 120472 - protein, 9 aa, Homo sapiens
YRKQVVIDG

SEQ ID NO: 120473 - protein, 9 aa, Homo sapiens
RKQVVIDGE

SEQ ID NO: 120474 - protein, 9 aa, Homo sapiens
KQVVIDGET

SEQ ID NO: 120475 - protein, 9 aa, Homo sapiens
QVVIDGETC

SEQ ID NO: 120476 - protein, 9 aa, Homo sapiens
VVIDGETCL

SEQ ID NO: 120477 - protein, 9 aa, Homo sapiens
VIDGETCLL

SEQ ID NO: 120478 - protein, 9 aa, Homo sapiens
IDGETCLLD

SEQ ID NO: 120479 - protein, 9 aa, Homo sapiens
DGETCLLDI

SEQ ID NO: 120480 - protein, 9 aa, Homo sapiens
GETCLLDIL

SEQ ID NO: 120481 - protein, 9 aa, Homo sapiens
ETCLLDILD

SEQ ID NO: 120482 - protein, 9 aa, Homo sapiens
TCLLDILDT

SEQ ID NO: 120483 - protein, 9 aa, Homo sapiens
CLLDILDTA

SEQ ID NO: 120484 - protein, 9 aa, Homo sapiens
LLDILDTAG

SEQ ID NO: 120485 - protein, 9 aa, Homo sapiens
LDILDTAGQ

SEQ ID NO: 120486 - protein, 9 aa, Homo sapiens
DILDTAGQE

SEQ ID NO: 120487 - protein, 9 aa, Homo sapiens
ILDTAGQEE

SEQ ID NO: 120488 - protein, 9 aa, Homo sapiens
LDTAGQEEY

SEQ ID NO: 120489 - protein, 9 aa, Homo sapiens
DTAGQEEYS

SEQ ID NO: 120490 - protein, 9 aa, Homo sapiens
TAGQEEYSA

SEQ ID NO: 120491 - protein, 9 aa, Homo sapiens
AGQEEYSAM

SEQ ID NO: 120492 - protein, 9 aa, Homo sapiens
GQEEYSAMR

SEQ ID NO: 120493 - protein, 9 aa, Homo sapiens
QEEYSAMRD

SEQ ID NO: 120494 - protein, 9 aa, Homo sapiens
EEYSAMRDQ

SEQ ID NO: 120495 - protein, 9 aa, Homo sapiens
EYSAMRDQY

SEQ ID NO: 120496 - protein, 9 aa, Homo sapiens
YSAMRDQYM

SEQ ID NO: 120497 - protein, 9 aa, Homo sapiens
SAMRDQYMR

SEQ ID NO: 120498 - protein, 9 aa, Homo sapiens
AMRDQYMRT

SEQ ID NO: 120499 - protein, 9 aa, Homo sapiens
MRDQYMRTG

SEQ ID NO: 120500 - protein, 9 aa, Homo sapiens
RDQYMRTGE

SEQ ID NO: 120501 - protein, 9 aa, Homo sapiens
DQYMRTGEG

SEQ ID NO: 120502 - protein, 9 aa, Homo sapiens
QYMRTGEGF

SEQ ID NO: 120503 - protein, 9 aa, Homo sapiens
YMRTGEGFL

SEQ ID NO: 120504 - protein, 9 aa, Homo sapiens
MRTGEGFLC

SEQ ID NO: 120505 - protein, 9 aa, Homo sapiens
RTGEGFLCV

SEQ ID NO: 120506 - protein, 9 aa, Homo sapiens
TGEGFLCVF

SEQ ID NO: 120507 - protein, 9 aa, Homo sapiens
GEGFLCVFA

SEQ ID NO: 120508 - protein, 9 aa, Homo sapiens
EGFLCVFAI

SEQ ID NO: 120509 - protein, 9 aa, Homo sapiens
GFLCVFAIN

SEQ ID NO: 120510 - protein, 9 aa, Homo sapiens
FLCVFAINN

SEQ ID NO: 120511 - protein, 9 aa, Homo sapiens
LCVFAINNT

SEQ ID NO: 120512 - protein, 9 aa, Homo sapiens
CVFAINNTK

SEQ ID NO: 120513 - protein, 9 aa, Homo sapiens
VFAINNTKS

SEQ ID NO: 120514 - protein, 9 aa, Homo sapiens
FAINNTKSF

SEQ ID NO: 120515 - protein, 9 aa, Homo sapiens
AINNTKSFE

SEQ ID NO: 120516 - protein, 9 aa, Homo sapiens
INNTKSFED

SEQ ID NO: 120517 - protein, 9 aa, Homo sapiens
NNTKSFEDI

SEQ ID NO: 120518 - protein, 9 aa, Homo sapiens
NTKSFEDIH

SEQ ID NO: 120519 - protein, 9 aa, Homo sapiens
TKSFEDIHQ

SEQ ID NO: 120520 - protein, 9 aa, Homo sapiens
KSFEDIHQY

SEQ ID NO: 120521 - protein, 9 aa, Homo sapiens
SFEDIHQYR

SEQ ID NO: 120522 - protein, 9 aa, Homo sapiens
FEDIHQYRE

SEQ ID NO: 120523 - protein, 9 aa, Homo sapiens
EDIHQYREQ

SEQ ID NO: 120524 - protein, 9 aa, Homo sapiens
DIHQYREQI

SEQ ID NO: 120525 - protein, 9 aa, Homo sapiens
IHQYREQIK

SEQ ID NO: 120526 - protein, 9 aa, Homo sapiens
HQYREQIKR

SEQ ID NO: 120527 - protein, 9 aa, Homo sapiens
QYREQIKRV

SEQ ID NO: 120528 - protein, 9 aa, Homo sapiens
YREQIKRVK

SEQ ID NO: 120529 - protein, 9 aa, Homo sapiens
REQIKRVKD

SEQ ID NO: 120530 - protein, 9 aa, Homo sapiens
EQIKRVKDS

SEQ ID NO: 120531 - protein, 9 aa, Homo sapiens
QIKRVKDSD

SEQ ID NO: 120532 - protein, 9 aa, Homo sapiens
IKRVKDSDD

SEQ ID NO: 120533 - protein, 9 aa, Homo sapiens
KRVKDSDDV

SEQ ID NO: 120534 - protein, 9 aa, Homo sapiens
RVKDSDDVP

SEQ ID NO: 120535 - protein, 9 aa, Homo sapiens
VKDSDDVPM

SEQ ID NO: 120536 - protein, 9 aa, Homo sapiens
KDSDDVPMV

SEQ ID NO: 120537 - protein, 9 aa, Homo sapiens
DSDDVPMVL

SEQ ID NO: 120538 - protein, 9 aa, Homo sapiens
SDDVPMVLV

SEQ ID NO: 120539 - protein, 9 aa, Homo sapiens
DDVPMVLVG

SEQ ID NO: 120540 - protein, 9 aa, Homo sapiens
DVPMVLVGN

SEQ ID NO: 120541 - protein, 9 aa, Homo sapiens
VPMVLVGNK

SEQ ID NO: 120542 - protein, 9 aa, Homo sapiens
PMVLVGNKC

SEQ ID NO: 120543 - protein, 9 aa, Homo sapiens
MVLVGNKCD

SEQ ID NO: 120544 - protein, 9 aa, Homo sapiens
VLVGNKCDL

SEQ ID NO: 120545 - protein, 9 aa, Homo sapiens
LVGNKCDLA

SEQ ID NO: 120546 - protein, 9 aa, Homo sapiens
VGNKCDLAA

SEQ ID NO: 120547 - protein, 9 aa, Homo sapiens
GNKCDLAAR

SEQ ID NO: 120548 - protein, 9 aa, Homo sapiens
NKCDLAART

SEQ ID NO: 120549 - protein, 9 aa, Homo sapiens
KCDLAARTV

SEQ ID NO: 120550 - protein, 9 aa, Homo sapiens
CDLAARTVE

SEQ ID NO: 120551 - protein, 9 aa, Homo sapiens
DLAARTVES

SEQ ID NO: 120552 - protein, 9 aa, Homo sapiens
LAARTVESR

SEQ ID NO: 120553 - protein, 9 aa, Homo sapiens
AARTVESRQ

SEQ ID NO: 120554 - protein, 9 aa, Homo sapiens
ARTVESRQA

SEQ ID NO: 120555 - protein, 9 aa, Homo sapiens
RTVESRQAQ

SEQ ID NO: 120556 - protein, 9 aa, Homo sapiens
TVESRQAQD

SEQ ID NO: 120557 - protein, 9 aa, Homo sapiens
VESRQAQDL

SEQ ID NO: 120558 - protein, 9 aa, Homo sapiens
ESRQAQDLA

SEQ ID NO: 120559 - protein, 9 aa, Homo sapiens
SRQAQDLAR

SEQ ID NO: 120560 - protein, 9 aa, Homo sapiens
RQAQDLARS

SEQ ID NO: 120561 - protein, 9 aa, Homo sapiens
QAQDLARSY

SEQ ID NO: 120562 - protein, 9 aa, Homo sapiens
AQDLARSYG

SEQ ID NO: 120563 - protein, 9 aa, Homo sapiens
QDLARSYGI

SEQ ID NO: 120564 - protein, 9 aa, Homo sapiens
DLARSYGIP

SEQ ID NO: 120565 - protein, 9 aa, Homo sapiens
LARSYGIPY

SEQ ID NO: 120566 - protein, 9 aa, Homo sapiens
ARSYGIPYI

SEQ ID NO: 120567 - protein, 9 aa, Homo sapiens
RSYGIPYIE

SEQ ID NO: 120568 - protein, 9 aa, Homo sapiens
SYGIPYIET

SEQ ID NO: 120569 - protein, 9 aa, Homo sapiens
YGIPYIETS

SEQ ID NO: 120570 - protein, 9 aa, Homo sapiens
GIPYIETSA

SEQ ID NO: 120571 - protein, 9 aa, Homo sapiens
IPYIETSAK

SEQ ID NO: 120572 - protein, 9 aa, Homo sapiens
PYIETSAKT

SEQ ID NO: 120573 - protein, 9 aa, Homo sapiens
YIETSAKTR

SEQ ID NO: 120574 - protein, 9 aa, Homo sapiens
IETSAKTRQ

SEQ ID NO: 120575 - protein, 9 aa, Homo sapiens
ETSAKTRQG

SEQ ID NO: 120576 - protein, 9 aa, Homo sapiens
TSAKTRQGV

SEQ ID NO: 120577 - protein, 9 aa, Homo sapiens
SAKTRQGVE

SEQ ID NO: 120578 - protein, 9 aa, Homo sapiens
AKTRQGVED

SEQ ID NO: 120579 - protein, 9 aa, Homo sapiens
KTRQGVEDA

SEQ ID NO: 120580 - protein, 9 aa, Homo sapiens
TRQGVEDAF

SEQ ID NO: 120581 - protein, 9 aa, Homo sapiens
RQGVEDAFY

SEQ ID NO: 120582 - protein, 9 aa, Homo sapiens
QGVEDAFYT

SEQ ID NO: 120583 - protein, 9 aa, Homo sapiens
GVEDAFYTL

SEQ ID NO: 120584 - protein, 9 aa, Homo sapiens
VEDAFYTLV

SEQ ID NO: 120585 - protein, 9 aa, Homo sapiens
EDAFYTLVR

SEQ ID NO: 120586 - protein, 9 aa, Homo sapiens
DAFYTLVRE

SEQ ID NO: 120587 - protein, 9 aa, Homo sapiens
AFYTLVREI

SEQ ID NO: 120588 - protein, 9 aa, Homo sapiens
FYTLVREIR

SEQ ID NO: 120589 - protein, 9 aa, Homo sapiens
YTLVREIRQ

SEQ ID NO: 120590 - protein, 9 aa, Homo sapiens
TLVREIRQH

SEQ ID NO: 120591 - protein, 9 aa, Homo sapiens
LVREIRQHK

SEQ ID NO: 120592 - protein, 9 aa, Homo sapiens
VREIRQHKL

SEQ ID NO: 120593 - protein, 9 aa, Homo sapiens
REIRQHKLR

SEQ ID NO: 120594 - protein, 9 aa, Homo sapiens
EIRQHKLRK

SEQ ID NO: 120595 - protein, 9 aa, Homo sapiens
IRQHKLRKL

SEQ ID NO: 120596 - protein, 9 aa, Homo sapiens
VATWMLEVC

SEQ ID NO: 120597 - protein, 9 aa, Homo sapiens
ATWMLEVCE

SEQ ID NO: 120598 - protein, 9 aa, Homo sapiens
TWMLEVCEE

SEQ ID NO: 120599 - protein, 9 aa, Homo sapiens
WMLEVCEEQ

SEQ ID NO: 120600 - protein, 9 aa, Homo sapiens
MLEVCEEQK

SEQ ID NO: 120601 - protein, 9 aa, Homo sapiens
LEVCEEQKC

SEQ ID NO: 120602 - protein, 9 aa, Homo sapiens
EVCEEQKCE

SEQ ID NO: 120603 - protein, 9 aa, Homo sapiens
VCEEQKCEE

SEQ ID NO: 120604 - protein, 9 aa, Homo sapiens
CEEQKCEEE

SEQ ID NO: 120605 - protein, 9 aa, Homo sapiens
EEQKCEEEV

SEQ ID NO: 120606 - protein, 9 aa, Homo sapiens
EQKCEEEVF

SEQ ID NO: 120607 - protein, 9 aa, Homo sapiens
QKCEEEVFP

SEQ ID NO: 120608 - protein, 9 aa, Homo sapiens
KCEEEVFPL

SEQ ID NO: 120609 - protein, 9 aa, Homo sapiens
CEEEVFPLA

SEQ ID NO: 120610 - protein, 9 aa, Homo sapiens
EEEVFPLAM

SEQ ID NO: 120611 - protein, 9 aa, Homo sapiens
EEVFPLAMN

SEQ ID NO: 120612 - protein, 9 aa, Homo sapiens
EVFPLAMNY

SEQ ID NO: 120613 - protein, 9 aa, Homo sapiens
VFPLAMNYL

SEQ ID NO: 120614 - protein, 9 aa, Homo sapiens
FPLAMNYLD

SEQ ID NO: 120615 - protein, 9 aa, Homo sapiens
PLAMNYLDR

SEQ ID NO: 120616 - protein, 9 aa, Homo sapiens
LAMNYLDRF

SEQ ID NO: 120617 - protein, 9 aa, Homo sapiens
AMNYLDRFL

SEQ ID NO: 120618 - protein, 9 aa, Homo sapiens
MNYLDRFLS

SEQ ID NO: 120619 - protein, 9 aa, Homo sapiens
NYLDRFLSL

SEQ ID NO: 120620 - protein, 9 aa, Homo sapiens
YLDRFLSLE

SEQ ID NO: 120621 - protein, 9 aa, Homo sapiens
LDRFLSLEP

SEQ ID NO: 120622 - protein, 9 aa, Homo sapiens
DRFLSLEPV

SEQ ID NO: 120623 - protein, 9 aa, Homo sapiens
RFLSLEPVK

SEQ ID NO: 120624 - protein, 9 aa, Homo sapiens
FLSLEPVKK

SEQ ID NO: 120625 - protein, 9 aa, Homo sapiens
LSLEPVKKS

SEQ ID NO: 120626 - protein, 9 aa, Homo sapiens
SLEPVKKSR

SEQ ID NO: 120627 - protein, 9 aa, Homo sapiens
LEPVKKSRL

SEQ ID NO: 120628 - protein, 9 aa, Homo sapiens
EPVKKSRLQ

SEQ ID NO: 120629 - protein, 9 aa, Homo sapiens
PVKKSRLQL

SEQ ID NO: 120630 - protein, 9 aa, Homo sapiens
VKKSRLQLL

SEQ ID NO: 120631 - protein, 9 aa, Homo sapiens
KKSRLQLLG

SEQ ID NO: 120632 - protein, 9 aa, Homo sapiens
KSRLQLLGA

SEQ ID NO: 120633 - protein, 9 aa, Homo sapiens
SRLQLLGAT

SEQ ID NO: 120634 - protein, 9 aa, Homo sapiens
RLQLLGATC

SEQ ID NO: 120635 - protein, 9 aa, Homo sapiens
LQLLGATCM

SEQ ID NO: 120636 - protein, 9 aa, Homo sapiens
QLLGATCMF

SEQ ID NO: 120637 - protein, 9 aa, Homo sapiens
LLGATCMFV

SEQ ID NO: 120638 - protein, 9 aa, Homo sapiens
LGATCMFVA

SEQ ID NO: 120639 - protein, 9 aa, Homo sapiens
GATCMFVAS

SEQ ID NO: 120640 - protein, 9 aa, Homo sapiens
ATCMFVASK

SEQ ID NO: 120641 - protein, 9 aa, Homo sapiens
TCMFVASKM

SEQ ID NO: 120642 - protein, 9 aa, Homo sapiens
CMFVASKMK

SEQ ID NO: 120643 - protein, 9 aa, Homo sapiens
MFVASKMKE

SEQ ID NO: 120644 - protein, 9 aa, Homo sapiens
FVASKMKET

SEQ ID NO: 120645 - protein, 9 aa, Homo sapiens
VASKMKETI

SEQ ID NO: 120646 - protein, 9 aa, Homo sapiens
ASKMKETIP

SEQ ID NO: 120647 - protein, 9 aa, Homo sapiens
SKMKETIPL

SEQ ID NO: 120648 - protein, 9 aa, Homo sapiens
KMKETIPLT

SEQ ID NO: 120649 - protein, 9 aa, Homo sapiens
MKETIPLTA

SEQ ID NO: 120650 - protein, 9 aa, Homo sapiens
KETIPLTAE

SEQ ID NO: 120651 - protein, 9 aa, Homo sapiens
ETIPLTAEK

SEQ ID NO: 120652 - protein, 9 aa, Homo sapiens
TIPLTAEKL

SEQ ID NO: 120653 - protein, 9 aa, Homo sapiens
IPLTAEKLC

SEQ ID NO: 120654 - protein, 9 aa, Homo sapiens
PLTAEKLCI

SEQ ID NO: 120655 - protein, 9 aa, Homo sapiens
LTAEKLCIY

SEQ ID NO: 120656 - protein, 9 aa, Homo sapiens
TAEKLCIYT

SEQ ID NO: 120657 - protein, 9 aa, Homo sapiens
AEKLCIYTD

SEQ ID NO: 120658 - protein, 9 aa, Homo sapiens
EKLCIYTDN

SEQ ID NO: 120659 - protein, 9 aa, Homo sapiens
KLCIYTDNS

SEQ ID NO: 120660 - protein, 9 aa, Homo sapiens
LCIYTDNSI

SEQ ID NO: 120661 - protein, 9 aa, Homo sapiens
CIYTDNSIR

SEQ ID NO: 120662 - protein, 9 aa, Homo sapiens
IYTDNSIRP

SEQ ID NO: 120663 - protein, 9 aa, Homo sapiens
YTDNSIRPE

SEQ ID NO: 120664 - protein, 9 aa, Homo sapiens
TDNSIRPEE

SEQ ID NO: 120665 - protein, 9 aa, Homo sapiens
DNSIRPEEL

SEQ ID NO: 120666 - protein, 9 aa, Homo sapiens
NSIRPEELL

SEQ ID NO: 120667 - protein, 9 aa, Homo sapiens
SIRPEELLQ

SEQ ID NO: 120668 - protein, 9 aa, Homo sapiens
IRPEELLQM

SEQ ID NO: 120669 - protein, 9 aa, Homo sapiens
RPEELLQME

SEQ ID NO: 120670 - protein, 9 aa, Homo sapiens
PEELLQMEL

SEQ ID NO: 120671 - protein, 9 aa, Homo sapiens
EELLQMELL

SEQ ID NO: 120672 - protein, 9 aa, Homo sapiens
ELLQMELLL

SEQ ID NO: 120673 - protein, 9 aa, Homo sapiens
LLQMELLLV

SEQ ID NO: 120674 - protein, 9 aa, Homo sapiens
LQMELLLVN

SEQ ID NO: 120675 - protein, 9 aa, Homo sapiens
QMELLLVNK

SEQ ID NO: 120676 - protein, 9 aa, Homo sapiens
MELLLVNKL

SEQ ID NO: 120677 - protein, 9 aa, Homo sapiens
ELLLVNKLK

SEQ ID NO: 120678 - protein, 9 aa, Homo sapiens
LLLVNKLKW

SEQ ID NO: 120679 - protein, 9 aa, Homo sapiens
LLVNKLKWN

SEQ ID NO: 120680 - protein, 9 aa, Homo sapiens
LVNKLKWNL

SEQ ID NO: 120681 - protein, 9 aa, Homo sapiens
VNKLKWNLA

SEQ ID NO: 120682 - protein, 9 aa, Homo sapiens
NKLKWNLAA

SEQ ID NO: 120683 - protein, 9 aa, Homo sapiens
KLKWNLAAM

SEQ ID NO: 120684 - protein, 9 aa, Homo sapiens
LKWNLAAMT

SEQ ID NO: 120685 - protein, 9 aa, Homo sapiens
KWNLAAMTP

SEQ ID NO: 120686 - protein, 9 aa, Homo sapiens
WNLAAMTPH

SEQ ID NO: 120687 - protein, 9 aa, Homo sapiens
NLAAMTPHD

SEQ ID NO: 120688 - protein, 9 aa, Homo sapiens
LAAMTPHDF

SEQ ID NO: 120689 - protein, 9 aa, Homo sapiens
AAMTPHDFI

SEQ ID NO: 120690 - protein, 9 aa, Homo sapiens
AMTPHDFIE

SEQ ID NO: 120691 - protein, 9 aa, Homo sapiens
MTPHDFIEH

SEQ ID NO: 120692 - protein, 9 aa, Homo sapiens
TPHDFIEHF

SEQ ID NO: 120693 - protein, 9 aa, Homo sapiens
PHDFIEHFL

SEQ ID NO: 120694 - protein, 9 aa, Homo sapiens
HDFIEHFLS

SEQ ID NO: 120695 - protein, 9 aa, Homo sapiens
DFIEHFLSK

SEQ ID NO: 120696 - protein, 9 aa, Homo sapiens
FIEHFLSKM

SEQ ID NO: 120697 - protein, 9 aa, Homo sapiens
IEHFLSKMP

SEQ ID NO: 120698 - protein, 9 aa, Homo sapiens
EHFLSKMPE

SEQ ID NO: 120699 - protein, 9 aa, Homo sapiens
HFLSKMPEA

SEQ ID NO: 120700 - protein, 9 aa, Homo sapiens
FLSKMPEAE

SEQ ID NO: 120701 - protein, 9 aa, Homo sapiens
LSKMPEAEE

SEQ ID NO: 120702 - protein, 9 aa, Homo sapiens
SKMPEAEEN

SEQ ID NO: 120703 - protein, 9 aa, Homo sapiens
KMPEAEENK

SEQ ID NO: 120704 - protein, 9 aa, Homo sapiens
MPEAEENKQ

SEQ ID NO: 120705 - protein, 9 aa, Homo sapiens
PEAEENKQI

SEQ ID NO: 120706 - protein, 9 aa, Homo sapiens
EAEENKQII

SEQ ID NO: 120707 - protein, 9 aa, Homo sapiens
AEENKQIIR

SEQ ID NO: 120708 - protein, 9 aa, Homo sapiens
EENKQIIRK

SEQ ID NO: 120709 - protein, 9 aa, Homo sapiens
ENKQIIRKH

SEQ ID NO: 120710 - protein, 9 aa, Homo sapiens
NKQIIRKHA

SEQ ID NO: 120711 - protein, 9 aa, Homo sapiens
KQIIRKHAQ

SEQ ID NO: 120712 - protein, 9 aa, Homo sapiens
QIIRKHAQT

SEQ ID NO: 120713 - protein, 9 aa, Homo sapiens
IIRKHAQTF

SEQ ID NO: 120714 - protein, 9 aa, Homo sapiens
IRKHAQTFV

SEQ ID NO: 120715 - protein, 9 aa, Homo sapiens
RKHAQTFVA

SEQ ID NO: 120716 - protein, 9 aa, Homo sapiens
KHAQTFVAL

SEQ ID NO: 120717 - protein, 9 aa, Homo sapiens
HAQTFVALC

SEQ ID NO: 120718 - protein, 9 aa, Homo sapiens
AQTFVALCA

SEQ ID NO: 120719 - protein, 9 aa, Homo sapiens
QTFVALCAT

SEQ ID NO: 120720 - protein, 9 aa, Homo sapiens
TFVALCATD

SEQ ID NO: 120721 - protein, 9 aa, Homo sapiens
FVALCATDV

SEQ ID NO: 120722 - protein, 9 aa, Homo sapiens
VALCATDVK

SEQ ID NO: 120723 - protein, 9 aa, Homo sapiens
ALCATDVKF

SEQ ID NO: 120724 - protein, 9 aa, Homo sapiens
LCATDVKFI

SEQ ID NO: 120725 - protein, 9 aa, Homo sapiens
CATDVKFIS

SEQ ID NO: 120726 - protein, 9 aa, Homo sapiens
ATDVKFISN

SEQ ID NO: 120727 - protein, 9 aa, Homo sapiens
TDVKFISNP

SEQ ID NO: 120728 - protein, 9 aa, Homo sapiens
DVKFISNPP

SEQ ID NO: 120729 - protein, 9 aa, Homo sapiens
VKFISNPPS

SEQ ID NO: 120730 - protein, 9 aa, Homo sapiens
KFISNPPSM

SEQ ID NO: 120731 - protein, 9 aa, Homo sapiens
FISNPPSMV

SEQ ID NO: 120732 - protein, 9 aa, Homo sapiens
ISNPPSMVA

SEQ ID NO: 120733 - protein, 9 aa, Homo sapiens
SNPPSMVAA

SEQ ID NO: 120734 - protein, 9 aa, Homo sapiens
NPPSMVAAG

SEQ ID NO: 120735 - protein, 9 aa, Homo sapiens
PPSMVAAGS

SEQ ID NO: 120736 - protein, 9 aa, Homo sapiens
PSMVAAGSV

SEQ ID NO: 120737 - protein, 9 aa, Homo sapiens
SMVAAGSVV

SEQ ID NO: 120738 - protein, 9 aa, Homo sapiens
MVAAGSVVA

SEQ ID NO: 120739 - protein, 9 aa, Homo sapiens
VAAGSVVAA

SEQ ID NO: 120740 - protein, 9 aa, Homo sapiens
AAGSVVAAV

SEQ ID NO: 120741 - protein, 9 aa, Homo sapiens
AGSVVAAVQ

SEQ ID NO: 120742 - protein, 9 aa, Homo sapiens
GSVVAAVQG

SEQ ID NO: 120743 - protein, 9 aa, Homo sapiens
SVVAAVQGL

SEQ ID NO: 120744 - protein, 9 aa, Homo sapiens
VVAAVQGLN

SEQ ID NO: 120745 - protein, 9 aa, Homo sapiens
VAAVQGLNL

SEQ ID NO: 120746 - protein, 9 aa, Homo sapiens
AAVQGLNLR

SEQ ID NO: 120747 - protein, 9 aa, Homo sapiens
AVQGLNLRS

SEQ ID NO: 120748 - protein, 9 aa, Homo sapiens
VQGLNLRSP

SEQ ID NO: 120749 - protein, 9 aa, Homo sapiens
QGLNLRSPN

SEQ ID NO: 120750 - protein, 9 aa, Homo sapiens
GLNLRSPNN

SEQ ID NO: 120751 - protein, 9 aa, Homo sapiens
LNLRSPNNF

SEQ ID NO: 120752 - protein, 9 aa, Homo sapiens
NLRSPNNFL

SEQ ID NO: 120753 - protein, 9 aa, Homo sapiens
LRSPNNFLS

SEQ ID NO: 120754 - protein, 9 aa, Homo sapiens
RSPNNFLSY

SEQ ID NO: 120755 - protein, 9 aa, Homo sapiens
SPNNFLSYY

SEQ ID NO: 120756 - protein, 9 aa, Homo sapiens
PNNFLSYYR

SEQ ID NO: 120757 - protein, 9 aa, Homo sapiens
NNFLSYYRL

SEQ ID NO: 120758 - protein, 9 aa, Homo sapiens
NFLSYYRLT

SEQ ID NO: 120759 - protein, 9 aa, Homo sapiens
FLSYYRLTR

SEQ ID NO: 120760 - protein, 9 aa, Homo sapiens
LSYYRLTRF

SEQ ID NO: 120761 - protein, 9 aa, Homo sapiens
SYYRLTRFL

SEQ ID NO: 120762 - protein, 9 aa, Homo sapiens
YYRLTRFLS

SEQ ID NO: 120763 - protein, 9 aa, Homo sapiens
YRLTRFLSR

SEQ ID NO: 120764 - protein, 9 aa, Homo sapiens
RLTRFLSRV

SEQ ID NO: 120765 - protein, 9 aa, Homo sapiens
LTRFLSRVI

SEQ ID NO: 120766 - protein, 9 aa, Homo sapiens
TRFLSRVIK

SEQ ID NO: 120767 - protein, 9 aa, Homo sapiens
RFLSRVIKC

SEQ ID NO: 120768 - protein, 9 aa, Homo sapiens
FLSRVIKCD

SEQ ID NO: 120769 - protein, 9 aa, Homo sapiens
LSRVIKCDP

SEQ ID NO: 120770 - protein, 9 aa, Homo sapiens
SRVIKCDPD

SEQ ID NO: 120771 - protein, 9 aa, Homo sapiens
RVIKCDPDC

SEQ ID NO: 120772 - protein, 9 aa, Homo sapiens
VIKCDPDCL

SEQ ID NO: 120773 - protein, 9 aa, Homo sapiens
IKCDPDCLR

SEQ ID NO: 120774 - protein, 9 aa, Homo sapiens
KCDPDCLRA

SEQ ID NO: 120775 - protein, 9 aa, Homo sapiens
CDPDCLRAC

SEQ ID NO: 120776 - protein, 9 aa, Homo sapiens
DPDCLRACQ

SEQ ID NO: 120777 - protein, 9 aa, Homo sapiens
PDCLRACQE

SEQ ID NO: 120778 - protein, 9 aa, Homo sapiens
DCLRACQEQ

SEQ ID NO: 120779 - protein, 9 aa, Homo sapiens
CLRACQEQI

SEQ ID NO: 120780 - protein, 9 aa, Homo sapiens
LRACQEQIE

SEQ ID NO: 120781 - protein, 9 aa, Homo sapiens
RACQEQIEA

SEQ ID NO: 120782 - protein, 9 aa, Homo sapiens
ACQEQIEAL

SEQ ID NO: 120783 - protein, 9 aa, Homo sapiens
CQEQIEALL

SEQ ID NO: 120784 - protein, 9 aa, Homo sapiens
QEQIEALLE

SEQ ID NO: 120785 - protein, 9 aa, Homo sapiens
EQIEALLES

SEQ ID NO: 120786 - protein, 9 aa, Homo sapiens
QIEALLESS

SEQ ID NO: 120787 - protein, 9 aa, Homo sapiens
IEALLESSL

SEQ ID NO: 120788 - protein, 9 aa, Homo sapiens
EALLESSLR

SEQ ID NO: 120789 - protein, 9 aa, Homo sapiens
ALLESSLRQ

SEQ ID NO: 120790 - protein, 9 aa, Homo sapiens
LLESSLRQA

SEQ ID NO: 120791 - protein, 9 aa, Homo sapiens
LESSLRQAQ

SEQ ID NO: 120792 - protein, 9 aa, Homo sapiens
ESSLRQAQQ

SEQ ID NO: 120793 - protein, 9 aa, Homo sapiens
SSLRQAQQN

SEQ ID NO: 120794 - protein, 9 aa, Homo sapiens
SLRQAQQNM

SEQ ID NO: 120795 - protein, 9 aa, Homo sapiens
LRQAQQNMD

SEQ ID NO: 120796 - protein, 9 aa, Homo sapiens
RQAQQNMDP

SEQ ID NO: 120797 - protein, 9 aa, Homo sapiens
QAQQNMDPK

SEQ ID NO: 120798 - protein, 9 aa, Homo sapiens
AQQNMDPKA

SEQ ID NO: 120799 - protein, 9 aa, Homo sapiens
QQNMDPKAA

SEQ ID NO: 120800 - protein, 9 aa, Homo sapiens
QNMDPKAAE

SEQ ID NO: 120801 - protein, 9 aa, Homo sapiens
NMDPKAAEE

SEQ ID NO: 120802 - protein, 9 aa, Homo sapiens
MDPKAAEEE

SEQ ID NO: 120803 - protein, 9 aa, Homo sapiens
DPKAAEEEE

SEQ ID NO: 120804 - protein, 9 aa, Homo sapiens
PKAAEEEEE

SEQ ID NO: 120805 - protein, 9 aa, Homo sapiens
KAAEEEEEE

SEQ ID NO: 120806 - protein, 9 aa, Homo sapiens
AAEEEEEEE

SEQ ID NO: 120807 - protein, 9 aa, Homo sapiens
AEEEEEEEE

SEQ ID NO: 120808 - protein, 9 aa, Homo sapiens
EEEEEEEEE

SEQ ID NO: 120809 - protein, 9 aa, Homo sapiens
EEEEEEEEV

SEQ ID NO: 120810 - protein, 9 aa, Homo sapiens
EEEEEEEVD

SEQ ID NO: 120811 - protein, 9 aa, Homo sapiens
EEEEEEVDL

SEQ ID NO: 120812 - protein, 9 aa, Homo sapiens
EEEEEVDLA

SEQ ID NO: 120813 - protein, 9 aa, Homo sapiens
EEEEVDLAC

SEQ ID NO: 120814 - protein, 9 aa, Homo sapiens
EEEVDLACT

SEQ ID NO: 120815 - protein, 9 aa, Homo sapiens
EEVDLACTP

SEQ ID NO: 120816 - protein, 9 aa, Homo sapiens
EVDLACTPT

SEQ ID NO: 120817 - protein, 9 aa, Homo sapiens
VDLACTPTD

SEQ ID NO: 120818 - protein, 9 aa, Homo sapiens
DLACTPTDV

SEQ ID NO: 120819 - protein, 9 aa, Homo sapiens
LACTPTDVR

SEQ ID NO: 120820 - protein, 9 aa, Homo sapiens
ACTPTDVRD

SEQ ID NO: 120821 - protein, 9 aa, Homo sapiens
CTPTDVRDV

SEQ ID NO: 120822 - protein, 9 aa, Homo sapiens
TPTDVRDVD

SEQ ID NO: 120823 - protein, 9 aa, Homo sapiens
PTDVRDVDI

SEQ ID NO: 120824 - protein, 9 aa, Homo sapiens
MGTSLSPND

SEQ ID NO: 120825 - protein, 9 aa, Homo sapiens
GTSLSPNDP

SEQ ID NO: 120826 - protein, 9 aa, Homo sapiens
TSLSPNDPW

SEQ ID NO: 120827 - protein, 9 aa, Homo sapiens
SLSPNDPWP

SEQ ID NO: 120828 - protein, 9 aa, Homo sapiens
LSPNDPWPL

SEQ ID NO: 120829 - protein, 9 aa, Homo sapiens
SPNDPWPLN

SEQ ID NO: 120830 - protein, 9 aa, Homo sapiens
PNDPWPLNP

SEQ ID NO: 120831 - protein, 9 aa, Homo sapiens
NDPWPLNPL

SEQ ID NO: 120832 - protein, 9 aa, Homo sapiens
DPWPLNPLS

SEQ ID NO: 120833 - protein, 9 aa, Homo sapiens
PWPLNPLSI

SEQ ID NO: 120834 - protein, 9 aa, Homo sapiens
WPLNPLSIQ

SEQ ID NO: 120835 - protein, 9 aa, Homo sapiens
PLNPLSIQQ

SEQ ID NO: 120836 - protein, 9 aa, Homo sapiens
LNPLSIQQT

SEQ ID NO: 120837 - protein, 9 aa, Homo sapiens
NPLSIQQTT

SEQ ID NO: 120838 - protein, 9 aa, Homo sapiens
PLSIQQTTL

SEQ ID NO: 120839 - protein, 9 aa, Homo sapiens
LSIQQTTLL

SEQ ID NO: 120840 - protein, 9 aa, Homo sapiens
SIQQTTLLL

SEQ ID NO: 120841 - protein, 9 aa, Homo sapiens
IQQTTLLLL

SEQ ID NO: 120842 - protein, 9 aa, Homo sapiens
QQTTLLLLL

SEQ ID NO: 120843 - protein, 9 aa, Homo sapiens
QTTLLLLLS

SEQ ID NO: 120844 - protein, 9 aa, Homo sapiens
TTLLLLLSV

SEQ ID NO: 120845 - protein, 9 aa, Homo sapiens
TLLLLLSVL

SEQ ID NO: 120846 - protein, 9 aa, Homo sapiens
LLLLLSVLA

SEQ ID NO: 120847 - protein, 9 aa, Homo sapiens
LLLLSVLAT

SEQ ID NO: 120848 - protein, 9 aa, Homo sapiens
LLLSVLATV

SEQ ID NO: 120849 - protein, 9 aa, Homo sapiens
LLSVLATVH

SEQ ID NO: 120850 - protein, 9 aa, Homo sapiens
LSVLATVHV

SEQ ID NO: 120851 - protein, 9 aa, Homo sapiens
SVLATVHVG

SEQ ID NO: 120852 - protein, 9 aa, Homo sapiens
VLATVHVGQ

SEQ ID NO: 120853 - protein, 9 aa, Homo sapiens
LATVHVGQR

SEQ ID NO: 120854 - protein, 9 aa, Homo sapiens
ATVHVGQRL

SEQ ID NO: 120855 - protein, 9 aa, Homo sapiens
TVHVGQRLL

SEQ ID NO: 120856 - protein, 9 aa, Homo sapiens
VHVGQRLLR

SEQ ID NO: 120857 - protein, 9 aa, Homo sapiens
HVGQRLLRQ

SEQ ID NO: 120858 - protein, 9 aa, Homo sapiens
VGQRLLRQR

SEQ ID NO: 120859 - protein, 9 aa, Homo sapiens
GQRLLRQRR

SEQ ID NO: 120860 - protein, 9 aa, Homo sapiens
QRLLRQRRR

SEQ ID NO: 120861 - protein, 9 aa, Homo sapiens
RLLRQRRRQ

SEQ ID NO: 120862 - protein, 9 aa, Homo sapiens
LLRQRRRQL

SEQ ID NO: 120863 - protein, 9 aa, Homo sapiens
LRQRRRQLR

SEQ ID NO: 120864 - protein, 9 aa, Homo sapiens
RQRRRQLRS

SEQ ID NO: 120865 - protein, 9 aa, Homo sapiens
QRRRQLRSA

SEQ ID NO: 120866 - protein, 9 aa, Homo sapiens
RRRQLRSAP

SEQ ID NO: 120867 - protein, 9 aa, Homo sapiens
RRQLRSAPP

SEQ ID NO: 120868 - protein, 9 aa, Homo sapiens
RQLRSAPPG

SEQ ID NO: 120869 - protein, 9 aa, Homo sapiens
QLRSAPPGP

SEQ ID NO: 120870 - protein, 9 aa, Homo sapiens
LRSAPPGPF

SEQ ID NO: 120871 - protein, 9 aa, Homo sapiens
RSAPPGPFA

SEQ ID NO: 120872 - protein, 9 aa, Homo sapiens
SAPPGPFAW

SEQ ID NO: 120873 - protein, 9 aa, Homo sapiens
APPGPFAWP

SEQ ID NO: 120874 - protein, 9 aa, Homo sapiens
PPGPFAWPL

SEQ ID NO: 120875 - protein, 9 aa, Homo sapiens
PGPFAWPLI

SEQ ID NO: 120876 - protein, 9 aa, Homo sapiens
GPFAWPLIG

SEQ ID NO: 120877 - protein, 9 aa, Homo sapiens
PFAWPLIGN

SEQ ID NO: 120878 - protein, 9 aa, Homo sapiens
FAWPLIGNA

SEQ ID NO: 120879 - protein, 9 aa, Homo sapiens
AWPLIGNAA

SEQ ID NO: 120880 - protein, 9 aa, Homo sapiens
WPLIGNAAA

SEQ ID NO: 120881 - protein, 9 aa, Homo sapiens
PLIGNAAAV

SEQ ID NO: 120882 - protein, 9 aa, Homo sapiens
LIGNAAAVG

SEQ ID NO: 120883 - protein, 9 aa, Homo sapiens
IGNAAAVGQ

SEQ ID NO: 120884 - protein, 9 aa, Homo sapiens
GNAAAVGQA

SEQ ID NO: 120885 - protein, 9 aa, Homo sapiens
NAAAVGQAA

SEQ ID NO: 120886 - protein, 9 aa, Homo sapiens
AAAVGQAAH

SEQ ID NO: 120887 - protein, 9 aa, Homo sapiens
AAVGQAAHL

SEQ ID NO: 120888 - protein, 9 aa, Homo sapiens
AVGQAAHLS

SEQ ID NO: 120889 - protein, 9 aa, Homo sapiens
VGQAAHLSF

SEQ ID NO: 120890 - protein, 9 aa, Homo sapiens
GQAAHLSFA

SEQ ID NO: 120891 - protein, 9 aa, Homo sapiens
QAAHLSFAR

SEQ ID NO: 120892 - protein, 9 aa, Homo sapiens
AAHLSFARL

SEQ ID NO: 120893 - protein, 9 aa, Homo sapiens
AHLSFARLA

SEQ ID NO: 120894 - protein, 9 aa, Homo sapiens
HLSFARLAR

SEQ ID NO: 120895 - protein, 9 aa, Homo sapiens
LSFARLARR

SEQ ID NO: 120896 - protein, 9 aa, Homo sapiens
SFARLARRY

SEQ ID NO: 120897 - protein, 9 aa, Homo sapiens
FARLARRYG

SEQ ID NO: 120898 - protein, 9 aa, Homo sapiens
ARLARRYGD

SEQ ID NO: 120899 - protein, 9 aa, Homo sapiens
RLARRYGDV

SEQ ID NO: 120900 - protein, 9 aa, Homo sapiens
LARRYGDVF

SEQ ID NO: 120901 - protein, 9 aa, Homo sapiens
ARRYGDVFQ

SEQ ID NO: 120902 - protein, 9 aa, Homo sapiens
RRYGDVFQI

SEQ ID NO: 120903 - protein, 9 aa, Homo sapiens
RYGDVFQIR

SEQ ID NO: 120904 - protein, 9 aa, Homo sapiens
YGDVFQIRL

SEQ ID NO: 120905 - protein, 9 aa, Homo sapiens
GDVFQIRLG

SEQ ID NO: 120906 - protein, 9 aa, Homo sapiens
DVFQIRLGS

SEQ ID NO: 120907 - protein, 9 aa, Homo sapiens
VFQIRLGSC

SEQ ID NO: 120908 - protein, 9 aa, Homo sapiens
FQIRLGSCP

SEQ ID NO: 120909 - protein, 9 aa, Homo sapiens
QIRLGSCPI

SEQ ID NO: 120910 - protein, 9 aa, Homo sapiens
IRLGSCPIV

SEQ ID NO: 120911 - protein, 9 aa, Homo sapiens
RLGSCPIVV

SEQ ID NO: 120912 - protein, 9 aa, Homo sapiens
LGSCPIVVL

SEQ ID NO: 120913 - protein, 9 aa, Homo sapiens
GSCPIVVLN

SEQ ID NO: 120914 - protein, 9 aa, Homo sapiens
SCPIVVLNG

SEQ ID NO: 120915 - protein, 9 aa, Homo sapiens
CPIVVLNGE

SEQ ID NO: 120916 - protein, 9 aa, Homo sapiens
PIVVLNGER

SEQ ID NO: 120917 - protein, 9 aa, Homo sapiens
IVVLNGERA

SEQ ID NO: 120918 - protein, 9 aa, Homo sapiens
VVLNGERAI

SEQ ID NO: 120919 - protein, 9 aa, Homo sapiens
VLNGERAIH

SEQ ID NO: 120920 - protein, 9 aa, Homo sapiens
LNGERAIHQ

SEQ ID NO: 120921 - protein, 9 aa, Homo sapiens
NGERAIHQA

SEQ ID NO: 120922 - protein, 9 aa, Homo sapiens
GERAIHQAL

SEQ ID NO: 120923 - protein, 9 aa, Homo sapiens
ERAIHQALV

SEQ ID NO: 120924 - protein, 9 aa, Homo sapiens
RAIHQALVQ

SEQ ID NO: 120925 - protein, 9 aa, Homo sapiens
AIHQALVQQ

SEQ ID NO: 120926 - protein, 9 aa, Homo sapiens
IHQALVQQG

SEQ ID NO: 120927 - protein, 9 aa, Homo sapiens
HQALVQQGS

SEQ ID NO: 120928 - protein, 9 aa, Homo sapiens
QALVQQGSA

SEQ ID NO: 120929 - protein, 9 aa, Homo sapiens
ALVQQGSAF

SEQ ID NO: 120930 - protein, 9 aa, Homo sapiens
LVQQGSAFA

SEQ ID NO: 120931 - protein, 9 aa, Homo sapiens
VQQGSAFAD

SEQ ID NO: 120932 - protein, 9 aa, Homo sapiens
QQGSAFADR

SEQ ID NO: 120933 - protein, 9 aa, Homo sapiens
QGSAFADRP

SEQ ID NO: 120934 - protein, 9 aa, Homo sapiens
GSAFADRPA

SEQ ID NO: 120935 - protein, 9 aa, Homo sapiens
SAFADRPAF

SEQ ID NO: 120936 - protein, 9 aa, Homo sapiens
AFADRPAFA

SEQ ID NO: 120937 - protein, 9 aa, Homo sapiens
FADRPAFAS

SEQ ID NO: 120938 - protein, 9 aa, Homo sapiens
ADRPAFASF

SEQ ID NO: 120939 - protein, 9 aa, Homo sapiens
DRPAFASFR

SEQ ID NO: 120940 - protein, 9 aa, Homo sapiens
RPAFASFRV

SEQ ID NO: 120941 - protein, 9 aa, Homo sapiens
PAFASFRVV

SEQ ID NO: 120942 - protein, 9 aa, Homo sapiens
AFASFRVVS

SEQ ID NO: 120943 - protein, 9 aa, Homo sapiens
FASFRVVSG

SEQ ID NO: 120944 - protein, 9 aa, Homo sapiens
ASFRVVSGG

SEQ ID NO: 120945 - protein, 9 aa, Homo sapiens
SFRVVSGGR

SEQ ID NO: 120946 - protein, 9 aa, Homo sapiens
FRVVSGGRS

SEQ ID NO: 120947 - protein, 9 aa, Homo sapiens
RVVSGGRSM

SEQ ID NO: 120948 - protein, 9 aa, Homo sapiens
VVSGGRSMA

SEQ ID NO: 120949 - protein, 9 aa, Homo sapiens
VSGGRSMAF

SEQ ID NO: 120950 - protein, 9 aa, Homo sapiens
SGGRSMAFG

SEQ ID NO: 120951 - protein, 9 aa, Homo sapiens
GGRSMAFGH

SEQ ID NO: 120952 - protein, 9 aa, Homo sapiens
GRSMAFGHY

SEQ ID NO: 120953 - protein, 9 aa, Homo sapiens
RSMAFGHYS

SEQ ID NO: 120954 - protein, 9 aa, Homo sapiens
SMAFGHYSE

SEQ ID NO: 120955 - protein, 9 aa, Homo sapiens
MAFGHYSEH

SEQ ID NO: 120956 - protein, 9 aa, Homo sapiens
AFGHYSEHW

SEQ ID NO: 120957 - protein, 9 aa, Homo sapiens
FGHYSEHWK

SEQ ID NO: 120958 - protein, 9 aa, Homo sapiens
GHYSEHWKV

SEQ ID NO: 120959 - protein, 9 aa, Homo sapiens
HYSEHWKVQ

SEQ ID NO: 120960 - protein, 9 aa, Homo sapiens
YSEHWKVQR

SEQ ID NO: 120961 - protein, 9 aa, Homo sapiens
SEHWKVQRR

SEQ ID NO: 120962 - protein, 9 aa, Homo sapiens
EHWKVQRRA

SEQ ID NO: 120963 - protein, 9 aa, Homo sapiens
HWKVQRRAA

SEQ ID NO: 120964 - protein, 9 aa, Homo sapiens
WKVQRRAAH

SEQ ID NO: 120965 - protein, 9 aa, Homo sapiens
KVQRRAAHS

SEQ ID NO: 120966 - protein, 9 aa, Homo sapiens
VQRRAAHSM

SEQ ID NO: 120967 - protein, 9 aa, Homo sapiens
QRRAAHSMM

SEQ ID NO: 120968 - protein, 9 aa, Homo sapiens
RRAAHSMMR

SEQ ID NO: 120969 - protein, 9 aa, Homo sapiens
RAAHSMMRN

SEQ ID NO: 120970 - protein, 9 aa, Homo sapiens
AAHSMMRNF

SEQ ID NO: 120971 - protein, 9 aa, Homo sapiens
AHSMMRNFF

SEQ ID NO: 120972 - protein, 9 aa, Homo sapiens
HSMMRNFFT

SEQ ID NO: 120973 - protein, 9 aa, Homo sapiens
SMMRNFFTR

SEQ ID NO: 120974 - protein, 9 aa, Homo sapiens
MMRNFFTRQ

SEQ ID NO: 120975 - protein, 9 aa, Homo sapiens
MRNFFTRQP

SEQ ID NO: 120976 - protein, 9 aa, Homo sapiens
RNFFTRQPR

SEQ ID NO: 120977 - protein, 9 aa, Homo sapiens
NFFTRQPRS

SEQ ID NO: 120978 - protein, 9 aa, Homo sapiens
FFTRQPRSR

SEQ ID NO: 120979 - protein, 9 aa, Homo sapiens
FTRQPRSRQ

SEQ ID NO: 120980 - protein, 9 aa, Homo sapiens
TRQPRSRQV

SEQ ID NO: 120981 - protein, 9 aa, Homo sapiens
RQPRSRQVL

SEQ ID NO: 120982 - protein, 9 aa, Homo sapiens
QPRSRQVLE

SEQ ID NO: 120983 - protein, 9 aa, Homo sapiens
PRSRQVLEG

SEQ ID NO: 120984 - protein, 9 aa, Homo sapiens
RSRQVLEGH

SEQ ID NO: 120985 - protein, 9 aa, Homo sapiens
SRQVLEGHV

SEQ ID NO: 120986 - protein, 9 aa, Homo sapiens
RQVLEGHVL

SEQ ID NO: 120987 - protein, 9 aa, Homo sapiens
QVLEGHVLS

SEQ ID NO: 120988 - protein, 9 aa, Homo sapiens
VLEGHVLSE

SEQ ID NO: 120989 - protein, 9 aa, Homo sapiens
LEGHVLSEA

SEQ ID NO: 120990 - protein, 9 aa, Homo sapiens
EGHVLSEAR

SEQ ID NO: 120991 - protein, 9 aa, Homo sapiens
GHVLSEARE

SEQ ID NO: 120992 - protein, 9 aa, Homo sapiens
HVLSEAREL

SEQ ID NO: 120993 - protein, 9 aa, Homo sapiens
VLSEARELV

SEQ ID NO: 120994 - protein, 9 aa, Homo sapiens
LSEARELVA

SEQ ID NO: 120995 - protein, 9 aa, Homo sapiens
SEARELVAL

SEQ ID NO: 120996 - protein, 9 aa, Homo sapiens
EARELVALL

SEQ ID NO: 120997 - protein, 9 aa, Homo sapiens
ARELVALLV

SEQ ID NO: 120998 - protein, 9 aa, Homo sapiens
RELVALLVR

SEQ ID NO: 120999 - protein, 9 aa, Homo sapiens
ELVALLVRG

SEQ ID NO: 121000 - protein, 9 aa, Homo sapiens
LVALLVRGS

SEQ ID NO: 121001 - protein, 9 aa, Homo sapiens
VALLVRGSA

SEQ ID NO: 121002 - protein, 9 aa, Homo sapiens
ALLVRGSAD

SEQ ID NO: 121003 - protein, 9 aa, Homo sapiens
LLVRGSADG

SEQ ID NO: 121004 - protein, 9 aa, Homo sapiens
LVRGSADGA

SEQ ID NO: 121005 - protein, 9 aa, Homo sapiens
VRGSADGAF

SEQ ID NO: 121006 - protein, 9 aa, Homo sapiens
RGSADGAFL

SEQ ID NO: 121007 - protein, 9 aa, Homo sapiens
GSADGAFLD

SEQ ID NO: 121008 - protein, 9 aa, Homo sapiens
SADGAFLDP

SEQ ID NO: 121009 - protein, 9 aa, Homo sapiens
ADGAFLDPR

SEQ ID NO: 121010 - protein, 9 aa, Homo sapiens
DGAFLDPRP

SEQ ID NO: 121011 - protein, 9 aa, Homo sapiens
GAFLDPRPL

SEQ ID NO: 121012 - protein, 9 aa, Homo sapiens
AFLDPRPLT

SEQ ID NO: 121013 - protein, 9 aa, Homo sapiens
FLDPRPLTV

SEQ ID NO: 121014 - protein, 9 aa, Homo sapiens
LDPRPLTVV

SEQ ID NO: 121015 - protein, 9 aa, Homo sapiens
DPRPLTVVA

SEQ ID NO: 121016 - protein, 9 aa, Homo sapiens
PRPLTVVAV

SEQ ID NO: 121017 - protein, 9 aa, Homo sapiens
RPLTVVAVA

SEQ ID NO: 121018 - protein, 9 aa, Homo sapiens
PLTVVAVAN

SEQ ID NO: 121019 - protein, 9 aa, Homo sapiens
LTVVAVANV

SEQ ID NO: 121020 - protein, 9 aa, Homo sapiens
TVVAVANVM

SEQ ID NO: 121021 - protein, 9 aa, Homo sapiens
VVAVANVMS

SEQ ID NO: 121022 - protein, 9 aa, Homo sapiens
VAVANVMSA

SEQ ID NO: 121023 - protein, 9 aa, Homo sapiens
AVANVMSAV

SEQ ID NO: 121024 - protein, 9 aa, Homo sapiens
VANVMSAVC

SEQ ID NO: 121025 - protein, 9 aa, Homo sapiens
ANVMSAVCF

SEQ ID NO: 121026 - protein, 9 aa, Homo sapiens
NVMSAVCFG

SEQ ID NO: 121027 - protein, 9 aa, Homo sapiens
VMSAVCFGC

SEQ ID NO: 121028 - protein, 9 aa, Homo sapiens
MSAVCFGCR

SEQ ID NO: 121029 - protein, 9 aa, Homo sapiens
SAVCFGCRY

SEQ ID NO: 121030 - protein, 9 aa, Homo sapiens
AVCFGCRYS

SEQ ID NO: 121031 - protein, 9 aa, Homo sapiens
VCFGCRYSH

SEQ ID NO: 121032 - protein, 9 aa, Homo sapiens
CFGCRYSHD

SEQ ID NO: 121033 - protein, 9 aa, Homo sapiens
FGCRYSHDD

SEQ ID NO: 121034 - protein, 9 aa, Homo sapiens
GCRYSHDDP

SEQ ID NO: 121035 - protein, 9 aa, Homo sapiens
CRYSHDDPE

SEQ ID NO: 121036 - protein, 9 aa, Homo sapiens
RYSHDDPEF

SEQ ID NO: 121037 - protein, 9 aa, Homo sapiens
YSHDDPEFR

SEQ ID NO: 121038 - protein, 9 aa, Homo sapiens
SHDDPEFRE

SEQ ID NO: 121039 - protein, 9 aa, Homo sapiens
HDDPEFREL

SEQ ID NO: 121040 - protein, 9 aa, Homo sapiens
DDPEFRELL

SEQ ID NO: 121041 - protein, 9 aa, Homo sapiens
DPEFRELLS

SEQ ID NO: 121042 - protein, 9 aa, Homo sapiens
PEFRELLSH

SEQ ID NO: 121043 - protein, 9 aa, Homo sapiens
EFRELLSHN

SEQ ID NO: 121044 - protein, 9 aa, Homo sapiens
FRELLSHNE

SEQ ID NO: 121045 - protein, 9 aa, Homo sapiens
RELLSHNEE

SEQ ID NO: 121046 - protein, 9 aa, Homo sapiens
ELLSHNEEF

SEQ ID NO: 121047 - protein, 9 aa, Homo sapiens
LLSHNEEFG

SEQ ID NO: 121048 - protein, 9 aa, Homo sapiens
LSHNEEFGR

SEQ ID NO: 121049 - protein, 9 aa, Homo sapiens
SHNEEFGRT

SEQ ID NO: 121050 - protein, 9 aa, Homo sapiens
HNEEFGRTV

SEQ ID NO: 121051 - protein, 9 aa, Homo sapiens
NEEFGRTVG

SEQ ID NO: 121052 - protein, 9 aa, Homo sapiens
EEFGRTVGA

SEQ ID NO: 121053 - protein, 9 aa, Homo sapiens
EFGRTVGAG

SEQ ID NO: 121054 - protein, 9 aa, Homo sapiens
FGRTVGAGS

SEQ ID NO: 121055 - protein, 9 aa, Homo sapiens
GRTVGAGSL

SEQ ID NO: 121056 - protein, 9 aa, Homo sapiens
RTVGAGSLV

SEQ ID NO: 121057 - protein, 9 aa, Homo sapiens
TVGAGSLVD

SEQ ID NO: 121058 - protein, 9 aa, Homo sapiens
VGAGSLVDV

SEQ ID NO: 121059 - protein, 9 aa, Homo sapiens
GAGSLVDVM

SEQ ID NO: 121060 - protein, 9 aa, Homo sapiens
AGSLVDVMP

SEQ ID NO: 121061 - protein, 9 aa, Homo sapiens
GSLVDVMPW

SEQ ID NO: 121062 - protein, 9 aa, Homo sapiens
SLVDVMPWL

SEQ ID NO: 121063 - protein, 9 aa, Homo sapiens
LVDVMPWLQ

SEQ ID NO: 121064 - protein, 9 aa, Homo sapiens
VDVMPWLQY

SEQ ID NO: 121065 - protein, 9 aa, Homo sapiens
DVMPWLQYF

SEQ ID NO: 121066 - protein, 9 aa, Homo sapiens
VMPWLQYFP

SEQ ID NO: 121067 - protein, 9 aa, Homo sapiens
MPWLQYFPN

SEQ ID NO: 121068 - protein, 9 aa, Homo sapiens
PWLQYFPNP

SEQ ID NO: 121069 - protein, 9 aa, Homo sapiens
WLQYFPNPV

SEQ ID NO: 121070 - protein, 9 aa, Homo sapiens
LQYFPNPVR

SEQ ID NO: 121071 - protein, 9 aa, Homo sapiens
QYFPNPVRT

SEQ ID NO: 121072 - protein, 9 aa, Homo sapiens
YFPNPVRTV

SEQ ID NO: 121073 - protein, 9 aa, Homo sapiens
FPNPVRTVF

SEQ ID NO: 121074 - protein, 9 aa, Homo sapiens
PNPVRTVFR

SEQ ID NO: 121075 - protein, 9 aa, Homo sapiens
NPVRTVFRE

SEQ ID NO: 121076 - protein, 9 aa, Homo sapiens
PVRTVFREF

SEQ ID NO: 121077 - protein, 9 aa, Homo sapiens
VRTVFREFE

SEQ ID NO: 121078 - protein, 9 aa, Homo sapiens
RTVFREFEQ

SEQ ID NO: 121079 - protein, 9 aa, Homo sapiens
TVFREFEQL

SEQ ID NO: 121080 - protein, 9 aa, Homo sapiens
VFREFEQLN

SEQ ID NO: 121081 - protein, 9 aa, Homo sapiens
FREFEQLNR

SEQ ID NO: 121082 - protein, 9 aa, Homo sapiens
REFEQLNRN

SEQ ID NO: 121083 - protein, 9 aa, Homo sapiens
EFEQLNRNF

SEQ ID NO: 121084 - protein, 9 aa, Homo sapiens
FEQLNRNFS

SEQ ID NO: 121085 - protein, 9 aa, Homo sapiens
EQLNRNFSN

SEQ ID NO: 121086 - protein, 9 aa, Homo sapiens
QLNRNFSNF

SEQ ID NO: 121087 - protein, 9 aa, Homo sapiens
LNRNFSNFI

SEQ ID NO: 121088 - protein, 9 aa, Homo sapiens
NRNFSNFIL

SEQ ID NO: 121089 - protein, 9 aa, Homo sapiens
RNFSNFILD

SEQ ID NO: 121090 - protein, 9 aa, Homo sapiens
NFSNFILDK

SEQ ID NO: 121091 - protein, 9 aa, Homo sapiens
FSNFILDKF

SEQ ID NO: 121092 - protein, 9 aa, Homo sapiens
SNFILDKFL

SEQ ID NO: 121093 - protein, 9 aa, Homo sapiens
NFILDKFLR

SEQ ID NO: 121094 - protein, 9 aa, Homo sapiens
FILDKFLRH

SEQ ID NO: 121095 - protein, 9 aa, Homo sapiens
ILDKFLRHC

SEQ ID NO: 121096 - protein, 9 aa, Homo sapiens
LDKFLRHCE

SEQ ID NO: 121097 - protein, 9 aa, Homo sapiens
DKFLRHCES

SEQ ID NO: 121098 - protein, 9 aa, Homo sapiens
KFLRHCESL

SEQ ID NO: 121099 - protein, 9 aa, Homo sapiens
FLRHCESLR

SEQ ID NO: 121100 - protein, 9 aa, Homo sapiens
LRHCESLRP

SEQ ID NO: 121101 - protein, 9 aa, Homo sapiens
RHCESLRPG

SEQ ID NO: 121102 - protein, 9 aa, Homo sapiens
HCESLRPGA

SEQ ID NO: 121103 - protein, 9 aa, Homo sapiens
CESLRPGAA

SEQ ID NO: 121104 - protein, 9 aa, Homo sapiens
ESLRPGAAP

SEQ ID NO: 121105 - protein, 9 aa, Homo sapiens
SLRPGAAPR

SEQ ID NO: 121106 - protein, 9 aa, Homo sapiens
LRPGAAPRD

SEQ ID NO: 121107 - protein, 9 aa, Homo sapiens
RPGAAPRDM

SEQ ID NO: 121108 - protein, 9 aa, Homo sapiens
PGAAPRDMM

SEQ ID NO: 121109 - protein, 9 aa, Homo sapiens
GAAPRDMMD

SEQ ID NO: 121110 - protein, 9 aa, Homo sapiens
AAPRDMMDA

SEQ ID NO: 121111 - protein, 9 aa, Homo sapiens
APRDMMDAF

SEQ ID NO: 121112 - protein, 9 aa, Homo sapiens
PRDMMDAFI

SEQ ID NO: 121113 - protein, 9 aa, Homo sapiens
RDMMDAFIL

SEQ ID NO: 121114 - protein, 9 aa, Homo sapiens
DMMDAFILS

SEQ ID NO: 121115 - protein, 9 aa, Homo sapiens
MMDAFILSA

SEQ ID NO: 121116 - protein, 9 aa, Homo sapiens
MDAFILSAE

SEQ ID NO: 121117 - protein, 9 aa, Homo sapiens
DAFILSAEK

SEQ ID NO: 121118 - protein, 9 aa, Homo sapiens
AFILSAEKK

SEQ ID NO: 121119 - protein, 9 aa, Homo sapiens
FILSAEKKA

SEQ ID NO: 121120 - protein, 9 aa, Homo sapiens
ILSAEKKAA

SEQ ID NO: 121121 - protein, 9 aa, Homo sapiens
LSAEKKAAG

SEQ ID NO: 121122 - protein, 9 aa, Homo sapiens
SAEKKAAGD

SEQ ID NO: 121123 - protein, 9 aa, Homo sapiens
AEKKAAGDS

SEQ ID NO: 121124 - protein, 9 aa, Homo sapiens
EKKAAGDSH

SEQ ID NO: 121125 - protein, 9 aa, Homo sapiens
KKAAGDSHG

SEQ ID NO: 121126 - protein, 9 aa, Homo sapiens
KAAGDSHGG

SEQ ID NO: 121127 - protein, 9 aa, Homo sapiens
AAGDSHGGG

SEQ ID NO: 121128 - protein, 9 aa, Homo sapiens
AGDSHGGGA

SEQ ID NO: 121129 - protein, 9 aa, Homo sapiens
GDSHGGGAR

SEQ ID NO: 121130 - protein, 9 aa, Homo sapiens
DSHGGGARL

SEQ ID NO: 121131 - protein, 9 aa, Homo sapiens
SHGGGARLD

SEQ ID NO: 121132 - protein, 9 aa, Homo sapiens
HGGGARLDL

SEQ ID NO: 121133 - protein, 9 aa, Homo sapiens
GGGARLDLE

SEQ ID NO: 121134 - protein, 9 aa, Homo sapiens
GGARLDLEN

SEQ ID NO: 121135 - protein, 9 aa, Homo sapiens
GARLDLENV

SEQ ID NO: 121136 - protein, 9 aa, Homo sapiens
ARLDLENVP

SEQ ID NO: 121137 - protein, 9 aa, Homo sapiens
RLDLENVPA

SEQ ID NO: 121138 - protein, 9 aa, Homo sapiens
LDLENVPAT

SEQ ID NO: 121139 - protein, 9 aa, Homo sapiens
DLENVPATI

SEQ ID NO: 121140 - protein, 9 aa, Homo sapiens
LENVPATIT

SEQ ID NO: 121141 - protein, 9 aa, Homo sapiens
ENVPATITD

SEQ ID NO: 121142 - protein, 9 aa, Homo sapiens
NVPATITDI

SEQ ID NO: 121143 - protein, 9 aa, Homo sapiens
VPATITDIF

SEQ ID NO: 121144 - protein, 9 aa, Homo sapiens
PATITDIFG

SEQ ID NO: 121145 - protein, 9 aa, Homo sapiens
ATITDIFGA

SEQ ID NO: 121146 - protein, 9 aa, Homo sapiens
TITDIFGAS

SEQ ID NO: 121147 - protein, 9 aa, Homo sapiens
ITDIFGASQ

SEQ ID NO: 121148 - protein, 9 aa, Homo sapiens
TDIFGASQD

SEQ ID NO: 121149 - protein, 9 aa, Homo sapiens
DIFGASQDT

SEQ ID NO: 121150 - protein, 9 aa, Homo sapiens
IFGASQDTL

SEQ ID NO: 121151 - protein, 9 aa, Homo sapiens
FGASQDTLS

SEQ ID NO: 121152 - protein, 9 aa, Homo sapiens
GASQDTLST

SEQ ID NO: 121153 - protein, 9 aa, Homo sapiens
ASQDTLSTA

SEQ ID NO: 121154 - protein, 9 aa, Homo sapiens
SQDTLSTAL

SEQ ID NO: 121155 - protein, 9 aa, Homo sapiens
QDTLSTALQ

SEQ ID NO: 121156 - protein, 9 aa, Homo sapiens
DTLSTALQW

SEQ ID NO: 121157 - protein, 9 aa, Homo sapiens
TLSTALQWL

SEQ ID NO: 121158 - protein, 9 aa, Homo sapiens
LSTALQWLL

SEQ ID NO: 121159 - protein, 9 aa, Homo sapiens
STALQWLLL

SEQ ID NO: 121160 - protein, 9 aa, Homo sapiens
TALQWLLLL

SEQ ID NO: 121161 - protein, 9 aa, Homo sapiens
ALQWLLLLF

SEQ ID NO: 121162 - protein, 9 aa, Homo sapiens
LQWLLLLFT

SEQ ID NO: 121163 - protein, 9 aa, Homo sapiens
QWLLLLFTR

SEQ ID NO: 121164 - protein, 9 aa, Homo sapiens
WLLLLFTRY

SEQ ID NO: 121165 - protein, 9 aa, Homo sapiens
LLLLFTRYP

SEQ ID NO: 121166 - protein, 9 aa, Homo sapiens
LLLFTRYPD

SEQ ID NO: 121167 - protein, 9 aa, Homo sapiens
LLFTRYPDV

SEQ ID NO: 121168 - protein, 9 aa, Homo sapiens
LFTRYPDVQ

SEQ ID NO: 121169 - protein, 9 aa, Homo sapiens
FTRYPDVQT

SEQ ID NO: 121170 - protein, 9 aa, Homo sapiens
TRYPDVQTR

SEQ ID NO: 121171 - protein, 9 aa, Homo sapiens
RYPDVQTRV

SEQ ID NO: 121172 - protein, 9 aa, Homo sapiens
YPDVQTRVQ

SEQ ID NO: 121173 - protein, 9 aa, Homo sapiens
PDVQTRVQA

SEQ ID NO: 121174 - protein, 9 aa, Homo sapiens
DVQTRVQAE

SEQ ID NO: 121175 - protein, 9 aa, Homo sapiens
VQTRVQAEL

SEQ ID NO: 121176 - protein, 9 aa, Homo sapiens
QTRVQAELD

SEQ ID NO: 121177 - protein, 9 aa, Homo sapiens
TRVQAELDQ

SEQ ID NO: 121178 - protein, 9 aa, Homo sapiens
RVQAELDQV

SEQ ID NO: 121179 - protein, 9 aa, Homo sapiens
VQAELDQVV

SEQ ID NO: 121180 - protein, 9 aa, Homo sapiens
QAELDQVVG

SEQ ID NO: 121181 - protein, 9 aa, Homo sapiens
AELDQVVGR

SEQ ID NO: 121182 - protein, 9 aa, Homo sapiens
ELDQVVGRD

SEQ ID NO: 121183 - protein, 9 aa, Homo sapiens
LDQVVGRDR

SEQ ID NO: 121184 - protein, 9 aa, Homo sapiens
DQVVGRDRL

SEQ ID NO: 121185 - protein, 9 aa, Homo sapiens
QVVGRDRLP

SEQ ID NO: 121186 - protein, 9 aa, Homo sapiens
VVGRDRLPC

SEQ ID NO: 121187 - protein, 9 aa, Homo sapiens
VGRDRLPCM

SEQ ID NO: 121188 - protein, 9 aa, Homo sapiens
GRDRLPCMG

SEQ ID NO: 121189 - protein, 9 aa, Homo sapiens
RDRLPCMGD

SEQ ID NO: 121190 - protein, 9 aa, Homo sapiens
DRLPCMGDQ

SEQ ID NO: 121191 - protein, 9 aa, Homo sapiens
RLPCMGDQP

SEQ ID NO: 121192 - protein, 9 aa, Homo sapiens
LPCMGDQPN

SEQ ID NO: 121193 - protein, 9 aa, Homo sapiens
PCMGDQPNL

SEQ ID NO: 121194 - protein, 9 aa, Homo sapiens
CMGDQPNLP

SEQ ID NO: 121195 - protein, 9 aa, Homo sapiens
MGDQPNLPY

SEQ ID NO: 121196 - protein, 9 aa, Homo sapiens
GDQPNLPYV

SEQ ID NO: 121197 - protein, 9 aa, Homo sapiens
DQPNLPYVL

SEQ ID NO: 121198 - protein, 9 aa, Homo sapiens
QPNLPYVLA

SEQ ID NO: 121199 - protein, 9 aa, Homo sapiens
PNLPYVLAF

SEQ ID NO: 121200 - protein, 9 aa, Homo sapiens
NLPYVLAFL

SEQ ID NO: 121201 - protein, 9 aa, Homo sapiens
LPYVLAFLY

SEQ ID NO: 121202 - protein, 9 aa, Homo sapiens
PYVLAFLYE

SEQ ID NO: 121203 - protein, 9 aa, Homo sapiens
YVLAFLYEA

SEQ ID NO: 121204 - protein, 9 aa, Homo sapiens
VLAFLYEAM

SEQ ID NO: 121205 - protein, 9 aa, Homo sapiens
LAFLYEAMR

SEQ ID NO: 121206 - protein, 9 aa, Homo sapiens
AFLYEAMRF

SEQ ID NO: 121207 - protein, 9 aa, Homo sapiens
FLYEAMRFS

SEQ ID NO: 121208 - protein, 9 aa, Homo sapiens
LYEAMRFSS

SEQ ID NO: 121209 - protein, 9 aa, Homo sapiens
YEAMRFSSF

SEQ ID NO: 121210 - protein, 9 aa, Homo sapiens
EAMRFSSFV

SEQ ID NO: 121211 - protein, 9 aa, Homo sapiens
AMRFSSFVP

SEQ ID NO: 121212 - protein, 9 aa, Homo sapiens
MRFSSFVPV

SEQ ID NO: 121213 - protein, 9 aa, Homo sapiens
RFSSFVPVT

SEQ ID NO: 121214 - protein, 9 aa, Homo sapiens
FSSFVPVTI

SEQ ID NO: 121215 - protein, 9 aa, Homo sapiens
SSFVPVTIP

SEQ ID NO: 121216 - protein, 9 aa, Homo sapiens
SFVPVTIPH

SEQ ID NO: 121217 - protein, 9 aa, Homo sapiens
FVPVTIPHA

SEQ ID NO: 121218 - protein, 9 aa, Homo sapiens
VPVTIPHAT

SEQ ID NO: 121219 - protein, 9 aa, Homo sapiens
PVTIPHATT

SEQ ID NO: 121220 - protein, 9 aa, Homo sapiens
VTIPHATTA

SEQ ID NO: 121221 - protein, 9 aa, Homo sapiens
TIPHATTAN

SEQ ID NO: 121222 - protein, 9 aa, Homo sapiens
IPHATTANT

SEQ ID NO: 121223 - protein, 9 aa, Homo sapiens
PHATTANTS

SEQ ID NO: 121224 - protein, 9 aa, Homo sapiens
HATTANTSV

SEQ ID NO: 121225 - protein, 9 aa, Homo sapiens
ATTANTSVL

SEQ ID NO: 121226 - protein, 9 aa, Homo sapiens
TTANTSVLG

SEQ ID NO: 121227 - protein, 9 aa, Homo sapiens
TANTSVLGY

SEQ ID NO: 121228 - protein, 9 aa, Homo sapiens
ANTSVLGYH

SEQ ID NO: 121229 - protein, 9 aa, Homo sapiens
NTSVLGYHI

SEQ ID NO: 121230 - protein, 9 aa, Homo sapiens
TSVLGYHIP

SEQ ID NO: 121231 - protein, 9 aa, Homo sapiens
SVLGYHIPK

SEQ ID NO: 121232 - protein, 9 aa, Homo sapiens
VLGYHIPKD

SEQ ID NO: 121233 - protein, 9 aa, Homo sapiens
LGYHIPKDT

SEQ ID NO: 121234 - protein, 9 aa, Homo sapiens
GYHIPKDTV

SEQ ID NO: 121235 - protein, 9 aa, Homo sapiens
YHIPKDTVV

SEQ ID NO: 121236 - protein, 9 aa, Homo sapiens
HIPKDTVVF

SEQ ID NO: 121237 - protein, 9 aa, Homo sapiens
IPKDTVVFV

SEQ ID NO: 121238 - protein, 9 aa, Homo sapiens
PKDTVVFVN

SEQ ID NO: 121239 - protein, 9 aa, Homo sapiens
KDTVVFVNQ

SEQ ID NO: 121240 - protein, 9 aa, Homo sapiens
DTVVFVNQW

SEQ ID NO: 121241 - protein, 9 aa, Homo sapiens
TVVFVNQWS

SEQ ID NO: 121242 - protein, 9 aa, Homo sapiens
VVFVNQWSV

SEQ ID NO: 121243 - protein, 9 aa, Homo sapiens
VFVNQWSVN

SEQ ID NO: 121244 - protein, 9 aa, Homo sapiens
FVNQWSVNH

SEQ ID NO: 121245 - protein, 9 aa, Homo sapiens
VNQWSVNHD

SEQ ID NO: 121246 - protein, 9 aa, Homo sapiens
NQWSVNHDP

SEQ ID NO: 121247 - protein, 9 aa, Homo sapiens
QWSVNHDPL

SEQ ID NO: 121248 - protein, 9 aa, Homo sapiens
WSVNHDPLK

SEQ ID NO: 121249 - protein, 9 aa, Homo sapiens
SVNHDPLKW

SEQ ID NO: 121250 - protein, 9 aa, Homo sapiens
VNHDPLKWP

SEQ ID NO: 121251 - protein, 9 aa, Homo sapiens
NHDPLKWPN

SEQ ID NO: 121252 - protein, 9 aa, Homo sapiens
HDPLKWPNP

SEQ ID NO: 121253 - protein, 9 aa, Homo sapiens
DPLKWPNPE

SEQ ID NO: 121254 - protein, 9 aa, Homo sapiens
PLKWPNPEN

SEQ ID NO: 121255 - protein, 9 aa, Homo sapiens
LKWPNPENF

SEQ ID NO: 121256 - protein, 9 aa, Homo sapiens
KWPNPENFD

SEQ ID NO: 121257 - protein, 9 aa, Homo sapiens
WPNPENFDP

SEQ ID NO: 121258 - protein, 9 aa, Homo sapiens
PNPENFDPA

SEQ ID NO: 121259 - protein, 9 aa, Homo sapiens
NPENFDPAR

SEQ ID NO: 121260 - protein, 9 aa, Homo sapiens
PENFDPARF

SEQ ID NO: 121261 - protein, 9 aa, Homo sapiens
ENFDPARFL

SEQ ID NO: 121262 - protein, 9 aa, Homo sapiens
NFDPARFLD

SEQ ID NO: 121263 - protein, 9 aa, Homo sapiens
FDPARFLDK

SEQ ID NO: 121264 - protein, 9 aa, Homo sapiens
DPARFLDKD

SEQ ID NO: 121265 - protein, 9 aa, Homo sapiens
PARFLDKDG

SEQ ID NO: 121266 - protein, 9 aa, Homo sapiens
ARFLDKDGL

SEQ ID NO: 121267 - protein, 9 aa, Homo sapiens
RFLDKDGLI

SEQ ID NO: 121268 - protein, 9 aa, Homo sapiens
FLDKDGLIN

SEQ ID NO: 121269 - protein, 9 aa, Homo sapiens
LDKDGLINK

SEQ ID NO: 121270 - protein, 9 aa, Homo sapiens
DKDGLINKD

SEQ ID NO: 121271 - protein, 9 aa, Homo sapiens
KDGLINKDL

SEQ ID NO: 121272 - protein, 9 aa, Homo sapiens
DGLINKDLT

SEQ ID NO: 121273 - protein, 9 aa, Homo sapiens
GLINKDLTS

SEQ ID NO: 121274 - protein, 9 aa, Homo sapiens
LINKDLTSR

SEQ ID NO: 121275 - protein, 9 aa, Homo sapiens
INKDLTSRV

SEQ ID NO: 121276 - protein, 9 aa, Homo sapiens
NKDLTSRVM

SEQ ID NO: 121277 - protein, 9 aa, Homo sapiens
KDLTSRVMI

SEQ ID NO: 121278 - protein, 9 aa, Homo sapiens
DLTSRVMIF

SEQ ID NO: 121279 - protein, 9 aa, Homo sapiens
LTSRVMIFS

SEQ ID NO: 121280 - protein, 9 aa, Homo sapiens
TSRVMIFSV

SEQ ID NO: 121281 - protein, 9 aa, Homo sapiens
SRVMIFSVG

SEQ ID NO: 121282 - protein, 9 aa, Homo sapiens
RVMIFSVGK

SEQ ID NO: 121283 - protein, 9 aa, Homo sapiens
VMIFSVGKR

SEQ ID NO: 121284 - protein, 9 aa, Homo sapiens
MIFSVGKRR

SEQ ID NO: 121285 - protein, 9 aa, Homo sapiens
IFSVGKRRC

SEQ ID NO: 121286 - protein, 9 aa, Homo sapiens
FSVGKRRCI

SEQ ID NO: 121287 - protein, 9 aa, Homo sapiens
SVGKRRCIG

SEQ ID NO: 121288 - protein, 9 aa, Homo sapiens
VGKRRCIGE

SEQ ID NO: 121289 - protein, 9 aa, Homo sapiens
GKRRCIGEE

SEQ ID NO: 121290 - protein, 9 aa, Homo sapiens
KRRCIGEEL

SEQ ID NO: 121291 - protein, 9 aa, Homo sapiens
RRCIGEELS

SEQ ID NO: 121292 - protein, 9 aa, Homo sapiens
RCIGEELSK

SEQ ID NO: 121293 - protein, 9 aa, Homo sapiens
CIGEELSKM

SEQ ID NO: 121294 - protein, 9 aa, Homo sapiens
IGEELSKMQ

SEQ ID NO: 121295 - protein, 9 aa, Homo sapiens
GEELSKMQL

SEQ ID NO: 121296 - protein, 9 aa, Homo sapiens
EELSKMQLF

SEQ ID NO: 121297 - protein, 9 aa, Homo sapiens
ELSKMQLFL

SEQ ID NO: 121298 - protein, 9 aa, Homo sapiens
LSKMQLFLF

SEQ ID NO: 121299 - protein, 9 aa, Homo sapiens
SKMQLFLFI

SEQ ID NO: 121300 - protein, 9 aa, Homo sapiens
KMQLFLFIS

SEQ ID NO: 121301 - protein, 9 aa, Homo sapiens
MQLFLFISI

SEQ ID NO: 121302 - protein, 9 aa, Homo sapiens
QLFLFISIL

SEQ ID NO: 121303 - protein, 9 aa, Homo sapiens
LFLFISILA

SEQ ID NO: 121304 - protein, 9 aa, Homo sapiens
FLFISILAH

SEQ ID NO: 121305 - protein, 9 aa, Homo sapiens
LFISILAHQ

SEQ ID NO: 121306 - protein, 9 aa, Homo sapiens
FISILAHQC

SEQ ID NO: 121307 - protein, 9 aa, Homo sapiens
ISILAHQCD

SEQ ID NO: 121308 - protein, 9 aa, Homo sapiens
SILAHQCDF

SEQ ID NO: 121309 - protein, 9 aa, Homo sapiens
ILAHQCDFR

SEQ ID NO: 121310 - protein, 9 aa, Homo sapiens
LAHQCDFRA

SEQ ID NO: 121311 - protein, 9 aa, Homo sapiens
AHQCDFRAN

SEQ ID NO: 121312 - protein, 9 aa, Homo sapiens
HQCDFRANP

SEQ ID NO: 121313 - protein, 9 aa, Homo sapiens
QCDFRANPN

SEQ ID NO: 121314 - protein, 9 aa, Homo sapiens
CDFRANPNE

SEQ ID NO: 121315 - protein, 9 aa, Homo sapiens
DFRANPNEP

SEQ ID NO: 121316 - protein, 9 aa, Homo sapiens
FRANPNEPA

SEQ ID NO: 121317 - protein, 9 aa, Homo sapiens
RANPNEPAK

SEQ ID NO: 121318 - protein, 9 aa, Homo sapiens
ANPNEPAKM

SEQ ID NO: 121319 - protein, 9 aa, Homo sapiens
NPNEPAKMN

SEQ ID NO: 121320 - protein, 9 aa, Homo sapiens
PNEPAKMNF

SEQ ID NO: 121321 - protein, 9 aa, Homo sapiens
NEPAKMNFS

SEQ ID NO: 121322 - protein, 9 aa, Homo sapiens
EPAKMNFSY

SEQ ID NO: 121323 - protein, 9 aa, Homo sapiens
PAKMNFSYG

SEQ ID NO: 121324 - protein, 9 aa, Homo sapiens
AKMNFSYGL

SEQ ID NO: 121325 - protein, 9 aa, Homo sapiens
KMNFSYGLT

SEQ ID NO: 121326 - protein, 9 aa, Homo sapiens
MNFSYGLTI

SEQ ID NO: 121327 - protein, 9 aa, Homo sapiens
NFSYGLTIK

SEQ ID NO: 121328 - protein, 9 aa, Homo sapiens
FSYGLTIKP

SEQ ID NO: 121329 - protein, 9 aa, Homo sapiens
SYGLTIKPK

SEQ ID NO: 121330 - protein, 9 aa, Homo sapiens
YGLTIKPKS

SEQ ID NO: 121331 - protein, 9 aa, Homo sapiens
GLTIKPKSF

SEQ ID NO: 121332 - protein, 9 aa, Homo sapiens
LTIKPKSFK

SEQ ID NO: 121333 - protein, 9 aa, Homo sapiens
TIKPKSFKV

SEQ ID NO: 121334 - protein, 9 aa, Homo sapiens
IKPKSFKVN

SEQ ID NO: 121335 - protein, 9 aa, Homo sapiens
KPKSFKVNV

SEQ ID NO: 121336 - protein, 9 aa, Homo sapiens
PKSFKVNVT

SEQ ID NO: 121337 - protein, 9 aa, Homo sapiens
KSFKVNVTL

SEQ ID NO: 121338 - protein, 9 aa, Homo sapiens
SFKVNVTLR

SEQ ID NO: 121339 - protein, 9 aa, Homo sapiens
FKVNVTLRE

SEQ ID NO: 121340 - protein, 9 aa, Homo sapiens
KVNVTLRES

SEQ ID NO: 121341 - protein, 9 aa, Homo sapiens
VNVTLRESM

SEQ ID NO: 121342 - protein, 9 aa, Homo sapiens
NVTLRESME

SEQ ID NO: 121343 - protein, 9 aa, Homo sapiens
VTLRESMEL

SEQ ID NO: 121344 - protein, 9 aa, Homo sapiens
TLRESMELL

SEQ ID NO: 121345 - protein, 9 aa, Homo sapiens
LRESMELLD

SEQ ID NO: 121346 - protein, 9 aa, Homo sapiens
RESMELLDS

SEQ ID NO: 121347 - protein, 9 aa, Homo sapiens
ESMELLDSA

SEQ ID NO: 121348 - protein, 9 aa, Homo sapiens
SMELLDSAV

SEQ ID NO: 121349 - protein, 9 aa, Homo sapiens
MELLDSAVQ

SEQ ID NO: 121350 - protein, 9 aa, Homo sapiens
ELLDSAVQN

SEQ ID NO: 121351 - protein, 9 aa, Homo sapiens
LLDSAVQNL

SEQ ID NO: 121352 - protein, 9 aa, Homo sapiens
LDSAVQNLQ

SEQ ID NO: 121353 - protein, 9 aa, Homo sapiens
DSAVQNLQA

SEQ ID NO: 121354 - protein, 9 aa, Homo sapiens
SAVQNLQAK

SEQ ID NO: 121355 - protein, 9 aa, Homo sapiens
AVQNLQAKE

SEQ ID NO: 121356 - protein, 9 aa, Homo sapiens
VQNLQAKET

SEQ ID NO: 121357 - protein, 9 aa, Homo sapiens
QNLQAKETC

SEQ ID NO: 121358 - protein, 9 aa, Homo sapiens
NLQAKETCQ

SEQ ID NO: 121359 - protein, 9 aa, Homo sapiens
MELSVLLFL

SEQ ID NO: 121360 - protein, 9 aa, Homo sapiens
ELSVLLFLA

SEQ ID NO: 121361 - protein, 9 aa, Homo sapiens
LSVLLFLAL

SEQ ID NO: 121362 - protein, 9 aa, Homo sapiens
SVLLFLALL

SEQ ID NO: 121363 - protein, 9 aa, Homo sapiens
VLLFLALLT

SEQ ID NO: 121364 - protein, 9 aa, Homo sapiens
LLFLALLTG

SEQ ID NO: 121365 - protein, 9 aa, Homo sapiens
LFLALLTGL

SEQ ID NO: 121366 - protein, 9 aa, Homo sapiens
FLALLTGLL

SEQ ID NO: 121367 - protein, 9 aa, Homo sapiens
LALLTGLLL

SEQ ID NO: 121368 - protein, 9 aa, Homo sapiens
ALLTGLLLL

SEQ ID NO: 121369 - protein, 9 aa, Homo sapiens
LLTGLLLLL

SEQ ID NO: 121370 - protein, 9 aa, Homo sapiens
LTGLLLLLV

SEQ ID NO: 121371 - protein, 9 aa, Homo sapiens
TGLLLLLVQ

SEQ ID NO: 121372 - protein, 9 aa, Homo sapiens
GLLLLLVQR

SEQ ID NO: 121373 - protein, 9 aa, Homo sapiens
LLLLLVQRH

SEQ ID NO: 121374 - protein, 9 aa, Homo sapiens
LLLLVQRHP

SEQ ID NO: 121375 - protein, 9 aa, Homo sapiens
LLLVQRHPN

SEQ ID NO: 121376 - protein, 9 aa, Homo sapiens
LLVQRHPNT

SEQ ID NO: 121377 - protein, 9 aa, Homo sapiens
LVQRHPNTH

SEQ ID NO: 121378 - protein, 9 aa, Homo sapiens
VQRHPNTHD

SEQ ID NO: 121379 - protein, 9 aa, Homo sapiens
QRHPNTHDR

SEQ ID NO: 121380 - protein, 9 aa, Homo sapiens
RHPNTHDRL

SEQ ID NO: 121381 - protein, 9 aa, Homo sapiens
HPNTHDRLP

SEQ ID NO: 121382 - protein, 9 aa, Homo sapiens
PNTHDRLPP

SEQ ID NO: 121383 - protein, 9 aa, Homo sapiens
NTHDRLPPG

SEQ ID NO: 121384 - protein, 9 aa, Homo sapiens
THDRLPPGP

SEQ ID NO: 121385 - protein, 9 aa, Homo sapiens
HDRLPPGPR

SEQ ID NO: 121386 - protein, 9 aa, Homo sapiens
DRLPPGPRP

SEQ ID NO: 121387 - protein, 9 aa, Homo sapiens
RLPPGPRPL

SEQ ID NO: 121388 - protein, 9 aa, Homo sapiens
LPPGPRPLP

SEQ ID NO: 121389 - protein, 9 aa, Homo sapiens
PPGPRPLPL

SEQ ID NO: 121390 - protein, 9 aa, Homo sapiens
PGPRPLPLL

SEQ ID NO: 121391 - protein, 9 aa, Homo sapiens
GPRPLPLLG

SEQ ID NO: 121392 - protein, 9 aa, Homo sapiens
PRPLPLLGN

SEQ ID NO: 121393 - protein, 9 aa, Homo sapiens
RPLPLLGNL

SEQ ID NO: 121394 - protein, 9 aa, Homo sapiens
PLPLLGNLL

SEQ ID NO: 121395 - protein, 9 aa, Homo sapiens
LPLLGNLLQ

SEQ ID NO: 121396 - protein, 9 aa, Homo sapiens
PLLGNLLQM

SEQ ID NO: 121397 - protein, 9 aa, Homo sapiens
LLGNLLQMD

SEQ ID NO: 121398 - protein, 9 aa, Homo sapiens
LGNLLQMDR

SEQ ID NO: 121399 - protein, 9 aa, Homo sapiens
GNLLQMDRR

SEQ ID NO: 121400 - protein, 9 aa, Homo sapiens
NLLQMDRRG

SEQ ID NO: 121401 - protein, 9 aa, Homo sapiens
LLQMDRRGL

SEQ ID NO: 121402 - protein, 9 aa, Homo sapiens
LQMDRRGLL

SEQ ID NO: 121403 - protein, 9 aa, Homo sapiens
QMDRRGLLK

SEQ ID NO: 121404 - protein, 9 aa, Homo sapiens
MDRRGLLKS

SEQ ID NO: 121405 - protein, 9 aa, Homo sapiens
DRRGLLKSF

SEQ ID NO: 121406 - protein, 9 aa, Homo sapiens
RRGLLKSFL

SEQ ID NO: 121407 - protein, 9 aa, Homo sapiens
RGLLKSFLR

SEQ ID NO: 121408 - protein, 9 aa, Homo sapiens
GLLKSFLRF

SEQ ID NO: 121409 - protein, 9 aa, Homo sapiens
LLKSFLRFR

SEQ ID NO: 121410 - protein, 9 aa, Homo sapiens
LKSFLRFRE

SEQ ID NO: 121411 - protein, 9 aa, Homo sapiens
KSFLRFREK

SEQ ID NO: 121412 - protein, 9 aa, Homo sapiens
SFLRFREKY

SEQ ID NO: 121413 - protein, 9 aa, Homo sapiens
FLRFREKYG

SEQ ID NO: 121414 - protein, 9 aa, Homo sapiens
LRFREKYGD

SEQ ID NO: 121415 - protein, 9 aa, Homo sapiens
RFREKYGDV

SEQ ID NO: 121416 - protein, 9 aa, Homo sapiens
FREKYGDVF

SEQ ID NO: 121417 - protein, 9 aa, Homo sapiens
REKYGDVFT

SEQ ID NO: 121418 - protein, 9 aa, Homo sapiens
EKYGDVFTV

SEQ ID NO: 121419 - protein, 9 aa, Homo sapiens
KYGDVFTVH

SEQ ID NO: 121420 - protein, 9 aa, Homo sapiens
YGDVFTVHL

SEQ ID NO: 121421 - protein, 9 aa, Homo sapiens
GDVFTVHLG

SEQ ID NO: 121422 - protein, 9 aa, Homo sapiens
DVFTVHLGP

SEQ ID NO: 121423 - protein, 9 aa, Homo sapiens
VFTVHLGPR

SEQ ID NO: 121424 - protein, 9 aa, Homo sapiens
FTVHLGPRP

SEQ ID NO: 121425 - protein, 9 aa, Homo sapiens
TVHLGPRPV

SEQ ID NO: 121426 - protein, 9 aa, Homo sapiens
VHLGPRPVV

SEQ ID NO: 121427 - protein, 9 aa, Homo sapiens
HLGPRPVVM

SEQ ID NO: 121428 - protein, 9 aa, Homo sapiens
LGPRPVVML

SEQ ID NO: 121429 - protein, 9 aa, Homo sapiens
GPRPVVMLC

SEQ ID NO: 121430 - protein, 9 aa, Homo sapiens
PRPVVMLCG

SEQ ID NO: 121431 - protein, 9 aa, Homo sapiens
RPVVMLCGV

SEQ ID NO: 121432 - protein, 9 aa, Homo sapiens
PVVMLCGVE

SEQ ID NO: 121433 - protein, 9 aa, Homo sapiens
VVMLCGVEA

SEQ ID NO: 121434 - protein, 9 aa, Homo sapiens
VMLCGVEAI

SEQ ID NO: 121435 - protein, 9 aa, Homo sapiens
MLCGVEAIR

SEQ ID NO: 121436 - protein, 9 aa, Homo sapiens
LCGVEAIRE

SEQ ID NO: 121437 - protein, 9 aa, Homo sapiens
CGVEAIREA

SEQ ID NO: 121438 - protein, 9 aa, Homo sapiens
GVEAIREAL

SEQ ID NO: 121439 - protein, 9 aa, Homo sapiens
VEAIREALV

SEQ ID NO: 121440 - protein, 9 aa, Homo sapiens
EAIREALVD

SEQ ID NO: 121441 - protein, 9 aa, Homo sapiens
AIREALVDK

SEQ ID NO: 121442 - protein, 9 aa, Homo sapiens
IREALVDKA

SEQ ID NO: 121443 - protein, 9 aa, Homo sapiens
REALVDKAE

SEQ ID NO: 121444 - protein, 9 aa, Homo sapiens
EALVDKAEA

SEQ ID NO: 121445 - protein, 9 aa, Homo sapiens
ALVDKAEAF

SEQ ID NO: 121446 - protein, 9 aa, Homo sapiens
LVDKAEAFS

SEQ ID NO: 121447 - protein, 9 aa, Homo sapiens
VDKAEAFSG

SEQ ID NO: 121448 - protein, 9 aa, Homo sapiens
DKAEAFSGR

SEQ ID NO: 121449 - protein, 9 aa, Homo sapiens
KAEAFSGRG

SEQ ID NO: 121450 - protein, 9 aa, Homo sapiens
AEAFSGRGK

SEQ ID NO: 121451 - protein, 9 aa, Homo sapiens
EAFSGRGKI

SEQ ID NO: 121452 - protein, 9 aa, Homo sapiens
AFSGRGKIA

SEQ ID NO: 121453 - protein, 9 aa, Homo sapiens
FSGRGKIAM

SEQ ID NO: 121454 - protein, 9 aa, Homo sapiens
SGRGKIAMV

SEQ ID NO: 121455 - protein, 9 aa, Homo sapiens
GRGKIAMVD

SEQ ID NO: 121456 - protein, 9 aa, Homo sapiens
RGKIAMVDP

SEQ ID NO: 121457 - protein, 9 aa, Homo sapiens
GKIAMVDPF

SEQ ID NO: 121458 - protein, 9 aa, Homo sapiens
KIAMVDPFF

SEQ ID NO: 121459 - protein, 9 aa, Homo sapiens
IAMVDPFFR

SEQ ID NO: 121460 - protein, 9 aa, Homo sapiens
AMVDPFFRG

SEQ ID NO: 121461 - protein, 9 aa, Homo sapiens
MVDPFFRGY

SEQ ID NO: 121462 - protein, 9 aa, Homo sapiens
VDPFFRGYG

SEQ ID NO: 121463 - protein, 9 aa, Homo sapiens
DPFFRGYGV

SEQ ID NO: 121464 - protein, 9 aa, Homo sapiens
PFFRGYGVI

SEQ ID NO: 121465 - protein, 9 aa, Homo sapiens
FFRGYGVIF

SEQ ID NO: 121466 - protein, 9 aa, Homo sapiens
FRGYGVIFA

SEQ ID NO: 121467 - protein, 9 aa, Homo sapiens
RGYGVIFAN

SEQ ID NO: 121468 - protein, 9 aa, Homo sapiens
GYGVIFANG

SEQ ID NO: 121469 - protein, 9 aa, Homo sapiens
YGVIFANGN

SEQ ID NO: 121470 - protein, 9 aa, Homo sapiens
GVIFANGNR

SEQ ID NO: 121471 - protein, 9 aa, Homo sapiens
VIFANGNRW

SEQ ID NO: 121472 - protein, 9 aa, Homo sapiens
IFANGNRWK

SEQ ID NO: 121473 - protein, 9 aa, Homo sapiens
FANGNRWKV

SEQ ID NO: 121474 - protein, 9 aa, Homo sapiens
ANGNRWKVL

SEQ ID NO: 121475 - protein, 9 aa, Homo sapiens
NGNRWKVLR

SEQ ID NO: 121476 - protein, 9 aa, Homo sapiens
GNRWKVLRR

SEQ ID NO: 121477 - protein, 9 aa, Homo sapiens
NRWKVLRRF

SEQ ID NO: 121478 - protein, 9 aa, Homo sapiens
RWKVLRRFS

SEQ ID NO: 121479 - protein, 9 aa, Homo sapiens
WKVLRRFSV

SEQ ID NO: 121480 - protein, 9 aa, Homo sapiens
KVLRRFSVT

SEQ ID NO: 121481 - protein, 9 aa, Homo sapiens
VLRRFSVTT

SEQ ID NO: 121482 - protein, 9 aa, Homo sapiens
LRRFSVTTM

SEQ ID NO: 121483 - protein, 9 aa, Homo sapiens
RRFSVTTMR

SEQ ID NO: 121484 - protein, 9 aa, Homo sapiens
RFSVTTMRD

SEQ ID NO: 121485 - protein, 9 aa, Homo sapiens
FSVTTMRDF

SEQ ID NO: 121486 - protein, 9 aa, Homo sapiens
SVTTMRDFG

SEQ ID NO: 121487 - protein, 9 aa, Homo sapiens
VTTMRDFGM

SEQ ID NO: 121488 - protein, 9 aa, Homo sapiens
TTMRDFGMG

SEQ ID NO: 121489 - protein, 9 aa, Homo sapiens
TMRDFGMGK

SEQ ID NO: 121490 - protein, 9 aa, Homo sapiens
MRDFGMGKR

SEQ ID NO: 121491 - protein, 9 aa, Homo sapiens
RDFGMGKRS

SEQ ID NO: 121492 - protein, 9 aa, Homo sapiens
DFGMGKRSV

SEQ ID NO: 121493 - protein, 9 aa, Homo sapiens
FGMGKRSVE

SEQ ID NO: 121494 - protein, 9 aa, Homo sapiens
GMGKRSVEE

SEQ ID NO: 121495 - protein, 9 aa, Homo sapiens
MGKRSVEER

SEQ ID NO: 121496 - protein, 9 aa, Homo sapiens
GKRSVEERI

SEQ ID NO: 121497 - protein, 9 aa, Homo sapiens
KRSVEERIQ

SEQ ID NO: 121498 - protein, 9 aa, Homo sapiens
RSVEERIQE

SEQ ID NO: 121499 - protein, 9 aa, Homo sapiens
SVEERIQEE

SEQ ID NO: 121500 - protein, 9 aa, Homo sapiens
VEERIQEEA

SEQ ID NO: 121501 - protein, 9 aa, Homo sapiens
EERIQEEAQ

SEQ ID NO: 121502 - protein, 9 aa, Homo sapiens
ERIQEEAQC

SEQ ID NO: 121503 - protein, 9 aa, Homo sapiens
RIQEEAQCL

SEQ ID NO: 121504 - protein, 9 aa, Homo sapiens
IQEEAQCLI

SEQ ID NO: 121505 - protein, 9 aa, Homo sapiens
QEEAQCLIE

SEQ ID NO: 121506 - protein, 9 aa, Homo sapiens
EEAQCLIEE

SEQ ID NO: 121507 - protein, 9 aa, Homo sapiens
EAQCLIEEL

SEQ ID NO: 121508 - protein, 9 aa, Homo sapiens
AQCLIEELR

SEQ ID NO: 121509 - protein, 9 aa, Homo sapiens
QCLIEELRK

SEQ ID NO: 121510 - protein, 9 aa, Homo sapiens
CLIEELRKS

SEQ ID NO: 121511 - protein, 9 aa, Homo sapiens
LIEELRKSK

SEQ ID NO: 121512 - protein, 9 aa, Homo sapiens
IEELRKSKG

SEQ ID NO: 121513 - protein, 9 aa, Homo sapiens
EELRKSKGA

SEQ ID NO: 121514 - protein, 9 aa, Homo sapiens
ELRKSKGAL

SEQ ID NO: 121515 - protein, 9 aa, Homo sapiens
LRKSKGALM

SEQ ID NO: 121516 - protein, 9 aa, Homo sapiens
RKSKGALMD

SEQ ID NO: 121517 - protein, 9 aa, Homo sapiens
KSKGALMDP

SEQ ID NO: 121518 - protein, 9 aa, Homo sapiens
SKGALMDPT

SEQ ID NO: 121519 - protein, 9 aa, Homo sapiens
KGALMDPTF

SEQ ID NO: 121520 - protein, 9 aa, Homo sapiens
GALMDPTFL

SEQ ID NO: 121521 - protein, 9 aa, Homo sapiens
ALMDPTFLF

SEQ ID NO: 121522 - protein, 9 aa, Homo sapiens
LMDPTFLFQ

SEQ ID NO: 121523 - protein, 9 aa, Homo sapiens
MDPTFLFQS

SEQ ID NO: 121524 - protein, 9 aa, Homo sapiens
DPTFLFQSI

SEQ ID NO: 121525 - protein, 9 aa, Homo sapiens
PTFLFQSIT

SEQ ID NO: 121526 - protein, 9 aa, Homo sapiens
TFLFQSITA

SEQ ID NO: 121527 - protein, 9 aa, Homo sapiens
FLFQSITAN

SEQ ID NO: 121528 - protein, 9 aa, Homo sapiens
LFQSITANI

SEQ ID NO: 121529 - protein, 9 aa, Homo sapiens
FQSITANII

SEQ ID NO: 121530 - protein, 9 aa, Homo sapiens
QSITANIIC

SEQ ID NO: 121531 - protein, 9 aa, Homo sapiens
SITANIICS

SEQ ID NO: 121532 - protein, 9 aa, Homo sapiens
ITANIICSI

SEQ ID NO: 121533 - protein, 9 aa, Homo sapiens
TANIICSIV

SEQ ID NO: 121534 - protein, 9 aa, Homo sapiens
ANIICSIVF

SEQ ID NO: 121535 - protein, 9 aa, Homo sapiens
NIICSIVFG

SEQ ID NO: 121536 - protein, 9 aa, Homo sapiens
IICSIVFGK

SEQ ID NO: 121537 - protein, 9 aa, Homo sapiens
ICSIVFGKR

SEQ ID NO: 121538 - protein, 9 aa, Homo sapiens
CSIVFGKRF

SEQ ID NO: 121539 - protein, 9 aa, Homo sapiens
SIVFGKRFH

SEQ ID NO: 121540 - protein, 9 aa, Homo sapiens
IVFGKRFHY

SEQ ID NO: 121541 - protein, 9 aa, Homo sapiens
VFGKRFHYQ

SEQ ID NO: 121542 - protein, 9 aa, Homo sapiens
FGKRFHYQD

SEQ ID NO: 121543 - protein, 9 aa, Homo sapiens
GKRFHYQDQ

SEQ ID NO: 121544 - protein, 9 aa, Homo sapiens
KRFHYQDQE

SEQ ID NO: 121545 - protein, 9 aa, Homo sapiens
RFHYQDQEF

SEQ ID NO: 121546 - protein, 9 aa, Homo sapiens
FHYQDQEFL

SEQ ID NO: 121547 - protein, 9 aa, Homo sapiens
HYQDQEFLK

SEQ ID NO: 121548 - protein, 9 aa, Homo sapiens
YQDQEFLKM

SEQ ID NO: 121549 - protein, 9 aa, Homo sapiens
QDQEFLKML

SEQ ID NO: 121550 - protein, 9 aa, Homo sapiens
DQEFLKMLN

SEQ ID NO: 121551 - protein, 9 aa, Homo sapiens
QEFLKMLNL

SEQ ID NO: 121552 - protein, 9 aa, Homo sapiens
EFLKMLNLF

SEQ ID NO: 121553 - protein, 9 aa, Homo sapiens
FLKMLNLFY

SEQ ID NO: 121554 - protein, 9 aa, Homo sapiens
LKMLNLFYQ

SEQ ID NO: 121555 - protein, 9 aa, Homo sapiens
KMLNLFYQT

SEQ ID NO: 121556 - protein, 9 aa, Homo sapiens
MLNLFYQTF

SEQ ID NO: 121557 - protein, 9 aa, Homo sapiens
LNLFYQTFS

SEQ ID NO: 121558 - protein, 9 aa, Homo sapiens
NLFYQTFSL

SEQ ID NO: 121559 - protein, 9 aa, Homo sapiens
LFYQTFSLI

SEQ ID NO: 121560 - protein, 9 aa, Homo sapiens
FYQTFSLIS

SEQ ID NO: 121561 - protein, 9 aa, Homo sapiens
YQTFSLISS

SEQ ID NO: 121562 - protein, 9 aa, Homo sapiens
QTFSLISSV

SEQ ID NO: 121563 - protein, 9 aa, Homo sapiens
TFSLISSVF

SEQ ID NO: 121564 - protein, 9 aa, Homo sapiens
FSLISSVFG

SEQ ID NO: 121565 - protein, 9 aa, Homo sapiens
SLISSVFGQ

SEQ ID NO: 121566 - protein, 9 aa, Homo sapiens
LISSVFGQL

SEQ ID NO: 121567 - protein, 9 aa, Homo sapiens
ISSVFGQLF

SEQ ID NO: 121568 - protein, 9 aa, Homo sapiens
SSVFGQLFE

SEQ ID NO: 121569 - protein, 9 aa, Homo sapiens
SVFGQLFEL

SEQ ID NO: 121570 - protein, 9 aa, Homo sapiens
VFGQLFELF

SEQ ID NO: 121571 - protein, 9 aa, Homo sapiens
FGQLFELFS

SEQ ID NO: 121572 - protein, 9 aa, Homo sapiens
GQLFELFSG

SEQ ID NO: 121573 - protein, 9 aa, Homo sapiens
QLFELFSGF

SEQ ID NO: 121574 - protein, 9 aa, Homo sapiens
LFELFSGFL

SEQ ID NO: 121575 - protein, 9 aa, Homo sapiens
FELFSGFLK

SEQ ID NO: 121576 - protein, 9 aa, Homo sapiens
ELFSGFLKY

SEQ ID NO: 121577 - protein, 9 aa, Homo sapiens
LFSGFLKYF

SEQ ID NO: 121578 - protein, 9 aa, Homo sapiens
FSGFLKYFP

SEQ ID NO: 121579 - protein, 9 aa, Homo sapiens
SGFLKYFPG

SEQ ID NO: 121580 - protein, 9 aa, Homo sapiens
GFLKYFPGA

SEQ ID NO: 121581 - protein, 9 aa, Homo sapiens
FLKYFPGAH

SEQ ID NO: 121582 - protein, 9 aa, Homo sapiens
LKYFPGAHR

SEQ ID NO: 121583 - protein, 9 aa, Homo sapiens
KYFPGAHRQ

SEQ ID NO: 121584 - protein, 9 aa, Homo sapiens
YFPGAHRQV

SEQ ID NO: 121585 - protein, 9 aa, Homo sapiens
FPGAHRQVY

SEQ ID NO: 121586 - protein, 9 aa, Homo sapiens
PGAHRQVYK

SEQ ID NO: 121587 - protein, 9 aa, Homo sapiens
GAHRQVYKN

SEQ ID NO: 121588 - protein, 9 aa, Homo sapiens
AHRQVYKNL

SEQ ID NO: 121589 - protein, 9 aa, Homo sapiens
HRQVYKNLQ

SEQ ID NO: 121590 - protein, 9 aa, Homo sapiens
RQVYKNLQE

SEQ ID NO: 121591 - protein, 9 aa, Homo sapiens
QVYKNLQEI

SEQ ID NO: 121592 - protein, 9 aa, Homo sapiens
VYKNLQEIN

SEQ ID NO: 121593 - protein, 9 aa, Homo sapiens
YKNLQEINA

SEQ ID NO: 121594 - protein, 9 aa, Homo sapiens
KNLQEINAY

SEQ ID NO: 121595 - protein, 9 aa, Homo sapiens
NLQEINAYI

SEQ ID NO: 121596 - protein, 9 aa, Homo sapiens
LQEINAYIG

SEQ ID NO: 121597 - protein, 9 aa, Homo sapiens
QEINAYIGH

SEQ ID NO: 121598 - protein, 9 aa, Homo sapiens
EINAYIGHS

SEQ ID NO: 121599 - protein, 9 aa, Homo sapiens
INAYIGHSV

SEQ ID NO: 121600 - protein, 9 aa, Homo sapiens
NAYIGHSVE

SEQ ID NO: 121601 - protein, 9 aa, Homo sapiens
AYIGHSVEK

SEQ ID NO: 121602 - protein, 9 aa, Homo sapiens
YIGHSVEKH

SEQ ID NO: 121603 - protein, 9 aa, Homo sapiens
IGHSVEKHR

SEQ ID NO: 121604 - protein, 9 aa, Homo sapiens
GHSVEKHRE

SEQ ID NO: 121605 - protein, 9 aa, Homo sapiens
HSVEKHRET

SEQ ID NO: 121606 - protein, 9 aa, Homo sapiens
SVEKHRETL

SEQ ID NO: 121607 - protein, 9 aa, Homo sapiens
VEKHRETLD

SEQ ID NO: 121608 - protein, 9 aa, Homo sapiens
EKHRETLDP

SEQ ID NO: 121609 - protein, 9 aa, Homo sapiens
KHRETLDPS

SEQ ID NO: 121610 - protein, 9 aa, Homo sapiens
HRETLDPSA

SEQ ID NO: 121611 - protein, 9 aa, Homo sapiens
RETLDPSAP

SEQ ID NO: 121612 - protein, 9 aa, Homo sapiens
ETLDPSAPK

SEQ ID NO: 121613 - protein, 9 aa, Homo sapiens
TLDPSAPKD

SEQ ID NO: 121614 - protein, 9 aa, Homo sapiens
LDPSAPKDL

SEQ ID NO: 121615 - protein, 9 aa, Homo sapiens
DPSAPKDLI

SEQ ID NO: 121616 - protein, 9 aa, Homo sapiens
PSAPKDLID

SEQ ID NO: 121617 - protein, 9 aa, Homo sapiens
SAPKDLIDT

SEQ ID NO: 121618 - protein, 9 aa, Homo sapiens
APKDLIDTY

SEQ ID NO: 121619 - protein, 9 aa, Homo sapiens
PKDLIDTYL

SEQ ID NO: 121620 - protein, 9 aa, Homo sapiens
KDLIDTYLL

SEQ ID NO: 121621 - protein, 9 aa, Homo sapiens
DLIDTYLLH

SEQ ID NO: 121622 - protein, 9 aa, Homo sapiens
LIDTYLLHM

SEQ ID NO: 121623 - protein, 9 aa, Homo sapiens
IDTYLLHME

SEQ ID NO: 121624 - protein, 9 aa, Homo sapiens
DTYLLHMEK

SEQ ID NO: 121625 - protein, 9 aa, Homo sapiens
TYLLHMEKE

SEQ ID NO: 121626 - protein, 9 aa, Homo sapiens
YLLHMEKEK

SEQ ID NO: 121627 - protein, 9 aa, Homo sapiens
LLHMEKEKS

SEQ ID NO: 121628 - protein, 9 aa, Homo sapiens
LHMEKEKSN

SEQ ID NO: 121629 - protein, 9 aa, Homo sapiens
HMEKEKSNA

SEQ ID NO: 121630 - protein, 9 aa, Homo sapiens
MEKEKSNAH

SEQ ID NO: 121631 - protein, 9 aa, Homo sapiens
EKEKSNAHS

SEQ ID NO: 121632 - protein, 9 aa, Homo sapiens
KEKSNAHSE

SEQ ID NO: 121633 - protein, 9 aa, Homo sapiens
EKSNAHSEF

SEQ ID NO: 121634 - protein, 9 aa, Homo sapiens
KSNAHSEFS

SEQ ID NO: 121635 - protein, 9 aa, Homo sapiens
SNAHSEFSH

SEQ ID NO: 121636 - protein, 9 aa, Homo sapiens
NAHSEFSHQ

SEQ ID NO: 121637 - protein, 9 aa, Homo sapiens
AHSEFSHQN

SEQ ID NO: 121638 - protein, 9 aa, Homo sapiens
HSEFSHQNL

SEQ ID NO: 121639 - protein, 9 aa, Homo sapiens
SEFSHQNLN

SEQ ID NO: 121640 - protein, 9 aa, Homo sapiens
EFSHQNLNL

SEQ ID NO: 121641 - protein, 9 aa, Homo sapiens
FSHQNLNLN

SEQ ID NO: 121642 - protein, 9 aa, Homo sapiens
SHQNLNLNT

SEQ ID NO: 121643 - protein, 9 aa, Homo sapiens
HQNLNLNTL

SEQ ID NO: 121644 - protein, 9 aa, Homo sapiens
QNLNLNTLS

SEQ ID NO: 121645 - protein, 9 aa, Homo sapiens
NLNLNTLSL

SEQ ID NO: 121646 - protein, 9 aa, Homo sapiens
LNLNTLSLF

SEQ ID NO: 121647 - protein, 9 aa, Homo sapiens
NLNTLSLFF

SEQ ID NO: 121648 - protein, 9 aa, Homo sapiens
LNTLSLFFA

SEQ ID NO: 121649 - protein, 9 aa, Homo sapiens
NTLSLFFAG

SEQ ID NO: 121650 - protein, 9 aa, Homo sapiens
TLSLFFAGT

SEQ ID NO: 121651 - protein, 9 aa, Homo sapiens
LSLFFAGTE

SEQ ID NO: 121652 - protein, 9 aa, Homo sapiens
SLFFAGTET

SEQ ID NO: 121653 - protein, 9 aa, Homo sapiens
LFFAGTETT

SEQ ID NO: 121654 - protein, 9 aa, Homo sapiens
FFAGTETTS

SEQ ID NO: 121655 - protein, 9 aa, Homo sapiens
FAGTETTST

SEQ ID NO: 121656 - protein, 9 aa, Homo sapiens
AGTETTSTT

SEQ ID NO: 121657 - protein, 9 aa, Homo sapiens
GTETTSTTL

SEQ ID NO: 121658 - protein, 9 aa, Homo sapiens
TETTSTTLR

SEQ ID NO: 121659 - protein, 9 aa, Homo sapiens
ETTSTTLRY

SEQ ID NO: 121660 - protein, 9 aa, Homo sapiens
TTSTTLRYG

SEQ ID NO: 121661 - protein, 9 aa, Homo sapiens
TSTTLRYGF

SEQ ID NO: 121662 - protein, 9 aa, Homo sapiens
STTLRYGFL

SEQ ID NO: 121663 - protein, 9 aa, Homo sapiens
TTLRYGFLL

SEQ ID NO: 121664 - protein, 9 aa, Homo sapiens
TLRYGFLLM

SEQ ID NO: 121665 - protein, 9 aa, Homo sapiens
LRYGFLLML

SEQ ID NO: 121666 - protein, 9 aa, Homo sapiens
RYGFLLMLK

SEQ ID NO: 121667 - protein, 9 aa, Homo sapiens
YGFLLMLKY

SEQ ID NO: 121668 - protein, 9 aa, Homo sapiens
GFLLMLKYP

SEQ ID NO: 121669 - protein, 9 aa, Homo sapiens
FLLMLKYPH

SEQ ID NO: 121670 - protein, 9 aa, Homo sapiens
LLMLKYPHV

SEQ ID NO: 121671 - protein, 9 aa, Homo sapiens
LMLKYPHVA

SEQ ID NO: 121672 - protein, 9 aa, Homo sapiens
MLKYPHVAE

SEQ ID NO: 121673 - protein, 9 aa, Homo sapiens
LKYPHVAER

SEQ ID NO: 121674 - protein, 9 aa, Homo sapiens
KYPHVAERV

SEQ ID NO: 121675 - protein, 9 aa, Homo sapiens
YPHVAERVY

SEQ ID NO: 121676 - protein, 9 aa, Homo sapiens
PHVAERVYR

SEQ ID NO: 121677 - protein, 9 aa, Homo sapiens
HVAERVYRE

SEQ ID NO: 121678 - protein, 9 aa, Homo sapiens
VAERVYREI

SEQ ID NO: 121679 - protein, 9 aa, Homo sapiens
AERVYREIE

SEQ ID NO: 121680 - protein, 9 aa, Homo sapiens
ERVYREIEQ

SEQ ID NO: 121681 - protein, 9 aa, Homo sapiens
RVYREIEQV

SEQ ID NO: 121682 - protein, 9 aa, Homo sapiens
VYREIEQVI

SEQ ID NO: 121683 - protein, 9 aa, Homo sapiens
YREIEQVIG

SEQ ID NO: 121684 - protein, 9 aa, Homo sapiens
REIEQVIGP

SEQ ID NO: 121685 - protein, 9 aa, Homo sapiens
EIEQVIGPH

SEQ ID NO: 121686 - protein, 9 aa, Homo sapiens
IEQVIGPHR

SEQ ID NO: 121687 - protein, 9 aa, Homo sapiens
EQVIGPHRP

SEQ ID NO: 121688 - protein, 9 aa, Homo sapiens
QVIGPHRPP

SEQ ID NO: 121689 - protein, 9 aa, Homo sapiens
VIGPHRPPE

SEQ ID NO: 121690 - protein, 9 aa, Homo sapiens
IGPHRPPEL

SEQ ID NO: 121691 - protein, 9 aa, Homo sapiens
GPHRPPELH

SEQ ID NO: 121692 - protein, 9 aa, Homo sapiens
PHRPPELHD

SEQ ID NO: 121693 - protein, 9 aa, Homo sapiens
HRPPELHDR

SEQ ID NO: 121694 - protein, 9 aa, Homo sapiens
RPPELHDRA

SEQ ID NO: 121695 - protein, 9 aa, Homo sapiens
PPELHDRAK

SEQ ID NO: 121696 - protein, 9 aa, Homo sapiens
PELHDRAKM

SEQ ID NO: 121697 - protein, 9 aa, Homo sapiens
ELHDRAKMP

SEQ ID NO: 121698 - protein, 9 aa, Homo sapiens
LHDRAKMPY

SEQ ID NO: 121699 - protein, 9 aa, Homo sapiens
HDRAKMPYT

SEQ ID NO: 121700 - protein, 9 aa, Homo sapiens
DRAKMPYTE

SEQ ID NO: 121701 - protein, 9 aa, Homo sapiens
RAKMPYTEA

SEQ ID NO: 121702 - protein, 9 aa, Homo sapiens
AKMPYTEAV

SEQ ID NO: 121703 - protein, 9 aa, Homo sapiens
KMPYTEAVI

SEQ ID NO: 121704 - protein, 9 aa, Homo sapiens
MPYTEAVIY

SEQ ID NO: 121705 - protein, 9 aa, Homo sapiens
PYTEAVIYE

SEQ ID NO: 121706 - protein, 9 aa, Homo sapiens
YTEAVIYEI

SEQ ID NO: 121707 - protein, 9 aa, Homo sapiens
TEAVIYEIQ

SEQ ID NO: 121708 - protein, 9 aa, Homo sapiens
EAVIYEIQR

SEQ ID NO: 121709 - protein, 9 aa, Homo sapiens
AVIYEIQRF

SEQ ID NO: 121710 - protein, 9 aa, Homo sapiens
VIYEIQRFS

SEQ ID NO: 121711 - protein, 9 aa, Homo sapiens
IYEIQRFSD

SEQ ID NO: 121712 - protein, 9 aa, Homo sapiens
YEIQRFSDL

SEQ ID NO: 121713 - protein, 9 aa, Homo sapiens
EIQRFSDLL

SEQ ID NO: 121714 - protein, 9 aa, Homo sapiens
IQRFSDLLP

SEQ ID NO: 121715 - protein, 9 aa, Homo sapiens
QRFSDLLPM

SEQ ID NO: 121716 - protein, 9 aa, Homo sapiens
RFSDLLPMG

SEQ ID NO: 121717 - protein, 9 aa, Homo sapiens
FSDLLPMGV

SEQ ID NO: 121718 - protein, 9 aa, Homo sapiens
SDLLPMGVP

SEQ ID NO: 121719 - protein, 9 aa, Homo sapiens
DLLPMGVPH

SEQ ID NO: 121720 - protein, 9 aa, Homo sapiens
LLPMGVPHI

SEQ ID NO: 121721 - protein, 9 aa, Homo sapiens
LPMGVPHIV

SEQ ID NO: 121722 - protein, 9 aa, Homo sapiens
PMGVPHIVT

SEQ ID NO: 121723 - protein, 9 aa, Homo sapiens
MGVPHIVTQ

SEQ ID NO: 121724 - protein, 9 aa, Homo sapiens
GVPHIVTQH

SEQ ID NO: 121725 - protein, 9 aa, Homo sapiens
VPHIVTQHT

SEQ ID NO: 121726 - protein, 9 aa, Homo sapiens
PHIVTQHTS

SEQ ID NO: 121727 - protein, 9 aa, Homo sapiens
HIVTQHTSF

SEQ ID NO: 121728 - protein, 9 aa, Homo sapiens
IVTQHTSFR

SEQ ID NO: 121729 - protein, 9 aa, Homo sapiens
VTQHTSFRG

SEQ ID NO: 121730 - protein, 9 aa, Homo sapiens
TQHTSFRGY

SEQ ID NO: 121731 - protein, 9 aa, Homo sapiens
QHTSFRGYI

SEQ ID NO: 121732 - protein, 9 aa, Homo sapiens
HTSFRGYII

SEQ ID NO: 121733 - protein, 9 aa, Homo sapiens
TSFRGYIIP

SEQ ID NO: 121734 - protein, 9 aa, Homo sapiens
SFRGYIIPK

SEQ ID NO: 121735 - protein, 9 aa, Homo sapiens
FRGYIIPKD

SEQ ID NO: 121736 - protein, 9 aa, Homo sapiens
RGYIIPKDT
